United States Patent Application Publication US 2007/0042381 A1 - sequence listing, part 7

SEQ ID NO: 267689 - RNA, 19 nt, Human
ccagagucaugucuccccc

SEQ ID NO: 267690 - RNA, 22 nt, Human
gggaccuggcgagggucacaca

SEQ ID NO: 267691 - RNA, 22 nt, Human
ucagugucugugggcaggaugg

SEQ ID NO: 267692 - RNA, 22 nt, Human
cuuaauuuaaaauaguucaggc

SEQ ID NO: 267693 - RNA, 22 nt, Human
cagccuggagccacagcccagg

SEQ ID NO: 267694 - RNA, 22 nt, Human
cuccagaauuguccauuggaaa

SEQ ID NO: 267695 - RNA, 22 nt, Human
ucugacuuccuuuucugaucca

SEQ ID NO: 267696 - RNA, 22 nt, Human
auccaggcugcuuucuaugccc

SEQ ID NO: 267697 - RNA, 22 nt, Human
uaggucugauuuccauucaguc

SEQ ID NO: 267698 - RNA, 22 nt, Human
gcucugccaaggacccauucuc

SEQ ID NO: 267699 - RNA, 22 nt, Human
uucuucaugcuguugcugcuug

SEQ ID NO: 267700 - RNA, 22 nt, Human
gaaggcagggaauguggugcua

SEQ ID NO: 267701 - RNA, 22 nt, Human
cguccaggaagaucggccgaug

SEQ ID NO: 267702 - RNA, 22 nt, Human
uaguaaucagagguaaacuuua

SEQ ID NO: 267703 - RNA, 22 nt, Human
uagguucaugaaauuuucagga

SEQ ID NO: 267704 - RNA, 22 nt, Human
uuucuuuccaugagccuaugua

SEQ ID NO: 267705 - RNA, 22 nt, Human
guuuaagaggguuucauuccca

SEQ ID NO: 267706 - RNA, 22 nt, Human
ugaggccugacagaccaagccu

SEQ ID NO: 267707 - RNA, 22 nt, Human
ucaugauuuccugguuaaggac

SEQ ID NO: 267708 - RNA, 22 nt, Human
ugucuuuaaaauuaaacacauc

SEQ ID NO: 267709 - RNA, 22 nt, Human
agugcccucgugcccagggccu

SEQ ID NO: 267710 - RNA, 22 nt, Human
aagcuccuuuggcucgagaucu

SEQ ID NO: 267711 - RNA, 22 nt, Human
agucuucuugaucuuuucagug

SEQ ID NO: 267712 - RNA, 22 nt, Human
ucuuucugaauauuugaccuca

SEQ ID NO: 267713 - RNA, 22 nt, Human
acaggccuggguucaaauuugg

SEQ ID NO: 267714 - RNA, 22 nt, Human
aucugaauaaauuucuuuuagu

SEQ ID NO: 267715 - RNA, 22 nt, Human
uccuagagaguaauacaguuuu

SEQ ID NO: 267716 - RNA, 22 nt, Human
acugaugaucugggaguagagu

SEQ ID NO: 267717 - RNA, 22 nt, Human
ugcauuaaaaugugccucucuu

SEQ ID NO: 267718 - RNA, 22 nt, Human
agcagagacaugaaauaugcuu

SEQ ID NO: 267719 - RNA, 23 nt, Human
agucugugcuuggugggagggcc

SEQ ID NO: 267720 - RNA, 22 nt, Human
aagccaguaaguuuuugucauu

SEQ ID NO: 267721 - RNA, 22 nt, Human
aagaauuauugcaauacuagau

SEQ ID NO: 267722 - RNA, 22 nt, Human
ggaagaaagguggacaacaggu

SEQ ID NO: 267723 - RNA, 22 nt, Human
ggcacagggggcugaggacuag

SEQ ID NO: 267724 - RNA, 22 nt, Human
aaguggggccuggugguacagu

SEQ ID NO: 267725 - RNA, 22 nt, Human
acuguaaagagguguaucuuua

SEQ ID NO: 267726 - RNA, 22 nt, Human
gagccagcuauguagcaagagg

SEQ ID NO: 267727 - RNA, 22 nt, Human
cagcccuggugccaagguuccc

SEQ ID NO: 267728 - RNA, 22 nt, Human
ucaggaagcauccugagguguc

SEQ ID NO: 267729 - RNA, 22 nt, Human
agagguuguuagaauaguggag

SEQ ID NO: 267730 - RNA, 22 nt, Human
uauagcaagcaggacagucuca

SEQ ID NO: 267731 - RNA, 22 nt, Human
cagugccacuuaaugaggcugc

SEQ ID NO: 267732 - RNA, 22 nt, Human
aauaaugagacagcuuauuuaa

SEQ ID NO: 267733 - RNA, 22 nt, Human
agcugcagauucucuacuucau

SEQ ID NO: 267734 - RNA, 22 nt, Human
cuuagggagaaugccucugcag

SEQ ID NO: 267735 - RNA, 22 nt, Human
ccacagagacucugcaggacug

SEQ ID NO: 267736 - RNA, 22 nt, Human
aaagguuaguucuuagaagugc

SEQ ID NO: 267737 - RNA, 20 nt, Human
agcagcauuguucuagagca

SEQ ID NO: 267738 - RNA, 19 nt, Human
auacacauacguaaacuga

SEQ ID NO: 267739 - RNA, 22 nt, Human
aagacagccagcuccaugggau

SEQ ID NO: 267740 - RNA, 22 nt, Human
ucaggaacccuggucuccugcu

SEQ ID NO: 267741 - RNA, 22 nt, Human
ucucugaguucuccuccagccc

SEQ ID NO: 267742 - RNA, 19 nt, Human
uagcugauagcuacuuuau

SEQ ID NO: 267743 - RNA, 22 nt, Human
ccucagagcagcacccagauga

SEQ ID NO: 267744 - RNA, 22 nt, Human
agcugcacugugaaguucauag

SEQ ID NO: 267745 - RNA, 19 nt, Human
ucuuauugagcagcugagg

SEQ ID NO: 267746 - RNA, 22 nt, Human
ccuggcugugugaccuuggcaa

SEQ ID NO: 267747 - RNA, 20 nt, Human
cguguccuuggcgggagagc

SEQ ID NO: 267748 - RNA, 22 nt, Human
augaguucaauuguuucaguca

SEQ ID NO: 267749 - RNA, 22 nt, Human
agaaucugcauuuuuaauaaca

SEQ ID NO: 267750 - RNA, 22 nt, Human
ucagagguggagauaguuggga

SEQ ID NO: 267751 - RNA, 22 nt, Human
augcauugucaggcaauuucau

SEQ ID NO: 267752 - RNA, 22 nt, Human
agagcugagcaccaagcauggu

SEQ ID NO: 267753 - RNA, 22 nt, Human
agauaacuuuuggguauucaug

SEQ ID NO: 267754 - RNA, 22 nt, Human
ccagaagcaaaacagacaguuu

SEQ ID NO: 267755 - RNA, 22 nt, Human
ucaugucaguuucuucuauaaa

SEQ ID NO: 267756 - RNA, 22 nt, Human
ggcaggcuagcacugauguccu

SEQ ID NO: 267757 - RNA, 22 nt, Human
ucugaaaugaccuuuccccacu

SEQ ID NO: 267758 - RNA, 22 nt, Human
cuuaauaauaggugaggcuaug

SEQ ID NO: 267759 - RNA, 22 nt, Human
uauccaaagagauucauguucu

SEQ ID NO: 267760 - RNA, 22 nt, Human
uccaggccauugacugcauccu

SEQ ID NO: 267761 - RNA, 21 nt, Human
accaaaaccuauacuuucugu

SEQ ID NO: 267762 - RNA, 22 nt, Human
uggaauuuuguauuagcuuuga

SEQ ID NO: 267763 - RNA, 22 nt, Human
cagagccucagaauccugugga

SEQ ID NO: 267764 - RNA, 16 nt, Human
ucccaggccaggugga

SEQ ID NO: 267765 - RNA, 22 nt, Human
ggcaggugaguucauuaucugc

SEQ ID NO: 267766 - RNA, 22 nt, Human
agaguacacuguacacacaauu

SEQ ID NO: 267767 - RNA, 20 nt, Human
cugggaggucuuccaaauca

SEQ ID NO: 267768 - RNA, 22 nt, Human
uaggaaaagucuagauugauga

SEQ ID NO: 267769 - RNA, 22 nt, Human
acucagagaauaucuagaagga

SEQ ID NO: 267770 - RNA, 22 nt, Human
uguaaagaaagacgcagaguua

SEQ ID NO: 267771 - RNA, 22 nt, Human
cuucugugcuucacaguugcca

SEQ ID NO: 267772 - RNA, 22 nt, Human
agcaucagccucuguccuggag

SEQ ID NO: 267773 - RNA, 22 nt, Human
guagaauuuuaauaauggagau

SEQ ID NO: 267774 - RNA, 22 nt, Human
ucuccccuguuggccagguuuu

SEQ ID NO: 267775 - RNA, 22 nt, Human
cuccacagguguacuguaccuu

SEQ ID NO: 267776 - RNA, 22 nt, Human
gugcaaaagcaguuggauuuuu

SEQ ID NO: 267777 - RNA, 22 nt, Human
caaaggcaguuacugaaugaag

SEQ ID NO: 267778 - RNA, 22 nt, Human
cuuuguuuauauuucuccucga

SEQ ID NO: 267779 - RNA, 22 nt, Human
uacaaguagcucagguuuucug

SEQ ID NO: 267780 - RNA, 22 nt, Human
aaaccuuugugugucugugccu

SEQ ID NO: 267781 - RNA, 22 nt, Human
gccuuggacuaccacucccaca

SEQ ID NO: 267782 - RNA, 22 nt, Human
uucaguuccauuucaggugggu

SEQ ID NO: 267783 - RNA, 22 nt, Human
cugugggccuagucuggccuag

SEQ ID NO: 267784 - RNA, 22 nt, Human
ggagcccaagucugcacucggc

SEQ ID NO: 267785 - RNA, 22 nt, Human
acagccugauuuauggagcagu

SEQ ID NO: 267786 - RNA, 22 nt, Human
uggcuguggacucagauggcuc

SEQ ID NO: 267787 - RNA, 22 nt, Human
ugaagccaucaggaagccagca

SEQ ID NO: 267788 - RNA, 22 nt, Human
acagccaagucuucuauuucag

SEQ ID NO: 267789 - RNA, 22 nt, Human
auuucucagcacuuccuaucuc

SEQ ID NO: 267790 - RNA, 22 nt, Human
uaaggccaaggggccauagucu

SEQ ID NO: 267791 - RNA, 23 nt, Human
agucacaucuuagcagccagguc

SEQ ID NO: 267792 - RNA, 22 nt, Human
aaagacauggcaagagaugggg

SEQ ID NO: 267793 - RNA, 22 nt, Human
accaggcccaccgcaugcuccu

SEQ ID NO: 267794 - RNA, 22 nt, Human
agaaucaauucacugcugcagc

SEQ ID NO: 267795 - RNA, 22 nt, Human
gaggagugccagccguggaguc

SEQ ID NO: 267796 - RNA, 17 nt, Human
aggcaccucuuccugcu

SEQ ID NO: 267797 - RNA, 22 nt, Human
ucacagaagcccucgcaaacua

SEQ ID NO: 267798 - RNA, 22 nt, Human
aggcuggagugcuggagugcug

SEQ ID NO: 267799 - RNA, 22 nt, Human
caggacaggcccuguggggucu

SEQ ID NO: 267800 - RNA, 22 nt, Human
ugaugacaugugggcuguggcu

SEQ ID NO: 267801 - RNA, 22 nt, Human
aaaguguuuacauugcuauaag

SEQ ID NO: 267802 - RNA, 22 nt, Human
aguuuguaaaauguggccugga

SEQ ID NO: 267803 - RNA, 22 nt, Human
agggaggaguccucaaagucau

SEQ ID NO: 267804 - RNA, 22 nt, Human
agcuuuauggugccucacuuga

SEQ ID NO: 267805 - RNA, 22 nt, Human
uuuauacauggagaauuuuugc

SEQ ID NO: 267806 - RNA, 22 nt, Human
auucucagcuuucaaauagaca

SEQ ID NO: 267807 - RNA, 22 nt, Human
aagccaguguccagaaugggca

SEQ ID NO: 267808 - RNA, 22 nt, Human
gcguggcuccuaacagaucuga

SEQ ID NO: 267809 - RNA, 22 nt, Human
gcuucccaaugugcuaguuucu

SEQ ID NO: 267810 - RNA, 22 nt, Human
cugaaacuccaugagaaauugc

SEQ ID NO: 267811 - RNA, 22 nt, Human
uucuuuauaucugcuagugggu

SEQ ID NO: 267812 - RNA, 21 nt, Human
gagugcagcaagguagagucu

SEQ ID NO: 267813 - RNA, 22 nt, Human
cuccuggcaguuccccuuguca

SEQ ID NO: 267814 - RNA, 22 nt, Human
uuccagccaugguuucccuaug

SEQ ID NO: 267815 - RNA, 22 nt, Human
ccaggacacgauuuuuagucug

SEQ ID NO: 267816 - RNA, 22 nt, Human
gaaggccuagggaugcucugcg

SEQ ID NO: 267817 - RNA, 21 nt, Human
ccagcuccaggaccuuggauc

SEQ ID NO: 267818 - RNA, 22 nt, Human
cuucuucccagcuucccucacc

SEQ ID NO: 267819 - RNA, 22 nt, Human
gcagauggacuguaugaccuga

SEQ ID NO: 267820 - RNA, 22 nt, Human
gcuccuggcaggcagugugugu

SEQ ID NO: 267821 - RNA, 22 nt, Human
agauggccccaggugcccaggg

SEQ ID NO: 267822 - RNA, 21 nt, Human
agaaaaguauuugaaucaaga

SEQ ID NO: 267823 - RNA, 22 nt, Human
uugguguacaucuccccuucau

SEQ ID NO: 267824 - RNA, 22 nt, Human
agcaggcuacuccuguguucgu

SEQ ID NO: 267825 - RNA, 22 nt, Human
cugccugggccggccacccucu

SEQ ID NO: 267826 - RNA, 22 nt, Human
agagcagucaggcuaggacacu

SEQ ID NO: 267827 - RNA, 20 nt, Human
cugugccuccugcuaguccu

SEQ ID NO: 267828 - RNA, 22 nt, Human
cagcuucuuacgagcugguacu

SEQ ID NO: 267829 - RNA, 22 nt, Human
ucaggcuucacuccuguccaag

SEQ ID NO: 267830 - RNA, 22 nt, Human
acagugcauaaaaacaacuuuu

SEQ ID NO: 267831 - RNA, 22 nt, Human
gcaaaguauuaaccaacaggau

SEQ ID NO: 267832 - RNA, 22 nt, Human
uauuuauuggacaguguugcug

SEQ ID NO: 267833 - RNA, 22 nt, Human
agggggcucagcaggcucugga

SEQ ID NO: 267834 - RNA, 22 nt, Human
uggcuucucccuacaacaugcc

SEQ ID NO: 267835 - RNA, 22 nt, Human
uauaaagagucucaaagaaguu

SEQ ID NO: 267836 - RNA, 22 nt, Human
agacaggccacucuggucuggu

SEQ ID NO: 267837 - RNA, 22 nt, Human
uuuguagauucauugaacuuuu

SEQ ID NO: 267838 - RNA, 20 nt, Human
aaguuacauuguauuguacc

SEQ ID NO: 267839 - RNA, 23 nt, Human
ucccugagcuggagagacugcac

SEQ ID NO: 267840 - RNA, 22 nt, Human
auaaggaaaugaaacucuaaua

SEQ ID NO: 267841 - RNA, 22 nt, Human
ccaaggagcaaggcucaacaag

SEQ ID NO: 267842 - RNA, 22 nt, Human
ccuggcugcauuuugcuggaug

SEQ ID NO: 267843 - RNA, 22 nt, Human
gcucuagcaaggcuggccuggg

SEQ ID NO: 267844 - RNA, 19 nt, Human
ggcaagcacaaaagcuuug

SEQ ID NO: 267845 - RNA, 22 nt, Human
agagucugauauuuguaccaga

SEQ ID NO: 267846 - RNA, 22 nt, Human
caaugacaucucccugcucuaa

SEQ ID NO: 267847 - RNA, 22 nt, Human
auagauauuugaguuguuucca

SEQ ID NO: 267848 - RNA, 22 nt, Human
gggacaucuuucuagucagggu

SEQ ID NO: 267849 - RNA, 22 nt, Human
cagugggggggccaugcugcag

SEQ ID NO: 267850 - RNA, 22 nt, Human
cugggacaugauagaaacagau

SEQ ID NO: 267851 - RNA, 22 nt, Human
ccucagucuauuuccagcaggu

SEQ ID NO: 267852 - RNA, 17 nt, Human
aguguggcccugguuaa

SEQ ID NO: 267853 - RNA, 22 nt, Human
cggcuucuauuaggucggugca

SEQ ID NO: 267854 - RNA, 22 nt, Human
guucucugcgcucccggcccgg

SEQ ID NO: 267855 - RNA, 22 nt, Human
acagacauuuaauaaaugcuga

SEQ ID NO: 267856 - RNA, 22 nt, Human
uggagcaggugccaggugugug

SEQ ID NO: 267857 - RNA, 22 nt, Human
gcuccugucagucaucaggugc

SEQ ID NO: 267858 - RNA, 22 nt, Human
caguuacauaaaugauaaaaug

SEQ ID NO: 267859 - RNA, 22 nt, Human
ugacauguuagggaaaugugau

SEQ ID NO: 267860 - RNA, 22 nt, Human
ugaaugaugguguguucuugcc

SEQ ID NO: 267861 - RNA, 22 nt, Human
ucagggcaggacaguguaggcc

SEQ ID NO: 267862 - RNA, 22 nt, Human
uuccagccacuuuauacugcua

SEQ ID NO: 267863 - RNA, 22 nt, Human
ucacagaaugucagaguugggg

SEQ ID NO: 267864 - RNA, 22 nt, Human
ggcugccugugcccaggcacac

SEQ ID NO: 267865 - RNA, 22 nt, Human
cuggaaagugcauguaaugagg

SEQ ID NO: 267866 - RNA, 22 nt, Human
aaggcugaguaaaacagagaac

SEQ ID NO: 267867 - RNA, 22 nt, Human
gcugcccuacccgaggcacucu

SEQ ID NO: 267868 - RNA, 22 nt, Human
agugaauguccccgcgggucag

SEQ ID NO: 267869 - RNA, 22 nt, Human
agcucagggcgaucugucucgg

SEQ ID NO: 267870 - RNA, 22 nt, Human
gcuccuggcauccugcuuuuaa

SEQ ID NO: 267871 - RNA, 22 nt, Human
cuucuguagccaguaacauaua

SEQ ID NO: 267872 - RNA, 22 nt, Human
cagugauauuuauccuacucac

SEQ ID NO: 267873 - RNA, 22 nt, Human
ccacaggcggaguggcgggcag

SEQ ID NO: 267874 - RNA, 22 nt, Human
ucaaacuguuuacagugagaua

SEQ ID NO: 267875 - RNA, 21 nt, Human
uccacccucucugcucccagu

SEQ ID NO: 267876 - RNA, 22 nt, Human
cagaacuggccuuucaucaguc

SEQ ID NO: 267877 - RNA, 22 nt, Human
uggaaccuggccugagcuacca

SEQ ID NO: 267878 - RNA, 22 nt, Human
uuacaguuuauccaggaagagc

SEQ ID NO: 267879 - RNA, 22 nt, Human
uccaggcuagaagucacaggcc

SEQ ID NO: 267880 - RNA, 22 nt, Human
aguggcuagaucaugagugagc

SEQ ID NO: 267881 - RNA, 22 nt, Human
guggcuuggaccagucacagug

SEQ ID NO: 267882 - RNA, 22 nt, Human
ugggaguacuaugugauaggau

SEQ ID NO: 267883 - RNA, 22 nt, Human
ucuucaaauccuacagugucug

SEQ ID NO: 267884 - RNA, 22 nt, Human
gguggcagcauggucccagugu

SEQ ID NO: 267885 - RNA, 17 nt, Human
cagcugugagagccuua

SEQ ID NO: 267886 - RNA, 22 nt, Human
ucugggauagggccagaacaug

SEQ ID NO: 267887 - RNA, 22 nt, Human
aggccucugggccugcggguuu

SEQ ID NO: 267888 - RNA, 22 nt, Human
uaacaugauuugcuauuuagau

SEQ ID NO: 267889 - RNA, 22 nt, Human
ggcacagagcuccagccuuggc

SEQ ID NO: 267890 - RNA, 21 nt, Human
agcuggcucucucuggagaga

SEQ ID NO: 267891 - RNA, 22 nt, Human
cagugucuuucagacucagaaa

SEQ ID NO: 267892 - RNA, 22 nt, Human
cagcauauuacuuuaaaaaauc

SEQ ID NO: 267893 - RNA, 22 nt, Human
agguccagcuguugcagccucc

SEQ ID NO: 267894 - RNA, 17 nt, Human
ucccaggaacagggaau

SEQ ID NO: 267895 - RNA, 22 nt, Human
aaggguccagcaccucggcucc

SEQ ID NO: 267896 - RNA, 22 nt, Human
uccccaccccagaacuacuagg

SEQ ID NO: 267897 - RNA, 22 nt, Human
agacacaggauucugcauuucu

SEQ ID NO: 267898 - RNA, 22 nt, Human
uugcucugcaguccagacagua

SEQ ID NO: 267899 - RNA, 22 nt, Human
cuggcaggcagacuucugcaag

SEQ ID NO: 267900 - RNA, 22 nt, Human
gaaggaaaacagaucugccuga

SEQ ID NO: 267901 - RNA, 22 nt, Human
ucuagagcuuuuuccucuugua

SEQ ID NO: 267902 - RNA, 21 nt, Human
cagaaguaaggguaacuucuc

SEQ ID NO: 267903 - RNA, 22 nt, Human
cauuccuauuaugucccuagug

SEQ ID NO: 267904 - RNA, 22 nt, Human
gauauauuuuccauggucugca

SEQ ID NO: 267905 - RNA, 22 nt, Human
ucuggcaguugccgcuucaguc

SEQ ID NO: 267906 - RNA, 22 nt, Human
ucaucugucauccacaaagcug

SEQ ID NO: 267907 - RNA, 22 nt, Human
agcagagugccccaucacaagg

SEQ ID NO: 267908 - RNA, 22 nt, Human
aauguuuucauuauccuaacug

SEQ ID NO: 267909 - RNA, 22 nt, Human
ccagagggcaaaaugaagcuua

SEQ ID NO: 267910 - RNA, 22 nt, Human
uaggugucuuguguaugguaca

SEQ ID NO: 267911 - RNA, 22 nt, Human
uuucaguuguccuguuaauagc

SEQ ID NO: 267912 - RNA, 19 nt, Human
agaaaucucgagauuuguu

SEQ ID NO: 267913 - RNA, 22 nt, Human
auucuuuccagacacugauugc

SEQ ID NO: 267914 - RNA, 18 nt, Human
agugcaugcuaggggaag

SEQ ID NO: 267915 - RNA, 22 nt, Human
gcuucuccucccgcucccaggc

SEQ ID NO: 267916 - RNA, 22 nt, Human
cagaggcuguguaggcagacug

SEQ ID NO: 267917 - RNA, 22 nt, Human
augaaacaugagaaauggagag

SEQ ID NO: 267918 - RNA, 22 nt, Human
auaauauaauccuacuucccau

SEQ ID NO: 267919 - RNA, 22 nt, Human
ggcagugagaggucuccugguc

SEQ ID NO: 267920 - RNA, 22 nt, Human
aagaggaagucuccauggagag

SEQ ID NO: 267921 - RNA, 22 nt, Human
aaugucucaccguaaauguaac

SEQ ID NO: 267922 - RNA, 22 nt, Human
cuggauguuuaugaaggaccca

SEQ ID NO: 267923 - RNA, 21 nt, Human
uuucucaguugugugagcagc

SEQ ID NO: 267924 - RNA, 22 nt, Human
ucuuagaaaaaugguauguuuu

SEQ ID NO: 267925 - RNA, 19 nt, Human
augaauguguucuuaccuc

SEQ ID NO: 267926 - RNA, 22 nt, Human
caggugaguaacaaugggugau

SEQ ID NO: 267927 - RNA, 22 nt, Human
gagcucaggagcaucagaagaa

SEQ ID NO: 267928 - RNA, 22 nt, Human
uugggagauauuguucuuuaca

SEQ ID NO: 267929 - RNA, 22 nt, Human
uccugggagagugggacuguau

SEQ ID NO: 267930 - RNA, 22 nt, Human
gcagcuguagaggggagaaaga

SEQ ID NO: 267931 - RNA, 22 nt, Human
ucucuuugucugcucuuaguug

SEQ ID NO: 267932 - RNA, 22 nt, Human
gaagagaaaggcaaggaguuuu

SEQ ID NO: 267933 - RNA, 22 nt, Human
ugcuggcacguggaccaggaga

SEQ ID NO: 267934 - RNA, 22 nt, Human
uuuacuacuugugauaacugaa

SEQ ID NO: 267935 - RNA, 22 nt, Human
ccccaccuugcaauuguucccu

SEQ ID NO: 267936 - RNA, 22 nt, Human
ugucauuuucagcuuaugcuuc

SEQ ID NO: 267937 - RNA, 22 nt, Human
auggcugccuuaauucuucagc

SEQ ID NO: 267938 - RNA, 22 nt, Human
gcugggcucugucaugccuucc

SEQ ID NO: 267939 - RNA, 22 nt, Human
aucuuauugcuguugccagaua

SEQ ID NO: 267940 - RNA, 22 nt, Human
ccaggcucugcaaaaucaggcu

SEQ ID NO: 267941 - RNA, 22 nt, Human
uucugggcucucuuucugugug

SEQ ID NO: 267942 - RNA, 22 nt, Human
auggcugcagccggcccugcgc

SEQ ID NO: 267943 - RNA, 22 nt, Human
gcuguccucgucucucacgcaa

SEQ ID NO: 267944 - RNA, 22 nt, Human
auuuggaaaugcaucucuugag

SEQ ID NO: 267945 - RNA, 22 nt, Human
acagucuuucuacauucugugc

SEQ ID NO: 267946 - RNA, 22 nt, Human
acuguucauccuuuuugaacaa

SEQ ID NO: 267947 - RNA, 22 nt, Human
ucauucaagauuucaauagauu

SEQ ID NO: 267948 - RNA, 22 nt, Human
gcuguccaggagugcagagauu

SEQ ID NO: 267949 - RNA, 21 nt, Human
acagcaagccuuccuuucagg

SEQ ID NO: 267950 - RNA, 22 nt, Human
aggccuccagccacaugccagu

SEQ ID NO: 267951 - RNA, 22 nt, Human
ccugcccacuccaggagcaacu

SEQ ID NO: 267952 - RNA, 22 nt, Human
cuguuuucuagggcugagguga

SEQ ID NO: 267953 - RNA, 22 nt, Human
ggcacuggaaggaucaugugag

SEQ ID NO: 267954 - RNA, 22 nt, Human
cuucugaggcagcuauucaguu

SEQ ID NO: 267955 - RNA, 22 nt, Human
cugagcugguucucuugugaaa

SEQ ID NO: 267956 - RNA, 22 nt, Human
gcucugagaucauucacuguaa

SEQ ID NO: 267957 - RNA, 22 nt, Human
gccaguuuccaccuaggcaauu

SEQ ID NO: 267958 - RNA, 22 nt, Human
gggaacagagugccagacugac

SEQ ID NO: 267959 - RNA, 22 nt, Human
gccucugggguggagcccagca

SEQ ID NO: 267960 - RNA, 22 nt, Human
caggugcugugaaucuucauaa

SEQ ID NO: 267961 - RNA, 20 nt, Human
ccagaagcacucuucauguu

SEQ ID NO: 267962 - RNA, 22 nt, Human
ugggagcagcugggaacacagc

SEQ ID NO: 267963 - RNA, 20 nt, Human
ugcaggaauuugcauuccuu

SEQ ID NO: 267964 - RNA, 22 nt, Human
gugugcaguagagaaagagcag

SEQ ID NO: 267965 - RNA, 22 nt, Human
cauucuuacacaauauuuuaau

SEQ ID NO: 267966 - RNA, 19 nt, Human
guggcugccgaucgcggcu

SEQ ID NO: 267967 - RNA, 22 nt, Human
cugcuuuaauguaagauauacc

SEQ ID NO: 267968 - RNA, 22 nt, Human
aguggcugcuggaguggagaug

SEQ ID NO: 267969 - RNA, 19 nt, Human
caggaaugagguaauggcu

SEQ ID NO: 267970 - RNA, 22 nt, Human
uccuggaggggacagcaugggc

SEQ ID NO: 267971 - RNA, 19 nt, Human
uugcuucaugucuuuugcu

SEQ ID NO: 267972 - RNA, 22 nt, Human
uaaaguguggauaugauuagua

SEQ ID NO: 267973 - RNA, 20 nt, Human
ggcagcucuagucgaggccc

SEQ ID NO: 267974 - RNA, 22 nt, Human
gaggggaugcagagaggcuuau

SEQ ID NO: 267975 - RNA, 22 nt, Human
caucagaauagcucuguggaua

SEQ ID NO: 267976 - RNA, 22 nt, Human
agaggccagcaaccacaguaaa

SEQ ID NO: 267977 - RNA, 22 nt, Human
uaguuuacucaucuauaaaaug

SEQ ID NO: 267978 - RNA, 21 nt, Human
aagaaguuuggauuuuguccu

SEQ ID NO: 267979 - RNA, 22 nt, Human
uccaggagguugagugaguucc

SEQ ID NO: 267980 - RNA, 22 nt, Human
uuuacauguccuucaagagcag

SEQ ID NO: 267981 - RNA, 22 nt, Human
gagcccuuuuccuagauacugu

SEQ ID NO: 267982 - RNA, 22 nt, Human
uucaguuuguuugacuguuaga

SEQ ID NO: 267983 - RNA, 22 nt, Human
uuauuucauauaauguuaucaa

SEQ ID NO: 267984 - RNA, 22 nt, Human
cuggcucuuuccuagcuaggcu

SEQ ID NO: 267985 - RNA, 22 nt, Human
uaacucugcuuguucucugagu

SEQ ID NO: 267986 - RNA, 18 nt, Human
ucaggcucucuggcuaga

SEQ ID NO: 267987 - RNA, 22 nt, Human
ucuggcuugucucagggucuga

SEQ ID NO: 267988 - RNA, 22 nt, Human
aacauuuguuucguuaugugaa

SEQ ID NO: 267989 - RNA, 22 nt, Human
gggaagggagggccuccaguca

SEQ ID NO: 267990 - RNA, 20 nt, Human
gcuguggccgugccagacuc

SEQ ID NO: 267991 - RNA, 22 nt, Human
aaaugccaaggagagacuguua

SEQ ID NO: 267992 - RNA, 22 nt, Human
aggcagguguugggagacacca

SEQ ID NO: 267993 - RNA, 22 nt, Human
ucagaagucuggacugcuucuc

SEQ ID NO: 267994 - RNA, 22 nt, Human
ggcuuucuuguuaaauguccau

SEQ ID NO: 267995 - RNA, 22 nt, Human
augccuuucuuuggugcagguu

SEQ ID NO: 267996 - RNA, 22 nt, Human
cugaaggcauuuuugcugauuu

SEQ ID NO: 267997 - RNA, 22 nt, Human
caugaaacuuccaaagcugacc

SEQ ID NO: 267998 - RNA, 22 nt, Human
uuggcuucugauguauuccuga

SEQ ID NO: 267999 - RNA, 22 nt, Human
gagguucaggaaaugggcaaag

SEQ ID NO: 268000 - RNA, 22 nt, Human
gaacauuuggcaugagaauuug

SEQ ID NO: 268001 - RNA, 22 nt, Human
ggcucugguugaccaugauggc

SEQ ID NO: 268002 - RNA, 22 nt, Human
gcccagggcgauggucggggcc

SEQ ID NO: 268003 - RNA, 23 nt, Human
ucucuuucaagagcuuaaugugc

SEQ ID NO: 268004 - RNA, 22 nt, Human
acagggcauuuccucuaugugu

SEQ ID NO: 268005 - RNA, 22 nt, Human
aacuucauggguucaaagcugg

SEQ ID NO: 268006 - RNA, 22 nt, Human
agagcuggaagcugcucuuaga

SEQ ID NO: 268007 - RNA, 22 nt, Human
cacaggccugggguugagcggg

SEQ ID NO: 268008 - RNA, 22 nt, Human
acuagaaacuaauggauuauua

SEQ ID NO: 268009 - RNA, 22 nt, Human
cucucuguauguguauauuuau

SEQ ID NO: 268010 - RNA, 22 nt, Human
aaugccuugccugcuacaacuu

SEQ ID NO: 268011 - RNA, 22 nt, Human
uauucagaaaauaaauuggauu

SEQ ID NO: 268012 - RNA, 22 nt, Human
caggaaggcccaccuguccugu

SEQ ID NO: 268013 - RNA, 22 nt, Human
ggcccagccuugggguuucuuu

SEQ ID NO: 268014 - RNA, 22 nt, Human
acuuuaucaggaaucacacagc

SEQ ID NO: 268015 - RNA, 22 nt, Human
ggcagggaagcuggcaucacgg

SEQ ID NO: 268016 - RNA, 22 nt, Human
uagaccugaaauauggaccugg

SEQ ID NO: 268017 - RNA, 19 nt, Human
gaaaacaugggugaggguc

SEQ ID NO: 268018 - RNA, 22 nt, Human
ucuuugaaagcuguucuagagu

SEQ ID NO: 268019 - RNA, 22 nt, Human
cauauuuaguguuuggagaucg

SEQ ID NO: 268020 - RNA, 22 nt, Human
uacaagcugacccugaagauga

SEQ ID NO: 268021 - RNA, 22 nt, Human
agggagcuuucagguagcuuaa

SEQ ID NO: 268022 - RNA, 22 nt, Human
acagaggccaugagcugccacc

SEQ ID NO: 268023 - RNA, 22 nt, Human
uuccaaagaaguucacauuuac

SEQ ID NO: 268024 - RNA, 22 nt, Human
uccaugcagcagccucccagcc

SEQ ID NO: 268025 - RNA, 22 nt, Human
guugcucaggcaggaguacagu

SEQ ID NO: 268026 - RNA, 22 nt, Human
gagauggggucagcugggacau

SEQ ID NO: 268027 - RNA, 22 nt, Human
augaccaagaguccaggucaag

SEQ ID NO: 268028 - RNA, 22 nt, Human
augagguuuugauuggcacagg

SEQ ID NO: 268029 - RNA, 22 nt, Human
ucugccugcggcugcagguggc

SEQ ID NO: 268030 - RNA, 22 nt, Human
uauuucagcaagaagaaugugg

SEQ ID NO: 268031 - RNA, 22 nt, Human
uguaggcacauguauauauccc

SEQ ID NO: 268032 - RNA, 22 nt, Human
acguagcacugagagaugcagg

SEQ ID NO: 268033 - RNA, 22 nt, Human
uccugggcugcagggaagagca

SEQ ID NO: 268034 - RNA, 22 nt, Human
aguguuucaccguauguucuca

SEQ ID NO: 268035 - RNA, 22 nt, Human
caugaauuuuucuguggguuaa

SEQ ID NO: 268036 - RNA, 22 nt, Human
agcaaagcuaucucuauggaga

SEQ ID NO: 268037 - RNA, 22 nt, Human
uccuuggaucuuuccuaugauu

SEQ ID NO: 268038 - RNA, 22 nt, Human
ccuggcuuccuggagcucacaa

SEQ ID NO: 268039 - RNA, 22 nt, Human
cagccagguaugggcgugcggg

SEQ ID NO: 268040 - RNA, 22 nt, Human
gaaguucaacugccaugcuugg

SEQ ID NO: 268041 - RNA, 22 nt, Human
gggagcugcggucuugcgaaga

SEQ ID NO: 268042 - RNA, 22 nt, Human
uccaugagcuagggauucauca

SEQ ID NO: 268043 - RNA, 22 nt, Human
agcacaguggcuucuaugucua

SEQ ID NO: 268044 - RNA, 22 nt, Human
auuauucuuaugucaucauggc

SEQ ID NO: 268045 - RNA, 22 nt, Human
ugggacagauuauaagucugca

SEQ ID NO: 268046 - RNA, 20 nt, Human
acuuggaacucauuuuucuu

SEQ ID NO: 268047 - RNA, 22 nt, Human
gcagaauaauagaaaggcacac

SEQ ID NO: 268048 - RNA, 22 nt, Human
guauuuuucaguuaggagcuua

SEQ ID NO: 268049 - RNA, 22 nt, Human
aaggaacuaacuauguagagau

SEQ ID NO: 268050 - RNA, 22 nt, Human
aggccacaguugaggccagcaa

SEQ ID NO: 268051 - RNA, 22 nt, Human
ucuuggacucaaaauugccuua

SEQ ID NO: 268052 - RNA, 22 nt, Human
gugagggcagaacccccaggcc

SEQ ID NO: 268053 - RNA, 21 nt, Human
ucagaacuggugcagaugaau

SEQ ID NO: 268054 - RNA, 22 nt, Human
ugagaaaauuacuauaauuguc

SEQ ID NO: 268055 - RNA, 18 nt, Human
aggcaggcggaucacaag

SEQ ID NO: 268056 - RNA, 22 nt, Human
aggccucaguucuugccaggug

SEQ ID NO: 268057 - RNA, 22 nt, Human
uacaaggaaaauuuuauaguaa

SEQ ID NO: 268058 - RNA, 22 nt, Human
ccugagugccaugagagcaccc

SEQ ID NO: 268059 - RNA, 22 nt, Human
cuuaaacaggaaagagccaggu

SEQ ID NO: 268060 - RNA, 22 nt, Human
agaggcugauggaguagugucu

SEQ ID NO: 268061 - RNA, 22 nt, Human
acacuguuccacacuaagaagg

SEQ ID NO: 268062 - RNA, 22 nt, Human
uuucucuuaaugucucugugcu

SEQ ID NO: 268063 - RNA, 22 nt, Human
ugucaguucaauuauaguaauu

SEQ ID NO: 268064 - RNA, 22 nt, Human
ucugugcuagaggaguuggcca

SEQ ID NO: 268065 - RNA, 22 nt, Human
aaauucuaugucaauguuuauu

SEQ ID NO: 268066 - RNA, 22 nt, Human
cuucagaaauaacaacaauuac

SEQ ID NO: 268067 - RNA, 22 nt, Human
gggcacaugcuuagggaggaaa

SEQ ID NO: 268068 - RNA, 22 nt, Human
aguuucaguguugacagauggu

SEQ ID NO: 268069 - RNA, 22 nt, Human
agaacaauugccccaaagcuug

SEQ ID NO: 268070 - RNA, 22 nt, Human
uuuuauugggaguccucuacug

SEQ ID NO: 268071 - RNA, 22 nt, Human
acugcccauuaaaggugcuuug

SEQ ID NO: 268072 - RNA, 22 nt, Human
ccucugggccuggaagggcagu

SEQ ID NO: 268073 - RNA, 22 nt, Human
aacauuucauuggaagcuaugu

SEQ ID NO: 268074 - RNA, 22 nt, Human
uuccuggggcuccagcuaccag

SEQ ID NO: 268075 - RNA, 22 nt, Human
ugaccugcagucaagaggggaa

SEQ ID NO: 268076 - RNA, 22 nt, Human
uacaggcaugaaugaaaucugu

SEQ ID NO: 268077 - RNA, 22 nt, Human
gcuggccauggggagugaggag

SEQ ID NO: 268078 - RNA, 22 nt, Human
cacuuagaaaacuugagcaagu

SEQ ID NO: 268079 - RNA, 22 nt, Human
ggggugugucugacaaugguau

SEQ ID NO: 268080 - RNA, 22 nt, Human
uuucucugggcacucuccaaac

SEQ ID NO: 268081 - RNA, 22 nt, Human
caagagcacgugcccuccauaa

SEQ ID NO: 268082 - RNA, 22 nt, Human
accagcagguggcaguauguau

SEQ ID NO: 268083 - RNA, 22 nt, Human
ccaucagauuagcaaaauccag

SEQ ID NO: 268084 - RNA, 22 nt, Human
uuuguguggcguuggccggcgg

SEQ ID NO: 268085 - RNA, 20 nt, Human
guaacucuggcuaaguaaau

SEQ ID NO: 268086 - RNA, 22 nt, Human
acuuaaaaacagauccagcagg

SEQ ID NO: 268087 - RNA, 22 nt, Human
aggcccuggucaggucuggcug

SEQ ID NO: 268088 - RNA, 22 nt, Human
agggccugugcuuccugagaua

SEQ ID NO: 268089 - RNA, 22 nt, Human
ucagagucuuaacuauucagag

SEQ ID NO: 268090 - RNA, 22 nt, Human
cuguggcuggccugucugacau

SEQ ID NO: 268091 - RNA, 22 nt, Human
cugggucucaggaguucugagg

SEQ ID NO: 268092 - RNA, 22 nt, Human
gcuccuguuuucuuccagaaau

SEQ ID NO: 268093 - RNA, 22 nt, Human
gggaguggagagcaauggauga

SEQ ID NO: 268094 - RNA, 19 nt, Human
guccugcaacuggcucucc

SEQ ID NO: 268095 - RNA, 22 nt, Human
agugauuugaggauuauugcuc

SEQ ID NO: 268096 - RNA, 22 nt, Human
cugccucugcgucccacagagu

SEQ ID NO: 268097 - RNA, 22 nt, Human
uccaagaauacagauuugugaa

SEQ ID NO: 268098 - RNA, 22 nt, Human
agacaccuaauagaugaauuca

SEQ ID NO: 268099 - RNA, 22 nt, Human
cauccagaguccaaggcugggc

SEQ ID NO: 268100 - RNA, 22 nt, Human
cagaggcauacucccagucuug

SEQ ID NO: 268101 - RNA, 20 nt, Human
uacagaaugcaauaaaaugg

SEQ ID NO: 268102 - RNA, 22 nt, Human
acucacugcacuuugaaaugug

SEQ ID NO: 268103 - RNA, 22 nt, Human
agcagggcaaagucaggcuaac

SEQ ID NO: 268104 - RNA, 20 nt, Human
uuguuuauuauguucugauc

SEQ ID NO: 268105 - RNA, 22 nt, Human
cagcuccugggccaucuccuag

SEQ ID NO: 268106 - RNA, 22 nt, Human
guagaaucccaguggcuauauu

SEQ ID NO: 268107 - RNA, 22 nt, Human
cagauaugauaggauuagcaca

SEQ ID NO: 268108 - RNA, 22 nt, Human
gcccagagugaguccugggccc

SEQ ID NO: 268109 - RNA, 22 nt, Human
ccagcaggcagucauauccuuu

SEQ ID NO: 268110 - RNA, 22 nt, Human
ugggaaggcguggaaguagaag

SEQ ID NO: 268111 - RNA, 23 nt, Human
ucaggugugcggacugcugaguc

SEQ ID NO: 268112 - RNA, 22 nt, Human
ucuggcuuuauuuucaucaucu

SEQ ID NO: 268113 - RNA, 22 nt, Human
uaggaaugauuggaauuccagg

SEQ ID NO: 268114 - RNA, 22 nt, Human
guggggagggagaugcugaagu

SEQ ID NO: 268115 - RNA, 22 nt, Human
gagcuacaggcagcugagcccu

SEQ ID NO: 268116 - RNA, 22 nt, Human
ucuggcaguuccuuguugauau

SEQ ID NO: 268117 - RNA, 22 nt, Human
uguguauguaagcaugugcaua

SEQ ID NO: 268118 - RNA, 22 nt, Human
cuuccaaauguaaauaaguuuc

SEQ ID NO: 268119 - RNA, 22 nt, Human
aggcugagcugguagugaguac

SEQ ID NO: 268120 - RNA, 21 nt, Human
gccuggcagguggaagggcuc

SEQ ID NO: 268121 - RNA, 22 nt, Human
uaggcugcucaccaggcucaga

SEQ ID NO: 268122 - RNA, 22 nt, Human
gcucuugucaaaaauuaguuga

SEQ ID NO: 268123 - RNA, 22 nt, Human
uagugccaccuuccaaguauca

SEQ ID NO: 268124 - RNA, 22 nt, Human
cuccagccagagugccucuguu

SEQ ID NO: 268125 - RNA, 22 nt, Human
ucugcucuguggcuucagcuaa

SEQ ID NO: 268126 - RNA, 22 nt, Human
uuauuccagcuaagaguccugg

SEQ ID NO: 268127 - RNA, 21 nt, Human
aggcagcaggauccagggaca

SEQ ID NO: 268128 - RNA, 22 nt, Human
aauaugcacucugauuuagcag

SEQ ID NO: 268129 - RNA, 20 nt, Human
gcuuagcaggcauaguagcu

SEQ ID NO: 268130 - RNA, 22 nt, Human
ucucuagacauggggaauguca

SEQ ID NO: 268131 - RNA, 22 nt, Human
aauauuuuugaggcccuguuau

SEQ ID NO: 268132 - RNA, 22 nt, Human
cagggccaggcugauggccugg

SEQ ID NO: 268133 - RNA, 22 nt, Human
agcagguugugauacacucaga

SEQ ID NO: 268134 - RNA, 22 nt, Human
ccagcaggacuuuggaaauaug

SEQ ID NO: 268135 - RNA, 22 nt, Human
aggaagcccaagucucaucuuc

SEQ ID NO: 268136 - RNA, 22 nt, Human
aggcccagcugggccaggaaca

SEQ ID NO: 268137 - RNA, 22 nt, Human
aggaggugagcggucauguggu

SEQ ID NO: 268138 - RNA, 22 nt, Human
uuuguuaaaaugcagauucugu

SEQ ID NO: 268139 - RNA, 22 nt, Human
ucuuccagagccuccaucccua

SEQ ID NO: 268140 - RNA, 19 nt, Human
aggcuggagacaccaggcc

SEQ ID NO: 268141 - RNA, 20 nt, Human
ucucuggccagaaacaacag

SEQ ID NO: 268142 - RNA, 22 nt, Human
uauuccaacuucacuauugucu

SEQ ID NO: 268143 - RNA, 22 nt, Human
gagagacagcagaacgugcagc

SEQ ID NO: 268144 - RNA, 22 nt, Human
uguaaaaggaaaucaaagcacu

SEQ ID NO: 268145 - RNA, 22 nt, Human
agaaugcaagauaaacuuuauu

SEQ ID NO: 268146 - RNA, 22 nt, Human
gcucagagauaaaacugaucag

SEQ ID NO: 268147 - RNA, 22 nt, Human
ucaucaguuuagaaaaaauaug

SEQ ID NO: 268148 - RNA, 22 nt, Human
gauucuuacuucuaagcaagcu

SEQ ID NO: 268149 - RNA, 22 nt, Human
caugagaaugaagaagacuuaa

SEQ ID NO: 268150 - RNA, 22 nt, Human
ugucaagucucugaaugaaaug

SEQ ID NO: 268151 - RNA, 22 nt, Human
uucuuguauguaugcaaaauca

SEQ ID NO: 268152 - RNA, 22 nt, Human
auuaguaaaacauuguauaugu

SEQ ID NO: 268153 - RNA, 22 nt, Human
acaaaugaaucauacauaaugu

SEQ ID NO: 268154 - RNA, 22 nt, Human
ugugggagaaggaagcaagcug

SEQ ID NO: 268155 - RNA, 22 nt, Human
gaggaggaaaggaguugaaaug

SEQ ID NO: 268156 - RNA, 23 nt, Human
uguaaaagcauuugucagccugg

SEQ ID NO: 268157 - RNA, 22 nt, Human
cagugcaguugguggcaggggu

SEQ ID NO: 268158 - RNA, 22 nt, Human
cuccuccuaaaugauucuuccu

SEQ ID NO: 268159 - RNA, 22 nt, Human
cagcagagaugagauuccuaua

SEQ ID NO: 268160 - RNA, 22 nt, Human
aggcccugcccagagcuccucg

SEQ ID NO: 268161 - RNA, 22 nt, Human
gcugccucaggcaccuccuggc

SEQ ID NO: 268162 - RNA, 22 nt, Human
uaggccuaugcagaaggugguu

SEQ ID NO: 268163 - RNA, 22 nt, Human
gaggcuggcagaaaagcacagg

SEQ ID NO: 268164 - RNA, 22 nt, Human
aaagugcauuguuuguguuccu

SEQ ID NO: 268165 - RNA, 22 nt, Human
auguagcagaagauguuuuccu

SEQ ID NO: 268166 - RNA, 22 nt, Human
ucugcccaaggcugucacuaga

SEQ ID NO: 268167 - RNA, 22 nt, Human
agagucuuuugucaguaauguu

SEQ ID NO: 268168 - RNA, 23 nt, Human
acagacuguauucaaaguaggac

SEQ ID NO: 268169 - RNA, 22 nt, Human
gacaacugagcagaggaaauga

SEQ ID NO: 268170 - RNA, 22 nt, Human
uguuuuguccuuuucuauauac

SEQ ID NO: 268171 - RNA, 22 nt, Human
cuucaugcucccauuuccuaca

SEQ ID NO: 268172 - RNA, 22 nt, Human
ccugccugacagagaagguuca

SEQ ID NO: 268173 - RNA, 22 nt, Human
ucaguuugaauguuagcacagu

SEQ ID NO: 268174 - RNA, 22 nt, Human
caagcuggagguuggagcuacu

SEQ ID NO: 268175 - RNA, 21 nt, Human
aaggagccuaggaggcucagg

SEQ ID NO: 268176 - RNA, 21 nt, Human
acucaggcaccaggggauggc

SEQ ID NO: 268177 - RNA, 22 nt, Human
auauuuuggggugaugugcauc

SEQ ID NO: 268178 - RNA, 19 nt, Human
uccuuccaguuccuggggu

SEQ ID NO: 268179 - RNA, 22 nt, Human
ugaggccuggacucugcaugga

SEQ ID NO: 268180 - RNA, 22 nt, Human
aucuuugaucuuuauugcuaag

SEQ ID NO: 268181 - RNA, 22 nt, Human
auuucuacauugaguuuuagca

SEQ ID NO: 268182 - RNA, 18 nt, Human
cagccucugauugguugc

SEQ ID NO: 268183 - RNA, 22 nt, Human
uggaugagggcugagcacuggg

SEQ ID NO: 268184 - RNA, 22 nt, Human
uucucccaucucagucuuacau

SEQ ID NO: 268185 - RNA, 21 nt, Human
ccagcugucuguccuuaggca

SEQ ID NO: 268186 - RNA, 22 nt, Human
uguuuuaaagccauugccuuuc

SEQ ID NO: 268187 - RNA, 22 nt, Human
gcugaagagagaugcguccagc

SEQ ID NO: 268188 - RNA, 21 nt, Human
aggcucagagaucaaacagua

SEQ ID NO: 268189 - RNA, 22 nt, Human
gucaaauauuaugcagcuugga

SEQ ID NO: 268190 - RNA, 22 nt, Human
uggcauguuuaauguacuguau

SEQ ID NO: 268191 - RNA, 22 nt, Human
aaauuuuagacuccugggucua

SEQ ID NO: 268192 - RNA, 22 nt, Human
ucagaacaauugggaaccauua

SEQ ID NO: 268193 - RNA, 22 nt, Human
uggcagaaagaaccaugugcaa

SEQ ID NO: 268194 - RNA, 22 nt, Human
uuggaauuugagaccaagaaaa

SEQ ID NO: 268195 - RNA, 22 nt, Human
cugggggcaauggucagagugu

SEQ ID NO: 268196 - RNA, 23 nt, Human
auguccaguuuacuucaggauga

SEQ ID NO: 268197 - RNA, 22 nt, Human
uauauucaaugauuaguaucag

SEQ ID NO: 268198 - RNA, 23 nt, Human
aguuuuuaauggucauagcugag

SEQ ID NO: 268199 - RNA, 22 nt, Human
uaacaagguaagccuggccaug

SEQ ID NO: 268200 - RNA, 17 nt, Human
ugguggcuggagucagg

SEQ ID NO: 268201 - RNA, 22 nt, Human
gagcuggggcagcuuaggagug

SEQ ID NO: 268202 - RNA, 22 nt, Human
uggaaagcaguucuuagaaucg

SEQ ID NO: 268203 - RNA, 22 nt, Human
gcauuagacccaagguauuuug

SEQ ID NO: 268204 - RNA, 22 nt, Human
ccuggguacgcagggcuccucu

SEQ ID NO: 268205 - RNA, 22 nt, Human
acauuuuacaguugucuggcua

SEQ ID NO: 268206 - RNA, 21 nt, Human
ucauauuucucuugcuauugu

SEQ ID NO: 268207 - RNA, 22 nt, Human
ggcccugggaugcucagcagug

SEQ ID NO: 268208 - RNA, 22 nt, Human
uuuauugaauuguaacccuauu

SEQ ID NO: 268209 - RNA, 22 nt, Human
guuuuccuacuguaucaucaaa

SEQ ID NO: 268210 - RNA, 22 nt, Human
gcgagccucuggaguccucugg

SEQ ID NO: 268211 - RNA, 22 nt, Human
aucuaaacccuacuuucuuucu

SEQ ID NO: 268212 - RNA, 20 nt, Human
aggguucccuuguucagcag

SEQ ID NO: 268213 - RNA, 22 nt, Human
gauuucuugauaauucaaaucc

SEQ ID NO: 268214 - RNA, 22 nt, Human
uccugaagaugaaaagagaggu

SEQ ID NO: 268215 - RNA, 22 nt, Human
auuauaaagaacaugugugugg

SEQ ID NO: 268216 - RNA, 22 nt, Human
gcaggccugguuuacaugguag

SEQ ID NO: 268217 - RNA, 22 nt, Human
aggcccagcuugaagugggaag

SEQ ID NO: 268218 - RNA, 22 nt, Human
uggcagccaucagagcaggggu

SEQ ID NO: 268219 - RNA, 22 nt, Human
cugggccucucagcucccgcgg

SEQ ID NO: 268220 - RNA, 22 nt, Human
cagucuggcucagcacaaaggg

SEQ ID NO: 268221 - RNA, 20 nt, Human
ggagcuggcauccagccucu

SEQ ID NO: 268222 - RNA, 22 nt, Human
gucucagggcagcuggaggagg

SEQ ID NO: 268223 - RNA, 22 nt, Human
caagaaauguuuacugagcauc

SEQ ID NO: 268224 - RNA, 22 nt, Human
agucacaucgauuauaaaauuu

SEQ ID NO: 268225 - RNA, 22 nt, Human
gcaagcaaaaugggagauuccc

SEQ ID NO: 268226 - RNA, 22 nt, Human
acugcccuguaacugccaggua

SEQ ID NO: 268227 - RNA, 22 nt, Human
cuucagcaacuuuggaauguuu

SEQ ID NO: 268228 - RNA, 22 nt, Human
auaaccuguuucagacauuugu

SEQ ID NO: 268229 - RNA, 22 nt, Human
ccagguguaggacaccaaggga

SEQ ID NO: 268230 - RNA, 22 nt, Human
ugagaggcagaauggugccugc

SEQ ID NO: 268231 - RNA, 22 nt, Human
uuugcagcaaggagagagcauu

SEQ ID NO: 268232 - RNA, 18 nt, Human
gucucaggaguggcacgu

SEQ ID NO: 268233 - RNA, 22 nt, Human
aacugucuugccuacucagcau

SEQ ID NO: 268234 - RNA, 22 nt, Human
cgcagguguucaguaaauguau

SEQ ID NO: 268235 - RNA, 22 nt, Human
acacagaagcuuuuucuauucc

SEQ ID NO: 268236 - RNA, 22 nt, Human
cucuccagaucugcugagccag

SEQ ID NO: 268237 - RNA, 22 nt, Human
ucaagcuuucugucucuuaugg

SEQ ID NO: 268238 - RNA, 22 nt, Human
cccagugugccccuccugcagc

SEQ ID NO: 268239 - RNA, 22 nt, Human
agugugacuacauuacaagagu

SEQ ID NO: 268240 - RNA, 22 nt, Human
uccaugagggacacuggaugcu

SEQ ID NO: 268241 - RNA, 22 nt, Human
aaauagacaggcuuaaauagga

SEQ ID NO: 268242 - RNA, 22 nt, Human
uacaaagaggcagcuccauuuu

SEQ ID NO: 268243 - RNA, 22 nt, Human
gcauucuuugaaugcuucuaau

SEQ ID NO: 268244 - RNA, 22 nt, Human
uaugcacauucacacaaaaaug

SEQ ID NO: 268245 - RNA, 22 nt, Human
cugggcccuauggaagaaaggg

SEQ ID NO: 268246 - RNA, 22 nt, Human
cuggcagauauuugcagacaug

SEQ ID NO: 268247 - RNA, 22 nt, Human
uuuucaaagacuggaggcugau

SEQ ID NO: 268248 - RNA, 22 nt, Human
gaguuacuggguggaaggcacu

SEQ ID NO: 268249 - RNA, 22 nt, Human
aaguacauuauaugagcagaau

SEQ ID NO: 268250 - RNA, 22 nt, Human
aaagacuaaccaguugucaaaa

SEQ ID NO: 268251 - RNA, 22 nt, Human
uuggaaggcccugccuagcagg

SEQ ID NO: 268252 - RNA, 22 nt, Human
uguccugggccggcgacugguc

SEQ ID NO: 268253 - RNA, 22 nt, Human
ucugggagggagccucagaauc

SEQ ID NO: 268254 - RNA, 22 nt, Human
ugccaggaguguagagugguuu

SEQ ID NO: 268255 - RNA, 22 nt, Human
ccaggugugccagcagggacug

SEQ ID NO: 268256 - RNA, 22 nt, Human
auauuauucuaguaacagugau

SEQ ID NO: 268257 - RNA, 22 nt, Human
uggcuucucugugguggcuccc

SEQ ID NO: 268258 - RNA, 22 nt, Human
aaguuuuaugggaagaugugca

SEQ ID NO: 268259 - RNA, 22 nt, Human
aggcucagccugggccuagagc

SEQ ID NO: 268260 - RNA, 22 nt, Human
uuucuuaugugcagagugagua

SEQ ID NO: 268261 - RNA, 21 nt, Human
acacaaaccuccucagccugg

SEQ ID NO: 268262 - RNA, 18 nt, Human
ccugccagucuggagcag

SEQ ID NO: 268263 - RNA, 22 nt, Human
uaaauguguuagucaugguuuu

SEQ ID NO: 268264 - RNA, 22 nt, Human
cagugagagagaacgcauucau

SEQ ID NO: 268265 - RNA, 22 nt, Human
augugcauuaaaugucaauguu

SEQ ID NO: 268266 - RNA, 21 nt, Human
cuccugggcuaagauauagug

SEQ ID NO: 268267 - RNA, 22 nt, Human
ggagcugaguggguuuauugau

SEQ ID NO: 268268 - RNA, 22 nt, Human
aguguuugucccguuagaaaug

SEQ ID NO: 268269 - RNA, 22 nt, Human
aauauguuccacuuaaagcugg

SEQ ID NO: 268270 - RNA, 20 nt, Human
aggcacaguuccuaguuggg

SEQ ID NO: 268271 - RNA, 22 nt, Human
uuguuuaucgcuugcucacaua

SEQ ID NO: 268272 - RNA, 22 nt, Human
cuuuggaacuguaaggagaugg

SEQ ID NO: 268273 - RNA, 22 nt, Human
ggcaggaggugaguggcgggug

SEQ ID NO: 268274 - RNA, 22 nt, Human
gcacaguauugcacaacucuag

SEQ ID NO: 268275 - RNA, 22 nt, Human
aauucuuggaaacauuacugga

SEQ ID NO: 268276 - RNA, 22 nt, Human
guagucuuggauuuuaaaaagu

SEQ ID NO: 268277 - RNA, 22 nt, Human
ccaggccugcauucccucucag

SEQ ID NO: 268278 - RNA, 22 nt, Human
ucauauuuaggccuuuaauuca

SEQ ID NO: 268279 - RNA, 22 nt, Human
aagaguuaugaaagcaaggcau

SEQ ID NO: 268280 - RNA, 22 nt, Human
aaucauucuuauuucacagcaa

SEQ ID NO: 268281 - RNA, 22 nt, Human
ucugacagguguucuuccaggc

SEQ ID NO: 268282 - RNA, 22 nt, Human
ucccaggcuggggccaggugac

SEQ ID NO: 268283 - RNA, 22 nt, Human
uucagugucaauuuuuaaauau

SEQ ID NO: 268284 - RNA, 22 nt, Human
gaggagcccagcaccaucacuu

SEQ ID NO: 268285 - RNA, 22 nt, Human
uaggaaaugcuccauugcauaa

SEQ ID NO: 268286 - RNA, 22 nt, Human
aagaacuuuaaagcacuuauga

SEQ ID NO: 268287 - RNA, 22 nt, Human
cuucagagugcagaagauuggg

SEQ ID NO: 268288 - RNA, 22 nt, Human
uuauaacaacaguuuacuuuaa

SEQ ID NO: 268289 - RNA, 22 nt, Human
gcugggcaccggagagacccca

SEQ ID NO: 268290 - RNA, 23 nt, Human
uauuagcaauucccacagagcag

SEQ ID NO: 268291 - RNA, 22 nt, Human
uauuagguagauuuuacugauu

SEQ ID NO: 268292 - RNA, 22 nt, Human
uacaagaaaguccaguggguuu

SEQ ID NO: 268293 - RNA, 22 nt, Human
cauaauccugguguagcccucu

SEQ ID NO: 268294 - RNA, 22 nt, Human
uccaaacacccuccaugcugca

SEQ ID NO: 268295 - RNA, 22 nt, Human
cagcucagugaugccuucacag

SEQ ID NO: 268296 - RNA, 23 nt, Human
gagaccagggccagcugugucau

SEQ ID NO: 268297 - RNA, 18 nt, Human
uggcagcaggaagccauu

SEQ ID NO: 268298 - RNA, 22 nt, Human
ggcccaguguggguggauguug

SEQ ID NO: 268299 - RNA, 22 nt, Human
cuuuuauuuugaauuaagggcu

SEQ ID NO: 268300 - RNA, 22 nt, Human
uccugguguaaugguaagcaug

SEQ ID NO: 268301 - RNA, 22 nt, Human
aaagagcccuuccaugacucuu

SEQ ID NO: 268302 - RNA, 20 nt, Human
agcccuguuuccuggagaga

SEQ ID NO: 268303 - RNA, 22 nt, Human
ucagcauaucuugagcuucaug

SEQ ID NO: 268304 - RNA, 22 nt, Human
uuucuuauauucugucauuguu

SEQ ID NO: 268305 - RNA, 22 nt, Human
gccuggaggggccaggguggua

SEQ ID NO: 268306 - RNA, 22 nt, Human
uauauguuucuuacaaaauauu

SEQ ID NO: 268307 - RNA, 16 nt, Human
uaucuagaguugaggu

SEQ ID NO: 268308 - RNA, 20 nt, Human
acagugcauggggggacagc

SEQ ID NO: 268309 - RNA, 22 nt, Human
cagaaccugugaauguguuauc

SEQ ID NO: 268310 - RNA, 22 nt, Human
gcugagacuggcagcaggaagu

SEQ ID NO: 268311 - RNA, 22 nt, Human
uucaauguuucuuaucaaguug

SEQ ID NO: 268312 - RNA, 22 nt, Human
cugggcucccucaugugucugc

SEQ ID NO: 268313 - RNA, 21 nt, Human
ucugacuugaucuauucuccc

SEQ ID NO: 268314 - RNA, 22 nt, Human
aagcuggccuguaccugcugag

SEQ ID NO: 268315 - RNA, 22 nt, Human
uucaacuuuggagauuuaauaa

SEQ ID NO: 268316 - RNA, 22 nt, Human
cagaggcugccagccaugugca

SEQ ID NO: 268317 - RNA, 22 nt, Human
uagcaacaugguuaucacauua

SEQ ID NO: 268318 - RNA, 22 nt, Human
aagggcauugaggcugagagac

SEQ ID NO: 268319 - RNA, 22 nt, Human
cccaggaggcagagcuugcagu

SEQ ID NO: 268320 - RNA, 22 nt, Human
aaagaguucuuguagcuuugag

SEQ ID NO: 268321 - RNA, 22 nt, Human
uuggccuugucuggucuucucc

SEQ ID NO: 268322 - RNA, 22 nt, Human
ggcccagccggcgagucucgcg

SEQ ID NO: 268323 - RNA, 18 nt, Human
cucuuucuuuggcacaaa

SEQ ID NO: 268324 - RNA, 22 nt, Human
gcaugcagagucccucugcauu

SEQ ID NO: 268325 - RNA, 22 nt, Human
gcuggagaaacugcagcugagg

SEQ ID NO: 268326 - RNA, 22 nt, Human
aggggagaaaaaugccuucugu

SEQ ID NO: 268327 - RNA, 22 nt, Human
ugcaggugucuccagggcaggu

SEQ ID NO: 268328 - RNA, 22 nt, Human
ccaagcaaggcuaauucacuug

SEQ ID NO: 268329 - RNA, 22 nt, Human
auaaacaagacuggccaacuuu

SEQ ID NO: 268330 - RNA, 22 nt, Human
cuccagcugaguaagaacacua

SEQ ID NO: 268331 - RNA, 22 nt, Human
uugcauguuauuuaaucuguau

SEQ ID NO: 268332 - RNA, 22 nt, Human
aacaguaggcaucacauaauga

SEQ ID NO: 268333 - RNA, 22 nt, Human
ggaugugaaucugggcugagac

SEQ ID NO: 268334 - RNA, 22 nt, Human
uccucagaugcucuuggacgcc

SEQ ID NO: 268335 - RNA, 22 nt, Human
uauggaaaguguuuucuucugu

SEQ ID NO: 268336 - RNA, 22 nt, Human
aaggaaaggaugagcaugcauu

SEQ ID NO: 268337 - RNA, 22 nt, Human
agcagcaggaggcuguccacca

SEQ ID NO: 268338 - RNA, 22 nt, Human
auggcuucuagcauugucacaa

SEQ ID NO: 268339 - RNA, 22 nt, Human
aaucaaaaccuacagagguaau

SEQ ID NO: 268340 - RNA, 22 nt, Human
agcugguucauggacugccugg

SEQ ID NO: 268341 - RNA, 22 nt, Human
uacuuucuuucugauccuuaug

SEQ ID NO: 268342 - RNA, 22 nt, Human
cuuuccaaugucacuaugaauc

SEQ ID NO: 268343 - RNA, 22 nt, Human
gcaaggaagagcagguggugcu

SEQ ID NO: 268344 - RNA, 22 nt, Human
ccuuuagaauucugccccuccu

SEQ ID NO: 268345 - RNA, 22 nt, Human
auuugcuggugaaauagugaca

SEQ ID NO: 268346 - RNA, 22 nt, Human
ggcuuccuaauacucccuacac

SEQ ID NO: 268347 - RNA, 22 nt, Human
uuaacauuguccuuagcagauu

SEQ ID NO: 268348 - RNA, 23 nt, Human
agaagcugggagccuggggaugg

SEQ ID NO: 268349 - RNA, 22 nt, Human
ucugcaggaugcaaaguguaca

SEQ ID NO: 268350 - RNA, 22 nt, Human
aaagucauguuuuuguuuagca

SEQ ID NO: 268351 - RNA, 22 nt, Human
aauggcacuuuauaaauguuaa

SEQ ID NO: 268352 - RNA, 22 nt, Human
gggcuucucuuuagugagcuga

SEQ ID NO: 268353 - RNA, 22 nt, Human
uucuggaaaugcacaacuaauu

SEQ ID NO: 268354 - RNA, 22 nt, Human
acugggaaggaaaggaauguaa

SEQ ID NO: 268355 - RNA, 22 nt, Human
ccugaaaugaguucugcucacu

SEQ ID NO: 268356 - RNA, 22 nt, Human
ccuggcuggacuggaccguggc

SEQ ID NO: 268357 - RNA, 22 nt, Human
acuuucugucaucuagacaagu

SEQ ID NO: 268358 - RNA, 22 nt, Human
auacauucagcagugcucauga

SEQ ID NO: 268359 - RNA, 22 nt, Human
uguaaccaugaugagcagguau

SEQ ID NO: 268360 - RNA, 22 nt, Human
auuucccagcuuugaucaguuu

SEQ ID NO: 268361 - RNA, 22 nt, Human
uccuggcuaaugcugcugaugg

SEQ ID NO: 268362 - RNA, 22 nt, Human
uuuucuaaaagaagucacugau

SEQ ID NO: 268363 - RNA, 22 nt, Human
cuuccuggaugaacaguagaaa

SEQ ID NO: 268364 - RNA, 22 nt, Human
auauaaagaaguggaaaaugag

SEQ ID NO: 268365 - RNA, 22 nt, Human
uggcuggcaguaggcuaguggc

SEQ ID NO: 268366 - RNA, 22 nt, Human
ugcuccaggugugccucucaug

SEQ ID NO: 268367 - RNA, 22 nt, Human
uccuggguccugggaagcccug

SEQ ID NO: 268368 - RNA, 22 nt, Human
accagcucucuagcccuggucc

SEQ ID NO: 268369 - RNA, 22 nt, Human
ggguggagcuuggacaccagua

SEQ ID NO: 268370 - RNA, 22 nt, Human
cucugugaaccccuccuuucuu

SEQ ID NO: 268371 - RNA, 22 nt, Human
uuacaagcagcuacauaucaca

SEQ ID NO: 268372 - RNA, 22 nt, Human
cugccaccaaauagcugcauga

SEQ ID NO: 268373 - RNA, 22 nt, Human
agcaggugcguuacuucacucu

SEQ ID NO: 268374 - RNA, 22 nt, Human
ucuggaugaagacccagaggcu

SEQ ID NO: 268375 - RNA, 22 nt, Human
uguagaaaauuggagcauucau

SEQ ID NO: 268376 - RNA, 22 nt, Human
caucauuguuagggacucuaac

SEQ ID NO: 268377 - RNA, 22 nt, Human
agcccagagacaaugcucagua

SEQ ID NO: 268378 - RNA, 22 nt, Human
cucugaaagcaaaacuagagaa

SEQ ID NO: 268379 - RNA, 22 nt, Human
aaggaaaugugccugacacugc

SEQ ID NO: 268380 - RNA, 22 nt, Human
ucaagauguccagugccuauaa

SEQ ID NO: 268381 - RNA, 22 nt, Human
uucaauaucucuaagaaugagg

SEQ ID NO: 268382 - RNA, 22 nt, Human
ugcuggggucucuccggugccc

SEQ ID NO: 268383 - RNA, 22 nt, Human
agugaaggaaguuugucuuggg

SEQ ID NO: 268384 - RNA, 22 nt, Human
ugaggaaagaaaggcaugcaug

SEQ ID NO: 268385 - RNA, 22 nt, Human
ugcaggucauguggcgggacug

SEQ ID NO: 268386 - RNA, 22 nt, Human
cuccccugagcauagacucugu

SEQ ID NO: 268387 - RNA, 22 nt, Human
caggcaccaacuuccuggggag

SEQ ID NO: 268388 - RNA, 22 nt, Human
acauugugauccgacugauuaa

SEQ ID NO: 268389 - RNA, 22 nt, Human
aacaggcuccaugaacaacgug

SEQ ID NO: 268390 - RNA, 22 nt, Human
uggcuggggagccccgacuccc

SEQ ID NO: 268391 - RNA, 22 nt, Human
aaaugcauugguuucuacuugu

SEQ ID NO: 268392 - RNA, 22 nt, Human
ucuauauuccagauacagauua

SEQ ID NO: 268393 - RNA, 22 nt, Human
guaggcagucucucaggugauc

SEQ ID NO: 268394 - RNA, 22 nt, Human
acaggcuuagggcuugggcccg

SEQ ID NO: 268395 - RNA, 22 nt, Human
cccucugccugcgcccuggugu

SEQ ID NO: 268396 - RNA, 22 nt, Human
ucuagaaugacaugcaagagua

SEQ ID NO: 268397 - RNA, 22 nt, Human
cccuggcucuucaccaccugcc

SEQ ID NO: 268398 - RNA, 22 nt, Human
gucccuggggaaucagcuggag

SEQ ID NO: 268399 - RNA, 22 nt, Human
gggcacaggaauuugggaugug

SEQ ID NO: 268400 - RNA, 22 nt, Human
cucuccugguguggaggacagg

SEQ ID NO: 268401 - RNA, 22 nt, Human
aauaugcagcaugaugaaguaa

SEQ ID NO: 268402 - RNA, 22 nt, Human
gcagggcugggacuuacuggua

SEQ ID NO: 268403 - RNA, 22 nt, Human
aaguuucucaauggcaacuggg

SEQ ID NO: 268404 - RNA, 22 nt, Human
ugaggcaggaguucaggcugcg

SEQ ID NO: 268405 - RNA, 22 nt, Human
aggucugagcuccuuccucuga

SEQ ID NO: 268406 - RNA, 22 nt, Human
aaauaguucagcuuguaaaccc

SEQ ID NO: 268407 - RNA, 22 nt, Human
auucuucaucacuaccuuguga

SEQ ID NO: 268408 - RNA, 22 nt, Human
aucuggagcucugcacaccugg

SEQ ID NO: 268409 - RNA, 22 nt, Human
agaguguguuccccaagaaaga

SEQ ID NO: 268410 - RNA, 22 nt, Human
aacaucuccaaccuacauccac

SEQ ID NO: 268411 - RNA, 20 nt, Human
ucaggcuccgcauuaacuua

SEQ ID NO: 268412 - RNA, 22 nt, Human
aaguguguuuucaguguacuua

SEQ ID NO: 268413 - RNA, 22 nt, Human
uucuccagacaggcagagggaa

SEQ ID NO: 268414 - RNA, 22 nt, Human
cauuacaaccccaaauuacaaa

SEQ ID NO: 268415 - RNA, 22 nt, Human
gauuuacaaagcucucuagugu

SEQ ID NO: 268416 - RNA, 22 nt, Human
gcaggagccaggccgagcuggu

SEQ ID NO: 268417 - RNA, 22 nt, Human
gagacacagcagauauucaauc

SEQ ID NO: 268418 - RNA, 22 nt, Human
acaggcaagaggaaagcaagua

SEQ ID NO: 268419 - RNA, 22 nt, Human
gcuccaguggauacagcagugg

SEQ ID NO: 268420 - RNA, 22 nt, Human
caggaggcagcgcucucaggac

SEQ ID NO: 268421 - RNA, 22 nt, Human
uguuugaaaaguggagauuuau

SEQ ID NO: 268422 - RNA, 22 nt, Human
caagauuuaagagucagccuug

SEQ ID NO: 268423 - RNA, 22 nt, Human
ucagggagaggugagagccugu

SEQ ID NO: 268424 - RNA, 22 nt, Human
agucacauagcucugguuucuu

SEQ ID NO: 268425 - RNA, 22 nt, Human
agagcccaggcaggcauccagg

SEQ ID NO: 268426 - RNA, 22 nt, Human
acaggcacugucaagucaugaa

SEQ ID NO: 268427 - RNA, 22 nt, Human
guuagagggcugccuuuuguuu

SEQ ID NO: 268428 - RNA, 22 nt, Human
aucugagguauaugacuggcua

SEQ ID NO: 268429 - RNA, 22 nt, Human
gugaauuacauguauuuuuaag

SEQ ID NO: 268430 - RNA, 22 nt, Human
uugagcaaugcugcaaagagau

SEQ ID NO: 268431 - RNA, 22 nt, Human
caaguuuacaauguguaugugu

SEQ ID NO: 268432 - RNA, 22 nt, Human
gacacagacaguuagagguaau

SEQ ID NO: 268433 - RNA, 22 nt, Human
gugggcuuguuuugaugagauc

SEQ ID NO: 268434 - RNA, 22 nt, Human
cagcaucucauucauucauguu

SEQ ID NO: 268435 - RNA, 21 nt, Human
uucucagagucuauuacaguu

SEQ ID NO: 268436 - RNA, 22 nt, Human
aggcuggauuuauggggacuuc

SEQ ID NO: 268437 - RNA, 22 nt, Human
ccccacaggugucugaggcagg

SEQ ID NO: 268438 - RNA, 22 nt, Human
gaaggaagucauuagugcagac

SEQ ID NO: 268439 - RNA, 22 nt, Human
augagggaagcucacgugucca

SEQ ID NO: 268440 - RNA, 22 nt, Human
ucagugcugcuuuaugacaguu

SEQ ID NO: 268441 - RNA, 22 nt, Human
ucuggagaaaguugaguuugug

SEQ ID NO: 268442 - RNA, 23 nt, Human
agcuggguggccugcgugaagcu

SEQ ID NO: 268443 - RNA, 22 nt, Human
accugccuaucagcugccugcu

SEQ ID NO: 268444 - RNA, 23 nt, Human
ucagaguagcaauuuuucucucc

SEQ ID NO: 268445 - RNA, 22 nt, Human
agcuagcaaauagcauguagga

SEQ ID NO: 268446 - RNA, 22 nt, Human
uauagcaacuccaaagagacuu

SEQ ID NO: 268447 - RNA, 22 nt, Human
guuuuacaaaugacggcauuca

SEQ ID NO: 268448 - RNA, 22 nt, Human
guugaaaauacagauuccuagg

SEQ ID NO: 268449 - RNA, 22 nt, Human
ggcucaggccuguaauccuagc

SEQ ID NO: 268450 - RNA, 22 nt, Human
ucuguucaguugauuagacaga

SEQ ID NO: 268451 - RNA, 22 nt, Human
ucagcuggugaguggauagaca

SEQ ID NO: 268452 - RNA, 22 nt, Human
cugccagcaagcuacccuggca

SEQ ID NO: 268453 - RNA, 22 nt, Human
acuuguuuggucucauguuuaa

SEQ ID NO: 268454 - RNA, 22 nt, Human
gcacagagccugguaccgagaa

SEQ ID NO: 268455 - RNA, 22 nt, Human
ugcccagccuaaacuuggcaag

SEQ ID NO: 268456 - RNA, 22 nt, Human
uagcuacaaucacuguccuuug

SEQ ID NO: 268457 - RNA, 22 nt, Human
guggcugcugguacucugggaa

SEQ ID NO: 268458 - RNA, 22 nt, Human
auguguccugcugugucacaca

SEQ ID NO: 268459 - RNA, 22 nt, Human
aguguagacauaggucuggucu

SEQ ID NO: 268460 - RNA, 22 nt, Human
auucuuauuauaguaaaacagu

SEQ ID NO: 268461 - RNA, 22 nt, Human
gccagccagggaagggagagac

SEQ ID NO: 268462 - RNA, 22 nt, Human
gaugguccuccugcugccucuc

SEQ ID NO: 268463 - RNA, 22 nt, Human
agagugagggggcacugagacg

SEQ ID NO: 268464 - RNA, 20 nt, Human
cuguggcucaugcaucugcc

SEQ ID NO: 268465 - RNA, 22 nt, Human
cuggcuggucaucagcaguacg

SEQ ID NO: 268466 - RNA, 22 nt, Human
ucaaaauuuuauuucucaagga

SEQ ID NO: 268467 - RNA, 18 nt, Human
uugauucauauuaaccau

SEQ ID NO: 268468 - RNA, 22 nt, Human
acaggcucgugcgcgcacgugu

SEQ ID NO: 268469 - RNA, 22 nt, Human
gcccacauccacuagacaugca

SEQ ID NO: 268470 - RNA, 21 nt, Human
cccaggagaagaaaagaugca

SEQ ID NO: 268471 - RNA, 22 nt, Human
gcaagacaugucuaagguuuaa

SEQ ID NO: 268472 - RNA, 22 nt, Human
gugcugacaggagccuggcggu

SEQ ID NO: 268473 - RNA, 19 nt, Human
cugggccugcaugguuguu

SEQ ID NO: 268474 - RNA, 22 nt, Human
gcugucuuuccccugcuccaga

SEQ ID NO: 268475 - RNA, 22 nt, Human
ccagggcagcagaauuggggca

SEQ ID NO: 268476 - RNA, 22 nt, Human
cucagucugucuugucuguguu

SEQ ID NO: 268477 - RNA, 22 nt, Human
uuugguaaguacccaccugggu

SEQ ID NO: 268478 - RNA, 22 nt, Human
cacucugauuccacaaggcucc

SEQ ID NO: 268479 - RNA, 22 nt, Human
gcagggcagcugaagcuaggug

SEQ ID NO: 268480 - RNA, 22 nt, Human
gagugcaguaugagaggcugcu

SEQ ID NO: 268481 - RNA, 22 nt, Human
gguggagagcuggaugagaggu

SEQ ID NO: 268482 - RNA, 22 nt, Human
uauuggucaaguugaggacccu

SEQ ID NO: 268483 - RNA, 22 nt, Human
aggaggccccuccuggguugcu

SEQ ID NO: 268484 - RNA, 22 nt, Human
cugcagugaggauucuuaggug

SEQ ID NO: 268485 - RNA, 22 nt, Human
ucaucuuuguaucccuaacaca

SEQ ID NO: 268486 - RNA, 22 nt, Human
aaaguuagaaugauaucaacga

SEQ ID NO: 268487 - RNA, 22 nt, Human
uugagggaaauaacugaugcuu

SEQ ID NO: 268488 - RNA, 22 nt, Human
gcagagcugucuaagucacuuc

SEQ ID NO: 268489 - RNA, 22 nt, Human
guggcccaggcuuggcgcuggc

SEQ ID NO: 268490 - RNA, 22 nt, Human
uuggccuuguacaucauauuaa

SEQ ID NO: 268491 - RNA, 19 nt, Human
accugccaugacagccuga

SEQ ID NO: 268492 - RNA, 22 nt, Human
aagucagagaucaaggugucua

SEQ ID NO: 268493 - RNA, 22 nt, Human
ugcccagccaguuuaugguaau

SEQ ID NO: 268494 - RNA, 22 nt, Human
augcaauauguguuucuguuua

SEQ ID NO: 268495 - RNA, 21 nt, Human
cuacccucacucccauuccuc

SEQ ID NO: 268496 - RNA, 21 nt, Human
gggccuggcugcgcaggacgg

SEQ ID NO: 268497 - RNA, 22 nt, Human
agaggcccucucucuccugaug

SEQ ID NO: 268498 - RNA, 21 nt, Human
gggcaggucucugaugucaac

SEQ ID NO: 268499 - RNA, 22 nt, Human
aggcucagggacggggccccuu

SEQ ID NO: 268500 - RNA, 22 nt, Human
gugugcagaacagggagugggu

SEQ ID NO: 268501 - RNA, 22 nt, Human
gagucagaccgacugggcucau

SEQ ID NO: 268502 - RNA, 22 nt, Human
cauagugacucaugccuauaau

SEQ ID NO: 268503 - RNA, 22 nt, Human
cacacagggagaaagaaagccu

SEQ ID NO: 268504 - RNA, 20 nt, Human
caggucuucauguggcuguc

SEQ ID NO: 268505 - RNA, 22 nt, Human
uacaggcucuugucagacguau

SEQ ID NO: 268506 - RNA, 22 nt, Human
ggccccagcagacccuccucug

SEQ ID NO: 268507 - RNA, 22 nt, Human
aaguacuucuagauggauaauc

SEQ ID NO: 268508 - RNA, 22 nt, Human
ucuggaugauaugugaacuuga

SEQ ID NO: 268509 - RNA, 22 nt, Human
cagccuggccugggacugcuga

SEQ ID NO: 268510 - RNA, 22 nt, Human
agacugaauaacaagcaaauaa

SEQ ID NO: 268511 - RNA, 22 nt, Human
guuagggaagcgcuguguucuu

SEQ ID NO: 268512 - RNA, 22 nt, Human
cagcacuuggugccauugagug

SEQ ID NO: 268513 - RNA, 22 nt, Human
acuugcaagguugcaguuagaa

SEQ ID NO: 268514 - RNA, 22 nt, Human
aguguuugggggccuuguaaca

SEQ ID NO: 268515 - RNA, 22 nt, Human
gauauugugaugaugucuuugg

SEQ ID NO: 268516 - RNA, 22 nt, Human
ucuaagaggcaucaagacaagc

SEQ ID NO: 268517 - RNA, 22 nt, Human
uuugagguuagcuagcagauca

SEQ ID NO: 268518 - RNA, 22 nt, Human
uuccaggauagcuuucaggaau

SEQ ID NO: 268519 - RNA, 22 nt, Human
cacaucagggcugcuugggggu

SEQ ID NO: 268520 - RNA, 22 nt, Human
aggcugagccugggcguggugg

SEQ ID NO: 268521 - RNA, 22 nt, Human
aagagacaagaauuccaacgcu

SEQ ID NO: 268522 - RNA, 22 nt, Human
acaaaugucuccucuuuuguua

SEQ ID NO: 268523 - RNA, 22 nt, Human
gcaucucuuacccacgagccag

SEQ ID NO: 268524 - RNA, 19 nt, Human
cuccaggauggcugggcga

SEQ ID NO: 268525 - RNA, 22 nt, Human
caugcaaacacguaaacauuca

SEQ ID NO: 268526 - RNA, 22 nt, Human
aacugcaauuacuuuugcgcca

SEQ ID NO: 268527 - RNA, 22 nt, Human
uccuggccgccgcguggggccg

SEQ ID NO: 268528 - RNA, 22 nt, Human
uuaauaugcugcuucuugaaaa

SEQ ID NO: 268529 - RNA, 22 nt, Human
ccuggcagcagcacaugccuuc

SEQ ID NO: 268530 - RNA, 22 nt, Human
caaagucagccagcuaguaggu

SEQ ID NO: 268531 - RNA, 22 nt, Human
caguauaugcucuuucaucaaa

SEQ ID NO: 268532 - RNA, 22 nt, Human
agugaauuuaaaacacugagga

SEQ ID NO: 268533 - RNA, 22 nt, Human
auucuuuuaaauggcaguagua

SEQ ID NO: 268534 - RNA, 23 nt, Human
ccuggcuucauucucuuagggug

SEQ ID NO: 268535 - RNA, 22 nt, Human
cuccuccagcuuccaguggcuc

SEQ ID NO: 268536 - RNA, 22 nt, Human
acauuucuauagugcaucuguu

SEQ ID NO: 268537 - RNA, 22 nt, Human
uggagcuccacuggaaaaaugu

SEQ ID NO: 268538 - RNA, 22 nt, Human
uggcuggggccugaauccugca

SEQ ID NO: 268539 - RNA, 22 nt, Human
cagaaugcagaauguucauuuu

SEQ ID NO: 268540 - RNA, 22 nt, Human
agagcccagugacaucagcaca

SEQ ID NO: 268541 - RNA, 22 nt, Human
ucacaucuaauucgguuagguu

SEQ ID NO: 268542 - RNA, 22 nt, Human
caggagcucaagaccacccugg

SEQ ID NO: 268543 - RNA, 22 nt, Human
ccaucuugggucacugcccccc

SEQ ID NO: 268544 - RNA, 22 nt, Human
aggaaugugacuauuuuuucag

SEQ ID NO: 268545 - RNA, 22 nt, Human
gagaaucuggguuuuggcuauc

SEQ ID NO: 268546 - RNA, 22 nt, Human
uuugcaaauauguguuucuauu

SEQ ID NO: 268547 - RNA, 22 nt, Human
aaagguaucauguccauacagu

SEQ ID NO: 268548 - RNA, 22 nt, Human
ugaaacaguagucuguggguuu

SEQ ID NO: 268549 - RNA, 19 nt, Human
guucaaacacugauucagc

SEQ ID NO: 268550 - RNA, 22 nt, Human
aacagcaugcuggguaacauug

SEQ ID NO: 268551 - RNA, 22 nt, Human
ccugguggcuucuggguggacg

SEQ ID NO: 268552 - RNA, 22 nt, Human
cauagaaucauagcacauuuga

SEQ ID NO: 268553 - RNA, 22 nt, Human
uaaguguugaucugagugcuaa

SEQ ID NO: 268554 - RNA, 22 nt, Human
ccucugccaccucccacgaggc

SEQ ID NO: 268555 - RNA, 22 nt, Human
gcccaggaguucaaggcugcag

SEQ ID NO: 268556 - RNA, 22 nt, Human
ucaggaaagaguaauguauaca

SEQ ID NO: 268557 - RNA, 22 nt, Human
aaauggauguugaguuaaaugu

SEQ ID NO: 268558 - RNA, 21 nt, Human
uaagacaguaugaauacuuuc

SEQ ID NO: 268559 - RNA, 22 nt, Human
gugaggcuacucagcuguccga

SEQ ID NO: 268560 - RNA, 22 nt, Human
auuucuguggcuucauucuccu

SEQ ID NO: 268561 - RNA, 18 nt, Human
caggccucuugaucuucc

SEQ ID NO: 268562 - RNA, 22 nt, Human
uuuggaguuuaacaacuugaag

SEQ ID NO: 268563 - RNA, 22 nt, Human
gggcagugucggggcccaggga

SEQ ID NO: 268564 - RNA, 22 nt, Human
cauagacaaagaucagaagagu

SEQ ID NO: 268565 - RNA, 22 nt, Human
cagaggggcugacacccuuggc

SEQ ID NO: 268566 - RNA, 21 nt, Human
ugcuggaaaaagugguucuag

SEQ ID NO: 268567 - RNA, 22 nt, Human
gucaggacaggcucuggacuga

SEQ ID NO: 268568 - RNA, 22 nt, Human
acaugcaaaaauauauuuauga

SEQ ID NO: 268569 - RNA, 22 nt, Human
acggugcuggguauugggguuc

SEQ ID NO: 268570 - RNA, 22 nt, Human
uagugcauaccuaacauuuuug

SEQ ID NO: 268571 - RNA, 22 nt, Human
ggcacagcacagagcacaugua

SEQ ID NO: 268572 - RNA, 22 nt, Human
aaacucuggagauguuuaugca

SEQ ID NO: 268573 - RNA, 22 nt, Human
ucccuccuuaauaagaggucug

SEQ ID NO: 268574 - RNA, 21 nt, Human
gcaaccagaccacagggcagu

SEQ ID NO: 268575 - RNA, 22 nt, Human
gauugcugugcgccccaggugu

SEQ ID NO: 268576 - RNA, 22 nt, Human
gcuuucugguucucaaagcacu

SEQ ID NO: 268577 - RNA, 22 nt, Human
uugcuuuauuggguuuacugcc

SEQ ID NO: 268578 - RNA, 22 nt, Human
ugucaucuggccugauuggugu

SEQ ID NO: 268579 - RNA, 22 nt, Human
aaugguaucaccucacagaauu

SEQ ID NO: 268580 - RNA, 22 nt, Human
gaauucugucgcuuacuagaug

SEQ ID NO: 268581 - RNA, 22 nt, Human
uggcaagaaacugaggccugcu

SEQ ID NO: 268582 - RNA, 22 nt, Human
caaaagcaaagucccugaaugu

SEQ ID NO: 268583 - RNA, 22 nt, Human
uuacuucuuacaaaagaaauau

SEQ ID NO: 268584 - RNA, 22 nt, Human
gagcaagauccuguuuuucuau

SEQ ID NO: 268585 - RNA, 21 nt, Human
ugguggagugugcugagcaug

SEQ ID NO: 268586 - RNA, 20 nt, Human
ugccagggccagcagaggcu

SEQ ID NO: 268587 - RNA, 22 nt, Human
uucuaaacugaaguauuuuaaa

SEQ ID NO: 268588 - RNA, 22 nt, Human
aggugcugggcagcagucauug

SEQ ID NO: 268589 - RNA, 22 nt, Human
uggagcagagaugguggccuuc

SEQ ID NO: 268590 - RNA, 22 nt, Human
gucuccagagguuacauccugu

SEQ ID NO: 268591 - RNA, 22 nt, Human
aagauacaaaugucaauauugg

SEQ ID NO: 268592 - RNA, 22 nt, Human
cuuguauuaagcuuagagaggc

SEQ ID NO: 268593 - RNA, 22 nt, Human
gcugcaggcuguggcaggggag

SEQ ID NO: 268594 - RNA, 22 nt, Human
auuuccuauccuggucuuaaaa

SEQ ID NO: 268595 - RNA, 22 nt, Human
ugguaaagaaggcuagaucuga

SEQ ID NO: 268596 - RNA, 22 nt, Human
ugggcacuccuggggacagcug

SEQ ID NO: 268597 - RNA, 22 nt, Human
gggccugcagguucugagaggc

SEQ ID NO: 268598 - RNA, 22 nt, Human
aggaaagacuggggccccagaa

SEQ ID NO: 268599 - RNA, 22 nt, Human
gcuggcuuaauguagcuaaaaa

SEQ ID NO: 268600 - RNA, 22 nt, Human
uuuuaaaggauacucuugucua

SEQ ID NO: 268601 - RNA, 19 nt, Human
guucuuuucaccucugugc

SEQ ID NO: 268602 - RNA, 22 nt, Human
ucaggagcucuucccuggugug

SEQ ID NO: 268603 - RNA, 22 nt, Human
acagcuuuucugauagauccug

SEQ ID NO: 268604 - RNA, 22 nt, Human
ccacagagucuuccuucucuuc

SEQ ID NO: 268605 - RNA, 22 nt, Human
agugcuuuccuucuugugacau

SEQ ID NO: 268606 - RNA, 22 nt, Human
auggcugcuuacaaaaacugug

SEQ ID NO: 268607 - RNA, 22 nt, Human
ccuguccccucacaaugccacu

SEQ ID NO: 268608 - RNA, 22 nt, Human
uuuauaaacaguaccacggugc

SEQ ID NO: 268609 - RNA, 21 nt, Human
cuguccucagauguggacgag

SEQ ID NO: 268610 - RNA, 22 nt, Human
gucaacaagguuugcuuaucuu

SEQ ID NO: 268611 - RNA, 22 nt, Human
caccagggccccaggcugugcc

SEQ ID NO: 268612 - RNA, 22 nt, Human
ucugcaccuccugcuugcuaga

SEQ ID NO: 268613 - RNA, 21 nt, Human
uuugacuccucauuuuuauau

SEQ ID NO: 268614 - RNA, 22 nt, Human
aaggugucggguuagcucagcc

SEQ ID NO: 268615 - RNA, 23 nt, Human
cagugcagggcaacucagacucc

SEQ ID NO: 268616 - RNA, 22 nt, Human
aaauacauaaagguuguaccag

SEQ ID NO: 268617 - RNA, 22 nt, Human
aaggcuuuugggaauuuucaac

SEQ ID NO: 268618 - RNA, 22 nt, Human
cugggcucagugucucacuccu

SEQ ID NO: 268619 - RNA, 22 nt, Human
gccucccuccaccacugcaggu

SEQ ID NO: 268620 - RNA, 22 nt, Human
acagcuuuguguuaaugggaag

SEQ ID NO: 268621 - RNA, 22 nt, Human
ucacagagagguuaagcaguug

SEQ ID NO: 268622 - RNA, 22 nt, Human
ucauuagaaaugcagauucuca

SEQ ID NO: 268623 - RNA, 22 nt, Human
cagugguuauacuuacuguuuc

SEQ ID NO: 268624 - RNA, 22 nt, Human
uaaaacuuaacuauccagauua

SEQ ID NO: 268625 - RNA, 22 nt, Human
ccugaggggcugcaggccagcu

SEQ ID NO: 268626 - RNA, 22 nt, Human
ggcagcuccucaaaaaauuaaa

SEQ ID NO: 268627 - RNA, 22 nt, Human
aacagccucagugagauuagga

SEQ ID NO: 268628 - RNA, 22 nt, Human
uggagccaggguagaagcagag

SEQ ID NO: 268629 - RNA, 22 nt, Human
acaguucugcaagauauuuuuu

SEQ ID NO: 268630 - RNA, 22 nt, Human
aagcaugggaaucccacagggu

SEQ ID NO: 268631 - RNA, 19 nt, Human
guccaguguuuuccaguca

SEQ ID NO: 268632 - RNA, 22 nt, Human
accugggaggcagagguugcag

SEQ ID NO: 268633 - RNA, 22 nt, Human
ccuggaaucuggaguuggaauc

SEQ ID NO: 268634 - RNA, 22 nt, Human
cacaugcaucugucauguuugg

SEQ ID NO: 268635 - RNA, 22 nt, Human
uggguccacuucugcacugugg

SEQ ID NO: 268636 - RNA, 22 nt, Human
cacagcccugcgccccaguuug

SEQ ID NO: 268637 - RNA, 22 nt, Human
uuuggucaaauauuauccugag

SEQ ID NO: 268638 - RNA, 22 nt, Human
uaguaacugguugaacaacugu

SEQ ID NO: 268639 - RNA, 22 nt, Human
acacaaugucaucauaauguca

SEQ ID NO: 268640 - RNA, 22 nt, Human
aagaauguggguggauaugaug

SEQ ID NO: 268641 - RNA, 22 nt, Human
uugaaugaauucuacuuccaga

SEQ ID NO: 268642 - RNA, 22 nt, Human
gcauggcugguguccugaggga

SEQ ID NO: 268643 - RNA, 22 nt, Human
aggcuucuaggaaacuuucugg

SEQ ID NO: 268644 - RNA, 22 nt, Human
uuagagcugauaguacacuggu

SEQ ID NO: 268645 - RNA, 19 nt, Human
uggcuuccugacucucauc

SEQ ID NO: 268646 - RNA, 22 nt, Human
ggcugccacgucgaggguccaa

SEQ ID NO: 268647 - RNA, 22 nt, Human
gagaacacaugcagacugggua

SEQ ID NO: 268648 - RNA, 22 nt, Human
ccucaggcugcucacacuuguc

SEQ ID NO: 268649 - RNA, 22 nt, Human
gaggcugguaggaaaggaaaca

SEQ ID NO: 268650 - RNA, 22 nt, Human
agaaucuucgguaacuggaaga

SEQ ID NO: 268651 - RNA, 22 nt, Human
augcaggguuauuucaaaaaua

SEQ ID NO: 268652 - RNA, 22 nt, Human
gagcuacacugauucauuuguu

SEQ ID NO: 268653 - RNA, 22 nt, Human
aaggccagagcagacuggaguu

SEQ ID NO: 268654 - RNA, 22 nt, Human
ggcagggcuugucucugugaug

SEQ ID NO: 268655 - RNA, 22 nt, Human
ugcaaaaagagcgaggagcccu

SEQ ID NO: 268656 - RNA, 22 nt, Human
ugucacagagcaacuauuucuu

SEQ ID NO: 268657 - RNA, 22 nt, Human
gaaugauuugguuguuuagauu

SEQ ID NO: 268658 - RNA, 22 nt, Human
agauaacugguuuacauuauug

SEQ ID NO: 268659 - RNA, 22 nt, Human
aagccagaucaaaguguccagg

SEQ ID NO: 268660 - RNA, 22 nt, Human
augacaaaggcugaaagggaaa

SEQ ID NO: 268661 - RNA, 22 nt, Human
uacugaaagacugaauauuuag

SEQ ID NO: 268662 - RNA, 22 nt, Human
aagaaugauuacaaagcaacga

SEQ ID NO: 268663 - RNA, 22 nt, Human
uuucauaauacuguacaugaaa

SEQ ID NO: 268664 - RNA, 22 nt, Human
ucagcagaccuguuauuuggau

SEQ ID NO: 268665 - RNA, 22 nt, Human
cugaggugagaggaggccaugu

SEQ ID NO: 268666 - RNA, 23 nt, Human
ccauggccaaugucaagcuacua

SEQ ID NO: 268667 - RNA, 22 nt, Human
gggcuuggaguaggcugaugaa

SEQ ID NO: 268668 - RNA, 23 nt, Human
gauugcuguaugcaggagcauuc

SEQ ID NO: 268669 - RNA, 22 nt, Human
auuugggaauuauuugccuaau

SEQ ID NO: 268670 - RNA, 22 nt, Human
uccuuggcuuucuggagcuucu

SEQ ID NO: 268671 - RNA, 22 nt, Human
cagggucuuauaaggccaauuu

SEQ ID NO: 268672 - RNA, 22 nt, Human
gccugcugaaccucaugcaguc

SEQ ID NO: 268673 - RNA, 22 nt, Human
agccuggccugggcaggcacau

SEQ ID NO: 268674 - RNA, 22 nt, Human
guugacagaaaaauaacauagc

SEQ ID NO: 268675 - RNA, 22 nt, Human
cacauuuacauauaaaacuuuc

SEQ ID NO: 268676 - RNA, 22 nt, Human
auuugcaaagguuaacagcagu

SEQ ID NO: 268677 - RNA, 22 nt, Human
guguaaagaugccaggaaucuu

SEQ ID NO: 268678 - RNA, 21 nt, Human
ucuaaugacauccucugacaa

SEQ ID NO: 268679 - RNA, 22 nt, Human
uugcauuacauuugcucagucu

SEQ ID NO: 268680 - RNA, 22 nt, Human
ccagggcaggagaaagacucac

SEQ ID NO: 268681 - RNA, 23 nt, Human
ccaguagcacaguuacccagugg

SEQ ID NO: 268682 - RNA, 22 nt, Human
cagccacuugugaugcugggga

SEQ ID NO: 268683 - RNA, 19 nt, Human
gacuccaacuuuaagcaug

SEQ ID NO: 268684 - RNA, 22 nt, Human
agucacaugagcacuaauuagg

SEQ ID NO: 268685 - RNA, 18 nt, Human
aguuuuuaggaagaaaug

SEQ ID NO: 268686 - RNA, 22 nt, Human
cagcugaaucagugaguggaaa

SEQ ID NO: 268687 - RNA, 22 nt, Human
gggcacaguacuccaaucaacu

SEQ ID NO: 268688 - RNA, 22 nt, Human
cuggaaggagcccgggcggauc

SEQ ID NO: 268689 - RNA, 22 nt, Human
aucauaaaauugcaccauuucu

SEQ ID NO: 268690 - RNA, 22 nt, Human
auuaggucauggggaggcccua

SEQ ID NO: 268691 - RNA, 22 nt, Human
uggggcagccacauagacaaca

SEQ ID NO: 268692 - RNA, 19 nt, Human
ucaggaaguugaugaggug

SEQ ID NO: 268693 - RNA, 22 nt, Human
gggcagaggggcgcuucccucu

SEQ ID NO: 268694 - RNA, 17 nt, Human
guccugggaggagagag

SEQ ID NO: 268695 - RNA, 19 nt, Human
ucaugcauuucuaagugca

SEQ ID NO: 268696 - RNA, 23 nt, Human
aguuggaccuggguaagaaaaug

SEQ ID NO: 268697 - RNA, 22 nt, Human
uugggggguugaggaguagaua

SEQ ID NO: 268698 - RNA, 22 nt, Human
cagcccugcugacacugucuga

SEQ ID NO: 268699 - RNA, 22 nt, Human
cuccaggagggcuuccugugau

SEQ ID NO: 268700 - RNA, 22 nt, Human
uucauguucauauguguauauc

SEQ ID NO: 268701 - RNA, 22 nt, Human
cccacauuuuugagucuucauc

SEQ ID NO: 268702 - RNA, 22 nt, Human
uaaaguuuauuggcaccaccau

SEQ ID NO: 268703 - RNA, 20 nt, Human
uucuucucuaguuaucuuca

SEQ ID NO: 268704 - RNA, 23 nt, Human
uggcacagaggaccaugcuuugc

SEQ ID NO: 268705 - RNA, 22 nt, Human
uggacccaccccagggccugcu

SEQ ID NO: 268706 - RNA, 22 nt, Human
ccugcucuuauagcuguuucca

SEQ ID NO: 268707 - RNA, 20 nt, Human
ucuaaaguacaguuugugug

SEQ ID NO: 268708 - RNA, 22 nt, Human
aauugcuuuugggggcaguuac

SEQ ID NO: 268709 - RNA, 22 nt, Human
ccaggagguggcaggacuugcc

SEQ ID NO: 268710 - RNA, 22 nt, Human
ccugcacccaggccgcaccucu

SEQ ID NO: 268711 - RNA, 18 nt, Human
ugggcacaaugaacagca

SEQ ID NO: 268712 - RNA, 22 nt, Human
aauuuuacauaggggauauggg

SEQ ID NO: 268713 - RNA, 20 nt, Human
ucacagaaacaaauagagaa

SEQ ID NO: 268714 - RNA, 22 nt, Human
gcaugugucuuuauagcagcau

SEQ ID NO: 268715 - RNA, 23 nt, Human
gcacaagaccuggcagcuuccau

SEQ ID NO: 268716 - RNA, 22 nt, Human
aaaugccuauuuguuccuucag

SEQ ID NO: 268717 - RNA, 22 nt, Human
gcaguaucuaugugauggguug

SEQ ID NO: 268718 - RNA, 22 nt, Human
gaaugaauuuuggauggugaag

SEQ ID NO: 268719 - RNA, 21 nt, Human
gaagacacauaaccucucucc

SEQ ID NO: 268720 - RNA, 22 nt, Human
auucagacucuugagcaguccc

SEQ ID NO: 268721 - RNA, 22 nt, Human
ugcauuaagaauuucugaggau

SEQ ID NO: 268722 - RNA, 22 nt, Human
ugaggccauggaacuagcuugg

SEQ ID NO: 268723 - RNA, 23 nt, Human
ccucagagaggcagagccacaug

SEQ ID NO: 268724 - RNA, 22 nt, Human
aacugaaacguauuuuugagau

SEQ ID NO: 268725 - RNA, 22 nt, Human
aauaaauguuuguuggauguuu

SEQ ID NO: 268726 - RNA, 22 nt, Human
uuagcaauaugaaugcauuugc

SEQ ID NO: 268727 - RNA, 22 nt, Human
ggacauuucuauugagcuaaga

SEQ ID NO: 268728 - RNA, 22 nt, Human
gauaauauuagaagauacaaau

SEQ ID NO: 268729 - RNA, 22 nt, Human
uuacuguugguguauccauagc

SEQ ID NO: 268730 - RNA, 22 nt, Human
gccuggagggauagaaugcaag

SEQ ID NO: 268731 - RNA, 22 nt, Human
gcugaggauugaagaguugcca

SEQ ID NO: 268732 - RNA, 22 nt, Human
aaggucuguauuagaguuucau

SEQ ID NO: 268733 - RNA, 22 nt, Human
gucuagaaaugccauacgugcc

SEQ ID NO: 268734 - RNA, 22 nt, Human
aggcugcuuucauggccgcccc

SEQ ID NO: 268735 - RNA, 22 nt, Human
uuaguguuagggccuguuaccu

SEQ ID NO: 268736 - RNA, 22 nt, Human
uugaaauauggauugaccuuga

SEQ ID NO: 268737 - RNA, 22 nt, Human
aaaaugcuauuucauggaggag

SEQ ID NO: 268738 - RNA, 22 nt, Human
uccaggcuagccugguagagaa

SEQ ID NO: 268739 - RNA, 22 nt, Human
auugggaugccggcugauaaga

SEQ ID NO: 268740 - RNA, 22 nt, Human
ccucaggugugggccagcuguc

SEQ ID NO: 268741 - RNA, 22 nt, Human
aaacaugcauucaagaaaaucu

SEQ ID NO: 268742 - RNA, 22 nt, Human
uuucauguuacauuuaaaaugu

SEQ ID NO: 268743 - RNA, 22 nt, Human
uuuuagaaguucacuuggguuu

SEQ ID NO: 268744 - RNA, 22 nt, Human
augugaaaaauuucuuauuaca

SEQ ID NO: 268745 - RNA, 22 nt, Human
auugaagaucagggaaagauuc

SEQ ID NO: 268746 - RNA, 22 nt, Human
gucucuggguuaagcagugcau

SEQ ID NO: 268747 - RNA, 22 nt, Human
uccuggagagugggcgagcaca

SEQ ID NO: 268748 - RNA, 22 nt, Human
ggcugcucaaggacucugaucg

SEQ ID NO: 268749 - RNA, 22 nt, Human
gucaggggaugugcugguggcc

SEQ ID NO: 268750 - RNA, 22 nt, Human
cagggcuggcuguggcaaucuc

SEQ ID NO: 268751 - RNA, 22 nt, Human
accugggaguaugcagugguga

SEQ ID NO: 268752 - RNA, 22 nt, Human
agaugggugccuucuuucuuua

SEQ ID NO: 268753 - RNA, 22 nt, Human
gcugugugaccugggcaagucu

SEQ ID NO: 268754 - RNA, 22 nt, Human
uuuccaaauaaggucacauucu

SEQ ID NO: 268755 - RNA, 19 nt, Human
cuucugugauacaucaguc

SEQ ID NO: 268756 - RNA, 22 nt, Human
aguggcaucaacuuuaucugua

SEQ ID NO: 268757 - RNA, 22 nt, Human
ccaggacacugcuucacagcag

SEQ ID NO: 268758 - RNA, 22 nt, Human
auuauguagguuaggugguugu

SEQ ID NO: 268759 - RNA, 22 nt, Human
aaggcuucuuaugcaauuguuu

SEQ ID NO: 268760 - RNA, 22 nt, Human
auuuaacaagacagagaacugg

SEQ ID NO: 268761 - RNA, 22 nt, Human
ccugagcucaaagggugccugg

SEQ ID NO: 268762 - RNA, 22 nt, Human
gcccaggaguugguggcugcag

SEQ ID NO: 268763 - RNA, 22 nt, Human
gagggcuccauuccccgugccc

SEQ ID NO: 268764 - RNA, 22 nt, Human
uuuguucagcucucauugauua

SEQ ID NO: 268765 - RNA, 22 nt, Human
aguucuuuugugaacauaugcu

SEQ ID NO: 268766 - RNA, 22 nt, Human
ccuaggcuggcugucuucaggu

SEQ ID NO: 268767 - RNA, 22 nt, Human
caugcacacugcaacaaggacu

SEQ ID NO: 268768 - RNA, 22 nt, Human
aacagaacccgagugugaaucu

SEQ ID NO: 268769 - RNA, 20 nt, Human
agcccaggccugugugaguc

SEQ ID NO: 268770 - RNA, 19 nt, Human
ucugagcugauaugacauu

SEQ ID NO: 268771 - RNA, 22 nt, Human
cagagugggcugucagccacca

SEQ ID NO: 268772 - RNA, 22 nt, Human
gcuccccuugguccuccuggga

SEQ ID NO: 268773 - RNA, 22 nt, Human
augagcagguuuaagagaggcc

SEQ ID NO: 268774 - RNA, 22 nt, Human
uccaucauguucacagcuauau

SEQ ID NO: 268775 - RNA, 22 nt, Human
agccagcugccuuucacaucug

SEQ ID NO: 268776 - RNA, 22 nt, Human
uuuucaauuuugaggcaguggu

SEQ ID NO: 268777 - RNA, 22 nt, Human
ggguccaggucuucaggcagag

SEQ ID NO: 268778 - RNA, 22 nt, Human
acauguguggacaugaaucuac

SEQ ID NO: 268779 - RNA, 22 nt, Human
gagaauuagggcguaauucaga

SEQ ID NO: 268780 - RNA, 22 nt, Human
uggcagccucccagcugcauuc

SEQ ID NO: 268781 - RNA, 19 nt, Human
gacauuccugacacuggcu

SEQ ID NO: 268782 - RNA, 22 nt, Human
ucugugcugucucagauaagca

SEQ ID NO: 268783 - RNA, 18 nt, Human
ucugcaggaccucagggc

SEQ ID NO: 268784 - RNA, 22 nt, Human
aaggaaauuagguuauuuugcu

SEQ ID NO: 268785 - RNA, 22 nt, Human
caccugggucauugcugguguu

SEQ ID NO: 268786 - RNA, 22 nt, Human
guucaaauugagaugguauaaa

SEQ ID NO: 268787 - RNA, 22 nt, Human
acuggcagaacgugaugcgggu

SEQ ID NO: 268788 - RNA, 22 nt, Human
cucuggaguggguggccgggag

SEQ ID NO: 268789 - RNA, 22 nt, Human
augcccugccaagcaggcuaaa

SEQ ID NO: 268790 - RNA, 22 nt, Human
guucucugaguccuggcaaaau

SEQ ID NO: 268791 - RNA, 22 nt, Human
aauauccacuucaauacaggca

SEQ ID NO: 268792 - RNA, 22 nt, Human
uguacauagaaaggauacagcu

SEQ ID NO: 268793 - RNA, 22 nt, Human
gcuuuuacaagagccagagagg

SEQ ID NO: 268794 - RNA, 22 nt, Human
ccagggcaaaugagaucauagc

SEQ ID NO: 268795 - RNA, 17 nt, Human
uauguaguacuuauaaa

SEQ ID NO: 268796 - RNA, 22 nt, Human
uaaagacaauuucgagcuguag

SEQ ID NO: 268797 - RNA, 22 nt, Human
ugggaaaguaauugucauccuu

SEQ ID NO: 268798 - RNA, 22 nt, Human
gucuuauuuaaggacaagaaga

SEQ ID NO: 268799 - RNA, 20 nt, Human
acagagacugagacacuugc

SEQ ID NO: 268800 - RNA, 22 nt, Human
ggauguagugcaaggagugaau

SEQ ID NO: 268801 - RNA, 19 nt, Human
ggaaggccacggcaggcuu

SEQ ID NO: 268802 - RNA, 22 nt, Human
uaauaauuggcaauguugagca

SEQ ID NO: 268803 - RNA, 22 nt, Human
uauguuuuuaagagaaugcauu

SEQ ID NO: 268804 - RNA, 22 nt, Human
aggaggcuguggagcacuccau

SEQ ID NO: 268805 - RNA, 22 nt, Human
ccugggcuuucggcggcuuccu

SEQ ID NO: 268806 - RNA, 22 nt, Human
acucaggcuacaggggcagaag

SEQ ID NO: 268807 - RNA, 22 nt, Human
ucaggccccaucccagacuuau

SEQ ID NO: 268808 - RNA, 22 nt, Human
auccuguggcuccagggagccg

SEQ ID NO: 268809 - RNA, 22 nt, Human
auuguauaauuguauugccaaa

SEQ ID NO: 268810 - RNA, 22 nt, Human
agugaggggcagcugagugggc

SEQ ID NO: 268811 - RNA, 22 nt, Human
uggaaagagguagaggaucugg

SEQ ID NO: 268812 - RNA, 22 nt, Human
cccagccuacucugccauagca

SEQ ID NO: 268813 - RNA, 22 nt, Human
aggggagcuugccuggucaccc

SEQ ID NO: 268814 - RNA, 22 nt, Human
ugcaucaaccuaauaucagcuc

SEQ ID NO: 268815 - RNA, 22 nt, Human
gcccucuguguaacaauccaga

SEQ ID NO: 268816 - RNA, 20 nt, Human
gccugccucagcuagcugag

SEQ ID NO: 268817 - RNA, 22 nt, Human
ccagagacgucggucagggcgc

SEQ ID NO: 268818 - RNA, 22 nt, Human
acaagauuuugucugguagggu

SEQ ID NO: 268819 - RNA, 22 nt, Human
gaagccccaaacccucgccauc

SEQ ID NO: 268820 - RNA, 22 nt, Human
uuggcugaugcaagagcuuccu

SEQ ID NO: 268821 - RNA, 22 nt, Human
agagccugugggagaugcagcu

SEQ ID NO: 268822 - RNA, 22 nt, Human
uuugucagucaugucugcuuuu

SEQ ID NO: 268823 - RNA, 22 nt, Human
cagggcagagccaggauuucaa

SEQ ID NO: 268824 - RNA, 22 nt, Human
aacaugauuucaugcauuuaga

SEQ ID NO: 268825 - RNA, 22 nt, Human
aagcaucuccucaucauuuggg

SEQ ID NO: 268826 - RNA, 22 nt, Human
acauguuugccugcaggcuuag

SEQ ID NO: 268827 - RNA, 22 nt, Human
agaggaauaaauuucuguagug

SEQ ID NO: 268828 - RNA, 22 nt, Human
gaggaagaugguugaguggucc

SEQ ID NO: 268829 - RNA, 22 nt, Human
aggcagguccccuggaaggcac

SEQ ID NO: 268830 - RNA, 19 nt, Human
uuucauguuuuuggugaga

SEQ ID NO: 268831 - RNA, 16 nt, Human
uccuggccccuaugga

SEQ ID NO: 268832 - RNA, 22 nt, Human
ggagcuccuggcagugacagag

SEQ ID NO: 268833 - RNA, 18 nt, Human
ugaggccucugcugggcc

SEQ ID NO: 268834 - RNA, 22 nt, Human
gcccugccugucugcugggagg

SEQ ID NO: 268835 - RNA, 22 nt, Human
uaggaaaagcacaggauguucu

SEQ ID NO: 268836 - RNA, 22 nt, Human
acagauauaugauuguguaaau

SEQ ID NO: 268837 - RNA, 22 nt, Human
gccccuggcuggccagcuccuc

SEQ ID NO: 268838 - RNA, 22 nt, Human
uaaaccaaguguccauauuagu

SEQ ID NO: 268839 - RNA, 19 nt, Human
aaugaguuccaugaaaaga

SEQ ID NO: 268840 - RNA, 22 nt, Human
guacacauuaugcuucucuaaa

SEQ ID NO: 268841 - RNA, 22 nt, Human
cagcccugggaguuggggccga

SEQ ID NO: 268842 - RNA, 22 nt, Human
aaguuacauaaauguccucuag

SEQ ID NO: 268843 - RNA, 22 nt, Human
cuggcuggccggagcgaggcgg

SEQ ID NO: 268844 - RNA, 22 nt, Human
ugcuuugcucucacuguaaggu

SEQ ID NO: 268845 - RNA, 21 nt, Human
gccuggcuucacaggcacuga

SEQ ID NO: 268846 - RNA, 22 nt, Human
agcagggcuccauuucacugcc

SEQ ID NO: 268847 - RNA, 22 nt, Human
agagaaggaaagcugacauggg

SEQ ID NO: 268848 - RNA, 22 nt, Human
uucacaauagcuggcaucaucu

SEQ ID NO: 268849 - RNA, 22 nt, Human
aauagcaaacagacaugcacaa

SEQ ID NO: 268850 - RNA, 22 nt, Human
uucauaaugagguccuagaggc

SEQ ID NO: 268851 - RNA, 22 nt, Human
auuucuagguagagaagcuuag

SEQ ID NO: 268852 - RNA, 22 nt, Human
aauggcaacaugguauagugag

SEQ ID NO: 268853 - RNA, 22 nt, Human
ucaggcuggagugcaguggcgc

SEQ ID NO: 268854 - RNA, 22 nt, Human
gucuuacccacagcaucuagaa

SEQ ID NO: 268855 - RNA, 22 nt, Human
uaggcaaguggaccagagguuu

SEQ ID NO: 268856 - RNA, 22 nt, Human
gcugcccagcaggccccagggg

SEQ ID NO: 268857 - RNA, 22 nt, Human
agugugagcccuggaguggugc

SEQ ID NO: 268858 - RNA, 22 nt, Human
aacaggcaacaguugacucuga

SEQ ID NO: 268859 - RNA, 22 nt, Human
uucaaaggcaggauagcagcug

SEQ ID NO: 268860 - RNA, 22 nt, Human
ucagaacagugccuggcacuaa

SEQ ID NO: 268861 - RNA, 22 nt, Human
gcauggccaggaaagguagaaa

SEQ ID NO: 268862 - RNA, 22 nt, Human
ugcuggaguaacaagacacuca

SEQ ID NO: 268863 - RNA, 22 nt, Human
auccaugaagguacuucucagg

SEQ ID NO: 268864 - RNA, 22 nt, Human
acuuccagaggguguggaaaua

SEQ ID NO: 268865 - RNA, 22 nt, Human
uggcacagugcuggauggugcu

SEQ ID NO: 268866 - RNA, 22 nt, Human
aguacaaaaugcagcaucauca

SEQ ID NO: 268867 - RNA, 22 nt, Human
gcugcugcaagagccagcucuu

SEQ ID NO: 268868 - RNA, 20 nt, Human
gccaggcacuguucucaaua

SEQ ID NO: 268869 - RNA, 22 nt, Human
cucagcagguaccacaugaucu

SEQ ID NO: 268870 - RNA, 22 nt, Human
gagcuacaagggagacuuuuuu

SEQ ID NO: 268871 - RNA, 22 nt, Human
agcugaaauuuuacugaguaua

SEQ ID NO: 268872 - RNA, 22 nt, Human
uucauguuguaguauguaucag

SEQ ID NO: 268873 - RNA, 22 nt, Human
auucagugugagguuuucaagu

SEQ ID NO: 268874 - RNA, 22 nt, Human
agagacagaggcaauauagcuu

SEQ ID NO: 268875 - RNA, 22 nt, Human
uaggguggagacuggaagcagg

SEQ ID NO: 268876 - RNA, 22 nt, Human
agcacagagaaacuaagacauu

SEQ ID NO: 268877 - RNA, 22 nt, Human
ucuuaaagagcgcaauuugagg

SEQ ID NO: 268878 - RNA, 22 nt, Human
guuauugacauguauuaagcac

SEQ ID NO: 268879 - RNA, 22 nt, Human
aucuguuauuuacccaucucug

SEQ ID NO: 268880 - RNA, 22 nt, Human
agcagguggccuccugucuguc

SEQ ID NO: 268881 - RNA, 22 nt, Human
aggaauguuuagaaugucagaa

SEQ ID NO: 268882 - RNA, 22 nt, Human
gcucaggcucucccaggggaau

SEQ ID NO: 268883 - RNA, 22 nt, Human
gcaagcugugccuucucaggau

SEQ ID NO: 268884 - RNA, 21 nt, Human
agaauuaaauuggauuugugu

SEQ ID NO: 268885 - RNA, 22 nt, Human
uuggcuucccagagcuuacgcu

SEQ ID NO: 268886 - RNA, 22 nt, Human
aacauguaccuacaaucagaau

SEQ ID NO: 268887 - RNA, 20 nt, Human
uccagagaguggcaaagcuc

SEQ ID NO: 268888 - RNA, 22 nt, Human
cagaguggagaaagcauuuagu

SEQ ID NO: 268889 - RNA, 22 nt, Human
uuuuuacagucauggucacuca

SEQ ID NO: 268890 - RNA, 22 nt, Human
aacaaaugauaccaguucucaa

SEQ ID NO: 268891 - RNA, 22 nt, Human
uugagggagaaaguuggaguag

SEQ ID NO: 268892 - RNA, 22 nt, Human
augaggcagauguugcaugagg

SEQ ID NO: 268893 - RNA, 22 nt, Human
uuucuucauagaccuugucuug

SEQ ID NO: 268894 - RNA, 20 nt, Human
gcugaggggucuauggcaua

SEQ ID NO: 268895 - RNA, 22 nt, Human
acccugggucauauacagugug

SEQ ID NO: 268896 - RNA, 22 nt, Human
aaggauuuuuggaaugagaugg

SEQ ID NO: 268897 - RNA, 22 nt, Human
gagggagagugauggaccauug

SEQ ID NO: 268898 - RNA, 22 nt, Human
uucacaauaggagcaugcaaau

SEQ ID NO: 268899 - RNA, 22 nt, Human
caaagggcauggccugagcacu

SEQ ID NO: 268900 - RNA, 22 nt, Human
ggugggagggcugcguuccucu

SEQ ID NO: 268901 - RNA, 22 nt, Human
gugcauauuuugcacacagaug

SEQ ID NO: 268902 - RNA, 22 nt, Human
gugaaauauuuaacguccaggu

SEQ ID NO: 268903 - RNA, 22 nt, Human
uccccucuggaggcugcagggg

SEQ ID NO: 268904 - RNA, 22 nt, Human
guucagcagcagugauuuugug

SEQ ID NO: 268905 - RNA, 22 nt, Human
gaaggcuugguuuuuucaacac

SEQ ID NO: 268906 - RNA, 22 nt, Human
ucaaauaguugacauuaacuug

SEQ ID NO: 268907 - RNA, 22 nt, Human
agguccugucuaucacccucgc

SEQ ID NO: 268908 - RNA, 22 nt, Human
ucucagagaccugaacucccug

SEQ ID NO: 268909 - RNA, 22 nt, Human
ccucaggccagggggcggccag

SEQ ID NO: 268910 - RNA, 22 nt, Human
uaucagauuuagaggagucaua

SEQ ID NO: 268911 - RNA, 22 nt, Human
gcaaaugcucuccuuggucagg

SEQ ID NO: 268912 - RNA, 22 nt, Human
uguuaaauguuuugcuaguguc

SEQ ID NO: 268913 - RNA, 22 nt, Human
acauguuuugugccuugacuag

SEQ ID NO: 268914 - RNA, 22 nt, Human
uuagggaagcauggaggagaug

SEQ ID NO: 268915 - RNA, 22 nt, Human
ucugucucuuuguucugugagu

SEQ ID NO: 268916 - RNA, 22 nt, Human
gcagggccagugcagagaggaa

SEQ ID NO: 268917 - RNA, 22 nt, Human
aggaggugcuguuuguccugga

SEQ ID NO: 268918 - RNA, 22 nt, Human
cuuuauguccaccagacugcaa

SEQ ID NO: 268919 - RNA, 22 nt, Human
ucucagaggucuucagccucug

SEQ ID NO: 268920 - RNA, 22 nt, Human
ccuucuucuguguggcccaaga

SEQ ID NO: 268921 - RNA, 22 nt, Human
gaaggagcuaccaagacugaau

SEQ ID NO: 268922 - RNA, 22 nt, Human
ggggccacuggcaggaccuugg

SEQ ID NO: 268923 - RNA, 22 nt, Human
ugcccugcuaaccuugguucca

SEQ ID NO: 268924 - RNA, 22 nt, Human
agaugaauccacacauggcaaa

SEQ ID NO: 268925 - RNA, 23 nt, Human
ucugggccacuugucugcacuuc

SEQ ID NO: 268926 - RNA, 22 nt, Human
uuugauagggaaguaagaauga

SEQ ID NO: 268927 - RNA, 22 nt, Human
cugcccugcccaggccuugggc

SEQ ID NO: 268928 - RNA, 21 nt, Human
cucugcccagggccuccugcc

SEQ ID NO: 268929 - RNA, 22 nt, Human
gcuggcccagggucaccuagga

SEQ ID NO: 268930 - RNA, 22 nt, Human
gggaucugacuugcuggugggu

SEQ ID NO: 268931 - RNA, 22 nt, Human
acaggaaguuuggaaagccuca

SEQ ID NO: 268932 - RNA, 22 nt, Human
uaagaacagugacagccaacau

SEQ ID NO: 268933 - RNA, 22 nt, Human
aaggugcucguuauggccagug

SEQ ID NO: 268934 - RNA, 22 nt, Human
auuauuagauucuuaauuguaa

SEQ ID NO: 268935 - RNA, 22 nt, Human
gcacccagcccagggcgugaug

SEQ ID NO: 268936 - RNA, 22 nt, Human
ggcacagcccucucuguggaca

SEQ ID NO: 268937 - RNA, 22 nt, Human
acauucaaguuucugcucaugg

SEQ ID NO: 268938 - RNA, 22 nt, Human
gcuggaggaucacuugagccca

SEQ ID NO: 268939 - RNA, 21 nt, Human
agaauaaugguaucauuugcu

SEQ ID NO: 268940 - RNA, 20 nt, Human
uuggcucagauuuuuauggg

SEQ ID NO: 268941 - RNA, 22 nt, Human
gggagcugcugaacacaagggu

SEQ ID NO: 268942 - RNA, 22 nt, Human
aaugcacaaaaauuguauguaa

SEQ ID NO: 268943 - RNA, 22 nt, Human
uugggccucucaaagugcuggg

SEQ ID NO: 268944 - RNA, 22 nt, Human
gcugcagugagccaagaucgug

SEQ ID NO: 268945 - RNA, 22 nt, Human
ccacauggagcaggaggugggg

SEQ ID NO: 268946 - RNA, 22 nt, Human
ugccccagaccuacugaauggg

SEQ ID NO: 268947 - RNA, 22 nt, Human
uaccaggaauggggucaccguc

SEQ ID NO: 268948 - RNA, 22 nt, Human
acgucuucguuggcagagauuu

SEQ ID NO: 268949 - RNA, 22 nt, Human
ugaggugguucaagagccuugu

SEQ ID NO: 268950 - RNA, 22 nt, Human
cucuggaccucagcuacagacu

SEQ ID NO: 268951 - RNA, 20 nt, Human
cucuuaaauguaaaguaggc

SEQ ID NO: 268952 - RNA, 22 nt, Human
agagcagcugugacauggacag

SEQ ID NO: 268953 - RNA, 22 nt, Human
aaugacaugcuuuuuaauuaua

SEQ ID NO: 268954 - RNA, 22 nt, Human
agcacacaggacuugauucaug

SEQ ID NO: 268955 - RNA, 22 nt, Human
ggguaccaagcugcuugggggc

SEQ ID NO: 268956 - RNA, 22 nt, Human
ugugacccucuccgaugggcag

SEQ ID NO: 268957 - RNA, 22 nt, Human
uuuguucugcaucacagaaaaa

SEQ ID NO: 268958 - RNA, 22 nt, Human
uggcacagaaaaaugcuccauu

SEQ ID NO: 268959 - RNA, 22 nt, Human
auucugaugccuggguacugcc

SEQ ID NO: 268960 - RNA, 17 nt, Human
ucugucuugacugucac

SEQ ID NO: 268961 - RNA, 22 nt, Human
agggccagucguguauuacugu

SEQ ID NO: 268962 - RNA, 22 nt, Human
caugcagccugugaacaguguc

SEQ ID NO: 268963 - RNA, 22 nt, Human
uguauauucugccuaaaagcuu

SEQ ID NO: 268964 - RNA, 22 nt, Human
uugaaaagcaaaugauggguag

SEQ ID NO: 268965 - RNA, 22 nt, Human
cugagcccaggcgggagcugag

SEQ ID NO: 268966 - RNA, 22 nt, Human
uauccauaguuuauagaucaag

SEQ ID NO: 268967 - RNA, 22 nt, Human
gggcagggguagcauuccaagu

SEQ ID NO: 268968 - RNA, 22 nt, Human
ugagccaggucucacucaccuu

SEQ ID NO: 268969 - RNA, 22 nt, Human
gcuagaauauuggguaggcaag

SEQ ID NO: 268970 - RNA, 22 nt, Human
uguguccuccagggagauguaa

SEQ ID NO: 268971 - RNA, 22 nt, Human
caacagagagaccagaaacagg

SEQ ID NO: 268972 - RNA, 22 nt, Human
ggccugcuguguacugauguca

SEQ ID NO: 268973 - RNA, 22 nt, Human
ugcagaggagucagccugggca

SEQ ID NO: 268974 - RNA, 22 nt, Human
agucuagggugggguccacagg

SEQ ID NO: 268975 - RNA, 20 nt, Human
uuucaaaggcaccuaugaag

SEQ ID NO: 268976 - RNA, 20 nt, Human
uccagccccugcauguugcu

SEQ ID NO: 268977 - RNA, 22 nt, Human
uugaagauucuuuuuguuagua

SEQ ID NO: 268978 - RNA, 22 nt, Human
caauaagauguauugagcagag

SEQ ID NO: 268979 - RNA, 22 nt, Human
gugcaauauugccauguucuug

SEQ ID NO: 268980 - RNA, 22 nt, Human
uugagaacuacuuuauuauucu

SEQ ID NO: 268981 - RNA, 22 nt, Human
uaaagcuuguauugcaauauuu

SEQ ID NO: 268982 - RNA, 22 nt, Human
agcugguggaagggagcccaaa

SEQ ID NO: 268983 - RNA, 22 nt, Human
uugcagggaaaucagugaggau

SEQ ID NO: 268984 - RNA, 22 nt, Human
aaaccaacccuggcuggccuag

SEQ ID NO: 268985 - RNA, 22 nt, Human
cagaugcuuggaggacacuugg

SEQ ID NO: 268986 - RNA, 22 nt, Human
ugaaugaucuaguuuuguagac

SEQ ID NO: 268987 - RNA, 22 nt, Human
uuuuauuggagugauaccaagc

SEQ ID NO: 268988 - RNA, 22 nt, Human
ugggagcucagaaagggagguc

SEQ ID NO: 268989 - RNA, 22 nt, Human
cuuagaaauaaugguuucaguu

SEQ ID NO: 268990 - RNA, 22 nt, Human
aaaguacaugcaauucuucuga

SEQ ID NO: 268991 - RNA, 22 nt, Human
acaagauucaaugaauugauug

SEQ ID NO: 268992 - RNA, 22 nt, Human
augaaggcaguuaaacgucauc

SEQ ID NO: 268993 - RNA, 22 nt, Human
ccaggacuuuaaguccagcacu

SEQ ID NO: 268994 - RNA, 20 nt, Human
caacagaggggucuggagua

SEQ ID NO: 268995 - RNA, 22 nt, Human
uccaggccccccacgcuaaugg

SEQ ID NO: 268996 - RNA, 22 nt, Human
aaagaacaaauuagcuguuuua

SEQ ID NO: 268997 - RNA, 22 nt, Human
gccuccaguuuuuuucugaacu

SEQ ID NO: 268998 - RNA, 22 nt, Human
gagggcagagacagugauucac

SEQ ID NO: 268999 - RNA, 22 nt, Human
ucaggcaaggcccuuagagugu

SEQ ID NO: 269000 - RNA, 22 nt, Human
gaggaacagagggcaaggccag

SEQ ID NO: 269001 - RNA, 22 nt, Human
ccugcugcuaugaaggugacag

SEQ ID NO: 269002 - RNA, 22 nt, Human
gugcugagugcagagugcagag

SEQ ID NO: 269003 - RNA, 22 nt, Human
aaggcuccacccucauggaugc

SEQ ID NO: 269004 - RNA, 22 nt, Human
cacuuucucaugaauuuggccc

SEQ ID NO: 269005 - RNA, 22 nt, Human
ucuauaaauuaugcagucucag

SEQ ID NO: 269006 - RNA, 22 nt, Human
cagcaagauuaagggcagaaaa

SEQ ID NO: 269007 - RNA, 20 nt, Human
uaugaguauuacuuucagga

SEQ ID NO: 269008 - RNA, 22 nt, Human
gcuggcagcuggaaguugggcu

SEQ ID NO: 269009 - RNA, 22 nt, Human
ugcaguuuuggccauugaaggc

SEQ ID NO: 269010 - RNA, 22 nt, Human
cgaggcagggaagcugcaaaag

SEQ ID NO: 269011 - RNA, 22 nt, Human
uaagaguuagggcuagcaauau

SEQ ID NO: 269012 - RNA, 19 nt, Human
gcucugugaugcugagggg

SEQ ID NO: 269013 - RNA, 20 nt, Human
aucaucuuuacaaugucagu

SEQ ID NO: 269014 - RNA, 22 nt, Human
gucuggagccugggucccugcu

SEQ ID NO: 269015 - RNA, 22 nt, Human
aguguacauguuuacagcaucu

SEQ ID NO: 269016 - RNA, 23 nt, Human
ugucuucgacuccugcgugcuuc

SEQ ID NO: 269017 - RNA, 22 nt, Human
agaggccaccacugucagggac

SEQ ID NO: 269018 - RNA, 22 nt, Human
ugagccaggcuccaugccaccu

SEQ ID NO: 269019 - RNA, 22 nt, Human
cuaaauuauuugcacauuagag

SEQ ID NO: 269020 - RNA, 22 nt, Human
agucaguguagaaagcccaggc

SEQ ID NO: 269021 - RNA, 23 nt, Human
ucccagggaaggugagcgaggcu

SEQ ID NO: 269022 - RNA, 22 nt, Human
ugaggcaaagacaaagcagcau

SEQ ID NO: 269023 - RNA, 22 nt, Human
cagccucuugcacuuugaaggc

SEQ ID NO: 269024 - RNA, 22 nt, Human
uggcagauuuugaagacagaga

SEQ ID NO: 269025 - RNA, 22 nt, Human
aggcagguagaaggaucuuuau

SEQ ID NO: 269026 - RNA, 17 nt, Human
gauuuccugaaguucuu

SEQ ID NO: 269027 - RNA, 22 nt, Human
uuauuucuacuauuuugccuga

SEQ ID NO: 269028 - RNA, 22 nt, Human
uggacacaguggugaagguaca

SEQ ID NO: 269029 - RNA, 22 nt, Human
cggcuccuccgcccuugcucac

SEQ ID NO: 269030 - RNA, 22 nt, Human
ugaaagcaugcuugccaagcuu

SEQ ID NO: 269031 - RNA, 22 nt, Human
gucuggccugccagcucuggug

SEQ ID NO: 269032 - RNA, 22 nt, Human
uuucagacuccaaauucauaag

SEQ ID NO: 269033 - RNA, 22 nt, Human
ccagcuggagcucgcagauagg

SEQ ID NO: 269034 - RNA, 22 nt, Human
acagacuggaggagaauaguuu

SEQ ID NO: 269035 - RNA, 22 nt, Human
auucauguagugauugagucac

SEQ ID NO: 269036 - RNA, 22 nt, Human
uacagaauaaagcgugaagcuu

SEQ ID NO: 269037 - RNA, 19 nt, Human
cugugcaggccgggcugag

SEQ ID NO: 269038 - RNA, 22 nt, Human
cagagguauugcaaaagccuag

SEQ ID NO: 269039 - RNA, 23 nt, Human
ccucagaggccucauagucuggc

SEQ ID NO: 269040 - RNA, 22 nt, Human
cucugagaggugagaagcagca

SEQ ID NO: 269041 - RNA, 19 nt, Human
ccugagauuccuccuuuuc

SEQ ID NO: 269042 - RNA, 22 nt, Human
ucaccaggcuccuguuaagaug

SEQ ID NO: 269043 - RNA, 22 nt, Human
auaguucacuaauagcaaaagc

SEQ ID NO: 269044 - RNA, 22 nt, Human
uuccuucuggagcccggggagc

SEQ ID NO: 269045 - RNA, 22 nt, Human
uaggaaauauuugaacauagga

SEQ ID NO: 269046 - RNA, 23 nt, Human
auuuacagcugugugagcaaguu

SEQ ID NO: 269047 - RNA, 22 nt, Human
ggcucaggacacagugguuuag

SEQ ID NO: 269048 - RNA, 22 nt, Human
acaacacagcuuuccucaaguu

SEQ ID NO: 269049 - RNA, 22 nt, Human
cagcaugacagucugcagcaga

SEQ ID NO: 269050 - RNA, 22 nt, Human
ugauggucaacaauuuugagug

SEQ ID NO: 269051 - RNA, 23 nt, Human
gcaugaagugcuacgucuacagc

SEQ ID NO: 269052 - RNA, 22 nt, Human
caggguccccgggucuccugug

SEQ ID NO: 269053 - RNA, 20 nt, Human
agcuaggagaaagcauggag

SEQ ID NO: 269054 - RNA, 22 nt, Human
agagaaugcagggcuucggaca

SEQ ID NO: 269055 - RNA, 22 nt, Human
uagaaucugccugcagcaaaga

SEQ ID NO: 269056 - RNA, 22 nt, Human
caggcaggugcagauuccucuu

SEQ ID NO: 269057 - RNA, 22 nt, Human
gauucugaucuauaguguuaua

SEQ ID NO: 269058 - RNA, 22 nt, Human
aggcaagcccccagugaggcuc

SEQ ID NO: 269059 - RNA, 22 nt, Human
gugucacuggaauacugucugu

SEQ ID NO: 269060 - RNA, 20 nt, Human
ucugggcuucccccagcucc

SEQ ID NO: 269061 - RNA, 22 nt, Human
ucaggaagccgguuaaauagau

SEQ ID NO: 269062 - RNA, 22 nt, Human
augugcuugcagaugagccuca

SEQ ID NO: 269063 - RNA, 22 nt, Human
auuagaaaaacucaagggcucu

SEQ ID NO: 269064 - RNA, 23 nt, Human
ucaggcagcugggguaguuggag

SEQ ID NO: 269065 - RNA, 22 nt, Human
cauguuaaaauauacauucuga

SEQ ID NO: 269066 - RNA, 22 nt, Human
ugccucuuggagccuuuccucu

SEQ ID NO: 269067 - RNA, 22 nt, Human
aaggccagauucacuuuacaau

SEQ ID NO: 269068 - RNA, 22 nt, Human
uaucuauuauguucuauguguc

SEQ ID NO: 269069 - RNA, 20 nt, Human
uggcaggaggcagcagugga

SEQ ID NO: 269070 - RNA, 19 nt, Human
uaaaaggauguggaaggau

SEQ ID NO: 269071 - RNA, 22 nt, Human
agcagugggggaguguuaguuu

SEQ ID NO: 269072 - RNA, 22 nt, Human
ugggcucugaagucagucugcu

SEQ ID NO: 269073 - RNA, 19 nt, Human
ggccuugcucuguggcagc

SEQ ID NO: 269074 - RNA, 22 nt, Human
uuucucagccuccuugcuggag

SEQ ID NO: 269075 - RNA, 22 nt, Human
cuuuccaaugcauuuccaaugu

SEQ ID NO: 269076 - RNA, 22 nt, Human
acaucucuggguccuccaugca

SEQ ID NO: 269077 - RNA, 22 nt, Human
uuucugaaacauggucuuugua

SEQ ID NO: 269078 - RNA, 22 nt, Human
ggaggccaugaggcucuaggug

SEQ ID NO: 269079 - RNA, 22 nt, Human
gaggacugaaacuuacaggaaa

SEQ ID NO: 269080 - RNA, 22 nt, Human
cagacaggcaggugagagcucc

SEQ ID NO: 269081 - RNA, 22 nt, Human
agagccuguaacaucuuucuua

SEQ ID NO: 269082 - RNA, 23 nt, Human
aaguucuuuuagaugucuucgug

SEQ ID NO: 269083 - RNA, 22 nt, Human
aaauauguaaccaaggugaagu

SEQ ID NO: 269084 - RNA, 22 nt, Human
uucagauguggcuuugucaggc

SEQ ID NO: 269085 - RNA, 23 nt, Human
uguguucucacacagaugcagua

SEQ ID NO: 269086 - RNA, 22 nt, Human
ccacugccuauuugcagggccc

SEQ ID NO: 269087 - RNA, 22 nt, Human
uuagcauucugccuccuauauc

SEQ ID NO: 269088 - RNA, 22 nt, Human
gacaccagcaaggcugugagga

SEQ ID NO: 269089 - RNA, 22 nt, Human
aaaauagaugaaaggaagucug

SEQ ID NO: 269090 - RNA, 20 nt, Human
agcagcagauguuggaggug

SEQ ID NO: 269091 - RNA, 22 nt, Human
uggucugauucuugcuccccaa

SEQ ID NO: 269092 - RNA, 22 nt, Human
cugcacaggggaugagggcagu

SEQ ID NO: 269093 - RNA, 19 nt, Human
aauguuuaagagaaaaagg

SEQ ID NO: 269094 - RNA, 22 nt, Human
gcucagagagauuaaauaauuu

SEQ ID NO: 269095 - RNA, 22 nt, Human
acagcuuuuuacuaauagauug

SEQ ID NO: 269096 - RNA, 22 nt, Human
ucagaaguacugugcuacaaua

SEQ ID NO: 269097 - RNA, 23 nt, Human
ccaagcuucuaaugcugcugagc

SEQ ID NO: 269098 - RNA, 22 nt, Human
gaggucuuagaagaaaaaucau

SEQ ID NO: 269099 - RNA, 22 nt, Human
aauaagagcacuggcuuuggag

SEQ ID NO: 269100 - RNA, 22 nt, Human
ugguaaaguguacugaauauga

SEQ ID NO: 269101 - RNA, 22 nt, Human
auccacaggaggguuuggaaaa

SEQ ID NO: 269102 - RNA, 22 nt, Human
aagucuuuugcugucauaggug

SEQ ID NO: 269103 - RNA, 22 nt, Human
agccagucccuugagcgugccc

SEQ ID NO: 269104 - RNA, 22 nt, Human
ugcagggauuauguagggguug

SEQ ID NO: 269105 - RNA, 19 nt, Human
gcuggcagauguggccgug

SEQ ID NO: 269106 - RNA, 22 nt, Human
acagaauugaagcugaguaaau

SEQ ID NO: 269107 - RNA, 23 nt, Human
aagaggaggcccugcucccgucc

SEQ ID NO: 269108 - RNA, 22 nt, Human
ggauagugggagaaugcuaugu

SEQ ID NO: 269109 - RNA, 22 nt, Human
uuucucaguugugcgagcagca

SEQ ID NO: 269110 - RNA, 22 nt, Human
caguuuaaagaaggaugggagu

SEQ ID NO: 269111 - RNA, 22 nt, Human
ugacagggacaguggagaugga

SEQ ID NO: 269112 - RNA, 22 nt, Human
ucacacaugaguaaauacaggg

SEQ ID NO: 269113 - RNA, 22 nt, Human
gcagaggugagaagggccuccc

SEQ ID NO: 269114 - RNA, 22 nt, Human
acuuccagcaccucaagcggaa

SEQ ID NO: 269115 - RNA, 22 nt, Human
uccuggcccacuccuagcuucu

SEQ ID NO: 269116 - RNA, 22 nt, Human
uuuaacuugaucaguagagcau

SEQ ID NO: 269117 - RNA, 22 nt, Human
gcuuugugugaaguccauggcg

SEQ ID NO: 269118 - RNA, 22 nt, Human
cuccucccucuuugccacacau

SEQ ID NO: 269119 - RNA, 22 nt, Human
agaauccuggccaggucagagc

SEQ ID NO: 269120 - RNA, 22 nt, Human
caacaccuugaucuuggacuuc

SEQ ID NO: 269121 - RNA, 22 nt, Human
aucaguauacaggggacauuca

SEQ ID NO: 269122 - RNA, 22 nt, Human
agguagaaggaccagaauuuau

SEQ ID NO: 269123 - RNA, 18 nt, Human
gcagaugaguaguguacc

SEQ ID NO: 269124 - RNA, 22 nt, Human
uccacagggauguugaguucuu

SEQ ID NO: 269125 - RNA, 22 nt, Human
acagaugaggaagagucagcca

SEQ ID NO: 269126 - RNA, 22 nt, Human
gacuccuggcuuucccucuuag

SEQ ID NO: 269127 - RNA, 14 nt, Human
agcugcaagcaucc

SEQ ID NO: 269128 - RNA, 22 nt, Human
uauguguccuaagcaaucaucc

SEQ ID NO: 269129 - RNA, 22 nt, Human
uucucaaagaaagcugucauua

SEQ ID NO: 269130 - RNA, 22 nt, Human
uugcacuccagcccgagcaaca

SEQ ID NO: 269131 - RNA, 22 nt, Human
aguguuaguggcugcagcuggu

SEQ ID NO: 269132 - RNA, 22 nt, Human
ucuuccugaaacccuguuccag

SEQ ID NO: 269133 - RNA, 22 nt, Human
cacugguacguagguuggggca

SEQ ID NO: 269134 - RNA, 22 nt, Human
ccuuuguucacuggagagugga

SEQ ID NO: 269135 - RNA, 22 nt, Human
ugguucaguugcacaggcuguu

SEQ ID NO: 269136 - RNA, 22 nt, Human
guccagcccucugccuccaggu

SEQ ID NO: 269137 - RNA, 22 nt, Human
auuggucucugcuaaagggagg

SEQ ID NO: 269138 - RNA, 22 nt, Human
cucugggucucccugaggcuaa

SEQ ID NO: 269139 - RNA, 22 nt, Human
gcuucuguggugaggucaccuu

SEQ ID NO: 269140 - RNA, 22 nt, Human
gagaggggcccaagccacauag

SEQ ID NO: 269141 - RNA, 22 nt, Human
ugugugcaagugacauuagaaa

SEQ ID NO: 269142 - RNA, 22 nt, Human
ccuuucagaugggcauggaccg

SEQ ID NO: 269143 - RNA, 22 nt, Human
ggcugcagcggauuggggauug

SEQ ID NO: 269144 - RNA, 22 nt, Human
uccuuugguuguagacaggaau

SEQ ID NO: 269145 - RNA, 22 nt, Human
ccugagggaggguauaggcugu

SEQ ID NO: 269146 - RNA, 22 nt, Human
aauuuguuagcauacucuaguu

SEQ ID NO: 269147 - RNA, 22 nt, Human
ccuuuagaauacagacuuucua

SEQ ID NO: 269148 - RNA, 22 nt, Human
accaggcccgcugcuauggugg

SEQ ID NO: 269149 - RNA, 22 nt, Human
augucuguucauuauuaacugc

SEQ ID NO: 269150 - RNA, 22 nt, Human
ucacauguguuuucucaccaac

SEQ ID NO: 269151 - RNA, 22 nt, Human
gcuccagguauuugcccuuuua

SEQ ID NO: 269152 - RNA, 21 nt, Human
agauguuucccccuuggcuuc

SEQ ID NO: 269153 - RNA, 22 nt, Human
uaaaguucuuagaacaaggccu

SEQ ID NO: 269154 - RNA, 22 nt, Human
auacagaugggucagauuucau

SEQ ID NO: 269155 - RNA, 22 nt, Human
uaggacaguggagauaaccaga

SEQ ID NO: 269156 - RNA, 22 nt, Human
ucucagcucauggcagccuuga

SEQ ID NO: 269157 - RNA, 22 nt, Human
uucugagagcugaagaaauguu

SEQ ID NO: 269158 - RNA, 20 nt, Human
uccuggaggcuucauccaua

SEQ ID NO: 269159 - RNA, 23 nt, Human
acagaauaccauugacuaggugu

SEQ ID NO: 269160 - RNA, 22 nt, Human
ggccagcagucacagggucaga

SEQ ID NO: 269161 - RNA, 22 nt, Human
cagcuucuguuucuagccccug

SEQ ID NO: 269162 - RNA, 22 nt, Human
ccaggaggucugaguguggaca

SEQ ID NO: 269163 - RNA, 22 nt, Human
guggcugcagcucugaacggac

SEQ ID NO: 269164 - RNA, 22 nt, Human
aaaauuauucauggcuuuugga

SEQ ID NO: 269165 - RNA, 22 nt, Human
uauuugaagauucuucugaugu

SEQ ID NO: 269166 - RNA, 22 nt, Human
auagaaacagggaagcaaagca

SEQ ID NO: 269167 - RNA, 22 nt, Human
uuccaggaagacaucucaggaa

SEQ ID NO: 269168 - RNA, 22 nt, Human
cagggcuagugacaccccaguc

SEQ ID NO: 269169 - RNA, 23 nt, Human
uuugcaaauuuuccugacuacuc

SEQ ID NO: 269170 - RNA, 20 nt, Human
ccagaggguagggccgcccc

SEQ ID NO: 269171 - RNA, 22 nt, Human
uccacgugagcuucgugugcag

SEQ ID NO: 269172 - RNA, 22 nt, Human
gccugagaaggauaggaagcga

SEQ ID NO: 269173 - RNA, 22 nt, Human
uucuuuagguagauccaguuuu

SEQ ID NO: 269174 - RNA, 22 nt, Human
cuggucacuccuccaccugcuu

SEQ ID NO: 269175 - RNA, 23 nt, Human
gcugccuccuacaaaagcccagc

SEQ ID NO: 269176 - RNA, 22 nt, Human
aauauaugugguauugaccagc

SEQ ID NO: 269177 - RNA, 22 nt, Human
aguacaauuuaaugaagauagc

SEQ ID NO: 269178 - RNA, 22 nt, Human
gugcccuccugaagccaucaca

SEQ ID NO: 269179 - RNA, 22 nt, Human
aaguuugagagccuuuaguaua

SEQ ID NO: 269180 - RNA, 22 nt, Human
gaauucuagucacacacauuca

SEQ ID NO: 269181 - RNA, 22 nt, Human
acuggcagggggagccccgaga

SEQ ID NO: 269182 - RNA, 19 nt, Human
gguuauuugaggguuaaga

SEQ ID NO: 269183 - RNA, 22 nt, Human
gccuccccaggggugucaugag

SEQ ID NO: 269184 - RNA, 22 nt, Human
auauacacauuugcuuaugugu

SEQ ID NO: 269185 - RNA, 22 nt, Human
aggccaggguagggcccauugu

SEQ ID NO: 269186 - RNA, 22 nt, Human
ggagcugcucagagccaguccc

SEQ ID NO: 269187 - RNA, 22 nt, Human
agagacaagaaauaccugggac

SEQ ID NO: 269188 - RNA, 22 nt, Human
cacagcugcccuacuccaugug

SEQ ID NO: 269189 - RNA, 22 nt, Human
aacuuucagaauccuaugcauu

SEQ ID NO: 269190 - RNA, 22 nt, Human
agcacaaugugaaaagagcucu

SEQ ID NO: 269191 - RNA, 21 nt, Human
agacacagggguugcuggggu

SEQ ID NO: 269192 - RNA, 22 nt, Human
cucucuggguccucuuuuauag

SEQ ID NO: 269193 - RNA, 22 nt, Human
aagguggugaucaucuugaagg

SEQ ID NO: 269194 - RNA, 23 nt, Human
ugacaacagcucucagccauguc

SEQ ID NO: 269195 - RNA, 22 nt, Human
uaagaaucaguagauauagauu

SEQ ID NO: 269196 - RNA, 22 nt, Human
ucugcaggcucuagaugagguu

SEQ ID NO: 269197 - RNA, 22 nt, Human
agucucugcaugaugcagcaca

SEQ ID NO: 269198 - RNA, 22 nt, Human
agggcuccaggggcugggugac

SEQ ID NO: 269199 - RNA, 23 nt, Human
augcaggguuacagggcugacuu

SEQ ID NO: 269200 - RNA, 22 nt, Human
ugcaaacaucaauggccugagc

SEQ ID NO: 269201 - RNA, 22 nt, Human
gcuuuagaucugacuuucugug

SEQ ID NO: 269202 - RNA, 22 nt, Human
aagucagauaggugaguccaaa

SEQ ID NO: 269203 - RNA, 22 nt, Human
auucucugcugcacugauaaca

SEQ ID NO: 269204 - RNA, 22 nt, Human
gccugggagagggauagugcag

SEQ ID NO: 269205 - RNA, 22 nt, Human
ucaggcugcaguggcaaaagac

SEQ ID NO: 269206 - RNA, 22 nt, Human
agcagcuguuagaaacaggaag

SEQ ID NO: 269207 - RNA, 22 nt, Human
gcucccagggcagcgcagaaga

SEQ ID NO: 269208 - RNA, 22 nt, Human
aggcuggagggcaauggcaaga

SEQ ID NO: 269209 - RNA, 22 nt, Human
ccucugggcuggaaaauuaaug

SEQ ID NO: 269210 - RNA, 22 nt, Human
aaggaaaucuuuguaacaucuu

SEQ ID NO: 269211 - RNA, 22 nt, Human
ugacauuuuuaaaaccacuagu

SEQ ID NO: 269212 - RNA, 20 nt, Human
cugacagaaaauauuucauc

SEQ ID NO: 269213 - RNA, 22 nt, Human
auauuauucuagcucuugugug

SEQ ID NO: 269214 - RNA, 22 nt, Human
uaagauguacaaccacuucucu

SEQ ID NO: 269215 - RNA, 22 nt, Human
gaugcauuacaaaagugauuau

SEQ ID NO: 269216 - RNA, 22 nt, Human
aggggagacuggaaucuaacau

SEQ ID NO: 269217 - RNA, 22 nt, Human
auguuuguguuacacucugcag

SEQ ID NO: 269218 - RNA, 22 nt, Human
auacaacugcucucagauaagu

SEQ ID NO: 269219 - RNA, 17 nt, Human
acauuuccuaacugaag

SEQ ID NO: 269220 - RNA, 22 nt, Human
uucacauugaaggugcuuucuu

SEQ ID NO: 269221 - RNA, 22 nt, Human
aucuuugggauauuugugauua

SEQ ID NO: 269222 - RNA, 22 nt, Human
gaguccuugacacauaguaggu

SEQ ID NO: 269223 - RNA, 22 nt, Human
ugagggucuggaaucugggcuu

SEQ ID NO: 269224 - RNA, 23 nt, Human
agcuccagaacauagcacaggaa

SEQ ID NO: 269225 - RNA, 22 nt, Human
ucuccauacuugccuuuggccu

SEQ ID NO: 269226 - RNA, 22 nt, Human
uacaagaaggaaaacuagcaau

SEQ ID NO: 269227 - RNA, 22 nt, Human
cugggccuccucugcccaagcu

SEQ ID NO: 269228 - RNA, 22 nt, Human
gaaauauacaugaagucggcug

SEQ ID NO: 269229 - RNA, 22 nt, Human
ggaauucaguggccagacauga

SEQ ID NO: 269230 - RNA, 22 nt, Human
ucuuagaaaugaaguucuuucu

SEQ ID NO: 269231 - RNA, 22 nt, Human
gggacagaaggaagugagcaca

SEQ ID NO: 269232 - RNA, 22 nt, Human
cuguggcuucugggucaguuca

SEQ ID NO: 269233 - RNA, 22 nt, Human
uggagagcagggcuggaguuca

SEQ ID NO: 269234 - RNA, 22 nt, Human
gggcccuggauuuaagcaugga

SEQ ID NO: 269235 - RNA, 22 nt, Human
cuguggcucaauugccuacuga

SEQ ID NO: 269236 - RNA, 22 nt, Human
cucaacauuuaacagugaaaaa

SEQ ID NO: 269237 - RNA, 22 nt, Human
gggagggucugagagcugcacc

SEQ ID NO: 269238 - RNA, 22 nt, Human
cacuuuaugggaagcaaaaauu

SEQ ID NO: 269239 - RNA, 22 nt, Human
caagaaguugacagccagguga

SEQ ID NO: 269240 - RNA, 22 nt, Human
ucauuguaauuaucugugguau

SEQ ID NO: 269241 - RNA, 22 nt, Human
gaagaauauucuugaucuuaga

SEQ ID NO: 269242 - RNA, 22 nt, Human
ucuucucccaucuccaggcagg

SEQ ID NO: 269243 - RNA, 22 nt, Human
ccaguguucauaauuuuacacu

SEQ ID NO: 269244 - RNA, 22 nt, Human
cugaggagggaaguccccaaag

SEQ ID NO: 269245 - RNA, 22 nt, Human
ccagcuuuaucaagucugagcu

SEQ ID NO: 269246 - RNA, 22 nt, Human
ucacagcauugaguguacuaga

SEQ ID NO: 269247 - RNA, 22 nt, Human
ggagagucugccgagccagccc

SEQ ID NO: 269248 - RNA, 22 nt, Human
aucuguggauaugcacagagca

SEQ ID NO: 269249 - RNA, 22 nt, Human
cagucuuuuguauauuagcaga

SEQ ID NO: 269250 - RNA, 22 nt, Human
gggaucuguguugcgauggauu

SEQ ID NO: 269251 - RNA, 22 nt, Human
gcuggcagcauuagacccuggg

SEQ ID NO: 269252 - RNA, 21 nt, Human
agucacauuggggguuuaggg

SEQ ID NO: 269253 - RNA, 22 nt, Human
aauucaacagucaguuaucuca

SEQ ID NO: 269254 - RNA, 22 nt, Human
gccugagaaggacacagcaggu

SEQ ID NO: 269255 - RNA, 17 nt, Human
gaggacagggaaguagg

SEQ ID NO: 269256 - RNA, 22 nt, Human
cuucaugcugauauccucgaug

SEQ ID NO: 269257 - RNA, 22 nt, Human
cuggagcucagcccagguucca

SEQ ID NO: 269258 - RNA, 22 nt, Human
gccaggcucuugguuauguuuu

SEQ ID NO: 269259 - RNA, 22 nt, Human
auauagcacuuguuuugcaugu

SEQ ID NO: 269260 - RNA, 22 nt, Human
uggccuugauaacuggggagag

SEQ ID NO: 269261 - RNA, 22 nt, Human
uggcccaguauguauaaucuua

SEQ ID NO: 269262 - RNA, 22 nt, Human
ugugcucuucuguuacuuguag

SEQ ID NO: 269263 - RNA, 22 nt, Human
cagggagccugaauguuccagg

SEQ ID NO: 269264 - RNA, 22 nt, Human
ucugucaucuguaacaggaggg

SEQ ID NO: 269265 - RNA, 22 nt, Human
auuugcaugaccuuugcaagug

SEQ ID NO: 269266 - RNA, 22 nt, Human
ccaggagagcaggcgugcagcu

SEQ ID NO: 269267 - RNA, 22 nt, Human
agaugguugucgcaaaugaaug

SEQ ID NO: 269268 - RNA, 22 nt, Human
aagccaguauucaauggggcua

SEQ ID NO: 269269 - RNA, 19 nt, Human
gcacacguugugcuugagc

SEQ ID NO: 269270 - RNA, 22 nt, Human
cuuuccuaguaguuacagaaug

SEQ ID NO: 269271 - RNA, 22 nt, Human
gaauacauguguguauagaggu

SEQ ID NO: 269272 - RNA, 22 nt, Human
uguccagcugaaggcagccuca

SEQ ID NO: 269273 - RNA, 20 nt, Human
uauuggaucuaagaaauggg

SEQ ID NO: 269274 - RNA, 18 nt, Human
cugaggcuuagagagguu

SEQ ID NO: 269275 - RNA, 22 nt, Human
cugugcaagacuuacuuuaaua

SEQ ID NO: 269276 - RNA, 22 nt, Human
agaggccuaauugcuacccuuu

SEQ ID NO: 269277 - RNA, 22 nt, Human
uaggauaugguagaaaucauuc

SEQ ID NO: 269278 - RNA, 22 nt, Human
gccagccccuccauccuguuca

SEQ ID NO: 269279 - RNA, 22 nt, Human
uugaggaguugugacagauacu

SEQ ID NO: 269280 - RNA, 22 nt, Human
uacaacagacaggaauaagauu

SEQ ID NO: 269281 - RNA, 22 nt, Human
augcccugagcaggccuucaag

SEQ ID NO: 269282 - RNA, 22 nt, Human
auguuuacugaaaagauuucaa

SEQ ID NO: 269283 - RNA, 22 nt, Human
aaauacagaguugcuuaaaagc

SEQ ID NO: 269284 - RNA, 22 nt, Human
agcuccugcuugacagaagagg

SEQ ID NO: 269285 - RNA, 22 nt, Human
uccagugguacauggagacacu

SEQ ID NO: 269286 - RNA, 22 nt, Human
ugcuuuauucaggguuuacccc

SEQ ID NO: 269287 - RNA, 19 nt, Human
ugcuuccucaccaucuccc

SEQ ID NO: 269288 - RNA, 22 nt, Human
ccagugucagaaagauuauccu

SEQ ID NO: 269289 - RNA, 22 nt, Human
uggguggcacuucuggggucca

SEQ ID NO: 269290 - RNA, 22 nt, Human
augcccugcugcuggggcagug

SEQ ID NO: 269291 - RNA, 22 nt, Human
auagcuuucuuaaauauauaaa

SEQ ID NO: 269292 - RNA, 22 nt, Human
uuuacuuguucugcugaauucu

SEQ ID NO: 269293 - RNA, 21 nt, Human
gcucccugcucagcuccuggg

SEQ ID NO: 269294 - RNA, 22 nt, Human
agaggugaaagaauuuggcucu

SEQ ID NO: 269295 - RNA, 22 nt, Human
gggagggccaggcucacccagg

SEQ ID NO: 269296 - RNA, 22 nt, Human
gcauguguucuugaaaggccac

SEQ ID NO: 269297 - RNA, 22 nt, Human
ggcucagaccucccagcuccag

SEQ ID NO: 269298 - RNA, 22 nt, Human
ucugggagaagcugaugugaag

SEQ ID NO: 269299 - RNA, 22 nt, Human
agaaggcuuuaaguacuggcau

SEQ ID NO: 269300 - RNA, 22 nt, Human
uauuccaccagagaugugaauu

SEQ ID NO: 269301 - RNA, 22 nt, Human
ugcugcacaauuggaaaguauc

SEQ ID NO: 269302 - RNA, 22 nt, Human
aacaaguaaguuuauauauauu

SEQ ID NO: 269303 - RNA, 22 nt, Human
uucagagaguuugugaguccuu

SEQ ID NO: 269304 - RNA, 22 nt, Human
aagucacauucugagguauugg

SEQ ID NO: 269305 - RNA, 22 nt, Human
cagggcagugaagaacacacgu

SEQ ID NO: 269306 - RNA, 22 nt, Human
ugauagaaaggaaauuaauugg

SEQ ID NO: 269307 - RNA, 22 nt, Human
uuuaauacagaacuugucaggg

SEQ ID NO: 269308 - RNA, 22 nt, Human
uucugggcccaacccuagagug

SEQ ID NO: 269309 - RNA, 22 nt, Human
ggccaggcacugugugagauau

SEQ ID NO: 269310 - RNA, 22 nt, Human
uccuccuguuucucaggccugg

SEQ ID NO: 269311 - RNA, 22 nt, Human
accuuauuuugaaauagauugu

SEQ ID NO: 269312 - RNA, 22 nt, Human
auucucaauggcuacuuucaua

SEQ ID NO: 269313 - RNA, 22 nt, Human
uggcaucuccgacagucuugau

SEQ ID NO: 269314 - RNA, 22 nt, Human
gggagcuguaagggacagguag

SEQ ID NO: 269315 - RNA, 22 nt, Human
uccaggcauuccagccauucca

SEQ ID NO: 269316 - RNA, 22 nt, Human
ucugcccuaauucagugcuuag

SEQ ID NO: 269317 - RNA, 22 nt, Human
aggaggaauacaauccagcagc

SEQ ID NO: 269318 - RNA, 22 nt, Human
cuguacauauacauuuuuuucc

SEQ ID NO: 269319 - RNA, 22 nt, Human
gcacagaagagcuuuggaauga

SEQ ID NO: 269320 - RNA, 22 nt, Human
cuugaauguaaauaauguacag

SEQ ID NO: 269321 - RNA, 22 nt, Human
ccugcagggugcugccacagau

SEQ ID NO: 269322 - RNA, 22 nt, Human
uugcauuugcucauuugauaug

SEQ ID NO: 269323 - RNA, 22 nt, Human
agagaucugugcuuacuacaag

SEQ ID NO: 269324 - RNA, 22 nt, Human
uuuugcuguuauaugcuauuau

SEQ ID NO: 269325 - RNA, 22 nt, Human
guccagcugggccagggcacuc

SEQ ID NO: 269326 - RNA, 22 nt, Human
uauuucaggggguacaagaaga

SEQ ID NO: 269327 - RNA, 22 nt, Human
guccucugcuucaugcccugau

SEQ ID NO: 269328 - RNA, 22 nt, Human
auuugcuaguggaauuuuccug

SEQ ID NO: 269329 - RNA, 22 nt, Human
ugcauucaaauccugauccugc

SEQ ID NO: 269330 - RNA, 22 nt, Human
ggcccagcaucuugugaaguuu

SEQ ID NO: 269331 - RNA, 22 nt, Human
aacaguuuggguagguauguag

SEQ ID NO: 269332 - RNA, 22 nt, Human
ugacacaaaggaaagcauaauc

SEQ ID NO: 269333 - RNA, 22 nt, Human
aggguaggaacugaguggaagg

SEQ ID NO: 269334 - RNA, 22 nt, Human
uucagggcagagaguucaggga

SEQ ID NO: 269335 - RNA, 22 nt, Human
ucccuggccauuccucuaggcc

SEQ ID NO: 269336 - RNA, 22 nt, Human
cugaggcaguuuaauuuuugaa

SEQ ID NO: 269337 - RNA, 22 nt, Human
cauuagggacugaggaauaagg

SEQ ID NO: 269338 - RNA, 22 nt, Human
cagguccagucacuggucugca

SEQ ID NO: 269339 - RNA, 22 nt, Human
cugggccugguagggcuugaaa

SEQ ID NO: 269340 - RNA, 22 nt, Human
augcaccccagaagcugcagug

SEQ ID NO: 269341 - RNA, 22 nt, Human
gucucugggugugugaugccaa

SEQ ID NO: 269342 - RNA, 22 nt, Human
caagggaaggcuaagggcaaca

SEQ ID NO: 269343 - RNA, 22 nt, Human
ggaaggaggggcaaagcaguuc

SEQ ID NO: 269344 - RNA, 22 nt, Human
cuuuuucuucuaggugugccug

SEQ ID NO: 269345 - RNA, 22 nt, Human
ucuuccucaugaauucucguau

SEQ ID NO: 269346 - RNA, 22 nt, Human
caggaaauaucuccuggcagag

SEQ ID NO: 269347 - RNA, 22 nt, Human
acagucauagcagccuuuguua

SEQ ID NO: 269348 - RNA, 22 nt, Human
ugcaaacacuucaacgugcauc

SEQ ID NO: 269349 - RNA, 22 nt, Human
auggcccagaaguuuggaaagg

SEQ ID NO: 269350 - RNA, 22 nt, Human
ucuggggagucaaagagaccug

SEQ ID NO: 269351 - RNA, 22 nt, Human
cagauggauuuuguaggcugau

SEQ ID NO: 269352 - RNA, 22 nt, Human
ucacagaaguugaauuugcaug

SEQ ID NO: 269353 - RNA, 22 nt, Human
cgugagcaaaauggacacuccc

SEQ ID NO: 269354 - RNA, 22 nt, Human
gauuccacagcuucgaggucuu

SEQ ID NO: 269355 - RNA, 17 nt, Human
cucuggaauuggugaag

SEQ ID NO: 269356 - RNA, 22 nt, Human
ccaggugugagcauucugucuu

SEQ ID NO: 269357 - RNA, 22 nt, Human
ggcaggcuugauauggggggac

SEQ ID NO: 269358 - RNA, 22 nt, Human
ggcaggugcaccugagccaucu

SEQ ID NO: 269359 - RNA, 22 nt, Human
cagcuucucgggagcgcaugug

SEQ ID NO: 269360 - RNA, 22 nt, Human
acagggagucugaggggauagu

SEQ ID NO: 269361 - RNA, 22 nt, Human
uuccuacaauuagagccucuuu

SEQ ID NO: 269362 - RNA, 22 nt, Human
acaagaauuauuucuaguuaac

SEQ ID NO: 269363 - RNA, 19 nt, Human
uagaaagaugauggguggg

SEQ ID NO: 269364 - RNA, 22 nt, Human
ggccacugaccuacaucugggg

SEQ ID NO: 269365 - RNA, 22 nt, Human
uuccaggcaugucagacauagg

SEQ ID NO: 269366 - RNA, 22 nt, Human
uuccugugugaccgagacagug

SEQ ID NO: 269367 - RNA, 22 nt, Human
uaguucaggaagagaaacaaca

SEQ ID NO: 269368 - RNA, 22 nt, Human
uuuauaugugaagguuugcaga

SEQ ID NO: 269369 - RNA, 22 nt, Human
gaccauuucaggggcagggacu

SEQ ID NO: 269370 - RNA, 22 nt, Human
aagcagagguagggugugcagu

SEQ ID NO: 269371 - RNA, 19 nt, Human
uucuuuggugguggugacc

SEQ ID NO: 269372 - RNA, 22 nt, Human
auguuaacagcugcuucuggug

SEQ ID NO: 269373 - RNA, 22 nt, Human
cuugauuuauuacccacuauau

SEQ ID NO: 269374 - RNA, 23 nt, Human
ggcagagagcauggcuggggccc

SEQ ID NO: 269375 - RNA, 22 nt, Human
gccucaggacuggcauacucau

SEQ ID NO: 269376 - RNA, 22 nt, Human
gccuguggcccaacugucuguc

SEQ ID NO: 269377 - RNA, 22 nt, Human
uuaacauuaaaagcagcauuuu

SEQ ID NO: 269378 - RNA, 20 nt, Human
gcuucccaauucuugaucug

SEQ ID NO: 269379 - RNA, 22 nt, Human
ugucucugccagcuagcagaau

SEQ ID NO: 269380 - RNA, 22 nt, Human
uccaggaguuugagacugcagu

SEQ ID NO: 269381 - RNA, 22 nt, Human
ugggcucuggagggccuaggau

SEQ ID NO: 269382 - RNA, 22 nt, Human
acacaggaacucaagcucgcuu

SEQ ID NO: 269383 - RNA, 22 nt, Human
acaaaugcuuaguucaccaaaa

SEQ ID NO: 269384 - RNA, 22 nt, Human
auggcugcucuggauggagucc

SEQ ID NO: 269385 - RNA, 18 nt, Human
uuugcugaugagcaucau

SEQ ID NO: 269386 - RNA, 22 nt, Human
aagcccagaugugagaacugag

SEQ ID NO: 269387 - RNA, 22 nt, Human
cuacuguugggagcccuggaag

SEQ ID NO: 269388 - RNA, 22 nt, Human
ggcuuuugcuguguuuuccaga

SEQ ID NO: 269389 - RNA, 22 nt, Human
uucaaacaaaacuguucccaua

SEQ ID NO: 269390 - RNA, 22 nt, Human
ucccaguggcuucauaaggcag

SEQ ID NO: 269391 - RNA, 22 nt, Human
aagacagagacucugcaacagg

SEQ ID NO: 269392 - RNA, 22 nt, Human
cugcuuuaaucccugccuggaa

SEQ ID NO: 269393 - RNA, 22 nt, Human
ccuugcucggggagcugcagga

SEQ ID NO: 269394 - RNA, 22 nt, Human
uaacagaaauuuuaguuagggg

SEQ ID NO: 269395 - RNA, 22 nt, Human
ccucaggguggcaucagaucuu

SEQ ID NO: 269396 - RNA, 21 nt, Human
acacguguguguaaacacaca

SEQ ID NO: 269397 - RNA, 22 nt, Human
ccucagagccaugccugaguuc

SEQ ID NO: 269398 - RNA, 22 nt, Human
caaaaguaauguaugcucaucg

SEQ ID NO: 269399 - RNA, 17 nt, Human
uuuguacaacauuuuaa

SEQ ID NO: 269400 - RNA, 22 nt, Human
uugggaagaaacauguccauca

SEQ ID NO: 269401 - RNA, 22 nt, Human
augucagaaucuacauucuacu

SEQ ID NO: 269402 - RNA, 22 nt, Human
cuggugacauuuccggcugcca

SEQ ID NO: 269403 - RNA, 22 nt, Human
aucuccaggcauuucaagagac

SEQ ID NO: 269404 - RNA, 22 nt, Human
cugcacugagcucucccagccc

SEQ ID NO: 269405 - RNA, 22 nt, Human
aacgaagcuuaacuuuucugag

SEQ ID NO: 269406 - RNA, 21 nt, Human
ggcaggugggucucuguugcu

SEQ ID NO: 269407 - RNA, 22 nt, Human
uaaaggcaaauguguguuugug

SEQ ID NO: 269408 - RNA, 22 nt, Human
caguuucugagcccugucauuu

SEQ ID NO: 269409 - RNA, 22 nt, Human
uauguuaaauguuugauguuua

SEQ ID NO: 269410 - RNA, 21 nt, Human
ugacuaauugugauaaagugc

SEQ ID NO: 269411 - RNA, 21 nt, Human
ccuggcuccagaacuuccggu

SEQ ID NO: 269412 - RNA, 22 nt, Human
ggcaggcaucauguggucauua

SEQ ID NO: 269413 - RNA, 22 nt, Human
ucaaagagcuauucaguugugg

SEQ ID NO: 269414 - RNA, 22 nt, Human
gaagcuucguggcucuucaaau

SEQ ID NO: 269415 - RNA, 22 nt, Human
caguuuuauugguugaaaucug

SEQ ID NO: 269416 - RNA, 22 nt, Human
ccucuccaguuuuaacgugacc

SEQ ID NO: 269417 - RNA, 22 nt, Human
auggcugccccaaauuguugcu

SEQ ID NO: 269418 - RNA, 22 nt, Human
ccugggagccaagccucugugu

SEQ ID NO: 269419 - RNA, 22 nt, Human
aggaauguuaaagauuaagagc

SEQ ID NO: 269420 - RNA, 22 nt, Human
auuggaauggcuuugcaugucc

SEQ ID NO: 269421 - RNA, 22 nt, Human
cugagcagcacagggcgccagg

SEQ ID NO: 269422 - RNA, 22 nt, Human
aagguccuguagccacagagcc

SEQ ID NO: 269423 - RNA, 21 nt, Human
aagcaggcuguaaucaugugg

SEQ ID NO: 269424 - RNA, 22 nt, Human
aguccaggaguugggugacauu

SEQ ID NO: 269425 - RNA, 21 nt, Human
aggugcuggcgccccaggaga

SEQ ID NO: 269426 - RNA, 22 nt, Human
ggaagagggaaccacgacugua

SEQ ID NO: 269427 - RNA, 22 nt, Human
aaaaugagauacaguuugaaag

SEQ ID NO: 269428 - RNA, 20 nt, Human
auguccucagccacugcccu

SEQ ID NO: 269429 - RNA, 22 nt, Human
caauucuuucagcugcauuugu

SEQ ID NO: 269430 - RNA, 22 nt, Human
auuuggcuaccaugaggauggg

SEQ ID NO: 269431 - RNA, 22 nt, Human
ucacaucuuggauuacaauuuu

SEQ ID NO: 269432 - RNA, 19 nt, Human
ccucagagcuagugaacau

SEQ ID NO: 269433 - RNA, 22 nt, Human
gcacacaguacuauaugcuaca

SEQ ID NO: 269434 - RNA, 22 nt, Human
ccagcugagguugaagaaagag

SEQ ID NO: 269435 - RNA, 22 nt, Human
gcaggagcucguuuccaggcug

SEQ ID NO: 269436 - RNA, 20 nt, Human
uccaguuuuggagacauucu

SEQ ID NO: 269437 - RNA, 22 nt, Human
cugcagugaaaucaggaagcaa

SEQ ID NO: 269438 - RNA, 22 nt, Human
agauuacagcaugggaauggga

SEQ ID NO: 269439 - RNA, 22 nt, Human
uucucuguuuuccccucgaugu

SEQ ID NO: 269440 - RNA, 22 nt, Human
cagaaaggacagagugagggug

SEQ ID NO: 269441 - RNA, 22 nt, Human
augaggcacuuaaaagugaaga

SEQ ID NO: 269442 - RNA, 22 nt, Human
ccugggugcccggcccuucucu

SEQ ID NO: 269443 - RNA, 22 nt, Human
aaaaaucuaugacugcuucucc

SEQ ID NO: 269444 - RNA, 22 nt, Human
cagaugcuucgugggugagcac

SEQ ID NO: 269445 - RNA, 22 nt, Human
aaguuccuaaagucagggguca

SEQ ID NO: 269446 - RNA, 22 nt, Human
cacugguguauuagagcuagaa

SEQ ID NO: 269447 - RNA, 22 nt, Human
caaacauuuuaaauaagggaua

SEQ ID NO: 269448 - RNA, 22 nt, Human
uucagaauauuuguuuuacaug

SEQ ID NO: 269449 - RNA, 22 nt, Human
cacaggugcuccucggggagcu

SEQ ID NO: 269450 - RNA, 22 nt, Human
gggggugguucuaaguccuaua

SEQ ID NO: 269451 - RNA, 22 nt, Human
agaugaguagguagcauuagua

SEQ ID NO: 269452 - RNA, 22 nt, Human
uucaguuucuaaaugcuccucu

SEQ ID NO: 269453 - RNA, 21 nt, Human
ucuuugcaucaguuguuuucu

SEQ ID NO: 269454 - RNA, 22 nt, Human
ugaggcaaaaacacugauuagg

SEQ ID NO: 269455 - RNA, 19 nt, Human
acaguccagcuguuuguac

SEQ ID NO: 269456 - RNA, 22 nt, Human
ccugucaguugcugucagggau

SEQ ID NO: 269457 - RNA, 22 nt, Human
uaaaguuuggcagacaauaaca

SEQ ID NO: 269458 - RNA, 22 nt, Human
caggaaaaucugcccacacaag

SEQ ID NO: 269459 - RNA, 22 nt, Human
cauggaggacccucagggagcu

SEQ ID NO: 269460 - RNA, 20 nt, Human
uuguuagaggaaugccauag

SEQ ID NO: 269461 - RNA, 22 nt, Human
agggcuccuaugaugcucugcc

SEQ ID NO: 269462 - RNA, 22 nt, Human
guauauaagguaaagcgauugu

SEQ ID NO: 269463 - RNA, 22 nt, Human
uauguacaaucagcaguucaua

SEQ ID NO: 269464 - RNA, 22 nt, Human
caggugguuccauguuucauga

SEQ ID NO: 269465 - RNA, 22 nt, Human
ccaggaccuggagcucuaugaa

SEQ ID NO: 269466 - RNA, 22 nt, Human
auucaacuuauaagauauuaau

SEQ ID NO: 269467 - RNA, 22 nt, Human
ugcucccagcuguaggaauguu

SEQ ID NO: 269468 - RNA, 22 nt, Human
cagugcauaaucuaaauggggg

SEQ ID NO: 269469 - RNA, 22 nt, Human
caacuguuauaaaucaacagag

SEQ ID NO: 269470 - RNA, 22 nt, Human
aagagacaugaauacucgaagg

SEQ ID NO: 269471 - RNA, 22 nt, Human
auuuuccucaagccucuggaag

SEQ ID NO: 269472 - RNA, 22 nt, Human
agacagacuuugaucuggaugu

SEQ ID NO: 269473 - RNA, 20 nt, Human
acguggccaccaguggcuua

SEQ ID NO: 269474 - RNA, 18 nt, Human
ugagacagcuaccacuug

SEQ ID NO: 269475 - RNA, 22 nt, Human
uuaaugaccuagagcaguaauu

SEQ ID NO: 269476 - RNA, 22 nt, Human
uagggucccagauaggagccag

SEQ ID NO: 269477 - RNA, 22 nt, Human
cugcucuugagggacugcgguc

SEQ ID NO: 269478 - RNA, 23 nt, Human
ggucagugaguucguuucucugg

SEQ ID NO: 269479 - RNA, 22 nt, Human
aaggccagggaugccagcucgg

SEQ ID NO: 269480 - RNA, 22 nt, Human
gcucaaauuucagacucaugaa

SEQ ID NO: 269481 - RNA, 22 nt, Human
aaacaucuauuaugugcugagc

SEQ ID NO: 269482 - RNA, 22 nt, Human
ucacagaacaauguuuaguucu

SEQ ID NO: 269483 - RNA, 21 nt, Human
ggccccagcccauggguucuc

SEQ ID NO: 269484 - RNA, 22 nt, Human
aaguaaaauguuuccuuuauua

SEQ ID NO: 269485 - RNA, 22 nt, Human
gcagagguccuagccaggaguc

SEQ ID NO: 269486 - RNA, 22 nt, Human
acagggcuuuuaaucaguaguu

SEQ ID NO: 269487 - RNA, 22 nt, Human
uauuuagaaugcguguacgugu

SEQ ID NO: 269488 - RNA, 22 nt, Human
guggcagagaacaaggagaggu

SEQ ID NO: 269489 - RNA, 22 nt, Human
ugccucagcugaggccgcucca

SEQ ID NO: 269490 - RNA, 22 nt, Human
uccauuuagcuggcaaacaaug

SEQ ID NO: 269491 - RNA, 22 nt, Human
uggcucugagucugcccuuggc

SEQ ID NO: 269492 - RNA, 22 nt, Human
gacaugggaugagaugaagcau

SEQ ID NO: 269493 - RNA, 22 nt, Human
ugggcagagucauacaggagac

SEQ ID NO: 269494 - RNA, 22 nt, Human
cacaugagugagaacaugcagu

SEQ ID NO: 269495 - RNA, 22 nt, Human
aggcaggagugacccugacagg

SEQ ID NO: 269496 - RNA, 22 nt, Human
cuggcuuccucaggagcagugg

SEQ ID NO: 269497 - RNA, 22 nt, Human
aaaggccaauaaagacaagcug

SEQ ID NO: 269498 - RNA, 22 nt, Human
ggucucuguugccuccaucaag

SEQ ID NO: 269499 - RNA, 22 nt, Human
augccauuguauauucauugau

SEQ ID NO: 269500 - RNA, 22 nt, Human
uucaugaaagacagcaacugug

SEQ ID NO: 269501 - RNA, 17 nt, Human
cagugaggccuuuccuc

SEQ ID NO: 269502 - RNA, 16 nt, Human
agugggaggagaaaga

SEQ ID NO: 269503 - RNA, 22 nt, Human
gcuuugcuaugacucaccagca

SEQ ID NO: 269504 - RNA, 22 nt, Human
ccagucagggcaggagccuggu

SEQ ID NO: 269505 - RNA, 22 nt, Human
caggaaaugcuaucauagcuga

SEQ ID NO: 269506 - RNA, 22 nt, Human
cagcugagaaaggcaggcucac

SEQ ID NO: 269507 - RNA, 22 nt, Human
uggcuuuuguugguaccaccuu

SEQ ID NO: 269508 - RNA, 22 nt, Human
uuagaacugaagaagauuaagg

SEQ ID NO: 269509 - RNA, 22 nt, Human
aggagccauuuuccaagggcga

SEQ ID NO: 269510 - RNA, 22 nt, Human
aggacuggcagugugagggguc

SEQ ID NO: 269511 - RNA, 22 nt, Human
gaggcugcuuuccuccuauccu

SEQ ID NO: 269512 - RNA, 22 nt, Human
gccugcuggacauuggccggcc

SEQ ID NO: 269513 - RNA, 22 nt, Human
gaaggaggcguuagcccuagga

SEQ ID NO: 269514 - RNA, 20 nt, Human
cugugcuuuggaaccuggaa

SEQ ID NO: 269515 - RNA, 22 nt, Human
aauuacagucggagcagcacug

SEQ ID NO: 269516 - RNA, 22 nt, Human
gcacccagaggucagcagugcu

SEQ ID NO: 269517 - RNA, 22 nt, Human
agcagaaucuguccuuggaaga

SEQ ID NO: 269518 - RNA, 22 nt, Human
gaauuuacaaguugaauaacaa

SEQ ID NO: 269519 - RNA, 22 nt, Human
ccagggccugagggcgacgccc

SEQ ID NO: 269520 - RNA, 20 nt, Human
auuagagcuacauggcuaca

SEQ ID NO: 269521 - RNA, 22 nt, Human
uccuucucugguuuuuacugua

SEQ ID NO: 269522 - RNA, 22 nt, Human
cguagcucacgcccccucuccc

SEQ ID NO: 269523 - RNA, 21 nt, Human
cugcuguggcccccgacaugc

SEQ ID NO: 269524 - RNA, 22 nt, Human
agcauccuccuucccagagaug

SEQ ID NO: 269525 - RNA, 22 nt, Human
uucuauuaauauguuaauucug

SEQ ID NO: 269526 - RNA, 22 nt, Human
ccaagguugagaaacuguagga

SEQ ID NO: 269527 - RNA, 22 nt, Human
aagcugccuugcugaggagaaa

SEQ ID NO: 269528 - RNA, 22 nt, Human
uucccaggcugugcuaccagag

SEQ ID NO: 269529 - RNA, 22 nt, Human
ccuggagcuuuuccauccugga

SEQ ID NO: 269530 - RNA, 23 nt, Human
gaagugucugagcuguauuuuuc

SEQ ID NO: 269531 - RNA, 22 nt, Human
ucugcugcuacagacucucuag

SEQ ID NO: 269532 - RNA, 22 nt, Human
uuuauacuccacucugcaagcg

SEQ ID NO: 269533 - RNA, 22 nt, Human
aacagcauauuucauauauuga

SEQ ID NO: 269534 - RNA, 22 nt, Human
gguuagagggcaugcgaucuuu

SEQ ID NO: 269535 - RNA, 22 nt, Human
ccugggaaucugcauugucagc

SEQ ID NO: 269536 - RNA, 22 nt, Human
gagaaucuccagaugaaguccu

SEQ ID NO: 269537 - RNA, 22 nt, Human
ggggcagcucccgagggcagga

SEQ ID NO: 269538 - RNA, 22 nt, Human
ugcccugcagugagugcgucug

SEQ ID NO: 269539 - RNA, 22 nt, Human
cuguaaaacugcuuaaguaugc

SEQ ID NO: 269540 - RNA, 17 nt, Human
gcccacccuuaggagcu

SEQ ID NO: 269541 - RNA, 22 nt, Human
uucuaguuaaaguauguauuag

SEQ ID NO: 269542 - RNA, 22 nt, Human
gaacagcauguaagaagcuacu

SEQ ID NO: 269543 - RNA, 22 nt, Human
ugccuggguucccaccccaaag

SEQ ID NO: 269544 - RNA, 22 nt, Human
ccagcucuagccccauguggcu

SEQ ID NO: 269545 - RNA, 22 nt, Human
uuagcauuucuggaaucacaag

SEQ ID NO: 269546 - RNA, 18 nt, Human
ucucucagggaaacagaa

SEQ ID NO: 269547 - RNA, 22 nt, Human
ugcaggcugcuggcaguagcuu

SEQ ID NO: 269548 - RNA, 22 nt, Human
uuuccaaauaaggucacacuca

SEQ ID NO: 269549 - RNA, 22 nt, Human
ucuuucuugguauucugagcua

SEQ ID NO: 269550 - RNA, 21 nt, Human
cagcuucugaagguguaggaa

SEQ ID NO: 269551 - RNA, 17 nt, Human
ggacacagcucauggcu

SEQ ID NO: 269552 - RNA, 22 nt, Human
cacagugcucaaacacaagugc

SEQ ID NO: 269553 - RNA, 22 nt, Human
ggagugaggcauuuguagcuga

SEQ ID NO: 269554 - RNA, 22 nt, Human
gaauacaugauacaugaacugc

SEQ ID NO: 269555 - RNA, 22 nt, Human
ugucacagagcgugcaacagaa

SEQ ID NO: 269556 - RNA, 23 nt, Human
ggcagccucugacucugcuuugc

SEQ ID NO: 269557 - RNA, 22 nt, Human
uacacacaugcauuugccuuau

SEQ ID NO: 269558 - RNA, 22 nt, Human
ugguggcuaccagguccugggg

SEQ ID NO: 269559 - RNA, 22 nt, Human
ugacauguauaucuuacgcuau

SEQ ID NO: 269560 - RNA, 22 nt, Human
ugcccagcacugugccagucac

SEQ ID NO: 269561 - RNA, 22 nt, Human
ccaggcuggauuuugcaguuca

SEQ ID NO: 269562 - RNA, 22 nt, Human
cccaggagagaggggauaaagc

SEQ ID NO: 269563 - RNA, 22 nt, Human
ccagggagccuggugugucagc

SEQ ID NO: 269564 - RNA, 22 nt, Human
uaauuauuugaagacauuagag

SEQ ID NO: 269565 - RNA, 22 nt, Human
uccagcccugcuuccugccuca

SEQ ID NO: 269566 - RNA, 22 nt, Human
ucucaguguuuaaaaagauuuc

SEQ ID NO: 269567 - RNA, 22 nt, Human
ucccagagccaagcuauggaug

SEQ ID NO: 269568 - RNA, 22 nt, Human
gcuuucaauuaugucagccugu

SEQ ID NO: 269569 - RNA, 22 nt, Human
uuacagagcucauuucuaaggg

SEQ ID NO: 269570 - RNA, 22 nt, Human
cagggacagcacuaaacucuug

SEQ ID NO: 269571 - RNA, 22 nt, Human
aagagguugucugugaugaguu

SEQ ID NO: 269572 - RNA, 22 nt, Human
agagggcuggacgcagguugga

SEQ ID NO: 269573 - RNA, 22 nt, Human
ccaggcagcucugauuuauguc

SEQ ID NO: 269574 - RNA, 22 nt, Human
acuuuaaggaggcacucaucuc

SEQ ID NO: 269575 - RNA, 22 nt, Human
aaacagaguuugguaaauagcc

SEQ ID NO: 269576 - RNA, 22 nt, Human
cugagcugugcuaagugaaaug

SEQ ID NO: 269577 - RNA, 22 nt, Human
agcaaagucaguggaaccaucc

SEQ ID NO: 269578 - RNA, 22 nt, Human
ggcagggacuuugcaaaucuuu

SEQ ID NO: 269579 - RNA, 20 nt, Human
agguguccuguagcuugagu

SEQ ID NO: 269580 - RNA, 22 nt, Human
cuguuuauagcagagcaagccu

SEQ ID NO: 269581 - RNA, 22 nt, Human
ucuuuauacaaacugggaaaca

SEQ ID NO: 269582 - RNA, 21 nt, Human
aaauuucugcaagccucaacu

SEQ ID NO: 269583 - RNA, 22 nt, Human
uucaacuauuaugaauaaaauu

SEQ ID NO: 269584 - RNA, 22 nt, Human
uuccucucaacaugccugccgg

SEQ ID NO: 269585 - RNA, 22 nt, Human
ucagggcccagucugugcaucu

SEQ ID NO: 269586 - RNA, 22 nt, Human
ucaucaaagucaaagaaugacu

SEQ ID NO: 269587 - RNA, 19 nt, Human
aggcugccucacccucccu

SEQ ID NO: 269588 - RNA, 22 nt, Human
ugcauauugugaaaauguagau

SEQ ID NO: 269589 - RNA, 22 nt, Human
ucucgacagccuggcacagugg

SEQ ID NO: 269590 - RNA, 22 nt, Human
gcucagaggguuuuggccaagu

SEQ ID NO: 269591 - RNA, 22 nt, Human
ugacaaagcaugauggugacag

SEQ ID NO: 269592 - RNA, 22 nt, Human
ucucugaaagcagcugcucauc

SEQ ID NO: 269593 - RNA, 22 nt, Human
uaaacauggcuguuucaguuau

SEQ ID NO: 269594 - RNA, 22 nt, Human
uuuauuggaugggucagcucua

SEQ ID NO: 269595 - RNA, 22 nt, Human
uggauugauaaaaugggauguu

SEQ ID NO: 269596 - RNA, 22 nt, Human
ggcaucuggaucugcuucuccc

SEQ ID NO: 269597 - RNA, 22 nt, Human
gagauauguuagaaagcuauug

SEQ ID NO: 269598 - RNA, 22 nt, Human
cccaggaacagcacagaacagc

SEQ ID NO: 269599 - RNA, 22 nt, Human
aaaugaacucuuccugcauccc

SEQ ID NO: 269600 - RNA, 22 nt, Human
caauucauuacauugcaaagac

SEQ ID NO: 269601 - RNA, 22 nt, Human
gagcuccugaaacguuccugcc

SEQ ID NO: 269602 - RNA, 22 nt, Human
acaggcuggugguccuggccau

SEQ ID NO: 269603 - RNA, 22 nt, Human
aggcugcuucuuguccuuggca

SEQ ID NO: 269604 - RNA, 19 nt, Human
ucucuggcauagacucaau

SEQ ID NO: 269605 - RNA, 22 nt, Human
cucacagcaaggagguaaggua

SEQ ID NO: 269606 - RNA, 22 nt, Human
gucaccucgcugucuuccugag

SEQ ID NO: 269607 - RNA, 22 nt, Human
acucuguagauguggaaaugcg

SEQ ID NO: 269608 - RNA, 22 nt, Human
cagcccuggugagguuggcuau

SEQ ID NO: 269609 - RNA, 22 nt, Human
agggcucccgugaggugacugc

SEQ ID NO: 269610 - RNA, 22 nt, Human
ccauguguugagauuccagccu

SEQ ID NO: 269611 - RNA, 22 nt, Human
ccagcuuucucagaggcuucua

SEQ ID NO: 269612 - RNA, 22 nt, Human
gaauuaacuggcaguuagugcu

SEQ ID NO: 269613 - RNA, 20 nt, Human
ggugcugauaagaaagaagu

SEQ ID NO: 269614 - RNA, 22 nt, Human
uccuggagcuggugucuuuccc

SEQ ID NO: 269615 - RNA, 22 nt, Human
acaugcauucucuaaaagcaaa

SEQ ID NO: 269616 - RNA, 21 nt, Human
ggccucugucauccugggaag

SEQ ID NO: 269617 - RNA, 22 nt, Human
auuugcuugugcuaugaaaguu

SEQ ID NO: 269618 - RNA, 22 nt, Human
cugcagcugggccagggccacc

SEQ ID NO: 269619 - RNA, 22 nt, Human
agacuucuugagcuggcacuuc

SEQ ID NO: 269620 - RNA, 22 nt, Human
ccccaggcagggccuaacagag

SEQ ID NO: 269621 - RNA, 22 nt, Human
agagacaggguuuugucguguu

SEQ ID NO: 269622 - RNA, 18 nt, Human
gccugggaggaggaaaug

SEQ ID NO: 269623 - RNA, 22 nt, Human
ggccuguguccuccuugcccug

SEQ ID NO: 269624 - RNA, 22 nt, Human
acugagagcguguacaaacuua

SEQ ID NO: 269625 - RNA, 22 nt, Human
ccauuggagccaagaguuuuac

SEQ ID NO: 269626 - RNA, 22 nt, Human
cuggaaagucaggucagaaacu

SEQ ID NO: 269627 - RNA, 22 nt, Human
gccaccaguagcuaacaacagu

SEQ ID NO: 269628 - RNA, 22 nt, Human
gagaagcucuagagguguuuuu

SEQ ID NO: 269629 - RNA, 22 nt, Human
agacagggucuugaucagagcu

SEQ ID NO: 269630 - RNA, 22 nt, Human
gaguccaguaguuaggacagag

SEQ ID NO: 269631 - RNA, 22 nt, Human
cccaggucugccagccuguggg

SEQ ID NO: 269632 - RNA, 22 nt, Human
agaaaguucugugaguuguuca

SEQ ID NO: 269633 - RNA, 22 nt, Human
uuccaggaggucaaaggccugu

SEQ ID NO: 269634 - RNA, 22 nt, Human
aaauuugauaagccauuguuac

SEQ ID NO: 269635 - RNA, 22 nt, Human
uggggaagggcacccuggagac

SEQ ID NO: 269636 - RNA, 21 nt, Human
agacaguaacucuucuacucc

SEQ ID NO: 269637 - RNA, 22 nt, Human
ugaaggagaauuaauaggcauu

SEQ ID NO: 269638 - RNA, 20 nt, Human
cugggcagguguuugaucuc

SEQ ID NO: 269639 - RNA, 22 nt, Human
ucaaacuagccugacugguauu

SEQ ID NO: 269640 - RNA, 22 nt, Human
acacagaguccuuacugaggua

SEQ ID NO: 269641 - RNA, 22 nt, Human
cuagggcagggaguguuugcgc

SEQ ID NO: 269642 - RNA, 22 nt, Human
acaauaugggauauacauuuua

SEQ ID NO: 269643 - RNA, 22 nt, Human
agugaaaacacuaguucuugcc

SEQ ID NO: 269644 - RNA, 22 nt, Human
gggccaaggggagcuggaaggg

SEQ ID NO: 269645 - RNA, 22 nt, Human
cuccagugcugucaucccuucc

SEQ ID NO: 269646 - RNA, 22 nt, Human
aggacacacugcaagagccugg

SEQ ID NO: 269647 - RNA, 22 nt, Human
cccaggcuggagugcaauggca

SEQ ID NO: 269648 - RNA, 22 nt, Human
acaugauuaaaagauuuuaaag

SEQ ID NO: 269649 - RNA, 21 nt, Human
uggcugcaagcagcugccucc

SEQ ID NO: 269650 - RNA, 22 nt, Human
cacauguucuugaagccaacuc

SEQ ID NO: 269651 - RNA, 21 nt, Human
aggcucagcagguguauaaag

SEQ ID NO: 269652 - RNA, 22 nt, Human
ugcugucuuccaggauggugaa

SEQ ID NO: 269653 - RNA, 22 nt, Human
uggcucagagcagggacucugg

SEQ ID NO: 269654 - RNA, 22 nt, Human
auucugggagguagaacugaaa

SEQ ID NO: 269655 - RNA, 22 nt, Human
acuuucuucuuaugcauuaagg

SEQ ID NO: 269656 - RNA, 22 nt, Human
gggaugagagcugggacagaag

SEQ ID NO: 269657 - RNA, 22 nt, Human
ugggcugcagagcccggccuuc

SEQ ID NO: 269658 - RNA, 22 nt, Human
uucaguguuaaauucaaagagu

SEQ ID NO: 269659 - RNA, 19 nt, Human
uugugacuggcucugcaua

SEQ ID NO: 269660 - RNA, 22 nt, Human
augaggaugggaagggagccaa

SEQ ID NO: 269661 - RNA, 22 nt, Human
ccucagcauccuccugcucagu

SEQ ID NO: 269662 - RNA, 22 nt, Human
ggcaccagccaccuauuucuag

SEQ ID NO: 269663 - RNA, 21 nt, Human
gcuggcucucugacgugcuuu

SEQ ID NO: 269664 - RNA, 22 nt, Human
aguucacauuccgagguacugg

SEQ ID NO: 269665 - RNA, 22 nt, Human
uauaagcaugcuucauauggau

SEQ ID NO: 269666 - RNA, 22 nt, Human
gcccaggaaaugccccguggug

SEQ ID NO: 269667 - RNA, 22 nt, Human
aacacagguugcugggccucac

SEQ ID NO: 269668 - RNA, 22 nt, Human
uugcuuuucccugucucugauu

SEQ ID NO: 269669 - RNA, 22 nt, Human
auuaguguucuuaucuucuagg

SEQ ID NO: 269670 - RNA, 22 nt, Human
aaaagguaguugccaaauaagg

SEQ ID NO: 269671 - RNA, 22 nt, Human
aaaugacacucauucaguguca

SEQ ID NO: 269672 - RNA, 22 nt, Human
acugccuuagaacaaagcagga

SEQ ID NO: 269673 - RNA, 19 nt, Human
agugcagggagcacccuca

SEQ ID NO: 269674 - RNA, 22 nt, Human
accaggcagcugggggugaugu

SEQ ID NO: 269675 - RNA, 18 nt, Human
gaguccaggcucuucacc

SEQ ID NO: 269676 - RNA, 22 nt, Human
caggugaguuuuccuccuuggu

SEQ ID NO: 269677 - RNA, 21 nt, Human
uuucuguccuuuccaucagcu

SEQ ID NO: 269678 - RNA, 22 nt, Human
cuucaggauuuaggaagaugaa

SEQ ID NO: 269679 - RNA, 19 nt, Human
caggacagacuucaaagcc

SEQ ID NO: 269680 - RNA, 22 nt, Human
auagaacagaaacagaugcaca

SEQ ID NO: 269681 - RNA, 23 nt, Human
agaaaaacaggauuguguuccua

SEQ ID NO: 269682 - RNA, 22 nt, Human
uaauuauaacaugcuuucuggc

SEQ ID NO: 269683 - RNA, 22 nt, Human
gcuagagaccagaggccuugaa

SEQ ID NO: 269684 - RNA, 22 nt, Human
cacuguacugugaauaaggagg

SEQ ID NO: 269685 - RNA, 22 nt, Human
cugcggugggcugggcuguccc

SEQ ID NO: 269686 - RNA, 22 nt, Human
aaguuuuauuggcuauagcacu

SEQ ID NO: 269687 - RNA, 22 nt, Human
caggcacuggccagucagcaca

SEQ ID NO: 269688 - RNA, 22 nt, Human
acaguauaccauugugacuuug

SEQ ID NO: 269689 - RNA, 22 nt, Human
gaugaauugaaaucauugggca

SEQ ID NO: 269690 - RNA, 22 nt, Human
ucccacccccuccaaggaggaa

SEQ ID NO: 269691 - RNA, 22 nt, Human
gcauguguugguuuaugcaugu

SEQ ID NO: 269692 - RNA, 22 nt, Human
augcaacaggguugggaggcgg

SEQ ID NO: 269693 - RNA, 22 nt, Human
uggcucugcgucuguucguggg

SEQ ID NO: 269694 - RNA, 22 nt, Human
aaaugccucuggguuauucuag

SEQ ID NO: 269695 - RNA, 22 nt, Human
gaguaguugcugcagagaauac

SEQ ID NO: 269696 - RNA, 22 nt, Human
aggcaaauuauuguaugcaguu

SEQ ID NO: 269697 - RNA, 22 nt, Human
auagcaaagaugucaauucccc

SEQ ID NO: 269698 - RNA, 22 nt, Human
ucuguaucacccguucccagaa

SEQ ID NO: 269699 - RNA, 22 nt, Human
ucuggaggccauagggaaggau

SEQ ID NO: 269700 - RNA, 22 nt, Human
uugcauuccaguccccacugug

SEQ ID NO: 269701 - RNA, 22 nt, Human
cuuguccccagcagguugguuu

SEQ ID NO: 269702 - RNA, 22 nt, Human
uuccugagggacuuuugagauu

SEQ ID NO: 269703 - RNA, 22 nt, Human
uuugcaaagugcuugcagagua

SEQ ID NO: 269704 - RNA, 22 nt, Human
uucagagcagauauugaagggu

SEQ ID NO: 269705 - RNA, 22 nt, Human
uugaggaguggcgcuggacuua

SEQ ID NO: 269706 - RNA, 21 nt, Human
agaugaggauacugaggccua

SEQ ID NO: 269707 - RNA, 22 nt, Human
ucagcagguggugggcagguga

SEQ ID NO: 269708 - RNA, 22 nt, Human
ggacugggcaugggugcucugc

SEQ ID NO: 269709 - RNA, 19 nt, Human
gcgaggaagucacuguggu

SEQ ID NO: 269710 - RNA, 22 nt, Human
acauucuuucaccuugugucca

SEQ ID NO: 269711 - RNA, 22 nt, Human
agaaggaaggcugagugcugau

SEQ ID NO: 269712 - RNA, 22 nt, Human
agagcccugccaauggaugagg

SEQ ID NO: 269713 - RNA, 22 nt, Human
agccucccuaugcaccuucagg

SEQ ID NO: 269714 - RNA, 22 nt, Human
ggcugccugaggcugaggcccg

SEQ ID NO: 269715 - RNA, 22 nt, Human
aaugaguuauuagguguaagug

SEQ ID NO: 269716 - RNA, 19 nt, Human
cagggauggguagggacuc

SEQ ID NO: 269717 - RNA, 20 nt, Human
ucuuauugucuugaggaguu

SEQ ID NO: 269718 - RNA, 22 nt, Human
gucugaggucauuagcucucuu

SEQ ID NO: 269719 - RNA, 18 nt, Human
cagucuaauucccuuccc

SEQ ID NO: 269720 - RNA, 22 nt, Human
uucugcuuuuagcuaaacuaua

SEQ ID NO: 269721 - RNA, 22 nt, Human
agcugucuuucugccuccugau

SEQ ID NO: 269722 - RNA, 22 nt, Human
agcaggugucggcgagggucuu

SEQ ID NO: 269723 - RNA, 22 nt, Human
uucagugugcuucaggacguua

SEQ ID NO: 269724 - RNA, 22 nt, Human
ugucuucaugccugaaagaaga

SEQ ID NO: 269725 - RNA, 20 nt, Human
ccccuucaucuacagccuga

SEQ ID NO: 269726 - RNA, 22 nt, Human
uuuuaucauuacccagcugaaa

SEQ ID NO: 269727 - RNA, 22 nt, Human
uccuuuaucugcucagaaagua

SEQ ID NO: 269728 - RNA, 22 nt, Human
auauaguuggguuucauucuac

SEQ ID NO: 269729 - RNA, 22 nt, Human
aucagcaaggcaaucacugcag

SEQ ID NO: 269730 - RNA, 22 nt, Human
gcagagcugcagcgaggccugg

SEQ ID NO: 269731 - RNA, 22 nt, Human
ucagcugugauccaucuaucua

SEQ ID NO: 269732 - RNA, 21 nt, Human
auucucugugaugggauuagg

SEQ ID NO: 269733 - RNA, 22 nt, Human
cugcuguccaaccugcacucgc

SEQ ID NO: 269734 - RNA, 19 nt, Human
gauuucuacaaaugucaga

SEQ ID NO: 269735 - RNA, 17 nt, Human
ggcucucuuccagacuu

SEQ ID NO: 269736 - RNA, 20 nt, Human
guauuaggagguaaauguaa

SEQ ID NO: 269737 - RNA, 21 nt, Human
uguuuuccaccuugaggcaag

SEQ ID NO: 269738 - RNA, 22 nt, Human
agcugagauuaugcucuucuca

SEQ ID NO: 269739 - RNA, 22 nt, Human
cugcagggcccgccugagcccu

SEQ ID NO: 269740 - RNA, 22 nt, Human
augaagcaacagcccuccuauu

SEQ ID NO: 269741 - RNA, 18 nt, Human
ccuucagcucugccagua

SEQ ID NO: 269742 - RNA, 22 nt, Human
ggaucuguuuugccucugaggg

SEQ ID NO: 269743 - RNA, 22 nt, Human
acuccagggcuccaccccagau

SEQ ID NO: 269744 - RNA, 22 nt, Human
ugagcccaggaguuggaggcug

SEQ ID NO: 269745 - RNA, 22 nt, Human
auaguguuacccuucuuaaagu

SEQ ID NO: 269746 - RNA, 22 nt, Human
ugucagcagaucuccugcagcc

SEQ ID NO: 269747 - RNA, 22 nt, Human
acuuuagauauuccucuguaca

SEQ ID NO: 269748 - RNA, 23 nt, Human
ggcuccuggauucaaauccugcc

SEQ ID NO: 269749 - RNA, 22 nt, Human
auuuucuucucucccuggcugc

SEQ ID NO: 269750 - RNA, 22 nt, Human
ucuuauacagaagauguuuaau

SEQ ID NO: 269751 - RNA, 22 nt, Human
cuccuggcuuucccagaccagg

SEQ ID NO: 269752 - RNA, 22 nt, Human
ugcauuucagaagaaaauucgg

SEQ ID NO: 269753 - RNA, 22 nt, Human
auaucacaaacaagucuguacu

SEQ ID NO: 269754 - RNA, 20 nt, Human
cugggcucgguggcccuggc

SEQ ID NO: 269755 - RNA, 18 nt, Human
ucccugggauauaauuac

SEQ ID NO: 269756 - RNA, 19 nt, Human
uccuggggauguggucacc

SEQ ID NO: 269757 - RNA, 22 nt, Human
auguuauuuuggaaaauacaaa

SEQ ID NO: 269758 - RNA, 22 nt, Human
uagggauggaugaugccuggca

SEQ ID NO: 269759 - RNA, 22 nt, Human
agcccagagccucuccuaaagg

SEQ ID NO: 269760 - RNA, 22 nt, Human
agagcuuuuacuuacauucuau

SEQ ID NO: 269761 - RNA, 22 nt, Human
agagcccuaaacccugccuugg

SEQ ID NO: 269762 - RNA, 22 nt, Human
gugggcagagcaagggaacuca

SEQ ID NO: 269763 - RNA, 22 nt, Human
guggucagaauggagcccagga

SEQ ID NO: 269764 - RNA, 22 nt, Human
gcuucugaggaaggcucagccu

SEQ ID NO: 269765 - RNA, 18 nt, Human
uggcagguagacucaggu

SEQ ID NO: 269766 - RNA, 22 nt, Human
cagggaugagaaagcucucuaa

SEQ ID NO: 269767 - RNA, 22 nt, Human
ugugguggcuauucuggucuca

SEQ ID NO: 269768 - RNA, 22 nt, Human
uuaaaaccaucagcuguaagau

SEQ ID NO: 269769 - RNA, 22 nt, Human
aagauaacaggaggaguuugua

SEQ ID NO: 269770 - RNA, 22 nt, Human
accaggcaaaaccacaggagca

SEQ ID NO: 269771 - RNA, 22 nt, Human
gccugcucuccggaucccugau

SEQ ID NO: 269772 - RNA, 22 nt, Human
guucuuaagaccacaauaaaaa

SEQ ID NO: 269773 - RNA, 20 nt, Human
uuccuguauacaaagaguuc

SEQ ID NO: 269774 - RNA, 22 nt, Human
uguuacagcagaauugaaagag

SEQ ID NO: 269775 - RNA, 22 nt, Human
uuagguuuaagugacuggaauc

SEQ ID NO: 269776 - RNA, 22 nt, Human
cagggccucauccucagagauu

SEQ ID NO: 269777 - RNA, 22 nt, Human
cugagaauggacagcagggcag

SEQ ID NO: 269778 - RNA, 21 nt, Human
ugucagcucccuguccugugu

SEQ ID NO: 269779 - RNA, 22 nt, Human
gcugcucucauagauggcuuca

SEQ ID NO: 269780 - RNA, 22 nt, Human
uaaguucauaagcuuauucuua

SEQ ID NO: 269781 - RNA, 22 nt, Human
aacacaggccagccugugcagu

SEQ ID NO: 269782 - RNA, 22 nt, Human
agcugaggacgugaagggcggc

SEQ ID NO: 269783 - RNA, 22 nt, Human
cagcaccauuugcagccucuuu

SEQ ID NO: 269784 - RNA, 22 nt, Human
gcuuuauuuugugagggauuac

SEQ ID NO: 269785 - RNA, 18 nt, Human
cccucuccugcuaguggg

SEQ ID NO: 269786 - RNA, 22 nt, Human
augucuguacgaguuacaaugg

SEQ ID NO: 269787 - RNA, 22 nt, Human
aaagcugcccagcugccuguuu

SEQ ID NO: 269788 - RNA, 22 nt, Human
gcagcaggaauaggauaagcaa

SEQ ID NO: 269789 - RNA, 22 nt, Human
uuacauucaaggaacucauucu

SEQ ID NO: 269790 - RNA, 22 nt, Human
cugagggccugaggaccuagau

SEQ ID NO: 269791 - RNA, 22 nt, Human
ugccuggauucgguuguuguca

SEQ ID NO: 269792 - RNA, 16 nt, Human
gcuguaaaaggauuca

SEQ ID NO: 269793 - RNA, 22 nt, Human
ucagaaggaugugcagguggca

SEQ ID NO: 269794 - RNA, 22 nt, Human
gcagacaggggcuuaggaaagg

SEQ ID NO: 269795 - RNA, 22 nt, Human
cacugcccaggaccugccaccc

SEQ ID NO: 269796 - RNA, 20 nt, Human
agcaguccaaaagggcagac

SEQ ID NO: 269797 - RNA, 22 nt, Human
acacaucuccagccagcaggag

SEQ ID NO: 269798 - RNA, 22 nt, Human
ucucugcaacuacaucuuaggg

SEQ ID NO: 269799 - RNA, 22 nt, Human
ggugggaggcaggcugcuccca

SEQ ID NO: 269800 - RNA, 22 nt, Human
cuagauuugcaugccuacacca

SEQ ID NO: 269801 - RNA, 22 nt, Human
cagcugagaaggucugaucagg

SEQ ID NO: 269802 - RNA, 22 nt, Human
cacaugugggaaauggugcuua

SEQ ID NO: 269803 - RNA, 20 nt, Human
gggaggccagccucagagaa

SEQ ID NO: 269804 - RNA, 22 nt, Human
aaaagucucucugaguaaaagu

SEQ ID NO: 269805 - RNA, 22 nt, Human
uaacuguaguuauaaagcuauc

SEQ ID NO: 269806 - RNA, 22 nt, Human
caggagaagguuuggagugcag

SEQ ID NO: 269807 - RNA, 22 nt, Human
uauuucuaagagauaucuguac

SEQ ID NO: 269808 - RNA, 22 nt, Human
auaaggcaucucucaguuagca

SEQ ID NO: 269809 - RNA, 22 nt, Human
ccuugguuuccaggaugaggcu

SEQ ID NO: 269810 - RNA, 22 nt, Human
aaggcuugauauuuacagucuu

SEQ ID NO: 269811 - RNA, 22 nt, Human
uggcuggaugugagaucaagag

SEQ ID NO: 269812 - RNA, 22 nt, Human
gagggcuguggggcaugaccag

SEQ ID NO: 269813 - RNA, 23 nt, Human
uccaaauaccugucaccuugucu

SEQ ID NO: 269814 - RNA, 22 nt, Human
cgccugcucucacuggacagcu

SEQ ID NO: 269815 - RNA, 22 nt, Human
ucuggccacuaauaggucucac

SEQ ID NO: 269816 - RNA, 22 nt, Human
ucauggcucuaaagacauagau

SEQ ID NO: 269817 - RNA, 18 nt, Human
guuaacaauuacuaacgc

SEQ ID NO: 269818 - RNA, 22 nt, Human
aagccaguccucuacugggcac

SEQ ID NO: 269819 - RNA, 22 nt, Human
auuccaaacuuaccccagagga

SEQ ID NO: 269820 - RNA, 22 nt, Human
ucaagaugaaagauguagccau

SEQ ID NO: 269821 - RNA, 20 nt, Human
uuggaaucaccuggagaggu

SEQ ID NO: 269822 - RNA, 22 nt, Human
ugucuccacaggugucagcuca

SEQ ID NO: 269823 - RNA, 22 nt, Human
uuugcugaauaaaugugugacu

SEQ ID NO: 269824 - RNA, 19 nt, Human
aucugagauuauaaacaga

SEQ ID NO: 269825 - RNA, 22 nt, Human
caugcuguccugccagggaugg

SEQ ID NO: 269826 - RNA, 22 nt, Human
acacuugagguuuuuaggugcg

SEQ ID NO: 269827 - RNA, 22 nt, Human
ccagggaaggcucugccugcuu

SEQ ID NO: 269828 - RNA, 22 nt, Human
uuucaaagaguuguaaauuacu

SEQ ID NO: 269829 - RNA, 22 nt, Human
ccugucucuuucaaucugagag

SEQ ID NO: 269830 - RNA, 22 nt, Human
uggagcagggcaucacugugcg

SEQ ID NO: 269831 - RNA, 22 nt, Human
cuggagcucuccagagccccgu

SEQ ID NO: 269832 - RNA, 22 nt, Human
guccaggucuggacccugagcc

SEQ ID NO: 269833 - RNA, 22 nt, Human
uggcagggaguucguucacaac

SEQ ID NO: 269834 - RNA, 22 nt, Human
gacuuucugcuauacuuucugu

SEQ ID NO: 269835 - RNA, 22 nt, Human
ugggcucuggguggccugagca

SEQ ID NO: 269836 - RNA, 22 nt, Human
ccaggcucugugugggcuagag

SEQ ID NO: 269837 - RNA, 22 nt, Human
guauacauagaugaugaacaag

SEQ ID NO: 269838 - RNA, 22 nt, Human
ccuccagcgcgauccacuccgg

SEQ ID NO: 269839 - RNA, 22 nt, Human
uacaacauuguguugcuucaua

SEQ ID NO: 269840 - RNA, 22 nt, Human
auuacaguggguaaacagaauu

SEQ ID NO: 269841 - RNA, 22 nt, Human
uugcugaucugugaaucagcca

SEQ ID NO: 269842 - RNA, 23 nt, Human
uugcuuucaucaugagaugcucc

SEQ ID NO: 269843 - RNA, 22 nt, Human
aucauuaguuguggaauucuug

SEQ ID NO: 269844 - RNA, 22 nt, Human
gaggccagaugucaugucuuau

SEQ ID NO: 269845 - RNA, 22 nt, Human
agcagguggccacgaggaggag

SEQ ID NO: 269846 - RNA, 22 nt, Human
acccagagccagggucaggagc

SEQ ID NO: 269847 - RNA, 22 nt, Human
cugggcucaccuguggcuggca

SEQ ID NO: 269848 - RNA, 22 nt, Human
caaagcccuggaaagaugaaga

SEQ ID NO: 269849 - RNA, 22 nt, Human
ucagcuuugccaccagcuguaa

SEQ ID NO: 269850 - RNA, 22 nt, Human
ggcucuuguucguaccauggcu

SEQ ID NO: 269851 - RNA, 22 nt, Human
gagcagugaugggaggacguca

SEQ ID NO: 269852 - RNA, 22 nt, Human
agacugaaguaagaaugcagcu

SEQ ID NO: 269853 - RNA, 22 nt, Human
guggcagguuccguagacagca

SEQ ID NO: 269854 - RNA, 22 nt, Human
cagugcccuuccaggacugcag

SEQ ID NO: 269855 - RNA, 22 nt, Human
caccucaugucaucaguaaaau

SEQ ID NO: 269856 - RNA, 22 nt, Human
acagauggaauguguuauggga

SEQ ID NO: 269857 - RNA, 22 nt, Human
uugaggagguaguacagaguau

SEQ ID NO: 269858 - RNA, 22 nt, Human
uaguuuugaggauuauauguga

SEQ ID NO: 269859 - RNA, 22 nt, Human
uacacaccugccugcagacucu

SEQ ID NO: 269860 - RNA, 22 nt, Human
uccaggaggguuuucugccuuc

SEQ ID NO: 269861 - RNA, 22 nt, Human
cccuuccucccaggcuucugug

SEQ ID NO: 269862 - RNA, 22 nt, Human
aagaugugcugucuugccacuc

SEQ ID NO: 269863 - RNA, 22 nt, Human
aguucccaaauuacaggccaca

SEQ ID NO: 269864 - RNA, 22 nt, Human
aagucacugugaaaggugaagc

SEQ ID NO: 269865 - RNA, 22 nt, Human
agcugccuguccuaggccauca

SEQ ID NO: 269866 - RNA, 22 nt, Human
agggcugacagugaggagucaa

SEQ ID NO: 269867 - RNA, 22 nt, Human
gcugccaucuccugaggacagg

SEQ ID NO: 269868 - RNA, 22 nt, Human
ccaggaccacacgacaggagag

SEQ ID NO: 269869 - RNA, 22 nt, Human
ggguuccagucugaaacuacag

SEQ ID NO: 269870 - RNA, 20 nt, Human
uuucucagaacaguggcugc

SEQ ID NO: 269871 - RNA, 22 nt, Human
uccaggcacuauauauacuuuu

SEQ ID NO: 269872 - RNA, 22 nt, Human
gaaacauauuaauccagugaaa

SEQ ID NO: 269873 - RNA, 22 nt, Human
uccaugcagaguccaggccuca

SEQ ID NO: 269874 - RNA, 22 nt, Human
uuucucaaauugcaugaguagc

SEQ ID NO: 269875 - RNA, 21 nt, Human
gucuuucuaccucuauguggc

SEQ ID NO: 269876 - RNA, 22 nt, Human
ccaugugucgggccugcagugg

SEQ ID NO: 269877 - RNA, 22 nt, Human
uauaauccauucauugauuucu

SEQ ID NO: 269878 - RNA, 22 nt, Human
uuugacuccacuccuaacuccu

SEQ ID NO: 269879 - RNA, 22 nt, Human
aaccuuugaggggagcucuuuc

SEQ ID NO: 269880 - RNA, 22 nt, Human
ccauuacuuuccaauauaucag

SEQ ID NO: 269881 - RNA, 22 nt, Human
ugauagagcacuaaguagugua

SEQ ID NO: 269882 - RNA, 22 nt, Human
uuaggaaaauggaguccuuuua

SEQ ID NO: 269883 - RNA, 22 nt, Human
caaauucagaaaauugguagag

SEQ ID NO: 269884 - RNA, 22 nt, Human
auuucuagccucugaaguagga

SEQ ID NO: 269885 - RNA, 22 nt, Human
acccagagcugggcuuggcaaa

SEQ ID NO: 269886 - RNA, 22 nt, Human
aauuauacaauugucaaguucu

SEQ ID NO: 269887 - RNA, 22 nt, Human
cagggagaucuuggcuccuggu

SEQ ID NO: 269888 - RNA, 22 nt, Human
uaauacuugucauaaaggcauu

SEQ ID NO: 269889 - RNA, 22 nt, Human
ccaggugugcucugcaguggau

SEQ ID NO: 269890 - RNA, 23 nt, Human
ucuccagugucucuucauugagu

SEQ ID NO: 269891 - RNA, 22 nt, Human
gaguguguucuuuaugcuguga

SEQ ID NO: 269892 - RNA, 22 nt, Human
gaggcugggaaguccaagauca

SEQ ID NO: 269893 - RNA, 22 nt, Human
uaguaacucuacacacgacacu

SEQ ID NO: 269894 - RNA, 22 nt, Human
auuaacaugaguuggagauagg

SEQ ID NO: 269895 - RNA, 22 nt, Human
gcaggcuaugucagggccgcuc

SEQ ID NO: 269896 - RNA, 22 nt, Human
gcccugcucauuucacguguuu

SEQ ID NO: 269897 - RNA, 23 nt, Human
cuucagcagaaacauaaauucuc

SEQ ID NO: 269898 - RNA, 22 nt, Human
auuaaauuagcaaacugugaaa

SEQ ID NO: 269899 - RNA, 22 nt, Human
ucccagaggcaguugguaacuu

SEQ ID NO: 269900 - RNA, 22 nt, Human
gaggcuuuuggcuaauaacugu

SEQ ID NO: 269901 - RNA, 22 nt, Human
uggcacagccacugaaucggga

SEQ ID NO: 269902 - RNA, 22 nt, Human
acauaagugcacaauaaauauu

SEQ ID NO: 269903 - RNA, 22 nt, Human
auuagggaaggauuuggccuga

SEQ ID NO: 269904 - RNA, 22 nt, Human
uccacacacauuucuaugugca

SEQ ID NO: 269905 - RNA, 22 nt, Human
uccugaggaugguugaagugca

SEQ ID NO: 269906 - RNA, 22 nt, Human
auacaucuugucagauucaugu

SEQ ID NO: 269907 - RNA, 22 nt, Human
gugcaggagcaggagccauguc

SEQ ID NO: 269908 - RNA, 22 nt, Human
uccaggagggggagccgugccg

SEQ ID NO: 269909 - RNA, 22 nt, Human
ccugugacccuuccagucuacu

SEQ ID NO: 269910 - RNA, 22 nt, Human
agacagaaauaggagaaaccag

SEQ ID NO: 269911 - RNA, 22 nt, Human
cagcuuggauuuuggcacgugu

SEQ ID NO: 269912 - RNA, 22 nt, Human
aaaugucuuugaguauuucugc

SEQ ID NO: 269913 - RNA, 22 nt, Human
uccuccagcccucuaggaaaau

SEQ ID NO: 269914 - RNA, 22 nt, Human
cacaggaaucgucacuuagcgc

SEQ ID NO: 269915 - RNA, 20 nt, Human
agggugugggccuuagccau

SEQ ID NO: 269916 - RNA, 22 nt, Human
ggcccagauuagaagcugaaug

SEQ ID NO: 269917 - RNA, 22 nt, Human
uucuaaguguugacaaagucua

SEQ ID NO: 269918 - RNA, 22 nt, Human
gccacugucaucuugugaagca

SEQ ID NO: 269919 - RNA, 22 nt, Human
ccuuggcuugugggcugcagcc

SEQ ID NO: 269920 - RNA, 22 nt, Human
cccaggcauuuucaacuuuagu

SEQ ID NO: 269921 - RNA, 22 nt, Human
uucaacaugcuuuauuucuaaa

SEQ ID NO: 269922 - RNA, 22 nt, Human
auaaacuggguaucaagaggcc

SEQ ID NO: 269923 - RNA, 22 nt, Human
ucccaggugaugcugaggccac

SEQ ID NO: 269924 - RNA, 22 nt, Human
gcacagccacguaaugugguca

SEQ ID NO: 269925 - RNA, 22 nt, Human
gucuucuuguguugccugucuu

SEQ ID NO: 269926 - RNA, 22 nt, Human
cccaggcugggaacgauucuag

SEQ ID NO: 269927 - RNA, 22 nt, Human
cagggccucuccuccaggaacu

SEQ ID NO: 269928 - RNA, 22 nt, Human
acacacaauuaguuuuaugcuu

SEQ ID NO: 269929 - RNA, 22 nt, Human
gugguccuggcaaccaugguga

SEQ ID NO: 269930 - RNA, 22 nt, Human
gagcaguucuccuugguagggg

SEQ ID NO: 269931 - RNA, 22 nt, Human
uuuacugaauuugguauauucc

SEQ ID NO: 269932 - RNA, 22 nt, Human
gcuggagauaguaggauccaua

SEQ ID NO: 269933 - RNA, 22 nt, Human
agagagagggaaacugcuaaac

SEQ ID NO: 269934 - RNA, 22 nt, Human
acuuggcuucaagguuaagguc

SEQ ID NO: 269935 - RNA, 22 nt, Human
ugcuuggcuagcuuggcagcuc

SEQ ID NO: 269936 - RNA, 22 nt, Human
aggaagaauguuuacauaucaa

SEQ ID NO: 269937 - RNA, 22 nt, Human
gagcugaaguuuccauuuguac

SEQ ID NO: 269938 - RNA, 22 nt, Human
ugaguuaaaugagaacaugaaa

SEQ ID NO: 269939 - RNA, 22 nt, Human
ugaaucauggauaaauagcuua

SEQ ID NO: 269940 - RNA, 20 nt, Human
aauuauauaacuccaacauu

SEQ ID NO: 269941 - RNA, 19 nt, Human
ccugggagucagcugaagg

SEQ ID NO: 269942 - RNA, 22 nt, Human
cagcaucucuuuuugcauuccu

SEQ ID NO: 269943 - RNA, 22 nt, Human
uucacauuacaaggccauauuu

SEQ ID NO: 269944 - RNA, 22 nt, Human
guucaaauugauuuugguaaag

SEQ ID NO: 269945 - RNA, 22 nt, Human
uuucacauguggaaugccaggu

SEQ ID NO: 269946 - RNA, 22 nt, Human
augcaaaugcuagagaauguug

SEQ ID NO: 269947 - RNA, 22 nt, Human
ccacccagcagaggaggcaaga

SEQ ID NO: 269948 - RNA, 22 nt, Human
uguccuuuuucuuaggaaauau

SEQ ID NO: 269949 - RNA, 22 nt, Human
guauuuucaugauuucagacca

SEQ ID NO: 269950 - RNA, 22 nt, Human
uccugagacaucucugcugguc

SEQ ID NO: 269951 - RNA, 22 nt, Human
uguccucaaggagcuucagucu

SEQ ID NO: 269952 - RNA, 22 nt, Human
cugccuggugcggugcccaccc

SEQ ID NO: 269953 - RNA, 22 nt, Human
aaguacuguaucacuuacuccu

SEQ ID NO: 269954 - RNA, 22 nt, Human
gggacacagagaaacuggagaa

SEQ ID NO: 269955 - RNA, 22 nt, Human
gacccaggagagaggguugcau

SEQ ID NO: 269956 - RNA, 21 nt, Human
cacaccaggcaugucuugagc

SEQ ID NO: 269957 - RNA, 22 nt, Human
uuauuugugaaucauuuaucua

SEQ ID NO: 269958 - RNA, 22 nt, Human
cucuaaaggcuuguuauugcau

SEQ ID NO: 269959 - RNA, 22 nt, Human
gagaggggcgcgcagcucgcga

SEQ ID NO: 269960 - RNA, 22 nt, Human
ucucuggguuuuuguccuguac

SEQ ID NO: 269961 - RNA, 22 nt, Human
cuggcacucauaggccaguuca

SEQ ID NO: 269962 - RNA, 23 nt, Human
agucaagaugcaucugugaggaa

SEQ ID NO: 269963 - RNA, 22 nt, Human
cauguacacucauguaacuaua

SEQ ID NO: 269964 - RNA, 22 nt, Human
cucucuguucauugagucaaaa

SEQ ID NO: 269965 - RNA, 18 nt, Human
uccagggcuuccuccucu

SEQ ID NO: 269966 - RNA, 22 nt, Human
gcuguccacgggguugguagag

SEQ ID NO: 269967 - RNA, 22 nt, Human
gcuccugggcucuaccuugcua

SEQ ID NO: 269968 - RNA, 22 nt, Human
gucucacacagaguagauuuug

SEQ ID NO: 269969 - RNA, 22 nt, Human
cgcagagggcaggcagugcugg

SEQ ID NO: 269970 - RNA, 22 nt, Human
aggacucacauagcuucagaug

SEQ ID NO: 269971 - RNA, 22 nt, Human
uccagccccuuuuacucauuca

SEQ ID NO: 269972 - RNA, 22 nt, Human
ccaaggacuggacacacagguu

SEQ ID NO: 269973 - RNA, 22 nt, Human
cuuguauuaggaagaaugcuuu

SEQ ID NO: 269974 - RNA, 22 nt, Human
uagaaaguaaaucaguuuuauu

SEQ ID NO: 269975 - RNA, 21 nt, Human
aguguuaauggaaauuauauu

SEQ ID NO: 269976 - RNA, 20 nt, Human
gacacaggcaguccucagag

SEQ ID NO: 269977 - RNA, 22 nt, Human
ugaggccuggagggaggaguuu

SEQ ID NO: 269978 - RNA, 22 nt, Human
ugggccagagaguaagaaaggu

SEQ ID NO: 269979 - RNA, 22 nt, Human
uccuggccuuauccccaaacug

SEQ ID NO: 269980 - RNA, 22 nt, Human
uagaacaguauaggcuaaacau

SEQ ID NO: 269981 - RNA, 22 nt, Human
cugggcaaauugugccagcuau

SEQ ID NO: 269982 - RNA, 22 nt, Human
uagaaucuaguucauucauuug

SEQ ID NO: 269983 - RNA, 22 nt, Human
ccugggucuccuccugcuggcu

SEQ ID NO: 269984 - RNA, 21 nt, Human
gccugcugccuguggccgguc

SEQ ID NO: 269985 - RNA, 22 nt, Human
cagaaaauagaguuucucugag

SEQ ID NO: 269986 - RNA, 22 nt, Human
ucauuacaguguuuauaugucu

SEQ ID NO: 269987 - RNA, 22 nt, Human
uuuauuauccaguguugucaug

SEQ ID NO: 269988 - RNA, 19 nt, Human
aaugacugaguacauuguc

SEQ ID NO: 269989 - RNA, 22 nt, Human
gaggccuccucugagacaucug

SEQ ID NO: 269990 - RNA, 22 nt, Human
uaguuacaauuaugcauggaaa

SEQ ID NO: 269991 - RNA, 22 nt, Human
gagggaagaaagaauugaugcg

SEQ ID NO: 269992 - RNA, 22 nt, Human
aaucacagaguccagcagauga

SEQ ID NO: 269993 - RNA, 22 nt, Human
gcagccuuccguggaccuggac

SEQ ID NO: 269994 - RNA, 22 nt, Human
guccuucagcuuuaucugaaca

SEQ ID NO: 269995 - RNA, 22 nt, Human
uacuuuuuagcacagugugugc

SEQ ID NO: 269996 - RNA, 22 nt, Human
gaggcuccccaugaggccccag

SEQ ID NO: 269997 - RNA, 22 nt, Human
agcaguguucuaaucuggcuag

SEQ ID NO: 269998 - RNA, 22 nt, Human
cuucccugagcuuucucaggcu

SEQ ID NO: 269999 - RNA, 19 nt, Human
uguuucuuccuccaucuga

SEQ ID NO: 270000 - RNA, 22 nt, Human
cuggccuggcagggagggcaug

SEQ ID NO: 270001 - RNA, 22 nt, Human
ucagaaaagguagcugugacaa

SEQ ID NO: 270002 - RNA, 19 nt, Human
ugucagugauacaugcuuu

SEQ ID NO: 270003 - RNA, 19 nt, Human
acauauguggauauacaug

SEQ ID NO: 270004 - RNA, 22 nt, Human
agcucagcacugucagcacucc

SEQ ID NO: 270005 - RNA, 22 nt, Human
gagaaucucaggcacccagaag

SEQ ID NO: 270006 - RNA, 22 nt, Human
accauacauuaaaugacuuuca

SEQ ID NO: 270007 - RNA, 17 nt, Human
caucuuuaaaauccuga

SEQ ID NO: 270008 - RNA, 22 nt, Human
ugcagggccuuguugaugugcu

SEQ ID NO: 270009 - RNA, 22 nt, Human
gcucugggcugaaucauuuauc

SEQ ID NO: 270010 - RNA, 22 nt, Human
uguacagucugcagcuugcugu

SEQ ID NO: 270011 - RNA, 20 nt, Human
cagaguaauuauuacccuuu

SEQ ID NO: 270012 - RNA, 22 nt, Human
ucccugcccucagugcacccgg

SEQ ID NO: 270013 - RNA, 22 nt, Human
aaaaacacaaguggcuuggucu

SEQ ID NO: 270014 - RNA, 20 nt, Human
acacagacucagcuuggaug

SEQ ID NO: 270015 - RNA, 22 nt, Human
caggcaagauccagaggcugcu

SEQ ID NO: 270016 - RNA, 22 nt, Human
acagaaaaguuuacuuuugcuc

SEQ ID NO: 270017 - RNA, 22 nt, Human
acagggcugaggcuggcuucuu

SEQ ID NO: 270018 - RNA, 22 nt, Human
uagcaacaccaucuggugagaa

SEQ ID NO: 270019 - RNA, 22 nt, Human
ucuccuggcccugucgccaucu

SEQ ID NO: 270020 - RNA, 22 nt, Human
agucaaagaugaccgaguuccu

SEQ ID NO: 270021 - RNA, 22 nt, Human
ccagcaggguugguuucuucug

SEQ ID NO: 270022 - RNA, 22 nt, Human
uaacaguacauccuuuucucuu

SEQ ID NO: 270023 - RNA, 22 nt, Human
gcaaagaaaugucagugagagg

SEQ ID NO: 270024 - RNA, 22 nt, Human
cagagcuggacuuaaauauauu

SEQ ID NO: 270025 - RNA, 22 nt, Human
ccuuagaucaggcugucuaggg

SEQ ID NO: 270026 - RNA, 22 nt, Human
agguggcagaggacuccuccug

SEQ ID NO: 270027 - RNA, 22 nt, Human
acauguguuaaaauucucacca

SEQ ID NO: 270028 - RNA, 22 nt, Human
cugaggccucuguucaccagaa

SEQ ID NO: 270029 - RNA, 22 nt, Human
ucugggaugcaaacagaaucug

SEQ ID NO: 270030 - RNA, 21 nt, Human
uucuccuguuuugcaccacag

SEQ ID NO: 270031 - RNA, 22 nt, Human
aggaaugugccuagccucccug

SEQ ID NO: 270032 - RNA, 22 nt, Human
auacagguaggggacauacauc

SEQ ID NO: 270033 - RNA, 23 nt, Human
ucagagagcuguugagagcugcc

SEQ ID NO: 270034 - RNA, 22 nt, Human
cucaggcucauaucccaucagc

SEQ ID NO: 270035 - RNA, 22 nt, Human
cuucugugaccaccagcagccc

SEQ ID NO: 270036 - RNA, 22 nt, Human
cuggcccucagacucaugggca

SEQ ID NO: 270037 - RNA, 19 nt, Human
uuuuggcuggagugaucug

SEQ ID NO: 270038 - RNA, 22 nt, Human
uaaguucaaugaacucaguucu

SEQ ID NO: 270039 - RNA, 21 nt, Human
uagggcaggcauuggaagaga

SEQ ID NO: 270040 - RNA, 22 nt, Human
cggcugcuucugagccccggcg

SEQ ID NO: 270041 - RNA, 22 nt, Human
ucacaucugaaaaaauauugag

SEQ ID NO: 270042 - RNA, 22 nt, Human
aggcucauccccacaaagcaaa

SEQ ID NO: 270043 - RNA, 20 nt, Human
caccuucaaauuuccuggca

SEQ ID NO: 270044 - RNA, 22 nt, Human
agguucaaaugcaagagaugcu

SEQ ID NO: 270045 - RNA, 22 nt, Human
uuugagaaaaccagaaagaucu

SEQ ID NO: 270046 - RNA, 22 nt, Human
uaaggccaaguucauauacaac

SEQ ID NO: 270047 - RNA, 22 nt, Human
ggcagggagagcaugcugauaa

SEQ ID NO: 270048 - RNA, 22 nt, Human
uggaaagacauguccuucauua

SEQ ID NO: 270049 - RNA, 21 nt, Human
aguuuugagaguggguagugu

SEQ ID NO: 270050 - RNA, 22 nt, Human
ugcccucccuguacugucagga

SEQ ID NO: 270051 - RNA, 22 nt, Human
ggccagcuguaagcugcugaau

SEQ ID NO: 270052 - RNA, 22 nt, Human
aggaccuacugauaucuuagca

SEQ ID NO: 270053 - RNA, 22 nt, Human
uugaaugaagggaugaccgaag

SEQ ID NO: 270054 - RNA, 22 nt, Human
cugcaggguucggagaguuccc

SEQ ID NO: 270055 - RNA, 22 nt, Human
aauguguauaugaacauacagg

SEQ ID NO: 270056 - RNA, 22 nt, Human
ugacaagaaagcgucuucuuuu

SEQ ID NO: 270057 - RNA, 22 nt, Human
uccucuggaaccucacccuugc

SEQ ID NO: 270058 - RNA, 22 nt, Human
caacaauaugcugaguuuuuca

SEQ ID NO: 270059 - RNA, 20 nt, Human
aacagggggcugcagagggc

SEQ ID NO: 270060 - RNA, 22 nt, Human
guauuuuuagguaaggaaagua

SEQ ID NO: 270061 - RNA, 22 nt, Human
gucuuucucuggaacaguaaaa

SEQ ID NO: 270062 - RNA, 22 nt, Human
augucuguuuucauaucagaua

SEQ ID NO: 270063 - RNA, 22 nt, Human
aagauuuuuuuccacagacuca

SEQ ID NO: 270064 - RNA, 17 nt, Human
cucugcagugcauggcu

SEQ ID NO: 270065 - RNA, 22 nt, Human
uuaaaugaggcugauguagauu

SEQ ID NO: 270066 - RNA, 22 nt, Human
uccuccaggauaaaauguguug

SEQ ID NO: 270067 - RNA, 22 nt, Human
uaaggcuuauauacuuagacau

SEQ ID NO: 270068 - RNA, 20 nt, Human
aaagugcacagauacagcuc

SEQ ID NO: 270069 - RNA, 22 nt, Human
cugaauuacuuauuagugggga

SEQ ID NO: 270070 - RNA, 22 nt, Human
guguauaacuaucuaucuagua

SEQ ID NO: 270071 - RNA, 22 nt, Human
acaucccucagucagacuguaa

SEQ ID NO: 270072 - RNA, 22 nt, Human
gcagagcuccccaagacaccaa

SEQ ID NO: 270073 - RNA, 17 nt, Human
ggccauggugcaagguu

SEQ ID NO: 270074 - RNA, 22 nt, Human
agagcagcugacagccugccau

SEQ ID NO: 270075 - RNA, 22 nt, Human
aggccagaaaugucagggagug

SEQ ID NO: 270076 - RNA, 22 nt, Human
gucagagcccccagcggcgcgg

SEQ ID NO: 270077 - RNA, 22 nt, Human
ggcccagagcucugggggagcu

SEQ ID NO: 270078 - RNA, 22 nt, Human
cuguauuucuuggacaguugcu

SEQ ID NO: 270079 - RNA, 22 nt, Human
uauucagaguguagcaaauaga

SEQ ID NO: 270080 - RNA, 23 nt, Human
cacuuccccuguggcgagccugc

SEQ ID NO: 270081 - RNA, 22 nt, Human
gauacaaauucaugucugaauu

SEQ ID NO: 270082 - RNA, 22 nt, Human
cauucaaaggcauguccuauuu

SEQ ID NO: 270083 - RNA, 22 nt, Human
uaagaacaguguuucaucucua

SEQ ID NO: 270084 - RNA, 22 nt, Human
auucuggguuugcuguacaaag

SEQ ID NO: 270085 - RNA, 22 nt, Human
ucugggcagccgccccauagga

SEQ ID NO: 270086 - RNA, 23 nt, Human
gcagagcugcccuauugccuugg

SEQ ID NO: 270087 - RNA, 22 nt, Human
uagcccucaucugcucaaaagg

SEQ ID NO: 270088 - RNA, 22 nt, Human
acuucccauuucucugcuuuag

SEQ ID NO: 270089 - RNA, 22 nt, Human
cagaggaaaugggaaggagaua

SEQ ID NO: 270090 - RNA, 22 nt, Human
cacagaaucugugacuccaaga

SEQ ID NO: 270091 - RNA, 22 nt, Human
auucagacuaugaacacgucag

SEQ ID NO: 270092 - RNA, 22 nt, Human
gcuggcucccauugguccuucc

SEQ ID NO: 270093 - RNA, 22 nt, Human
ccagagccagagaggugccugc

SEQ ID NO: 270094 - RNA, 22 nt, Human
aauuagaguagagccuaagaau

SEQ ID NO: 270095 - RNA, 22 nt, Human
ggccucagagaaggcugugcgg

SEQ ID NO: 270096 - RNA, 22 nt, Human
uuacagaacugucuugaaauuu

SEQ ID NO: 270097 - RNA, 22 nt, Human
cugcaggauuucaugggcugac

SEQ ID NO: 270098 - RNA, 22 nt, Human
uccagggaccucccugagagcu

SEQ ID NO: 270099 - RNA, 22 nt, Human
ccaggcucugccaggcccuuga

SEQ ID NO: 270100 - RNA, 22 nt, Human
aaccaaagaaaacuguggugag

SEQ ID NO: 270101 - RNA, 22 nt, Human
aagaacugguuauguuaucuug

SEQ ID NO: 270102 - RNA, 22 nt, Human
uuccaggaggcacugacagagg

SEQ ID NO: 270103 - RNA, 22 nt, Human
agacucuaacucaugccauugc

SEQ ID NO: 270104 - RNA, 22 nt, Human
aaagccaguuugucucuuuaaa

SEQ ID NO: 270105 - RNA, 22 nt, Human
auuuccuauuucuuguccccua

SEQ ID NO: 270106 - RNA, 22 nt, Human
aucuguacaagauuuuaugcgu

SEQ ID NO: 270107 - RNA, 23 nt, Human
agucuucauuguauuuccagacc

SEQ ID NO: 270108 - RNA, 22 nt, Human
aauaacaggguugauuugcaau

SEQ ID NO: 270109 - RNA, 22 nt, Human
ugguacugagaauagcgucuac

SEQ ID NO: 270110 - RNA, 22 nt, Human
uuuacaguauaguaggacucau

SEQ ID NO: 270111 - RNA, 22 nt, Human
cagagugaaaacugagcucaaa

SEQ ID NO: 270112 - RNA, 22 nt, Human
ccacugaggccugggcccaggg

SEQ ID NO: 270113 - RNA, 22 nt, Human
aguguuacugguucaugaaucu

SEQ ID NO: 270114 - RNA, 22 nt, Human
ugggcagggucucuguuaucag

SEQ ID NO: 270115 - RNA, 22 nt, Human
guguuacucaagagauagcuuu

SEQ ID NO: 270116 - RNA, 22 nt, Human
uucagcaaugggauggugcagg

SEQ ID NO: 270117 - RNA, 22 nt, Human
caacauuugaguaaagaaaugg

SEQ ID NO: 270118 - RNA, 22 nt, Human
cauuugaaccuggauguucuua

SEQ ID NO: 270119 - RNA, 22 nt, Human
cagagccucucagccccuuggg

SEQ ID NO: 270120 - RNA, 22 nt, Human
aaggccauuauucugauauauu

SEQ ID NO: 270121 - RNA, 22 nt, Human
uaacaucuugcaguagcagaac

SEQ ID NO: 270122 - RNA, 22 nt, Human
auuagcaugccaagcuuuuaga

SEQ ID NO: 270123 - RNA, 22 nt, Human
cucugggucuauaaugcagcug

SEQ ID NO: 270124 - RNA, 22 nt, Human
uguggcuuuugcuagcuuugca

SEQ ID NO: 270125 - RNA, 22 nt, Human
gucuuucuaugcauagagcaga

SEQ ID NO: 270126 - RNA, 14 nt, Human
gcaggcagaucacu

SEQ ID NO: 270127 - RNA, 22 nt, Human
aucugggcucgaauccuagcuc

SEQ ID NO: 270128 - RNA, 22 nt, Human
aauguuacgaucaacaacacau

SEQ ID NO: 270129 - RNA, 22 nt, Human
uucuaauuaaaucuacgcuagg

SEQ ID NO: 270130 - RNA, 22 nt, Human
ucauuuugccugccauuugagu

SEQ ID NO: 270131 - RNA, 22 nt, Human
aggaggaaggcuucauuagguu

SEQ ID NO: 270132 - RNA, 22 nt, Human
aauuuuacaaaauaccuccgau

SEQ ID NO: 270133 - RNA, 22 nt, Human
ugcuggcugucccuaccuggcu

SEQ ID NO: 270134 - RNA, 21 nt, Human
ugccagggauuuacagagccu

SEQ ID NO: 270135 - RNA, 22 nt, Human
uaaugcuuaauuuucacaagcc

SEQ ID NO: 270136 - RNA, 22 nt, Human
cuccuggggccauggaaggaac

SEQ ID NO: 270137 - RNA, 22 nt, Human
gaugaguucuuucuauucuauu

SEQ ID NO: 270138 - RNA, 22 nt, Human
ucuaggaaagccuuucacaacu

SEQ ID NO: 270139 - RNA, 22 nt, Human
acaguguccuuguggucccugu

SEQ ID NO: 270140 - RNA, 22 nt, Human
gguggcacucaaccuuuuauua

SEQ ID NO: 270141 - RNA, 22 nt, Human
aacaugaugugaagcaugaacu

SEQ ID NO: 270142 - RNA, 22 nt, Human
ucuggcagagauauccauccca

SEQ ID NO: 270143 - RNA, 22 nt, Human
aaugauauuuauugaauagaug

SEQ ID NO: 270144 - RNA, 22 nt, Human
uucucagauauuuacugagcau

SEQ ID NO: 270145 - RNA, 22 nt, Human
ccagaggcuggcaagggcuccu

SEQ ID NO: 270146 - RNA, 22 nt, Human
agaagccucauccucucuagug

SEQ ID NO: 270147 - RNA, 21 nt, Human
aagagcucuuuuguuaugguc

SEQ ID NO: 270148 - RNA, 20 nt, Human
uaaaugcaugaauguaaggc

SEQ ID NO: 270149 - RNA, 22 nt, Human
acccucaggcagaauguauucu

SEQ ID NO: 270150 - RNA, 22 nt, Human
gagcccagggcaggcaaggcag

SEQ ID NO: 270151 - RNA, 22 nt, Human
ccaggugucugucucuuuuuca

SEQ ID NO: 270152 - RNA, 22 nt, Human
aauagaucugugugcacauuug

SEQ ID NO: 270153 - RNA, 22 nt, Human
gacugucucugugaaugguagg

SEQ ID NO: 270154 - RNA, 20 nt, Human
uaaaggcugugagguggccc

SEQ ID NO: 270155 - RNA, 22 nt, Human
agcuucugcaucuuuucuuccc

SEQ ID NO: 270156 - RNA, 22 nt, Human
cagcuuuccccgugccucagcc

SEQ ID NO: 270157 - RNA, 22 nt, Human
cugaagaggacgcagcagcaag

SEQ ID NO: 270158 - RNA, 22 nt, Human
auugauucuaccagcuacuuug

SEQ ID NO: 270159 - RNA, 22 nt, Human
agaggccagggacacugcucaa

SEQ ID NO: 270160 - RNA, 22 nt, Human
cagcuucucagaaagcugaggu

SEQ ID NO: 270161 - RNA, 22 nt, Human
agcccugcgugccaggggacug

SEQ ID NO: 270162 - RNA, 22 nt, Human
uaucacugaccuguaucaguug

SEQ ID NO: 270163 - RNA, 22 nt, Human
aaugcacaugccacauguggua

SEQ ID NO: 270164 - RNA, 22 nt, Human
ugacaguuaagguauacauuca

SEQ ID NO: 270165 - RNA, 22 nt, Human
ugggcuccaauuuguccuuuca

SEQ ID NO: 270166 - RNA, 21 nt, Human
agcagacagaugcacgcacac

SEQ ID NO: 270167 - RNA, 20 nt, Human
ucagaacaguagaggagcua

SEQ ID NO: 270168 - RNA, 22 nt, Human
ugcagggauuguuggcauccau

SEQ ID NO: 270169 - RNA, 22 nt, Human
cacgugcaggucuuaggagaca

SEQ ID NO: 270170 - RNA, 22 nt, Human
cacuugaaauauuaggggugau

SEQ ID NO: 270171 - RNA, 22 nt, Human
gccagagccacuuuugggugau

SEQ ID NO: 270172 - RNA, 22 nt, Human
ugucagagcaaggccaggccag

SEQ ID NO: 270173 - RNA, 22 nt, Human
guggcuucuucuugggagcugc

SEQ ID NO: 270174 - RNA, 22 nt, Human
aagcuguugcccugcucuuucu

SEQ ID NO: 270175 - RNA, 22 nt, Human
uacuuuaucagcgucaaaggua

SEQ ID NO: 270176 - RNA, 22 nt, Human
acacagcuuuguguugcuccac

SEQ ID NO: 270177 - RNA, 22 nt, Human
caggccagcuuccugacauccu

SEQ ID NO: 270178 - RNA, 22 nt, Human
ccugggccugaaaacauuucuc

SEQ ID NO: 270179 - RNA, 22 nt, Human
agccauguaugaggguuuccag

SEQ ID NO: 270180 - RNA, 22 nt, Human
ccuggcugcugucacugaccau

SEQ ID NO: 270181 - RNA, 22 nt, Human
gggcagugguccaggcuacagc

SEQ ID NO: 270182 - RNA, 23 nt, Human
gggaucuguaaguugaagacaaa

SEQ ID NO: 270183 - RNA, 22 nt, Human
ugcuggguagaaguauuagucu

SEQ ID NO: 270184 - RNA, 22 nt, Human
gugcaguggcagauccuagcuc

SEQ ID NO: 270185 - RNA, 22 nt, Human
ggguccagaguuuucccgcccu

SEQ ID NO: 270186 - RNA, 22 nt, Human
auaagaugagaucagcuuucug

SEQ ID NO: 270187 - RNA, 22 nt, Human
caauuucucuuuauaucucaca

SEQ ID NO: 270188 - RNA, 22 nt, Human
uuugcaaaauuauucccagcau

SEQ ID NO: 270189 - RNA, 22 nt, Human
caggcucacuguaaggucagcu

SEQ ID NO: 270190 - RNA, 22 nt, Human
acugggcuguuuuuugagugga

SEQ ID NO: 270191 - RNA, 22 nt, Human
auggagccauuccugaagacuu

SEQ ID NO: 270192 - RNA, 22 nt, Human
ccugaguagcuggaauuaaagg

SEQ ID NO: 270193 - RNA, 19 nt, Human
uccugcccaccagccaggg

SEQ ID NO: 270194 - RNA, 22 nt, Human
uguacaaagaguauagcuuuga

SEQ ID NO: 270195 - RNA, 21 nt, Human
uagaaagucaaagcuaucagc

SEQ ID NO: 270196 - RNA, 23 nt, Human
aagcaucuuuuccuagcuccauc

SEQ ID NO: 270197 - RNA, 22 nt, Human
aggcagugguguuugcuggugg

SEQ ID NO: 270198 - RNA, 22 nt, Human
aagcaucuuaaaaaguaucaga

SEQ ID NO: 270199 - RNA, 22 nt, Human
cuuggcauguucaucugcuugg

SEQ ID NO: 270200 - RNA, 19 nt, Human
guuucauuaagauaggaaa

SEQ ID NO: 270201 - RNA, 22 nt, Human
agcccagcuuucaccccucugg

SEQ ID NO: 270202 - RNA, 22 nt, Human
aggcuucuguuucuuaaaggug

SEQ ID NO: 270203 - RNA, 22 nt, Human
auguucuuggauguuguguaua

SEQ ID NO: 270204 - RNA, 22 nt, Human
ucagcagggccuccuugugcag

SEQ ID NO: 270205 - RNA, 22 nt, Human
gcuuagaagauugacccugguu

SEQ ID NO: 270206 - RNA, 19 nt, Human
cauuuucucauugugcccc

SEQ ID NO: 270207 - RNA, 22 nt, Human
cacagggcuuugauggcugagu

SEQ ID NO: 270208 - RNA, 20 nt, Human
auguccagugacuggaccau

SEQ ID NO: 270209 - RNA, 22 nt, Human
cugcccuggccacugugcccag

SEQ ID NO: 270210 - RNA, 22 nt, Human
ucuuuguaguuauaaacgacuu

SEQ ID NO: 270211 - RNA, 22 nt, Human
uucaguuugcuacaagcaacau

SEQ ID NO: 270212 - RNA, 22 nt, Human
aauuuggagcuuuguuucuaga

SEQ ID NO: 270213 - RNA, 22 nt, Human
agaaggccuaacuugggggcaa

SEQ ID NO: 270214 - RNA, 22 nt, Human
guccuggcccacuggcaggcug

SEQ ID NO: 270215 - RNA, 20 nt, Human
ccuuuagaaacucauaugua

SEQ ID NO: 270216 - RNA, 19 nt, Human
ugagucacucuuacaguca

SEQ ID NO: 270217 - RNA, 22 nt, Human
uugaagagaaucagaagguuga

SEQ ID NO: 270218 - RNA, 22 nt, Human
uagaaacucucaaucugggaug

SEQ ID NO: 270219 - RNA, 22 nt, Human
ucucugucugagccuggcagac

SEQ ID NO: 270220 - RNA, 22 nt, Human
auagggcauccuuuauugagau

SEQ ID NO: 270221 - RNA, 22 nt, Human
gaggcagcaauaaaaagaauuu

SEQ ID NO: 270222 - RNA, 22 nt, Human
cagcuguggcugccacugcucc

SEQ ID NO: 270223 - RNA, 22 nt, Human
gagcugcacuggggguggaaug

SEQ ID NO: 270224 - RNA, 22 nt, Human
ccucagagucuaguaaauaaua

SEQ ID NO: 270225 - RNA, 22 nt, Human
ugauuacauugguaauguuuau

SEQ ID NO: 270226 - RNA, 22 nt, Human
gagcucuuccuuucaggaggcc

SEQ ID NO: 270227 - RNA, 22 nt, Human
augauacauugcaaaauuuuaa

SEQ ID NO: 270228 - RNA, 22 nt, Human
ucuagggaacaugggucaagcu

SEQ ID NO: 270229 - RNA, 22 nt, Human
agaaauguggaucguuuuaaaa

SEQ ID NO: 270230 - RNA, 22 nt, Human
agcugagacacuugagagacua

SEQ ID NO: 270231 - RNA, 22 nt, Human
uaugcacacaggcuuaauucau

SEQ ID NO: 270232 - RNA, 22 nt, Human
guauaaaguauaagcuuguuuu

SEQ ID NO: 270233 - RNA, 22 nt, Human
caggaggccaacugugggacuu

SEQ ID NO: 270234 - RNA, 22 nt, Human
ugggaccugcuccuggaaugag

SEQ ID NO: 270235 - RNA, 22 nt, Human
ccagugugaaaggucauuuauc

SEQ ID NO: 270236 - RNA, 18 nt, Human
gggaggccccagcaggag

SEQ ID NO: 270237 - RNA, 22 nt, Human
ucucaaacuacaguauggcugu

SEQ ID NO: 270238 - RNA, 22 nt, Human
auuauuuuaugugcggccugau

SEQ ID NO: 270239 - RNA, 22 nt, Human
uaugagaaaauaaauaucuguu

SEQ ID NO: 270240 - RNA, 22 nt, Human
gccagguggucuggcuccagag

SEQ ID NO: 270241 - RNA, 22 nt, Human
uuuccucuccggggccuccagg

SEQ ID NO: 270242 - RNA, 22 nt, Human
ucaauucaguccaacaguaauu

SEQ ID NO: 270243 - RNA, 22 nt, Human
gaguuugauagagaggaaccgg

SEQ ID NO: 270244 - RNA, 22 nt, Human
ggcugggccgcggcuacccaga

SEQ ID NO: 270245 - RNA, 22 nt, Human
cuggcuguggucacagguaacu

SEQ ID NO: 270246 - RNA, 22 nt, Human
aaggcaugauguaaucaaugau

SEQ ID NO: 270247 - RNA, 23 nt, Human
ucuggaauccucccccuugguuc

SEQ ID NO: 270248 - RNA, 22 nt, Human
aaaguuuucugccuucauuaga

SEQ ID NO: 270249 - RNA, 22 nt, Human
ugcaagagcccaccacacacuu

SEQ ID NO: 270250 - RNA, 22 nt, Human
gcacacguagaagaacuugacu

SEQ ID NO: 270251 - RNA, 22 nt, Human
auuagaagaggcugacgaaugu

SEQ ID NO: 270252 - RNA, 22 nt, Human
cuccuggaccagggcuauuggg

SEQ ID NO: 270253 - RNA, 22 nt, Human
uuacagguggagaaguaaggcu

SEQ ID NO: 270254 - RNA, 22 nt, Human
agggagccaggaacgcaggucg

SEQ ID NO: 270255 - RNA, 22 nt, Human
uuggaauuaaaaggagaacuuc

SEQ ID NO: 270256 - RNA, 22 nt, Human
ucucagagugacaaugagaauu

SEQ ID NO: 270257 - RNA, 19 nt, Human
ucccaggcaaaggcuucuc

SEQ ID NO: 270258 - RNA, 22 nt, Human
agagacugcgugucagcgcugg

SEQ ID NO: 270259 - RNA, 22 nt, Human
gagguguccucagccaacucug

SEQ ID NO: 270260 - RNA, 22 nt, Human
gaggggcagagguagagaacaa

SEQ ID NO: 270261 - RNA, 22 nt, Human
augaggcacguguuacuggccu

SEQ ID NO: 270262 - RNA, 22 nt, Human
caggcagcugcgacaagagagc

SEQ ID NO: 270263 - RNA, 22 nt, Human
agcagggccuggcacuccuggg

SEQ ID NO: 270264 - RNA, 22 nt, Human
ugagucuccagcgaaguaggau

SEQ ID NO: 270265 - RNA, 22 nt, Human
cagacaggguuuuggucuuugg

SEQ ID NO: 270266 - RNA, 22 nt, Human
aacaucuaguuccuauauaaua

SEQ ID NO: 270267 - RNA, 22 nt, Human
uaacugguuaagggugaaaucc

SEQ ID NO: 270268 - RNA, 22 nt, Human
agcagcauuuaaggauccaagu

SEQ ID NO: 270269 - RNA, 22 nt, Human
ugccucagagaccugacaguac

SEQ ID NO: 270270 - RNA, 22 nt, Human
ggcaucaggagcuucuucaggu

SEQ ID NO: 270271 - RNA, 16 nt, Human
aggaauguggcggaac

SEQ ID NO: 270272 - RNA, 22 nt, Human
gggcgcagccaauccuggcccu

SEQ ID NO: 270273 - RNA, 22 nt, Human
aggagaggcucuaacucugugu

SEQ ID NO: 270274 - RNA, 22 nt, Human
guacuacaguuucucauuaaau

SEQ ID NO: 270275 - RNA, 20 nt, Human
aggguggggacguucugacu

SEQ ID NO: 270276 - RNA, 22 nt, Human
agaugagaauuuuuagagugcu

SEQ ID NO: 270277 - RNA, 22 nt, Human
acaucugacaugaucuucagua

SEQ ID NO: 270278 - RNA, 22 nt, Human
uuucaacaccagagaccaugcg

SEQ ID NO: 270279 - RNA, 22 nt, Human
agaaaugaagagagucaagguu

SEQ ID NO: 270280 - RNA, 22 nt, Human
gaaaugcagauucugauucugu

SEQ ID NO: 270281 - RNA, 22 nt, Human
ggcaggcagaaaaauagaauau

SEQ ID NO: 270282 - RNA, 22 nt, Human
ggcucagguuaccagucccucc

SEQ ID NO: 270283 - RNA, 22 nt, Human
cgcaggugggcccuucauugau

SEQ ID NO: 270284 - RNA, 22 nt, Human
uucacaacugccauagccagug

SEQ ID NO: 270285 - RNA, 22 nt, Human
cacuggcauuagucacgaggca

SEQ ID NO: 270286 - RNA, 20 nt, Human
uaguccaguaggggggcuuu

SEQ ID NO: 270287 - RNA, 18 nt, Human
ucacagaauauugagugg

SEQ ID NO: 270288 - RNA, 22 nt, Human
uuuuaaaucuccaguugacccc

SEQ ID NO: 270289 - RNA, 23 nt, Human
acucaucuucugguauccacagu

SEQ ID NO: 270290 - RNA, 22 nt, Human
caaggcuacccuuucaccaaaa

SEQ ID NO: 270291 - RNA, 22 nt, Human
acaggagaaaucuggucaaaag

SEQ ID NO: 270292 - RNA, 22 nt, Human
cauuucacacauaaacuugggu

SEQ ID NO: 270293 - RNA, 22 nt, Human
cacaaaaguaggaggcaggcgg

SEQ ID NO: 270294 - RNA, 22 nt, Human
cauaacuagagugaaauguuga

SEQ ID NO: 270295 - RNA, 22 nt, Human
cuccugaggaaaagcuugguca

SEQ ID NO: 270296 - RNA, 22 nt, Human
ggucucuggccuuggagauuga

SEQ ID NO: 270297 - RNA, 22 nt, Human
ugccaggguccugagggccuug

SEQ ID NO: 270298 - RNA, 22 nt, Human
uugcagaacuuaaagacagagu

SEQ ID NO: 270299 - RNA, 22 nt, Human
cugagcagugcuuugcaguggg

SEQ ID NO: 270300 - RNA, 21 nt, Human
ccucuguaguuaaguuuccua

SEQ ID NO: 270301 - RNA, 22 nt, Human
aguuaaaugucaguagcuuaac

SEQ ID NO: 270302 - RNA, 22 nt, Human
caggaggaggguacaccaucag

SEQ ID NO: 270303 - RNA, 20 nt, Human
ccuuucuggagugcuguuca

SEQ ID NO: 270304 - RNA, 22 nt, Human
gcaugugucaucugccuuucgu

SEQ ID NO: 270305 - RNA, 22 nt, Human
ggcugcucuccaucccaggccu

SEQ ID NO: 270306 - RNA, 22 nt, Human
acagaaauauucguggugcuug

SEQ ID NO: 270307 - RNA, 22 nt, Human
cguguaaccccugaacucgcau

SEQ ID NO: 270308 - RNA, 22 nt, Human
ccugagggcguaauuaacagug

SEQ ID NO: 270309 - RNA, 22 nt, Human
agcuccuugaagggcucuggga

SEQ ID NO: 270310 - RNA, 22 nt, Human
acagcauucaauaaauaauaac

SEQ ID NO: 270311 - RNA, 22 nt, Human
aauauaaauuccugggcccagc

SEQ ID NO: 270312 - RNA, 22 nt, Human
uuucuacauuuguaaccagauu

SEQ ID NO: 270313 - RNA, 22 nt, Human
ucuguacaacaaagggaugaga

SEQ ID NO: 270314 - RNA, 22 nt, Human
gugacaggccacugcggcucug

SEQ ID NO: 270315 - RNA, 22 nt, Human
aauguccuaggcaugauuuugu

SEQ ID NO: 270316 - RNA, 22 nt, Human
cugugggaugggaccucagcug

SEQ ID NO: 270317 - RNA, 22 nt, Human
cugccuucuuucaaggguaagc

SEQ ID NO: 270318 - RNA, 23 nt, Human
cuggcucuguagguggcauccuu

SEQ ID NO: 270319 - RNA, 22 nt, Human
auuagguuagugugcaagagaa

SEQ ID NO: 270320 - RNA, 20 nt, Human
ugccaggcacggagugcaug

SEQ ID NO: 270321 - RNA, 22 nt, Human
uucuacaugagaaaauguauuu

SEQ ID NO: 270322 - RNA, 22 nt, Human
auccacagagaggaagaauagu

SEQ ID NO: 270323 - RNA, 22 nt, Human
cugcucuggcguacucggcauc

SEQ ID NO: 270324 - RNA, 21 nt, Human
ucuucccucaggauguccugc

SEQ ID NO: 270325 - RNA, 22 nt, Human
uacaauguugguaaaguaucau

SEQ ID NO: 270326 - RNA, 22 nt, Human
gacaagacaccucucuccaucc

SEQ ID NO: 270327 - RNA, 22 nt, Human
uaucacaucaauguuuuaaaau

SEQ ID NO: 270328 - RNA, 22 nt, Human
gcagcuccuucaaucucaccau

SEQ ID NO: 270329 - RNA, 22 nt, Human
uagggcucgggcacaggacagg

SEQ ID NO: 270330 - RNA, 22 nt, Human
uacagcuggacugguagcugug

SEQ ID NO: 270331 - RNA, 22 nt, Human
cugcaaaaguaauuggggcuuu

SEQ ID NO: 270332 - RNA, 22 nt, Human
cauggccucaaaggacugcaga

SEQ ID NO: 270333 - RNA, 22 nt, Human
ucuggcucauacaagccugcaa

SEQ ID NO: 270334 - RNA, 19 nt, Human
ggcucaagcauccagguag

SEQ ID NO: 270335 - RNA, 22 nt, Human
ucagcagacauuauuuucuggc

SEQ ID NO: 270336 - RNA, 21 nt, Human
auacacauacacauaaaugug

SEQ ID NO: 270337 - RNA, 22 nt, Human
ugagcccuggcucuuucacuua

SEQ ID NO: 270338 - RNA, 22 nt, Human
ccgggccucgggacaccgggua

SEQ ID NO: 270339 - RNA, 22 nt, Human
uugauuuauagaauguucaagc

SEQ ID NO: 270340 - RNA, 22 nt, Human
aggaagccacugaaugaaaguu

SEQ ID NO: 270341 - RNA, 22 nt, Human
cacccccagcagggaaaggagg

SEQ ID NO: 270342 - RNA, 22 nt, Human
aucuuuggaaagccaagcacag

SEQ ID NO: 270343 - RNA, 22 nt, Human
augaggcaugugaggagaaggg

SEQ ID NO: 270344 - RNA, 22 nt, Human
uggcuucuugacuucuuggcug

SEQ ID NO: 270345 - RNA, 22 nt, Human
ugcguacuguuuauacaugugu

SEQ ID NO: 270346 - RNA, 21 nt, Human
agaaacaugaucaaaggaacc

SEQ ID NO: 270347 - RNA, 22 nt, Human
agcuguuccaggccucauugcu

SEQ ID NO: 270348 - RNA, 20 nt, Human
ugggccuguggcagaagucu

SEQ ID NO: 270349 - RNA, 19 nt, Human
ugacaagauaauagccuug

SEQ ID NO: 270350 - RNA, 23 nt, Human
uguuuuucauucacaugggcugu

SEQ ID NO: 270351 - RNA, 20 nt, Human
uccuccaaccagcugcuaau

SEQ ID NO: 270352 - RNA, 22 nt, Human
uugucuuuggaaauuuaauguu

SEQ ID NO: 270353 - RNA, 22 nt, Human
auuaguguggacccuaauuuaa

SEQ ID NO: 270354 - RNA, 22 nt, Human
gcaggggcuacucugagcuucc

SEQ ID NO: 270355 - RNA, 22 nt, Human
ccuuggcugaggagggagcuga

SEQ ID NO: 270356 - RNA, 22 nt, Human
uuguuacuugcauguagacuaa

SEQ ID NO: 270357 - RNA, 22 nt, Human
acugccuguagcccugagaugu

SEQ ID NO: 270358 - RNA, 22 nt, Human
caggcccacgaggcacacagag

SEQ ID NO: 270359 - RNA, 22 nt, Human
aagucagaaauaucugccauca

SEQ ID NO: 270360 - RNA, 22 nt, Human
cccaggcuggcacugcugaagu

SEQ ID NO: 270361 - RNA, 22 nt, Human
guccugugcucagacauggggg

SEQ ID NO: 270362 - RNA, 22 nt, Human
cucagcaacccacacacggucu

SEQ ID NO: 270363 - RNA, 22 nt, Human
gacagacacaauugauccauga

SEQ ID NO: 270364 - RNA, 22 nt, Human
gccagcuguucagacauucuuu

SEQ ID NO: 270365 - RNA, 22 nt, Human
cucuccagguuagagcacuuau

SEQ ID NO: 270366 - RNA, 22 nt, Human
guuuacuggagaagaugaccug

SEQ ID NO: 270367 - RNA, 22 nt, Human
auucugggcgccuauggcugca

SEQ ID NO: 270368 - RNA, 22 nt, Human
aggaggugcguggugauccccu

SEQ ID NO: 270369 - RNA, 18 nt, Human
gaauaucuagcacauagu

SEQ ID NO: 270370 - RNA, 22 nt, Human
cgcaggcucgguucacagagca

SEQ ID NO: 270371 - RNA, 22 nt, Human
auucagugaccuaauuacuuac

SEQ ID NO: 270372 - RNA, 22 nt, Human
ugucuuuaguugcuuagauuug

SEQ ID NO: 270373 - RNA, 22 nt, Human
cugcugucuuuauuucacugcu

SEQ ID NO: 270374 - RNA, 22 nt, Human
auagaguccaaaguaugaauau

SEQ ID NO: 270375 - RNA, 22 nt, Human
aucaacaugaauuucucugaag

SEQ ID NO: 270376 - RNA, 22 nt, Human
acuccccagacugccaugcugg

SEQ ID NO: 270377 - RNA, 20 nt, Human
aagcuggcaggucauagcuu

SEQ ID NO: 270378 - RNA, 21 nt, Human
uggaacuggugaaaaccuccu

SEQ ID NO: 270379 - RNA, 22 nt, Human
aguuaaaucauuacugacagag

SEQ ID NO: 270380 - RNA, 22 nt, Human
caggcagcguccugcuuccugu

SEQ ID NO: 270381 - RNA, 23 nt, Human
acugggcugaaauuuuucauggc

SEQ ID NO: 270382 - RNA, 23 nt, Human
aguuaggucaaguuaggucaauu

SEQ ID NO: 270383 - RNA, 22 nt, Human
cagguucuuaaguaacagcaca

SEQ ID NO: 270384 - RNA, 22 nt, Human
caguucuuauuuggccaguguc

SEQ ID NO: 270385 - RNA, 22 nt, Human
acucaucagccucuaggaaaga

SEQ ID NO: 270386 - RNA, 22 nt, Human
ucugaccaggcucagccaaggc

SEQ ID NO: 270387 - RNA, 17 nt, Human
auuuacauugucaccga

SEQ ID NO: 270388 - RNA, 22 nt, Human
cccucagcuucucccugcagcu

SEQ ID NO: 270389 - RNA, 22 nt, Human
acagcaugagaguagcaaaagg

SEQ ID NO: 270390 - RNA, 20 nt, Human
gucuuuauguuuuaugaccu

SEQ ID NO: 270391 - RNA, 22 nt, Human
uagaagauaagacaagugcugc

SEQ ID NO: 270392 - RNA, 22 nt, Human
ucaggcagaugcagggauggau

SEQ ID NO: 270393 - RNA, 22 nt, Human
cugucuccuccacugcauggga

SEQ ID NO: 270394 - RNA, 22 nt, Human
uucaguguggaaugugaacugc

SEQ ID NO: 270395 - RNA, 22 nt, Human
uuacacagaaauuuuauugccu

SEQ ID NO: 270396 - RNA, 22 nt, Human
ugcuuccuugagcucuccaauc

SEQ ID NO: 270397 - RNA, 22 nt, Human
aaaggacuggauauuaaagagu

SEQ ID NO: 270398 - RNA, 22 nt, Human
guugggaagcagauggaugagc

SEQ ID NO: 270399 - RNA, 22 nt, Human
ucagcuuugggggucucaggag

SEQ ID NO: 270400 - RNA, 22 nt, Human
caucugucugcuguuagcugca

SEQ ID NO: 270401 - RNA, 22 nt, Human
acagcauuuaaagaaaaugaac

SEQ ID NO: 270402 - RNA, 22 nt, Human
uaaggcaaagugauuucuuaaa

SEQ ID NO: 270403 - RNA, 22 nt, Human
augcaaagcaccacacuaagau

SEQ ID NO: 270404 - RNA, 22 nt, Human
aaaaaccuuucccauacuaaga

SEQ ID NO: 270405 - RNA, 22 nt, Human
uccaucuacggcuauaccaccc

SEQ ID NO: 270406 - RNA, 22 nt, Human
ucugucuuugucaggaccagag

SEQ ID NO: 270407 - RNA, 22 nt, Human
ucgagcucuggagccaaggaug

SEQ ID NO: 270408 - RNA, 22 nt, Human
uuuuucagccaugaauuacacu

SEQ ID NO: 270409 - RNA, 22 nt, Human
agcuuuaugaggagaccuuagu

SEQ ID NO: 270410 - RNA, 22 nt, Human
aauguguagcauuuaaugcagu

SEQ ID NO: 270411 - RNA, 22 nt, Human
cccuggcucugccucagagccc

SEQ ID NO: 270412 - RNA, 17 nt, Human
ccagagaguaguuagga

SEQ ID NO: 270413 - RNA, 22 nt, Human
aaggccagcaguuugagaccag

SEQ ID NO: 270414 - RNA, 22 nt, Human
acuugguguauuagcucucacu

SEQ ID NO: 270415 - RNA, 22 nt, Human
cuggcccaggcuccuggggcac

SEQ ID NO: 270416 - RNA, 22 nt, Human
auccauuugccgugcuaugugc

SEQ ID NO: 270417 - RNA, 22 nt, Human
cagaaccuuggugguagggaca

SEQ ID NO: 270418 - RNA, 22 nt, Human
ccuggggaagucacuucucuuu

SEQ ID NO: 270419 - RNA, 21 nt, Human
cacuugaaugguguuuuacaa

SEQ ID NO: 270420 - RNA, 21 nt, Human
agcagcaaccacauaguuuuu

SEQ ID NO: 270421 - RNA, 22 nt, Human
ugggaaccaggacuggcugagg

SEQ ID NO: 270422 - RNA, 22 nt, Human
uuccucuuucucugugcuaugu

SEQ ID NO: 270423 - RNA, 22 nt, Human
uucccucuuuuccaacaguugu

SEQ ID NO: 270424 - RNA, 22 nt, Human
acucugaggaauguacaggacc

SEQ ID NO: 270425 - RNA, 23 nt, Human
ucuuuuuaagagaucuagugacg

SEQ ID NO: 270426 - RNA, 22 nt, Human
aaaugcauuuuuaauuagaccc

SEQ ID NO: 270427 - RNA, 22 nt, Human
ggcugccucccaggagaaucug

SEQ ID NO: 270428 - RNA, 22 nt, Human
uggcagguuucguuaaaaaugg

SEQ ID NO: 270429 - RNA, 22 nt, Human
gcaguuuuauuaugauggaaau

SEQ ID NO: 270430 - RNA, 22 nt, Human
uaaugugugucaucaguagagu

SEQ ID NO: 270431 - RNA, 22 nt, Human
gcugggucucuggguguaacaa

SEQ ID NO: 270432 - RNA, 22 nt, Human
ucuccuugugcuggguccuucc

SEQ ID NO: 270433 - RNA, 22 nt, Human
uacagggacucccgcagagaua

SEQ ID NO: 270434 - RNA, 22 nt, Human
guucaguuugacaaccuuuaua

SEQ ID NO: 270435 - RNA, 19 nt, Human
ugagggacauugggagcag

SEQ ID NO: 270436 - RNA, 22 nt, Human
cugcccagauuuuaccaccugc

SEQ ID NO: 270437 - RNA, 22 nt, Human
ugggagcaggaagcaggaagua

SEQ ID NO: 270438 - RNA, 20 nt, Human
cauuuguuagcuuucuacug

SEQ ID NO: 270439 - RNA, 22 nt, Human
gcagacagaugagggugcuggg

SEQ ID NO: 270440 - RNA, 23 nt, Human
acugggcuuaugaggaggcuugu

SEQ ID NO: 270441 - RNA, 22 nt, Human
aacuucuaaucuguacaguuuu

SEQ ID NO: 270442 - RNA, 22 nt, Human
caugacaauauguucuuucauu

SEQ ID NO: 270443 - RNA, 22 nt, Human
gcccaggcuggagugcaguagc

SEQ ID NO: 270444 - RNA, 22 nt, Human
aggugacugguuuaucuggcag

SEQ ID NO: 270445 - RNA, 22 nt, Human
uauuuagcuggagucagugcuu

SEQ ID NO: 270446 - RNA, 22 nt, Human
caacagagggaauggaucucau

SEQ ID NO: 270447 - RNA, 20 nt, Human
ucagacccggggaagggagc

SEQ ID NO: 270448 - RNA, 22 nt, Human
ucuccagucccuucucuguuag

SEQ ID NO: 270449 - RNA, 22 nt, Human
uauugacaauaggcaacugagg

SEQ ID NO: 270450 - RNA, 22 nt, Human
uuucacauuuaggcgugaauug

SEQ ID NO: 270451 - RNA, 22 nt, Human
gcuccugucuuggggcacuggc

SEQ ID NO: 270452 - RNA, 22 nt, Human
gguucacacuuucaugauuuca

SEQ ID NO: 270453 - RNA, 22 nt, Human
ucccuguccaaagucuuccuau

SEQ ID NO: 270454 - RNA, 22 nt, Human
uacaguuccucucguggaggug

SEQ ID NO: 270455 - RNA, 22 nt, Human
ucuucauguauacucaugguac

SEQ ID NO: 270456 - RNA, 22 nt, Human
ucccagagugagccaggggcag

SEQ ID NO: 270457 - RNA, 22 nt, Human
uucaaucauugcaaaguaaugg

SEQ ID NO: 270458 - RNA, 22 nt, Human
ucaaaugcacguagagaaaaua

SEQ ID NO: 270459 - RNA, 22 nt, Human
ugggagcagcuuugcgagggag

SEQ ID NO: 270460 - RNA, 22 nt, Human
gcaucuaaauaaacgugggagu

SEQ ID NO: 270461 - RNA, 22 nt, Human
ccugggugaaugauauucuaaa

SEQ ID NO: 270462 - RNA, 22 nt, Human
caggcucuuccauccugcugag

SEQ ID NO: 270463 - RNA, 22 nt, Human
guuuagaauggcaaaauuaagu

SEQ ID NO: 270464 - RNA, 22 nt, Human
guauacacugguaagauuuguc

SEQ ID NO: 270465 - RNA, 22 nt, Human
guccugugcccuggguggcgcu

SEQ ID NO: 270466 - RNA, 22 nt, Human
caaaauguucuggcaccuuuaa

SEQ ID NO: 270467 - RNA, 22 nt, Human
cuuggcccaguugccaaggaaa

SEQ ID NO: 270468 - RNA, 22 nt, Human
caaaggcuuugcuaugaugcau

SEQ ID NO: 270469 - RNA, 22 nt, Human
agcaacuagccaggaugcagag

SEQ ID NO: 270470 - RNA, 22 nt, Human
ugggaggaucucuugaggccag

SEQ ID NO: 270471 - RNA, 22 nt, Human
ugaguuuugucuugcuagaagu

SEQ ID NO: 270472 - RNA, 22 nt, Human
uuugaaaccuaguuauaugacu

SEQ ID NO: 270473 - RNA, 20 nt, Human
uccugugugucucaucaacc

SEQ ID NO: 270474 - RNA, 22 nt, Human
aaggcacagccacuugaucauc

SEQ ID NO: 270475 - RNA, 20 nt, Human
caaugcacacagcugcuucu

SEQ ID NO: 270476 - RNA, 20 nt, Human
aaugaggucccacugaggag

SEQ ID NO: 270477 - RNA, 22 nt, Human
cucuuuuacaccaaaaggccua

SEQ ID NO: 270478 - RNA, 22 nt, Human
auuucagaguagaucguuauuu

SEQ ID NO: 270479 - RNA, 22 nt, Human
ugguuagacucaccuuauaguu

SEQ ID NO: 270480 - RNA, 22 nt, Human
ucaggcugcuggccagcaggcu

SEQ ID NO: 270481 - RNA, 22 nt, Human
ucucaggcacugggugccaacu

SEQ ID NO: 270482 - RNA, 22 nt, Human
aaacugccaaaagaccuuggau

SEQ ID NO: 270483 - RNA, 19 nt, Human
cagagccucagagcuagaa

SEQ ID NO: 270484 - RNA, 22 nt, Human
auuguauuuguacaagacaugu

SEQ ID NO: 270485 - RNA, 20 nt, Human
uuucaguugguuaauggcau

SEQ ID NO: 270486 - RNA, 22 nt, Human
cccaggcugccacgauuacugc

SEQ ID NO: 270487 - RNA, 22 nt, Human
aucuccaggaagugucauuuac

SEQ ID NO: 270488 - RNA, 22 nt, Human
uuuuacaggugugagccaccau

SEQ ID NO: 270489 - RNA, 22 nt, Human
aucaguaaauauucauugugca

SEQ ID NO: 270490 - RNA, 22 nt, Human
ucaaaccaccuuguuacugggg

SEQ ID NO: 270491 - RNA, 22 nt, Human
gagagccagcaguaaagacauu

SEQ ID NO: 270492 - RNA, 22 nt, Human
ggaguugauuuuggauauauua

SEQ ID NO: 270493 - RNA, 22 nt, Human
ggcucugcugguaagaugccuc

SEQ ID NO: 270494 - RNA, 22 nt, Human
cugggccuuugcuuauuaauuu

SEQ ID NO: 270495 - RNA, 22 nt, Human
cuggcuccaucacugggugaug

SEQ ID NO: 270496 - RNA, 22 nt, Human
uguuuuaagggucaacugucac

SEQ ID NO: 270497 - RNA, 22 nt, Human
agaaucuucagaugauuuguca

SEQ ID NO: 270498 - RNA, 22 nt, Human
uaagcaaucuaaaagccuuacc

SEQ ID NO: 270499 - RNA, 21 nt, Human
aaacaucucugcuuuuguguc

SEQ ID NO: 270500 - RNA, 22 nt, Human
cugcauaugagaauaggagaaa

SEQ ID NO: 270501 - RNA, 22 nt, Human
uauuacaguucgaguuucuagg

SEQ ID NO: 270502 - RNA, 22 nt, Human
gaaaggggcauguagggaucac

SEQ ID NO: 270503 - RNA, 22 nt, Human
agucucucuccucgugguaacc

SEQ ID NO: 270504 - RNA, 22 nt, Human
aggccagcacgacagccgcagg

SEQ ID NO: 270505 - RNA, 22 nt, Human
cugagcaccccaggaccugcgc

SEQ ID NO: 270506 - RNA, 22 nt, Human
auguccuugagacccuccucgg

SEQ ID NO: 270507 - RNA, 22 nt, Human
gaaagcugggaaauaaauauua

SEQ ID NO: 270508 - RNA, 22 nt, Human
uccugaugauauugcucuuucu

SEQ ID NO: 270509 - RNA, 22 nt, Human
agcagccagaaauccagaggug

SEQ ID NO: 270510 - RNA, 22 nt, Human
ucugaaaugcaaauuugacuga

SEQ ID NO: 270511 - RNA, 22 nt, Human
augguuuauaggacagcucugu

SEQ ID NO: 270512 - RNA, 22 nt, Human
uugagucugugcccuaugcugu

SEQ ID NO: 270513 - RNA, 22 nt, Human
ucuggcagcucuccucggcgga

SEQ ID NO: 270514 - RNA, 18 nt, Human
gcaggagauggguggggu

SEQ ID NO: 270515 - RNA, 22 nt, Human
ugaugaguuuacucuuuucuaa

SEQ ID NO: 270516 - RNA, 23 nt, Human
aggagccaggaaccagcuucccc

SEQ ID NO: 270517 - RNA, 22 nt, Human
aggcucugacccaugggaccca

SEQ ID NO: 270518 - RNA, 22 nt, Human
cucugggugugacagcaccugg

SEQ ID NO: 270519 - RNA, 19 nt, Human
agaaauagccuuccuuguc

SEQ ID NO: 270520 - RNA, 22 nt, Human
aaauugaauuugggaaacauug

SEQ ID NO: 270521 - RNA, 22 nt, Human
caggcucccacccuccugcagc

SEQ ID NO: 270522 - RNA, 22 nt, Human
gaggccuguagucauggaugua

SEQ ID NO: 270523 - RNA, 22 nt, Human
cuccccacacacuaggccugau

SEQ ID NO: 270524 - RNA, 20 nt, Human
agacaaaaugacuucaugca

SEQ ID NO: 270525 - RNA, 22 nt, Human
uccuccagcaggacugaggccc

SEQ ID NO: 270526 - RNA, 22 nt, Human
aagcugaggcuccccugaggga

SEQ ID NO: 270527 - RNA, 22 nt, Human
cuggccuuucgugagagcuggg

SEQ ID NO: 270528 - RNA, 22 nt, Human
cagggcugaacugagcuuguga

SEQ ID NO: 270529 - RNA, 22 nt, Human
aauacagaggggucacaauuca

SEQ ID NO: 270530 - RNA, 22 nt, Human
cggcuggggcuguccccaugac

SEQ ID NO: 270531 - RNA, 22 nt, Human
ugaugagggaacugguucauac

SEQ ID NO: 270532 - RNA, 22 nt, Human
uggcucagucauggaugaguaa

SEQ ID NO: 270533 - RNA, 21 nt, Human
ucuuccugcuccacacucccc

SEQ ID NO: 270534 - RNA, 18 nt, Human
cugccccuucucugagau

SEQ ID NO: 270535 - RNA, 22 nt, Human
uuucucugaguuguuacaaaac

SEQ ID NO: 270536 - RNA, 22 nt, Human
ugccugggggacuaaggccaaa

SEQ ID NO: 270537 - RNA, 22 nt, Human
guagcuacuuagagccguucuu

SEQ ID NO: 270538 - RNA, 22 nt, Human
aggggagaguuaaugugaaugu

SEQ ID NO: 270539 - RNA, 22 nt, Human
gccucagagggcccuagggaca

SEQ ID NO: 270540 - RNA, 22 nt, Human
ccagcugcugugcagggaggcu

SEQ ID NO: 270541 - RNA, 22 nt, Human
cagcccuguccagcagagggug

SEQ ID NO: 270542 - RNA, 22 nt, Human
agcaggcuaggaaccucacugc

SEQ ID NO: 270543 - RNA, 22 nt, Human
gagccucguggcggccacugcg

SEQ ID NO: 270544 - RNA, 22 nt, Human
gccugcugagggaaguugggca

SEQ ID NO: 270545 - RNA, 22 nt, Human
agccacaccuguccugccagcu

SEQ ID NO: 270546 - RNA, 22 nt, Human
gcuuugaagacuuuuccagggu

SEQ ID NO: 270547 - RNA, 22 nt, Human
acauuaaaauugggugggguaa

SEQ ID NO: 270548 - RNA, 22 nt, Human
cuaauuuaaugaaugagucuua

SEQ ID NO: 270549 - RNA, 22 nt, Human
ucuacauuccuuuuauaauauc

SEQ ID NO: 270550 - RNA, 22 nt, Human
ugugugcacaggaguguuugaa

SEQ ID NO: 270551 - RNA, 22 nt, Human
aucuuuagacaggaagcaauca

SEQ ID NO: 270552 - RNA, 22 nt, Human
cuucuggggauggagcccagaa

SEQ ID NO: 270553 - RNA, 20 nt, Human
ucccuccugcagauagagaa

SEQ ID NO: 270554 - RNA, 22 nt, Human
uggcccugcuguaucaucugcu

SEQ ID NO: 270555 - RNA, 22 nt, Human
augugguuuuggauuauucaug

SEQ ID NO: 270556 - RNA, 22 nt, Human
acaugauucuugauaggcauug

SEQ ID NO: 270557 - RNA, 22 nt, Human
uguauuuauauuagaaugguug

SEQ ID NO: 270558 - RNA, 21 nt, Human
cuuguuccaagcaugucugag

SEQ ID NO: 270559 - RNA, 22 nt, Human
ugagguggguggcuucuguuau

SEQ ID NO: 270560 - RNA, 22 nt, Human
gaggaaaagagacagguuauug

SEQ ID NO: 270561 - RNA, 22 nt, Human
uuuuuccuagcgauuugucagc

SEQ ID NO: 270562 - RNA, 22 nt, Human
uuaucacuuaugagcuuuuugc

SEQ ID NO: 270563 - RNA, 22 nt, Human
cuucaaaucccccugaguuuga

SEQ ID NO: 270564 - RNA, 22 nt, Human
cacugggcuuuguaguuagcau

SEQ ID NO: 270565 - RNA, 19 nt, Human
acuggcagcuguagucugu

SEQ ID NO: 270566 - RNA, 22 nt, Human
cuggggacucauucagagcaua

SEQ ID NO: 270567 - RNA, 22 nt, Human
agagucuuguuaacuugcuaag

SEQ ID NO: 270568 - RNA, 22 nt, Human
auugaugagcauuacucucuaa

SEQ ID NO: 270569 - RNA, 22 nt, Human
augagcaagagcuauguacaga

SEQ ID NO: 270570 - RNA, 22 nt, Human
ucuuucuucuuucauaguguga

SEQ ID NO: 270571 - RNA, 22 nt, Human
uggaaaacuuugguggugaggg

SEQ ID NO: 270572 - RNA, 22 nt, Human
ucauguuucucuuacagcagcu

SEQ ID NO: 270573 - RNA, 22 nt, Human
cagcaugaugagugcaguuugg

SEQ ID NO: 270574 - RNA, 22 nt, Human
cuccucuggguccugguggcca

SEQ ID NO: 270575 - RNA, 22 nt, Human
caggaugggugucggccagcac

SEQ ID NO: 270576 - RNA, 23 nt, Human
uggcaaagcauucuuauaacagu

SEQ ID NO: 270577 - RNA, 22 nt, Human
ugcccagggauaagccuagaga

SEQ ID NO: 270578 - RNA, 22 nt, Human
uguuaucugcacguagaguuuu

SEQ ID NO: 270579 - RNA, 22 nt, Human
gaguuaaauauuuucugaaguu

SEQ ID NO: 270580 - RNA, 22 nt, Human
cucucagaaguagcacgugggc

SEQ ID NO: 270581 - RNA, 22 nt, Human
agagccaggccaggccggggca

SEQ ID NO: 270582 - RNA, 22 nt, Human
aaaauguucaagcaugcugguu

SEQ ID NO: 270583 - RNA, 22 nt, Human
gggcuucucucaggggcaugag

SEQ ID NO: 270584 - RNA, 18 nt, Human
cagaaaguuauuuacucu

SEQ ID NO: 270585 - RNA, 23 nt, Human
gcugacugugaaauucuggagcu

SEQ ID NO: 270586 - RNA, 19 nt, Human
gcccaggggcccgaugcug

SEQ ID NO: 270587 - RNA, 22 nt, Human
cugaaggcaccaggggugccag

SEQ ID NO: 270588 - RNA, 22 nt, Human
aaucuuuuucacaagaaagcac

SEQ ID NO: 270589 - RNA, 22 nt, Human
aagccaguggcuucucccugcu

SEQ ID NO: 270590 - RNA, 22 nt, Human
cagcuggguggcucuucugcuc

SEQ ID NO: 270591 - RNA, 22 nt, Human
agaggucagaggucgccagguc

SEQ ID NO: 270592 - RNA, 22 nt, Human
aaauacuggcaagugcuaauuc

SEQ ID NO: 270593 - RNA, 22 nt, Human
gugaugucagcaagaauaggaa

SEQ ID NO: 270594 - RNA, 17 nt, Human
gucaauauuguugacag

SEQ ID NO: 270595 - RNA, 22 nt, Human
gcagcaggagaguaauagcggu

SEQ ID NO: 270596 - RNA, 22 nt, Human
gugcaggguccuaauuguuaag

SEQ ID NO: 270597 - RNA, 22 nt, Human
aggcuucuggaauccaguuucu

SEQ ID NO: 270598 - RNA, 22 nt, Human
uguuuucucuugaaaagcaguc

SEQ ID NO: 270599 - RNA, 22 nt, Human
cacaggcuccggccuugcagcc

SEQ ID NO: 270600 - RNA, 22 nt, Human
uggaggcaguuuaagucugaga

SEQ ID NO: 270601 - RNA, 22 nt, Human
aucuuuagcauuacuuuauuca

SEQ ID NO: 270602 - RNA, 22 nt, Human
gcuggggagggcgucaaggcca

SEQ ID NO: 270603 - RNA, 22 nt, Human
uuuagcaagaugcccuggcuuu

SEQ ID NO: 270604 - RNA, 22 nt, Human
auuuuucagcuucauugaggca

SEQ ID NO: 270605 - RNA, 22 nt, Human
ugucuuuauauauuuggaaaau

SEQ ID NO: 270606 - RNA, 22 nt, Human
ucugcacccugugguccucuag

SEQ ID NO: 270607 - RNA, 22 nt, Human
agaaaagaggcuuucuaagcau

SEQ ID NO: 270608 - RNA, 22 nt, Human
caaaggcugguagaaugagcca

SEQ ID NO: 270609 - RNA, 22 nt, Human
ccagcugugccuaggagcaggg

SEQ ID NO: 270610 - RNA, 22 nt, Human
cacacagguaagccucuuucaa

SEQ ID NO: 270611 - RNA, 21 nt, Human
aaguaaaucagagaaauaacc

SEQ ID NO: 270612 - RNA, 23 nt, Human
gccaggcuccggucuguggccac

SEQ ID NO: 270613 - RNA, 22 nt, Human
uacuggguauacaaagaugaau

SEQ ID NO: 270614 - RNA, 19 nt, Human
uaucacugggcacugagga

SEQ ID NO: 270615 - RNA, 22 nt, Human
auguuuaugcaaacaugugagu

SEQ ID NO: 270616 - RNA, 22 nt, Human
uguguccugcagacagacucag

SEQ ID NO: 270617 - RNA, 22 nt, Human
cagggguguuuuuggccaggag

SEQ ID NO: 270618 - RNA, 22 nt, Human
cuuugccuccuagagcacguuc

SEQ ID NO: 270619 - RNA, 22 nt, Human
ccagaccagacugacuugagcc

SEQ ID NO: 270620 - RNA, 22 nt, Human
uucugggcuguccagaggguga

SEQ ID NO: 270621 - RNA, 18 nt, Human
ugucuuuggaccacugaa

SEQ ID NO: 270622 - RNA, 22 nt, Human
cauauuuuaguugcugaacagc

SEQ ID NO: 270623 - RNA, 22 nt, Human
ucacucuguuuuacucacuguu

SEQ ID NO: 270624 - RNA, 22 nt, Human
ggagagcugguauaugaagaca

SEQ ID NO: 270625 - RNA, 22 nt, Human
cucugggaauucugagcaagca

SEQ ID NO: 270626 - RNA, 22 nt, Human
aaauguacaacauccauauaua

SEQ ID NO: 270627 - RNA, 22 nt, Human
uuccuguguacguguuucgcug

SEQ ID NO: 270628 - RNA, 22 nt, Human
agcugccucucuugagguuacg

SEQ ID NO: 270629 - RNA, 22 nt, Human
auguacuaugcagucaacuguu

SEQ ID NO: 270630 - RNA, 21 nt, Human
ggacagcugcgcgcagggcuc

SEQ ID NO: 270631 - RNA, 22 nt, Human
ucuguaaaauuaguauaauugu

SEQ ID NO: 270632 - RNA, 22 nt, Human
gcuggagguagggagguccugu

SEQ ID NO: 270633 - RNA, 21 nt, Human
ccaagagcaaugcuaaggaga

SEQ ID NO: 270634 - RNA, 22 nt, Human
gacagacacuauugguaugccu

SEQ ID NO: 270635 - RNA, 18 nt, Human
cugcccagagcacuugug

SEQ ID NO: 270636 - RNA, 22 nt, Human
agcugcagcguucauuuuucca

SEQ ID NO: 270637 - RNA, 22 nt, Human
agguccagaguugagauacaga

SEQ ID NO: 270638 - RNA, 22 nt, Human
gcugcugggucccucugugcca

SEQ ID NO: 270639 - RNA, 22 nt, Human
agauuuagugguggaauuuugg

SEQ ID NO: 270640 - RNA, 22 nt, Human
auucaguuagccacagcuauuc

SEQ ID NO: 270641 - RNA, 22 nt, Human
auuuucugguugagguuuaaca

SEQ ID NO: 270642 - RNA, 22 nt, Human
aaacaggcacauaguaacauuu

SEQ ID NO: 270643 - RNA, 22 nt, Human
auccaaaaccagugcauuuucc

SEQ ID NO: 270644 - RNA, 18 nt, Human
uggaggaaaaaucucaug

SEQ ID NO: 270645 - RNA, 22 nt, Human
gaagacauuaagucuaugucac

SEQ ID NO: 270646 - RNA, 22 nt, Human
ugcagggaaaacccaggaugcu

SEQ ID NO: 270647 - RNA, 22 nt, Human
gucucugucuuaggccaggccu

SEQ ID NO: 270648 - RNA, 22 nt, Human
caauaacuaguaauuauuccgg

SEQ ID NO: 270649 - RNA, 20 nt, Human
aguuuucagcagaacaccca

SEQ ID NO: 270650 - RNA, 22 nt, Human
acauacuuaacauuaaagucau

SEQ ID NO: 270651 - RNA, 22 nt, Human
agugugucuuauccugggagaa

SEQ ID NO: 270652 - RNA, 22 nt, Human
cucugugggccugugcuuuagu

SEQ ID NO: 270653 - RNA, 22 nt, Human
uggcucagcauucacuggucuu

SEQ ID NO: 270654 - RNA, 22 nt, Human
auucuucacaccuguuccuguu

SEQ ID NO: 270655 - RNA, 23 nt, Human
ucagagaacucgggcagaugacc

SEQ ID NO: 270656 - RNA, 22 nt, Human
gggcucucaaggcagggcccca

SEQ ID NO: 270657 - RNA, 22 nt, Human
uucuuuauuaguuuagugagcu

SEQ ID NO: 270658 - RNA, 22 nt, Human
uucuagucuauggcuagauagu

SEQ ID NO: 270659 - RNA, 22 nt, Human
aaagugcaucaaaugacuuccc

SEQ ID NO: 270660 - RNA, 22 nt, Human
aaugugcagaugaauaaacaaa

SEQ ID NO: 270661 - RNA, 22 nt, Human
ugcacagugaccacugagcaag

SEQ ID NO: 270662 - RNA, 22 nt, Human
uuuuuaucuuguaugugucucu

SEQ ID NO: 270663 - RNA, 22 nt, Human
uuccaggauggagacacuagua

SEQ ID NO: 270664 - RNA, 22 nt, Human
agccaggacaucucuagcugcu

SEQ ID NO: 270665 - RNA, 21 nt, Human
aggaagaaagguuggagguug

SEQ ID NO: 270666 - RNA, 22 nt, Human
cucaaauaccucuccaugugac

SEQ ID NO: 270667 - RNA, 22 nt, Human
cauucccuuggggaguucaugc

SEQ ID NO: 270668 - RNA, 22 nt, Human
augcaacaaauugugugcaaua

SEQ ID NO: 270669 - RNA, 22 nt, Human
cagggacauaagaggaacaugg

SEQ ID NO: 270670 - RNA, 22 nt, Human
uacauucagcaaaagaaugguu

SEQ ID NO: 270671 - RNA, 22 nt, Human
ggucacaucuaaauggagcauu

SEQ ID NO: 270672 - RNA, 22 nt, Human
cuguuauuucugccaggugagu

SEQ ID NO: 270673 - RNA, 22 nt, Human
auuauaaauauuuucuaggggu

SEQ ID NO: 270674 - RNA, 22 nt, Human
guagcugauccugaggacaggg

SEQ ID NO: 270675 - RNA, 22 nt, Human
ccuggcuuucucauuuacaggc

SEQ ID NO: 270676 - RNA, 19 nt, Human
uuugcugguucaggaaaga

SEQ ID NO: 270677 - RNA, 22 nt, Human
ugggaccuguuacauugaguua

SEQ ID NO: 270678 - RNA, 20 nt, Human
uucuuuguuccuuacauuug

SEQ ID NO: 270679 - RNA, 22 nt, Human
cucuuagaaagaaacacacugg

SEQ ID NO: 270680 - RNA, 22 nt, Human
ugcuggcuuuuccuucaggcag

SEQ ID NO: 270681 - RNA, 22 nt, Human
cucugccugugucgccaccaca

SEQ ID NO: 270682 - RNA, 22 nt, Human
accaggaguaacagugaguggu

SEQ ID NO: 270683 - RNA, 22 nt, Human
gucauucuuaacaacucaguag

SEQ ID NO: 270684 - RNA, 23 nt, Human
ugggcagcuucugcaugcccacc

SEQ ID NO: 270685 - RNA, 22 nt, Human
aaggcugaauucaaggguaggc

SEQ ID NO: 270686 - RNA, 22 nt, Human
gucagugcuugaagggcagaga

SEQ ID NO: 270687 - RNA, 18 nt, Human
ucuguggagagggcaguu

SEQ ID NO: 270688 - RNA, 22 nt, Human
gaggagagaugguagauugggu

SEQ ID NO: 270689 - RNA, 22 nt, Human
gaggcuguuagggccugaggua

SEQ ID NO: 270690 - RNA, 22 nt, Human
uacccagcccaugccuaccuca

SEQ ID NO: 270691 - RNA, 22 nt, Human
uuccaggccgggcaggaaacac

SEQ ID NO: 270692 - RNA, 22 nt, Human
agcuuguucucauccauucuuc

SEQ ID NO: 270693 - RNA, 22 nt, Human
acugagcucuagguuuugaacc

SEQ ID NO: 270694 - RNA, 22 nt, Human
auacagaaguuuuccacuuauu

SEQ ID NO: 270695 - RNA, 22 nt, Human
cuggagggcuucugcagguuac

SEQ ID NO: 270696 - RNA, 22 nt, Human
acaugcauaaacuacuucuuau

SEQ ID NO: 270697 - RNA, 22 nt, Human
augauguuauuuucagaaacau

SEQ ID NO: 270698 - RNA, 22 nt, Human
acuauauacacauuaucuuguu

SEQ ID NO: 270699 - RNA, 22 nt, Human
gaaggcauucuauucuacauau

SEQ ID NO: 270700 - RNA, 22 nt, Human
uggcucagauuuuuguaggcuu

SEQ ID NO: 270701 - RNA, 22 nt, Human
aaaaauaggucaaccguguaug

SEQ ID NO: 270702 - RNA, 22 nt, Human
cacagugcuuuaugagagaucu

SEQ ID NO: 270703 - RNA, 22 nt, Human
uuagaagugggccuauaguccu

SEQ ID NO: 270704 - RNA, 22 nt, Human
guccugaggcaggauggguuuc

SEQ ID NO: 270705 - RNA, 22 nt, Human
aggacacacuucugaggucuuu

SEQ ID NO: 270706 - RNA, 22 nt, Human
cugaggcacugguaaugggcau

SEQ ID NO: 270707 - RNA, 22 nt, Human
guccaaggauggggucucccag

SEQ ID NO: 270708 - RNA, 22 nt, Human
ugcaguggaaucuggagagcag

SEQ ID NO: 270709 - RNA, 22 nt, Human
ucagaggacagcagcuaaauaa

SEQ ID NO: 270710 - RNA, 22 nt, Human
uaggguccauauggaugaaugg

SEQ ID NO: 270711 - RNA, 22 nt, Human
caugugugugagggaaacaugu

SEQ ID NO: 270712 - RNA, 22 nt, Human
uauaaauuauuaggcugcuaaa

SEQ ID NO: 270713 - RNA, 22 nt, Human
agaaaucacuuagaggaaguga

SEQ ID NO: 270714 - RNA, 22 nt, Human
ugucuccaacucacuguauacu

SEQ ID NO: 270715 - RNA, 18 nt, Human
agauuuugagaaauacaa

SEQ ID NO: 270716 - RNA, 22 nt, Human
gucugucucccugugacugaga

SEQ ID NO: 270717 - RNA, 22 nt, Human
gaaaguauucacaaaguucuug

SEQ ID NO: 270718 - RNA, 22 nt, Human
ggcucagaaacuaaaggcgcug

SEQ ID NO: 270719 - RNA, 22 nt, Human
aucuagaaaaggugacuaaaau

SEQ ID NO: 270720 - RNA, 22 nt, Human
uaacaguauugaagauaaacua

SEQ ID NO: 270721 - RNA, 22 nt, Human
gcagcaggugugcuuuuaauga

SEQ ID NO: 270722 - RNA, 22 nt, Human
cuuugaaaacuuaaauaacagc

SEQ ID NO: 270723 - RNA, 22 nt, Human
ccuggcagcaggugggcccgug

SEQ ID NO: 270724 - RNA, 22 nt, Human
gcccagccagagcugugugaug

SEQ ID NO: 270725 - RNA, 22 nt, Human
uuagaaacccagacucuuaggu

SEQ ID NO: 270726 - RNA, 22 nt, Human
cugcucagaggaaggaaugucu

SEQ ID NO: 270727 - RNA, 22 nt, Human
uuaggaaaggaacauugaaacg

SEQ ID NO: 270728 - RNA, 22 nt, Human
acaagcaugggcuuugacauca

SEQ ID NO: 270729 - RNA, 22 nt, Human
ucacaugcuugaggaaagaaaa

SEQ ID NO: 270730 - RNA, 22 nt, Human
ugcagggcuaagucagagccug

SEQ ID NO: 270731 - RNA, 22 nt, Human
aggacagcccccaacagcaaca

SEQ ID NO: 270732 - RNA, 19 nt, Human
agcauuuggaauucuacac

SEQ ID NO: 270733 - RNA, 20 nt, Human
aaguuucugguuuauaucuu

SEQ ID NO: 270734 - RNA, 22 nt, Human
uuuuauaagcaagaaagggaaa

SEQ ID NO: 270735 - RNA, 22 nt, Human
ggcaggugaucuagagucaaua

SEQ ID NO: 270736 - RNA, 22 nt, Human
acuguauuccuacuagaaucua

SEQ ID NO: 270737 - RNA, 20 nt, Human
ccuccaggcacacccaugug

SEQ ID NO: 270738 - RNA, 19 nt, Human
ugcuauuuagaacgccugg

SEQ ID NO: 270739 - RNA, 22 nt, Human
cucuguccuaugcuugauagaa

SEQ ID NO: 270740 - RNA, 22 nt, Human
uaauaauagcaguagcugccac

SEQ ID NO: 270741 - RNA, 22 nt, Human
caggaaaugggucguuuuauaa

SEQ ID NO: 270742 - RNA, 22 nt, Human
gcauggcaagaucaggagacca

SEQ ID NO: 270743 - RNA, 22 nt, Human
caggcuuccgccagguuuccag

SEQ ID NO: 270744 - RNA, 22 nt, Human
agaucaaugugucagaagagau

SEQ ID NO: 270745 - RNA, 22 nt, Human
cccaugagauucugaauuuggc

SEQ ID NO: 270746 - RNA, 22 nt, Human
aggacacacccagcucacgggg

SEQ ID NO: 270747 - RNA, 22 nt, Human
aaaugugcuucuuacucucaau

SEQ ID NO: 270748 - RNA, 22 nt, Human
ccuguggcuggucaggccagca

SEQ ID NO: 270749 - RNA, 22 nt, Human
cccaccacgugcuuugcuggag

SEQ ID NO: 270750 - RNA, 22 nt, Human
aaaucacagggucucuaaguau

SEQ ID NO: 270751 - RNA, 22 nt, Human
caggaaaucagaacucaagugg

SEQ ID NO: 270752 - RNA, 22 nt, Human
aacaccagucccaagagaggcu

SEQ ID NO: 270753 - RNA, 22 nt, Human
cauauucuuuaagcaaugcucu

SEQ ID NO: 270754 - RNA, 22 nt, Human
cuaggcccaugagguuugcugg

SEQ ID NO: 270755 - RNA, 22 nt, Human
uuuauugcuggccaccuguagc

SEQ ID NO: 270756 - RNA, 22 nt, Human
aguggcugauguaggcaguggg

SEQ ID NO: 270757 - RNA, 20 nt, Human
aaaagagugcuucaacugcu

SEQ ID NO: 270758 - RNA, 22 nt, Human
aagauacugaugauguaggcua

SEQ ID NO: 270759 - RNA, 22 nt, Human
ucccuggggauguuggccugcc

SEQ ID NO: 270760 - RNA, 22 nt, Human
aguggcuguuuauaggugggua

SEQ ID NO: 270761 - RNA, 20 nt, Human
uuguuucugcuauuuucuaa

SEQ ID NO: 270762 - RNA, 22 nt, Human
agacuacagaauggcauuguuu

SEQ ID NO: 270763 - RNA, 22 nt, Human
guuccacauaacacaucuacaa

SEQ ID NO: 270764 - RNA, 22 nt, Human
cucucccuggccagcugugcag

SEQ ID NO: 270765 - RNA, 22 nt, Human
aucucuucuagcucugaaauua

SEQ ID NO: 270766 - RNA, 22 nt, Human
caggucuuuucuacugguggag

SEQ ID NO: 270767 - RNA, 20 nt, Human
uugcugggaccuuuuucaac

SEQ ID NO: 270768 - RNA, 22 nt, Human
aaugcuuauaacguuagaaugu

SEQ ID NO: 270769 - RNA, 23 nt, Human
uggcccugugcaugcugcuuccc

SEQ ID NO: 270770 - RNA, 22 nt, Human
gccugggaaaugguggggucag

SEQ ID NO: 270771 - RNA, 23 nt, Human
uuguaaaacagugugacgguucc

SEQ ID NO: 270772 - RNA, 22 nt, Human
auaauacaugguuaaccucuuu

SEQ ID NO: 270773 - RNA, 22 nt, Human
uuuacaauucucuaccaguguu

SEQ ID NO: 270774 - RNA, 22 nt, Human
aacauucaauugaggaaguuaa

SEQ ID NO: 270775 - RNA, 22 nt, Human
gagccagacugccugaagcuca

SEQ ID NO: 270776 - RNA, 22 nt, Human
cuaugaaaggauuuggaguugu

SEQ ID NO: 270777 - RNA, 22 nt, Human
aucuggcugagcgaggcccaca

SEQ ID NO: 270778 - RNA, 22 nt, Human
cacccagccuucacacaggagu

SEQ ID NO: 270779 - RNA, 22 nt, Human
ggccgcugcgccuccaaccgag

SEQ ID NO: 270780 - RNA, 22 nt, Human
auaugacauaaaaucauuuuug

SEQ ID NO: 270781 - RNA, 22 nt, Human
ugucauuuaugcuucuucagug

SEQ ID NO: 270782 - RNA, 22 nt, Human
uuucuguaaagaccaagccagc

SEQ ID NO: 270783 - RNA, 22 nt, Human
aaagcagauucugaugcaguag

SEQ ID NO: 270784 - RNA, 22 nt, Human
uuucauguuuauggaaaaugag

SEQ ID NO: 270785 - RNA, 20 nt, Human
caccuggcugacugucucca

SEQ ID NO: 270786 - RNA, 22 nt, Human
cugggcacagacccccugggcc

SEQ ID NO: 270787 - RNA, 22 nt, Human
cacaggagaacccacagauucu

SEQ ID NO: 270788 - RNA, 22 nt, Human
ucucuuaauuuuggaauagugu

SEQ ID NO: 270789 - RNA, 22 nt, Human
gcucucagaugcuccagcagcc

SEQ ID NO: 270790 - RNA, 22 nt, Human
aagcuuuaugaucucucagcua

SEQ ID NO: 270791 - RNA, 22 nt, Human
gcucagggaaagagcuccuguc

SEQ ID NO: 270792 - RNA, 22 nt, Human
caauaugcaagcuauuaaguau

SEQ ID NO: 270793 - RNA, 21 nt, Human
agaggcccucggacugggcgu

SEQ ID NO: 270794 - RNA, 22 nt, Human
aggcuuccucgugccuuagaua

SEQ ID NO: 270795 - RNA, 22 nt, Human
uauugcugaugcugaagggaag

SEQ ID NO: 270796 - RNA, 22 nt, Human
gcaggugguccccguggagugg

SEQ ID NO: 270797 - RNA, 22 nt, Human
cagccaucaguaaagacagcuu

SEQ ID NO: 270798 - RNA, 22 nt, Human
ugcucccugacccaggucuucu

SEQ ID NO: 270799 - RNA, 22 nt, Human
cucuccagccuuuagcccacgc

SEQ ID NO: 270800 - RNA, 22 nt, Human
ugcagaggaccauuguccugga

SEQ ID NO: 270801 - RNA, 22 nt, Human
uuccuggggugaagauauuuuu

SEQ ID NO: 270802 - RNA, 18 nt, Human
cuguucuagaacuccugu

SEQ ID NO: 270803 - RNA, 22 nt, Human
gaguccaggcuguugcucaucu

SEQ ID NO: 270804 - RNA, 22 nt, Human
ugggaggacuugugggcuucau

SEQ ID NO: 270805 - RNA, 22 nt, Human
cccugugccucaguuuccucau

SEQ ID NO: 270806 - RNA, 20 nt, Human
aggaggggauagaaucaaag

SEQ ID NO: 270807 - RNA, 22 nt, Human
ccugaaauccauaguuuacacu

SEQ ID NO: 270808 - RNA, 22 nt, Human
ccagagcagggcagcagggcuc

SEQ ID NO: 270809 - RNA, 22 nt, Human
auuaagcuccaaguugcucuga

SEQ ID NO: 270810 - RNA, 22 nt, Human
auuugcaagcaugcacaaaagc

SEQ ID NO: 270811 - RNA, 22 nt, Human
ucuuccuucgcccuugcuguuu

SEQ ID NO: 270812 - RNA, 22 nt, Human
ggggacaguuaaagaccaagac

SEQ ID NO: 270813 - RNA, 22 nt, Human
agcuggcccacuguguggucca

SEQ ID NO: 270814 - RNA, 22 nt, Human
ugaucaaauucaggagucugga

SEQ ID NO: 270815 - RNA, 22 nt, Human
cauguuuuguguacagaauauu

SEQ ID NO: 270816 - RNA, 22 nt, Human
cuugacacugucacucaggcca

SEQ ID NO: 270817 - RNA, 22 nt, Human
ugcucagaauugcgcuggugga

SEQ ID NO: 270818 - RNA, 22 nt, Human
caaauacugagcacgcaaucaa

SEQ ID NO: 270819 - RNA, 22 nt, Human
aggcuggccagugcugcagugg

SEQ ID NO: 270820 - RNA, 20 nt, Human
cucaaguaagguuauaaggu

SEQ ID NO: 270821 - RNA, 22 nt, Human
auuacacaggcuggcucuuuga

SEQ ID NO: 270822 - RNA, 16 nt, Human
caauacauggcauuuc

SEQ ID NO: 270823 - RNA, 18 nt, Human
acaaaggucugcaagacc

SEQ ID NO: 270824 - RNA, 22 nt, Human
acuuccuggauucccaagggcu

SEQ ID NO: 270825 - RNA, 21 nt, Human
acagggcaugcagcuggcugu

SEQ ID NO: 270826 - RNA, 22 nt, Human
aaguauucauaaggacauaugu

SEQ ID NO: 270827 - RNA, 20 nt, Human
uugaccugcaagucaucauu

SEQ ID NO: 270828 - RNA, 22 nt, Human
ucagaaucugaaaagcgcuugg

SEQ ID NO: 270829 - RNA, 22 nt, Human
aaagcauaguucaucuguccau

SEQ ID NO: 270830 - RNA, 22 nt, Human
acugucuccucaucaugccugg

SEQ ID NO: 270831 - RNA, 22 nt, Human
aaauaagugugggccagucaaa

SEQ ID NO: 270832 - RNA, 22 nt, Human
gcuguucacauuuugggccaaa

SEQ ID NO: 270833 - RNA, 22 nt, Human
aagucuaaguuuguaacuugga

SEQ ID NO: 270834 - RNA, 22 nt, Human
uuuuuguucccagagaauuugu

SEQ ID NO: 270835 - RNA, 22 nt, Human
agcaccaggccauggggucccu

SEQ ID NO: 270836 - RNA, 22 nt, Human
cccagccucuguuugcuccucu

SEQ ID NO: 270837 - RNA, 22 nt, Human
uuugcaguagacaucuuauuuu

SEQ ID NO: 270838 - RNA, 22 nt, Human
augugucuuggaguuuuaaugu

SEQ ID NO: 270839 - RNA, 22 nt, Human
cacguuaacagcuaacagauga

SEQ ID NO: 270840 - RNA, 16 nt, Human
cagaggcaccuggcuc

SEQ ID NO: 270841 - RNA, 21 nt, Human
aagagcuggaucaaggauaag

SEQ ID NO: 270842 - RNA, 22 nt, Human
auucucuguucaaggaugguga

SEQ ID NO: 270843 - RNA, 22 nt, Human
agggaugacucuuggcugauuc

SEQ ID NO: 270844 - RNA, 22 nt, Human
agcugcaggauuauggaaugga

SEQ ID NO: 270845 - RNA, 22 nt, Human
cucucuggcuuggcacggagau

SEQ ID NO: 270846 - RNA, 22 nt, Human
ggucacugucugagguacugga

SEQ ID NO: 270847 - RNA, 19 nt, Human
gaacaaacuuaaacuuuuc

SEQ ID NO: 270848 - RNA, 22 nt, Human
gcugaggacaucauggaaggaa

SEQ ID NO: 270849 - RNA, 22 nt, Human
acuguauuuggauauaagaucu

SEQ ID NO: 270850 - RNA, 22 nt, Human
cugguagcagugaagcuguuga

SEQ ID NO: 270851 - RNA, 22 nt, Human
gggcacugcuggaggcucccug

SEQ ID NO: 270852 - RNA, 19 nt, Human
aaacuaaggggaaauguuu

SEQ ID NO: 270853 - RNA, 22 nt, Human
cucuuuggcguuggcagagcca

SEQ ID NO: 270854 - RNA, 22 nt, Human
aggaaccuaagagccugcaguc

SEQ ID NO: 270855 - RNA, 23 nt, Human
ugaaugauggugcuccucaucuu

SEQ ID NO: 270856 - RNA, 18 nt, Human
auaugcuugagcuaagga

SEQ ID NO: 270857 - RNA, 22 nt, Human
gaccauuucuaggaaucagacu

SEQ ID NO: 270858 - RNA, 22 nt, Human
uuuauuuauccuucuggauugc

SEQ ID NO: 270859 - RNA, 22 nt, Human
ggcuccugggcagcugcucccu

SEQ ID NO: 270860 - RNA, 22 nt, Human
uucucugacccccuuaaauauu

SEQ ID NO: 270861 - RNA, 22 nt, Human
cccagaggaggcaaagcucugu

SEQ ID NO: 270862 - RNA, 22 nt, Human
ggugcucaaggugacaggacau

SEQ ID NO: 270863 - RNA, 22 nt, Human
cccucccaggaguggccagaga

SEQ ID NO: 270864 - RNA, 17 nt, Human
acaaugcagucucuagu

SEQ ID NO: 270865 - RNA, 22 nt, Human
agcuccugcccaggaaggcucu

SEQ ID NO: 270866 - RNA, 23 nt, Human
cuuauucauucauguagcccauu

SEQ ID NO: 270867 - RNA, 22 nt, Human
cauagaaaguauuauggaauuu

SEQ ID NO: 270868 - RNA, 22 nt, Human
uagcuuuaaugaguugguaaga

SEQ ID NO: 270869 - RNA, 22 nt, Human
ugucucaguucccuucucugga

SEQ ID NO: 270870 - RNA, 22 nt, Human
ggauguugauugaauggccauu

SEQ ID NO: 270871 - RNA, 22 nt, Human
caaugauagauuuuacaaauua

SEQ ID NO: 270872 - RNA, 22 nt, Human
uagaaaguagccacuuacagag

SEQ ID NO: 270873 - RNA, 22 nt, Human
uuucacuagaacguucuuguuu

SEQ ID NO: 270874 - RNA, 22 nt, Human
ugaacagaucaauagaacugac

SEQ ID NO: 270875 - RNA, 22 nt, Human
cagugcagucaaggaagaacca

SEQ ID NO: 270876 - RNA, 22 nt, Human
aacacaguuuuccaaaauagag

SEQ ID NO: 270877 - RNA, 22 nt, Human
cuaacugucaugcacauguguu

SEQ ID NO: 270878 - RNA, 22 nt, Human
guccaggcucaaaagguuguua

SEQ ID NO: 270879 - RNA, 22 nt, Human
uugcuggcaauuuagagauuuc

SEQ ID NO: 270880 - RNA, 22 nt, Human
cacauuuagagguuagcauggu

SEQ ID NO: 270881 - RNA, 22 nt, Human
cuuagaaauuguuacucauuca

SEQ ID NO: 270882 - RNA, 22 nt, Human
ugcaggcugccuucacagagcc

SEQ ID NO: 270883 - RNA, 22 nt, Human
aggcugcuucagcugcagggag

SEQ ID NO: 270884 - RNA, 22 nt, Human
cugcaagauuggaagaugcaau

SEQ ID NO: 270885 - RNA, 22 nt, Human
cauuuucucaaugaacccucuu

SEQ ID NO: 270886 - RNA, 22 nt, Human
agagaugcgguuccaugguuau

SEQ ID NO: 270887 - RNA, 22 nt, Human
aaaggcuugguauuuuggaguu

SEQ ID NO: 270888 - RNA, 22 nt, Human
agagacugcuuuauauuguacu

SEQ ID NO: 270889 - RNA, 19 nt, Human
cucucuggcggugucugcg

SEQ ID NO: 270890 - RNA, 22 nt, Human
acaguguuuggcaaugcaugca

SEQ ID NO: 270891 - RNA, 18 nt, Human
ucuuggaguaaugaucaa

SEQ ID NO: 270892 - RNA, 22 nt, Human
ucagggcugccgggcagaccgu

SEQ ID NO: 270893 - RNA, 22 nt, Human
gaaaugaaacaggcuuuuaagg

SEQ ID NO: 270894 - RNA, 22 nt, Human
ccaguguguuaguggauuuccc

SEQ ID NO: 270895 - RNA, 22 nt, Human
cauguacaugccuacuaucaau

SEQ ID NO: 270896 - RNA, 22 nt, Human
cuuguccuuuacuugagacuca

SEQ ID NO: 270897 - RNA, 22 nt, Human
agcagcaugaugacagagucuc

SEQ ID NO: 270898 - RNA, 22 nt, Human
augaggcauagcagggaucgga

SEQ ID NO: 270899 - RNA, 22 nt, Human
aaaguauuugugauuuuuacca

SEQ ID NO: 270900 - RNA, 22 nt, Human
guuuacaacaugccaacugggc

SEQ ID NO: 270901 - RNA, 22 nt, Human
aagauaaacucuugauuucuga

SEQ ID NO: 270902 - RNA, 22 nt, Human
ugagguggaaggauccuuugaa

SEQ ID NO: 270903 - RNA, 22 nt, Human
ucccaggauguuuauggcuggu

SEQ ID NO: 270904 - RNA, 22 nt, Human
caagaucaaggugucagcaggu

SEQ ID NO: 270905 - RNA, 22 nt, Human
caagaucaagguaucagcagau

SEQ ID NO: 270906 - RNA, 23 nt, Human
cuggcccaggugagagguuggug

SEQ ID NO: 270907 - RNA, 22 nt, Human
uuugguuuagggucauuuaaca

SEQ ID NO: 270908 - RNA, 22 nt, Human
uuuccucugcugccauugcccc

SEQ ID NO: 270909 - RNA, 22 nt, Human
uaugugcaaauuaauugcuaga

SEQ ID NO: 270910 - RNA, 22 nt, Human
uugcuuuaucucuuaugccuca

SEQ ID NO: 270911 - RNA, 22 nt, Human
ucucagagaagugaugagcaau

SEQ ID NO: 270912 - RNA, 23 nt, Human
cagugggcuucuaacugcuccug

SEQ ID NO: 270913 - RNA, 22 nt, Human
aucuucccaggcuggggagagg

SEQ ID NO: 270914 - RNA, 22 nt, Human
cucagcagcuacaggauucggg

SEQ ID NO: 270915 - RNA, 19 nt, Human
cuugaaacuacuguugaga

SEQ ID NO: 270916 - RNA, 22 nt, Human
ucucugggcccagaccuuccuu

SEQ ID NO: 270917 - RNA, 22 nt, Human
uucuauugggcagcauugcuuc

SEQ ID NO: 270918 - RNA, 23 nt, Human
uuucaguugagaaugcacggacc

SEQ ID NO: 270919 - RNA, 22 nt, Human
gacagacaccugggggguugcu

SEQ ID NO: 270920 - RNA, 22 nt, Human
uuuauugacccaaagcgagagu

SEQ ID NO: 270921 - RNA, 22 nt, Human
auauauuggugucagaaagagu

SEQ ID NO: 270922 - RNA, 22 nt, Human
agcugcuuagagucucuucuua

SEQ ID NO: 270923 - RNA, 22 nt, Human
cugccugaguacaagucccaga

SEQ ID NO: 270924 - RNA, 22 nt, Human
cuggccugcugggugagguccu

SEQ ID NO: 270925 - RNA, 22 nt, Human
aaaggcuuagacacagaacugu

SEQ ID NO: 270926 - RNA, 22 nt, Human
uaggaaaccaaucuuuugggag

SEQ ID NO: 270927 - RNA, 22 nt, Human
gccuguguggaugcgccggugc

SEQ ID NO: 270928 - RNA, 22 nt, Human
aaagccacguggccuggggagc

SEQ ID NO: 270929 - RNA, 22 nt, Human
gggagacaguucagauaguuuc

SEQ ID NO: 270930 - RNA, 22 nt, Human
caucuuuugguaggagccgggc

SEQ ID NO: 270931 - RNA, 22 nt, Human
ggagagagaccuccaugcccag

SEQ ID NO: 270932 - RNA, 22 nt, Human
ugaucauuaucaaacuggucau

SEQ ID NO: 270933 - RNA, 22 nt, Human
ugcagagagaccccugggccag

SEQ ID NO: 270934 - RNA, 22 nt, Human
acacauauucauauguacuuac

SEQ ID NO: 270935 - RNA, 22 nt, Human
uccagugccucacugaggauuc

SEQ ID NO: 270936 - RNA, 22 nt, Human
caguuucuuaucuucaaaauug

SEQ ID NO: 270937 - RNA, 22 nt, Human
uagaaccuccacaggaccucca

SEQ ID NO: 270938 - RNA, 17 nt, Human
ccaggagcgugggucuc

SEQ ID NO: 270939 - RNA, 22 nt, Human
uccagauggauuuaagaccuaa

SEQ ID NO: 270940 - RNA, 19 nt, Human
auuuacugccuaaaaucuc

SEQ ID NO: 270941 - RNA, 22 nt, Human
aaugaauugcaguacugacuug

SEQ ID NO: 270942 - RNA, 23 nt, Human
agcugaaagcuugcaacgaggca

SEQ ID NO: 270943 - RNA, 22 nt, Human
uugugaauagugccgcaauaaa

SEQ ID NO: 270944 - RNA, 22 nt, Human
cauggcugaacacucagugacu

SEQ ID NO: 270945 - RNA, 22 nt, Human
agggcugcuuaccuggaauggc

SEQ ID NO: 270946 - RNA, 22 nt, Human
cucaggaguuggaggcuacagu

SEQ ID NO: 270947 - RNA, 22 nt, Human
ucacaucuguugauacagcauc

SEQ ID NO: 270948 - RNA, 22 nt, Human
agucuggucaucugauucuuuu

SEQ ID NO: 270949 - RNA, 22 nt, Human
uucaguauacuucauaacauuu

SEQ ID NO: 270950 - RNA, 22 nt, Human
ggggagaccaucugaaggugau

SEQ ID NO: 270951 - RNA, 22 nt, Human
auuuauuaccucggaguuucug

SEQ ID NO: 270952 - RNA, 22 nt, Human
gauuagaaauguuaccauacag

SEQ ID NO: 270953 - RNA, 22 nt, Human
caggacagcugggccaccacca

SEQ ID NO: 270954 - RNA, 22 nt, Human
auuaauauugguucauuagcug

SEQ ID NO: 270955 - RNA, 22 nt, Human
auggcaauuguaaauggaaaga

SEQ ID NO: 270956 - RNA, 22 nt, Human
caggccuggcugcagcucgccu

SEQ ID NO: 270957 - RNA, 22 nt, Human
ugacacaguagaaagaugauga

SEQ ID NO: 270958 - RNA, 22 nt, Human
caaauucucaagguuuauccca

SEQ ID NO: 270959 - RNA, 22 nt, Human
agcaggcagccuaggaagugaa

SEQ ID NO: 270960 - RNA, 22 nt, Human
uggcacagccaucuucuccugc

SEQ ID NO: 270961 - RNA, 22 nt, Human
ccccagugguugcaacagcaga

SEQ ID NO: 270962 - RNA, 22 nt, Human
gucuggcauaugcaaagugcau

SEQ ID NO: 270963 - RNA, 22 nt, Human
ggcucaggggccaggccugucc

SEQ ID NO: 270964 - RNA, 22 nt, Human
auuguauuagcacaauacaauu

SEQ ID NO: 270965 - RNA, 22 nt, Human
caucacagaaauaaacauaccu

SEQ ID NO: 270966 - RNA, 22 nt, Human
auaaacugugcuggaugaugag

SEQ ID NO: 270967 - RNA, 22 nt, Human
gcagagaagaugcccaggcuuc

SEQ ID NO: 270968 - RNA, 22 nt, Human
aggaagccacgaguggcacggg

SEQ ID NO: 270969 - RNA, 22 nt, Human
ucucaguggacgugucugucuu

SEQ ID NO: 270970 - RNA, 22 nt, Human
gagagcuggguucaaguagcug

SEQ ID NO: 270971 - RNA, 22 nt, Human
aggccagguuccucaaucuuga

SEQ ID NO: 270972 - RNA, 22 nt, Human
auucagcaaacauuuauuaucu

SEQ ID NO: 270973 - RNA, 22 nt, Human
uauguagcaauagcaucauacu

SEQ ID NO: 270974 - RNA, 22 nt, Human
augaacaucucugauccaagca

SEQ ID NO: 270975 - RNA, 22 nt, Human
ucccaggccauaaaacucagag

SEQ ID NO: 270976 - RNA, 22 nt, Human
agcugcaggcgccggggccgau

SEQ ID NO: 270977 - RNA, 22 nt, Human
cugugggagcacuggggaccga

SEQ ID NO: 270978 - RNA, 22 nt, Human
ucagcagaguuucaucuuggga

SEQ ID NO: 270979 - RNA, 22 nt, Human
cucaggucgcuauuucucuuac

SEQ ID NO: 270980 - RNA, 22 nt, Human
ccugugcccucugcauagcagc

SEQ ID NO: 270981 - RNA, 22 nt, Human
cuuguauucuuccacuuaagau

SEQ ID NO: 270982 - RNA, 22 nt, Human
caguuuaaggcaggacauggga

SEQ ID NO: 270983 - RNA, 22 nt, Human
guccugugcaccgugggauguu

SEQ ID NO: 270984 - RNA, 22 nt, Human
ucacagugggacuuuuaucgcu

SEQ ID NO: 270985 - RNA, 22 nt, Human
uuauauuaguuagacuugcugu

SEQ ID NO: 270986 - RNA, 22 nt, Human
gaggccuggaauuccagccugg

SEQ ID NO: 270987 - RNA, 22 nt, Human
uuccugugugcucucauuuagu

SEQ ID NO: 270988 - RNA, 22 nt, Human
aacuuuggcaagucagacuucu

SEQ ID NO: 270989 - RNA, 22 nt, Human
uagcuccuacaaguacagcaaa

SEQ ID NO: 270990 - RNA, 22 nt, Human
agagccaggcaggcaauguuga

SEQ ID NO: 270991 - RNA, 22 nt, Human
cauuugucaucacugagcugcc

SEQ ID NO: 270992 - RNA, 20 nt, Human
gcuugcccacaucugcacug

SEQ ID NO: 270993 - RNA, 22 nt, Human
uagguauaauauuuugaagaaa

SEQ ID NO: 270994 - RNA, 22 nt, Human
ggucagugacuuuuuucugugg

SEQ ID NO: 270995 - RNA, 22 nt, Human
agugggaauuucagugcuaaaa

SEQ ID NO: 270996 - RNA, 22 nt, Human
ugaaagcagugccaugauuaug

SEQ ID NO: 270997 - RNA, 22 nt, Human
aguuguaagaggcacaaggaag

SEQ ID NO: 270998 - RNA, 22 nt, Human
agcaggcaggaaggcagcacug

SEQ ID NO: 270999 - RNA, 22 nt, Human
cacaggcuuccaguccccagcu

SEQ ID NO: 271000 - RNA, 22 nt, Human
uuuuuagaauuggcugagaauu

SEQ ID NO: 271001 - RNA, 22 nt, Human
uagugcaggguuuuaagcacug

SEQ ID NO: 271002 - RNA, 17 nt, Human
gaccaggagaaaccagg

SEQ ID NO: 271003 - RNA, 18 nt, Human
ugcugggguagaauccac

SEQ ID NO: 271004 - RNA, 22 nt, Human
caggaagucgcagagcuggggg

SEQ ID NO: 271005 - RNA, 22 nt, Human
uggaggaaguugcuggaaguca

SEQ ID NO: 271006 - RNA, 22 nt, Human
cucagagaaaugucacaacaau

SEQ ID NO: 271007 - RNA, 22 nt, Human
ggucuccugaggcugccacacc

SEQ ID NO: 271008 - RNA, 22 nt, Human
gaauauuuuuaaagggacuaau

SEQ ID NO: 271009 - RNA, 22 nt, Human
gccagaucugacauaguggaag

SEQ ID NO: 271010 - RNA, 22 nt, Human
auuugcugagcucaaagaaaag

SEQ ID NO: 271011 - RNA, 22 nt, Human
ugguggacaccgcagccaugaa

SEQ ID NO: 271012 - RNA, 22 nt, Human
cacagcugugagaagggagccu

SEQ ID NO: 271013 - RNA, 22 nt, Human
gggcugagucugcugccuguca

SEQ ID NO: 271014 - RNA, 22 nt, Human
agaaaugaaaccaaagccuaga

SEQ ID NO: 271015 - RNA, 20 nt, Human
gcaaggcacagugaggaggg

SEQ ID NO: 271016 - RNA, 22 nt, Human
caggcccacugcuugucuaguc

SEQ ID NO: 271017 - RNA, 22 nt, Human
cuggugcuguagccugauugag

SEQ ID NO: 271018 - RNA, 22 nt, Human
gaaaguuauucagccucucuga

SEQ ID NO: 271019 - RNA, 22 nt, Human
gacaguaacugagagauguaau

SEQ ID NO: 271020 - RNA, 22 nt, Human
guacaauagcaguuuucccuuu

SEQ ID NO: 271021 - RNA, 22 nt, Human
agaaggcacucacacuggcacg

SEQ ID NO: 271022 - RNA, 21 nt, Human
cuggaucugucaucgaguuuu

SEQ ID NO: 271023 - RNA, 22 nt, Human
agaguggggaagguguugagaa

SEQ ID NO: 271024 - RNA, 22 nt, Human
ccugccuggagcugagugugga

SEQ ID NO: 271025 - RNA, 22 nt, Human
ugcagggcuauaacuccauucu

SEQ ID NO: 271026 - RNA, 22 nt, Human
uguccuuuuggcugucuauggu

SEQ ID NO: 271027 - RNA, 22 nt, Human
augcagaaagcggcaaacaggu

SEQ ID NO: 271028 - RNA, 22 nt, Human
aucuccagcagugcuuuugagc

SEQ ID NO: 271029 - RNA, 22 nt, Human
uuucacaaguuucaggauucug

SEQ ID NO: 271030 - RNA, 22 nt, Human
uuccuggcuuuugggcuaauuc

SEQ ID NO: 271031 - RNA, 22 nt, Human
uuguagauggcuuauuucugug

SEQ ID NO: 271032 - RNA, 22 nt, Human
gggcacagccuaacuauggaga

SEQ ID NO: 271033 - RNA, 23 nt, Human
agcuucauugaccuccgcagggg

SEQ ID NO: 271034 - RNA, 22 nt, Human
uucugucauccuuucuagaugu

SEQ ID NO: 271035 - RNA, 23 nt, Human
cuggccaccaucuuucuggcuuc

SEQ ID NO: 271036 - RNA, 22 nt, Human
uaguuacagcaggcaggauaua

SEQ ID NO: 271037 - RNA, 22 nt, Human
aggcaaagcgauaccagagcua

SEQ ID NO: 271038 - RNA, 22 nt, Human
aaggccagacucuggaaugaca

SEQ ID NO: 271039 - RNA, 19 nt, Human
gauuuaaacguggcucuau

SEQ ID NO: 271040 - RNA, 22 nt, Human
agagcaucuaacacauaagccu

SEQ ID NO: 271041 - RNA, 22 nt, Human
auggaaauaucuuuagagcuua

SEQ ID NO: 271042 - RNA, 19 nt, Human
uaaaaugucuguggucagu

SEQ ID NO: 271043 - RNA, 22 nt, Human
gcugggaagagaugcacaugau

SEQ ID NO: 271044 - RNA, 21 nt, Human
cacaggcuucuauacacaaug

SEQ ID NO: 271045 - RNA, 22 nt, Human
uuauucacucugaagccauccu

SEQ ID NO: 271046 - RNA, 22 nt, Human
ucagggcuccggaaguggccuc

SEQ ID NO: 271047 - RNA, 22 nt, Human
acaaaguuugugguauuccaag

SEQ ID NO: 271048 - RNA, 19 nt, Human
caggcccuggacccaucug

SEQ ID NO: 271049 - RNA, 22 nt, Human
ucagcuuucucaaagaagcugg

SEQ ID NO: 271050 - RNA, 22 nt, Human
acuggcagccacaacuggcagg

SEQ ID NO: 271051 - RNA, 21 nt, Human
uugaaggaucacuucuguacc

SEQ ID NO: 271052 - RNA, 22 nt, Human
cagcaagaacagccugaugugc

SEQ ID NO: 271053 - RNA, 22 nt, Human
ugguuauaaaaguccucucauu

SEQ ID NO: 271054 - RNA, 22 nt, Human
ggccucucuccagucagugcag

SEQ ID NO: 271055 - RNA, 21 nt, Human
ugagcaggagucaugggaaug

SEQ ID NO: 271056 - RNA, 22 nt, Human
auuuacagugugccuacuauau

SEQ ID NO: 271057 - RNA, 20 nt, Human
agacagaaucagagauaaag

SEQ ID NO: 271058 - RNA, 19 nt, Human
gggagcugucugcccgugg

SEQ ID NO: 271059 - RNA, 22 nt, Human
acaaugcaccuauuuuaaaacu

SEQ ID NO: 271060 - RNA, 17 nt, Human
ggcugcaguccaggagg

SEQ ID NO: 271061 - RNA, 22 nt, Human
caguggcuucuuccuagagcca

SEQ ID NO: 271062 - RNA, 22 nt, Human
uuagcuuuucacuugcauuauc

SEQ ID NO: 271063 - RNA, 22 nt, Human
cauguguccacccuugaacaca

SEQ ID NO: 271064 - RNA, 22 nt, Human
ucauuuguucaucugcucuucu

SEQ ID NO: 271065 - RNA, 22 nt, Human
aguccacugccccagcuccucg

SEQ ID NO: 271066 - RNA, 22 nt, Human
agcuccagaggcagugaugaag

SEQ ID NO: 271067 - RNA, 20 nt, Human
caugccaugucuacugaggc

SEQ ID NO: 271068 - RNA, 22 nt, Human
gggcagcagaauuggacagaaa

SEQ ID NO: 271069 - RNA, 22 nt, Human
agaauuguaagcaauuugauua

SEQ ID NO: 271070 - RNA, 22 nt, Human
acugggcuaccccaccauuacc

SEQ ID NO: 271071 - RNA, 22 nt, Human
uuccagauguuuaaguucugcu

SEQ ID NO: 271072 - RNA, 22 nt, Human
ccugaguguaauaaugaaggca

SEQ ID NO: 271073 - RNA, 22 nt, Human
ucagagacaccagagagcugug

SEQ ID NO: 271074 - RNA, 22 nt, Human
aaaggcuuuugguauauaggag

SEQ ID NO: 271075 - RNA, 22 nt, Human
cacacaaauauucuggaggcaa

SEQ ID NO: 271076 - RNA, 17 nt, Human
acaggccugcuugcacu

SEQ ID NO: 271077 - RNA, 22 nt, Human
ccauguuguaucucuuaucggc

SEQ ID NO: 271078 - RNA, 22 nt, Human
ucaggucugaugccucauccau

SEQ ID NO: 271079 - RNA, 22 nt, Human
ucagucuuucgaauucagccag

SEQ ID NO: 271080 - RNA, 22 nt, Human
ggcacagagcaggccacuaauc

SEQ ID NO: 271081 - RNA, 22 nt, Human
cucagucucuugggcugugaag

SEQ ID NO: 271082 - RNA, 22 nt, Human
cuuuggaggaccuaugugcaau

SEQ ID NO: 271083 - RNA, 22 nt, Human
cuuccagguccuucuugagaag

SEQ ID NO: 271084 - RNA, 22 nt, Human
cuuagacauggcagcuccaagu

SEQ ID NO: 271085 - RNA, 19 nt, Human
gcagccaggugcucuaccu

SEQ ID NO: 271086 - RNA, 22 nt, Human
cagaagccugccucagaugcac

SEQ ID NO: 271087 - RNA, 22 nt, Human
ucacacagcuaguaagggccga

SEQ ID NO: 271088 - RNA, 22 nt, Human
guuggcuauagggagauggggc

SEQ ID NO: 271089 - RNA, 22 nt, Human
gaggccagcuaguccaggaagu

SEQ ID NO: 271090 - RNA, 18 nt, Human
gcagccccucuuccuucc

SEQ ID NO: 271091 - RNA, 22 nt, Human
uuuacucuugcuacacaacugu

SEQ ID NO: 271092 - RNA, 22 nt, Human
gggucgagggucucgcccuucc

SEQ ID NO: 271093 - RNA, 22 nt, Human
ugaccuauuagauuuccuugcc

SEQ ID NO: 271094 - RNA, 23 nt, Human
uggcauagugaggggcacagaga

SEQ ID NO: 271095 - RNA, 22 nt, Human
agcugcuguggggcucggccug

SEQ ID NO: 271096 - RNA, 22 nt, Human
augucuuucuaguuaagagcua

SEQ ID NO: 271097 - RNA, 22 nt, Human
aagcauuuuagauaaagcauca

SEQ ID NO: 271098 - RNA, 22 nt, Human
gucuguagucacacaggugaca

SEQ ID NO: 271099 - RNA, 22 nt, Human
gcaggucuaucaggcugcaggu

SEQ ID NO: 271100 - RNA, 22 nt, Human
gaugaggaaugcucagcucaau

SEQ ID NO: 271101 - RNA, 22 nt, Human
ggguaggcagugcguccugccu

SEQ ID NO: 271102 - RNA, 22 nt, Human
cuguacaggucaaugauaagau

SEQ ID NO: 271103 - RNA, 22 nt, Human
uuuaguaaguucacugcaaagc

SEQ ID NO: 271104 - RNA, 22 nt, Human
auaggcagacucuuuuuggagg

SEQ ID NO: 271105 - RNA, 22 nt, Human
gugucauuacugaaagauugaa

SEQ ID NO: 271106 - RNA, 22 nt, Human
gaggccacaguccugaggcauc

SEQ ID NO: 271107 - RNA, 22 nt, Human
auuagagcaguaauuguggcag

SEQ ID NO: 271108 - RNA, 22 nt, Human
caggacuggaagucucaagaga

SEQ ID NO: 271109 - RNA, 22 nt, Human
ccucugcagcagagagccagag

SEQ ID NO: 271110 - RNA, 22 nt, Human
uucaacaacuugguucaaaugg

SEQ ID NO: 271111 - RNA, 22 nt, Human
aggcagagaaaaaccagauaug

SEQ ID NO: 271112 - RNA, 22 nt, Human
augugugccccuuuuacucuuu

SEQ ID NO: 271113 - RNA, 22 nt, Human
acauuccaaaaacuagcagaua

SEQ ID NO: 271114 - RNA, 22 nt, Human
ucccaggccacacuuggggaac

SEQ ID NO: 271115 - RNA, 22 nt, Human
augagcugggccauccagugau

SEQ ID NO: 271116 - RNA, 22 nt, Human
aaugcuaacauugguuuauauc

SEQ ID NO: 271117 - RNA, 22 nt, Human
cuuauaguaugauguugagaau

SEQ ID NO: 271118 - RNA, 22 nt, Human
ggcuucccuaaaccuuuccacu

SEQ ID NO: 271119 - RNA, 22 nt, Human
ugcuuuauggagcccaucucau

SEQ ID NO: 271120 - RNA, 22 nt, Human
ucacagcauugucacaaggcug

SEQ ID NO: 271121 - RNA, 21 nt, Human
guggcucugccaggacugaaa

SEQ ID NO: 271122 - RNA, 22 nt, Human
augcacuuuguaaucuguucaa

SEQ ID NO: 271123 - RNA, 22 nt, Human
acaagguacaaaacagagcaca

SEQ ID NO: 271124 - RNA, 22 nt, Human
cuauauuucuuggcuuuaaaca

SEQ ID NO: 271125 - RNA, 23 nt, Human
ucucagacccgaagccagaggaa

SEQ ID NO: 271126 - RNA, 22 nt, Human
uuucacaaagcauagcacuuua

SEQ ID NO: 271127 - RNA, 22 nt, Human
uggacauguccggccagacaau

SEQ ID NO: 271128 - RNA, 22 nt, Human
acuaggaaggcauaugggcaga

SEQ ID NO: 271129 - RNA, 20 nt, Human
caggccagagguuugauggc

SEQ ID NO: 271130 - RNA, 22 nt, Human
augcaaacauucgcuugucucu

SEQ ID NO: 271131 - RNA, 22 nt, Human
agugauuugacucuuuuauugu

SEQ ID NO: 271132 - RNA, 22 nt, Human
aaagcagcaaauacuuuugcac

SEQ ID NO: 271133 - RNA, 22 nt, Human
agauggucuucauaaguuuuaa

SEQ ID NO: 271134 - RNA, 22 nt, Human
uugggcugaaguagagggcaga

SEQ ID NO: 271135 - RNA, 22 nt, Human
acuuuguuccuuucacaaagaa

SEQ ID NO: 271136 - RNA, 22 nt, Human
ggcugccuacuuucccagaguu

SEQ ID NO: 271137 - RNA, 22 nt, Human
uaagaacagauaaaguuucccc

SEQ ID NO: 271138 - RNA, 22 nt, Human
gcagugcaggaacauagcuucu

SEQ ID NO: 271139 - RNA, 22 nt, Human
agcagcagaucaaacaggcuug

SEQ ID NO: 271140 - RNA, 22 nt, Human
auacaaaauauauacuggagac

SEQ ID NO: 271141 - RNA, 22 nt, Human
gcacagcccuggucggggcccc

SEQ ID NO: 271142 - RNA, 23 nt, Human
uggcuacuuuaugagguugagga

SEQ ID NO: 271143 - RNA, 20 nt, Human
cuccugguccaggagccuga

SEQ ID NO: 271144 - RNA, 22 nt, Human
aggagguggcaacugucgacag

SEQ ID NO: 271145 - RNA, 22 nt, Human
acagguagugggcuagaucugg

SEQ ID NO: 271146 - RNA, 22 nt, Human
aggcuggcggugacugcucuga

SEQ ID NO: 271147 - RNA, 21 nt, Human
cugucaccugcucagagaggg

SEQ ID NO: 271148 - RNA, 22 nt, Human
augcagaauugcuaaguaucug

SEQ ID NO: 271149 - RNA, 22 nt, Human
uauuaggguuuugaagguuugu

SEQ ID NO: 271150 - RNA, 22 nt, Human
cuccuggcucgcccccagcuga

SEQ ID NO: 271151 - RNA, 22 nt, Human
gguggcacucauuaucaggugc

SEQ ID NO: 271152 - RNA, 17 nt, Human
uccaggcagcaacugag

SEQ ID NO: 271153 - RNA, 22 nt, Human
ucucaggcuuccuggugcugug

SEQ ID NO: 271154 - RNA, 22 nt, Human
cugaagcacagcauauaaauaa

SEQ ID NO: 271155 - RNA, 22 nt, Human
gcuuuuccugacuuuccauuag

SEQ ID NO: 271156 - RNA, 22 nt, Human
cacagguuagguauuauacuau

SEQ ID NO: 271157 - RNA, 18 nt, Human
uaauccauaugcuuugcc

SEQ ID NO: 271158 - RNA, 22 nt, Human
aagcuggcaugucaccugagaa

SEQ ID NO: 271159 - RNA, 22 nt, Human
gcuaaugacugaguuuuuagca

SEQ ID NO: 271160 - RNA, 22 nt, Human
ugacauaauaauccaaacauac

SEQ ID NO: 271161 - RNA, 22 nt, Human
ccaggcaguggaagcuaaaauu

SEQ ID NO: 271162 - RNA, 20 nt, Human
guauuagguguuccucuuuc

SEQ ID NO: 271163 - RNA, 22 nt, Human
uaauagaaagguauuuuuugca

SEQ ID NO: 271164 - RNA, 22 nt, Human
ggcuccugcuguccuuugaagc

SEQ ID NO: 271165 - RNA, 22 nt, Human
auauuacuuccugguauaaaau

SEQ ID NO: 271166 - RNA, 22 nt, Human
gagggaugucaggggaccuugg

SEQ ID NO: 271167 - RNA, 22 nt, Human
caggccugugaguugaggcccc

SEQ ID NO: 271168 - RNA, 22 nt, Human
cagggcugaggacacaaguaaa

SEQ ID NO: 271169 - RNA, 22 nt, Human
aagugauacaucuagucuauaa

SEQ ID NO: 271170 - RNA, 22 nt, Human
ggaaacagcaaauuauggcaau

SEQ ID NO: 271171 - RNA, 22 nt, Human
agaagcuuccuacauuguucuu

SEQ ID NO: 271172 - RNA, 22 nt, Human
aagcugucaauguaucuagucu

SEQ ID NO: 271173 - RNA, 18 nt, Human
cacaauuuacagaugaca

SEQ ID NO: 271174 - RNA, 20 nt, Human
gcugggcuuugacugacaca

SEQ ID NO: 271175 - RNA, 22 nt, Human
agaaggcaucagaaguguguag

SEQ ID NO: 271176 - RNA, 22 nt, Human
acacuuuacucuuacaccauug

SEQ ID NO: 271177 - RNA, 22 nt, Human
ucccucucccuauugccuggag

SEQ ID NO: 271178 - RNA, 22 nt, Human
ggugagagucuuguggucccag

SEQ ID NO: 271179 - RNA, 22 nt, Human
gcaggcaccggguugcuccccu

SEQ ID NO: 271180 - RNA, 22 nt, Human
aggcucaguauagcuggcaagu

SEQ ID NO: 271181 - RNA, 22 nt, Human
ccagccaggcuggcuguggagg

SEQ ID NO: 271182 - RNA, 22 nt, Human
ucugaaauaaaugcacuguuag

SEQ ID NO: 271183 - RNA, 22 nt, Human
aucucugguuguuuugcuccca

SEQ ID NO: 271184 - RNA, 22 nt, Human
uuguuuugcuaaagggucauca

SEQ ID NO: 271185 - RNA, 22 nt, Human
uuuaucuguuguaccugcauug

SEQ ID NO: 271186 - RNA, 22 nt, Human
ucuucuguauuguuaacucagg

SEQ ID NO: 271187 - RNA, 22 nt, Human
cacagcugaccacccugcuccc

SEQ ID NO: 271188 - RNA, 22 nt, Human
gaacuauaugucuuaaagcuuu

SEQ ID NO: 271189 - RNA, 22 nt, Human
ugcacccucaucagucaaaugg

SEQ ID NO: 271190 - RNA, 22 nt, Human
auaaacugaagggaacacugag

SEQ ID NO: 271191 - RNA, 22 nt, Human
ucugccaggcuuggugcuagau

SEQ ID NO: 271192 - RNA, 23 nt, Human
aauuaaauugcuagauccagggc

SEQ ID NO: 271193 - RNA, 22 nt, Human
aauccacacaucuggcauguga

SEQ ID NO: 271194 - RNA, 22 nt, Human
gccuggccugaacuaggaggug

SEQ ID NO: 271195 - RNA, 22 nt, Human
gggcaggugccagcucccuguc

SEQ ID NO: 271196 - RNA, 22 nt, Human
uguguaaaaucugauuaauacu

SEQ ID NO: 271197 - RNA, 22 nt, Human
auggggaagcaauuggauuucc

SEQ ID NO: 271198 - RNA, 22 nt, Human
ccugagagugcgugccuccuua

SEQ ID NO: 271199 - RNA, 22 nt, Human
uuuaaugugacaucuuuuagag

SEQ ID NO: 271200 - RNA, 22 nt, Human
ccucugggccagccuggacccu

SEQ ID NO: 271201 - RNA, 22 nt, Human
ccuggaaaacaugggaaucaca

SEQ ID NO: 271202 - RNA, 22 nt, Human
ugaaauguagauuaggcauucu

SEQ ID NO: 271203 - RNA, 22 nt, Human
aaaagaggagugguuuaugaca

SEQ ID NO: 271204 - RNA, 22 nt, Human
uucaauuuagugauguuguugg

SEQ ID NO: 271205 - RNA, 20 nt, Human
guccugggagccacagcaca

SEQ ID NO: 271206 - RNA, 22 nt, Human
cucuuagagaguuguugaucag

SEQ ID NO: 271207 - RNA, 22 nt, Human
acugccuuuuccauuacuuaau

SEQ ID NO: 271208 - RNA, 22 nt, Human
ucuccuguaugggacuggcgag

SEQ ID NO: 271209 - RNA, 22 nt, Human
ugagcauuggaucaaaugacuu

SEQ ID NO: 271210 - RNA, 18 nt, Human
gcugcaggcccuccgagg

SEQ ID NO: 271211 - RNA, 22 nt, Human
ucucugagcaccuaagauauau

SEQ ID NO: 271212 - RNA, 22 nt, Human
uucagucuuguugaaaacuugg

SEQ ID NO: 271213 - RNA, 22 nt, Human
ggcagcucaccucugguccagg

SEQ ID NO: 271214 - RNA, 22 nt, Human
acagaugguagcauuauguugg

SEQ ID NO: 271215 - RNA, 23 nt, Human
caugcaaacacuauugcauuugg

SEQ ID NO: 271216 - RNA, 22 nt, Human
acacagauaaugcucauauagg

SEQ ID NO: 271217 - RNA, 22 nt, Human
cagaauaugacaagauuuuccu

SEQ ID NO: 271218 - RNA, 22 nt, Human
cagagcacccaaggagcauuug

SEQ ID NO: 271219 - RNA, 22 nt, Human
uccaggagcucauccacgucaa

SEQ ID NO: 271220 - RNA, 22 nt, Human
auggcccaggccaggauccagc

SEQ ID NO: 271221 - RNA, 22 nt, Human
cugaggaaagcugcagcgguac

SEQ ID NO: 271222 - RNA, 22 nt, Human
augcuuccaaggcuaagacaag

SEQ ID NO: 271223 - RNA, 22 nt, Human
uaagacacaugcguacaagaua

SEQ ID NO: 271224 - RNA, 22 nt, Human
ucauccaguucacauggugagu

SEQ ID NO: 271225 - RNA, 22 nt, Human
ucugaagaacugucuagagaac

SEQ ID NO: 271226 - RNA, 22 nt, Human
uccucagagcagcccuccgcau

SEQ ID NO: 271227 - RNA, 22 nt, Human
cccuugagccuggaggagcucu

SEQ ID NO: 271228 - RNA, 22 nt, Human
ucccagcagaugagcugaccua

SEQ ID NO: 271229 - RNA, 22 nt, Human
agccuuagauuugggcaagaac

SEQ ID NO: 271230 - RNA, 22 nt, Human
aaauuagaccagggcuccugga

SEQ ID NO: 271231 - RNA, 22 nt, Human
auugcugaacuuauaaaugaau

SEQ ID NO: 271232 - RNA, 22 nt, Human
cauucauucacauuuugucuau

SEQ ID NO: 271233 - RNA, 22 nt, Human
aaugaaaauuggacccuagaac

SEQ ID NO: 271234 - RNA, 18 nt, Human
cacaggagaugaccugac

SEQ ID NO: 271235 - RNA, 22 nt, Human
uuucauguuaguugguucuugg

SEQ ID NO: 271236 - RNA, 22 nt, Human
cccaggguggaugcaagcagca

SEQ ID NO: 271237 - RNA, 22 nt, Human
cagcuccuauuagacacugaau

SEQ ID NO: 271238 - RNA, 22 nt, Human
gcccucaggacaagguuacgcu

SEQ ID NO: 271239 - RNA, 23 nt, Human
uucuuuguggauaaucuccagug

SEQ ID NO: 271240 - RNA, 22 nt, Human
cuggcuuuuggaggagggucag

SEQ ID NO: 271241 - RNA, 23 nt, Human
aaagacucuccagagggaaguag

SEQ ID NO: 271242 - RNA, 22 nt, Human
caggagugaguuggggucuaca

SEQ ID NO: 271243 - RNA, 20 nt, Human
uuauaucauaaugugccaau

SEQ ID NO: 271244 - RNA, 21 nt, Human
ggcugcagggagcccuggggu

SEQ ID NO: 271245 - RNA, 22 nt, Human
aggagagagcugagcuuugcug

SEQ ID NO: 271246 - RNA, 22 nt, Human
ccaggaagguaugggaagaaaa

SEQ ID NO: 271247 - RNA, 21 nt, Human
uuacaaagcaagugcuguguc

SEQ ID NO: 271248 - RNA, 22 nt, Human
acgguaacagauaccacagacu

SEQ ID NO: 271249 - RNA, 22 nt, Human
auucauguucggggccacguug

SEQ ID NO: 271250 - RNA, 22 nt, Human
auagggcaguggcaucucuuaa

SEQ ID NO: 271251 - RNA, 22 nt, Human
cuccuuccaacaagagaaagag

SEQ ID NO: 271252 - RNA, 22 nt, Human
aggucaagauucuacauuugua

SEQ ID NO: 271253 - RNA, 22 nt, Human
cagaagcaaaugccuugcugag

SEQ ID NO: 271254 - RNA, 21 nt, Human
cuuauucacuguuauuuauca

SEQ ID NO: 271255 - RNA, 22 nt, Human
auguucuuugaaauauuuuaga

SEQ ID NO: 271256 - RNA, 22 nt, Human
aaguacaugcuguaaugauugg

SEQ ID NO: 271257 - RNA, 22 nt, Human
ccugcccuagagaugacacaau

SEQ ID NO: 271258 - RNA, 22 nt, Human
aguaagugagucacugugcugg

SEQ ID NO: 271259 - RNA, 22 nt, Human
aaauauaguaaaugcauaguuc

SEQ ID NO: 271260 - RNA, 22 nt, Human
agggcuccugaggcccuucugg

SEQ ID NO: 271261 - RNA, 22 nt, Human
cacacauuagagccaaugucag

SEQ ID NO: 271262 - RNA, 22 nt, Human
uggcagugaugcuuaugguuug

SEQ ID NO: 271263 - RNA, 22 nt, Human
uguuuauugagugccuacuaua

SEQ ID NO: 271264 - RNA, 22 nt, Human
cugucuguuuuguauacaggcc

SEQ ID NO: 271265 - RNA, 22 nt, Human
caagcugcuauagguugcuggg

SEQ ID NO: 271266 - RNA, 22 nt, Human
uucuguacucuuugagaagaau

SEQ ID NO: 271267 - RNA, 22 nt, Human
agaaggcuccaaguagaguuug

SEQ ID NO: 271268 - RNA, 22 nt, Human
ucauggauuaaauuauuaaguu

SEQ ID NO: 271269 - RNA, 22 nt, Human
gccuccccugcaauuguccuug

SEQ ID NO: 271270 - RNA, 22 nt, Human
cccaugagaccugguuuaaggc

SEQ ID NO: 271271 - RNA, 22 nt, Human
uuguuucugaguuuucauguau

SEQ ID NO: 271272 - RNA, 22 nt, Human
aguguccugugucccagacugu

SEQ ID NO: 271273 - RNA, 21 nt, Human
uagaaaucagcuggugccucu

SEQ ID NO: 271274 - RNA, 22 nt, Human
auuuuagagcuccaaguacagc

SEQ ID NO: 271275 - RNA, 22 nt, Human
ugguccugcccacgcccaucug

SEQ ID NO: 271276 - RNA, 22 nt, Human
cagcaccuguuagcauuaaaua

SEQ ID NO: 271277 - RNA, 22 nt, Human
uccagcaguccaugugagacac

SEQ ID NO: 271278 - RNA, 22 nt, Human
aaggcacagaggcagggcacuu

SEQ ID NO: 271279 - RNA, 22 nt, Human
cagugugcugcagagaacauuu

SEQ ID NO: 271280 - RNA, 22 nt, Human
auagaaacagaggucaggcauu

SEQ ID NO: 271281 - RNA, 22 nt, Human
uggcuucuccagaaaucuuggu

SEQ ID NO: 271282 - RNA, 22 nt, Human
cuuuagaaaucuggauguauuu

SEQ ID NO: 271283 - RNA, 22 nt, Human
uccuccugccuuugcuucuugu

SEQ ID NO: 271284 - RNA, 22 nt, Human
agaauuacagcuuuuagaauag

SEQ ID NO: 271285 - RNA, 22 nt, Human
ugguacaauggcaucuaucuau

SEQ ID NO: 271286 - RNA, 22 nt, Human
ucuguccauucagaauggcccu

SEQ ID NO: 271287 - RNA, 21 nt, Human
cacacagugaucuauccacau

SEQ ID NO: 271288 - RNA, 22 nt, Human
augaaacaugcuuuguggauga

SEQ ID NO: 271289 - RNA, 20 nt, Human
gggugggagagucugagggu

SEQ ID NO: 271290 - RNA, 22 nt, Human
aagggcucuguugccauuucag

SEQ ID NO: 271291 - RNA, 22 nt, Human
gaauacauggcagggagucauc

SEQ ID NO: 271292 - RNA, 22 nt, Human
cugacugugagagcaggaaugg

SEQ ID NO: 271293 - RNA, 22 nt, Human
gcaggugucuucagcaggauga

SEQ ID NO: 271294 - RNA, 22 nt, Human
ccugggcuuugcuggcaaggcc

SEQ ID NO: 271295 - RNA, 22 nt, Human
agcauccugccucuccucccaa

SEQ ID NO: 271296 - RNA, 22 nt, Human
aacuguuuggaacucuuccaca

SEQ ID NO: 271297 - RNA, 22 nt, Human
uuucacauaaauauuaugccua

SEQ ID NO: 271298 - RNA, 22 nt, Human
uacagaggggacauggaagaca

SEQ ID NO: 271299 - RNA, 22 nt, Human
cuggccucagagggucauggug

SEQ ID NO: 271300 - RNA, 22 nt, Human
ggaagcugaggcccagugaagg

SEQ ID NO: 271301 - RNA, 22 nt, Human
ccugugcccuggaaggagagag

SEQ ID NO: 271302 - RNA, 22 nt, Human
uuuuggcuccagugguuugugc

SEQ ID NO: 271303 - RNA, 22 nt, Human
aggaaacauugauauugggaaa

SEQ ID NO: 271304 - RNA, 22 nt, Human
cucccugggcagauguggcucu

SEQ ID NO: 271305 - RNA, 22 nt, Human
aguguggguuuuauggagcccu

SEQ ID NO: 271306 - RNA, 22 nt, Human
agacacagauuuuggaaaagau

SEQ ID NO: 271307 - RNA, 22 nt, Human
uggccagcccucuucccacacu

SEQ ID NO: 271308 - RNA, 22 nt, Human
cuggccaagcuucucuaagcag

SEQ ID NO: 271309 - RNA, 22 nt, Human
cagucaaacuuauaggcacauu

SEQ ID NO: 271310 - RNA, 20 nt, Human
ucaaguuuugcuugacaaga

SEQ ID NO: 271311 - RNA, 22 nt, Human
cagcagcugggaaggaggcuga

SEQ ID NO: 271312 - RNA, 22 nt, Human
cuuguauuccccuaucucuaaa

SEQ ID NO: 271313 - RNA, 22 nt, Human
ccuuccucauccauuucucuug

SEQ ID NO: 271314 - RNA, 22 nt, Human
aacacuuucuauuauuaugguu

SEQ ID NO: 271315 - RNA, 22 nt, Human
gugaggugccuaauaccgugac

SEQ ID NO: 271316 - RNA, 22 nt, Human
uggcaguugugagguucauauu

SEQ ID NO: 271317 - RNA, 22 nt, Human
auuauucaacacuugagaaauu

SEQ ID NO: 271318 - RNA, 21 nt, Human
ucucugugguccaaucccagc

SEQ ID NO: 271319 - RNA, 22 nt, Human
agggccugucagcgguguccug

SEQ ID NO: 271320 - RNA, 22 nt, Human
uaagcaaugcuguaguucaguc

SEQ ID NO: 271321 - RNA, 22 nt, Human
ugacccuuagugaacauuagaa

SEQ ID NO: 271322 - RNA, 22 nt, Human
cuggggcauugggagaggccug

SEQ ID NO: 271323 - RNA, 20 nt, Human
ugcuggaggcgccggcgcuc

SEQ ID NO: 271324 - RNA, 22 nt, Human
gaugugucuccguuucaaggca

SEQ ID NO: 271325 - RNA, 22 nt, Human
cuucugagcagaccuccugggg

SEQ ID NO: 271326 - RNA, 21 nt, Human
acagaaguggcuuggucucag

SEQ ID NO: 271327 - RNA, 22 nt, Human
cugggccugucagggcuuuuug

SEQ ID NO: 271328 - RNA, 22 nt, Human
ugcgcccagccaagucuggcac

SEQ ID NO: 271329 - RNA, 22 nt, Human
ugagcuacacacuaggcauggg

SEQ ID NO: 271330 - RNA, 22 nt, Human
aguggcagacacaaugugggca

SEQ ID NO: 271331 - RNA, 22 nt, Human
cucuccccacacccucugcaug

SEQ ID NO: 271332 - RNA, 22 nt, Human
ucaucacauaugucaugauuug

SEQ ID NO: 271333 - RNA, 22 nt, Human
gcugaaaucccagcauucccca

SEQ ID NO: 271334 - RNA, 22 nt, Human
uaagacacaaauaucuuuuaca

SEQ ID NO: 271335 - RNA, 22 nt, Human
gcugauguuuaguugauguuac

SEQ ID NO: 271336 - RNA, 22 nt, Human
uugcacuaggaaaaggcagcca

SEQ ID NO: 271337 - RNA, 22 nt, Human
caggccuggggcuggcuuccag

SEQ ID NO: 271338 - RNA, 22 nt, Human
acacacagguaaaggagccugg

SEQ ID NO: 271339 - RNA, 22 nt, Human
ugcaaaguugcaucaaaaccca

SEQ ID NO: 271340 - RNA, 22 nt, Human
gcaaauagaagauucuguugac

SEQ ID NO: 271341 - RNA, 21 nt, Human
caucuuagguuguacauauau

SEQ ID NO: 271342 - RNA, 22 nt, Human
ugcccagcaauaaaccagaaga

SEQ ID NO: 271343 - RNA, 22 nt, Human
cgguccuggcacuugcggcucc

SEQ ID NO: 271344 - RNA, 22 nt, Human
guuaaugucacuuuauguggcu

SEQ ID NO: 271345 - RNA, 22 nt, Human
cuguggcugaguuccuuauguu

SEQ ID NO: 271346 - RNA, 22 nt, Human
uggcucugaccagguagaggag

SEQ ID NO: 271347 - RNA, 22 nt, Human
uccaggccccagcaccuuggga

SEQ ID NO: 271348 - RNA, 21 nt, Human
cauuagggcagaagcaggaag

SEQ ID NO: 271349 - RNA, 22 nt, Human
ugguucauagccucacaggaua

SEQ ID NO: 271350 - RNA, 22 nt, Human
aauaagaacuugucucuggcag

SEQ ID NO: 271351 - RNA, 21 nt, Human
uugcugcccucccuuuccuca

SEQ ID NO: 271352 - RNA, 22 nt, Human
gcugggccuuccgauucucaag

SEQ ID NO: 271353 - RNA, 22 nt, Human
acacauguuuccaaaagcaccc

SEQ ID NO: 271354 - RNA, 22 nt, Human
ccugccugauuccaggauggcu

SEQ ID NO: 271355 - RNA, 22 nt, Human
gccuguauuuauugagagugua

SEQ ID NO: 271356 - RNA, 22 nt, Human
uccugucuuaaugaucucgugc

SEQ ID NO: 271357 - RNA, 22 nt, Human
uuggaauccugccucugcuacu

SEQ ID NO: 271358 - RNA, 22 nt, Human
caaguuuugauuuugcaguaaa

SEQ ID NO: 271359 - RNA, 22 nt, Human
cugggccuugccaggggugucu

SEQ ID NO: 271360 - RNA, 22 nt, Human
ccugccagggccuuggaagaaa

SEQ ID NO: 271361 - RNA, 22 nt, Human
aacuucugccaaacagcuguua

SEQ ID NO: 271362 - RNA, 22 nt, Human
uuacaaggaggauagcauuucc

SEQ ID NO: 271363 - RNA, 22 nt, Human
ugacaggucauauaagcuugca

SEQ ID NO: 271364 - RNA, 22 nt, Human
uugguggaccucaucagaaccg

SEQ ID NO: 271365 - RNA, 22 nt, Human
auuuugaaaagcauuugaguaa

SEQ ID NO: 271366 - RNA, 23 nt, Human
agggucugcucagugucguucaa

SEQ ID NO: 271367 - RNA, 22 nt, Human
aaguugaaucaguaacacaguu

SEQ ID NO: 271368 - RNA, 22 nt, Human
gccuuuaucuugggccaaguuu

SEQ ID NO: 271369 - RNA, 22 nt, Human
gcuccuggcuucacugacauca

SEQ ID NO: 271370 - RNA, 22 nt, Human
uuguauuucuuccggucucauu

SEQ ID NO: 271371 - RNA, 22 nt, Human
acuaaguaguuucacauauaau

SEQ ID NO: 271372 - RNA, 22 nt, Human
gagagaagaaagccaugguccu

SEQ ID NO: 271373 - RNA, 22 nt, Human
caguuauaagacuaagcuauuc

SEQ ID NO: 271374 - RNA, 22 nt, Human
uacagacaaagagcaugcggua

SEQ ID NO: 271375 - RNA, 22 nt, Human
ggucuccagcugggacccugca

SEQ ID NO: 271376 - RNA, 20 nt, Human
uauucaacuuuaaaaacuua

SEQ ID NO: 271377 - RNA, 22 nt, Human
agccuagaagaaguggcuacuu

SEQ ID NO: 271378 - RNA, 22 nt, Human
agaaaugacacacaugagacau

SEQ ID NO: 271379 - RNA, 22 nt, Human
aagucccaaagucacucugcuu

SEQ ID NO: 271380 - RNA, 20 nt, Human
ccuuccccacccgcugaggu

SEQ ID NO: 271381 - RNA, 22 nt, Human
uuccuggccagcuguggugagu

SEQ ID NO: 271382 - RNA, 22 nt, Human
cauaauccuugauucaaauaau

SEQ ID NO: 271383 - RNA, 22 nt, Human
auaaaaaugagggcgguagcua

SEQ ID NO: 271384 - RNA, 23 nt, Human
uuacaaguucugaaauuuccuuc

SEQ ID NO: 271385 - RNA, 22 nt, Human
uggcaugaguauaggcuucuca

SEQ ID NO: 271386 - RNA, 22 nt, Human
ugaauaugauugcaaauuuggc

SEQ ID NO: 271387 - RNA, 22 nt, Human
uguuuugucuaaucuaaauucu

SEQ ID NO: 271388 - RNA, 22 nt, Human
aggccacaaccacccugugccc

SEQ ID NO: 271389 - RNA, 22 nt, Human
cauguguuucgagacuguugag

SEQ ID NO: 271390 - RNA, 22 nt, Human
aaccaccaccaucuaguuccaa

SEQ ID NO: 271391 - RNA, 22 nt, Human
ggcagggcccugauuccugggg

SEQ ID NO: 271392 - RNA, 22 nt, Human
acagaaagaagguguauuugag

SEQ ID NO: 271393 - RNA, 22 nt, Human
ccccaucuucccugagggauuu

SEQ ID NO: 271394 - RNA, 22 nt, Human
uauguacauacaugugcauacg

SEQ ID NO: 271395 - RNA, 22 nt, Human
auguacagugauaagagggcag

SEQ ID NO: 271396 - RNA, 22 nt, Human
ggaggccaaggaggagcuugcc

SEQ ID NO: 271397 - RNA, 22 nt, Human
agacuccuucucacugccugua

SEQ ID NO: 271398 - RNA, 22 nt, Human
gagaggcugugugccauuguug

SEQ ID NO: 271399 - RNA, 19 nt, Human
caugcugaccugcuguggu

SEQ ID NO: 271400 - RNA, 23 nt, Human
uucauugauugcaaggagauugg

SEQ ID NO: 271401 - RNA, 22 nt, Human
uaguucaccccucuuuauuuuc

SEQ ID NO: 271402 - RNA, 22 nt, Human
aaggugucauccaggauggugg

SEQ ID NO: 271403 - RNA, 22 nt, Human
gagucuuaggcaaaaauaaugg

SEQ ID NO: 271404 - RNA, 22 nt, Human
uuggcagacugacaaucuguuu

SEQ ID NO: 271405 - RNA, 22 nt, Human
ccuggcagguagcauugaggag

SEQ ID NO: 271406 - RNA, 23 nt, Human
ucauucaaggcugguaucuuuca

SEQ ID NO: 271407 - RNA, 22 nt, Human
cucugaagggagggccaagccc

SEQ ID NO: 271408 - RNA, 22 nt, Human
uaccagccucuguugggggugg

SEQ ID NO: 271409 - RNA, 22 nt, Human
ugccuugaacauaguggacagu

SEQ ID NO: 271410 - RNA, 22 nt, Human
ccugggcucaagugauccuccu

SEQ ID NO: 271411 - RNA, 22 nt, Human
uuaauuuauguccaaaccagau

SEQ ID NO: 271412 - RNA, 22 nt, Human
uuuucugugugucccucgacag

SEQ ID NO: 271413 - RNA, 22 nt, Human
auucuucauggcugugaguccu

SEQ ID NO: 271414 - RNA, 21 nt, Human
ucucuguauccauggguucca

SEQ ID NO: 271415 - RNA, 22 nt, Human
uugggcuggcagagguggucuu

SEQ ID NO: 271416 - RNA, 22 nt, Human
ggugcagugcaggguaauuaua

SEQ ID NO: 271417 - RNA, 22 nt, Human
guucuuaaagauucaucaagca

SEQ ID NO: 271418 - RNA, 22 nt, Human
uuugugaagggaacagaagugu

SEQ ID NO: 271419 - RNA, 22 nt, Human
aucuagaggcaaugaaggaggu

SEQ ID NO: 271420 - RNA, 21 nt, Human
gcuccuggugcugcguggcgc

SEQ ID NO: 271421 - RNA, 22 nt, Human
gccucugcaugcucagcaccca

SEQ ID NO: 271422 - RNA, 22 nt, Human
aagccuugauucacucugugga

SEQ ID NO: 271423 - RNA, 21 nt, Human
acaaugucaaggucagacauu

SEQ ID NO: 271424 - RNA, 22 nt, Human
agcuggcauuacaggagcaugc

SEQ ID NO: 271425 - RNA, 22 nt, Human
caggcucaauggccacuugggc

SEQ ID NO: 271426 - RNA, 22 nt, Human
agacuccaaaaguuugguggaa

SEQ ID NO: 271427 - RNA, 22 nt, Human
cuuucagaggggcguacacagc

SEQ ID NO: 271428 - RNA, 22 nt, Human
gccaggguggcagaaggcccca

SEQ ID NO: 271429 - RNA, 22 nt, Human
cagucagagucacaguaauuug

SEQ ID NO: 271430 - RNA, 22 nt, Human
aagcacaggaucuugaggagcg

SEQ ID NO: 271431 - RNA, 22 nt, Human
gccuacuuaguagcugggauua

SEQ ID NO: 271432 - RNA, 22 nt, Human
acagauaaagaaacaaucacag

SEQ ID NO: 271433 - RNA, 22 nt, Human
ugagaggugaggcaugaggcau

SEQ ID NO: 271434 - RNA, 22 nt, Human
ucaggcaggaagccccugcaca

SEQ ID NO: 271435 - RNA, 22 nt, Human
uuuauugagcacccguugugcg

SEQ ID NO: 271436 - RNA, 22 nt, Human
gguaacaguauguagaguaaga

SEQ ID NO: 271437 - RNA, 20 nt, Human
ccuguguggccagcugaggc

SEQ ID NO: 271438 - RNA, 22 nt, Human
aauuuuacuucccucaguguag

SEQ ID NO: 271439 - RNA, 22 nt, Human
aggcuggcagccaccucagcag

SEQ ID NO: 271440 - RNA, 22 nt, Human
uugagaacucuguauguccagc

SEQ ID NO: 271441 - RNA, 22 nt, Human
ugcaacuaggagguucuuagcu

SEQ ID NO: 271442 - RNA, 22 nt, Human
cccucccugugugccucauuug

SEQ ID NO: 271443 - RNA, 22 nt, Human
aaagaagacagacauuucuuuc

SEQ ID NO: 271444 - RNA, 21 nt, Human
agaacugauuaaauaagcagu

SEQ ID NO: 271445 - RNA, 22 nt, Human
uuuaugucaaaacuacaguugg

SEQ ID NO: 271446 - RNA, 22 nt, Human
caggagagauaugaguccccac

SEQ ID NO: 271447 - RNA, 22 nt, Human
cauuacaaacauguuaagauuu

SEQ ID NO: 271448 - RNA, 22 nt, Human
gcaugcuuuuauaucuguuuaa

SEQ ID NO: 271449 - RNA, 22 nt, Human
ccacagcuagggcaaucugauu

SEQ ID NO: 271450 - RNA, 22 nt, Human
ucugggaaaguaaauguaaagg

SEQ ID NO: 271451 - RNA, 22 nt, Human
cagugacacccagucuggccca

SEQ ID NO: 271452 - RNA, 22 nt, Human
ugagcuuuguuguuaguauauu

SEQ ID NO: 271453 - RNA, 22 nt, Human
gcuggcugcgucaucacagggc

SEQ ID NO: 271454 - RNA, 22 nt, Human
ucuucuccuuugccauguguuu

SEQ ID NO: 271455 - RNA, 22 nt, Human
aauuauguagccauaugaaaca

SEQ ID NO: 271456 - RNA, 22 nt, Human
uagaaacagaaaacuguaauag

SEQ ID NO: 271457 - RNA, 22 nt, Human
acucuucaccgcuacugaaaua

SEQ ID NO: 271458 - RNA, 22 nt, Human
aguggggacaaugagagcaggu

SEQ ID NO: 271459 - RNA, 22 nt, Human
ucuuagaaugucaacugauguu

SEQ ID NO: 271460 - RNA, 22 nt, Human
acaggcuuuuuugcucucgaau

SEQ ID NO: 271461 - RNA, 22 nt, Human
auggcagauggcuggagcaggu

SEQ ID NO: 271462 - RNA, 22 nt, Human
ccucagcucccaugagaucugc

SEQ ID NO: 271463 - RNA, 22 nt, Human
ccaggcuuuaagagguggaaac

SEQ ID NO: 271464 - RNA, 22 nt, Human
ggcuucaucucguugacaccuc

SEQ ID NO: 271465 - RNA, 22 nt, Human
uguuaucugguugucugauuac

SEQ ID NO: 271466 - RNA, 22 nt, Human
ccugaagaaaauuccacgagaa

SEQ ID NO: 271467 - RNA, 23 nt, Human
uggcauuuuaguuagcuucagug

SEQ ID NO: 271468 - RNA, 22 nt, Human
ugaaggcugggcucagccagcu

SEQ ID NO: 271469 - RNA, 22 nt, Human
agcuggcacagaccaggagauc

SEQ ID NO: 271470 - RNA, 22 nt, Human
uagcucauguaauccgaacaua

SEQ ID NO: 271471 - RNA, 22 nt, Human
aagaacauuuaugauggcauuu

SEQ ID NO: 271472 - RNA, 22 nt, Human
ccuccugguugcaaugaaaugg

SEQ ID NO: 271473 - RNA, 22 nt, Human
ugaggggcauguguuuacacau

SEQ ID NO: 271474 - RNA, 19 nt, Human
agcuggagauuggagggca

SEQ ID NO: 271475 - RNA, 22 nt, Human
gcagagcucaagguguucagcu

SEQ ID NO: 271476 - RNA, 22 nt, Human
cuuccagaguugcguucucggu

SEQ ID NO: 271477 - RNA, 22 nt, Human
ccaaggcuucccagagaugcuc

SEQ ID NO: 271478 - RNA, 22 nt, Human
aaggccagauucucucuagggg

SEQ ID NO: 271479 - RNA, 22 nt, Human
aggcuucucugcaagauguuaa

SEQ ID NO: 271480 - RNA, 20 nt, Human
ucucagcauaagaacccuuc

SEQ ID NO: 271481 - RNA, 22 nt, Human
cugucagguuucccaucugcaa

SEQ ID NO: 271482 - RNA, 22 nt, Human
ugguuccugguucacuuggcag

SEQ ID NO: 271483 - RNA, 22 nt, Human
cugccccaggccuccuuuucuu

SEQ ID NO: 271484 - RNA, 22 nt, Human
gcaguggcaugaugugggcuca

SEQ ID NO: 271485 - RNA, 21 nt, Human
ucagaguguguuacagcaagc

SEQ ID NO: 271486 - RNA, 22 nt, Human
uuggaaauacgaguaguaucau

SEQ ID NO: 271487 - RNA, 22 nt, Human
cagagcauuuggaagccacgug

SEQ ID NO: 271488 - RNA, 21 nt, Human
uaaaggcuuuagaauggcaaa

SEQ ID NO: 271489 - RNA, 22 nt, Human
uuauuuaggagaaggaacccug

SEQ ID NO: 271490 - RNA, 22 nt, Human
cacuuuauaugcauuaccucau

SEQ ID NO: 271491 - RNA, 22 nt, Human
uccuggagaaacucagagaucu

SEQ ID NO: 271492 - RNA, 17 nt, Human
gacagcugguuccuggc

SEQ ID NO: 271493 - RNA, 22 nt, Human
uggcagcugcaggccuccugag

SEQ ID NO: 271494 - RNA, 22 nt, Human
uucauucaagggguuccugauu

SEQ ID NO: 271495 - RNA, 22 nt, Human
uccagccccuccugagccaagc

SEQ ID NO: 271496 - RNA, 22 nt, Human
aguauauggggaauugcauaau

SEQ ID NO: 271497 - RNA, 22 nt, Human
gggcucuggauggagccugcag

SEQ ID NO: 271498 - RNA, 23 nt, Human
ucuuuccuaaugaaacagugaaa

SEQ ID NO: 271499 - RNA, 19 nt, Human
ccuggguccacucagacua

SEQ ID NO: 271500 - RNA, 22 nt, Human
ugcauuauaacugaauguuguu

SEQ ID NO: 271501 - RNA, 22 nt, Human
ugaugacagcaaaaaaugcuag

SEQ ID NO: 271502 - RNA, 22 nt, Human
agaauuuaggaugcaugugaau

SEQ ID NO: 271503 - RNA, 22 nt, Human
augaauauugaaugucuuauga

SEQ ID NO: 271504 - RNA, 22 nt, Human
cauggcuggccagugggagugg

SEQ ID NO: 271505 - RNA, 22 nt, Human
aacuacauagaaauuaguauuu

SEQ ID NO: 271506 - RNA, 17 nt, Human
ugaggccauggcaccau

SEQ ID NO: 271507 - RNA, 22 nt, Human
cagguggcuuauuagggucagu

SEQ ID NO: 271508 - RNA, 22 nt, Human
agguggguucccgacucuggcu

SEQ ID NO: 271509 - RNA, 21 nt, Human
auacuuugaauuacagccuug

SEQ ID NO: 271510 - RNA, 22 nt, Human
ccccaaaacuuggugacuucca

SEQ ID NO: 271511 - RNA, 22 nt, Human
uucuuuggggucuccagcauag

SEQ ID NO: 271512 - RNA, 22 nt, Human
auauaucuucauuaggucgaga

SEQ ID NO: 271513 - RNA, 22 nt, Human
uaaaggcaguaauuccugaguu

SEQ ID NO: 271514 - RNA, 22 nt, Human
uggccaggaggcugcuucugac

SEQ ID NO: 271515 - RNA, 22 nt, Human
cagagcagguaucuuuggugaa

SEQ ID NO: 271516 - RNA, 22 nt, Human
aaucuucacagagaaaauuagg

SEQ ID NO: 271517 - RNA, 22 nt, Human
ucaugcaaggcugaaacauggu

SEQ ID NO: 271518 - RNA, 22 nt, Human
ccaggaagcggugagggcugcc

SEQ ID NO: 271519 - RNA, 22 nt, Human
agcaaauacuugaauaaaaaga

SEQ ID NO: 271520 - RNA, 22 nt, Human
aagcaugggaggccuggaggag

SEQ ID NO: 271521 - RNA, 22 nt, Human
caaaugcaaaauauaacccugu

SEQ ID NO: 271522 - RNA, 22 nt, Human
gcugccacucugagcuugcuuc

SEQ ID NO: 271523 - RNA, 22 nt, Human
cucccuggcagccgcacuccug

SEQ ID NO: 271524 - RNA, 22 nt, Human
uucucugggacaggaacaguuu

SEQ ID NO: 271525 - RNA, 22 nt, Human
ucccagugggaagcagcacgcu

SEQ ID NO: 271526 - RNA, 22 nt, Human
gaugcuucaagcuuccuuauaa

SEQ ID NO: 271527 - RNA, 22 nt, Human
cuucuuaaugacagauuaaaau

SEQ ID NO: 271528 - RNA, 22 nt, Human
agauuuagacugccuuaaucau

SEQ ID NO: 271529 - RNA, 22 nt, Human
aaguauuucagcgguucuuugu

SEQ ID NO: 271530 - RNA, 22 nt, Human
gaggcugcccacaccugcgccg

SEQ ID NO: 271531 - RNA, 22 nt, Human
accuccuggcuuaucauggaca

SEQ ID NO: 271532 - RNA, 22 nt, Human
cagguggcuucucccuaggcca

SEQ ID NO: 271533 - RNA, 22 nt, Human
uuauuuuaccuuccucugagcu

SEQ ID NO: 271534 - RNA, 22 nt, Human
caacaguuccuccauccucucu

SEQ ID NO: 271535 - RNA, 22 nt, Human
guuuuccugaaacugauggugu

SEQ ID NO: 271536 - RNA, 22 nt, Human
cagauggcacagauuuagagug

SEQ ID NO: 271537 - RNA, 22 nt, Human
ccaggugggcgugucuucaccu

SEQ ID NO: 271538 - RNA, 19 nt, Human
agugugaguaauuggaguu

SEQ ID NO: 271539 - RNA, 22 nt, Human
ugucugggucaccccuccuggc

SEQ ID NO: 271540 - RNA, 22 nt, Human
caaggccuugcugucuccuccu

SEQ ID NO: 271541 - RNA, 22 nt, Human
aaaaacagaaugugucuaacuc

SEQ ID NO: 271542 - RNA, 22 nt, Human
ggcaauaguuguggguucuuua

SEQ ID NO: 271543 - RNA, 22 nt, Human
aaggcaaugcuaagagguuugg

SEQ ID NO: 271544 - RNA, 21 nt, Human
acuuggccaggcccccaccug

SEQ ID NO: 271545 - RNA, 22 nt, Human
caaggcugagaaauucugcccu

SEQ ID NO: 271546 - RNA, 22 nt, Human
auuuggaaacaauuauauucuu

SEQ ID NO: 271547 - RNA, 22 nt, Human
cggcuggguucggcugcaggcc

SEQ ID NO: 271548 - RNA, 22 nt, Human
uucaaucauuuuuacauagucc

SEQ ID NO: 271549 - RNA, 22 nt, Human
guaggggaugguucccuagaaa

SEQ ID NO: 271550 - RNA, 22 nt, Human
ccagcagcugcaaagccugggu

SEQ ID NO: 271551 - RNA, 22 nt, Human
ugugugucagucuuguuuaggg

SEQ ID NO: 271552 - RNA, 23 nt, Human
uggcucagcuaguuuuccauuuc

SEQ ID NO: 271553 - RNA, 22 nt, Human
uucauucuugggaucagagagu

SEQ ID NO: 271554 - RNA, 22 nt, Human
aacuaguaaaagcaacaguaua

SEQ ID NO: 271555 - RNA, 22 nt, Human
uucauuuagcaugcuaaaccug

SEQ ID NO: 271556 - RNA, 22 nt, Human
gagggggcucugccaaccuguc

SEQ ID NO: 271557 - RNA, 22 nt, Human
uccuggucuacacugcauuggg

SEQ ID NO: 271558 - RNA, 22 nt, Human
ugggagcaggugugcuagggaa

SEQ ID NO: 271559 - RNA, 20 nt, Human
cucugggcugcguugcaaac

SEQ ID NO: 271560 - RNA, 16 nt, Human
gggcugggggauucug

SEQ ID NO: 271561 - RNA, 22 nt, Human
gccuggcacauugcaguggauu

SEQ ID NO: 271562 - RNA, 22 nt, Human
uguaaugagaaagagagugaau

SEQ ID NO: 271563 - RNA, 22 nt, Human
cccaguggggagcugagguuca

SEQ ID NO: 271564 - RNA, 20 nt, Human
gaaucuuacuacauucucuc

SEQ ID NO: 271565 - RNA, 22 nt, Human
caacugaacugauaucaacuau

SEQ ID NO: 271566 - RNA, 22 nt, Human
augcugaaugaaagaaauuagu

SEQ ID NO: 271567 - RNA, 22 nt, Human
gcccagcaaggaccaagggccg

SEQ ID NO: 271568 - RNA, 22 nt, Human
gacagcagaugaagccugcaga

SEQ ID NO: 271569 - RNA, 22 nt, Human
ggugcugagagccuaggagggc

SEQ ID NO: 271570 - RNA, 22 nt, Human
cugagcagaccauggcagaggu

SEQ ID NO: 271571 - RNA, 22 nt, Human
ucaaaugcaggucuggucuugg

SEQ ID NO: 271572 - RNA, 23 nt, Human
aacugucuugcaagugugauacc

SEQ ID NO: 271573 - RNA, 22 nt, Human
auugugaauugagaguacuucu

SEQ ID NO: 271574 - RNA, 22 nt, Human
acuaaugauuauugucauugug

SEQ ID NO: 271575 - RNA, 22 nt, Human
gugggugugagugacggcgucc

SEQ ID NO: 271576 - RNA, 22 nt, Human
acagcagguuacaguggcacag

SEQ ID NO: 271577 - RNA, 22 nt, Human
uaugcacacauuagcacagggu

SEQ ID NO: 271578 - RNA, 22 nt, Human
uggcucagaguucaucuuuuag

SEQ ID NO: 271579 - RNA, 22 nt, Human
acugggcuagaguggaagcugg

SEQ ID NO: 271580 - RNA, 22 nt, Human
uggggaaaaugcagaagauuac

SEQ ID NO: 271581 - RNA, 20 nt, Human
ugucauuuauuuaucaaaug

SEQ ID NO: 271582 - RNA, 22 nt, Human
aguaacacuuggaaugauagca

SEQ ID NO: 271583 - RNA, 22 nt, Human
aaacauuugcaacucgguuugg

SEQ ID NO: 271584 - RNA, 22 nt, Human
acuuugauaguuuaaucuagga

SEQ ID NO: 271585 - RNA, 22 nt, Human
uaaggaauagugcuaugaaaaa

SEQ ID NO: 271586 - RNA, 22 nt, Human
gccuggcuuggggcucaguggu

SEQ ID NO: 271587 - RNA, 22 nt, Human
ugcucugcacaucccucacaaa

SEQ ID NO: 271588 - RNA, 22 nt, Human
aggcaggcucaggcccaugcuu

SEQ ID NO: 271589 - RNA, 22 nt, Human
uccaggcuagguuuacaggaca

SEQ ID NO: 271590 - RNA, 22 nt, Human
ggcagccauggacacuggcuag

SEQ ID NO: 271591 - RNA, 22 nt, Human
caaauguauaaauguacuuucu

SEQ ID NO: 271592 - RNA, 20 nt, Human
uaucuuacuuuagucauuug

SEQ ID NO: 271593 - RNA, 22 nt, Human
uggaaacugugguauuucuuua

SEQ ID NO: 271594 - RNA, 18 nt, Human
gugcugugggcaguggcc

SEQ ID NO: 271595 - RNA, 22 nt, Human
ugaaauuagugaaguuacaguu

SEQ ID NO: 271596 - RNA, 22 nt, Human
acgaugcuggauuaucucaagg

SEQ ID NO: 271597 - RNA, 22 nt, Human
cacuauaucuguucuuguuuau

SEQ ID NO: 271598 - RNA, 22 nt, Human
ugggcucuuccuauaguuuaua

SEQ ID NO: 271599 - RNA, 21 nt, Human
uauuucuuugacucucucccu

SEQ ID NO: 271600 - RNA, 22 nt, Human
acacugaguuuuaccaggcaca

SEQ ID NO: 271601 - RNA, 22 nt, Human
aaauagcauaaaauaggaagcu

SEQ ID NO: 271602 - RNA, 22 nt, Human
cuaacauuuauugagcacuuag

SEQ ID NO: 271603 - RNA, 22 nt, Human
acaaagugcacaagaugagaac

SEQ ID NO: 271604 - RNA, 18 nt, Human
gggcaucauucacaaagu

SEQ ID NO: 271605 - RNA, 22 nt, Human
ccugcuccugcuauucuucugg

SEQ ID NO: 271606 - RNA, 22 nt, Human
cagccaggggcuggcguguuga

SEQ ID NO: 271607 - RNA, 22 nt, Human
agacacuguucucacaugcuug

SEQ ID NO: 271608 - RNA, 22 nt, Human
uguauuagagcaguagaauuau

SEQ ID NO: 271609 - RNA, 22 nt, Human
uggucacccacugggacugcgg

SEQ ID NO: 271610 - RNA, 22 nt, Human
uagcuacauacuuggccauucu

SEQ ID NO: 271611 - RNA, 22 nt, Human
uggcccaggggcucuugguguu

SEQ ID NO: 271612 - RNA, 22 nt, Human
uuuccaggugcauagaaaacag

SEQ ID NO: 271613 - RNA, 22 nt, Human
aucuuacacgauaacuguuagu

SEQ ID NO: 271614 - RNA, 22 nt, Human
aacugcauuguacuaaacuugu

SEQ ID NO: 271615 - RNA, 22 nt, Human
cuuuggaggaaaauugagguca

SEQ ID NO: 271616 - RNA, 22 nt, Human
uuucaucuuccuuggcauaggu

SEQ ID NO: 271617 - RNA, 22 nt, Human
uucuggaagcugcagguggccg

SEQ ID NO: 271618 - RNA, 22 nt, Human
ugcccuggcauuggguuggaua

SEQ ID NO: 271619 - RNA, 22 nt, Human
aggcacugggaauaugcugagg

SEQ ID NO: 271620 - RNA, 22 nt, Human
aacccuggagaaggcuuuggau

SEQ ID NO: 271621 - RNA, 22 nt, Human
uucuucuucuggcugcaccugg

SEQ ID NO: 271622 - RNA, 22 nt, Human
ucagaauaaacaugggcauggg

SEQ ID NO: 271623 - RNA, 22 nt, Human
uugguacaugcagauauuuagu

SEQ ID NO: 271624 - RNA, 22 nt, Human
ugguccuguagcacuugauuag

SEQ ID NO: 271625 - RNA, 22 nt, Human
gauuuaaaguagaccuuuguuu

SEQ ID NO: 271626 - RNA, 22 nt, Human
cugcugggcuccucaugugacu

SEQ ID NO: 271627 - RNA, 22 nt, Human
agcugguggagccuuucuguuu

SEQ ID NO: 271628 - RNA, 22 nt, Human
aaggcauauauucuaaacagga

SEQ ID NO: 271629 - RNA, 22 nt, Human
uguuacugugguuaccagaagc

SEQ ID NO: 271630 - RNA, 22 nt, Human
agagccagcaagugaauaguga

SEQ ID NO: 271631 - RNA, 22 nt, Human
cugcucuguucccccaucaucu

SEQ ID NO: 271632 - RNA, 22 nt, Human
cagggcucagggacugcagaaa

SEQ ID NO: 271633 - RNA, 22 nt, Human
uagggcaggugaagaaaagcua

SEQ ID NO: 271634 - RNA, 22 nt, Human
gcugucugcugggucgcucagg

SEQ ID NO: 271635 - RNA, 22 nt, Human
acaguuuaucgauucaccuacc

SEQ ID NO: 271636 - RNA, 21 nt, Human
agagucugagugugcaagggc

SEQ ID NO: 271637 - RNA, 22 nt, Human
aaagaacuaccuguaugauauu

SEQ ID NO: 271638 - RNA, 23 nt, Human
uuucaacuccugccauuauuucu

SEQ ID NO: 271639 - RNA, 23 nt, Human
ccucaaauguagccuuuuuccca

SEQ ID NO: 271640 - RNA, 22 nt, Human
uggcuggcugucaaggaaagcc

SEQ ID NO: 271641 - RNA, 22 nt, Human
gcccucagaggacagcugacuu

SEQ ID NO: 271642 - RNA, 22 nt, Human
agccuugaaccaauuguuuagc

SEQ ID NO: 271643 - RNA, 22 nt, Human
augccagaagagucugcaggga

SEQ ID NO: 271644 - RNA, 22 nt, Human
agccucugggggagcugggagc

SEQ ID NO: 271645 - RNA, 22 nt, Human
cuguauuugaaagaaaagauuu

SEQ ID NO: 271646 - RNA, 22 nt, Human
acuagaaauguauugguagcug

SEQ ID NO: 271647 - RNA, 23 nt, Human
uagauccuuccaacuacucuuac

SEQ ID NO: 271648 - RNA, 22 nt, Human
aucuucuacuuugccaaucagg

SEQ ID NO: 271649 - RNA, 22 nt, Human
aagaugauaggacuugcuuaag

SEQ ID NO: 271650 - RNA, 21 nt, Human
aaauguguuccauaaugcuuu

SEQ ID NO: 271651 - RNA, 22 nt, Human
aggcaaagaggauauuuugggg

SEQ ID NO: 271652 - RNA, 22 nt, Human
cugagggauguggauuuugguc

SEQ ID NO: 271653 - RNA, 22 nt, Human
cugcaggguuuuucaaggacaa

SEQ ID NO: 271654 - RNA, 22 nt, Human
uccugggguuuuggccgcagcu

SEQ ID NO: 271655 - RNA, 20 nt, Human
ucuggccccuuccuguccug

SEQ ID NO: 271656 - RNA, 22 nt, Human
aggagcucauugaaguggauga

SEQ ID NO: 271657 - RNA, 22 nt, Human
guccucagaagccugcuuagcu

SEQ ID NO: 271658 - RNA, 22 nt, Human
ucucauggagucaggagcagaa

SEQ ID NO: 271659 - RNA, 22 nt, Human
uuugcaaauaccaugaaacuug

SEQ ID NO: 271660 - RNA, 22 nt, Human
aggcuucuugauaaaaugcaga

SEQ ID NO: 271661 - RNA, 22 nt, Human
ccugccuucagcccugaagucu

SEQ ID NO: 271662 - RNA, 22 nt, Human
aacacuuuuuauauauuguauc

SEQ ID NO: 271663 - RNA, 20 nt, Human
gcagcagugcaaguccucuu

SEQ ID NO: 271664 - RNA, 22 nt, Human
uuuacagaugaggauacugagg

SEQ ID NO: 271665 - RNA, 22 nt, Human
auuagaagcgugaauccuuuca

SEQ ID NO: 271666 - RNA, 22 nt, Human
uccagggcaugcucagacucag

SEQ ID NO: 271667 - RNA, 22 nt, Human
cccacacaaaucauggggagaa

SEQ ID NO: 271668 - RNA, 22 nt, Human
ucaggaagugccuaggcuggcc

SEQ ID NO: 271669 - RNA, 22 nt, Human
ccagaggugaacaggaggcugu

SEQ ID NO: 271670 - RNA, 22 nt, Human
cccaggguagcugagcuggcag

SEQ ID NO: 271671 - RNA, 22 nt, Human
uucugucucuguguuuacauua

SEQ ID NO: 271672 - RNA, 22 nt, Human
cauuuguaggaugcuucuuguu

SEQ ID NO: 271673 - RNA, 22 nt, Human
ugcugccacauuuaaagagggg

SEQ ID NO: 271674 - RNA, 22 nt, Human
aaaucucaggccucuauuuacu

SEQ ID NO: 271675 - RNA, 22 nt, Human
ucuggaggcucugagggugagu

SEQ ID NO: 271676 - RNA, 22 nt, Human
cagagguacaagcuaaguuggg

SEQ ID NO: 271677 - RNA, 22 nt, Human
ucagagccaaucauggugcauu

SEQ ID NO: 271678 - RNA, 22 nt, Human
aaggugcucacgggcucaggga

SEQ ID NO: 271679 - RNA, 22 nt, Human
acaggacugugauccaguaacc

SEQ ID NO: 271680 - RNA, 22 nt, Human
ggcuccagauguccccuggcaa

SEQ ID NO: 271681 - RNA, 22 nt, Human
caguugcagcugugacauugcg

SEQ ID NO: 271682 - RNA, 22 nt, Human
gcaccugccugggacugaagau

SEQ ID NO: 271683 - RNA, 22 nt, Human
ucuauacaaguuucacuuugac

SEQ ID NO: 271684 - RNA, 18 nt, Human
ucuggagggaagcuuuga

SEQ ID NO: 271685 - RNA, 22 nt, Human
augcuuuuuaaacuuaauugga

SEQ ID NO: 271686 - RNA, 22 nt, Human
gagauccacuuaauuuuuuugc

SEQ ID NO: 271687 - RNA, 22 nt, Human
uaggauaugcauuuuuauacau

SEQ ID NO: 271688 - RNA, 22 nt, Human
acacaguucuuucacuguuggu

SEQ ID NO: 271689 - RNA, 22 nt, Human
agcaacagcccuguuucauuag

SEQ ID NO: 271690 - RNA, 22 nt, Human
cuggcucccguuguccuugaag

SEQ ID NO: 271691 - RNA, 22 nt, Human
aaacaaugacaacacagcugcg

SEQ ID NO: 271692 - RNA, 22 nt, Human
gguguccucaugauuuucuaga

SEQ ID NO: 271693 - RNA, 22 nt, Human
uucaacauguucuacauaaggg

SEQ ID NO: 271694 - RNA, 22 nt, Human
agagagggaauauuugggguau

SEQ ID NO: 271695 - RNA, 22 nt, Human
ugcaagagguaaaaugaaagga

SEQ ID NO: 271696 - RNA, 22 nt, Human
agcauccaggccagguugggca

SEQ ID NO: 271697 - RNA, 22 nt, Human
aaguuaguggauaaacagcaaa

SEQ ID NO: 271698 - RNA, 22 nt, Human
cuggacagaaagggcugcugug

SEQ ID NO: 271699 - RNA, 22 nt, Human
uuucauaaccucaagcuacagu

SEQ ID NO: 271700 - RNA, 21 nt, Human
gugguuauuuucauuagcauc

SEQ ID NO: 271701 - RNA, 22 nt, Human
gaaggagggugcggaucugagc

SEQ ID NO: 271702 - RNA, 22 nt, Human
gauugagucugaggaugcugca

SEQ ID NO: 271703 - RNA, 22 nt, Human
gagcccugcccacuugucugag

SEQ ID NO: 271704 - RNA, 22 nt, Human
aagcacugggaggaggcugaga

SEQ ID NO: 271705 - RNA, 18 nt, Human
ucucucugauaacauuuu

SEQ ID NO: 271706 - RNA, 22 nt, Human
agggccugggauguccuccuag

SEQ ID NO: 271707 - RNA, 22 nt, Human
aaagugcugugggcuguaagug

SEQ ID NO: 271708 - RNA, 22 nt, Human
agcuugaauuauucugcucuua

SEQ ID NO: 271709 - RNA, 22 nt, Human
auuuuacauaaggaagguuuaa

SEQ ID NO: 271710 - RNA, 22 nt, Human
gacagacauuuccugauccaau

SEQ ID NO: 271711 - RNA, 21 nt, Human
uauuaauaugucuaagcugau

SEQ ID NO: 271712 - RNA, 22 nt, Human
ugauucacagacuucacaaggc

SEQ ID NO: 271713 - RNA, 22 nt, Human
ccaggaggcucugcccauccca

SEQ ID NO: 271714 - RNA, 18 nt, Human
auccaaaaagauggaagu

SEQ ID NO: 271715 - RNA, 22 nt, Human
acccuccaggcugcagcuccug

SEQ ID NO: 271716 - RNA, 22 nt, Human
caugugugagugagcagucuuc

SEQ ID NO: 271717 - RNA, 19 nt, Human
cagcugccuuuucuuugca

SEQ ID NO: 271718 - RNA, 22 nt, Human
uucauucagguguauuuauggg

SEQ ID NO: 271719 - RNA, 22 nt, Human
gucucaguaagaaaggcuccug

SEQ ID NO: 271720 - RNA, 22 nt, Human
ccagguggaaggucugugcucu

SEQ ID NO: 271721 - RNA, 22 nt, Human
cugcugaaccuuugcuagauaa

SEQ ID NO: 271722 - RNA, 22 nt, Human
auagcauauaaguuauaaaacu

SEQ ID NO: 271723 - RNA, 23 nt, Human
uggaagaaaaugguuuggcugug

SEQ ID NO: 271724 - RNA, 19 nt, Human
uucuggucuggaaucaagg

SEQ ID NO: 271725 - RNA, 22 nt, Human
cugccaggcagcagagggagaa

SEQ ID NO: 271726 - RNA, 22 nt, Human
ggcugaggguauagcuguccca

SEQ ID NO: 271727 - RNA, 22 nt, Human
ucagcuggcagguucugggaag

SEQ ID NO: 271728 - RNA, 22 nt, Human
cugggcugucaauggcccucug

SEQ ID NO: 271729 - RNA, 22 nt, Human
ucuucaggaagggaaaucaucc

SEQ ID NO: 271730 - RNA, 22 nt, Human
aucagaaaguucaucauguuug

SEQ ID NO: 271731 - RNA, 22 nt, Human
uugaggcagcccuuaauuggga

SEQ ID NO: 271732 - RNA, 22 nt, Human
uuaaacagagucugaaauguaa

SEQ ID NO: 271733 - RNA, 22 nt, Human
cagcaugauuggugucugguga

SEQ ID NO: 271734 - RNA, 22 nt, Human
cugucccagugauccugagugc

SEQ ID NO: 271735 - RNA, 22 nt, Human
uuagagagaaccaucaggaucu

SEQ ID NO: 271736 - RNA, 22 nt, Human
gaggcuuuucucuaaauagugg

SEQ ID NO: 271737 - RNA, 22 nt, Human
guuauuuuaacuucucaguaau

SEQ ID NO: 271738 - RNA, 22 nt, Human
uucaauuucauaauaucuagcu

SEQ ID NO: 271739 - RNA, 22 nt, Human
cauggcaauaaaccuacacagu

SEQ ID NO: 271740 - RNA, 22 nt, Human
ucaggcuuugggucaggcucug

SEQ ID NO: 271741 - RNA, 22 nt, Human
ugggccaggggccucuucugau

SEQ ID NO: 271742 - RNA, 22 nt, Human
aaugugucccuuauuucacagg

SEQ ID NO: 271743 - RNA, 22 nt, Human
cugaggagcccccucucagcau

SEQ ID NO: 271744 - RNA, 21 nt, Human
cacaugugaauuacugaacug

SEQ ID NO: 271745 - RNA, 22 nt, Human
aaagggccuccgccugggcagg

SEQ ID NO: 271746 - RNA, 22 nt, Human
ugggcacagggguaggaaugag

SEQ ID NO: 271747 - RNA, 22 nt, Human
uccaguccagggaauggcugau

SEQ ID NO: 271748 - RNA, 23 nt, Human
acagaggcuuaaaugaguggcag

SEQ ID NO: 271749 - RNA, 22 nt, Human
ugaguucuaggcuuaaaacuaa

SEQ ID NO: 271750 - RNA, 22 nt, Human
ccaggagagcagaagcccaggc

SEQ ID NO: 271751 - RNA, 22 nt, Human
cuggcugggcagacagaaugcu

SEQ ID NO: 271752 - RNA, 22 nt, Human
uguuuacuccugauauauuuuu

SEQ ID NO: 271753 - RNA, 22 nt, Human
cauacauuuauacacaucuaug

SEQ ID NO: 271754 - RNA, 22 nt, Human
ccagcuuuuagugggcuuauua

SEQ ID NO: 271755 - RNA, 22 nt, Human
aggggaugccugaggaucugua

SEQ ID NO: 271756 - RNA, 22 nt, Human
agagggugaaugagauagaaaa

SEQ ID NO: 271757 - RNA, 22 nt, Human
uuucaaggugcaggaggguuuu

SEQ ID NO: 271758 - RNA, 22 nt, Human
uggaauaugcaauugcauuuca

SEQ ID NO: 271759 - RNA, 22 nt, Human
gcugcagaccucaugcaggugg

SEQ ID NO: 271760 - RNA, 22 nt, Human
cuccuggcucugccacuuacua

SEQ ID NO: 271761 - RNA, 22 nt, Human
gcacacauucggauucuuaacc

SEQ ID NO: 271762 - RNA, 22 nt, Human
uucuguuagaauuuugaaaaua

SEQ ID NO: 271763 - RNA, 22 nt, Human
ucauugaggaaagguaguggcu

SEQ ID NO: 271764 - RNA, 22 nt, Human
uggccucaaucuguccuccagc

SEQ ID NO: 271765 - RNA, 22 nt, Human
ggucccagcugcucaagaggcu

SEQ ID NO: 271766 - RNA, 22 nt, Human
aacuggaagagugaauauaacu

SEQ ID NO: 271767 - RNA, 22 nt, Human
ugcucccacacuacucggaggc

SEQ ID NO: 271768 - RNA, 22 nt, Human
uucuagaugcuuauaggcauau

SEQ ID NO: 271769 - RNA, 20 nt, Human
gacaggugcuaaagaggggc

SEQ ID NO: 271770 - RNA, 22 nt, Human
cuuuggaaguaaagucagcagg

SEQ ID NO: 271771 - RNA, 22 nt, Human
gugccuggaacuggguaggcug

SEQ ID NO: 271772 - RNA, 22 nt, Human
uagcaagagugggcuuuguggg

SEQ ID NO: 271773 - RNA, 22 nt, Human
auuuuguuauaggagcugaaau

SEQ ID NO: 271774 - RNA, 22 nt, Human
ugagcccaggaguaugaggcug

SEQ ID NO: 271775 - RNA, 17 nt, Human
uaaauacacaaggguau

SEQ ID NO: 271776 - RNA, 22 nt, Human
gcugggcaacggaagagagaaa

SEQ ID NO: 271777 - RNA, 22 nt, Human
ucagagaaaugaaguagggauu

SEQ ID NO: 271778 - RNA, 22 nt, Human
ugguccaguucugugauauugc

SEQ ID NO: 271779 - RNA, 22 nt, Human
gaccacagauuccuaaguggca

SEQ ID NO: 271780 - RNA, 22 nt, Human
aauaacagugccaugaaauuga

SEQ ID NO: 271781 - RNA, 22 nt, Human
gaggcugguucccuugaucuuu

SEQ ID NO: 271782 - RNA, 22 nt, Human
ucccagggucaguggugaggcc

SEQ ID NO: 271783 - RNA, 22 nt, Human
uuuagagcugugcugccacaug

SEQ ID NO: 271784 - RNA, 22 nt, Human
auuggcuuucuuuugugaaaau

SEQ ID NO: 271785 - RNA, 22 nt, Human
aaagaagagcuggaaggagucu

SEQ ID NO: 271786 - RNA, 19 nt, Human
uuugcagugguuccuuugu

SEQ ID NO: 271787 - RNA, 22 nt, Human
cucagaggucaagagcagagcu

SEQ ID NO: 271788 - RNA, 22 nt, Human
uggcugagcucccuguguguug

SEQ ID NO: 271789 - RNA, 21 nt, Human
gcccagcaaggugagaaggcc

SEQ ID NO: 271790 - RNA, 22 nt, Human
cagacaaggccaucuuucauuu

SEQ ID NO: 271791 - RNA, 22 nt, Human
auucaguguaguuauuaucuuu

SEQ ID NO: 271792 - RNA, 22 nt, Human
cccuggcagaaugucucugggc

SEQ ID NO: 271793 - RNA, 22 nt, Human
auagacauauggcuuuguuucu

SEQ ID NO: 271794 - RNA, 20 nt, Human
uccagcccagguccugccug

SEQ ID NO: 271795 - RNA, 22 nt, Human
uguguccaacccagggacaagu

SEQ ID NO: 271796 - RNA, 22 nt, Human
ucaugccugauuauguuacuca

SEQ ID NO: 271797 - RNA, 22 nt, Human
ccagggccaagagaccucgagg

SEQ ID NO: 271798 - RNA, 22 nt, Human
gagagggauacugaguuuuggu

SEQ ID NO: 271799 - RNA, 22 nt, Human
ugggaagaggcgggaggcuguu

SEQ ID NO: 271800 - RNA, 22 nt, Human
ugguccugguagcggugugcuu

SEQ ID NO: 271801 - RNA, 22 nt, Human
gugugagagcaaaacugcagga

SEQ ID NO: 271802 - RNA, 22 nt, Human
ugccugguauuugaauaaagag

SEQ ID NO: 271803 - RNA, 23 nt, Human
ugaaucaauuaugggauucaaug

SEQ ID NO: 271804 - RNA, 22 nt, Human
aaggcugacguuuguguuuauu

SEQ ID NO: 271805 - RNA, 22 nt, Human
agagauuugucaaugauuucca

SEQ ID NO: 271806 - RNA, 23 nt, Human
aaucuggcugauguuuuuucucu

SEQ ID NO: 271807 - RNA, 23 nt, Human
auugagaaggauacauuguucuc

SEQ ID NO: 271808 - RNA, 22 nt, Human
cagagggcacucggagugacau

SEQ ID NO: 271809 - RNA, 22 nt, Human
agcugugaccuucaagagcuac

SEQ ID NO: 271810 - RNA, 22 nt, Human
ggccuugccucaauagcuccac

SEQ ID NO: 271811 - RNA, 22 nt, Human
uguguccuuucuaaugcccaga

SEQ ID NO: 271812 - RNA, 22 nt, Human
aaauaguccugggaauaguacu

SEQ ID NO: 271813 - RNA, 22 nt, Human
cauaugaaauaugaguugaaca

SEQ ID NO: 271814 - RNA, 22 nt, Human
aggacuuuucaucagcuauccu

SEQ ID NO: 271815 - RNA, 22 nt, Human
cagcuauugauaaauguugggg

SEQ ID NO: 271816 - RNA, 22 nt, Human
gguguccuucguccgcuggcau

SEQ ID NO: 271817 - RNA, 22 nt, Human
uguagcucuccagccagcaagg

SEQ ID NO: 271818 - RNA, 22 nt, Human
cucaggagacaguguccacaug

SEQ ID NO: 271819 - RNA, 22 nt, Human
aggggagccgaggggcaucugu

SEQ ID NO: 271820 - RNA, 22 nt, Human
ucagcuuucucuucuaucgaua

SEQ ID NO: 271821 - RNA, 18 nt, Human
gcagugccagccucuccu

SEQ ID NO: 271822 - RNA, 22 nt, Human
caguuucuucaucaguuaagca

SEQ ID NO: 271823 - RNA, 22 nt, Human
ugagggcagagcacuggggagc

SEQ ID NO: 271824 - RNA, 22 nt, Human
caggcuagauuggggccaguag

SEQ ID NO: 271825 - RNA, 22 nt, Human
cagggccuguacaagucccacc

SEQ ID NO: 271826 - RNA, 22 nt, Human
gaggcagcucuucugaaugggg

SEQ ID NO: 271827 - RNA, 22 nt, Human
uguguccuuccaguuuuuccug

SEQ ID NO: 271828 - RNA, 22 nt, Human
agcaggcuuuccacagaaggag

SEQ ID NO: 271829 - RNA, 22 nt, Human
cagaaaccaaaugggaugggga

SEQ ID NO: 271830 - RNA, 22 nt, Human
gauuagaugacuaaugagcugu

SEQ ID NO: 271831 - RNA, 22 nt, Human
cagcucuuugaguauuccauuu

SEQ ID NO: 271832 - RNA, 22 nt, Human
gugggacaaggaugaagauauu

SEQ ID NO: 271833 - RNA, 22 nt, Human
uccauacuaacagcauuuauca

SEQ ID NO: 271834 - RNA, 22 nt, Human
cagauggagucccguggaguuc

SEQ ID NO: 271835 - RNA, 22 nt, Human
ggaccugaacauaaaacgaggc

SEQ ID NO: 271836 - RNA, 22 nt, Human
ggcucugcuggauugaggccag

SEQ ID NO: 271837 - RNA, 22 nt, Human
ucccagggauuaggacauggau

SEQ ID NO: 271838 - RNA, 22 nt, Human
augaaaaguucgaucuagaagg

SEQ ID NO: 271839 - RNA, 22 nt, Human
cauuguaagcuguugaauccuc

SEQ ID NO: 271840 - RNA, 22 nt, Human
uauguacaucguugaauucaaa

SEQ ID NO: 271841 - RNA, 22 nt, Human
uuugucuugaggcuggggaagu

SEQ ID NO: 271842 - RNA, 22 nt, Human
gcugccacuuggucaugucaug

SEQ ID NO: 271843 - RNA, 22 nt, Human
cacagguguguccuggucuugu

SEQ ID NO: 271844 - RNA, 22 nt, Human
ggguccaguaguugguggccgu

SEQ ID NO: 271845 - RNA, 22 nt, Human
agaaguuguagguuugcauauu

SEQ ID NO: 271846 - RNA, 22 nt, Human
aaaugcacagguuuuaaauccu

SEQ ID NO: 271847 - RNA, 22 nt, Human
gagcuuaaauggcuaaauauaa

SEQ ID NO: 271848 - RNA, 22 nt, Human
acagaauucucucugcagaggc

SEQ ID NO: 271849 - RNA, 22 nt, Human
guaaacaugcuguguacucagc

SEQ ID NO: 271850 - RNA, 22 nt, Human
ggcugaggcggcgaugcccuug

SEQ ID NO: 271851 - RNA, 22 nt, Human
uggcuucugucccugcuacauu

SEQ ID NO: 271852 - RNA, 22 nt, Human
ucugggagccugaaagugaaug

SEQ ID NO: 271853 - RNA, 22 nt, Human
caggaaaaggagacuuuagcac

SEQ ID NO: 271854 - RNA, 22 nt, Human
uagggcagccuuauagcuccca

SEQ ID NO: 271855 - RNA, 22 nt, Human
aaagacaucagaaccagcugag

SEQ ID NO: 271856 - RNA, 22 nt, Human
cccacaggcaggggcagagaca

SEQ ID NO: 271857 - RNA, 21 nt, Human
ucugggagugggaaaaugguc

SEQ ID NO: 271858 - RNA, 22 nt, Human
uaaauuacccuuuagggaauug

SEQ ID NO: 271859 - RNA, 22 nt, Human
aagacacugauacucugugauu

SEQ ID NO: 271860 - RNA, 22 nt, Human
uauaugaugccaaauaaccugu

SEQ ID NO: 271861 - RNA, 22 nt, Human
aauaugcagcuuaucuucuagg

SEQ ID NO: 271862 - RNA, 22 nt, Human
ucuggguacuugcaagauuuuc

SEQ ID NO: 271863 - RNA, 22 nt, Human
aggcagggucuugcuauguugc

SEQ ID NO: 271864 - RNA, 22 nt, Human
uuucauugucaauaaacuguau

SEQ ID NO: 271865 - RNA, 22 nt, Human
augguuuacagaacuccuagca

SEQ ID NO: 271866 - RNA, 22 nt, Human
uggaagaagcuacaagcgguga

SEQ ID NO: 271867 - RNA, 22 nt, Human
guuuauaagguaaaggagagag

SEQ ID NO: 271868 - RNA, 22 nt, Human
acugaacuuggugaaugccaca

SEQ ID NO: 271869 - RNA, 22 nt, Human
cagagggacaguguaaugcaua

SEQ ID NO: 271870 - RNA, 22 nt, Human
auacaaaguauugauccugagu

SEQ ID NO: 271871 - RNA, 22 nt, Human
aaacaauguagauuaccauuua

SEQ ID NO: 271872 - RNA, 22 nt, Human
gcacuuuguggauuguauuucc

SEQ ID NO: 271873 - RNA, 22 nt, Human
ggccagggggcuucagacucca

SEQ ID NO: 271874 - RNA, 19 nt, Human
uguguaaagucugugguca

SEQ ID NO: 271875 - RNA, 22 nt, Human
aagggcuguaguuuguugauca

SEQ ID NO: 271876 - RNA, 22 nt, Human
uguguucauuucucucugcugu

SEQ ID NO: 271877 - RNA, 22 nt, Human
ucucugggaaauggagaauuuu

SEQ ID NO: 271878 - RNA, 22 nt, Human
aggcuguauguuuccauuugaa

SEQ ID NO: 271879 - RNA, 22 nt, Human
uggggaaggcggagcuugcagc

SEQ ID NO: 271880 - RNA, 22 nt, Human
acuccuguguggcugggagguu

SEQ ID NO: 271881 - RNA, 22 nt, Human
caagcauuuauuauaauuauca

SEQ ID NO: 271882 - RNA, 22 nt, Human
gagcagcagcugggccagguuc

SEQ ID NO: 271883 - RNA, 22 nt, Human
ccuggcaggacuguuguaagaa

SEQ ID NO: 271884 - RNA, 22 nt, Human
ccuggcaggccccuccuggauu

SEQ ID NO: 271885 - RNA, 22 nt, Human
cccacuguguugcagucuagug

SEQ ID NO: 271886 - RNA, 22 nt, Human
ccugagagccagugccugccca

SEQ ID NO: 271887 - RNA, 22 nt, Human
uccuaggguuggagacagugac

SEQ ID NO: 271888 - RNA, 22 nt, Human
ucugcugccaccuuguggugag

SEQ ID NO: 271889 - RNA, 23 nt, Human
gcccucaguagaaaauguuagaa

SEQ ID NO: 271890 - RNA, 22 nt, Human
aaaggauuaaauaaaugugcug

SEQ ID NO: 271891 - RNA, 22 nt, Human
ggguccagacuaugaagaacuu

SEQ ID NO: 271892 - RNA, 22 nt, Human
ucaugaaaauagaucagaaauu

SEQ ID NO: 271893 - RNA, 22 nt, Human
agaaagugugucauacuaagug

SEQ ID NO: 271894 - RNA, 22 nt, Human
ugaaggcuuucuccccucuggu

SEQ ID NO: 271895 - RNA, 22 nt, Human
aaugauuggcacuagauacaca

SEQ ID NO: 271896 - RNA, 22 nt, Human
accucaagaauguauaacacag

SEQ ID NO: 271897 - RNA, 22 nt, Human
uauuuguuucuaguggcagcaa

SEQ ID NO: 271898 - RNA, 20 nt, Human
auauguguacguguauacau

SEQ ID NO: 271899 - RNA, 22 nt, Human
ugaagccaaucugccaggcaga

SEQ ID NO: 271900 - RNA, 22 nt, Human
gcccuccuuugcuucuccuagu

SEQ ID NO: 271901 - RNA, 22 nt, Human
aucugcuguucuucacagcuug

SEQ ID NO: 271902 - RNA, 22 nt, Human
ugagcuggcuugucaaccaggg

SEQ ID NO: 271903 - RNA, 22 nt, Human
aguuacagugaccauuuauuua

SEQ ID NO: 271904 - RNA, 22 nt, Human
gcuaggaggaagaaugugaauu

SEQ ID NO: 271905 - RNA, 22 nt, Human
gcaggcaguuauuuaguagaau

SEQ ID NO: 271906 - RNA, 22 nt, Human
cugcugagagccccagcugaga

SEQ ID NO: 271907 - RNA, 22 nt, Human
guaauagucucaaacuccugga

SEQ ID NO: 271908 - RNA, 22 nt, Human
ugaaaaugcacgcuggaaagca

SEQ ID NO: 271909 - RNA, 20 nt, Human
uacaacaaguagagacauac

SEQ ID NO: 271910 - RNA, 22 nt, Human
gguccugcgucuggcucgcccg

SEQ ID NO: 271911 - RNA, 22 nt, Human
ggaggcagaacuucccgucagu

SEQ ID NO: 271912 - RNA, 22 nt, Human
cagggcucacucggcuggcguc

SEQ ID NO: 271913 - RNA, 22 nt, Human
gggagggacacaaagaguuccc

SEQ ID NO: 271914 - RNA, 22 nt, Human
uagauuaagaugccaguuuuga

SEQ ID NO: 271915 - RNA, 19 nt, Human
ugccuggcaccagcuccac

SEQ ID NO: 271916 - RNA, 20 nt, Human
aggugcaagcaguaaauugc

SEQ ID NO: 271917 - RNA, 22 nt, Human
ccaggguugcuguauggcacuu

SEQ ID NO: 271918 - RNA, 22 nt, Human
gcuccaagguauccaccagggu

SEQ ID NO: 271919 - RNA, 22 nt, Human
cuggaggcaguugccccaguca

SEQ ID NO: 271920 - RNA, 16 nt, Human
aggaggggaauuagga

SEQ ID NO: 271921 - RNA, 22 nt, Human
ugaguacugauuuaagauacac

SEQ ID NO: 271922 - RNA, 22 nt, Human
uugaaugaguguuuuacucaug

SEQ ID NO: 271923 - RNA, 22 nt, Human
ccaggcucaggugcgagagaca

SEQ ID NO: 271924 - RNA, 22 nt, Human
agacauagauaggcacugauug

SEQ ID NO: 271925 - RNA, 22 nt, Human
agggcccaugugggagcacuug

SEQ ID NO: 271926 - RNA, 22 nt, Human
uagaggcacagucuauguagag

SEQ ID NO: 271927 - RNA, 22 nt, Human
aggcucagucccggcccgcgcc

SEQ ID NO: 271928 - RNA, 23 nt, Human
gguuccaggaacacagccugaug

SEQ ID NO: 271929 - RNA, 22 nt, Human
cuggcagucugguggaaggccu

SEQ ID NO: 271930 - RNA, 19 nt, Human
cucuggcuccugggcugcc

SEQ ID NO: 271931 - RNA, 22 nt, Human
cucuccaguuauagcugauuug

SEQ ID NO: 271932 - RNA, 22 nt, Human
ugcuuuaaaccauggaugugag

SEQ ID NO: 271933 - RNA, 22 nt, Human
uggaggugagugugguacagca

SEQ ID NO: 271934 - RNA, 22 nt, Human
cugggcucagcaggccaaggcc

SEQ ID NO: 271935 - RNA, 22 nt, Human
ugcugaggucaccuugcugcua

SEQ ID NO: 271936 - RNA, 22 nt, Human
aaguuccugggccaaguccagg

SEQ ID NO: 271937 - RNA, 22 nt, Human
gcagggaccaaaagaggcagua

SEQ ID NO: 271938 - RNA, 22 nt, Human
ucucagacauguaaucucuacc

SEQ ID NO: 271939 - RNA, 22 nt, Human
gggggucccaagcugggcugcu

SEQ ID NO: 271940 - RNA, 22 nt, Human
cuggcuccucaguauuccacuu

SEQ ID NO: 271941 - RNA, 22 nt, Human
aaauagcagccuuuaguuaaca

SEQ ID NO: 271942 - RNA, 22 nt, Human
uccaguguugucagaucaucug

SEQ ID NO: 271943 - RNA, 19 nt, Human
auggaaaauuguacucaau

SEQ ID NO: 271944 - RNA, 22 nt, Human
cuuuacagccuccagaaggaac

SEQ ID NO: 271945 - RNA, 22 nt, Human
cugcucuggggaagccagaugu

SEQ ID NO: 271946 - RNA, 22 nt, Human
gcaggcugcccucuuguguuga

SEQ ID NO: 271947 - RNA, 22 nt, Human
auguaaagggcaugguauuggg

SEQ ID NO: 271948 - RNA, 22 nt, Human
ggaaaucaugggagaguuggaa

SEQ ID NO: 271949 - RNA, 23 nt, Human
ugucaacaaaacuuucaggagaa

SEQ ID NO: 271950 - RNA, 22 nt, Human
agggagaagguccaugccuguc

SEQ ID NO: 271951 - RNA, 22 nt, Human
uaguuuuagcagcaaugggaug

SEQ ID NO: 271952 - RNA, 22 nt, Human
agguccuguuucuucccugggg

SEQ ID NO: 271953 - RNA, 22 nt, Human
uacaugcaugucacagaaugaa

SEQ ID NO: 271954 - RNA, 22 nt, Human
acucucacugcuuggcuccugc

SEQ ID NO: 271955 - RNA, 22 nt, Human
auuuggaagguuuacaaagaga

SEQ ID NO: 271956 - RNA, 18 nt, Human
ucagcuggguuucugggu

SEQ ID NO: 271957 - RNA, 22 nt, Human
uucacauugguucuugauagcu

SEQ ID NO: 271958 - RNA, 19 nt, Human
uaccagccuccugccugau

SEQ ID NO: 271959 - RNA, 22 nt, Human
cagcaggacguccaagugcuau

SEQ ID NO: 271960 - RNA, 22 nt, Human
gagcuugggugccaugcugagc

SEQ ID NO: 271961 - RNA, 22 nt, Human
gaccuccagcggcccugcagag

SEQ ID NO: 271962 - RNA, 22 nt, Human
ugggaaccacaggacucggcac

SEQ ID NO: 271963 - RNA, 22 nt, Human
gauucugagcugguguuuuacg

SEQ ID NO: 271964 - RNA, 22 nt, Human
ucugcuguacuuuuggucuguu

SEQ ID NO: 271965 - RNA, 22 nt, Human
gggagagaugcugauugccaau

SEQ ID NO: 271966 - RNA, 21 nt, Human
aauuacagauggaauuacaga

SEQ ID NO: 271967 - RNA, 22 nt, Human
accuggacaccugcugucaucu

SEQ ID NO: 271968 - RNA, 22 nt, Human
gcaggccugucuugcucgcccu

SEQ ID NO: 271969 - RNA, 22 nt, Human
gggcacagucugcagcccccca

SEQ ID NO: 271970 - RNA, 22 nt, Human
ggaagaggcucucauugagggc

SEQ ID NO: 271971 - RNA, 19 nt, Human
ggaaggagagaaaugcaug

SEQ ID NO: 271972 - RNA, 22 nt, Human
ccugagaguaggugucucuuua

SEQ ID NO: 271973 - RNA, 22 nt, Human
cagugcaauuacaagcuaauuc

SEQ ID NO: 271974 - RNA, 22 nt, Human
agccccagccccucucucacaa

SEQ ID NO: 271975 - RNA, 22 nt, Human
cgacugucauacacaagacaug

SEQ ID NO: 271976 - RNA, 22 nt, Human
guggcuucacauggcauuuggc

SEQ ID NO: 271977 - RNA, 22 nt, Human
caagaugugccuaaucagaccu

SEQ ID NO: 271978 - RNA, 22 nt, Human
cccuguuuggauggggacccag

SEQ ID NO: 271979 - RNA, 22 nt, Human
cuggcccuguggccuaaggacu

SEQ ID NO: 271980 - RNA, 22 nt, Human
gugguaucugucucccccacug

SEQ ID NO: 271981 - RNA, 22 nt, Human
auguaucagaaauagcauuggc

SEQ ID NO: 271982 - RNA, 22 nt, Human
ggcucucuuaacuggccauccu

SEQ ID NO: 271983 - RNA, 22 nt, Human
acuguacauauggauucuaaga

SEQ ID NO: 271984 - RNA, 22 nt, Human
ggcuuggcuugggcucagaggc

SEQ ID NO: 271985 - RNA, 22 nt, Human
cuguggcugcguaggucuggca

SEQ ID NO: 271986 - RNA, 22 nt, Human
uacaaagauaaaaucucaccau

SEQ ID NO: 271987 - RNA, 22 nt, Human
gccaggcucagcagucaaccug

SEQ ID NO: 271988 - RNA, 22 nt, Human
ucuggcccagccccugauccca

SEQ ID NO: 271989 - RNA, 22 nt, Human
agguacagggugaaaguuuaug

SEQ ID NO: 271990 - RNA, 22 nt, Human
acagguguuuuggaggaugauu

SEQ ID NO: 271991 - RNA, 21 nt, Human
agagucugcauuucugacaag

SEQ ID NO: 271992 - RNA, 22 nt, Human
uuucuguaauuggccaagucac

SEQ ID NO: 271993 - RNA, 21 nt, Human
uagggcucucugugucaggug

SEQ ID NO: 271994 - RNA, 22 nt, Human
uuggcugcuauuuccauauuua

SEQ ID NO: 271995 - RNA, 22 nt, Human
cuguuuauugagcaaucugcca

SEQ ID NO: 271996 - RNA, 22 nt, Human
gcccugcucuggucucugcccg

SEQ ID NO: 271997 - RNA, 22 nt, Human
ucucugagaagcugaggcuggg

SEQ ID NO: 271998 - RNA, 22 nt, Human
gauugcuguucccagggggcug

SEQ ID NO: 271999 - RNA, 22 nt, Human
auguagaguagaauaguacaac

SEQ ID NO: 272000 - RNA, 22 nt, Human
uugcacagugguuuagagccug

SEQ ID NO: 272001 - RNA, 22 nt, Human
uaucuagauggauuuuagugaa

SEQ ID NO: 272002 - RNA, 22 nt, Human
uauguaaaggauugagaugaau

SEQ ID NO: 272003 - RNA, 22 nt, Human
aaauugugagcuauagaucuag

SEQ ID NO: 272004 - RNA, 22 nt, Human
cuucucugucacaggguuacgu

SEQ ID NO: 272005 - RNA, 23 nt, Human
cuguuaaauuccuuaagagcagg

SEQ ID NO: 272006 - RNA, 23 nt, Human
acaagauagggauaaaaagauaa

SEQ ID NO: 272007 - RNA, 22 nt, Human
uugaaacuaugaagacaaccau

SEQ ID NO: 272008 - RNA, 22 nt, Human
auuaggugggguuguuacuguu

SEQ ID NO: 272009 - RNA, 22 nt, Human
caggaaauaaaaaguaucuucu

SEQ ID NO: 272010 - RNA, 22 nt, Human
guagcuucaaguacucucccug

SEQ ID NO: 272011 - RNA, 22 nt, Human
uuccuuucccucacagccucgg

SEQ ID NO: 272012 - RNA, 22 nt, Human
ggugggucuuguggggcagcuu

SEQ ID NO: 272013 - RNA, 22 nt, Human
uggagcagaggcugagguuggg

SEQ ID NO: 272014 - RNA, 22 nt, Human
aauguacacugaaagccuauca

SEQ ID NO: 272015 - RNA, 22 nt, Human
gggaacagcauaucugaagggu

SEQ ID NO: 272016 - RNA, 18 nt, Human
aggucaggaaagcagagu

SEQ ID NO: 272017 - RNA, 22 nt, Human
uggcaguuuacagaguucugaa

SEQ ID NO: 272018 - RNA, 22 nt, Human
ggucuggauuucugcuucuuuc

SEQ ID NO: 272019 - RNA, 22 nt, Human
cugagcugggcaacucuuagau

SEQ ID NO: 272020 - RNA, 22 nt, Human
agaggccaccuucucuugagaa

SEQ ID NO: 272021 - RNA, 22 nt, Human
uuacaaacaacagacauuuauu

SEQ ID NO: 272022 - RNA, 22 nt, Human
ucucuuuaaagacucagagauu

SEQ ID NO: 272023 - RNA, 22 nt, Human
ucuagacaaugcacuguaagga

SEQ ID NO: 272024 - RNA, 22 nt, Human
cacacgaugugaauucuugccc

SEQ ID NO: 272025 - RNA, 22 nt, Human
uggguccugcacugcaagcacc

SEQ ID NO: 272026 - RNA, 22 nt, Human
cacagcauucacagaaagacau

SEQ ID NO: 272027 - RNA, 22 nt, Human
caauauagagagaaaauuaugu

SEQ ID NO: 272028 - RNA, 21 nt, Human
ucaggcugucugcugguucca

SEQ ID NO: 272029 - RNA, 19 nt, Human
aaggcuggagaaggccucu

SEQ ID NO: 272030 - RNA, 22 nt, Human
gaaggcuugccgggaagcggca

SEQ ID NO: 272031 - RNA, 23 nt, Human
auguaaacuucagagucauugcc

SEQ ID NO: 272032 - RNA, 22 nt, Human
cauuaucugccauugacaccau

SEQ ID NO: 272033 - RNA, 22 nt, Human
uccuggcucaggccccuggugc

SEQ ID NO: 272034 - RNA, 22 nt, Human
gcugccaguguggcaugaugca

SEQ ID NO: 272035 - RNA, 22 nt, Human
uucaguuuccacuuacauuuaa

SEQ ID NO: 272036 - RNA, 22 nt, Human
uuauuguaggccuauuguagaa

SEQ ID NO: 272037 - RNA, 22 nt, Human
cuggaaggucuguccccacugc

SEQ ID NO: 272038 - RNA, 22 nt, Human
agcauuuaggagaauuugagaa

SEQ ID NO: 272039 - RNA, 22 nt, Human
gcagacaggcccaguggaggga

SEQ ID NO: 272040 - RNA, 22 nt, Human
uuggagagaggcugcucaggcu

SEQ ID NO: 272041 - RNA, 22 nt, Human
augcaaaauaaggcagaaacau

SEQ ID NO: 272042 - RNA, 22 nt, Human
gaugcacagugacccugccagu

SEQ ID NO: 272043 - RNA, 22 nt, Human
uguauuagguugaugcgaaagu

SEQ ID NO: 272044 - RNA, 22 nt, Human
gccuguuuaaguauucugacau

SEQ ID NO: 272045 - RNA, 22 nt, Human
cugaggccgucugggucugcag

SEQ ID NO: 272046 - RNA, 22 nt, Human
agccagaggaacuugaugacug

SEQ ID NO: 272047 - RNA, 20 nt, Human
agcuggagaagggcccuucc

SEQ ID NO: 272048 - RNA, 23 nt, Human
agcaacagugggugaguguugcu

SEQ ID NO: 272049 - RNA, 22 nt, Human
ugacauguauguauuuguuuau

SEQ ID NO: 272050 - RNA, 22 nt, Human
aaugcuggaagccucaguagau

SEQ ID NO: 272051 - RNA, 22 nt, Human
agaaggccagauggacggggcu

SEQ ID NO: 272052 - RNA, 22 nt, Human
cucugugauucucauguaccac

SEQ ID NO: 272053 - RNA, 21 nt, Human
ucaugcaggcagaguuuggua

SEQ ID NO: 272054 - RNA, 22 nt, Human
agucccagcuacucaagaggcu

SEQ ID NO: 272055 - RNA, 20 nt, Human
aacuuucucccauuggacug

SEQ ID NO: 272056 - RNA, 22 nt, Human
aaacaguuucauuuucaugacc

SEQ ID NO: 272057 - RNA, 22 nt, Human
uuggcagagggaccagccuaca

SEQ ID NO: 272058 - RNA, 22 nt, Human
uuugaguugcuuauuuaauagg

SEQ ID NO: 272059 - RNA, 22 nt, Human
ggucccaguccucucccugcua

SEQ ID NO: 272060 - RNA, 22 nt, Human
uccucacagggcaggaaggagg

SEQ ID NO: 272061 - RNA, 18 nt, Human
auccugggagcagacagc

SEQ ID NO: 272062 - RNA, 22 nt, Human
aaggaugaacauuaauacauca

SEQ ID NO: 272063 - RNA, 22 nt, Human
gggcuccagaguccauguucuu

SEQ ID NO: 272064 - RNA, 22 nt, Human
gggaaggccgguccagucaggu

SEQ ID NO: 272065 - RNA, 22 nt, Human
agcuucucagaagaguccugua

SEQ ID NO: 272066 - RNA, 22 nt, Human
ucucucuugucaccccaucugc

SEQ ID NO: 272067 - RNA, 22 nt, Human
acucugggaauccucaccuucc

SEQ ID NO: 272068 - RNA, 22 nt, Human
ugaaugauguauaauauugaga

SEQ ID NO: 272069 - RNA, 22 nt, Human
ucugagaaauuucuuugugaug

SEQ ID NO: 272070 - RNA, 22 nt, Human
auggccagcucagagcacucag

SEQ ID NO: 272071 - RNA, 22 nt, Human
ugcagagagauauggcaagagg

SEQ ID NO: 272072 - RNA, 22 nt, Human
ucucugagaaguuccuuuguga

SEQ ID NO: 272073 - RNA, 22 nt, Human
agaaggcuggcccuggguggcc

SEQ ID NO: 272074 - RNA, 22 nt, Human
gacuuuauucguuaacuguuaa

SEQ ID NO: 272075 - RNA, 22 nt, Human
uuuucauuagaaugacugagaa

SEQ ID NO: 272076 - RNA, 22 nt, Human
ucagaacagaagaaggaacacg

SEQ ID NO: 272077 - RNA, 21 nt, Human
gccugcccucugugauggcca

SEQ ID NO: 272078 - RNA, 22 nt, Human
cuuagaaugggacccaaugggu

SEQ ID NO: 272079 - RNA, 22 nt, Human
aacaugcaugaagaaguuauau

SEQ ID NO: 272080 - RNA, 22 nt, Human
agucacaguuucccugagagag

SEQ ID NO: 272081 - RNA, 22 nt, Human
cauuuacuguugaaucccuagc

SEQ ID NO: 272082 - RNA, 22 nt, Human
auacagagcaguaauagaggag

SEQ ID NO: 272083 - RNA, 22 nt, Human
ggaggauuugucaucugaagau

SEQ ID NO: 272084 - RNA, 22 nt, Human
acagacauuuucuguauugccu

SEQ ID NO: 272085 - RNA, 22 nt, Human
uauacagaaccgccugaagucu

SEQ ID NO: 272086 - RNA, 22 nt, Human
auuagacaucauaugauucagc

SEQ ID NO: 272087 - RNA, 22 nt, Human
gcaugugugucacuuuccugcc

SEQ ID NO: 272088 - RNA, 22 nt, Human
acuugggagggugugggcagcu

SEQ ID NO: 272089 - RNA, 22 nt, Human
gccagcugaggccgugcaggcu

SEQ ID NO: 272090 - RNA, 22 nt, Human
uuuacagucuauguugaauuaa

SEQ ID NO: 272091 - RNA, 22 nt, Human
cacacgugugagagcuguggca

SEQ ID NO: 272092 - RNA, 22 nt, Human
gcaguccuccugccucagccuc

SEQ ID NO: 272093 - RNA, 22 nt, Human
cucuggaguuagugaucugggc

SEQ ID NO: 272094 - RNA, 22 nt, Human
ccacaguagcauccaaacagua

SEQ ID NO: 272095 - RNA, 23 nt, Human
ucucaaauaugaucugggucauc

SEQ ID NO: 272096 - RNA, 22 nt, Human
uauacaauggcugaaucaucca

SEQ ID NO: 272097 - RNA, 21 nt, Human
ucacaacuuugaauuucaaua

SEQ ID NO: 272098 - RNA, 20 nt, Human
agaagcugauacugauggaa

SEQ ID NO: 272099 - RNA, 22 nt, Human
cacagugcaugaugggcagaag

SEQ ID NO: 272100 - RNA, 22 nt, Human
ccuucugauacugacaucauuu

SEQ ID NO: 272101 - RNA, 22 nt, Human
aaaaguguucaggaagaauaau

SEQ ID NO: 272102 - RNA, 21 nt, Human
uacuguagccuugcacuguag

SEQ ID NO: 272103 - RNA, 22 nt, Human
gacaccagagacugaugaggcc

SEQ ID NO: 272104 - RNA, 22 nt, Human
agaugguccaugcacagauaug

SEQ ID NO: 272105 - RNA, 22 nt, Human
cugccccugccaggcagcuguc

SEQ ID NO: 272106 - RNA, 22 nt, Human
cacacacaguuuuguauucugu

SEQ ID NO: 272107 - RNA, 22 nt, Human
aguacugucagcaggguguuga

SEQ ID NO: 272108 - RNA, 22 nt, Human
ucaaucaaagcacugggcuuug

SEQ ID NO: 272109 - RNA, 17 nt, Human
agugucagggcccuucc

SEQ ID NO: 272110 - RNA, 22 nt, Human
gccaggaccucagaugcagggc

SEQ ID NO: 272111 - RNA, 22 nt, Human
uaacaaacuggaaauugacauu

SEQ ID NO: 272112 - RNA, 22 nt, Human
aacuggaaugaaauuuacgaug

SEQ ID NO: 272113 - RNA, 22 nt, Human
gugcaaaaguaacugugguuuu

SEQ ID NO: 272114 - RNA, 22 nt, Human
guauuagacugagaaauggagu

SEQ ID NO: 272115 - RNA, 22 nt, Human
ucagcaggcgguuccuuguggg

SEQ ID NO: 272116 - RNA, 17 nt, Human
acagagcuacauauucu

SEQ ID NO: 272117 - RNA, 22 nt, Human
aacuccuuaaugcauuucagag

SEQ ID NO: 272118 - RNA, 22 nt, Human
cugggccuucauugcucuccca

SEQ ID NO: 272119 - RNA, 22 nt, Human
aacaggcuucuucugggcuccu

SEQ ID NO: 272120 - RNA, 22 nt, Human
uucucaacucucaagagaagcu

SEQ ID NO: 272121 - RNA, 21 nt, Human
cucugcagcccugcuuccagg

SEQ ID NO: 272122 - RNA, 22 nt, Human
uggaguugcagcuaccagacau

SEQ ID NO: 272123 - RNA, 22 nt, Human
auccucaguguuucugacaucu

SEQ ID NO: 272124 - RNA, 22 nt, Human
uggcucugggaaucuguugcuu

SEQ ID NO: 272125 - RNA, 22 nt, Human
caggcagggagcuggaaaggau

SEQ ID NO: 272126 - RNA, 22 nt, Human
gagccugaugaaacaggcagac

SEQ ID NO: 272127 - RNA, 22 nt, Human
auggcucucuagggcccagguu

SEQ ID NO: 272128 - RNA, 22 nt, Human
acaugccaagauccucgucuuu

SEQ ID NO: 272129 - RNA, 22 nt, Human
aaaaguuaccucuguaauauaa

SEQ ID NO: 272130 - RNA, 22 nt, Human
aaggcauuaugauuugaguacc

SEQ ID NO: 272131 - RNA, 22 nt, Human
gaagcaguucgaaagcaguugg

SEQ ID NO: 272132 - RNA, 22 nt, Human
auuagagcaguguauuaugaua

SEQ ID NO: 272133 - RNA, 20 nt, Human
uauuaugaccuguguucugg

SEQ ID NO: 272134 - RNA, 22 nt, Human
aagcucagcaugucuccuagaa

SEQ ID NO: 272135 - RNA, 20 nt, Human
acaaaugcauucugugacau

SEQ ID NO: 272136 - RNA, 22 nt, Human
cucaccccuguaauuccagcac

SEQ ID NO: 272137 - RNA, 22 nt, Human
agaaaagugcucuagugagagc

SEQ ID NO: 272138 - RNA, 22 nt, Human
gauuuuacaugucauaucuauu

SEQ ID NO: 272139 - RNA, 17 nt, Human
uuaguguaucuguuuug

SEQ ID NO: 272140 - RNA, 22 nt, Human
gauggacaccuccugagguucu

SEQ ID NO: 272141 - RNA, 22 nt, Human
ggagucugagcuuguguccugg

SEQ ID NO: 272142 - RNA, 22 nt, Human
aaagccauugcagagcaggauu

SEQ ID NO: 272143 - RNA, 18 nt, Human
ggauaggaccuuaggcag

SEQ ID NO: 272144 - RNA, 22 nt, Human
uugcaaauaaacaaguauacau

SEQ ID NO: 272145 - RNA, 23 nt, Human
cauuagaagguagaguggaauga

SEQ ID NO: 272146 - RNA, 22 nt, Human
caagcagagacuagauagcugu

SEQ ID NO: 272147 - RNA, 22 nt, Human
auaagccugauucacuugucau

SEQ ID NO: 272148 - RNA, 22 nt, Human
uucaguaugauuccuccaguag

SEQ ID NO: 272149 - RNA, 22 nt, Human
ucuccugguacccuuccuagca

SEQ ID NO: 272150 - RNA, 22 nt, Human
uuguuagugcaauguuugguga

SEQ ID NO: 272151 - RNA, 22 nt, Human
acagguggaggcuuuaggaggu

SEQ ID NO: 272152 - RNA, 20 nt, Human
uggcuucucuucacuccugu

SEQ ID NO: 272153 - RNA, 22 nt, Human
caggcugcugacaggcuuggag

SEQ ID NO: 272154 - RNA, 22 nt, Human
acaaucacacaugcaauuauac

SEQ ID NO: 272155 - RNA, 22 nt, Human
ucugaaauggcgauggccguug

SEQ ID NO: 272156 - RNA, 22 nt, Human
ucuggcuagauugaugaguccc

SEQ ID NO: 272157 - RNA, 22 nt, Human
acacaguucaggaucaaauagc

SEQ ID NO: 272158 - RNA, 22 nt, Human
cuggcuguguccacagaguaag

SEQ ID NO: 272159 - RNA, 22 nt, Human
aauuagagaucgcaauaacggg

SEQ ID NO: 272160 - RNA, 22 nt, Human
gcuccuggagagauugagaaag

SEQ ID NO: 272161 - RNA, 22 nt, Human
gccaguggguaguuggagcugg

SEQ ID NO: 272162 - RNA, 22 nt, Human
uccaggccccugccugggccug

SEQ ID NO: 272163 - RNA, 22 nt, Human
cagaaagcgggaugcagcaugu

SEQ ID NO: 272164 - RNA, 22 nt, Human
acucugggcuguuaggagcugu

SEQ ID NO: 272165 - RNA, 22 nt, Human
cugugccauccuagggcugcug

SEQ ID NO: 272166 - RNA, 22 nt, Human
aguuauauaacuaucuagaugc

SEQ ID NO: 272167 - RNA, 22 nt, Human
gggcugaggcuaccacuggucu

SEQ ID NO: 272168 - RNA, 22 nt, Human
auguacauuuguaguaauauca

SEQ ID NO: 272169 - RNA, 22 nt, Human
uuuggaagacagggcaggaaag

SEQ ID NO: 272170 - RNA, 22 nt, Human
agugcauuugggguaguggaag

SEQ ID NO: 272171 - RNA, 22 nt, Human
uggaucugacuggcuuuucuuc

SEQ ID NO: 272172 - RNA, 22 nt, Human
aaucuuuaaggacucagucucu

SEQ ID NO: 272173 - RNA, 22 nt, Human
aagucucuaagacugugccauc

SEQ ID NO: 272174 - RNA, 22 nt, Human
gucaacaaguaguuuucuucca

SEQ ID NO: 272175 - RNA, 22 nt, Human
uucaguguucuuuucuguuagc

SEQ ID NO: 272176 - RNA, 22 nt, Human
ucugugugcccuaaagccugcu

SEQ ID NO: 272177 - RNA, 22 nt, Human
ucaacguuuguuaaaugaguau

SEQ ID NO: 272178 - RNA, 22 nt, Human
aucuguggccaaaagacuguug

SEQ ID NO: 272179 - RNA, 22 nt, Human
agcacuuugugcauuucugaag

SEQ ID NO: 272180 - RNA, 22 nt, Human
uguggaaggggccccaugacca

SEQ ID NO: 272181 - RNA, 22 nt, Human
ugucaggagccaccagcacucc

SEQ ID NO: 272182 - RNA, 22 nt, Human
ccuggcucugggaucuucgcuu

SEQ ID NO: 272183 - RNA, 22 nt, Human
aagcacuaauauuuuggcaccu

SEQ ID NO: 272184 - RNA, 22 nt, Human
auacaugaggcucauuuauguc

SEQ ID NO: 272185 - RNA, 21 nt, Human
uuuguucauagcucacucuuu

SEQ ID NO: 272186 - RNA, 22 nt, Human
gauuguaauuuucaagagguaa

SEQ ID NO: 272187 - RNA, 22 nt, Human
aggcacagauuuggggaaagca

SEQ ID NO: 272188 - RNA, 22 nt, Human
uggcagguacccauuggcugua

SEQ ID NO: 272189 - RNA, 22 nt, Human
aagaguuugaccugugccaucc

SEQ ID NO: 272190 - RNA, 22 nt, Human
auuuccaugccuuagcuuaagg

SEQ ID NO: 272191 - RNA, 22 nt, Human
cuggggaccgagcaagcucugg

SEQ ID NO: 272192 - RNA, 22 nt, Human
cugauagacaaucaccauggga

SEQ ID NO: 272193 - RNA, 22 nt, Human
gggcagguacaagaugcuucuu

SEQ ID NO: 272194 - RNA, 19 nt, Human
uucacaauuaugaaauuag

SEQ ID NO: 272195 - RNA, 22 nt, Human
uccugaggugcucagccaggaa

SEQ ID NO: 272196 - RNA, 22 nt, Human
auaaauuaugaauggcccuuuu

SEQ ID NO: 272197 - RNA, 23 nt, Human
accagcugcccugaacuuugugc

SEQ ID NO: 272198 - RNA, 22 nt, Human
ugucucagaguaucccugaacu

SEQ ID NO: 272199 - RNA, 22 nt, Human
uaggcucccagaucguuugcug

SEQ ID NO: 272200 - RNA, 19 nt, Human
uuaaagugcgagaagucuu

SEQ ID NO: 272201 - RNA, 22 nt, Human
ucucaaauucccuuuuccuccu

SEQ ID NO: 272202 - RNA, 22 nt, Human
ggacaggcgcagggccaaggaa

SEQ ID NO: 272203 - RNA, 22 nt, Human
gauauuuugagaaauccuauga

SEQ ID NO: 272204 - RNA, 22 nt, Human
cuguuauuugagaguguugaau

SEQ ID NO: 272205 - RNA, 22 nt, Human
ccuuaaacuuuaucuugugaga

SEQ ID NO: 272206 - RNA, 22 nt, Human
auaaagcaaauaggacuauugc

SEQ ID NO: 272207 - RNA, 22 nt, Human
cuggagccccagacagggagag

SEQ ID NO: 272208 - RNA, 22 nt, Human
ucugcccucauugcugccugga

SEQ ID NO: 272209 - RNA, 22 nt, Human
aucacaaaggucucagagcaca

SEQ ID NO: 272210 - RNA, 22 nt, Human
uaggugucuguccugggcugug

SEQ ID NO: 272211 - RNA, 22 nt, Human
agaaauacaaaguacuaagaua

SEQ ID NO: 272212 - RNA, 22 nt, Human
gacuuucuuaggcccccuaaua

SEQ ID NO: 272213 - RNA, 22 nt, Human
cuggacaaccacucagccucag

SEQ ID NO: 272214 - RNA, 22 nt, Human
gaagagccaggugucgcugugg

SEQ ID NO: 272215 - RNA, 22 nt, Human
uccugauggaggggucaucuuu

SEQ ID NO: 272216 - RNA, 22 nt, Human
ccugggcuccacuccaagagca

SEQ ID NO: 272217 - RNA, 22 nt, Human
uuuaacagaugugaaauuuuca

SEQ ID NO: 272218 - RNA, 23 nt, Human
auguuauuauuagcagucuugcc

SEQ ID NO: 272219 - RNA, 22 nt, Human
uucaggagaaaguucaguacuu

SEQ ID NO: 272220 - RNA, 22 nt, Human
aaaagagagcugaggagcucca

SEQ ID NO: 272221 - RNA, 22 nt, Human
ccuaauuaucucccaaagaucc

SEQ ID NO: 272222 - RNA, 22 nt, Human
cagcaggcagccauuucacugu

SEQ ID NO: 272223 - RNA, 22 nt, Human
aguccagggcuuagucagcggg

SEQ ID NO: 272224 - RNA, 22 nt, Human
gugggaguggagcucagcaugu

SEQ ID NO: 272225 - RNA, 21 nt, Human
ccuuuagauuucuaugcaguu

SEQ ID NO: 272226 - RNA, 22 nt, Human
gcagggacaaggcagguguucu

SEQ ID NO: 272227 - RNA, 22 nt, Human
ugaaagcacaaguucuaacagg

SEQ ID NO: 272228 - RNA, 22 nt, Human
cuggcaggagcauucacagagg

SEQ ID NO: 272229 - RNA, 22 nt, Human
uucuagaauccuugucuacuuu

SEQ ID NO: 272230 - RNA, 22 nt, Human
cagcagccugccuugggagcuu

SEQ ID NO: 272231 - RNA, 22 nt, Human
gguggcugaaucaaaucaggcc

SEQ ID NO: 272232 - RNA, 22 nt, Human
agagcugucacauagagccaga

SEQ ID NO: 272233 - RNA, 22 nt, Human
agcagcaggauuuucguuggga

SEQ ID NO: 272234 - RNA, 22 nt, Human
ggccuuggguauagguggguau

SEQ ID NO: 272235 - RNA, 22 nt, Human
agcuccagcccaucugcucgug

SEQ ID NO: 272236 - RNA, 22 nt, Human
cuugaaugggccauaagacggu

SEQ ID NO: 272237 - RNA, 20 nt, Human
aggcugccuaaggcucugca

SEQ ID NO: 272238 - RNA, 22 nt, Human
uccaguccauggccucagucuu

SEQ ID NO: 272239 - RNA, 22 nt, Human
guggcuuccaagacuaagucac

SEQ ID NO: 272240 - RNA, 22 nt, Human
cuuugaauuccaguacaauaac

SEQ ID NO: 272241 - RNA, 22 nt, Human
uggcagauucugguugauacuu

SEQ ID NO: 272242 - RNA, 22 nt, Human
acauugaagcugugaaaucaaa

SEQ ID NO: 272243 - RNA, 22 nt, Human
ugcaucuuucugcauauguaaa

SEQ ID NO: 272244 - RNA, 22 nt, Human
uuggaaggcugaauggccucuc

SEQ ID NO: 272245 - RNA, 22 nt, Human
ccagccagggaaacuuuuucuu

SEQ ID NO: 272246 - RNA, 22 nt, Human
uccagugcuggaccagagcacc

SEQ ID NO: 272247 - RNA, 22 nt, Human
auuaaagugaaguucucagaug

SEQ ID NO: 272248 - RNA, 22 nt, Human
cuucccagaccuuagagugcag

SEQ ID NO: 272249 - RNA, 22 nt, Human
caucaucugugcuggagagccu

SEQ ID NO: 272250 - RNA, 22 nt, Human
caggaaacauucccauaacaca

SEQ ID NO: 272251 - RNA, 22 nt, Human
uggaaacacccacgcaugcaua

SEQ ID NO: 272252 - RNA, 22 nt, Human
gguuggggcgagcuggaggccc

SEQ ID NO: 272253 - RNA, 22 nt, Human
uaagcuggggcuaugcuaaaua

SEQ ID NO: 272254 - RNA, 22 nt, Human
cacacagguauauauauguaca

SEQ ID NO: 272255 - RNA, 22 nt, Human
aacaagucuuugguuuuggcua

SEQ ID NO: 272256 - RNA, 22 nt, Human
cuggggaauagagcuggagacc

SEQ ID NO: 272257 - RNA, 22 nt, Human
auuggucuaggcuuuaaaaaga

SEQ ID NO: 272258 - RNA, 18 nt, Human
uggcaggggcaguacgcc

SEQ ID NO: 272259 - RNA, 22 nt, Human
gaaaugcauggaucuuggcaga

SEQ ID NO: 272260 - RNA, 22 nt, Human
cccagagcugggugggcagcgg

SEQ ID NO: 272261 - RNA, 22 nt, Human
ucugagagccacugaacagcaa

SEQ ID NO: 272262 - RNA, 22 nt, Human
cuggcaggcaaauuggugggag

SEQ ID NO: 272263 - RNA, 22 nt, Human
ugcccugccaagacucaguggu

SEQ ID NO: 272264 - RNA, 22 nt, Human
ugagucugcuccugguagcaga

SEQ ID NO: 272265 - RNA, 22 nt, Human
caggauggucuucauuuggcuc

SEQ ID NO: 272266 - RNA, 22 nt, Human
uugugcaauuuaaaaucuuccu

SEQ ID NO: 272267 - RNA, 22 nt, Human
gcagcagcggggccccugcgcg

SEQ ID NO: 272268 - RNA, 22 nt, Human
gguggcuggaggagcugaugga

SEQ ID NO: 272269 - RNA, 22 nt, Human
aagggcugcauuugauguguca

SEQ ID NO: 272270 - RNA, 22 nt, Human
ucuuccuggcauugaugcugca

SEQ ID NO: 272271 - RNA, 22 nt, Human
aguguggaccuucacacagaga

SEQ ID NO: 272272 - RNA, 22 nt, Human
guaacacuggcaccgucucaca

SEQ ID NO: 272273 - RNA, 22 nt, Human
uuccaggcuucucuggggcguc

SEQ ID NO: 272274 - RNA, 22 nt, Human
cucugagcuuugcagccccugg

SEQ ID NO: 272275 - RNA, 22 nt, Human
aagcagacagagaauggguuug

SEQ ID NO: 272276 - RNA, 22 nt, Human
uugauucagagaagauuggccc

SEQ ID NO: 272277 - RNA, 22 nt, Human
guuaauacaaccaugaucuucu

SEQ ID NO: 272278 - RNA, 22 nt, Human
cuauuagacacaauuagugauu

SEQ ID NO: 272279 - RNA, 22 nt, Human
aaacaguauuaucaauauauuu

SEQ ID NO: 272280 - RNA, 22 nt, Human
acaggaagaaagugcaguagau

SEQ ID NO: 272281 - RNA, 22 nt, Human
cagcaggucuuguugcugcuga

SEQ ID NO: 272282 - RNA, 22 nt, Human
uggagagaugucuguucaaggu

SEQ ID NO: 272283 - RNA, 22 nt, Human
cccagagguuccuuagggacca

SEQ ID NO: 272284 - RNA, 20 nt, Human
ucaaagcaaagggagaugau

SEQ ID NO: 272285 - RNA, 22 nt, Human
ggcuccagcccuggcucuucac

SEQ ID NO: 272286 - RNA, 16 nt, Human
gcagguggaucaccug

SEQ ID NO: 272287 - RNA, 22 nt, Human
agcccaggagccuuuggagggu

SEQ ID NO: 272288 - RNA, 20 nt, Human
uucuaaacuguuaggcuugc

SEQ ID NO: 272289 - RNA, 22 nt, Human
auuaguguacaucucacacgca

SEQ ID NO: 272290 - RNA, 20 nt, Human
aggcccagugaauauauugc

SEQ ID NO: 272291 - RNA, 22 nt, Human
gacauuaauggcaaauuaauua

SEQ ID NO: 272292 - RNA, 22 nt, Human
ucaaaggcgguccaggaauaaa

SEQ ID NO: 272293 - RNA, 22 nt, Human
cuagagaaaaugauagcaggaa

SEQ ID NO: 272294 - RNA, 22 nt, Human
uguguccuucugggagucccag

SEQ ID NO: 272295 - RNA, 22 nt, Human
ccucaugcugcaucucugaggu

SEQ ID NO: 272296 - RNA, 22 nt, Human
gcugucaccaaagcaggcacug

SEQ ID NO: 272297 - RNA, 22 nt, Human
ugaaucaauaguugcaaguauu

SEQ ID NO: 272298 - RNA, 22 nt, Human
gccuuccuuuuaccaccagcca

SEQ ID NO: 272299 - RNA, 22 nt, Human
gcagcccaggucucucucacuc

SEQ ID NO: 272300 - RNA, 21 nt, Human
auaaagacaaacacuauuugg

SEQ ID NO: 272301 - RNA, 22 nt, Human
agcuguuuccauaaaugagaca

SEQ ID NO: 272302 - RNA, 22 nt, Human
caggcauuguucuagguucuca

SEQ ID NO: 272303 - RNA, 22 nt, Human
uguccugggucccugcuagaag

SEQ ID NO: 272304 - RNA, 20 nt, Human
cuggaguguagcaguggcug

SEQ ID NO: 272305 - RNA, 22 nt, Human
augaaacucuaacuuaacaagu

SEQ ID NO: 272306 - RNA, 22 nt, Human
auauuaauuauuuacacaugag

SEQ ID NO: 272307 - RNA, 22 nt, Human
auucucuguggugaugcuggug

SEQ ID NO: 272308 - RNA, 22 nt, Human
agcaagcagaauucuguccucu

SEQ ID NO: 272309 - RNA, 22 nt, Human
cucguugcugaagccaaaguca

SEQ ID NO: 272310 - RNA, 22 nt, Human
gggagcuggaugauugaggcaa

SEQ ID NO: 272311 - RNA, 22 nt, Human
ucucagaaaaacuuugagggua

SEQ ID NO: 272312 - RNA, 22 nt, Human
acugccuuccaccuauggauga

SEQ ID NO: 272313 - RNA, 22 nt, Human
uuuaaaaaacuagucugagucu

SEQ ID NO: 272314 - RNA, 22 nt, Human
uugaacauaaaucacuggucag

SEQ ID NO: 272315 - RNA, 22 nt, Human
ugcacuuugcaggcauggaaac

SEQ ID NO: 272316 - RNA, 22 nt, Human
uucaauucugaugaaggcaaua

SEQ ID NO: 272317 - RNA, 20 nt, Human
agcuccugguauaggugccu

SEQ ID NO: 272318 - RNA, 22 nt, Human
guugagaguuaagcgggcuaau

SEQ ID NO: 272319 - RNA, 22 nt, Human
uugaucaaaucagcuacugagg

SEQ ID NO: 272320 - RNA, 22 nt, Human
aauguauuccucaugcaagagu

SEQ ID NO: 272321 - RNA, 23 nt, Human
aagaacuuugguccugcagaguc

SEQ ID NO: 272322 - RNA, 22 nt, Human
ccugguccuuacgucauugcuu

SEQ ID NO: 272323 - RNA, 22 nt, Human
gcagagcccuggggguauggug

SEQ ID NO: 272324 - RNA, 22 nt, Human
guccaggccccagggauucuug

SEQ ID NO: 272325 - RNA, 22 nt, Human
cugguccucuccagcaggcauu

SEQ ID NO: 272326 - RNA, 22 nt, Human
uugagacacuuugggcaucacu

SEQ ID NO: 272327 - RNA, 17 nt, Human
auacauuguuaaaguau

SEQ ID NO: 272328 - RNA, 22 nt, Human
cccagcaggucggugcugccug

SEQ ID NO: 272329 - RNA, 22 nt, Human
cccugcuaguugucucagugau

SEQ ID NO: 272330 - RNA, 22 nt, Human
uuuuucugagaauaugagagga

SEQ ID NO: 272331 - RNA, 22 nt, Human
agguucuguuuggcugaggauc

SEQ ID NO: 272332 - RNA, 22 nt, Human
augaccagccgagauaaacaga

SEQ ID NO: 272333 - RNA, 22 nt, Human
gcuggagugcaguugcacaguc

SEQ ID NO: 272334 - RNA, 22 nt, Human
cugggucucuuaccaugugacu

SEQ ID NO: 272335 - RNA, 22 nt, Human
cugcagccacgagucacagccc

SEQ ID NO: 272336 - RNA, 22 nt, Human
ccugggaagaccggcagugggg

SEQ ID NO: 272337 - RNA, 22 nt, Human
ugcucaggaggaggcugugagg

SEQ ID NO: 272338 - RNA, 22 nt, Human
aaggcucuggguuucauaggug

SEQ ID NO: 272339 - RNA, 22 nt, Human
ucagcaggcacaccaaaaacug

SEQ ID NO: 272340 - RNA, 22 nt, Human
uauauuuaauccuagagccauu

SEQ ID NO: 272341 - RNA, 22 nt, Human
ugaauauggcaacucuuguaac

SEQ ID NO: 272342 - RNA, 21 nt, Human
ucugcccuccaggagcucaua

SEQ ID NO: 272343 - RNA, 22 nt, Human
uucugggagauucauaugaaaa

SEQ ID NO: 272344 - RNA, 21 nt, Human
cugcccauuugugaugucccc

SEQ ID NO: 272345 - RNA, 22 nt, Human
aaacuaaaccuggcuuaguaag

SEQ ID NO: 272346 - RNA, 22 nt, Human
uccuaggcaguuggugcuccau

SEQ ID NO: 272347 - RNA, 20 nt, Human
cuggcuggaaacuuagccuu

SEQ ID NO: 272348 - RNA, 18 nt, Human
cagcugccagcucaugga

SEQ ID NO: 272349 - RNA, 22 nt, Human
uggaagccaaggucagaaggag

SEQ ID NO: 272350 - RNA, 22 nt, Human
acuggcagagggaaaaccauuc

SEQ ID NO: 272351 - RNA, 22 nt, Human
uugcuuuaacuaguaaaugggg

SEQ ID NO: 272352 - RNA, 22 nt, Human
guuacaaauguaaauucugggg

SEQ ID NO: 272353 - RNA, 22 nt, Human
cauuuugugcuagacacuaugg

SEQ ID NO: 272354 - RNA, 22 nt, Human
aggaagagcuggaccagaggac

SEQ ID NO: 272355 - RNA, 22 nt, Human
uagaaaucagguuuuuagaaag

SEQ ID NO: 272356 - RNA, 22 nt, Human
gaggcggcggccgagccuggcu

SEQ ID NO: 272357 - RNA, 18 nt, Human
cugggccuuuguauuuuu

SEQ ID NO: 272358 - RNA, 18 nt, Human
cacaggcaggugauaggu

SEQ ID NO: 272359 - RNA, 22 nt, Human
aagcaagcccaggcucagucaa

SEQ ID NO: 272360 - RNA, 22 nt, Human
aggaaggacugcagcauuuggu

SEQ ID NO: 272361 - RNA, 22 nt, Human
uaaaggccuaguaaguugagac

SEQ ID NO: 272362 - RNA, 19 nt, Human
ugccuggacaaaugugggg

SEQ ID NO: 272363 - RNA, 22 nt, Human
uaagaugggggaaagaaauagu

SEQ ID NO: 272364 - RNA, 22 nt, Human
ugaagccacuuuccagaaucac

SEQ ID NO: 272365 - RNA, 22 nt, Human
aaucucuugggaggaaugaauu

SEQ ID NO: 272366 - RNA, 21 nt, Human
agcuggcagauauggugucug

SEQ ID NO: 272367 - RNA, 22 nt, Human
gccuguuuggaaucuguuuaau

SEQ ID NO: 272368 - RNA, 22 nt, Human
ucaaaggguaauguaauagucu

SEQ ID NO: 272369 - RNA, 22 nt, Human
uugguacagaugagguauucuc

SEQ ID NO: 272370 - RNA, 23 nt, Human
acagucguagguauccuuuuccu

SEQ ID NO: 272371 - RNA, 22 nt, Human
ucugggcugaaaugaaggccuu

SEQ ID NO: 272372 - RNA, 22 nt, Human
gagggcucacugagaaagcagu

SEQ ID NO: 272373 - RNA, 22 nt, Human
ugagaaaauccagaggcuaguu

SEQ ID NO: 272374 - RNA, 22 nt, Human
uggggauguaaaugaggugaua

SEQ ID NO: 272375 - RNA, 22 nt, Human
aaacccugcucuuauggaacuu

SEQ ID NO: 272376 - RNA, 22 nt, Human
cugcugcaacucuuuagagggu

SEQ ID NO: 272377 - RNA, 22 nt, Human
ggccccaggccuuuggucuggc

SEQ ID NO: 272378 - RNA, 22 nt, Human
cauggcagccugcccugcuugc

SEQ ID NO: 272379 - RNA, 22 nt, Human
cauauuugguauaacuuaagca

SEQ ID NO: 272380 - RNA, 22 nt, Human
ugagcaggacugaccggccuua

SEQ ID NO: 272381 - RNA, 22 nt, Human
augauugaccaucugcugggcu

SEQ ID NO: 272382 - RNA, 20 nt, Human
ggaggguggaagaaagcaag

SEQ ID NO: 272383 - RNA, 22 nt, Human
cauguacaguuuuucuguccug

SEQ ID NO: 272384 - RNA, 22 nt, Human
gcaggcagguggcaucuuguga

SEQ ID NO: 272385 - RNA, 22 nt, Human
augcaggggcagcagagccugg

SEQ ID NO: 272386 - RNA, 22 nt, Human
caggacacauuucuuguucagg

SEQ ID NO: 272387 - RNA, 22 nt, Human
ucagcuuuuuggauugcccaag

SEQ ID NO: 272388 - RNA, 22 nt, Human
uccucggcugggccccaggcuu

SEQ ID NO: 272389 - RNA, 22 nt, Human
gcucugagucucagcuaccaca

SEQ ID NO: 272390 - RNA, 22 nt, Human
gucaacaauuccaguuuuuacu

SEQ ID NO: 272391 - RNA, 22 nt, Human
uugaggaguacaaagcaugcuu

SEQ ID NO: 272392 - RNA, 20 nt, Human
cacaggaaagcuacucaguu

SEQ ID NO: 272393 - RNA, 22 nt, Human
gccugagggcuccuagcaggcu

SEQ ID NO: 272394 - RNA, 22 nt, Human
auguuacugugaucaugauacu

SEQ ID NO: 272395 - RNA, 22 nt, Human
uugguacaaaaccaugaaagaa

SEQ ID NO: 272396 - RNA, 22 nt, Human
cuuuggaguucccuaauuuccc

SEQ ID NO: 272397 - RNA, 22 nt, Human
aguuagaagugugucaucugug

SEQ ID NO: 272398 - RNA, 22 nt, Human
cuacuuguucacuguaggucgc

SEQ ID NO: 272399 - RNA, 22 nt, Human
cauggccugccuccuccuggug

SEQ ID NO: 272400 - RNA, 22 nt, Human
agggccugugaauucucccugc

SEQ ID NO: 272401 - RNA, 22 nt, Human
ugggguccucucacuuggaggg

SEQ ID NO: 272402 - RNA, 22 nt, Human
aaggugguuguaggcuggucug

SEQ ID NO: 272403 - RNA, 22 nt, Human
auccaaaggugacacagaauac

SEQ ID NO: 272404 - RNA, 22 nt, Human
cuguuacccagcaaccccagca

SEQ ID NO: 272405 - RNA, 22 nt, Human
aggugcuggcgccccaggagac

SEQ ID NO: 272406 - RNA, 22 nt, Human
agcagagccaggucucucugua

SEQ ID NO: 272407 - RNA, 22 nt, Human
acagcugcucaccugugagccc

SEQ ID NO: 272408 - RNA, 22 nt, Human
cucugcagaggcccaaggcuga

SEQ ID NO: 272409 - RNA, 19 nt, Human
acugcagggaggaggugug

SEQ ID NO: 272410 - RNA, 19 nt, Human
aguuuagagagacucuaaa

SEQ ID NO: 272411 - RNA, 17 nt, Human
cagcucuuccucccucu

SEQ ID NO: 272412 - RNA, 22 nt, Human
guuggcuuugcucucuguccua

SEQ ID NO: 272413 - RNA, 22 nt, Human
agucagagaauguuuucaugga

SEQ ID NO: 272414 - RNA, 22 nt, Human
agaaaaacacaaucgggccucc

SEQ ID NO: 272415 - RNA, 22 nt, Human
acaugccaauuugguuaguuca

SEQ ID NO: 272416 - RNA, 22 nt, Human
gaaaucuuugccuuagcugugu

SEQ ID NO: 272417 - RNA, 22 nt, Human
gaggcucaccuagggagcacug

SEQ ID NO: 272418 - RNA, 21 nt, Human
ucaaagcacauauuugcacau

SEQ ID NO: 272419 - RNA, 22 nt, Human
cuggccaccaagagcuugcuca

SEQ ID NO: 272420 - RNA, 22 nt, Human
gggaggugaaaggucaugugug

SEQ ID NO: 272421 - RNA, 22 nt, Human
gggccccuuguaucucuggcuc

SEQ ID NO: 272422 - RNA, 22 nt, Human
ugagacuuccugaugaggcccg

SEQ ID NO: 272423 - RNA, 22 nt, Human
ugagcugucuaugguccugucu

SEQ ID NO: 272424 - RNA, 22 nt, Human
uucuggcugaaaguuuauuuga

SEQ ID NO: 272425 - RNA, 22 nt, Human
guauccuuugcggaaauuucua

SEQ ID NO: 272426 - RNA, 23 nt, Human
cagaugagguuggcagcaugguc

SEQ ID NO: 272427 - RNA, 23 nt, Human
cccagcugcagacaagggagggu

SEQ ID NO: 272428 - RNA, 22 nt, Human
cagaaugcauugcuucugaugg

SEQ ID NO: 272429 - RNA, 22 nt, Human
ucugagacaggaaguggagggu

SEQ ID NO: 272430 - RNA, 22 nt, Human
aggacaguuaguuaggaaguuu

SEQ ID NO: 272431 - RNA, 22 nt, Human
ugagauggggagggcugcagaa

SEQ ID NO: 272432 - RNA, 22 nt, Human
agugcauguucacuggcauggu

SEQ ID NO: 272433 - RNA, 22 nt, Human
cuggaggaccccugccuggaag

SEQ ID NO: 272434 - RNA, 22 nt, Human
uugguacaaugugcuagguagg

SEQ ID NO: 272435 - RNA, 20 nt, Human
cauuugaaucuccauucugc

SEQ ID NO: 272436 - RNA, 22 nt, Human
aaggccaggggcuggcgccucc

SEQ ID NO: 272437 - RNA, 22 nt, Human
ggcagggguggccuuccuuugg

SEQ ID NO: 272438 - RNA, 22 nt, Human
agacagcugcucgcagagcuau

SEQ ID NO: 272439 - RNA, 22 nt, Human
uggcuucuggccaggcacagga

SEQ ID NO: 272440 - RNA, 22 nt, Human
uugggaaguaauaugguggucu

SEQ ID NO: 272441 - RNA, 22 nt, Human
uaacagaaaagaacugaguuug

SEQ ID NO: 272442 - RNA, 22 nt, Human
gacugccagaaugugaggccug

SEQ ID NO: 272443 - RNA, 22 nt, Human
ccucagaggcaugguuagaaua

SEQ ID NO: 272444 - RNA, 22 nt, Human
uggagcucagcgggugguuucu

SEQ ID NO: 272445 - RNA, 22 nt, Human
gaaggggaguggcuagugugug

SEQ ID NO: 272446 - RNA, 22 nt, Human
agugggagccagcagcuugggg

SEQ ID NO: 272447 - RNA, 22 nt, Human
ccagggugcucuguggcgucgc

SEQ ID NO: 272448 - RNA, 22 nt, Human
aagccuucccuuuuugagcuca

SEQ ID NO: 272449 - RNA, 22 nt, Human
aaagaguuggacuuucucaggc

SEQ ID NO: 272450 - RNA, 22 nt, Human
auagacauagccguaauuuauu

SEQ ID NO: 272451 - RNA, 22 nt, Human
ccagcuggaaacaaauagagug

SEQ ID NO: 272452 - RNA, 22 nt, Human
ugccagaagauucucuaucaga

SEQ ID NO: 272453 - RNA, 20 nt, Human
aggcaguguagagaugagua

SEQ ID NO: 272454 - RNA, 22 nt, Human
ugcaggugcugugucaagagag

SEQ ID NO: 272455 - RNA, 22 nt, Human
ggaaagcuuuguacuugaaaac

SEQ ID NO: 272456 - RNA, 22 nt, Human
cauuugcagagggugacacucu

SEQ ID NO: 272457 - RNA, 22 nt, Human
ccagagcuugacgugcaacgga

SEQ ID NO: 272458 - RNA, 22 nt, Human
ugagacacucucgggcacauuu

SEQ ID NO: 272459 - RNA, 22 nt, Human
auggaacaagaacucagauuua

SEQ ID NO: 272460 - RNA, 22 nt, Human
aguagcacaauuuugucccuaa

SEQ ID NO: 272461 - RNA, 22 nt, Human
uuuuagaaucagguugucuggg

SEQ ID NO: 272462 - RNA, 22 nt, Human
gcacagaacuucucuuaguagg

SEQ ID NO: 272463 - RNA, 22 nt, Human
aagucuaaacacauauuuaaaa

SEQ ID NO: 272464 - RNA, 22 nt, Human
agaaucaggaagacagccuggc

SEQ ID NO: 272465 - RNA, 22 nt, Human
aggcaaaucugagacauuuaaa

SEQ ID NO: 272466 - RNA, 22 nt, Human
uggcuuuaggagcuauauaccu

SEQ ID NO: 272467 - RNA, 22 nt, Human
aggagcccagccugggcucgga

SEQ ID NO: 272468 - RNA, 22 nt, Human
agcagggcccacuaggggagau

SEQ ID NO: 272469 - RNA, 22 nt, Human
ucaagcaacagaacugugagac

SEQ ID NO: 272470 - RNA, 22 nt, Human
uuggccagcagcucuggcuuag

SEQ ID NO: 272471 - RNA, 22 nt, Human
ucacagcuccagacugcaacuc

SEQ ID NO: 272472 - RNA, 22 nt, Human
ucuauguagugccagcuaguau

SEQ ID NO: 272473 - RNA, 20 nt, Human
caggcuccgcaggacuaggg

SEQ ID NO: 272474 - RNA, 22 nt, Human
gcccuggaugcucauggcauca

SEQ ID NO: 272475 - RNA, 22 nt, Human
cagauucucacuguauucaggu

SEQ ID NO: 272476 - RNA, 22 nt, Human
ccugacucuggccaggccagcu

SEQ ID NO: 272477 - RNA, 22 nt, Human
caggauaaauaguaaauguaag

SEQ ID NO: 272478 - RNA, 22 nt, Human
uagauuaacaguuuuguugaag

SEQ ID NO: 272479 - RNA, 22 nt, Human
cauuacagaauauguaaugauc

SEQ ID NO: 272480 - RNA, 22 nt, Human
aggaggaaagaaggcccccagc

SEQ ID NO: 272481 - RNA, 22 nt, Human
gcaaagcacacuggagaugucg

SEQ ID NO: 272482 - RNA, 22 nt, Human
uucucuggaaggcucuacggga

SEQ ID NO: 272483 - RNA, 22 nt, Human
ugcaugcaugugagcaugcaua

SEQ ID NO: 272484 - RNA, 22 nt, Human
caaaugauaccuauuacuaggc

SEQ ID NO: 272485 - RNA, 22 nt, Human
caggccaggugcucuagaauca

SEQ ID NO: 272486 - RNA, 20 nt, Human
ucugagaagcaaacaauguu

SEQ ID NO: 272487 - RNA, 22 nt, Human
cacugcaggucugagauggggg

SEQ ID NO: 272488 - RNA, 22 nt, Human
auuccucauuuguugagaacca

SEQ ID NO: 272489 - RNA, 22 nt, Human
ucugaaagcccuaguuuguaau

SEQ ID NO: 272490 - RNA, 22 nt, Human
aauaucaacaguguccuucuaa

SEQ ID NO: 272491 - RNA, 22 nt, Human
agggcuggcuaggugcguuccc

SEQ ID NO: 272492 - RNA, 22 nt, Human
uggccaggccggggacagaacu

SEQ ID NO: 272493 - RNA, 22 nt, Human
ucugacuugcaucuuaaaggag

SEQ ID NO: 272494 - RNA, 22 nt, Human
cagcuucugcucauggaggggu

SEQ ID NO: 272495 - RNA, 22 nt, Human
aagcacaggagacgcacagcca

SEQ ID NO: 272496 - RNA, 22 nt, Human
ccaggaagauuuauuuuggcuu

SEQ ID NO: 272497 - RNA, 22 nt, Human
ggcauggcuggguucuggugag

SEQ ID NO: 272498 - RNA, 22 nt, Human
caaauuacccucaacaucuaga

SEQ ID NO: 272499 - RNA, 22 nt, Human
ucugcuguucauucuuuuagcu

SEQ ID NO: 272500 - RNA, 19 nt, Human
acagugcaugggaccuggu

SEQ ID NO: 272501 - RNA, 22 nt, Human
cuuguauucagaguggacauga

SEQ ID NO: 272502 - RNA, 22 nt, Human
cugagcugaaacuugagaggcu

SEQ ID NO: 272503 - RNA, 22 nt, Human
uuuucaguaaugucuacauaau

SEQ ID NO: 272504 - RNA, 22 nt, Human
uuuuagaagugccuauccuaug

SEQ ID NO: 272505 - RNA, 22 nt, Human
guccugugaugaguaccaggug

SEQ ID NO: 272506 - RNA, 22 nt, Human
augcaacaccccuauggaugga

SEQ ID NO: 272507 - RNA, 22 nt, Human
uccagcuuuuaccaaaugagca

SEQ ID NO: 272508 - RNA, 22 nt, Human
agguauaugaagaugaaauaac

SEQ ID NO: 272509 - RNA, 22 nt, Human
guucuucaucauuuuagauagg

SEQ ID NO: 272510 - RNA, 22 nt, Human
uauuagaaagcuuaauaucgug

SEQ ID NO: 272511 - RNA, 22 nt, Human
gccagcccauuaaccccugucc

SEQ ID NO: 272512 - RNA, 22 nt, Human
agccucagggcucugcgcagac

SEQ ID NO: 272513 - RNA, 22 nt, Human
ucugggaacauuuugagggcaa

SEQ ID NO: 272514 - RNA, 22 nt, Human
aagccagggucaggggccuccu

SEQ ID NO: 272515 - RNA, 22 nt, Human
cacuggaauggauagagcagag

SEQ ID NO: 272516 - RNA, 17 nt, Human
uuuuguucaucuucaaa

SEQ ID NO: 272517 - RNA, 22 nt, Human
agcccagagggguuugaggacu

SEQ ID NO: 272518 - RNA, 22 nt, Human
agccacagugcaagagagaaaa

SEQ ID NO: 272519 - RNA, 23 nt, Human
uugaauuucucuugcaauauuua

SEQ ID NO: 272520 - RNA, 22 nt, Human
gagagaauguacaugcuagggg

SEQ ID NO: 272521 - RNA, 22 nt, Human
uaacuagaauggcuauuuugag

SEQ ID NO: 272522 - RNA, 22 nt, Human
cacagcuggugcacuagcucug

SEQ ID NO: 272523 - RNA, 19 nt, Human
uucucagagcuugcagcac

SEQ ID NO: 272524 - RNA, 22 nt, Human
caggccuggagugcaauggcac

SEQ ID NO: 272525 - RNA, 22 nt, Human
ggaaggcuuugaggggugcugg

SEQ ID NO: 272526 - RNA, 22 nt, Human
uccacaggcaagucucuuggca

SEQ ID NO: 272527 - RNA, 22 nt, Human
ggcuuccccuccagugcucugu

SEQ ID NO: 272528 - RNA, 22 nt, Human
ccuggguggcagagguugcagu

SEQ ID NO: 272529 - RNA, 23 nt, Human
aguguugagcagaugcaaagguu

SEQ ID NO: 272530 - RNA, 22 nt, Human
agacacagaugguaccugagcc

SEQ ID NO: 272531 - RNA, 22 nt, Human
cagcugcuguucaguuuuguuu

SEQ ID NO: 272532 - RNA, 22 nt, Human
cagaugcuaaacaaaggacuuu

SEQ ID NO: 272533 - RNA, 22 nt, Human
cagaacagacuuaacagggcug

SEQ ID NO: 272534 - RNA, 23 nt, Human
auugaacagagagaaaaacaucc

SEQ ID NO: 272535 - RNA, 22 nt, Human
aucaaugcuugccaaauggaag

SEQ ID NO: 272536 - RNA, 22 nt, Human
cuggccugagcacagcggcugc

SEQ ID NO: 272537 - RNA, 22 nt, Human
gagcaucugugguccaucagaa

SEQ ID NO: 272538 - RNA, 23 nt, Human
aaugaguugggcagcauacaggc

SEQ ID NO: 272539 - RNA, 22 nt, Human
uggccaugacauggaggcuuug

SEQ ID NO: 272540 - RNA, 22 nt, Human
gcuggaaaugaauggagaggug

SEQ ID NO: 272541 - RNA, 22 nt, Human
agcaggcacuaugccaggaucu

SEQ ID NO: 272542 - RNA, 22 nt, Human
cugaggaagacagcagcugugu

SEQ ID NO: 272543 - RNA, 22 nt, Human
uacagcaaugguucuaagaguc

SEQ ID NO: 272544 - RNA, 22 nt, Human
agcaagaagggcaaggaaguuu

SEQ ID NO: 272545 - RNA, 23 nt, Human
agggccucaggagggcugcaugg

SEQ ID NO: 272546 - RNA, 22 nt, Human
cgcaggcaagagaguacaguua

SEQ ID NO: 272547 - RNA, 22 nt, Human
cagcuuuguggccuugaccucg

SEQ ID NO: 272548 - RNA, 22 nt, Human
caggcaccugugugucucaggg

SEQ ID NO: 272549 - RNA, 22 nt, Human
ggcaggcaccagcucagcaaua

SEQ ID NO: 272550 - RNA, 22 nt, Human
cuuuuguugcccuugucgcagg

SEQ ID NO: 272551 - RNA, 22 nt, Human
uuuguguggauggaaggcagua

SEQ ID NO: 272552 - RNA, 20 nt, Human
cagcagccaaacuucuauuc

SEQ ID NO: 272553 - RNA, 22 nt, Human
ggugaggaauuggggacugacc

SEQ ID NO: 272554 - RNA, 22 nt, Human
uuaaggcauucuccuacuaaua

SEQ ID NO: 272555 - RNA, 22 nt, Human
augucacaucugggauggcccu

SEQ ID NO: 272556 - RNA, 22 nt, Human
cccagcuucugagggggccuug

SEQ ID NO: 272557 - RNA, 21 nt, Human
gcacagggacagaucaucaca

SEQ ID NO: 272558 - RNA, 22 nt, Human
guuuccuaccagugguuccaga

SEQ ID NO: 272559 - RNA, 19 nt, Human
ccugcagggaugagagguu

SEQ ID NO: 272560 - RNA, 20 nt, Human
cugcuugggccccucuggcc

SEQ ID NO: 272561 - RNA, 22 nt, Human
ccagugcucuuaaaggucauaa

SEQ ID NO: 272562 - RNA, 22 nt, Human
cagcacuaugacauuuaauucu

SEQ ID NO: 272563 - RNA, 20 nt, Human
gaugaaaucacugggcagcc

SEQ ID NO: 272564 - RNA, 22 nt, Human
auagaauagcauagaaaauuga

SEQ ID NO: 272565 - RNA, 22 nt, Human
cuggcuuugcgucuuugccaca

SEQ ID NO: 272566 - RNA, 22 nt, Human
cagagagagucaaaucuuugcu

SEQ ID NO: 272567 - RNA, 22 nt, Human
uucuuaagcguaugauaaugaa

SEQ ID NO: 272568 - RNA, 22 nt, Human
uuacaaugacagguguaucauu

SEQ ID NO: 272569 - RNA, 20 nt, Human
cccagggaccugagcuccau

SEQ ID NO: 272570 - RNA, 22 nt, Human
guagcuuauuagggauaauagu

SEQ ID NO: 272571 - RNA, 22 nt, Human
gccugagaguugaaguucagug

SEQ ID NO: 272572 - RNA, 22 nt, Human
gaauugcuaauccaagugacug

SEQ ID NO: 272573 - RNA, 22 nt, Human
gugagcugggugaaugguaggg

SEQ ID NO: 272574 - RNA, 23 nt, Human
ucugucuguguaugugcagaaag

SEQ ID NO: 272575 - RNA, 22 nt, Human
acaggcugaaaguuaaguucug

SEQ ID NO: 272576 - RNA, 22 nt, Human
ugagcaucuuuuuacagguuua

SEQ ID NO: 272577 - RNA, 22 nt, Human
ccuuugugguggcccagugugg

SEQ ID NO: 272578 - RNA, 22 nt, Human
agcccagauaaaguacaaccau

SEQ ID NO: 272579 - RNA, 22 nt, Human
cugguacagggaaauaaaggaa

SEQ ID NO: 272580 - RNA, 22 nt, Human
uucacauuguuuuaaugugaau

SEQ ID NO: 272581 - RNA, 22 nt, Human
acaaauguuggauuugucuucc

SEQ ID NO: 272582 - RNA, 20 nt, Human
auucucugcucaaguggcac

SEQ ID NO: 272583 - RNA, 22 nt, Human
cguggcaguggaaggcugggug

SEQ ID NO: 272584 - RNA, 22 nt, Human
uccugggacucuuuaucagaga

SEQ ID NO: 272585 - RNA, 22 nt, Human
caggcccaaaugcaaccuucuu

SEQ ID NO: 272586 - RNA, 22 nt, Human
agggaagcuuguuacugagaag

SEQ ID NO: 272587 - RNA, 19 nt, Human
uuuacucuccaaggugagu

SEQ ID NO: 272588 - RNA, 22 nt, Human
gcucugagugaucagcugggaa

SEQ ID NO: 272589 - RNA, 22 nt, Human
agcuacagaugagcccaguauc

SEQ ID NO: 272590 - RNA, 22 nt, Human
uuauuuaaaauguagguuggga

SEQ ID NO: 272591 - RNA, 22 nt, Human
cuagaaucugggauuucugacu

SEQ ID NO: 272592 - RNA, 22 nt, Human
uuuuccucaggaaugcuaagcu

SEQ ID NO: 272593 - RNA, 22 nt, Human
ugggcaggggcccugcuuccgu

SEQ ID NO: 272594 - RNA, 22 nt, Human
caggaaauucuuuuguuugugc

SEQ ID NO: 272595 - RNA, 22 nt, Human
cauggggagacaccuagggaaa

SEQ ID NO: 272596 - RNA, 22 nt, Human
agucuucugcucugucacuaac

SEQ ID NO: 272597 - RNA, 22 nt, Human
gcuggccucaucacugacuucu

SEQ ID NO: 272598 - RNA, 22 nt, Human
agggucucuggagagcugagga

SEQ ID NO: 272599 - RNA, 22 nt, Human
cugcagggaacugaggcccaga

SEQ ID NO: 272600 - RNA, 22 nt, Human
uucuuuucuuggcaggaguaga

SEQ ID NO: 272601 - RNA, 22 nt, Human
ccaggccuuucuucuuggucug

SEQ ID NO: 272602 - RNA, 22 nt, Human
cuugccugcuggagcagggcuc

SEQ ID NO: 272603 - RNA, 22 nt, Human
uucagagcuggugucuacagcu

SEQ ID NO: 272604 - RNA, 22 nt, Human
agcccaggucucaaaguacagg

SEQ ID NO: 272605 - RNA, 19 nt, Human
gcacacauacacccuuugg

SEQ ID NO: 272606 - RNA, 19 nt, Human
ucucacaagcaacauuguu

SEQ ID NO: 272607 - RNA, 20 nt, Human
cuccaaggcuugcaggaggc

SEQ ID NO: 272608 - RNA, 22 nt, Human
ggucucugacuuagagauggau

SEQ ID NO: 272609 - RNA, 22 nt, Human
gcaggagagucugugccagguu

SEQ ID NO: 272610 - RNA, 22 nt, Human
caggacagcucaacaccuccuc

SEQ ID NO: 272611 - RNA, 22 nt, Human
acucucacuagcucugugaccu

SEQ ID NO: 272612 - RNA, 19 nt, Human
uuucucugugcaccuuuuc

SEQ ID NO: 272613 - RNA, 22 nt, Human
uguuuacagggugauuuuaccu

SEQ ID NO: 272614 - RNA, 22 nt, Human
uggggaggaagucagauuucag

SEQ ID NO: 272615 - RNA, 22 nt, Human
ugcuuuuaggagauuaaaauua

SEQ ID NO: 272616 - RNA, 22 nt, Human
uggcagugucuuaucaggagug

SEQ ID NO: 272617 - RNA, 22 nt, Human
cugcuguggccagccaggucaa

SEQ ID NO: 272618 - RNA, 22 nt, Human
guuguuuauaaaaauaucuagc

SEQ ID NO: 272619 - RNA, 22 nt, Human
ugucuccaccaucaucuuacca

SEQ ID NO: 272620 - RNA, 22 nt, Human
uuuuauguaauccuuacugucg

SEQ ID NO: 272621 - RNA, 22 nt, Human
uccaucuggugagugaggagcc

SEQ ID NO: 272622 - RNA, 22 nt, Human
ggcuggcauccagggaaaucca

SEQ ID NO: 272623 - RNA, 22 nt, Human
acgugcauauguauacacacau

SEQ ID NO: 272624 - RNA, 22 nt, Human
auauuuucuggaacuaugccug

SEQ ID NO: 272625 - RNA, 22 nt, Human
uucuucaaagaugucuguugga

SEQ ID NO: 272626 - RNA, 22 nt, Human
gagaggcuggcagugccagguu

SEQ ID NO: 272627 - RNA, 22 nt, Human
ugagcaauuaacagagucuaaa

SEQ ID NO: 272628 - RNA, 22 nt, Human
gguggaguaauucgcagagguu

SEQ ID NO: 272629 - RNA, 17 nt, Human
uguuuuuucccuguucu

SEQ ID NO: 272630 - RNA, 22 nt, Human
augucuuggguuucaguuuacu

SEQ ID NO: 272631 - RNA, 22 nt, Human
acaguaaaacauuuuuauuagg

SEQ ID NO: 272632 - RNA, 22 nt, Human
ugcaucugauucucaggcagaa

SEQ ID NO: 272633 - RNA, 22 nt, Human
caggaagcugugaaggagacgg

SEQ ID NO: 272634 - RNA, 20 nt, Human
ccaguccaccugagacaugu

SEQ ID NO: 272635 - RNA, 22 nt, Human
accucaaggaaaaucuagacag

SEQ ID NO: 272636 - RNA, 22 nt, Human
gucaaauauaugcaaaacuauu

SEQ ID NO: 272637 - RNA, 22 nt, Human
cacuguaucuuuuccaaagucu

SEQ ID NO: 272638 - RNA, 22 nt, Human
aauguguguauuucuaggcgag

SEQ ID NO: 272639 - RNA, 22 nt, Human
gcacaagaauaaccauauuuaa

SEQ ID NO: 272640 - RNA, 22 nt, Human
ucagaguccaugguacuuaauu

SEQ ID NO: 272641 - RNA, 23 nt, Human
uccuggguuugaauucuagucuu

SEQ ID NO: 272642 - RNA, 21 nt, Human
ucaggaagagccaguucaugc

SEQ ID NO: 272643 - RNA, 22 nt, Human
acagacaucuauccauuuaauu

SEQ ID NO: 272644 - RNA, 22 nt, Human
guucugcuuaaauuauugaucc

SEQ ID NO: 272645 - RNA, 15 nt, Human
caggagaggaagguu

SEQ ID NO: 272646 - RNA, 22 nt, Human
caggcuggagugcaguugugca

SEQ ID NO: 272647 - RNA, 22 nt, Human
gggccugauuagcaggcuagcu

SEQ ID NO: 272648 - RNA, 22 nt, Human
uccucagcuuuuauuucacuug

SEQ ID NO: 272649 - RNA, 22 nt, Human
gcugccuguguggccacucacu

SEQ ID NO: 272650 - RNA, 22 nt, Human
ugugaauauccauuuguuucag

SEQ ID NO: 272651 - RNA, 22 nt, Human
agcaggccugccaccucggggu

SEQ ID NO: 272652 - RNA, 22 nt, Human
uccuggaucuacucucaauugg

SEQ ID NO: 272653 - RNA, 22 nt, Human
ugacuuuaagcuaucugauucu

SEQ ID NO: 272654 - RNA, 22 nt, Human
ggcccagagucugcaauggagu

SEQ ID NO: 272655 - RNA, 22 nt, Human
ucaggacagaaggcugccaggg

SEQ ID NO: 272656 - RNA, 20 nt, Human
ugugacaaaggcauauuuua

SEQ ID NO: 272657 - RNA, 22 nt, Human
caugcacaaagguaagaugcgu

SEQ ID NO: 272658 - RNA, 22 nt, Human
ggcucuggggccuccucccuug

SEQ ID NO: 272659 - RNA, 22 nt, Human
uucugucuucccacugaggagc

SEQ ID NO: 272660 - RNA, 22 nt, Human
uccugugaguagauaguauugu

SEQ ID NO: 272661 - RNA, 22 nt, Human
gucuggcucuggaaggcaaagg

SEQ ID NO: 272662 - RNA, 19 nt, Human
auucagugucucugacuuc

SEQ ID NO: 272663 - RNA, 22 nt, Human
agggucaacauuucauugauuc

SEQ ID NO: 272664 - RNA, 22 nt, Human
aauaaauguuaagauugucuca

SEQ ID NO: 272665 - RNA, 22 nt, Human
acacauuccugcagacaugaug

SEQ ID NO: 272666 - RNA, 22 nt, Human
aaacaaagcaucuugcuaugca

SEQ ID NO: 272667 - RNA, 22 nt, Human
auccagccaguguggaugacuu

SEQ ID NO: 272668 - RNA, 23 nt, Human
ccuggcuguggauuugggccugc

SEQ ID NO: 272669 - RNA, 22 nt, Human
gaggccagaaugagcugaaugc

SEQ ID NO: 272670 - RNA, 22 nt, Human
gaaggccacaaaaaaugucaua

SEQ ID NO: 272671 - RNA, 22 nt, Human
agggcagcucucaccucuggcc

SEQ ID NO: 272672 - RNA, 22 nt, Human
aaagugcagcugaaaacauccu

SEQ ID NO: 272673 - RNA, 22 nt, Human
uggcaaaggggaccauguugaa

SEQ ID NO: 272674 - RNA, 22 nt, Human
agaggcagaaguguucaaaccc

SEQ ID NO: 272675 - RNA, 22 nt, Human
ugcccugccugagagacaguaa

SEQ ID NO: 272676 - RNA, 22 nt, Human
aaggcaaugagggagauagagu

SEQ ID NO: 272677 - RNA, 22 nt, Human
acuccuggugcugaugaagaga

SEQ ID NO: 272678 - RNA, 22 nt, Human
gagugucagugccuggcuuguu

SEQ ID NO: 272679 - RNA, 22 nt, Human
uacaugcuccacuuucuccugu

SEQ ID NO: 272680 - RNA, 22 nt, Human
cugaggcacugucagcugaggc

SEQ ID NO: 272681 - RNA, 23 nt, Human
aaacaagucucucaauggcuugc

SEQ ID NO: 272682 - RNA, 22 nt, Human
uggagccagcaggacucagagg

SEQ ID NO: 272683 - RNA, 22 nt, Human
guggauuacaagacaguugaga

SEQ ID NO: 272684 - RNA, 22 nt, Human
uauuccagaugaaaucauucag

SEQ ID NO: 272685 - RNA, 22 nt, Human
agcuuuuacauaaugaucuuga

SEQ ID NO: 272686 - RNA, 22 nt, Human
cugcugggucccccugcugauu

SEQ ID NO: 272687 - RNA, 22 nt, Human
auauuuuggcaaaugucuagau

SEQ ID NO: 272688 - RNA, 22 nt, Human
cuuuacauccuguuucccguuu

SEQ ID NO: 272689 - RNA, 22 nt, Human
uccauacauugaaauaccauuc

SEQ ID NO: 272690 - RNA, 22 nt, Human
ucuuucuggucucgccuuauuc

SEQ ID NO: 272691 - RNA, 22 nt, Human
agcaggugccagguguacccgc

SEQ ID NO: 272692 - RNA, 22 nt, Human
cucaggucacggaucugagcug

SEQ ID NO: 272693 - RNA, 22 nt, Human
aguggcagagugcacucaggca

SEQ ID NO: 272694 - RNA, 22 nt, Human
ugguuacagagauuuuuaagau

SEQ ID NO: 272695 - RNA, 22 nt, Human
acacacagaaggaagccccacu

SEQ ID NO: 272696 - RNA, 22 nt, Human
aacuguagggaucugucuuagu

SEQ ID NO: 272697 - RNA, 22 nt, Human
uaccuagaccaguuacaaugca

SEQ ID NO: 272698 - RNA, 22 nt, Human
uuaaucugaaucaguaaacacu

SEQ ID NO: 272699 - RNA, 22 nt, Human
uacuuuuagccuauuugauucu

SEQ ID NO: 272700 - RNA, 22 nt, Human
ugaggcacugggagagcacacu

SEQ ID NO: 272701 - RNA, 17 nt, Human
agcagcugaagcagcca

SEQ ID NO: 272702 - RNA, 22 nt, Human
aggcugugggaguugagagucu

SEQ ID NO: 272703 - RNA, 22 nt, Human
gggcaaguccggugcccagagc

SEQ ID NO: 272704 - RNA, 22 nt, Human
cugugggaauacugcgagugua

SEQ ID NO: 272705 - RNA, 22 nt, Human
agcaguguggccuuagacccgg

SEQ ID NO: 272706 - RNA, 22 nt, Human
aggaccugacauuguguuuucu

SEQ ID NO: 272707 - RNA, 22 nt, Human
aaagggaaguugcacauguucc

SEQ ID NO: 272708 - RNA, 22 nt, Human
uucccagucccaagaaaagcca

SEQ ID NO: 272709 - RNA, 22 nt, Human
ucucuguaagagaggcuuucau

SEQ ID NO: 272710 - RNA, 22 nt, Human
caguguggugugcacagcuuag

SEQ ID NO: 272711 - RNA, 22 nt, Human
ugccuugacaguuguaagaccu

SEQ ID NO: 272712 - RNA, 22 nt, Human
ccuggcugaacaaagucccucc

SEQ ID NO: 272713 - RNA, 22 nt, Human
cugggccucaaucucagaguuu

SEQ ID NO: 272714 - RNA, 22 nt, Human
gacugguaaggaaauucacuaa

SEQ ID NO: 272715 - RNA, 22 nt, Human
caguccuuauuccuauauuccu

SEQ ID NO: 272716 - RNA, 22 nt, Human
agcugugggauuugggugugcc

SEQ ID NO: 272717 - RNA, 22 nt, Human
uaacuuagaaguuuaauuguau

SEQ ID NO: 272718 - RNA, 22 nt, Human
cuucaggaaaaucucuaaggau

SEQ ID NO: 272719 - RNA, 22 nt, Human
uguuccugguuccugcaugaug

SEQ ID NO: 272720 - RNA, 22 nt, Human
ugaccagugaucuacugggauu

SEQ ID NO: 272721 - RNA, 22 nt, Human
ucugaaagaugagugguccauu

SEQ ID NO: 272722 - RNA, 22 nt, Human
gagggguguggagccaucaguu

SEQ ID NO: 272723 - RNA, 22 nt, Human
cugccccaggaccucuucugga

SEQ ID NO: 272724 - RNA, 22 nt, Human
ggaagcugaacuuagcaaggaa

SEQ ID NO: 272725 - RNA, 22 nt, Human
uuuacagaucuguugauuuguu

SEQ ID NO: 272726 - RNA, 22 nt, Human
uggcagucugccucuucaccau

SEQ ID NO: 272727 - RNA, 20 nt, Human
ucauguguguccuacagaga

SEQ ID NO: 272728 - RNA, 22 nt, Human
aaauauuugucugaggcgguug

SEQ ID NO: 272729 - RNA, 21 nt, Human
uccagccuuucccucacuucc

SEQ ID NO: 272730 - RNA, 22 nt, Human
uucaguaucccugcuuggacag

SEQ ID NO: 272731 - RNA, 22 nt, Human
agaguggguuauaggcagacuu

SEQ ID NO: 272732 - RNA, 22 nt, Human
uuucagaucauuuuuuaaguac

SEQ ID NO: 272733 - RNA, 22 nt, Human
caaaagucuguccuuuaacuuc

SEQ ID NO: 272734 - RNA, 22 nt, Human
cucuggaggccuaaggaagugg

SEQ ID NO: 272735 - RNA, 22 nt, Human
gcucagaggaugcuccuuuaug

SEQ ID NO: 272736 - RNA, 22 nt, Human
ccacaauuuuaugauuuaggag

SEQ ID NO: 272737 - RNA, 22 nt, Human
uuugacucuugcccaguuuggc

SEQ ID NO: 272738 - RNA, 22 nt, Human
augauauuugcaaugugcuugc

SEQ ID NO: 272739 - RNA, 22 nt, Human
caugaggugauaaagcugggau

SEQ ID NO: 272740 - RNA, 22 nt, Human
acauuucuggaguuucucaaca

SEQ ID NO: 272741 - RNA, 22 nt, Human
uuuaacaugugaauuuuggaag

SEQ ID NO: 272742 - RNA, 22 nt, Human
guccuggcuuaguucgcuguaa

SEQ ID NO: 272743 - RNA, 22 nt, Human
ugagcagugguguuuuucuauc

SEQ ID NO: 272744 - RNA, 22 nt, Human
ucagaggaacacuguuucaugc

SEQ ID NO: 272745 - RNA, 21 nt, Human
ugggaccuauuucaacuggau

SEQ ID NO: 272746 - RNA, 22 nt, Human
ugauuuacaguagugucuaaac

SEQ ID NO: 272747 - RNA, 22 nt, Human
aacuuucagcaaguaauucugg

SEQ ID NO: 272748 - RNA, 22 nt, Human
gcuucugcaggguccucgcugu

SEQ ID NO: 272749 - RNA, 22 nt, Human
uaaaguauccaguuauucuucu

SEQ ID NO: 272750 - RNA, 18 nt, Human
uagcaaagauguggauug

SEQ ID NO: 272751 - RNA, 22 nt, Human
augacacauaaaacaaggacug

SEQ ID NO: 272752 - RNA, 22 nt, Human
uuauuguuuacuaguuugcaga

SEQ ID NO: 272753 - RNA, 22 nt, Human
gucuaugauauuuuguuauagc

SEQ ID NO: 272754 - RNA, 22 nt, Human
uccacagguaugaggccccacc

SEQ ID NO: 272755 - RNA, 22 nt, Human
aucaagaguauugacaagacca

SEQ ID NO: 272756 - RNA, 22 nt, Human
ugccugcuuucuccucaacuca

SEQ ID NO: 272757 - RNA, 22 nt, Human
uuuuccucuguauuugaaaugc

SEQ ID NO: 272758 - RNA, 22 nt, Human
uaguaaauuaaaauauugacuu

SEQ ID NO: 272759 - RNA, 22 nt, Human
aucagagcuaguacuugcaggu

SEQ ID NO: 272760 - RNA, 22 nt, Human
uuacacaucuagacccauuuuu

SEQ ID NO: 272761 - RNA, 22 nt, Human
cuguacagauugcacacgggga

SEQ ID NO: 272762 - RNA, 22 nt, Human
ucucuggggaaaaggcugauac

SEQ ID NO: 272763 - RNA, 22 nt, Human
uaacauuugcugucuccuaugu

SEQ ID NO: 272764 - RNA, 22 nt, Human
gcuucaugggugugcaaccugu

SEQ ID NO: 272765 - RNA, 21 nt, Human
agggccagaucaccaaggagc

SEQ ID NO: 272766 - RNA, 22 nt, Human
cagaucuuguacucauuauuga

SEQ ID NO: 272767 - RNA, 22 nt, Human
cauucuugcaccgugauggcuu

SEQ ID NO: 272768 - RNA, 22 nt, Human
ugcuuuauugcaucaguguggg

SEQ ID NO: 272769 - RNA, 22 nt, Human
gaagcaguagcaacugugucuu

SEQ ID NO: 272770 - RNA, 20 nt, Human
guuuagcauggcagugaaag

SEQ ID NO: 272771 - RNA, 22 nt, Human
acagaugagaagcugcauucaa

SEQ ID NO: 272772 - RNA, 22 nt, Human
agcuccuggaggugcgcacucg

SEQ ID NO: 272773 - RNA, 22 nt, Human
cagccuccugggacacucaccg

SEQ ID NO: 272774 - RNA, 22 nt, Human
cugucccauccuuacucuaccc

SEQ ID NO: 272775 - RNA, 22 nt, Human
agggaagaagcugguaguaggu

SEQ ID NO: 272776 - RNA, 22 nt, Human
ucagaggaaaggucagauggcu

SEQ ID NO: 272777 - RNA, 22 nt, Human
cagacccugggccacagaggag

SEQ ID NO: 272778 - RNA, 22 nt, Human
cagcucuuauuuucucuccuaa

SEQ ID NO: 272779 - RNA, 22 nt, Human
auugucuuuaaaaauauacaac

SEQ ID NO: 272780 - RNA, 22 nt, Human
cacagcuaggaggaaagcagag

SEQ ID NO: 272781 - RNA, 23 nt, Human
uccagcucccuucaauggcacug

SEQ ID NO: 272782 - RNA, 22 nt, Human
ggcucagguuuccuucccagcu

SEQ ID NO: 272783 - RNA, 23 nt, Human
auauucacgccgccagagguccc

SEQ ID NO: 272784 - RNA, 22 nt, Human
cacagauaaggauguuaauuuu

SEQ ID NO: 272785 - RNA, 22 nt, Human
ccagcccuguaaggaugaggca

SEQ ID NO: 272786 - RNA, 22 nt, Human
gaagcugcguguagccauacuu

SEQ ID NO: 272787 - RNA, 22 nt, Human
gcagaagggaauaaggagcuuu

SEQ ID NO: 272788 - RNA, 22 nt, Human
aauccugaccugggcaugcuug

SEQ ID NO: 272789 - RNA, 22 nt, Human
agugucugaucaguugacuaga

SEQ ID NO: 272790 - RNA, 22 nt, Human
ugcuggcuuugcgagaugcauu

SEQ ID NO: 272791 - RNA, 22 nt, Human
ccauuuggcaagaaagagucau

SEQ ID NO: 272792 - RNA, 22 nt, Human
auuucuacaguacacaugcauu

SEQ ID NO: 272793 - RNA, 22 nt, Human
uaugaagauugcggucuggaau

SEQ ID NO: 272794 - RNA, 22 nt, Human
uucaacuagaggugauuuugcc

SEQ ID NO: 272795 - RNA, 22 nt, Human
guucccauugcccuagcuugua

SEQ ID NO: 272796 - RNA, 22 nt, Human
uaaugucaaggucauucuagag

SEQ ID NO: 272797 - RNA, 17 nt, Human
cucuguggagguguuua

SEQ ID NO: 272798 - RNA, 22 nt, Human
gcucuauuacuuucaauaaaaa

SEQ ID NO: 272799 - RNA, 22 nt, Human
ugggugcuucgucagcucugag

SEQ ID NO: 272800 - RNA, 22 nt, Human
agggagcagggcuccuuugggu

SEQ ID NO: 272801 - RNA, 22 nt, Human
cuggcagguggauggggacucc

SEQ ID NO: 272802 - RNA, 22 nt, Human
auuuuguuuccuuuggaguaga

SEQ ID NO: 272803 - RNA, 22 nt, Human
guacaugugcacaaugugcagg

SEQ ID NO: 272804 - RNA, 22 nt, Human
ucuggcagcgaagcguguacuu

SEQ ID NO: 272805 - RNA, 22 nt, Human
ggcagaaggcaauuagagacug

SEQ ID NO: 272806 - RNA, 22 nt, Human
aggaaacuaaagcccagagagg

SEQ ID NO: 272807 - RNA, 22 nt, Human
cagcuccugcagcuggcuccca

SEQ ID NO: 272808 - RNA, 22 nt, Human
uagcacuuguguuaugccuugu

SEQ ID NO: 272809 - RNA, 22 nt, Human
ugagcccaggaguuggagaccg

SEQ ID NO: 272810 - RNA, 22 nt, Human
ugccugugggugccaccacccu

SEQ ID NO: 272811 - RNA, 22 nt, Human
ugaggagucgagaagggguaau

SEQ ID NO: 272812 - RNA, 22 nt, Human
gcccuguguauccccugugcuu

SEQ ID NO: 272813 - RNA, 18 nt, Human
uucucugguggauguuau

SEQ ID NO: 272814 - RNA, 22 nt, Human
uggcucugggaaugggaagaug

SEQ ID NO: 272815 - RNA, 22 nt, Human
gcagcagauuguuuuuucaccu

SEQ ID NO: 272816 - RNA, 22 nt, Human
ucugagcuaauccuguugccga

SEQ ID NO: 272817 - RNA, 22 nt, Human
acagauuugacugguaccuggc

SEQ ID NO: 272818 - RNA, 22 nt, Human
aacugcaaagccaaucucagga

SEQ ID NO: 272819 - RNA, 22 nt, Human
uaggggcagaagcggcggucca

SEQ ID NO: 272820 - RNA, 22 nt, Human
ccugcccaggagucucucugug

SEQ ID NO: 272821 - RNA, 22 nt, Human
gaugcgggcccgcuccacugcc

SEQ ID NO: 272822 - RNA, 22 nt, Human
aacauaaauuugaaguggcaaa

SEQ ID NO: 272823 - RNA, 22 nt, Human
ucugccuuuguggucgggagaa

SEQ ID NO: 272824 - RNA, 21 nt, Human
gacaggcaaggagucacuuag

SEQ ID NO: 272825 - RNA, 20 nt, Human
caugccugcugguaucuggc

SEQ ID NO: 272826 - RNA, 22 nt, Human
gagguugggaaguccaagcugg

SEQ ID NO: 272827 - RNA, 22 nt, Human
ugucucaguacacuccgauguu

SEQ ID NO: 272828 - RNA, 22 nt, Human
ugcuggagaucauuaauguuca

SEQ ID NO: 272829 - RNA, 18 nt, Human
cuccagagcugugagaca

SEQ ID NO: 272830 - RNA, 22 nt, Human
uaucagcucggaaucuguugaa

SEQ ID NO: 272831 - RNA, 22 nt, Human
aggcugggcaccguuuugaucc

SEQ ID NO: 272832 - RNA, 22 nt, Human
ucugaauuaaucaugccucuuu

SEQ ID NO: 272833 - RNA, 22 nt, Human
cuccagcuuuagcucuccaggg

SEQ ID NO: 272834 - RNA, 22 nt, Human
gguuucaaaguggacaguuagu

SEQ ID NO: 272835 - RNA, 22 nt, Human
ugguuagacacaugcaugucau

SEQ ID NO: 272836 - RNA, 22 nt, Human
cagggcacaguuauggaggugg

SEQ ID NO: 272837 - RNA, 22 nt, Human
aaagcauguucugggaauagua

SEQ ID NO: 272838 - RNA, 17 nt, Human
auacaguuuauuuuaca

SEQ ID NO: 272839 - RNA, 22 nt, Human
agcuccuggcuuuccucucacc

SEQ ID NO: 272840 - RNA, 22 nt, Human
ugcagggcuacaggacuacaac

SEQ ID NO: 272841 - RNA, 22 nt, Human
cauaaaguaaagaugucuucca

SEQ ID NO: 272842 - RNA, 22 nt, Human
aagacauuccaaaguggcuaau

SEQ ID NO: 272843 - RNA, 22 nt, Human
gggaugagaguagggugugaaa

SEQ ID NO: 272844 - RNA, 22 nt, Human
uaacaguauauuuaccaaaccu

SEQ ID NO: 272845 - RNA, 20 nt, Human
cacagaacaaauugcaggac

SEQ ID NO: 272846 - RNA, 22 nt, Human
agucacuguuucagaacugagu

SEQ ID NO: 272847 - RNA, 22 nt, Human
aaaaggcauuuugucaaccaua

SEQ ID NO: 272848 - RNA, 22 nt, Human
cucaggacagauuccagagaaa

SEQ ID NO: 272849 - RNA, 21 nt, Human
ugguacagaggaggugaagug

SEQ ID NO: 272850 - RNA, 22 nt, Human
uaugauguguaccuaagucacc

SEQ ID NO: 272851 - RNA, 22 nt, Human
agcacacaucacuucugcucau

SEQ ID NO: 272852 - RNA, 19 nt, Human
aggcugcccagucucugcc

SEQ ID NO: 272853 - RNA, 22 nt, Human
agaucugguuggaguccugaca

SEQ ID NO: 272854 - RNA, 22 nt, Human
caaaugaagaaccuucucaccu

SEQ ID NO: 272855 - RNA, 22 nt, Human
ucacaugcccuaccuaaucuua

SEQ ID NO: 272856 - RNA, 22 nt, Human
aagccuggacuaucgcgugugc

SEQ ID NO: 272857 - RNA, 22 nt, Human
uccauacacauugaauuuuagu

SEQ ID NO: 272858 - RNA, 22 nt, Human
aacagugucaggauuacagaua

SEQ ID NO: 272859 - RNA, 22 nt, Human
uaggaaacucaaagggaagugg

SEQ ID NO: 272860 - RNA, 22 nt, Human
ccagggcaucacauccaguguu

SEQ ID NO: 272861 - RNA, 22 nt, Human
uuugcaaaugaagcucugagga

SEQ ID NO: 272862 - RNA, 22 nt, Human
aucuguggcuggugagaggcag

SEQ ID NO: 272863 - RNA, 22 nt, Human
aggccagacagcuagaaacagg

SEQ ID NO: 272864 - RNA, 22 nt, Human
ccagugucuacuguggcauauc

SEQ ID NO: 272865 - RNA, 20 nt, Human
gccaacgcgcuggggcugcc

SEQ ID NO: 272866 - RNA, 22 nt, Human
ucugucaucuguucagugcuca

SEQ ID NO: 272867 - RNA, 22 nt, Human
gugcaaaaaucuaucaccagca

SEQ ID NO: 272868 - RNA, 22 nt, Human
aggaaagauggaaggaggauaa

SEQ ID NO: 272869 - RNA, 22 nt, Human
uccccuccaacuccaacuaugg

SEQ ID NO: 272870 - RNA, 22 nt, Human
uuagagcuagaugaggucauga

SEQ ID NO: 272871 - RNA, 22 nt, Human
ugaggcagucacccccuccugc

SEQ ID NO: 272872 - RNA, 19 nt, Human
aaaugugaugguacaauuc

SEQ ID NO: 272873 - RNA, 22 nt, Human
ucugguggcacgugucuugcau

SEQ ID NO: 272874 - RNA, 22 nt, Human
ucacugggagagcugacaagga

SEQ ID NO: 272875 - RNA, 22 nt, Human
uauagaggccaccaacaugaaa

SEQ ID NO: 272876 - RNA, 22 nt, Human
ugcacacacaggagucuccucc

SEQ ID NO: 272877 - RNA, 17 nt, Human
uuucagauucacuuucu

SEQ ID NO: 272878 - RNA, 22 nt, Human
agugugaguuacaaagugugaa

SEQ ID NO: 272879 - RNA, 18 nt, Human
ucucagaggccauccuag

SEQ ID NO: 272880 - RNA, 22 nt, Human
ccucugcucugguccaugugcu

SEQ ID NO: 272881 - RNA, 22 nt, Human
uggccuggggaagaccaugggc

SEQ ID NO: 272882 - RNA, 22 nt, Human
ccuauacaggcuucuuuacaug

SEQ ID NO: 272883 - RNA, 23 nt, Human
agcagcugugguuuaccuuagua

SEQ ID NO: 272884 - RNA, 22 nt, Human
ugaaccuuuguguuggaccugg

SEQ ID NO: 272885 - RNA, 22 nt, Human
aguucuuauugaauagaaauca

SEQ ID NO: 272886 - RNA, 22 nt, Human
ccuugcucucccaagcccgcag

SEQ ID NO: 272887 - RNA, 22 nt, Human
gagggccagcagccucagcaug

SEQ ID NO: 272888 - RNA, 22 nt, Human
cucaggaugucggugacuauug

SEQ ID NO: 272889 - RNA, 22 nt, Human
ugaggccacuuccccacagccc

SEQ ID NO: 272890 - RNA, 22 nt, Human
cugguucauccccuuccaggaa

SEQ ID NO: 272891 - RNA, 22 nt, Human
gugaaauuguauuuggcauuga

SEQ ID NO: 272892 - RNA, 22 nt, Human
gaggccugaaaggggaccuaug

SEQ ID NO: 272893 - RNA, 22 nt, Human
ggccauggaccccgagcugacc

SEQ ID NO: 272894 - RNA, 22 nt, Human
augguacagauaauacaugcug

SEQ ID NO: 272895 - RNA, 21 nt, Human
gucagagaugcccaacugccu

SEQ ID NO: 272896 - RNA, 22 nt, Human
gaaaaggccuggggcaaagugu

SEQ ID NO: 272897 - RNA, 22 nt, Human
aaugccaucuggugauguauua

SEQ ID NO: 272898 - RNA, 22 nt, Human
aucaaauaaagguaccuagcuu

SEQ ID NO: 272899 - RNA, 20 nt, Human
ugggagcuggugaggucuca

SEQ ID NO: 272900 - RNA, 22 nt, Human
cuccacagcucaggcucagagu

SEQ ID NO: 272901 - RNA, 22 nt, Human
ggcuucugcucagccugcacgc

SEQ ID NO: 272902 - RNA, 22 nt, Human
gcacgugcacacauguguacaa

SEQ ID NO: 272903 - RNA, 22 nt, Human
auccaguuuaugucauauucuu

SEQ ID NO: 272904 - RNA, 22 nt, Human
ucugaggaauucugcagugaga

SEQ ID NO: 272905 - RNA, 22 nt, Human
ggccaggcgaugaccccuccac

SEQ ID NO: 272906 - RNA, 22 nt, Human
caggccugaguguggaagucuu

SEQ ID NO: 272907 - RNA, 22 nt, Human
ugcuuuauucccuucugaugug

SEQ ID NO: 272908 - RNA, 22 nt, Human
gggcugcuacgagaacugaaua

SEQ ID NO: 272909 - RNA, 22 nt, Human
guccucugauuucuagguauau

SEQ ID NO: 272910 - RNA, 22 nt, Human
gagauggggaauaggagcaagc

SEQ ID NO: 272911 - RNA, 22 nt, Human
agcugagagcugugucaagaua

SEQ ID NO: 272912 - RNA, 23 nt, Human
ccucccaccuauuucacuuucuu

SEQ ID NO: 272913 - RNA, 22 nt, Human
aagcccugucacccugacuuca

SEQ ID NO: 272914 - RNA, 20 nt, Human
gucuccacuggggguuaacc

SEQ ID NO: 272915 - RNA, 22 nt, Human
uauugguaggacucagcugaga

SEQ ID NO: 272916 - RNA, 22 nt, Human
agccagggugagagggcuuugu

SEQ ID NO: 272917 - RNA, 22 nt, Human
uuauaucuuuuuacaucucucc

SEQ ID NO: 272918 - RNA, 22 nt, Human
caggaaauggcugaauaaauuc

SEQ ID NO: 272919 - RNA, 22 nt, Human
uggauuaguuuaacaauguggc

SEQ ID NO: 272920 - RNA, 22 nt, Human
ccagaggggcugagcaggucac

SEQ ID NO: 272921 - RNA, 22 nt, Human
gccacuguacuccagccugcga

SEQ ID NO: 272922 - RNA, 22 nt, Human
ccaugagcuucaacugacacag

SEQ ID NO: 272923 - RNA, 18 nt, Human
auauucaagaagacagag

SEQ ID NO: 272924 - RNA, 22 nt, Human
ugccugccccacaagggguugc

SEQ ID NO: 272925 - RNA, 22 nt, Human
agaaacucaccuuuccagccau

SEQ ID NO: 272926 - RNA, 22 nt, Human
ugccugggagugaccaagacuc

SEQ ID NO: 272927 - RNA, 21 nt, Human
ucugggcuuucuuauaaggca

SEQ ID NO: 272928 - RNA, 22 nt, Human
ggcugagcacuuuaggcaggag

SEQ ID NO: 272929 - RNA, 22 nt, Human
agcuugggcaacacagcaagac

SEQ ID NO: 272930 - RNA, 22 nt, Human
uaaagacaauaggaaaguuguu

SEQ ID NO: 272931 - RNA, 22 nt, Human
aaagcaauugugguuuuuguca

SEQ ID NO: 272932 - RNA, 22 nt, Human
uuggaaagucucacccaguuga

SEQ ID NO: 272933 - RNA, 22 nt, Human
cuguccugcccacccugcaggg

SEQ ID NO: 272934 - RNA, 22 nt, Human
cagcagcucccauccgcugagc

SEQ ID NO: 272935 - RNA, 22 nt, Human
ucuuggaaguagaacacagucu

SEQ ID NO: 272936 - RNA, 22 nt, Human
uccaugguuucagucuggcugg

SEQ ID NO: 272937 - RNA, 22 nt, Human
aaugcacacauuugguacugaa

SEQ ID NO: 272938 - RNA, 22 nt, Human
cagcagaaacccagcaaagcca

SEQ ID NO: 272939 - RNA, 22 nt, Human
uaugaagaaaccuauccucuag

SEQ ID NO: 272940 - RNA, 22 nt, Human
ucccagggugaaaugcaguagg

SEQ ID NO: 272941 - RNA, 23 nt, Human
aguauucaaaaggcaagcuauau

SEQ ID NO: 272942 - RNA, 22 nt, Human
uguacuugcuuauuagaaaucu

SEQ ID NO: 272943 - RNA, 22 nt, Human
gcugguccacucccuggaggcu

SEQ ID NO: 272944 - RNA, 22 nt, Human
ucauccaguuguggagagggaa

SEQ ID NO: 272945 - RNA, 22 nt, Human
uauccauuauguuggcuagucu

SEQ ID NO: 272946 - RNA, 20 nt, Human
gcugcucgcugcagucacuc

SEQ ID NO: 272947 - RNA, 22 nt, Human
aagcccuggaacuuuccuagcc

SEQ ID NO: 272948 - RNA, 22 nt, Human
uaaagugcuuccuaacccagag

SEQ ID NO: 272949 - RNA, 22 nt, Human
gcuauucauggagcauguacug

SEQ ID NO: 272950 - RNA, 22 nt, Human
uuuacagagagagaacuggacu

SEQ ID NO: 272951 - RNA, 22 nt, Human
gccuguuuuugcuucguuuaag

SEQ ID NO: 272952 - RNA, 20 nt, Human
gccaggagggugugaugagc

SEQ ID NO: 272953 - RNA, 22 nt, Human
agguaaauucagcagugacauu

SEQ ID NO: 272954 - RNA, 22 nt, Human
ucuuucauucuagucugagguu

SEQ ID NO: 272955 - RNA, 22 nt, Human
ggagacugaucugagugauaac

SEQ ID NO: 272956 - RNA, 22 nt, Human
guauaagguauguaaacuauuu

SEQ ID NO: 272957 - RNA, 22 nt, Human
uggccagcccuucagccaugcc

SEQ ID NO: 272958 - RNA, 22 nt, Human
ugggccaggucugugucagcug

SEQ ID NO: 272959 - RNA, 22 nt, Human
guuagaaaugcagaaacuugac

SEQ ID NO: 272960 - RNA, 22 nt, Human
guggccuggcgagcuggcgcgg

SEQ ID NO: 272961 - RNA, 21 nt, Human
aggcagcucaggcccagagag

SEQ ID NO: 272962 - RNA, 22 nt, Human
uaaaugucaaugugauuuauaa

SEQ ID NO: 272963 - RNA, 22 nt, Human
gagggaggggagcuccacccuc

SEQ ID NO: 272964 - RNA, 18 nt, Human
aucugcuggcaggucugg

SEQ ID NO: 272965 - RNA, 22 nt, Human
cugagccagagggagucggguc

SEQ ID NO: 272966 - RNA, 22 nt, Human
ggagagaaucugaaccugcucc

SEQ ID NO: 272967 - RNA, 22 nt, Human
ugcaugcagcuggugauaagaa

SEQ ID NO: 272968 - RNA, 22 nt, Human
uagacaggagucaggcuagaau

SEQ ID NO: 272969 - RNA, 22 nt, Human
auaguuugugaaacacagcagu

SEQ ID NO: 272970 - RNA, 22 nt, Human
ccucuuccagcuguugcuucca

SEQ ID NO: 272971 - RNA, 22 nt, Human
agcagcagugacagccgaaagc

SEQ ID NO: 272972 - RNA, 22 nt, Human
auacauagcaggguaguagauc

SEQ ID NO: 272973 - RNA, 23 nt, Human
caggagauggcugcugugucagc

SEQ ID NO: 272974 - RNA, 22 nt, Human
uuaggaaagaagcagcuaggag

SEQ ID NO: 272975 - RNA, 22 nt, Human
ucugcuggccuuagcaggucua

SEQ ID NO: 272976 - RNA, 22 nt, Human
agcuggguacagccugugccua

SEQ ID NO: 272977 - RNA, 22 nt, Human
agugauuugggugucagaaagu

SEQ ID NO: 272978 - RNA, 22 nt, Human
ucaaaugcuucuacuccuaaga

SEQ ID NO: 272979 - RNA, 22 nt, Human
gcaaagcacacccucagaguuu

SEQ ID NO: 272980 - RNA, 22 nt, Human
aggaauguaauaguguggcuca

SEQ ID NO: 272981 - RNA, 22 nt, Human
ggccuugagcagggagaaacca

SEQ ID NO: 272982 - RNA, 22 nt, Human
ucugucuucaucagcaugugau

SEQ ID NO: 272983 - RNA, 22 nt, Human
uggcagggugggcuucagcccc

SEQ ID NO: 272984 - RNA, 22 nt, Human
cucaggcccacagcagacccac

SEQ ID NO: 272985 - RNA, 18 nt, Human
cuccugggcugcagaugc

SEQ ID NO: 272986 - RNA, 22 nt, Human
gacagccaucagcacacgcugc

SEQ ID NO: 272987 - RNA, 22 nt, Human
auggaauuaaaagucaaguaau

SEQ ID NO: 272988 - RNA, 22 nt, Human
agagcuuuagcugcuggucugg

SEQ ID NO: 272989 - RNA, 22 nt, Human
uuuacuuucucaaguauauagg

SEQ ID NO: 272990 - RNA, 23 nt, Human
caggugguagagaaaaauccaga

SEQ ID NO: 272991 - RNA, 22 nt, Human
augcaaaaacugcacuuacgcu

SEQ ID NO: 272992 - RNA, 22 nt, Human
ugaucccaaucuuuccugcucc

SEQ ID NO: 272993 - RNA, 22 nt, Human
ucuguggcaguucugguucauc

SEQ ID NO: 272994 - RNA, 22 nt, Human
cugcccugggauggucugugcg

SEQ ID NO: 272995 - RNA, 22 nt, Human
ucuccucccaggcucuuccagg

SEQ ID NO: 272996 - RNA, 22 nt, Human
agggaacuccaugaggccagag

SEQ ID NO: 272997 - RNA, 22 nt, Human
cagaugcugccugggaaugucu

SEQ ID NO: 272998 - RNA, 22 nt, Human
cuggcaggaagaggaaagguca

SEQ ID NO: 272999 - RNA, 22 nt, Human
gaugugucauuuggucaucugc

SEQ ID NO: 273000 - RNA, 22 nt, Human
uccuagaacagcccaccuggaa

SEQ ID NO: 273001 - RNA, 22 nt, Human
cauuuguuaauuacuauuaucu

SEQ ID NO: 273002 - RNA, 22 nt, Human
auguucuuucagccagugcauc

SEQ ID NO: 273003 - RNA, 22 nt, Human
ggaggccauaguuugggaguca

SEQ ID NO: 273004 - RNA, 22 nt, Human
gacuaaaugcuuugugcaugca

SEQ ID NO: 273005 - RNA, 22 nt, Human
aaagccaugggucuuuggcaua

SEQ ID NO: 273006 - RNA, 22 nt, Human
ccuggcuguuuauuucggggcu

SEQ ID NO: 273007 - RNA, 17 nt, Human
uuacaacgucaucucug

SEQ ID NO: 273008 - RNA, 21 nt, Human
ugauugauauuugcaaacaga

SEQ ID NO: 273009 - RNA, 22 nt, Human
agaagccaaaugccagugaccu

SEQ ID NO: 273010 - RNA, 22 nt, Human
gcugauuuugagaagcacaguc

SEQ ID NO: 273011 - RNA, 22 nt, Human
uguacuugaacuugacuguaga

SEQ ID NO: 273012 - RNA, 22 nt, Human
ggcacagggugauguugcaguu

SEQ ID NO: 273013 - RNA, 22 nt, Human
ucagcaggcaccggaaguguuu

SEQ ID NO: 273014 - RNA, 22 nt, Human
ucucaggcuccugacauauaug

SEQ ID NO: 273015 - RNA, 22 nt, Human
uuguuacuguucuacauacagu

SEQ ID NO: 273016 - RNA, 22 nt, Human
aggccagaacagcucugcacca

SEQ ID NO: 273017 - RNA, 22 nt, Human
ucaggaagcugcucuggguggu

SEQ ID NO: 273018 - RNA, 22 nt, Human
gcccagccuccaagcuccaagg

SEQ ID NO: 273019 - RNA, 22 nt, Human
uagcaaaguuuuguggugauua

SEQ ID NO: 273020 - RNA, 22 nt, Human
caguccugcuggccuucccugg

SEQ ID NO: 273021 - RNA, 22 nt, Human
ugcuuccugcuaaggcugccug

SEQ ID NO: 273022 - RNA, 22 nt, Human
aucuuguucucccuuguucuua

SEQ ID NO: 273023 - RNA, 22 nt, Human
gcuggcagggugguugagagag

SEQ ID NO: 273024 - RNA, 22 nt, Human
ucugaauuuugaugugcauuga

SEQ ID NO: 273025 - RNA, 22 nt, Human
ggacaggcugcaucugagcaug

SEQ ID NO: 273026 - RNA, 22 nt, Human
ucugcaccuuucuuaaaaaucg

SEQ ID NO: 273027 - RNA, 22 nt, Human
uuuucuucggugcuggguugau

SEQ ID NO: 273028 - RNA, 18 nt, Human
ucuagaaacccagacucu

SEQ ID NO: 273029 - RNA, 22 nt, Human
aaacauguaauucugcuuaaga

SEQ ID NO: 273030 - RNA, 18 nt, Human
cccccagccaaauucucu

SEQ ID NO: 273031 - RNA, 22 nt, Human
uuucaucauguuggcagauugg

SEQ ID NO: 273032 - RNA, 22 nt, Human
aacuagaaaacaagaugcugau

SEQ ID NO: 273033 - RNA, 22 nt, Human
gucuguggucccugcuggggac

SEQ ID NO: 273034 - RNA, 22 nt, Human
ucuuuuuuuccugugcagagcu

SEQ ID NO: 273035 - RNA, 22 nt, Human
cucugucacuucuccagcugag

SEQ ID NO: 273036 - RNA, 22 nt, Human
agucuuagaacuacagugccua

SEQ ID NO: 273037 - RNA, 22 nt, Human
ugcaagcacucaaugcaaacag

SEQ ID NO: 273038 - RNA, 22 nt, Human
guccugagggcccaggcauucu

SEQ ID NO: 273039 - RNA, 22 nt, Human
uuugaauauacuucaaacaaag

SEQ ID NO: 273040 - RNA, 22 nt, Human
ggcucccacccauagggcgagu

SEQ ID NO: 273041 - RNA, 22 nt, Human
cccaguuuucugauugaagagc

SEQ ID NO: 273042 - RNA, 22 nt, Human
accagcagaguugaggaggaca

SEQ ID NO: 273043 - RNA, 22 nt, Human
acuguucauuuguccuguaucu

SEQ ID NO: 273044 - RNA, 22 nt, Human
ucuuugggagaaggggucccag

SEQ ID NO: 273045 - RNA, 19 nt, Human
ugcuuugcaucugauuguu

SEQ ID NO: 273046 - RNA, 22 nt, Human
acugugauguucucuaucuugg

SEQ ID NO: 273047 - RNA, 22 nt, Human
acucuggcccuccugcugccag

SEQ ID NO: 273048 - RNA, 22 nt, Human
gaguccaguuguucacagaggc

SEQ ID NO: 273049 - RNA, 22 nt, Human
guuucaaagcacagcucacauu

SEQ ID NO: 273050 - RNA, 22 nt, Human
uugagggagcacagauucuuau

SEQ ID NO: 273051 - RNA, 22 nt, Human
uauguauccguguguguacaga

SEQ ID NO: 273052 - RNA, 22 nt, Human
ggcgcccaucggugcagagggc

SEQ ID NO: 273053 - RNA, 22 nt, Human
guaucuaugauccuuuauaucu

SEQ ID NO: 273054 - RNA, 22 nt, Human
uuccugggccuuaaaucuuuug

SEQ ID NO: 273055 - RNA, 22 nt, Human
cuggccagaagcaccuuuggcg

SEQ ID NO: 273056 - RNA, 19 nt, Human
acagugcuucugagugagg

SEQ ID NO: 273057 - RNA, 20 nt, Human
uggucuggagccagugagga

SEQ ID NO: 273058 - RNA, 23 nt, Human
uuucuguuccucuagcuuugcau

SEQ ID NO: 273059 - RNA, 22 nt, Human
auuucauacuaaggcucaaaaa

SEQ ID NO: 273060 - RNA, 22 nt, Human
uuccugguggcuuugccaacug

SEQ ID NO: 273061 - RNA, 22 nt, Human
acaaaguuauucuuucagagga

SEQ ID NO: 273062 - RNA, 22 nt, Human
aaggcuggguuugggaugugau

SEQ ID NO: 273063 - RNA, 22 nt, Human
caguucucugugccucgcuggg

SEQ ID NO: 273064 - RNA, 22 nt, Human
cauuuguaauacugacuugcag

SEQ ID NO: 273065 - RNA, 22 nt, Human
gcagcacaaaguccccagggac

SEQ ID NO: 273066 - RNA, 22 nt, Human
ugauuuacacaucaaagcagca

SEQ ID NO: 273067 - RNA, 22 nt, Human
gaggugucaggguagucaugau

SEQ ID NO: 273068 - RNA, 22 nt, Human
agguaacuguggcuagguaacu

SEQ ID NO: 273069 - RNA, 22 nt, Human
acuaaagugcaccccuuugaga

SEQ ID NO: 273070 - RNA, 22 nt, Human
aaggcuccgugacuggggcuga

SEQ ID NO: 273071 - RNA, 22 nt, Human
uaaggccagcaugaaugcagca

SEQ ID NO: 273072 - RNA, 21 nt, Human
uacaccaguuuacacuuccuc

SEQ ID NO: 273073 - RNA, 22 nt, Human
aaccagcuuugauacgcauuau

SEQ ID NO: 273074 - RNA, 22 nt, Human
ucuguaaacacccguaagcuuu

SEQ ID NO: 273075 - RNA, 22 nt, Human
aggcucugggcucuagauuuug

SEQ ID NO: 273076 - RNA, 22 nt, Human
uucaaucauuagaaucucaggc

SEQ ID NO: 273077 - RNA, 21 nt, Human
agaagcuagucacuaaaucca

SEQ ID NO: 273078 - RNA, 22 nt, Human
uguauguguauguacauaugca

SEQ ID NO: 273079 - RNA, 22 nt, Human
auguucauccaugucguagcag

SEQ ID NO: 273080 - RNA, 22 nt, Human
uuccauaaucaccuuauucuuu

SEQ ID NO: 273081 - RNA, 22 nt, Human
gaccauuagcugcuauucagua

SEQ ID NO: 273082 - RNA, 22 nt, Human
ccugccagaaaagagggaguuc

SEQ ID NO: 273083 - RNA, 22 nt, Human
gagggcugcuggaaaaaugcag

SEQ ID NO: 273084 - RNA, 22 nt, Human
gucucagaccacccucuuuggc

SEQ ID NO: 273085 - RNA, 22 nt, Human
uucacaucuauaacuuagauaa

SEQ ID NO: 273086 - RNA, 22 nt, Human
cugggcuuuugagucacaaggg

SEQ ID NO: 273087 - RNA, 22 nt, Human
uaucuacaggugucagguaaga

SEQ ID NO: 273088 - RNA, 22 nt, Human
cagggcaggaauuugacauugc

SEQ ID NO: 273089 - RNA, 22 nt, Human
uguauugaggauucauuuuugu

SEQ ID NO: 273090 - RNA, 22 nt, Human
accagccaccaccaggagaucg

SEQ ID NO: 273091 - RNA, 19 nt, Human
cccacaggaggacauaugg

SEQ ID NO: 273092 - RNA, 22 nt, Human
cacaugacacuauuuuguucua

SEQ ID NO: 273093 - RNA, 22 nt, Human
caggaaacggcuauucuuuugu

SEQ ID NO: 273094 - RNA, 22 nt, Human
agugugagaacggacuaauaaa

SEQ ID NO: 273095 - RNA, 22 nt, Human
cagugcuggaggcuggagggaa

SEQ ID NO: 273096 - RNA, 22 nt, Human
cuugggaaugcuaacagaugac

SEQ ID NO: 273097 - RNA, 22 nt, Human
ucuucuguggcucucaccaccc

SEQ ID NO: 273098 - RNA, 21 nt, Human
agugacagaggaaggugcaua

SEQ ID NO: 273099 - RNA, 19 nt, Human
agggccugcagcucaagcu

SEQ ID NO: 273100 - RNA, 22 nt, Human
aaugagcugcugcuguuccacc

SEQ ID NO: 273101 - RNA, 21 nt, Human
gccugccugcgugacccucuu

SEQ ID NO: 273102 - RNA, 22 nt, Human
gagcccuguucaggccuccuca

SEQ ID NO: 273103 - RNA, 22 nt, Human
uuccuggguuuacguauugggu

SEQ ID NO: 273104 - RNA, 22 nt, Human
uuuggacaaguuacugguuucc

SEQ ID NO: 273105 - RNA, 22 nt, Human
guucauauuacuuugagugcag

SEQ ID NO: 273106 - RNA, 22 nt, Human
gagcugcuggcuccucagguua

SEQ ID NO: 273107 - RNA, 22 nt, Human
ccucagccuuggccccaggcag

SEQ ID NO: 273108 - RNA, 21 nt, Human
uucauucauggcauaauauag

SEQ ID NO: 273109 - RNA, 18 nt, Human
cauuaugugguuauagaa

SEQ ID NO: 273110 - RNA, 22 nt, Human
cccaggcuggaauuccaggccu

SEQ ID NO: 273111 - RNA, 22 nt, Human
gcugagguuuucugccugcuca

SEQ ID NO: 273112 - RNA, 22 nt, Human
ccaggccuccugugaguggacc

SEQ ID NO: 273113 - RNA, 22 nt, Human
gaccagcugauaaggcauauaa

SEQ ID NO: 273114 - RNA, 22 nt, Human
aggcuuuaauuaucuacaggag

SEQ ID NO: 273115 - RNA, 22 nt, Human
uggcucugucacugugagcuau

SEQ ID NO: 273116 - RNA, 22 nt, Human
agcuagaauauugaucugaaau

SEQ ID NO: 273117 - RNA, 22 nt, Human
aaaugaugcucacagauuagug

SEQ ID NO: 273118 - RNA, 22 nt, Human
ggaauaaaaauuguuuacugua

SEQ ID NO: 273119 - RNA, 18 nt, Human
uccagucccaaggccagc

SEQ ID NO: 273120 - RNA, 22 nt, Human
auuuccuaauuuaugcaggagu

SEQ ID NO: 273121 - RNA, 22 nt, Human
ucugcgcccugucgccugcucc

SEQ ID NO: 273122 - RNA, 22 nt, Human
ucugggagguguuuugagaacu

SEQ ID NO: 273123 - RNA, 22 nt, Human
aucuuucaaucaggaaaaaucu

SEQ ID NO: 273124 - RNA, 22 nt, Human
uggagcagcuaagccucugaga

SEQ ID NO: 273125 - RNA, 22 nt, Human
ccuccaggaggaaauggaacac

SEQ ID NO: 273126 - RNA, 22 nt, Human
cuuguauuaugguucgcuuagu

SEQ ID NO: 273127 - RNA, 22 nt, Human
ccuggcagcgugccgagcugcg

SEQ ID NO: 273128 - RNA, 22 nt, Human
aggaagccuggcauuaaaaagc

SEQ ID NO: 273129 - RNA, 20 nt, Human
aacauugaaagucuagaaga

SEQ ID NO: 273130 - RNA, 22 nt, Human
uuuaauauccaguggauacaaa

SEQ ID NO: 273131 - RNA, 22 nt, Human
gaggagaggggcucccaagagc

SEQ ID NO: 273132 - RNA, 22 nt, Human
acaggcagcaaaaucagccuca

SEQ ID NO: 273133 - RNA, 22 nt, Human
aaggcacucauucaaggagaua

SEQ ID NO: 273134 - RNA, 22 nt, Human
agucacugagauggugaggcua

SEQ ID NO: 273135 - RNA, 22 nt, Human
gggaccagaagaaggaugguga

SEQ ID NO: 273136 - RNA, 18 nt, Human
ucuuuguuuccuucuugc

SEQ ID NO: 273137 - RNA, 22 nt, Human
ugacacaggggaaggagucugg

SEQ ID NO: 273138 - RNA, 22 nt, Human
agggccugugcugaguagacga

SEQ ID NO: 273139 - RNA, 22 nt, Human
uggauucucaugggaccaguag

SEQ ID NO: 273140 - RNA, 22 nt, Human
uggcagguuaugcgggccacau

SEQ ID NO: 273141 - RNA, 22 nt, Human
caaguccuuagaugguucuuug

SEQ ID NO: 273142 - RNA, 22 nt, Human
caggcauaaucucaucuuguuu

SEQ ID NO: 273143 - RNA, 22 nt, Human
guuuccuaggcuuauacagcug

SEQ ID NO: 273144 - RNA, 22 nt, Human
agaccuggaugugagggaagua

SEQ ID NO: 273145 - RNA, 18 nt, Human
guccauggccuccaccca

SEQ ID NO: 273146 - RNA, 22 nt, Human
caggccagugggaaauagggau

SEQ ID NO: 273147 - RNA, 20 nt, Human
cagcuuuagaucuuugauua

SEQ ID NO: 273148 - RNA, 18 nt, Human
ucuuuggacaacuacugg

SEQ ID NO: 273149 - RNA, 22 nt, Human
augcuaaauguuaauguuaccu

SEQ ID NO: 273150 - RNA, 22 nt, Human
auuguacaugcagugagucauc

SEQ ID NO: 273151 - RNA, 23 nt, Human
ggggacagagggcagcccgcauc

SEQ ID NO: 273152 - RNA, 22 nt, Human
auucuuauuuaaauagagucug

SEQ ID NO: 273153 - RNA, 21 nt, Human
cuguuucuugugaagugacac

SEQ ID NO: 273154 - RNA, 22 nt, Human
uaacuguuuuugaaauauaucu

SEQ ID NO: 273155 - RNA, 18 nt, Human
aaaugcuaggcuacauga

SEQ ID NO: 273156 - RNA, 22 nt, Human
gcaaaaguacagccggauuucu

SEQ ID NO: 273157 - RNA, 22 nt, Human
ucaggugguccuaagugccauc

SEQ ID NO: 273158 - RNA, 22 nt, Human
agucucugagguucagaugccu

SEQ ID NO: 273159 - RNA, 22 nt, Human
guaggcagugcuugauuuucca

SEQ ID NO: 273160 - RNA, 20 nt, Human
ggaaggcuguuuuuccacca

SEQ ID NO: 273161 - RNA, 22 nt, Human
agagcuuuuugacaucucucua

SEQ ID NO: 273162 - RNA, 22 nt, Human
aggaaaaauaaggcagcagggc

SEQ ID NO: 273163 - RNA, 22 nt, Human
ucuccccagcugagcugcccuu

SEQ ID NO: 273164 - RNA, 22 nt, Human
auguuacuuagaauaauucugg

SEQ ID NO: 273165 - RNA, 22 nt, Human
aagggcagggaguuugugucua

SEQ ID NO: 273166 - RNA, 20 nt, Human
acuggcagccugccugcugu

SEQ ID NO: 273167 - RNA, 19 nt, Human
uagggcuggccgggcggug

SEQ ID NO: 273168 - RNA, 22 nt, Human
ggccacagaacagcuacaggac

SEQ ID NO: 273169 - RNA, 22 nt, Human
cacugcccaggcacccaucuug

SEQ ID NO: 273170 - RNA, 22 nt, Human
ccagggcauccucacaucgcag

SEQ ID NO: 273171 - RNA, 18 nt, Human
gcucagguauagacaggg

SEQ ID NO: 273172 - RNA, 22 nt, Human
uccaggucaucuuggagagcug

SEQ ID NO: 273173 - RNA, 22 nt, Human
gcugccugcuucaugugggaga

SEQ ID NO: 273174 - RNA, 22 nt, Human
ugcucuggcuggagcaaugacu

SEQ ID NO: 273175 - RNA, 22 nt, Human
ggcucugcuucagaaggcucau

SEQ ID NO: 273176 - RNA, 18 nt, Human
ccagcaugccagaggcug

SEQ ID NO: 273177 - RNA, 22 nt, Human
uuggaugggcauuaggaaaguc

SEQ ID NO: 273178 - RNA, 22 nt, Human
aaggcugauuagacugauagcu

SEQ ID NO: 273179 - RNA, 21 nt, Human
uuagaaagcucacuacaguua

SEQ ID NO: 273180 - RNA, 22 nt, Human
cugcccaggcugaaggaacauc

SEQ ID NO: 273181 - RNA, 22 nt, Human
aggacaguguggaagagggugc

SEQ ID NO: 273182 - RNA, 22 nt, Human
uggcccugcugggucagagcug

SEQ ID NO: 273183 - RNA, 22 nt, Human
gguuuuaaccauucacaaguga

SEQ ID NO: 273184 - RNA, 22 nt, Human
auccugggggcagcuggaaaca

SEQ ID NO: 273185 - RNA, 22 nt, Human
agggcacaggcuccggguccag

SEQ ID NO: 273186 - RNA, 22 nt, Human
gaggggcacagcagcuguugca

SEQ ID NO: 273187 - RNA, 22 nt, Human
uuuuauauugagugagaguucc

SEQ ID NO: 273188 - RNA, 22 nt, Human
agaaguaucaggaagauucuca

SEQ ID NO: 273189 - RNA, 22 nt, Human
cucuauuuauggcaucuuuaug

SEQ ID NO: 273190 - RNA, 22 nt, Human
ugaggccugggcacauaaccuc

SEQ ID NO: 273191 - RNA, 22 nt, Human
gugaauaauauuguuuauaaaa

SEQ ID NO: 273192 - RNA, 22 nt, Human
ucugccaugcuaacuucaguau

SEQ ID NO: 273193 - RNA, 22 nt, Human
gaggccaacuuuggagaacagg

SEQ ID NO: 273194 - RNA, 22 nt, Human
ccugggcuguaccugugcgcgg

SEQ ID NO: 273195 - RNA, 22 nt, Human
ugccugacugcugccaccacua

SEQ ID NO: 273196 - RNA, 22 nt, Human
aagaaaugcacacaacugcugg

SEQ ID NO: 273197 - RNA, 22 nt, Human
uccaauaaccacaaucagauag

SEQ ID NO: 273198 - RNA, 22 nt, Human
gcacacaguagggauucaauga

SEQ ID NO: 273199 - RNA, 22 nt, Human
uagagguguugacgccaaggua

SEQ ID NO: 273200 - RNA, 22 nt, Human
acuuuacaggcacuucaaguau

SEQ ID NO: 273201 - RNA, 22 nt, Human
aaggaggguucccagguccugg

SEQ ID NO: 273202 - RNA, 20 nt, Human
aagaggugauaacaggugag

SEQ ID NO: 273203 - RNA, 22 nt, Human
acagggcagcaacuuugugccu

SEQ ID NO: 273204 - RNA, 22 nt, Human
cuacaugaaaauaaguuugaaa

SEQ ID NO: 273205 - RNA, 22 nt, Human
gacuuuaugaagagaugaccaa

SEQ ID NO: 273206 - RNA, 22 nt, Human
cauuucugauuacagaauacua

SEQ ID NO: 273207 - RNA, 22 nt, Human
guagggcauguaagucaccaua

SEQ ID NO: 273208 - RNA, 22 nt, Human
aggcacaggaacaggaaaagag

SEQ ID NO: 273209 - RNA, 22 nt, Human
ccauccugucuguggccucagg

SEQ ID NO: 273210 - RNA, 22 nt, Human
ccuuucugauggccucccagcc

SEQ ID NO: 273211 - RNA, 22 nt, Human
gugcaaaaguacuugcggauuu

SEQ ID NO: 273212 - RNA, 22 nt, Human
acucugggaucuugaaaagagu

SEQ ID NO: 273213 - RNA, 21 nt, Human
gggagggauggaaaugauguu

SEQ ID NO: 273214 - RNA, 22 nt, Human
agauaucugcaauauaauuuaa

SEQ ID NO: 273215 - RNA, 20 nt, Human
gcugccuguuucuguaagua

SEQ ID NO: 273216 - RNA, 22 nt, Human
uauaguaaaauuuucauuuaug

SEQ ID NO: 273217 - RNA, 22 nt, Human
gccuugggcacaggcagggccc

SEQ ID NO: 273218 - RNA, 22 nt, Human
uguguucuggcugugacagcug

SEQ ID NO: 273219 - RNA, 19 nt, Human
ugggcuuccccagggcaga

SEQ ID NO: 273220 - RNA, 22 nt, Human
guccuggcaccucacuggcuac

SEQ ID NO: 273221 - RNA, 22 nt, Human
cagcucuuccuagccaugccac

SEQ ID NO: 273222 - RNA, 22 nt, Human
caaauagaagguacucagagaa

SEQ ID NO: 273223 - RNA, 19 nt, Human
aauagauuaauuauccucu

SEQ ID NO: 273224 - RNA, 22 nt, Human
cccagagggcugaggauaugaa

SEQ ID NO: 273225 - RNA, 22 nt, Human
ucugggagguggcagggugcau

SEQ ID NO: 273226 - RNA, 22 nt, Human
ucuggggagugccuaaguggaa

SEQ ID NO: 273227 - RNA, 22 nt, Human
cugggagacgcagcuggggauc

SEQ ID NO: 273228 - RNA, 22 nt, Human
aaacugcagccuugaguucagg

SEQ ID NO: 273229 - RNA, 22 nt, Human
cuggauguaacgaagguuucac

SEQ ID NO: 273230 - RNA, 22 nt, Human
uaaauacuuuacaggaugucuc

SEQ ID NO: 273231 - RNA, 22 nt, Human
uuagacaggauguaugaaagcu

SEQ ID NO: 273232 - RNA, 22 nt, Human
uuuguccucuccauguacaaua

SEQ ID NO: 273233 - RNA, 22 nt, Human
uauuucuggcuuugagggugau

SEQ ID NO: 273234 - RNA, 22 nt, Human
gaggaaaaugggacaggcugua

SEQ ID NO: 273235 - RNA, 22 nt, Human
aagcccagcaucccugcaccag

SEQ ID NO: 273236 - RNA, 19 nt, Human
uggcucuguuucucuggag

SEQ ID NO: 273237 - RNA, 22 nt, Human
ugggcugcggauaggccucgga

SEQ ID NO: 273238 - RNA, 22 nt, Human
ugacguuuuagguguuaaaucg

SEQ ID NO: 273239 - RNA, 19 nt, Human
cuuuucaucaacagccaau

SEQ ID NO: 273240 - RNA, 22 nt, Human
agaaauuaggaaaguaacacuu

SEQ ID NO: 273241 - RNA, 22 nt, Human
uucugcuuauucuguagccuuu

SEQ ID NO: 273242 - RNA, 22 nt, Human
uuucacauucagauauagacuu

SEQ ID NO: 273243 - RNA, 22 nt, Human
agucucucacagaggauucucc

SEQ ID NO: 273244 - RNA, 22 nt, Human
gagaaaccuguaaggaaggaag

SEQ ID NO: 273245 - RNA, 22 nt, Human
cucaguguuaaauauaagguau

SEQ ID NO: 273246 - RNA, 22 nt, Human
ggccagagagcagccaggauuc

SEQ ID NO: 273247 - RNA, 22 nt, Human
cacccacauuccucuaguaugu

SEQ ID NO: 273248 - RNA, 22 nt, Human
ugacagagcauguagugacagc

SEQ ID NO: 273249 - RNA, 22 nt, Human
acagguguguucccggaaagcc

SEQ ID NO: 273250 - RNA, 22 nt, Human
uaguuaggaaaguccagggagc

SEQ ID NO: 273251 - RNA, 22 nt, Human
gauuuggcuuggaugauuaaac

SEQ ID NO: 273252 - RNA, 22 nt, Human
agaaucaauuagauucuaugag

SEQ ID NO: 273253 - RNA, 22 nt, Human
uuccagccagauuugcuggguu

SEQ ID NO: 273254 - RNA, 22 nt, Human
ccaggcugcuuuauuacucugu

SEQ ID NO: 273255 - RNA, 22 nt, Human
aaaguuuuagaacuaggaagca

SEQ ID NO: 273256 - RNA, 17 nt, Human
ucuccuggcucuaucag

SEQ ID NO: 273257 - RNA, 22 nt, Human
gcccuguuuugaaacuugcaua

SEQ ID NO: 273258 - RNA, 22 nt, Human
acagguguaaaacccaggaugg

SEQ ID NO: 273259 - RNA, 22 nt, Human
cagcaugaaacaauugagccca

SEQ ID NO: 273260 - RNA, 22 nt, Human
uuuaaauucugucugccgcuua

SEQ ID NO: 273261 - RNA, 22 nt, Human
aaaguggucaccuucucauuuc

SEQ ID NO: 273262 - RNA, 21 nt, Human
ggccucagccaccuggcucug

SEQ ID NO: 273263 - RNA, 22 nt, Human
cuccagauuccugcuggcagaa

SEQ ID NO: 273264 - RNA, 18 nt, Human
acaggcugugggaauggu

SEQ ID NO: 273265 - RNA, 22 nt, Human
ucagaagucaugcucagucugu

SEQ ID NO: 273266 - RNA, 22 nt, Human
aaaaguauuuuggaucucagau

SEQ ID NO: 273267 - RNA, 20 nt, Human
ggaaggcuugaaguuuacau

SEQ ID NO: 273268 - RNA, 20 nt, Human
uucuggaggcuacaagucug

SEQ ID NO: 273269 - RNA, 22 nt, Human
gggcugagccacagcuuuuguu

SEQ ID NO: 273270 - RNA, 22 nt, Human
ucucagaguaauucuuuaaggu

SEQ ID NO: 273271 - RNA, 22 nt, Human
ugagauguaagguaugcuuacu

SEQ ID NO: 273272 - RNA, 22 nt, Human
uguauuuucuucuggaagcuua

SEQ ID NO: 273273 - RNA, 22 nt, Human
uccugggaguaaaagcugcccu

SEQ ID NO: 273274 - RNA, 22 nt, Human
cuggcagcuuagcacucugguu

SEQ ID NO: 273275 - RNA, 22 nt, Human
agggcugacaguggcguggcgu

SEQ ID NO: 273276 - RNA, 22 nt, Human
agcugggcuggagcuccaagcg

SEQ ID NO: 273277 - RNA, 22 nt, Human
ugauuuaggaaacagcuacagg

SEQ ID NO: 273278 - RNA, 22 nt, Human
ucugagcuacgaugccugucac

SEQ ID NO: 273279 - RNA, 22 nt, Human
gacccagcuaaccaggugggga

SEQ ID NO: 273280 - RNA, 22 nt, Human
guguaugauuucaaauggcuag

SEQ ID NO: 273281 - RNA, 23 nt, Human
ccugcaaagaaacaagccaccug

SEQ ID NO: 273282 - RNA, 22 nt, Human
uuuacagucucuauagucaaaa

SEQ ID NO: 273283 - RNA, 22 nt, Human
ugggugagccacaggaguuguc

SEQ ID NO: 273284 - RNA, 22 nt, Human
uucuaauuguguuugcauaucu

SEQ ID NO: 273285 - RNA, 22 nt, Human
cccagacauaacagcagagagg

SEQ ID NO: 273286 - RNA, 22 nt, Human
gcagggcucauugccaggcauu

SEQ ID NO: 273287 - RNA, 19 nt, Human
aauguaguguuaugucaac

SEQ ID NO: 273288 - RNA, 22 nt, Human
uuucuuccuaaauaugauuucc

SEQ ID NO: 273289 - RNA, 22 nt, Human
agguagggcuaggcugcgucug

SEQ ID NO: 273290 - RNA, 22 nt, Human
aagcugcagguugaauccaggu

SEQ ID NO: 273291 - RNA, 20 nt, Human
ggaccagcugucugaggggc

SEQ ID NO: 273292 - RNA, 22 nt, Human
aagacuacuuuuggcagugugu

SEQ ID NO: 273293 - RNA, 22 nt, Human
cagcugggugaucuugggcagg

SEQ ID NO: 273294 - RNA, 22 nt, Human
caugcugugguaaaucacugaa

SEQ ID NO: 273295 - RNA, 22 nt, Human
uccaggagaaggccauccagcg

SEQ ID NO: 273296 - RNA, 22 nt, Human
gugaauggggcaggaaggaugg

SEQ ID NO: 273297 - RNA, 22 nt, Human
cuuugcauucucagcacagagc

SEQ ID NO: 273298 - RNA, 22 nt, Human
aucuguguguucaggaaguccu

SEQ ID NO: 273299 - RNA, 22 nt, Human
gaauacaagccugccaccugga

SEQ ID NO: 273300 - RNA, 22 nt, Human
uaugagcagacagugguuuuac

SEQ ID NO: 273301 - RNA, 22 nt, Human
gggcaggcugagcaugucaccu

SEQ ID NO: 273302 - RNA, 22 nt, Human
aaauauagugacacuuauaguc

SEQ ID NO: 273303 - RNA, 22 nt, Human
accagcugccuggucuaucugc

SEQ ID NO: 273304 - RNA, 22 nt, Human
gaccccaggcagaucagggggu

SEQ ID NO: 273305 - RNA, 21 nt, Human
uucacagaugggaaaacugag

SEQ ID NO: 273306 - RNA, 22 nt, Human
guuaguguauauugccuucaaa

SEQ ID NO: 273307 - RNA, 22 nt, Human
uccucacagcugguucauucag

SEQ ID NO: 273308 - RNA, 22 nt, Human
gcuccagaugaaaggccagagg

SEQ ID NO: 273309 - RNA, 22 nt, Human
gaguuagaagacagaauguaaa

SEQ ID NO: 273310 - RNA, 22 nt, Human
uguguccugugaucucuagggu

SEQ ID NO: 273311 - RNA, 22 nt, Human
auaaaugugaauuagagcuuug

SEQ ID NO: 273312 - RNA, 22 nt, Human
gucuggaguggggccugagaau

SEQ ID NO: 273313 - RNA, 22 nt, Human
gacaggugagaugaggaacacc

SEQ ID NO: 273314 - RNA, 22 nt, Human
cagaguggcgacccccucagcu

SEQ ID NO: 273315 - RNA, 22 nt, Human
ugcaggcugggaagagggacaa

SEQ ID NO: 273316 - RNA, 22 nt, Human
guucauuuuacuguaaauagca

SEQ ID NO: 273317 - RNA, 18 nt, Human
ggucacugagaugcuacu

SEQ ID NO: 273318 - RNA, 22 nt, Human
gcuggcuggaugguugguucgc

SEQ ID NO: 273319 - RNA, 22 nt, Human
auccugaaaauugaauggaagg

SEQ ID NO: 273320 - RNA, 22 nt, Human
ccaacucugaaaauccagauau

SEQ ID NO: 273321 - RNA, 22 nt, Human
gauacacuggccaaguggagga

SEQ ID NO: 273322 - RNA, 22 nt, Human
augcuauacucaaagaaauuca

SEQ ID NO: 273323 - RNA, 19 nt, Human
ucugcagaaggcauacaug

SEQ ID NO: 273324 - RNA, 22 nt, Human
ucuguggauuuuaguguucaug

SEQ ID NO: 273325 - RNA, 20 nt, Human
ggcaggugcuguccccuccu

SEQ ID NO: 273326 - RNA, 22 nt, Human
uacaccagguuaccaaucacug

SEQ ID NO: 273327 - RNA, 22 nt, Human
uuauuuaaugugaucugaagag

SEQ ID NO: 273328 - RNA, 22 nt, Human
ugugcagcagcagcuguggaga

SEQ ID NO: 273329 - RNA, 22 nt, Human
ggcaguuuggcaggauggaggg

SEQ ID NO: 273330 - RNA, 22 nt, Human
ugggccucugccacgcuccccc

SEQ ID NO: 273331 - RNA, 22 nt, Human
caggaagcaagugauuuucuug

SEQ ID NO: 273332 - RNA, 22 nt, Human
caccagcuugcagucuuaaccc

SEQ ID NO: 273333 - RNA, 22 nt, Human
aaagccaucaguaaaaugauuu

SEQ ID NO: 273334 - RNA, 22 nt, Human
cugucaaagacuaagguucuua

SEQ ID NO: 273335 - RNA, 22 nt, Human
uacaugugcuggguucuuggcc

SEQ ID NO: 273336 - RNA, 22 nt, Human
gcugggaagugcaagaucaagg

SEQ ID NO: 273337 - RNA, 22 nt, Human
cucugcagagccuccagcccag

SEQ ID NO: 273338 - RNA, 22 nt, Human
uaaacauggauucugaucacag

SEQ ID NO: 273339 - RNA, 17 nt, Human
cagagucugucugcauc

SEQ ID NO: 273340 - RNA, 22 nt, Human
aacugauuguuggaugauagug

SEQ ID NO: 273341 - RNA, 22 nt, Human
uccuguguuaaagggggugcua

SEQ ID NO: 273342 - RNA, 22 nt, Human
aaagugcugggauuacaagugu

SEQ ID NO: 273343 - RNA, 22 nt, Human
uuaagucaauaucaaucucagc

SEQ ID NO: 273344 - RNA, 22 nt, Human
cagaaccugagagcacaauccu

SEQ ID NO: 273345 - RNA, 22 nt, Human
aggccugucccagcugaggacg

SEQ ID NO: 273346 - RNA, 22 nt, Human
aucuuuggguacaaacuugccu

SEQ ID NO: 273347 - RNA, 22 nt, Human
ggcaggcugggugucauggagu

SEQ ID NO: 273348 - RNA, 20 nt, Human
uccugcugccaccucuucuu

SEQ ID NO: 273349 - RNA, 22 nt, Human
aauaauuuccagccaacuggaa

SEQ ID NO: 273350 - RNA, 17 nt, Human
gucuggaguggccuuca

SEQ ID NO: 273351 - RNA, 22 nt, Human
agauuuuaguguagaggacuug

SEQ ID NO: 273352 - RNA, 22 nt, Human
auacaucuuccuuuuaaaaugc

SEQ ID NO: 273353 - RNA, 22 nt, Human
ggaaaaaugacacauaucucaa

SEQ ID NO: 273354 - RNA, 18 nt, Human
acugaagaugcaagaccu

SEQ ID NO: 273355 - RNA, 22 nt, Human
uccuggcucucuacaaaccaga

SEQ ID NO: 273356 - RNA, 22 nt, Human
cuccaggguuccccgauccacu

SEQ ID NO: 273357 - RNA, 22 nt, Human
ugucucugaggugagggucagc

SEQ ID NO: 273358 - RNA, 22 nt, Human
aggugucuucagggugagacag

SEQ ID NO: 273359 - RNA, 20 nt, Human
aagaaguugguaagcagugc

SEQ ID NO: 273360 - RNA, 22 nt, Human
cugaguccuugggcuuagagug

SEQ ID NO: 273361 - RNA, 22 nt, Human
cugcacaguguuggaagcugcc

SEQ ID NO: 273362 - RNA, 22 nt, Human
gagguccauacagcuauucuac

SEQ ID NO: 273363 - RNA, 22 nt, Human
uucacuuauagggauguuauug

SEQ ID NO: 273364 - RNA, 17 nt, Human
agguuuaugguauuuga

SEQ ID NO: 273365 - RNA, 22 nt, Human
agcccuccuuuguucaugcugc

SEQ ID NO: 273366 - RNA, 22 nt, Human
gggucuccuaauggaggaugac

SEQ ID NO: 273367 - RNA, 22 nt, Human
uggcugaguaaguugugauaug

SEQ ID NO: 273368 - RNA, 22 nt, Human
gggggaugcucaggaggcugcu

SEQ ID NO: 273369 - RNA, 15 nt, Human
cuauuucauccuucu

SEQ ID NO: 273370 - RNA, 22 nt, Human
cagcugaggaauacuagaugua

SEQ ID NO: 273371 - RNA, 22 nt, Human
ugucagugucuaugaagaauuu

SEQ ID NO: 273372 - RNA, 22 nt, Human
uagaaacccaggauuuguauuu

SEQ ID NO: 273373 - RNA, 22 nt, Human
agucugaagacucaugucugaa

SEQ ID NO: 273374 - RNA, 22 nt, Human
gaagaggcuuuccuagggcaag

SEQ ID NO: 273375 - RNA, 22 nt, Human
cauagcgguauuccacgugguu

SEQ ID NO: 273376 - RNA, 22 nt, Human
cggagcuggcgucuguguggac

SEQ ID NO: 273377 - RNA, 22 nt, Human
ugggccucggggaagcccgugu

SEQ ID NO: 273378 - RNA, 22 nt, Human
ggccacagugggaaauccuggg

SEQ ID NO: 273379 - RNA, 22 nt, Human
ggcugaaacagauuucaagaca

SEQ ID NO: 273380 - RNA, 22 nt, Human
gguguugggcucacugguccuu

SEQ ID NO: 273381 - RNA, 23 nt, Human
ucuguaggcagcaugccacucuc

SEQ ID NO: 273382 - RNA, 22 nt, Human
uugggaaggcguggaagcagaa

SEQ ID NO: 273383 - RNA, 22 nt, Human
gcucagagcaucccagugaaug

SEQ ID NO: 273384 - RNA, 22 nt, Human
auggcuuugaaguucagcuuuu

SEQ ID NO: 273385 - RNA, 20 nt, Human
ugaaauagauacucagagau

SEQ ID NO: 273386 - RNA, 22 nt, Human
caggugcucugcugcagguaag

SEQ ID NO: 273387 - RNA, 22 nt, Human
ucaggcugcuguacugugaaug

SEQ ID NO: 273388 - RNA, 19 nt, Human
ugcccaggccucccaaaag

SEQ ID NO: 273389 - RNA, 22 nt, Human
cacagaacauuuuuagaugcag

SEQ ID NO: 273390 - RNA, 22 nt, Human
aagggcugcuguagaagcagag

SEQ ID NO: 273391 - RNA, 22 nt, Human
ucuuucggccauagcgaugauu

SEQ ID NO: 273392 - RNA, 22 nt, Human
uucuccaacacaagcaugaugu

SEQ ID NO: 273393 - RNA, 22 nt, Human
ugaggccaugcccgugccggcc

SEQ ID NO: 273394 - RNA, 22 nt, Human
ggcaaagagacaugcaucgggg

SEQ ID NO: 273395 - RNA, 22 nt, Human
aauucaaucuaagaaaugauca

SEQ ID NO: 273396 - RNA, 22 nt, Human
acacauguuuacagucuucagu

SEQ ID NO: 273397 - RNA, 22 nt, Human
ugucuguaauagucacuaugug

SEQ ID NO: 273398 - RNA, 22 nt, Human
cagcugcucugguggucucucc

SEQ ID NO: 273399 - RNA, 22 nt, Human
gcuuucccugcccucagaagga

SEQ ID NO: 273400 - RNA, 22 nt, Human
augaaugagaaagcugaaaucu

SEQ ID NO: 273401 - RNA, 22 nt, Human
cagcuggcuccaccucugggcu

SEQ ID NO: 273402 - RNA, 22 nt, Human
cacagguuugacaaggauaaaa

SEQ ID NO: 273403 - RNA, 22 nt, Human
uggcaguggcucagagugcaga

SEQ ID NO: 273404 - RNA, 22 nt, Human
aacuacagaaucauagaaaaua

SEQ ID NO: 273405 - RNA, 19 nt, Human
cuguugcuggggcucucuu

SEQ ID NO: 273406 - RNA, 22 nt, Human
uugagauggagcuucacucuug

SEQ ID NO: 273407 - RNA, 22 nt, Human
aggccuugccaaugagagaacu

SEQ ID NO: 273408 - RNA, 22 nt, Human
agaauucugacaauagaauugg

SEQ ID NO: 273409 - RNA, 22 nt, Human
aauaucugucucuaaugcauau

SEQ ID NO: 273410 - RNA, 22 nt, Human
accugggaaaaggaguggccau

SEQ ID NO: 273411 - RNA, 22 nt, Human
gaccugggguaagcuuggcaac

SEQ ID NO: 273412 - RNA, 20 nt, Human
ucuccuggugacaguaccca

SEQ ID NO: 273413 - RNA, 21 nt, Human
acaguacuugagaucuuuuga

SEQ ID NO: 273414 - RNA, 22 nt, Human
acuugaauaggaaagccacaaa

SEQ ID NO: 273415 - RNA, 22 nt, Human
uagaaaacuaauacaugcuuga

SEQ ID NO: 273416 - RNA, 22 nt, Human
ggcugagaaggagugggugagg

SEQ ID NO: 273417 - RNA, 22 nt, Human
gcaggcuugggacgagcuggag

SEQ ID NO: 273418 - RNA, 22 nt, Human
uacaaacuguuauuauuauugu

SEQ ID NO: 273419 - RNA, 22 nt, Human
caguagccuuauuuggaucauu

SEQ ID NO: 273420 - RNA, 22 nt, Human
accccaaaagaguaauagaauu

SEQ ID NO: 273421 - RNA, 22 nt, Human
gccuggcuggucacugccuggc

SEQ ID NO: 273422 - RNA, 22 nt, Human
uugcuuagagccaaucuugauu

SEQ ID NO: 273423 - RNA, 19 nt, Human
uaucaaucacggcaucuuu

SEQ ID NO: 273424 - RNA, 22 nt, Human
ucugggcagccucaggccaggg

SEQ ID NO: 273425 - RNA, 22 nt, Human
aaucagaauuuauugaaucuuu

SEQ ID NO: 273426 - RNA, 22 nt, Human
ccuggacuguguccugugguca

SEQ ID NO: 273427 - RNA, 23 nt, Human
cagaccuuucuguaucaguuauc

SEQ ID NO: 273428 - RNA, 22 nt, Human
uauccaauucaccauugauggg

SEQ ID NO: 273429 - RNA, 22 nt, Human
cuggcccuaugagccuccugau

SEQ ID NO: 273430 - RNA, 22 nt, Human
gaaacacauaugaacaguugau

SEQ ID NO: 273431 - RNA, 22 nt, Human
ugacagagagguaaguuaugaa

SEQ ID NO: 273432 - RNA, 22 nt, Human
uuauugaaggaacugaaauaaa

SEQ ID NO: 273433 - RNA, 22 nt, Human
augugucaauuuucaaaugcuu

SEQ ID NO: 273434 - RNA, 22 nt, Human
ucucccaguccucugugcuuac

SEQ ID NO: 273435 - RNA, 22 nt, Human
uuuggaaugcccauggacuggu

SEQ ID NO: 273436 - RNA, 22 nt, Human
uagcauuuauggucaugugucc

SEQ ID NO: 273437 - RNA, 22 nt, Human
ugacccauuaaccacuuucccu

SEQ ID NO: 273438 - RNA, 22 nt, Human
ccagacccugcucuggggcucu

SEQ ID NO: 273439 - RNA, 22 nt, Human
uuugcaguuucauugcugaaau

SEQ ID NO: 273440 - RNA, 22 nt, Human
uguagauaaguaaaagcccagu

SEQ ID NO: 273441 - RNA, 22 nt, Human
ucugggcuuuguaaugggaggu

SEQ ID NO: 273442 - RNA, 22 nt, Human
gacaccaggaauaguucugucu

SEQ ID NO: 273443 - RNA, 22 nt, Human
ucuucauuuuacaggcagaccu

SEQ ID NO: 273444 - RNA, 22 nt, Human
auuaaauuaaguggcuaauuua

SEQ ID NO: 273445 - RNA, 22 nt, Human
ucagagaggcaauacuguuuaa

SEQ ID NO: 273446 - RNA, 22 nt, Human
cuggcucaguucuugguuuuca

SEQ ID NO: 273447 - RNA, 22 nt, Human
aaugaaacuaguagaaucuuug

SEQ ID NO: 273448 - RNA, 22 nt, Human
uuugaaacucugaacauguuuc

SEQ ID NO: 273449 - RNA, 22 nt, Human
uguccuggagugcuugggggaa

SEQ ID NO: 273450 - RNA, 22 nt, Human
ugccacccuggcggcagccugc

SEQ ID NO: 273451 - RNA, 23 nt, Human
gguuauuugcauccuguaauuau

SEQ ID NO: 273452 - RNA, 22 nt, Human
ucagauggaggcaauguuaccu

SEQ ID NO: 273453 - RNA, 22 nt, Human
ugcuaucuaggcaagguggucc

SEQ ID NO: 273454 - RNA, 22 nt, Human
acagcagaguaguuuuccaacu

SEQ ID NO: 273455 - RNA, 22 nt, Human
auuucuguuauaccuuucucag

SEQ ID NO: 273456 - RNA, 22 nt, Human
caguggaagacucagcucuccc

SEQ ID NO: 273457 - RNA, 22 nt, Human
acagugcaaauaggacugucuu

SEQ ID NO: 273458 - RNA, 19 nt, Human
gcugugugaccuugggcaa

SEQ ID NO: 273459 - RNA, 22 nt, Human
uuaugcaacaggugagcagaca

SEQ ID NO: 273460 - RNA, 22 nt, Human
auagcacuuauagauuuggucu

SEQ ID NO: 273461 - RNA, 22 nt, Human
aaggcugaggcuggagaauuac

SEQ ID NO: 273462 - RNA, 22 nt, Human
gggagaaggagcuaguucuuga

SEQ ID NO: 273463 - RNA, 20 nt, Human
ucugagagucugagugauga

SEQ ID NO: 273464 - RNA, 22 nt, Human
ucuuauugugaugaugaagaac

SEQ ID NO: 273465 - RNA, 22 nt, Human
auauucuuauccuuuucucugu

SEQ ID NO: 273466 - RNA, 22 nt, Human
aggcaagcccaggcacuuggag

SEQ ID NO: 273467 - RNA, 22 nt, Human
aaaagcaauugcaguucuugcc

SEQ ID NO: 273468 - RNA, 22 nt, Human
ggaugaggaagauuacugagaa

SEQ ID NO: 273469 - RNA, 22 nt, Human
auugauuugaacaaagauauua

SEQ ID NO: 273470 - RNA, 22 nt, Human
gaaggaaaaauacucuguaagg

SEQ ID NO: 273471 - RNA, 22 nt, Human
ucuaagacacuguacuuucagu

SEQ ID NO: 273472 - RNA, 22 nt, Human
cgcugcagcuggcugcagggaa

SEQ ID NO: 273473 - RNA, 22 nt, Human
gcagguuagauuuaauccauuc

SEQ ID NO: 273474 - RNA, 22 nt, Human
uuaauauacaauuuuacgggcu

SEQ ID NO: 273475 - RNA, 22 nt, Human
guucugggucuggacacacaga

SEQ ID NO: 273476 - RNA, 22 nt, Human
uggcaggguacaccuuaacacc

SEQ ID NO: 273477 - RNA, 23 nt, Human
uuucccacccucucucauugcug

SEQ ID NO: 273478 - RNA, 22 nt, Human
agcuggcauacuuugcuaggaa

SEQ ID NO: 273479 - RNA, 22 nt, Human
caucuuuaguuauugaauauag

SEQ ID NO: 273480 - RNA, 23 nt, Human
ucugucuuguuuaggccacuguu

SEQ ID NO: 273481 - RNA, 22 nt, Human
ggcuucucuccaguaugcauuc

SEQ ID NO: 273482 - RNA, 22 nt, Human
ugcuugcuggaggcagacagaa

SEQ ID NO: 273483 - RNA, 22 nt, Human
cauauaucuaccugcaauugca

SEQ ID NO: 273484 - RNA, 22 nt, Human
agaacucuuuaucuguggaaug

SEQ ID NO: 273485 - RNA, 22 nt, Human
acacuuuaagcauuucacacug

SEQ ID NO: 273486 - RNA, 22 nt, Human
auggcagaauuaggauuucaag

SEQ ID NO: 273487 - RNA, 22 nt, Human
auguggcuagugcaacugagaa

SEQ ID NO: 273488 - RNA, 22 nt, Human
uacacuggacaggaguaggaag

SEQ ID NO: 273489 - RNA, 22 nt, Human
gcugguggcagagacaucaggu

SEQ ID NO: 273490 - RNA, 22 nt, Human
caggcuggucccagagcauugc

SEQ ID NO: 273491 - RNA, 22 nt, Human
gucacaugccagugcacacagg

SEQ ID NO: 273492 - RNA, 20 nt, Human
agauuauuccuaagauuucu

SEQ ID NO: 273493 - RNA, 22 nt, Human
aucugagucucugacagcaugu

SEQ ID NO: 273494 - RNA, 22 nt, Human
gacagaggcaagaccagaagcc

SEQ ID NO: 273495 - RNA, 22 nt, Human
ugcaagagauucaaaccauaaa

SEQ ID NO: 273496 - RNA, 22 nt, Human
uugcaacaucugaacauuuauc

SEQ ID NO: 273497 - RNA, 22 nt, Human
agggacuggcucucugagcagg

SEQ ID NO: 273498 - RNA, 22 nt, Human
gagaggcuaugagguucugugu

SEQ ID NO: 273499 - RNA, 22 nt, Human
agggcagcuagcuguagaaaga

SEQ ID NO: 273500 - RNA, 22 nt, Human
ucucacagugcaggucugucuc

SEQ ID NO: 273501 - RNA, 22 nt, Human
gagagggccagggugagaacua

SEQ ID NO: 273502 - RNA, 22 nt, Human
uugugagcauguuuacuugauu

SEQ ID NO: 273503 - RNA, 22 nt, Human
agcuucagcuugcagcugugau

SEQ ID NO: 273504 - RNA, 22 nt, Human
cugugggacucugaggaaaagc

SEQ ID NO: 273505 - RNA, 22 nt, Human
agcuguuuucuaaugcauuuga

SEQ ID NO: 273506 - RNA, 22 nt, Human
guaugcaucgacucaagucuga

SEQ ID NO: 273507 - RNA, 22 nt, Human
ugccaggcucagccccuaucuu

SEQ ID NO: 273508 - RNA, 22 nt, Human
acuuuggacgccaugcuguuug

SEQ ID NO: 273509 - RNA, 22 nt, Human
aggagauagucaaagcuucuug

SEQ ID NO: 273510 - RNA, 22 nt, Human
uuccauacgacugaggucucgg

SEQ ID NO: 273511 - RNA, 22 nt, Human
cacauacaaugguguuauuugg

SEQ ID NO: 273512 - RNA, 22 nt, Human
gccuccugacuuacacugagcu

SEQ ID NO: 273513 - RNA, 22 nt, Human
uuauugagcaacucuggggcuc

SEQ ID NO: 273514 - RNA, 22 nt, Human
ggcugcggccgcgggucugugc

SEQ ID NO: 273515 - RNA, 16 nt, Human
acaaauacaacugcug

SEQ ID NO: 273516 - RNA, 22 nt, Human
ucugagcuagaaaguaugcccu

SEQ ID NO: 273517 - RNA, 22 nt, Human
auaaaugccucagaaucauccc

SEQ ID NO: 273518 - RNA, 22 nt, Human
aggcugugaugagccucaugga

SEQ ID NO: 273519 - RNA, 22 nt, Human
auccucagaccucagcaaagcc

SEQ ID NO: 273520 - RNA, 23 nt, Human
ucagugcaaaaauaggauuuugg

SEQ ID NO: 273521 - RNA, 20 nt, Human
ucccaaaauucuacuuuauc

SEQ ID NO: 273522 - RNA, 22 nt, Human
ccugugacauuagaauuucauu

SEQ ID NO: 273523 - RNA, 20 nt, Human
uguaaaacaaggugaauccu

SEQ ID NO: 273524 - RNA, 19 nt, Human
guccaggcauuggguuggu

SEQ ID NO: 273525 - RNA, 22 nt, Human
aaaccauuugaauuauuacuga

SEQ ID NO: 273526 - RNA, 22 nt, Human
ggcugcaguugugugaaggccg

SEQ ID NO: 273527 - RNA, 22 nt, Human
uauuuguauguguguacauaua

SEQ ID NO: 273528 - RNA, 22 nt, Human
augucacaugagagcgcagcac

SEQ ID NO: 273529 - RNA, 22 nt, Human
uccuucuggaggcuguaaagga

SEQ ID NO: 273530 - RNA, 22 nt, Human
uccuuggcaagacacagcacag

SEQ ID NO: 273531 - RNA, 22 nt, Human
ugcuggagaugaaagggcccug

SEQ ID NO: 273532 - RNA, 23 nt, Human
ugaaguucauucucacugaugua

SEQ ID NO: 273533 - RNA, 22 nt, Human
uggccuggaagagaggucgagg

SEQ ID NO: 273534 - RNA, 22 nt, Human
cacaaggagguccugaggaagc

SEQ ID NO: 273535 - RNA, 22 nt, Human
uuggcugccuguggaucgcauu

SEQ ID NO: 273536 - RNA, 22 nt, Human
acaugccagcccauuuaaaugg

SEQ ID NO: 273537 - RNA, 23 nt, Human
ugugggcgcauuguaaggguagc

SEQ ID NO: 273538 - RNA, 22 nt, Human
uguguacucaauugagccauuu

SEQ ID NO: 273539 - RNA, 18 nt, Human
gcccugguggagcuggug

SEQ ID NO: 273540 - RNA, 22 nt, Human
augcccugggagugcuguacca

SEQ ID NO: 273541 - RNA, 17 nt, Human
agccugggaaggaguga

SEQ ID NO: 273542 - RNA, 22 nt, Human
uagcuuuagugaaaaauaucag

SEQ ID NO: 273543 - RNA, 22 nt, Human
cauuccaaguauauacaugaua

SEQ ID NO: 273544 - RNA, 22 nt, Human
ugauucaagcuacuguuacugg

SEQ ID NO: 273545 - RNA, 22 nt, Human
uauuuccaccuauuauuuucug

SEQ ID NO: 273546 - RNA, 17 nt, Human
uccaggagaggcaaugg

SEQ ID NO: 273547 - RNA, 22 nt, Human
uuugcugaccccauucugaguc

SEQ ID NO: 273548 - RNA, 22 nt, Human
ugucaauaguuuugaguucucu

SEQ ID NO: 273549 - RNA, 22 nt, Human
gaaagugcucucucuauacaca

SEQ ID NO: 273550 - RNA, 22 nt, Human
augcuaaagcuuugcuuucauu

SEQ ID NO: 273551 - RNA, 22 nt, Human
uguuuggaaacacuggcagaaa

SEQ ID NO: 273552 - RNA, 23 nt, Human
ugguggcagaaguagcagaugac

SEQ ID NO: 273553 - RNA, 22 nt, Human
uaucagugauugcuguauacaa

SEQ ID NO: 273554 - RNA, 22 nt, Human
guucacaagaguuacagacaga

SEQ ID NO: 273555 - RNA, 22 nt, Human
gcucagggucccuuggugcugg

SEQ ID NO: 273556 - RNA, 22 nt, Human
uugggcuuuaauuccagagagg

SEQ ID NO: 273557 - RNA, 22 nt, Human
agggagacaaaagcagcugcca

SEQ ID NO: 273558 - RNA, 22 nt, Human
uugaaaaaauugguagaggaug

SEQ ID NO: 273559 - RNA, 22 nt, Human
ugaaaaacuuuaauccauaaag

SEQ ID NO: 273560 - RNA, 20 nt, Human
ccacaagggaauauuguuga

SEQ ID NO: 273561 - RNA, 22 nt, Human
ggcagcugguucuuuccauuaa

SEQ ID NO: 273562 - RNA, 22 nt, Human
uguucugagugcagcuuaauaa

SEQ ID NO: 273563 - RNA, 22 nt, Human
gaggucuucacaaagaacagca

SEQ ID NO: 273564 - RNA, 22 nt, Human
gcaggugugcugaauuacguga

SEQ ID NO: 273565 - RNA, 22 nt, Human
cagauuaagugcucaacagugu

SEQ ID NO: 273566 - RNA, 22 nt, Human
cauuuaaagguuguggguaaaa

SEQ ID NO: 273567 - RNA, 22 nt, Human
aaauuauuuucagaauggagaa

SEQ ID NO: 273568 - RNA, 22 nt, Human
gcucaggccucacuccauuugg

SEQ ID NO: 273569 - RNA, 22 nt, Human
ugucauuuucugguuaguuaau

SEQ ID NO: 273570 - RNA, 18 nt, Human
uucuggguguuauguuua

SEQ ID NO: 273571 - RNA, 22 nt, Human
cucccaguguuguuuucugaug

SEQ ID NO: 273572 - RNA, 21 nt, Human
agcugagcccagaagacuggu

SEQ ID NO: 273573 - RNA, 22 nt, Human
augaggcaaagguggagguggg

SEQ ID NO: 273574 - RNA, 20 nt, Human
ucacuguaauugccuacauu

SEQ ID NO: 273575 - RNA, 22 nt, Human
cucuccacucagcgucaugucc

SEQ ID NO: 273576 - RNA, 22 nt, Human
caggaggcuccuagggcucugu

SEQ ID NO: 273577 - RNA, 22 nt, Human
uggcccuuguucaaauauguca

SEQ ID NO: 273578 - RNA, 22 nt, Human
cugaggaguuuggguuguucaa

SEQ ID NO: 273579 - RNA, 22 nt, Human
ucccugcccugccuucaugguu

SEQ ID NO: 273580 - RNA, 22 nt, Human
ucagagucuaaauagaagaaua

SEQ ID NO: 273581 - RNA, 22 nt, Human
uccaggcagucauuaaucucua

SEQ ID NO: 273582 - RNA, 22 nt, Human
cugcagaacaauuccugcuguu

SEQ ID NO: 273583 - RNA, 22 nt, Human
ugguccagcuugauucucuucu

SEQ ID NO: 273584 - RNA, 22 nt, Human
gugugucccuacaacagcuuca

SEQ ID NO: 273585 - RNA, 20 nt, Human
ucuugagaacaauuucuggc

SEQ ID NO: 273586 - RNA, 22 nt, Human
uaaguucagaguucucauuugu

SEQ ID NO: 273587 - RNA, 22 nt, Human
gaggagggcaguuccucuuuua

SEQ ID NO: 273588 - RNA, 22 nt, Human
aagcaagacagaaguuacugcc

SEQ ID NO: 273589 - RNA, 22 nt, Human
aaaggccucuguccuagugccu

SEQ ID NO: 273590 - RNA, 22 nt, Human
agggggaggcugugcugcgucu

SEQ ID NO: 273591 - RNA, 22 nt, Human
cucaggaaccgcggcagcagcc

SEQ ID NO: 273592 - RNA, 22 nt, Human
uuuuauugucaaugaagacaga

SEQ ID NO: 273593 - RNA, 22 nt, Human
gcaggcuccaaggccugggaga

SEQ ID NO: 273594 - RNA, 22 nt, Human
ugggccuguggcuuggcucuag

SEQ ID NO: 273595 - RNA, 22 nt, Human
uuuacuguguccaucugugacu

SEQ ID NO: 273596 - RNA, 22 nt, Human
uccagacccaugacccugggga

SEQ ID NO: 273597 - RNA, 22 nt, Human
aaugcugcucucauaauuauag

SEQ ID NO: 273598 - RNA, 22 nt, Human
cagagcugcgcuuuuuccuggu

SEQ ID NO: 273599 - RNA, 22 nt, Human
ugagcccagagaucugagcuau

SEQ ID NO: 273600 - RNA, 19 nt, Human
agcuggcacuagaauccag

SEQ ID NO: 273601 - RNA, 22 nt, Human
uuuguacaccuaccuaauacag

SEQ ID NO: 273602 - RNA, 22 nt, Human
ugagaggucauuaggccaugag

SEQ ID NO: 273603 - RNA, 22 nt, Human
auuuacugagcagcuaccaugu

SEQ ID NO: 273604 - RNA, 22 nt, Human
uuguacaaagauuucacagcuc

SEQ ID NO: 273605 - RNA, 22 nt, Human
ccagagguuacuuugccuugga

SEQ ID NO: 273606 - RNA, 22 nt, Human
ucauucaauguaagcauauaua

SEQ ID NO: 273607 - RNA, 22 nt, Human
gccuguuugagaauagucaggg

SEQ ID NO: 273608 - RNA, 22 nt, Human
ggccugugagcccuugcaugua

SEQ ID NO: 273609 - RNA, 22 nt, Human
cugggagagguggugggaagua

SEQ ID NO: 273610 - RNA, 22 nt, Human
cccagaggggucgucugagggg

SEQ ID NO: 273611 - RNA, 22 nt, Human
uggcagguagaguucugagaug

SEQ ID NO: 273612 - RNA, 22 nt, Human
ccugggaggcugugggucugcu

SEQ ID NO: 273613 - RNA, 19 nt, Human
cugcagggaugugcagagu

SEQ ID NO: 273614 - RNA, 22 nt, Human
aggcacagugccuggaaucaaa

SEQ ID NO: 273615 - RNA, 22 nt, Human
agacugggauucucccugauca

SEQ ID NO: 273616 - RNA, 22 nt, Human
cuggccaggccccuugcagggc

SEQ ID NO: 273617 - RNA, 22 nt, Human
ucaaagucauggcaggcucaga

SEQ ID NO: 273618 - RNA, 20 nt, Human
aggagcugaauuagaggguu

SEQ ID NO: 273619 - RNA, 20 nt, Human
gcacaguuugggaaccaugg

SEQ ID NO: 273620 - RNA, 22 nt, Human
gacccggcuccaggcccagcag

SEQ ID NO: 273621 - RNA, 22 nt, Human
caagccuuggaaauccauucug

SEQ ID NO: 273622 - RNA, 23 nt, Human
uccaugagaugugggcuucuagu

SEQ ID NO: 273623 - RNA, 22 nt, Human
uaugcacaauaugaucuauuug

SEQ ID NO: 273624 - RNA, 22 nt, Human
gcaggcuugcccggccuccuuc

SEQ ID NO: 273625 - RNA, 22 nt, Human
gaagauaauuccuacuuauaac

SEQ ID NO: 273626 - RNA, 22 nt, Human
ucuguucauuugccucggcucu

SEQ ID NO: 273627 - RNA, 22 nt, Human
uugggacagcaaccaucugcua

SEQ ID NO: 273628 - RNA, 22 nt, Human
guccagagguccaggaucaagg

SEQ ID NO: 273629 - RNA, 22 nt, Human
acuuauauuugcuuuaugcuuc

SEQ ID NO: 273630 - RNA, 22 nt, Human
uuagaaucuuguaucagaaguu

SEQ ID NO: 273631 - RNA, 22 nt, Human
guccuuggagguguggaaucug

SEQ ID NO: 273632 - RNA, 22 nt, Human
ggccagacauaucgcucccaaa

SEQ ID NO: 273633 - RNA, 23 nt, Human
uguuuucuuguccugguauaauu

SEQ ID NO: 273634 - RNA, 22 nt, Human
gccucaggugcaucucucauuc

SEQ ID NO: 273635 - RNA, 21 nt, Human
cagugaggcccuccuguuccc

SEQ ID NO: 273636 - RNA, 22 nt, Human
aguuccaccauuuaggaucugu

SEQ ID NO: 273637 - RNA, 22 nt, Human
ugguccugggcacaguauaugc

SEQ ID NO: 273638 - RNA, 22 nt, Human
aagcacagugggcagagcagcc

SEQ ID NO: 273639 - RNA, 22 nt, Human
ugcauuauuugcaugugccugu

SEQ ID NO: 273640 - RNA, 22 nt, Human
ccagagccugcugagccccauu

SEQ ID NO: 273641 - RNA, 22 nt, Human
gucucaguccgugcuguucagg

SEQ ID NO: 273642 - RNA, 22 nt, Human
agccacaaugccaaccucuacu

SEQ ID NO: 273643 - RNA, 22 nt, Human
uggcugagaccuucccaaauuc

SEQ ID NO: 273644 - RNA, 22 nt, Human
augcuaaagggguaggccuccu

SEQ ID NO: 273645 - RNA, 20 nt, Human
uccagccacuuccgcugguc

SEQ ID NO: 273646 - RNA, 21 nt, Human
uccagaccucccucuccuagc

SEQ ID NO: 273647 - RNA, 22 nt, Human
cagagagagcaggaaaccuccg

SEQ ID NO: 273648 - RNA, 22 nt, Human
acagcaggcaugaagaaauguu

SEQ ID NO: 273649 - RNA, 22 nt, Human
uauuaacauuuuaugaaaauaa

SEQ ID NO: 273650 - RNA, 22 nt, Human
uuucucuucacugugugccuca

SEQ ID NO: 273651 - RNA, 22 nt, Human
auaacagauacucucugugagg

SEQ ID NO: 273652 - RNA, 22 nt, Human
gagugcugaaugcgagaacaga

SEQ ID NO: 273653 - RNA, 22 nt, Human
cagggagggacaauugucaccu

SEQ ID NO: 273654 - RNA, 22 nt, Human
aguguguccagaaaucuguauu

SEQ ID NO: 273655 - RNA, 22 nt, Human
aaaugaguagcgaugcacauua

SEQ ID NO: 273656 - RNA, 22 nt, Human
auuccacacaguaauacucaau

SEQ ID NO: 273657 - RNA, 22 nt, Human
ucugggagguaaccaugcugau

SEQ ID NO: 273658 - RNA, 22 nt, Human
uguguccugguguuaauuuuau

SEQ ID NO: 273659 - RNA, 22 nt, Human
agagggcccauguugggcugcu

SEQ ID NO: 273660 - RNA, 22 nt, Human
ucucagagaucuuucugcaugu

SEQ ID NO: 273661 - RNA, 22 nt, Human
aaaugcuugcaacaucccaggu

SEQ ID NO: 273662 - RNA, 22 nt, Human
agcugcaaagaucugucaguca

SEQ ID NO: 273663 - RNA, 22 nt, Human
aacugcauuugcauaaguccau

SEQ ID NO: 273664 - RNA, 22 nt, Human
ggcaaacagacuugaccaucuu

SEQ ID NO: 273665 - RNA, 19 nt, Human
uacaugcagcaggcacgca

SEQ ID NO: 273666 - RNA, 22 nt, Human
gaagguuuucaggagccuaguc

SEQ ID NO: 273667 - RNA, 22 nt, Human
uggagcagugguccuggagaug

SEQ ID NO: 273668 - RNA, 22 nt, Human
gcaguucuacuuauccauagac

SEQ ID NO: 273669 - RNA, 23 nt, Human
guaaugaugggaauuuacuuaga

SEQ ID NO: 273670 - RNA, 22 nt, Human
aggucugguguugaugaauucc

SEQ ID NO: 273671 - RNA, 21 nt, Human
uccaagccuucaacacauuca

SEQ ID NO: 273672 - RNA, 22 nt, Human
uaaaaccaggucuugggauuua

SEQ ID NO: 273673 - RNA, 22 nt, Human
ucugcagggucccagccucagc

SEQ ID NO: 273674 - RNA, 22 nt, Human
auaaaaccaaagcagcaguguu

SEQ ID NO: 273675 - RNA, 22 nt, Human
ugccgcagugcggggagggccc

SEQ ID NO: 273676 - RNA, 22 nt, Human
agaagucaaugaugagagugcu

SEQ ID NO: 273677 - RNA, 19 nt, Human
gcagguggauguggucagc

SEQ ID NO: 273678 - RNA, 22 nt, Human
ccagucuguacuuugcucuguu

SEQ ID NO: 273679 - RNA, 20 nt, Human
uccagggcccuggcuccucu

SEQ ID NO: 273680 - RNA, 22 nt, Human
cuccuccuggacacaggcugug

SEQ ID NO: 273681 - RNA, 19 nt, Human
uggagaggaaaugcugcuc

SEQ ID NO: 273682 - RNA, 22 nt, Human
uuuuugaaggcugaugugauua

SEQ ID NO: 273683 - RNA, 16 nt, Human
ugggugggaggagcgg

SEQ ID NO: 273684 - RNA, 22 nt, Human
cagcaacucuccugugcucaaa

SEQ ID NO: 273685 - RNA, 22 nt, Human
uacuuuaauauaugugaaguuc

SEQ ID NO: 273686 - RNA, 22 nt, Human
ucuacaaauaaauuacuaugua

SEQ ID NO: 273687 - RNA, 22 nt, Human
uucauucuugucuuuguauagu

SEQ ID NO: 273688 - RNA, 22 nt, Human
gcagaauagggcauaacuuugc

SEQ ID NO: 273689 - RNA, 22 nt, Human
ccagccuugcaccgagccagcc

SEQ ID NO: 273690 - RNA, 22 nt, Human
uuuaucaguagcaaaguuuuaa

SEQ ID NO: 273691 - RNA, 22 nt, Human
uaaagguaguuuuaaaggugcu

SEQ ID NO: 273692 - RNA, 22 nt, Human
guggggguggaaaggcaaguug

SEQ ID NO: 273693 - RNA, 22 nt, Human
agcaaagcacuuugcauacaua

SEQ ID NO: 273694 - RNA, 20 nt, Human
uucaaagacccucaggucca

SEQ ID NO: 273695 - RNA, 22 nt, Human
uucaguguuaaucuugggagaa

SEQ ID NO: 273696 - RNA, 22 nt, Human
uccuggauuaauagggagcugu

SEQ ID NO: 273697 - RNA, 22 nt, Human
uaaacagagagugcaguuauag

SEQ ID NO: 273698 - RNA, 22 nt, Human
uaaacugcuucucucagucugu

SEQ ID NO: 273699 - RNA, 23 nt, Human
ggucacaugugagauuaaacuug

SEQ ID NO: 273700 - RNA, 22 nt, Human
ccaggcccguucccuucuccag

SEQ ID NO: 273701 - RNA, 22 nt, Human
uuucauuuugguuaugccauaa

SEQ ID NO: 273702 - RNA, 22 nt, Human
uagcuucuugagaaagggugcc

SEQ ID NO: 273703 - RNA, 22 nt, Human
ggaacugauuaagucaugagaa

SEQ ID NO: 273704 - RNA, 22 nt, Human
gagagcccucacuccuucccug

SEQ ID NO: 273705 - RNA, 22 nt, Human
uggaaucuguauguauguauaa

SEQ ID NO: 273706 - RNA, 23 nt, Human
uccuccugagugagagugccagc

SEQ ID NO: 273707 - RNA, 22 nt, Human
ccauccaggcugugggugagcu

SEQ ID NO: 273708 - RNA, 22 nt, Human
uugcaacagguguguuuuggug

SEQ ID NO: 273709 - RNA, 22 nt, Human
agcuggugugccacuguugggg

SEQ ID NO: 273710 - RNA, 19 nt, Human
acucaggcuuccucugagg

SEQ ID NO: 273711 - RNA, 22 nt, Human
cagggcugagucauauagccuu

SEQ ID NO: 273712 - RNA, 22 nt, Human
caaguuuuagaaauaucuggau

SEQ ID NO: 273713 - RNA, 22 nt, Human
ggccagagagccgcuguuagga

SEQ ID NO: 273714 - RNA, 22 nt, Human
cuggacucauccauagagguga

SEQ ID NO: 273715 - RNA, 22 nt, Human
caggcauggagaggcagagacu

SEQ ID NO: 273716 - RNA, 22 nt, Human
ugguaccagcuguguguucacu

SEQ ID NO: 273717 - RNA, 22 nt, Human
gcagauguucugugucucacaa

SEQ ID NO: 273718 - RNA, 22 nt, Human
cggcugaggaucuccaggccug

SEQ ID NO: 273719 - RNA, 22 nt, Human
uggagagaaaaaagacaguucu

SEQ ID NO: 273720 - RNA, 18 nt, Human
gaggaaacaaggcagagg

SEQ ID NO: 273721 - RNA, 22 nt, Human
uugaggaggacagaaacauuua

SEQ ID NO: 273722 - RNA, 19 nt, Human
ugagaaggcaguggggagc

SEQ ID NO: 273723 - RNA, 22 nt, Human
ugaaaggaagagggcuacuccu

SEQ ID NO: 273724 - RNA, 22 nt, Human
ucaguccauaggugggccugag

SEQ ID NO: 273725 - RNA, 22 nt, Human
cauuuuaccuagaagcugaaag

SEQ ID NO: 273726 - RNA, 22 nt, Human
guuuauacagugcaugguguua

SEQ ID NO: 273727 - RNA, 22 nt, Human
agggccucugacgcccccagcc

SEQ ID NO: 273728 - RNA, 19 nt, Human
uuucagacauuucaaauuu

SEQ ID NO: 273729 - RNA, 22 nt, Human
ggaacugaggaacgaacuggga

SEQ ID NO: 273730 - RNA, 22 nt, Human
agaaaucugacugcugugcaca

SEQ ID NO: 273731 - RNA, 22 nt, Human
agccuugacacuggggaaacug

SEQ ID NO: 273732 - RNA, 22 nt, Human
ggcugagacaaccugggaccca

SEQ ID NO: 273733 - RNA, 22 nt, Human
acuaauuguauaguugauguaa

SEQ ID NO: 273734 - RNA, 22 nt, Human
agagaagagucuugucaaauua

SEQ ID NO: 273735 - RNA, 22 nt, Human
uauauguagucagucagaguaa

SEQ ID NO: 273736 - RNA, 22 nt, Human
cugcccugugaggguccuuggg

SEQ ID NO: 273737 - RNA, 22 nt, Human
ugacaauagcgauuuaucuugc

SEQ ID NO: 273738 - RNA, 22 nt, Human
agagacaccgcgcaucauggcu

SEQ ID NO: 273739 - RNA, 19 nt, Human
ugugugcaaauggaagcca

SEQ ID NO: 273740 - RNA, 22 nt, Human
aaggugguuugauuaucccacu

SEQ ID NO: 273741 - RNA, 20 nt, Human
guggccucucacauucugag

SEQ ID NO: 273742 - RNA, 22 nt, Human
gggcaggugauuuuggcuccau

SEQ ID NO: 273743 - RNA, 21 nt, Human
augguagguggagcaggugau

SEQ ID NO: 273744 - RNA, 22 nt, Human
acucagagaacauucccagucu

SEQ ID NO: 273745 - RNA, 22 nt, Human
gaccugccugagcugccucugc

SEQ ID NO: 273746 - RNA, 22 nt, Human
gguccuggaaguguaaguggca

SEQ ID NO: 273747 - RNA, 22 nt, Human
aguuauuuuggaaaaugaguca

SEQ ID NO: 273748 - RNA, 22 nt, Human
cagcgcaggcgugugaaggcgc

SEQ ID NO: 273749 - RNA, 22 nt, Human
caugucaauaaauauaacugca

SEQ ID NO: 273750 - RNA, 22 nt, Human
guuauuuauaagguguaacucc

SEQ ID NO: 273751 - RNA, 22 nt, Human
ggcugaguugagaggauuacuu

SEQ ID NO: 273752 - RNA, 22 nt, Human
uaggcugagguugaugccaggg

SEQ ID NO: 273753 - RNA, 22 nt, Human
ugggcucauggcccagcacugg

SEQ ID NO: 273754 - RNA, 22 nt, Human
cccugggauucaauuucacucu

SEQ ID NO: 273755 - RNA, 22 nt, Human
uccacaucuagguuugucaaca

SEQ ID NO: 273756 - RNA, 22 nt, Human
agggaugauggaaagaagcagg

SEQ ID NO: 273757 - RNA, 22 nt, Human
uucugcugaaaacagccaugua

SEQ ID NO: 273758 - RNA, 16 nt, Human
uuuauuuacuaguguu

SEQ ID NO: 273759 - RNA, 22 nt, Human
acauuuacagugcuagacaauc

SEQ ID NO: 273760 - RNA, 22 nt, Human
uuugcauuucuaaugagcuccg

SEQ ID NO: 273761 - RNA, 22 nt, Human
uacuccagacauucuguccucg

SEQ ID NO: 273762 - RNA, 22 nt, Human
ggagcagggaauuacagcgcag

SEQ ID NO: 273763 - RNA, 22 nt, Human
ccugagcauuagacauccauca

SEQ ID NO: 273764 - RNA, 22 nt, Human
uuggaggacuaguuaagagacc

SEQ ID NO: 273765 - RNA, 22 nt, Human
auuuugauguaucuuuguagcu

SEQ ID NO: 273766 - RNA, 18 nt, Human
gcccagaggucugggccc

SEQ ID NO: 273767 - RNA, 22 nt, Human
ggcuucccagucccugcucuca

SEQ ID NO: 273768 - RNA, 22 nt, Human
aaauguuuugcucccauguggu

SEQ ID NO: 273769 - RNA, 22 nt, Human
cagugcuguguuugcugccugg

SEQ ID NO: 273770 - RNA, 22 nt, Human
ugaguccgaaguugcagugagc

SEQ ID NO: 273771 - RNA, 22 nt, Human
uuggcccagggucagcggcgcu

SEQ ID NO: 273772 - RNA, 22 nt, Human
auucauguaaaauuggauagac

SEQ ID NO: 273773 - RNA, 22 nt, Human
agcuguggcagcagccguggca

SEQ ID NO: 273774 - RNA, 22 nt, Human
aucuugggaauuuuccaggagu

SEQ ID NO: 273775 - RNA, 22 nt, Human
gcccucagcuccuggacacaug

SEQ ID NO: 273776 - RNA, 22 nt, Human
aagucuaaccuauuccgguguu

SEQ ID NO: 273777 - RNA, 22 nt, Human
cugugcaguggggcucuggguu

SEQ ID NO: 273778 - RNA, 22 nt, Human
acaggcagguccugucccagcu

SEQ ID NO: 273779 - RNA, 22 nt, Human
agaggacacaucuuuccucaaa

SEQ ID NO: 273780 - RNA, 22 nt, Human
agcuuguuaaacagccuccacu

SEQ ID NO: 273781 - RNA, 22 nt, Human
uaucuugugcagaugaaagaau

SEQ ID NO: 273782 - RNA, 22 nt, Human
uggcuuccuguuucccagaaag

SEQ ID NO: 273783 - RNA, 22 nt, Human
gccugugucauguaguagcuuc

SEQ ID NO: 273784 - RNA, 22 nt, Human
acagaacugggaaaugcacaua

SEQ ID NO: 273785 - RNA, 22 nt, Human
aacauugaauuuaaaauacagu

SEQ ID NO: 273786 - RNA, 22 nt, Human
uugcaaaucagaaguauagauu

SEQ ID NO: 273787 - RNA, 22 nt, Human
aguuagcagcuuauuagaaaca

SEQ ID NO: 273788 - RNA, 22 nt, Human
cuccgcagcgggccaauccgga

SEQ ID NO: 273789 - RNA, 22 nt, Human
acagagagaaacaaucagcagc

SEQ ID NO: 273790 - RNA, 22 nt, Human
ucccugggcggacauucuccca

SEQ ID NO: 273791 - RNA, 21 nt, Human
uucuccaggcaaccauuucag

SEQ ID NO: 273792 - RNA, 22 nt, Human
cucacagcagcucugcgagaua

SEQ ID NO: 273793 - RNA, 22 nt, Human
aacagugauaucaagacagaca

SEQ ID NO: 273794 - RNA, 22 nt, Human
uggucccuaaagaugucuacau

SEQ ID NO: 273795 - RNA, 22 nt, Human
auaacauggaguuugucauuua

SEQ ID NO: 273796 - RNA, 22 nt, Human
acucugugugaguagagccugu

SEQ ID NO: 273797 - RNA, 22 nt, Human
uaacuugguuggugggcaggag

SEQ ID NO: 273798 - RNA, 22 nt, Human
uuuguuuauuaggggagaguug

SEQ ID NO: 273799 - RNA, 19 nt, Human
uaaguguuggugaauuucu

SEQ ID NO: 273800 - RNA, 22 nt, Human
uaauuucaauagcuugcauaau

SEQ ID NO: 273801 - RNA, 22 nt, Human
ccagugcagucccccugaacug

SEQ ID NO: 273802 - RNA, 22 nt, Human
agauaggagccaggacuuaaca

SEQ ID NO: 273803 - RNA, 20 nt, Human
aguuuauuccaggagaacug

SEQ ID NO: 273804 - RNA, 22 nt, Human
gaacuauaucuucaagaaaaug

SEQ ID NO: 273805 - RNA, 22 nt, Human
caaaugaagagggcaacuucug

SEQ ID NO: 273806 - RNA, 22 nt, Human
ucaagucuggagaucuggaacu

SEQ ID NO: 273807 - RNA, 22 nt, Human
uccuaggccuggccugguggau

SEQ ID NO: 273808 - RNA, 22 nt, Human
ggcugcagcccucgccuagcca

SEQ ID NO: 273809 - RNA, 22 nt, Human
ugcugaggacaccuagccuucu

SEQ ID NO: 273810 - RNA, 22 nt, Human
ugucucugaaauauguggcucc

SEQ ID NO: 273811 - RNA, 22 nt, Human
gccagagcugagugagguucuu

SEQ ID NO: 273812 - RNA, 22 nt, Human
cacagaggugauaguggucaag

SEQ ID NO: 273813 - RNA, 22 nt, Human
accugaggcuguuagucuaggu

SEQ ID NO: 273814 - RNA, 22 nt, Human
uauuuauucauucagcaagcau

SEQ ID NO: 273815 - RNA, 22 nt, Human
gcugauuuugucacauagcaag

SEQ ID NO: 273816 - RNA, 22 nt, Human
uccuggcccgaucccugugaag

SEQ ID NO: 273817 - RNA, 22 nt, Human
aaugaaacuguauauagacugu

SEQ ID NO: 273818 - RNA, 22 nt, Human
gcgcucaggugccaggccugcg

SEQ ID NO: 273819 - RNA, 22 nt, Human
auucacaaugauacauaagcga

SEQ ID NO: 273820 - RNA, 22 nt, Human
ggcuccugcaccugucccucug

SEQ ID NO: 273821 - RNA, 22 nt, Human
uuuggacauguugagucugaua

SEQ ID NO: 273822 - RNA, 18 nt, Human
aggaaagacgaagagggc

SEQ ID NO: 273823 - RNA, 22 nt, Human
ggcuguagguuggugcuggaca

SEQ ID NO: 273824 - RNA, 22 nt, Human
ucaaaaauguuuuauauuggua

SEQ ID NO: 273825 - RNA, 22 nt, Human
gugugggaaggcuaggaugcug

SEQ ID NO: 273826 - RNA, 22 nt, Human
aacugucuaaggagaauaugaa

SEQ ID NO: 273827 - RNA, 22 nt, Human
agacaucauguuacagauuaag

SEQ ID NO: 273828 - RNA, 22 nt, Human
agagcccuggagggcagucccg

SEQ ID NO: 273829 - RNA, 22 nt, Human
cccaagccuuucaaaacucaga

SEQ ID NO: 273830 - RNA, 22 nt, Human
aggcggcugguguccugcaggu

SEQ ID NO: 273831 - RNA, 18 nt, Human
ggcaugugagugcugagg

SEQ ID NO: 273832 - RNA, 22 nt, Human
ucagcaggcccauccuccaggc

SEQ ID NO: 273833 - RNA, 22 nt, Human
ugucaugguagcugaaggaugu

SEQ ID NO: 273834 - RNA, 22 nt, Human
gugugggaggaaggugaacaga

SEQ ID NO: 273835 - RNA, 22 nt, Human
ucaaaggagacacaaggagaaa

SEQ ID NO: 273836 - RNA, 17 nt, Human
ggagacagggucuuuaa

SEQ ID NO: 273837 - RNA, 22 nt, Human
cuuaggaagcuuuugaggacaa

SEQ ID NO: 273838 - RNA, 19 nt, Human
gcugggugggguccacagc

SEQ ID NO: 273839 - RNA, 22 nt, Human
uacauuccugggcuccacccua

SEQ ID NO: 273840 - RNA, 22 nt, Human
acaguuaaucaaauggcauaug

SEQ ID NO: 273841 - RNA, 22 nt, Human
guuaugauggcaccacugcacu

SEQ ID NO: 273842 - RNA, 22 nt, Human
ugucagugccaacuuugcuggu

SEQ ID NO: 273843 - RNA, 21 nt, Human
ugggccugauucccaggguca

SEQ ID NO: 273844 - RNA, 22 nt, Human
aguuaacacaaguaagauucca

SEQ ID NO: 273845 - RNA, 22 nt, Human
caggcauaucuacauuauccaa

SEQ ID NO: 273846 - RNA, 22 nt, Human
acagggcaccugagguaggaag

SEQ ID NO: 273847 - RNA, 22 nt, Human
aggaugagaagauuggaaucuu

SEQ ID NO: 273848 - RNA, 22 nt, Human
acuauaaaaggauaaaccagaa

SEQ ID NO: 273849 - RNA, 22 nt, Human
ucagauggauucauuacaugac

SEQ ID NO: 273850 - RNA, 22 nt, Human
uucaaaugcaaguuacuacuuu

SEQ ID NO: 273851 - RNA, 22 nt, Human
agaugguuaucuuuucuuugua

SEQ ID NO: 273852 - RNA, 19 nt, Human
uuuuuaaugggcuggagca

SEQ ID NO: 273853 - RNA, 22 nt, Human
acucaggcuucaggcacagcug

SEQ ID NO: 273854 - RNA, 22 nt, Human
ugcagguggauucaauguggga

SEQ ID NO: 273855 - RNA, 22 nt, Human
agggagaguagauaucaggugu

SEQ ID NO: 273856 - RNA, 22 nt, Human
cagucagggacaccagcuagga

SEQ ID NO: 273857 - RNA, 22 nt, Human
gcucaggccucggacacacaau

SEQ ID NO: 273858 - RNA, 22 nt, Human
ugccuucucccuuggacccuga

SEQ ID NO: 273859 - RNA, 22 nt, Human
agucuggucuguucauggguca

SEQ ID NO: 273860 - RNA, 21 nt, Human
ucuccagagugggaggaaauc

SEQ ID NO: 273861 - RNA, 22 nt, Human
uccagcccaggcuggaguguag

SEQ ID NO: 273862 - RNA, 22 nt, Human
cccuggcaugcaugucccuggc

SEQ ID NO: 273863 - RNA, 22 nt, Human
gcuucaggguuaugcaagagug

SEQ ID NO: 273864 - RNA, 23 nt, Human
cagaagcaccuguugacugcugc

SEQ ID NO: 273865 - RNA, 22 nt, Human
agcagagcugcaguggccugcu

SEQ ID NO: 273866 - RNA, 19 nt, Human
uccucugguaccacccuug

SEQ ID NO: 273867 - RNA, 22 nt, Human
auauaauucucagguuugacua

SEQ ID NO: 273868 - RNA, 22 nt, Human
aacaggcucacucugacuucua

SEQ ID NO: 273869 - RNA, 22 nt, Human
uucauguuucauuuguuacuau

SEQ ID NO: 273870 - RNA, 23 nt, Human
ccaagcuugucccugccugcuuu

SEQ ID NO: 273871 - RNA, 22 nt, Human
guuugcauggaagacagugagu

SEQ ID NO: 273872 - RNA, 22 nt, Human
ugacccaucaggccacaugagg

SEQ ID NO: 273873 - RNA, 22 nt, Human
ucacacuuagagcgaauuguuu

SEQ ID NO: 273874 - RNA, 18 nt, Human
acacugcagcagucugcu

SEQ ID NO: 273875 - RNA, 22 nt, Human
cugggagaucuguugggacugg

SEQ ID NO: 273876 - RNA, 22 nt, Human
uaccugaauuaccaaaagcuuu

SEQ ID NO: 273877 - RNA, 22 nt, Human
cugagccuugaugucccuuguc

SEQ ID NO: 273878 - RNA, 22 nt, Human
agagugcucagaugcaugucuu

SEQ ID NO: 273879 - RNA, 22 nt, Human
gcacggcaagacggggccuccu

SEQ ID NO: 273880 - RNA, 20 nt, Human
ucuucuguugccuuguucug

SEQ ID NO: 273881 - RNA, 22 nt, Human
gacuuuauuacuaacccuguga

SEQ ID NO: 273882 - RNA, 22 nt, Human
ucuucaguauuuggauaacauu

SEQ ID NO: 273883 - RNA, 22 nt, Human
cuguugucuucauugucauauc

SEQ ID NO: 273884 - RNA, 22 nt, Human
gagcuggaggcagugcugaggu

SEQ ID NO: 273885 - RNA, 22 nt, Human
aacagcuucaucacauggcaua

SEQ ID NO: 273886 - RNA, 22 nt, Human
cagcuccaaagccccacugucc

SEQ ID NO: 273887 - RNA, 22 nt, Human
gugcacagauucagagguuuug

SEQ ID NO: 273888 - RNA, 22 nt, Human
auaaaaguucaagagaguacag

SEQ ID NO: 273889 - RNA, 22 nt, Human
cagcaucuggauuuccuccacu

SEQ ID NO: 273890 - RNA, 22 nt, Human
ccagagccucuuaugaagaucg

SEQ ID NO: 273891 - RNA, 22 nt, Human
agcugcugcaaguggugcuaac

SEQ ID NO: 273892 - RNA, 22 nt, Human
uggcuuccuaaacugauuucca

SEQ ID NO: 273893 - RNA, 22 nt, Human
ucucaacuuugagaaacauugu

SEQ ID NO: 273894 - RNA, 22 nt, Human
aggcuucuaaaucacaaggaaa

SEQ ID NO: 273895 - RNA, 22 nt, Human
cccagggaaugacucuggccuu

SEQ ID NO: 273896 - RNA, 22 nt, Human
uuuaguuuuaacugaaagcuau

SEQ ID NO: 273897 - RNA, 22 nt, Human
cugagccuccauuucaucaggu

SEQ ID NO: 273898 - RNA, 22 nt, Human
gcuucuuuggcaacccugacau

SEQ ID NO: 273899 - RNA, 22 nt, Human
aggcucuguuugcugugguacc

SEQ ID NO: 273900 - RNA, 22 nt, Human
agagccaggcggcugggcaccu

SEQ ID NO: 273901 - RNA, 22 nt, Human
augcuaaugagcuaaggagucc

SEQ ID NO: 273902 - RNA, 22 nt, Human
caaagcaagggcugaagacucc

SEQ ID NO: 273903 - RNA, 22 nt, Human
uuggccaacauggugaaacccc

SEQ ID NO: 273904 - RNA, 22 nt, Human
gacccugauaggaguagaagaa

SEQ ID NO: 273905 - RNA, 22 nt, Human
ugcuggcugggcugcuggagac

SEQ ID NO: 273906 - RNA, 22 nt, Human
cuuucucuucagcacccagccc

SEQ ID NO: 273907 - RNA, 22 nt, Human
uggcacucacucucagagucug

SEQ ID NO: 273908 - RNA, 22 nt, Human
uguccagguggccucugcugcu

SEQ ID NO: 273909 - RNA, 22 nt, Human
uaagaacuucggacauguuauc

SEQ ID NO: 273910 - RNA, 22 nt, Human
uuuugaauaauucagaaacagc

SEQ ID NO: 273911 - RNA, 22 nt, Human
uuaaagcugagcccucagaagc

SEQ ID NO: 273912 - RNA, 22 nt, Human
gaggucugggcuugggccuggu

SEQ ID NO: 273913 - RNA, 22 nt, Human
uucuccugcgcaggcccaggga

SEQ ID NO: 273914 - RNA, 22 nt, Human
gcuccaggccacggcuucuugg

SEQ ID NO: 273915 - RNA, 22 nt, Human
cagacuggccacaucugcacug

SEQ ID NO: 273916 - RNA, 22 nt, Human
ugccagauuguggcauggcacu

SEQ ID NO: 273917 - RNA, 22 nt, Human
aguuagaauagucagauuguag

SEQ ID NO: 273918 - RNA, 22 nt, Human
accagcugccuuuucuuaguag

SEQ ID NO: 273919 - RNA, 22 nt, Human
ugaacauugucacauuccuagc

SEQ ID NO: 273920 - RNA, 22 nt, Human
ggaauguuuuccagaccuagau

SEQ ID NO: 273921 - RNA, 22 nt, Human
auuaaaugguggucauucauuu

SEQ ID NO: 273922 - RNA, 22 nt, Human
acugagcaguagauuuucuguu

SEQ ID NO: 273923 - RNA, 22 nt, Human
ccuguucacccuccaugcacag

SEQ ID NO: 273924 - RNA, 22 nt, Human
ggucaacacugugaccaacagg

SEQ ID NO: 273925 - RNA, 22 nt, Human
ccuaaggaccagggcuuccagc

SEQ ID NO: 273926 - RNA, 22 nt, Human
gaucugguuucaucauggacuu

SEQ ID NO: 273927 - RNA, 22 nt, Human
ggcugcaggaugcccagccgug

SEQ ID NO: 273928 - RNA, 22 nt, Human
cuagagaagaggcucagccagc

SEQ ID NO: 273929 - RNA, 22 nt, Human
uugcugggcucuucaacacaca

SEQ ID NO: 273930 - RNA, 22 nt, Human
uacagacauuuacuccacuccu

SEQ ID NO: 273931 - RNA, 22 nt, Human
uuguacaaaggauuuggaagag

SEQ ID NO: 273932 - RNA, 22 nt, Human
ucaugaacaucucaaauaacca

SEQ ID NO: 273933 - RNA, 22 nt, Human
ugcuuuauuggaaccucauccu

SEQ ID NO: 273934 - RNA, 22 nt, Human
gaguauuuauauguaaguaccu

SEQ ID NO: 273935 - RNA, 18 nt, Human
gccugagggucaagugug

SEQ ID NO: 273936 - RNA, 22 nt, Human
ccaaguacucucaccaaagcuu

SEQ ID NO: 273937 - RNA, 21 nt, Human
agcaggcuuuggaguggggcu

SEQ ID NO: 273938 - RNA, 22 nt, Human
cugggcagugguggcccuuccc

SEQ ID NO: 273939 - RNA, 22 nt, Human
cagggcuuugaacaggcaucaa

SEQ ID NO: 273940 - RNA, 22 nt, Human
gcuaggagccgcugcacuaggu

SEQ ID NO: 273941 - RNA, 22 nt, Human
ccugcugucucugggcaggcag

SEQ ID NO: 273942 - RNA, 22 nt, Human
uccaaauauagaugaguuguaa

SEQ ID NO: 273943 - RNA, 22 nt, Human
gacccaggaagcuacuucuggu

SEQ ID NO: 273944 - RNA, 22 nt, Human
uuuaaauuuguguuuagagggu

SEQ ID NO: 273945 - RNA, 22 nt, Human
cuauuguuauaauuguugacau

SEQ ID NO: 273946 - RNA, 22 nt, Human
aggcuugccacuuguuagucua

SEQ ID NO: 273947 - RNA, 22 nt, Human
uuauccaacaugacuuaugucc

SEQ ID NO: 273948 - RNA, 22 nt, Human
guucaaaucucaggacuucaga

SEQ ID NO: 273949 - RNA, 22 nt, Human
gaccaggcuguuccagucuaac

SEQ ID NO: 273950 - RNA, 22 nt, Human
agcuggguacugaugucuucag

SEQ ID NO: 273951 - RNA, 22 nt, Human
cagaugagaguggccaggguuc

SEQ ID NO: 273952 - RNA, 22 nt, Human
cagagacccuaggcaggugaca

SEQ ID NO: 273953 - RNA, 22 nt, Human
aggcaggugcuuaugacuugcu

SEQ ID NO: 273954 - RNA, 22 nt, Human
aucuuguuaaagugcagauuuu

SEQ ID NO: 273955 - RNA, 22 nt, Human
ucugccuuguuugagcuuugac

SEQ ID NO: 273956 - RNA, 19 nt, Human
aaaaagaggcuauaauauu

SEQ ID NO: 273957 - RNA, 22 nt, Human
augcagggaaaagagauauuau

SEQ ID NO: 273958 - RNA, 22 nt, Human
aauucacaggagguauuugucc

SEQ ID NO: 273959 - RNA, 22 nt, Human
ucaguuaagcacuauacccuaa

SEQ ID NO: 273960 - RNA, 22 nt, Human
auucagucaaaaaugauggaga

SEQ ID NO: 273961 - RNA, 22 nt, Human
ugucagcaugaacccugaauua

SEQ ID NO: 273962 - RNA, 22 nt, Human
gacacagagauaggccuguguu

SEQ ID NO: 273963 - RNA, 22 nt, Human
ucucugaagaaucgaugauucu

SEQ ID NO: 273964 - RNA, 22 nt, Human
auauugagauaagaacugacau

SEQ ID NO: 273965 - RNA, 22 nt, Human
acccagcuaacccuacccugga

SEQ ID NO: 273966 - RNA, 22 nt, Human
cuuuagaauuugauauaaucaa

SEQ ID NO: 273967 - RNA, 22 nt, Human
acuuuggaauaagcuauauaac

SEQ ID NO: 273968 - RNA, 22 nt, Human
aaguguuuacuuaaagucaugg

SEQ ID NO: 273969 - RNA, 22 nt, Human
gcuuccuaaaugcacagggcag

SEQ ID NO: 273970 - RNA, 22 nt, Human
ucuggcagcagcaucaguggcu

SEQ ID NO: 273971 - RNA, 22 nt, Human
auugguauguauucugaaaacu

SEQ ID NO: 273972 - RNA, 22 nt, Human
gccagguugcugacgacgaucu

SEQ ID NO: 273973 - RNA, 22 nt, Human
uuaggaaugagauuucuaguga

SEQ ID NO: 273974 - RNA, 22 nt, Human
gagcuccuggauugcuccuagg

SEQ ID NO: 273975 - RNA, 22 nt, Human
guuaggaacacuggagccuaaa

SEQ ID NO: 273976 - RNA, 22 nt, Human
uggaaggggagcuggaaagggg

SEQ ID NO: 273977 - RNA, 22 nt, Human
ucuuaaugaaagugaaauauca

SEQ ID NO: 273978 - RNA, 22 nt, Human
agucugcaggaccgcgucacau

SEQ ID NO: 273979 - RNA, 20 nt, Human
uccaggcagcucagaguguc

SEQ ID NO: 273980 - RNA, 22 nt, Human
ggaagaggcugaggccaugcug

SEQ ID NO: 273981 - RNA, 19 nt, Human
gucuagaccaggcuccuua

SEQ ID NO: 273982 - RNA, 21 nt, Human
uaggacagccccccugcccuc

SEQ ID NO: 273983 - RNA, 22 nt, Human
uacuaguucucauaugaaauaa

SEQ ID NO: 273984 - RNA, 17 nt, Human
accaggcaacacgccca

SEQ ID NO: 273985 - RNA, 22 nt, Human
uuacugaaauaaugaaacacau

SEQ ID NO: 273986 - RNA, 22 nt, Human
ucccacaccugucuauuccuag

SEQ ID NO: 273987 - RNA, 22 nt, Human
ucuuugcaacucccauuuccau

SEQ ID NO: 273988 - RNA, 22 nt, Human
uuagaagugguaaguagaaaga

SEQ ID NO: 273989 - RNA, 22 nt, Human
gggcuggagagucccacguggg

SEQ ID NO: 273990 - RNA, 22 nt, Human
gcuucucucaggagcaucagcc

SEQ ID NO: 273991 - RNA, 17 nt, Human
aauugcuuguacuccca

SEQ ID NO: 273992 - RNA, 22 nt, Human
auccaguucucagugcuuacag

SEQ ID NO: 273993 - RNA, 22 nt, Human
aucucuagcuaacccucuggca

SEQ ID NO: 273994 - RNA, 22 nt, Human
cugucccagccccguacucuaa

SEQ ID NO: 273995 - RNA, 22 nt, Human
agggccaaguccaggaccucgg

SEQ ID NO: 273996 - RNA, 22 nt, Human
uuauguguguguauacauacaa

SEQ ID NO: 273997 - RNA, 22 nt, Human
cuuuggaaggaacaggauucuc

SEQ ID NO: 273998 - RNA, 22 nt, Human
gacagacacuguguccucacuu

SEQ ID NO: 273999 - RNA, 23 nt, Human
aggucuggacccuuggccccugc

SEQ ID NO: 274000 - RNA, 19 nt, Human
uugcuggagaaaaaggaga

SEQ ID NO: 274001 - RNA, 22 nt, Human
guuugugucaaugacuucugca

SEQ ID NO: 274002 - RNA, 22 nt, Human
agcagcuguggggacaagggua

SEQ ID NO: 274003 - RNA, 22 nt, Human
ccugucaggguuugccucagaa

SEQ ID NO: 274004 - RNA, 22 nt, Human
gcucaggaaggcucaaccagga

SEQ ID NO: 274005 - RNA, 22 nt, Human
auucuagauaagaaaagggcug

SEQ ID NO: 274006 - RNA, 22 nt, Human
uuugaaaggguuaugagacuga

SEQ ID NO: 274007 - RNA, 22 nt, Human
uagcaucagccacaccuuguac

SEQ ID NO: 274008 - RNA, 22 nt, Human
ucugccuuuucacugccacuaa

SEQ ID NO: 274009 - RNA, 22 nt, Human
ccucagucuccgugcucaccuu

SEQ ID NO: 274010 - RNA, 22 nt, Human
agaaaucucuagcacaucgaau

SEQ ID NO: 274011 - RNA, 22 nt, Human
aaauuucuggaagugucagagu

SEQ ID NO: 274012 - RNA, 22 nt, Human
ccagcaggaaagugacguuuga

SEQ ID NO: 274013 - RNA, 22 nt, Human
acagcacaaucugagucccaga

SEQ ID NO: 274014 - RNA, 22 nt, Human
aaugucuucccuggcaggccaa

SEQ ID NO: 274015 - RNA, 22 nt, Human
agagugggccucugagucccag

SEQ ID NO: 274016 - RNA, 22 nt, Human
uagcaacaagugacuaucuaua

SEQ ID NO: 274017 - RNA, 22 nt, Human
uaccugcacagccagccaugug

SEQ ID NO: 274018 - RNA, 22 nt, Human
ggacaguugguugggcucuugu

SEQ ID NO: 274019 - RNA, 17 nt, Human
aaucagauuucugagga

SEQ ID NO: 274020 - RNA, 22 nt, Human
ugauuuugucauguuucugaua

SEQ ID NO: 274021 - RNA, 22 nt, Human
agugacuucuccuaaugucaua

SEQ ID NO: 274022 - RNA, 22 nt, Human
ucagagcaugugggcugcaguu

SEQ ID NO: 274023 - RNA, 22 nt, Human
cauuuuaaaugauuuaagccaa

SEQ ID NO: 274024 - RNA, 22 nt, Human
acugggccaggugugggugagu

SEQ ID NO: 274025 - RNA, 22 nt, Human
ucaaaugcugccuuugugugcc

SEQ ID NO: 274026 - RNA, 22 nt, Human
caugcccauugagaagggccuc

SEQ ID NO: 274027 - RNA, 22 nt, Human
gaggcugagacucugaauuuuu

SEQ ID NO: 274028 - RNA, 22 nt, Human
gaaaugaaauagcaccaagguu

SEQ ID NO: 274029 - RNA, 22 nt, Human
cauguuaaugaauuuuugcagu

SEQ ID NO: 274030 - RNA, 22 nt, Human
cagagccagucagucagaaacu

SEQ ID NO: 274031 - RNA, 20 nt, Human
caggugagcagaucugggug

SEQ ID NO: 274032 - RNA, 22 nt, Human
ccuggggcucaagauggcgccg

SEQ ID NO: 274033 - RNA, 22 nt, Human
aauggcagaggcaaagauggua

SEQ ID NO: 274034 - RNA, 22 nt, Human
aucucagaaacauaucuaaucc

SEQ ID NO: 274035 - RNA, 22 nt, Human
ugaguggguuaucaggaaaggu

SEQ ID NO: 274036 - RNA, 21 nt, Human
ugcaggagucugugagucagg

SEQ ID NO: 274037 - RNA, 22 nt, Human
gaaaaucugcuuauauuauuuu

SEQ ID NO: 274038 - RNA, 22 nt, Human
ggacccugggcagcuggcugcu

SEQ ID NO: 274039 - RNA, 22 nt, Human
uuccaggcuauccggugaaggg

SEQ ID NO: 274040 - RNA, 22 nt, Human
gaguaggguuuccagguuagag

SEQ ID NO: 274041 - RNA, 23 nt, Human
agcagcccagaugccuuccaucc

SEQ ID NO: 274042 - RNA, 22 nt, Human
ggucaguggcaggggguacuuc

SEQ ID NO: 274043 - RNA, 22 nt, Human
ccccagcacaggcuccucagau

SEQ ID NO: 274044 - RNA, 22 nt, Human
cugccucucaggucccugagau

SEQ ID NO: 274045 - RNA, 22 nt, Human
uagcaucuugauuucagaccag

SEQ ID NO: 274046 - RNA, 22 nt, Human
ccuggcucuguccucgcgcaaa

SEQ ID NO: 274047 - RNA, 22 nt, Human
cuccugcugaauggccaggagc

SEQ ID NO: 274048 - RNA, 22 nt, Human
acaauagucaaugcacgucauu

SEQ ID NO: 274049 - RNA, 22 nt, Human
ucccagagaaagucaaggucuu

SEQ ID NO: 274050 - RNA, 22 nt, Human
agccuggaguucccaggagaag

SEQ ID NO: 274051 - RNA, 22 nt, Human
agcaggagcccuuaucaccagg

SEQ ID NO: 274052 - RNA, 22 nt, Human
ucugucauaaacacacacaagc

SEQ ID NO: 274053 - RNA, 22 nt, Human
uguucuuuggcuucacagcucu

SEQ ID NO: 274054 - RNA, 18 nt, Human
ucccuggggcugccaccc

SEQ ID NO: 274055 - RNA, 22 nt, Human
agcagggccugagugaccuaac

SEQ ID NO: 274056 - RNA, 22 nt, Human
aucagcugcuacauuggccucu

SEQ ID NO: 274057 - RNA, 21 nt, Human
agacacugguuuagcauucau

SEQ ID NO: 274058 - RNA, 21 nt, Human
cuuggaacggguagaacucac

SEQ ID NO: 274059 - RNA, 22 nt, Human
ucauguuuuagcugcaaaauga

SEQ ID NO: 274060 - RNA, 22 nt, Human
agcaagauugaggcuuccucag

SEQ ID NO: 274061 - RNA, 22 nt, Human
ugguggcaucaauugacuucuc

SEQ ID NO: 274062 - RNA, 22 nt, Human
uuauuauugauucgcucucaaa

SEQ ID NO: 274063 - RNA, 22 nt, Human
guccauggcagagcccuucugc

SEQ ID NO: 274064 - RNA, 22 nt, Human
uucuuuaugcuucuguuuaggc

SEQ ID NO: 274065 - RNA, 22 nt, Human
guccagagauggacgagcagau

SEQ ID NO: 274066 - RNA, 22 nt, Human
gcagcuuuagaaacaagggcug

SEQ ID NO: 274067 - RNA, 22 nt, Human
uacagugcaaugugauguagau

SEQ ID NO: 274068 - RNA, 22 nt, Human
gugugcugagugacugucauca

SEQ ID NO: 274069 - RNA, 22 nt, Human
guggcaggaucacggcucacug

SEQ ID NO: 274070 - RNA, 22 nt, Human
gauggccuggguccccuuccgg

SEQ ID NO: 274071 - RNA, 21 nt, Human
ggaugccacgaagcaccagga

SEQ ID NO: 274072 - RNA, 22 nt, Human
uucuaccuacccucugcauaca

SEQ ID NO: 274073 - RNA, 22 nt, Human
ggucacuggucucugcuuccau

SEQ ID NO: 274074 - RNA, 22 nt, Human
aguaucagaugugauuaaaggg

SEQ ID NO: 274075 - RNA, 22 nt, Human
caugagcauuuuggucuaguuu

SEQ ID NO: 274076 - RNA, 22 nt, Human
uuggggaaggcuucccuguacc

SEQ ID NO: 274077 - RNA, 22 nt, Human
caucuuuguucuguaaacuuuu

SEQ ID NO: 274078 - RNA, 22 nt, Human
uccuggcaguaauuugauguug

SEQ ID NO: 274079 - RNA, 20 nt, Human
cagcuuggaugagaggcuga

SEQ ID NO: 274080 - RNA, 22 nt, Human
aacuagaacgucuaguugcugg

SEQ ID NO: 274081 - RNA, 22 nt, Human
ucaaaggcauugccaauaagua

SEQ ID NO: 274082 - RNA, 22 nt, Human
gugcugagauuggagugagcag

SEQ ID NO: 274083 - RNA, 22 nt, Human
ugcuccaggcugcugaagaucu

SEQ ID NO: 274084 - RNA, 22 nt, Human
caaagucauggggaugcagguc

SEQ ID NO: 274085 - RNA, 22 nt, Human
ccagcuccacugucagaugaga

SEQ ID NO: 274086 - RNA, 22 nt, Human
caagauuuuaucuccguuucug

SEQ ID NO: 274087 - RNA, 22 nt, Human
aacagcugcuucaguacuugaa

SEQ ID NO: 274088 - RNA, 22 nt, Human
cucugugggaagcuggguguga

SEQ ID NO: 274089 - RNA, 22 nt, Human
aacaauguguucagcacugugg

SEQ ID NO: 274090 - RNA, 19 nt, Human
acauggcucuccagucugg

SEQ ID NO: 274091 - RNA, 22 nt, Human
uccagggagcaagucaggccgg

SEQ ID NO: 274092 - RNA, 21 nt, Human
ccugggugggaccccucuucc

SEQ ID NO: 274093 - RNA, 22 nt, Human
ccuggcucuagaggccacuccu

SEQ ID NO: 274094 - RNA, 23 nt, Human
agacacauaggagcagcuauugg

SEQ ID NO: 274095 - RNA, 22 nt, Human
ucagagcccugcuccuccccaa

SEQ ID NO: 274096 - RNA, 22 nt, Human
acagaauuaucaggaaauguua

SEQ ID NO: 274097 - RNA, 22 nt, Human
augaguaagaccauaauuuuug

SEQ ID NO: 274098 - RNA, 22 nt, Human
uccaggcuggagugcaguggca

SEQ ID NO: 274099 - RNA, 18 nt, Human
acaaauguagugucuuaa

SEQ ID NO: 274100 - RNA, 22 nt, Human
gagagcuggauucuggauaggu

SEQ ID NO: 274101 - RNA, 22 nt, Human
uccuccagaaacugaggcagaa

SEQ ID NO: 274102 - RNA, 22 nt, Human
auacacauguuauuguggaagc

SEQ ID NO: 274103 - RNA, 22 nt, Human
acuagaaaauuccuagaaacua

SEQ ID NO: 274104 - RNA, 22 nt, Human
gcuggcuggaaugggagaagaa

SEQ ID NO: 274105 - RNA, 22 nt, Human
cugccuuugaaaguucuguuga

SEQ ID NO: 274106 - RNA, 22 nt, Human
aaaacuuagcuaggcaaguuuu

SEQ ID NO: 274107 - RNA, 22 nt, Human
uugacacagaucaauauucaac

SEQ ID NO: 274108 - RNA, 22 nt, Human
uggcuuccugcauggauccucu

SEQ ID NO: 274109 - RNA, 22 nt, Human
agcuggagaauaggaauuagug

SEQ ID NO: 274110 - RNA, 22 nt, Human
acauuucuaguuguucaucucc

SEQ ID NO: 274111 - RNA, 22 nt, Human
agugacucacacaaacaugugu

SEQ ID NO: 274112 - RNA, 22 nt, Human
uuugcaaauaaauaagugcucg

SEQ ID NO: 274113 - RNA, 21 nt, Human
aggacagauguaggaauaaag

SEQ ID NO: 274114 - RNA, 22 nt, Human
cuuagcuuguuuucaccuaaga

SEQ ID NO: 274115 - RNA, 22 nt, Human
ugguccaguaaggguggagaga

SEQ ID NO: 274116 - RNA, 22 nt, Human
uagggcucuggugggcucuguu

SEQ ID NO: 274117 - RNA, 22 nt, Human
caagagcuuuagaaaugcucau

SEQ ID NO: 274118 - RNA, 22 nt, Human
cuccaggggccagaagccuggc

SEQ ID NO: 274119 - RNA, 22 nt, Human
acacaaguucuaaagauugcgc

SEQ ID NO: 274120 - RNA, 22 nt, Human
ccugagaauguuuaacagagaa

SEQ ID NO: 274121 - RNA, 21 nt, Human
aggcucccagaaaugggcauc

SEQ ID NO: 274122 - RNA, 22 nt, Human
aacagcagggaugacauggcca

SEQ ID NO: 274123 - RNA, 22 nt, Human
ugcaaacauccgacugaaagcc

SEQ ID NO: 274124 - RNA, 22 nt, Human
cuccucgaagcaaccugcaggc

SEQ ID NO: 274125 - RNA, 22 nt, Human
uucugugguugaaaggagagau

SEQ ID NO: 274126 - RNA, 22 nt, Human
aggggccaccuguggcacccug

SEQ ID NO: 274127 - RNA, 22 nt, Human
uaacauguuaagaaauuagaua

SEQ ID NO: 274128 - RNA, 22 nt, Human
uggaggucgcgcgggugcugca

SEQ ID NO: 274129 - RNA, 19 nt, Human
cugaggugcaguaagaggc

SEQ ID NO: 274130 - RNA, 19 nt, Human
uuucaauggcuuagagaaa

SEQ ID NO: 274131 - RNA, 22 nt, Human
aguccaggaaaauaagcuaggu

SEQ ID NO: 274132 - RNA, 22 nt, Human
gugggagaaauuagcucuaguu

SEQ ID NO: 274133 - RNA, 21 nt, Human
gagaacugaaccagagcagcu

SEQ ID NO: 274134 - RNA, 22 nt, Human
ggcagcuccucucagcaaaaga

SEQ ID NO: 274135 - RNA, 22 nt, Human
ucagaacauccugguuuaaaau

SEQ ID NO: 274136 - RNA, 22 nt, Human
gcagccacuaguuuuccuguuu

SEQ ID NO: 274137 - RNA, 22 nt, Human
aauaaaauggucaguuuucuca

SEQ ID NO: 274138 - RNA, 16 nt, Human
gugcaaaagugaggag

SEQ ID NO: 274139 - RNA, 22 nt, Human
acaagucuguuaugcaccugga

SEQ ID NO: 274140 - RNA, 22 nt, Human
gcuggcucaagugugcuuccca

SEQ ID NO: 274141 - RNA, 22 nt, Human
aaaugguauuuacucuguauua

SEQ ID NO: 274142 - RNA, 21 nt, Human
cucuuugggaucuuuggaaag

SEQ ID NO: 274143 - RNA, 22 nt, Human
uacccagggcuuuucugaugca

SEQ ID NO: 274144 - RNA, 22 nt, Human
uagggcagagcuuguacacgau

SEQ ID NO: 274145 - RNA, 22 nt, Human
uuuuuccuuggaugugucucuc

SEQ ID NO: 274146 - RNA, 22 nt, Human
gcugggugucacggggcucgug

SEQ ID NO: 274147 - RNA, 22 nt, Human
agucccaacagcuuacaaggaa

SEQ ID NO: 274148 - RNA, 22 nt, Human
aaucaagaaaaugaggauucuu

SEQ ID NO: 274149 - RNA, 22 nt, Human
uuauucuucuucucuugccagg

SEQ ID NO: 274150 - RNA, 22 nt, Human
agaaaucuuuccugaaguguuu

SEQ ID NO: 274151 - RNA, 22 nt, Human
uacagacauucaauuuugaccc

SEQ ID NO: 274152 - RNA, 22 nt, Human
ucagcagggcugugguguggcu

SEQ ID NO: 274153 - RNA, 22 nt, Human
guuacaaaggacugggggccac

SEQ ID NO: 274154 - RNA, 22 nt, Human
guccuuccccagccagcucugg

SEQ ID NO: 274155 - RNA, 21 nt, Human
acaggaugauuuuuccuuaug

SEQ ID NO: 274156 - RNA, 22 nt, Human
ggcuccagaaaucauagagcag

SEQ ID NO: 274157 - RNA, 22 nt, Human
ugcaggaauagcuacagagcug

SEQ ID NO: 274158 - RNA, 22 nt, Human
ugacagaaauaguucuuaauuu

SEQ ID NO: 274159 - RNA, 22 nt, Human
aaugagauggcaaugacuuaaa

SEQ ID NO: 274160 - RNA, 22 nt, Human
cuggcuggucaugucaugagcc

SEQ ID NO: 274161 - RNA, 22 nt, Human
ugggcaggauaauaucucaugu

SEQ ID NO: 274162 - RNA, 20 nt, Human
uuacaaagaggcaucgcuuu

SEQ ID NO: 274163 - RNA, 22 nt, Human
gccagccacguuagacuggccc

SEQ ID NO: 274164 - RNA, 22 nt, Human
cacauaauaaauguuccugaug

SEQ ID NO: 274165 - RNA, 22 nt, Human
guuuacauugcuguuugugucu

SEQ ID NO: 274166 - RNA, 22 nt, Human
auauauuugagaauauucauga

SEQ ID NO: 274167 - RNA, 21 nt, Human
agacaggucagggagagguga

SEQ ID NO: 274168 - RNA, 20 nt, Human
ucugguccaggucuucaugg

SEQ ID NO: 274169 - RNA, 21 nt, Human
uucuggguuguuaaucugaac

SEQ ID NO: 274170 - RNA, 18 nt, Human
uuccaugauuccuuucac

SEQ ID NO: 274171 - RNA, 22 nt, Human
aaacagaugaguuauaauagcc

SEQ ID NO: 274172 - RNA, 22 nt, Human
cccugaggaaaggguggagggc

SEQ ID NO: 274173 - RNA, 22 nt, Human
uuguacaaguuuugagcuuaag

SEQ ID NO: 274174 - RNA, 22 nt, Human
uuucaauguaugucuuucugag

SEQ ID NO: 274175 - RNA, 22 nt, Human
uccuggccaugcaagaugagga

SEQ ID NO: 274176 - RNA, 22 nt, Human
uuuccaagagcuuauuucugaa

SEQ ID NO: 274177 - RNA, 22 nt, Human
agguaugccaauuaggucaagu

SEQ ID NO: 274178 - RNA, 22 nt, Human
caaacuuacguagucuuacuac

SEQ ID NO: 274179 - RNA, 23 nt, Human
uugaaagauugcuaaguaaaaau

SEQ ID NO: 274180 - RNA, 22 nt, Human
cuggcuccaccccaggaggaug

SEQ ID NO: 274181 - RNA, 22 nt, Human
accaggcaguauggugcugcaa

SEQ ID NO: 274182 - RNA, 22 nt, Human
gcuggacuagaagcagggcuca

SEQ ID NO: 274183 - RNA, 22 nt, Human
aagcuuggaagucuuccuuuca

SEQ ID NO: 274184 - RNA, 22 nt, Human
gcuugucugcugagccaccugu

SEQ ID NO: 274185 - RNA, 22 nt, Human
guucuucaucauuaacacucug

SEQ ID NO: 274186 - RNA, 22 nt, Human
gcacucaguaccaggucacugc

SEQ ID NO: 274187 - RNA, 22 nt, Human
aaaaguuuaagacucauucuag

SEQ ID NO: 274188 - RNA, 22 nt, Human
gcagggugacguugcccaccuc

SEQ ID NO: 274189 - RNA, 22 nt, Human
ucucagagggaggauuacugcc

SEQ ID NO: 274190 - RNA, 23 nt, Human
ucugaaagggaugcugggcagga

SEQ ID NO: 274191 - RNA, 22 nt, Human
aaauagcaaugugaaaagagga

SEQ ID NO: 274192 - RNA, 22 nt, Human
uugcuugcccugcagcauacuu

SEQ ID NO: 274193 - RNA, 22 nt, Human
ugaaccuuuugaauaaggacca

SEQ ID NO: 274194 - RNA, 22 nt, Human
uuccuuccugucuuccuuacug

SEQ ID NO: 274195 - RNA, 22 nt, Human
guauuacaaauaaauguuacug

SEQ ID NO: 274196 - RNA, 22 nt, Human
acugccuucuuuaauccuaguu

SEQ ID NO: 274197 - RNA, 22 nt, Human
gugcuggcccuguccucgagcu

SEQ ID NO: 274198 - RNA, 22 nt, Human
acuuugcagggcuugauaucca

SEQ ID NO: 274199 - RNA, 22 nt, Human
aacacuuaaggagagaucaaau

SEQ ID NO: 274200 - RNA, 22 nt, Human
uguauucagugccuagcauaug

SEQ ID NO: 274201 - RNA, 22 nt, Human
accagcuccaggccccugcugg

SEQ ID NO: 274202 - RNA, 22 nt, Human
uuucaagacucauugaguauug

SEQ ID NO: 274203 - RNA, 22 nt, Human
uuggaaauggcuguaguuauga

SEQ ID NO: 274204 - RNA, 22 nt, Human
ucccuccugcaugaggcucggc

SEQ ID NO: 274205 - RNA, 22 nt, Human
cagaauucgaaugagcagaauc

SEQ ID NO: 274206 - RNA, 22 nt, Human
gggaagagaccguacccuggcc

SEQ ID NO: 274207 - RNA, 22 nt, Human
agugucaaugccaacaguauau

SEQ ID NO: 274208 - RNA, 22 nt, Human
aaauaguaaagugguagccauc

SEQ ID NO: 274209 - RNA, 22 nt, Human
ccucagaccccacagggccugu

SEQ ID NO: 274210 - RNA, 22 nt, Human
auauacaaagggcaaccucgcu

SEQ ID NO: 274211 - RNA, 22 nt, Human
gcaggcagagucaauuugaucc

SEQ ID NO: 274212 - RNA, 22 nt, Human
ucagagacuggucugcagaugc

SEQ ID NO: 274213 - RNA, 22 nt, Human
ugcuggcuacugauggcaggcc

SEQ ID NO: 274214 - RNA, 22 nt, Human
cagagccuaaaacgacuccacu

SEQ ID NO: 274215 - RNA, 22 nt, Human
ccuucugagcuucaauuucagu

SEQ ID NO: 274216 - RNA, 22 nt, Human
aacagcauaaguauuuauuuca

SEQ ID NO: 274217 - RNA, 22 nt, Human
aggaccuuuggcaaggcugcuc

SEQ ID NO: 274218 - RNA, 22 nt, Human
ucugcccucgaggagcuugugu

SEQ ID NO: 274219 - RNA, 22 nt, Human
uacacaucauacacugggauua

SEQ ID NO: 274220 - RNA, 22 nt, Human
aauucuagcauugugaaaauau

SEQ ID NO: 274221 - RNA, 22 nt, Human
aaacaaauagugcaugggaauu

SEQ ID NO: 274222 - RNA, 22 nt, Human
cagaguggcacucugcuggaug

SEQ ID NO: 274223 - RNA, 22 nt, Human
agcaggugggcaugaaagcuga

SEQ ID NO: 274224 - RNA, 22 nt, Human
uccagugcaauggcucauucau

SEQ ID NO: 274225 - RNA, 22 nt, Human
uggggaagacagcagacacugu

SEQ ID NO: 274226 - RNA, 22 nt, Human
uccaggagaaaacugacggugg

SEQ ID NO: 274227 - RNA, 22 nt, Human
uuagucuucuuccuuauauguu

SEQ ID NO: 274228 - RNA, 22 nt, Human
gaucuucuagcagaaguaauuu

SEQ ID NO: 274229 - RNA, 22 nt, Human
aagccaaugauacgggugaucu

SEQ ID NO: 274230 - RNA, 22 nt, Human
ucacccuucccagcuguccgcc

SEQ ID NO: 274231 - RNA, 22 nt, Human
ccaggagcaaagaucacuggga

SEQ ID NO: 274232 - RNA, 22 nt, Human
gccuggcccagggcucuuguug

SEQ ID NO: 274233 - RNA, 22 nt, Human
cugcucagcggaaggaagagcg

SEQ ID NO: 274234 - RNA, 22 nt, Human
cuguaagggccugacuacccug

SEQ ID NO: 274235 - RNA, 22 nt, Human
uaaggacaaucagguuaguagc

SEQ ID NO: 274236 - RNA, 22 nt, Human
cauggcaggcuucuucagccuu

SEQ ID NO: 274237 - RNA, 19 nt, Human
agucugguggcgugcaugu

SEQ ID NO: 274238 - RNA, 20 nt, Human
ggugucagggccaugccugg

SEQ ID NO: 274239 - RNA, 17 nt, Human
gaggagcuccaguaggu

SEQ ID NO: 274240 - RNA, 22 nt, Human
gccugcagugagugcagaaggu

SEQ ID NO: 274241 - RNA, 22 nt, Human
agcugcaguuagccccagauga

SEQ ID NO: 274242 - RNA, 22 nt, Human
gacuugccugcacugagccuau

SEQ ID NO: 274243 - RNA, 22 nt, Human
agccuccaaaugucaggucccg

SEQ ID NO: 274244 - RNA, 22 nt, Human
gaucuucuauguaaugaagugu

SEQ ID NO: 274245 - RNA, 22 nt, Human
uggcuucugcuuucaguggagg

SEQ ID NO: 274246 - RNA, 22 nt, Human
augaaugggucauuauuugauc

SEQ ID NO: 274247 - RNA, 22 nt, Human
gaaggccacaagagaaguuaag

SEQ ID NO: 274248 - RNA, 22 nt, Human
ugcacacacgcggcacaucugu

SEQ ID NO: 274249 - RNA, 20 nt, Human
acuguuaguauacuugugcc

SEQ ID NO: 274250 - RNA, 19 nt, Human
cucuccagcuccaguagcu

SEQ ID NO: 274251 - RNA, 22 nt, Human
agcagggcucuguggagggugg

SEQ ID NO: 274252 - RNA, 21 nt, Human
gugcugggacacagccaggcu

SEQ ID NO: 274253 - RNA, 22 nt, Human
ggaccuuccuggcuccuggggu

SEQ ID NO: 274254 - RNA, 22 nt, Human
ugucccagggaaggcccagcac

SEQ ID NO: 274255 - RNA, 22 nt, Human
cucuccuccaacagcccugccg

SEQ ID NO: 274256 - RNA, 22 nt, Human
agugccuggaccccaugacaua

SEQ ID NO: 274257 - RNA, 22 nt, Human
aggcuggagagugcaguggcgu

SEQ ID NO: 274258 - RNA, 18 nt, Human
uggagcugagugcugugc

SEQ ID NO: 274259 - RNA, 22 nt, Human
auuucuagaggcagcuucuagg

SEQ ID NO: 274260 - RNA, 22 nt, Human
cugaggcaggggcagcuggaga

SEQ ID NO: 274261 - RNA, 22 nt, Human
agaagccaagaacagacagugc

SEQ ID NO: 274262 - RNA, 22 nt, Human
agcagggcagguaaggaucaga

SEQ ID NO: 274263 - RNA, 22 nt, Human
guggcccacuuacgucaugugu

SEQ ID NO: 274264 - RNA, 22 nt, Human
uguuuccuucugucucuuugga

SEQ ID NO: 274265 - RNA, 20 nt, Human
ucugggcagggcacauggaa

SEQ ID NO: 274266 - RNA, 22 nt, Human
ucuuccagauacuuccugacuu

SEQ ID NO: 274267 - RNA, 22 nt, Human
uuuguucaacaggugaaauaga

SEQ ID NO: 274268 - RNA, 22 nt, Human
uauuuagaacagacaauagaaa

SEQ ID NO: 274269 - RNA, 22 nt, Human
caaggccaguucaccaagggca

SEQ ID NO: 274270 - RNA, 22 nt, Human
uggaauauacucagaacaggcu

SEQ ID NO: 274271 - RNA, 22 nt, Human
uuuguugguugcacuggugggu

SEQ ID NO: 274272 - RNA, 22 nt, Human
ugaggccaggcaaaggcgaucu

SEQ ID NO: 274273 - RNA, 23 nt, Human
acugaaaggauccuagcagagac

SEQ ID NO: 274274 - RNA, 22 nt, Human
agguuucuuuaugcugcuagaa

SEQ ID NO: 274275 - RNA, 22 nt, Human
agcauggacaguggcagcagug

SEQ ID NO: 274276 - RNA, 22 nt, Human
ugucagggauuuaaagacacaa

SEQ ID NO: 274277 - RNA, 22 nt, Human
uaggaaaugaaugcaggcuccc

SEQ ID NO: 274278 - RNA, 22 nt, Human
guguggcccugcguccugaguc

SEQ ID NO: 274279 - RNA, 22 nt, Human
gggcuggaccgcgaccccugag

SEQ ID NO: 274280 - RNA, 21 nt, Human
cagcagaguaaugcauucgua

SEQ ID NO: 274281 - RNA, 20 nt, Human
cuguggcaucugucauggug

SEQ ID NO: 274282 - RNA, 22 nt, Human
cuuagaauuuuaauccagaaag

SEQ ID NO: 274283 - RNA, 22 nt, Human
gcauggcagccaguacauggug

SEQ ID NO: 274284 - RNA, 22 nt, Human
ugggccugggagggcagacgcu

SEQ ID NO: 274285 - RNA, 22 nt, Human
aggccagcuuccagaggggcag

SEQ ID NO: 274286 - RNA, 22 nt, Human
acugccugccuuccagguacug

SEQ ID NO: 274287 - RNA, 22 nt, Human
cugagaaaggaccucaaacagg

SEQ ID NO: 274288 - RNA, 22 nt, Human
aaguucaagucuccugaguaua

SEQ ID NO: 274289 - RNA, 22 nt, Human
augugguugaagaauuacaucu

SEQ ID NO: 274290 - RNA, 22 nt, Human
aagaaaaucaguucuggucagu

SEQ ID NO: 274291 - RNA, 22 nt, Human
acaacucucaguuaaauaaaga

SEQ ID NO: 274292 - RNA, 22 nt, Human
agcagcucugagaggccagcac

SEQ ID NO: 274293 - RNA, 22 nt, Human
auuuugugaacccucaagcaau

SEQ ID NO: 274294 - RNA, 22 nt, Human
aaccccaaaaccucugaagugg

SEQ ID NO: 274295 - RNA, 20 nt, Human
agugcauggagggagagggc

SEQ ID NO: 274296 - RNA, 22 nt, Human
cuauuuuccgcagcaggaagua

SEQ ID NO: 274297 - RNA, 23 nt, Human
cuggggcuuucaaaucugggcag

SEQ ID NO: 274298 - RNA, 22 nt, Human
ggagaaggcacacccaccucug

SEQ ID NO: 274299 - RNA, 22 nt, Human
ugcaggugcuacaagaacucac

SEQ ID NO: 274300 - RNA, 22 nt, Human
aacuggauuuaggaacagagaa

SEQ ID NO: 274301 - RNA, 22 nt, Human
aguggcugacaacuggguuaac

SEQ ID NO: 274302 - RNA, 22 nt, Human
ggcagaggugacagugucuuuu

SEQ ID NO: 274303 - RNA, 23 nt, Human
acucguggaauucucugcgaucg

SEQ ID NO: 274304 - RNA, 18 nt, Human
cucugggagaggcauaca

SEQ ID NO: 274305 - RNA, 22 nt, Human
auuagaacuaggcuaaguaaaa

SEQ ID NO: 274306 - RNA, 22 nt, Human
ucacaaagcuuugauaagcaga

SEQ ID NO: 274307 - RNA, 22 nt, Human
gccucucucuacccaguaugau

SEQ ID NO: 274308 - RNA, 22 nt, Human
aagggcuccaagagguagcugg

SEQ ID NO: 274309 - RNA, 22 nt, Human
gaccuccauucugucaugacug

SEQ ID NO: 274310 - RNA, 22 nt, Human
uauuuauucuuuguacugccuu

SEQ ID NO: 274311 - RNA, 22 nt, Human
aucuaaacuauaguaccuaguc

SEQ ID NO: 274312 - RNA, 22 nt, Human
cuuuaagacuaaauuagaguuu

SEQ ID NO: 274313 - RNA, 22 nt, Human
acagugcaaacccucgggaaag

SEQ ID NO: 274314 - RNA, 22 nt, Human
uucucuggguuaggggaacuau

SEQ ID NO: 274315 - RNA, 22 nt, Human
gacagcugcauccucagacaca

SEQ ID NO: 274316 - RNA, 22 nt, Human
uucuacuucugacacuguuugu

SEQ ID NO: 274317 - RNA, 20 nt, Human
gccagaguuaugaugagagg

SEQ ID NO: 274318 - RNA, 20 nt, Human
acuaaucauccagucacagu

SEQ ID NO: 274319 - RNA, 22 nt, Human
caggucuggugagagaacaguu

SEQ ID NO: 274320 - RNA, 22 nt, Human
caggcggccaugaucuggcagg

SEQ ID NO: 274321 - RNA, 22 nt, Human
auugugcaaauauuaucuguag

SEQ ID NO: 274322 - RNA, 22 nt, Human
aacugguagaaagcaguaagug

SEQ ID NO: 274323 - RNA, 22 nt, Human
caggcucccgcuccacugggca

SEQ ID NO: 274324 - RNA, 22 nt, Human
uugugcaaggucuggacuauag

SEQ ID NO: 274325 - RNA, 22 nt, Human
gggagcgggacugcgcaggcuu

SEQ ID NO: 274326 - RNA, 22 nt, Human
gcuguauucaacagugaaaaga

SEQ ID NO: 274327 - RNA, 22 nt, Human
ucagcagauggguuguguuggc

SEQ ID NO: 274328 - RNA, 22 nt, Human
acugugcugcucuccgcagccc

SEQ ID NO: 274329 - RNA, 22 nt, Human
aacaguuucaguuacugaugag

SEQ ID NO: 274330 - RNA, 22 nt, Human
uaagaaacuaaugcaauaagag

SEQ ID NO: 274331 - RNA, 22 nt, Human
gcuggccagggcugcucgcgga

SEQ ID NO: 274332 - RNA, 22 nt, Human
cuggaucuugcugcauugagaa

SEQ ID NO: 274333 - RNA, 23 nt, Human
cagaaaugacaguaagcacccug

SEQ ID NO: 274334 - RNA, 22 nt, Human
acagauuuguucuuuugggcua

SEQ ID NO: 274335 - RNA, 22 nt, Human
uugggaagaggccccuggauuc

SEQ ID NO: 274336 - RNA, 22 nt, Human
cugggcugcaguuccugguccu

SEQ ID NO: 274337 - RNA, 22 nt, Human
aaaguaaccuaguaauaguguc

SEQ ID NO: 274338 - RNA, 22 nt, Human
ucauguauugaaaagcauuuua

SEQ ID NO: 274339 - RNA, 22 nt, Human
cauaagaaauaaugaugaugac

SEQ ID NO: 274340 - RNA, 22 nt, Human
cugaaggagcauagucaguuuu

SEQ ID NO: 274341 - RNA, 22 nt, Human
caggaaagucuguaaaggaacc

SEQ ID NO: 274342 - RNA, 23 nt, Human
auacaaaccuugcaggacauguu

SEQ ID NO: 274343 - RNA, 22 nt, Human
ugcauuuauggagcaaggcagu

SEQ ID NO: 274344 - RNA, 22 nt, Human
agcugugccuugcugcacggug

SEQ ID NO: 274345 - RNA, 22 nt, Human
gcagugggcaacaagagcugga

SEQ ID NO: 274346 - RNA, 22 nt, Human
cuugccuuugucuucaaaggcu

SEQ ID NO: 274347 - RNA, 22 nt, Human
cacaauuuccuugcuucacuuu

SEQ ID NO: 274348 - RNA, 22 nt, Human
gaccauuuuuacagagcauuca

SEQ ID NO: 274349 - RNA, 22 nt, Human
ucccugcaguaguggcuaagau

SEQ ID NO: 274350 - RNA, 22 nt, Human
cugaggaaggaguuaggcaguu

SEQ ID NO: 274351 - RNA, 22 nt, Human
gagggucccugcucagggccag

SEQ ID NO: 274352 - RNA, 22 nt, Human
auccauugucuuguuggcuucu

SEQ ID NO: 274353 - RNA, 22 nt, Human
gugcccugaucgcuaggcuccc

SEQ ID NO: 274354 - RNA, 22 nt, Human
gguccagggaacuuugaaggau

SEQ ID NO: 274355 - RNA, 22 nt, Human
ucuauagacuuggacauauagu

SEQ ID NO: 274356 - RNA, 21 nt, Human
cagggcacacagaggauggua

SEQ ID NO: 274357 - RNA, 22 nt, Human
ugcuccagugagcuggccaucc

SEQ ID NO: 274358 - RNA, 22 nt, Human
agugcuguccaguuucacaggu

SEQ ID NO: 274359 - RNA, 20 nt, Human
gaaauacuuacccaacuguu

SEQ ID NO: 274360 - RNA, 22 nt, Human
aggccucacacaacagaugcau

SEQ ID NO: 274361 - RNA, 19 nt, Human
aggucuaaucauaagacaa

SEQ ID NO: 274362 - RNA, 22 nt, Human
acauuuauauaacucacuagga

SEQ ID NO: 274363 - RNA, 22 nt, Human
accccaggagcugugccuaguc

SEQ ID NO: 274364 - RNA, 22 nt, Human
uaaaguuauaaauuaccuguca

SEQ ID NO: 274365 - RNA, 22 nt, Human
ucuuucugcacuuaguggggcu

SEQ ID NO: 274366 - RNA, 22 nt, Human
ucucugggugauggcagggcac

SEQ ID NO: 274367 - RNA, 22 nt, Human
cuggcucuugcgacucagcuug

SEQ ID NO: 274368 - RNA, 22 nt, Human
ccauccugcaggaccuccauau

SEQ ID NO: 274369 - RNA, 22 nt, Human
ccucccugccggcuggacuagu

SEQ ID NO: 274370 - RNA, 22 nt, Human
uucuaacuuuugaggcaaugug

SEQ ID NO: 274371 - RNA, 22 nt, Human
gccugggagauuaauuaggaag

SEQ ID NO: 274372 - RNA, 22 nt, Human
ugcauagaggauccaguguggu

SEQ ID NO: 274373 - RNA, 22 nt, Human
aggacacagguaagccagugga

SEQ ID NO: 274374 - RNA, 22 nt, Human
uagacuuugauauuguacaccc

SEQ ID NO: 274375 - RNA, 22 nt, Human
agguuccucuuccucuggccug

SEQ ID NO: 274376 - RNA, 23 nt, Human
aaggguccauagcuaucauuaca

SEQ ID NO: 274377 - RNA, 22 nt, Human
gagcuggccucaggcacaggag

SEQ ID NO: 274378 - RNA, 22 nt, Human
ccacaucuuuuuuccugaacag

SEQ ID NO: 274379 - RNA, 22 nt, Human
uuuauacuucauaaugucuauu

SEQ ID NO: 274380 - RNA, 22 nt, Human
ccaaggacguacaggagauaau

SEQ ID NO: 274381 - RNA, 22 nt, Human
acuauuagcauaucaugaaugg

SEQ ID NO: 274382 - RNA, 22 nt, Human
cuggaggaggaagucuacaaug

SEQ ID NO: 274383 - RNA, 22 nt, Human
agucuuagagucugugucauga

SEQ ID NO: 274384 - RNA, 20 nt, Human
uggaaccuaggcagagcugg

SEQ ID NO: 274385 - RNA, 22 nt, Human
gccaggugagaggacugaggcu

SEQ ID NO: 274386 - RNA, 22 nt, Human
caggcagcgcucguggccuggc

SEQ ID NO: 274387 - RNA, 22 nt, Human
aggucugaguauggccugagaa

SEQ ID NO: 274388 - RNA, 22 nt, Human
cuucuauucacuggucacaguu

SEQ ID NO: 274389 - RNA, 22 nt, Human
cugggugguuuugaugugaauu

SEQ ID NO: 274390 - RNA, 22 nt, Human
auaggcguguuuaggaggacgu

SEQ ID NO: 274391 - RNA, 22 nt, Human
uuccuacauuugccucacuccc

SEQ ID NO: 274392 - RNA, 22 nt, Human
aaauaaucaauuuuuguagaua

SEQ ID NO: 274393 - RNA, 22 nt, Human
uacaguaaccuuauuugucauu

SEQ ID NO: 274394 - RNA, 22 nt, Human
cugcccuguagcuguucuagca

SEQ ID NO: 274395 - RNA, 22 nt, Human
cucagagguggaugccuugugg

SEQ ID NO: 274396 - RNA, 21 nt, Human
gcaguuuauguaauaugcacu

SEQ ID NO: 274397 - RNA, 22 nt, Human
ugggcacaaacaucugccuguu

SEQ ID NO: 274398 - RNA, 22 nt, Human
uccaccauguaacaagcucugu

SEQ ID NO: 274399 - RNA, 22 nt, Human
uagugauuaaaggcagaauguu

SEQ ID NO: 274400 - RNA, 19 nt, Human
auguacccagugucaaucc

SEQ ID NO: 274401 - RNA, 22 nt, Human
aaaggcugccagguaaaauauu

SEQ ID NO: 274402 - RNA, 22 nt, Human
aagaaagcauuagacaggcauu

SEQ ID NO: 274403 - RNA, 22 nt, Human
gcugcuguugauuuaguccaau

SEQ ID NO: 274404 - RNA, 22 nt, Human
gagauccagauuuccauuccuu

SEQ ID NO: 274405 - RNA, 22 nt, Human
ggcacagcaggagcuaugugaa

SEQ ID NO: 274406 - RNA, 22 nt, Human
ccaggcucugcgcuggacaugg

SEQ ID NO: 274407 - RNA, 22 nt, Human
uaaggcuagcaagaugagaaua

SEQ ID NO: 274408 - RNA, 22 nt, Human
uggguccuaaaugcagucacau

SEQ ID NO: 274409 - RNA, 22 nt, Human
caacagcuuuagaaacacuuuc

SEQ ID NO: 274410 - RNA, 22 nt, Human
uucucugggcuuuucggauccg

SEQ ID NO: 274411 - RNA, 22 nt, Human
agaguugcuauagaaggaugga

SEQ ID NO: 274412 - RNA, 22 nt, Human
ucaugaaucguggaaugauuua

SEQ ID NO: 274413 - RNA, 22 nt, Human
uucuccagucacugacuucgag

SEQ ID NO: 274414 - RNA, 22 nt, Human
uucuaaagagaaugcguuucug

SEQ ID NO: 274415 - RNA, 22 nt, Human
caugcagcaggaucucauuccc

SEQ ID NO: 274416 - RNA, 23 nt, Human
auccacauuacaguaucauacaa

SEQ ID NO: 274417 - RNA, 22 nt, Human
agacagcucuggguuccacacu

SEQ ID NO: 274418 - RNA, 22 nt, Human
agcugguguccuccuggagcug

SEQ ID NO: 274419 - RNA, 22 nt, Human
caggugguacuuaaagucagaa

SEQ ID NO: 274420 - RNA, 22 nt, Human
gggaggugauuaggaccaugua

SEQ ID NO: 274421 - RNA, 22 nt, Human
uagaucugauacaauucaucug

SEQ ID NO: 274422 - RNA, 22 nt, Human
accaguuauuagcccuacaacu

SEQ ID NO: 274423 - RNA, 22 nt, Human
uucacauuagugguucuauaua

SEQ ID NO: 274424 - RNA, 22 nt, Human
uucagaaacaucaguggaugga

SEQ ID NO: 274425 - RNA, 22 nt, Human
ccagcagguguagggcucaugg

SEQ ID NO: 274426 - RNA, 22 nt, Human
acaguguagaauccuguacuua

SEQ ID NO: 274427 - RNA, 22 nt, Human
cucagcucugacaggaggcauc

SEQ ID NO: 274428 - RNA, 22 nt, Human
uccuggcagggaacuugucagc

SEQ ID NO: 274429 - RNA, 22 nt, Human
accugccuucucaaggacauga

SEQ ID NO: 274430 - RNA, 22 nt, Human
agcccagggcuaauaggaacca

SEQ ID NO: 274431 - RNA, 22 nt, Human
caggagcugggucuggaagcag

SEQ ID NO: 274432 - RNA, 22 nt, Human
cuauuagguaugcagccuauuu

SEQ ID NO: 274433 - RNA, 22 nt, Human
aagaguuuaauuuugucuagac

SEQ ID NO: 274434 - RNA, 22 nt, Human
aagaaaggauauaugggaggua

SEQ ID NO: 274435 - RNA, 22 nt, Human
uugcucauauuugcauguguuu

SEQ ID NO: 274436 - RNA, 22 nt, Human
ugacccauuggucccuagaucc

SEQ ID NO: 274437 - RNA, 22 nt, Human
acccagagcagagcuuggcuuc

SEQ ID NO: 274438 - RNA, 22 nt, Human
acacauauaccacuguaaauga

SEQ ID NO: 274439 - RNA, 22 nt, Human
ccagcaggagaugccugugucu

SEQ ID NO: 274440 - RNA, 20 nt, Human
cagcugccuggcucugggau

SEQ ID NO: 274441 - RNA, 22 nt, Human
ucccagaagugaaauuucuaga

SEQ ID NO: 274442 - RNA, 19 nt, Human
cccaggcuacauggagagg

SEQ ID NO: 274443 - RNA, 22 nt, Human
uguguccuguccccuugcugcu

SEQ ID NO: 274444 - RNA, 22 nt, Human
caguuaaaagaagucuaucuua

SEQ ID NO: 274445 - RNA, 22 nt, Human
cugaaaggaauaaggcucuuug

SEQ ID NO: 274446 - RNA, 22 nt, Human
gucuccaguuacagcagccagg

SEQ ID NO: 274447 - RNA, 20 nt, Human
cacaggccuugugagcagac

SEQ ID NO: 274448 - RNA, 22 nt, Human
uccuagaaugcaccucugcugu

SEQ ID NO: 274449 - RNA, 21 nt, Human
ucugaggagaaacucuuggug

SEQ ID NO: 274450 - RNA, 19 nt, Human
cugcucaggucagucuguc

SEQ ID NO: 274451 - RNA, 22 nt, Human
uuucuacuuuggaaugcacuga

SEQ ID NO: 274452 - RNA, 22 nt, Human
ccuucccaggcuagaccaacau

SEQ ID NO: 274453 - RNA, 22 nt, Human
cagggccucucaucccacgggc

SEQ ID NO: 274454 - RNA, 22 nt, Human
uauuggucaauuucaccuugau

SEQ ID NO: 274455 - RNA, 22 nt, Human
acaguaauaaguguuggugagg

SEQ ID NO: 274456 - RNA, 22 nt, Human
auacacuaaucaugugcucagu

SEQ ID NO: 274457 - RNA, 22 nt, Human
ugagaggucaaagggcauggag

SEQ ID NO: 274458 - RNA, 22 nt, Human
ggccagcccagugguccucucu

SEQ ID NO: 274459 - RNA, 18 nt, Human
gggcuaggcaaggaccac

SEQ ID NO: 274460 - RNA, 22 nt, Human
uuggcuucuuuucuagacagaa

SEQ ID NO: 274461 - RNA, 22 nt, Human
ucuuuaucuggcucagagacac

SEQ ID NO: 274462 - RNA, 22 nt, Human
aagggcuguagacaagauugcu

SEQ ID NO: 274463 - RNA, 22 nt, Human
cacagaggcaugacccugcccu

SEQ ID NO: 274464 - RNA, 22 nt, Human
uuguagcugaaaguaaagaagu

SEQ ID NO: 274465 - RNA, 22 nt, Human
ucucacaggugcacguggcugu

SEQ ID NO: 274466 - RNA, 22 nt, Human
acacuguaaagugaugcuuaaa

SEQ ID NO: 274467 - RNA, 22 nt, Human
aaauggcugacuaaauuaaauu

SEQ ID NO: 274468 - RNA, 22 nt, Human
ggucuggcaggugaggacucag

SEQ ID NO: 274469 - RNA, 22 nt, Human
aaauauguauggaguucaugaa

SEQ ID NO: 274470 - RNA, 22 nt, Human
gcuggcucuucaguggagauag

SEQ ID NO: 274471 - RNA, 22 nt, Human
uagcuggguugaggucaucuac

SEQ ID NO: 274472 - RNA, 22 nt, Human
ugcuccagcgcugccaccaguu

SEQ ID NO: 274473 - RNA, 22 nt, Human
agccaguccaucacuaaugggu

SEQ ID NO: 274474 - RNA, 22 nt, Human
ccauggccgccgcugcucagga

SEQ ID NO: 274475 - RNA, 22 nt, Human
cugccugugaacauacuggggg

SEQ ID NO: 274476 - RNA, 22 nt, Human
ugcuggggcagaagagccaaga

SEQ ID NO: 274477 - RNA, 22 nt, Human
acucugggauuguuucugguau

SEQ ID NO: 274478 - RNA, 17 nt, Human
uuuuggugaguuguuuc

SEQ ID NO: 274479 - RNA, 18 nt, Human
aggcuucuuggcucaguc

SEQ ID NO: 274480 - RNA, 23 nt, Human
ccugcagcugccacgcccugcuc

SEQ ID NO: 274481 - RNA, 22 nt, Human
ggccaggagcaagccaggcucu

SEQ ID NO: 274482 - RNA, 22 nt, Human
uacauguauguuuaucuugaga

SEQ ID NO: 274483 - RNA, 22 nt, Human
cccccagucugaacagcagcug

SEQ ID NO: 274484 - RNA, 17 nt, Human
ccacagcugggugccuu

SEQ ID NO: 274485 - RNA, 22 nt, Human
ggucuagaugaaauuaaauguu

SEQ ID NO: 274486 - RNA, 22 nt, Human
aauuucagauauuaaagaauga

SEQ ID NO: 274487 - RNA, 22 nt, Human
aguggggccggugaggccgagg

SEQ ID NO: 274488 - RNA, 22 nt, Human
ccuccuggagcauuggugagga

SEQ ID NO: 274489 - RNA, 22 nt, Human
acagguggccccgagggagugg

SEQ ID NO: 274490 - RNA, 22 nt, Human
aauggcuuagcagaguuagaag

SEQ ID NO: 274491 - RNA, 22 nt, Human
ggagaaugauucuuugcucacu

SEQ ID NO: 274492 - RNA, 22 nt, Human
ugagacagccucugcacucaug

SEQ ID NO: 274493 - RNA, 22 nt, Human
gaagauugaaggcugggaauua

SEQ ID NO: 274494 - RNA, 22 nt, Human
accuccugaugagaguaaagga

SEQ ID NO: 274495 - RNA, 22 nt, Human
auuuuaccuuaaagucuauauu

SEQ ID NO: 274496 - RNA, 22 nt, Human
ugggcuucauaauugguccuag

SEQ ID NO: 274497 - RNA, 22 nt, Human
uagcaaaggaugacuauguacc

SEQ ID NO: 274498 - RNA, 22 nt, Human
ucugccuugccgaauuccaggc

SEQ ID NO: 274499 - RNA, 23 nt, Human
cacugggggcugcuacagagagg

SEQ ID NO: 274500 - RNA, 22 nt, Human
agagaugacugauggcugauua

SEQ ID NO: 274501 - RNA, 22 nt, Human
acuuuugaggacuuuauuguau

SEQ ID NO: 274502 - RNA, 22 nt, Human
cccaggagcuucucucugccuc

SEQ ID NO: 274503 - RNA, 21 nt, Human
uuucuaaggaggaagaaaaga

SEQ ID NO: 274504 - RNA, 22 nt, Human
gugcccucaugaaacgaaggau

SEQ ID NO: 274505 - RNA, 22 nt, Human
cuggcugcaguagcaagagacu

SEQ ID NO: 274506 - RNA, 22 nt, Human
ggcucugggcauagaaggaagc

SEQ ID NO: 274507 - RNA, 22 nt, Human
ucacagaaagcuguguccugac

SEQ ID NO: 274508 - RNA, 22 nt, Human
uuaauuuuuauguauagugugu

SEQ ID NO: 274509 - RNA, 19 nt, Human
ucucugcagcgcgcccggc

SEQ ID NO: 274510 - RNA, 22 nt, Human
aacuguucacacugaugugacg

SEQ ID NO: 274511 - RNA, 22 nt, Human
gagcuggccgcagagagggcag

SEQ ID NO: 274512 - RNA, 22 nt, Human
cacuucaacaguuauuucuuag

SEQ ID NO: 274513 - RNA, 22 nt, Human
uuaacagacuugggauuuucua

SEQ ID NO: 274514 - RNA, 22 nt, Human
acagcuguggucuccuuagugu

SEQ ID NO: 274515 - RNA, 22 nt, Human
caggagcccugguggguggaca

SEQ ID NO: 274516 - RNA, 23 nt, Human
uguuuguuucuaugagagauagc

SEQ ID NO: 274517 - RNA, 22 nt, Human
ucuguugaccaagucuucuucc

SEQ ID NO: 274518 - RNA, 22 nt, Human
ugaaauuaugcauuguuguacc

SEQ ID NO: 274519 - RNA, 20 nt, Human
aaacauaguggauaccacag

SEQ ID NO: 274520 - RNA, 22 nt, Human
gucuguggcaggggagaaguuu

SEQ ID NO: 274521 - RNA, 22 nt, Human
ucauuuuuuuccgguaggaaua

SEQ ID NO: 274522 - RNA, 22 nt, Human
caccauuuaagaaagccaaauu

SEQ ID NO: 274523 - RNA, 22 nt, Human
ucucagaguuugaaucuggagu

SEQ ID NO: 274524 - RNA, 22 nt, Human
gacugagcuucugcaacacugg

SEQ ID NO: 274525 - RNA, 22 nt, Human
uagggcucugagaguucagccu

SEQ ID NO: 274526 - RNA, 22 nt, Human
uccugacccaccaagucuguaa

SEQ ID NO: 274527 - RNA, 22 nt, Human
cugugugaugggaagaauguuu

SEQ ID NO: 274528 - RNA, 22 nt, Human
uugggaaagaaugagaagguga

SEQ ID NO: 274529 - RNA, 22 nt, Human
gggcagguggcagggucucugg

SEQ ID NO: 274530 - RNA, 22 nt, Human
guccaggcaccucccuugugcu

SEQ ID NO: 274531 - RNA, 22 nt, Human
accuggcacagaguaugcucuc

SEQ ID NO: 274532 - RNA, 23 nt, Human
agagcuuucuaaaauguaaaucu

SEQ ID NO: 274533 - RNA, 23 nt, Human
cuccuugguaugccaugcccagc

SEQ ID NO: 274534 - RNA, 22 nt, Human
gcuacagugauaggaaacacau

SEQ ID NO: 274535 - RNA, 22 nt, Human
ugccuccaccauugcucacuuu

SEQ ID NO: 274536 - RNA, 22 nt, Human
uaguccaggaagguggggcaga

SEQ ID NO: 274537 - RNA, 21 nt, Human
ucucuggaguuagcagagaga

SEQ ID NO: 274538 - RNA, 22 nt, Human
augcacuuucuagagauucuga

SEQ ID NO: 274539 - RNA, 22 nt, Human
ucuuuggauaucgcuagaccgu

SEQ ID NO: 274540 - RNA, 22 nt, Human
guuuuucuaggaccaugugauu

SEQ ID NO: 274541 - RNA, 22 nt, Human
aacugagacacgaacuaugauu

SEQ ID NO: 274542 - RNA, 22 nt, Human
acaugcaagccccugaacacau

SEQ ID NO: 274543 - RNA, 22 nt, Human
gaagcagccacggggagacaga

SEQ ID NO: 274544 - RNA, 22 nt, Human
caguucuaauuaauaggaguaa

SEQ ID NO: 274545 - RNA, 20 nt, Human
ccugggcuccaggagccccg

SEQ ID NO: 274546 - RNA, 22 nt, Human
gagccaggagauaccuaagggg

SEQ ID NO: 274547 - RNA, 18 nt, Human
caauuuuacccagucccu

SEQ ID NO: 274548 - RNA, 22 nt, Human
aaguuucuguucauaucucuga

SEQ ID NO: 274549 - RNA, 22 nt, Human
gcugugugacccuagccaguag

SEQ ID NO: 274550 - RNA, 22 nt, Human
aaacuguuauagcagaaaggac

SEQ ID NO: 274551 - RNA, 22 nt, Human
aguggcugcugacuuuaauaca

SEQ ID NO: 274552 - RNA, 22 nt, Human
uuuauuagauuaucaaagaggu

SEQ ID NO: 274553 - RNA, 22 nt, Human
cuugggcucuaaaugccaguga

SEQ ID NO: 274554 - RNA, 22 nt, Human
ggugucugcuucccuccagcug

SEQ ID NO: 274555 - RNA, 20 nt, Human
uaaaugcaucuguucaacug

SEQ ID NO: 274556 - RNA, 22 nt, Human
uucaaauccuagcccuguggcc

SEQ ID NO: 274557 - RNA, 22 nt, Human
augucagucuuucugucucaga

SEQ ID NO: 274558 - RNA, 22 nt, Human
gcuggggucugugaggagggcu

SEQ ID NO: 274559 - RNA, 22 nt, Human
aaaugcuaacaaggaaugcugc

SEQ ID NO: 274560 - RNA, 22 nt, Human
ucuaaaugugguagucauaaga

SEQ ID NO: 274561 - RNA, 22 nt, Human
agcuggaaagaagguggcagcc

SEQ ID NO: 274562 - RNA, 22 nt, Human
cagcuagcuaagaaggccagag

SEQ ID NO: 274563 - RNA, 22 nt, Human
agcggcuggaccagcguucaag

SEQ ID NO: 274564 - RNA, 22 nt, Human
auaaguucagguaaagaaauca

SEQ ID NO: 274565 - RNA, 22 nt, Human
cugaggagugggugggcaguga

SEQ ID NO: 274566 - RNA, 22 nt, Human
ccuggcagcuguuuggcuuggc

SEQ ID NO: 274567 - RNA, 22 nt, Human
caaagggcauuuuagugaacug

SEQ ID NO: 274568 - RNA, 22 nt, Human
uuuucuauucauugucuauggu

SEQ ID NO: 274569 - RNA, 22 nt, Human
uccugagcuucaguuucuucau

SEQ ID NO: 274570 - RNA, 22 nt, Human
uguguucaccaaaguguagaaa

SEQ ID NO: 274571 - RNA, 21 nt, Human
uagcuuuaauauucccacauu

SEQ ID NO: 274572 - RNA, 22 nt, Human
cagaugaaguaggugacgagca

SEQ ID NO: 274573 - RNA, 22 nt, Human
cacuuuauaaaauuggugugag

SEQ ID NO: 274574 - RNA, 22 nt, Human
acagaagaaguucaaggugaag

SEQ ID NO: 274575 - RNA, 22 nt, Human
aagcauuuuguuuuaagaauga

SEQ ID NO: 274576 - RNA, 22 nt, Human
acaauaacuucuguuuccuugc

SEQ ID NO: 274577 - RNA, 18 nt, Human
cagcagguagaguuuggu

SEQ ID NO: 274578 - RNA, 22 nt, Human
gaaaggugccccauaggcagga

SEQ ID NO: 274579 - RNA, 22 nt, Human
aauguuuuauagcucaagcaau

SEQ ID NO: 274580 - RNA, 22 nt, Human
cucgggcaggagggcccucucc

SEQ ID NO: 274581 - RNA, 22 nt, Human
gaugauucuguguuuggaaugc

SEQ ID NO: 274582 - RNA, 22 nt, Human
cugggccaucucucugcaagug

SEQ ID NO: 274583 - RNA, 22 nt, Human
gagcuccaccaccuucaggcag

SEQ ID NO: 274584 - RNA, 22 nt, Human
ccuggcugccgagugugcagcg

SEQ ID NO: 274585 - RNA, 22 nt, Human
aagagaugauggcagccagagg

SEQ ID NO: 274586 - RNA, 22 nt, Human
acagaauuaaugaaaauuacaa

SEQ ID NO: 274587 - RNA, 22 nt, Human
uguuaauauacuaaaauccacu

SEQ ID NO: 274588 - RNA, 22 nt, Human
ucacuggugugagaggagcaaa

SEQ ID NO: 274589 - RNA, 22 nt, Human
ugucuccauagaagagacugca

SEQ ID NO: 274590 - RNA, 22 nt, Human
cuggcuuccaccauggccccug

SEQ ID NO: 274591 - RNA, 22 nt, Human
cuuauagaauguuuuuauaugu

SEQ ID NO: 274592 - RNA, 22 nt, Human
cagcaggucucagcagcuccuu

SEQ ID NO: 274593 - RNA, 22 nt, Human
uggaagagcaggcagacaaugc

SEQ ID NO: 274594 - RNA, 22 nt, Human
ugugcaacaugagacagaacag

SEQ ID NO: 274595 - RNA, 22 nt, Human
aaguuaacccaguauuucuuuu

SEQ ID NO: 274596 - RNA, 22 nt, Human
aaaggccacugcaagggaaggu

SEQ ID NO: 274597 - RNA, 22 nt, Human
augugcugaguguguauauaca

SEQ ID NO: 274598 - RNA, 20 nt, Human
cugcacugaacaugucugag

SEQ ID NO: 274599 - RNA, 19 nt, Human
gcucugagaggggcauggg

SEQ ID NO: 274600 - RNA, 22 nt, Human
aaacugccuccugggcaacuaa

SEQ ID NO: 274601 - RNA, 22 nt, Human
gaagacacuaaacuggggcuuc

SEQ ID NO: 274602 - RNA, 22 nt, Human
cuucaaaugugauuuuaauaac

SEQ ID NO: 274603 - RNA, 22 nt, Human
aaaugccucugcuguacacaau

SEQ ID NO: 274604 - RNA, 22 nt, Human
ugaauagacuggggcugugaag

SEQ ID NO: 274605 - RNA, 22 nt, Human
auggacaggcuuauaacagcaa

SEQ ID NO: 274606 - RNA, 20 nt, Human
aguuugugugucuaugcgcu

SEQ ID NO: 274607 - RNA, 23 nt, Human
cagugcugguucugccugugggg

SEQ ID NO: 274608 - RNA, 22 nt, Human
uccuccccucagggcaacggau

SEQ ID NO: 274609 - RNA, 22 nt, Human
augaaacacacacgcgcauacu

SEQ ID NO: 274610 - RNA, 22 nt, Human
auucuuuuuuaaggaauagaac

SEQ ID NO: 274611 - RNA, 22 nt, Human
uaaugucagcauaguuuauuuu

SEQ ID NO: 274612 - RNA, 22 nt, Human
uugagauggagucucacucugu

SEQ ID NO: 274613 - RNA, 22 nt, Human
gcaggcugugguauguugggca

SEQ ID NO: 274614 - RNA, 22 nt, Human
acugggcaucccauggcagagc

SEQ ID NO: 274615 - RNA, 22 nt, Human
ucugugugcccaccugacaccu

SEQ ID NO: 274616 - RNA, 22 nt, Human
ugcucagagcucuggugcaggu

SEQ ID NO: 274617 - RNA, 22 nt, Human
cugcacccaugagcucaaggga

SEQ ID NO: 274618 - RNA, 22 nt, Human
ccaucagagggcugcucugcaa

SEQ ID NO: 274619 - RNA, 21 nt, Human
ucaggcaggcgcagagggaag

SEQ ID NO: 274620 - RNA, 22 nt, Human
cccagcagccuggauguucuuu

SEQ ID NO: 274621 - RNA, 22 nt, Human
agaauucuuggugguuagaaua

SEQ ID NO: 274622 - RNA, 19 nt, Human
ccucucccaugcuuaccuc

SEQ ID NO: 274623 - RNA, 22 nt, Human
uccuggguagagaccugaugaa

SEQ ID NO: 274624 - RNA, 22 nt, Human
aaggucuggaugaugggugugc

SEQ ID NO: 274625 - RNA, 22 nt, Human
uuucucaaaagacagaagugaa

SEQ ID NO: 274626 - RNA, 22 nt, Human
uggguccuugcuggcuucaaag

SEQ ID NO: 274627 - RNA, 22 nt, Human
acucuggggcgcuacuccaacu

SEQ ID NO: 274628 - RNA, 22 nt, Human
acaagcgggccacagugcuggu

SEQ ID NO: 274629 - RNA, 22 nt, Human
ggccagagaauaugccuuacgu

SEQ ID NO: 274630 - RNA, 22 nt, Human
cucagggugcagcacaguuccu

SEQ ID NO: 274631 - RNA, 22 nt, Human
ugaugaaaauaugauucugagg

SEQ ID NO: 274632 - RNA, 22 nt, Human
caaaguuaugaaugauaagauu

SEQ ID NO: 274633 - RNA, 22 nt, Human
guccaggagcucagggcuuauu

SEQ ID NO: 274634 - RNA, 22 nt, Human
ucugccuuugcuuuggcuguca

SEQ ID NO: 274635 - RNA, 22 nt, Human
cagcaggagcagucagacuccu

SEQ ID NO: 274636 - RNA, 22 nt, Human
uuucauuauucaugcuaguuau

SEQ ID NO: 274637 - RNA, 22 nt, Human
cuaugaccccagcaugaauaag

SEQ ID NO: 274638 - RNA, 22 nt, Human
agcauucucagaaugucauuuu

SEQ ID NO: 274639 - RNA, 22 nt, Human
agcucccaggcagucaugagga

SEQ ID NO: 274640 - RNA, 19 nt, Human
gcaucagagcagaaggggu

SEQ ID NO: 274641 - RNA, 22 nt, Human
auucugaucauucaagauguca

SEQ ID NO: 274642 - RNA, 22 nt, Human
uggauuucuccagcucuccauu

SEQ ID NO: 274643 - RNA, 22 nt, Human
uagggcugccuauggcuagaua

SEQ ID NO: 274644 - RNA, 22 nt, Human
ucaggcugauuucuuuugaggg

SEQ ID NO: 274645 - RNA, 22 nt, Human
acagaagacagaguguucaucu

SEQ ID NO: 274646 - RNA, 22 nt, Human
auauuaggugcucaauacaugc

SEQ ID NO: 274647 - RNA, 22 nt, Human
ccuuccuggagcccaugcagau

SEQ ID NO: 274648 - RNA, 22 nt, Human
auuuggaagcuugaagauuauu

SEQ ID NO: 274649 - RNA, 22 nt, Human
ugaggcagaguaagauacauga

SEQ ID NO: 274650 - RNA, 22 nt, Human
ccugcccugucacuggcuaggg

SEQ ID NO: 274651 - RNA, 22 nt, Human
gauucuuuagcccagaaaguua

SEQ ID NO: 274652 - RNA, 22 nt, Human
cuggagagaccgaaagaggcug

SEQ ID NO: 274653 - RNA, 21 nt, Human
ugggaccuagcuuugcacagg

SEQ ID NO: 274654 - RNA, 22 nt, Human
acucaggcuacaacgcguggcu

SEQ ID NO: 274655 - RNA, 22 nt, Human
ucccaaauauaaugcaagagac

SEQ ID NO: 274656 - RNA, 22 nt, Human
ucaaugcaugugacaaagagua

SEQ ID NO: 274657 - RNA, 22 nt, Human
guuuuucuuugugugaagacaa

SEQ ID NO: 274658 - RNA, 22 nt, Human
cugccguguuuuucauguuaaa

SEQ ID NO: 274659 - RNA, 19 nt, Human
cagcacaugcuucucugag

SEQ ID NO: 274660 - RNA, 22 nt, Human
aggagcugcagauucugccuug

SEQ ID NO: 274661 - RNA, 22 nt, Human
guuaaagugaucuugucagguu

SEQ ID NO: 274662 - RNA, 22 nt, Human
gagagaaaggcuugcaggcugu

SEQ ID NO: 274663 - RNA, 22 nt, Human
agucacauaguguuuuggaauc

SEQ ID NO: 274664 - RNA, 22 nt, Human
aauagguagccagauauauaaa

SEQ ID NO: 274665 - RNA, 19 nt, Human
augucacucauguucccug

SEQ ID NO: 274666 - RNA, 19 nt, Human
acuaaaaaugauguuugag

SEQ ID NO: 274667 - RNA, 22 nt, Human
ucaggcugcuuucaugcuuaga

SEQ ID NO: 274668 - RNA, 22 nt, Human
ugcucuucacaguuucagcauc

SEQ ID NO: 274669 - RNA, 22 nt, Human
cugagaggaacaucuuaugcuu

SEQ ID NO: 274670 - RNA, 22 nt, Human
ucaaauacauggucaaucaacu

SEQ ID NO: 274671 - RNA, 22 nt, Human
guaacagaaagucaugcucauu

SEQ ID NO: 274672 - RNA, 20 nt, Human
gaagccagaggggaaaggag

SEQ ID NO: 274673 - RNA, 22 nt, Human
aaguaacacauguuacuucugc

SEQ ID NO: 274674 - RNA, 21 nt, Human
uccagccaguaaaugcucagc

SEQ ID NO: 274675 - RNA, 22 nt, Human
uuuccauguuaucuugcagacu

SEQ ID NO: 274676 - RNA, 22 nt, Human
acaugcuaauggagaugccaag

SEQ ID NO: 274677 - RNA, 22 nt, Human
cagagacauucaguaaauuauc

SEQ ID NO: 274678 - RNA, 22 nt, Human
cuucuggcaaaacaggcagaaa

SEQ ID NO: 274679 - RNA, 22 nt, Human
cuuauuagaaagaaaagacaug

SEQ ID NO: 274680 - RNA, 22 nt, Human
cugugggagggugagagaacca

SEQ ID NO: 274681 - RNA, 22 nt, Human
ugagcagagacgggggccucca

SEQ ID NO: 274682 - RNA, 22 nt, Human
gacaggcuuagggagggugcuc

SEQ ID NO: 274683 - RNA, 22 nt, Human
cuguguccugcgucaagccaau

SEQ ID NO: 274684 - RNA, 22 nt, Human
ucucaggcuaguaaaagauggg

SEQ ID NO: 274685 - RNA, 22 nt, Human
aggcugugagaaguccuucagu

SEQ ID NO: 274686 - RNA, 22 nt, Human
gaaugcagugacggaggcuuac

SEQ ID NO: 274687 - RNA, 22 nt, Human
agcuccugugugcccaccugcu

SEQ ID NO: 274688 - RNA, 22 nt, Human
ggagacacagagcaacaaaaua

SEQ ID NO: 274689 - RNA, 22 nt, Human
caggcugggacugaccccugcu

SEQ ID NO: 274690 - RNA, 22 nt, Human
aaggugucacugggacaggaaa

SEQ ID NO: 274691 - RNA, 22 nt, Human
agccugggcaugggacgggagg

SEQ ID NO: 274692 - RNA, 20 nt, Human
ucagacagucgcaguucugg

SEQ ID NO: 274693 - RNA, 22 nt, Human
agcucaggcucugcagggacua

SEQ ID NO: 274694 - RNA, 22 nt, Human
cagagcagaaaccugggugauu

SEQ ID NO: 274695 - RNA, 22 nt, Human
uggacccaggcaggucuguccu

SEQ ID NO: 274696 - RNA, 22 nt, Human
gcaugaugaaggaggaggaguc

SEQ ID NO: 274697 - RNA, 23 nt, Human
cagcccuggagaugugggaggca

SEQ ID NO: 274698 - RNA, 22 nt, Human
cugugagagugguggccuaggc

SEQ ID NO: 274699 - RNA, 22 nt, Human
ucagaacaucccagauaguaga

SEQ ID NO: 274700 - RNA, 22 nt, Human
cuacuuuaauuuucugcagaga

SEQ ID NO: 274701 - RNA, 22 nt, Human
ugucuagaggccaacaggaaag

SEQ ID NO: 274702 - RNA, 22 nt, Human
ucagaggaacuggacuaaagcc

SEQ ID NO: 274703 - RNA, 22 nt, Human
ugaggauggggagauggugucu

SEQ ID NO: 274704 - RNA, 22 nt, Human
gcaggcugcugagauccuuagg

SEQ ID NO: 274705 - RNA, 22 nt, Human
cccagcagccagaaugaggagc

SEQ ID NO: 274706 - RNA, 23 nt, Human
ugcaggggaggcuuaaagcaggu

SEQ ID NO: 274707 - RNA, 22 nt, Human
cagagagggcggcccuggcuuc

SEQ ID NO: 274708 - RNA, 22 nt, Human
ccacugaggcaggcaguaucua

SEQ ID NO: 274709 - RNA, 22 nt, Human
agacagugauggacaggcagac

SEQ ID NO: 274710 - RNA, 22 nt, Human
aaggguuggggaagagcaaauu

SEQ ID NO: 274711 - RNA, 22 nt, Human
agcagggcaugaauaaggguuu

SEQ ID NO: 274712 - RNA, 23 nt, Human
aagcuugucaccauuucuuucag

SEQ ID NO: 274713 - RNA, 22 nt, Human
ugcacacauucuauggggcuga

SEQ ID NO: 274714 - RNA, 22 nt, Human
uacauucacuuguugaaggugg

SEQ ID NO: 274715 - RNA, 22 nt, Human
uccagggcucauucccucugca

SEQ ID NO: 274716 - RNA, 22 nt, Human
ggcuucucucuucacauggcuu

SEQ ID NO: 274717 - RNA, 22 nt, Human
aacacagggcagcugcugggaa

SEQ ID NO: 274718 - RNA, 22 nt, Human
guguuacugacacauuuuuguc

SEQ ID NO: 274719 - RNA, 22 nt, Human
augggagaaacaucaugaggca

SEQ ID NO: 274720 - RNA, 22 nt, Human
ucacagaauugacaugggaauc

SEQ ID NO: 274721 - RNA, 22 nt, Human
cagggcucccuugcaaggaggg

SEQ ID NO: 274722 - RNA, 20 nt, Human
cuggccagaacgccuacaca

SEQ ID NO: 274723 - RNA, 22 nt, Human
uguuuucugauucucguguggu

SEQ ID NO: 274724 - RNA, 22 nt, Human
caggaccaggcguucugggcug

SEQ ID NO: 274725 - RNA, 18 nt, Human
ucuugccugcacccucuc

SEQ ID NO: 274726 - RNA, 21 nt, Human
aggaaaauugaggguuguugu

SEQ ID NO: 274727 - RNA, 22 nt, Human
ugguaucugugaaugugacauu

SEQ ID NO: 274728 - RNA, 22 nt, Human
ugccuugcuuuggcggaggcug

SEQ ID NO: 274729 - RNA, 22 nt, Human
uacagccugauuuggagccacu

SEQ ID NO: 274730 - RNA, 18 nt, Human
uaggcugggggcuguagu

SEQ ID NO: 274731 - RNA, 22 nt, Human
gaaggcuacuucuccucagggc

SEQ ID NO: 274732 - RNA, 20 nt, Human
gcucagggccugggucugga

SEQ ID NO: 274733 - RNA, 22 nt, Human
ugcaggugguacuucuuuuucu

SEQ ID NO: 274734 - RNA, 22 nt, Human
uauugcugaaaugcugaguuca

SEQ ID NO: 274735 - RNA, 22 nt, Human
caaauguaaauucuuuugaagc

SEQ ID NO: 274736 - RNA, 22 nt, Human
aggcaccuugcgguccagugaa

SEQ ID NO: 274737 - RNA, 22 nt, Human
cuggcugguagaauugugaccu

SEQ ID NO: 274738 - RNA, 22 nt, Human
ccagguguucuuugucccuguu

SEQ ID NO: 274739 - RNA, 19 nt, Human
cucuggagcagacacugga

SEQ ID NO: 274740 - RNA, 22 nt, Human
uccaggccugcaaugacaaagc

SEQ ID NO: 274741 - RNA, 22 nt, Human
ccaggcuucccugagaggcugc

SEQ ID NO: 274742 - RNA, 22 nt, Human
aaagcucacaguaauacaaggc

SEQ ID NO: 274743 - RNA, 22 nt, Human
agagaggcgaguuaccugugcu

SEQ ID NO: 274744 - RNA, 22 nt, Human
caaaguuuaaaguagauuucag

SEQ ID NO: 274745 - RNA, 22 nt, Human
aggcaggccccugagaauagac

SEQ ID NO: 274746 - RNA, 22 nt, Human
uuaaaugaugcauaucauuuag

SEQ ID NO: 274747 - RNA, 22 nt, Human
uccagccuaauguucuucccac

SEQ ID NO: 274748 - RNA, 22 nt, Human
ucagaggauugccucagcgagc

SEQ ID NO: 274749 - RNA, 22 nt, Human
agggcagaaaccaccuugaugg

SEQ ID NO: 274750 - RNA, 22 nt, Human
ugcuuuauggauuuguguccug

SEQ ID NO: 274751 - RNA, 22 nt, Human
ugugcauguauugauuuguacc

SEQ ID NO: 274752 - RNA, 22 nt, Human
aggaaaauggaccagaguuguu

SEQ ID NO: 274753 - RNA, 22 nt, Human
ucccagcccagacuucuccagu

SEQ ID NO: 274754 - RNA, 18 nt, Human
auggucucauacugggag

SEQ ID NO: 274755 - RNA, 22 nt, Human
uccuggcuuuucuuggcucauc

SEQ ID NO: 274756 - RNA, 22 nt, Human
uagaaucuguguucaaaccuac

SEQ ID NO: 274757 - RNA, 22 nt, Human
aauaugugagguauguucagug

SEQ ID NO: 274758 - RNA, 22 nt, Human
gugcugggugcugcagacaggu

SEQ ID NO: 274759 - RNA, 22 nt, Human
cagagcaacacccuuuacaucg

SEQ ID NO: 274760 - RNA, 22 nt, Human
agcugggugaaggcagauggcu

SEQ ID NO: 274761 - RNA, 22 nt, Human
guaaagaaguuuuugaaugcau

SEQ ID NO: 274762 - RNA, 22 nt, Human
cuccagauaggagggggucccc

SEQ ID NO: 274763 - RNA, 22 nt, Human
cacuggcaaauggagagaaugu

SEQ ID NO: 274764 - RNA, 22 nt, Human
gagaaagauguaggcugggagg

SEQ ID NO: 274765 - RNA, 22 nt, Human
cagaaguuugcaauuguuuauu

SEQ ID NO: 274766 - RNA, 22 nt, Human
uucggcauauuaauggugggug

SEQ ID NO: 274767 - RNA, 22 nt, Human
uuuggcucgauggacuuugaau

SEQ ID NO: 274768 - RNA, 22 nt, Human
aaugaagaaauggacaucuuua

SEQ ID NO: 274769 - RNA, 22 nt, Human
uucaacauuuaucaguuuauca

SEQ ID NO: 274770 - RNA, 22 nt, Human
ccuuucccgcuuugagggcaag

SEQ ID NO: 274771 - RNA, 22 nt, Human
agucacaguucugcugucugag

SEQ ID NO: 274772 - RNA, 22 nt, Human
gcaggccagcugugcagauggg

SEQ ID NO: 274773 - RNA, 22 nt, Human
ggugaggaaagauggugacagu

SEQ ID NO: 274774 - RNA, 18 nt, Human
aggcacagagcauacaua

SEQ ID NO: 274775 - RNA, 22 nt, Human
ucagggagagugacccauccac

SEQ ID NO: 274776 - RNA, 22 nt, Human
caugucuguguacacaugcaca

SEQ ID NO: 274777 - RNA, 22 nt, Human
acagucuucaugcuagaauggc

SEQ ID NO: 274778 - RNA, 22 nt, Human
ggucccaugacugacacagcag

SEQ ID NO: 274779 - RNA, 22 nt, Human
cucuggacagcaggugcugugg

SEQ ID NO: 274780 - RNA, 23 nt, Human
ugcuggcuuuuaucuggucccua

SEQ ID NO: 274781 - RNA, 22 nt, Human
agaaccaugaguuugaguaucu

SEQ ID NO: 274782 - RNA, 22 nt, Human
cagucucucagcuuucagcugu

SEQ ID NO: 274783 - RNA, 22 nt, Human
uaaguguuauuauucucacuuu

SEQ ID NO: 274784 - RNA, 22 nt, Human
aagaauaagaggauuuagaaca

SEQ ID NO: 274785 - RNA, 22 nt, Human
uccaguuuccuguggcugccua

SEQ ID NO: 274786 - RNA, 22 nt, Human
cacuauaucucuuucaucuuuu

SEQ ID NO: 274787 - RNA, 19 nt, Human
uccucccuuugguguccug

SEQ ID NO: 274788 - RNA, 22 nt, Human
ucugugcugcaggagucugcau

SEQ ID NO: 274789 - RNA, 22 nt, Human
ccagagaggggaagggcuugcc

SEQ ID NO: 274790 - RNA, 21 nt, Human
gcauucuucaugugauucaga

SEQ ID NO: 274791 - RNA, 22 nt, Human
agcaccaggcaguauaucaaag

SEQ ID NO: 274792 - RNA, 22 nt, Human
uaagauaaggaacauucuguga

SEQ ID NO: 274793 - RNA, 22 nt, Human
auucuucacaaauauauagaag

SEQ ID NO: 274794 - RNA, 22 nt, Human
cagugagguagacagcuuuuuc

SEQ ID NO: 274795 - RNA, 19 nt, Human
gcucaacagcucggguccu

SEQ ID NO: 274796 - RNA, 22 nt, Human
uggggugggguuacucauucug

SEQ ID NO: 274797 - RNA, 22 nt, Human
cacacagcuagugacaggagaa

SEQ ID NO: 274798 - RNA, 22 nt, Human
uuucugaagucuucuaacagau

SEQ ID NO: 274799 - RNA, 21 nt, Human
ccagcagcucaaggaucucuu

SEQ ID NO: 274800 - RNA, 20 nt, Human
acugccuuuagguauccuug

SEQ ID NO: 274801 - RNA, 22 nt, Human
gauccacuguguuuguguugag

SEQ ID NO: 274802 - RNA, 22 nt, Human
auacuacacuaugcauggaugu

SEQ ID NO: 274803 - RNA, 22 nt, Human
acaagaauuuacauguagugga

SEQ ID NO: 274804 - RNA, 22 nt, Human
uucugggcaguuggaaauuuca

SEQ ID NO: 274805 - RNA, 22 nt, Human
uaggugucuugucacuaccguu

SEQ ID NO: 274806 - RNA, 22 nt, Human
cuggugaccggaccucaguuuu

SEQ ID NO: 274807 - RNA, 22 nt, Human
aguggcaggaucucgguucacu

SEQ ID NO: 274808 - RNA, 22 nt, Human
uaugccagacugugagcuucuu

SEQ ID NO: 274809 - RNA, 22 nt, Human
ugcacaagucagaguaacauuu

SEQ ID NO: 274810 - RNA, 22 nt, Human
caugucaagcuuaucucugugg

SEQ ID NO: 274811 - RNA, 22 nt, Human
acuccaguuaccuuggcugagg

SEQ ID NO: 274812 - RNA, 22 nt, Human
uuccucuggggccaggccaaca

SEQ ID NO: 274813 - RNA, 22 nt, Human
ucaggaggcggugcugccuuug

SEQ ID NO: 274814 - RNA, 22 nt, Human
cacagaggcucaaagccaggug

SEQ ID NO: 274815 - RNA, 19 nt, Human
uggcuucuucgguguuccc

SEQ ID NO: 274816 - RNA, 22 nt, Human
cuccuucacgcaggcugccaug

SEQ ID NO: 274817 - RNA, 22 nt, Human
gucccuggggguuuaggacuca

SEQ ID NO: 274818 - RNA, 22 nt, Human
acuuuaaaacugaucaucagag

SEQ ID NO: 274819 - RNA, 22 nt, Human
aucagcaagcauuuauugagug

SEQ ID NO: 274820 - RNA, 22 nt, Human
gcuauugugacagcuuuucgcc

SEQ ID NO: 274821 - RNA, 22 nt, Human
agcccagcugcuauguaccugg

SEQ ID NO: 274822 - RNA, 22 nt, Human
agauaacucauuuuguauaucc

SEQ ID NO: 274823 - RNA, 22 nt, Human
cccugcagaccaaugccauaga

SEQ ID NO: 274824 - RNA, 22 nt, Human
agcucccagaagccagagucgg

SEQ ID NO: 274825 - RNA, 22 nt, Human
accugaauuuuggaugagcugu

SEQ ID NO: 274826 - RNA, 22 nt, Human
agguaaagacugcaaggagaau

SEQ ID NO: 274827 - RNA, 21 nt, Human
caggcucugcugggugcuggg

SEQ ID NO: 274828 - RNA, 22 nt, Human
ugcaaauuuaaugaaacuaugu

SEQ ID NO: 274829 - RNA, 22 nt, Human
uguccaggucagcagcagggac

SEQ ID NO: 274830 - RNA, 22 nt, Human
auacagggacauccaguuuuuc

SEQ ID NO: 274831 - RNA, 22 nt, Human
aacaucuucagagaagcuaagu

SEQ ID NO: 274832 - RNA, 22 nt, Human
auuuccaugucgguauuuuaua

SEQ ID NO: 274833 - RNA, 20 nt, Human
ggucacuguggcugcaggau

SEQ ID NO: 274834 - RNA, 22 nt, Human
cagggcuggguuaaaagcaggg

SEQ ID NO: 274835 - RNA, 22 nt, Human
ccacccugugcaggcgugggua

SEQ ID NO: 274836 - RNA, 22 nt, Human
uugccaggagacaucuggagcc

SEQ ID NO: 274837 - RNA, 18 nt, Human
agcagggcauuuugccau

SEQ ID NO: 274838 - RNA, 22 nt, Human
uucacaagugugaaggcagagc

SEQ ID NO: 274839 - RNA, 20 nt, Human
uccuucugaggugaggagga

SEQ ID NO: 274840 - RNA, 17 nt, Human
gcuggcugacccaugcc

SEQ ID NO: 274841 - RNA, 21 nt, Human
ucagacuugagcucuucuaca

SEQ ID NO: 274842 - RNA, 21 nt, Human
ggaggaaaaaggaaugacuug

SEQ ID NO: 274843 - RNA, 22 nt, Human
ugauuuaugcauuauacuguug

SEQ ID NO: 274844 - RNA, 22 nt, Human
agagugcuagccugagggaggu

SEQ ID NO: 274845 - RNA, 22 nt, Human
acuguucaagcaaaugacauug

SEQ ID NO: 274846 - RNA, 22 nt, Human
uucauagugcuuaauuugauaa

SEQ ID NO: 274847 - RNA, 22 nt, Human
aaaggcuuugagaaguccugca

SEQ ID NO: 274848 - RNA, 22 nt, Human
cuuuauauauucccaggcugcc

SEQ ID NO: 274849 - RNA, 22 nt, Human
auccacagaaggaacuugaaag

SEQ ID NO: 274850 - RNA, 22 nt, Human
uuuucauuguuacuaugagcua

SEQ ID NO: 274851 - RNA, 22 nt, Human
gagugcugcuaaugcaagggug

SEQ ID NO: 274852 - RNA, 20 nt, Human
uccagguaacaucucucugg

SEQ ID NO: 274853 - RNA, 22 nt, Human
uguuaacagguaacugaggcug

SEQ ID NO: 274854 - RNA, 22 nt, Human
gguauuuauaugucugaagcug

SEQ ID NO: 274855 - RNA, 22 nt, Human
uggguccugucuccuuguucug

SEQ ID NO: 274856 - RNA, 22 nt, Human
uccaggcaucccccaggacaga

SEQ ID NO: 274857 - RNA, 22 nt, Human
gaucauuugcaggaaacauuaa

SEQ ID NO: 274858 - RNA, 22 nt, Human
caguguggcugagacagaggcu

SEQ ID NO: 274859 - RNA, 22 nt, Human
uuuguuuaucaaggucuagcau

SEQ ID NO: 274860 - RNA, 22 nt, Human
aagggcuccacuugaaucacac

SEQ ID NO: 274861 - RNA, 22 nt, Human
cagcuaauccucucuauccaag

SEQ ID NO: 274862 - RNA, 22 nt, Human
cauagaaacugagacaaggauu

SEQ ID NO: 274863 - RNA, 22 nt, Human
uggaaagguaggauuucaagac

SEQ ID NO: 274864 - RNA, 22 nt, Human
ugagcaggcaaacaaugguuau

SEQ ID NO: 274865 - RNA, 22 nt, Human
agaucaaaucugggauuucuaa

SEQ ID NO: 274866 - RNA, 22 nt, Human
gaaagcacugugagaucuuguu

SEQ ID NO: 274867 - RNA, 22 nt, Human
uucauugacugguucguuaagu

SEQ ID NO: 274868 - RNA, 22 nt, Human
cugggguggagauuggcaaucu

SEQ ID NO: 274869 - RNA, 22 nt, Human
gggaagggagggaccucagucu

SEQ ID NO: 274870 - RNA, 22 nt, Human
ugcugggcuagaagcugaggcc

SEQ ID NO: 274871 - RNA, 22 nt, Human
cgcaggcuggcgcggaguggca

SEQ ID NO: 274872 - RNA, 22 nt, Human
uggugcugugauacgaggcacu

SEQ ID NO: 274873 - RNA, 22 nt, Human
uggcccugguggcacagccugc

SEQ ID NO: 274874 - RNA, 22 nt, Human
uguccuuuaugaaaugguguuu

SEQ ID NO: 274875 - RNA, 22 nt, Human
augucuuuuaugauuacgggau

SEQ ID NO: 274876 - RNA, 22 nt, Human
cucccaagauaaauaaggcagu

SEQ ID NO: 274877 - RNA, 22 nt, Human
agcaccaggcuguuggaagccc

SEQ ID NO: 274878 - RNA, 22 nt, Human
ucaaaauuaaaccaacguccag

SEQ ID NO: 274879 - RNA, 18 nt, Human
caugcagagggaucugug

SEQ ID NO: 274880 - RNA, 22 nt, Human
acggcuucuugacuguggguug

SEQ ID NO: 274881 - RNA, 22 nt, Human
guuuccuauggcugcugcagga

SEQ ID NO: 274882 - RNA, 22 nt, Human
uuucuauuguaagucuccuaua

SEQ ID NO: 274883 - RNA, 22 nt, Human
uaacugguuuggcucagggucu

SEQ ID NO: 274884 - RNA, 22 nt, Human
ccacuguuuuucaguuaacuuu

SEQ ID NO: 274885 - RNA, 22 nt, Human
aggagcucacaucuuuauuucu

SEQ ID NO: 274886 - RNA, 22 nt, Human
gcagcccaaaaaagagguagau

SEQ ID NO: 274887 - RNA, 17 nt, Human
uaggagacuggcugucc

SEQ ID NO: 274888 - RNA, 22 nt, Human
aaugucuucaguguauacaugg

SEQ ID NO: 274889 - RNA, 22 nt, Human
cagacacuaggugacagagugc

SEQ ID NO: 274890 - RNA, 22 nt, Human
uuguacaguuuaagugggugaa

SEQ ID NO: 274891 - RNA, 20 nt, Human
ucagaagugcagcugccccu

SEQ ID NO: 274892 - RNA, 22 nt, Human
gcacuuuaaauguucacggaaa

SEQ ID NO: 274893 - RNA, 22 nt, Human
gcuucugugguugucacgacua

SEQ ID NO: 274894 - RNA, 22 nt, Human
uuuaggaauauuuucuuucagg

SEQ ID NO: 274895 - RNA, 21 nt, Human
ucccagggccaggugccauca

SEQ ID NO: 274896 - RNA, 22 nt, Human
ugccuucaccaggccuucagcc

SEQ ID NO: 274897 - RNA, 22 nt, Human
aaagagggacaggcgcagacac

SEQ ID NO: 274898 - RNA, 22 nt, Human
ucugugcagaacucacagaagg

SEQ ID NO: 274899 - RNA, 22 nt, Human
uucaguuucguuaucuaugaga

SEQ ID NO: 274900 - RNA, 22 nt, Human
guuauugcaguauagaggucua

SEQ ID NO: 274901 - RNA, 22 nt, Human
auacauuagaaucugguacuca

SEQ ID NO: 274902 - RNA, 22 nt, Human
uacagcuguugguguuuccucu

SEQ ID NO: 274903 - RNA, 22 nt, Human
guacaaauacauucugaaggua

SEQ ID NO: 274904 - RNA, 22 nt, Human
cucuggaauuaaggaagccugu

SEQ ID NO: 274905 - RNA, 22 nt, Human
gaggcauaaaucacaguguuca

SEQ ID NO: 274906 - RNA, 22 nt, Human
gggcucagaggaguggccuggg

SEQ ID NO: 274907 - RNA, 22 nt, Human
uaacugaacagccuaauucuuu

SEQ ID NO: 274908 - RNA, 22 nt, Human
uggugagauaacuuucggcaag

SEQ ID NO: 274909 - RNA, 22 nt, Human
aucuuugucacucuacugucua

SEQ ID NO: 274910 - RNA, 22 nt, Human
uucagcuugcugacugcggcag

SEQ ID NO: 274911 - RNA, 22 nt, Human
ugaaagcauaugcuaaagacca

SEQ ID NO: 274912 - RNA, 21 nt, Human
agccagucuguuuucuagugc

SEQ ID NO: 274913 - RNA, 22 nt, Human
ccccagggucaguguguggagg

SEQ ID NO: 274914 - RNA, 19 nt, Human
acugccugaggcucacagg

SEQ ID NO: 274915 - RNA, 22 nt, Human
uuuccaggagaaagagagccuu

SEQ ID NO: 274916 - RNA, 16 nt, Human
ucagugucagcuccug

SEQ ID NO: 274917 - RNA, 22 nt, Human
cccagcuguaacgggucugcac

SEQ ID NO: 274918 - RNA, 22 nt, Human
cacugugucuggagugagcugg

SEQ ID NO: 274919 - RNA, 22 nt, Human
caugagaucugcagggaugggc

SEQ ID NO: 274920 - RNA, 18 nt, Human
aucuuuccauagcauguu

SEQ ID NO: 274921 - RNA, 22 nt, Human
ccauuuguaccauuucuuugua

SEQ ID NO: 274922 - RNA, 22 nt, Human
auuguuccuggaaaagaacagg

SEQ ID NO: 274923 - RNA, 18 nt, Human
ccuggcagccaugcgcgc

SEQ ID NO: 274924 - RNA, 22 nt, Human
cccugggcagucugcacuucag

SEQ ID NO: 274925 - RNA, 22 nt, Human
aagaacuuccuaauauauuuuc

SEQ ID NO: 274926 - RNA, 18 nt, Human
uccagagagggagaagug

SEQ ID NO: 274927 - RNA, 22 nt, Human
cuggcauguguuuggcuccugu

SEQ ID NO: 274928 - RNA, 22 nt, Human
gauuucuaaguuuuaccacaaa

SEQ ID NO: 274929 - RNA, 22 nt, Human
uaucuaaaggauuuaauuuagu

SEQ ID NO: 274930 - RNA, 22 nt, Human
guagggcagaaguucaaugugg

SEQ ID NO: 274931 - RNA, 22 nt, Human
caugcucacuuuuauacuguaa

SEQ ID NO: 274932 - RNA, 22 nt, Human
ccagcuccucuugucucuagca

SEQ ID NO: 274933 - RNA, 21 nt, Human
ucugucuuccucagccuaagg

SEQ ID NO: 274934 - RNA, 22 nt, Human
acagcagcauccuauuucacuc

SEQ ID NO: 274935 - RNA, 22 nt, Human
guuuagaagccaagauuugggu

SEQ ID NO: 274936 - RNA, 22 nt, Human
gcuuuggaacuuaaauccuugg

SEQ ID NO: 274937 - RNA, 22 nt, Human
uagcuggcuuauauaaaagggc

SEQ ID NO: 274938 - RNA, 22 nt, Human
cccagugugguugugaauucug

SEQ ID NO: 274939 - RNA, 22 nt, Human
gagcaggcucugccuguguguc

SEQ ID NO: 274940 - RNA, 22 nt, Human
acuuagaaagggauucuagauu

SEQ ID NO: 274941 - RNA, 22 nt, Human
aucuguaaaugcaaauguagcu

SEQ ID NO: 274942 - RNA, 22 nt, Human
auaaugucugcagagccacaca

SEQ ID NO: 274943 - RNA, 22 nt, Human
uagguucauauucuagaaucau

SEQ ID NO: 274944 - RNA, 22 nt, Human
aagcaauucacaguucacuuaa

SEQ ID NO: 274945 - RNA, 23 nt, Human
cucuggguccgauguccugacag

SEQ ID NO: 274946 - RNA, 22 nt, Human
cuuuuucauuggcuuuaggaca

SEQ ID NO: 274947 - RNA, 22 nt, Human
agaagaauacuugauguucaug

SEQ ID NO: 274948 - RNA, 22 nt, Human
uuuguauaagaacauucuagca

SEQ ID NO: 274949 - RNA, 22 nt, Human
uugaggaggccuuucagggcuu

SEQ ID NO: 274950 - RNA, 22 nt, Human
cugcagagcaugaggaggucug

SEQ ID NO: 274951 - RNA, 22 nt, Human
augagaugugucuaauggaacc

SEQ ID NO: 274952 - RNA, 22 nt, Human
cucacaggguucuaucgaagag

SEQ ID NO: 274953 - RNA, 22 nt, Human
ucugggcuuuaagaacucuguu

SEQ ID NO: 274954 - RNA, 22 nt, Human
cagcagagguuuugcuccauga

SEQ ID NO: 274955 - RNA, 23 nt, Human
agggccucugucccccagcacuc

SEQ ID NO: 274956 - RNA, 19 nt, Human
cucagagaggggcagugcc

SEQ ID NO: 274957 - RNA, 22 nt, Human
ugccccagacucugcucaccuc

SEQ ID NO: 274958 - RNA, 22 nt, Human
ugagguggcacacacuuccugc

SEQ ID NO: 274959 - RNA, 22 nt, Human
ggcaagagggcagauggagugc

SEQ ID NO: 274960 - RNA, 22 nt, Human
ucaggagcugcacugggcccac

SEQ ID NO: 274961 - RNA, 22 nt, Human
uacaguuuuuauucaugacaag

SEQ ID NO: 274962 - RNA, 22 nt, Human
aaacucaagucuaugaacaagg

SEQ ID NO: 274963 - RNA, 22 nt, Human
uuucacagugcucuguaaguau

SEQ ID NO: 274964 - RNA, 22 nt, Human
cugaaaauguuacacaggaaga

SEQ ID NO: 274965 - RNA, 22 nt, Human
uguccagguuagcuucaaacac

SEQ ID NO: 274966 - RNA, 22 nt, Human
gagcacugaggaaagcugguua

SEQ ID NO: 274967 - RNA, 22 nt, Human
cacaauuagcagcucuuuauuu

SEQ ID NO: 274968 - RNA, 18 nt, Human
cuccccagcugcccccag

SEQ ID NO: 274969 - RNA, 22 nt, Human
uuccaggcugaugggccacagg

SEQ ID NO: 274970 - RNA, 22 nt, Human
agcauuuaugacuaauguaaaa

SEQ ID NO: 274971 - RNA, 22 nt, Human
agaaacaucgcuuaguccucau

SEQ ID NO: 274972 - RNA, 22 nt, Human
ugaaaugauuauaugguguuug

SEQ ID NO: 274973 - RNA, 22 nt, Human
cccagagccucauucuguuggg

SEQ ID NO: 274974 - RNA, 22 nt, Human
ggcagccaguagggccagccug

SEQ ID NO: 274975 - RNA, 22 nt, Human
cugcaggggccucgagcacagg

SEQ ID NO: 274976 - RNA, 22 nt, Human
cagcuagcggugcuggcggcuc

SEQ ID NO: 274977 - RNA, 22 nt, Human
uauuuaacuggaaacacaauga

SEQ ID NO: 274978 - RNA, 22 nt, Human
ucacaucucucauugccucugc

SEQ ID NO: 274979 - RNA, 22 nt, Human
cauagcuuagggguuaaacuca

SEQ ID NO: 274980 - RNA, 22 nt, Human
uuaugauuuagaaagauucacu

SEQ ID NO: 274981 - RNA, 22 nt, Human
uccagccugaacuuuguccaga

SEQ ID NO: 274982 - RNA, 22 nt, Human
ccugggucccagccaggcuuug

SEQ ID NO: 274983 - RNA, 22 nt, Human
ggcugccucuauuuaggaucaa

SEQ ID NO: 274984 - RNA, 22 nt, Human
acuuuccuagacuucagugaca

SEQ ID NO: 274985 - RNA, 22 nt, Human
aauuagaaucuuauuuggggaa

SEQ ID NO: 274986 - RNA, 22 nt, Human
uggcacaggaauuuagaugcag

SEQ ID NO: 274987 - RNA, 22 nt, Human
aaguaguuaggaacauucucuc

SEQ ID NO: 274988 - RNA, 22 nt, Human
aggcucaguucuguggugagcc

SEQ ID NO: 274989 - RNA, 22 nt, Human
ugggaaaguguugaggugucuu

SEQ ID NO: 274990 - RNA, 22 nt, Human
ucuguucacugagcaauggcaa

SEQ ID NO: 274991 - RNA, 22 nt, Human
uuauuguagcacuuuggcagug

SEQ ID NO: 274992 - RNA, 22 nt, Human
uaggugucuggacaacuuugua

SEQ ID NO: 274993 - RNA, 22 nt, Human
aaagcuaagguagcauuggaga

SEQ ID NO: 274994 - RNA, 22 nt, Human
caguagcccacuaguaugcagu

SEQ ID NO: 274995 - RNA, 18 nt, Human
gcugcccuagcuccccuc

SEQ ID NO: 274996 - RNA, 22 nt, Human
aacuguaagagaauaaaugugu

SEQ ID NO: 274997 - RNA, 22 nt, Human
acugggaagacaagaaagauag

SEQ ID NO: 274998 - RNA, 22 nt, Human
cucuggucaagcaaagagguuu

SEQ ID NO: 274999 - RNA, 22 nt, Human
acaggcucucuauugagugcag

SEQ ID NO: 275000 - RNA, 19 nt, Human
aucuuuagcaacuuucaaa

SEQ ID NO: 275001 - RNA, 22 nt, Human
uggcaacaccuggaagacaugg

SEQ ID NO: 275002 - RNA, 22 nt, Human
uguuuaaccaccauucuauucu

SEQ ID NO: 275003 - RNA, 22 nt, Human
aaagucuuguuacguuccauug

SEQ ID NO: 275004 - RNA, 22 nt, Human
gguggcaggcccugagcauccc

SEQ ID NO: 275005 - RNA, 22 nt, Human
ggggagaauuacauggcgugga

SEQ ID NO: 275006 - RNA, 22 nt, Human
uauuucagguauggugugaaau

SEQ ID NO: 275007 - RNA, 22 nt, Human
gugagggguggcugagcaguuu

SEQ ID NO: 275008 - RNA, 22 nt, Human
agcuccagaaagguacacacag

SEQ ID NO: 275009 - RNA, 22 nt, Human
cugggcugcagcgggagcgacg

SEQ ID NO: 275010 - RNA, 22 nt, Human
ugggagauaauucauuguguuc

SEQ ID NO: 275011 - RNA, 22 nt, Human
gcuuagcagucacacauuguuc

SEQ ID NO: 275012 - RNA, 22 nt, Human
cuguggcuaggaagcuguggga

SEQ ID NO: 275013 - RNA, 22 nt, Human
ccagaggagaugccuccucugu

SEQ ID NO: 275014 - RNA, 22 nt, Human
auugucaucgauguuagccagu

SEQ ID NO: 275015 - RNA, 22 nt, Human
ucuggcuuuccuggagcaagaa

SEQ ID NO: 275016 - RNA, 22 nt, Human
cuuagaacagugucugccagag

SEQ ID NO: 275017 - RNA, 20 nt, Human
guacacuucauguuucaccu

SEQ ID NO: 275018 - RNA, 22 nt, Human
agccaggccagacucacacccu

SEQ ID NO: 275019 - RNA, 22 nt, Human
cgcagguguguuuucaggacua

SEQ ID NO: 275020 - RNA, 22 nt, Human
ccugggcucaagugaugguccc

SEQ ID NO: 275021 - RNA, 22 nt, Human
ugggugccaaccucugguggcc

SEQ ID NO: 275022 - RNA, 22 nt, Human
uuuauuauucucuggagaaugu

SEQ ID NO: 275023 - RNA, 22 nt, Human
ggcugggucccagcugggagga

SEQ ID NO: 275024 - RNA, 23 nt, Human
agcugcagaugcucagcgggcag

SEQ ID NO: 275025 - RNA, 22 nt, Human
uaauaaaugaaagugcuggcau

SEQ ID NO: 275026 - RNA, 22 nt, Human
ccagcccuacaguaucaccugu

SEQ ID NO: 275027 - RNA, 22 nt, Human
uggcagauguggcauagagcau

SEQ ID NO: 275028 - RNA, 22 nt, Human
gaggcuccucauucaguaugcu

SEQ ID NO: 275029 - RNA, 22 nt, Human
gcauguguuauuucucuguggg

SEQ ID NO: 275030 - RNA, 19 nt, Human
agccagugagccucugggu

SEQ ID NO: 275031 - RNA, 22 nt, Human
cuggcucauuuuagcaucaggu

SEQ ID NO: 275032 - RNA, 22 nt, Human
uugguuuugggauguacaaagg

SEQ ID NO: 275033 - RNA, 22 nt, Human
ugcuuuguguuugaauagauaa

SEQ ID NO: 275034 - RNA, 22 nt, Human
aggaauguuaagaaggucuacc

SEQ ID NO: 275035 - RNA, 22 nt, Human
auuugugauaauuuguuacagc

SEQ ID NO: 275036 - RNA, 22 nt, Human
ccugaggcuuaaucugucccaa

SEQ ID NO: 275037 - RNA, 22 nt, Human
cuuauacacgaacacaaggugu

SEQ ID NO: 275038 - RNA, 22 nt, Human
ggcccagcucuauugaauuaca

SEQ ID NO: 275039 - RNA, 22 nt, Human
ccugcugucugcuguguuaagc

SEQ ID NO: 275040 - RNA, 20 nt, Human
agcauucauucagcaagccu

SEQ ID NO: 275041 - RNA, 22 nt, Human
cacaguuucuauaggucagaau

SEQ ID NO: 275042 - RNA, 22 nt, Human
auggcagcaaaugucuggcugg

SEQ ID NO: 275043 - RNA, 22 nt, Human
ugggccuccuuuccauucagag

SEQ ID NO: 275044 - RNA, 22 nt, Human
gaagagaagcaucaauagguaa

SEQ ID NO: 275045 - RNA, 22 nt, Human
ccuguauuauuuguaugugcug

SEQ ID NO: 275046 - RNA, 22 nt, Human
uccaggcaggguuaaggguccu

SEQ ID NO: 275047 - RNA, 22 nt, Human
aguguauuaguuguccagcagu

SEQ ID NO: 275048 - RNA, 18 nt, Human
agcuuagcauacuuuucc

SEQ ID NO: 275049 - RNA, 22 nt, Human
ucugagcauugaauuuucuucc

SEQ ID NO: 275050 - RNA, 21 nt, Human
gcagugucaugguuucaaguu

SEQ ID NO: 275051 - RNA, 22 nt, Human
gacaggaagucugaaggaggga

SEQ ID NO: 275052 - RNA, 22 nt, Human
ucuauaaagggccagauaguag

SEQ ID NO: 275053 - RNA, 22 nt, Human
cuuagggaaucuuagagcugga

SEQ ID NO: 275054 - RNA, 20 nt, Human
aaagucuuaugguuaauuuu

SEQ ID NO: 275055 - RNA, 22 nt, Human
cacaagucauuuucagcaggcu

SEQ ID NO: 275056 - RNA, 22 nt, Human
cugagccaaccacagcaggagc

SEQ ID NO: 275057 - RNA, 22 nt, Human
acacuuauuuuuguccacuucc

SEQ ID NO: 275058 - RNA, 22 nt, Human
gaaggggacuggcagcugcaga

SEQ ID NO: 275059 - RNA, 22 nt, Human
ucaggacaguucccugcaaauu

SEQ ID NO: 275060 - RNA, 22 nt, Human
ugauuauauucuaacuucauaa

SEQ ID NO: 275061 - RNA, 22 nt, Human
uucuuugggcaauugcuggccc

SEQ ID NO: 275062 - RNA, 22 nt, Human
agggugcaaaagcaaggacagu

SEQ ID NO: 275063 - RNA, 22 nt, Human
caguggcagaucaccaacugga

SEQ ID NO: 275064 - RNA, 22 nt, Human
cugagacuuucaugugcuuuua

SEQ ID NO: 275065 - RNA, 22 nt, Human
auauguguauuugguuagccua

SEQ ID NO: 275066 - RNA, 22 nt, Human
auuauaggcuugagccaccgug

SEQ ID NO: 275067 - RNA, 22 nt, Human
gauagucaccucccuuaacuuu

SEQ ID NO: 275068 - RNA, 22 nt, Human
auuucaguguugguuagcaagc

SEQ ID NO: 275069 - RNA, 22 nt, Human
ccuuuuaagggagacuagagau

SEQ ID NO: 275070 - RNA, 23 nt, Human
ccagggccccuacaccacugucc

SEQ ID NO: 275071 - RNA, 22 nt, Human
cacacuaucuuccuauccuggc

SEQ ID NO: 275072 - RNA, 22 nt, Human
agcagugugggcugcacgcugg

SEQ ID NO: 275073 - RNA, 16 nt, Human
ugguggggaggacagc

SEQ ID NO: 275074 - RNA, 22 nt, Human
uuguuuauguaauuggcacacu

SEQ ID NO: 275075 - RNA, 19 nt, Human
gaggaggaaaacuagugua

SEQ ID NO: 275076 - RNA, 22 nt, Human
uucuguuugccauauauaguag

SEQ ID NO: 275077 - RNA, 22 nt, Human
ggguccaggcggcauaguugua

SEQ ID NO: 275078 - RNA, 22 nt, Human
cccaggcagucuggcucuaaag

SEQ ID NO: 275079 - RNA, 22 nt, Human
cagaggaggccaccgcauaggc

SEQ ID NO: 275080 - RNA, 22 nt, Human
cugcaggguuucgccaguugug

SEQ ID NO: 275081 - RNA, 22 nt, Human
aagaacauguuaaaagauucac

SEQ ID NO: 275082 - RNA, 22 nt, Human
uggcagcuugaaugcagucuuu

SEQ ID NO: 275083 - RNA, 21 nt, Human
ucuagaauccuguauaagacu

SEQ ID NO: 275084 - RNA, 22 nt, Human
aagcaggcccugggccagggga

SEQ ID NO: 275085 - RNA, 22 nt, Human
acagguguagcaggagcaucaa

SEQ ID NO: 275086 - RNA, 22 nt, Human
gagcucauuguggauggauggg

SEQ ID NO: 275087 - RNA, 22 nt, Human
cacaugcauuggcaaaagugua

SEQ ID NO: 275088 - RNA, 22 nt, Human
uuuggaauggaauagagauugc

SEQ ID NO: 275089 - RNA, 22 nt, Human
aggagcugggcccaaggaugcu

SEQ ID NO: 275090 - RNA, 22 nt, Human
auaaagcauacuuuguaugacu

SEQ ID NO: 275091 - RNA, 22 nt, Human
cacaccagauggcagcguggga

SEQ ID NO: 275092 - RNA, 22 nt, Human
cuggcuguaacauuuugccaua

SEQ ID NO: 275093 - RNA, 22 nt, Human
uacaaaaaauugauacugacga

SEQ ID NO: 275094 - RNA, 22 nt, Human
ccagggcagccaacccagaugc

SEQ ID NO: 275095 - RNA, 22 nt, Human
acacuuggagcaacacuuaugg

SEQ ID NO: 275096 - RNA, 22 nt, Human
ugcagagauccuggacugagcg

SEQ ID NO: 275097 - RNA, 22 nt, Human
cuccagugcccuccuugggggc

SEQ ID NO: 275098 - RNA, 22 nt, Human
agguaacacuacuuaguauacu

SEQ ID NO: 275099 - RNA, 19 nt, Human
aaaguuuuauucucauuug

SEQ ID NO: 275100 - RNA, 22 nt, Human
uuaaaggcgauaaggcaguguu

SEQ ID NO: 275101 - RNA, 22 nt, Human
uguccucaucuuuuccagaaau

SEQ ID NO: 275102 - RNA, 22 nt, Human
ccuggcagcauugguagagauu

SEQ ID NO: 275103 - RNA, 22 nt, Human
cagcuggcugcggugaggggac

SEQ ID NO: 275104 - RNA, 22 nt, Human
uauuuccacccucaguaaggaa

SEQ ID NO: 275105 - RNA, 22 nt, Human
gacauaaaauggaauucuguug

SEQ ID NO: 275106 - RNA, 22 nt, Human
uuuuacaguuccaugcaaagcg

SEQ ID NO: 275107 - RNA, 22 nt, Human
gggccucagcucugcucugcaa

SEQ ID NO: 275108 - RNA, 22 nt, Human
acauucuuugaguuuuguuaaa

SEQ ID NO: 275109 - RNA, 22 nt, Human
aauuugugaaucugucucuuga

SEQ ID NO: 275110 - RNA, 22 nt, Human
cuggcagggcucuuugggugcu

SEQ ID NO: 275111 - RNA, 22 nt, Human
ucugccagguggggagaggcca

SEQ ID NO: 275112 - RNA, 22 nt, Human
cagcaugaucccaguugauugc

SEQ ID NO: 275113 - RNA, 22 nt, Human
caggaagauuguggaggugguu

SEQ ID NO: 275114 - RNA, 22 nt, Human
acucugggagaggacaaacaaa

SEQ ID NO: 275115 - RNA, 22 nt, Human
gcagcuggcucagagagguggg

SEQ ID NO: 275116 - RNA, 22 nt, Human
ucuauuuuauacucaaaucuuc

SEQ ID NO: 275117 - RNA, 20 nt, Human
ucccucaggucauugggcug

SEQ ID NO: 275118 - RNA, 22 nt, Human
uggcaggaaaguaacagagcac

SEQ ID NO: 275119 - RNA, 22 nt, Human
augugcuguaauccauugaagg

SEQ ID NO: 275120 - RNA, 22 nt, Human
aaggguccaaggcuuugcguuu

SEQ ID NO: 275121 - RNA, 22 nt, Human
cagaccaucuugaagcaaacug

SEQ ID NO: 275122 - RNA, 16 nt, Human
uucagagcggcucaua

SEQ ID NO: 275123 - RNA, 22 nt, Human
auuauguaacugugguucagca

SEQ ID NO: 275124 - RNA, 22 nt, Human
aacaaagaagacugguuauuuu

SEQ ID NO: 275125 - RNA, 22 nt, Human
cacagcuuguuuagugacucac

SEQ ID NO: 275126 - RNA, 22 nt, Human
gaggccugcagcguggucccug

SEQ ID NO: 275127 - RNA, 22 nt, Human
cacaugaguguaggaagaggga

SEQ ID NO: 275128 - RNA, 22 nt, Human
agucauuuaucuuagccauuau

SEQ ID NO: 275129 - RNA, 20 nt, Human
gcccaagguccagaaggggg

SEQ ID NO: 275130 - RNA, 22 nt, Human
uaguacaguuccaucaaagcag

SEQ ID NO: 275131 - RNA, 22 nt, Human
ggaaagaaagugugaacaacuu

SEQ ID NO: 275132 - RNA, 22 nt, Human
augaacuaucaucaguuccacc

SEQ ID NO: 275133 - RNA, 22 nt, Human
guggaaauuuuaggaucaucuu

SEQ ID NO: 275134 - RNA, 22 nt, Human
ugcagagguuuccaggcaaguu

SEQ ID NO: 275135 - RNA, 22 nt, Human
ccugggucuugguucaugcucu

SEQ ID NO: 275136 - RNA, 18 nt, Human
uggaggcagaguucuggc

SEQ ID NO: 275137 - RNA, 22 nt, Human
uucucacaguaccuaacaugua

SEQ ID NO: 275138 - RNA, 21 nt, Human
uucauaaaccauucucaugca

SEQ ID NO: 275139 - RNA, 22 nt, Human
auaauauuuggauaggacagua

SEQ ID NO: 275140 - RNA, 22 nt, Human
agcugccaaguuucucaguuua

SEQ ID NO: 275141 - RNA, 22 nt, Human
aauagcuuggacccauugcuuu

SEQ ID NO: 275142 - RNA, 22 nt, Human
uucccaaagcuuugucugugaa

SEQ ID NO: 275143 - RNA, 22 nt, Human
aguaaacagaaagcaagaugau

SEQ ID NO: 275144 - RNA, 22 nt, Human
uaaggcuaucuuuugagugugu

SEQ ID NO: 275145 - RNA, 22 nt, Human
aucucaaaugauuacaccaagc

SEQ ID NO: 275146 - RNA, 22 nt, Human
acauuucucuugaugucucuau

SEQ ID NO: 275147 - RNA, 22 nt, Human
guacauuucauuuaaaugaugu

SEQ ID NO: 275148 - RNA, 22 nt, Human
ugugcugcucucagugacagcc

SEQ ID NO: 275149 - RNA, 22 nt, Human
aggcugcuggcaggcguggacg

SEQ ID NO: 275150 - RNA, 22 nt, Human
ugcuuucauauugccuaugacu

SEQ ID NO: 275151 - RNA, 22 nt, Human
uuacaguggcagaguuggguag

SEQ ID NO: 275152 - RNA, 22 nt, Human
guccaguguguuuaucuuggau

SEQ ID NO: 275153 - RNA, 22 nt, Human
ucaaggaaugacuauaugagga

SEQ ID NO: 275154 - RNA, 22 nt, Human
gaaagugccagaauaggaggcc

SEQ ID NO: 275155 - RNA, 22 nt, Human
uucuagacuucaggcauucucc

SEQ ID NO: 275156 - RNA, 22 nt, Human
gaaauagacacuuucuaugaau

SEQ ID NO: 275157 - RNA, 22 nt, Human
cauguuaauaugcauugaguac

SEQ ID NO: 275158 - RNA, 22 nt, Human
aauuccacagaugucuaucugu

SEQ ID NO: 275159 - RNA, 22 nt, Human
uugggacaucuggcauacaguu

SEQ ID NO: 275160 - RNA, 22 nt, Human
uaggaacuagacucaugacuca

SEQ ID NO: 275161 - RNA, 22 nt, Human
agcaucuaaacuaucaguuuga

SEQ ID NO: 275162 - RNA, 22 nt, Human
cagggccugcuuccuucuuguu

SEQ ID NO: 275163 - RNA, 22 nt, Human
gaaguggggaagcaacaggaga

SEQ ID NO: 275164 - RNA, 22 nt, Human
uuucuguaauuaaaagggcagg

SEQ ID NO: 275165 - RNA, 22 nt, Human
gggcucugccuggcugggagua

SEQ ID NO: 275166 - RNA, 22 nt, Human
acuguugaagugccagcuugau

SEQ ID NO: 275167 - RNA, 22 nt, Human
gccuccaggguagaggaggaag

SEQ ID NO: 275168 - RNA, 22 nt, Human
aagucccugguuccuagcaaaa

SEQ ID NO: 275169 - RNA, 22 nt, Human
cuucaagauauuucuagaauca

SEQ ID NO: 275170 - RNA, 22 nt, Human
uggcagugggaauggacaaaca

SEQ ID NO: 275171 - RNA, 22 nt, Human
cagcccugcacgcugccuccgc

SEQ ID NO: 275172 - RNA, 17 nt, Human
ccagguggaaucgugga

SEQ ID NO: 275173 - RNA, 22 nt, Human
gccugugcuguucccucugcca

SEQ ID NO: 275174 - RNA, 22 nt, Human
aguguucuucugggguaugcuc

SEQ ID NO: 275175 - RNA, 22 nt, Human
augguacaaugauggauagugg

SEQ ID NO: 275176 - RNA, 22 nt, Human
aagcaaagugaauuuugccaag

SEQ ID NO: 275177 - RNA, 22 nt, Human
ccuuggauuuugugcccacgcc

SEQ ID NO: 275178 - RNA, 22 nt, Human
ucucauugguauauacaugugu

SEQ ID NO: 275179 - RNA, 22 nt, Human
agaucagacacggcuugugacg

SEQ ID NO: 275180 - RNA, 22 nt, Human
uggugggcacagugcccaggcu

SEQ ID NO: 275181 - RNA, 22 nt, Human
uauuucugaggcccaggaagug

SEQ ID NO: 275182 - RNA, 20 nt, Human
agacuuaggcaauuuaggcu

SEQ ID NO: 275183 - RNA, 22 nt, Human
ucagagaauucucagaugacuc

SEQ ID NO: 275184 - RNA, 22 nt, Human
auacauguugagaaaauaucug

SEQ ID NO: 275185 - RNA, 22 nt, Human
gcauuuagcuuuaaaauauuuc

SEQ ID NO: 275186 - RNA, 22 nt, Human
ccaugccauacuggccacccgg

SEQ ID NO: 275187 - RNA, 22 nt, Human
uuacauaacgguaugaaaaaug

SEQ ID NO: 275188 - RNA, 22 nt, Human
ugccugggccucugaggaaggc

SEQ ID NO: 275189 - RNA, 22 nt, Human
ucuguuuagacucaguugaaac

SEQ ID NO: 275190 - RNA, 22 nt, Human
gccuguccuauacaggcggcug

SEQ ID NO: 275191 - RNA, 22 nt, Human
cugaggcauguuacaggacaua

SEQ ID NO: 275192 - RNA, 22 nt, Human
aauaauauuugaagcuucaaag

SEQ ID NO: 275193 - RNA, 22 nt, Human
uuuacagaauguugaauuuggg

SEQ ID NO: 275194 - RNA, 22 nt, Human
uucuucaaccaucuacauaaac

SEQ ID NO: 275195 - RNA, 22 nt, Human
auguaaaggcagacuuuaauuu

SEQ ID NO: 275196 - RNA, 19 nt, Human
ccagagacauuggcaucuu

SEQ ID NO: 275197 - RNA, 22 nt, Human
gaauguaagugggcagaagaca

SEQ ID NO: 275198 - RNA, 22 nt, Human
aaaaccacaaugacuuuugcac

SEQ ID NO: 275199 - RNA, 22 nt, Human
gucucuaucauagcugaacccu

SEQ ID NO: 275200 - RNA, 22 nt, Human
cucuugggugggcagugggccu

SEQ ID NO: 275201 - RNA, 21 nt, Human
ccuucucuugcuucagcuuca

SEQ ID NO: 275202 - RNA, 22 nt, Human
gcugggucuggcugugagccgg

SEQ ID NO: 275203 - RNA, 22 nt, Human
uucuuuauugagacuucauugu

SEQ ID NO: 275204 - RNA, 22 nt, Human
ugcuggcugccagguucccugu

SEQ ID NO: 275205 - RNA, 22 nt, Human
gucaaguuaagauaaggucaug

SEQ ID NO: 275206 - RNA, 22 nt, Human
ugcuggagucucuugacccugg

SEQ ID NO: 275207 - RNA, 22 nt, Human
ccaaaauaacagcccaauucac

SEQ ID NO: 275208 - RNA, 22 nt, Human
uacauguuauuucacuauuggu

SEQ ID NO: 275209 - RNA, 22 nt, Human
gacagcagccacagggagaggg

SEQ ID NO: 275210 - RNA, 22 nt, Human
uuauugcuuuggaaaacacuca

SEQ ID NO: 275211 - RNA, 22 nt, Human
agacaucucuaugcaggaucuc

SEQ ID NO: 275212 - RNA, 22 nt, Human
agucuagaggauggguccagau

SEQ ID NO: 275213 - RNA, 22 nt, Human
ggagggagucagcugauuagaa

SEQ ID NO: 275214 - RNA, 22 nt, Human
aaacagcuaauggccaggaaua

SEQ ID NO: 275215 - RNA, 22 nt, Human
ucccugggcacaaucugcuggc

SEQ ID NO: 275216 - RNA, 22 nt, Human
agcucccugcacgacccugccc

SEQ ID NO: 275217 - RNA, 22 nt, Human
uuccaaguccagccaggccaaa

SEQ ID NO: 275218 - RNA, 22 nt, Human
gcugggaaguggcagagcugga

SEQ ID NO: 275219 - RNA, 22 nt, Human
gcacuucucgggggcgcugucu

SEQ ID NO: 275220 - RNA, 22 nt, Human
gcauugaaauggcaaaaagaga

SEQ ID NO: 275221 - RNA, 22 nt, Human
gccuucaggaaaucaguccuug

SEQ ID NO: 275222 - RNA, 22 nt, Human
cagaggguugucaggcgccuug

SEQ ID NO: 275223 - RNA, 21 nt, Human
guucuguugacugugggcauc

SEQ ID NO: 275224 - RNA, 22 nt, Human
gaauggcugaaugucuuaaauu

SEQ ID NO: 275225 - RNA, 22 nt, Human
ucagaggagaccaaggggaaua

SEQ ID NO: 275226 - RNA, 20 nt, Human
ggccauggguugccugaggu

SEQ ID NO: 275227 - RNA, 22 nt, Human
aagcaacagaaacauucuaaua

SEQ ID NO: 275228 - RNA, 22 nt, Human
uggagggcauagcuguucuuuc

SEQ ID NO: 275229 - RNA, 19 nt, Human
cccagucuagguccuagga

SEQ ID NO: 275230 - RNA, 22 nt, Human
ucaggcagucugacuccggagg

SEQ ID NO: 275231 - RNA, 22 nt, Human
ggcccagcuguauauuacaguu

SEQ ID NO: 275232 - RNA, 22 nt, Human
uuucucugggcuguuggcagcc

SEQ ID NO: 275233 - RNA, 22 nt, Human
cucucaugagcauuccuaaggg

SEQ ID NO: 275234 - RNA, 22 nt, Human
aagaacuuugauuucauugcau

SEQ ID NO: 275235 - RNA, 22 nt, Human
acaggggaauuuacugucauua

SEQ ID NO: 275236 - RNA, 22 nt, Human
agcugcugcccauaggugacau

SEQ ID NO: 275237 - RNA, 22 nt, Human
caagaaccgcaauuacuuuugc

SEQ ID NO: 275238 - RNA, 22 nt, Human
gauuuuacaaacugcaggaccc

SEQ ID NO: 275239 - RNA, 20 nt, Human
aaaaacaguaaugcugaaga

SEQ ID NO: 275240 - RNA, 22 nt, Human
uagcaucaugaucagaacuguu

SEQ ID NO: 275241 - RNA, 22 nt, Human
uggauaaauggugcuaucaccc

SEQ ID NO: 275242 - RNA, 22 nt, Human
gcagggcaguaagagcuagagu

SEQ ID NO: 275243 - RNA, 22 nt, Human
auuuccauguccaaaaauuagu

SEQ ID NO: 275244 - RNA, 22 nt, Human
ccuggaccugcagcaucagcau

SEQ ID NO: 275245 - RNA, 22 nt, Human
uucauucugcaguucucagcuc

SEQ ID NO: 275246 - RNA, 22 nt, Human
ccuagaugggauggcggccggg

SEQ ID NO: 275247 - RNA, 22 nt, Human
auuauguagcuaaaaauugugu

SEQ ID NO: 275248 - RNA, 22 nt, Human
ucagggccacgcggaggugacg

SEQ ID NO: 275249 - RNA, 22 nt, Human
gcucuagguuccuagccaaguc

SEQ ID NO: 275250 - RNA, 22 nt, Human
auuacugagcuuguagcugcau

SEQ ID NO: 275251 - RNA, 22 nt, Human
cagggcuggauccuccagacuc

SEQ ID NO: 275252 - RNA, 22 nt, Human
ucauauaaguuuaaaacuaucu

SEQ ID NO: 275253 - RNA, 22 nt, Human
ucacaggaggacugaaagauau

SEQ ID NO: 275254 - RNA, 19 nt, Human
agggccugagcagauguug

SEQ ID NO: 275255 - RNA, 22 nt, Human
ggccugugggaggacagcuggg

SEQ ID NO: 275256 - RNA, 21 nt, Human
ccugccaggaaacugaguguc

SEQ ID NO: 275257 - RNA, 22 nt, Human
cuggcccagucucagaguguca

SEQ ID NO: 275258 - RNA, 22 nt, Human
acucaggcacucagcccucgcc

SEQ ID NO: 275259 - RNA, 20 nt, Human
agcuucuucugucuaauuuu

SEQ ID NO: 275260 - RNA, 22 nt, Human
uaauucuucaggccuuuugucu

SEQ ID NO: 275261 - RNA, 22 nt, Human
ugugaaagauacuaggcagagg

SEQ ID NO: 275262 - RNA, 22 nt, Human
uggcugucagcugccuggugcg

SEQ ID NO: 275263 - RNA, 20 nt, Human
ucugugcauugccugcuggu

SEQ ID NO: 275264 - RNA, 18 nt, Human
gccagccaggcguugcuc

SEQ ID NO: 275265 - RNA, 22 nt, Human
cuggaaggagaaggaggcugug

SEQ ID NO: 275266 - RNA, 22 nt, Human
accagaaaggaugccuccuucc

SEQ ID NO: 275267 - RNA, 17 nt, Human
agcacuugaaaauuucu

SEQ ID NO: 275268 - RNA, 22 nt, Human
uggaggagggcuggugucugua

SEQ ID NO: 275269 - RNA, 22 nt, Human
aauguaaaguugggcacaaaug

SEQ ID NO: 275270 - RNA, 22 nt, Human
gaauuucuggacccuuugagaa

SEQ ID NO: 275271 - RNA, 22 nt, Human
ugaggcaacagaaagggccaau

SEQ ID NO: 275272 - RNA, 22 nt, Human
caacuuuaugauugguuuguca

SEQ ID NO: 275273 - RNA, 22 nt, Human
ccauuccaugugcuacacauaa

SEQ ID NO: 275274 - RNA, 22 nt, Human
acacugugacaagaaagagcug

SEQ ID NO: 275275 - RNA, 22 nt, Human
uagacuagaggaucagcaaggg

SEQ ID NO: 275276 - RNA, 22 nt, Human
auccuggcuuuaggucagaggc

SEQ ID NO: 275277 - RNA, 22 nt, Human
agcuucuccaucugcccagaga

SEQ ID NO: 275278 - RNA, 22 nt, Human
uggcuucucauuugcauuaaac

SEQ ID NO: 275279 - RNA, 22 nt, Human
cugggacaguucagguagggca

SEQ ID NO: 275280 - RNA, 23 nt, Human
uuuggcauguuaacuucacuuac

SEQ ID NO: 275281 - RNA, 22 nt, Human
cuuauuagugucugucugaguu

SEQ ID NO: 275282 - RNA, 22 nt, Human
ucugggccagaucuagggaucu

SEQ ID NO: 275283 - RNA, 22 nt, Human
aaugguauuugucaagcauagu

SEQ ID NO: 275284 - RNA, 22 nt, Human
aucucugcaucccucaagguug

SEQ ID NO: 275285 - RNA, 22 nt, Human
uuggaaaaugaggcacagagag

SEQ ID NO: 275286 - RNA, 22 nt, Human
agcuggcugccuucuccuuagg

SEQ ID NO: 275287 - RNA, 22 nt, Human
ggcaggcaaggcagccugguga

SEQ ID NO: 275288 - RNA, 22 nt, Human
ggcuggugaguucagagaaccc

SEQ ID NO: 275289 - RNA, 20 nt, Human
agcaggccuuggggagagga

SEQ ID NO: 275290 - RNA, 23 nt, Human
aggagccccuaauucugggcagc

SEQ ID NO: 275291 - RNA, 20 nt, Human
uggcuucauaaugguuucug

SEQ ID NO: 275292 - RNA, 22 nt, Human
agcaagaugcauuauuucuuau

SEQ ID NO: 275293 - RNA, 18 nt, Human
cagcagagacauucaaaa

SEQ ID NO: 275294 - RNA, 22 nt, Human
uccagccuccuauuuacccuaa

SEQ ID NO: 275295 - RNA, 22 nt, Human
aggugagguuugggagguguca

SEQ ID NO: 275296 - RNA, 21 nt, Human
uacacaaagcgugguccagag

SEQ ID NO: 275297 - RNA, 22 nt, Human
ugaggaagugguuguaugguuu

SEQ ID NO: 275298 - RNA, 22 nt, Human
ucuguucaguugauguaguuuu

SEQ ID NO: 275299 - RNA, 20 nt, Human
uuuuagcacuuguuauggug

SEQ ID NO: 275300 - RNA, 22 nt, Human
aggcuuuggggcauucuguguu

SEQ ID NO: 275301 - RNA, 22 nt, Human
ccaugcauauaauagugccugg

SEQ ID NO: 275302 - RNA, 22 nt, Human
aaugcacagcuaaagugguucc

SEQ ID NO: 275303 - RNA, 22 nt, Human
uucagcaacauuuguugagugc

SEQ ID NO: 275304 - RNA, 23 nt, Human
auuuccuacuauaaaagagguaa

SEQ ID NO: 275305 - RNA, 19 nt, Human
caagauuuguucacacaug

SEQ ID NO: 275306 - RNA, 22 nt, Human
uauucacagcugccgcacucag

SEQ ID NO: 275307 - RNA, 22 nt, Human
aagugcauaaguaugauuauuu

SEQ ID NO: 275308 - RNA, 22 nt, Human
aacuguuggaggauuauuuugc

SEQ ID NO: 275309 - RNA, 22 nt, Human
uuaagaaggcuguuugcuagac

SEQ ID NO: 275310 - RNA, 22 nt, Human
ugcuggcccuggcucagggaac

SEQ ID NO: 275311 - RNA, 22 nt, Human
ucagcugcaguuucacaagcac

SEQ ID NO: 275312 - RNA, 17 nt, Human
gcuaggagagggaggag

SEQ ID NO: 275313 - RNA, 19 nt, Human
uccugggcugggccagguc

SEQ ID NO: 275314 - RNA, 22 nt, Human
uggcaggagacacauggcauag

SEQ ID NO: 275315 - RNA, 22 nt, Human
cuccagagagaaaggaggccgc

SEQ ID NO: 275316 - RNA, 19 nt, Human
uuugugaagaaaaugaugc

SEQ ID NO: 275317 - RNA, 22 nt, Human
agucacccuccaacucuccacu

SEQ ID NO: 275318 - RNA, 22 nt, Human
gcucugggauuaccagccuuag

SEQ ID NO: 275319 - RNA, 22 nt, Human
ccucacaguuuggcuaacugug

SEQ ID NO: 275320 - RNA, 21 nt, Human
cuuaagauggcauaguacgaa

SEQ ID NO: 275321 - RNA, 22 nt, Human
ccaugugucuccccuggaagua

SEQ ID NO: 275322 - RNA, 22 nt, Human
gcuuugcugaggucugaggauu

SEQ ID NO: 275323 - RNA, 22 nt, Human
acugccuuauaugcugugugug

SEQ ID NO: 275324 - RNA, 22 nt, Human
auucuuuauugcugaugguuau

SEQ ID NO: 275325 - RNA, 22 nt, Human
caaauggucauuucucuuuugu

SEQ ID NO: 275326 - RNA, 22 nt, Human
auuauucagucuuguaaggagu

SEQ ID NO: 275327 - RNA, 22 nt, Human
uggcacagacagcacagcaaug

SEQ ID NO: 275328 - RNA, 22 nt, Human
gcagcccagcagggcccggagc

SEQ ID NO: 275329 - RNA, 22 nt, Human
caacuuuugacacgugugcuaa

SEQ ID NO: 275330 - RNA, 22 nt, Human
ucuucagacuguuguucuuuug

SEQ ID NO: 275331 - RNA, 22 nt, Human
cugcccugcuggagaucacagu

SEQ ID NO: 275332 - RNA, 19 nt, Human
gccucugcuggggacaggc

SEQ ID NO: 275333 - RNA, 22 nt, Human
gggcuggacaucuaagguagcu

SEQ ID NO: 275334 - RNA, 22 nt, Human
cugacugucucuucucccauga

SEQ ID NO: 275335 - RNA, 22 nt, Human
ccugccuggcuuccagaagaga

SEQ ID NO: 275336 - RNA, 22 nt, Human
uucaacauuuuugaguuuaggu

SEQ ID NO: 275337 - RNA, 22 nt, Human
agagucaaaauuuaccagaaug

SEQ ID NO: 275338 - RNA, 22 nt, Human
agugcauucugucaucuugguu

SEQ ID NO: 275339 - RNA, 22 nt, Human
ggagaggggcaaguuuaucuag

SEQ ID NO: 275340 - RNA, 22 nt, Human
auaagcugaauagucaacacaa

SEQ ID NO: 275341 - RNA, 22 nt, Human
cuggcagcgugagcagcaucca

SEQ ID NO: 275342 - RNA, 22 nt, Human
cuauuauuauguuaacuggacu

SEQ ID NO: 275343 - RNA, 22 nt, Human
uuacagaggcuuccagggccca

SEQ ID NO: 275344 - RNA, 22 nt, Human
aggggaagagcccuuuacaugg

SEQ ID NO: 275345 - RNA, 20 nt, Human
agugauuuguuaguacauug

SEQ ID NO: 275346 - RNA, 23 nt, Human
cagggcugguagggaagagcgug

SEQ ID NO: 275347 - RNA, 22 nt, Human
aggccaguuguucagugggccg

SEQ ID NO: 275348 - RNA, 22 nt, Human
cagcagagcugugugggaaggg

SEQ ID NO: 275349 - RNA, 22 nt, Human
cuagcacugagaauagugcaua

SEQ ID NO: 275350 - RNA, 22 nt, Human
ucugcccagccagacccaaggu

SEQ ID NO: 275351 - RNA, 16 nt, Human
uucucugggguugugc

SEQ ID NO: 275352 - RNA, 22 nt, Human
uaauuuuuccacguacacuggg

SEQ ID NO: 275353 - RNA, 22 nt, Human
uugaggagguccuggguuuacu

SEQ ID NO: 275354 - RNA, 22 nt, Human
ucccagagauuuccucuccuuc

SEQ ID NO: 275355 - RNA, 22 nt, Human
uugccaucccuuaccucaguca

SEQ ID NO: 275356 - RNA, 22 nt, Human
auuucucauguacaaaaacacu

SEQ ID NO: 275357 - RNA, 22 nt, Human
guauauauuggauaaaccagag

SEQ ID NO: 275358 - RNA, 22 nt, Human
agacaucuugcacacauauacu

SEQ ID NO: 275359 - RNA, 22 nt, Human
cucagcaguauacucugaagau

SEQ ID NO: 275360 - RNA, 22 nt, Human
gaucuucucuuuaguagaaaca

SEQ ID NO: 275361 - RNA, 22 nt, Human
gcaugucuguaauuacagagcc

SEQ ID NO: 275362 - RNA, 22 nt, Human
uuauuuugccacaggugaccuu

SEQ ID NO: 275363 - RNA, 22 nt, Human
acucuguagggacgguucuccc

SEQ ID NO: 275364 - RNA, 23 nt, Human
ggcucagaaaaaguccuggccuc

SEQ ID NO: 275365 - RNA, 22 nt, Human
uguaaagagaaggcuuauaaag

SEQ ID NO: 275366 - RNA, 22 nt, Human
acaggugugagaacaugccuug

SEQ ID NO: 275367 - RNA, 22 nt, Human
aggcccagagagccaguuagug

SEQ ID NO: 275368 - RNA, 19 nt, Human
uugagcagugcuuagcacc

SEQ ID NO: 275369 - RNA, 22 nt, Human
aagggcagagggaaucccacau

SEQ ID NO: 275370 - RNA, 22 nt, Human
aauuuuacuaaucugaguguga

SEQ ID NO: 275371 - RNA, 22 nt, Human
cugaggagaacaaugagaucaa

SEQ ID NO: 275372 - RNA, 22 nt, Human
aaauuagaagugcucaggaaua

SEQ ID NO: 275373 - RNA, 22 nt, Human
ucagugugaguaccaugcucag

SEQ ID NO: 275374 - RNA, 22 nt, Human
agggccagcacuccuggcagga

SEQ ID NO: 275375 - RNA, 22 nt, Human
ucccacauuacccugacugaca

SEQ ID NO: 275376 - RNA, 22 nt, Human
acagcuuuaguguggguggugc

SEQ ID NO: 275377 - RNA, 22 nt, Human
ucugucauuagccuugacugua

SEQ ID NO: 275378 - RNA, 22 nt, Human
caauuagacauuuauuggccag

SEQ ID NO: 275379 - RNA, 22 nt, Human
uguuuuaagagcgcacuuuaua

SEQ ID NO: 275380 - RNA, 22 nt, Human
cagagucucugggaggcugggu

SEQ ID NO: 275381 - RNA, 22 nt, Human
gauacacuggagcuuccugaca

SEQ ID NO: 275382 - RNA, 22 nt, Human
caucacauguaggcagcaucac

SEQ ID NO: 275383 - RNA, 22 nt, Human
uggcuucuauugcuguggcauu

SEQ ID NO: 275384 - RNA, 22 nt, Human
uuccuggaaauuaugcucaccu

SEQ ID NO: 275385 - RNA, 22 nt, Human
uuugaaauuaagauauugucca

SEQ ID NO: 275386 - RNA, 22 nt, Human
ugaguucaaguccaaguugcug

SEQ ID NO: 275387 - RNA, 22 nt, Human
aucauguguaauuucaagcuac

SEQ ID NO: 275388 - RNA, 22 nt, Human
auagacauuauaacacagagcu

SEQ ID NO: 275389 - RNA, 22 nt, Human
ggcuccuguggcaagacagcuu

SEQ ID NO: 275390 - RNA, 22 nt, Human
aggcugccucgugagcucgcug

SEQ ID NO: 275391 - RNA, 22 nt, Human
aaagcaguauauugguaguugu

SEQ ID NO: 275392 - RNA, 22 nt, Human
agaugaaaauacgugacuuuaa

SEQ ID NO: 275393 - RNA, 21 nt, Human
agaaaauggcguuuuagauuu

SEQ ID NO: 275394 - RNA, 23 nt, Human
aacacaaagcugauuccaguggc

SEQ ID NO: 275395 - RNA, 22 nt, Human
gcagggcagaccuccagccuau

SEQ ID NO: 275396 - RNA, 22 nt, Human
uagcugggagugucugaugggu

SEQ ID NO: 275397 - RNA, 22 nt, Human
aaaagagcaaacauguaauagu

SEQ ID NO: 275398 - RNA, 22 nt, Human
cagcauggacccaucgcugagu

SEQ ID NO: 275399 - RNA, 22 nt, Human
aauauggcuccauuccuuuagg

SEQ ID NO: 275400 - RNA, 22 nt, Human
uuccuucuuccagaggcugccc

SEQ ID NO: 275401 - RNA, 23 nt, Human
agagugcagagauaugcuugugu

SEQ ID NO: 275402 - RNA, 22 nt, Human
ggccaccaaaguccuguggcuu

SEQ ID NO: 275403 - RNA, 22 nt, Human
gaaugugucacccugucccaug

SEQ ID NO: 275404 - RNA, 22 nt, Human
ggcaggaagcucauguggacug

SEQ ID NO: 275405 - RNA, 22 nt, Human
agccucaguuucaggccuccuc

SEQ ID NO: 275406 - RNA, 22 nt, Human
caccuggaguagcaagguaauu

SEQ ID NO: 275407 - RNA, 22 nt, Human
ugcccagccccuaucccuggga

SEQ ID NO: 275408 - RNA, 22 nt, Human
uuugauuuucagcaauaguggc

SEQ ID NO: 275409 - RNA, 22 nt, Human
aaggaaacacugaacuuuguag

SEQ ID NO: 275410 - RNA, 22 nt, Human
ugucuacuugggcucuacagca

SEQ ID NO: 275411 - RNA, 22 nt, Human
guccccagaaaggugaggcagg

SEQ ID NO: 275412 - RNA, 22 nt, Human
agacacugaaauguauugaaga

SEQ ID NO: 275413 - RNA, 22 nt, Human
cuucagaaccagccagaagagg

SEQ ID NO: 275414 - RNA, 22 nt, Human
cuggcuccaggucaugcacuca

SEQ ID NO: 275415 - RNA, 22 nt, Human
uacugaaacucuuguaaauauc

SEQ ID NO: 275416 - RNA, 22 nt, Human
ucagagacuguaggagcagccu

SEQ ID NO: 275417 - RNA, 22 nt, Human
ccagggaguuuccaaucugaga

SEQ ID NO: 275418 - RNA, 22 nt, Human
uagcaggcauggagaugacugu

SEQ ID NO: 275419 - RNA, 22 nt, Human
acaggccuuggcaggcauguga

SEQ ID NO: 275420 - RNA, 22 nt, Human
caggucagcuggugccccaggu

SEQ ID NO: 275421 - RNA, 22 nt, Human
caggugucagcagcacuguacu

SEQ ID NO: 275422 - RNA, 23 nt, Human
uucuuuauaaaucaaugggaugu

SEQ ID NO: 275423 - RNA, 22 nt, Human
cuuaaagaguauuuaauauaau

SEQ ID NO: 275424 - RNA, 22 nt, Human
guacccaggcacgccuugcuga

SEQ ID NO: 275425 - RNA, 23 nt, Human
guacacauaguguaguuauauuu

SEQ ID NO: 275426 - RNA, 22 nt, Human
uuggcugcugaaauauguucug

SEQ ID NO: 275427 - RNA, 22 nt, Human
gaauguuugacuaaagguagcu

SEQ ID NO: 275428 - RNA, 22 nt, Human
aggcucugaaggagaaccuguu

SEQ ID NO: 275429 - RNA, 16 nt, Human
ccagguggggcuguga

SEQ ID NO: 275430 - RNA, 22 nt, Human
ugucucugucucccagguugug

SEQ ID NO: 275431 - RNA, 22 nt, Human
aacagcagcugaggagcugggc

SEQ ID NO: 275432 - RNA, 19 nt, Human
ccugaggaaaagaugauug

SEQ ID NO: 275433 - RNA, 21 nt, Human
ugauaggguuugggcaauuau

SEQ ID NO: 275434 - RNA, 22 nt, Human
uguaauuauguuguuagaguau

SEQ ID NO: 275435 - RNA, 22 nt, Human
ucacacguccuugcuacuccuc

SEQ ID NO: 275436 - RNA, 22 nt, Human
ucuggagcuugaagcuuugguu

SEQ ID NO: 275437 - RNA, 22 nt, Human
cuugcacacauguacaugugua

SEQ ID NO: 275438 - RNA, 22 nt, Human
cugaaggauuuaguucuuugcu

SEQ ID NO: 275439 - RNA, 22 nt, Human
agggauggaagcucgucugcaa

SEQ ID NO: 275440 - RNA, 22 nt, Human
ccuagggauguguuagccagau

SEQ ID NO: 275441 - RNA, 22 nt, Human
ucaggcagguuggcugcagguc

SEQ ID NO: 275442 - RNA, 22 nt, Human
aggcaguuuaggcagcgauuua

SEQ ID NO: 275443 - RNA, 22 nt, Human
uagaacuuagcacuagacuugu

SEQ ID NO: 275444 - RNA, 22 nt, Human
uguguucaucaugauaucaggu

SEQ ID NO: 275445 - RNA, 22 nt, Human
uaaaguauaagcauuggaguau

SEQ ID NO: 275446 - RNA, 22 nt, Human
augcaggagcccucuugagggc

SEQ ID NO: 275447 - RNA, 22 nt, Human
acagccugagaguggagcuggc

SEQ ID NO: 275448 - RNA, 22 nt, Human
uuuuguuuucuuagaaaccugg

SEQ ID NO: 275449 - RNA, 22 nt, Human
ggaagaggcugagccagguccc

SEQ ID NO: 275450 - RNA, 22 nt, Human
acagucuugagcaucagccaga

SEQ ID NO: 275451 - RNA, 22 nt, Human
ugugacaucgcugugucuguuu

SEQ ID NO: 275452 - RNA, 22 nt, Human
cugcaggcaucuaacugugggc

SEQ ID NO: 275453 - RNA, 22 nt, Human
gaaguucaaugucagcaucuau

SEQ ID NO: 275454 - RNA, 22 nt, Human
uguguucaaucaccaaagguau

SEQ ID NO: 275455 - RNA, 22 nt, Human
uccagggcuggguuggcucagc

SEQ ID NO: 275456 - RNA, 22 nt, Human
cuguggaacuuagugggagaca

SEQ ID NO: 275457 - RNA, 22 nt, Human
aggcucuuugagacuaccugga

SEQ ID NO: 275458 - RNA, 22 nt, Human
caggacucacuucucacauccc

SEQ ID NO: 275459 - RNA, 22 nt, Human
uaaauuguguguugcuagggga

SEQ ID NO: 275460 - RNA, 22 nt, Human
ccaaaauuauuacauuuguagg

SEQ ID NO: 275461 - RNA, 22 nt, Human
cccaaggaauaggaucccagga

SEQ ID NO: 275462 - RNA, 22 nt, Human
ucucaagcuuguugguauguuu

SEQ ID NO: 275463 - RNA, 19 nt, Human
agacaaugggguuggcagu

SEQ ID NO: 275464 - RNA, 18 nt, Human
gaaaggagagacaguagg

SEQ ID NO: 275465 - RNA, 23 nt, Human
uggcuucugccccauucucucca

SEQ ID NO: 275466 - RNA, 22 nt, Human
ucaggcuguagggccccuggag

SEQ ID NO: 275467 - RNA, 22 nt, Human
ucugagcuucugccugcugcaa

SEQ ID NO: 275468 - RNA, 22 nt, Human
ggcaaggggucaggcugagaca

SEQ ID NO: 275469 - RNA, 22 nt, Human
ccuggccuuaagggcagggagc

SEQ ID NO: 275470 - RNA, 22 nt, Human
uagggacaaagagcugaggccu

SEQ ID NO: 275471 - RNA, 22 nt, Human
aaaauuauggaguaucccaaag

SEQ ID NO: 275472 - RNA, 21 nt, Human
ucauuuauugagaaaugacug

SEQ ID NO: 275473 - RNA, 22 nt, Human
uugagggagaaagccgaggugu

SEQ ID NO: 275474 - RNA, 22 nt, Human
uggacaugucuucuccaagaaa

SEQ ID NO: 275475 - RNA, 22 nt, Human
cucugggcuuaccugcuuccug

SEQ ID NO: 275476 - RNA, 22 nt, Human
gguggccucgguggugcacagg

SEQ ID NO: 275477 - RNA, 22 nt, Human
ggcuccaggugcaugccaggcu

SEQ ID NO: 275478 - RNA, 17 nt, Human
ucauuucaguaaaucca

SEQ ID NO: 275479 - RNA, 21 nt, Human
gcaaauguucaggaaaaaaga

SEQ ID NO: 275480 - RNA, 22 nt, Human
uuaaacauuuauggaggcagca

SEQ ID NO: 275481 - RNA, 22 nt, Human
cuggccaguugccuuccugggu

SEQ ID NO: 275482 - RNA, 22 nt, Human
uuagcagguuucuggcucuugg

SEQ ID NO: 275483 - RNA, 22 nt, Human
ccucaggcuucuaguucaguga

SEQ ID NO: 275484 - RNA, 21 nt, Human
aaacuagcagcaaccaugauc

SEQ ID NO: 275485 - RNA, 17 nt, Human
uggcacagaggugcuau

SEQ ID NO: 275486 - RNA, 22 nt, Human
cuggccuuuagccccagugucu

SEQ ID NO: 275487 - RNA, 22 nt, Human
ugcauugauagaaaaacaugga

SEQ ID NO: 275488 - RNA, 22 nt, Human
uacagagauacucuagaucaaa

SEQ ID NO: 275489 - RNA, 22 nt, Human
cccugcagagccagcccugacc

SEQ ID NO: 275490 - RNA, 22 nt, Human
ucagugcagggugggagagaga

SEQ ID NO: 275491 - RNA, 22 nt, Human
ucaggagccugaaagaggucua

SEQ ID NO: 275492 - RNA, 22 nt, Human
uaaagguaacaugaacugcuuu

SEQ ID NO: 275493 - RNA, 22 nt, Human
uauucaaaguaccuucauugcc

SEQ ID NO: 275494 - RNA, 20 nt, Human
agugcaagaaagcacagcug

SEQ ID NO: 275495 - RNA, 22 nt, Human
ggaagaaaagcuuccagcgccu

SEQ ID NO: 275496 - RNA, 22 nt, Human
cagggccagcgcccaggcccag

SEQ ID NO: 275497 - RNA, 22 nt, Human
uaacacagacagccacuaguaa

SEQ ID NO: 275498 - RNA, 22 nt, Human
uucccaguuagucauuuuuaca

SEQ ID NO: 275499 - RNA, 22 nt, Human
guucuggguucuggguuauugg

SEQ ID NO: 275500 - RNA, 22 nt, Human
ugaggugggcuuguggauuugc

SEQ ID NO: 275501 - RNA, 22 nt, Human
auaucuuggccccaggauuuua

SEQ ID NO: 275502 - RNA, 23 nt, Human
uuucaaggugucuguaccacuga

SEQ ID NO: 275503 - RNA, 22 nt, Human
acacuuuaucaauauucaaaaa

SEQ ID NO: 275504 - RNA, 22 nt, Human
gcaagcuggcuguuagaggaug

SEQ ID NO: 275505 - RNA, 22 nt, Human
acucuggguucuuucacuugac

SEQ ID NO: 275506 - RNA, 22 nt, Human
ccuguacauuagcugugaauug

SEQ ID NO: 275507 - RNA, 22 nt, Human
ccagcccuucccaacuggccag

SEQ ID NO: 275508 - RNA, 22 nt, Human
aguggaggcacuaauuggauuu

SEQ ID NO: 275509 - RNA, 22 nt, Human
aagccaaggagaauggccucag

SEQ ID NO: 275510 - RNA, 19 nt, Human
cagagcugcuggccucguc

SEQ ID NO: 275511 - RNA, 20 nt, Human
ccagcuuucccugcagcauc

SEQ ID NO: 275512 - RNA, 22 nt, Human
guucaaauuuuggcuguacugc

SEQ ID NO: 275513 - RNA, 21 nt, Human
ggccugaguauaggacaggcc

SEQ ID NO: 275514 - RNA, 18 nt, Human
auuuugaacaaugcugua

SEQ ID NO: 275515 - RNA, 22 nt, Human
gcuugggaggcaagcauuccau

SEQ ID NO: 275516 - RNA, 22 nt, Human
aucuuuuuacuaacacugcuua

SEQ ID NO: 275517 - RNA, 22 nt, Human
ucccugccucucagacuuccuu

SEQ ID NO: 275518 - RNA, 22 nt, Human
ggccugugucugugccuguccu

SEQ ID NO: 275519 - RNA, 22 nt, Human
uccugggacaagccguggaagu

SEQ ID NO: 275520 - RNA, 22 nt, Human
cugggacauauugcuaguguug

SEQ ID NO: 275521 - RNA, 22 nt, Human
cuccugagggaugcuuaggcuu

SEQ ID NO: 275522 - RNA, 22 nt, Human
acaaagaucuugcuuuccuacu

SEQ ID NO: 275523 - RNA, 20 nt, Human
uuggaagguggagaagagga

SEQ ID NO: 275524 - RNA, 22 nt, Human
ugcccucagcagcagcuccugc

SEQ ID NO: 275525 - RNA, 22 nt, Human
gaaaguauuuacauuaacaucu

SEQ ID NO: 275526 - RNA, 22 nt, Human
aguugcagacgcagagauguug

SEQ ID NO: 275527 - RNA, 22 nt, Human
ugucucagauacgccaucaagg

SEQ ID NO: 275528 - RNA, 22 nt, Human
aggaaaacacaguauugaugga

SEQ ID NO: 275529 - RNA, 22 nt, Human
auucucuggucauugagcauau

SEQ ID NO: 275530 - RNA, 22 nt, Human
ggccacugcccuggcuacaccg

SEQ ID NO: 275531 - RNA, 22 nt, Human
gcccuccugcaggggcuucugg

SEQ ID NO: 275532 - RNA, 22 nt, Human
aucuuugcccagagacucagcc

SEQ ID NO: 275533 - RNA, 22 nt, Human
gucucaaacuccuaggcuaaag

SEQ ID NO: 275534 - RNA, 22 nt, Human
gcagcuuucuacuuccuacagc

SEQ ID NO: 275535 - RNA, 22 nt, Human
aguggcugagugacugugacuc

SEQ ID NO: 275536 - RNA, 22 nt, Human
gaauuucaagcagugcaauguu

SEQ ID NO: 275537 - RNA, 22 nt, Human
aagcccaguaccuucagugagg

SEQ ID NO: 275538 - RNA, 22 nt, Human
agauguuuguguuaucuccauu

SEQ ID NO: 275539 - RNA, 22 nt, Human
ugcuguuaguaaggaacaugac

SEQ ID NO: 275540 - RNA, 21 nt, Human
acccuggguucuccauacccu

SEQ ID NO: 275541 - RNA, 19 nt, Human
ucuagcaacccacugcaug

SEQ ID NO: 275542 - RNA, 23 nt, Human
cccagagcacagccuccagaugc

SEQ ID NO: 275543 - RNA, 22 nt, Human
acaguacagugcagaggaagau

SEQ ID NO: 275544 - RNA, 22 nt, Human
ggaaggcuuucuguucugugac

SEQ ID NO: 275545 - RNA, 22 nt, Human
ggccagaaguuggaaaagagcc

SEQ ID NO: 275546 - RNA, 22 nt, Human
guccagucacugucaauguucc

SEQ ID NO: 275547 - RNA, 22 nt, Human
auuucucaucaagugccaacuc

SEQ ID NO: 275548 - RNA, 22 nt, Human
ccugagaauaauucuccauagc

SEQ ID NO: 275549 - RNA, 22 nt, Human
gcagcauauuguacuggccugc

SEQ ID NO: 275550 - RNA, 22 nt, Human
uaaaguucuggugagagguaag

SEQ ID NO: 275551 - RNA, 22 nt, Human
agcugugugcccaugguggagg

SEQ ID NO: 275552 - RNA, 22 nt, Human
uuugaguagugagacuaggcag

SEQ ID NO: 275553 - RNA, 22 nt, Human
gaccugagauuuugaggcucau

SEQ ID NO: 275554 - RNA, 22 nt, Human
aaaauacacauacuaggggaaa

SEQ ID NO: 275555 - RNA, 22 nt, Human
guccuuaguuacuuuucauguc

SEQ ID NO: 275556 - RNA, 22 nt, Human
ugaagaggccgugugcagguga

SEQ ID NO: 275557 - RNA, 22 nt, Human
gcuggcagccaagugaagaggg

SEQ ID NO: 275558 - RNA, 22 nt, Human
gugcaugcaaauuacuguaaag

SEQ ID NO: 275559 - RNA, 22 nt, Human
gaaggcuagaaacgaugcuuau

SEQ ID NO: 275560 - RNA, 22 nt, Human
ugccugggugcccucugcuccu

SEQ ID NO: 275561 - RNA, 23 nt, Human
uuucagaagugguccuaggaagc

SEQ ID NO: 275562 - RNA, 22 nt, Human
gagauuuauugacuuaacagua

SEQ ID NO: 275563 - RNA, 22 nt, Human
agggcagccauugagggauucu

SEQ ID NO: 275564 - RNA, 21 nt, Human
gccagccaugcuugccuaggc

SEQ ID NO: 275565 - RNA, 22 nt, Human
uagaagcaguaauagaaauagg

SEQ ID NO: 275566 - RNA, 22 nt, Human
gugcauuuggugacucucaccc

SEQ ID NO: 275567 - RNA, 22 nt, Human
ugcuggagaagcuccugggacu

SEQ ID NO: 275568 - RNA, 18 nt, Human
acagugcugucacugcuu

SEQ ID NO: 275569 - RNA, 22 nt, Human
agaaggcucaucccucacccca

SEQ ID NO: 275570 - RNA, 22 nt, Human
uccugcagccauuagaggucaa

SEQ ID NO: 275571 - RNA, 22 nt, Human
ccaggcucacugacuaccacau

SEQ ID NO: 275572 - RNA, 22 nt, Human
ucaaauuuuaacaugcauuaga

SEQ ID NO: 275573 - RNA, 23 nt, Human
gagcuuagucuacucagacaucc

SEQ ID NO: 275574 - RNA, 22 nt, Human
agaaucugaaggcaccucuggu

SEQ ID NO: 275575 - RNA, 22 nt, Human
augcccugcaucaagugacacu

SEQ ID NO: 275576 - RNA, 22 nt, Human
gcaaaguaaaaauagauucuga

SEQ ID NO: 275577 - RNA, 22 nt, Human
agagauggcgucucagagccug

SEQ ID NO: 275578 - RNA, 22 nt, Human
cuugaagaaauggagacaggau

SEQ ID NO: 275579 - RNA, 22 nt, Human
ucagcacuuugaagcagaagga

SEQ ID NO: 275580 - RNA, 22 nt, Human
uccagcucaggguuggcucaag

SEQ ID NO: 275581 - RNA, 22 nt, Human
cugcccucgggcccucccauag

SEQ ID NO: 275582 - RNA, 22 nt, Human
uugcauguacguacagagagag

SEQ ID NO: 275583 - RNA, 22 nt, Human
ugucucagaggcaggaagagcc

SEQ ID NO: 275584 - RNA, 22 nt, Human
acugugcagguagaugccuggg

SEQ ID NO: 275585 - RNA, 22 nt, Human
aagcccugagcacugcagagaa

SEQ ID NO: 275586 - RNA, 22 nt, Human
aauuagggaggacaaagguaca

SEQ ID NO: 275587 - RNA, 22 nt, Human
agaaagaacguugguuaucuua

SEQ ID NO: 275588 - RNA, 22 nt, Human
ugcuccaggccgccuggggcug

SEQ ID NO: 275589 - RNA, 23 nt, Human
ucccuggccgcaauggccgccuu

SEQ ID NO: 275590 - RNA, 22 nt, Human
uaaagacagauggaccagccau

SEQ ID NO: 275591 - RNA, 22 nt, Human
acaguaaccucuccucugaagg

SEQ ID NO: 275592 - RNA, 22 nt, Human
uuucuucucacccaggacagag

SEQ ID NO: 275593 - RNA, 22 nt, Human
acacuguaggagaaaggaguuu

SEQ ID NO: 275594 - RNA, 22 nt, Human
ggugggggagacuuggucaaga

SEQ ID NO: 275595 - RNA, 22 nt, Human
ggcucaggccagaccacgacuc

SEQ ID NO: 275596 - RNA, 22 nt, Human
gucugggccaggcgagccgagg

SEQ ID NO: 275597 - RNA, 22 nt, Human
ccuggaucccgauggcugugag

SEQ ID NO: 275598 - RNA, 21 nt, Human
ucacuacaauguucucuuaua

SEQ ID NO: 275599 - RNA, 22 nt, Human
ggcccuuccucuugugcuggca

SEQ ID NO: 275600 - RNA, 20 nt, Human
augauuuugcacuaacuuca

SEQ ID NO: 275601 - RNA, 22 nt, Human
ccagaggcuggguucaccucag

SEQ ID NO: 275602 - RNA, 22 nt, Human
aaaucagucccucuuggaauuu

SEQ ID NO: 275603 - RNA, 22 nt, Human
ugggagaagcauggggugcaga

SEQ ID NO: 275604 - RNA, 22 nt, Human
augcacauaggccaaaucauuu

SEQ ID NO: 275605 - RNA, 22 nt, Human
auggcuuccucuggauuggauu

SEQ ID NO: 275606 - RNA, 22 nt, Human
agccauguuggggaaggugggc

SEQ ID NO: 275607 - RNA, 22 nt, Human
caaggaaacaugaaaugcauug

SEQ ID NO: 275608 - RNA, 22 nt, Human
aaugcauauguaggcaagcagu

SEQ ID NO: 275609 - RNA, 22 nt, Human
cuuccuggaugaagcccagcau

SEQ ID NO: 275610 - RNA, 22 nt, Human
ucuuucaaugagcauucuuucc

SEQ ID NO: 275611 - RNA, 22 nt, Human
uucuuuauggaauggugauagu

SEQ ID NO: 275612 - RNA, 22 nt, Human
ucaggauccauagacucccaaa

SEQ ID NO: 275613 - RNA, 22 nt, Human
gucccagggcaaggcuguuucu

SEQ ID NO: 275614 - RNA, 22 nt, Human
ccagugcugaaugaggaggucu

SEQ ID NO: 275615 - RNA, 22 nt, Human
uuccaggacaagauguuucagg

SEQ ID NO: 275616 - RNA, 22 nt, Human
uuuuuugucccagagagccugg

SEQ ID NO: 275617 - RNA, 22 nt, Human
aacaugaagguaggaugguuuu

SEQ ID NO: 275618 - RNA, 22 nt, Human
cagaagcuuugucuagucuuga

SEQ ID NO: 275619 - RNA, 22 nt, Human
agggaagggcagggucuaugca

SEQ ID NO: 275620 - RNA, 22 nt, Human
ugcacagcgggugucugucagg

SEQ ID NO: 275621 - RNA, 22 nt, Human
uggcauuucaccuuucauuucc

SEQ ID NO: 275622 - RNA, 22 nt, Human
uggagcuggaagacagugauau

SEQ ID NO: 275623 - RNA, 22 nt, Human
uggcuucauucuccugugaaua

SEQ ID NO: 275624 - RNA, 22 nt, Human
auauuuuccgaacuugagguag

SEQ ID NO: 275625 - RNA, 22 nt, Human
guccuucaaguaaccugggacc

SEQ ID NO: 275626 - RNA, 22 nt, Human
uuuuaugugugaaaugcugucu

SEQ ID NO: 275627 - RNA, 20 nt, Human
agggucaguagcacagagcu

SEQ ID NO: 275628 - RNA, 22 nt, Human
aaguccuuggagaauagaaagg

SEQ ID NO: 275629 - RNA, 22 nt, Human
caggaaggaaaggguguggaga

SEQ ID NO: 275630 - RNA, 22 nt, Human
gaggaaugggugucucgugauu

SEQ ID NO: 275631 - RNA, 22 nt, Human
uaugcacaccuggguccuuguc

SEQ ID NO: 275632 - RNA, 22 nt, Human
aaaaccacaguuacuuuugcac

SEQ ID NO: 275633 - RNA, 22 nt, Human
uaacacuaagaaucuaaauuua

SEQ ID NO: 275634 - RNA, 22 nt, Human
gcugugugcuaggauauguuuu

SEQ ID NO: 275635 - RNA, 22 nt, Human
ggacagggaucauuaucugagc

SEQ ID NO: 275636 - RNA, 22 nt, Human
gucuccuggaaauaugcccaua

SEQ ID NO: 275637 - RNA, 22 nt, Human
ugaguaggugguuaagcaugga

SEQ ID NO: 275638 - RNA, 22 nt, Human
uuuuaauccucuugguaucuua

SEQ ID NO: 275639 - RNA, 21 nt, Human
cagccugcugcuccagggcca

SEQ ID NO: 275640 - RNA, 22 nt, Human
ggcagcucugcuaauugagccu

SEQ ID NO: 275641 - RNA, 22 nt, Human
ugucuggggaacugugcaucca

SEQ ID NO: 275642 - RNA, 22 nt, Human
uggagacagagauagccaauug

SEQ ID NO: 275643 - RNA, 22 nt, Human
cugagcagugguucuugagcgc

SEQ ID NO: 275644 - RNA, 22 nt, Human
gccaggucuggguagcagagga

SEQ ID NO: 275645 - RNA, 22 nt, Human
ugcaggugacaccacucuuccu

SEQ ID NO: 275646 - RNA, 22 nt, Human
aagacaagcaucaaaucaggca

SEQ ID NO: 275647 - RNA, 22 nt, Human
cuccaggccccuggccuucugc

SEQ ID NO: 275648 - RNA, 22 nt, Human
uaaauuagggacuuuaguuaau

SEQ ID NO: 275649 - RNA, 22 nt, Human
ucuuauuauuguuguaaaagca

SEQ ID NO: 275650 - RNA, 22 nt, Human
aggcucagagaugaguaagcac

SEQ ID NO: 275651 - RNA, 22 nt, Human
aaaaggcuagcuaguaacagaa

SEQ ID NO: 275652 - RNA, 22 nt, Human
guucucuggaaacuaugauuca

SEQ ID NO: 275653 - RNA, 22 nt, Human
acuggaggggaaaaugguagua

SEQ ID NO: 275654 - RNA, 22 nt, Human
ccugggaagucagccaaggacg

SEQ ID NO: 275655 - RNA, 22 nt, Human
gcuuggcuggagaaaguuaccu

SEQ ID NO: 275656 - RNA, 22 nt, Human
agaagaaagauugaagguuccu

SEQ ID NO: 275657 - RNA, 23 nt, Human
caggaaauguucuugaagccuga

SEQ ID NO: 275658 - RNA, 22 nt, Human
aaguguguugacugaauugggg

SEQ ID NO: 275659 - RNA, 22 nt, Human
uccagccaccaccuugauugcc

SEQ ID NO: 275660 - RNA, 22 nt, Human
gcuggccuugaggugucuuuau

SEQ ID NO: 275661 - RNA, 22 nt, Human
ugagucacuaucacuuucucug

SEQ ID NO: 275662 - RNA, 22 nt, Human
cagggcucgcugccagcuucag

SEQ ID NO: 275663 - RNA, 22 nt, Human
ggcugcagcagagggacucacg

SEQ ID NO: 275664 - RNA, 22 nt, Human
uuugguauugcacacugucuuc

SEQ ID NO: 275665 - RNA, 22 nt, Human
uuggccuuugcugggcuguuga

SEQ ID NO: 275666 - RNA, 22 nt, Human
aguuuacagaugcuacaggagc

SEQ ID NO: 275667 - RNA, 22 nt, Human
aaguuucuguaugcucuucugu

SEQ ID NO: 275668 - RNA, 22 nt, Human
gcacaggcacagagggccacug

SEQ ID NO: 275669 - RNA, 22 nt, Human
uuuacagcacugaagccagggg

SEQ ID NO: 275670 - RNA, 15 nt, Human
gcccucaggcgacac

SEQ ID NO: 275671 - RNA, 22 nt, Human
agugcauucucuaauuacaggu

SEQ ID NO: 275672 - RNA, 22 nt, Human
ggcucugaaggagacagcugcu

SEQ ID NO: 275673 - RNA, 22 nt, Human
caggcagagcaacugguccaga

SEQ ID NO: 275674 - RNA, 22 nt, Human
gcuggccacacugcugauggag

SEQ ID NO: 275675 - RNA, 22 nt, Human
ucugccugaaccacucuuggag

SEQ ID NO: 275676 - RNA, 22 nt, Human
aaauuaccauuguaaaguauuu

SEQ ID NO: 275677 - RNA, 22 nt, Human
aggugcugaacuggugaggucu

SEQ ID NO: 275678 - RNA, 22 nt, Human
uuagaaaugauuucaccucuuu

SEQ ID NO: 275679 - RNA, 22 nt, Human
uccaggcugacgcagcuauuua

SEQ ID NO: 275680 - RNA, 22 nt, Human
gcaaggaacaaaugcucugcuu

SEQ ID NO: 275681 - RNA, 22 nt, Human
acagagcucccagccaucuccu

SEQ ID NO: 275682 - RNA, 22 nt, Human
gcauggcuguugaagucagcuc

SEQ ID NO: 275683 - RNA, 20 nt, Human
aacacugaggccuacucuuc

SEQ ID NO: 275684 - RNA, 22 nt, Human
gggcagugggaccaggcaccag

SEQ ID NO: 275685 - RNA, 22 nt, Human
cacaauuuccaagucauguuau

SEQ ID NO: 275686 - RNA, 22 nt, Human
uaauuuuacuuccugagcaccu

SEQ ID NO: 275687 - RNA, 22 nt, Human
ucugcaugaugaacaaaugagc

SEQ ID NO: 275688 - RNA, 22 nt, Human
cugcaucacagcaggaggcaca

SEQ ID NO: 275689 - RNA, 22 nt, Human
cuccuggggcacuuagaagcaa

SEQ ID NO: 275690 - RNA, 22 nt, Human
acuuggaaagaugcaacacagu

SEQ ID NO: 275691 - RNA, 22 nt, Human
auccuggcgccacacggcucua

SEQ ID NO: 275692 - RNA, 22 nt, Human
aaaugcaauuguauguacucca

SEQ ID NO: 275693 - RNA, 23 nt, Human
cccagggacacgaugacaccucc

SEQ ID NO: 275694 - RNA, 22 nt, Human
gcaccagggagggugugcuuca

SEQ ID NO: 275695 - RNA, 22 nt, Human
uccauggguagcccugguugag

SEQ ID NO: 275696 - RNA, 22 nt, Human
caacaacaugggauucauuucu

SEQ ID NO: 275697 - RNA, 22 nt, Human
cuuucuggaguggaaagguauu

SEQ ID NO: 275698 - RNA, 22 nt, Human
gaaaacugugauuagaaugccu

SEQ ID NO: 275699 - RNA, 22 nt, Human
aagucuaggacaggaagucuau

SEQ ID NO: 275700 - RNA, 22 nt, Human
acaggugugggcugggcucuga

SEQ ID NO: 275701 - RNA, 22 nt, Human
uuguccagagccaggcugucgg

SEQ ID NO: 275702 - RNA, 22 nt, Human
agcugugguuagauagaguccu

SEQ ID NO: 275703 - RNA, 22 nt, Human
caggaaagguagucacaaugua

SEQ ID NO: 275704 - RNA, 22 nt, Human
uccagcccagcuguccccuuca

SEQ ID NO: 275705 - RNA, 22 nt, Human
gccgaggcucugcccagcugcu

SEQ ID NO: 275706 - RNA, 22 nt, Human
ggcagaccucuccagccccaca

SEQ ID NO: 275707 - RNA, 22 nt, Human
acuuucccacuuaauguauuua

SEQ ID NO: 275708 - RNA, 22 nt, Human
cuuuucaugagucuguuauggg

SEQ ID NO: 275709 - RNA, 22 nt, Human
aguggcuggucuaaggucacag

SEQ ID NO: 275710 - RNA, 22 nt, Human
aggaagccaugguggacgucua

SEQ ID NO: 275711 - RNA, 22 nt, Human
ccauagaugagacaaaguagag

SEQ ID NO: 275712 - RNA, 21 nt, Human
ccaggcugggagggcaguucc

SEQ ID NO: 275713 - RNA, 22 nt, Human
gcagagaacccagcagauuggc

SEQ ID NO: 275714 - RNA, 22 nt, Human
ucagguggcuucggggaguggc

SEQ ID NO: 275715 - RNA, 23 nt, Human
agggagcuaaaaggcuggagcag

SEQ ID NO: 275716 - RNA, 22 nt, Human
ggaaggaauuccaagacuaaag

SEQ ID NO: 275717 - RNA, 22 nt, Human
agagauggagagcacuggggcu

SEQ ID NO: 275718 - RNA, 22 nt, Human
uagugcacacgcauguagcagu

SEQ ID NO: 275719 - RNA, 22 nt, Human
ugcaaauuccauuuaaacacua

SEQ ID NO: 275720 - RNA, 22 nt, Human
uccaggaaagcacugggcuggg

SEQ ID NO: 275721 - RNA, 22 nt, Human
gcuuccagacgaucauguaaga

SEQ ID NO: 275722 - RNA, 22 nt, Human
guaaucucagcuacuugggagg

SEQ ID NO: 275723 - RNA, 19 nt, Human
acacuguagauauagcuau

SEQ ID NO: 275724 - RNA, 22 nt, Human
uggcuucugagucuccugacau

SEQ ID NO: 275725 - RNA, 22 nt, Human
ugcccagucuccgggccagccc

SEQ ID NO: 275726 - RNA, 22 nt, Human
cugggcuuugaagccaggcugc

SEQ ID NO: 275727 - RNA, 22 nt, Human
uuccagugaugggcaauuuggu

SEQ ID NO: 275728 - RNA, 22 nt, Human
accacccaccucacagcauagu

SEQ ID NO: 275729 - RNA, 22 nt, Human
ucuaaugaggacuuuauagaga

SEQ ID NO: 275730 - RNA, 22 nt, Human
uauaggaaauuuaucuccuggg

SEQ ID NO: 275731 - RNA, 22 nt, Human
cugcacaguggguggggcguca

SEQ ID NO: 275732 - RNA, 22 nt, Human
ccugguucagucuuucuaugcu

SEQ ID NO: 275733 - RNA, 22 nt, Human
aggacaggauugagcugaacug

SEQ ID NO: 275734 - RNA, 22 nt, Human
gauggcagguaguggucucauc

SEQ ID NO: 275735 - RNA, 20 nt, Human
guacauuuucaggaggggau

SEQ ID NO: 275736 - RNA, 19 nt, Human
aagcaagcuuugagugggu

SEQ ID NO: 275737 - RNA, 22 nt, Human
acacuaauuaagcugcuuuacu

SEQ ID NO: 275738 - RNA, 22 nt, Human
ccaguuacaagugauucuuggu

SEQ ID NO: 275739 - RNA, 22 nt, Human
uuccaggaacaaacucaccuua

SEQ ID NO: 275740 - RNA, 19 nt, Human
agccagaacuaguguuucu

SEQ ID NO: 275741 - RNA, 22 nt, Human
ugaggcagcccacuuuccuuag

SEQ ID NO: 275742 - RNA, 22 nt, Human
ugcugagaggaaagaaugcaca

SEQ ID NO: 275743 - RNA, 22 nt, Human
acuucauugcuaagaacaaggu

SEQ ID NO: 275744 - RNA, 22 nt, Human
acucugagucaugcacuccuug

SEQ ID NO: 275745 - RNA, 22 nt, Human
auuuccuaacagaggcaacagu

SEQ ID NO: 275746 - RNA, 22 nt, Human
ugaguccauaguggauccuuca

SEQ ID NO: 275747 - RNA, 20 nt, Human
caaagacaugcuaggggugg

SEQ ID NO: 275748 - RNA, 22 nt, Human
cauuucugugacacuuccaucu

SEQ ID NO: 275749 - RNA, 22 nt, Human
aggccaggcaacauucugaagu

SEQ ID NO: 275750 - RNA, 22 nt, Human
ucugagaagcaccuucuggaca

SEQ ID NO: 275751 - RNA, 22 nt, Human
ggcagcugggucacaccgaucu

SEQ ID NO: 275752 - RNA, 22 nt, Human
ucuggccugaaaguccaugcuu

SEQ ID NO: 275753 - RNA, 22 nt, Human
agaaaucauugaauuauuugcu

SEQ ID NO: 275754 - RNA, 22 nt, Human
agaaagcuggagucaagcagag

SEQ ID NO: 275755 - RNA, 22 nt, Human
ggguauuaaaaugaaggagaaa

SEQ ID NO: 275756 - RNA, 20 nt, Human
agugggagagggcagacugc

SEQ ID NO: 275757 - RNA, 22 nt, Human
uaugugucccuugguguagcaa

SEQ ID NO: 275758 - RNA, 22 nt, Human
ugguggggauucccucccuggc

SEQ ID NO: 275759 - RNA, 22 nt, Human
uucauugauaguuuuauguaug

SEQ ID NO: 275760 - RNA, 22 nt, Human
gaauacaagccaggcacaaggc

SEQ ID NO: 275761 - RNA, 22 nt, Human
cagaacacaggcuaaacugaga

SEQ ID NO: 275762 - RNA, 22 nt, Human
aacaaugcugaacugaggaaag

SEQ ID NO: 275763 - RNA, 22 nt, Human
ucccuggcugggggcugccuug

SEQ ID NO: 275764 - RNA, 22 nt, Human
cacacaguggaguauuacucag

SEQ ID NO: 275765 - RNA, 22 nt, Human
gccacccccaaguagguggucu

SEQ ID NO: 275766 - RNA, 22 nt, Human
cacagcuguuuucuccaggcag

SEQ ID NO: 275767 - RNA, 22 nt, Human
uuugcuugacccuugugcugaa

SEQ ID NO: 275768 - RNA, 22 nt, Human
gccugcagccucaagggcugag

SEQ ID NO: 275769 - RNA, 22 nt, Human
ucuagggagcucuagcaguggu

SEQ ID NO: 275770 - RNA, 22 nt, Human
aaacugggauucuucacaaggu

SEQ ID NO: 275771 - RNA, 22 nt, Human
gcugccugcucacccggccugg

SEQ ID NO: 275772 - RNA, 22 nt, Human
caugcuuucuguccaaauguua

SEQ ID NO: 275773 - RNA, 22 nt, Human
ugcaaucagaaaguucagcggu

SEQ ID NO: 275774 - RNA, 19 nt, Human
acacaccagugccugugac

SEQ ID NO: 275775 - RNA, 22 nt, Human
ggagaagaggagcuggaagccu

SEQ ID NO: 275776 - RNA, 19 nt, Human
acuguucuaacuugcagcu

SEQ ID NO: 275777 - RNA, 23 nt, Human
ugcagcugccucuggcgggccgg

SEQ ID NO: 275778 - RNA, 22 nt, Human
augguguuuauaggcaaagauc

SEQ ID NO: 275779 - RNA, 22 nt, Human
agguuucuccuuuaaagcaugg

SEQ ID NO: 275780 - RNA, 22 nt, Human
uuccaguucuggcuuugccacu

SEQ ID NO: 275781 - RNA, 22 nt, Human
ugacauuucgguguaugugaug

SEQ ID NO: 275782 - RNA, 22 nt, Human
aacccuggggcugcucugccug

SEQ ID NO: 275783 - RNA, 22 nt, Human
acaggugcaugcuaccaugucu

SEQ ID NO: 275784 - RNA, 23 nt, Human
agaugaggcuucuccauguuggu

SEQ ID NO: 275785 - RNA, 20 nt, Human
guggccuguccuguuguggg

SEQ ID NO: 275786 - RNA, 22 nt, Human
ucccagagccucugccacucug

SEQ ID NO: 275787 - RNA, 22 nt, Human
gcugggcacugucccauaggcu

SEQ ID NO: 275788 - RNA, 22 nt, Human
ucacacauacucaugugugagu

SEQ ID NO: 275789 - RNA, 22 nt, Human
auagauguguguaaguacauaa

SEQ ID NO: 275790 - RNA, 22 nt, Human
ggaagccaggccaaugagaaca

SEQ ID NO: 275791 - RNA, 22 nt, Human
uguauauauuucuuucauucua

SEQ ID NO: 275792 - RNA, 22 nt, Human
ccaauaauucuucaaguguuuu

SEQ ID NO: 275793 - RNA, 22 nt, Human
gugcacagaagcagaagcuaga

SEQ ID NO: 275794 - RNA, 17 nt, Human
ucugcucugccaaucca

SEQ ID NO: 275795 - RNA, 22 nt, Human
cugcuccaggauuucaggccag

SEQ ID NO: 275796 - RNA, 22 nt, Human
uggcuucucuggcauccccauc

SEQ ID NO: 275797 - RNA, 22 nt, Human
auucuccuuauucugaaaaaag

SEQ ID NO: 275798 - RNA, 17 nt, Human
uuugguaauauauuaag

SEQ ID NO: 275799 - RNA, 22 nt, Human
acaggacagggaauucgaaauu

SEQ ID NO: 275800 - RNA, 22 nt, Human
ccuggcagguggagguugcagu

SEQ ID NO: 275801 - RNA, 22 nt, Human
uaggugucugcucuuauuuaac

SEQ ID NO: 275802 - RNA, 22 nt, Human
cagcagcaguguucuagaaucu

SEQ ID NO: 275803 - RNA, 22 nt, Human
uccugcagcauccgucgucugu

SEQ ID NO: 275804 - RNA, 22 nt, Human
ggagcccuugcugaccuuccaa

SEQ ID NO: 275805 - RNA, 22 nt, Human
agcacuauuccaaugauccaau

SEQ ID NO: 275806 - RNA, 22 nt, Human
auucauuuagguauucacuuac

SEQ ID NO: 275807 - RNA, 21 nt, Human
ucuccccauucuuauucccau

SEQ ID NO: 275808 - RNA, 22 nt, Human
uguacaugaauaaaagaucuug

SEQ ID NO: 275809 - RNA, 22 nt, Human
ugagaaccucgaagauuuugcc

SEQ ID NO: 275810 - RNA, 22 nt, Human
ugggaagcacgcucagcagaaa

SEQ ID NO: 275811 - RNA, 22 nt, Human
aaagaucaauagauaaagcuac

SEQ ID NO: 275812 - RNA, 22 nt, Human
ggcccugcaagguacccaggcc

SEQ ID NO: 275813 - RNA, 18 nt, Human
ugcugggcauuaggcuua

SEQ ID NO: 275814 - RNA, 22 nt, Human
ucaugccacuuacaaaauaaug

SEQ ID NO: 275815 - RNA, 22 nt, Human
cugcaggagugaaagcaggccu

SEQ ID NO: 275816 - RNA, 23 nt, Human
cauggcugauuucaagcuaccac

SEQ ID NO: 275817 - RNA, 22 nt, Human
gcagcccugcagcuccacaccg

SEQ ID NO: 275818 - RNA, 22 nt, Human
gagcuuggggcauauggugcua

SEQ ID NO: 275819 - RNA, 19 nt, Human
ucuccagcuuugggcuuuu

SEQ ID NO: 275820 - RNA, 22 nt, Human
caggaagcugaugucuagucau

SEQ ID NO: 275821 - RNA, 22 nt, Human
caggagcaaggagcagugggau

SEQ ID NO: 275822 - RNA, 22 nt, Human
acuacauucaugcucguguugg

SEQ ID NO: 275823 - RNA, 22 nt, Human
caccuucagaaugcuccaggca

SEQ ID NO: 275824 - RNA, 22 nt, Human
gcagccuguuguaccagccugu

SEQ ID NO: 275825 - RNA, 22 nt, Human
acugggagucaugaggaaggag

SEQ ID NO: 275826 - RNA, 22 nt, Human
uaguacaguggcauucaaacuu

SEQ ID NO: 275827 - RNA, 22 nt, Human
cccagagcugagggggcacguu

SEQ ID NO: 275828 - RNA, 22 nt, Human
gagaggugaauguggaugccac

SEQ ID NO: 275829 - RNA, 22 nt, Human
cuauuuuaacuugauuaccucu

SEQ ID NO: 275830 - RNA, 22 nt, Human
aaauccuaauaaugcacuagug

SEQ ID NO: 275831 - RNA, 22 nt, Human
agcagggggaguuagacuagau

SEQ ID NO: 275832 - RNA, 22 nt, Human
uguuuuggaacaaaagcuauuc

SEQ ID NO: 275833 - RNA, 22 nt, Human
aaauaacuuucuguguauaguc

SEQ ID NO: 275834 - RNA, 22 nt, Human
aaauucuaaggucacaauguug

SEQ ID NO: 275835 - RNA, 22 nt, Human
uacaugcuggugacuguagaca

SEQ ID NO: 275836 - RNA, 22 nt, Human
agucacugucaaagccacacac

SEQ ID NO: 275837 - RNA, 18 nt, Human
ggcagggaaaagauaggg

SEQ ID NO: 275838 - RNA, 18 nt, Human
cagugaggaugaaggguu

SEQ ID NO: 275839 - RNA, 22 nt, Human
aaagaaauaccuuucucagcuu

SEQ ID NO: 275840 - RNA, 22 nt, Human
acucccugcaagauuuuccaug

SEQ ID NO: 275841 - RNA, 22 nt, Human
cuggcacgcccacguaggcacu

SEQ ID NO: 275842 - RNA, 21 nt, Human
uccuugcuauuuuccucagcu

SEQ ID NO: 275843 - RNA, 22 nt, Human
uguaucuuucuguacuuuuaug

SEQ ID NO: 275844 - RNA, 19 nt, Human
agggccaggauucuggaac

SEQ ID NO: 275845 - RNA, 22 nt, Human
uaagugaugucuugguuaauga

SEQ ID NO: 275846 - RNA, 22 nt, Human
gacugucuccugucaugaggga

SEQ ID NO: 275847 - RNA, 22 nt, Human
aguugacucucaagauccuguu

SEQ ID NO: 275848 - RNA, 22 nt, Human
ugcaguuagccuaggauugagc

SEQ ID NO: 275849 - RNA, 22 nt, Human
ugagcaguaggucugaauagug

SEQ ID NO: 275850 - RNA, 22 nt, Human
uuccuuccauagcaaaacaugc

SEQ ID NO: 275851 - RNA, 22 nt, Human
aaggcugaaagaccuugaaccu

SEQ ID NO: 275852 - RNA, 22 nt, Human
guggccagaaccaggagaauga

SEQ ID NO: 275853 - RNA, 22 nt, Human
gcacacagacuaaccauauuuc

SEQ ID NO: 275854 - RNA, 22 nt, Human
cagugccucaggccagccugca

SEQ ID NO: 275855 - RNA, 22 nt, Human
gauggcagucaaccaggugagg

SEQ ID NO: 275856 - RNA, 22 nt, Human
aagauauauuuuggugauuuca

SEQ ID NO: 275857 - RNA, 22 nt, Human
gccuggagaaaggaagguggga

SEQ ID NO: 275858 - RNA, 22 nt, Human
gucuggggaagucagggcauca

SEQ ID NO: 275859 - RNA, 23 nt, Human
aggacagcaaaccccgccucccc

SEQ ID NO: 275860 - RNA, 22 nt, Human
auccacaguggggguggcggaa

SEQ ID NO: 275861 - RNA, 22 nt, Human
caggccagcguccagaacaagc

SEQ ID NO: 275862 - RNA, 22 nt, Human
aaaggccacacagagcagggag

SEQ ID NO: 275863 - RNA, 23 nt, Human
ucaaaguaguuuuauccaauaaa

SEQ ID NO: 275864 - RNA, 23 nt, Human
aucaaaugauuggccauucagug

SEQ ID NO: 275865 - RNA, 23 nt, Human
uagaaugucauucaaugauaugg

SEQ ID NO: 275866 - RNA, 22 nt, Human
cauguacaaaaggcaaaugccu

SEQ ID NO: 275867 - RNA, 22 nt, Human
agagcuuuucuguaauaacauc

SEQ ID NO: 275868 - RNA, 22 nt, Human
caucuugugaggaccuucuugc

SEQ ID NO: 275869 - RNA, 20 nt, Human
aggguggcaaguuagugaca

SEQ ID NO: 275870 - RNA, 18 nt, Human
gcuuggcugcagagagag

SEQ ID NO: 275871 - RNA, 22 nt, Human
gauaauaucugguuuauucacc

SEQ ID NO: 275872 - RNA, 22 nt, Human
uaaagccacuucauucuagucu

SEQ ID NO: 275873 - RNA, 22 nt, Human
uugauacaggcucuauuucauc

SEQ ID NO: 275874 - RNA, 22 nt, Human
cuccagugcucaugccguugac

SEQ ID NO: 275875 - RNA, 22 nt, Human
aucucuguaaaccauaaauuga

SEQ ID NO: 275876 - RNA, 22 nt, Human
aaacaaguguaaacuagucugu

SEQ ID NO: 275877 - RNA, 22 nt, Human
auuccuugcacaucagauaguu

SEQ ID NO: 275878 - RNA, 22 nt, Human
uacacguguguguauguacaua

SEQ ID NO: 275879 - RNA, 22 nt, Human
aguguuuggggugauuguaacc

SEQ ID NO: 275880 - RNA, 22 nt, Human
uucuguacaaguuguggcugcu

SEQ ID NO: 275881 - RNA, 22 nt, Human
ggcucugcucacagcccgcagc

SEQ ID NO: 275882 - RNA, 22 nt, Human
cacaggagagguuaaugggggc

SEQ ID NO: 275883 - RNA, 22 nt, Human
uaaaaugaucucucauguucuu

SEQ ID NO: 275884 - RNA, 22 nt, Human
ugagcagagcaguaacaggagc

SEQ ID NO: 275885 - RNA, 22 nt, Human
uucauucugggcucuaaggaac

SEQ ID NO: 275886 - RNA, 22 nt, Human
auaugaaaguaagcaugugugu

SEQ ID NO: 275887 - RNA, 22 nt, Human
ucagagcuuuggagaccaggaa

SEQ ID NO: 275888 - RNA, 22 nt, Human
ugucugugaccucuuaggcaag

SEQ ID NO: 275889 - RNA, 22 nt, Human
uucagaacaaccaugguuagau

SEQ ID NO: 275890 - RNA, 22 nt, Human
gucuagagugcuuccuagucau

SEQ ID NO: 275891 - RNA, 23 nt, Human
cuucagugugggacugcagcgug

SEQ ID NO: 275892 - RNA, 22 nt, Human
uccuggccugucuggaguagcu

SEQ ID NO: 275893 - RNA, 18 nt, Human
guuuacauuacugaauag

SEQ ID NO: 275894 - RNA, 22 nt, Human
gaggaaggcuaaggggcuuaga

SEQ ID NO: 275895 - RNA, 22 nt, Human
gagcagcugagcuggaaugaga

SEQ ID NO: 275896 - RNA, 22 nt, Human
auuuuacuuaguguaaugucca

SEQ ID NO: 275897 - RNA, 22 nt, Human
gcugagggcauguguggcgacu

SEQ ID NO: 275898 - RNA, 22 nt, Human
aggagccuggcuggcccacagg

SEQ ID NO: 275899 - RNA, 22 nt, Human
ugaggggagaagcagcagccug

SEQ ID NO: 275900 - RNA, 22 nt, Human
gagccugggacugggggucaug

SEQ ID NO: 275901 - RNA, 22 nt, Human
ucaguuuucucaucuguaauuu

SEQ ID NO: 275902 - RNA, 22 nt, Human
aggcccagacucagcggggcgg

SEQ ID NO: 275903 - RNA, 22 nt, Human
cccugacccuaucagagggcca

SEQ ID NO: 275904 - RNA, 22 nt, Human
ucucugaaugagauuacugccu

SEQ ID NO: 275905 - RNA, 22 nt, Human
aagcccagaugagaucccugga

SEQ ID NO: 275906 - RNA, 22 nt, Human
cuggagccugcaguuuucacuu

SEQ ID NO: 275907 - RNA, 22 nt, Human
aauucuauguucuugaguaaga

SEQ ID NO: 275908 - RNA, 22 nt, Human
ucaaaguauaauugcuuuuuug

SEQ ID NO: 275909 - RNA, 22 nt, Human
uugugaaaucguguuuggaagc

SEQ ID NO: 275910 - RNA, 22 nt, Human
gaggccagacugccuuuuauga

SEQ ID NO: 275911 - RNA, 22 nt, Human
aaaggcaguggguauguggauc

SEQ ID NO: 275912 - RNA, 22 nt, Human
cuggcugcagcuccgaggaaga

SEQ ID NO: 275913 - RNA, 22 nt, Human
cuccuucccuucaaguguuccu

SEQ ID NO: 275914 - RNA, 22 nt, Human
ccagagagcuacaaggcauaaa

SEQ ID NO: 275915 - RNA, 22 nt, Human
uucuuccucacacucucaccca

SEQ ID NO: 275916 - RNA, 22 nt, Human
ggauggagaugaccauggugac

SEQ ID NO: 275917 - RNA, 22 nt, Human
uugaaagaacucuucagagaua

SEQ ID NO: 275918 - RNA, 23 nt, Human
auguuaaacauaacugaagagcc

SEQ ID NO: 275919 - RNA, 22 nt, Human
agggccagccccacccucucug

SEQ ID NO: 275920 - RNA, 22 nt, Human
uugaacauuggcaauuucauau

SEQ ID NO: 275921 - RNA, 22 nt, Human
cugguggcaucuugagaugguu

SEQ ID NO: 275922 - RNA, 22 nt, Human
ucagcuuugaucucaggcaauc

SEQ ID NO: 275923 - RNA, 22 nt, Human
agggacacaugugauuauuuau

SEQ ID NO: 275924 - RNA, 22 nt, Human
cagcuguugugcugggcaguua

SEQ ID NO: 275925 - RNA, 22 nt, Human
guaacucuuuggaaaacauuuu

SEQ ID NO: 275926 - RNA, 19 nt, Human
uugugagcugaagaacagg

SEQ ID NO: 275927 - RNA, 22 nt, Human
ucucugcagucuugggcaggca

SEQ ID NO: 275928 - RNA, 22 nt, Human
cacagcuaugagcagccuagcu

SEQ ID NO: 275929 - RNA, 22 nt, Human
acauacaugggauuaaaaaauu

SEQ ID NO: 275930 - RNA, 22 nt, Human
gcccacaguuaaugggggcucu

SEQ ID NO: 275931 - RNA, 22 nt, Human
aguguccuggggcccuaaggcc

SEQ ID NO: 275932 - RNA, 22 nt, Human
cccagcugcaccucuauggccu

SEQ ID NO: 275933 - RNA, 22 nt, Human
cagagcugacccaaggauugaa

SEQ ID NO: 275934 - RNA, 18 nt, Human
aaugaaauguacaccuuu

SEQ ID NO: 275935 - RNA, 22 nt, Human
cuauacuacuauacagauguaa

SEQ ID NO: 275936 - RNA, 22 nt, Human
caggaagcaguagaacuuuucc

SEQ ID NO: 275937 - RNA, 22 nt, Human
gcauucuuuuuaggagguuccu

SEQ ID NO: 275938 - RNA, 22 nt, Human
aacaggacacugggauggcuac

SEQ ID NO: 275939 - RNA, 22 nt, Human
ucugagagucucugaggcagau

SEQ ID NO: 275940 - RNA, 22 nt, Human
gcucugggaauucagaaagccu

SEQ ID NO: 275941 - RNA, 22 nt, Human
agagagcccgggccagggcaca

SEQ ID NO: 275942 - RNA, 22 nt, Human
gcacagcacagcaacauguuuu

SEQ ID NO: 275943 - RNA, 22 nt, Human
uucaucaauguguuuaauaaug

SEQ ID NO: 275944 - RNA, 22 nt, Human
uuagaucauuuuagcuaaaugg

SEQ ID NO: 275945 - RNA, 22 nt, Human
uuguauuucgaugcacguguag

SEQ ID NO: 275946 - RNA, 22 nt, Human
ccagagcugcagguaaaaugcu

SEQ ID NO: 275947 - RNA, 22 nt, Human
uccaaauauucggucuuucuga

SEQ ID NO: 275948 - RNA, 22 nt, Human
gcugucuuguauguuguaggac

SEQ ID NO: 275949 - RNA, 22 nt, Human
gcuggagugcugaggugcagug

SEQ ID NO: 275950 - RNA, 22 nt, Human
aagaccuaaaauucccucagau

SEQ ID NO: 275951 - RNA, 22 nt, Human
aguacacacaguagaauagagu

SEQ ID NO: 275952 - RNA, 22 nt, Human
ugaggcuccagccaggccagca

SEQ ID NO: 275953 - RNA, 22 nt, Human
cuccuacacauagaugcuuuca

SEQ ID NO: 275954 - RNA, 22 nt, Human
aucagcaagcaugguuaggugu

SEQ ID NO: 275955 - RNA, 22 nt, Human
auguaucaauuaucugucugca

SEQ ID NO: 275956 - RNA, 22 nt, Human
auccaaaauuuacuguagcauu

SEQ ID NO: 275957 - RNA, 19 nt, Human
aggguuacccgcugccacc

SEQ ID NO: 275958 - RNA, 22 nt, Human
ugauuuuacuuagcaugauguu

SEQ ID NO: 275959 - RNA, 21 nt, Human
auuugcauuaaaauauuacgc

SEQ ID NO: 275960 - RNA, 22 nt, Human
gcuggcucugccccaccuguuc

SEQ ID NO: 275961 - RNA, 22 nt, Human
aggcccuuggguccucuccaca

SEQ ID NO: 275962 - RNA, 20 nt, Human
uacugggucuggguccugga

SEQ ID NO: 275963 - RNA, 22 nt, Human
ugcccaggcuucacccucagag

SEQ ID NO: 275964 - RNA, 22 nt, Human
ggaggagguggguuaaguugua

SEQ ID NO: 275965 - RNA, 22 nt, Human
ucaucucuuuuguauugggguu

SEQ ID NO: 275966 - RNA, 22 nt, Human
gugggggcaggcagugcuagga

SEQ ID NO: 275967 - RNA, 22 nt, Human
cccuguuuaagaaaccuguaaa

SEQ ID NO: 275968 - RNA, 18 nt, Human
auggaggcagagagcuga

SEQ ID NO: 275969 - RNA, 22 nt, Human
ccuguggcuuccacgaccuaau

SEQ ID NO: 275970 - RNA, 22 nt, Human
uuauuagguuauucucuguacu

SEQ ID NO: 275971 - RNA, 22 nt, Human
agcccagagccccggccauguu

SEQ ID NO: 275972 - RNA, 17 nt, Human
uugagucuggggucuac

SEQ ID NO: 275973 - RNA, 22 nt, Human
cucuaauacugaccaagucacc

SEQ ID NO: 275974 - RNA, 22 nt, Human
auuaaacugagcaaauuaacau

SEQ ID NO: 275975 - RNA, 22 nt, Human
gagcaguggucugaucuucuaa

SEQ ID NO: 275976 - RNA, 22 nt, Human
aguaaacauaauuuaccuguag

SEQ ID NO: 275977 - RNA, 22 nt, Human
gugcugcagagucucgugccgc

SEQ ID NO: 275978 - RNA, 22 nt, Human
cuggccugaggucggcuguagg

SEQ ID NO: 275979 - RNA, 22 nt, Human
uuccugugaagccgguggucuc

SEQ ID NO: 275980 - RNA, 22 nt, Human
cagggcagggccacacccccug

SEQ ID NO: 275981 - RNA, 22 nt, Human
aagggugggcccuggcagccau

SEQ ID NO: 275982 - RNA, 22 nt, Human
cuggagcugucuucacaggccu

SEQ ID NO: 275983 - RNA, 22 nt, Human
cuacagccagaugcagaaaguu

SEQ ID NO: 275984 - RNA, 22 nt, Human
gguggggcccuggcacugguau

SEQ ID NO: 275985 - RNA, 22 nt, Human
acauucuuauaagagugaggca

SEQ ID NO: 275986 - RNA, 22 nt, Human
acagguggucuuugcuccuuuu

SEQ ID NO: 275987 - RNA, 22 nt, Human
ugcagguggcuccagggacugc

SEQ ID NO: 275988 - RNA, 22 nt, Human
cauuuguucugauuucaaaagg

SEQ ID NO: 275989 - RNA, 22 nt, Human
uuauuaguguugauauuaggau

SEQ ID NO: 275990 - RNA, 22 nt, Human
acucagcacagcacugggaacc

SEQ ID NO: 275991 - RNA, 22 nt, Human
agagucuucuggggccacuuuc

SEQ ID NO: 275992 - RNA, 22 nt, Human
ugggccacggggguggagagcu

SEQ ID NO: 275993 - RNA, 22 nt, Human
acuuagaagaugcaguaaagca

SEQ ID NO: 275994 - RNA, 22 nt, Human
ccugcucugccaaguccucuuu

SEQ ID NO: 275995 - RNA, 16 nt, Human
agcccugccguguacu

SEQ ID NO: 275996 - RNA, 22 nt, Human
cacaagcuccuuauguggagaa

SEQ ID NO: 275997 - RNA, 22 nt, Human
gagacacacacaggagguggca

SEQ ID NO: 275998 - RNA, 22 nt, Human
aucuggauagguuguuuugcau

SEQ ID NO: 275999 - RNA, 22 nt, Human
acugggaaucucaggaacaugg

SEQ ID NO: 276000 - RNA, 22 nt, Human
uuugugaaaugaagucacaacu

SEQ ID NO: 276001 - RNA, 22 nt, Human
ucagagguaagggcugagagga

SEQ ID NO: 276002 - RNA, 22 nt, Human
cucagcagagaccagggaggaa

SEQ ID NO: 276003 - RNA, 22 nt, Human
agaagcugacagaugcagcagg

SEQ ID NO: 276004 - RNA, 20 nt, Human
ugaucaugugaaagucaugu

SEQ ID NO: 276005 - RNA, 22 nt, Human
gaggaaaauauucagggagguu

SEQ ID NO: 276006 - RNA, 22 nt, Human
aaggcuuccuggaggagguguc

SEQ ID NO: 276007 - RNA, 22 nt, Human
uccugggucucuuccuuaguuc

SEQ ID NO: 276008 - RNA, 20 nt, Human
aggcuccuccaggaugugug

SEQ ID NO: 276009 - RNA, 22 nt, Human
gaccauuuguugaaaagauuau

SEQ ID NO: 276010 - RNA, 22 nt, Human
caguggagagacuuuuacucuu

SEQ ID NO: 276011 - RNA, 20 nt, Human
ugcugcagacagggccauug

SEQ ID NO: 276012 - RNA, 22 nt, Human
ggaaggcugugccagaagaacu

SEQ ID NO: 276013 - RNA, 22 nt, Human
cuagaauaucauaugaagagac

SEQ ID NO: 276014 - RNA, 19 nt, Human
caccuacuuuuggauuugc

SEQ ID NO: 276015 - RNA, 22 nt, Human
agugcagugaugaauaaugguu

SEQ ID NO: 276016 - RNA, 21 nt, Human
ccugaaauucucacuagcuua

SEQ ID NO: 276017 - RNA, 22 nt, Human
acagguguccucacagggggug

SEQ ID NO: 276018 - RNA, 22 nt, Human
gagcugugccaaucugucuggg

SEQ ID NO: 276019 - RNA, 22 nt, Human
ucaggucuugagccaucaggau

SEQ ID NO: 276020 - RNA, 22 nt, Human
guucacuggcugugugacucug

SEQ ID NO: 276021 - RNA, 22 nt, Human
uucuaaacuucaauucuaaauu

SEQ ID NO: 276022 - RNA, 22 nt, Human
cuuagagccuuacucuucuugu

SEQ ID NO: 276023 - RNA, 22 nt, Human
gccagcuguaagcagugauucu

SEQ ID NO: 276024 - RNA, 22 nt, Human
auagagugauguaagguaugug

SEQ ID NO: 276025 - RNA, 23 nt, Human
cagggccaggcagcagcugucac

SEQ ID NO: 276026 - RNA, 22 nt, Human
cagggccugucacgacgcucau

SEQ ID NO: 276027 - RNA, 22 nt, Human
ugcuggaggggccugaccagga

SEQ ID NO: 276028 - RNA, 22 nt, Human
ccaaaguccauaguuuacauaa

SEQ ID NO: 276029 - RNA, 22 nt, Human
gccuagguaccagcagagagcc

SEQ ID NO: 276030 - RNA, 22 nt, Human
ccuccugcacuugcuuuccuuc

SEQ ID NO: 276031 - RNA, 22 nt, Human
uggcucugugucucccagcagc

SEQ ID NO: 276032 - RNA, 21 nt, Human
ucucuggaauuagaccauguu

SEQ ID NO: 276033 - RNA, 22 nt, Human
acaggaagugcuggcacuuaca

SEQ ID NO: 276034 - RNA, 22 nt, Human
agcccaaggcuucccugcuggc

SEQ ID NO: 276035 - RNA, 22 nt, Human
augaggauaccgcagggggcag

SEQ ID NO: 276036 - RNA, 22 nt, Human
aacuagcagcuaagacauaauu

SEQ ID NO: 276037 - RNA, 22 nt, Human
acauauuaacugcacuacacua

SEQ ID NO: 276038 - RNA, 22 nt, Human
gagagggugccuggaagccagg

SEQ ID NO: 276039 - RNA, 22 nt, Human
uauguuuuucaagugcacacua

SEQ ID NO: 276040 - RNA, 22 nt, Human
uauguguaggaggaggacaggg

SEQ ID NO: 276041 - RNA, 22 nt, Human
ccaggagcagccggcccaccug

SEQ ID NO: 276042 - RNA, 22 nt, Human
caucugcugcugaagccagcau

SEQ ID NO: 276043 - RNA, 22 nt, Human
auuguauuauaauuaggccaaa

SEQ ID NO: 276044 - RNA, 22 nt, Human
augaaacaguguguauagcaaa

SEQ ID NO: 276045 - RNA, 20 nt, Human
gaaaugugaccucuucugug

SEQ ID NO: 276046 - RNA, 22 nt, Human
gcucugggugaaggguaccauu

SEQ ID NO: 276047 - RNA, 22 nt, Human
caggcagugucccaggaagcca

SEQ ID NO: 276048 - RNA, 22 nt, Human
gggcugggauugcuugcuguga

SEQ ID NO: 276049 - RNA, 20 nt, Human
acaaaauagguacuggguag

SEQ ID NO: 276050 - RNA, 22 nt, Human
uuuguguuguacuucugugcau

SEQ ID NO: 276051 - RNA, 22 nt, Human
agguagaucaacuggggaggga

SEQ ID NO: 276052 - RNA, 22 nt, Human
acuuaguauuuuucagcuuuga

SEQ ID NO: 276053 - RNA, 22 nt, Human
auucauguuagcccacauguag

SEQ ID NO: 276054 - RNA, 22 nt, Human
ucucagaaauacuauguuguca

SEQ ID NO: 276055 - RNA, 22 nt, Human
gccuuggcccacagugcuccug

SEQ ID NO: 276056 - RNA, 22 nt, Human
ugcccugcuucucuugggacag

SEQ ID NO: 276057 - RNA, 22 nt, Human
ugccaggcauuugacagacacu

SEQ ID NO: 276058 - RNA, 22 nt, Human
uaggguccucaucuguaaauga

SEQ ID NO: 276059 - RNA, 22 nt, Human
cauguaaaaaauuaggucaucu

SEQ ID NO: 276060 - RNA, 22 nt, Human
ggcucagguuuaaagugcuuua

SEQ ID NO: 276061 - RNA, 22 nt, Human
gcuguauuuauaugaaggcaug

SEQ ID NO: 276062 - RNA, 22 nt, Human
agcccggcuuccccgguugcua

SEQ ID NO: 276063 - RNA, 22 nt, Human
ugcagcaguguuccuuggcuug

SEQ ID NO: 276064 - RNA, 22 nt, Human
caggcugaggguuaggccuuag

SEQ ID NO: 276065 - RNA, 22 nt, Human
cuccucuggcuuccuggaggca

SEQ ID NO: 276066 - RNA, 22 nt, Human
agguucuugguguccagauuuc

SEQ ID NO: 276067 - RNA, 21 nt, Human
acagccaggaacaugaggggc

SEQ ID NO: 276068 - RNA, 22 nt, Human
cacugaaaggaaaccagagcau

SEQ ID NO: 276069 - RNA, 22 nt, Human
gcuggucagagagaaaggaggc

SEQ ID NO: 276070 - RNA, 22 nt, Human
aauagcaaaugcucauuugaaa

SEQ ID NO: 276071 - RNA, 16 nt, Human
ugagugggagaagggg

SEQ ID NO: 276072 - RNA, 22 nt, Human
aucacaauguacguuaaaaugu

SEQ ID NO: 276073 - RNA, 22 nt, Human
ucaaauugucaucuugauaaug

SEQ ID NO: 276074 - RNA, 22 nt, Human
uucuguuuacucagaaauacaa

SEQ ID NO: 276075 - RNA, 22 nt, Human
ccaggcucugacauagauggga

SEQ ID NO: 276076 - RNA, 22 nt, Human
aagaaucauccugcaagagucu

SEQ ID NO: 276077 - RNA, 22 nt, Human
uguuccuucacagcaguggaca

SEQ ID NO: 276078 - RNA, 22 nt, Human
cuggcuucccugucuuauggaa

SEQ ID NO: 276079 - RNA, 22 nt, Human
ccagguggcccugcccuacucu

SEQ ID NO: 276080 - RNA, 22 nt, Human
cacaacuuuaggaaccacauuc

SEQ ID NO: 276081 - RNA, 22 nt, Human
aaggccagaguugaacugcucc

SEQ ID NO: 276082 - RNA, 22 nt, Human
gggaggaaggcuugggugagua

SEQ ID NO: 276083 - RNA, 22 nt, Human
gccuggacaccgcccuugcaga

SEQ ID NO: 276084 - RNA, 22 nt, Human
uggagagcaaugaggggcaggc

SEQ ID NO: 276085 - RNA, 22 nt, Human
aaagguguugccuuggagaccu

SEQ ID NO: 276086 - RNA, 18 nt, Human
uggcucugccacucaccg

SEQ ID NO: 276087 - RNA, 22 nt, Human
aacuggugagauaaauuauuua

SEQ ID NO: 276088 - RNA, 22 nt, Human
gggaccugaggagggguuucag

SEQ ID NO: 276089 - RNA, 22 nt, Human
caauacugaguuuacauucauc

SEQ ID NO: 276090 - RNA, 22 nt, Human
cucuuagaaacuauagagauua

SEQ ID NO: 276091 - RNA, 22 nt, Human
agacaaaccuuguuuuaugaug

SEQ ID NO: 276092 - RNA, 22 nt, Human
caggagcucucaucgucagggc

SEQ ID NO: 276093 - RNA, 22 nt, Human
gcaccaggaagcuguuauagca

SEQ ID NO: 276094 - RNA, 22 nt, Human
uauaacugagaagauacauagu

SEQ ID NO: 276095 - RNA, 22 nt, Human
uuuucuagggugcuaaaugaac

SEQ ID NO: 276096 - RNA, 22 nt, Human
uaacaguuuugaguuuugcuuc

SEQ ID NO: 276097 - RNA, 21 nt, Human
agcaagcagaauccaucuaga

SEQ ID NO: 276098 - RNA, 22 nt, Human
guggcuuuggaauuguagacuc

SEQ ID NO: 276099 - RNA, 22 nt, Human
ccugcuggcugguagaguuccg

SEQ ID NO: 276100 - RNA, 22 nt, Human
cuuggaauugaugauuuucaua

SEQ ID NO: 276101 - RNA, 21 nt, Human
gugcacaguccugcacacagg

SEQ ID NO: 276102 - RNA, 22 nt, Human
uugcaaauuauauaagggaugc

SEQ ID NO: 276103 - RNA, 22 nt, Human
ggguuaaacaugcuauaugagu

SEQ ID NO: 276104 - RNA, 23 nt, Human
aacagcaggaugauagaggaggu

SEQ ID NO: 276105 - RNA, 23 nt, Human
ccacaggcacagaggcuugcauc

SEQ ID NO: 276106 - RNA, 22 nt, Human
uacauguaagacaugagacucu

SEQ ID NO: 276107 - RNA, 22 nt, Human
gcaggucuggcauagagccugc

SEQ ID NO: 276108 - RNA, 22 nt, Human
cagcagagguuggaacaguucu

SEQ ID NO: 276109 - RNA, 22 nt, Human
uucaggcaucccuacaguuagg

SEQ ID NO: 276110 - RNA, 22 nt, Human
ccucuggggcaucagacaaagg

SEQ ID NO: 276111 - RNA, 22 nt, Human
gcccuggagcuagacuaggaca

SEQ ID NO: 276112 - RNA, 22 nt, Human
ggauucagugucuguuaauagu

SEQ ID NO: 276113 - RNA, 22 nt, Human
ccuggguccacccugugaagua

SEQ ID NO: 276114 - RNA, 22 nt, Human
gcugcagagggaggggcucgca

SEQ ID NO: 276115 - RNA, 22 nt, Human
auggaaagccaguguuccauca

SEQ ID NO: 276116 - RNA, 22 nt, Human
gucccugguuugcccaggacca

SEQ ID NO: 276117 - RNA, 22 nt, Human
cauuuguuaaugcugcuuuuaa

SEQ ID NO: 276118 - RNA, 20 nt, Human
aggccaggaaauguaguucu

SEQ ID NO: 276119 - RNA, 22 nt, Human
auaaauuuucuugcuguacuua

SEQ ID NO: 276120 - RNA, 22 nt, Human
uccuuggagcucuccaagggau

SEQ ID NO: 276121 - RNA, 22 nt, Human
cucuccucugaaguggugaccc

SEQ ID NO: 276122 - RNA, 22 nt, Human
gguggcaccuugaucuuggacu

SEQ ID NO: 276123 - RNA, 22 nt, Human
uuccuagaaugguuagaaaaua

SEQ ID NO: 276124 - RNA, 22 nt, Human
ccucccuggccagagcagcagc

SEQ ID NO: 276125 - RNA, 19 nt, Human
gggcuucugggaucaagag

SEQ ID NO: 276126 - RNA, 22 nt, Human
cccaggcagaauuaguguuuca

SEQ ID NO: 276127 - RNA, 22 nt, Human
uguaacaguuauaacaaugugg

SEQ ID NO: 276128 - RNA, 22 nt, Human
cccaggaggguggccucugccc

SEQ ID NO: 276129 - RNA, 22 nt, Human
uuacugauggaacagagauaga

SEQ ID NO: 276130 - RNA, 22 nt, Human
aguccaggcucuuccugaagaa

SEQ ID NO: 276131 - RNA, 22 nt, Human
uugaggagaagacuuugcuucc

SEQ ID NO: 276132 - RNA, 22 nt, Human
aauaaucucccuuuuuguaugu

SEQ ID NO: 276133 - RNA, 22 nt, Human
ucagugcacagagauuuuuguu

SEQ ID NO: 276134 - RNA, 22 nt, Human
agugaaaucagguuuugacugc

SEQ ID NO: 276135 - RNA, 22 nt, Human
uggcugagagaagacggggaag

SEQ ID NO: 276136 - RNA, 22 nt, Human
cuucuccgacaaccgacgccgg

SEQ ID NO: 276137 - RNA, 22 nt, Human
aagggggcgaagacgugauuga

SEQ ID NO: 276138 - RNA, 22 nt, Human
auugaaaaugacauuugugccc

SEQ ID NO: 276139 - RNA, 19 nt, Human
ccagcagguucauuucagg

SEQ ID NO: 276140 - RNA, 22 nt, Human
uugcccugcguuaccaucucuu

SEQ ID NO: 276141 - RNA, 22 nt, Human
cagcugucagccggugcaggcu

SEQ ID NO: 276142 - RNA, 22 nt, Human
ccugaggcaaggacuugguggc

SEQ ID NO: 276143 - RNA, 22 nt, Human
cccagaggugcuucagaggugc

SEQ ID NO: 276144 - RNA, 22 nt, Human
agccaacagccagcaucaacca

SEQ ID NO: 276145 - RNA, 22 nt, Human
ccagcuuuugcacuggacuggg

SEQ ID NO: 276146 - RNA, 22 nt, Human
aggagcugauagucuauggaga

SEQ ID NO: 276147 - RNA, 22 nt, Human
gccagcaguccugcugugugcc

SEQ ID NO: 276148 - RNA, 20 nt, Human
uggccucugagaugccacgg

SEQ ID NO: 276149 - RNA, 22 nt, Human
uuuaagacuuagauuuauuggg

SEQ ID NO: 276150 - RNA, 22 nt, Human
uugcaggggaaggagcagagcu

SEQ ID NO: 276151 - RNA, 22 nt, Human
gacccugagcaaaagcaguucu

SEQ ID NO: 276152 - RNA, 22 nt, Human
uagcuugaguguuucauaaaua

SEQ ID NO: 276153 - RNA, 22 nt, Human
gacagggaggagcagagcuucu

SEQ ID NO: 276154 - RNA, 22 nt, Human
cagcuguuguguaucaggcaga

SEQ ID NO: 276155 - RNA, 20 nt, Human
aaaugcuuuugacacauauu

SEQ ID NO: 276156 - RNA, 22 nt, Human
uuuuccagauuggacuuagucc

SEQ ID NO: 276157 - RNA, 22 nt, Human
cucuagaaagauuguugaccaa

SEQ ID NO: 276158 - RNA, 22 nt, Human
ugcccugcggcuaucuagauga

SEQ ID NO: 276159 - RNA, 22 nt, Human
aggcugugaaauguggcaagga

SEQ ID NO: 276160 - RNA, 22 nt, Human
uuccuggcuucauacuuuguac

SEQ ID NO: 276161 - RNA, 22 nt, Human
agggucucuacgcacuagaggg

SEQ ID NO: 276162 - RNA, 22 nt, Human
aagaauauagauuuuuugaagu

SEQ ID NO: 276163 - RNA, 22 nt, Human
ccugagcuuuaaaagccaugua

SEQ ID NO: 276164 - RNA, 22 nt, Human
uaacagaauccuguuauugcca

SEQ ID NO: 276165 - RNA, 22 nt, Human
uuuacaauugguuuucucuaau

SEQ ID NO: 276166 - RNA, 22 nt, Human
aaugcuuugacuauaucuauaa

SEQ ID NO: 276167 - RNA, 22 nt, Human
agacagcugguagcacuuccug

SEQ ID NO: 276168 - RNA, 22 nt, Human
uccaggcuuuggggcaggagcg

SEQ ID NO: 276169 - RNA, 22 nt, Human
ugcagcccugugcacauccccu

SEQ ID NO: 276170 - RNA, 22 nt, Human
cugggucugggccuccuggagu

SEQ ID NO: 276171 - RNA, 22 nt, Human
uccuccaagcguggguguuuga

SEQ ID NO: 276172 - RNA, 22 nt, Human
uccugggagcccuugcuccacc

SEQ ID NO: 276173 - RNA, 22 nt, Human
aaaggcuauuucagggucagua

SEQ ID NO: 276174 - RNA, 22 nt, Human
augcacagaacaauuuuaagag

SEQ ID NO: 276175 - RNA, 17 nt, Human
ucugcagggggccgugu

SEQ ID NO: 276176 - RNA, 22 nt, Human
uagauucuacugucacuuaguu

SEQ ID NO: 276177 - RNA, 22 nt, Human
cugugcaguaggucagggcugg

SEQ ID NO: 276178 - RNA, 22 nt, Human
aagauuuucagcuaauggugca

SEQ ID NO: 276179 - RNA, 22 nt, Human
gcugguggugggccaguucugu

SEQ ID NO: 276180 - RNA, 22 nt, Human
uaaguucaagucuuggauauaa

SEQ ID NO: 276181 - RNA, 22 nt, Human
aaagccuuuuaugaucaguuaa

SEQ ID NO: 276182 - RNA, 22 nt, Human
aaggaggcacucgcucucaggg

SEQ ID NO: 276183 - RNA, 22 nt, Human
ugagcccagaagcccacucggc

SEQ ID NO: 276184 - RNA, 22 nt, Human
accugccuauggagccacaugg

SEQ ID NO: 276185 - RNA, 22 nt, Human
guauacaacuauuguuggguaa

SEQ ID NO: 276186 - RNA, 22 nt, Human
aggcucugcagugcuggaggac

SEQ ID NO: 276187 - RNA, 22 nt, Human
caucucaugggcaugccaagcu

SEQ ID NO: 276188 - RNA, 19 nt, Human
agagccagacagcauagga

SEQ ID NO: 276189 - RNA, 22 nt, Human
uuaggaaacaguagccuuugcu

SEQ ID NO: 276190 - RNA, 22 nt, Human
uuauaacaucaaucagaguuaa

SEQ ID NO: 276191 - RNA, 22 nt, Human
uucauguaggcugcaaugcaca

SEQ ID NO: 276192 - RNA, 22 nt, Human
acaggcaggagcuccccauucc

SEQ ID NO: 276193 - RNA, 22 nt, Human
agugcacaacaugcagguuugu

SEQ ID NO: 276194 - RNA, 21 nt, Human
caggcuugaggaaugugccug

SEQ ID NO: 276195 - RNA, 22 nt, Human
agcuuuaaaaauccaauaucca

SEQ ID NO: 276196 - RNA, 22 nt, Human
gguggacaguguuagcucuggg

SEQ ID NO: 276197 - RNA, 22 nt, Human
auagauuauuugcucauuacuu

SEQ ID NO: 276198 - RNA, 22 nt, Human
acuggcagaggauagcacuaau

SEQ ID NO: 276199 - RNA, 22 nt, Human
uagguaguuuccuguuguuggg

SEQ ID NO: 276200 - RNA, 22 nt, Human
acccuugguuuugcagagcugu

SEQ ID NO: 276201 - RNA, 22 nt, Human
aaaagucugcucucauuucaga

SEQ ID NO: 276202 - RNA, 22 nt, Human
ugaaaucugucccacuuuagcu

SEQ ID NO: 276203 - RNA, 22 nt, Human
cuauuuuaagaggccauuaggu

SEQ ID NO: 276204 - RNA, 22 nt, Human
cugcugagccgcacccaggagc

SEQ ID NO: 276205 - RNA, 22 nt, Human
aacaaugcacuaucguaagugg

SEQ ID NO: 276206 - RNA, 22 nt, Human
uaggcuggaggaagcagugccu

SEQ ID NO: 276207 - RNA, 22 nt, Human
ucaauaaauagcuuggcucagc

SEQ ID NO: 276208 - RNA, 21 nt, Human
uuaccaauggcuucucuuucc

SEQ ID NO: 276209 - RNA, 22 nt, Human
uuucuucucuaaucucaaugau

SEQ ID NO: 276210 - RNA, 22 nt, Human
gcuuuugugagauuaagcuacu

SEQ ID NO: 276211 - RNA, 22 nt, Human
gggaaacucacaggugcagggg

SEQ ID NO: 276212 - RNA, 22 nt, Human
acaggggcuccgaaggugaggg

SEQ ID NO: 276213 - RNA, 22 nt, Human
aguuuccucaucuguaaaauga

SEQ ID NO: 276214 - RNA, 22 nt, Human
cuccagggagcugcgggagcca

SEQ ID NO: 276215 - RNA, 22 nt, Human
agcuggguugacaagauggaaa

SEQ ID NO: 276216 - RNA, 22 nt, Human
ucucugggguagggcccaggac

SEQ ID NO: 276217 - RNA, 22 nt, Human
auucagaaauagaaaauuugau

SEQ ID NO: 276218 - RNA, 21 nt, Human
uuuuauugaugaauggccacu

SEQ ID NO: 276219 - RNA, 22 nt, Human
acuuauuagacaucuucauugu

SEQ ID NO: 276220 - RNA, 22 nt, Human
cucuggcuguuugcagcucaag

SEQ ID NO: 276221 - RNA, 22 nt, Human
ugcugaggucauuuccaaguga

SEQ ID NO: 276222 - RNA, 22 nt, Human
acauuucucagggaguuuugcu

SEQ ID NO: 276223 - RNA, 22 nt, Human
ucaucauaauauggaaucuugu

SEQ ID NO: 276224 - RNA, 22 nt, Human
acagucuuaugcauacacuauu

SEQ ID NO: 276225 - RNA, 22 nt, Human
aagucaugaguccucuucugug

SEQ ID NO: 276226 - RNA, 22 nt, Human
uguucaguccaauguuggaaaa

SEQ ID NO: 276227 - RNA, 22 nt, Human
cugggccuaacccacagcguuu

SEQ ID NO: 276228 - RNA, 22 nt, Human
cagugggguuucugugggugcu

SEQ ID NO: 276229 - RNA, 22 nt, Human
agcuggugugccaguuccaguu

SEQ ID NO: 276230 - RNA, 22 nt, Human
aaugcuuuaaauccuaguguaa

SEQ ID NO: 276231 - RNA, 22 nt, Human
guccagagggcugcaggaugcu

SEQ ID NO: 276232 - RNA, 22 nt, Human
ugaccugcguaggugguuucug

SEQ ID NO: 276233 - RNA, 22 nt, Human
gaguccaguuagugaggcuggg

SEQ ID NO: 276234 - RNA, 22 nt, Human
ggcuggagauaugucuggaaca

SEQ ID NO: 276235 - RNA, 22 nt, Human
ucugugcugucucagagaaagc

SEQ ID NO: 276236 - RNA, 22 nt, Human
cuugaagaaaguauguugggau

SEQ ID NO: 276237 - RNA, 22 nt, Human
cagcuggcauaccugggcccgg

SEQ ID NO: 276238 - RNA, 22 nt, Human
uauucaugagauaggcaguuuu

SEQ ID NO: 276239 - RNA, 22 nt, Human
gaaaaggcucucacucccuccg

SEQ ID NO: 276240 - RNA, 22 nt, Human
uuuugcccuugcuagaucacug

SEQ ID NO: 276241 - RNA, 22 nt, Human
ugguggaaggcagagcuacacc

SEQ ID NO: 276242 - RNA, 22 nt, Human
agacagaauuugucagauaaau

SEQ ID NO: 276243 - RNA, 21 nt, Human
uccauccaucaguccagccag

SEQ ID NO: 276244 - RNA, 22 nt, Human
ccuuuucuauccuucuagguuc

SEQ ID NO: 276245 - RNA, 22 nt, Human
augcccaaugucacaauuuuug

SEQ ID NO: 276246 - RNA, 22 nt, Human
cuuucuuauaccugucagggcc

SEQ ID NO: 276247 - RNA, 22 nt, Human
gugcaaucugguuaauacgacu

SEQ ID NO: 276248 - RNA, 22 nt, Human
uuagaacaauauucucccuaca

SEQ ID NO: 276249 - RNA, 22 nt, Human
ccuugagacacagccaaagaug

SEQ ID NO: 276250 - RNA, 22 nt, Human
ggugaggguaaauauaggcaaa

SEQ ID NO: 276251 - RNA, 22 nt, Human
agcucccugagaugccacagca

SEQ ID NO: 276252 - RNA, 22 nt, Human
guuguuuuaaaauacuccagaa

SEQ ID NO: 276253 - RNA, 22 nt, Human
augaaggauagggcaaaauuuu

SEQ ID NO: 276254 - RNA, 21 nt, Human
uaaaacuguaacuuuguccug

SEQ ID NO: 276255 - RNA, 22 nt, Human
gaacaguaacugucugcugugu

SEQ ID NO: 276256 - RNA, 18 nt, Human
caugucugcgccacaagg

SEQ ID NO: 276257 - RNA, 22 nt, Human
ccuggcaacauuucaaggucuu

SEQ ID NO: 276258 - RNA, 22 nt, Human
agcuucucggcugggaguauuu

SEQ ID NO: 276259 - RNA, 22 nt, Human
aaugaacauggacaaguuaaua

SEQ ID NO: 276260 - RNA, 21 nt, Human
caauaaacugcacauugagac

SEQ ID NO: 276261 - RNA, 22 nt, Human
ccugcccagcuucccgagugca

SEQ ID NO: 276262 - RNA, 18 nt, Human
uccagcaggucugaggug

SEQ ID NO: 276263 - RNA, 22 nt, Human
gcuaucuuucugcaccauaauu

SEQ ID NO: 276264 - RNA, 22 nt, Human
aucauggaagccuaucuugaga

SEQ ID NO: 276265 - RNA, 22 nt, Human
uggguccuucaaagcugggucu

SEQ ID NO: 276266 - RNA, 22 nt, Human
gggccagucugacucugcuggu

SEQ ID NO: 276267 - RNA, 22 nt, Human
accugcagguguuuccacacuu

SEQ ID NO: 276268 - RNA, 22 nt, Human
auaaauuuauaauuguuuccug

SEQ ID NO: 276269 - RNA, 22 nt, Human
gccacugucauacccuggcaau

SEQ ID NO: 276270 - RNA, 22 nt, Human
gucaauaucuugguuguacuau

SEQ ID NO: 276271 - RNA, 22 nt, Human
uccuccugcuguuagucuugaa

SEQ ID NO: 276272 - RNA, 22 nt, Human
aguguucuuccuaucugcuguu

SEQ ID NO: 276273 - RNA, 22 nt, Human
ccaggcagaaugaaaccccugu

SEQ ID NO: 276274 - RNA, 20 nt, Human
agcaaacucuucccaucuuc

SEQ ID NO: 276275 - RNA, 22 nt, Human
ggcagcuuacguuuugcuagug

SEQ ID NO: 276276 - RNA, 22 nt, Human
ucaacaauugcauguugauguu

SEQ ID NO: 276277 - RNA, 17 nt, Human
gugaagagucauugaau

SEQ ID NO: 276278 - RNA, 22 nt, Human
aaggcauaggacaaaucaguga

SEQ ID NO: 276279 - RNA, 22 nt, Human
auuagguugagguacucagagc

SEQ ID NO: 276280 - RNA, 22 nt, Human
ucugcagcccaaagucucuuag

SEQ ID NO: 276281 - RNA, 22 nt, Human
ucuggcagcaagauaacaaugg

SEQ ID NO: 276282 - RNA, 23 nt, Human
ucugggcaccuuguugacaugau

SEQ ID NO: 276283 - RNA, 22 nt, Human
gcaggccuccccugcuggagcu

SEQ ID NO: 276284 - RNA, 22 nt, Human
ugguucagagaguugcugacca

SEQ ID NO: 276285 - RNA, 20 nt, Human
ccagcacccucucagcugaa

SEQ ID NO: 276286 - RNA, 22 nt, Human
agagucaguuagcgaauacuua

SEQ ID NO: 276287 - RNA, 22 nt, Human
uguuuaauugggccaacagcgg

SEQ ID NO: 276288 - RNA, 22 nt, Human
cauuagaaccuauaaaaagcau

SEQ ID NO: 276289 - RNA, 22 nt, Human
uggcuccaggggacacgcagua

SEQ ID NO: 276290 - RNA, 22 nt, Human
ucagagauggaguuagcaguga

SEQ ID NO: 276291 - RNA, 22 nt, Human
ucugcucuguacugcacuggcc

SEQ ID NO: 276292 - RNA, 21 nt, Human
ccuagccucuuacccagcuuu

SEQ ID NO: 276293 - RNA, 22 nt, Human
aaguguauuuuuguacuaacau

SEQ ID NO: 276294 - RNA, 23 nt, Human
ucuggcucuaugugacagcucuc

SEQ ID NO: 276295 - RNA, 20 nt, Human
aagggagaauaaugauugua

SEQ ID NO: 276296 - RNA, 22 nt, Human
uuagcaaauaucuugaaacagg

SEQ ID NO: 276297 - RNA, 22 nt, Human
augugacaauauuuggucuuau

SEQ ID NO: 276298 - RNA, 22 nt, Human
uuuaucagaggcuauguuucau

SEQ ID NO: 276299 - RNA, 23 nt, Human
uaauucacauauacauugcuuca

SEQ ID NO: 276300 - RNA, 22 nt, Human
cccugugcacacacuucacucu

SEQ ID NO: 276301 - RNA, 22 nt, Human
cuagaacuacaucuuuuaauag

SEQ ID NO: 276302 - RNA, 22 nt, Human
ucucuggcagacaccucccuga

SEQ ID NO: 276303 - RNA, 18 nt, Human
ucuguguucugucauugc

SEQ ID NO: 276304 - RNA, 22 nt, Human
uuuuccucaccuaacucaaggu

SEQ ID NO: 276305 - RNA, 22 nt, Human
ucacaggcccaaaccacgcuua

SEQ ID NO: 276306 - RNA, 22 nt, Human
uuccuggcgccacggagccggu

SEQ ID NO: 276307 - RNA, 22 nt, Human
gaagccaucuuuguuccccacc

SEQ ID NO: 276308 - RNA, 22 nt, Human
auucacaaaaugauauagauac

SEQ ID NO: 276309 - RNA, 22 nt, Human
gaaggagagggucaaggauaau

SEQ ID NO: 276310 - RNA, 22 nt, Human
aaagccagcaaggugaguuuca

SEQ ID NO: 276311 - RNA, 22 nt, Human
ggcaggcugggagucaucagag

SEQ ID NO: 276312 - RNA, 22 nt, Human
acuggcugaggaaguugccacu

SEQ ID NO: 276313 - RNA, 22 nt, Human
ugggaggagcccucugggaagg

SEQ ID NO: 276314 - RNA, 22 nt, Human
caggcucccuucucggaauucu

SEQ ID NO: 276315 - RNA, 22 nt, Human
cugccugcaucccacagugggg

SEQ ID NO: 276316 - RNA, 22 nt, Human
cuauuucaaggcccagauauga

SEQ ID NO: 276317 - RNA, 22 nt, Human
gcuggaguuaggugggcuugaa

SEQ ID NO: 276318 - RNA, 22 nt, Human
agcuucucagcuucagaacugu

SEQ ID NO: 276319 - RNA, 22 nt, Human
uauuacagaaucaggcauaacu

SEQ ID NO: 276320 - RNA, 22 nt, Human
ugcuauuuuuaucuugaucaaa

SEQ ID NO: 276321 - RNA, 22 nt, Human
agaguuuacagaaauaagcugu

SEQ ID NO: 276322 - RNA, 22 nt, Human
gcagacagccagacugcacugg

SEQ ID NO: 276323 - RNA, 22 nt, Human
uuucugugguggguaguucaga

SEQ ID NO: 276324 - RNA, 22 nt, Human
gcuguggcugacauugcagaca

SEQ ID NO: 276325 - RNA, 22 nt, Human
uuuccuucuuagcgguguucuu

SEQ ID NO: 276326 - RNA, 20 nt, Human
gcagccucaacaggcacagc

SEQ ID NO: 276327 - RNA, 22 nt, Human
guuagggagucagguggcucuu

SEQ ID NO: 276328 - RNA, 22 nt, Human
uaggcucagugaguagggaguu

SEQ ID NO: 276329 - RNA, 22 nt, Human
gacagcauccaagagggaggga

SEQ ID NO: 276330 - RNA, 22 nt, Human
gacuuugguucagggcucagag

SEQ ID NO: 276331 - RNA, 22 nt, Human
acaugacuauaauuacuuaaau

SEQ ID NO: 276332 - RNA, 21 nt, Human
gauuuaguggcuguucuaccu

SEQ ID NO: 276333 - RNA, 22 nt, Human
aggagcugggcugcugcuggga

SEQ ID NO: 276334 - RNA, 22 nt, Human
uuuuccaaaguaccaugucccu

SEQ ID NO: 276335 - RNA, 22 nt, Human
guagaaccuucuuuacuagagu

SEQ ID NO: 276336 - RNA, 22 nt, Human
uacaacaugugguccuuuauga

SEQ ID NO: 276337 - RNA, 22 nt, Human
aaugggcucacaagaccugaau

SEQ ID NO: 276338 - RNA, 22 nt, Human
ugcagcugccuagggcuggcuu

SEQ ID NO: 276339 - RNA, 21 nt, Human
gggaucugaggcaagucuccu

SEQ ID NO: 276340 - RNA, 22 nt, Human
cauuccuuaacguggggagucu

SEQ ID NO: 276341 - RNA, 22 nt, Human
guucacaauggcuuuaccuaag

SEQ ID NO: 276342 - RNA, 22 nt, Human
acaguuuguguuggccaugggc

SEQ ID NO: 276343 - RNA, 22 nt, Human
gcugagacuuccacugccaucu

SEQ ID NO: 276344 - RNA, 22 nt, Human
ugaggcaagaguuugauuagag

SEQ ID NO: 276345 - RNA, 18 nt, Human
uucuccagaaaacauagc

SEQ ID NO: 276346 - RNA, 22 nt, Human
ccuggccagccagggcuggggu

SEQ ID NO: 276347 - RNA, 22 nt, Human
aagcuacaauguguuuuugaaa

SEQ ID NO: 276348 - RNA, 22 nt, Human
aacaagaagggaaggcaugauu

SEQ ID NO: 276349 - RNA, 22 nt, Human
cacccagcacagagggaggcga

SEQ ID NO: 276350 - RNA, 22 nt, Human
acuauucaccuuucaugcagga

SEQ ID NO: 276351 - RNA, 22 nt, Human
agcugcaaguccaaaggaauua

SEQ ID NO: 276352 - RNA, 22 nt, Human
ucauggcacaugcccuccaggg

SEQ ID NO: 276353 - RNA, 22 nt, Human
gcucuggccagacccucagugg

SEQ ID NO: 276354 - RNA, 22 nt, Human
ucugaaauauauuuugaguguu

SEQ ID NO: 276355 - RNA, 22 nt, Human
ugagaggauauuuugggaggau

SEQ ID NO: 276356 - RNA, 22 nt, Human
aauguggccacuuuuuucuggg

SEQ ID NO: 276357 - RNA, 22 nt, Human
gaggcugugugucccucuggac

SEQ ID NO: 276358 - RNA, 22 nt, Human
ucauugaaugagaugcaauaga

SEQ ID NO: 276359 - RNA, 22 nt, Human
ugaggcaggacauggacaacug

SEQ ID NO: 276360 - RNA, 22 nt, Human
uucuuggccaccagaucucacu

SEQ ID NO: 276361 - RNA, 22 nt, Human
uucuuuggggaauauucugguu

SEQ ID NO: 276362 - RNA, 22 nt, Human
gcuccugucaucaaacaauccu

SEQ ID NO: 276363 - RNA, 17 nt, Human
agugacuuggaaagagc

SEQ ID NO: 276364 - RNA, 22 nt, Human
ugcccagaauagaugggcugug

SEQ ID NO: 276365 - RNA, 22 nt, Human
acuuuacaaacuccucacuguu

SEQ ID NO: 276366 - RNA, 22 nt, Human
cucuuccuacagucugcuaugc

SEQ ID NO: 276367 - RNA, 22 nt, Human
acagaaagaugauuugaaaugg

SEQ ID NO: 276368 - RNA, 22 nt, Human
uugagucuccucagcagggcua

SEQ ID NO: 276369 - RNA, 22 nt, Human
uaauaucuacuucauagaguuu

SEQ ID NO: 276370 - RNA, 22 nt, Human
ucaggugggaguagaaugcuag

SEQ ID NO: 276371 - RNA, 22 nt, Human
gaaaguauuagccuagaaguca

SEQ ID NO: 276372 - RNA, 22 nt, Human
cagagucaauguccaagaagcu

SEQ ID NO: 276373 - RNA, 22 nt, Human
uaggaaauuggaaacucuucac

SEQ ID NO: 276374 - RNA, 22 nt, Human
agaagucauuuauguuagauga

SEQ ID NO: 276375 - RNA, 22 nt, Human
cuauucaacuugacuguuucac

SEQ ID NO: 276376 - RNA, 22 nt, Human
aaagucuuuauuuuguaucuuu

SEQ ID NO: 276377 - RNA, 22 nt, Human
ugcuuaaacauacuauuuauau

SEQ ID NO: 276378 - RNA, 22 nt, Human
uuucuaguucucugccaaaaaa

SEQ ID NO: 276379 - RNA, 22 nt, Human
cuuggagacaggacaggcagaa

SEQ ID NO: 276380 - RNA, 22 nt, Human
ucuauuucgcauauaaguuuug

SEQ ID NO: 276381 - RNA, 22 nt, Human
cccagggacagaugggcagcua

SEQ ID NO: 276382 - RNA, 22 nt, Human
uauagaucuugcuauuuaagga

SEQ ID NO: 276383 - RNA, 22 nt, Human
ccauucugacuucauugccuca

SEQ ID NO: 276384 - RNA, 22 nt, Human
agccuggauccuaggcucagcu

SEQ ID NO: 276385 - RNA, 20 nt, Human
gucuucuauucccagaaagu

SEQ ID NO: 276386 - RNA, 18 nt, Human
ggccuuaguaugugccuu

SEQ ID NO: 276387 - RNA, 22 nt, Human
aauuucaaagcucacuggcaua

SEQ ID NO: 276388 - RNA, 22 nt, Human
cucuggguucacugaggcucug

SEQ ID NO: 276389 - RNA, 22 nt, Human
ugggccuccugcccuggccuag

SEQ ID NO: 276390 - RNA, 22 nt, Human
gaggugucccugacccuuugca

SEQ ID NO: 276391 - RNA, 22 nt, Human
gguguccucacuauagcaaguc

SEQ ID NO: 276392 - RNA, 22 nt, Human
uuagauaaauuaagacuuuaca

SEQ ID NO: 276393 - RNA, 22 nt, Human
ccagcugguuaaaauagagaaa

SEQ ID NO: 276394 - RNA, 22 nt, Human
gggcagcucugcccaucagagg

SEQ ID NO: 276395 - RNA, 23 nt, Human
cagugggaggacugagauaaaac

SEQ ID NO: 276396 - RNA, 22 nt, Human
ccaggccuggacggguggccug

SEQ ID NO: 276397 - RNA, 22 nt, Human
caguuuuagcuagagcaaacca

SEQ ID NO: 276398 - RNA, 22 nt, Human
aagggcugaucucacuuucuuu

SEQ ID NO: 276399 - RNA, 22 nt, Human
cugaaacuggucaauuaaucug

SEQ ID NO: 276400 - RNA, 18 nt, Human
acagcagguuucauucuu

SEQ ID NO: 276401 - RNA, 22 nt, Human
ugcucauuugcccauuagcauc

SEQ ID NO: 276402 - RNA, 22 nt, Human
gccugagcuuuaauuuucuugu

SEQ ID NO: 276403 - RNA, 22 nt, Human
ggcucugccgugugcucacaug

SEQ ID NO: 276404 - RNA, 22 nt, Human
ccugcaccugagcagccugacu

SEQ ID NO: 276405 - RNA, 22 nt, Human
ucuccuggcucaccaggcugga

SEQ ID NO: 276406 - RNA, 22 nt, Human
cauugcugugggcauuugcugc

SEQ ID NO: 276407 - RNA, 22 nt, Human
ccucccuucaguagagcccaau

SEQ ID NO: 276408 - RNA, 22 nt, Human
gagaggcauggaacagauucuu

SEQ ID NO: 276409 - RNA, 22 nt, Human
ccaggugugauuuggcaguguc

SEQ ID NO: 276410 - RNA, 22 nt, Human
agagcagcucgcuaccucucua

SEQ ID NO: 276411 - RNA, 22 nt, Human
ccucugggcagguagcagcagc

SEQ ID NO: 276412 - RNA, 22 nt, Human
uuggcagacuggguccugggga

SEQ ID NO: 276413 - RNA, 22 nt, Human
gaauguuauuggacagcagugg

SEQ ID NO: 276414 - RNA, 22 nt, Human
ccacccugagccgcaagagcag

SEQ ID NO: 276415 - RNA, 22 nt, Human
ucauucauugcuuacccugugu

SEQ ID NO: 276416 - RNA, 22 nt, Human
aaauaugaaugauaagaguuau

SEQ ID NO: 276417 - RNA, 21 nt, Human
aagcuuccaaacugcuggacu

SEQ ID NO: 276418 - RNA, 22 nt, Human
gaggggccuggcacugagcugg

SEQ ID NO: 276419 - RNA, 22 nt, Human
ggagaggugagagguacaaguu

SEQ ID NO: 276420 - RNA, 22 nt, Human
gaggcucccucaacucugggug

SEQ ID NO: 276421 - RNA, 22 nt, Human
cuggaggaauaauggcaucuug

SEQ ID NO: 276422 - RNA, 22 nt, Human
cagcccuguugcgcuuccggcg

SEQ ID NO: 276423 - RNA, 22 nt, Human
ggccuugacaguuaagagaccu

SEQ ID NO: 276424 - RNA, 22 nt, Human
cccaggaggugugcccaacucg

SEQ ID NO: 276425 - RNA, 22 nt, Human
acaggaagcuggagacccuuga

SEQ ID NO: 276426 - RNA, 16 nt, Human
cagccugcagugguca

SEQ ID NO: 276427 - RNA, 22 nt, Human
ucaaggaaggucuguugcucca

SEQ ID NO: 276428 - RNA, 22 nt, Human
cagcucaggaaggaaggccggc

SEQ ID NO: 276429 - RNA, 20 nt, Human
ggcuccuucuuucauggccc

SEQ ID NO: 276430 - RNA, 22 nt, Human
agugugaguaauucagggaggg

SEQ ID NO: 276431 - RNA, 22 nt, Human
cacaaaguuggacaacgcaccc

SEQ ID NO: 276432 - RNA, 22 nt, Human
ccugcccacugcccggucagcc

SEQ ID NO: 276433 - RNA, 22 nt, Human
ugcagaaauucagaaagcauaa

SEQ ID NO: 276434 - RNA, 22 nt, Human
gggcucugggaugcucuuagag

SEQ ID NO: 276435 - RNA, 22 nt, Human
agacaacuagaaaacuagacag

SEQ ID NO: 276436 - RNA, 17 nt, Human
aucuggaagcuagcuga

SEQ ID NO: 276437 - RNA, 22 nt, Human
uguagaacugacauuuuggacu

SEQ ID NO: 276438 - RNA, 22 nt, Human
auuggaaauacaguagaaaaau

SEQ ID NO: 276439 - RNA, 22 nt, Human
gccuccuggguucaugccauuc

SEQ ID NO: 276440 - RNA, 22 nt, Human
uucauugcaguucuucagguua

SEQ ID NO: 276441 - RNA, 22 nt, Human
uggagcugagaaguggagcucu

SEQ ID NO: 276442 - RNA, 22 nt, Human
gcacagugauaggcaguugugc

SEQ ID NO: 276443 - RNA, 22 nt, Human
uccauaaauuuuaugaacauau

SEQ ID NO: 276444 - RNA, 22 nt, Human
ucauaauacaaagaguucugca

SEQ ID NO: 276445 - RNA, 22 nt, Human
cugucccagauguucucagcac

SEQ ID NO: 276446 - RNA, 22 nt, Human
cuguuauuuuauaauucaagaa

SEQ ID NO: 276447 - RNA, 22 nt, Human
ugagagaguaauugagugguaa

SEQ ID NO: 276448 - RNA, 22 nt, Human
caagcugaacacugucuucaag

SEQ ID NO: 276449 - RNA, 22 nt, Human
cccugugcagauggcagcuggg

SEQ ID NO: 276450 - RNA, 22 nt, Human
aauacuauguagccaaaauaau

SEQ ID NO: 276451 - RNA, 22 nt, Human
ccccugccauagucaaaucuaa

SEQ ID NO: 276452 - RNA, 22 nt, Human
uucccucucacuuaaagcuugg

SEQ ID NO: 276453 - RNA, 22 nt, Human
aucuuuauuuauugagcacuua

SEQ ID NO: 276454 - RNA, 22 nt, Human
ucuguuuaggcaaaauagcuac

SEQ ID NO: 276455 - RNA, 22 nt, Human
auuucuauaggaggacaguauu

SEQ ID NO: 276456 - RNA, 22 nt, Human
uauacacaccuccaaagcagga

SEQ ID NO: 276457 - RNA, 22 nt, Human
gcucagaguuaaauauagugcu

SEQ ID NO: 276458 - RNA, 22 nt, Human
caguguggcuuagggaauaggc

SEQ ID NO: 276459 - RNA, 22 nt, Human
ucaauuuauguggcuauucauu

SEQ ID NO: 276460 - RNA, 22 nt, Human
agaggccaccagagguggugcc

SEQ ID NO: 276461 - RNA, 22 nt, Human
gcugggcugcgucggggaagcc

SEQ ID NO: 276462 - RNA, 23 nt, Human
aggaccagguucccaaaagucaa

SEQ ID NO: 276463 - RNA, 23 nt, Human
uuccuggcagguacaacuuuuac

SEQ ID NO: 276464 - RNA, 22 nt, Human
ggcagugguuagaaacaugagc

SEQ ID NO: 276465 - RNA, 22 nt, Human
uucuuuuaauugugggggagug

SEQ ID NO: 276466 - RNA, 22 nt, Human
cucugcagauucaucccuucac

SEQ ID NO: 276467 - RNA, 22 nt, Human
uuucacagucaauuuggaguca

SEQ ID NO: 276468 - RNA, 20 nt, Human
cugacucuccuuggcuugga

SEQ ID NO: 276469 - RNA, 22 nt, Human
ucugggaaccagugcggcuggg

SEQ ID NO: 276470 - RNA, 22 nt, Human
aagaaaugcugauguuggaugg

SEQ ID NO: 276471 - RNA, 22 nt, Human
acacugugucuagcauuuuaca

SEQ ID NO: 276472 - RNA, 23 nt, Human
ugagcccaggaggucaaggcugc

SEQ ID NO: 276473 - RNA, 21 nt, Human
agggaaaaggcugagugaggg

SEQ ID NO: 276474 - RNA, 22 nt, Human
uccuggcagaaauggggcugug

SEQ ID NO: 276475 - RNA, 22 nt, Human
cugccuggucucaggcaugggg

SEQ ID NO: 276476 - RNA, 22 nt, Human
aggaaagggguagguguggacg

SEQ ID NO: 276477 - RNA, 22 nt, Human
caauucaugugagcggacucuu

SEQ ID NO: 276478 - RNA, 22 nt, Human
gcugcccagggcugaguguccu

SEQ ID NO: 276479 - RNA, 22 nt, Human
gagggacagcuaaagagaaauu

SEQ ID NO: 276480 - RNA, 22 nt, Human
cagcugucucagggaggugauc

SEQ ID NO: 276481 - RNA, 22 nt, Human
cacacauggcugccagggaggu

SEQ ID NO: 276482 - RNA, 22 nt, Human
ccauggcaauggucagucuauu

SEQ ID NO: 276483 - RNA, 22 nt, Human
aguuguaauaacaauaccaaaa

SEQ ID NO: 276484 - RNA, 22 nt, Human
caaauguguagagcuuuugggg

SEQ ID NO: 276485 - RNA, 22 nt, Human
acuguucacagauuagucgaug

SEQ ID NO: 276486 - RNA, 22 nt, Human
cuccaggugcagaaggacucag

SEQ ID NO: 276487 - RNA, 22 nt, Human
auggccagagaggccagccugg

SEQ ID NO: 276488 - RNA, 22 nt, Human
aagauuuucucaacuguauuug

SEQ ID NO: 276489 - RNA, 22 nt, Human
agugucaaauuaaauaaucugg

SEQ ID NO: 276490 - RNA, 20 nt, Human
ugcauggcgcacaucugugg

SEQ ID NO: 276491 - RNA, 22 nt, Human
uuuauguuugacaaugaucugg

SEQ ID NO: 276492 - RNA, 22 nt, Human
aaacaggcuugcaacauguuuu

SEQ ID NO: 276493 - RNA, 22 nt, Human
ccuuagcauuagaagcuguggg

SEQ ID NO: 276494 - RNA, 22 nt, Human
aacugcaacuucguaaagugag

SEQ ID NO: 276495 - RNA, 22 nt, Human
ucucuccaacaugguggugcug

SEQ ID NO: 276496 - RNA, 22 nt, Human
gguggggagucaggcauucuug

SEQ ID NO: 276497 - RNA, 22 nt, Human
uucuucugacacugaugcugua

SEQ ID NO: 276498 - RNA, 22 nt, Human
augauugaaaaugacauugcca

SEQ ID NO: 276499 - RNA, 22 nt, Human
ugggagaaagaacccugaguga

SEQ ID NO: 276500 - RNA, 18 nt, Human
cucaggcagagaagcuuu

SEQ ID NO: 276501 - RNA, 22 nt, Human
ugcauuaaauauaaucuguuga

SEQ ID NO: 276502 - RNA, 22 nt, Human
ugagccagcaggccuccagugg

SEQ ID NO: 276503 - RNA, 22 nt, Human
ggaggugggagccuccaguggu

SEQ ID NO: 276504 - RNA, 20 nt, Human
aggcucugccauugucccug

SEQ ID NO: 276505 - RNA, 22 nt, Human
gguuuuaacuacagaauugcaa

SEQ ID NO: 276506 - RNA, 22 nt, Human
uuuauuauucuguucucucuac

SEQ ID NO: 276507 - RNA, 23 nt, Human
ggccuguguuuugucugaaguac

SEQ ID NO: 276508 - RNA, 22 nt, Human
ccaggcucagcgcgcacgucug

SEQ ID NO: 276509 - RNA, 23 nt, Human
gugagcagcccacuaggaaugcc

SEQ ID NO: 276510 - RNA, 23 nt, Human
agaggcugcaggguauugagaau

SEQ ID NO: 276511 - RNA, 22 nt, Human
cugagccaccggcagggacauc

SEQ ID NO: 276512 - RNA, 21 nt, Human
ucuccagugcuucugccucuu

SEQ ID NO: 276513 - RNA, 22 nt, Human
aggaugagauugcuguguugua

SEQ ID NO: 276514 - RNA, 22 nt, Human
aaaauaucagcaaagggugaca

SEQ ID NO: 276515 - RNA, 22 nt, Human
cuccucccugcgauugcucugc

SEQ ID NO: 276516 - RNA, 22 nt, Human
caaguccucgcuucuagcugug

SEQ ID NO: 276517 - RNA, 19 nt, Human
ucaaaacacaaaugguuga

SEQ ID NO: 276518 - RNA, 22 nt, Human
uucuguuaccuuugugaguuuc

SEQ ID NO: 276519 - RNA, 22 nt, Human
uuccugugaagaucugggugcu

SEQ ID NO: 276520 - RNA, 22 nt, Human
ucugcaggcuuauaggaugggu

SEQ ID NO: 276521 - RNA, 22 nt, Human
uauuauguagaguaaggguuaa

SEQ ID NO: 276522 - RNA, 21 nt, Human
agcucagccgggcacaguggc

SEQ ID NO: 276523 - RNA, 22 nt, Human
agacccacacuuugaguagcaa

SEQ ID NO: 276524 - RNA, 17 nt, Human
ugagacagggcaggccc

SEQ ID NO: 276525 - RNA, 21 nt, Human
uuuaucaucacgagcuugagc

SEQ ID NO: 276526 - RNA, 22 nt, Human
aaaucacugauuaaaguuagaa

SEQ ID NO: 276527 - RNA, 22 nt, Human
caagcuggcucuuaugcaaaaa

SEQ ID NO: 276528 - RNA, 19 nt, Human
ucuccaguuuauucuucca

SEQ ID NO: 276529 - RNA, 22 nt, Human
cauuguaagaggcuuugcagca

SEQ ID NO: 276530 - RNA, 22 nt, Human
augguacauaguuuaaauaagg

SEQ ID NO: 276531 - RNA, 22 nt, Human
gcugcuuuauaaucucggcaga

SEQ ID NO: 276532 - RNA, 22 nt, Human
gggcagcucuggcugugggaag

SEQ ID NO: 276533 - RNA, 22 nt, Human
agaaacugaacacaagagucgg

SEQ ID NO: 276534 - RNA, 22 nt, Human
aggaggaggugggacacaguga

SEQ ID NO: 276535 - RNA, 18 nt, Human
agacaaacuucuucugcc

SEQ ID NO: 276536 - RNA, 22 nt, Human
uagcugggacuacuggcccugc

SEQ ID NO: 276537 - RNA, 22 nt, Human
cagggcuccaugcagggacucc

SEQ ID NO: 276538 - RNA, 22 nt, Human
aggagagcaggccagccguccc

SEQ ID NO: 276539 - RNA, 22 nt, Human
acuugaaaccuuggcaaacaau

SEQ ID NO: 276540 - RNA, 22 nt, Human
ucucucagucagaugcuaaaga

SEQ ID NO: 276541 - RNA, 22 nt, Human
ccaccagcuucagcagccgcgg

SEQ ID NO: 276542 - RNA, 22 nt, Human
gcaauuauuaugugacuuuuac

SEQ ID NO: 276543 - RNA, 22 nt, Human
ugcauuauacuuuuagaaauuu

SEQ ID NO: 276544 - RNA, 22 nt, Human
ggcaucaguauggccauagggu

SEQ ID NO: 276545 - RNA, 22 nt, Human
uuucuagucucgaucucuuaau

SEQ ID NO: 276546 - RNA, 22 nt, Human
gaagacacuaaggcccagggag

SEQ ID NO: 276547 - RNA, 22 nt, Human
cauaaaagguagcaguuugaaa

SEQ ID NO: 276548 - RNA, 22 nt, Human
auauauaagcugaugagccaca

SEQ ID NO: 276549 - RNA, 22 nt, Human
gcugaaaugaaaacacaggucg

SEQ ID NO: 276550 - RNA, 22 nt, Human
cauggcuucuaagugauaacgu

SEQ ID NO: 276551 - RNA, 18 nt, Human
aaguaacagaagagcaca

SEQ ID NO: 276552 - RNA, 22 nt, Human
uccagcccugcacugauuagau

SEQ ID NO: 276553 - RNA, 21 nt, Human
ugaaaguuggagucaaaugua

SEQ ID NO: 276554 - RNA, 22 nt, Human
ccagcagagcuggaagugugcu

SEQ ID NO: 276555 - RNA, 22 nt, Human
uuccuggcacccuuguuagccu

SEQ ID NO: 276556 - RNA, 22 nt, Human
ugagcaauaugugaauuuucuu

SEQ ID NO: 276557 - RNA, 22 nt, Human
gcaccugggguacacagcuaca

SEQ ID NO: 276558 - RNA, 22 nt, Human
ucucuggguccuggcaagcuca

SEQ ID NO: 276559 - RNA, 22 nt, Human
ccaggccagcaggcacaccugc

SEQ ID NO: 276560 - RNA, 22 nt, Human
uacuguuaauguuaaauucagg

SEQ ID NO: 276561 - RNA, 22 nt, Human
aaacagcucaagaaguuacucu

SEQ ID NO: 276562 - RNA, 22 nt, Human
aggaaucugggcccaacugugc

SEQ ID NO: 276563 - RNA, 23 nt, Human
agcugggaauuuucugaagcuuu

SEQ ID NO: 276564 - RNA, 22 nt, Human
ucuuuacauaguguggacuacu

SEQ ID NO: 276565 - RNA, 22 nt, Human
ugucaccaccggaagaaacugc

SEQ ID NO: 276566 - RNA, 22 nt, Human
gacuuuggcaucuagacauugu

SEQ ID NO: 276567 - RNA, 22 nt, Human
ggcaaacaggagaguaaagaga

SEQ ID NO: 276568 - RNA, 22 nt, Human
cuucccagacgggguggcagcc

SEQ ID NO: 276569 - RNA, 18 nt, Human
ugucucaggcugaaacag

SEQ ID NO: 276570 - RNA, 22 nt, Human
cccaggcagagagcuggugagc

SEQ ID NO: 276571 - RNA, 21 nt, Human
cugccaccugcuccaucagca

SEQ ID NO: 276572 - RNA, 22 nt, Human
caggcaugagccaggccccucc

SEQ ID NO: 276573 - RNA, 20 nt, Human
cuccagccccugcccugguc

SEQ ID NO: 276574 - RNA, 22 nt, Human
uucugaggcuuucccguccccu

SEQ ID NO: 276575 - RNA, 22 nt, Human
uucugugauuccuccagccagc

SEQ ID NO: 276576 - RNA, 19 nt, Human
aggugaggggcaccauguc

SEQ ID NO: 276577 - RNA, 19 nt, Human
cauuuagaaguacauauua

SEQ ID NO: 276578 - RNA, 22 nt, Human
gcagggcaaugaucccgagagg

SEQ ID NO: 276579 - RNA, 22 nt, Human
gagcacuguacucauuugcacu

SEQ ID NO: 276580 - RNA, 22 nt, Human
acaaggcaguacaaugaugaca

SEQ ID NO: 276581 - RNA, 19 nt, Human
ccaacaguacugaagcacu

SEQ ID NO: 276582 - RNA, 22 nt, Human
gcuguggucugugagcuccaaa

SEQ ID NO: 276583 - RNA, 22 nt, Human
aggcucugcauccaggcuuuau

SEQ ID NO: 276584 - RNA, 22 nt, Human
ggcucuggcaaggggaggcuac

SEQ ID NO: 276585 - RNA, 22 nt, Human
auguguuuguaccuuuaaauau

SEQ ID NO: 276586 - RNA, 22 nt, Human
uagcaauagaaacauauaaagu

SEQ ID NO: 276587 - RNA, 22 nt, Human
uagagcugggcagugcucugag

SEQ ID NO: 276588 - RNA, 22 nt, Human
cgggcuggcugcagcugcugga

SEQ ID NO: 276589 - RNA, 22 nt, Human
gaguggagcaaaagagguagau

SEQ ID NO: 276590 - RNA, 22 nt, Human
uagacacaucuucauccacaau

SEQ ID NO: 276591 - RNA, 22 nt, Human
gagggcagaaaauuaugcggug

SEQ ID NO: 276592 - RNA, 22 nt, Human
aaacaaauuucaagcugugaca

SEQ ID NO: 276593 - RNA, 18 nt, Human
aggcaggugcuaauauuu

SEQ ID NO: 276594 - RNA, 23 nt, Human
ggaaaaacacugugucuuggcag

SEQ ID NO: 276595 - RNA, 22 nt, Human
uuccugaagucaaagaucuaaa

SEQ ID NO: 276596 - RNA, 22 nt, Human
ggacagagagugaauaugacau

SEQ ID NO: 276597 - RNA, 22 nt, Human
cagccacuggugccaggcuguu

SEQ ID NO: 276598 - RNA, 22 nt, Human
ugucagugucugagguuuuaua

SEQ ID NO: 276599 - RNA, 22 nt, Human
agauggcugauuaacuccaugg

SEQ ID NO: 276600 - RNA, 22 nt, Human
agauuccagaucccaaaaauga

SEQ ID NO: 276601 - RNA, 22 nt, Human
augugggccgugcggguguccu

SEQ ID NO: 276602 - RNA, 22 nt, Human
cugaggcagagagaacccgggc

SEQ ID NO: 276603 - RNA, 22 nt, Human
augguccuuauggccgugauau

SEQ ID NO: 276604 - RNA, 22 nt, Human
agauucuacucuagauccaugg

SEQ ID NO: 276605 - RNA, 22 nt, Human
aggcacagggaugcggagccag

SEQ ID NO: 276606 - RNA, 22 nt, Human
uagcaaccagaacagcacucua

SEQ ID NO: 276607 - RNA, 22 nt, Human
uucaucaggcaucaugcucaag

SEQ ID NO: 276608 - RNA, 22 nt, Human
agcaggauuuugaagugcaagu

SEQ ID NO: 276609 - RNA, 22 nt, Human
ucaggaaauggacaucuuugcu

SEQ ID NO: 276610 - RNA, 22 nt, Human
ggcuucucccuucuucugauug

SEQ ID NO: 276611 - RNA, 22 nt, Human
aaugaaacucgaaauaaucaca

SEQ ID NO: 276612 - RNA, 16 nt, Human
agccaggcugccucgg

SEQ ID NO: 276613 - RNA, 22 nt, Human
aaugauugcaaacauugagaac

SEQ ID NO: 276614 - RNA, 22 nt, Human
ugggaaagccagcagugucacc

SEQ ID NO: 276615 - RNA, 22 nt, Human
cuggcugcuuguagacucgacu

SEQ ID NO: 276616 - RNA, 22 nt, Human
guugaauaucguguucuuguuu

SEQ ID NO: 276617 - RNA, 22 nt, Human
ucauugcaguugaguuguguua

SEQ ID NO: 276618 - RNA, 22 nt, Human
cucuuaaauaacaucauugcuu

SEQ ID NO: 276619 - RNA, 22 nt, Human
agaaacuaagucauaacucuuu

SEQ ID NO: 276620 - RNA, 22 nt, Human
cagggaggaugggcuguuuugc

SEQ ID NO: 276621 - RNA, 22 nt, Human
ccauuguaguaucuguuuuagu

SEQ ID NO: 276622 - RNA, 22 nt, Human
aggcuggcccaccucuugucuu

SEQ ID NO: 276623 - RNA, 22 nt, Human
ugucagcaucauuuguugaagg

SEQ ID NO: 276624 - RNA, 22 nt, Human
caaguuauuccuuuacacuaua

SEQ ID NO: 276625 - RNA, 21 nt, Human
uggcccuggccacggcugcca

SEQ ID NO: 276626 - RNA, 20 nt, Human
ugauuuucugaaacagcaca

SEQ ID NO: 276627 - RNA, 23 nt, Human
aguuuguaaagaaauauuugcac

SEQ ID NO: 276628 - RNA, 22 nt, Human
agccucuggcccuagacugcuu

SEQ ID NO: 276629 - RNA, 22 nt, Human
cacaaaugugcagaaaugugag

SEQ ID NO: 276630 - RNA, 22 nt, Human
agaaggaguguacaggucaugc

SEQ ID NO: 276631 - RNA, 22 nt, Human
gugcugaggugggugggcagcc

SEQ ID NO: 276632 - RNA, 22 nt, Human
cuguggcucaaaaucccaugau

SEQ ID NO: 276633 - RNA, 22 nt, Human
aaaaccagguagcaaaggagac

SEQ ID NO: 276634 - RNA, 22 nt, Human
uggagcugacucacaccagcua

SEQ ID NO: 276635 - RNA, 22 nt, Human
gaguccuuuguuccuugccaca

SEQ ID NO: 276636 - RNA, 18 nt, Human
augagaggugucagaaga

SEQ ID NO: 276637 - RNA, 22 nt, Human
guuaaauucgaugauggauaaa

SEQ ID NO: 276638 - RNA, 22 nt, Human
ucucuggguaugguaacguugg

SEQ ID NO: 276639 - RNA, 22 nt, Human
uccuguuucuccugcaaaaucc

SEQ ID NO: 276640 - RNA, 22 nt, Human
ugcagcugauuaaagggcagac

SEQ ID NO: 276641 - RNA, 22 nt, Human
agagcaccccgggaagagcaag

SEQ ID NO: 276642 - RNA, 18 nt, Human
ucaggcugggccuccuuc

SEQ ID NO: 276643 - RNA, 22 nt, Human
augucaggacccuacugcauug

SEQ ID NO: 276644 - RNA, 22 nt, Human
guuaaauaaccucauguccguu

SEQ ID NO: 276645 - RNA, 22 nt, Human
uucacacuuguuaggauggcuu

SEQ ID NO: 276646 - RNA, 22 nt, Human
gaggacagcuuagggcuuccug

SEQ ID NO: 276647 - RNA, 22 nt, Human
auauuaggaguuaaauguauua

SEQ ID NO: 276648 - RNA, 22 nt, Human
auuuaucucuggaaacuaagca

SEQ ID NO: 276649 - RNA, 22 nt, Human
ggcugagggucccagacccuaa

SEQ ID NO: 276650 - RNA, 22 nt, Human
agcaguuuuuauaacacuggaa

SEQ ID NO: 276651 - RNA, 21 nt, Human
aaagaaaucucccauugguag

SEQ ID NO: 276652 - RNA, 22 nt, Human
guucaaaauucaaaugguauac

SEQ ID NO: 276653 - RNA, 22 nt, Human
uuuaggaugcucuauucugacu

SEQ ID NO: 276654 - RNA, 19 nt, Human
gugucugccuuugugccac

SEQ ID NO: 276655 - RNA, 22 nt, Human
gcucagagggaacaaggggcug

SEQ ID NO: 276656 - RNA, 22 nt, Human
gaauuauagguuugcaugcuaa

SEQ ID NO: 276657 - RNA, 22 nt, Human
uaaaaggcacuuggaugcugag

SEQ ID NO: 276658 - RNA, 22 nt, Human
caaaaguaauugcaguuuuugc

SEQ ID NO: 276659 - RNA, 22 nt, Human
ugaggaaggaauugagguuuua

SEQ ID NO: 276660 - RNA, 22 nt, Human
uauuucacaugugggaaacaua

SEQ ID NO: 276661 - RNA, 19 nt, Human
aggaauggaauuaauucug

SEQ ID NO: 276662 - RNA, 22 nt, Human
auccaggcugcuaugaggauga

SEQ ID NO: 276663 - RNA, 21 nt, Human
agauuguauggaggugagagg

SEQ ID NO: 276664 - RNA, 22 nt, Human
gcugccuguccugaggaguccg

SEQ ID NO: 276665 - RNA, 22 nt, Human
uaagacaagccucgcauuugua

SEQ ID NO: 276666 - RNA, 22 nt, Human
gccuggagacaaggacaaaggg

SEQ ID NO: 276667 - RNA, 22 nt, Human
aaggaacuaaauaguucuggaa

SEQ ID NO: 276668 - RNA, 22 nt, Human
agucaguuaaccucacagcauc

SEQ ID NO: 276669 - RNA, 19 nt, Human
gagacauguagauagaaga

SEQ ID NO: 276670 - RNA, 22 nt, Human
aaaggcuauucagggacuugcc

SEQ ID NO: 276671 - RNA, 22 nt, Human
ccacugagugagcagagcaggg

SEQ ID NO: 276672 - RNA, 22 nt, Human
uagaaagacagagguuuugucu

SEQ ID NO: 276673 - RNA, 22 nt, Human
ccugagccucuugcacgcucag

SEQ ID NO: 276674 - RNA, 21 nt, Human
ucugccugagacuuugcuggu

SEQ ID NO: 276675 - RNA, 22 nt, Human
cuagagcuguucugugcacuca

SEQ ID NO: 276676 - RNA, 22 nt, Human
uaugacauuuucccagauuuau

SEQ ID NO: 276677 - RNA, 19 nt, Human
cuguuucugagcuugcuuu

SEQ ID NO: 276678 - RNA, 22 nt, Human
auuugccuuacugaagaaggag

SEQ ID NO: 276679 - RNA, 22 nt, Human
ucaggugugaacuauuuggaaa

SEQ ID NO: 276680 - RNA, 18 nt, Human
gagaaaccugugaaugcu

SEQ ID NO: 276681 - RNA, 23 nt, Human
acagggcuggcagcugcaagacc

SEQ ID NO: 276682 - RNA, 22 nt, Human
gagcucugcuuggguucuuagg

SEQ ID NO: 276683 - RNA, 22 nt, Human
aguauugugacucaaguauucu

SEQ ID NO: 276684 - RNA, 22 nt, Human
gaacuauucauucucauuagcg

SEQ ID NO: 276685 - RNA, 22 nt, Human
agaacagaggccuuauguuuca

SEQ ID NO: 276686 - RNA, 22 nt, Human
uauugaguuacagaaaauacuu

SEQ ID NO: 276687 - RNA, 19 nt, Human
gucucuggauuucaggucc

SEQ ID NO: 276688 - RNA, 22 nt, Human
aacuuaaugauuucaugcaugu

SEQ ID NO: 276689 - RNA, 22 nt, Human
uggcuccagauuuccugcugca

SEQ ID NO: 276690 - RNA, 22 nt, Human
uggcaaaguaauuggguuucuc

SEQ ID NO: 276691 - RNA, 22 nt, Human
augcaucaggcacuaggaauag

SEQ ID NO: 276692 - RNA, 22 nt, Human
gaggaggggacaguacuugugc

SEQ ID NO: 276693 - RNA, 22 nt, Human
uguguucaugucacuggaaucc

SEQ ID NO: 276694 - RNA, 22 nt, Human
gugacccaugcagugguuuugg

SEQ ID NO: 276695 - RNA, 22 nt, Human
cuggccacuggagguggcaccc

SEQ ID NO: 276696 - RNA, 22 nt, Human
agucuacauuuuuguuaauggu

SEQ ID NO: 276697 - RNA, 22 nt, Human
ggcccagaauacaugaaguaua

SEQ ID NO: 276698 - RNA, 22 nt, Human
uuagggaaggcugcugucagcu

SEQ ID NO: 276699 - RNA, 22 nt, Human
caggcugcuccaggguaggaaa

SEQ ID NO: 276700 - RNA, 22 nt, Human
aagcauguguauaagcugggca

SEQ ID NO: 276701 - RNA, 22 nt, Human
aaacuguauagggaaaaguaga

SEQ ID NO: 276702 - RNA, 22 nt, Human
accagcauccuuccuauuaaca

SEQ ID NO: 276703 - RNA, 22 nt, Human
cuguaaaacacuguaguaucug

SEQ ID NO: 276704 - RNA, 22 nt, Human
uguaaaggguguuaaauuacuc

SEQ ID NO: 276705 - RNA, 22 nt, Human
ggccagcauauagagugaagua

SEQ ID NO: 276706 - RNA, 22 nt, Human
ugcuuaggaugcuagcaggcau

SEQ ID NO: 276707 - RNA, 22 nt, Human
ccugagauuucauugucuggcc

SEQ ID NO: 276708 - RNA, 22 nt, Human
gccagccagagaggcaugguua

SEQ ID NO: 276709 - RNA, 22 nt, Human
uuuuggcuuaaagagaauguau

SEQ ID NO: 276710 - RNA, 22 nt, Human
aucagacaauuguugaguacug

SEQ ID NO: 276711 - RNA, 22 nt, Human
gggaacagggccugagcugggg

SEQ ID NO: 276712 - RNA, 22 nt, Human
ggucucugaacuuccacugcgc

SEQ ID NO: 276713 - RNA, 22 nt, Human
acauuucuucccuuuagcagaa

SEQ ID NO: 276714 - RNA, 22 nt, Human
ugcauuauacauggaucuaaag

SEQ ID NO: 276715 - RNA, 22 nt, Human
aaacaaguuuagaauaaugaau

SEQ ID NO: 276716 - RNA, 22 nt, Human
auuccuucuaaaacgcugcccu

SEQ ID NO: 276717 - RNA, 22 nt, Human
gcuuacaagaucgugcuccagu

SEQ ID NO: 276718 - RNA, 22 nt, Human
ccugcugugugacgggauguua

SEQ ID NO: 276719 - RNA, 22 nt, Human
caauagugucugcuuguuucua

SEQ ID NO: 276720 - RNA, 22 nt, Human
uuauacaccaucacugccuugg

SEQ ID NO: 276721 - RNA, 22 nt, Human
ugucaaaaauaagagagauugu

SEQ ID NO: 276722 - RNA, 22 nt, Human
uauuaucauugguaauaugguc

SEQ ID NO: 276723 - RNA, 22 nt, Human
ccugaggucacaacuugcuuau

SEQ ID NO: 276724 - RNA, 22 nt, Human
agucugaaccagauggcaaggu

SEQ ID NO: 276725 - RNA, 22 nt, Human
aggccucuugucuuccucacau

SEQ ID NO: 276726 - RNA, 22 nt, Human
agauuuccguucucucuucagu

SEQ ID NO: 276727 - RNA, 22 nt, Human
ugccugccucuggcagcccugc

SEQ ID NO: 276728 - RNA, 22 nt, Human
aaagauuaggcggcaacugggc

SEQ ID NO: 276729 - RNA, 22 nt, Human
ugccuucacugagcuuauggga

SEQ ID NO: 276730 - RNA, 22 nt, Human
ugagcuggucuugaguguagcu

SEQ ID NO: 276731 - RNA, 18 nt, Human
uccaggucccaggggaag

SEQ ID NO: 276732 - RNA, 22 nt, Human
uacacauccuucugaacaaccu

SEQ ID NO: 276733 - RNA, 22 nt, Human
gagcuccucccaggguagcacu

SEQ ID NO: 276734 - RNA, 22 nt, Human
cagucucuggugaguugacagu

SEQ ID NO: 276735 - RNA, 22 nt, Human
agacagcaugagccugcugaug

SEQ ID NO: 276736 - RNA, 22 nt, Human
uuagaaccauaaugaaucaaug

SEQ ID NO: 276737 - RNA, 22 nt, Human
ucccagggcuuuucucaugcuu

SEQ ID NO: 276738 - RNA, 22 nt, Human
guguguccucaguaguggcaug

SEQ ID NO: 276739 - RNA, 22 nt, Human
cuggcaggcggagguugcagug

SEQ ID NO: 276740 - RNA, 22 nt, Human
uuuaugagcaaugcugagggga

SEQ ID NO: 276741 - RNA, 22 nt, Human
uuucuguagugugguauguagg

SEQ ID NO: 276742 - RNA, 22 nt, Human
ucucagcacguuguuuucauug

SEQ ID NO: 276743 - RNA, 22 nt, Human
uauuugcaggacauagauaugg

SEQ ID NO: 276744 - RNA, 22 nt, Human
gcacagggcccugugcguaggu

SEQ ID NO: 276745 - RNA, 22 nt, Human
gagcaggacgugggaaugggaa

SEQ ID NO: 276746 - RNA, 22 nt, Human
accucacaagucucugucagcu

SEQ ID NO: 276747 - RNA, 22 nt, Human
aauuagaagggaguuauugaua

SEQ ID NO: 276748 - RNA, 22 nt, Human
augaaauugaucuugaacuuuu

SEQ ID NO: 276749 - RNA, 22 nt, Human
uuccuggcaugaaaaauaucac

SEQ ID NO: 276750 - RNA, 22 nt, Human
cagugccugucuuauucuuaca

SEQ ID NO: 276751 - RNA, 17 nt, Human
ucugagaaaggagaauc

SEQ ID NO: 276752 - RNA, 22 nt, Human
cagagacacuuaacaggaaugg

SEQ ID NO: 276753 - RNA, 20 nt, Human
uuagaaguggcuauuuccuc

SEQ ID NO: 276754 - RNA, 22 nt, Human
uuguuucuggaaaaggcgagaa

SEQ ID NO: 276755 - RNA, 18 nt, Human
agcagguucucacagcca

SEQ ID NO: 276756 - RNA, 22 nt, Human
ugucucagaauggcucauaaua

SEQ ID NO: 276757 - RNA, 22 nt, Human
acugucacugugauguuagaga

SEQ ID NO: 276758 - RNA, 22 nt, Human
acucuggcuauucacuauaaua

SEQ ID NO: 276759 - RNA, 22 nt, Human
ccuuuucugaaccacuuaaaua

SEQ ID NO: 276760 - RNA, 22 nt, Human
ccucaaauugcucagcgucuag

SEQ ID NO: 276761 - RNA, 22 nt, Human
ucucccaggcuggagugcagug

SEQ ID NO: 276762 - RNA, 22 nt, Human
uuugacucaagcccucauguua

SEQ ID NO: 276763 - RNA, 22 nt, Human
aggcacugacaauucuggacug

SEQ ID NO: 276764 - RNA, 22 nt, Human
uaacaagucauuuuaaauuaug

SEQ ID NO: 276765 - RNA, 22 nt, Human
gacauuuagaaguuagauucaa

SEQ ID NO: 276766 - RNA, 21 nt, Human
ccagucuguaaaauggggaca

SEQ ID NO: 276767 - RNA, 22 nt, Human
gccuguggggcugaggcugccu

SEQ ID NO: 276768 - RNA, 22 nt, Human
ugguuugacaaugaggacuggu

SEQ ID NO: 276769 - RNA, 22 nt, Human
acaucuuuguuucuuaguguau

SEQ ID NO: 276770 - RNA, 19 nt, Human
ucaguggagaaaggggaag

SEQ ID NO: 276771 - RNA, 22 nt, Human
ugccagcacuucuggcugucug

SEQ ID NO: 276772 - RNA, 22 nt, Human
cugaggagcagcuggcccgcua

SEQ ID NO: 276773 - RNA, 22 nt, Human
acuuccugcaaucguccacucc

SEQ ID NO: 276774 - RNA, 21 nt, Human
cuuuggcaagggagaagucac

SEQ ID NO: 276775 - RNA, 22 nt, Human
aaguauuucguucugaaaaagu

SEQ ID NO: 276776 - RNA, 22 nt, Human
auaaugagcuuuugaauacuga

SEQ ID NO: 276777 - RNA, 22 nt, Human
uuuuucuuaaauguggguuggc

SEQ ID NO: 276778 - RNA, 22 nt, Human
auuucagauucagaaauguagg

SEQ ID NO: 276779 - RNA, 22 nt, Human
gugaaggacuagcauggagggc

SEQ ID NO: 276780 - RNA, 22 nt, Human
ugccuggguguaaagggccaac

SEQ ID NO: 276781 - RNA, 22 nt, Human
uggggcuggggaucuugagccu

SEQ ID NO: 276782 - RNA, 22 nt, Human
uggcccugccgcacuauccuca

SEQ ID NO: 276783 - RNA, 22 nt, Human
aaaaagagaaaugcucuagucc

SEQ ID NO: 276784 - RNA, 22 nt, Human
cuggcuggcguuuuccaaaagc

SEQ ID NO: 276785 - RNA, 22 nt, Human
aggaauguuaggagaugagucu

SEQ ID NO: 276786 - RNA, 22 nt, Human
uuguuuauguguugucuauggc

SEQ ID NO: 276787 - RNA, 22 nt, Human
uucagaaugugaccuuauuugg

SEQ ID NO: 276788 - RNA, 22 nt, Human
ucaggcagaguggaagcugcaa

SEQ ID NO: 276789 - RNA, 22 nt, Human
aauucuugguccuaguguauaa

SEQ ID NO: 276790 - RNA, 22 nt, Human
acugagggagagucuuagguug

SEQ ID NO: 276791 - RNA, 22 nt, Human
gcucugugcuagaacuaagaau

SEQ ID NO: 276792 - RNA, 22 nt, Human
ugcuguaauacuuaagguuaag

SEQ ID NO: 276793 - RNA, 22 nt, Human
auuuuuucagauugaguguuaa

SEQ ID NO: 276794 - RNA, 22 nt, Human
auuucuguaacuuaugaaaguu

SEQ ID NO: 276795 - RNA, 22 nt, Human
agcuuuauuaacucuccaggug

SEQ ID NO: 276796 - RNA, 18 nt, Human
cugugggcuggugcauga

SEQ ID NO: 276797 - RNA, 22 nt, Human
aggcccugaccugggagaucua

SEQ ID NO: 276798 - RNA, 22 nt, Human
gcuggccagcccucuuccucca

SEQ ID NO: 276799 - RNA, 22 nt, Human
ggugggaggacuguuugaggca

SEQ ID NO: 276800 - RNA, 22 nt, Human
ucaguauuccuggaaauacaag

SEQ ID NO: 276801 - RNA, 22 nt, Human
aagcaagaguuggagugauguu

SEQ ID NO: 276802 - RNA, 20 nt, Human
agcacagcgcgguguuccuu

SEQ ID NO: 276803 - RNA, 22 nt, Human
gggggcuggacuuucccacaca

SEQ ID NO: 276804 - RNA, 22 nt, Human
gccaccuguuucagaugugguu

SEQ ID NO: 276805 - RNA, 22 nt, Human
guccugggcccaggggcugccu

SEQ ID NO: 276806 - RNA, 22 nt, Human
uggaggaaguggacaguugugu

SEQ ID NO: 276807 - RNA, 22 nt, Human
ccugggcuuccacgagcagagg

SEQ ID NO: 276808 - RNA, 22 nt, Human
gauccagcuucuacacagagcu

SEQ ID NO: 276809 - RNA, 22 nt, Human
uccaggcaaagccuuguagacg

SEQ ID NO: 276810 - RNA, 22 nt, Human
uauugcacaugcgcuagaacca

SEQ ID NO: 276811 - RNA, 22 nt, Human
cagagccccucagcucucuccc

SEQ ID NO: 276812 - RNA, 22 nt, Human
acagccugacuuuuguugucac

SEQ ID NO: 276813 - RNA, 22 nt, Human
guccacccaugacaccugccug

SEQ ID NO: 276814 - RNA, 22 nt, Human
uggaaagagaaacucuugcuaa

SEQ ID NO: 276815 - RNA, 22 nt, Human
uggcuguggguggaaggaaacc

SEQ ID NO: 276816 - RNA, 22 nt, Human
uucagagccagcaacacuaggc

SEQ ID NO: 276817 - RNA, 22 nt, Human
acagugugaugggccugccuga

SEQ ID NO: 276818 - RNA, 22 nt, Human
uguacacaaugugcagguuugu

SEQ ID NO: 276819 - RNA, 22 nt, Human
agagaaaugggguaaucuuuca

SEQ ID NO: 276820 - RNA, 22 nt, Human
auuaauguguagccaacuuaau

SEQ ID NO: 276821 - RNA, 22 nt, Human
uaggcuaggcugaagguuuugg

SEQ ID NO: 276822 - RNA, 22 nt, Human
uccaggagcauccaggugaagc

SEQ ID NO: 276823 - RNA, 20 nt, Human
ggcuucuuuacaucuguguu

SEQ ID NO: 276824 - RNA, 22 nt, Human
cuggcagcuggaggcuagaggc

SEQ ID NO: 276825 - RNA, 22 nt, Human
ugaaugcucacaugccuagguc

SEQ ID NO: 276826 - RNA, 22 nt, Human
gagagcccugcauggcugauga

SEQ ID NO: 276827 - RNA, 22 nt, Human
aguggcagguguuucguggugc

SEQ ID NO: 276828 - RNA, 22 nt, Human
ggacagaaauucuuguuggaca

SEQ ID NO: 276829 - RNA, 22 nt, Human
aaggcuauaucucaauacuauu

SEQ ID NO: 276830 - RNA, 22 nt, Human
uuuuagaaauacugauuuagug

SEQ ID NO: 276831 - RNA, 22 nt, Human
uaccagccucaguugugagccc

SEQ ID NO: 276832 - RNA, 22 nt, Human
uagcaagaugaugaauuauuca

SEQ ID NO: 276833 - RNA, 22 nt, Human
gucugcugcagucguggcucua

SEQ ID NO: 276834 - RNA, 22 nt, Human
ucaggcucugccaccuagauua

SEQ ID NO: 276835 - RNA, 22 nt, Human
guuuggauagugagagauacuu

SEQ ID NO: 276836 - RNA, 18 nt, Human
uggcagggaggaaauaua

SEQ ID NO: 276837 - RNA, 22 nt, Human
cuucaaaagccagaagccugcg

SEQ ID NO: 276838 - RNA, 22 nt, Human
cagcacacagugacucgcaccu

SEQ ID NO: 276839 - RNA, 22 nt, Human
ugagugggauuaaaugagguga

SEQ ID NO: 276840 - RNA, 22 nt, Human
uggaaauggaucugaugagucu

SEQ ID NO: 276841 - RNA, 22 nt, Human
auucuacacaacaugaugaugg

SEQ ID NO: 276842 - RNA, 22 nt, Human
cacaguuagagguagaguccag

SEQ ID NO: 276843 - RNA, 22 nt, Human
ugcuuugcagugucuaacagaa

SEQ ID NO: 276844 - RNA, 22 nt, Human
agcuguggggaggaggcuagca

SEQ ID NO: 276845 - RNA, 22 nt, Human
ucagagaguuggaaagaauuaa

SEQ ID NO: 276846 - RNA, 22 nt, Human
gccaggaaagccacuggcauac

SEQ ID NO: 276847 - RNA, 22 nt, Human
cacaaauaccaguuuccuaaca

SEQ ID NO: 276848 - RNA, 22 nt, Human
cacaccuguaauaccagcuacu

SEQ ID NO: 276849 - RNA, 22 nt, Human
acauggugagcggcaggccuau

SEQ ID NO: 276850 - RNA, 22 nt, Human
aaguguuuaugguuauuguuaa

SEQ ID NO: 276851 - RNA, 22 nt, Human
ucagcaggguuugacuucuaau

SEQ ID NO: 276852 - RNA, 22 nt, Human
guccuggaguggcauggcaugg

SEQ ID NO: 276853 - RNA, 22 nt, Human
gaaaagggcaagagagagggca

SEQ ID NO: 276854 - RNA, 22 nt, Human
ggcuccacugcugaccacucca

SEQ ID NO: 276855 - RNA, 22 nt, Human
uagagaaaaccacuggugagcu

SEQ ID NO: 276856 - RNA, 22 nt, Human
cccagagauguccugagugaua

SEQ ID NO: 276857 - RNA, 22 nt, Human
ucagaaagacgaaacagauggg

SEQ ID NO: 276858 - RNA, 22 nt, Human
uacuuuauuguaaaugcugaug

SEQ ID NO: 276859 - RNA, 22 nt, Human
uuacauucaauuucuagaggua

SEQ ID NO: 276860 - RNA, 22 nt, Human
ggccuggaagaggacagagaaa

SEQ ID NO: 276861 - RNA, 22 nt, Human
uuccuucuggaagcuucagggg

SEQ ID NO: 276862 - RNA, 22 nt, Human
caggagacaauggcuguggggc

SEQ ID NO: 276863 - RNA, 22 nt, Human
accuuuauaugaaagaugacau

SEQ ID NO: 276864 - RNA, 20 nt, Human
cccaggaguuugcucuuacu

SEQ ID NO: 276865 - RNA, 22 nt, Human
gacugucuuuugaauaaaaaug

SEQ ID NO: 276866 - RNA, 22 nt, Human
cucccagguuacaucugagccu

SEQ ID NO: 276867 - RNA, 22 nt, Human
agugaaauagcauuuaugaagc

SEQ ID NO: 276868 - RNA, 22 nt, Human
agcugcaagauaaaagugaugu

SEQ ID NO: 276869 - RNA, 22 nt, Human
gaguggcagaacuggggguccu

SEQ ID NO: 276870 - RNA, 22 nt, Human
ucuucucuguggccugguggug

SEQ ID NO: 276871 - RNA, 22 nt, Human
agguguggcuugaagucucuau

SEQ ID NO: 276872 - RNA, 22 nt, Human
uucuuucugggaagaguucaga

SEQ ID NO: 276873 - RNA, 20 nt, Human
aggcugaguucuaugcacuu

SEQ ID NO: 276874 - RNA, 22 nt, Human
agucacaugggauuagaaccca

SEQ ID NO: 276875 - RNA, 22 nt, Human
cagacaggguggguuucugggc

SEQ ID NO: 276876 - RNA, 22 nt, Human
uggagggcucuuucaccuggua

SEQ ID NO: 276877 - RNA, 22 nt, Human
ucagaggagcaaaagaggggau

SEQ ID NO: 276878 - RNA, 22 nt, Human
ucaguggucuuggcugauuguu

SEQ ID NO: 276879 - RNA, 22 nt, Human
gcauucuuguuuuuccuacccu

SEQ ID NO: 276880 - RNA, 22 nt, Human
ccaaggcaaugugcagcuggug

SEQ ID NO: 276881 - RNA, 22 nt, Human
gagaaacaacacuugaugccuu

SEQ ID NO: 276882 - RNA, 22 nt, Human
caauagcaggucuacagagaga

SEQ ID NO: 276883 - RNA, 19 nt, Human
uuugauagggcauaauaua

SEQ ID NO: 276884 - RNA, 22 nt, Human
gaggugucuguuaggaauaggc

SEQ ID NO: 276885 - RNA, 22 nt, Human
aagucuggaaccucaugcuggc

SEQ ID NO: 276886 - RNA, 22 nt, Human
caugugcauccuuaaucucccu

SEQ ID NO: 276887 - RNA, 22 nt, Human
gcacaaaacacauuuugacaau

SEQ ID NO: 276888 - RNA, 22 nt, Human
ugcugggugguugcuccucccg

SEQ ID NO: 276889 - RNA, 22 nt, Human
gugccagccgcaccccaggaga

SEQ ID NO: 276890 - RNA, 22 nt, Human
auguuacaacccugaggagccg

SEQ ID NO: 276891 - RNA, 22 nt, Human
aggacuaaggaacagcugauuc

SEQ ID NO: 276892 - RNA, 22 nt, Human
aaagaacaauguggaaucuccu

SEQ ID NO: 276893 - RNA, 19 nt, Human
ccugugacuaucuuuguaa

SEQ ID NO: 276894 - RNA, 21 nt, Human
uuccagagauuguuucaccug

SEQ ID NO: 276895 - RNA, 22 nt, Human
aggucucucacacucacagggc

SEQ ID NO: 276896 - RNA, 22 nt, Human
aggcagacaaggacacaguggg

SEQ ID NO: 276897 - RNA, 22 nt, Human
auagcuguagaauguauacaca

SEQ ID NO: 276898 - RNA, 22 nt, Human
cacauuucuuauggauguuggc

SEQ ID NO: 276899 - RNA, 22 nt, Human
acagaggccgccucucucacgg

SEQ ID NO: 276900 - RNA, 18 nt, Human
cagacacucugcucugca

SEQ ID NO: 276901 - RNA, 22 nt, Human
uucugucuucucgguuguuuac

SEQ ID NO: 276902 - RNA, 22 nt, Human
uggagccagagcgcagccuggg

SEQ ID NO: 276903 - RNA, 22 nt, Human
aauuccaaguagcaucccauca

SEQ ID NO: 276904 - RNA, 22 nt, Human
ugagcccauguagcacuuccau

SEQ ID NO: 276905 - RNA, 22 nt, Human
aaacagauaaugcuauaaaugg

SEQ ID NO: 276906 - RNA, 22 nt, Human
ucagcccugggcuuccucaugg

SEQ ID NO: 276907 - RNA, 20 nt, Human
uauaagcagcuccaggcaga

SEQ ID NO: 276908 - RNA, 22 nt, Human
auguaucaugcaggguccauga

SEQ ID NO: 276909 - RNA, 22 nt, Human
guuugcaaauuguguuaaagcu

SEQ ID NO: 276910 - RNA, 22 nt, Human
cacagaauuaagggagaaauau

SEQ ID NO: 276911 - RNA, 22 nt, Human
ccauuaguaccucuggaaaauu

SEQ ID NO: 276912 - RNA, 22 nt, Human
ucuggaagaacggggcaugcug

SEQ ID NO: 276913 - RNA, 22 nt, Human
uguuuaaauagaacauacugca

SEQ ID NO: 276914 - RNA, 22 nt, Human
uacccagcuccucagaagacca

SEQ ID NO: 276915 - RNA, 22 nt, Human
ccugcccaucccguccuuggcc

SEQ ID NO: 276916 - RNA, 22 nt, Human
ugucucuuggcucuaucacuua

SEQ ID NO: 276917 - RNA, 22 nt, Human
uuuagcauguuccuuucauaga

SEQ ID NO: 276918 - RNA, 22 nt, Human
gcuggagcugcagccugggccu

SEQ ID NO: 276919 - RNA, 22 nt, Human
agaugguccaucuauuuucuau

SEQ ID NO: 276920 - RNA, 22 nt, Human
uuuaaauaggacuccugggggu

SEQ ID NO: 276921 - RNA, 22 nt, Human
ugauuuuauuggugaggaaauu

SEQ ID NO: 276922 - RNA, 22 nt, Human
uagguguccucguccaaagauu

SEQ ID NO: 276923 - RNA, 22 nt, Human
gaggaggcuggcgccgccugcc

SEQ ID NO: 276924 - RNA, 22 nt, Human
gaaagaggaaggagauguauua

SEQ ID NO: 276925 - RNA, 22 nt, Human
gaguuacauuuggugacacuuc

SEQ ID NO: 276926 - RNA, 22 nt, Human
ccugagcucaagaaggugacca

SEQ ID NO: 276927 - RNA, 22 nt, Human
ccugagcuugauccuucugucu

SEQ ID NO: 276928 - RNA, 22 nt, Human
auuuacagccuugaaaacagca

SEQ ID NO: 276929 - RNA, 22 nt, Human
uccuuucccuuuccauccuggc

SEQ ID NO: 276930 - RNA, 22 nt, Human
agaaggcugagacugggaugaa

SEQ ID NO: 276931 - RNA, 22 nt, Human
ggggcugguggugguuucucca

SEQ ID NO: 276932 - RNA, 22 nt, Human
ucacagaaggcaucacagaaga

SEQ ID NO: 276933 - RNA, 22 nt, Human
auuacaaucgagagaaacaaau

SEQ ID NO: 276934 - RNA, 21 nt, Human
ccaccaggucuucugcucggg

SEQ ID NO: 276935 - RNA, 22 nt, Human
gcaggucuagaagcugccucug

SEQ ID NO: 276936 - RNA, 23 nt, Human
cccagcuggaaguuagaggacca

SEQ ID NO: 276937 - RNA, 22 nt, Human
uuauuagggugguuuauguucu

SEQ ID NO: 276938 - RNA, 22 nt, Human
cuguuuaucucuaaccuguuua

SEQ ID NO: 276939 - RNA, 22 nt, Human
gauuuagauucgcuggggcugg

SEQ ID NO: 276940 - RNA, 22 nt, Human
aagggcuguaagccaaguaaag

SEQ ID NO: 276941 - RNA, 22 nt, Human
caggcugauuaggccucgucca

SEQ ID NO: 276942 - RNA, 22 nt, Human
ccugggaggcggagguugcagg

SEQ ID NO: 276943 - RNA, 22 nt, Human
cagcuggggcagccacgugcgg

SEQ ID NO: 276944 - RNA, 22 nt, Human
caggggcucuaaugcaugauca

SEQ ID NO: 276945 - RNA, 20 nt, Human
uuucauugucagaaucuuau

SEQ ID NO: 276946 - RNA, 22 nt, Human
aguggccacuagaagcucagcu

SEQ ID NO: 276947 - RNA, 22 nt, Human
uggaaucugugcuguuuuagug

SEQ ID NO: 276948 - RNA, 22 nt, Human
ucaggugggcaguggguugagc

SEQ ID NO: 276949 - RNA, 22 nt, Human
gcugguggcagagcuccgcggc

SEQ ID NO: 276950 - RNA, 21 nt, Human
ccacagcuggucucugagccc

SEQ ID NO: 276951 - RNA, 22 nt, Human
ggcuggcacugaggagagcucu

SEQ ID NO: 276952 - RNA, 22 nt, Human
cugggacuuuguaggccaguug

SEQ ID NO: 276953 - RNA, 22 nt, Human
ccgggagcaggcgccaccgcca

SEQ ID NO: 276954 - RNA, 20 nt, Human
guauuacaggcuuagaacca

SEQ ID NO: 276955 - RNA, 22 nt, Human
gcaaacaagcugccugaagauu

SEQ ID NO: 276956 - RNA, 22 nt, Human
cuagggagggauguuggcauga

SEQ ID NO: 276957 - RNA, 22 nt, Human
aucuguucuugugucaguaauu

SEQ ID NO: 276958 - RNA, 22 nt, Human
ucaucucuccccagugucuuua

SEQ ID NO: 276959 - RNA, 22 nt, Human
uuccaugacugaagcaggggcg

SEQ ID NO: 276960 - RNA, 22 nt, Human
gcugccugugcgggucgcuagg

SEQ ID NO: 276961 - RNA, 22 nt, Human
ucugccucgcuaacagcagcca

SEQ ID NO: 276962 - RNA, 22 nt, Human
gaccacagcagugcaagaggag

SEQ ID NO: 276963 - RNA, 22 nt, Human
cugaggcaccuacagucucggg

SEQ ID NO: 276964 - RNA, 21 nt, Human
ggggaugcgaccacaggcucc

SEQ ID NO: 276965 - RNA, 21 nt, Human
cacauuccaugggucuauuua

SEQ ID NO: 276966 - RNA, 22 nt, Human
aaaaguaauugcaguuuuguca

SEQ ID NO: 276967 - RNA, 22 nt, Human
ucauggcagcccuuuacuagag

SEQ ID NO: 276968 - RNA, 22 nt, Human
ucugggucuuaguuuucuugau

SEQ ID NO: 276969 - RNA, 22 nt, Human
auggaggaugugcagcaugggc

SEQ ID NO: 276970 - RNA, 22 nt, Human
cucauuuacuguagaacaguua

SEQ ID NO: 276971 - RNA, 17 nt, Human
agcaggcugcagaggcc

SEQ ID NO: 276972 - RNA, 20 nt, Human
ucucaguuucuagagucagg

SEQ ID NO: 276973 - RNA, 22 nt, Human
ucccagagacaucauuucuccg

SEQ ID NO: 276974 - RNA, 22 nt, Human
aucuacaggauaguuuaauauu

SEQ ID NO: 276975 - RNA, 22 nt, Human
ggcuuagauugacacugaucuc

SEQ ID NO: 276976 - RNA, 22 nt, Human
ggccagcuuauuagcucagagg

SEQ ID NO: 276977 - RNA, 22 nt, Human
ugucacauaauuuaucuguagg

SEQ ID NO: 276978 - RNA, 22 nt, Human
cuucucuggcuccucagcgccc

SEQ ID NO: 276979 - RNA, 22 nt, Human
ugaagaaacagaccaagaggau

SEQ ID NO: 276980 - RNA, 22 nt, Human
ccagagggaagaggaagcgcug

SEQ ID NO: 276981 - RNA, 22 nt, Human
uacacaugcucagauuccugug

SEQ ID NO: 276982 - RNA, 22 nt, Human
aggaaagcuuggcaaacuaaau

SEQ ID NO: 276983 - RNA, 21 nt, Human
aggaggccaguacugcugaac

SEQ ID NO: 276984 - RNA, 22 nt, Human
auuauuaggacuacugggguug

SEQ ID NO: 276985 - RNA, 22 nt, Human
uuucccagccuccuuugcagcu

SEQ ID NO: 276986 - RNA, 22 nt, Human
uuaaaguguuaacugaagcuua

SEQ ID NO: 276987 - RNA, 22 nt, Human
auccauuugacauaauuucagc

SEQ ID NO: 276988 - RNA, 22 nt, Human
gggcacagucuaaaguugggcc

SEQ ID NO: 276989 - RNA, 22 nt, Human
cugcagagaccuaggucagguu

SEQ ID NO: 276990 - RNA, 22 nt, Human
cagguggggcgcccucaggcag

SEQ ID NO: 276991 - RNA, 22 nt, Human
ucugaggccugaagcagcagag

SEQ ID NO: 276992 - RNA, 22 nt, Human
cagcaggugggcuuugcggaug

SEQ ID NO: 276993 - RNA, 22 nt, Human
aagggcuggagaggaaagguug

SEQ ID NO: 276994 - RNA, 22 nt, Human
acaacaguuuagguauuuguag

SEQ ID NO: 276995 - RNA, 22 nt, Human
gcagagugaagggagaggugug

SEQ ID NO: 276996 - RNA, 22 nt, Human
ccaagcugacugugcuguugug

SEQ ID NO: 276997 - RNA, 22 nt, Human
uagggggcuuugcugcuugaca

SEQ ID NO: 276998 - RNA, 22 nt, Human
acagggcagguggcuacugguc

SEQ ID NO: 276999 - RNA, 22 nt, Human
gugaccauccugguaaugaauc

SEQ ID NO: 277000 - RNA, 22 nt, Human
cugcagcuaaggaaugugguug

SEQ ID NO: 277001 - RNA, 22 nt, Human
gaggcuguaaguguggagccua

SEQ ID NO: 277002 - RNA, 22 nt, Human
ccaguguccuuccuuuccaugg

SEQ ID NO: 277003 - RNA, 22 nt, Human
uauuucuucgggauucaagcua

SEQ ID NO: 277004 - RNA, 22 nt, Human
ggcagagccucagcccuccacc

SEQ ID NO: 277005 - RNA, 22 nt, Human
cucuagaguacgggcuggcaug

SEQ ID NO: 277006 - RNA, 18 nt, Human
gaggaaacaggcucugug

SEQ ID NO: 277007 - RNA, 22 nt, Human
ucucuggcagcuugugcuguug

SEQ ID NO: 277008 - RNA, 22 nt, Human
uaacaacuugcuuuuaucuuag

SEQ ID NO: 277009 - RNA, 22 nt, Human
ucuuuacacaagacaagaauaa

SEQ ID NO: 277010 - RNA, 22 nt, Human
cagaccucaaagcugcagugcu

SEQ ID NO: 277011 - RNA, 22 nt, Human
gacaguaagucagagacuuggu

SEQ ID NO: 277012 - RNA, 22 nt, Human
cuugagaaucuucucugaagag

SEQ ID NO: 277013 - RNA, 22 nt, Human
acuccagguuuuuucacugaag

SEQ ID NO: 277014 - RNA, 22 nt, Human
acuucuuucacaauguuucuag

SEQ ID NO: 277015 - RNA, 22 nt, Human
gaucggguggguucugccauca

SEQ ID NO: 277016 - RNA, 22 nt, Human
ccuggagggcagcccauucugg

SEQ ID NO: 277017 - RNA, 22 nt, Human
gaaauguuuuacaaggcauacu

SEQ ID NO: 277018 - RNA, 22 nt, Human
cagccagcugaauguaccauga

SEQ ID NO: 277019 - RNA, 22 nt, Human
uuguuucauggggauguuuauu

SEQ ID NO: 277020 - RNA, 22 nt, Human
cucugaggaagucaaguagcca

SEQ ID NO: 277021 - RNA, 22 nt, Human
cacaugugcaguuacaugaauu

SEQ ID NO: 277022 - RNA, 22 nt, Human
agucucacuucuugagcuaugc

SEQ ID NO: 277023 - RNA, 22 nt, Human
uaaaaugacuuccuccaacauc

SEQ ID NO: 277024 - RNA, 22 nt, Human
uuuuauugcaauaaagugugua

SEQ ID NO: 277025 - RNA, 22 nt, Human
uugaauuauuuguuugcaagcu

SEQ ID NO: 277026 - RNA, 18 nt, Human
auguggcuagugcuacug

SEQ ID NO: 277027 - RNA, 22 nt, Human
gaaauauugggacucagagcuu

SEQ ID NO: 277028 - RNA, 22 nt, Human
accacaucuagauugcagcccu

SEQ ID NO: 277029 - RNA, 22 nt, Human
acaaggcuuauaguugcuuuuu

SEQ ID NO: 277030 - RNA, 23 nt, Human
cucccuggaguuucuggaagaug

SEQ ID NO: 277031 - RNA, 23 nt, Human
ucagucuucccugucaguaauag

SEQ ID NO: 277032 - RNA, 22 nt, Human
cugugucccuugucccagagcc

SEQ ID NO: 277033 - RNA, 22 nt, Human
gcaugcagggagggucuggcug

SEQ ID NO: 277034 - RNA, 22 nt, Human
auuugccucugcuuucaaggau

SEQ ID NO: 277035 - RNA, 22 nt, Human
ggccaccaguccucuggcaggg

SEQ ID NO: 277036 - RNA, 22 nt, Human
ucugaaauuuuaguuauagaaa

SEQ ID NO: 277037 - RNA, 22 nt, Human
agagcauccaucggccaggacc

SEQ ID NO: 277038 - RNA, 22 nt, Human
auuguaacauguucagaucacu

SEQ ID NO: 277039 - RNA, 22 nt, Human
ucaauauucuucuuuaguagga

SEQ ID NO: 277040 - RNA, 22 nt, Human
ucuccagggacauguuucugga

SEQ ID NO: 277041 - RNA, 22 nt, Human
gugcugagcugcagaugcgcuc

SEQ ID NO: 277042 - RNA, 22 nt, Human
ggcucugccucugacccucugg

SEQ ID NO: 277043 - RNA, 22 nt, Human
uggaaauacuugccauaaaacu

SEQ ID NO: 277044 - RNA, 22 nt, Human
ugucugagcuuuaugauggaag

SEQ ID NO: 277045 - RNA, 23 nt, Human
aaaugcacaguauugauuuuuaa

SEQ ID NO: 277046 - RNA, 22 nt, Human
ucagggcagguuaacuugggug

SEQ ID NO: 277047 - RNA, 22 nt, Human
uacuuauuguugaacugaauca

SEQ ID NO: 277048 - RNA, 22 nt, Human
uucuucuuuccaauuacauggu

SEQ ID NO: 277049 - RNA, 22 nt, Human
gcaccagagggggcucugcagg

SEQ ID NO: 277050 - RNA, 22 nt, Human
uggcucagccagcccuaggaac

SEQ ID NO: 277051 - RNA, 22 nt, Human
gacauggauacuugauaagggg

SEQ ID NO: 277052 - RNA, 22 nt, Human
caaacugagcaucagaaaguuu

SEQ ID NO: 277053 - RNA, 22 nt, Human
aagacaaagggguccuuggaug

SEQ ID NO: 277054 - RNA, 22 nt, Human
uuagagauugucuaguauugug

SEQ ID NO: 277055 - RNA, 22 nt, Human
ugagagcaacacgcaguaguau

SEQ ID NO: 277056 - RNA, 22 nt, Human
uucuaacucuacacuagcuuug

SEQ ID NO: 277057 - RNA, 22 nt, Human
agguggcuucuggccaggugug

SEQ ID NO: 277058 - RNA, 22 nt, Human
gacauucauuaagccuuucugu

SEQ ID NO: 277059 - RNA, 22 nt, Human
cugcugggggacacagguccgg

SEQ ID NO: 277060 - RNA, 22 nt, Human
uggcagccucagacaaggaccu

SEQ ID NO: 277061 - RNA, 22 nt, Human
uucuuggaaacugauuccuugu

SEQ ID NO: 277062 - RNA, 22 nt, Human
agagccagcauuugggcccugc

SEQ ID NO: 277063 - RNA, 22 nt, Human
acuccuggguuccggagauucu

SEQ ID NO: 277064 - RNA, 22 nt, Human
ucccugggguaacauuagaggg

SEQ ID NO: 277065 - RNA, 22 nt, Human
agaugagugagagcaucaacuu

SEQ ID NO: 277066 - RNA, 22 nt, Human
ucucuguagggcugcuugagua

SEQ ID NO: 277067 - RNA, 22 nt, Human
ccagaggagcauggccuugaga

SEQ ID NO: 277068 - RNA, 22 nt, Human
cuucucagcauuuugucagucu

SEQ ID NO: 277069 - RNA, 22 nt, Human
ugcaauuaugggcaauuuuuaa

SEQ ID NO: 277070 - RNA, 22 nt, Human
uguguuuugaacucaucuacug

SEQ ID NO: 277071 - RNA, 22 nt, Human
aggcaggugggucacuugaguc

SEQ ID NO: 277072 - RNA, 22 nt, Human
uauaucuuauaugugcagguac

SEQ ID NO: 277073 - RNA, 22 nt, Human
caggcuagcagggcccagggca

SEQ ID NO: 277074 - RNA, 22 nt, Human
uccuggcuaguuuugcugaaau

SEQ ID NO: 277075 - RNA, 22 nt, Human
uggcaggugccaugggcucaga

SEQ ID NO: 277076 - RNA, 22 nt, Human
guguuacuuaauuagaaucugc

SEQ ID NO: 277077 - RNA, 22 nt, Human
aagaaauggcuucaucugagua

SEQ ID NO: 277078 - RNA, 22 nt, Human
cugggcucuucccagauccaga

SEQ ID NO: 277079 - RNA, 22 nt, Human
aaagcaaugcccguucauuauc

SEQ ID NO: 277080 - RNA, 22 nt, Human
gaaguuuauuucaaucuauuca

SEQ ID NO: 277081 - RNA, 22 nt, Human
cagggaugagagauggcacaga

SEQ ID NO: 277082 - RNA, 22 nt, Human
acccagagaacugugccuugag

SEQ ID NO: 277083 - RNA, 22 nt, Human
cacagcagacagggaggcggcu

SEQ ID NO: 277084 - RNA, 22 nt, Human
cagagcuggggacuguuggaug

SEQ ID NO: 277085 - RNA, 18 nt, Human
gccugggagaaguuucac

SEQ ID NO: 277086 - RNA, 20 nt, Human
ggcucuggaaucuggugggc

SEQ ID NO: 277087 - RNA, 22 nt, Human
ggcaggcauggccacucccuag

SEQ ID NO: 277088 - RNA, 22 nt, Human
cuugccuguggcuaguuggcuc

SEQ ID NO: 277089 - RNA, 20 nt, Human
uauacuaacauauaucuguu

SEQ ID NO: 277090 - RNA, 22 nt, Human
ucucagagauuuuguuucccuu

SEQ ID NO: 277091 - RNA, 22 nt, Human
uaaggacaauuugucgcuugca

SEQ ID NO: 277092 - RNA, 19 nt, Human
cagagagaccaaggcgcca

SEQ ID NO: 277093 - RNA, 22 nt, Human
cagggcuccccgcaccgcagcc

SEQ ID NO: 277094 - RNA, 22 nt, Human
gguuucaaauuaaagucuuaag

SEQ ID NO: 277095 - RNA, 22 nt, Human
agggccaggcucccaugucagg

SEQ ID NO: 277096 - RNA, 22 nt, Human
uucuguuuauaauuugcaguug

SEQ ID NO: 277097 - RNA, 22 nt, Human
auguccagagaacauuugcuuu

SEQ ID NO: 277098 - RNA, 22 nt, Human
gcucucuggguggugggcaaca

SEQ ID NO: 277099 - RNA, 22 nt, Human
aagaaccuauaugcugaugaau

SEQ ID NO: 277100 - RNA, 18 nt, Human
cagaaguccuucaaggcc

SEQ ID NO: 277101 - RNA, 22 nt, Human
uucaagcaccaaauuaguaggc

SEQ ID NO: 277102 - RNA, 22 nt, Human
cuccauacuuccaacaaacuuu

SEQ ID NO: 277103 - RNA, 22 nt, Human
gcugcccucugugacccggccc

SEQ ID NO: 277104 - RNA, 22 nt, Human
gacaauaaaaugaucuuacagu

SEQ ID NO: 277105 - RNA, 22 nt, Human
uggcuucugggacuugugagca

SEQ ID NO: 277106 - RNA, 22 nt, Human
uaccauuucuacauaucuuguc

SEQ ID NO: 277107 - RNA, 22 nt, Human
cagcucaggcucuccaugcucc

SEQ ID NO: 277108 - RNA, 22 nt, Human
caagcuuguuucuccugggggu

SEQ ID NO: 277109 - RNA, 22 nt, Human
cagcuuucuaccuuaggcagug

SEQ ID NO: 277110 - RNA, 22 nt, Human
cccaggaguaagugacauuguu

SEQ ID NO: 277111 - RNA, 22 nt, Human
gaaucaauuauccaggcuguug

SEQ ID NO: 277112 - RNA, 22 nt, Human
agucccagagaggucggggcca

SEQ ID NO: 277113 - RNA, 22 nt, Human
ugggcucucucaccuggaggcu

SEQ ID NO: 277114 - RNA, 22 nt, Human
aauguauuugauguauuagccu

SEQ ID NO: 277115 - RNA, 22 nt, Human
acauucuugaagugaaguuuau

SEQ ID NO: 277116 - RNA, 22 nt, Human
cuggcuguuucaggcagugucc

SEQ ID NO: 277117 - RNA, 22 nt, Human
gcuggaaaucaaagaaguggau

SEQ ID NO: 277118 - RNA, 22 nt, Human
agccccugggaguagcugcugc

SEQ ID NO: 277119 - RNA, 22 nt, Human
ugcauacacaugugcacauacg

SEQ ID NO: 277120 - RNA, 22 nt, Human
aaaauugucgaacaguaguaac

SEQ ID NO: 277121 - RNA, 22 nt, Human
acucuguagaguauaccaaugu

SEQ ID NO: 277122 - RNA, 22 nt, Human
uuucaugucauuccauuucaga

SEQ ID NO: 277123 - RNA, 22 nt, Human
agagaauuacagaagaauguca

SEQ ID NO: 277124 - RNA, 22 nt, Human
gggugggguucaggaaucuuca

SEQ ID NO: 277125 - RNA, 22 nt, Human
uggaagccucaguuugccuucu

SEQ ID NO: 277126 - RNA, 22 nt, Human
ucugggcugggcuuaggaaccc

SEQ ID NO: 277127 - RNA, 22 nt, Human
augcaggaguucgaggcuguau

SEQ ID NO: 277128 - RNA, 22 nt, Human
ccacuggcaguuggcuagccuu

SEQ ID NO: 277129 - RNA, 22 nt, Human
uggggagagauugaggaguuuu

SEQ ID NO: 277130 - RNA, 22 nt, Human
acagcaggagccuucauaugcu

SEQ ID NO: 277131 - RNA, 22 nt, Human
aggguccauucuuugccuuuuc

SEQ ID NO: 277132 - RNA, 22 nt, Human
cugaggagucaguuccacucag

SEQ ID NO: 277133 - RNA, 22 nt, Human
acuaaauggaaugauuacuaua

SEQ ID NO: 277134 - RNA, 22 nt, Human
cuguacagaguucugaguguac

SEQ ID NO: 277135 - RNA, 22 nt, Human
agggcucugagcuggaccaccu

SEQ ID NO: 277136 - RNA, 22 nt, Human
gcucuuuguauuuuggaaucaa

SEQ ID NO: 277137 - RNA, 22 nt, Human
ggcucuggcuacuccacccugu

SEQ ID NO: 277138 - RNA, 22 nt, Human
aacaggcuuuuggaaaguuaca

SEQ ID NO: 277139 - RNA, 22 nt, Human
gcagggcuggggcugcuccuga

SEQ ID NO: 277140 - RNA, 21 nt, Human
cugcaucucauagaacauguc

SEQ ID NO: 277141 - RNA, 22 nt, Human
gggaggaaagagaaguggucca

SEQ ID NO: 277142 - RNA, 22 nt, Human
gggcccuggacguggcggcaga

SEQ ID NO: 277143 - RNA, 22 nt, Human
gagaugggcgagaagguggacu

SEQ ID NO: 277144 - RNA, 22 nt, Human
ggaaaacaagagaaugauguuu

SEQ ID NO: 277145 - RNA, 17 nt, Human
gucugggcuuuagagac

SEQ ID NO: 277146 - RNA, 22 nt, Human
aacgugcauuaggaccucucca

SEQ ID NO: 277147 - RNA, 22 nt, Human
aggcucucagaucagccacauu

SEQ ID NO: 277148 - RNA, 22 nt, Human
guuuucuggcaguuauuccuua

SEQ ID NO: 277149 - RNA, 20 nt, Human
acacaagcacuucugguauu

SEQ ID NO: 277150 - RNA, 22 nt, Human
cacaguuugguauagaagugau

SEQ ID NO: 277151 - RNA, 22 nt, Human
gacacuuuggugcuuugugguu

SEQ ID NO: 277152 - RNA, 22 nt, Human
ucacaugcucaccuaagccaca

SEQ ID NO: 277153 - RNA, 22 nt, Human
ccagcugguaagugauggagcc

SEQ ID NO: 277154 - RNA, 22 nt, Human
cuggagccggcgagccccagcc

SEQ ID NO: 277155 - RNA, 22 nt, Human
gugcauuaacaacccagaacuc

SEQ ID NO: 277156 - RNA, 22 nt, Human
guggcugcagagccagcaagcu

SEQ ID NO: 277157 - RNA, 22 nt, Human
ccugcaccucugugcuuggaac

SEQ ID NO: 277158 - RNA, 22 nt, Human
gagguccagccaagcggcaagg

SEQ ID NO: 277159 - RNA, 22 nt, Human
auauuagguuggugcaaaagua

SEQ ID NO: 277160 - RNA, 22 nt, Human
aagaagcauucuuucauugguu

SEQ ID NO: 277161 - RNA, 22 nt, Human
cuccugugggucaccaauaggc

SEQ ID NO: 277162 - RNA, 22 nt, Human
gaauuacauuuguguuacugca

SEQ ID NO: 277163 - RNA, 22 nt, Human
ggccagaggugguacauagcuu

SEQ ID NO: 277164 - RNA, 22 nt, Human
aucuagaagucauggcuuucuu

SEQ ID NO: 277165 - RNA, 22 nt, Human
uguguacaagaguguuuacugu

SEQ ID NO: 277166 - RNA, 22 nt, Human
aagcucagagucucggagggaa

SEQ ID NO: 277167 - RNA, 22 nt, Human
uccauacauacagauaugcauu

SEQ ID NO: 277168 - RNA, 22 nt, Human
ucccagccuuaucuccccuggc

SEQ ID NO: 277169 - RNA, 22 nt, Human
cauuuccagcuccugcaucaug

SEQ ID NO: 277170 - RNA, 22 nt, Human
cacaguauucacugggcagauu

SEQ ID NO: 277171 - RNA, 22 nt, Human
gcuguauuggaacacauccaug

SEQ ID NO: 277172 - RNA, 22 nt, Human
caaguccucaaagggcucugcu

SEQ ID NO: 277173 - RNA, 22 nt, Human
aaaauuacuauuguuccugggc

SEQ ID NO: 277174 - RNA, 22 nt, Human
gcccugagccaccaaugccauu

SEQ ID NO: 277175 - RNA, 22 nt, Human
agcagggguaacagaaggaaag

SEQ ID NO: 277176 - RNA, 22 nt, Human
gcacagcaauuucuauaagcuc

SEQ ID NO: 277177 - RNA, 23 nt, Human
uagggcagcugggagggacaugc

SEQ ID NO: 277178 - RNA, 22 nt, Human
ucaaagaacaucaucugaaaug

SEQ ID NO: 277179 - RNA, 21 nt, Human
ugcaggcuacuucugacucua

SEQ ID NO: 277180 - RNA, 22 nt, Human
agaaauguauucuguauguuuu

SEQ ID NO: 277181 - RNA, 22 nt, Human
gaggggagacagggaaaucagu

SEQ ID NO: 277182 - RNA, 22 nt, Human
cagaugaggggcauauaacaau

SEQ ID NO: 277183 - RNA, 22 nt, Human
aaagaaggaugggagaaauccu

SEQ ID NO: 277184 - RNA, 22 nt, Human
ggaggggccggcugccugccac

SEQ ID NO: 277185 - RNA, 22 nt, Human
acauaugugucugcacaugccc

SEQ ID NO: 277186 - RNA, 22 nt, Human
gagcaggccagcaauggaaggg

SEQ ID NO: 277187 - RNA, 22 nt, Human
aagacaggaaaagcuccaggcc

SEQ ID NO: 277188 - RNA, 22 nt, Human
uaaacucucaacagagaaccac

SEQ ID NO: 277189 - RNA, 22 nt, Human
uucuguauguacauauguguau

SEQ ID NO: 277190 - RNA, 19 nt, Human
uagcccuggccaucaugag

SEQ ID NO: 277191 - RNA, 20 nt, Human
ugauuucucuucuauuccuu

SEQ ID NO: 277192 - RNA, 22 nt, Human
ucagucuucuagcaaauccagg

SEQ ID NO: 277193 - RNA, 22 nt, Human
aaugcaaauuaucaggcuucuc

SEQ ID NO: 277194 - RNA, 22 nt, Human
aguguauuaucagaaacugugg

SEQ ID NO: 277195 - RNA, 22 nt, Human
aacuugaaaaccucaugaauug

SEQ ID NO: 277196 - RNA, 22 nt, Human
cggcagggcuccaugcauuucu

SEQ ID NO: 277197 - RNA, 22 nt, Human
ggaugacaaggaaagcaaacca

SEQ ID NO: 277198 - RNA, 22 nt, Human
cuuguuuaauaauaccuuagca

SEQ ID NO: 277199 - RNA, 20 nt, Human
gagcaguggaguuuccaggg

SEQ ID NO: 277200 - RNA, 22 nt, Human
gggaggaggaauguuuugugua

SEQ ID NO: 277201 - RNA, 22 nt, Human
gcuaucuucauggaaauacagg

SEQ ID NO: 277202 - RNA, 22 nt, Human
agggaccucauguaaguggauu

SEQ ID NO: 277203 - RNA, 22 nt, Human
acaauauuguacccagaaguuu

SEQ ID NO: 277204 - RNA, 22 nt, Human
caguccugugucccuugguggg

SEQ ID NO: 277205 - RNA, 22 nt, Human
uacaccauucccagguggauuu

SEQ ID NO: 277206 - RNA, 22 nt, Human
cauggugaggggugaagggcag

SEQ ID NO: 277207 - RNA, 22 nt, Human
ucuuuccagaggaauuuuuaga

SEQ ID NO: 277208 - RNA, 22 nt, Human
cugauugagaaggaaggggauc

SEQ ID NO: 277209 - RNA, 22 nt, Human
gcugggcuuguggccagcuggg

SEQ ID NO: 277210 - RNA, 22 nt, Human
augugucuuugagacucugcua

SEQ ID NO: 277211 - RNA, 22 nt, Human
aagacccuaccccuggagagga

SEQ ID NO: 277212 - RNA, 22 nt, Human
agaacaauguuaaauuauuaag

SEQ ID NO: 277213 - RNA, 22 nt, Human
ucacaaaaggccauguggcuuc

SEQ ID NO: 277214 - RNA, 22 nt, Human
ggcaggugcucaaaaauauuug

SEQ ID NO: 277215 - RNA, 22 nt, Human
auuuuacuaaguggauaucugu

SEQ ID NO: 277216 - RNA, 21 nt, Human
aucucacagcccagagaagcc

SEQ ID NO: 277217 - RNA, 22 nt, Human
caggccuuugcagggagagaga

SEQ ID NO: 277218 - RNA, 22 nt, Human
uccuggagugucuuccccaagg

SEQ ID NO: 277219 - RNA, 22 nt, Human
auugcaaaugguuuggucaucu

SEQ ID NO: 277220 - RNA, 22 nt, Human
uaucagaaaucaacacacagug

SEQ ID NO: 277221 - RNA, 19 nt, Human
agcaaauacaucaaaauug

SEQ ID NO: 277222 - RNA, 22 nt, Human
cagcagccauguaccacacuca

SEQ ID NO: 277223 - RNA, 22 nt, Human
aacugagggcccugcugaagca

SEQ ID NO: 277224 - RNA, 22 nt, Human
agacaggcagaggcugcagagg

SEQ ID NO: 277225 - RNA, 22 nt, Human
ggcuggagacaacguccugccc

SEQ ID NO: 277226 - RNA, 22 nt, Human
cuuagggaauugggaggaugcc

SEQ ID NO: 277227 - RNA, 23 nt, Human
cagcccuuccugcauguuuuugu

SEQ ID NO: 277228 - RNA, 22 nt, Human
ugucacauauauaauguucaau

SEQ ID NO: 277229 - RNA, 22 nt, Human
cugcagagaugaagaagguggc

SEQ ID NO: 277230 - RNA, 22 nt, Human
aagcuuuaagugucagucagcc

SEQ ID NO: 277231 - RNA, 22 nt, Human
uagcaagaagggagaugggguu

SEQ ID NO: 277232 - RNA, 22 nt, Human
uuccaggaugggcuguccuacu

SEQ ID NO: 277233 - RNA, 22 nt, Human
ucucuucacaugcuugcuccaa

SEQ ID NO: 277234 - RNA, 22 nt, Human
aagugucugcaaaaugacagag

SEQ ID NO: 277235 - RNA, 21 nt, Human
agcugccacccuagcuucuga

SEQ ID NO: 277236 - RNA, 22 nt, Human
uccuuccaugguggggcugcuu

SEQ ID NO: 277237 - RNA, 22 nt, Human
ucuagaauuuugccauauagcu

SEQ ID NO: 277238 - RNA, 22 nt, Human
cacacuuugugcuaaucuauuu

SEQ ID NO: 277239 - RNA, 22 nt, Human
gggcagugguuacacagcugag

SEQ ID NO: 277240 - RNA, 22 nt, Human
caggcucccuaagucagcagcc

SEQ ID NO: 277241 - RNA, 20 nt, Human
ugaauagagagcacauaugc

SEQ ID NO: 277242 - RNA, 22 nt, Human
caccagcuuacagucucacccc

SEQ ID NO: 277243 - RNA, 22 nt, Human
ccucuuuguucaggcugcuggc

SEQ ID NO: 277244 - RNA, 22 nt, Human
cuucucccuggcuucugcacac

SEQ ID NO: 277245 - RNA, 23 nt, Human
ugagaagccgccgggcagccugg

SEQ ID NO: 277246 - RNA, 22 nt, Human
ugagggacucccggcccugcca

SEQ ID NO: 277247 - RNA, 22 nt, Human
uuuguguuggaagaaaugcuac

SEQ ID NO: 277248 - RNA, 22 nt, Human
cuaaaugucauggaguuguaga

SEQ ID NO: 277249 - RNA, 17 nt, Human
ucagcaaagacaaagga

SEQ ID NO: 277250 - RNA, 22 nt, Human
ccagcaucuaugugcuguugau

SEQ ID NO: 277251 - RNA, 22 nt, Human
cuggaaggcggagguuguagug

SEQ ID NO: 277252 - RNA, 22 nt, Human
auguacaguuucuagacucaaa

SEQ ID NO: 277253 - RNA, 22 nt, Human
cugagggagaagucacgggcag

SEQ ID NO: 277254 - RNA, 19 nt, Human
ugcucuggagccagcucuc

SEQ ID NO: 277255 - RNA, 22 nt, Human
cggaaacuacgugacacccguu

SEQ ID NO: 277256 - RNA, 22 nt, Human
ggcaaaaaguucccaucagugu

SEQ ID NO: 277257 - RNA, 22 nt, Human
ucacagagaaauguggcacaaa

SEQ ID NO: 277258 - RNA, 22 nt, Human
auguguccaaggccacaauagc

SEQ ID NO: 277259 - RNA, 22 nt, Human
acccaggcuggagugcaguagc

SEQ ID NO: 277260 - RNA, 22 nt, Human
guuguacaaaauaucagugagg

SEQ ID NO: 277261 - RNA, 22 nt, Human
aguaugcaaaugucauaagcau

SEQ ID NO: 277262 - RNA, 21 nt, Human
ccccugggagcccugucagua

SEQ ID NO: 277263 - RNA, 22 nt, Human
ggcugccuccucgagacaggau

SEQ ID NO: 277264 - RNA, 22 nt, Human
uuagaaccaggaacucuaauau

SEQ ID NO: 277265 - RNA, 22 nt, Human
ucagugcagacuguaaguugga

SEQ ID NO: 277266 - RNA, 22 nt, Human
ucugggaguuagaauacauggg

SEQ ID NO: 277267 - RNA, 22 nt, Human
uuauguuugaguauaugacuca

SEQ ID NO: 277268 - RNA, 22 nt, Human
ugggucuccaguucagggcagg

SEQ ID NO: 277269 - RNA, 22 nt, Human
gcucugggugaauggcagauug

SEQ ID NO: 277270 - RNA, 22 nt, Human
uuacaaagagugccagagugug

SEQ ID NO: 277271 - RNA, 21 nt, Human
uuugcugaagauuuuaggcug

SEQ ID NO: 277272 - RNA, 22 nt, Human
uccuggcccuguggccugcagu

SEQ ID NO: 277273 - RNA, 22 nt, Human
uuuggcucggcugcugauggug

SEQ ID NO: 277274 - RNA, 22 nt, Human
uguuuaaucuucaggacagucu

SEQ ID NO: 277275 - RNA, 22 nt, Human
uuugugaauagguuggcuucca

SEQ ID NO: 277276 - RNA, 20 nt, Human
cccuggagagaagcuccacg

SEQ ID NO: 277277 - RNA, 21 nt, Human
ugaaugaucugguugccuuuu

SEQ ID NO: 277278 - RNA, 22 nt, Human
aagaagcagcugccaggccagu

SEQ ID NO: 277279 - RNA, 22 nt, Human
acugccaaugguaguuugaugg

SEQ ID NO: 277280 - RNA, 22 nt, Human
uuguagaauuuggaucucggca

SEQ ID NO: 277281 - RNA, 22 nt, Human
gucuacuuuugucaucauugca

SEQ ID NO: 277282 - RNA, 22 nt, Human
uguggcagucucacuggagggc

SEQ ID NO: 277283 - RNA, 20 nt, Human
uugguugagccagggccugg

SEQ ID NO: 277284 - RNA, 22 nt, Human
uggcucucaauggcuguacuau

SEQ ID NO: 277285 - RNA, 22 nt, Human
aaagaaucagaagucucaaaca

SEQ ID NO: 277286 - RNA, 22 nt, Human
aaauacauuagacggagaguua

SEQ ID NO: 277287 - RNA, 22 nt, Human
agcucagggccaggcgcguuuc

SEQ ID NO: 277288 - RNA, 22 nt, Human
ccaggcucagcuauuaagaaac

SEQ ID NO: 277289 - RNA, 22 nt, Human
cuggugagacucagggaugcuu

SEQ ID NO: 277290 - RNA, 22 nt, Human
aggacaaaggaccagaucugga

SEQ ID NO: 277291 - RNA, 22 nt, Human
ggguccagcuacaucagggugg

SEQ ID NO: 277292 - RNA, 22 nt, Human
aaguauauuuagcugagcuugu

SEQ ID NO: 277293 - RNA, 22 nt, Human
uguuuucuagaaacaaugccua

SEQ ID NO: 277294 - RNA, 22 nt, Human
uacugucuauacacuugauuac

SEQ ID NO: 277295 - RNA, 21 nt, Human
uggcucugagccucauggcug

SEQ ID NO: 277296 - RNA, 22 nt, Human
ugcccaggcuggaaugcagugg

SEQ ID NO: 277297 - RNA, 22 nt, Human
cugggaggugaacagaaaaacu

SEQ ID NO: 277298 - RNA, 17 nt, Human
acaacagaaauguauuc

SEQ ID NO: 277299 - RNA, 22 nt, Human
gacaaaugaaugaugaacacca

SEQ ID NO: 277300 - RNA, 22 nt, Human
ucuggggaugagguccagugau

SEQ ID NO: 277301 - RNA, 22 nt, Human
cuccuacauaacccagcgaacu

SEQ ID NO: 277302 - RNA, 22 nt, Human
ccugccaggacauugcuugaag

SEQ ID NO: 277303 - RNA, 22 nt, Human
aggcacagcacaccuggccccc

SEQ ID NO: 277304 - RNA, 22 nt, Human
cuuuucuggaaucaucucuaac

SEQ ID NO: 277305 - RNA, 22 nt, Human
uccugggcuuuguuucucuccu

SEQ ID NO: 277306 - RNA, 22 nt, Human
auggcuucucgcuggcaccugu

SEQ ID NO: 277307 - RNA, 19 nt, Human
aggcuucuacccuguccag

SEQ ID NO: 277308 - RNA, 22 nt, Human
cacuccagccucagugacagag

SEQ ID NO: 277309 - RNA, 22 nt, Human
ucuuauuugcaacuggcucaga

SEQ ID NO: 277310 - RNA, 22 nt, Human
cugagccaguagucagggacaa

SEQ ID NO: 277311 - RNA, 22 nt, Human
cuccugucccggggaccgccga

SEQ ID NO: 277312 - RNA, 22 nt, Human
ucaauucaauugaacaguuacu

SEQ ID NO: 277313 - RNA, 22 nt, Human
uuggcugcugggaacucaaaca

SEQ ID NO: 277314 - RNA, 22 nt, Human
agucucucuugggugugguuug

SEQ ID NO: 277315 - RNA, 22 nt, Human
ucacagacucaagggcauagga

SEQ ID NO: 277316 - RNA, 22 nt, Human
gcagagcuucuguccuucagga

SEQ ID NO: 277317 - RNA, 22 nt, Human
gaaucauuuagcucugcaugga

SEQ ID NO: 277318 - RNA, 22 nt, Human
auguuucucacuguuucucuau

SEQ ID NO: 277319 - RNA, 22 nt, Human
uucauagugauuguucagauag

SEQ ID NO: 277320 - RNA, 20 nt, Human
ccagagaguagguuagugau

SEQ ID NO: 277321 - RNA, 19 nt, Human
aacaccagagucaggaguc

SEQ ID NO: 277322 - RNA, 22 nt, Human
uuuccuugccuccuguccuucu

SEQ ID NO: 277323 - RNA, 22 nt, Human
uaugcacacauguaugcaugug

SEQ ID NO: 277324 - RNA, 22 nt, Human
ggcugaggcucaugccaucuug

SEQ ID NO: 277325 - RNA, 22 nt, Human
augugucucuaaaauuuaguaa

SEQ ID NO: 277326 - RNA, 22 nt, Human
uaagucuucauagucuaauguc

SEQ ID NO: 277327 - RNA, 22 nt, Human
gccugcugggagacacccccag

SEQ ID NO: 277328 - RNA, 22 nt, Human
cacuugaacuguuugaaugaga

SEQ ID NO: 277329 - RNA, 22 nt, Human
acaucugauuacaugagaauau

SEQ ID NO: 277330 - RNA, 22 nt, Human
agcaaguaguaccaaguagcuc

SEQ ID NO: 277331 - RNA, 22 nt, Human
uagaaacaaugacaugcuugua

SEQ ID NO: 277332 - RNA, 22 nt, Human
ggcucaggaugagccuucucau

SEQ ID NO: 277333 - RNA, 23 nt, Human
agcugagaauaaggagccguuug

SEQ ID NO: 277334 - RNA, 22 nt, Human
ccugguggcgaauggugguagg

SEQ ID NO: 277335 - RNA, 22 nt, Human
cuucagcagccucuugcauaaa

SEQ ID NO: 277336 - RNA, 22 nt, Human
auaaauagugugucauaaaguc

SEQ ID NO: 277337 - RNA, 22 nt, Human
gcccagggcugcaaguggacgc

SEQ ID NO: 277338 - RNA, 22 nt, Human
ucuggcagugauuucugugauc

SEQ ID NO: 277339 - RNA, 22 nt, Human
gaaaaggcagaguuccggggaa

SEQ ID NO: 277340 - RNA, 19 nt, Human
cauauugugcuugcauuuu

SEQ ID NO: 277341 - RNA, 22 nt, Human
cacaauauuggccgggcugguc

SEQ ID NO: 277342 - RNA, 22 nt, Human
uguaucuguaaucccagaucaa

SEQ ID NO: 277343 - RNA, 22 nt, Human
uacagcuuuagcaaauuaccua

SEQ ID NO: 277344 - RNA, 22 nt, Human
acuguggccaaagccucuggga

SEQ ID NO: 277345 - RNA, 22 nt, Human
aaggcaaaagaggugucaucac

SEQ ID NO: 277346 - RNA, 22 nt, Human
ucaaaccugcugucuuguucau

SEQ ID NO: 277347 - RNA, 22 nt, Human
ggagagcugguagcuggcucca

SEQ ID NO: 277348 - RNA, 22 nt, Human
uauacacugauauaaggaguaa

SEQ ID NO: 277349 - RNA, 23 nt, Human
aucaaaguggaaaucaauuaucu

SEQ ID NO: 277350 - RNA, 22 nt, Human
uugcuaggauucauucuauacu

SEQ ID NO: 277351 - RNA, 18 nt, Human
ccugugcuccagcaucug

SEQ ID NO: 277352 - RNA, 22 nt, Human
acagggugacuuugugacagau

SEQ ID NO: 277353 - RNA, 22 nt, Human
ucugaaagcauaauuuguccca

SEQ ID NO: 277354 - RNA, 22 nt, Human
uggcagaaugaagacuggggcc

SEQ ID NO: 277355 - RNA, 22 nt, Human
cauuaucugagaguguccuaca

SEQ ID NO: 277356 - RNA, 22 nt, Human
gucuucaauagagccucaauuu

SEQ ID NO: 277357 - RNA, 22 nt, Human
ccaggcacuuguuugccaggca

SEQ ID NO: 277358 - RNA, 23 nt, Human
ucagaacaaugccuuaggggcau

SEQ ID NO: 277359 - RNA, 22 nt, Human
agucugagguaauauuuuucuc

SEQ ID NO: 277360 - RNA, 20 nt, Human
auucuaaagcucugcucuuu

SEQ ID NO: 277361 - RNA, 22 nt, Human
guauaucuucagaaauuauagg

SEQ ID NO: 277362 - RNA, 22 nt, Human
uugcagacauuccagagcuuuu

SEQ ID NO: 277363 - RNA, 22 nt, Human
uugcaaggugauaaaagaauga

SEQ ID NO: 277364 - RNA, 21 nt, Human
uggcugccuacaugcugcagg

SEQ ID NO: 277365 - RNA, 22 nt, Human
auaauuuaauuuucacaguggu

SEQ ID NO: 277366 - RNA, 22 nt, Human
gcagcuggucuggccuagagua

SEQ ID NO: 277367 - RNA, 22 nt, Human
auauacuuccccauuauggggg

SEQ ID NO: 277368 - RNA, 22 nt, Human
ucauaaaaauagacucuaaagu

SEQ ID NO: 277369 - RNA, 22 nt, Human
uggaaacuaagacuagagagac

SEQ ID NO: 277370 - RNA, 18 nt, Human
ugaggcucagcuccuggu

SEQ ID NO: 277371 - RNA, 22 nt, Human
ucugccaguauucacggcccgu

SEQ ID NO: 277372 - RNA, 22 nt, Human
auguacaaaauguuuugaaaug

SEQ ID NO: 277373 - RNA, 22 nt, Human
uacaacacuguucagccucuuc

SEQ ID NO: 277374 - RNA, 22 nt, Human
uuuagagaguguaaaaauauau

SEQ ID NO: 277375 - RNA, 22 nt, Human
ucaguaaauaacucagaugcuc

SEQ ID NO: 277376 - RNA, 19 nt, Human
ugguccagcuucuucuccu

SEQ ID NO: 277377 - RNA, 22 nt, Human
ugggacagguuggagagaagca

SEQ ID NO: 277378 - RNA, 22 nt, Human
gcaggccacaguggagucucug

SEQ ID NO: 277379 - RNA, 22 nt, Human
gaggggcaagaaguuggccucu

SEQ ID NO: 277380 - RNA, 22 nt, Human
cugauaauguccugcaguaaau

SEQ ID NO: 277381 - RNA, 20 nt, Human
accugggauuagauacccaa

SEQ ID NO: 277382 - RNA, 20 nt, Human
cuccugggacugcugguuau

SEQ ID NO: 277383 - RNA, 22 nt, Human
uuaggaagaaggaggcaguauu

SEQ ID NO: 277384 - RNA, 22 nt, Human
ugccucccucucugccacugga

SEQ ID NO: 277385 - RNA, 22 nt, Human
ugagauaauuaaaucaaaaccu

SEQ ID NO: 277386 - RNA, 23 nt, Human
agcuuugugaaagcagacauggg

SEQ ID NO: 277387 - RNA, 22 nt, Human
aagcccuggauuaaagaugcca

SEQ ID NO: 277388 - RNA, 22 nt, Human
uguccagggauggggucaggga

SEQ ID NO: 277389 - RNA, 22 nt, Human
agcagccaguucucugugguag

SEQ ID NO: 277390 - RNA, 22 nt, Human
guaacaaaguuucuaggugcug

SEQ ID NO: 277391 - RNA, 22 nt, Human
uuucaaagucaagaaggauacu

SEQ ID NO: 277392 - RNA, 22 nt, Human
ggugcugggaacgaggaauuca

SEQ ID NO: 277393 - RNA, 22 nt, Human
gcuccugggcccugggcuaacu

SEQ ID NO: 277394 - RNA, 22 nt, Human
caucagugagccccuugaugag

SEQ ID NO: 277395 - RNA, 18 nt, Human
uguaaacacuuucauucu

SEQ ID NO: 277396 - RNA, 22 nt, Human
ccugcucuagacucugggaagg

SEQ ID NO: 277397 - RNA, 23 nt, Human
augguuuauguuguugugaagca

SEQ ID NO: 277398 - RNA, 22 nt, Human
aagcagaaaaacugagcuccaa

SEQ ID NO: 277399 - RNA, 22 nt, Human
ucugaagauggaggaacuuaga

SEQ ID NO: 277400 - RNA, 22 nt, Human
ugagcagauggaggcuucugca

SEQ ID NO: 277401 - RNA, 22 nt, Human
ucagggcacauucugcaguggc

SEQ ID NO: 277402 - RNA, 22 nt, Human
gcagaggacacaggagggcaag

SEQ ID NO: 277403 - RNA, 22 nt, Human
gcaguguuacuuggaguacuaa

SEQ ID NO: 277404 - RNA, 22 nt, Human
cucucuggaagggggagcugau

SEQ ID NO: 277405 - RNA, 22 nt, Human
gagcuuggacaagcucugaagg

SEQ ID NO: 277406 - RNA, 22 nt, Human
guuuccuacacuguaguauuau

SEQ ID NO: 277407 - RNA, 22 nt, Human
uccagagagguuucuccaugcu

SEQ ID NO: 277408 - RNA, 22 nt, Human
caacacagggguuaugccaugg

SEQ ID NO: 277409 - RNA, 22 nt, Human
uaucuuuaacuugcaguauuua

SEQ ID NO: 277410 - RNA, 22 nt, Human
ugagauuuuaauauugagaaaa

SEQ ID NO: 277411 - RNA, 22 nt, Human
gucuucuuguuuugaaggaaau

SEQ ID NO: 277412 - RNA, 22 nt, Human
cccugcagcauucucuaacugg

SEQ ID NO: 277413 - RNA, 22 nt, Human
ucauagaaugaguuaaugaacu

SEQ ID NO: 277414 - RNA, 22 nt, Human
acaggcucaguucacuggauuu

SEQ ID NO: 277415 - RNA, 22 nt, Human
aucucuguaauuacaugauauu

SEQ ID NO: 277416 - RNA, 22 nt, Human
uagaaagcugaguaauacauuu

SEQ ID NO: 277417 - RNA, 22 nt, Human
gcagggcaaauguggaaaggag

SEQ ID NO: 277418 - RNA, 22 nt, Human
aauauuucaaaaggaaacacag

SEQ ID NO: 277419 - RNA, 22 nt, Human
auuacuaugauuugaucauuac

SEQ ID NO: 277420 - RNA, 22 nt, Human
uaaaauguuugcaagagaccag

SEQ ID NO: 277421 - RNA, 22 nt, Human
gcugccuccgccggcuccacag

SEQ ID NO: 277422 - RNA, 22 nt, Human
gcaaauguuuuugaguguuuac

SEQ ID NO: 277423 - RNA, 22 nt, Human
gcauucuucgaaguaaguagug

SEQ ID NO: 277424 - RNA, 22 nt, Human
ugacagggagguggaauaagua

SEQ ID NO: 277425 - RNA, 22 nt, Human
ugcucagcuggugccagggucc

SEQ ID NO: 277426 - RNA, 22 nt, Human
ucccaggcuggcaggcagcagu

SEQ ID NO: 277427 - RNA, 22 nt, Human
gaaaaugugucaucccuacugu

SEQ ID NO: 277428 - RNA, 22 nt, Human
cuggcugggguccauccucuaa

SEQ ID NO: 277429 - RNA, 22 nt, Human
cugcugcugagaaugccucagg

SEQ ID NO: 277430 - RNA, 19 nt, Human
ugggcagcucccucugucc

SEQ ID NO: 277431 - RNA, 22 nt, Human
guuuauugauaaaagcuggaca

SEQ ID NO: 277432 - RNA, 22 nt, Human
uuauucagggauaacauccagg

SEQ ID NO: 277433 - RNA, 23 nt, Human
ucccucaggccuuaucuccaucu

SEQ ID NO: 277434 - RNA, 22 nt, Human
ggaagaguaacaggagguggaa

SEQ ID NO: 277435 - RNA, 22 nt, Human
aguaaacaguuucuuagaagaa

SEQ ID NO: 277436 - RNA, 22 nt, Human
ccaggaggcagagguuguagug

SEQ ID NO: 277437 - RNA, 22 nt, Human
aguuuucacacucaccaaaagg

SEQ ID NO: 277438 - RNA, 22 nt, Human
augcauauguacccauguucug

SEQ ID NO: 277439 - RNA, 22 nt, Human
uugaggcacagauuuuaguggc

SEQ ID NO: 277440 - RNA, 22 nt, Human
ugcugggccuuuaccuccaggg

SEQ ID NO: 277441 - RNA, 22 nt, Human
ucucagaggugcccuggcaucu

SEQ ID NO: 277442 - RNA, 22 nt, Human
aaucuggagagucaucucugac

SEQ ID NO: 277443 - RNA, 22 nt, Human
gucccaggggagcucucugauu

SEQ ID NO: 277444 - RNA, 20 nt, Human
ugcagggcucugcuucucuc

SEQ ID NO: 277445 - RNA, 22 nt, Human
caugaaacaucagagauuucuc

SEQ ID NO: 277446 - RNA, 18 nt, Human
acagggagggcgcugggg

SEQ ID NO: 277447 - RNA, 22 nt, Human
uaacagaaauauuuccagguga

SEQ ID NO: 277448 - RNA, 22 nt, Human
agauauaauaauuuacaagugu

SEQ ID NO: 277449 - RNA, 22 nt, Human
augaauacgcggucauacacau

SEQ ID NO: 277450 - RNA, 22 nt, Human
ucccagcagggccgaccagccu

SEQ ID NO: 277451 - RNA, 22 nt, Human
uccuggagccaaugugcugcug

SEQ ID NO: 277452 - RNA, 22 nt, Human
ugugaauagauugaagcuuugg

SEQ ID NO: 277453 - RNA, 22 nt, Human
uucuaagucacucagauuuugg

SEQ ID NO: 277454 - RNA, 22 nt, Human
cuaauauuuuuagaaaucacga

SEQ ID NO: 277455 - RNA, 22 nt, Human
agggacagucuacuguucacug

SEQ ID NO: 277456 - RNA, 22 nt, Human
gcuggcacuugggacaaaaucu

SEQ ID NO: 277457 - RNA, 22 nt, Human
ugcuggcuuuaagguuaaagug

SEQ ID NO: 277458 - RNA, 22 nt, Human
aucugcuggcaucucuagccca

SEQ ID NO: 277459 - RNA, 22 nt, Human
aacaguaucuuuuaucagaaau

SEQ ID NO: 277460 - RNA, 19 nt, Human
uauucaggaugauggcaca

SEQ ID NO: 277461 - RNA, 22 nt, Human
acaucacagagcccagauaaag

SEQ ID NO: 277462 - RNA, 22 nt, Human
uuauacccuccauaccuggccu

SEQ ID NO: 277463 - RNA, 22 nt, Human
uccaggagguugagacugcagu

SEQ ID NO: 277464 - RNA, 22 nt, Human
ucaguguccuucguucuuguug

SEQ ID NO: 277465 - RNA, 22 nt, Human
aauagcauguuaauaaccagag

SEQ ID NO: 277466 - RNA, 22 nt, Human
aauugcuugaugacuaguaauu

SEQ ID NO: 277467 - RNA, 20 nt, Human
cccagcccgggccgcgcucg

SEQ ID NO: 277468 - RNA, 22 nt, Human
ccuggguccuggcagccuccug

SEQ ID NO: 277469 - RNA, 22 nt, Human
gggagcugagcuggaagagaau

SEQ ID NO: 277470 - RNA, 17 nt, Human
uuacagcagcaauagag

SEQ ID NO: 277471 - RNA, 22 nt, Human
gugagucugugggugggaacug

SEQ ID NO: 277472 - RNA, 22 nt, Human
aggguccuaagccucagauaag

SEQ ID NO: 277473 - RNA, 18 nt, Human
ccauuucaugauuauuac

SEQ ID NO: 277474 - RNA, 23 nt, Human
aaggugucauugaugggauucua

SEQ ID NO: 277475 - RNA, 22 nt, Human
ggugacaucuagagacauccaa

SEQ ID NO: 277476 - RNA, 22 nt, Human
uuugcagaguaccugaagagga

SEQ ID NO: 277477 - RNA, 22 nt, Human
ggcccugcucaggcugcgauga

SEQ ID NO: 277478 - RNA, 18 nt, Human
caaauacuguugucuuau

SEQ ID NO: 277479 - RNA, 22 nt, Human
uuccauauucccaauuuugcca

SEQ ID NO: 277480 - RNA, 22 nt, Human
uccagccacguauuaucucacu

SEQ ID NO: 277481 - RNA, 22 nt, Human
ugugacccccgucacggcugcu

SEQ ID NO: 277482 - RNA, 22 nt, Human
uagaucuuguuacagauuuccu

SEQ ID NO: 277483 - RNA, 22 nt, Human
uagaaagagcauaguauuauaa

SEQ ID NO: 277484 - RNA, 23 nt, Human
gcccaugcuguugggcccgagca

SEQ ID NO: 277485 - RNA, 22 nt, Human
uucagaaaugaauauugguauu

SEQ ID NO: 277486 - RNA, 22 nt, Human
guuguaaguuuaaugucaauug

SEQ ID NO: 277487 - RNA, 22 nt, Human
acucuacuguaguaugggcacu

SEQ ID NO: 277488 - RNA, 22 nt, Human
gcuguggaguacagagcugguu

SEQ ID NO: 277489 - RNA, 21 nt, Human
ugggugggcagagucucuuca

SEQ ID NO: 277490 - RNA, 22 nt, Human
aggaaacuggguaugguuauac

SEQ ID NO: 277491 - RNA, 22 nt, Human
auacuuuggucacuauuauugg

SEQ ID NO: 277492 - RNA, 22 nt, Human
ucuggaauuaaacucaggagac

SEQ ID NO: 277493 - RNA, 22 nt, Human
ugucaguuaccuagcacaagaa

SEQ ID NO: 277494 - RNA, 22 nt, Human
uggugaggccaaagccaugaca

SEQ ID NO: 277495 - RNA, 22 nt, Human
gccaggcaauguguuagaagcg

SEQ ID NO: 277496 - RNA, 22 nt, Human
ggguguccagggcgugucugga

SEQ ID NO: 277497 - RNA, 22 nt, Human
uggcugaguucuccaggaguag

SEQ ID NO: 277498 - RNA, 22 nt, Human
uuccuggcacugcagugguuga

SEQ ID NO: 277499 - RNA, 21 nt, Human
agccugaaucccaccaguuca

SEQ ID NO: 277500 - RNA, 21 nt, Human
acucugucuugagccaucugu

SEQ ID NO: 277501 - RNA, 22 nt, Human
auucugggugacuacgugauca

SEQ ID NO: 277502 - RNA, 18 nt, Human
uccaccagucaaucuguc

SEQ ID NO: 277503 - RNA, 22 nt, Human
cuccugggggacagcggcaggg

SEQ ID NO: 277504 - RNA, 22 nt, Human
ugcugggucccuugagagcuca

SEQ ID NO: 277505 - RNA, 22 nt, Human
augccuuaaggcgagauacuua

SEQ ID NO: 277506 - RNA, 17 nt, Human
cugggccucugcccuuu

SEQ ID NO: 277507 - RNA, 22 nt, Human
ugcugucugcaacaguacuaca

SEQ ID NO: 277508 - RNA, 22 nt, Human
uugagucugcaauacauaacac

SEQ ID NO: 277509 - RNA, 22 nt, Human
gccuucccaagacgccugaguu

SEQ ID NO: 277510 - RNA, 22 nt, Human
aaaggcuucggaucagaaggua

SEQ ID NO: 277511 - RNA, 21 nt, Human
cucagggcuugguguccucau

SEQ ID NO: 277512 - RNA, 22 nt, Human
cagacaggaaguucagaagaaa

SEQ ID NO: 277513 - RNA, 22 nt, Human
gggggcaguaaggauauggaaa

SEQ ID NO: 277514 - RNA, 21 nt, Human
acauacauuaucuuuuuaaaa

SEQ ID NO: 277515 - RNA, 17 nt, Human
gacaggcucagugacga

SEQ ID NO: 277516 - RNA, 22 nt, Human
acacauuuucuaacagggauca

SEQ ID NO: 277517 - RNA, 22 nt, Human
agugcuggaaagggacggagga

SEQ ID NO: 277518 - RNA, 22 nt, Human
aaagcugcccuugugaaacaag

SEQ ID NO: 277519 - RNA, 22 nt, Human
auauacacauguguauacauuu

SEQ ID NO: 277520 - RNA, 22 nt, Human
ggcucuggucagugaggggccu

SEQ ID NO: 277521 - RNA, 22 nt, Human
uuccuguguguugguggcagaa

SEQ ID NO: 277522 - RNA, 22 nt, Human
uccaaagccgacugacaucuga

SEQ ID NO: 277523 - RNA, 22 nt, Human
uucaauucuaaacuaauauucu

SEQ ID NO: 277524 - RNA, 22 nt, Human
ggugcugacugaggauggcuug

SEQ ID NO: 277525 - RNA, 22 nt, Human
uucuacacaccucugaggacau

SEQ ID NO: 277526 - RNA, 22 nt, Human
ccugugacgugucuccuggcac

SEQ ID NO: 277527 - RNA, 22 nt, Human
caagggcucacggucugcuggg

SEQ ID NO: 277528 - RNA, 22 nt, Human
acacauuuuggcuagguggaga

SEQ ID NO: 277529 - RNA, 19 nt, Human
gauagcugaugaccaucau

SEQ ID NO: 277530 - RNA, 22 nt, Human
gcuaacauugauucagugccug

SEQ ID NO: 277531 - RNA, 22 nt, Human
augauucuuuuggauagaugau

SEQ ID NO: 277532 - RNA, 22 nt, Human
uuacauucauugaagugauuca

SEQ ID NO: 277533 - RNA, 22 nt, Human
ugucacaugaagccaacauagc

SEQ ID NO: 277534 - RNA, 22 nt, Human
ucucccucuuugucugcuuugg

SEQ ID NO: 277535 - RNA, 22 nt, Human
cugcccuggaaaacguaucuua

SEQ ID NO: 277536 - RNA, 22 nt, Human
agacccuggggaaagucacuuc

SEQ ID NO: 277537 - RNA, 22 nt, Human
aagucucugauguguguuaggu

SEQ ID NO: 277538 - RNA, 22 nt, Human
acagcuguauccccagagcuca

SEQ ID NO: 277539 - RNA, 22 nt, Human
augaaaugcugagaggugcuuc

SEQ ID NO: 277540 - RNA, 22 nt, Human
aacuuucucuggauggcuuccu

SEQ ID NO: 277541 - RNA, 22 nt, Human
gucaggacucugacccgucccg

SEQ ID NO: 277542 - RNA, 22 nt, Human
cagaggcuagacugugcuuccu

SEQ ID NO: 277543 - RNA, 22 nt, Human
cauacauuaccuaacuuaaugc

SEQ ID NO: 277544 - RNA, 22 nt, Human
uggcagagcccagaacugagca

SEQ ID NO: 277545 - RNA, 22 nt, Human
ggaaggcucgaggaugcuucug

SEQ ID NO: 277546 - RNA, 22 nt, Human
uugaacaaucaaaagaauucau

SEQ ID NO: 277547 - RNA, 22 nt, Human
uguuuuaaucucccauugcucu

SEQ ID NO: 277548 - RNA, 22 nt, Human
gcagggcucagccgcucccacc

SEQ ID NO: 277549 - RNA, 22 nt, Human
ucugaauucuuagaauuaaagg

SEQ ID NO: 277550 - RNA, 22 nt, Human
gaggccuggguuggaggugcau

SEQ ID NO: 277551 - RNA, 22 nt, Human
ugcuagggauacaguggugaau

SEQ ID NO: 277552 - RNA, 22 nt, Human
ggcagagacuggguuggcagag

SEQ ID NO: 277553 - RNA, 22 nt, Human
acagguguaugaauauguucca

SEQ ID NO: 277554 - RNA, 22 nt, Human
ccacaucucgguccccucuuug

SEQ ID NO: 277555 - RNA, 22 nt, Human
aacauugcugaaagcugggaca

SEQ ID NO: 277556 - RNA, 22 nt, Human
acagccuuuaaccauuucuucc

SEQ ID NO: 277557 - RNA, 22 nt, Human
uucucuuugacauuauucaggu

SEQ ID NO: 277558 - RNA, 22 nt, Human
uguuuuaugagccauauaaccu

SEQ ID NO: 277559 - RNA, 22 nt, Human
ucuuagcagacuuggcuacugu

SEQ ID NO: 277560 - RNA, 22 nt, Human
agaagaugucacugcagacagc

SEQ ID NO: 277561 - RNA, 22 nt, Human
guaauuacauuaggguaaauaa

SEQ ID NO: 277562 - RNA, 22 nt, Human
ugggaagguuagcaguuuguca

SEQ ID NO: 277563 - RNA, 22 nt, Human
cugaggucagaguuuagucugg

SEQ ID NO: 277564 - RNA, 22 nt, Human
gcuuucugguuugugcuacagg

SEQ ID NO: 277565 - RNA, 22 nt, Human
aggucaaaaugcuuuucagguc

SEQ ID NO: 277566 - RNA, 21 nt, Human
gcaggguccuuuccauuccua

SEQ ID NO: 277567 - RNA, 22 nt, Human
aaagcacauaguagaaggauuu

SEQ ID NO: 277568 - RNA, 22 nt, Human
acaguaauugugaacuuaacgu

SEQ ID NO: 277569 - RNA, 22 nt, Human
uacaugugcacgugugacuuug

SEQ ID NO: 277570 - RNA, 22 nt, Human
augcacaguaaugagcugguug

SEQ ID NO: 277571 - RNA, 22 nt, Human
cagcugucacuucuaaguuuug

SEQ ID NO: 277572 - RNA, 22 nt, Human
accagcuguuaucuguaguauc

SEQ ID NO: 277573 - RNA, 22 nt, Human
auguccagaguguccuggaaag

SEQ ID NO: 277574 - RNA, 22 nt, Human
ccagcuuuuggggugacaauuu

SEQ ID NO: 277575 - RNA, 22 nt, Human
gcugucuuggaaaaggcaaaga

SEQ ID NO: 277576 - RNA, 22 nt, Human
agagagggcauagaaaaaggga

SEQ ID NO: 277577 - RNA, 21 nt, Human
auucaacuagaugauuauuuc

SEQ ID NO: 277578 - RNA, 22 nt, Human
aaagagaaaaugaucuguacau

SEQ ID NO: 277579 - RNA, 22 nt, Human
uacuuucuagcucuccccaguu

SEQ ID NO: 277580 - RNA, 22 nt, Human
auauuaggcaaggagauuauuu

SEQ ID NO: 277581 - RNA, 22 nt, Human
ugcugagggagcaucaaagaaa

SEQ ID NO: 277582 - RNA, 22 nt, Human
ucucuucugaaaccugucuuua

SEQ ID NO: 277583 - RNA, 22 nt, Human
agcagggcucugccaugggccc

SEQ ID NO: 277584 - RNA, 22 nt, Human
ucaaaugcucuuugcagagagg

SEQ ID NO: 277585 - RNA, 22 nt, Human
accagaggcucugccaccucca

SEQ ID NO: 277586 - RNA, 23 nt, Human
ucacacagcuggucagguacaga

SEQ ID NO: 277587 - RNA, 22 nt, Human
gcauucagccuaaagagaaaag

SEQ ID NO: 277588 - RNA, 22 nt, Human
agcuuugguugaggggagugug

SEQ ID NO: 277589 - RNA, 22 nt, Human
uuguacuaucaccaugucaugu

SEQ ID NO: 277590 - RNA, 23 nt, Human
uaguuacauuauugucagagcug

SEQ ID NO: 277591 - RNA, 22 nt, Human
acaggaugauaaaggauggcca

SEQ ID NO: 277592 - RNA, 22 nt, Human
cacaggagaaaggggaagcucg

SEQ ID NO: 277593 - RNA, 21 nt, Human
cucugguccugucuggcaggc

SEQ ID NO: 277594 - RNA, 22 nt, Human
agaggacagguuuuccaugggc

SEQ ID NO: 277595 - RNA, 22 nt, Human
ucagauuuuauuuuccuguuac

SEQ ID NO: 277596 - RNA, 22 nt, Human
gcugagcagguuugaugcuuuu

SEQ ID NO: 277597 - RNA, 22 nt, Human
caucacuacaaauuuaagaaau

SEQ ID NO: 277598 - RNA, 22 nt, Human
acugaauagugcugcauuguac

SEQ ID NO: 277599 - RNA, 22 nt, Human
uuauugacugaucagagaggga

SEQ ID NO: 277600 - RNA, 21 nt, Human
ugacauuuggauucauaguaa

SEQ ID NO: 277601 - RNA, 22 nt, Human
ucugcccaggaggucccauggg

SEQ ID NO: 277602 - RNA, 22 nt, Human
aggcuggaguguagcagugcag

SEQ ID NO: 277603 - RNA, 22 nt, Human
cuggauuaaguaaaauagagga

SEQ ID NO: 277604 - RNA, 23 nt, Human
uggcagauacaggcaugacuucu

SEQ ID NO: 277605 - RNA, 22 nt, Human
gggcugagugaccucaggccaa

SEQ ID NO: 277606 - RNA, 22 nt, Human
ucaccuugugaucucccugccu

SEQ ID NO: 277607 - RNA, 22 nt, Human
auagauuugaauuuaagacuug

SEQ ID NO: 277608 - RNA, 22 nt, Human
aacaugaaaguugcuaagugca

SEQ ID NO: 277609 - RNA, 22 nt, Human
aaaggacucagacugaagggag

SEQ ID NO: 277610 - RNA, 22 nt, Human
uggaaucucugguaucugggga

SEQ ID NO: 277611 - RNA, 20 nt, Human
gagccugggaagucuaaggu

SEQ ID NO: 277612 - RNA, 22 nt, Human
cuggcugccuauagucucccuu

SEQ ID NO: 277613 - RNA, 22 nt, Human
uaguccaggacaaucuucauau

SEQ ID NO: 277614 - RNA, 22 nt, Human
uccccagggucccugcuuccau

SEQ ID NO: 277615 - RNA, 22 nt, Human
agcagugugcuucguuucauga

SEQ ID NO: 277616 - RNA, 22 nt, Human
agacuguagggauagaggucuu

SEQ ID NO: 277617 - RNA, 22 nt, Human
cagguuggucggcaaguacaca

SEQ ID NO: 277618 - RNA, 22 nt, Human
ugcugggcuggggccucagacc

SEQ ID NO: 277619 - RNA, 22 nt, Human
acagggagaugggugaaagcgg

SEQ ID NO: 277620 - RNA, 22 nt, Human
uggcagguuaacuuacaacugu

SEQ ID NO: 277621 - RNA, 22 nt, Human
guacacauauauuaaaaauugu

SEQ ID NO: 277622 - RNA, 22 nt, Human
uggccacaguguccagcagcag

SEQ ID NO: 277623 - RNA, 22 nt, Human
ugauuuucuccauuguaaauuc

SEQ ID NO: 277624 - RNA, 22 nt, Human
cucugcuacuguuaaaccauuu

SEQ ID NO: 277625 - RNA, 22 nt, Human
uggcaugaauuuagcuuuccau

SEQ ID NO: 277626 - RNA, 22 nt, Human
gagcacagaacuaaaugcuggu

SEQ ID NO: 277627 - RNA, 22 nt, Human
gaagcagucagcagcaccuuug

SEQ ID NO: 277628 - RNA, 22 nt, Human
cuggcugugcugacugagaggg

SEQ ID NO: 277629 - RNA, 22 nt, Human
augcugaagaaucacagggacu

SEQ ID NO: 277630 - RNA, 22 nt, Human
aggugccuaucuggucucugca

SEQ ID NO: 277631 - RNA, 20 nt, Human
uggcaggagccacuggaagc

SEQ ID NO: 277632 - RNA, 22 nt, Human
uguauguaaaguuuguaauaga

SEQ ID NO: 277633 - RNA, 20 nt, Human
agcaagaguaaggacagcga

SEQ ID NO: 277634 - RNA, 22 nt, Human
ccagaggacuugggggcugaau

SEQ ID NO: 277635 - RNA, 22 nt, Human
aacagauaaguauaucuaugua

SEQ ID NO: 277636 - RNA, 22 nt, Human
gccccagccuaguuuucuuuca

SEQ ID NO: 277637 - RNA, 23 nt, Human
ccugacccugucucccucacaug

SEQ ID NO: 277638 - RNA, 22 nt, Human
ccaggcugcuuagccuuaucuu

SEQ ID NO: 277639 - RNA, 22 nt, Human
gcaggacaggcguugguccagu

SEQ ID NO: 277640 - RNA, 22 nt, Human
aguggggaagagcaugggcccu

SEQ ID NO: 277641 - RNA, 22 nt, Human
ccucucucuuguagucccugcc

SEQ ID NO: 277642 - RNA, 22 nt, Human
ccuggcacaucuaacucacucu

SEQ ID NO: 277643 - RNA, 22 nt, Human
gcucaaaggccagguagcagca

SEQ ID NO: 277644 - RNA, 22 nt, Human
ugcuggaggggaugccuucacu

SEQ ID NO: 277645 - RNA, 22 nt, Human
uuugcaaaccggagcucugcaa

SEQ ID NO: 277646 - RNA, 23 nt, Human
agacaaaagccucagucuuaggc

SEQ ID NO: 277647 - RNA, 22 nt, Human
aagugcuuucauauagucuuaa

SEQ ID NO: 277648 - RNA, 22 nt, Human
caucuuugccauaugauguaau

SEQ ID NO: 277649 - RNA, 18 nt, Human
agaggaugcaucuaagag

SEQ ID NO: 277650 - RNA, 22 nt, Human
cagggcugcuggccgugcccuc

SEQ ID NO: 277651 - RNA, 22 nt, Human
cuuacaggaaagaagaaagcau

SEQ ID NO: 277652 - RNA, 22 nt, Human
accucuguauaguugccugugg

SEQ ID NO: 277653 - RNA, 19 nt, Human
caggaaacaccuacugcua

SEQ ID NO: 277654 - RNA, 22 nt, Human
uuuccaaagcugaguugagcaa

SEQ ID NO: 277655 - RNA, 22 nt, Human
aggcuucugagcauggaguuuu

SEQ ID NO: 277656 - RNA, 23 nt, Human
ugagucuacucaccacaacuggg

SEQ ID NO: 277657 - RNA, 17 nt, Human
aaggagcugagagaugg

SEQ ID NO: 277658 - RNA, 22 nt, Human
uggcauuucaguauuuucauaa

SEQ ID NO: 277659 - RNA, 22 nt, Human
uagaaagaucuguaggcaagag

SEQ ID NO: 277660 - RNA, 22 nt, Human
auaguuuucuaugcacuguuau

SEQ ID NO: 277661 - RNA, 22 nt, Human
auccuguggggcggcugcaggg

SEQ ID NO: 277662 - RNA, 22 nt, Human
guccucugagggggcugcacgc

SEQ ID NO: 277663 - RNA, 22 nt, Human
cagcagagcauuugguaggagg

SEQ ID NO: 277664 - RNA, 17 nt, Human
aggcuggcucacaggga

SEQ ID NO: 277665 - RNA, 22 nt, Human
ugcucuauuaauuuuaacgaug

SEQ ID NO: 277666 - RNA, 22 nt, Human
agccaggauuggcugagccuua

SEQ ID NO: 277667 - RNA, 22 nt, Human
ggaggccaaggcagguggaucg

SEQ ID NO: 277668 - RNA, 22 nt, Human
acuguagagaaucugagaaaaa

SEQ ID NO: 277669 - RNA, 22 nt, Human
ggcugcaagacaagguugguuu

SEQ ID NO: 277670 - RNA, 22 nt, Human
ccagcccugaacccugcugcau

SEQ ID NO: 277671 - RNA, 21 nt, Human
uuucccagcagagauagcugg

SEQ ID NO: 277672 - RNA, 22 nt, Human
aggcugagccacggggcuggcu

SEQ ID NO: 277673 - RNA, 22 nt, Human
gucagagcccuucccugauuuu

SEQ ID NO: 277674 - RNA, 22 nt, Human
agugggggccaacgagggcagc

SEQ ID NO: 277675 - RNA, 22 nt, Human
acacaaauuguaggauaauugc

SEQ ID NO: 277676 - RNA, 22 nt, Human
ccugggaggcagagguugcagu

SEQ ID NO: 277677 - RNA, 22 nt, Human
ggcuuauguuugucaagcaauc

SEQ ID NO: 277678 - RNA, 22 nt, Human
ccccuuccaggaagcagaaucg

SEQ ID NO: 277679 - RNA, 22 nt, Human
gaggguggcuccucccugggcc

SEQ ID NO: 277680 - RNA, 23 nt, Human
aaccuagacuacuuacuaugugg

SEQ ID NO: 277681 - RNA, 22 nt, Human
uuuacagaugaggaaacugaga

SEQ ID NO: 277682 - RNA, 22 nt, Human
aagucauguggaagaauaaccu

SEQ ID NO: 277683 - RNA, 22 nt, Human
guuuuuucaugaguaguuaucu

SEQ ID NO: 277684 - RNA, 21 nt, Human
ccugggcugugguuuggagac

SEQ ID NO: 277685 - RNA, 21 nt, Human
caaaaggauaggaaauuaggg

SEQ ID NO: 277686 - RNA, 22 nt, Human
guccugggaacuggacagcuaa

SEQ ID NO: 277687 - RNA, 22 nt, Human
auuuauugguuugcauggugaa

SEQ ID NO: 277688 - RNA, 23 nt, Human
ucuuuucaaugguucuuuaugug

SEQ ID NO: 277689 - RNA, 16 nt, Human
ugaggucuuauuagca

SEQ ID NO: 277690 - RNA, 22 nt, Human
agggagacacaugaggaaguca

SEQ ID NO: 277691 - RNA, 22 nt, Human
caggcugcggucggcucugguc

SEQ ID NO: 277692 - RNA, 22 nt, Human
cucagcuaguaacguacauguc

SEQ ID NO: 277693 - RNA, 22 nt, Human
uccauauacaacuuaaucuuua

SEQ ID NO: 277694 - RNA, 22 nt, Human
acccauacacacauauuuaugu

SEQ ID NO: 277695 - RNA, 22 nt, Human
acauuucuuccuaauuaucccu

SEQ ID NO: 277696 - RNA, 22 nt, Human
ggagauggcuggcagguagaug

SEQ ID NO: 277697 - RNA, 22 nt, Human
uugcaacauuguaaguuuauau

SEQ ID NO: 277698 - RNA, 22 nt, Human
acaugacacaggccuggccaau

SEQ ID NO: 277699 - RNA, 22 nt, Human
auguuuguguuucccauucagg

SEQ ID NO: 277700 - RNA, 22 nt, Human
uggcagaguaggauggcccugu

SEQ ID NO: 277701 - RNA, 22 nt, Human
uguuuacuucaucgaguacuuc

SEQ ID NO: 277702 - RNA, 22 nt, Human
gucaggcuggggcugcugccag

SEQ ID NO: 277703 - RNA, 22 nt, Human
ucuguuuuguaccagauacagc

SEQ ID NO: 277704 - RNA, 22 nt, Human
gccgugcgugcgcaggugcugu

SEQ ID NO: 277705 - RNA, 22 nt, Human
ucugaaaauguugacuuuguuu

SEQ ID NO: 277706 - RNA, 22 nt, Human
aggaauguauugaccuguugca

SEQ ID NO: 277707 - RNA, 23 nt, Human
gggaccugguaggaggugauugg

SEQ ID NO: 277708 - RNA, 22 nt, Human
acucccuccaaaucugcacagu

SEQ ID NO: 277709 - RNA, 22 nt, Human
uccugcagagucccacugauuu

SEQ ID NO: 277710 - RNA, 22 nt, Human
ggaugcugacuuuggagcaugg

SEQ ID NO: 277711 - RNA, 22 nt, Human
ggcccagagacgugcaauguac

SEQ ID NO: 277712 - RNA, 22 nt, Human
ucuuccucuucugcugagaagu

SEQ ID NO: 277713 - RNA, 22 nt, Human
cuuauguauaauguuccacaua

SEQ ID NO: 277714 - RNA, 22 nt, Human
aaggcuggcaauauauuuguua

SEQ ID NO: 277715 - RNA, 22 nt, Human
auauuuucacagaacuugcaaa

SEQ ID NO: 277716 - RNA, 21 nt, Human
gugcaugcgccgcugagaugc

SEQ ID NO: 277717 - RNA, 22 nt, Human
gccuggagggcucuagagaggc

SEQ ID NO: 277718 - RNA, 16 nt, Human
guaaaggcagggaauu

SEQ ID NO: 277719 - RNA, 22 nt, Human
gacagagaggcugagcaguaca

SEQ ID NO: 277720 - RNA, 20 nt, Human
agcugcaacagacuguaugg

SEQ ID NO: 277721 - RNA, 22 nt, Human
cugcccaggaaccagaggggca

SEQ ID NO: 277722 - RNA, 21 nt, Human
ugcacagggcccaggagagcc

SEQ ID NO: 277723 - RNA, 22 nt, Human
guggauggagcuggaagccauu

SEQ ID NO: 277724 - RNA, 22 nt, Human
gugagcuucugacagaugcacc

SEQ ID NO: 277725 - RNA, 20 nt, Human
aggcuggcacuccuggccag

SEQ ID NO: 277726 - RNA, 22 nt, Human
cuguggcuuuggggcggaggac

SEQ ID NO: 277727 - RNA, 22 nt, Human
aacaguuacccuuaagaucuuu

SEQ ID NO: 277728 - RNA, 22 nt, Human
ggaaggcuugaguucccagguc

SEQ ID NO: 277729 - RNA, 22 nt, Human
auucucugaagucuuucagggc

SEQ ID NO: 277730 - RNA, 22 nt, Human
guccagccacucaccuuccagc

SEQ ID NO: 277731 - RNA, 22 nt, Human
cuucuggaggacacuggcccca

SEQ ID NO: 277732 - RNA, 22 nt, Human
gcagcagugcgggcagcuacag

SEQ ID NO: 277733 - RNA, 22 nt, Human
uggcugccaugacgccugggga

SEQ ID NO: 277734 - RNA, 22 nt, Human
uuucacaacugcuuauuugaga

SEQ ID NO: 277735 - RNA, 22 nt, Human
agccagaaaaacaccaagagga

SEQ ID NO: 277736 - RNA, 22 nt, Human
ugugugaccuggggugagauag

SEQ ID NO: 277737 - RNA, 22 nt, Human
caggguggugaauagcuauagu

SEQ ID NO: 277738 - RNA, 22 nt, Human
augggugugaaaauggucaucu

SEQ ID NO: 277739 - RNA, 22 nt, Human
acagugcugucuaucucacuaa

SEQ ID NO: 277740 - RNA, 22 nt, Human
gcccaggagguggaggugcagu

SEQ ID NO: 277741 - RNA, 19 nt, Human
cuuggcuuagcuucuuagc

SEQ ID NO: 277742 - RNA, 22 nt, Human
cacugucuauuaauauaacuua

SEQ ID NO: 277743 - RNA, 22 nt, Human
agcagcugccagagagaguucc

SEQ ID NO: 277744 - RNA, 17 nt, Human
caaggccagcaucuuca

SEQ ID NO: 277745 - RNA, 22 nt, Human
cuuuacuugcuuuguuacaaaa

SEQ ID NO: 277746 - RNA, 22 nt, Human
gcagcugggccccagccucucc

SEQ ID NO: 277747 - RNA, 22 nt, Human
cugagcugggaguagagacucu

SEQ ID NO: 277748 - RNA, 22 nt, Human
acaaauuuauugaagggcauau

SEQ ID NO: 277749 - RNA, 22 nt, Human
uuuauuuauaagccacuugcug

SEQ ID NO: 277750 - RNA, 22 nt, Human
agucacauggcagagagaaguu

SEQ ID NO: 277751 - RNA, 22 nt, Human
uauuugcaacauaaaacucuga

SEQ ID NO: 277752 - RNA, 22 nt, Human
acaagauuuggcugaaacucca

SEQ ID NO: 277753 - RNA, 22 nt, Human
ugcagggccccucugcaugagu

SEQ ID NO: 277754 - RNA, 22 nt, Human
guuucgucaggcuuauucuauc

SEQ ID NO: 277755 - RNA, 22 nt, Human
uggcuggagagggucccaugag

SEQ ID NO: 277756 - RNA, 22 nt, Human
auuacaaguuucaguguuuugc

SEQ ID NO: 277757 - RNA, 22 nt, Human
cugggcuccuaaccauccaggu

SEQ ID NO: 277758 - RNA, 22 nt, Human
uguacauacauagauauacaca

SEQ ID NO: 277759 - RNA, 22 nt, Human
gccuggcugaggccucugcuaa

SEQ ID NO: 277760 - RNA, 22 nt, Human
uugcaaauauuguuuaccuuuc

SEQ ID NO: 277761 - RNA, 21 nt, Human
uccagggaacuucucaggaau

SEQ ID NO: 277762 - RNA, 22 nt, Human
uccugguguuacuaaauugaaa

SEQ ID NO: 277763 - RNA, 22 nt, Human
uggcaguguuucuaaggggcuc

SEQ ID NO: 277764 - RNA, 20 nt, Human
acugccuugguucaguaggu

SEQ ID NO: 277765 - RNA, 22 nt, Human
cuuuggaauaauuuccuggagu

SEQ ID NO: 277766 - RNA, 22 nt, Human
uguucuuuagcagaccauguug

SEQ ID NO: 277767 - RNA, 22 nt, Human
ccuccuggugggcgcuucuggc

SEQ ID NO: 277768 - RNA, 22 nt, Human
cagaggccuggcuuggacaccu

SEQ ID NO: 277769 - RNA, 22 nt, Human
cuccagauuccguuuauucagg

SEQ ID NO: 277770 - RNA, 22 nt, Human
uuccuggcucacagcagugggg

SEQ ID NO: 277771 - RNA, 22 nt, Human
aaaagcaucucaaaggagcuuc

SEQ ID NO: 277772 - RNA, 22 nt, Human
ugcagauacaguauguggaagc

SEQ ID NO: 277773 - RNA, 22 nt, Human
cacaguggcaaaggggcuuggg

SEQ ID NO: 277774 - RNA, 22 nt, Human
ugggccuccgcauggcccagcg

SEQ ID NO: 277775 - RNA, 22 nt, Human
acuuucaagaacuucuuuaaug

SEQ ID NO: 277776 - RNA, 22 nt, Human
agaaaauaaauugaugguggaa

SEQ ID NO: 277777 - RNA, 22 nt, Human
agcuuccugucuucugcacaaa

SEQ ID NO: 277778 - RNA, 22 nt, Human
gauaagcagcagccguuauagg

SEQ ID NO: 277779 - RNA, 22 nt, Human
gggcuuggcucauaaguggaug

SEQ ID NO: 277780 - RNA, 23 nt, Human
gaaaggcucugggacccccaacu

SEQ ID NO: 277781 - RNA, 22 nt, Human
caggaaauuuauguucuacuua

SEQ ID NO: 277782 - RNA, 22 nt, Human
ucuuugcaugugcuucuuggcc

SEQ ID NO: 277783 - RNA, 22 nt, Human
auccugggcagugugucacucu

SEQ ID NO: 277784 - RNA, 22 nt, Human
ccacugccaugggcuaggcaug

SEQ ID NO: 277785 - RNA, 21 nt, Human
ggaacuuucaugaaucuagca

SEQ ID NO: 277786 - RNA, 22 nt, Human
ccuuugguaauucuguguagag

SEQ ID NO: 277787 - RNA, 22 nt, Human
uacuguuagagccagaaaccua

SEQ ID NO: 277788 - RNA, 21 nt, Human
ucugugcugccgucaacaucc

SEQ ID NO: 277789 - RNA, 22 nt, Human
aggcuggcuuggcucuccugug

SEQ ID NO: 277790 - RNA, 22 nt, Human
ccgaggcuccuccccgagucug

SEQ ID NO: 277791 - RNA, 22 nt, Human
ugucaaaaagcugggacaagca

SEQ ID NO: 277792 - RNA, 22 nt, Human
cuggcucuuucagccgcuggag

SEQ ID NO: 277793 - RNA, 22 nt, Human
ugcccaggguuucuaagagcag

SEQ ID NO: 277794 - RNA, 18 nt, Human
gcuuucugugcagcggag

SEQ ID NO: 277795 - RNA, 22 nt, Human
uccuccagcuacuaggcaaaua

SEQ ID NO: 277796 - RNA, 15 nt, Human
gaggccaggcaugug

SEQ ID NO: 277797 - RNA, 22 nt, Human
ugaaguucacugagaguucacc

SEQ ID NO: 277798 - RNA, 22 nt, Human
uuucuaacagcaaauguuuauc

SEQ ID NO: 277799 - RNA, 22 nt, Human
ucccagggacccagccugauac

SEQ ID NO: 277800 - RNA, 22 nt, Human
ucacagaagaaguagauugcau

SEQ ID NO: 277801 - RNA, 22 nt, Human
aguuuuaagaugcgcuucuguu

SEQ ID NO: 277802 - RNA, 22 nt, Human
caggccuuuuuuccugcagugu

SEQ ID NO: 277803 - RNA, 22 nt, Human
guccucugacucagccuuggga

SEQ ID NO: 277804 - RNA, 22 nt, Human
aggaggacucucugagccagcc

SEQ ID NO: 277805 - RNA, 22 nt, Human
cacugucacguucugaaacugu

SEQ ID NO: 277806 - RNA, 22 nt, Human
ucagagcugggugcuucuuccu

SEQ ID NO: 277807 - RNA, 22 nt, Human
ugcagcagcagggaggaggcuc

SEQ ID NO: 277808 - RNA, 22 nt, Human
gaaggcuuagaaacaagggagc

SEQ ID NO: 277809 - RNA, 22 nt, Human
ccuuaccugauugcuggcaucc

SEQ ID NO: 277810 - RNA, 23 nt, Human
ggcugcucuuuucaugcuguuuc

SEQ ID NO: 277811 - RNA, 22 nt, Human
aaauaggggaccaggaaaggag

SEQ ID NO: 277812 - RNA, 22 nt, Human
agaucauaugcaguaaugaacu

SEQ ID NO: 277813 - RNA, 22 nt, Human
aucuuuuaugagcguucugaca

SEQ ID NO: 277814 - RNA, 22 nt, Human
aaaagugaugggauggcacuuc

SEQ ID NO: 277815 - RNA, 22 nt, Human
agagccuggcucccagcuaccg

SEQ ID NO: 277816 - RNA, 22 nt, Human
gagcaacaaauuagggggauuu

SEQ ID NO: 277817 - RNA, 22 nt, Human
uguaacaguagauaaggucuug

SEQ ID NO: 277818 - RNA, 22 nt, Human
gcuuagcagugugugcuuuuga

SEQ ID NO: 277819 - RNA, 22 nt, Human
uuggcgcccaggacgccgccgc

SEQ ID NO: 277820 - RNA, 21 nt, Human
uggcucugaaagagugcugca

SEQ ID NO: 277821 - RNA, 19 nt, Human
ucaugucucucaucuguga

SEQ ID NO: 277822 - RNA, 22 nt, Human
aggaagccuggaguccugccca

SEQ ID NO: 277823 - RNA, 22 nt, Human
aaaguuuuauaugcugcagcga

SEQ ID NO: 277824 - RNA, 22 nt, Human
agagccaggaucuguuuugggg

SEQ ID NO: 277825 - RNA, 19 nt, Human
uguacauauagagcucagu

SEQ ID NO: 277826 - RNA, 22 nt, Human
ugggagcagcagggagaugcgg

SEQ ID NO: 277827 - RNA, 22 nt, Human
cuggguucuauuuuuggcuuca

SEQ ID NO: 277828 - RNA, 22 nt, Human
cuggcuggcaaguagaacacaa

SEQ ID NO: 277829 - RNA, 17 nt, Human
cacaggugugguuugag

SEQ ID NO: 277830 - RNA, 22 nt, Human
ugugcugguacaugugaggaug

SEQ ID NO: 277831 - RNA, 22 nt, Human
uguguucagaauuugcugcuuu

SEQ ID NO: 277832 - RNA, 22 nt, Human
ggccucugcuuaugcugaugac

SEQ ID NO: 277833 - RNA, 22 nt, Human
aauguauuauacauaauuugug

SEQ ID NO: 277834 - RNA, 22 nt, Human
uugcuguaaguaucuuucuacc

SEQ ID NO: 277835 - RNA, 22 nt, Human
accaggaggcuacacuguccca

SEQ ID NO: 277836 - RNA, 22 nt, Human
auguggauagcacaggaauggu

SEQ ID NO: 277837 - RNA, 22 nt, Human
caggcuguggaucaggagccuu

SEQ ID NO: 277838 - RNA, 22 nt, Human
gauucaaagacagacucauuuc

SEQ ID NO: 277839 - RNA, 22 nt, Human
ugcaggcaccauucugccucuc

SEQ ID NO: 277840 - RNA, 22 nt, Human
caaugaaauugagauccagaga

SEQ ID NO: 277841 - RNA, 22 nt, Human
ucugaagagucuugcaagaaag

SEQ ID NO: 277842 - RNA, 22 nt, Human
cuccaggaguggccuggacacc

SEQ ID NO: 277843 - RNA, 22 nt, Human
gcugcccugucugcagcaggac

SEQ ID NO: 277844 - RNA, 22 nt, Human
ugugucugaacuaguugcucuc

SEQ ID NO: 277845 - RNA, 22 nt, Human
uucccuucuaguuuugagagac

SEQ ID NO: 277846 - RNA, 17 nt, Human
aggcuggccuucacagu

SEQ ID NO: 277847 - RNA, 22 nt, Human
ucaaaugaggcugaugaaugug

SEQ ID NO: 277848 - RNA, 22 nt, Human
ucaggcuguuagccaccuccuc

SEQ ID NO: 277849 - RNA, 22 nt, Human
uugagaugggcuuuauguucag

SEQ ID NO: 277850 - RNA, 22 nt, Human
agagcaggcauaaagcuuugaa

SEQ ID NO: 277851 - RNA, 22 nt, Human
ccuggcuccaaagcugugacuc

SEQ ID NO: 277852 - RNA, 22 nt, Human
ccaggcuggagugcaauggugc

SEQ ID NO: 277853 - RNA, 22 nt, Human
uugcuuuauuuggcaugccacu

SEQ ID NO: 277854 - RNA, 22 nt, Human
gugcaaaaguaauugcaguuuu

SEQ ID NO: 277855 - RNA, 22 nt, Human
ggggccagguccagcuuccaaa

SEQ ID NO: 277856 - RNA, 22 nt, Human
cuggagcuuauugggagcagaa

SEQ ID NO: 277857 - RNA, 21 nt, Human
ugaggccugccagucucagaa

SEQ ID NO: 277858 - RNA, 22 nt, Human
caaagugagagaauggcagaaa

SEQ ID NO: 277859 - RNA, 22 nt, Human
gguguccacucagcccguccug

SEQ ID NO: 277860 - RNA, 22 nt, Human
aguuaacucugaaaagacauuu

SEQ ID NO: 277861 - RNA, 22 nt, Human
aaaugucuuucaauagagaaau

SEQ ID NO: 277862 - RNA, 22 nt, Human
ucggagcuguagaugaaacccu

SEQ ID NO: 277863 - RNA, 22 nt, Human
uguuauauaacuuacaaccugu

SEQ ID NO: 277864 - RNA, 22 nt, Human
cugagcaggacagugggagacc

SEQ ID NO: 277865 - RNA, 22 nt, Human
cacuuucuguguugugcaaaaa

SEQ ID NO: 277866 - RNA, 22 nt, Human
caggauggcagagaaaagggug

SEQ ID NO: 277867 - RNA, 20 nt, Human
aguuacgcuauuacucuccu

SEQ ID NO: 277868 - RNA, 22 nt, Human
aguccuuccggcagauuucacu

SEQ ID NO: 277869 - RNA, 22 nt, Human
uuauuuaaaagugguaagauuc

SEQ ID NO: 277870 - RNA, 22 nt, Human
acaugaaacuguugcauuagaa

SEQ ID NO: 277871 - RNA, 22 nt, Human
aacaugugucuggcuagauugu

SEQ ID NO: 277872 - RNA, 22 nt, Human
ugaaaauauaguuuuccagacu

SEQ ID NO: 277873 - RNA, 19 nt, Human
aaaaggaauauucuuuggg

SEQ ID NO: 277874 - RNA, 22 nt, Human
cagacacacaagcaaucuaagu

SEQ ID NO: 277875 - RNA, 22 nt, Human
gagaggcuggguuggagaucga

SEQ ID NO: 277876 - RNA, 22 nt, Human
aaggcuggucagauguggugaa

SEQ ID NO: 277877 - RNA, 22 nt, Human
uacagugcgggugcgggccucu

SEQ ID NO: 277878 - RNA, 18 nt, Human
ucauuuguuuugcaugaa

SEQ ID NO: 277879 - RNA, 22 nt, Human
uuuacagaaugucaauuucuau

SEQ ID NO: 277880 - RNA, 22 nt, Human
gcaggcaccacggcucaggucu

SEQ ID NO: 277881 - RNA, 22 nt, Human
uccaggcugauccaugaagaau

SEQ ID NO: 277882 - RNA, 22 nt, Human
gcuggccugggcucaagaccag

SEQ ID NO: 277883 - RNA, 22 nt, Human
uggcccugcuuaugucucucuu

SEQ ID NO: 277884 - RNA, 22 nt, Human
aggagccaggaaaccugcucug

SEQ ID NO: 277885 - RNA, 22 nt, Human
ugaaccuuuugcuaagaaguua

SEQ ID NO: 277886 - RNA, 22 nt, Human
acauucaacauggcuggucuag

SEQ ID NO: 277887 - RNA, 22 nt, Human
uguggggacugaguggaggcuu

SEQ ID NO: 277888 - RNA, 22 nt, Human
uuugaagcaccaaaggagaaaa

SEQ ID NO: 277889 - RNA, 22 nt, Human
uuuccaggcagaggaguuguga

SEQ ID NO: 277890 - RNA, 18 nt, Human
aguaaagcuuauuacaug

SEQ ID NO: 277891 - RNA, 22 nt, Human
gaauucaguuaucuaauucaag

SEQ ID NO: 277892 - RNA, 22 nt, Human
cuauuuaucuauuucugaauga

SEQ ID NO: 277893 - RNA, 22 nt, Human
ucugggugaugaaaugcacugu

SEQ ID NO: 277894 - RNA, 22 nt, Human
uaaagacacccagggagggacu

SEQ ID NO: 277895 - RNA, 22 nt, Human
gagguccagagcagguucagug

SEQ ID NO: 277896 - RNA, 22 nt, Human
caaagcaguauuggauucuuua

SEQ ID NO: 277897 - RNA, 22 nt, Human
caggcuacuggggcuuggaugg

SEQ ID NO: 277898 - RNA, 22 nt, Human
cuccagaggaugcaggugaggg

SEQ ID NO: 277899 - RNA, 22 nt, Human
aaguguauaacgaccuacagga

SEQ ID NO: 277900 - RNA, 22 nt, Human
ggcauggacgucucugaggcca

SEQ ID NO: 277901 - RNA, 22 nt, Human
agacauagggaggcauauaaau

SEQ ID NO: 277902 - RNA, 22 nt, Human
uuaaauggggaugaguagaugg

SEQ ID NO: 277903 - RNA, 18 nt, Human
guucaucuuuuucuaaag

SEQ ID NO: 277904 - RNA, 22 nt, Human
uaaggcuuuggucaccauggag

SEQ ID NO: 277905 - RNA, 22 nt, Human
aaggaagauauaucaagcuuaa

SEQ ID NO: 277906 - RNA, 22 nt, Human
aaaaagacuuccaacucaggag

SEQ ID NO: 277907 - RNA, 22 nt, Human
aacagcuguauacuguagcugu

SEQ ID NO: 277908 - RNA, 22 nt, Human
uuuccaggaaguaaggauaauc

SEQ ID NO: 277909 - RNA, 22 nt, Human
agucacugcuuugucccugugu

SEQ ID NO: 277910 - RNA, 17 nt, Human
ugaaacaccaagacugu

SEQ ID NO: 277911 - RNA, 22 nt, Human
uacauuccacaagcauugcuuu

SEQ ID NO: 277912 - RNA, 22 nt, Human
gccugcagggccugggccuacc

SEQ ID NO: 277913 - RNA, 22 nt, Human
gaggaggaaguucucuguaggc

SEQ ID NO: 277914 - RNA, 22 nt, Human
gccagcccagcuccaggggaaa

SEQ ID NO: 277915 - RNA, 22 nt, Human
uggcagaguggaccauacucaa

SEQ ID NO: 277916 - RNA, 22 nt, Human
uaaaacacauaaacucucuauu

SEQ ID NO: 277917 - RNA, 22 nt, Human
ucaggucuauagaagaggaggg

SEQ ID NO: 277918 - RNA, 22 nt, Human
uuguccuguuuagggauaagga

SEQ ID NO: 277919 - RNA, 23 nt, Human
uggaaucagccuuuuuuccaagg

SEQ ID NO: 277920 - RNA, 22 nt, Human
gcagguggugggggagccguuc

SEQ ID NO: 277921 - RNA, 19 nt, Human
cuccuggcucugucauuuu

SEQ ID NO: 277922 - RNA, 22 nt, Human
agaacucucgcuggaucagacu

SEQ ID NO: 277923 - RNA, 22 nt, Human
uuauguacaauguuaauguaaa

SEQ ID NO: 277924 - RNA, 23 nt, Human
cccuggccuuggggcacaggcug

SEQ ID NO: 277925 - RNA, 22 nt, Human
agaaaugugaauuucauuuccu

SEQ ID NO: 277926 - RNA, 22 nt, Human
gacacagggggauguguggacg

SEQ ID NO: 277927 - RNA, 22 nt, Human
ucugaagaacugaguaaacaug

SEQ ID NO: 277928 - RNA, 22 nt, Human
aauaucagcucugucacuuacu

SEQ ID NO: 277929 - RNA, 22 nt, Human
uccugggcagaaugggauggcu

SEQ ID NO: 277930 - RNA, 22 nt, Human
ggaggagcacuucugagcucag

SEQ ID NO: 277931 - RNA, 22 nt, Human
gcuggcugcagauuuuagaggu

SEQ ID NO: 277932 - RNA, 22 nt, Human
accagccccaccgggacugcag

SEQ ID NO: 277933 - RNA, 22 nt, Human
aagagggaggugcgggugcaga

SEQ ID NO: 277934 - RNA, 22 nt, Human
aaaaaggcuaagcaucuugugc

SEQ ID NO: 277935 - RNA, 22 nt, Human
gcugcaggcauuuuccugggca

SEQ ID NO: 277936 - RNA, 22 nt, Human
aagucucuuccucugccaaaga

SEQ ID NO: 277937 - RNA, 21 nt, Human
agcuguuugaagcuauauugg

SEQ ID NO: 277938 - RNA, 20 nt, Human
gagcccucugcacuagcgcc

SEQ ID NO: 277939 - RNA, 22 nt, Human
uuuggaaugaaacagcagagcc

SEQ ID NO: 277940 - RNA, 22 nt, Human
ucucugaacuuccuggaaaggc

SEQ ID NO: 277941 - RNA, 22 nt, Human
cugcacaguggacagugaagau

SEQ ID NO: 277942 - RNA, 22 nt, Human
uucaguguauauuuuuugagua

SEQ ID NO: 277943 - RNA, 22 nt, Human
uccuggacuggcucagcacccu

SEQ ID NO: 277944 - RNA, 22 nt, Human
uuauuuucagcuaggaaagcca

SEQ ID NO: 277945 - RNA, 22 nt, Human
cugaauuagaugaaaaaggcuc

SEQ ID NO: 277946 - RNA, 22 nt, Human
caguacaagaggccaccugccc

SEQ ID NO: 277947 - RNA, 22 nt, Human
cucuccaggacuuuggcccaau

SEQ ID NO: 277948 - RNA, 22 nt, Human
guggccaggucagggacuugug

SEQ ID NO: 277949 - RNA, 22 nt, Human
acuagaacuucuaacuaagguc

SEQ ID NO: 277950 - RNA, 22 nt, Human
auacuguaucacuugugaguga

SEQ ID NO: 277951 - RNA, 22 nt, Human
gggggcuaccgucucuggagcu

SEQ ID NO: 277952 - RNA, 22 nt, Human
gcaggacuugaauccaggcagu

SEQ ID NO: 277953 - RNA, 22 nt, Human
uccagccuaggggaacagcugc

SEQ ID NO: 277954 - RNA, 22 nt, Human
cuggcugcaggaaggagugggc

SEQ ID NO: 277955 - RNA, 23 nt, Human
cacugcagcguggucuggcagga

SEQ ID NO: 277956 - RNA, 22 nt, Human
auagcacuuauuguaugcugag

SEQ ID NO: 277957 - RNA, 22 nt, Human
uguguguauaugcauuuaucua

SEQ ID NO: 277958 - RNA, 22 nt, Human
acugggccgcgcugcagagggc

SEQ ID NO: 277959 - RNA, 22 nt, Human
uuaucaugacuucaagcaucca

SEQ ID NO: 277960 - RNA, 17 nt, Human
caagagagaugacugga

SEQ ID NO: 277961 - RNA, 19 nt, Human
gcuucuguuugggcuuaga

SEQ ID NO: 277962 - RNA, 19 nt, Human
aucuuuagggauguggcuu

SEQ ID NO: 277963 - RNA, 22 nt, Human
ggggcuguugaaguuaguugag

SEQ ID NO: 277964 - RNA, 22 nt, Human
aggagacaucuaacuguagguu

SEQ ID NO: 277965 - RNA, 22 nt, Human
ucaggcuguaaauggugugggu

SEQ ID NO: 277966 - RNA, 22 nt, Human
agaaugcaguuugaaauaaggu

SEQ ID NO: 277967 - RNA, 22 nt, Human
acacaguguccuucuacuugcc

SEQ ID NO: 277968 - RNA, 22 nt, Human
cuggaucuguuugugcuugugg

SEQ ID NO: 277969 - RNA, 22 nt, Human
aguacaaugucugacacaguag

SEQ ID NO: 277970 - RNA, 22 nt, Human
uuaugacauaugaguacaagua

SEQ ID NO: 277971 - RNA, 22 nt, Human
auuguacauaaaauguaugucu

SEQ ID NO: 277972 - RNA, 22 nt, Human
uguguuaaguauuugauacacu

SEQ ID NO: 277973 - RNA, 22 nt, Human
auuuuccuccaugugagcaguu

SEQ ID NO: 277974 - RNA, 22 nt, Human
aacuguagcaaagaacagcucu

SEQ ID NO: 277975 - RNA, 20 nt, Human
uuuccacuguaauguaugau

SEQ ID NO: 277976 - RNA, 22 nt, Human
cugggucuuuuucuuccauuga

SEQ ID NO: 277977 - RNA, 22 nt, Human
gggcuguguaucaguuaucuau

SEQ ID NO: 277978 - RNA, 22 nt, Human
acaacagugugguggaaggagc

SEQ ID NO: 277979 - RNA, 22 nt, Human
ccagcuggaagagugcagaacu

SEQ ID NO: 277980 - RNA, 22 nt, Human
aauuaacuaauuugguacaaga

SEQ ID NO: 277981 - RNA, 17 nt, Human
ccaggucuccuugcuuu

SEQ ID NO: 277982 - RNA, 18 nt, Human
gccagcccuccaaccucc

SEQ ID NO: 277983 - RNA, 22 nt, Human
ccagggcucugcuucugccaug

SEQ ID NO: 277984 - RNA, 20 nt, Human
ccucaagcagacugacagcu

SEQ ID NO: 277985 - RNA, 22 nt, Human
uuuuacaggucauagguauagu

SEQ ID NO: 277986 - RNA, 22 nt, Human
aauucccaccuucucucuuuug

SEQ ID NO: 277987 - RNA, 22 nt, Human
uggaugaggcuggguuaggcag

SEQ ID NO: 277988 - RNA, 22 nt, Human
uaaaugugcacuuuacuuuuca

SEQ ID NO: 277989 - RNA, 22 nt, Human
ucaggaaagguuuguugaaugg

SEQ ID NO: 277990 - RNA, 22 nt, Human
ccugaagagugaauguggcagu

SEQ ID NO: 277991 - RNA, 22 nt, Human
aaauguguuugauaggaauauu

SEQ ID NO: 277992 - RNA, 22 nt, Human
cccaguuguugccggcucugga

SEQ ID NO: 277993 - RNA, 22 nt, Human
cuggguucuuggcacagcagga

SEQ ID NO: 277994 - RNA, 22 nt, Human
gguuucaacuaaaucaagaagg

SEQ ID NO: 277995 - RNA, 22 nt, Human
uuucuucacaggguauugggug

SEQ ID NO: 277996 - RNA, 22 nt, Human
gacagccaugcacuucugcugu

SEQ ID NO: 277997 - RNA, 18 nt, Human
gguugauaacuugugauu

SEQ ID NO: 277998 - RNA, 22 nt, Human
cagaauuuagaaaacaacauaa

SEQ ID NO: 277999 - RNA, 23 nt, Human
uggccugcagaguuucugcuggg

SEQ ID NO: 278000 - RNA, 22 nt, Human
ggcuuugccuggaauuuccuug

SEQ ID NO: 278001 - RNA, 22 nt, Human
uacuuuagaaggaaauaaguuc

SEQ ID NO: 278002 - RNA, 22 nt, Human
cccugggaaguauuccagcuau

SEQ ID NO: 278003 - RNA, 22 nt, Human
guuuaacauuguaccaacaccu

SEQ ID NO: 278004 - RNA, 22 nt, Human
uucucagaauugacugggagca

SEQ ID NO: 278005 - RNA, 22 nt, Human
uuguauuuccuauaaccuuucu

SEQ ID NO: 278006 - RNA, 22 nt, Human
ugaaugaauccuaacaaagaca

SEQ ID NO: 278007 - RNA, 22 nt, Human
ucagcagggcugggagcuguga

SEQ ID NO: 278008 - RNA, 22 nt, Human
cacuugauggaagagcagaaga

SEQ ID NO: 278009 - RNA, 22 nt, Human
uuccaggaugcugcugcuuuuu

SEQ ID NO: 278010 - RNA, 22 nt, Human
ccuggaggagcgcugaccagcu

SEQ ID NO: 278011 - RNA, 21 nt, Human
gggcgaggccugauguggcuc

SEQ ID NO: 278012 - RNA, 22 nt, Human
acagcagaguggagaugagcac

SEQ ID NO: 278013 - RNA, 22 nt, Human
ugagagggcccagagcacacca

SEQ ID NO: 278014 - RNA, 22 nt, Human
caagcagagguuuauguauuag

SEQ ID NO: 278015 - RNA, 22 nt, Human
aggauagaagccccauguucuu

SEQ ID NO: 278016 - RNA, 23 nt, Human
agcccugcugagacccagcuccc

SEQ ID NO: 278017 - RNA, 22 nt, Human
aucucuggguccauagaagaga

SEQ ID NO: 278018 - RNA, 22 nt, Human
ucucuuaaaagauuuuaaugac

SEQ ID NO: 278019 - RNA, 22 nt, Human
gaaauuauugcuagagacugca

SEQ ID NO: 278020 - RNA, 22 nt, Human
cucuuaaaaacuugauauauuu

SEQ ID NO: 278021 - RNA, 22 nt, Human
ugugaagguuuuuaugggauau

SEQ ID NO: 278022 - RNA, 20 nt, Human
ugucagugccugaggcacag

SEQ ID NO: 278023 - RNA, 20 nt, Human
cucugaggcugagaagggag

SEQ ID NO: 278024 - RNA, 22 nt, Human
caguagcuucaguugaggccug

SEQ ID NO: 278025 - RNA, 22 nt, Human
gcugguuaggugagggugcgcc

SEQ ID NO: 278026 - RNA, 22 nt, Human
uggcagggccugaaucuuauac

SEQ ID NO: 278027 - RNA, 22 nt, Human
uagacagauguuuucuggcugu

SEQ ID NO: 278028 - RNA, 22 nt, Human
aaguuuuacugaggacacaugu

SEQ ID NO: 278029 - RNA, 22 nt, Human
ugaggccuuuucugucuggcua

SEQ ID NO: 278030 - RNA, 22 nt, Human
aauugcuuuaguuaccauagug

SEQ ID NO: 278031 - RNA, 22 nt, Human
cugcaggaaggggacggagugg

SEQ ID NO: 278032 - RNA, 22 nt, Human
acaggccacaguggagucucug

SEQ ID NO: 278033 - RNA, 22 nt, Human
uuugaaucugauauggcagcau

SEQ ID NO: 278034 - RNA, 22 nt, Human
aaggagcucccggcagaccagg

SEQ ID NO: 278035 - RNA, 22 nt, Human
acauucucuccaugucuucuuu

SEQ ID NO: 278036 - RNA, 18 nt, Human
gagaaggccacuuguuuu

SEQ ID NO: 278037 - RNA, 22 nt, Human
auugaacagaaaaacucagaga

SEQ ID NO: 278038 - RNA, 23 nt, Human
uggucugaagccucagguuccuc

SEQ ID NO: 278039 - RNA, 20 nt, Human
uacaauacacaugcauauga

SEQ ID NO: 278040 - RNA, 22 nt, Human
ggcucaggacugcagcguagag

SEQ ID NO: 278041 - RNA, 22 nt, Human
cggggcugaggcaacgcggaga

SEQ ID NO: 278042 - RNA, 23 nt, Human
agaaaagcuuggacacauggccu

SEQ ID NO: 278043 - RNA, 22 nt, Human
ccaggucaagcuccccuguggu

SEQ ID NO: 278044 - RNA, 22 nt, Human
gggcccaggccuccuuccuucc

SEQ ID NO: 278045 - RNA, 22 nt, Human
gaggcagcugaaggagugacag

SEQ ID NO: 278046 - RNA, 19 nt, Human
ucaagauggauggcuccca

SEQ ID NO: 278047 - RNA, 22 nt, Human
acauacuuaugcuaaaaauaua

SEQ ID NO: 278048 - RNA, 22 nt, Human
cccauggcaauaaggucacagg

SEQ ID NO: 278049 - RNA, 22 nt, Human
aguggcuggcauaggaacagac

SEQ ID NO: 278050 - RNA, 22 nt, Human
uguaccagaugucuaaagccau

SEQ ID NO: 278051 - RNA, 21 nt, Human
uagaggcaggagggacugcag

SEQ ID NO: 278052 - RNA, 22 nt, Human
acuggacagaggaaauauggag

SEQ ID NO: 278053 - RNA, 22 nt, Human
uccuagaagauggaucagagaa

SEQ ID NO: 278054 - RNA, 22 nt, Human
aagagcuccaggcaaugcgguc

SEQ ID NO: 278055 - RNA, 22 nt, Human
caggcagcucuaauggaaagug

SEQ ID NO: 278056 - RNA, 19 nt, Human
uccaggcugagagucagcu

SEQ ID NO: 278057 - RNA, 22 nt, Human
ggugcaugguggaggugacccu

SEQ ID NO: 278058 - RNA, 22 nt, Human
ggagaguggauuccagcuguau

SEQ ID NO: 278059 - RNA, 22 nt, Human
uuccauaaaggugauaguauac

SEQ ID NO: 278060 - RNA, 22 nt, Human
accugaauugauuugaccugua

SEQ ID NO: 278061 - RNA, 22 nt, Human
cauuuguuggucagauuguagu

SEQ ID NO: 278062 - RNA, 22 nt, Human
uucuuguauauaaaaaucauuu

SEQ ID NO: 278063 - RNA, 22 nt, Human
acguucaaugucagucaacuuu

SEQ ID NO: 278064 - RNA, 22 nt, Human
uccucuccauauuuucugauuu

SEQ ID NO: 278065 - RNA, 22 nt, Human
aguuucuugaagacugauguuu

SEQ ID NO: 278066 - RNA, 22 nt, Human
ccaggcugggcggggaaccugg

SEQ ID NO: 278067 - RNA, 22 nt, Human
uccugaggacccugucaggggc

SEQ ID NO: 278068 - RNA, 22 nt, Human
uggcucagugaagagauaacuu

SEQ ID NO: 278069 - RNA, 21 nt, Human
uggcacagcaagugggcucau

SEQ ID NO: 278070 - RNA, 22 nt, Human
gggugguguauuagagcugcag

SEQ ID NO: 278071 - RNA, 22 nt, Human
uuuggagagaugaaguucugug

SEQ ID NO: 278072 - RNA, 22 nt, Human
auuugaaccacucagaacucau

SEQ ID NO: 278073 - RNA, 22 nt, Human
uuucauaaacaguagaagacua

SEQ ID NO: 278074 - RNA, 22 nt, Human
cagagacaaccugguagagaaa

SEQ ID NO: 278075 - RNA, 22 nt, Human
aguguccucuauuaugacuuua

SEQ ID NO: 278076 - RNA, 22 nt, Human
acccagggagugcuccuguucu

SEQ ID NO: 278077 - RNA, 22 nt, Human
aaagauuuaugaaguucaauua

SEQ ID NO: 278078 - RNA, 22 nt, Human
uccaggcuuuuucaugcugucu

SEQ ID NO: 278079 - RNA, 22 nt, Human
gccucaguaaccuuaggggaua

SEQ ID NO: 278080 - RNA, 21 nt, Human
agguacuaaugaaaagugauu

SEQ ID NO: 278081 - RNA, 22 nt, Human
ucaggugggucuacaauuaguu

SEQ ID NO: 278082 - RNA, 22 nt, Human
uugggccugggguagugucgga

SEQ ID NO: 278083 - RNA, 22 nt, Human
ccugcagguuucccccggacgg

SEQ ID NO: 278084 - RNA, 22 nt, Human
ugguaacacaggcauuaaaguu

SEQ ID NO: 278085 - RNA, 21 nt, Human
uguaaguuucaucugaauugg

SEQ ID NO: 278086 - RNA, 22 nt, Human
uugugucccuggagcuucugug

SEQ ID NO: 278087 - RNA, 22 nt, Human
aaaagucugcuuucuauuauca

SEQ ID NO: 278088 - RNA, 22 nt, Human
aguguauugucucacaguucuu

SEQ ID NO: 278089 - RNA, 22 nt, Human
cuggaggagcauggacuggagu

SEQ ID NO: 278090 - RNA, 20 nt, Human
acacacuuugaucuugagcc

SEQ ID NO: 278091 - RNA, 22 nt, Human
aacuguacgauaauaaauuugu

SEQ ID NO: 278092 - RNA, 22 nt, Human
ucaggccacggcucacugagac

SEQ ID NO: 278093 - RNA, 22 nt, Human
ggaguaggccccgggagagagu

SEQ ID NO: 278094 - RNA, 22 nt, Human
aaguuucuggaccuuaccugcu

SEQ ID NO: 278095 - RNA, 22 nt, Human
ccuguucuguagugaguuugag

SEQ ID NO: 278096 - RNA, 22 nt, Human
ugcccagcacccagcaugaugc

SEQ ID NO: 278097 - RNA, 22 nt, Human
acaguuaauaaguaguaaguca

SEQ ID NO: 278098 - RNA, 21 nt, Human
ugucugauguauuuuuugccu

SEQ ID NO: 278099 - RNA, 22 nt, Human
ggagucugucaccuguuucucu

SEQ ID NO: 278100 - RNA, 22 nt, Human
uccaggcuaauuuugcauuguu

SEQ ID NO: 278101 - RNA, 22 nt, Human
accuguuuucagaaaaugcaga

SEQ ID NO: 278102 - RNA, 22 nt, Human
cuagaaaucucuguuuacauca

SEQ ID NO: 278103 - RNA, 22 nt, Human
uggccagugauuaaugacgcuu

SEQ ID NO: 278104 - RNA, 22 nt, Human
aaagguuauuauuacuauuguc

SEQ ID NO: 278105 - RNA, 22 nt, Human
cacauaaauggugccauguuuu

SEQ ID NO: 278106 - RNA, 20 nt, Human
aguaggcaaaggaaagaucu

SEQ ID NO: 278107 - RNA, 22 nt, Human
uggcagagugcggcauccccug

SEQ ID NO: 278108 - RNA, 22 nt, Human
aagaaaccuagucuggagcagc

SEQ ID NO: 278109 - RNA, 22 nt, Human
agaggcaugaucuuauaauuua

SEQ ID NO: 278110 - RNA, 22 nt, Human
cagagccaggucuugaacucag

SEQ ID NO: 278111 - RNA, 22 nt, Human
ggcucuggugugaagcagccuc

SEQ ID NO: 278112 - RNA, 22 nt, Human
auggcagauccacaguuugaag

SEQ ID NO: 278113 - RNA, 21 nt, Human
cagaggccuaucacagacucc

SEQ ID NO: 278114 - RNA, 21 nt, Human
agggaaagaaaaugagcuaau

SEQ ID NO: 278115 - RNA, 22 nt, Human
aaaggucuucucaaacauccca

SEQ ID NO: 278116 - RNA, 22 nt, Human
guuuuccuguugaguaguauuc

SEQ ID NO: 278117 - RNA, 22 nt, Human
aaggcagccuuuguuugauuga

SEQ ID NO: 278118 - RNA, 22 nt, Human
agaauccuugacucaggcugag

SEQ ID NO: 278119 - RNA, 22 nt, Human
uggggcuagaauccugcaggaa

SEQ ID NO: 278120 - RNA, 22 nt, Human
ccuagagugauugagagcauca

SEQ ID NO: 278121 - RNA, 22 nt, Human
acauuucuuagccuaguuccag

SEQ ID NO: 278122 - RNA, 22 nt, Human
aagaacauuuuguagaaugaca

SEQ ID NO: 278123 - RNA, 22 nt, Human
gacccagccugguuuuuauagg

SEQ ID NO: 278124 - RNA, 22 nt, Human
gggcaauucacaggguuguuau

SEQ ID NO: 278125 - RNA, 22 nt, Human
ucaggacacuuggcacaagguc

SEQ ID NO: 278126 - RNA, 22 nt, Human
cucagagcugaggccagggaca

SEQ ID NO: 278127 - RNA, 23 nt, Human
agauuguuauucccaguucaugu

SEQ ID NO: 278128 - RNA, 22 nt, Human
acacugagcaucucuagaggca

SEQ ID NO: 278129 - RNA, 22 nt, Human
uguuuucuauuaccugagauug

SEQ ID NO: 278130 - RNA, 22 nt, Human
ucuuguccuaagagcuggauuc

SEQ ID NO: 278131 - RNA, 22 nt, Human
gcagcuuugaagacuuauuugc

SEQ ID NO: 278132 - RNA, 22 nt, Human
gaacuggugaagugaagggcag

SEQ ID NO: 278133 - RNA, 22 nt, Human
uugcaagguuucucucugccua

SEQ ID NO: 278134 - RNA, 22 nt, Human
cuugggugcuggaggcugccgc

SEQ ID NO: 278135 - RNA, 22 nt, Human
uacagauaacugaaugcagacu

SEQ ID NO: 278136 - RNA, 22 nt, Human
cuuggaggaaggggcucuucug

SEQ ID NO: 278137 - RNA, 22 nt, Human
uugauuucaaaauauaugcuug

SEQ ID NO: 278138 - RNA, 22 nt, Human
ugcagccuuuagaaguucagau

SEQ ID NO: 278139 - RNA, 22 nt, Human
ugucuuuagaccucucuggccu

SEQ ID NO: 278140 - RNA, 22 nt, Human
cucuuccucucaugcggucaua

SEQ ID NO: 278141 - RNA, 22 nt, Human
ugcaaacaggagaguaaguaua

SEQ ID NO: 278142 - RNA, 22 nt, Human
aaaagcagaccacgcuuugugg

SEQ ID NO: 278143 - RNA, 22 nt, Human
agcuggaacccgggugggcagc

SEQ ID NO: 278144 - RNA, 22 nt, Human
ucuggcuccacuuucuucauuu

SEQ ID NO: 278145 - RNA, 22 nt, Human
gacauuagacuaauguagcauu

SEQ ID NO: 278146 - RNA, 22 nt, Human
cucuagaacugauugggaagaa

SEQ ID NO: 278147 - RNA, 22 nt, Human
uugcaaagaauuuuacauucua

SEQ ID NO: 278148 - RNA, 20 nt, Human
agagugggugucacaggcug

SEQ ID NO: 278149 - RNA, 22 nt, Human
gaauucuuuucuuucugaaagu

SEQ ID NO: 278150 - RNA, 22 nt, Human
ugcugcauuugcaguccuuuaa

SEQ ID NO: 278151 - RNA, 22 nt, Human
aaaggacaugucaauaucaggc

SEQ ID NO: 278152 - RNA, 22 nt, Human
cgugacagggucuggcugguca

SEQ ID NO: 278153 - RNA, 22 nt, Human
agcugcaagucuguguggggag

SEQ ID NO: 278154 - RNA, 22 nt, Human
ucacagccuggucacucugccc

SEQ ID NO: 278155 - RNA, 22 nt, Human
aggagcuccagcccagggaagu

SEQ ID NO: 278156 - RNA, 21 nt, Human
ggauuuuaaaaacugcaccug

SEQ ID NO: 278157 - RNA, 22 nt, Human
uguccaggcacugggacucuag

SEQ ID NO: 278158 - RNA, 22 nt, Human
agacacagcuaccauaauacca

SEQ ID NO: 278159 - RNA, 22 nt, Human
ggcuccugggaugggacugagc

SEQ ID NO: 278160 - RNA, 21 nt, Human
uguaugcacgcacaugcacac

SEQ ID NO: 278161 - RNA, 22 nt, Human
agcauauaggaaauguugaauc

SEQ ID NO: 278162 - RNA, 22 nt, Human
cugagggaagggguacauggcu

SEQ ID NO: 278163 - RNA, 22 nt, Human
gguucaguggaauguguugacc

SEQ ID NO: 278164 - RNA, 22 nt, Human
ugcugaggacuaaaggagauga

SEQ ID NO: 278165 - RNA, 22 nt, Human
uucaacaaguaguacacacagu

SEQ ID NO: 278166 - RNA, 22 nt, Human
auuguacaaugcugagguuugg

SEQ ID NO: 278167 - RNA, 22 nt, Human
cagcaggcuguggaaauccugg

SEQ ID NO: 278168 - RNA, 23 nt, Human
gcaguuaguccacuuugcagaga

SEQ ID NO: 278169 - RNA, 22 nt, Human
uggcuccagguugaacuuuggg

SEQ ID NO: 278170 - RNA, 22 nt, Human
uuuuuguagucauuagaagagg

SEQ ID NO: 278171 - RNA, 22 nt, Human
agucuccacaacagcccugaua

SEQ ID NO: 278172 - RNA, 22 nt, Human
uuauuacagucccagggaguag

SEQ ID NO: 278173 - RNA, 22 nt, Human
uacagagaggugacccuugggc

SEQ ID NO: 278174 - RNA, 22 nt, Human
aaaguguugggauuacaggugu

SEQ ID NO: 278175 - RNA, 22 nt, Human
ucugcugucuaugcaaguccuu

SEQ ID NO: 278176 - RNA, 22 nt, Human
aagaacaguguccugggacucg

SEQ ID NO: 278177 - RNA, 22 nt, Human
cucuccucagaacaggcccucu

SEQ ID NO: 278178 - RNA, 22 nt, Human
uccaggcuggccucgcgugaca

SEQ ID NO: 278179 - RNA, 22 nt, Human
aggaagagcaucuuugggucug

SEQ ID NO: 278180 - RNA, 22 nt, Human
guguucuuuugcuucacagaaa

SEQ ID NO: 278181 - RNA, 22 nt, Human
agaguuucuugugagcacugac

SEQ ID NO: 278182 - RNA, 22 nt, Human
auggucuugugagaguaacagu

SEQ ID NO: 278183 - RNA, 22 nt, Human
gcugccuucuucugacucuauu

SEQ ID NO: 278184 - RNA, 22 nt, Human
gaacuggugagaguucacggga

SEQ ID NO: 278185 - RNA, 21 nt, Human
aggaagaucuggaggucggcg

SEQ ID NO: 278186 - RNA, 22 nt, Human
ggcugcagauagccagccacca

SEQ ID NO: 278187 - RNA, 22 nt, Human
cuugaaugaaaccaacugauga

SEQ ID NO: 278188 - RNA, 22 nt, Human
aggcccuguaagguguggagau

SEQ ID NO: 278189 - RNA, 22 nt, Human
cauuucuaccaaaugugacugg

SEQ ID NO: 278190 - RNA, 22 nt, Human
agcuggccauugugaguggccu

SEQ ID NO: 278191 - RNA, 22 nt, Human
caauucaaaugcauaguucaca

SEQ ID NO: 278192 - RNA, 22 nt, Human
auuuaauuuggagagagaaacc

SEQ ID NO: 278193 - RNA, 22 nt, Human
cugcagggcagaagggcauaga

SEQ ID NO: 278194 - RNA, 22 nt, Human
cacuaaguugguguuaauuagu

SEQ ID NO: 278195 - RNA, 22 nt, Human
aagacacaaagcuucccuuuuc

SEQ ID NO: 278196 - RNA, 22 nt, Human
cugugggagaggugccuggauu

SEQ ID NO: 278197 - RNA, 22 nt, Human
agcggcugcucuuuucagaucc

SEQ ID NO: 278198 - RNA, 22 nt, Human
gagcccaggaugguguauggcu

SEQ ID NO: 278199 - RNA, 22 nt, Human
acucagaggaaacccuccuagg

SEQ ID NO: 278200 - RNA, 22 nt, Human
cacaguccagacuccuggaguu

SEQ ID NO: 278201 - RNA, 22 nt, Human
ccagggcacuuaggcccagccc

SEQ ID NO: 278202 - RNA, 22 nt, Human
uggagcaggugggaugucguga

SEQ ID NO: 278203 - RNA, 22 nt, Human
aaugggagguaguaugggaggu

SEQ ID NO: 278204 - RNA, 22 nt, Human
cccagugucugggccugcaggg

SEQ ID NO: 278205 - RNA, 20 nt, Human
ugaaggcagguaagaaagau

SEQ ID NO: 278206 - RNA, 22 nt, Human
agacacagugcugggugcugag

SEQ ID NO: 278207 - RNA, 22 nt, Human
cuguuuucccuggaguucagca

SEQ ID NO: 278208 - RNA, 22 nt, Human
ucauggggugacagaagggagg

SEQ ID NO: 278209 - RNA, 23 nt, Human
ucccugggcccgugccagcggug

SEQ ID NO: 278210 - RNA, 21 nt, Human
uccuggcaggcccaggacccu

SEQ ID NO: 278211 - RNA, 22 nt, Human
ugacaggugcugggggcagugu

SEQ ID NO: 278212 - RNA, 22 nt, Human
acagucuaaucuuguguucugu

SEQ ID NO: 278213 - RNA, 22 nt, Human
ccagaggaucaguacuggcugg

SEQ ID NO: 278214 - RNA, 22 nt, Human
uauaauuuuaagugguaaauua

SEQ ID NO: 278215 - RNA, 22 nt, Human
acacauuaaccuuugaaauucu

SEQ ID NO: 278216 - RNA, 22 nt, Human
acugguguugauuuggaagggg

SEQ ID NO: 278217 - RNA, 22 nt, Human
ucucuguaucccagaaccaaaa

SEQ ID NO: 278218 - RNA, 22 nt, Human
aagucagugcuagcuaauggcu

SEQ ID NO: 278219 - RNA, 22 nt, Human
uccucagaaaccccugugaggu

SEQ ID NO: 278220 - RNA, 22 nt, Human
uaguuuguagaaaucuagaaau

SEQ ID NO: 278221 - RNA, 22 nt, Human
cugcagggagcagauggcgugu

SEQ ID NO: 278222 - RNA, 22 nt, Human
gcacaauuccaugggacagccc

SEQ ID NO: 278223 - RNA, 22 nt, Human
ccuggcucccggaacagggucu

SEQ ID NO: 278224 - RNA, 20 nt, Human
cucugggcugcacccucgcc

SEQ ID NO: 278225 - RNA, 22 nt, Human
agcacugugauuuauaacauuu

SEQ ID NO: 278226 - RNA, 22 nt, Human
cagccaucccagccugugguuc

SEQ ID NO: 278227 - RNA, 22 nt, Human
caaaggcuucaucucagagcag

SEQ ID NO: 278228 - RNA, 22 nt, Human
ggccuuugcguccacgccgcuu

SEQ ID NO: 278229 - RNA, 22 nt, Human
cuuuaacaaaugacucuugucu

SEQ ID NO: 278230 - RNA, 22 nt, Human
guuuaauucccacaccugcccu

SEQ ID NO: 278231 - RNA, 22 nt, Human
acaugccaucacuuucauuccu

SEQ ID NO: 278232 - RNA, 19 nt, Human
agaggcaagggcucaugac

SEQ ID NO: 278233 - RNA, 22 nt, Human
ucuggaagacagugagcccgcu

SEQ ID NO: 278234 - RNA, 22 nt, Human
gaaauuaagcaggggucugugg

SEQ ID NO: 278235 - RNA, 23 nt, Human
acuuuauugaccccaggucaguu

SEQ ID NO: 278236 - RNA, 16 nt, Human
uggcagguuuuuaucu

SEQ ID NO: 278237 - RNA, 22 nt, Human
uaugcaacagcauuauuacaau

SEQ ID NO: 278238 - RNA, 22 nt, Human
uguuucauuaguacugacaaua

SEQ ID NO: 278239 - RNA, 22 nt, Human
ucugcuguucucaugcugauuu

SEQ ID NO: 278240 - RNA, 22 nt, Human
gcuguucagggcacucaugggc

SEQ ID NO: 278241 - RNA, 22 nt, Human
agucaaaggguauuuggauuga

SEQ ID NO: 278242 - RNA, 21 nt, Human
acauuacagggugaugugucu

SEQ ID NO: 278243 - RNA, 19 nt, Human
ccuagagcaguaccuggua

SEQ ID NO: 278244 - RNA, 22 nt, Human
cagaggcccagugagagggcug

SEQ ID NO: 278245 - RNA, 22 nt, Human
auucuucagaauaucuggcacu

SEQ ID NO: 278246 - RNA, 22 nt, Human
uggccucagauuauugcacagu

SEQ ID NO: 278247 - RNA, 22 nt, Human
aggcuggaugugccucaccgag

SEQ ID NO: 278248 - RNA, 20 nt, Human
gugguauucaguaacaguga

SEQ ID NO: 278249 - RNA, 22 nt, Human
aagcccuggcccaaccuugauu

SEQ ID NO: 278250 - RNA, 22 nt, Human
ucccugggccuccugcuaugca

SEQ ID NO: 278251 - RNA, 19 nt, Human
gagguucacgcgcuggaug

SEQ ID NO: 278252 - RNA, 22 nt, Human
uucuaaagugcaaucugacaga

SEQ ID NO: 278253 - RNA, 22 nt, Human
agucaggaagcuggagcugggg

SEQ ID NO: 278254 - RNA, 22 nt, Human
auccauuauugggccaauaaag

SEQ ID NO: 278255 - RNA, 20 nt, Human
gagcacaguaaugacugcua

SEQ ID NO: 278256 - RNA, 22 nt, Human
caagucaaugauuauaagaguc

SEQ ID NO: 278257 - RNA, 19 nt, Human
ucagaggauuuggcuauga

SEQ ID NO: 278258 - RNA, 22 nt, Human
uggcuucuugggaugggucauu

SEQ ID NO: 278259 - RNA, 22 nt, Human
cucagagggaggacugggcugg

SEQ ID NO: 278260 - RNA, 22 nt, Human
caggaaacauaugugcuugagg

SEQ ID NO: 278261 - RNA, 22 nt, Human
auguaacacccacuuuuauagc

SEQ ID NO: 278262 - RNA, 22 nt, Human
cuccauauggcccugggaccug

SEQ ID NO: 278263 - RNA, 22 nt, Human
cacuugaacccgggaggcugag

SEQ ID NO: 278264 - RNA, 22 nt, Human
uaugagcuuuggaaugagaaac

SEQ ID NO: 278265 - RNA, 21 nt, Human
ccuguggauuuuaaaauugga

SEQ ID NO: 278266 - RNA, 22 nt, Human
uggaggcaacugaagauguagu

SEQ ID NO: 278267 - RNA, 22 nt, Human
gaggcagcugaagcuucaaaga

SEQ ID NO: 278268 - RNA, 22 nt, Human
acaaaugagaauguagacagag

SEQ ID NO: 278269 - RNA, 22 nt, Human
ccucaagaacaauccaccauua

SEQ ID NO: 278270 - RNA, 22 nt, Human
guuagggaucaggaacaagagc

SEQ ID NO: 278271 - RNA, 22 nt, Human
auccaggaaggauggcauugag

SEQ ID NO: 278272 - RNA, 22 nt, Human
ugucauuuggacuuugguauua

SEQ ID NO: 278273 - RNA, 22 nt, Human
gaagcuugagaacuacuguccu

SEQ ID NO: 278274 - RNA, 22 nt, Human
gagggggcucccugaagccagu

SEQ ID NO: 278275 - RNA, 22 nt, Human
auguacaagcuguuuuacugca

SEQ ID NO: 278276 - RNA, 22 nt, Human
cuauuuucauucuuacauuguc

SEQ ID NO: 278277 - RNA, 18 nt, Human
aggucugaggaagagccu

SEQ ID NO: 278278 - RNA, 21 nt, Human
uuuagggaggauauuuaacuu

SEQ ID NO: 278279 - RNA, 22 nt, Human
ugugugugcaggagagcaggug

SEQ ID NO: 278280 - RNA, 22 nt, Human
caggcagccaggggaccugucc

SEQ ID NO: 278281 - RNA, 22 nt, Human
aacuguaauuuuuacauaguaa

SEQ ID NO: 278282 - RNA, 22 nt, Human
guccuguguguugccggcugaa

SEQ ID NO: 278283 - RNA, 22 nt, Human
uggcucuguggucuuagcaugc

SEQ ID NO: 278284 - RNA, 16 nt, Human
uugaaugacugugugc

SEQ ID NO: 278285 - RNA, 22 nt, Human
cagcugccuucugcgggaaguc

SEQ ID NO: 278286 - RNA, 22 nt, Human
gcaaggcagcgcggaguagcua

SEQ ID NO: 278287 - RNA, 22 nt, Human
agcuuagaagugugcugagagg

SEQ ID NO: 278288 - RNA, 23 nt, Human
gagcucagguagggcucgcccgc

SEQ ID NO: 278289 - RNA, 22 nt, Human
uauauauaugcacacacaccua

SEQ ID NO: 278290 - RNA, 22 nt, Human
uaagacacaguccgcacucucu

SEQ ID NO: 278291 - RNA, 22 nt, Human
ggcagccccaucagagacgcug

SEQ ID NO: 278292 - RNA, 22 nt, Human
aagcugcagcacagagaggugg

SEQ ID NO: 278293 - RNA, 22 nt, Human
aauuucaagucuugaagaagua

SEQ ID NO: 278294 - RNA, 19 nt, Human
agcuccaggccuggaugcu

SEQ ID NO: 278295 - RNA, 22 nt, Human
agcccugcacaggucuguggcu

SEQ ID NO: 278296 - RNA, 22 nt, Human
cacagaaaaaggcuugaaaauc

SEQ ID NO: 278297 - RNA, 22 nt, Human
gggaaacuguccaguucucccc

SEQ ID NO: 278298 - RNA, 22 nt, Human
gaguaaaaguuggauuacaaag

SEQ ID NO: 278299 - RNA, 21 nt, Human
ucaggcagugcaaauacaugg

SEQ ID NO: 278300 - RNA, 22 nt, Human
gaguccaggauuugagcucugu

SEQ ID NO: 278301 - RNA, 20 nt, Human
gccuagggucacuucaguga

SEQ ID NO: 278302 - RNA, 22 nt, Human
ggaccaggcugagcaccugccu

SEQ ID NO: 278303 - RNA, 22 nt, Human
gggagaaggaggacugugcugu

SEQ ID NO: 278304 - RNA, 22 nt, Human
ugcagagaccacugugccuucc

SEQ ID NO: 278305 - RNA, 22 nt, Human
uuaaacagguuuuugaauggcc

SEQ ID NO: 278306 - RNA, 22 nt, Human
cacagcuaccugcaugccugcu

SEQ ID NO: 278307 - RNA, 22 nt, Human
aagugauuuuccuacuugcuaa

SEQ ID NO: 278308 - RNA, 22 nt, Human
caggcaacguccuuagagaugc

SEQ ID NO: 278309 - RNA, 22 nt, Human
gggacagacccaugggccaggu

SEQ ID NO: 278310 - RNA, 22 nt, Human
cuguucacacacuuguacucuc

SEQ ID NO: 278311 - RNA, 22 nt, Human
cagagccaaaccucagggcccg

SEQ ID NO: 278312 - RNA, 22 nt, Human
augaggcaggauuaagcuauca

SEQ ID NO: 278313 - RNA, 22 nt, Human
uucgcagggagacaggcucucu

SEQ ID NO: 278314 - RNA, 22 nt, Human
guuugccugccgacgcucucau

SEQ ID NO: 278315 - RNA, 22 nt, Human
augcuuggaugcugccauggga

SEQ ID NO: 278316 - RNA, 22 nt, Human
uuuacauggaauauugucuugu

SEQ ID NO: 278317 - RNA, 22 nt, Human
uggcuucuuuccacuguccugu

SEQ ID NO: 278318 - RNA, 22 nt, Human
uagaaguuaggaaauaggaaua

SEQ ID NO: 278319 - RNA, 22 nt, Human
aucuguggaaauuggcaagugc

SEQ ID NO: 278320 - RNA, 17 nt, Human
uuucugcaugauuggac

SEQ ID NO: 278321 - RNA, 22 nt, Human
ggcucagcacagggcuggcauc

SEQ ID NO: 278322 - RNA, 22 nt, Human
ccagcucuggcuucuugcuggg

SEQ ID NO: 278323 - RNA, 18 nt, Human
cauaauuuucuuucuuua

SEQ ID NO: 278324 - RNA, 22 nt, Human
uuucaaauggaucccucagccu

SEQ ID NO: 278325 - RNA, 22 nt, Human
uucugucugauggugccagaac

SEQ ID NO: 278326 - RNA, 21 nt, Human
gucauccaccucucgggcucu

SEQ ID NO: 278327 - RNA, 22 nt, Human
cuguggcucucugcaggguccc

SEQ ID NO: 278328 - RNA, 22 nt, Human
aauaauuacccaucuuuuugua

SEQ ID NO: 278329 - RNA, 22 nt, Human
acaaaugaacauauaagcuuga

SEQ ID NO: 278330 - RNA, 22 nt, Human
ugcagggccagacuggguugga

SEQ ID NO: 278331 - RNA, 22 nt, Human
uccuguccacagcccugaccuc

SEQ ID NO: 278332 - RNA, 22 nt, Human
cugucucuguugccuguaggug

SEQ ID NO: 278333 - RNA, 22 nt, Human
uacaaguguaagcuugugagac

SEQ ID NO: 278334 - RNA, 22 nt, Human
gccaccagggggcuccagugag

SEQ ID NO: 278335 - RNA, 22 nt, Human
gagggggcuagcgcagugccca

SEQ ID NO: 278336 - RNA, 23 nt, Human
cauggaaaacugaaagcugaccu

SEQ ID NO: 278337 - RNA, 22 nt, Human
uacacauguauuuauguguaca

SEQ ID NO: 278338 - RNA, 19 nt, Human
uccaguguagcuggucauu

SEQ ID NO: 278339 - RNA, 20 nt, Human
uggcuccagccuccccuacc

SEQ ID NO: 278340 - RNA, 22 nt, Human
uguaaaugaaguaugcuuuacu

SEQ ID NO: 278341 - RNA, 22 nt, Human
auuuuuuauauaccaagguggg

SEQ ID NO: 278342 - RNA, 22 nt, Human
gcaggcagagagggguuuccag

SEQ ID NO: 278343 - RNA, 20 nt, Human
uuuauugagcacguacugug

SEQ ID NO: 278344 - RNA, 22 nt, Human
uugaaagauagugaagccagcc

SEQ ID NO: 278345 - RNA, 22 nt, Human
acauuuaaguuaaaaccucagu

SEQ ID NO: 278346 - RNA, 22 nt, Human
cggccaggcacaguggcccacg

SEQ ID NO: 278347 - RNA, 22 nt, Human
aauucccacuauaugccaagca

SEQ ID NO: 278348 - RNA, 22 nt, Human
cuuucucaaugccggaaggcac

SEQ ID NO: 278349 - RNA, 22 nt, Human
ucuugccucuuccccuuuccau

SEQ ID NO: 278350 - RNA, 22 nt, Human
ugagcccuggagcccucuguua

SEQ ID NO: 278351 - RNA, 22 nt, Human
agaagccauugaagcagaccuc

SEQ ID NO: 278352 - RNA, 19 nt, Human
ccauuguaaagaaaaaugu

SEQ ID NO: 278353 - RNA, 22 nt, Human
acagauugaucuugagaauuau

SEQ ID NO: 278354 - RNA, 22 nt, Human
ccugcaggggagagacuucuag

SEQ ID NO: 278355 - RNA, 22 nt, Human
acaagauuuuaugacucuuuuu

SEQ ID NO: 278356 - RNA, 22 nt, Human
agagagcugacuuuggagucag

SEQ ID NO: 278357 - RNA, 22 nt, Human
gagcuggcacagaaggaucuua

SEQ ID NO: 278358 - RNA, 22 nt, Human
augguauucucagcaccuagca

SEQ ID NO: 278359 - RNA, 22 nt, Human
uuccagcagcgugggagaagua

SEQ ID NO: 278360 - RNA, 22 nt, Human
uagguuuaggagugaaggugaa

SEQ ID NO: 278361 - RNA, 22 nt, Human
ucugggaacagccuggcugugu

SEQ ID NO: 278362 - RNA, 23 nt, Human
gugagucuugccuuugcugugga

SEQ ID NO: 278363 - RNA, 22 nt, Human
ggacucagcagccaggaguggc

SEQ ID NO: 278364 - RNA, 22 nt, Human
uucuuugggcucagagagggag

SEQ ID NO: 278365 - RNA, 22 nt, Human
agcuuugaaguauuuggucucc

SEQ ID NO: 278366 - RNA, 18 nt, Human
uggcugcuggaguagggu

SEQ ID NO: 278367 - RNA, 22 nt, Human
ggguccagaguugaagagguua

SEQ ID NO: 278368 - RNA, 22 nt, Human
agcuccaggaucugaaaguucg

SEQ ID NO: 278369 - RNA, 22 nt, Human
ccugcucccgggacgcguucac

SEQ ID NO: 278370 - RNA, 22 nt, Human
gaggcugccccuuccucagcug

SEQ ID NO: 278371 - RNA, 22 nt, Human
cugggccugccaccaucuuagg

SEQ ID NO: 278372 - RNA, 22 nt, Human
aaugguuuguaccuguccuugg

SEQ ID NO: 278373 - RNA, 22 nt, Human
gugggaagucucucggaggaag

SEQ ID NO: 278374 - RNA, 20 nt, Human
cuagaacugagaaauuuaaa

SEQ ID NO: 278375 - RNA, 19 nt, Human
gauauaaagagauggugaa

SEQ ID NO: 278376 - RNA, 22 nt, Human
guggcugcuaagucuccuuccu

SEQ ID NO: 278377 - RNA, 22 nt, Human
gugcauuauucuuaccuuucuu

SEQ ID NO: 278378 - RNA, 22 nt, Human
ggaggaagcccucggugcccca

SEQ ID NO: 278379 - RNA, 22 nt, Human
agggagcuuuaccccagaucac

SEQ ID NO: 278380 - RNA, 22 nt, Human
aggcucugaucagguggcugug

SEQ ID NO: 278381 - RNA, 22 nt, Human
gucauucaacugcacauuaggu

SEQ ID NO: 278382 - RNA, 22 nt, Human
augaaauucaucugagaaugcu

SEQ ID NO: 278383 - RNA, 17 nt, Human
ucuagagcacuuugaga

SEQ ID NO: 278384 - RNA, 22 nt, Human
aauguuuugcauuaguuuucua

SEQ ID NO: 278385 - RNA, 22 nt, Human
ucuuuccauggccacacagucu

SEQ ID NO: 278386 - RNA, 22 nt, Human
cuguuaaauagacugcagugca

SEQ ID NO: 278387 - RNA, 22 nt, Human
cugccuugguuucuagcagggc

SEQ ID NO: 278388 - RNA, 22 nt, Human
agucaacaccugguucuauuac

SEQ ID NO: 278389 - RNA, 22 nt, Human
auuaaagaaacccagcauguga

SEQ ID NO: 278390 - RNA, 22 nt, Human
cagcacaguuucccccaugagc

SEQ ID NO: 278391 - RNA, 22 nt, Human
uaaggcuaucugaguuuaugug

SEQ ID NO: 278392 - RNA, 17 nt, Human
gcccucagcuuuaacca

SEQ ID NO: 278393 - RNA, 22 nt, Human
cuugaauccaaaugggagauga

SEQ ID NO: 278394 - RNA, 22 nt, Human
aagcaccacccucccaaccugu

SEQ ID NO: 278395 - RNA, 22 nt, Human
cccugggauggauuggcaggaa

SEQ ID NO: 278396 - RNA, 22 nt, Human
cauuuagaaacuguuuuuaaca

SEQ ID NO: 278397 - RNA, 22 nt, Human
caguuaaaaugugcuauaagaa

SEQ ID NO: 278398 - RNA, 22 nt, Human
uccuagaggaugguaggaagcu

SEQ ID NO: 278399 - RNA, 22 nt, Human
cagcaugaaaaguguugcuauc

SEQ ID NO: 278400 - RNA, 22 nt, Human
gggcagguggccucuuguacua

SEQ ID NO: 278401 - RNA, 22 nt, Human
aacaagcagaugcaaugcacuu

SEQ ID NO: 278402 - RNA, 19 nt, Human
uggagcagggcccuuguuu

SEQ ID NO: 278403 - RNA, 22 nt, Human
gcugccuggcuuuaguccacuu

SEQ ID NO: 278404 - RNA, 22 nt, Human
ccaggaagccugugucucugga

SEQ ID NO: 278405 - RNA, 22 nt, Human
cggcugugucuucacaggagcc

SEQ ID NO: 278406 - RNA, 22 nt, Human
uccaugcaaacaguggcuagcu

SEQ ID NO: 278407 - RNA, 22 nt, Human
ccuggggccccgagccagaagc

SEQ ID NO: 278408 - RNA, 22 nt, Human
acuuagauuccugguaccuccg

SEQ ID NO: 278409 - RNA, 22 nt, Human
ggaaagagaaguugggaggaau

SEQ ID NO: 278410 - RNA, 22 nt, Human
uuaguacauagaugaugguuga

SEQ ID NO: 278411 - RNA, 22 nt, Human
gagcaguuauuuuuagacauga

SEQ ID NO: 278412 - RNA, 22 nt, Human
uuuaucuuuaggacuuugcaga

SEQ ID NO: 278413 - RNA, 22 nt, Human
aaagugcauucgaaaguccauc

SEQ ID NO: 278414 - RNA, 22 nt, Human
cccaugcugaguggccugagau

SEQ ID NO: 278415 - RNA, 22 nt, Human
aagaaagauaagguuugcuugg

SEQ ID NO: 278416 - RNA, 22 nt, Human
agcaggagagcagugcgugguc

SEQ ID NO: 278417 - RNA, 20 nt, Human
ucugagaccuuuccacaccc

SEQ ID NO: 278418 - RNA, 22 nt, Human
ccuggcugcuauagcagcaugu

SEQ ID NO: 278419 - RNA, 22 nt, Human
aagcagccacuggccaguuaua

SEQ ID NO: 278420 - RNA, 22 nt, Human
agcaaaagauagauuaacaaga

SEQ ID NO: 278421 - RNA, 22 nt, Human
auuuagaacuuuguuugccaau

SEQ ID NO: 278422 - RNA, 22 nt, Human
uaggccaggacagagcuuccag

SEQ ID NO: 278423 - RNA, 22 nt, Human
agggcccucuggcaggccaggc

SEQ ID NO: 278424 - RNA, 21 nt, Human
ugcuucucuagaucaacuacu

SEQ ID NO: 278425 - RNA, 22 nt, Human
uucaacaauuaaguaucagccu

SEQ ID NO: 278426 - RNA, 22 nt, Human
uuauauaaagauaacuuuucuu

SEQ ID NO: 278427 - RNA, 22 nt, Human
ccagaagugucuaucaagaugu

SEQ ID NO: 278428 - RNA, 22 nt, Human
ggcuguggggaccaacaggacu

SEQ ID NO: 278429 - RNA, 22 nt, Human
uagggcuggguacacucuugcc

SEQ ID NO: 278430 - RNA, 22 nt, Human
gccaggucaccucacucaucca

SEQ ID NO: 278431 - RNA, 22 nt, Human
cagccaggauggagaacuguug

SEQ ID NO: 278432 - RNA, 22 nt, Human
ucagagcaaauuccugugagcc

SEQ ID NO: 278433 - RNA, 22 nt, Human
uacuuccuguuuccaugucugu

SEQ ID NO: 278434 - RNA, 22 nt, Human
cuaaucaucuuucucuuaaagc

SEQ ID NO: 278435 - RNA, 22 nt, Human
aagcccauaaaaagaggucccu

SEQ ID NO: 278436 - RNA, 22 nt, Human
auucagcaugcaauuagguaau

SEQ ID NO: 278437 - RNA, 22 nt, Human
aggaggugcuagagaagauguu

SEQ ID NO: 278438 - RNA, 22 nt, Human
acuguaaaauacauaaguauug

SEQ ID NO: 278439 - RNA, 22 nt, Human
gacuuucuaaugcucuguagau

SEQ ID NO: 278440 - RNA, 22 nt, Human
agaggagguggugaugcuuuaa

SEQ ID NO: 278441 - RNA, 22 nt, Human
gcucagggagagagggcagccg

SEQ ID NO: 278442 - RNA, 22 nt, Human
ugggacacacaaggucagcucu

SEQ ID NO: 278443 - RNA, 22 nt, Human
uuugaagacauuugaauacuuu

SEQ ID NO: 278444 - RNA, 22 nt, Human
ugaggccugcauugaacuagaa

SEQ ID NO: 278445 - RNA, 22 nt, Human
uugcuuuauguguaugacuuga

SEQ ID NO: 278446 - RNA, 21 nt, Human
gggguuggcaagagcagagac

SEQ ID NO: 278447 - RNA, 22 nt, Human
cccacaucccuuccccgcugug

SEQ ID NO: 278448 - RNA, 19 nt, Human
uucacauuuuuguggcacu

SEQ ID NO: 278449 - RNA, 22 nt, Human
aaugucagccugaaagcuauuc

SEQ ID NO: 278450 - RNA, 22 nt, Human
gggucugggcaggcgcuuccuc

SEQ ID NO: 278451 - RNA, 18 nt, Human
gcucagcuaugggagguu

SEQ ID NO: 278452 - RNA, 22 nt, Human
ggggaccuuuccauuucugaga

SEQ ID NO: 278453 - RNA, 22 nt, Human
cagaaucuucuuaauuggcaca

SEQ ID NO: 278454 - RNA, 22 nt, Human
ucauuguauacuuuauuuauga

SEQ ID NO: 278455 - RNA, 22 nt, Human
uuuccucacucaugucaucagu

SEQ ID NO: 278456 - RNA, 22 nt, Human
aacagaaucuuggguucuuuuc

SEQ ID NO: 278457 - RNA, 22 nt, Human
uuagagaaaggguuugauuccg

SEQ ID NO: 278458 - RNA, 22 nt, Human
uagcugggucucuguuuucuca

SEQ ID NO: 278459 - RNA, 22 nt, Human
uguuggaaaagaauuaacuagg

SEQ ID NO: 278460 - RNA, 22 nt, Human
uuuggcaagugggaaauuagua

SEQ ID NO: 278461 - RNA, 22 nt, Human
aguggccaccaugccagcucuc

SEQ ID NO: 278462 - RNA, 22 nt, Human
aucuuuuacauuacugcccaga

SEQ ID NO: 278463 - RNA, 22 nt, Human
cacagcagaaaguguaggagga

SEQ ID NO: 278464 - RNA, 22 nt, Human
aguccugugcaaaugcaucuga

SEQ ID NO: 278465 - RNA, 22 nt, Human
ucuucuggaucgaucacauugu

SEQ ID NO: 278466 - RNA, 16 nt, Human
uccaguuuucagcacu

SEQ ID NO: 278467 - RNA, 22 nt, Human
agcagcuggaacuaauaguggu

SEQ ID NO: 278468 - RNA, 21 nt, Human
ugacauuuccaauauaaagcc

SEQ ID NO: 278469 - RNA, 22 nt, Human
auagcaauuugcccaauuaccu

SEQ ID NO: 278470 - RNA, 22 nt, Human
aauauuaguuucucaagagaga

SEQ ID NO: 278471 - RNA, 22 nt, Human
ucuccagguggcuugggcuucu

SEQ ID NO: 278472 - RNA, 22 nt, Human
ucuuccuugcuccuugucacuu

SEQ ID NO: 278473 - RNA, 22 nt, Human
uugcaaucugcaaagcugugga

SEQ ID NO: 278474 - RNA, 21 nt, Human
aacaaagggaugcucaucuuu

SEQ ID NO: 278475 - RNA, 22 nt, Human
uggagaugaacauggugauguu

SEQ ID NO: 278476 - RNA, 22 nt, Human
uucaaggagauuggagucuacu

SEQ ID NO: 278477 - RNA, 22 nt, Human
ccugggcucugaggagggaguc

SEQ ID NO: 278478 - RNA, 19 nt, Human
uucacaagugaugucucuc

SEQ ID NO: 278479 - RNA, 22 nt, Human
cuucacagucacccugcugugu

SEQ ID NO: 278480 - RNA, 22 nt, Human
aucuggaauccuuguggacaau

SEQ ID NO: 278481 - RNA, 22 nt, Human
cuugggaguagaggcaggagca

SEQ ID NO: 278482 - RNA, 23 nt, Human
ucuccuggcugcacuguggccac

SEQ ID NO: 278483 - RNA, 22 nt, Human
ugggaagggucugaaucugaga

SEQ ID NO: 278484 - RNA, 22 nt, Human
uauguucaucuggugcaucagu

SEQ ID NO: 278485 - RNA, 22 nt, Human
cagaagaggacuggguagcuca

SEQ ID NO: 278486 - RNA, 20 nt, Human
cagaggcauuuucagacucu

SEQ ID NO: 278487 - RNA, 18 nt, Human
aggacacauucuucccuc

SEQ ID NO: 278488 - RNA, 20 nt, Human
uuuuuccuucucuacaggca

SEQ ID NO: 278489 - RNA, 22 nt, Human
gcaacuuaggaguuagagcaug

SEQ ID NO: 278490 - RNA, 22 nt, Human
cugggaagaaauugugggaggc

SEQ ID NO: 278491 - RNA, 22 nt, Human
accaggcacucuuguggcagug

SEQ ID NO: 278492 - RNA, 22 nt, Human
uugguuuaguaccugccagcgu

SEQ ID NO: 278493 - RNA, 22 nt, Human
aacaauaacuagacaugccaug

SEQ ID NO: 278494 - RNA, 22 nt, Human
ugauguguggcaguuaaacugu

SEQ ID NO: 278495 - RNA, 22 nt, Human
ucuguucuucuccacuguaugu

SEQ ID NO: 278496 - RNA, 22 nt, Human
ugaggcagggagaguggauaug

SEQ ID NO: 278497 - RNA, 22 nt, Human
cagcuagcuucccugcagugcu

SEQ ID NO: 278498 - RNA, 22 nt, Human
cagguacacucccuugugcuga

SEQ ID NO: 278499 - RNA, 20 nt, Human
acccagcucugugcccuggg

SEQ ID NO: 278500 - RNA, 22 nt, Human
agggaccugcucacugccuggc

SEQ ID NO: 278501 - RNA, 22 nt, Human
augguacaaaauguauaaaguc

SEQ ID NO: 278502 - RNA, 22 nt, Human
uggcagagucugggcuugggca

SEQ ID NO: 278503 - RNA, 17 nt, Human
uuaucuacugcuacugu

SEQ ID NO: 278504 - RNA, 22 nt, Human
ugauguucuguauaucauauag

SEQ ID NO: 278505 - RNA, 22 nt, Human
acuauuuacucaaaugagguug

SEQ ID NO: 278506 - RNA, 22 nt, Human
acugucuucaaaugaauauauu

SEQ ID NO: 278507 - RNA, 19 nt, Human
ucagugucccuguuaauau

SEQ ID NO: 278508 - RNA, 22 nt, Human
gauucuugggccuucugaaguu

SEQ ID NO: 278509 - RNA, 20 nt, Human
uuacucauaggaccacaagc

SEQ ID NO: 278510 - RNA, 22 nt, Human
cugcaggagggcuggggaagcc

SEQ ID NO: 278511 - RNA, 22 nt, Human
cuggaagaccccccaggacuca

SEQ ID NO: 278512 - RNA, 22 nt, Human
cauuaucucuucuauaugcuag

SEQ ID NO: 278513 - RNA, 22 nt, Human
cuagagcuauucaagguuuuau

SEQ ID NO: 278514 - RNA, 22 nt, Human
auuuauugagacuuaacaaccc

SEQ ID NO: 278515 - RNA, 22 nt, Human
ucaguguccauaaauaaaguuu

SEQ ID NO: 278516 - RNA, 22 nt, Human
agaaccuucagcuugcaacaag

SEQ ID NO: 278517 - RNA, 22 nt, Human
agauccaugugauuuggaguuc

SEQ ID NO: 278518 - RNA, 22 nt, Human
gccaggcuguggggaacuugaa

SEQ ID NO: 278519 - RNA, 22 nt, Human
gcucaggucuuacccaugccug

SEQ ID NO: 278520 - RNA, 18 nt, Human
ggcacuggugaugcagag

SEQ ID NO: 278521 - RNA, 22 nt, Human
ugucuccaugugauaguggccu

SEQ ID NO: 278522 - RNA, 22 nt, Human
cucugaagaugguaccagcuuu

SEQ ID NO: 278523 - RNA, 22 nt, Human
gaaugauauuauuucgugcugg

SEQ ID NO: 278524 - RNA, 22 nt, Human
cagagacauucuccccauugga

SEQ ID NO: 278525 - RNA, 22 nt, Human
aagaauuaucugaaagcugugu

SEQ ID NO: 278526 - RNA, 22 nt, Human
cugcauuagucaugcuuugcag

SEQ ID NO: 278527 - RNA, 22 nt, Human
auacaucuagagucauaaaaac

SEQ ID NO: 278528 - RNA, 22 nt, Human
aucuccagcaauggggagcucu

SEQ ID NO: 278529 - RNA, 22 nt, Human
uucaagcagagauauuucaaga

SEQ ID NO: 278530 - RNA, 19 nt, Human
cagagccuucagugacucc

SEQ ID NO: 278531 - RNA, 22 nt, Human
agcuggccuucggugucacugg

SEQ ID NO: 278532 - RNA, 22 nt, Human
cagcacugugauaacugagcca

SEQ ID NO: 278533 - RNA, 22 nt, Human
uccuuagagauacugucuugaa

SEQ ID NO: 278534 - RNA, 22 nt, Human
ucccagccggugccuggguccc

SEQ ID NO: 278535 - RNA, 22 nt, Human
aacacuguaucagucuucaaua

SEQ ID NO: 278536 - RNA, 22 nt, Human
ugcugagguuguggagugcauu

SEQ ID NO: 278537 - RNA, 22 nt, Human
gagucagaagaaacuauuuaca

SEQ ID NO: 278538 - RNA, 22 nt, Human
aaacaaacauagguuugaaagu

SEQ ID NO: 278539 - RNA, 22 nt, Human
agcacagaauggcuuggaagcc

SEQ ID NO: 278540 - RNA, 22 nt, Human
aguuuacauauuugucggaguc

SEQ ID NO: 278541 - RNA, 22 nt, Human
uauacagauaucuaagauguaa

SEQ ID NO: 278542 - RNA, 22 nt, Human
ucuaagaucuacuauacaugug

SEQ ID NO: 278543 - RNA, 22 nt, Human
ucucugaugcugccagggaaaa

SEQ ID NO: 278544 - RNA, 22 nt, Human
gccaggcuggugcaaggauauu

SEQ ID NO: 278545 - RNA, 22 nt, Human
acugaaagauaaaucaguuagc

SEQ ID NO: 278546 - RNA, 22 nt, Human
aggaccagaggccagagucagc

SEQ ID NO: 278547 - RNA, 22 nt, Human
gucauuccuauccauuugauac

SEQ ID NO: 278548 - RNA, 22 nt, Human
gcccucuguuauugcauccuua

SEQ ID NO: 278549 - RNA, 22 nt, Human
aagcugaagacacagcuccagu

SEQ ID NO: 278550 - RNA, 22 nt, Human
agucaacauuugagaugcaaug

SEQ ID NO: 278551 - RNA, 22 nt, Human
guacaauaacuagucuuauagu

SEQ ID NO: 278552 - RNA, 19 nt, Human
ucacagacagagcaaucac

SEQ ID NO: 278553 - RNA, 22 nt, Human
cauuuaguuuugcaguagcagg

SEQ ID NO: 278554 - RNA, 23 nt, Human
auauaaacaccagauagauugua

SEQ ID NO: 278555 - RNA, 22 nt, Human
ccagugcauugccgugucuagg

SEQ ID NO: 278556 - RNA, 22 nt, Human
uuuuuggcagcucagaaacuuc

SEQ ID NO: 278557 - RNA, 22 nt, Human
uguuuacuuuuaauuaccuguc

SEQ ID NO: 278558 - RNA, 22 nt, Human
gaagagcugacagugucauccu

SEQ ID NO: 278559 - RNA, 22 nt, Human
caauaacugcuaaauucccugu

SEQ ID NO: 278560 - RNA, 18 nt, Human
auccuagaccauacacag

SEQ ID NO: 278561 - RNA, 22 nt, Human
augguuuauugcuuuaaugaaa

SEQ ID NO: 278562 - RNA, 22 nt, Human
uuaaauugucauuugagcaaug

SEQ ID NO: 278563 - RNA, 22 nt, Human
auguagcagauauuugugcaca

SEQ ID NO: 278564 - RNA, 22 nt, Human
uauuucuauuccccaggcaagu

SEQ ID NO: 278565 - RNA, 22 nt, Human
ccaagcuggacagcagcaagga

SEQ ID NO: 278566 - RNA, 22 nt, Human
uggcaagagggaugcaagguuu

SEQ ID NO: 278567 - RNA, 22 nt, Human
uaauuagaguuugguaaacaau

SEQ ID NO: 278568 - RNA, 22 nt, Human
uucauugaaauacagucuugac

SEQ ID NO: 278569 - RNA, 22 nt, Human
cucugaggucuaggaccauggc

SEQ ID NO: 278570 - RNA, 22 nt, Human
caggcuucgcucugugggcagg

SEQ ID NO: 278571 - RNA, 22 nt, Human
guacacauagguuacugauuaa

SEQ ID NO: 278572 - RNA, 22 nt, Human
agcugaaaauuagugauaguuu

SEQ ID NO: 278573 - RNA, 22 nt, Human
gcuacaagucuugucauucauu

SEQ ID NO: 278574 - RNA, 22 nt, Human
auaaacagccugcccaaauugg

SEQ ID NO: 278575 - RNA, 22 nt, Human
aguacauacuucaaauguacuu

SEQ ID NO: 278576 - RNA, 22 nt, Human
agugucagcuaauuauucauga

SEQ ID NO: 278577 - RNA, 22 nt, Human
cuccuggccccagaucccaauc

SEQ ID NO: 278578 - RNA, 18 nt, Human
gaaaugugauucuagggc

SEQ ID NO: 278579 - RNA, 22 nt, Human
gaggacagagccgccuggcaag

SEQ ID NO: 278580 - RNA, 22 nt, Human
uuagaaucuaacauucuuaucu

SEQ ID NO: 278581 - RNA, 22 nt, Human
uguaaaagacauuucuaagcaa

SEQ ID NO: 278582 - RNA, 22 nt, Human
uggcugugggauaugugacuga

SEQ ID NO: 278583 - RNA, 22 nt, Human
acaacugucaguaaagaauauu

SEQ ID NO: 278584 - RNA, 22 nt, Human
auuaaauuuucacuaggcuccc

SEQ ID NO: 278585 - RNA, 22 nt, Human
uuuuugcuccacaacuuugaag

SEQ ID NO: 278586 - RNA, 22 nt, Human
guaacacucuaaagggaugcac

SEQ ID NO: 278587 - RNA, 22 nt, Human
augugcuggcuaacuggauggg

SEQ ID NO: 278588 - RNA, 22 nt, Human
gccccaccugcuaccuuccagc

SEQ ID NO: 278589 - RNA, 22 nt, Human
ucagauauucucuaagaacaau

SEQ ID NO: 278590 - RNA, 22 nt, Human
gaguucuucuauauaguaugag

SEQ ID NO: 278591 - RNA, 22 nt, Human
auacuucucaugggcucugagc

SEQ ID NO: 278592 - RNA, 21 nt, Human
uccuggcccacucuaucccca

SEQ ID NO: 278593 - RNA, 22 nt, Human
aggaccuguaccucagcaucua

SEQ ID NO: 278594 - RNA, 22 nt, Human
cacagaggaaaggcaguuggua

SEQ ID NO: 278595 - RNA, 21 nt, Human
agaugcaguuugcaggugggu

SEQ ID NO: 278596 - RNA, 22 nt, Human
uauaguuucaugagcuuuuuaa

SEQ ID NO: 278597 - RNA, 22 nt, Human
acugggcuccaaggaccuggag

SEQ ID NO: 278598 - RNA, 22 nt, Human
uucugugauugacauguggcuu

SEQ ID NO: 278599 - RNA, 22 nt, Human
ccucuggggguccucagagucu

SEQ ID NO: 278600 - RNA, 19 nt, Human
gaauuuuaggacuucagca

SEQ ID NO: 278601 - RNA, 23 nt, Human
cauguacacacagcuguacagug

SEQ ID NO: 278602 - RNA, 22 nt, Human
guccugugugacuucccaaaug

SEQ ID NO: 278603 - RNA, 22 nt, Human
ugcucuguccagugcaccauca

SEQ ID NO: 278604 - RNA, 22 nt, Human
gccagagugccaucagugccau

SEQ ID NO: 278605 - RNA, 22 nt, Human
ugcccugccaagacugaguggu

SEQ ID NO: 278606 - RNA, 22 nt, Human
augcaaaaguaguugcaguuuu

SEQ ID NO: 278607 - RNA, 19 nt, Human
uacauuccacacaaucucu

SEQ ID NO: 278608 - RNA, 22 nt, Human
gccaccuggacucagagccagg

SEQ ID NO: 278609 - RNA, 22 nt, Human
cagggagcggagucccaugccu

SEQ ID NO: 278610 - RNA, 22 nt, Human
cuucagcuuucagcuucccuga

SEQ ID NO: 278611 - RNA, 22 nt, Human
cugaaaaauauguuuuggagaa

SEQ ID NO: 278612 - RNA, 22 nt, Human
caaggcaggcaguucacuugag

SEQ ID NO: 278613 - RNA, 22 nt, Human
gaguuacacaaaauuucuauuu

SEQ ID NO: 278614 - RNA, 20 nt, Human
uacagccccugcuucuguug

SEQ ID NO: 278615 - RNA, 22 nt, Human
uugacagcuacggagcagcugu

SEQ ID NO: 278616 - RNA, 22 nt, Human
gcagacccugaacugggcaugg

SEQ ID NO: 278617 - RNA, 22 nt, Human
cuguccuggagggcauaggacg

SEQ ID NO: 278618 - RNA, 22 nt, Human
cagcccagcagacuguuaccac

SEQ ID NO: 278619 - RNA, 22 nt, Human
uacaugaagaaaauuaagcagu

SEQ ID NO: 278620 - RNA, 17 nt, Human
uccaugagacaugaaga

SEQ ID NO: 278621 - RNA, 22 nt, Human
agcaguccaacugagguggcau

SEQ ID NO: 278622 - RNA, 22 nt, Human
cagcugagaguagaaauggagg

SEQ ID NO: 278623 - RNA, 22 nt, Human
cuccuucuccucgggaggccag

SEQ ID NO: 278624 - RNA, 22 nt, Human
uccagggacaguauagaggauc

SEQ ID NO: 278625 - RNA, 22 nt, Human
uauagcaauucagaauacaugu

SEQ ID NO: 278626 - RNA, 21 nt, Human
ucagggcagcugcucuucaga

SEQ ID NO: 278627 - RNA, 22 nt, Human
guuuacuguuaaccaacgaaug

SEQ ID NO: 278628 - RNA, 22 nt, Human
uacagggauuguuuuaaucacc

SEQ ID NO: 278629 - RNA, 22 nt, Human
agaucagacuuugugacuagga

SEQ ID NO: 278630 - RNA, 22 nt, Human
aacuuucuauagguugggauuu

SEQ ID NO: 278631 - RNA, 22 nt, Human
cauugaaaaacguugacugagu

SEQ ID NO: 278632 - RNA, 22 nt, Human
ugugcaugacagcauacaaacg

SEQ ID NO: 278633 - RNA, 22 nt, Human
gaaacagauuaacagcauauuu

SEQ ID NO: 278634 - RNA, 20 nt, Human
gccugcagguuggaugggau

SEQ ID NO: 278635 - RNA, 22 nt, Human
acaugcuuuucccacaauuaua

SEQ ID NO: 278636 - RNA, 22 nt, Human
cucuuaguaaugccaugaagca

SEQ ID NO: 278637 - RNA, 22 nt, Human
gucuuccacauuucaagaggcu

SEQ ID NO: 278638 - RNA, 22 nt, Human
aagguggugcuucugcuccucu

SEQ ID NO: 278639 - RNA, 22 nt, Human
aaaauucauagaacuguacgcu

SEQ ID NO: 278640 - RNA, 21 nt, Human
aucugaaagguuaguguugag

SEQ ID NO: 278641 - RNA, 22 nt, Human
cuugccaaauuaacauacagaa

SEQ ID NO: 278642 - RNA, 22 nt, Human
gggaccagugucugugagaaaa

SEQ ID NO: 278643 - RNA, 19 nt, Human
uuccuggcucuucuguuuu

SEQ ID NO: 278644 - RNA, 22 nt, Human
aacauugaguucuacuuccauu

SEQ ID NO: 278645 - RNA, 22 nt, Human
ugccuguguugauuacuuuguc

SEQ ID NO: 278646 - RNA, 22 nt, Human
gcuuaggaugaaugcuguagaa

SEQ ID NO: 278647 - RNA, 23 nt, Human
ggaauguuuaccugugaauguca

SEQ ID NO: 278648 - RNA, 22 nt, Human
cuuagaugaagucacagaaccc

SEQ ID NO: 278649 - RNA, 22 nt, Human
uauauuguuggugggaauauaa

SEQ ID NO: 278650 - RNA, 22 nt, Human
gugaggcagaaguucccuuuua

SEQ ID NO: 278651 - RNA, 22 nt, Human
uagggaugagccaguggguagu

SEQ ID NO: 278652 - RNA, 22 nt, Human
uuagcaauugauucucauaagc

SEQ ID NO: 278653 - RNA, 22 nt, Human
auagauauuagcaaaauuuuau

SEQ ID NO: 278654 - RNA, 22 nt, Human
gugcccugguccccagcauaua

SEQ ID NO: 278655 - RNA, 22 nt, Human
uuccugaacauuucuaaguuga

SEQ ID NO: 278656 - RNA, 22 nt, Human
caaggcuucacguccccagugc

SEQ ID NO: 278657 - RNA, 22 nt, Human
gagaaacuuggaguuauucugg

SEQ ID NO: 278658 - RNA, 18 nt, Human
ggagcccagaggugaguu

SEQ ID NO: 278659 - RNA, 22 nt, Human
uggagcagcauucauccagcag

SEQ ID NO: 278660 - RNA, 22 nt, Human
guaggcagguggaggagugaag

SEQ ID NO: 278661 - RNA, 22 nt, Human
ucugccugagaaguggggugcc

SEQ ID NO: 278662 - RNA, 22 nt, Human
uuacugaggguguaucuuagug

SEQ ID NO: 278663 - RNA, 22 nt, Human
ugugccugauggucacguggcc

SEQ ID NO: 278664 - RNA, 22 nt, Human
cucuccacuguccuuugcuggu

SEQ ID NO: 278665 - RNA, 22 nt, Human
uugcaaaguucccuacacaugu

SEQ ID NO: 278666 - RNA, 22 nt, Human
augaggucaucuugaaguaggg

SEQ ID NO: 278667 - RNA, 22 nt, Human
ugguccaggcacccuucuagag

SEQ ID NO: 278668 - RNA, 18 nt, Human
auuucuacuacuauaaag

SEQ ID NO: 278669 - RNA, 22 nt, Human
uuagcucuuuguagcuauuucu

SEQ ID NO: 278670 - RNA, 22 nt, Human
gcagcucagggagagggcacca

SEQ ID NO: 278671 - RNA, 20 nt, Human
aaacuaaagguguuugguuu

SEQ ID NO: 278672 - RNA, 21 nt, Human
uguuuaauacauauuugugga

SEQ ID NO: 278673 - RNA, 22 nt, Human
ccaggccucuggcugcuuaguc

SEQ ID NO: 278674 - RNA, 22 nt, Human
ugagcccuccaaacccaggauu

SEQ ID NO: 278675 - RNA, 23 nt, Human
gggaccagcuagggcugugaccu

SEQ ID NO: 278676 - RNA, 22 nt, Human
auauauauugcccaggcugguu

SEQ ID NO: 278677 - RNA, 18 nt, Human
augcccuguugacuucag

SEQ ID NO: 278678 - RNA, 22 nt, Human
accaggaaaaacacuguguugg

SEQ ID NO: 278679 - RNA, 22 nt, Human
ucccaggcaggugacaggggga

SEQ ID NO: 278680 - RNA, 22 nt, Human
gguauacugcaugacauugggg

SEQ ID NO: 278681 - RNA, 22 nt, Human
agcugccacugagggugcacag

SEQ ID NO: 278682 - RNA, 22 nt, Human
uuacaagguaaguuguuaaguc

SEQ ID NO: 278683 - RNA, 22 nt, Human
acagaacuggaauuggaacuca

SEQ ID NO: 278684 - RNA, 19 nt, Human
ggcauccacgaaugcagag

SEQ ID NO: 278685 - RNA, 22 nt, Human
gagcauuuuugucugcauuuua

SEQ ID NO: 278686 - RNA, 22 nt, Human
ugcuuugcaggaacccuaagca

SEQ ID NO: 278687 - RNA, 22 nt, Human
uuacagaagagaaagaauucag

SEQ ID NO: 278688 - RNA, 22 nt, Human
uaggaaacaaaguggaugaaau

SEQ ID NO: 278689 - RNA, 22 nt, Human
cugugaauugaauaugacuaug

SEQ ID NO: 278690 - RNA, 22 nt, Human
gggaucuuucugaugcuguggc

SEQ ID NO: 278691 - RNA, 22 nt, Human
ggcagcugagaucaugcuguug

SEQ ID NO: 278692 - RNA, 22 nt, Human
uucauagacccagaacucauua

SEQ ID NO: 278693 - RNA, 22 nt, Human
aaugacaauauuaauuuggagg

SEQ ID NO: 278694 - RNA, 22 nt, Human
uuuccccagguagauagauaau

SEQ ID NO: 278695 - RNA, 21 nt, Human
cgguggcucccgggauggcuc

SEQ ID NO: 278696 - RNA, 22 nt, Human
auacucagcugcuagacagaag

SEQ ID NO: 278697 - RNA, 22 nt, Human
ccucaggauccgcaggugcagu

SEQ ID NO: 278698 - RNA, 22 nt, Human
gucaggucuuggaagauaggcu

SEQ ID NO: 278699 - RNA, 22 nt, Human
ugagaggcuagaucagcucugu

SEQ ID NO: 278700 - RNA, 20 nt, Human
agauuuaccuuugagccuuc

SEQ ID NO: 278701 - RNA, 22 nt, Human
agccagaggaagccuggcccuc

SEQ ID NO: 278702 - RNA, 22 nt, Human
aaaaggcuaauuaaguuuugga

SEQ ID NO: 278703 - RNA, 19 nt, Human
gccaggcuccauagccggc

SEQ ID NO: 278704 - RNA, 22 nt, Human
uacaguauggaaaauguauagu

SEQ ID NO: 278705 - RNA, 22 nt, Human
aaugaguucugguucauuuuau

SEQ ID NO: 278706 - RNA, 22 nt, Human
gcauggcugcucccuggcugca

SEQ ID NO: 278707 - RNA, 22 nt, Human
aggcugaggcuuuccuuggaga

SEQ ID NO: 278708 - RNA, 22 nt, Human
caggaagcuggucagauccugu

SEQ ID NO: 278709 - RNA, 21 nt, Human
auuuccacauaaucauaagac

SEQ ID NO: 278710 - RNA, 22 nt, Human
agcucagggcaaagacucaaau

SEQ ID NO: 278711 - RNA, 22 nt, Human
uccugggguuuagagggaagug

SEQ ID NO: 278712 - RNA, 22 nt, Human
ucccagggcagcuguccagaag

SEQ ID NO: 278713 - RNA, 22 nt, Human
aucauguuccagaaacagugau

SEQ ID NO: 278714 - RNA, 22 nt, Human
cagccacuucgagcuuccugau

SEQ ID NO: 278715 - RNA, 22 nt, Human
aguuuggaagaauuuggucugu

SEQ ID NO: 278716 - RNA, 22 nt, Human
auugcugacaccaaguaguagc

SEQ ID NO: 278717 - RNA, 22 nt, Human
auucuugauauagauaguuaau

SEQ ID NO: 278718 - RNA, 22 nt, Human
uuacacuucuaaaaaaagcagg

SEQ ID NO: 278719 - RNA, 22 nt, Human
agcuccuugaauuaaugcugcu

SEQ ID NO: 278720 - RNA, 22 nt, Human
aagcacuaggucacacaaguua

SEQ ID NO: 278721 - RNA, 22 nt, Human
auaaucuuguauuuccuaaagu

SEQ ID NO: 278722 - RNA, 22 nt, Human
auagcacaauauuaccuuuaug

SEQ ID NO: 278723 - RNA, 22 nt, Human
gaagucuugaaacacaaacuag

SEQ ID NO: 278724 - RNA, 22 nt, Human
ucugggcucugcgaagcccuuc

SEQ ID NO: 278725 - RNA, 22 nt, Human
gcaccaggagaaucacguuaga

SEQ ID NO: 278726 - RNA, 22 nt, Human
aagcuguuguucauccugaauu

SEQ ID NO: 278727 - RNA, 22 nt, Human
gcaguccuagggugcucugcag

SEQ ID NO: 278728 - RNA, 22 nt, Human
agggaccaaucaccgacaggcu

SEQ ID NO: 278729 - RNA, 22 nt, Human
gggcuggcgggaaaggcaauuc

SEQ ID NO: 278730 - RNA, 22 nt, Human
cagacacaccaggcccauucug

SEQ ID NO: 278731 - RNA, 22 nt, Human
aacaaauggggccuuguaugaa

SEQ ID NO: 278732 - RNA, 22 nt, Human
aauaagcaagccugugugcaag

SEQ ID NO: 278733 - RNA, 22 nt, Human
uacaggaggauuaucaaaggau

SEQ ID NO: 278734 - RNA, 22 nt, Human
ugccugcuuucugggcugccau

SEQ ID NO: 278735 - RNA, 22 nt, Human
ugacagggaaagguccucuuuu

SEQ ID NO: 278736 - RNA, 22 nt, Human
guguggccguguauccauggcu

SEQ ID NO: 278737 - RNA, 22 nt, Human
uccugggcaaagaggggcagug

SEQ ID NO: 278738 - RNA, 22 nt, Human
cagacagaccugcaagggcaca

SEQ ID NO: 278739 - RNA, 22 nt, Human
uugcccugaagaacgucccaga

SEQ ID NO: 278740 - RNA, 22 nt, Human
uuuuuccuuagggguuacucac

SEQ ID NO: 278741 - RNA, 22 nt, Human
ucacaggcucuagggauuaaga

SEQ ID NO: 278742 - RNA, 22 nt, Human
agaagacagagucuacauucua

SEQ ID NO: 278743 - RNA, 22 nt, Human
guccucuguguaggcugcagac

SEQ ID NO: 278744 - RNA, 22 nt, Human
caguuaacugagcucugugaga

SEQ ID NO: 278745 - RNA, 22 nt, Human
uccuggccuugcuccugaugcc

SEQ ID NO: 278746 - RNA, 21 nt, Human
gcagcaugagaaagccccaaa

SEQ ID NO: 278747 - RNA, 22 nt, Human
acuccaggcaucugcuucugcu

SEQ ID NO: 278748 - RNA, 22 nt, Human
uugaggcagggcaugguggccc

SEQ ID NO: 278749 - RNA, 22 nt, Human
uggaaugagcuggcuaauaacc

SEQ ID NO: 278750 - RNA, 22 nt, Human
gagacaguguccauccaggggc

SEQ ID NO: 278751 - RNA, 22 nt, Human
ugcaaagaagccuuugccuucu

SEQ ID NO: 278752 - RNA, 22 nt, Human
uucguuuaguccacaaaugcau

SEQ ID NO: 278753 - RNA, 22 nt, Human
aagaaucuuaauccagaaaccu

SEQ ID NO: 278754 - RNA, 21 nt, Human
cugggcuuucucucaaagaca

SEQ ID NO: 278755 - RNA, 22 nt, Human
accucagagggauguuacaggc

SEQ ID NO: 278756 - RNA, 22 nt, Human
cuuuacaaagcaauuuugucuc

SEQ ID NO: 278757 - RNA, 22 nt, Human
auuucuuccucugucaguaacu

SEQ ID NO: 278758 - RNA, 22 nt, Human
cccaggagagggaaccaaaugu

SEQ ID NO: 278759 - RNA, 22 nt, Human
uccaggaggcagggcugugccc

SEQ ID NO: 278760 - RNA, 22 nt, Human
gcugaaauguuuaauuugggag

SEQ ID NO: 278761 - RNA, 22 nt, Human
ugucagcauuuaaggaguaagg

SEQ ID NO: 278762 - RNA, 22 nt, Human
uuagaaucagaagagagguauu

SEQ ID NO: 278763 - RNA, 17 nt, Human
gcagccucuugguagug

SEQ ID NO: 278764 - RNA, 22 nt, Human
aggaccauccuaagguaggcaa

SEQ ID NO: 278765 - RNA, 22 nt, Human
uauuuguugaguuguuaugucu

SEQ ID NO: 278766 - RNA, 22 nt, Human
agucagagagcucucagcauag

SEQ ID NO: 278767 - RNA, 18 nt, Human
aaguuccacaagagaucu

SEQ ID NO: 278768 - RNA, 22 nt, Human
uaggcaggugugcacugcccac

SEQ ID NO: 278769 - RNA, 22 nt, Human
ucuagaaacagguuucuagaaa

SEQ ID NO: 278770 - RNA, 22 nt, Human
uuuaauauucugcauucuccuu

SEQ ID NO: 278771 - RNA, 22 nt, Human
uauuuugcaaaccugaguuuga

SEQ ID NO: 278772 - RNA, 22 nt, Human
ucccagcacagggcagauguga

SEQ ID NO: 278773 - RNA, 22 nt, Human
uggagcagcugaacagaguuga

SEQ ID NO: 278774 - RNA, 22 nt, Human
ccucagagguuuucauucugua

SEQ ID NO: 278775 - RNA, 22 nt, Human
cagccccucacagagcuguccu

SEQ ID NO: 278776 - RNA, 22 nt, Human
ucugcaccucugaaauugguca

SEQ ID NO: 278777 - RNA, 20 nt, Human
ucacacaugguaagcuauga

SEQ ID NO: 278778 - RNA, 22 nt, Human
ucacagugugaaggucagucac

SEQ ID NO: 278779 - RNA, 19 nt, Human
agaggccucagcagcuggc

SEQ ID NO: 278780 - RNA, 22 nt, Human
auuugcauaucugauagacuaa

SEQ ID NO: 278781 - RNA, 22 nt, Human
uaagaacauaaauucauacggg

SEQ ID NO: 278782 - RNA, 22 nt, Human
ggguaagcugcuuuaucucucu

SEQ ID NO: 278783 - RNA, 22 nt, Human
acagggaaggauuuagugggaa

SEQ ID NO: 278784 - RNA, 22 nt, Human
cacuaaaacuacauuggaaaca

SEQ ID NO: 278785 - RNA, 22 nt, Human
ucuggcucucaacaaauauuua

SEQ ID NO: 278786 - RNA, 22 nt, Human
ggcucagguugggucacaugac

SEQ ID NO: 278787 - RNA, 22 nt, Human
gguggcugcaauggcuaacuuc

SEQ ID NO: 278788 - RNA, 20 nt, Human
agucacaugcauacacaagu

SEQ ID NO: 278789 - RNA, 20 nt, Human
uuuaucugugggaguggaga

SEQ ID NO: 278790 - RNA, 22 nt, Human
uuuacuugauauggagcugagg

SEQ ID NO: 278791 - RNA, 22 nt, Human
uuuggaauuaugcuuaaaguuu

SEQ ID NO: 278792 - RNA, 22 nt, Human
gccugcagccagggaguucucu

SEQ ID NO: 278793 - RNA, 22 nt, Human
uaacagagguagaauucaaggu

SEQ ID NO: 278794 - RNA, 22 nt, Human
uaggccagauuacuagaguagg

SEQ ID NO: 278795 - RNA, 22 nt, Human
uccuagaauaaucuuugacugc

SEQ ID NO: 278796 - RNA, 22 nt, Human
cuagggaacaagaugcccaggg

SEQ ID NO: 278797 - RNA, 22 nt, Human
uuuucccaucuacaaagcaggg

SEQ ID NO: 278798 - RNA, 22 nt, Human
aaaguuuccugcuaagugcuau

SEQ ID NO: 278799 - RNA, 20 nt, Human
ucagauuuuucuaacuuuga

SEQ ID NO: 278800 - RNA, 22 nt, Human
ugauuuuuagcuauucugaaga

SEQ ID NO: 278801 - RNA, 19 nt, Human
uacaagcuuuuuuggcagg

SEQ ID NO: 278802 - RNA, 22 nt, Human
aggcuggagacccgccaagaaa

SEQ ID NO: 278803 - RNA, 22 nt, Human
gagggagccgccacagacuggg

SEQ ID NO: 278804 - RNA, 22 nt, Human
cggcaggugugcucacucugcc

SEQ ID NO: 278805 - RNA, 22 nt, Human
uuguuaaaaugcauauucuggu

SEQ ID NO: 278806 - RNA, 22 nt, Human
aguuuucuguucuacaauuuga

SEQ ID NO: 278807 - RNA, 22 nt, Human
uuccaugccucuauuuagaauu

SEQ ID NO: 278808 - RNA, 22 nt, Human
gcugcuuuacugaagagauaug

SEQ ID NO: 278809 - RNA, 22 nt, Human
gcacacacuguuuuccucacau

SEQ ID NO: 278810 - RNA, 22 nt, Human
aggcaguguguagcuggaagag

SEQ ID NO: 278811 - RNA, 22 nt, Human
agaccacuaaaacuuucucuau

SEQ ID NO: 278812 - RNA, 23 nt, Human
cuucuggcucuauaucagaauuc

SEQ ID NO: 278813 - RNA, 22 nt, Human
gcagcagguccgcaucaucauc

SEQ ID NO: 278814 - RNA, 22 nt, Human
aaaugcuacauacacaucaggg

SEQ ID NO: 278815 - RNA, 22 nt, Human
ggaauguuugcucccuucaggg

SEQ ID NO: 278816 - RNA, 22 nt, Human
acgauguggccugaaucaggca

SEQ ID NO: 278817 - RNA, 22 nt, Human
cugugauggucaggcccuaucu

SEQ ID NO: 278818 - RNA, 22 nt, Human
cugggcucugcggugucgcucu

SEQ ID NO: 278819 - RNA, 22 nt, Human
ccuccuguugucaccaggcgug

SEQ ID NO: 278820 - RNA, 19 nt, Human
acucaggcaaugagaaaca

SEQ ID NO: 278821 - RNA, 22 nt, Human
ggucacaggggagaagagugau

SEQ ID NO: 278822 - RNA, 22 nt, Human
ucaugcaucugggcuggcuggu

SEQ ID NO: 278823 - RNA, 22 nt, Human
gcagaugccagaucaugcaggg

SEQ ID NO: 278824 - RNA, 22 nt, Human
cauuucuacagcuucuucagaa

SEQ ID NO: 278825 - RNA, 22 nt, Human
ucuuuggauuaaaauauuugua

SEQ ID NO: 278826 - RNA, 22 nt, Human
ccaggcaccauguucuuaggac

SEQ ID NO: 278827 - RNA, 22 nt, Human
aaagucaguuggccagaucacu

SEQ ID NO: 278828 - RNA, 22 nt, Human
caaauacucuggauguguuugu

SEQ ID NO: 278829 - RNA, 22 nt, Human
cugggaaagugugcuccccucc

SEQ ID NO: 278830 - RNA, 22 nt, Human
ggaugucuaggguuuaugugcc

SEQ ID NO: 278831 - RNA, 22 nt, Human
cagcagccuacaaugcacagaa

SEQ ID NO: 278832 - RNA, 22 nt, Human
aagucacuugauuguugacaga

SEQ ID NO: 278833 - RNA, 22 nt, Human
gcccuagcgccagcucagcacc

SEQ ID NO: 278834 - RNA, 22 nt, Human
caguacauuucauaugauucua

SEQ ID NO: 278835 - RNA, 22 nt, Human
caggugcugcagggcuggcguc

SEQ ID NO: 278836 - RNA, 22 nt, Human
agauauuuguaucuugcuauug

SEQ ID NO: 278837 - RNA, 22 nt, Human
ccagacaguuccuugagguuca

SEQ ID NO: 278838 - RNA, 22 nt, Human
ugggcuuccuggagccugugcu

SEQ ID NO: 278839 - RNA, 22 nt, Human
caggagcaugcugaugccagaa

SEQ ID NO: 278840 - RNA, 19 nt, Human
uagaaugcccacuuaaaaa

SEQ ID NO: 278841 - RNA, 22 nt, Human
aacuuacaaggaugauagcugc

SEQ ID NO: 278842 - RNA, 20 nt, Human
cccugcagccaugggagugg

SEQ ID NO: 278843 - RNA, 22 nt, Human
gcaggcuuugacuuggggcaac

SEQ ID NO: 278844 - RNA, 22 nt, Human
auugcaaauaacuguacugaau

SEQ ID NO: 278845 - RNA, 22 nt, Human
aaaaguauuggccaccauuucu

SEQ ID NO: 278846 - RNA, 22 nt, Human
ccagugugauuguugcaagaau

SEQ ID NO: 278847 - RNA, 22 nt, Human
ucacuccucauugcugcccauu

SEQ ID NO: 278848 - RNA, 20 nt, Human
augagucuacacacuggcuu

SEQ ID NO: 278849 - RNA, 22 nt, Human
cauuuucagcacccaucugaaa

SEQ ID NO: 278850 - RNA, 22 nt, Human
acagagcuuaggaugacuccca

SEQ ID NO: 278851 - RNA, 22 nt, Human
gauacaagacuaauaggaaaca

SEQ ID NO: 278852 - RNA, 22 nt, Human
gcugacaguuguaccugccccu

SEQ ID NO: 278853 - RNA, 22 nt, Human
caaggccaguuucuccuaguca

SEQ ID NO: 278854 - RNA, 22 nt, Human
gccauauacccacugucuccau

SEQ ID NO: 278855 - RNA, 22 nt, Human
gcagugacagacaacuguuuga

SEQ ID NO: 278856 - RNA, 22 nt, Human
guggucagaaaucucaguggca

SEQ ID NO: 278857 - RNA, 22 nt, Human
uuuguacagugauguuguaugc

SEQ ID NO: 278858 - RNA, 22 nt, Human
ggagcccuucuauuccauggag

SEQ ID NO: 278859 - RNA, 22 nt, Human
gaggugucacuauuuugcuuau

SEQ ID NO: 278860 - RNA, 22 nt, Human
cucugaggagaaagagcuuggu

SEQ ID NO: 278861 - RNA, 22 nt, Human
ccaggagagcucucguucagug

SEQ ID NO: 278862 - RNA, 22 nt, Human
cagugucaccaggcgagucucc

SEQ ID NO: 278863 - RNA, 20 nt, Human
cuuuagaagaacccaagcau

SEQ ID NO: 278864 - RNA, 22 nt, Human
augaggauguuaguggacugga

SEQ ID NO: 278865 - RNA, 22 nt, Human
cuggaucugaacaucgguauca

SEQ ID NO: 278866 - RNA, 19 nt, Human
agcuccuguucagcagcuc

SEQ ID NO: 278867 - RNA, 22 nt, Human
aacacagaagugccaagagcca

SEQ ID NO: 278868 - RNA, 22 nt, Human
cacacagaugguaagggaggga

SEQ ID NO: 278869 - RNA, 22 nt, Human
gaugaggucauguuuuacauau

SEQ ID NO: 278870 - RNA, 22 nt, Human
aauucuuguuguuaguauauuu

SEQ ID NO: 278871 - RNA, 22 nt, Human
agcuuuaugcuuccuacaagcu

SEQ ID NO: 278872 - RNA, 22 nt, Human
ccacgacgagucaucagggcga

SEQ ID NO: 278873 - RNA, 22 nt, Human
cagcuugggaguuugguuuuau

SEQ ID NO: 278874 - RNA, 22 nt, Human
ucuauuuucuugccaaaacugc

SEQ ID NO: 278875 - RNA, 22 nt, Human
cagagagaaucuuggcagcuga

SEQ ID NO: 278876 - RNA, 22 nt, Human
acccugggcacaccauuucccc

SEQ ID NO: 278877 - RNA, 21 nt, Human
ggcacugcugggccaucugcu

SEQ ID NO: 278878 - RNA, 20 nt, Human
ucauacacaugagcaugcag

SEQ ID NO: 278879 - RNA, 22 nt, Human
ugcaaaaauugcuggaaucuuu

SEQ ID NO: 278880 - RNA, 22 nt, Human
uuuguguuaaauguuaaauuca

SEQ ID NO: 278881 - RNA, 22 nt, Human
gaauuugggguguguuauuuca

SEQ ID NO: 278882 - RNA, 22 nt, Human
ugaggacaugagugggacagag

SEQ ID NO: 278883 - RNA, 22 nt, Human
uuauuuacaacucuucucuucc

SEQ ID NO: 278884 - RNA, 22 nt, Human
uucuguggcugggagccuggcu

SEQ ID NO: 278885 - RNA, 23 nt, Human
ucuguucaaggcuuucuccuuga

SEQ ID NO: 278886 - RNA, 22 nt, Human
agggaggaccaaugugugguua

SEQ ID NO: 278887 - RNA, 22 nt, Human
ccaggcagagggauccccaucc

SEQ ID NO: 278888 - RNA, 22 nt, Human
gaauauauuauucagcuuuuca

SEQ ID NO: 278889 - RNA, 22 nt, Human
ggcagagacaccgaaugacucu

SEQ ID NO: 278890 - RNA, 17 nt, Human
uucagaagcauuuuggc

SEQ ID NO: 278891 - RNA, 22 nt, Human
ugccagaacagcucaucuggcc

SEQ ID NO: 278892 - RNA, 22 nt, Human
ugauuuucaugggugaucuuug

SEQ ID NO: 278893 - RNA, 22 nt, Human
gcuggccccgagugcuacgcuc

SEQ ID NO: 278894 - RNA, 21 nt, Human
cacauuugaaccucacagcaa

SEQ ID NO: 278895 - RNA, 22 nt, Human
acuggggaauggaacugggaau

SEQ ID NO: 278896 - RNA, 22 nt, Human
cacagcugcccccucucuaacu

SEQ ID NO: 278897 - RNA, 22 nt, Human
aagcauggagcaauagaaugac

SEQ ID NO: 278898 - RNA, 22 nt, Human
uuccuuucacguuuuaaugcac

SEQ ID NO: 278899 - RNA, 22 nt, Human
gauuaguugauuaagagucaga

SEQ ID NO: 278900 - RNA, 20 nt, Human
ggccugagcauggcuggcag

SEQ ID NO: 278901 - RNA, 22 nt, Human
agcuaggagauuuugugaggcu

SEQ ID NO: 278902 - RNA, 22 nt, Human
ggcugagaguuuccucuggggc

SEQ ID NO: 278903 - RNA, 22 nt, Human
caggugcugcguggcggagcug

SEQ ID NO: 278904 - RNA, 22 nt, Human
ucugccuucuuuuagucaucuu

SEQ ID NO: 278905 - RNA, 19 nt, Human
uggcugggcgugccuccgu

SEQ ID NO: 278906 - RNA, 22 nt, Human
aacaucucuguauuuuauagac

SEQ ID NO: 278907 - RNA, 22 nt, Human
ggcuuuauaggguagaggauca

SEQ ID NO: 278908 - RNA, 22 nt, Human
uguuuagaugcaaagucucaca

SEQ ID NO: 278909 - RNA, 22 nt, Human
cauacuuugggauaagagugga

SEQ ID NO: 278910 - RNA, 17 nt, Human
cuacaguguguuuccug

SEQ ID NO: 278911 - RNA, 22 nt, Human
ugcaagagcccaaacuauauac

SEQ ID NO: 278912 - RNA, 21 nt, Human
uccaggccucaggaagggaug

SEQ ID NO: 278913 - RNA, 21 nt, Human
ugcaggcugugcgcuccugcc

SEQ ID NO: 278914 - RNA, 22 nt, Human
ugggaucugcaguuuaacaaaa

SEQ ID NO: 278915 - RNA, 22 nt, Human
gcuguacauucuguggguuugg

SEQ ID NO: 278916 - RNA, 17 nt, Human
uacauguguaucugauu

SEQ ID NO: 278917 - RNA, 22 nt, Human
aaccuguucccugguccuugac

SEQ ID NO: 278918 - RNA, 22 nt, Human
ucauucacuuugaaauaaacga

SEQ ID NO: 278919 - RNA, 22 nt, Human
aggcuggcucggcuuuucuguc

SEQ ID NO: 278920 - RNA, 22 nt, Human
ggcugcaggaacgacggagggg

SEQ ID NO: 278921 - RNA, 22 nt, Human
uuauacacugcagaaccagcau

SEQ ID NO: 278922 - RNA, 22 nt, Human
agugauuucaucauuuuaucaa

SEQ ID NO: 278923 - RNA, 19 nt, Human
uuagaagccauagguacag

SEQ ID NO: 278924 - RNA, 22 nt, Human
cuuaacagcaagaucuguguca

SEQ ID NO: 278925 - RNA, 22 nt, Human
agagggaaugugauugcaccau

SEQ ID NO: 278926 - RNA, 22 nt, Human
uccaggaccucccaggcuagag

SEQ ID NO: 278927 - RNA, 21 nt, Human
gugguucuagagaaacagaau

SEQ ID NO: 278928 - RNA, 22 nt, Human
uacagcaaagaaacccucaguc

SEQ ID NO: 278929 - RNA, 22 nt, Human
cugguguccgcaacgggcagcg

SEQ ID NO: 278930 - RNA, 22 nt, Human
uuucucaaccucaacacuauuu

SEQ ID NO: 278931 - RNA, 22 nt, Human
ugcugaaagucccaaaucucau

SEQ ID NO: 278932 - RNA, 22 nt, Human
gcaguaggaguuuccagggugg

SEQ ID NO: 278933 - RNA, 22 nt, Human
ugacaagauagauugaguuuua

SEQ ID NO: 278934 - RNA, 22 nt, Human
uggaggaggaugcauuuguugu

SEQ ID NO: 278935 - RNA, 22 nt, Human
cuacuguuguguuuuaaaggua

SEQ ID NO: 278936 - RNA, 22 nt, Human
acauucauuccaggucagucag

SEQ ID NO: 278937 - RNA, 22 nt, Human
gccugagaucaggagaaagcca

SEQ ID NO: 278938 - RNA, 22 nt, Human
cagcugaguguuggcauguuca

SEQ ID NO: 278939 - RNA, 22 nt, Human
cuuacagcauuguucagaggcu

SEQ ID NO: 278940 - RNA, 22 nt, Human
ugguagcaacaucucaguggcu

SEQ ID NO: 278941 - RNA, 22 nt, Human
gauggggaugagaagugagcag

SEQ ID NO: 278942 - RNA, 22 nt, Human
cugaggccuggugaggugguga

SEQ ID NO: 278943 - RNA, 22 nt, Human
gaaguucaggugggaauugagc

SEQ ID NO: 278944 - RNA, 22 nt, Human
auuucacaaagaacagaugcag

SEQ ID NO: 278945 - RNA, 22 nt, Human
uuugaacagggaauguuccaca

SEQ ID NO: 278946 - RNA, 22 nt, Human
ucugaaauguucucuuguuuug

SEQ ID NO: 278947 - RNA, 22 nt, Human
agugacugguuuugacaggaau

SEQ ID NO: 278948 - RNA, 22 nt, Human
acauguaacauauauguagcau

SEQ ID NO: 278949 - RNA, 22 nt, Human
ucugaggaaagagagugggaug

SEQ ID NO: 278950 - RNA, 22 nt, Human
ggcucucagggaaaggccuccc

SEQ ID NO: 278951 - RNA, 22 nt, Human
cugggagcggcugucacugguu

SEQ ID NO: 278952 - RNA, 22 nt, Human
ugcaauaaagugcuauaaaucc

SEQ ID NO: 278953 - RNA, 22 nt, Human
uugucgggcuuacgcagggcca

SEQ ID NO: 278954 - RNA, 22 nt, Human
agcuggucuuaaauguguccag

SEQ ID NO: 278955 - RNA, 22 nt, Human
acucuuauuuugaaguaauaau

SEQ ID NO: 278956 - RNA, 22 nt, Human
ugguuuuugguuuaacacuaug

SEQ ID NO: 278957 - RNA, 22 nt, Human
ugccugugaaaacccugggguu

SEQ ID NO: 278958 - RNA, 19 nt, Human
agcuggggcgguguguguu

SEQ ID NO: 278959 - RNA, 22 nt, Human
cccuggagcuagucugagcaga

SEQ ID NO: 278960 - RNA, 22 nt, Human
ugcaugcaaagugucugcuuug

SEQ ID NO: 278961 - RNA, 22 nt, Human
ucaggggcagccggggaagcca

SEQ ID NO: 278962 - RNA, 22 nt, Human
ccugccaggagcuggugcugca

SEQ ID NO: 278963 - RNA, 18 nt, Human
gccugcucugcucucccc

SEQ ID NO: 278964 - RNA, 22 nt, Human
ccacaucuaagccuucaugaua

SEQ ID NO: 278965 - RNA, 22 nt, Human
ccaggaaggaucguuugggagu

SEQ ID NO: 278966 - RNA, 22 nt, Human
ucucaggcauucccacauagaa

SEQ ID NO: 278967 - RNA, 22 nt, Human
acuccugguuuguguccuggcu

SEQ ID NO: 278968 - RNA, 22 nt, Human
agauugggguccagacuccuga

SEQ ID NO: 278969 - RNA, 22 nt, Human
ugagcagagacuucaagggcag

SEQ ID NO: 278970 - RNA, 18 nt, Human
gugacguuuuggaugauu

SEQ ID NO: 278971 - RNA, 22 nt, Human
ucagguguaucauggaguugaa

SEQ ID NO: 278972 - RNA, 22 nt, Human
auccuuuauaagacuuguauuc

SEQ ID NO: 278973 - RNA, 21 nt, Human
uuccagaaaucucuuucuuca

SEQ ID NO: 278974 - RNA, 22 nt, Human
gacagggacacagccagugagg

SEQ ID NO: 278975 - RNA, 22 nt, Human
auugcuaggaacagguugcacc

SEQ ID NO: 278976 - RNA, 22 nt, Human
gcugaaauucagauuccuaggc

SEQ ID NO: 278977 - RNA, 22 nt, Human
ggguccagguuuagucauuugu

SEQ ID NO: 278978 - RNA, 22 nt, Human
aggcaagauuaggaccagaaga

SEQ ID NO: 278979 - RNA, 22 nt, Human
caugcuaaccagagacauaaag

SEQ ID NO: 278980 - RNA, 22 nt, Human
gagcccagcuguccuuggcaaa

SEQ ID NO: 278981 - RNA, 22 nt, Human
cuacagugucgugugguuucug

SEQ ID NO: 278982 - RNA, 20 nt, Human
ugcuggggacauacagggug

SEQ ID NO: 278983 - RNA, 20 nt, Human
cucagugcuuucauugccuc

SEQ ID NO: 278984 - RNA, 22 nt, Human
agguucugguaagcuguugcuu

SEQ ID NO: 278985 - RNA, 22 nt, Human
uaaagcuguuagaguaguaaga

SEQ ID NO: 278986 - RNA, 22 nt, Human
uggaaagaggaagugcccagca

SEQ ID NO: 278987 - RNA, 22 nt, Human
uuugaaguguaugaaaauacag

SEQ ID NO: 278988 - RNA, 22 nt, Human
cugugagacugauagggaagag

SEQ ID NO: 278989 - RNA, 22 nt, Human
uggagaguggauaugggagcaa

SEQ ID NO: 278990 - RNA, 22 nt, Human
ucaaaggaauuugauuuugaug

SEQ ID NO: 278991 - RNA, 22 nt, Human
cuuccccaggaccucugcuaaa

SEQ ID NO: 278992 - RNA, 22 nt, Human
uuuggccucaugaauuucuugc

SEQ ID NO: 278993 - RNA, 22 nt, Human
ucucauuggaaaagaguuuaau

SEQ ID NO: 278994 - RNA, 22 nt, Human
uggcagagucaucacaucugga

SEQ ID NO: 278995 - RNA, 22 nt, Human
uggaaacuagccuuuuagguug

SEQ ID NO: 278996 - RNA, 22 nt, Human
ccuggaaaaugccacuuucaca

SEQ ID NO: 278997 - RNA, 19 nt, Human
gcaggccucuugggaauua

SEQ ID NO: 278998 - RNA, 22 nt, Human
caaguauuuuaaggacuagugg

SEQ ID NO: 278999 - RNA, 22 nt, Human
ugaucaaagccaaaguugagau

SEQ ID NO: 279000 - RNA, 22 nt, Human
ugugggaaaugggaguggaaga

SEQ ID NO: 279001 - RNA, 22 nt, Human
gccaggaagcaguuagaugggu

SEQ ID NO: 279002 - RNA, 22 nt, Human
cccaggaguuugaguucagcau

SEQ ID NO: 279003 - RNA, 22 nt, Human
ccugugcaugccaggguacacc

SEQ ID NO: 279004 - RNA, 22 nt, Human
guguguucagcaagagguaagg

SEQ ID NO: 279005 - RNA, 22 nt, Human
agugacuacugauuuuuacuuu

SEQ ID NO: 279006 - RNA, 22 nt, Human
agaaaucaugucuuauuucuau

SEQ ID NO: 279007 - RNA, 22 nt, Human
ggcagcucugcuccuuggcucc

SEQ ID NO: 279008 - RNA, 22 nt, Human
aauacauauggaauuccauguu

SEQ ID NO: 279009 - RNA, 22 nt, Human
ccaggcauggggagagccagau

SEQ ID NO: 279010 - RNA, 22 nt, Human
agauauuaggaggauucauaau

SEQ ID NO: 279011 - RNA, 22 nt, Human
aagacaccauuugacaguggca

SEQ ID NO: 279012 - RNA, 22 nt, Human
cagagcacacaugcauagagug

SEQ ID NO: 279013 - RNA, 17 nt, Human
agcaaaaguaucaaagc

SEQ ID NO: 279014 - RNA, 22 nt, Human
ucaguguccggagccugagugc

SEQ ID NO: 279015 - RNA, 22 nt, Human
agaaaucauuuuaggcuugaug

SEQ ID NO: 279016 - RNA, 22 nt, Human
agaaggccaauagggugcacug

SEQ ID NO: 279017 - RNA, 22 nt, Human
agugcaacagaagcaggcuggc

SEQ ID NO: 279018 - RNA, 22 nt, Human
ggcaccagggacaauccucuuc

SEQ ID NO: 279019 - RNA, 22 nt, Human
uucugggcuugaaaguuuaaua

SEQ ID NO: 279020 - RNA, 22 nt, Human
aggcuccacggucacuggcucu

SEQ ID NO: 279021 - RNA, 22 nt, Human
uacaaguuccauuuugaaagug

SEQ ID NO: 279022 - RNA, 23 nt, Human
ugcagagggacugaagccagcuu

SEQ ID NO: 279023 - RNA, 22 nt, Human
acugcacugauuuaucauccca

SEQ ID NO: 279024 - RNA, 22 nt, Human
cccaggucccggggccagcugc

SEQ ID NO: 279025 - RNA, 20 nt, Human
uuucugugagaaacacuguu

SEQ ID NO: 279026 - RNA, 22 nt, Human
aagagcaucuauuucacagugg

SEQ ID NO: 279027 - RNA, 22 nt, Human
cggcucagacuucccaagaaca

SEQ ID NO: 279028 - RNA, 22 nt, Human
gcaggagaacaaagcaagcugc

SEQ ID NO: 279029 - RNA, 22 nt, Human
uuaggaaaaucaugagagauga

SEQ ID NO: 279030 - RNA, 23 nt, Human
ucugcccucugccuguuuuugua

SEQ ID NO: 279031 - RNA, 22 nt, Human
ucuaaaucccaacaugauauca

SEQ ID NO: 279032 - RNA, 22 nt, Human
uaucuuuugaguucucaagaug

SEQ ID NO: 279033 - RNA, 22 nt, Human
ccucagaagcucaaggacauug

SEQ ID NO: 279034 - RNA, 22 nt, Human
cacacgagcccuggagccagca

SEQ ID NO: 279035 - RNA, 22 nt, Human
uggcuucugggguggccugcau

SEQ ID NO: 279036 - RNA, 22 nt, Human
agcuuuauucaugauuucaggg

SEQ ID NO: 279037 - RNA, 22 nt, Human
cugaggagcaaccccgugcccu

SEQ ID NO: 279038 - RNA, 22 nt, Human
ugucaacacaccuaucucaauu

SEQ ID NO: 279039 - RNA, 22 nt, Human
cuucuuuacuuucuagaaauaa

SEQ ID NO: 279040 - RNA, 22 nt, Human
uguguucuccuacagauaagga

SEQ ID NO: 279041 - RNA, 22 nt, Human
aggugcaggagcugugcaggga

SEQ ID NO: 279042 - RNA, 22 nt, Human
cacaaggacuggauggaguggg

SEQ ID NO: 279043 - RNA, 22 nt, Human
uuagauacauucucauuuguuu

SEQ ID NO: 279044 - RNA, 22 nt, Human
uggcugagggggcaguucagga

SEQ ID NO: 279045 - RNA, 22 nt, Human
ucaauuucuugguuugauaaua

SEQ ID NO: 279046 - RNA, 22 nt, Human
gaauuguauugauuuuucagag

SEQ ID NO: 279047 - RNA, 21 nt, Human
ccucagagacagauacgggug

SEQ ID NO: 279048 - RNA, 22 nt, Human
gcccaugccccuccuucuggca

SEQ ID NO: 279049 - RNA, 22 nt, Human
aaugucaaagugcuuugcaaac

SEQ ID NO: 279050 - RNA, 22 nt, Human
cacccagcuuuugcauccuccg

SEQ ID NO: 279051 - RNA, 21 nt, Human
gacaaugcagucuuuuuugga

SEQ ID NO: 279052 - RNA, 22 nt, Human
aaauuauuaugccccucuauaa

SEQ ID NO: 279053 - RNA, 22 nt, Human
uagcagcauuaauuccauuugc

SEQ ID NO: 279054 - RNA, 22 nt, Human
ucccagcuacucuagaggcuga

SEQ ID NO: 279055 - RNA, 22 nt, Human
uagaacuuccaauucagggcug

SEQ ID NO: 279056 - RNA, 22 nt, Human
caugccauuaacauuagcuagc

SEQ ID NO: 279057 - RNA, 22 nt, Human
auuucacaucuaucucagauuu

SEQ ID NO: 279058 - RNA, 22 nt, Human
ggcuggcuugccaagcucaggg

SEQ ID NO: 279059 - RNA, 22 nt, Human
uuaaaaccuagagaucagacag

SEQ ID NO: 279060 - RNA, 22 nt, Human
agcugguuuaggaaaagguagg

SEQ ID NO: 279061 - RNA, 22 nt, Human
ccucagaauaguccucagauca

SEQ ID NO: 279062 - RNA, 22 nt, Human
cagauucacuaauagcuggccu

SEQ ID NO: 279063 - RNA, 22 nt, Human
uagcagaggaaaagagaacauu

SEQ ID NO: 279064 - RNA, 22 nt, Human
uuuauugcauacacaaauguca

SEQ ID NO: 279065 - RNA, 22 nt, Human
acagugcagugugaugaguauu

SEQ ID NO: 279066 - RNA, 22 nt, Human
guacaacaggauugauguacca

SEQ ID NO: 279067 - RNA, 22 nt, Human
agaaaucccaaggcaucaacca

SEQ ID NO: 279068 - RNA, 22 nt, Human
caaggcuuauuuuccuccuucc

SEQ ID NO: 279069 - RNA, 21 nt, Human
ugcaauauauauuugccugaa

SEQ ID NO: 279070 - RNA, 14 nt, Human
aggaauguccuagg

SEQ ID NO: 279071 - RNA, 22 nt, Human
gugagacacgugugugaccugg

SEQ ID NO: 279072 - RNA, 22 nt, Human
auggcugcaguccgugcccugg

SEQ ID NO: 279073 - RNA, 22 nt, Human
cuggacaggcuggggacugcaa

SEQ ID NO: 279074 - RNA, 22 nt, Human
ugaccacacgucuggaauugug

SEQ ID NO: 279075 - RNA, 22 nt, Human
ccuuuuggccaggucagugcag

SEQ ID NO: 279076 - RNA, 22 nt, Human
agacugggguucuggcaaggag

SEQ ID NO: 279077 - RNA, 22 nt, Human
ugaacccaggagguugcaguga

SEQ ID NO: 279078 - RNA, 22 nt, Human
gcuggcuucccuaccugcaccu

SEQ ID NO: 279079 - RNA, 22 nt, Human
aagucaggacuuaugcuaccug

SEQ ID NO: 279080 - RNA, 22 nt, Human
ccagagguccugcucacuggug

SEQ ID NO: 279081 - RNA, 22 nt, Human
uggcucaguuccaucaucugga

SEQ ID NO: 279082 - RNA, 22 nt, Human
uuuguuaaggaguauugcuucu

SEQ ID NO: 279083 - RNA, 22 nt, Human
cucuucuuuccaucccuagcca

SEQ ID NO: 279084 - RNA, 22 nt, Human
uuugcuuccuaguuggguaaua

SEQ ID NO: 279085 - RNA, 22 nt, Human
ucucugaagagucagacauaac

SEQ ID NO: 279086 - RNA, 22 nt, Human
uccuucuuucccccuagucauu

SEQ ID NO: 279087 - RNA, 22 nt, Human
ucugagguggacgauggagccu

SEQ ID NO: 279088 - RNA, 22 nt, Human
agcuuuauagaaaggaucagug

SEQ ID NO: 279089 - RNA, 22 nt, Human
gcuuggcuggaaauagguugag

SEQ ID NO: 279090 - RNA, 22 nt, Human
ucucuucauagugacacccauc

SEQ ID NO: 279091 - RNA, 22 nt, Human
ggcucaccauuuucacucucug

SEQ ID NO: 279092 - RNA, 22 nt, Human
uuuaaauuuagaagaaacacug

SEQ ID NO: 279093 - RNA, 22 nt, Human
ugccuggcuaauuuuuguaucc

SEQ ID NO: 279094 - RNA, 22 nt, Human
gagucaggaguccugugugaga

SEQ ID NO: 279095 - RNA, 22 nt, Human
gcugugugcugggcauggcacu

SEQ ID NO: 279096 - RNA, 22 nt, Human
uuucucugccaguuauuuuccu

SEQ ID NO: 279097 - RNA, 22 nt, Human
caauucaauggcaaaguauugu

SEQ ID NO: 279098 - RNA, 22 nt, Human
uucauacaguggcugcacucca

SEQ ID NO: 279099 - RNA, 22 nt, Human
cccaggucuaugccagcucuga

SEQ ID NO: 279100 - RNA, 22 nt, Human
uauauuaacacccacuugccuc

SEQ ID NO: 279101 - RNA, 22 nt, Human
ccaccaggacagcccugagggg

SEQ ID NO: 279102 - RNA, 22 nt, Human
aggcacuguacuagguacaggg

SEQ ID NO: 279103 - RNA, 22 nt, Human
aggcugcagaggugcugccaga

SEQ ID NO: 279104 - RNA, 22 nt, Human
ggugacugguuuaucuggcagu

SEQ ID NO: 279105 - RNA, 22 nt, Human
agcagagcugggauccuggguc

SEQ ID NO: 279106 - RNA, 22 nt, Human
uguucuuuggcuuccuuuccgu

SEQ ID NO: 279107 - RNA, 22 nt, Human
aggcaguggcugagaccagggg

SEQ ID NO: 279108 - RNA, 22 nt, Human
aaagacuaagaagaguauuauu

SEQ ID NO: 279109 - RNA, 22 nt, Human
aaggucuguggccaccucuggg

SEQ ID NO: 279110 - RNA, 22 nt, Human
gcuggaggcuggagugcagugg

SEQ ID NO: 279111 - RNA, 22 nt, Human
gaaccacaagauucaaaggggu

SEQ ID NO: 279112 - RNA, 22 nt, Human
agcaaaguaugugcugggagcu

SEQ ID NO: 279113 - RNA, 22 nt, Human
ucucaaauuuguuagauaaaau

SEQ ID NO: 279114 - RNA, 22 nt, Human
agguccugacuccacguucuag

SEQ ID NO: 279115 - RNA, 22 nt, Human
gcagaaguaccucguucuaguu

SEQ ID NO: 279116 - RNA, 22 nt, Human
cuccauugaacauccucucaga

SEQ ID NO: 279117 - RNA, 22 nt, Human
uacagcacaaagggccuuuacc

SEQ ID NO: 279118 - RNA, 22 nt, Human
aggcuguguuuccccuggagcu

SEQ ID NO: 279119 - RNA, 22 nt, Human
gcuuccaccuacuaaaugccac

SEQ ID NO: 279120 - RNA, 22 nt, Human
ggcccucccggugaugaagagc

SEQ ID NO: 279121 - RNA, 22 nt, Human
cuggcucauccagguguugcuc

SEQ ID NO: 279122 - RNA, 22 nt, Human
cuugauugcuucuacgugacug

SEQ ID NO: 279123 - RNA, 22 nt, Human
uuaaauaguaggucuauuuugg

SEQ ID NO: 279124 - RNA, 22 nt, Human
gugacagggagugauauagcag

SEQ ID NO: 279125 - RNA, 22 nt, Human
augagguggucuucaguagguc

SEQ ID NO: 279126 - RNA, 22 nt, Human
cuggccugaggccgccuucaga

SEQ ID NO: 279127 - RNA, 22 nt, Human
gucuccagaagccuagacagcc

SEQ ID NO: 279128 - RNA, 20 nt, Human
auagaaguauuauguaaugu

SEQ ID NO: 279129 - RNA, 20 nt, Human
ccuucucuggaauugccucc

SEQ ID NO: 279130 - RNA, 22 nt, Human
uuucuacauucaaaaacuacca

SEQ ID NO: 279131 - RNA, 20 nt, Human
cuuuaguuauuaacagcacu

SEQ ID NO: 279132 - RNA, 22 nt, Human
cuguuucuccacacucuuccca

SEQ ID NO: 279133 - RNA, 22 nt, Human
gagguuggugaggggacacggu

SEQ ID NO: 279134 - RNA, 22 nt, Human
uggcacugacagggugcucaag

SEQ ID NO: 279135 - RNA, 22 nt, Human
cacugaaacagguauugcuggu

SEQ ID NO: 279136 - RNA, 22 nt, Human
uaaaguguguauauacauaugg

SEQ ID NO: 279137 - RNA, 19 nt, Human
agguuacaggugucacaga

SEQ ID NO: 279138 - RNA, 22 nt, Human
agcuccagaagccugcaaggua

SEQ ID NO: 279139 - RNA, 22 nt, Human
gccuccugaagugcugggauua

SEQ ID NO: 279140 - RNA, 22 nt, Human
aggucacacuuggaucauagaa

SEQ ID NO: 279141 - RNA, 22 nt, Human
ugaauaaauugagagcgaaugu

SEQ ID NO: 279142 - RNA, 22 nt, Human
ugcugaggcauuuggacagagu

SEQ ID NO: 279143 - RNA, 19 nt, Human
ucccucccuguaaucucac

SEQ ID NO: 279144 - RNA, 22 nt, Human
gcuuugcugggugcuucaugua

SEQ ID NO: 279145 - RNA, 22 nt, Human
uuuguacauguaagauugcauc

SEQ ID NO: 279146 - RNA, 21 nt, Human
gcauuaaaagcaguuguuggu

SEQ ID NO: 279147 - RNA, 22 nt, Human
auccuggcgggggaacugccca

SEQ ID NO: 279148 - RNA, 22 nt, Human
aaagcugggcuagguuuguuuc

SEQ ID NO: 279149 - RNA, 22 nt, Human
aguuugaaaguauugacagaag

SEQ ID NO: 279150 - RNA, 22 nt, Human
ugggcacagaauagauggccca

SEQ ID NO: 279151 - RNA, 22 nt, Human
guacacuugacucauaggaaau

SEQ ID NO: 279152 - RNA, 22 nt, Human
uacauagcaaggaaaugacaga

SEQ ID NO: 279153 - RNA, 22 nt, Human
uuccagaagccuccauauuacu

SEQ ID NO: 279154 - RNA, 22 nt, Human
uuuguaaaggccugaauuucag

SEQ ID NO: 279155 - RNA, 22 nt, Human
agcaugcacaugacuggcuuaa

SEQ ID NO: 279156 - RNA, 22 nt, Human
ccuagaauuauaaacuuauuag

SEQ ID NO: 279157 - RNA, 22 nt, Human
cuucucggccguguggaugcgc

SEQ ID NO: 279158 - RNA, 22 nt, Human
ucaggagguaggacauacuggu

SEQ ID NO: 279159 - RNA, 22 nt, Human
ucucugggccuguuuucucauc

SEQ ID NO: 279160 - RNA, 22 nt, Human
cuucagagugacucagcaucuu

SEQ ID NO: 279161 - RNA, 22 nt, Human
aaagcucuuuuccaaguauuga

SEQ ID NO: 279162 - RNA, 17 nt, Human
uccuggauccauggugg

SEQ ID NO: 279163 - RNA, 22 nt, Human
gucagccugcacucagggagcg

SEQ ID NO: 279164 - RNA, 22 nt, Human
agugugagggguucuuugauau

SEQ ID NO: 279165 - RNA, 22 nt, Human
agacuccucggaccaaucagcg

SEQ ID NO: 279166 - RNA, 22 nt, Human
aagugcugagacuacaggcaug

SEQ ID NO: 279167 - RNA, 22 nt, Human
cacaguuuugcccagggcuucu

SEQ ID NO: 279168 - RNA, 22 nt, Human
uagaaagacuguccagauuuca

SEQ ID NO: 279169 - RNA, 22 nt, Human
acagggccuuauauccagaagg

SEQ ID NO: 279170 - RNA, 19 nt, Human
caaaugggacaggaaggca

SEQ ID NO: 279171 - RNA, 18 nt, Human
aggcccuggccucgaaca

SEQ ID NO: 279172 - RNA, 23 nt, Human
agcagcagcaauuaaguggauau

SEQ ID NO: 279173 - RNA, 22 nt, Human
uauuccaguccuauccucuuuu

SEQ ID NO: 279174 - RNA, 22 nt, Human
acaauuuauccauuguauaguu

SEQ ID NO: 279175 - RNA, 22 nt, Human
uaacuagaagaaugcaccaaga

SEQ ID NO: 279176 - RNA, 21 nt, Human
cagcaaaucauugggcagacu

SEQ ID NO: 279177 - RNA, 22 nt, Human
ugcaggcucugugugugccugg

SEQ ID NO: 279178 - RNA, 22 nt, Human
cugcuguaaugagucagcaucu

SEQ ID NO: 279179 - RNA, 22 nt, Human
aggccagcucuacccuuggacu

SEQ ID NO: 279180 - RNA, 22 nt, Human
uggggccugagguggagcugca

SEQ ID NO: 279181 - RNA, 22 nt, Human
auaaagcuuugaaauggagaua

SEQ ID NO: 279182 - RNA, 21 nt, Human
aguugcauaggccagccaucc

SEQ ID NO: 279183 - RNA, 22 nt, Human
uccuagaaagaugucuuuucac

SEQ ID NO: 279184 - RNA, 22 nt, Human
uggaccagggucccagaguaug

SEQ ID NO: 279185 - RNA, 22 nt, Human
ugcccugggaacacagaugcca

SEQ ID NO: 279186 - RNA, 22 nt, Human
ugagacagucaccaggcaggcc

SEQ ID NO: 279187 - RNA, 22 nt, Human
uaguccagguuaaucccugccu

SEQ ID NO: 279188 - RNA, 22 nt, Human
caucuaccuccacccuauauau

SEQ ID NO: 279189 - RNA, 22 nt, Human
agaggcuucucggauggggcag

SEQ ID NO: 279190 - RNA, 22 nt, Human
aggcaccuugagagcaggagcu

SEQ ID NO: 279191 - RNA, 22 nt, Human
gcucuggcuaguuaccucuuac

SEQ ID NO: 279192 - RNA, 22 nt, Human
uuugaagauaaauauggagaaa

SEQ ID NO: 279193 - RNA, 22 nt, Human
aacaggcuccuugugaauggau

SEQ ID NO: 279194 - RNA, 22 nt, Human
uuggccuccacauuuuccaggu

SEQ ID NO: 279195 - RNA, 22 nt, Human
uuuaucuguuguacauuuaugc

SEQ ID NO: 279196 - RNA, 22 nt, Human
gugcaaaagcaguugugguuuu

SEQ ID NO: 279197 - RNA, 22 nt, Human
accuguuuuagucuuuaaucau

SEQ ID NO: 279198 - RNA, 22 nt, Human
aaauucauuuuucuuagugugc

SEQ ID NO: 279199 - RNA, 22 nt, Human
cucuuugaaauccaucacugcu

SEQ ID NO: 279200 - RNA, 22 nt, Human
cucuccccgguacgagcggccg

SEQ ID NO: 279201 - RNA, 19 nt, Human
agucuggaguaaaaggaau

SEQ ID NO: 279202 - RNA, 23 nt, Human
ccaaagucgaagucuaguccaga

SEQ ID NO: 279203 - RNA, 22 nt, Human
ucaggugucuugugggauuuua

SEQ ID NO: 279204 - RNA, 22 nt, Human
cagcacaucugauuauaugacu

SEQ ID NO: 279205 - RNA, 23 nt, Human
ugcccucccaaugcuucggucac

SEQ ID NO: 279206 - RNA, 22 nt, Human
cuucagugauauaggcuucucc

SEQ ID NO: 279207 - RNA, 19 nt, Human
ccaggccugcgggcguugg

SEQ ID NO: 279208 - RNA, 20 nt, Human
ugcuucauuaugugagauag

SEQ ID NO: 279209 - RNA, 22 nt, Human
ggcuggguuugacuccuggcuu

SEQ ID NO: 279210 - RNA, 20 nt, Human
aaauuacugccacacauuuc

SEQ ID NO: 279211 - RNA, 22 nt, Human
uucuuuugggaauuacguaugc

SEQ ID NO: 279212 - RNA, 22 nt, Human
ugcaggagcugcuguccugcuc

SEQ ID NO: 279213 - RNA, 22 nt, Human
gcaggcagucaucuuucauauu

SEQ ID NO: 279214 - RNA, 19 nt, Human
uuucuuuuccccucagcac

SEQ ID NO: 279215 - RNA, 17 nt, Human
uuagcaaaauagcacuu

SEQ ID NO: 279216 - RNA, 22 nt, Human
ucuguaaaucuacuaagagcuc

SEQ ID NO: 279217 - RNA, 19 nt, Human
caggagagcaugcacuuug

SEQ ID NO: 279218 - RNA, 22 nt, Human
cagcugcuuacuagcuguguga

SEQ ID NO: 279219 - RNA, 22 nt, Human
agcugcugccgguggccacccu

SEQ ID NO: 279220 - RNA, 22 nt, Human
uggagaggagcaccauggccau

SEQ ID NO: 279221 - RNA, 22 nt, Human
guccaaugguaaauccaaauaa

SEQ ID NO: 279222 - RNA, 22 nt, Human
acaggcugcccgcuccccaccu

SEQ ID NO: 279223 - RNA, 22 nt, Human
cuuuucuuacucccgcaaggca

SEQ ID NO: 279224 - RNA, 22 nt, Human
ucuaaacauugguauggagcag

SEQ ID NO: 279225 - RNA, 22 nt, Human
acuguccagaagauagaaauau

SEQ ID NO: 279226 - RNA, 22 nt, Human
uucuagaagcucuaggggagaa

SEQ ID NO: 279227 - RNA, 22 nt, Human
uuucauguuacaguguaaaagu

SEQ ID NO: 279228 - RNA, 22 nt, Human
cucuguggguauuuauauguau

SEQ ID NO: 279229 - RNA, 22 nt, Human
uucuaaauguaaauaguaugau

SEQ ID NO: 279230 - RNA, 17 nt, Human
gggcagggacuccuggg

SEQ ID NO: 279231 - RNA, 22 nt, Human
cagcaggcccagaguuucaugg

SEQ ID NO: 279232 - RNA, 20 nt, Human
guuuauacagaagaccccaa

SEQ ID NO: 279233 - RNA, 22 nt, Human
uccuggugguuugaaaacugaa

SEQ ID NO: 279234 - RNA, 21 nt, Human
uggagcugccacuuguccucc

SEQ ID NO: 279235 - RNA, 21 nt, Human
uuucaauguguucuuuguagu

SEQ ID NO: 279236 - RNA, 22 nt, Human
ccccucuugugggcucagguca

SEQ ID NO: 279237 - RNA, 22 nt, Human
ugucucaucucuuaaccccacu

SEQ ID NO: 279238 - RNA, 22 nt, Human
agagcuccugcauucuucccug

SEQ ID NO: 279239 - RNA, 22 nt, Human
ggcaucuucaaaauugccaaau

SEQ ID NO: 279240 - RNA, 22 nt, Human
uucuucaacaaggacacuguua

SEQ ID NO: 279241 - RNA, 22 nt, Human
uuuggcucuaguaaauauaacc

SEQ ID NO: 279242 - RNA, 22 nt, Human
acauguguguauacguauuuau

SEQ ID NO: 279243 - RNA, 22 nt, Human
uuacauauugucuauuguucaa

SEQ ID NO: 279244 - RNA, 22 nt, Human
gacaaaacacauuaguuuaaaa

SEQ ID NO: 279245 - RNA, 22 nt, Human
ggggaggaagcucucaguucca

SEQ ID NO: 279246 - RNA, 22 nt, Human
ccagaaagguaaacacuggauu

SEQ ID NO: 279247 - RNA, 22 nt, Human
gcagagccagaauggccaggac

SEQ ID NO: 279248 - RNA, 18 nt, Human
aagucucugaaagcuuuu

SEQ ID NO: 279249 - RNA, 22 nt, Human
uuugacuccagagcccauuuuu

SEQ ID NO: 279250 - RNA, 22 nt, Human
uugaggcauuacuguaaugaga

SEQ ID NO: 279251 - RNA, 21 nt, Human
agcuccaggcuccugggguuc

SEQ ID NO: 279252 - RNA, 22 nt, Human
ucaggaacauuuaaccacaggg

SEQ ID NO: 279253 - RNA, 22 nt, Human
aaacaucaccauuuuaccuaau

SEQ ID NO: 279254 - RNA, 22 nt, Human
uucuuuuuaucuucccauaaga

SEQ ID NO: 279255 - RNA, 20 nt, Human
ccaccuggccaaggcugugc

SEQ ID NO: 279256 - RNA, 22 nt, Human
caaauacuuacugaaccugugc

SEQ ID NO: 279257 - RNA, 22 nt, Human
gggccugggaacuugcauuuag

SEQ ID NO: 279258 - RNA, 22 nt, Human
agggcacuucagucagacugag

SEQ ID NO: 279259 - RNA, 22 nt, Human
ccucaguguuaggauaagagaa

SEQ ID NO: 279260 - RNA, 21 nt, Human
agagaauugccuuagauguuc

SEQ ID NO: 279261 - RNA, 22 nt, Human
ucuaaacuaggguuaaaggaaa

SEQ ID NO: 279262 - RNA, 21 nt, Human
aggcagcgugagggccacuca

SEQ ID NO: 279263 - RNA, 22 nt, Human
ccacaggaccagaggagaucac

SEQ ID NO: 279264 - RNA, 22 nt, Human
gggugcaggggacccuagggac

SEQ ID NO: 279265 - RNA, 22 nt, Human
caggccugggcuucggggcuga

SEQ ID NO: 279266 - RNA, 22 nt, Human
ccaggaaggcaggccuccccgc

SEQ ID NO: 279267 - RNA, 22 nt, Human
uguggggccaaagcccagccac

SEQ ID NO: 279268 - RNA, 22 nt, Human
ugaaagcagauagcucuguugu

SEQ ID NO: 279269 - RNA, 22 nt, Human
uacaaacuaacaugucucaucc

SEQ ID NO: 279270 - RNA, 20 nt, Human
uuucacagucccuguuuccu

SEQ ID NO: 279271 - RNA, 22 nt, Human
ucucucuuuuuaaucauguaau

SEQ ID NO: 279272 - RNA, 22 nt, Human
ugcugagggcuguuaaggaagc

SEQ ID NO: 279273 - RNA, 22 nt, Human
ucucuggccccauggcugagcu

SEQ ID NO: 279274 - RNA, 22 nt, Human
aagggcuggaucucucugagca

SEQ ID NO: 279275 - RNA, 22 nt, Human
aaaaucuggcaacacuaaguuu

SEQ ID NO: 279276 - RNA, 22 nt, Human
auucuuuacauuggcuucuucc

SEQ ID NO: 279277 - RNA, 22 nt, Human
cugcugggucuaugcaagugga

SEQ ID NO: 279278 - RNA, 22 nt, Human
gccucagagcuacacacacgca

SEQ ID NO: 279279 - RNA, 22 nt, Human
augggcagagcuggugggaggc

SEQ ID NO: 279280 - RNA, 22 nt, Human
guuauaaaaugcacaguuguuu

SEQ ID NO: 279281 - RNA, 22 nt, Human
gaggccugguuuccagcauccu

SEQ ID NO: 279282 - RNA, 22 nt, Human
agugugucugaucacuugugag

SEQ ID NO: 279283 - RNA, 22 nt, Human
uauuuuacuuuaaagcgagaga

SEQ ID NO: 279284 - RNA, 22 nt, Human
gucuggcucaguccuagcugua

SEQ ID NO: 279285 - RNA, 22 nt, Human
uacagagaguacagcauccaca

SEQ ID NO: 279286 - RNA, 22 nt, Human
uaggcuccaagagcgaacucag

SEQ ID NO: 279287 - RNA, 22 nt, Human
aauguugauguuuucagugagc

SEQ ID NO: 279288 - RNA, 22 nt, Human
guggcgaggggagguccuggcg

SEQ ID NO: 279289 - RNA, 22 nt, Human
aagauguugucguuagugauga

SEQ ID NO: 279290 - RNA, 22 nt, Human
gaacagagcugacuacaaggca

SEQ ID NO: 279291 - RNA, 22 nt, Human
caugcuucacacacugaaugac

SEQ ID NO: 279292 - RNA, 23 nt, Human
ugugacagggucauugaaaaggg

SEQ ID NO: 279293 - RNA, 23 nt, Human
aucuaaaguguuaaauagcuggg

SEQ ID NO: 279294 - RNA, 22 nt, Human
caaugauuuuuccauugcagga

SEQ ID NO: 279295 - RNA, 22 nt, Human
ggcagcagcaagguuggagcug

SEQ ID NO: 279296 - RNA, 22 nt, Human
uaugcacauuaucuaauccauu

SEQ ID NO: 279297 - RNA, 22 nt, Human
gcagggacaacugugcaccuga

SEQ ID NO: 279298 - RNA, 22 nt, Human
caagcuggaguuccucagagug

SEQ ID NO: 279299 - RNA, 22 nt, Human
uccuggcacccuuggguuggag

SEQ ID NO: 279300 - RNA, 22 nt, Human
ucuacagugagucauucaaaca

SEQ ID NO: 279301 - RNA, 22 nt, Human
aaauccuaagcagaggaauuua

SEQ ID NO: 279302 - RNA, 22 nt, Human
aaggcuuuugacgguugccucu

SEQ ID NO: 279303 - RNA, 22 nt, Human
ccagaggagggcucugaugagg

SEQ ID NO: 279304 - RNA, 22 nt, Human
uguguucuuaaaagcagugaua

SEQ ID NO: 279305 - RNA, 22 nt, Human
ucacaugucagucuuaaacaga

SEQ ID NO: 279306 - RNA, 22 nt, Human
uugcaaaaaccacaauuacuuu

SEQ ID NO: 279307 - RNA, 22 nt, Human
cagcagcugcaaauggaaacag

SEQ ID NO: 279308 - RNA, 22 nt, Human
ccuuuuauacucagugauauca

SEQ ID NO: 279309 - RNA, 22 nt, Human
aggaauguauuauuccuucugg

SEQ ID NO: 279310 - RNA, 22 nt, Human
gacuguguccaugugcuggauu

SEQ ID NO: 279311 - RNA, 22 nt, Human
cucugagcccgcugcagcccca

SEQ ID NO: 279312 - RNA, 22 nt, Human
ccacuggagacuggucucugug

SEQ ID NO: 279313 - RNA, 22 nt, Human
auuagaauuaugcuugcuaaug

SEQ ID NO: 279314 - RNA, 22 nt, Human
cagugagggaagaucucagcac

SEQ ID NO: 279315 - RNA, 22 nt, Human
uggcucaggcuugaaaauagau

SEQ ID NO: 279316 - RNA, 22 nt, Human
ucuguucauaguaguguauaug

SEQ ID NO: 279317 - RNA, 22 nt, Human
ggaggggcugagcaacuuucag

SEQ ID NO: 279318 - RNA, 22 nt, Human
cagggcagaacauauagauagu

SEQ ID NO: 279319 - RNA, 22 nt, Human
uauaauaugaggcaggagugau

SEQ ID NO: 279320 - RNA, 22 nt, Human
ggcuuuagggcaggcaguguua

SEQ ID NO: 279321 - RNA, 22 nt, Human
ggaggaugccaagcugugcaca

SEQ ID NO: 279322 - RNA, 22 nt, Human
guuuaucauuauuauuagcaac

SEQ ID NO: 279323 - RNA, 22 nt, Human
cucugccauuuaucagaacugu

SEQ ID NO: 279324 - RNA, 22 nt, Human
aauaauguugacgauagucuua

SEQ ID NO: 279325 - RNA, 22 nt, Human
agacccugguaaacacuccagg

SEQ ID NO: 279326 - RNA, 22 nt, Human
gaggcccagcagcgcaggucuu

SEQ ID NO: 279327 - RNA, 22 nt, Human
cauuagaacuaagauguccagg

SEQ ID NO: 279328 - RNA, 22 nt, Human
ugcuggggucauggggcgcccg

SEQ ID NO: 279329 - RNA, 22 nt, Human
gggauggggagcuggaaagggg

SEQ ID NO: 279330 - RNA, 22 nt, Human
gcugcccugacuccagcagccu

SEQ ID NO: 279331 - RNA, 22 nt, Human
caucugcugacuugacaaguac

SEQ ID NO: 279332 - RNA, 22 nt, Human
aagaauaaguagaugggagaag

SEQ ID NO: 279333 - RNA, 22 nt, Human
auuuaguuuaggaaaaguaggu

SEQ ID NO: 279334 - RNA, 22 nt, Human
ccuguucaaugcccuggcuuca

SEQ ID NO: 279335 - RNA, 22 nt, Human
agaaacauccugcuuuccauuu

SEQ ID NO: 279336 - RNA, 22 nt, Human
acaaaugacuauuugguacagg

SEQ ID NO: 279337 - RNA, 22 nt, Human
uaaaugugagugaugcggugaa

SEQ ID NO: 279338 - RNA, 22 nt, Human
uauauaauuuguaaaagcaccu

SEQ ID NO: 279339 - RNA, 23 nt, Human
agugcaugcuugacuuagcaagc

SEQ ID NO: 279340 - RNA, 22 nt, Human
uaaugauauuucccauuucucu

SEQ ID NO: 279341 - RNA, 22 nt, Human
acuuccuguaaauagaauucca

SEQ ID NO: 279342 - RNA, 22 nt, Human
agcugccacauggugucacugu

SEQ ID NO: 279343 - RNA, 22 nt, Human
gcagcagagaacacaaugaugg

SEQ ID NO: 279344 - RNA, 22 nt, Human
uaugcagcaccacucacugcag

SEQ ID NO: 279345 - RNA, 22 nt, Human
guggccauaggaggucagauga

SEQ ID NO: 279346 - RNA, 22 nt, Human
ucccuaguagacccagaucauu

SEQ ID NO: 279347 - RNA, 22 nt, Human
guacauuuugagguuaaaacaa

SEQ ID NO: 279348 - RNA, 21 nt, Human
accuccuggcauccuguuccc

SEQ ID NO: 279349 - RNA, 22 nt, Human
cagagacauccauuuuauaugc

SEQ ID NO: 279350 - RNA, 22 nt, Human
ggugcagggagaggcaggcccc

SEQ ID NO: 279351 - RNA, 22 nt, Human
agaaaugaagcaggaguuauua

SEQ ID NO: 279352 - RNA, 22 nt, Human
gaaaucuugcucauugugacaa

SEQ ID NO: 279353 - RNA, 21 nt, Human
accuucaagccagaggugguc

SEQ ID NO: 279354 - RNA, 22 nt, Human
guguggggaggagagagcccuu

SEQ ID NO: 279355 - RNA, 22 nt, Human
ugaauacacuaaaaaucacuuu

SEQ ID NO: 279356 - RNA, 22 nt, Human
acaugacauaguagaaaagccc

SEQ ID NO: 279357 - RNA, 19 nt, Human
uucugggcagcacaugaau

SEQ ID NO: 279358 - RNA, 22 nt, Human
uacuuucuuucccaagaggugg

SEQ ID NO: 279359 - RNA, 22 nt, Human
ucaucugaggcaccagagcaua

SEQ ID NO: 279360 - RNA, 22 nt, Human
cagggccuggagcugggccugc

SEQ ID NO: 279361 - RNA, 22 nt, Human
aaugucuuucucauaacagaua

SEQ ID NO: 279362 - RNA, 20 nt, Human
aauguauuguuuuguuucag

SEQ ID NO: 279363 - RNA, 22 nt, Human
gaauacauaucagauguguuuc

SEQ ID NO: 279364 - RNA, 22 nt, Human
ugagggggguaaucacuggguu

SEQ ID NO: 279365 - RNA, 22 nt, Human
gaaguucuuuauagcaguguga

SEQ ID NO: 279366 - RNA, 22 nt, Human
ccuuuggucaccuccacucuua

SEQ ID NO: 279367 - RNA, 22 nt, Human
cugagacccagacaccugagga

SEQ ID NO: 279368 - RNA, 22 nt, Human
guggguccgcuugguuccggug

SEQ ID NO: 279369 - RNA, 14 nt, Human
gcaggcagaucauu

SEQ ID NO: 279370 - RNA, 22 nt, Human
uauagcacacaguuuauaaaag

SEQ ID NO: 279371 - RNA, 22 nt, Human
cuucagaagccugcagccuuug

SEQ ID NO: 279372 - RNA, 22 nt, Human
uccaggcaugguguaauuuugc

SEQ ID NO: 279373 - RNA, 22 nt, Human
ugagaaagccuuuagucccagg

SEQ ID NO: 279374 - RNA, 22 nt, Human
uggccucugcacugggcucccc

SEQ ID NO: 279375 - RNA, 22 nt, Human
caggcccucaggcaagggcucu

SEQ ID NO: 279376 - RNA, 22 nt, Human
ccugggcuuugagggcaggaug

SEQ ID NO: 279377 - RNA, 17 nt, Human
aggggagagugggaaga

SEQ ID NO: 279378 - RNA, 22 nt, Human
uacaauuacucagcucugcugu

SEQ ID NO: 279379 - RNA, 18 nt, Human
ccaaggccccugcugggg

SEQ ID NO: 279380 - RNA, 22 nt, Human
ggucaaagggugagauggcagg

SEQ ID NO: 279381 - RNA, 23 nt, Human
gggcuccagucucugcucaguug

SEQ ID NO: 279382 - RNA, 22 nt, Human
accucaagugauccacucaccu

SEQ ID NO: 279383 - RNA, 22 nt, Human
agcaggaggguuuuguagaguc

SEQ ID NO: 279384 - RNA, 22 nt, Human
ggagucugcggcagacacugua

SEQ ID NO: 279385 - RNA, 20 nt, Human
gggguugacccucuuggacu

SEQ ID NO: 279386 - RNA, 22 nt, Human
ccagccacagcuuccagcuccu

SEQ ID NO: 279387 - RNA, 22 nt, Human
ucuucagagauguaacauaugg

SEQ ID NO: 279388 - RNA, 22 nt, Human
cacacuugcuucagagucaagu

SEQ ID NO: 279389 - RNA, 22 nt, Human
accucagagaccucucaggugc

SEQ ID NO: 279390 - RNA, 22 nt, Human
cuagaugccaauuuuuauggau

SEQ ID NO: 279391 - RNA, 22 nt, Human
ccucaggcaggaaacugucccg

SEQ ID NO: 279392 - RNA, 22 nt, Human
agcuccuggacgaacagggagu

SEQ ID NO: 279393 - RNA, 22 nt, Human
agucuguguauauucacugccc

SEQ ID NO: 279394 - RNA, 18 nt, Human
ggucaggggcggagagaa

SEQ ID NO: 279395 - RNA, 22 nt, Human
cucaccccacuaccccuuggug

SEQ ID NO: 279396 - RNA, 22 nt, Human
cacaguaugaucuaaaguaagu

SEQ ID NO: 279397 - RNA, 22 nt, Human
acauuucugcaucucagagcua

SEQ ID NO: 279398 - RNA, 22 nt, Human
uuugucaaguuugcaaauacgu

SEQ ID NO: 279399 - RNA, 22 nt, Human
ucugagagcucuggggccccuu

SEQ ID NO: 279400 - RNA, 22 nt, Human
gcauucuugguggagugcuaaa

SEQ ID NO: 279401 - RNA, 22 nt, Human
aaacacuguacaaucugcaggg

SEQ ID NO: 279402 - RNA, 22 nt, Human
ugucauguaaagaguaaauggu

SEQ ID NO: 279403 - RNA, 22 nt, Human
uguacagauugaucauggagag

SEQ ID NO: 279404 - RNA, 23 nt, Human
ucuguuuugcaacaugugacaag

SEQ ID NO: 279405 - RNA, 22 nt, Human
acauucuucagcuuugucaggc

SEQ ID NO: 279406 - RNA, 22 nt, Human
acacagcuucaaagucuaauuc

SEQ ID NO: 279407 - RNA, 22 nt, Human
cauccaggcaccacaaccagcu

SEQ ID NO: 279408 - RNA, 22 nt, Human
acauuugucuucuuucagauua

SEQ ID NO: 279409 - RNA, 22 nt, Human
ugucauuuaguccucugugugu

SEQ ID NO: 279410 - RNA, 22 nt, Human
cugccucuccccagaguggccc

SEQ ID NO: 279411 - RNA, 22 nt, Human
uuacaaaguucugaguucaaac

SEQ ID NO: 279412 - RNA, 20 nt, Human
aauaaacuacugagagaugu

SEQ ID NO: 279413 - RNA, 22 nt, Human
ucaaggcaaaguaaauauucaa

SEQ ID NO: 279414 - RNA, 21 nt, Human
aguuggaggcaguuuggcaau

SEQ ID NO: 279415 - RNA, 22 nt, Human
uccuguccugaggcuccaggcc

SEQ ID NO: 279416 - RNA, 22 nt, Human
cuuuuaaugagcauugcugucu

SEQ ID NO: 279417 - RNA, 22 nt, Human
cacaucucagggcuacaggcag

SEQ ID NO: 279418 - RNA, 22 nt, Human
acaaacuaccuacagauguuca

SEQ ID NO: 279419 - RNA, 22 nt, Human
ccucuuccuucucacuguggaa

SEQ ID NO: 279420 - RNA, 22 nt, Human
gcuggcuugauaguuucugcuu

SEQ ID NO: 279421 - RNA, 22 nt, Human
ggcucugggaaauggucuuccu

SEQ ID NO: 279422 - RNA, 22 nt, Human
uguccugggucaaauccugguc

SEQ ID NO: 279423 - RNA, 22 nt, Human
gcauccaggacuauaugaugau

SEQ ID NO: 279424 - RNA, 22 nt, Human
ggaccaguuucaaacuguacca

SEQ ID NO: 279425 - RNA, 22 nt, Human
ucaucugaacaugcagccugug

SEQ ID NO: 279426 - RNA, 22 nt, Human
agugcacaccuuaguacaaagu

SEQ ID NO: 279427 - RNA, 22 nt, Human
gugcugugugauccaugcuggc

SEQ ID NO: 279428 - RNA, 22 nt, Human
ucucugaaggggagcuguuuaa

SEQ ID NO: 279429 - RNA, 22 nt, Human
ucuaaagagaaccuuuucucau

SEQ ID NO: 279430 - RNA, 22 nt, Human
aauagaaaggaggggcucuugu

SEQ ID NO: 279431 - RNA, 22 nt, Human
gcauuagauauccuugaaguua

SEQ ID NO: 279432 - RNA, 22 nt, Human
ugcccacauggugccauggcca

SEQ ID NO: 279433 - RNA, 22 nt, Human
aacucagaauagggugcagggc

SEQ ID NO: 279434 - RNA, 22 nt, Human
augguuuaguuagggcuuuuca

SEQ ID NO: 279435 - RNA, 19 nt, Human
cugaggcaaguggugguca

SEQ ID NO: 279436 - RNA, 22 nt, Human
gguccugggaagaugcucauga

SEQ ID NO: 279437 - RNA, 22 nt, Human
cuauuauuuccucaucuauaaa

SEQ ID NO: 279438 - RNA, 22 nt, Human
gcagcuuuggagguggaacucu

SEQ ID NO: 279439 - RNA, 22 nt, Human
acaggugggcuuaagagucggc

SEQ ID NO: 279440 - RNA, 22 nt, Human
aaguugaagcaugaaccaaggu

SEQ ID NO: 279441 - RNA, 22 nt, Human
cagcuucuaaagugugaagcca

SEQ ID NO: 279442 - RNA, 21 nt, Human
uuagaguugccauuauaugua

SEQ ID NO: 279443 - RNA, 22 nt, Human
uuccauaugaaaaagcuguugc

SEQ ID NO: 279444 - RNA, 22 nt, Human
cuuaauuuuuguaguagaugga

SEQ ID NO: 279445 - RNA, 22 nt, Human
uaaagugcuggauuugaguaaa

SEQ ID NO: 279446 - RNA, 22 nt, Human
uccagagaucacacugggcagg

SEQ ID NO: 279447 - RNA, 23 nt, Human
agucucagcuggaaacauguguc

SEQ ID NO: 279448 - RNA, 22 nt, Human
ucacucugcaggaaggagcagc

SEQ ID NO: 279449 - RNA, 22 nt, Human
cugggcaggauacuucauggga

SEQ ID NO: 279450 - RNA, 22 nt, Human
uauuucaucuggaacaagguaa

SEQ ID NO: 279451 - RNA, 22 nt, Human
agagggaaaaacucaugucauu

SEQ ID NO: 279452 - RNA, 20 nt, Human
cagggcucugggccuggccu

SEQ ID NO: 279453 - RNA, 22 nt, Human
gaucuuuagccaagacacacca

SEQ ID NO: 279454 - RNA, 22 nt, Human
aaagaggcaaucaauguagcaa

SEQ ID NO: 279455 - RNA, 22 nt, Human
gccuucccuggcuaggcaagca

SEQ ID NO: 279456 - RNA, 22 nt, Human
uauacacauccuccaaagauag

SEQ ID NO: 279457 - RNA, 22 nt, Human
aggcucagcugguggugaucgc

SEQ ID NO: 279458 - RNA, 22 nt, Human
cugccuggcauagucuggucga

SEQ ID NO: 279459 - RNA, 22 nt, Human
aguaacucuccuuugacauauu

SEQ ID NO: 279460 - RNA, 19 nt, Human
auucuuguuaagugucauc

SEQ ID NO: 279461 - RNA, 22 nt, Human
cuggcuggaaguuagagaacuu

SEQ ID NO: 279462 - RNA, 22 nt, Human
ucuccauuuuauagauaaugaa

SEQ ID NO: 279463 - RNA, 22 nt, Human
gagggcaggggucuugcacggu

SEQ ID NO: 279464 - RNA, 22 nt, Human
ugcauucaguuggucagcuuuu

SEQ ID NO: 279465 - RNA, 22 nt, Human
gagcugggaguuauagcauguu

SEQ ID NO: 279466 - RNA, 22 nt, Human
aggagacauacuauaggaauau

SEQ ID NO: 279467 - RNA, 22 nt, Human
aggccucacucucagagcuucu

SEQ ID NO: 279468 - RNA, 22 nt, Human
gaaauugugcauuuagcaacac

SEQ ID NO: 279469 - RNA, 22 nt, Human
cccaggcacaccccgaacggaa

SEQ ID NO: 279470 - RNA, 20 nt, Human
cuccugugccucucugggcc

SEQ ID NO: 279471 - RNA, 22 nt, Human
cagcagugucuccagcaucaca

SEQ ID NO: 279472 - RNA, 19 nt, Human
caguuacaggcacuguggg

SEQ ID NO: 279473 - RNA, 22 nt, Human
gguuucuagcagagucucuuua

SEQ ID NO: 279474 - RNA, 22 nt, Human
uuagcuuucagccuuucucacc

SEQ ID NO: 279475 - RNA, 22 nt, Human
cuggaaagugcuuuucugagag

SEQ ID NO: 279476 - RNA, 18 nt, Human
aaauguacuguccauggc

SEQ ID NO: 279477 - RNA, 22 nt, Human
ccagccuggggaggcagcuucu

SEQ ID NO: 279478 - RNA, 22 nt, Human
cugagggguauccaagggguaa

SEQ ID NO: 279479 - RNA, 21 nt, Human
guucaugucagcauuaaggga

SEQ ID NO: 279480 - RNA, 22 nt, Human
aacuuuauuguuaggggcuaaa

SEQ ID NO: 279481 - RNA, 22 nt, Human
cagagacauuaagugccaugau

SEQ ID NO: 279482 - RNA, 22 nt, Human
uaggauaugugaaaucauauua

SEQ ID NO: 279483 - RNA, 22 nt, Human
aggcuucaguagggagcauguc

SEQ ID NO: 279484 - RNA, 22 nt, Human
agucuucuggguguuuccagag

SEQ ID NO: 279485 - RNA, 22 nt, Human
caggguggcacaucacagcauu

SEQ ID NO: 279486 - RNA, 22 nt, Human
cauuauugccagccauacugaa

SEQ ID NO: 279487 - RNA, 22 nt, Human
gaucacaugaguuaucuaacuu

SEQ ID NO: 279488 - RNA, 22 nt, Human
gaggagacaguggagccgcuac

SEQ ID NO: 279489 - RNA, 22 nt, Human
guuuauuauucaacuucauguu

SEQ ID NO: 279490 - RNA, 21 nt, Human
cagaggggcuagccuggcugc

SEQ ID NO: 279491 - RNA, 22 nt, Human
uuagaaaaaggcuguggucuua

SEQ ID NO: 279492 - RNA, 22 nt, Human
ugaggcaggagaaucacaugaa

SEQ ID NO: 279493 - RNA, 21 nt, Human
gagccuucccucugcccuuuc

SEQ ID NO: 279494 - RNA, 22 nt, Human
gccagcuggcugcaggucccag

SEQ ID NO: 279495 - RNA, 22 nt, Human
agaggaaggaugcauauccaaa

SEQ ID NO: 279496 - RNA, 22 nt, Human
ugugcuucucacaucacuguug

SEQ ID NO: 279497 - RNA, 15 nt, Human
cauaucacugggaau

SEQ ID NO: 279498 - RNA, 17 nt, Human
ggagccaggagcccacc

SEQ ID NO: 279499 - RNA, 22 nt, Human
cugcccuguaucuucucccaau

SEQ ID NO: 279500 - RNA, 22 nt, Human
uggcagagccuugccaaacucc

SEQ ID NO: 279501 - RNA, 23 nt, Human
acugggcugaaauuaaagguguc

SEQ ID NO: 279502 - RNA, 22 nt, Human
ucuaccuggaguccguuguuaa

SEQ ID NO: 279503 - RNA, 22 nt, Human
uaaagcaagacacacccauagc

SEQ ID NO: 279504 - RNA, 22 nt, Human
ucacaauggcauaguauaaaau

SEQ ID NO: 279505 - RNA, 22 nt, Human
ugaacuuuugcacagaggauuu

SEQ ID NO: 279506 - RNA, 23 nt, Human
agaguggccuacucacacucauu

SEQ ID NO: 279507 - RNA, 22 nt, Human
ucucagcucagcuuccacagag

SEQ ID NO: 279508 - RNA, 22 nt, Human
uagcuauuuagcccagauaagu

SEQ ID NO: 279509 - RNA, 23 nt, Human
uggcucucucagugcugcagagg

SEQ ID NO: 279510 - RNA, 22 nt, Human
cagcugaguuacucugaggucu

SEQ ID NO: 279511 - RNA, 22 nt, Human
uggcuacucaacauguacucau

SEQ ID NO: 279512 - RNA, 22 nt, Human
acauuucuuccacaugcugcug

SEQ ID NO: 279513 - RNA, 22 nt, Human
ucucuguucauggcacuauguc

SEQ ID NO: 279514 - RNA, 22 nt, Human
uuaucuugguguuuuaguaauu

SEQ ID NO: 279515 - RNA, 22 nt, Human
cuguacaucccgagagccagua

SEQ ID NO: 279516 - RNA, 22 nt, Human
uaauuacagguccaaaacaauc

SEQ ID NO: 279517 - RNA, 22 nt, Human
gcucagggcgcgagggacgugg

SEQ ID NO: 279518 - RNA, 22 nt, Human
gcugcuguuccuccaguggauc

SEQ ID NO: 279519 - RNA, 22 nt, Human
gccuguccuugugaggucccag

SEQ ID NO: 279520 - RNA, 22 nt, Human
ucuccugcucagaacagccuca

SEQ ID NO: 279521 - RNA, 22 nt, Human
agauaaauuccuaagauuucag

SEQ ID NO: 279522 - RNA, 22 nt, Human
uaaagguuuauucaacaaaaua

SEQ ID NO: 279523 - RNA, 22 nt, Human
ucugaaauagaagugucuuucu

SEQ ID NO: 279524 - RNA, 22 nt, Human
agucacagguucuugggauuag

SEQ ID NO: 279525 - RNA, 22 nt, Human
gaagugacagaagggaugggca

SEQ ID NO: 279526 - RNA, 22 nt, Human
auuauuagugauguuguuacug

SEQ ID NO: 279527 - RNA, 22 nt, Human
cuuaagaauauugaaguugugg

SEQ ID NO: 279528 - RNA, 22 nt, Human
uaauuucacugauaugaaguca

SEQ ID NO: 279529 - RNA, 22 nt, Human
ugucaacauuggcugacaguug

SEQ ID NO: 279530 - RNA, 22 nt, Human
aaacacacagaaaugaaugagg

SEQ ID NO: 279531 - RNA, 22 nt, Human
aacccacaagcagcuguagccc

SEQ ID NO: 279532 - RNA, 22 nt, Human
aacagacaacuccuguggcuca

SEQ ID NO: 279533 - RNA, 22 nt, Human
guggcagaaauauucuugcucu

SEQ ID NO: 279534 - RNA, 22 nt, Human
acuucucuucauagguggcaau

SEQ ID NO: 279535 - RNA, 22 nt, Human
uggcacuuuacacccauuuggc

SEQ ID NO: 279536 - RNA, 22 nt, Human
aaauacauuuacagucguggcu

SEQ ID NO: 279537 - RNA, 22 nt, Human
uucaguauacauuaucuaauug

SEQ ID NO: 279538 - RNA, 22 nt, Human
cuggagagaaaugacaaagcua

SEQ ID NO: 279539 - RNA, 22 nt, Human
gcuuggcuccuggcucacaggu

SEQ ID NO: 279540 - RNA, 22 nt, Human
aggaauguuuacacgacagaaa

SEQ ID NO: 279541 - RNA, 22 nt, Human
cugucuguguggacacggcugc

SEQ ID NO: 279542 - RNA, 22 nt, Human
ccagcucucagcgggagacuca

SEQ ID NO: 279543 - RNA, 22 nt, Human
auaauuaggucuuauaacgucu

SEQ ID NO: 279544 - RNA, 22 nt, Human
cagcuggcgggcagagccgcca

SEQ ID NO: 279545 - RNA, 22 nt, Human
aguccauacauugagaauaaca

SEQ ID NO: 279546 - RNA, 20 nt, Human
cugcagggugagugggcgau

SEQ ID NO: 279547 - RNA, 22 nt, Human
gcugugcuugcaugagugucug

SEQ ID NO: 279548 - RNA, 22 nt, Human
uaaaugccauucguuucauaca

SEQ ID NO: 279549 - RNA, 22 nt, Human
cagagaaacucagauagcugau

SEQ ID NO: 279550 - RNA, 22 nt, Human
ucuuccucccuacagagcucag

SEQ ID NO: 279551 - RNA, 22 nt, Human
guagccagaucugcugugucug

SEQ ID NO: 279552 - RNA, 22 nt, Human
agcaggcaguguagagccuuca

SEQ ID NO: 279553 - RNA, 22 nt, Human
guagggacuuguuuuacuagua

SEQ ID NO: 279554 - RNA, 22 nt, Human
uaagugauuuguaguauacuau

SEQ ID NO: 279555 - RNA, 22 nt, Human
aaagccuucugucuagcagaua

SEQ ID NO: 279556 - RNA, 22 nt, Human
gcccggcagucacacacccagg

SEQ ID NO: 279557 - RNA, 22 nt, Human
ugaaggccacuuccugugagcu

SEQ ID NO: 279558 - RNA, 22 nt, Human
gccaucugcgcgguguccagcu

SEQ ID NO: 279559 - RNA, 22 nt, Human
gagcccagucugcuccugcgcc

SEQ ID NO: 279560 - RNA, 22 nt, Human
agcagggcuguguagguaauga

SEQ ID NO: 279561 - RNA, 22 nt, Human
uacugucuuuccauccuugccu

SEQ ID NO: 279562 - RNA, 22 nt, Human
ucuagaauacugugacaugcca

SEQ ID NO: 279563 - RNA, 22 nt, Human
cagcuuguuaccgagggagggu

SEQ ID NO: 279564 - RNA, 22 nt, Human
acaguaccaggccaaaccauga

SEQ ID NO: 279565 - RNA, 22 nt, Human
agaggggcgggaacucaaccuc

SEQ ID NO: 279566 - RNA, 22 nt, Human
ucauaaaacacaccagguaguu

SEQ ID NO: 279567 - RNA, 22 nt, Human
auggcuugcagagaaaagaggu

SEQ ID NO: 279568 - RNA, 22 nt, Human
ccucagagccuccagaaggaau

SEQ ID NO: 279569 - RNA, 22 nt, Human
gucuggugggauuccaaguggc

SEQ ID NO: 279570 - RNA, 22 nt, Human
ucuucuaguaggccaagaagcu

SEQ ID NO: 279571 - RNA, 19 nt, Human
uuguacagcaaccaacccu

SEQ ID NO: 279572 - RNA, 22 nt, Human
aaagcugccaaggagaauacua

SEQ ID NO: 279573 - RNA, 22 nt, Human
accaggcuguugggcccagugu

SEQ ID NO: 279574 - RNA, 23 nt, Human
agucagugcgggauggucagggg

SEQ ID NO: 279575 - RNA, 22 nt, Human
uggccuuccuggugacucauga

SEQ ID NO: 279576 - RNA, 22 nt, Human
caauccaguuucugucagcuac

SEQ ID NO: 279577 - RNA, 22 nt, Human
ggccuuagugagguccugaugc

SEQ ID NO: 279578 - RNA, 22 nt, Human
ugcccagagccugagaggauua

SEQ ID NO: 279579 - RNA, 22 nt, Human
guguggcaccuccuuuccagcu

SEQ ID NO: 279580 - RNA, 22 nt, Human
gaggagcucaugaaagcggugu

SEQ ID NO: 279581 - RNA, 22 nt, Human
ucccuggggaagggcaagcaag

SEQ ID NO: 279582 - RNA, 22 nt, Human
uuauucacucauuuaacauuau

SEQ ID NO: 279583 - RNA, 22 nt, Human
cuuaacagagagaaguguugcu

SEQ ID NO: 279584 - RNA, 22 nt, Human
aggcucagucuguucaugcacu

SEQ ID NO: 279585 - RNA, 22 nt, Human
caguucuggaggcuccacaucu

SEQ ID NO: 279586 - RNA, 22 nt, Human
auuuaaauuuucugauggagag

SEQ ID NO: 279587 - RNA, 22 nt, Human
cucagcuccagcccucagcagc

SEQ ID NO: 279588 - RNA, 22 nt, Human
aucaucaugcccacuugagacu

SEQ ID NO: 279589 - RNA, 18 nt, Human
agggccagcugugaguag

SEQ ID NO: 279590 - RNA, 22 nt, Human
uggcuccuuuccgggucuccag

SEQ ID NO: 279591 - RNA, 22 nt, Human
cagauuuagaguggggcuugga

SEQ ID NO: 279592 - RNA, 22 nt, Human
uuucaaagacagccauauuugu

SEQ ID NO: 279593 - RNA, 22 nt, Human
cuugccugaggaacagagggua

SEQ ID NO: 279594 - RNA, 22 nt, Human
agggcaugaagcaguggacagc

SEQ ID NO: 279595 - RNA, 22 nt, Human
cugcucuguuucuuagcugggu

SEQ ID NO: 279596 - RNA, 22 nt, Human
uuaagugucauaauuuccaaga

SEQ ID NO: 279597 - RNA, 22 nt, Human
cucaaauguuuccacuucugcu

SEQ ID NO: 279598 - RNA, 22 nt, Human
cuggcacaguuaacauaugcua

SEQ ID NO: 279599 - RNA, 22 nt, Human
uacagcuaggcaaaaaugacau

SEQ ID NO: 279600 - RNA, 22 nt, Human
gguggcugaagcagucuucggg

SEQ ID NO: 279601 - RNA, 22 nt, Human
agcugaggccugauuucgccgu

SEQ ID NO: 279602 - RNA, 22 nt, Human
cauguaaaccauugugagcauc

SEQ ID NO: 279603 - RNA, 22 nt, Human
ccuggugcccccaagccagcug

SEQ ID NO: 279604 - RNA, 18 nt, Human
aacaugcauuagaacugc

SEQ ID NO: 279605 - RNA, 23 nt, Human
auuuuuagccucucugagcugag

SEQ ID NO: 279606 - RNA, 22 nt, Human
uuccuucuuugugguagaaagu

SEQ ID NO: 279607 - RNA, 22 nt, Human
acagauacaaauauacaaauac

SEQ ID NO: 279608 - RNA, 22 nt, Human
gaacaaacauuuuuggcaguau

SEQ ID NO: 279609 - RNA, 22 nt, Human
gaggcagaaguugcagugagca

SEQ ID NO: 279610 - RNA, 22 nt, Human
caucuuuguuuuggauauaauc

SEQ ID NO: 279611 - RNA, 22 nt, Human
cucuagcugaggucacugcuau

SEQ ID NO: 279612 - RNA, 22 nt, Human
gaccuggaggauccucuucuug

SEQ ID NO: 279613 - RNA, 22 nt, Human
auuacagaaagcaauauugagu

SEQ ID NO: 279614 - RNA, 22 nt, Human
uuauaacacugccuugucacca

SEQ ID NO: 279615 - RNA, 22 nt, Human
gacccaggguggucaccugaaa

SEQ ID NO: 279616 - RNA, 22 nt, Human
ggguggaagccagagaggucau

SEQ ID NO: 279617 - RNA, 18 nt, Human
ugaucuuugaguauaaug

SEQ ID NO: 279618 - RNA, 22 nt, Human
cacagggaggcagccaugcucc

SEQ ID NO: 279619 - RNA, 22 nt, Human
cucuguagaaacagggcagaag

SEQ ID NO: 279620 - RNA, 22 nt, Human
cucugggcaccaaagagcagcu

SEQ ID NO: 279621 - RNA, 22 nt, Human
ccaggguuucuucucuguauag

SEQ ID NO: 279622 - RNA, 22 nt, Human
cuagggaguggcagagcuggga

SEQ ID NO: 279623 - RNA, 22 nt, Human
uagggaugaugucuaaaaucau

SEQ ID NO: 279624 - RNA, 22 nt, Human
agaacaaggcuguuuccaaugc

SEQ ID NO: 279625 - RNA, 22 nt, Human
acaagucucaacagcagccagc

SEQ ID NO: 279626 - RNA, 22 nt, Human
cucccaggacuggcucuaacug

SEQ ID NO: 279627 - RNA, 22 nt, Human
cuguugcuaaguagugcaggua

SEQ ID NO: 279628 - RNA, 22 nt, Human
acauauauguaaaguacuuugu

SEQ ID NO: 279629 - RNA, 22 nt, Human
uaaaugcaagugcuccugggag

SEQ ID NO: 279630 - RNA, 22 nt, Human
agaaagugccucccuugggagc

SEQ ID NO: 279631 - RNA, 22 nt, Human
ggcuccagcuaaugguuucuau

SEQ ID NO: 279632 - RNA, 22 nt, Human
cugcagagguugguucuaagau

SEQ ID NO: 279633 - RNA, 22 nt, Human
cagcccucaaaccacuuccagg

SEQ ID NO: 279634 - RNA, 22 nt, Human
aagucugccuaaccuucauguu

SEQ ID NO: 279635 - RNA, 22 nt, Human
uaugaaauugccauuuuuaugg

SEQ ID NO: 279636 - RNA, 22 nt, Human
uucuuguuccaugaaagacaga

SEQ ID NO: 279637 - RNA, 17 nt, Human
augcaggugugaggggc

SEQ ID NO: 279638 - RNA, 22 nt, Human
ucaggcagaaaaaucacuaauu

SEQ ID NO: 279639 - RNA, 22 nt, Human
auaguguuagagccaguauguu

SEQ ID NO: 279640 - RNA, 22 nt, Human
aaugccuuggagagccuagagg

SEQ ID NO: 279641 - RNA, 22 nt, Human
uccucagugcuagccaacugcc

SEQ ID NO: 279642 - RNA, 22 nt, Human
gggagggguugcauguuugagu

SEQ ID NO: 279643 - RNA, 22 nt, Human
ugcucaggcccugggccauccu

SEQ ID NO: 279644 - RNA, 22 nt, Human
cuagaaucccaaauggacuggg

SEQ ID NO: 279645 - RNA, 18 nt, Human
auggcuucugaguggagg

SEQ ID NO: 279646 - RNA, 22 nt, Human
cuuccuucaauauaauuuuuac

SEQ ID NO: 279647 - RNA, 22 nt, Human
ugaaugaucuccgauuaguccu

SEQ ID NO: 279648 - RNA, 22 nt, Human
ugagccuggccugcagagacca

SEQ ID NO: 279649 - RNA, 22 nt, Human
uaugcacauauaaccugcacug

SEQ ID NO: 279650 - RNA, 22 nt, Human
gcucugagcacugugcggcugg

SEQ ID NO: 279651 - RNA, 22 nt, Human
ugacuugucucuuugggagaca

SEQ ID NO: 279652 - RNA, 22 nt, Human
uggugcagacaggagccccgcu

SEQ ID NO: 279653 - RNA, 22 nt, Human
ggugcugaauucuggaggaggc

SEQ ID NO: 279654 - RNA, 22 nt, Human
ucacaucugccuccauagcacc

SEQ ID NO: 279655 - RNA, 22 nt, Human
gagacauucuuaggaacaaugu

SEQ ID NO: 279656 - RNA, 22 nt, Human
cuucaaauacaaguagauuaug

SEQ ID NO: 279657 - RNA, 22 nt, Human
cuccuuccugguuagcaccuua

SEQ ID NO: 279658 - RNA, 22 nt, Human
cccugccaggguccugacagac

SEQ ID NO: 279659 - RNA, 22 nt, Human
uugauuucuuacucuuccaagg

SEQ ID NO: 279660 - RNA, 18 nt, Human
ucuagaaacuucucuccu

SEQ ID NO: 279661 - RNA, 22 nt, Human
agcagguggucuguugcugcug

SEQ ID NO: 279662 - RNA, 22 nt, Human
uggaggagaacucccuggcuac

SEQ ID NO: 279663 - RNA, 22 nt, Human
ugcucagacuuaagaagaucag

SEQ ID NO: 279664 - RNA, 22 nt, Human
aaggcaguacuuuauguccaua

SEQ ID NO: 279665 - RNA, 22 nt, Human
caagagcuacccugugccauau

SEQ ID NO: 279666 - RNA, 22 nt, Human
gcuacagagcucugugaagaga

SEQ ID NO: 279667 - RNA, 22 nt, Human
ggcugcccucgucuacugccca

SEQ ID NO: 279668 - RNA, 22 nt, Human
cuuuggaaaguaagcagcuaga

SEQ ID NO: 279669 - RNA, 22 nt, Human
ucaugcucaucauuagagugac

SEQ ID NO: 279670 - RNA, 22 nt, Human
uucaucaccuugguagcacucc

SEQ ID NO: 279671 - RNA, 22 nt, Human
agcaaagauguccggggcaagc

SEQ ID NO: 279672 - RNA, 22 nt, Human
aggaagcuuagugaaaggacca

SEQ ID NO: 279673 - RNA, 22 nt, Human
aaggugggcagaucacaagguc

SEQ ID NO: 279674 - RNA, 22 nt, Human
aaacauucaaagcaggaugugu

SEQ ID NO: 279675 - RNA, 19 nt, Human
uaggccagaaguuuuccac

SEQ ID NO: 279676 - RNA, 22 nt, Human
ucucccaguggugcagaaagca

SEQ ID NO: 279677 - RNA, 22 nt, Human
acuguaacacaaugguaucugu

SEQ ID NO: 279678 - RNA, 22 nt, Human
aggugccaggagggaauuuagg

SEQ ID NO: 279679 - RNA, 22 nt, Human
uaguacacucuguaaguuuaaa

SEQ ID NO: 279680 - RNA, 22 nt, Human
uggguccacaaacaucagauau

SEQ ID NO: 279681 - RNA, 22 nt, Human
uacagcccaagaaguuuauacg

SEQ ID NO: 279682 - RNA, 17 nt, Human
ccugagugggagaggaa

SEQ ID NO: 279683 - RNA, 22 nt, Human
aacuuuggguaaugcuucaauu

SEQ ID NO: 279684 - RNA, 22 nt, Human
gucacaggcaguaacuaggacc

SEQ ID NO: 279685 - RNA, 22 nt, Human
auaaaggcaacaccaggguaug

SEQ ID NO: 279686 - RNA, 22 nt, Human
augggaagguuuugagagcggg

SEQ ID NO: 279687 - RNA, 22 nt, Human
gauacacaaguggaaggagacg

SEQ ID NO: 279688 - RNA, 22 nt, Human
uuacaguuuaccaagaauauug

SEQ ID NO: 279689 - RNA, 22 nt, Human
agaguggcuucuuugacaugcu

SEQ ID NO: 279690 - RNA, 22 nt, Human
ugacucuuggugauuacugggu

SEQ ID NO: 279691 - RNA, 22 nt, Human
caauguaucaagaagcaucagu

SEQ ID NO: 279692 - RNA, 18 nt, Human
accaggaagcuucuuguc

SEQ ID NO: 279693 - RNA, 22 nt, Human
uaaagauaagacaucaacugag

SEQ ID NO: 279694 - RNA, 22 nt, Human
ggcaggaaaacaaugagccagg

SEQ ID NO: 279695 - RNA, 22 nt, Human
ugcagaagacacaagguaacgu

SEQ ID NO: 279696 - RNA, 22 nt, Human
gcuuucugcucuguaaaauggg

SEQ ID NO: 279697 - RNA, 22 nt, Human
ugcacaggugagacucaggaag

SEQ ID NO: 279698 - RNA, 22 nt, Human
gcacugguuacccugaguggcu

SEQ ID NO: 279699 - RNA, 22 nt, Human
uuucagaaggggagaaagguca

SEQ ID NO: 279700 - RNA, 22 nt, Human
cagauguaauuacucaagucaa

SEQ ID NO: 279701 - RNA, 22 nt, Human
ccucucccaggcgcggcggcag

SEQ ID NO: 279702 - RNA, 22 nt, Human
ucuccuggaagaauaccacacu

SEQ ID NO: 279703 - RNA, 16 nt, Human
cagcuuuaugucagug

SEQ ID NO: 279704 - RNA, 22 nt, Human
uaagauguggaaucacagcuuc

SEQ ID NO: 279705 - RNA, 22 nt, Human
agcccagccacuauuaaauguu

SEQ ID NO: 279706 - RNA, 22 nt, Human
guuucauacagauuauucaugg

SEQ ID NO: 279707 - RNA, 22 nt, Human
gagcucagaggauucuggggag

SEQ ID NO: 279708 - RNA, 17 nt, Human
cccagggaccacugcuu

SEQ ID NO: 279709 - RNA, 22 nt, Human
ccuuaggggugacagaaauacc

SEQ ID NO: 279710 - RNA, 21 nt, Human
ugaagggguggcagugugcuu

SEQ ID NO: 279711 - RNA, 22 nt, Human
ugagugaaaaauuugccuggag

SEQ ID NO: 279712 - RNA, 22 nt, Human
aguaaagcagaguugcaguaca

SEQ ID NO: 279713 - RNA, 20 nt, Human
aaauuuaggaaauuuuacgc

SEQ ID NO: 279714 - RNA, 19 nt, Human
gacaauuagagaucacuca

SEQ ID NO: 279715 - RNA, 22 nt, Human
cugcacugaagaaaggagcucu

SEQ ID NO: 279716 - RNA, 22 nt, Human
ucaggagguguaacgaauacag

SEQ ID NO: 279717 - RNA, 22 nt, Human
uuccugcagcaaggagaagcug

SEQ ID NO: 279718 - RNA, 22 nt, Human
ucagggacugcagagggaagcu

SEQ ID NO: 279719 - RNA, 22 nt, Human
aagacuuucccucaucagaacg

SEQ ID NO: 279720 - RNA, 22 nt, Human
cagaaacugcuuguggucaucu

SEQ ID NO: 279721 - RNA, 22 nt, Human
cagagcaugucaacuagcuuua

SEQ ID NO: 279722 - RNA, 22 nt, Human
gcugagucuugccugugcuguc

SEQ ID NO: 279723 - RNA, 22 nt, Human
ucucaaauggcaaauguggguc

SEQ ID NO: 279724 - RNA, 22 nt, Human
uguuuucuuccuaauugcucau

SEQ ID NO: 279725 - RNA, 22 nt, Human
aucucccaaacucauuucuuca

SEQ ID NO: 279726 - RNA, 22 nt, Human
aacuagaaaucacuacagguau

SEQ ID NO: 279727 - RNA, 22 nt, Human
aggaacacccccuuccuaccag

SEQ ID NO: 279728 - RNA, 22 nt, Human
agcugcagaucaauaggcucac

SEQ ID NO: 279729 - RNA, 21 nt, Human
accaggccaggaggcuggcac

SEQ ID NO: 279730 - RNA, 22 nt, Human
caagauuuggcaacuuugucau

SEQ ID NO: 279731 - RNA, 22 nt, Human
uaauuauagccgcuauuuugcu

SEQ ID NO: 279732 - RNA, 22 nt, Human
uauguacauguuaaagggcaaa

SEQ ID NO: 279733 - RNA, 22 nt, Human
caggcugggcugguguuagagu

SEQ ID NO: 279734 - RNA, 22 nt, Human
cagcugguuggaagggagcuga

SEQ ID NO: 279735 - RNA, 22 nt, Human
gauuucuaguucauuaucuauu

SEQ ID NO: 279736 - RNA, 22 nt, Human
gacccugguguccagguccugc

SEQ ID NO: 279737 - RNA, 22 nt, Human
cugggaagaagugggcuacauu

SEQ ID NO: 279738 - RNA, 22 nt, Human
agcagcaguccuuuguguaauu

SEQ ID NO: 279739 - RNA, 20 nt, Human
cuuuuucuccagcucugagc

SEQ ID NO: 279740 - RNA, 22 nt, Human
ccaggugucauggauaaugggu

SEQ ID NO: 279741 - RNA, 22 nt, Human
ucauuguagggcauuuagagag

SEQ ID NO: 279742 - RNA, 22 nt, Human
agggccuugcugucugaagcug

SEQ ID NO: 279743 - RNA, 22 nt, Human
ucugggucuaucccaugccuuu

SEQ ID NO: 279744 - RNA, 22 nt, Human
uaagugguugcuuguuuucauu

SEQ ID NO: 279745 - RNA, 22 nt, Human
ugaggccaaugacccugggcag

SEQ ID NO: 279746 - RNA, 22 nt, Human
agguccugaggguucgucugca

SEQ ID NO: 279747 - RNA, 22 nt, Human
ucagcuuauauuuuuaguguaa

SEQ ID NO: 279748 - RNA, 22 nt, Human
caggcacaggggaaugucuuuu

SEQ ID NO: 279749 - RNA, 22 nt, Human
gaggccuggcugucagucccca

SEQ ID NO: 279750 - RNA, 22 nt, Human
ucccaggaauugaagccagugu

SEQ ID NO: 279751 - RNA, 22 nt, Human
uuuaugaaccacucuacaccuu

SEQ ID NO: 279752 - RNA, 22 nt, Human
gcagcuguggugcugagauagg

SEQ ID NO: 279753 - RNA, 22 nt, Human
uaugaguuguggcuuagucaca

SEQ ID NO: 279754 - RNA, 22 nt, Human
auggaucuaccuucaggcucug

SEQ ID NO: 279755 - RNA, 22 nt, Human
cagcagagcuuauguuggguca

SEQ ID NO: 279756 - RNA, 22 nt, Human
auuuccuauacaguuguccaua

SEQ ID NO: 279757 - RNA, 22 nt, Human
aauuagggaaguauuuaguagu

SEQ ID NO: 279758 - RNA, 22 nt, Human
guauuaggaaauaugaagaaag

SEQ ID NO: 279759 - RNA, 22 nt, Human
gccaaaucuugcacacucuugu

SEQ ID NO: 279760 - RNA, 18 nt, Human
gaggccugagaaccaggu

SEQ ID NO: 279761 - RNA, 22 nt, Human
guaaaggcccauucaaacagcu

SEQ ID NO: 279762 - RNA, 22 nt, Human
acccaggguuccugggucccag

SEQ ID NO: 279763 - RNA, 21 nt, Human
acagacagggccagugucccc

SEQ ID NO: 279764 - RNA, 22 nt, Human
uagggcuggcgugcucagggaa

SEQ ID NO: 279765 - RNA, 22 nt, Human
uggcucuggugcgggcuccugc

SEQ ID NO: 279766 - RNA, 22 nt, Human
aagcagcauuguaaccaaugcc

SEQ ID NO: 279767 - RNA, 21 nt, Human
agcugaaaaguuguuuacaag

SEQ ID NO: 279768 - RNA, 22 nt, Human
gggcuuaaggccagugugcuuu

SEQ ID NO: 279769 - RNA, 22 nt, Human
gcagggagguuugcugaccugg

SEQ ID NO: 279770 - RNA, 22 nt, Human
ugcaggguauccuugucucugc

SEQ ID NO: 279771 - RNA, 22 nt, Human
aaucuuacaccgaauuuaaacu

SEQ ID NO: 279772 - RNA, 22 nt, Human
auguacaauucuccuugguagg

SEQ ID NO: 279773 - RNA, 22 nt, Human
aucauaaaccacuuuguaaucu

SEQ ID NO: 279774 - RNA, 18 nt, Human
uuggaccugugucagggc

SEQ ID NO: 279775 - RNA, 22 nt, Human
ugggaagaagcagagaacugga

SEQ ID NO: 279776 - RNA, 22 nt, Human
acuacacugcccuggggaucaa

SEQ ID NO: 279777 - RNA, 22 nt, Human
cuggucaccuccuucccagcua

SEQ ID NO: 279778 - RNA, 22 nt, Human
guguccugggggacuucagguu

SEQ ID NO: 279779 - RNA, 22 nt, Human
ccugggcuuucaaaaccagccu

SEQ ID NO: 279780 - RNA, 22 nt, Human
uauuaagauacguaguuguaaa

SEQ ID NO: 279781 - RNA, 22 nt, Human
acaaauggaacaaugaagacug

SEQ ID NO: 279782 - RNA, 22 nt, Human
agggccugagcuggcugaccuc

SEQ ID NO: 279783 - RNA, 22 nt, Human
ucaggaucaggggccuuuccuu

SEQ ID NO: 279784 - RNA, 19 nt, Human
cuuuagacacaccuggaca

SEQ ID NO: 279785 - RNA, 22 nt, Human
ugagaaaagguugagaugauaa

SEQ ID NO: 279786 - RNA, 22 nt, Human
ugcuuuauuaagagagaaauuu

SEQ ID NO: 279787 - RNA, 22 nt, Human
guuucucugucuguuacauugg

SEQ ID NO: 279788 - RNA, 22 nt, Human
aaggcaguuaauuuggcuagaa

SEQ ID NO: 279789 - RNA, 20 nt, Human
cagccuccacucacucagcu

SEQ ID NO: 279790 - RNA, 22 nt, Human
ucuaaaaaagucuguucacuug

SEQ ID NO: 279791 - RNA, 22 nt, Human
uaauuuuaugacaguguauuuu

SEQ ID NO: 279792 - RNA, 19 nt, Human
agggaaggauucugucauu

SEQ ID NO: 279793 - RNA, 22 nt, Human
aaagcugcccuacacggaagca

SEQ ID NO: 279794 - RNA, 23 nt, Human
agggaaaguaguaauggccuuug

SEQ ID NO: 279795 - RNA, 22 nt, Human
aaggccagcuuguagggcuggu

SEQ ID NO: 279796 - RNA, 20 nt, Human
agaggcuuccuugggaggag

SEQ ID NO: 279797 - RNA, 22 nt, Human
cccaggcugaguuagagguguc

SEQ ID NO: 279798 - RNA, 22 nt, Human
aagcccugaccugagaguccgu

SEQ ID NO: 279799 - RNA, 22 nt, Human
cuuucagaagccggaagggcag

SEQ ID NO: 279800 - RNA, 22 nt, Human
auuuacagaagcauguaauagc

SEQ ID NO: 279801 - RNA, 22 nt, Human
gcagagugggagcccagggcug

SEQ ID NO: 279802 - RNA, 22 nt, Human
uccuggccacacauuaauagug

SEQ ID NO: 279803 - RNA, 22 nt, Human
uccugggcccuccggaucaggu

SEQ ID NO: 279804 - RNA, 22 nt, Human
gaaugauagagcugccuucgga

SEQ ID NO: 279805 - RNA, 22 nt, Human
gcagggaccucacuacccccag

SEQ ID NO: 279806 - RNA, 22 nt, Human
cacaugaggugacuuccaagcu

SEQ ID NO: 279807 - RNA, 22 nt, Human
auucaacuagugauuguguuau

SEQ ID NO: 279808 - RNA, 22 nt, Human
ucugcagaagcucacuaaaucc

SEQ ID NO: 279809 - RNA, 22 nt, Human
aguggcaguggaaagcacacgg

SEQ ID NO: 279810 - RNA, 22 nt, Human
cucuggcuuuaaggaugccaca

SEQ ID NO: 279811 - RNA, 22 nt, Human
gcaucuaagguggauaacuucu

SEQ ID NO: 279812 - RNA, 22 nt, Human
gcugggugauucauuuccauaa

SEQ ID NO: 279813 - RNA, 22 nt, Human
gagcaguaggagaacccugagc

SEQ ID NO: 279814 - RNA, 22 nt, Human
ugagcugggaagagcagccaga

SEQ ID NO: 279815 - RNA, 18 nt, Human
aaggucugucugguaggu

SEQ ID NO: 279816 - RNA, 22 nt, Human
ccuggcacugaccaggcacuga

SEQ ID NO: 279817 - RNA, 22 nt, Human
aguguucuaacaacugcuuuca

SEQ ID NO: 279818 - RNA, 21 nt, Human
ggaagcaguggcggcaacucc

SEQ ID NO: 279819 - RNA, 22 nt, Human
agcuggagaauguggaugaucc

SEQ ID NO: 279820 - RNA, 22 nt, Human
uuugaaaauuuaagugcuacac

SEQ ID NO: 279821 - RNA, 22 nt, Human
agaaggcucauuugacugcauu

SEQ ID NO: 279822 - RNA, 22 nt, Human
gccucagaaaguggcagguagg

SEQ ID NO: 279823 - RNA, 22 nt, Human
gcucaggcuggauugcaguggc

SEQ ID NO: 279824 - RNA, 22 nt, Human
gcugccugggcaggaggcgcug

SEQ ID NO: 279825 - RNA, 22 nt, Human
agccuauuccaggaugagcuca

SEQ ID NO: 279826 - RNA, 22 nt, Human
ucuucuccauaaucaacacucu

SEQ ID NO: 279827 - RNA, 21 nt, Human
gcugccaccgcgugcuccagg

SEQ ID NO: 279828 - RNA, 22 nt, Human
ucuggagggcccacauccacaa

SEQ ID NO: 279829 - RNA, 18 nt, Human
agggcugaugaguuuggg

SEQ ID NO: 279830 - RNA, 22 nt, Human
cuguccagucagaacgucauua

SEQ ID NO: 279831 - RNA, 22 nt, Human
uauacuucccugcagaguaaag

SEQ ID NO: 279832 - RNA, 22 nt, Human
guuucacauaauuuuaaauugu

SEQ ID NO: 279833 - RNA, 22 nt, Human
uuccuggagaguuuucccaaag

SEQ ID NO: 279834 - RNA, 22 nt, Human
ggcucuggagauguccgaccug

SEQ ID NO: 279835 - RNA, 22 nt, Human
ugcaacaguggggcaugcugaa

SEQ ID NO: 279836 - RNA, 23 nt, Human
uagaucuucaucuaauucuguag

SEQ ID NO: 279837 - RNA, 22 nt, Human
caggaucccuggccuccgccca

SEQ ID NO: 279838 - RNA, 22 nt, Human
agaauuguugggguaauaaaag

SEQ ID NO: 279839 - RNA, 22 nt, Human
cagcuuauucaguaagcacaua

SEQ ID NO: 279840 - RNA, 22 nt, Human
acaauaguaagguauauuguca

SEQ ID NO: 279841 - RNA, 22 nt, Human
guauagaaggaucuggugaauu

SEQ ID NO: 279842 - RNA, 22 nt, Human
ucauagaaauaucacgucuuuu

SEQ ID NO: 279843 - RNA, 22 nt, Human
cagggcugugcccaucuucccc

SEQ ID NO: 279844 - RNA, 22 nt, Human
cuugcuuuugcugaugauuaag

SEQ ID NO: 279845 - RNA, 22 nt, Human
aaguucaaggugauaguggcag

SEQ ID NO: 279846 - RNA, 22 nt, Human
cccaggcugauguucagcgggu

SEQ ID NO: 279847 - RNA, 22 nt, Human
cagggccagccauccugcuggg

SEQ ID NO: 279848 - RNA, 22 nt, Human
auuuaagacugacuucaccagu

SEQ ID NO: 279849 - RNA, 22 nt, Human
cagcaggcaggugggccaaguc

SEQ ID NO: 279850 - RNA, 22 nt, Human
accauagacuggaggaucuccu

SEQ ID NO: 279851 - RNA, 22 nt, Human
gggugcugggaggcugacaucu

SEQ ID NO: 279852 - RNA, 22 nt, Human
uugcauuucacuuucaguaggc

SEQ ID NO: 279853 - RNA, 22 nt, Human
uccuccagcuguauccugccug

SEQ ID NO: 279854 - RNA, 19 nt, Human
ccagagguuugcugggccu

SEQ ID NO: 279855 - RNA, 22 nt, Human
caguguggagggagagagccug

SEQ ID NO: 279856 - RNA, 22 nt, Human
agcuuuauauuuaaugaauucu

SEQ ID NO: 279857 - RNA, 22 nt, Human
gagcccugagaguugugaggcc

SEQ ID NO: 279858 - RNA, 22 nt, Human
cagugcagacguggagggggca

SEQ ID NO: 279859 - RNA, 22 nt, Human
ggccucugguucacagggagga

SEQ ID NO: 279860 - RNA, 22 nt, Human
uucagaaagugaaucuuguuau

SEQ ID NO: 279861 - RNA, 23 nt, Human
gggaagcuccauggaggugcugg

SEQ ID NO: 279862 - RNA, 22 nt, Human
uagaacuucuuacagcuaaguu

SEQ ID NO: 279863 - RNA, 22 nt, Human
gcauguuuugcaacaagugacc

SEQ ID NO: 279864 - RNA, 22 nt, Human
cuuggggcuuuguguguaggau

SEQ ID NO: 279865 - RNA, 22 nt, Human
aggacagaccuaggacuggagc

SEQ ID NO: 279866 - RNA, 22 nt, Human
accuacauggcuuuaaguaagu

SEQ ID NO: 279867 - RNA, 18 nt, Human
uuaaggauaagcagacua

SEQ ID NO: 279868 - RNA, 22 nt, Human
cuugcuggugucgugccuucac

SEQ ID NO: 279869 - RNA, 22 nt, Human
aaguaaauaucuguuuauagca

SEQ ID NO: 279870 - RNA, 22 nt, Human
uuuccuaguucuaagaaaugua

SEQ ID NO: 279871 - RNA, 22 nt, Human
ggaaucuucagccaugccaaga

SEQ ID NO: 279872 - RNA, 22 nt, Human
uguggggaagaguaugacuugg

SEQ ID NO: 279873 - RNA, 22 nt, Human
gcuggcucugcacccaggccuc

SEQ ID NO: 279874 - RNA, 22 nt, Human
cggcagagcccugagucagccu

SEQ ID NO: 279875 - RNA, 22 nt, Human
gggcuaagcagagugggaacag

SEQ ID NO: 279876 - RNA, 22 nt, Human
ugaggccaagccuccucugcca

SEQ ID NO: 279877 - RNA, 22 nt, Human
uucacagcucauacuguucuca

SEQ ID NO: 279878 - RNA, 22 nt, Human
caucugcaggggaagccaguuu

SEQ ID NO: 279879 - RNA, 22 nt, Human
uccugcagccauuagaggucaa

SEQ ID NO: 279880 - RNA, 22 nt, Human
ucacagcucacuguagccucga

SEQ ID NO: 279881 - RNA, 18 nt, Human
cuaagaggucguuucuca

SEQ ID NO: 279882 - RNA, 22 nt, Human
aggccagggcacugcucuuuag

SEQ ID NO: 279883 - RNA, 22 nt, Human
ucacagcugggguuuuggcagc

SEQ ID NO: 279884 - RNA, 22 nt, Human
caaagaagagauuuacagagcu

SEQ ID NO: 279885 - RNA, 22 nt, Human
acaggaaaugaaaugguaucua

SEQ ID NO: 279886 - RNA, 22 nt, Human
cagaggccuggcuuggacaccu

SEQ ID NO: 279887 - RNA, 22 nt, Human
uucagcacuggacagcgagucu

SEQ ID NO: 279888 - RNA, 22 nt, Human
agccaccaccacugaaagguua

SEQ ID NO: 279889 - RNA, 22 nt, Human
auuggagccccagaagcaaggu

SEQ ID NO: 279890 - RNA, 22 nt, Human
ccugcagacacuuguccagcaa

SEQ ID NO: 279891 - RNA, 22 nt, Human
aggaaaugccgcggcucucuuu

SEQ ID NO: 279892 - RNA, 22 nt, Human
gaggcucagagggacuuucaag

SEQ ID NO: 279893 - RNA, 22 nt, Human
ugcagugaugcuucuggcucag

SEQ ID NO: 279894 - RNA, 22 nt, Human
uucacagcuaagagcuaaguaa

SEQ ID NO: 279895 - RNA, 22 nt, Human
uggccagucuuagcugugccug

SEQ ID NO: 279896 - RNA, 22 nt, Human
ggcuacagcgggguggagacgg

SEQ ID NO: 279897 - RNA, 22 nt, Human
cucugcaggcacccaggguggg

SEQ ID NO: 279898 - RNA, 22 nt, Human
uggcagccugcgugaaggagcu

SEQ ID NO: 279899 - RNA, 21 nt, Human
auucaaagaagaggaaggccc

SEQ ID NO: 279900 - RNA, 22 nt, Human
aggccagugguucucugugucc

SEQ ID NO: 279901 - RNA, 22 nt, Human
uucacagaauugucuugacugg

SEQ ID NO: 279902 - RNA, 22 nt, Human
cagaggccccauuggcugugcg

SEQ ID NO: 279903 - RNA, 22 nt, Human
ugcgggucccagggucacaggc

SEQ ID NO: 279904 - RNA, 22 nt, Human
ggcucacgcaauuaucccggcc

SEQ ID NO: 279905 - RNA, 22 nt, Human
ggacucucaggcugucggcuuc

SEQ ID NO: 279906 - RNA, 22 nt, Human
gggagccagcagggcauggagc

SEQ ID NO: 279907 - RNA, 20 nt, Human
aggaaggagaaucugagcaa

SEQ ID NO: 279908 - RNA, 22 nt, Human
gaaggaagcugucuggaugugu

SEQ ID NO: 279909 - RNA, 22 nt, Human
cacagcuaccugcaugccugcu

SEQ ID NO: 279910 - RNA, 22 nt, Human
gcagucauggguagaacucaag

SEQ ID NO: 279911 - RNA, 22 nt, Human
uggagccagcaggacucagagg

SEQ ID NO: 279912 - RNA, 20 nt, Human
aaaaacaguaaugcugaaga

SEQ ID NO: 279913 - RNA, 22 nt, Human
caggaaauucccagaaggacug

SEQ ID NO: 279914 - RNA, 22 nt, Human
cuucagagugacucagcaucuu

SEQ ID NO: 279915 - RNA, 22 nt, Human
aggccagaacagcucugcacca

SEQ ID NO: 279916 - RNA, 22 nt, Human
aguaucagaugugauuaaaggg

SEQ ID NO: 279917 - RNA, 22 nt, Human
agccucucuguuagucacuggg

SEQ ID NO: 279918 - RNA, 22 nt, Human
ucucucugcagcccgggacacu

SEQ ID NO: 279919 - RNA, 22 nt, Hepatitis D virus
acugguccccaauguucaaagu

SEQ ID NO: 279920 - RNA, 22 nt, Hepatitis D virus
agggagagccacuuuucucucg

SEQ ID NO: 279921 - RNA, 21 nt, Hepatitis D virus
cuagagagauuuguggguccc

SEQ ID NO: 279922 - RNA, 22 nt, Hepatitis D virus
cuagagagauuuguggguccca

SEQ ID NO: 279923 - RNA, 22 nt, Human
gagcugaaucagagauauuauu

SEQ ID NO: 279924 - RNA, 22 nt, Human
cuggugcacuacagccuggaac

SEQ ID NO: 279925 - RNA, 23 nt, Human
aagaaucucagaauuagaaauac

SEQ ID NO: 279926 - RNA, 22 nt, Human
guuuacaguggcuucauuggau

SEQ ID NO: 279927 - RNA, 22 nt, Human
aauuaucagauauaaaacugca

SEQ ID NO: 279928 - RNA, 22 nt, Human
gauguguccuuuucuccaucca

SEQ ID NO: 279929 - RNA, 22 nt, Human
cugggguggauggguccaaguu

SEQ ID NO: 279930 - RNA, 22 nt, Human
ucucugaaggggagcuguuuaa

SEQ ID NO: 279931 - RNA, 20 nt, Human
gcuguggccgugccagacuc

SEQ ID NO: 279932 - RNA, 22 nt, Human
guguuuguuuagugcagagaga

SEQ ID NO: 279933 - RNA, 22 nt, Human
uuacagugacaguugcuaugau

SEQ ID NO: 279934 - RNA, 21 nt, Human
uguguaauauguauaagaaua

SEQ ID NO: 279935 - RNA, 22 nt, Human
aaucuauaugcuuuucacauac

SEQ ID NO: 279936 - RNA, 22 nt, Human
aagcagagguagggugugcagu

SEQ ID NO: 279937 - RNA, 22 nt, Human
uuuaagacuuagauuuauuggg

SEQ ID NO: 279938 - RNA, 22 nt, Human
acuguucauccuuuuugaacaa

SEQ ID NO: 279939 - RNA, 22 nt, Human
cagagcacugcuuggaggauuu

SEQ ID NO: 279940 - RNA, 22 nt, Human
uauuucccagggagcaacaagc

SEQ ID NO: 279941 - RNA, 22 nt, Human
ccagggcaauaggaacacuuuu

SEQ ID NO: 279942 - RNA, 22 nt, Human
ggaacacagugccuuacaaacu

SEQ ID NO: 279943 - RNA, 19 nt, Human
ccauuguaaagaaaaaugu

SEQ ID NO: 279944 - RNA, 22 nt, Human
uaagagaauguuguggcuaggu

SEQ ID NO: 279945 - RNA, 22 nt, Human
aguauacauauauuagccuucg

SEQ ID NO: 279946 - RNA, 19 nt, Human
uccuggcauuuguaggaaa

SEQ ID NO: 279947 - RNA, 22 nt, Human
ucagagaguuacacaaauuguu

SEQ ID NO: 279948 - RNA, 22 nt, Human
aaugacagagcacugaacuugg

SEQ ID NO: 279949 - RNA, 22 nt, Human
caggaaaucagaacucaagugg

SEQ ID NO: 279950 - RNA, 23 nt, Human
acagugugguggacaaggagcag

SEQ ID NO: 279951 - RNA, 18 nt, Human
ccuggaggucuucggggu

SEQ ID NO: 279952 - RNA, 22 nt, Human
aauuucuucagcucuaaaaugg

SEQ ID NO: 279953 - RNA, 22 nt, Human
cagauggauuuuguaggcugau

SEQ ID NO: 279954 - RNA, 22 nt, Human
augcagaagcagaacuuacaca

SEQ ID NO: 279955 - RNA, 22 nt, Human
gaggcacauauauacagagccc

SEQ ID NO: 279956 - RNA, 22 nt, Human
gcauguguuagagugugcaugc

SEQ ID NO: 279957 - RNA, 22 nt, Human
acagggauuaugacugacagcc

SEQ ID NO: 279958 - RNA, 22 nt, Human
uuggauccaucucaggcauagg

SEQ ID NO: 279959 - RNA, 22 nt, Human
ugcaggugugugcaagggaggg

SEQ ID NO: 279960 - RNA, 22 nt, Human
uccuggguccugggaagcccug

SEQ ID NO: 279961 - RNA, 22 nt, Human
uccucagaagaaccccuagauu

SEQ ID NO: 279962 - RNA, 22 nt, Human
gaaauauuucucuugagccccu

SEQ ID NO: 279963 - RNA, 22 nt, Human
uugcuuuaagguaucuggagaa

SEQ ID NO: 279964 - RNA, 22 nt, Human
gaggcugcggggaggagccugc

SEQ ID NO: 279965 - RNA, 22 nt, Human
cucugcccccagcuggugcuug

SEQ ID NO: 279966 - RNA, 22 nt, Human
acuuccuuguacugacuccauu

SEQ ID NO: 279967 - RNA, 22 nt, Human
gcagggcaucccugagcgggug

SEQ ID NO: 279968 - RNA, 22 nt, Human
ucuguucauuugccucggcucu

SEQ ID NO: 279969 - RNA, 22 nt, Human
aagguuaaauagguauuuucca

SEQ ID NO: 279970 - RNA, 22 nt, Human
auuccaguuggguucuaauaca

SEQ ID NO: 279971 - RNA, 22 nt, Human
gagaaacugaauauuuaacggg

SEQ ID NO: 279972 - RNA, 22 nt, Human
uacagauaacugaaugcagacu

SEQ ID NO: 279973 - RNA, 22 nt, Human
uagaaaacuaauacaugcuuga

SEQ ID NO: 279974 - RNA, 22 nt, Human
ccuggagggcgccgcacagucc

SEQ ID NO: 279975 - RNA, 22 nt, Human
uuacagcagcagggacagacua

SEQ ID NO: 279976 - RNA, 22 nt, Human
uuccugugccucaggucucagc

SEQ ID NO: 279977 - RNA, 20 nt, Human
caccuucaaauuuccuggca

SEQ ID NO: 279978 - RNA, 22 nt, Human
auuuucagagacaucuggacuu

SEQ ID NO: 279979 - RNA, 22 nt, Human
aguguuugucccguuagaaaug

SEQ ID NO: 279980 - RNA, 22 nt, Human
ucaacuaaggcacaaucucuaa

SEQ ID NO: 279981 - RNA, 22 nt, Human
gcagcuuucuugcccuaaucuu

SEQ ID NO: 279982 - RNA, 22 nt, Human
ucuucaaauccuacagugucug

SEQ ID NO: 279983 - RNA, 20 nt, Human
uacauucaaaacaaacucug

SEQ ID NO: 279984 - RNA, 22 nt, Human
ccuguggcuuccacgaccuaau

SEQ ID NO: 279985 - RNA, 18 nt, Human
ucauuuguuuugcaugaa

SEQ ID NO: 279986 - RNA, 22 nt, Human
accugcagguguuuccacacuu

SEQ ID NO: 279987 - RNA, 22 nt, Human
ugacaagaucacagucaagugu

SEQ ID NO: 279988 - RNA, 22 nt, Human
caucuuuuggccuauucugagg

SEQ ID NO: 279989 - RNA, 22 nt, Human
caaaaugugagucccaccucaa

SEQ ID NO: 279990 - RNA, 22 nt, Human
ggacaggugcaaagggcacaug

SEQ ID NO: 279991 - RNA, 20 nt, Human
agaaaaaguguggaaauuuc

SEQ ID NO: 279992 - RNA, 22 nt, Human
uagagaaacagaaccaacaggg

SEQ ID NO: 279993 - RNA, 22 nt, Human
uauuugaagggagaaagugcca

SEQ ID NO: 279994 - RNA, 22 nt, Human
uuuaaauguucaugauacugaa

SEQ ID NO: 279995 - RNA, 22 nt, Human
acuuaaaaccagacagcgucau

SEQ ID NO: 279996 - RNA, 22 nt, Human
aauuaacuaauuugguacaaga

SEQ ID NO: 279997 - RNA, 22 nt, Human
gcaggugugaaugugaauuaag

SEQ ID NO: 279998 - RNA, 22 nt, Human
cuuauugaaagccccugugccu

SEQ ID NO: 279999 - RNA, 22 nt, Human
guacuucccugggaggcaagca

SEQ ID NO: 280000 - RNA, 22 nt, Human
agaggggaguccuaaucugauu

SEQ ID NO: 280001 - RNA, 22 nt, Human
acugcugagagcaaucccaaac

SEQ ID NO: 280002 - RNA, 22 nt, Human
uagcuuuagaaauauucucaga

SEQ ID NO: 280003 - RNA, 22 nt, Human
ccuagagcucugcuuuaucuaa

SEQ ID NO: 280004 - RNA, 22 nt, Human
cuucacauguuggaguccuuug

SEQ ID NO: 280005 - RNA, 22 nt, Human
gcugccagucuaaugggaaaca

SEQ ID NO: 280006 - RNA, 22 nt, Human
ccucaagucaauucugucucgc

SEQ ID NO: 280007 - RNA, 22 nt, Human
agguggggaggagugucucuuu

SEQ ID NO: 280008 - RNA, 22 nt, Human
accuguuuucagaaaaugcaga

SEQ ID NO: 280009 - RNA, 22 nt, Human
uuagagaaccaaugaauagucu

SEQ ID NO: 280010 - RNA, 22 nt, Human
aauguuuuauagcucaagcaau

SEQ ID NO: 280011 - RNA, 22 nt, Human
ccuggcagcccagagcgccgcu

SEQ ID NO: 280012 - RNA, 22 nt, Human
ucagaaauguaagcugaugacu

SEQ ID NO: 280013 - RNA, 22 nt, Human
ugacagguucguuagucauguu

SEQ ID NO: 280014 - RNA, 18 nt, Human
auggucucauacugggag

SEQ ID NO: 280015 - RNA, 22 nt, Human
aaguguuuaaauuauuugcagg

SEQ ID NO: 280016 - RNA, 22 nt, Human
caaauuuaagugaggucuuugu

SEQ ID NO: 280017 - RNA, 22 nt, Human
gugguacagcugaaaggcuugc

SEQ ID NO: 280018 - RNA, 22 nt, Human
uaauuucacugauaugaaguca

SEQ ID NO: 280019 - RNA, 22 nt, Human
ucuguucauacagaguauagua

SEQ ID NO: 280020 - RNA, 22 nt, Human
cccugcagaccaaugccauaga

SEQ ID NO: 280021 - RNA, 22 nt, Human
agauaacucauuuuguauaucc

SEQ ID NO: 280022 - RNA, 22 nt, Human
gaugggcguggcgcguuuggug

SEQ ID NO: 280023 - RNA, 22 nt, Human
uccuggugcugacacccauagc

SEQ ID NO: 280024 - RNA, 22 nt, Human
guuggcaaguguuccuuccucu

SEQ ID NO: 280025 - RNA, 22 nt, Human
ccaggcagcaaauuuucugaau

SEQ ID NO: 280026 - RNA, 22 nt, Human
acacauaagccuaaucaucucc

SEQ ID NO: 280027 - RNA, 22 nt, Human
gcugugcccagcuccagcucug

SEQ ID NO: 280028 - RNA, 22 nt, Human
ggcaggcaggagcgugcuuggg

SEQ ID NO: 280029 - RNA, 22 nt, Human
cauuuguucugauuucaaaagg

SEQ ID NO: 280030 - RNA, 22 nt, Human
gcuuuaaugaagucacgcaaag

SEQ ID NO: 280031 - RNA, 22 nt, Human
aguacacaagacacauuuaaaa

SEQ ID NO: 280032 - RNA, 21 nt, Human
gcauucuucaugugauucaga

SEQ ID NO: 280033 - RNA, 22 nt, Human
ucuccugggaggacaaggaagg

SEQ ID NO: 280034 - RNA, 22 nt, Human
ccaugacauuuuaauuuucacu

SEQ ID NO: 280035 - RNA, 22 nt, Human
agaaaauaaauugaugguggaa

SEQ ID NO: 280036 - RNA, 22 nt, Human
guacacauauauuaaaaauugu

SEQ ID NO: 280037 - RNA, 22 nt, Human
gugaggucuuugggaggugauu

SEQ ID NO: 280038 - RNA, 22 nt, Human
uccaggcaucuguauuuuuuaa

SEQ ID NO: 280039 - RNA, 20 nt, Human
ccugucuccucuuaccuggc

SEQ ID NO: 280040 - RNA, 22 nt, Human
uuauuuucagcuaggaaagcca

SEQ ID NO: 280041 - RNA, 22 nt, Human
auugaaaaugacauuugugccc

SEQ ID NO: 280042 - RNA, 22 nt, Human
gacagguggguaccuuuaugga

SEQ ID NO: 280043 - RNA, 22 nt, Human
ccugaaaugacuccagcugagu

SEQ ID NO: 280044 - RNA, 21 nt, Human
uuucauugaaugagauaaggu

SEQ ID NO: 280045 - RNA, 22 nt, Human
caugacaaaucagaggggcuug

SEQ ID NO: 280046 - RNA, 22 nt, Human
uuccuucuuccuuuaguaacca

SEQ ID NO: 280047 - RNA, 22 nt, Human
cugcagggaacugaggcccaga

SEQ ID NO: 280048 - RNA, 23 nt, Human
aaauucaguccuucaacucugag

SEQ ID NO: 280049 - RNA, 22 nt, Human
ugcaaacaucaauggccugagc

SEQ ID NO: 280050 - RNA, 22 nt, Human
auuuguagugaagugaaaauaa

SEQ ID NO: 280051 - RNA, 22 nt, Human
uuuucauugagcaccugaguaa

SEQ ID NO: 280052 - RNA, 22 nt, Human
caauacuuccuuguuagaggca

SEQ ID NO: 280053 - RNA, 22 nt, Human
caggguggaagcuguagagugg

SEQ ID NO: 280054 - RNA, 22 nt, Human
uuguuuugcuaaagggucauca

SEQ ID NO: 280055 - RNA, 22 nt, Human
caguuucccugcuugaaaacgu

SEQ ID NO: 280056 - RNA, 22 nt, Human
aaguguuuggggaucauuuuaa

SEQ ID NO: 280057 - RNA, 22 nt, Human
cuggcaguauuaagagaaguga

SEQ ID NO: 280058 - RNA, 22 nt, Human
ucuuuccuagaggcugaugagu

SEQ ID NO: 280059 - RNA, 22 nt, Human
gccugagcuuuaauuuucuugu

SEQ ID NO: 280060 - RNA, 22 nt, Human
acuggcagugucguuuacauga

SEQ ID NO: 280061 - RNA, 22 nt, Human
auuagauauuugcuguuggauu

SEQ ID NO: 280062 - RNA, 22 nt, Human
acagcaugagagaugaacauuc

SEQ ID NO: 280063 - RNA, 22 nt, Human
ucugucuucuucauugccuaua

SEQ ID NO: 280064 - RNA, 22 nt, Human
gcuuuacauaaacauuuauuau

SEQ ID NO: 280065 - RNA, 22 nt, Human
ucgccaucgucggacacaguga

SEQ ID NO: 280066 - RNA, 22 nt, Human
uucaggaauauaggcauugaca

SEQ ID NO: 280067 - RNA, 22 nt, Human
uguuauugucgcugcacuggga

SEQ ID NO: 280068 - RNA, 22 nt, Human
uaaagguagugugacauauugu

SEQ ID NO: 280069 - RNA, 22 nt, Human
agugucuguuacgcuugcagaa

SEQ ID NO: 280070 - RNA, 22 nt, Human
gcacuggaaauaccuagaugaa

SEQ ID NO: 280071 - RNA, 22 nt, Human
gcaggaggagcauuaacugagc

SEQ ID NO: 280072 - RNA, 22 nt, Human
cugcagagcagccaguccccca

SEQ ID NO: 280073 - RNA, 22 nt, Human
ggacaguugguugggcucuugu

SEQ ID NO: 280074 - RNA, 22 nt, Human
ucuguggccuguguccaagugc

SEQ ID NO: 280075 - RNA, 22 nt, Human
gaugccuggcacccagcaagga

SEQ ID NO: 280076 - RNA, 22 nt, Human
aagucucugguugcuugcaugg

SEQ ID NO: 280077 - RNA, 22 nt, Human
acacaugaguucucaucuugug

SEQ ID NO: 280078 - RNA, 22 nt, Human
acacagcaacuugcaguaugga

SEQ ID NO: 280079 - RNA, 21 nt, Human
ccuggccaaucugauaggguu

SEQ ID NO: 280080 - RNA, 22 nt, Human
aaggugucacugggacaggaaa

SEQ ID NO: 280081 - RNA, 22 nt, Human
ugcuuuauggagcccaucucau

SEQ ID NO: 280082 - RNA, 23 nt, Human
ccagugauugccuggaaggaggu

SEQ ID NO: 280083 - RNA, 22 nt, Human
uuccauuuauucuuguccagau

SEQ ID NO: 280084 - RNA, 22 nt, Human
aagacaggaacauagcaaaucc

SEQ ID NO: 280085 - RNA, 22 nt, Human
aguguacaucagaacauaucaa

SEQ ID NO: 280086 - RNA, 22 nt, Human
uaugagaaaggagaaugacuuu

SEQ ID NO: 280087 - RNA, 22 nt, Human
augcagcuauuugagcauguca

SEQ ID NO: 280088 - RNA, 22 nt, Human
gcuagaaaucgacuucagaauu

SEQ ID NO: 280089 - RNA, 22 nt, Human
cacuguggcaaccugugcccaa

SEQ ID NO: 280090 - RNA, 22 nt, Human
cugcaggggccucgagcacagg

SEQ ID NO: 280091 - RNA, 22 nt, Human
acaaagauucauuugcauuauu

SEQ ID NO: 280092 - RNA, 22 nt, Human
ucagugcagggugggagagaga

SEQ ID NO: 280093 - RNA, 22 nt, Human
aacauuuccggccuuuuguucu

SEQ ID NO: 280094 - RNA, 22 nt, Human
agcugcaaaccaggccggcgcg

SEQ ID NO: 280095 - RNA, 22 nt, Human
agagccaggcaggcaauguuga

SEQ ID NO: 280096 - RNA, 22 nt, Human
gcguccagggaaggcccagcug

SEQ ID NO: 280097 - RNA, 22 nt, Human
aagcaaagugaauuuugccaag

SEQ ID NO: 280098 - RNA, 22 nt, Human
gcuuuacauuuuggaaagguga

SEQ ID NO: 280099 - RNA, 22 nt, Human
uuccuucucuguggggaaggca

SEQ ID NO: 280100 - RNA, 22 nt, Human
augauguugauaaauuacuuua

SEQ ID NO: 280101 - RNA, 22 nt, Human
auuguacagaugagguaaguga

SEQ ID NO: 280102 - RNA, 22 nt, Human
uacugucuaauaagauugaugg

SEQ ID NO: 280103 - RNA, 22 nt, Human
uuacauauuauccaaaacugcu

SEQ ID NO: 280104 - RNA, 22 nt, Human
agucaguucauggcucuguccu

SEQ ID NO: 280105 - RNA, 22 nt, Human
ggccagaaguuggaaaagagcc

SEQ ID NO: 280106 - RNA, 22 nt, Human
agacaauauauaauuuuaguug

SEQ ID NO: 280107 - RNA, 22 nt, Human
agaucuuuagaagauagaauca

SEQ ID NO: 280108 - RNA, 22 nt, Human
aaagccuuuucuguuuaacaca

SEQ ID NO: 280109 - RNA, 22 nt, Human
aucauuccacauguaccacuag

SEQ ID NO: 280110 - RNA, 22 nt, Human
ucuuagaaugucaacugauguu

SEQ ID NO: 280111 - RNA, 22 nt, Human
agugcaggcucgcuugugaggc

SEQ ID NO: 280112 - RNA, 22 nt, Human
accuucaacucaaaguguccca

SEQ ID NO: 280113 - RNA, 22 nt, Human
aguacaaaaugcagcaucauca

SEQ ID NO: 280114 - RNA, 22 nt, Human
uguuggaaaagaauuaacuagg

SEQ ID NO: 280115 - RNA, 22 nt, Human
uguuucuaggucaauaauuuuu

SEQ ID NO: 280116 - RNA, 22 nt, Human
ggagaggguagggguccugccc

SEQ ID NO: 280117 - RNA, 22 nt, Human
acugaaugaggggugaucuggg

SEQ ID NO: 280118 - RNA, 22 nt, Human
gcagcuuuggagguggaacucu

SEQ ID NO: 280119 - RNA, 22 nt, Human
gacaaaaguguuuugaacaagg

SEQ ID NO: 280120 - RNA, 22 nt, Human
cagagucagagcaccugggauu

SEQ ID NO: 280121 - RNA, 22 nt, Human
gccugcagccucagagaauuuu

SEQ ID NO: 280122 - RNA, 22 nt, Human
aguccuggcauauagguccuca

SEQ ID NO: 280123 - RNA, 22 nt, Human
uuccuucuagcccaaguauugg

SEQ ID NO: 280124 - RNA, 22 nt, Human
uccugagguggauugagcagag

SEQ ID NO: 280125 - RNA, 22 nt, Human
aagggcagccugacucacgguc

SEQ ID NO: 280126 - RNA, 22 nt, Human
auugcuggcaucagugacaaua

SEQ ID NO: 280127 - RNA, 22 nt, Human
ccuccuggagcauuggugagga

SEQ ID NO: 280128 - RNA, 22 nt, Human
cuguguccauuuaucauuguca

SEQ ID NO: 280129 - RNA, 22 nt, Human
ccuggcagacugugagggcagg

SEQ ID NO: 280130 - RNA, 22 nt, Human
aaaagucuacaagcuucaacaa

SEQ ID NO: 280131 - RNA, 21 nt, Human
acagcaagccuucacaugagu

SEQ ID NO: 280132 - RNA, 23 nt, Human
uggaaucagccuuuuuuccaagg

SEQ ID NO: 280133 - RNA, 22 nt, Human
uccuggccuugcgucuugggag

SEQ ID NO: 280134 - RNA, 22 nt, Human
agccuugaaccaauuguuuagc

SEQ ID NO: 280135 - RNA, 22 nt, Human
auuuauugguuugcauggugaa

SEQ ID NO: 280136 - RNA, 22 nt, Human
gacagaggagaagaugcugugg

SEQ ID NO: 280137 - RNA, 22 nt, Human
ugucauuuccugaaugcugagu

SEQ ID NO: 280138 - RNA, 18 nt, Human
ugaccugcgcuucacggu

SEQ ID NO: 280139 - RNA, 22 nt, Human
gaaaaaugcuccaaaucugugg

SEQ ID NO: 280140 - RNA, 22 nt, Human
aagagaugauggcagccagagg

SEQ ID NO: 280141 - RNA, 22 nt, Human
ccagcuuuccugcgaguugauu

SEQ ID NO: 280142 - RNA, 22 nt, Human
ccuucucucugaagaccccaaa

SEQ ID NO: 280143 - RNA, 22 nt, Human
gguguccuuugggggcuccgag

SEQ ID NO: 280144 - RNA, 22 nt, Human
uauugauaugcagaacugacuu

SEQ ID NO: 280145 - RNA, 22 nt, Human
ugcaaaaaggcagacuggugau

SEQ ID NO: 280146 - RNA, 22 nt, Human
accaggcagcaccaaagccggu

SEQ ID NO: 280147 - RNA, 22 nt, Human
ugacauguaagauggaaaagcg

SEQ ID NO: 280148 - RNA, 22 nt, Human
ucuuuggcuugucuccucaguu

SEQ ID NO: 280149 - RNA, 22 nt, Human
uggcaaagcuagacauucccuc

SEQ ID NO: 280150 - RNA, 22 nt, Human
guaucuaugauccuuuauaucu

SEQ ID NO: 280151 - RNA, 22 nt, Human
gaguuagagccauagagcacgg

SEQ ID NO: 280152 - RNA, 22 nt, Human
aagucauuaucucuucuaaucu

SEQ ID NO: 280153 - RNA, 22 nt, Human
ugucuuucugacccaagguagu

SEQ ID NO: 280154 - RNA, 22 nt, Human
gagcuuuaagggcacuggucuu

SEQ ID NO: 280155 - RNA, 22 nt, Human
auuuuacauaaggaagguuuaa

SEQ ID NO: 280156 - RNA, 22 nt, Human
augcuuuuccaggagaaauaua

SEQ ID NO: 280157 - RNA, 22 nt, Human
uggagggaacccaggcugcucu

SEQ ID NO: 280158 - RNA, 22 nt, Human
ugacugaaauggcgacagugaa

SEQ ID NO: 280159 - RNA, 22 nt, Human
aauucuauaggcaagcuauuuu

SEQ ID NO: 280160 - RNA, 22 nt, Human
uauuuugcguugagucagauuu

SEQ ID NO: 280161 - RNA, 23 nt, Human
gcccagagaggcucaccaggaau

SEQ ID NO: 280162 - RNA, 22 nt, Human
uacacacaugcauuugccuuau

SEQ ID NO: 280163 - RNA, 22 nt, Human
gcuccuggccagcacagggccc

SEQ ID NO: 280164 - RNA, 20 nt, Human
acaguguuuuugaguagagc

SEQ ID NO: 280165 - RNA, 22 nt, Human
ccuccuggcccugggccuggaa

SEQ ID NO: 280166 - RNA, 22 nt, Human
gccugagaaggauaggaagcga

SEQ ID NO: 280167 - RNA, 22 nt, Human
gggagagguuacccgagcaacu

SEQ ID NO: 280168 - RNA, 22 nt, Human
uguguucaaucaccaaagguau

SEQ ID NO: 280169 - RNA, 22 nt, Human
uggaaaauuaguagugaaaggc

SEQ ID NO: 280170 - RNA, 22 nt, Human
cagggcuagugacaccccaguc

SEQ ID NO: 280171 - RNA, 22 nt, Human
gacagacacagggccaugauug

SEQ ID NO: 280172 - RNA, 22 nt, Human
gagggcucacugagaaagcagu

SEQ ID NO: 280173 - RNA, 22 nt, Human
agcuguggaguaggggguugga

SEQ ID NO: 280174 - RNA, 22 nt, Human
augcacuacuuggcuuuacuga

SEQ ID NO: 280175 - RNA, 22 nt, Human
uggagagaugucuguucaaggu

SEQ ID NO: 280176 - RNA, 22 nt, Human
uccaggcauuggagagauaaug

SEQ ID NO: 280177 - RNA, 22 nt, Human
cuagugagucugaaugaguugc

SEQ ID NO: 280178 - RNA, 22 nt, Human
aaucucuugggaggaaugaauu

SEQ ID NO: 280179 - RNA, 22 nt, Human
uggccaguggacuaaguucuga

SEQ ID NO: 280180 - RNA, 22 nt, Human
uguguucauuuaacuguucuuu

SEQ ID NO: 280181 - RNA, 22 nt, Human
cucaaaauccauaaaaucaggu

SEQ ID NO: 280182 - RNA, 22 nt, Human
cucagagagggcaccagggcca

SEQ ID NO: 280183 - RNA, 22 nt, Human
agcaggugacagggcuguggug

SEQ ID NO: 280184 - RNA, 22 nt, Human
acuguuuucuuagcucccugcu

SEQ ID NO: 280185 - RNA, 22 nt, Human
aggcuagaggcuucuggcuuca

SEQ ID NO: 280186 - RNA, 22 nt, Human
uucugucuucucgguuguuuac

SEQ ID NO: 280187 - RNA, 22 nt, Human
uuccugugugcucucauuuagu

SEQ ID NO: 280188 - RNA, 19 nt, Human
uccuccuuacuuccucuug

SEQ ID NO: 280189 - RNA, 22 nt, Human
agacacugaaucagagggacau

SEQ ID NO: 280190 - RNA, 21 nt, Human
augucaaaugcuuuauuuuau

SEQ ID NO: 280191 - RNA, 20 nt, Human
uuucuguaaggcauuaaucu

SEQ ID NO: 280192 - RNA, 22 nt, Human
ccugugacucugucugaugguc

SEQ ID NO: 280193 - RNA, 22 nt, Human
agcuuuaucacaauauuggcua

SEQ ID NO: 280194 - RNA, 22 nt, Human
cagcagagcugugugggaaggg

SEQ ID NO: 280195 - RNA, 22 nt, Human
uuaguucuugggugaacuuuug

SEQ ID NO: 280196 - RNA, 22 nt, Human
ucuguuaugcauaagcaucagu

SEQ ID NO: 280197 - RNA, 22 nt, Human
auuguuaugaaaauaagauguu

SEQ ID NO: 280198 - RNA, 22 nt, Human
auagcaagguaugacuggagcc

SEQ ID NO: 280199 - RNA, 22 nt, Human
acccaugaguguaucuuuaaaa

SEQ ID NO: 280200 - RNA, 22 nt, Human
gauggucuguauuaaacagaug

SEQ ID NO: 280201 - RNA, 22 nt, Human
uacaaagaggcagcuccauuuu

SEQ ID NO: 280202 - RNA, 15 nt, Human
gggcaggucuggggc

SEQ ID NO: 280203 - RNA, 22 nt, Human
ucucugugugccuucaucugcc

SEQ ID NO: 280204 - RNA, 22 nt, Human
aguaccaugcuuccugacuggu

SEQ ID NO: 280205 - RNA, 22 nt, Human
ccagguccuguuuucaccacag

SEQ ID NO: 280206 - RNA, 22 nt, Human
auugcugaacuuauaaaugaau

SEQ ID NO: 280207 - RNA, 22 nt, Human
auacuucucaugggcucugagc

SEQ ID NO: 280208 - RNA, 22 nt, Human
ucaggugucuaucuaaccuggu

SEQ ID NO: 280209 - RNA, 22 nt, Human
uuuucuguauuauugugcuuca

SEQ ID NO: 280210 - RNA, 22 nt, Human
aucuacccacugaacacaauau

SEQ ID NO: 280211 - RNA, 22 nt, Human
gucauucuuaacaacucaguag

SEQ ID NO: 280212 - RNA, 22 nt, Human
uuguauuuauauugaauagcuu

SEQ ID NO: 280213 - RNA, 22 nt, Human
uuguuuacaaguuacucagucu

SEQ ID NO: 280214 - RNA, 22 nt, Human
uuaguugauguucuggagguag

SEQ ID NO: 280215 - RNA, 22 nt, Human
cacugucugcuucgacucuuca

SEQ ID NO: 280216 - RNA, 22 nt, Human
guaggcagguggaggagugaag

SEQ ID NO: 280217 - RNA, 22 nt, Human
ucugaagauuaccagcuaaaug

SEQ ID NO: 280218 - RNA, 22 nt, Human
ccucugccaccucccacgaggc

SEQ ID NO: 280219 - RNA, 22 nt, Human
ucuauuuucuugccaaaacugc

SEQ ID NO: 280220 - RNA, 22 nt, Human
ugaguaggugguuaagcaugga

SEQ ID NO: 280221 - RNA, 23 nt, Human
uaugaacugcauugcuggugugu

SEQ ID NO: 280222 - RNA, 22 nt, Human
uuuauguuugacaaugaucugg

SEQ ID NO: 280223 - RNA, 23 nt, Human
uagucaguauguaagucuaauug

SEQ ID NO: 280224 - RNA, 22 nt, Human
aaacacauuagcccuguggaaa

SEQ ID NO: 280225 - RNA, 22 nt, Human
auuauaaauauuuucuaggggu

SEQ ID NO: 280226 - RNA, 22 nt, Human
agcuuuggcccuggagguuacu

SEQ ID NO: 280227 - RNA, 22 nt, Human
agcagugccgcaucuugugacc

SEQ ID NO: 280228 - RNA, 22 nt, Human
uccuggacucaggaccacagga

SEQ ID NO: 280229 - RNA, 22 nt, Human
acagcagcuaaccccugggcca

SEQ ID NO: 280230 - RNA, 22 nt, Human
uaauaauuggcaauguugagca

SEQ ID NO: 280231 - RNA, 22 nt, Human
cuggucaccuccuucccagcua

SEQ ID NO: 280232 - RNA, 22 nt, Human
uuuacagcaacagugcagaggu

SEQ ID NO: 280233 - RNA, 22 nt, Human
caguggcaaguccgguauugaa

SEQ ID NO: 280234 - RNA, 22 nt, Human
ucuccuggaagaauaccacacu

SEQ ID NO: 280235 - RNA, 22 nt, Human
aauuagagaucgcaauaacggg

SEQ ID NO: 280236 - RNA, 22 nt, Human
uccugcagccacugcaggcaga

SEQ ID NO: 280237 - RNA, 22 nt, Human
cccagcccaucucaaaggucua

SEQ ID NO: 280238 - RNA, 22 nt, Human
guugggaaggcaagaaguagaa

SEQ ID NO: 280239 - RNA, 22 nt, Human
uggugaggucauagagaacugu

SEQ ID NO: 280240 - RNA, 22 nt, Human
acagcaugucuaguuaaauacu

SEQ ID NO: 280241 - RNA, 22 nt, Human
uuuaucugaggaaagcagacaa

SEQ ID NO: 280242 - RNA, 22 nt, Human
guccugguccugccuccccaug

SEQ ID NO: 280243 - RNA, 22 nt, Human
cuggccucauagccaagcugug

SEQ ID NO: 280244 - RNA, 22 nt, Human
acaguuaaauauuucuacuggg

SEQ ID NO: 280245 - RNA, 22 nt, Human
uucuguauuuaguuugaggaca

SEQ ID NO: 280246 - RNA, 19 nt, Human
guagggacagugguucuga

SEQ ID NO: 280247 - RNA, 22 nt, Human
augacaagaguguucagggaga

SEQ ID NO: 280248 - RNA, 22 nt, Human
auuucuguauccugcugucaga

SEQ ID NO: 280249 - RNA, 22 nt, Human
uuccugaaugcuguugugcugu

SEQ ID NO: 280250 - RNA, 22 nt, Human
uagaagcaguaauagaaauagg

SEQ ID NO: 280251 - RNA, 22 nt, Human
uccuggcugccgucguccugcg

SEQ ID NO: 280252 - RNA, 22 nt, Human
ggcucccugccuguccucaguc

SEQ ID NO: 280253 - RNA, 22 nt, Human
aagucucugauguguguuaggu

SEQ ID NO: 280254 - RNA, 22 nt, Human
uggaugucauaguuggauauac

SEQ ID NO: 280255 - RNA, 17 nt, Human
gccugcaggcccgcaga

SEQ ID NO: 280256 - RNA, 22 nt, Human
ggucacaugguugagcuugauc

SEQ ID NO: 280257 - RNA, 22 nt, Human
aagcaaacaggagaagagcugu

SEQ ID NO: 280258 - RNA, 22 nt, Human
acuugaauuauauuucuagaga

SEQ ID NO: 280259 - RNA, 22 nt, Human
cccagccuacucugccauagca

SEQ ID NO: 280260 - RNA, 22 nt, Human
ugucccagcagcuggguucucu

SEQ ID NO: 280261 - RNA, 19 nt, Human
acagugcaugggaccuggu

SEQ ID NO: 280262 - RNA, 22 nt, Human
uccugagugguuguuuucuucc

SEQ ID NO: 280263 - RNA, 22 nt, Human
aaagccuugagauccuauaguu

SEQ ID NO: 280264 - RNA, 22 nt, Human
ucugaaauggcagcgggaauga

SEQ ID NO: 280265 - RNA, 22 nt, Human
cucaaggccaguucuucugacu

SEQ ID NO: 280266 - RNA, 22 nt, Human
ucagggcuccggaaguggccuc

SEQ ID NO: 280267 - RNA, 22 nt, Human
auuguauuagcacaauacaauu

SEQ ID NO: 280268 - RNA, 22 nt, Human
cuuucuggaguggaaagguauu

SEQ ID NO: 280269 - RNA, 22 nt, Human
guucuucaggccauccucccag

SEQ ID NO: 280270 - RNA, 22 nt, Human
uugaacauuggcaauuucauau

SEQ ID NO: 280271 - RNA, 22 nt, Human
gugcaggggccuccccuugcug

SEQ ID NO: 280272 - RNA, 22 nt, Human
uuccugguggcuuugccaacug

SEQ ID NO: 280273 - RNA, 21 nt, Human
uccugcagaaugccuuccuac

SEQ ID NO: 280274 - RNA, 22 nt, Human
aaagaaggaccuggaggaggau

SEQ ID NO: 280275 - RNA, 22 nt, Human
ugcuauuugugagugucuucgu

SEQ ID NO: 280276 - RNA, 22 nt, Human
uguuuucugaugguuaaugagu

SEQ ID NO: 280277 - RNA, 19 nt, Human
cuguuauugucagagcucc

SEQ ID NO: 280278 - RNA, 22 nt, Human
ccugcaagagcggagaagccag

SEQ ID NO: 280279 - RNA, 22 nt, Human
cucagauguagaaagauuguga

SEQ ID NO: 280280 - RNA, 22 nt, Human
aaagcugccaaggagaauacua

SEQ ID NO: 280281 - RNA, 21 nt, Human
aggcugcaugcaugagugugg

SEQ ID NO: 280282 - RNA, 22 nt, Human
ucaggugggaccugcuaggaca

SEQ ID NO: 280283 - RNA, 22 nt, Human
ccaggcaggcgauggugcagug

SEQ ID NO: 280284 - RNA, 22 nt, Human
cucugagggcucgagggacgcg

SEQ ID NO: 280285 - RNA, 22 nt, Human
auugcuggaugagcucuuggau

SEQ ID NO: 280286 - RNA, 22 nt, Human
uuuuggcucuugguaggucaga

SEQ ID NO: 280287 - RNA, 22 nt, Human
caugacauccugaagcugcaca

SEQ ID NO: 280288 - RNA, 22 nt, Human
gccacccccaaguagguggucu

SEQ ID NO: 280289 - RNA, 23 nt, Human
uuucagaagugguccuaggaagc

SEQ ID NO: 280290 - RNA, 23 nt, Human
ccugcaaagaaacaagccaccug

SEQ ID NO: 280291 - RNA, 21 nt, Human
aguugcugcugcugcagguga

SEQ ID NO: 280292 - RNA, 22 nt, Human
ucugagcaccuuauauucuuga

SEQ ID NO: 280293 - RNA, 22 nt, Human
auuuucaucgcuagguuggccu

SEQ ID NO: 280294 - RNA, 22 nt, Human
uuguguccucuaaucucaccac

SEQ ID NO: 280295 - RNA, 22 nt, Human
acagauuuuaaaugacacuccc

SEQ ID NO: 280296 - RNA, 22 nt, Human
acugucuugcuaugagcuccca

SEQ ID NO: 280297 - RNA, 22 nt, Human
uagggaugaaguugcuauuuac

SEQ ID NO: 280298 - RNA, 22 nt, Human
agugauuugggugucagaaagu

SEQ ID NO: 280299 - RNA, 22 nt, Human
uucauucccaagaguaaacaua

SEQ ID NO: 280300 - RNA, 22 nt, Human
aaauuauuacaagcuaguuggc

SEQ ID NO: 280301 - RNA, 21 nt, Human
cuuggcugcagugacaggcau

SEQ ID NO: 280302 - RNA, 22 nt, Human
uuguacuaucaccaugucaugu

SEQ ID NO: 280303 - RNA, 22 nt, Human
uggcaggguacaccuuaacacc

SEQ ID NO: 280304 - RNA, 22 nt, Human
gcagacagccagacugcacugg

SEQ ID NO: 280305 - RNA, 20 nt, Human
uauuggaucuaagaaauggg

SEQ ID NO: 280306 - RNA, 22 nt, Human
aggcugugagagguggcuccca

SEQ ID NO: 280307 - RNA, 22 nt, Human
agcuccuggaggugcgcacucg

SEQ ID NO: 280308 - RNA, 22 nt, Human
gucucugugucugagagagccc

SEQ ID NO: 280309 - RNA, 22 nt, Human
uuccugugugaccgagacagug

SEQ ID NO: 280310 - RNA, 22 nt, Human
auauuaaauggauuuugggagc

SEQ ID NO: 280311 - RNA, 22 nt, Human
aaaguuuggauccagcaaaaga

SEQ ID NO: 280312 - RNA, 22 nt, Human
agagggaaggacagauguuuca

SEQ ID NO: 280313 - RNA, 22 nt, Human
uuucugaauaacucuaugauau

SEQ ID NO: 280314 - RNA, 22 nt, Human
ggggaccuucccagagcaguug

SEQ ID NO: 280315 - RNA, 22 nt, Human
gaagugaagguuacucuagauu

SEQ ID NO: 280316 - RNA, 22 nt, Human
uccugcaggccagaggggugag

SEQ ID NO: 280317 - RNA, 22 nt, Human
ugagaucauugacuuguuccug

SEQ ID NO: 280318 - RNA, 22 nt, Human
acagggcagaaauguugcaucu

SEQ ID NO: 280319 - RNA, 22 nt, Human
aaagugauuuaaguaccucagg

SEQ ID NO: 280320 - RNA, 22 nt, Human
ugacauguccaggugguccugu

SEQ ID NO: 280321 - RNA, 22 nt, Human
ugguccugcccacgcccaucug

SEQ ID NO: 280322 - RNA, 22 nt, Human
agcucccaggcagucaugagga

SEQ ID NO: 280323 - RNA, 22 nt, Human
uuagggacagcucuguagguga

SEQ ID NO: 280324 - RNA, 22 nt, Human
ucaguuagggccucagaagaca

SEQ ID NO: 280325 - RNA, 22 nt, Human
cuggcccucggaguccagcugc

SEQ ID NO: 280326 - RNA, 22 nt, Human
cagacaggaaguucagaagaaa

SEQ ID NO: 280327 - RNA, 22 nt, Human
auagaaacagaggucaggcauu

SEQ ID NO: 280328 - RNA, 22 nt, Human
ccaggcuccccaggaggcccuu

SEQ ID NO: 280329 - RNA, 22 nt, Human
uaguauuuccuguaagcuauag

SEQ ID NO: 280330 - RNA, 22 nt, Human
acaguuugcccugacauucucc

SEQ ID NO: 280331 - RNA, 22 nt, Human
ucuagaccuggcacugcccugu

SEQ ID NO: 280332 - RNA, 22 nt, Human
acacauuucucuuuuuguaagu

SEQ ID NO: 280333 - RNA, 22 nt, Human
cauuugaaugagauugcuguaa

SEQ ID NO: 280334 - RNA, 19 nt, Human
uagguguccgccggaggug

SEQ ID NO: 280335 - RNA, 22 nt, Human
ucuagaaauuuugccuuguauu

SEQ ID NO: 280336 - RNA, 22 nt, Human
aagcuguggcuuggaggaaaca

SEQ ID NO: 280337 - RNA, 22 nt, Human
auuaucuauguagaaugauuuu

SEQ ID NO: 280338 - RNA, 22 nt, Human
ucacugugaauguuaucaucuu

SEQ ID NO: 280339 - RNA, 22 nt, Human
auuauacauuuuguguagagau

SEQ ID NO: 280340 - RNA, 22 nt, Human
agggcagccaugagccuucagg

SEQ ID NO: 280341 - RNA, 22 nt, Human
aagguggucuuacugaugguau

SEQ ID NO: 280342 - RNA, 22 nt, Human
uacagacaaagugcuauagggu

SEQ ID NO: 280343 - RNA, 22 nt, Human
uaauuuuacuuccugagcaccu

SEQ ID NO: 280344 - RNA, 22 nt, Human
uguuggaauaagugcuugaagg

SEQ ID NO: 280345 - RNA, 22 nt, Human
gaggcugcccaacuggagugga

SEQ ID NO: 280346 - RNA, 22 nt, Human
ugcauggaggaagaugaaugca

SEQ ID NO: 280347 - RNA, 22 nt, Human
ugggugagccacaggaguuguc

SEQ ID NO: 280348 - RNA, 22 nt, Human
caugugguucaaguacuccaca

SEQ ID NO: 280349 - RNA, 22 nt, Human
cuuuuacacucaucugggaggg

SEQ ID NO: 280350 - RNA, 22 nt, Human
uuguagaaaauuagaugcaugg

SEQ ID NO: 280351 - RNA, 22 nt, Human
agcuuugguugaggggagugug

SEQ ID NO: 280352 - RNA, 22 nt, Human
agucaguuguggagauuuaacu

SEQ ID NO: 280353 - RNA, 22 nt, Human
uucuucuugaaacuuuagguug

SEQ ID NO: 280354 - RNA, 22 nt, Human
uucacauugaaggugcuuucuu

SEQ ID NO: 280355 - RNA, 22 nt, Human
aucaguuuuuauuaauguagcu

SEQ ID NO: 280356 - RNA, 22 nt, Human
uuucaaauaccauaaaccuaau

SEQ ID NO: 280357 - RNA, 22 nt, Human
agacagacacaugguaacagau

SEQ ID NO: 280358 - RNA, 22 nt, Human
acuuccuugucaggugcaucau

SEQ ID NO: 280359 - RNA, 22 nt, Human
ccugggugaaaucucuccugca

SEQ ID NO: 280360 - RNA, 22 nt, Human
gccaaaucacagggccaaaagc

SEQ ID NO: 280361 - RNA, 22 nt, Human
aagaaaugcacacaacugcugg

SEQ ID NO: 280362 - RNA, 22 nt, Human
aguugacucucaagauccuguu

SEQ ID NO: 280363 - RNA, 22 nt, Human
cuguguccugcgucaagccaau

SEQ ID NO: 280364 - RNA, 22 nt, Human
uucccuuccucacucuacuugu

SEQ ID NO: 280365 - RNA, 22 nt, Human
aagucagagcaacugagacauu

SEQ ID NO: 280366 - RNA, 22 nt, Human
cacaauauuggccgggcugguc

SEQ ID NO: 280367 - RNA, 22 nt, Human
ucuucacauggaacaugaagcu

SEQ ID NO: 280368 - RNA, 22 nt, Human
gaauuugaaaagugaugggaau

SEQ ID NO: 280369 - RNA, 18 nt, Human
ggcagggaaaagauaggg

SEQ ID NO: 280370 - RNA, 22 nt, Human
uccugcagacauuuacaccuuu

SEQ ID NO: 280371 - RNA, 22 nt, Human
gagaauguuaauguugaaguau

SEQ ID NO: 280372 - RNA, 22 nt, Human
auguuucaccagcaaauuaccu

SEQ ID NO: 280373 - RNA, 22 nt, Human
ugucauuuaguccucugugugu

SEQ ID NO: 280374 - RNA, 22 nt, Human
uacauguauguguacgugcaug

SEQ ID NO: 280375 - RNA, 22 nt, Human
guccuucuuuucaucccugguu

SEQ ID NO: 280376 - RNA, 22 nt, Human
gagcuuuaggagaaggagguca

SEQ ID NO: 280377 - RNA, 22 nt, Human
aggcugugcucagccaauggga

SEQ ID NO: 280378 - RNA, 22 nt, Human
gcccccagcucucaagcucaaa

SEQ ID NO: 280379 - RNA, 22 nt, Human
gagacaggauuuaaccaaagcu

SEQ ID NO: 280380 - RNA, 22 nt, Human
uuccugaauugagcuuuagaaa

SEQ ID NO: 280381 - RNA, 23 nt, Human
gcccacccucagcguccucacgg

SEQ ID NO: 280382 - RNA, 22 nt, Human
ccauaaucauguaaguaaauuc

SEQ ID NO: 280383 - RNA, 22 nt, Human
ugugugucagucuuguuuaggg

SEQ ID NO: 280384 - RNA, 22 nt, Human
aaaaugaagcaaaggcauucag

SEQ ID NO: 280385 - RNA, 22 nt, Human
uuuuacaggugaaaaaugaaga

SEQ ID NO: 280386 - RNA, 22 nt, Human
uuugcagugucagcuucugugu

SEQ ID NO: 280387 - RNA, 22 nt, Human
auucuucagcaggggacacuau

SEQ ID NO: 280388 - RNA, 18 nt, Human
aagcugggaaggagacag

SEQ ID NO: 280389 - RNA, 22 nt, Human
gacaggugaaacagcaagguaa

SEQ ID NO: 280390 - RNA, 22 nt, Human
gucuggaagaacuagggauguu

SEQ ID NO: 280391 - RNA, 22 nt, Human
uuuuacaggucauagguauagu

SEQ ID NO: 280392 - RNA, 22 nt, Human
acuguccuuuuaaugcagccgu

SEQ ID NO: 280393 - RNA, 22 nt, Human
ugucucaggggcauugaaauaa

SEQ ID NO: 280394 - RNA, 22 nt, Human
gaaacugaguaggcuagagcac

SEQ ID NO: 280395 - RNA, 22 nt, Human
cuuucagucaguuaacucagaa

SEQ ID NO: 280396 - RNA, 22 nt, Human
gggagaaguggaaaucucauua

SEQ ID NO: 280397 - RNA, 22 nt, Human
caggaagucgcagagcuggggg

SEQ ID NO: 280398 - RNA, 22 nt, Human
aaauaacagucagggacaacau

SEQ ID NO: 280399 - RNA, 22 nt, Human
uacuucaaccuucucuauuaga

SEQ ID NO: 280400 - RNA, 22 nt, Human
aagggcucuucuauuuauggcc

SEQ ID NO: 280401 - RNA, 22 nt, Human
cuggcagguuuggugucuggug

SEQ ID NO: 280402 - RNA, 22 nt, Human
ugacuuccugcacucaggugau

SEQ ID NO: 280403 - RNA, 22 nt, Human
cauggcugaacacucagugacu

SEQ ID NO: 280404 - RNA, 22 nt, Human
ggaugggaacuugguagggcau

SEQ ID NO: 280405 - RNA, 21 nt, Human
cccaggaggcugagaagagca

SEQ ID NO: 280406 - RNA, 22 nt, Human
uccugaagaugaaaagagaggu

SEQ ID NO: 280407 - RNA, 22 nt, Human
aagauauucaaagauuuauuag

SEQ ID NO: 280408 - RNA, 22 nt, Human
uccaggcaagggaggagcaugg

SEQ ID NO: 280409 - RNA, 22 nt, Human
uuccagaaaucuuucagcucaa

SEQ ID NO: 280410 - RNA, 22 nt, Human
cacaguaugaucuaaaguaagu

SEQ ID NO: 280411 - RNA, 22 nt, Human
ggcccaguguggguggauguug

SEQ ID NO: 280412 - RNA, 22 nt, Human
accugauguauagauucuagau

SEQ ID NO: 280413 - RNA, 21 nt, Human
uccaggagcacgggacuagga

SEQ ID NO: 280414 - RNA, 22 nt, Human
ucaguaguuuugaucugagcag

SEQ ID NO: 280415 - RNA, 22 nt, Human
uuucuuuugcccuguggguuag

SEQ ID NO: 280416 - RNA, 22 nt, Human
aagcaaagacaguuugagugga

SEQ ID NO: 280417 - RNA, 22 nt, Human
uuaucacuuaugagcuuuuugc

SEQ ID NO: 280418 - RNA, 22 nt, Human
cuacauaaauuuaucacagacu

SEQ ID NO: 280419 - RNA, 22 nt, Human
uuuacaguaagguggaugguac

SEQ ID NO: 280420 - RNA, 22 nt, Human
uuccaugaaagugaaauggagc

SEQ ID NO: 280421 - RNA, 22 nt, Human
ggggaggaccuuuccaaggcuu

SEQ ID NO: 280422 - RNA, 20 nt, Human
ggggcagguuuuuauggcua

SEQ ID NO: 280423 - RNA, 22 nt, Human
cuguccucuguccucagcagga

SEQ ID NO: 280424 - RNA, 22 nt, Human
agauuuuaguguagaggacuug

SEQ ID NO: 280425 - RNA, 22 nt, Human
cugggugucaggagacaugaug

SEQ ID NO: 280426 - RNA, 19 nt, Human
uguacauauagagcucagu

SEQ ID NO: 280427 - RNA, 22 nt, Human
uuugcauuuguucaaguauuga

SEQ ID NO: 280428 - RNA, 22 nt, Human
uuccuggugaccucacugguag

SEQ ID NO: 280429 - RNA, 22 nt, Human
ucagugucuucucuuuccuacc

SEQ ID NO: 280430 - RNA, 22 nt, Human
ugauuucucuuggcaauauguu

SEQ ID NO: 280431 - RNA, 22 nt, Human
gagggcaagaguuggaaacggu

SEQ ID NO: 280432 - RNA, 22 nt, Human
caagggcuucaaguggccaaga

SEQ ID NO: 280433 - RNA, 22 nt, Human
uccuggcugaguucccaagucg

SEQ ID NO: 280434 - RNA, 22 nt, Human
caguguuucugaguuccagcuc

SEQ ID NO: 280435 - RNA, 22 nt, Human
aaauuagaucaguggauuuucu

SEQ ID NO: 280436 - RNA, 22 nt, Human
agaucauaugaaaaauuucaag

SEQ ID NO: 280437 - RNA, 22 nt, Human
aagggcuccacuugaaucacac

SEQ ID NO: 280438 - RNA, 22 nt, Human
caggggcaagaaugcugucagc

SEQ ID NO: 280439 - RNA, 22 nt, Human
uccaggaggaggaaggcugcca

SEQ ID NO: 280440 - RNA, 22 nt, Human
acccaggguagagugcaguggc

SEQ ID NO: 280441 - RNA, 22 nt, Human
gcaugcagacagucugagacca

SEQ ID NO: 280442 - RNA, 22 nt, Human
auuuccaugaaggcagauuuua

SEQ ID NO: 280443 - RNA, 22 nt, Human
uauuuaguuaucuuucauaaaa

SEQ ID NO: 280444 - RNA, 22 nt, Human
ucaggaaagaagaugcucagug

SEQ ID NO: 280445 - RNA, 22 nt, Human
aaguaaaagcuuuaccaugcgc

SEQ ID NO: 280446 - RNA, 22 nt, Human
cguuuauuuugaagauuccacu

SEQ ID NO: 280447 - RNA, 22 nt, Human
aauauaaugcuguuuuaugcca

SEQ ID NO: 280448 - RNA, 22 nt, Human
augcuauuuaccacacaucauu

SEQ ID NO: 280449 - RNA, 23 nt, Human
aguuuccacccaggguagaaggg

SEQ ID NO: 280450 - RNA, 22 nt, Human
gaggcugcuuugaugacaggag

SEQ ID NO: 280451 - RNA, 22 nt, Human
gggcugcuguguuccugaggca

SEQ ID NO: 280452 - RNA, 22 nt, Human
acaauguguuuuuauacauuug

SEQ ID NO: 280453 - RNA, 22 nt, Human
ucugaaauagaagugucuuucu

SEQ ID NO: 280454 - RNA, 22 nt, Human
uauuggugaugacuugaggcca

SEQ ID NO: 280455 - RNA, 23 nt, Human
ugccguguuagaaauguuuuaca

SEQ ID NO: 280456 - RNA, 22 nt, Human
gguguccuugcuccuucagcuu

SEQ ID NO: 280457 - RNA, 22 nt, Human
cccagccucuguuugcuccucu

SEQ ID NO: 280458 - RNA, 22 nt, Human
gcauggcuccugucuuacuccc

SEQ ID NO: 280459 - RNA, 20 nt, Human
augccucuaauuuugcaaac

SEQ ID NO: 280460 - RNA, 22 nt, Human
aagagcaucgguggagccccca

SEQ ID NO: 280461 - RNA, 22 nt, Human
ugcagggauuguuggcauccau

SEQ ID NO: 280462 - RNA, 22 nt, Human
aaagcauaguucaucuguccau

SEQ ID NO: 280463 - RNA, 22 nt, Human
gugcccaguugaggccaggacu

SEQ ID NO: 280464 - RNA, 22 nt, Human
ucugucauuuuguaucuacaug

SEQ ID NO: 280465 - RNA, 22 nt, Human
acaugccagccucagcagcagu

SEQ ID NO: 280466 - RNA, 22 nt, Human
ccagggcauguccaagacuuag

SEQ ID NO: 280467 - RNA, 21 nt, Human
acuguucaucuguucagaagc

SEQ ID NO: 280468 - RNA, 22 nt, Human
uauguauagagucuuuuaaauu

SEQ ID NO: 280469 - RNA, 22 nt, Human
ucuuugaauccuuuacaucuga

SEQ ID NO: 280470 - RNA, 21 nt, Human
uuuuauugaugaauggccacu

SEQ ID NO: 280471 - RNA, 22 nt, Human
ucagagaccuagcaagaaauug

SEQ ID NO: 280472 - RNA, 22 nt, Human
auguuuacugguuuauagaaua

SEQ ID NO: 280473 - RNA, 22 nt, Human
cccugagaagaucauugccacg

SEQ ID NO: 280474 - RNA, 21 nt, Human
agaagggauugugguaaagau

SEQ ID NO: 280475 - RNA, 22 nt, Human
auauauuuugcggucacguggc

SEQ ID NO: 280476 - RNA, 22 nt, Human
uuucuugucuuuaguaucuggc

SEQ ID NO: 280477 - RNA, 22 nt, Human
aucuggcugagcgaggcccaca

SEQ ID NO: 280478 - RNA, 22 nt, Human
acccagcuguuucccgugucau

SEQ ID NO: 280479 - RNA, 22 nt, Human
ugucagagcaaugagguucagc

SEQ ID NO: 280480 - RNA, 22 nt, Human
uugcuuuaaaauggcuaagucu

SEQ ID NO: 280481 - RNA, 22 nt, Human
uuuggacuuagccugcagaauu

SEQ ID NO: 280482 - RNA, 23 nt, Human
cuguccugccauccacagcggcc

SEQ ID NO: 280483 - RNA, 23 nt, Human
uggcuaaacaguggagaaagcuu

SEQ ID NO: 280484 - RNA, 22 nt, Human
gcuuuuccugacuuuccauuag

SEQ ID NO: 280485 - RNA, 18 nt, Human
uguggcugguccacacug

SEQ ID NO: 280486 - RNA, 22 nt, Human
gcuaaauaaucuucuucugaca

SEQ ID NO: 280487 - RNA, 22 nt, Human
cacuuuauauucuaagacggcc

SEQ ID NO: 280488 - RNA, 22 nt, Human
uugccauuuauacugcaaguca

SEQ ID NO: 280489 - RNA, 22 nt, Human
uccaugaggaccaaauucguag

SEQ ID NO: 280490 - RNA, 22 nt, Human
auauuuuggggugaugugcauc

SEQ ID NO: 280491 - RNA, 21 nt, Human
uucugggaaaugagcuggggc

SEQ ID NO: 280492 - RNA, 22 nt, Human
uuacaauaguuccuucuuuugu

SEQ ID NO: 280493 - RNA, 22 nt, Human
aucuguucuucaaaauauuaca

SEQ ID NO: 280494 - RNA, 18 nt, Human
uccaaaaucauguauuuu

SEQ ID NO: 280495 - RNA, 22 nt, Human
ggagaaggcacacccaccucug

SEQ ID NO: 280496 - RNA, 22 nt, Human
aagcaucuucuaucaguuagac

SEQ ID NO: 280497 - RNA, 22 nt, Human
ucuacccagagcuaugaccuga

SEQ ID NO: 280498 - RNA, 22 nt, Human
uuuagggacaagggucuggggu

SEQ ID NO: 280499 - RNA, 22 nt, Human
ucugggaaaugcuguuccuugu

SEQ ID NO: 280500 - RNA, 22 nt, Human
agugagguaauuagagcugcug

SEQ ID NO: 280501 - RNA, 22 nt, Human
uagaaagcaaaauccuaccaag

SEQ ID NO: 280502 - RNA, 21 nt, Human
guagggacagagaguugguga

SEQ ID NO: 280503 - RNA, 21 nt, Human
ucccacugccacagcuucagg

SEQ ID NO: 280504 - RNA, 22 nt, Human
gggugggagaaaugaguaucua

SEQ ID NO: 280505 - RNA, 22 nt, Human
cauuugaauuguucugugggaa

SEQ ID NO: 280506 - RNA, 23 nt, Human
ucagagaacucgggcagaugacc

SEQ ID NO: 280507 - RNA, 22 nt, Human
cugcuaaaccucucugagagcu

SEQ ID NO: 280508 - RNA, 22 nt, Human
uccucagcauggaaucuggacu

SEQ ID NO: 280509 - RNA, 20 nt, Human
agcccuguuuccuggagaga

SEQ ID NO: 280510 - RNA, 22 nt, Human
gcacuggagauacagagaugaa

SEQ ID NO: 280511 - RNA, 22 nt, Human
gcuuggcuccuggcucacaggu

SEQ ID NO: 280512 - RNA, 22 nt, Human
uaguuuacucaucuauaaaaug

SEQ ID NO: 280513 - RNA, 23 nt, Human
guuccuucauguggucauugguu

SEQ ID NO: 280514 - RNA, 22 nt, Human
uggcuugguaaggaccagcagg

SEQ ID NO: 280515 - RNA, 22 nt, Human
gaauguuuaaggaaggcguggc

SEQ ID NO: 280516 - RNA, 22 nt, Human
agaagcuuccuacauuguucuu

SEQ ID NO: 280517 - RNA, 21 nt, Human
uauuugcugccaucuuugagg

SEQ ID NO: 280518 - RNA, 22 nt, Human
uagauaaaagggcaaagggcau

SEQ ID NO: 280519 - RNA, 22 nt, Human
gauucuuugacaggguguuggg

SEQ ID NO: 280520 - RNA, 21 nt, Human
ugucugauguauuuuuugccu

SEQ ID NO: 280521 - RNA, 22 nt, Human
gagacaggccaggugguacuua

SEQ ID NO: 280522 - RNA, 22 nt, Human
auuagcuuaucacacaagcugc

SEQ ID NO: 280523 - RNA, 22 nt, Human
cuguaaauaugaagaauauaug

SEQ ID NO: 280524 - RNA, 22 nt, Human
aucugucuggaggccuggcaug

SEQ ID NO: 280525 - RNA, 22 nt, Human
uuccugccccugagagcuccca

SEQ ID NO: 280526 - RNA, 22 nt, Human
aagggcagaaagggacgcuuug

SEQ ID NO: 280527 - RNA, 22 nt, Human
aagcugcagcacagagaggugg

SEQ ID NO: 280528 - RNA, 22 nt, Human
ucucccucauuccugcuuccau

SEQ ID NO: 280529 - RNA, 22 nt, Human
gccaggcagauaugugagcuua

SEQ ID NO: 280530 - RNA, 22 nt, Human
ugauugacuuuagaauagcacu

SEQ ID NO: 280531 - RNA, 22 nt, Human
aauaagauugacacaaguaccu

SEQ ID NO: 280532 - RNA, 22 nt, Human
gguggcucggccagugcaggcc

SEQ ID NO: 280533 - RNA, 22 nt, Human
acauguguaaggucucucaguc

SEQ ID NO: 280534 - RNA, 22 nt, Human
uucuucuucauuucugacgaug

SEQ ID NO: 280535 - RNA, 22 nt, Human
guuuuacaagguuaaucagcag

SEQ ID NO: 280536 - RNA, 22 nt, Human
caugacaaauaaaccuuugcca

SEQ ID NO: 280537 - RNA, 22 nt, Human
agggcugacagugaggagucaa

SEQ ID NO: 280538 - RNA, 22 nt, Human
uaacugugugaacgugaucauu

SEQ ID NO: 280539 - RNA, 22 nt, Human
uuuuccagagcugucucuugca

SEQ ID NO: 280540 - RNA, 22 nt, Human
cccuucaagcucucuggguuuu

SEQ ID NO: 280541 - RNA, 22 nt, Human
uagguggugggauaugagcauc

SEQ ID NO: 280542 - RNA, 22 nt, Human
acccagggagugcuccuguucu

SEQ ID NO: 280543 - RNA, 22 nt, Human
cuguggcuuucucugccuccuu

SEQ ID NO: 280544 - RNA, 22 nt, Human
cccaaggccuucaagccagcuc

SEQ ID NO: 280545 - RNA, 22 nt, Human
guccugagucaagugugggcag

SEQ ID NO: 280546 - RNA, 22 nt, Human
cauuuuaccuagaagcugaaag

SEQ ID NO: 280547 - RNA, 22 nt, Human
uuggcugaaugaggucaccuuu

SEQ ID NO: 280548 - RNA, 22 nt, Human
gucauuccuuauguugauucag

SEQ ID NO: 280549 - RNA, 23 nt, Human
guaaaauacgcagugcaguguga

SEQ ID NO: 280550 - RNA, 22 nt, Human
ucagaucuggugaaguuauagu

SEQ ID NO: 280551 - RNA, 22 nt, Human
gcuguggcccuuggcaucugcg

SEQ ID NO: 280552 - RNA, 22 nt, Human
ucacaacaggaaggaccagcug

SEQ ID NO: 280553 - RNA, 22 nt, Human
acauagaaccuggcacauagua

SEQ ID NO: 280554 - RNA, 22 nt, Human
ccuccuggugggcgcuucuggc

SEQ ID NO: 280555 - RNA, 22 nt, Human
cuggauguaaagggugaagaaa

SEQ ID NO: 280556 - RNA, 22 nt, Human
uaauguaaacacagagacagaa

SEQ ID NO: 280557 - RNA, 22 nt, Human
gcagacagaugagggugcuggg

SEQ ID NO: 280558 - RNA, 21 nt, Human
ccugggagaucagcugccuuc

SEQ ID NO: 280559 - RNA, 22 nt, Human
gcaucuaaauaaacgugggagu

SEQ ID NO: 280560 - RNA, 22 nt, Human
ccagcuuuuccucucauugcuu

SEQ ID NO: 280561 - RNA, 22 nt, Human
auuuaucucuggaaacuaagca

SEQ ID NO: 280562 - RNA, 22 nt, Human
auucuucagaauaucuggcacu

SEQ ID NO: 280563 - RNA, 22 nt, Human
uucucuuagcuguaaagucaau

SEQ ID NO: 280564 - RNA, 22 nt, Human
uugaaagacuucuccugugaaa

SEQ ID NO: 280565 - RNA, 22 nt, Human
uugggcucaggaguuugagacc

SEQ ID NO: 280566 - RNA, 23 nt, Human
ucaguuaacuguguuaccugugc

SEQ ID NO: 280567 - RNA, 22 nt, Human
uuauucagauuggcuacaggau

SEQ ID NO: 280568 - RNA, 22 nt, Human
uccuucaaaaguugagagagcc

SEQ ID NO: 280569 - RNA, 22 nt, Human
auccugaagcaugaaugucaaa

SEQ ID NO: 280570 - RNA, 22 nt, Human
gcccagcuuuucacuuccacac

SEQ ID NO: 280571 - RNA, 22 nt, Human
uuuguacacugucuacuaugaa

SEQ ID NO: 280572 - RNA, 22 nt, Human
uaugugucugucgugcauaaau

SEQ ID NO: 280573 - RNA, 22 nt, Human
guauacauagaugaugaacaag

SEQ ID NO: 280574 - RNA, 22 nt, Human
acuuuuaaggggccuugauuua

SEQ ID NO: 280575 - RNA, 22 nt, Human
uuuaauuguuguggguacauag

SEQ ID NO: 280576 - RNA, 22 nt, Human
ugucuuuauauauuuggaaaau

SEQ ID NO: 280577 - RNA, 22 nt, Human
uauuauugcaaguauauaaagu

SEQ ID NO: 280578 - RNA, 22 nt, Human
aucucccagccacagcauucuu

SEQ ID NO: 280579 - RNA, 22 nt, Human
aucagaaauagucauguuacuu

SEQ ID NO: 280580 - RNA, 22 nt, Human
gagcagugagugaauguugccu

SEQ ID NO: 280581 - RNA, 22 nt, Human
uagcagggagggccagugucaa

SEQ ID NO: 280582 - RNA, 22 nt, Human
caggauggcagagaaaagggug

SEQ ID NO: 280583 - RNA, 22 nt, Human
ccugccugacagagaagguuca

SEQ ID NO: 280584 - RNA, 22 nt, Human
cacauaauaaauguuccugaug

SEQ ID NO: 280585 - RNA, 22 nt, Human
uagacacaucaaggaucaguuu

SEQ ID NO: 280586 - RNA, 22 nt, Human
auaauauaauccuacuucccau

SEQ ID NO: 280587 - RNA, 22 nt, Human
uggguacuccuauuaguucagu

SEQ ID NO: 280588 - RNA, 22 nt, Human
aagcaccacccucccaaccugu

SEQ ID NO: 280589 - RNA, 22 nt, Human
gugcauuugugcaugcacaugu

SEQ ID NO: 280590 - RNA, 22 nt, Human
uauugcugaggauugaggcuug

SEQ ID NO: 280591 - RNA, 22 nt, Human
cuguccuccagacgacaguccc

SEQ ID NO: 280592 - RNA, 22 nt, Human
gcaucugauccaauagauauau

SEQ ID NO: 280593 - RNA, 22 nt, Human
uuugacucauugauuuucucug

SEQ ID NO: 280594 - RNA, 22 nt, Human
gcuuuggucagguguccagccc

SEQ ID NO: 280595 - RNA, 17 nt, Human
uuuuggugaguuguuuc

SEQ ID NO: 280596 - RNA, 22 nt, Human
aguaaaaauugaggugcaaaau

SEQ ID NO: 280597 - RNA, 22 nt, Human
aagggauguaaacaugaauaag

SEQ ID NO: 280598 - RNA, 22 nt, Human
ugauagaagcagaagcauacca

SEQ ID NO: 280599 - RNA, 22 nt, Human
aguuuauuuuugauaagucuug

SEQ ID NO: 280600 - RNA, 22 nt, Human
ugcuggguagaaguauuagucu

SEQ ID NO: 280601 - RNA, 20 nt, Human
auacacauucauagaaaaau

SEQ ID NO: 280602 - RNA, 22 nt, Human
uagugaaaugauaacagagcag

SEQ ID NO: 280603 - RNA, 22 nt, Human
caugccagguuugaguaucuug

SEQ ID NO: 280604 - RNA, 22 nt, Human
uguggcugcaaaggaaggcugc

SEQ ID NO: 280605 - RNA, 22 nt, Human
gccacugugguccucccaugau

SEQ ID NO: 280606 - RNA, 21 nt, Human
uuucucaguugugugagcagc

SEQ ID NO: 280607 - RNA, 22 nt, Human
gacccaggguauccagagcugc

SEQ ID NO: 280608 - RNA, 22 nt, Human
uaacagaguaacagguauguaa

SEQ ID NO: 280609 - RNA, 22 nt, Human
uuugcaguagacaucuuauuuu

SEQ ID NO: 280610 - RNA, 18 nt, Human
gguggcucagucaugggg

SEQ ID NO: 280611 - RNA, 22 nt, Human
ugcaaauagccugaugaaagaa

SEQ ID NO: 280612 - RNA, 22 nt, Human
ggcuacuagacuuugauacuag

SEQ ID NO: 280613 - RNA, 22 nt, Human
ccuggcuccugccucugcaggg

SEQ ID NO: 280614 - RNA, 20 nt, Human
aucuucuuggccagcuugcu

SEQ ID NO: 280615 - RNA, 22 nt, Human
ccauagcaagaggagcagaaau

SEQ ID NO: 280616 - RNA, 22 nt, Human
cugcugccccugagcucagccu

SEQ ID NO: 280617 - RNA, 20 nt, Human
ugcagggcugccucccagcu

SEQ ID NO: 280618 - RNA, 22 nt, Human
uuuccagauuaagauaccacuu

SEQ ID NO: 280619 - RNA, 22 nt, Human
cagugucuuucagacucagaaa

SEQ ID NO: 280620 - RNA, 22 nt, Human
uggaagggaacagguggguguu

SEQ ID NO: 280621 - RNA, 22 nt, Human
cuuuacagauaggaacuacuca

SEQ ID NO: 280622 - RNA, 20 nt, Human
agacccucuggacugggccc

SEQ ID NO: 280623 - RNA, 22 nt, Human
uuugacuccuguguuucuggaa

SEQ ID NO: 280624 - RNA, 22 nt, Human
ugggugggagcacccugucugg

SEQ ID NO: 280625 - RNA, 22 nt, Human
agauuuuaguuuggggaggugc

SEQ ID NO: 280626 - RNA, 22 nt, Human
aacacuuuuuaguaaagauuga

SEQ ID NO: 280627 - RNA, 17 nt, Human
ugauaguucauuuuaag

SEQ ID NO: 280628 - RNA, 22 nt, Human
aaggccagacaggaccacaucu

SEQ ID NO: 280629 - RNA, 22 nt, Human
uuccauacgacugaggucucgg

SEQ ID NO: 280630 - RNA, 22 nt, Human
caggcauaaucucaucuuguuu

SEQ ID NO: 280631 - RNA, 22 nt, Human
agcccaggucucaaaguacagg

SEQ ID NO: 280632 - RNA, 22 nt, Human
ugaauagagcugcaguggacau

SEQ ID NO: 280633 - RNA, 22 nt, Human
uauuugcaacauaaaacucuga

SEQ ID NO: 280634 - RNA, 22 nt, Human
uuggaacaugccgggguccagg

SEQ ID NO: 280635 - RNA, 22 nt, Human
augaaaugaaguuggccuggcu

SEQ ID NO: 280636 - RNA, 22 nt, Human
agcaggugguaggcagucagca

SEQ ID NO: 280637 - RNA, 22 nt, Human
acugccaaugguaguuugaugg

SEQ ID NO: 280638 - RNA, 22 nt, Human
ggccugacugaccugauucuaa

SEQ ID NO: 280639 - RNA, 18 nt, Human
guuaauuuugaaguucau

SEQ ID NO: 280640 - RNA, 22 nt, Human
uuauuagguuauucucuguacu

SEQ ID NO: 280641 - RNA, 22 nt, Human
cccaggcagagagcuggugagc

SEQ ID NO: 280642 - RNA, 22 nt, Human
uaugaaaagguggccaauguag

SEQ ID NO: 280643 - RNA, 22 nt, Human
aacagcuucaucacauggcaua

SEQ ID NO: 280644 - RNA, 22 nt, Human
ccucugcccuuuuccuguauca

SEQ ID NO: 280645 - RNA, 22 nt, Human
uugcauuguaggauguuagaag

SEQ ID NO: 280646 - RNA, 23 nt, Human
gggaccugguaggaggugauugg

SEQ ID NO: 280647 - RNA, 22 nt, Human
uuucuuguuucauggugucuca

SEQ ID NO: 280648 - RNA, 22 nt, Human
uucucugaucuugcuagacuga

SEQ ID NO: 280649 - RNA, 22 nt, Human
cccagcagggucucugugucua

SEQ ID NO: 280650 - RNA, 22 nt, Human
uccuggaggagauccaaucuga

SEQ ID NO: 280651 - RNA, 21 nt, Human
aaaugaaugugguagugcaag

SEQ ID NO: 280652 - RNA, 22 nt, Human
gggugguggccagcagugggca

SEQ ID NO: 280653 - RNA, 22 nt, Human
acaaguuucauuguuuagaacc

SEQ ID NO: 280654 - RNA, 22 nt, Human
cacaaaugguuguagacauuaa

SEQ ID NO: 280655 - RNA, 22 nt, Human
gguuccaccuggcgagggguau

SEQ ID NO: 280656 - RNA, 22 nt, Human
ucacaagaauuuguagaugaaa

SEQ ID NO: 280657 - RNA, 22 nt, Human
cccaggcauuuucaacuuuagu

SEQ ID NO: 280658 - RNA, 22 nt, Human
cugaaggauuagagagcacuua

SEQ ID NO: 280659 - RNA, 22 nt, Human
aaaauugguuccuuucugaggc

SEQ ID NO: 280660 - RNA, 22 nt, Human
uucacauuagugguucuauaua

SEQ ID NO: 280661 - RNA, 22 nt, Human
auauauauugcccaggcugguu

SEQ ID NO: 280662 - RNA, 22 nt, Human
aaugaugaguucuaauagaccc

SEQ ID NO: 280663 - RNA, 21 nt, Human
aaaaguuugacaggaaaggga

SEQ ID NO: 280664 - RNA, 22 nt, Human
uacacaguauaugggaucacag

SEQ ID NO: 280665 - RNA, 22 nt, Human
uggcucaggaucuaagcagaau

SEQ ID NO: 280666 - RNA, 22 nt, Human
gggaccuggacaugugugugcu

SEQ ID NO: 280667 - RNA, 22 nt, Human
cauguguccacccuugaacaca

SEQ ID NO: 280668 - RNA, 20 nt, Human
gcacaguuugggaaccaugg

SEQ ID NO: 280669 - RNA, 22 nt, Human
augcaucuuaucaaaaauuaua

SEQ ID NO: 280670 - RNA, 22 nt, Human
cggcuggugucgggcacagcaa

SEQ ID NO: 280671 - RNA, 20 nt, Human
aaugucuugagacauuucag

SEQ ID NO: 280672 - RNA, 22 nt, Human
auuuauuggaugcuuacuuggg

SEQ ID NO: 280673 - RNA, 22 nt, Human
uuccuguggccuuacaucugug

SEQ ID NO: 280674 - RNA, 22 nt, Human
uucugugacuccucagagauuu

SEQ ID NO: 280675 - RNA, 22 nt, Human
uuuuagcacuaagugauaugcu

SEQ ID NO: 280676 - RNA, 22 nt, Human
uuaguuagucccugguaccuuu

SEQ ID NO: 280677 - RNA, 22 nt, Human
guucuucaaagugacaacuaaa

SEQ ID NO: 280678 - RNA, 22 nt, Human
aguuaaaucauuacugacagag

SEQ ID NO: 280679 - RNA, 22 nt, Human
auugcugggaauauuuagccca

SEQ ID NO: 280680 - RNA, 22 nt, Human
ucgcuugaacccaggaagugga

SEQ ID NO: 280681 - RNA, 22 nt, Human
auuagagguacaaaccuucacu

SEQ ID NO: 280682 - RNA, 22 nt, Human
aagugauuuagucuuauaaagg

SEQ ID NO: 280683 - RNA, 17 nt, Human
agacagguuauaguuga

SEQ ID NO: 280684 - RNA, 22 nt, Human
ucagguguggaccgaggucaga

SEQ ID NO: 280685 - RNA, 22 nt, Human
uguuuugguuuaaguauaugaa

SEQ ID NO: 280686 - RNA, 22 nt, Human
auguuacaauccaacaaaauua

SEQ ID NO: 280687 - RNA, 22 nt, Human
cuuuaugguaaguauagaugac

SEQ ID NO: 280688 - RNA, 22 nt, Human
ucucucuuuuuaaucauguaau

SEQ ID NO: 280689 - RNA, 22 nt, Human
acauguguguauacguauuuau

SEQ ID NO: 280690 - RNA, 22 nt, Human
accagucuuguugccaugucug

SEQ ID NO: 280691 - RNA, 22 nt, Human
caguuuuaaauuuugaaugucu

SEQ ID NO: 280692 - RNA, 22 nt, Human
uuuacauugcauuagguauuau

SEQ ID NO: 280693 - RNA, 22 nt, Human
aaggaccuauauugucagagga

SEQ ID NO: 280694 - RNA, 22 nt, Human
gucuacuuuugucaucauugca

SEQ ID NO: 280695 - RNA, 21 nt, Human
uccagaggaggacagacucag

SEQ ID NO: 280696 - RNA, 22 nt, Human
ggccugaggccaccagcagccc

SEQ ID NO: 280697 - RNA, 22 nt, Human
guguguccaggcgggagucaag

SEQ ID NO: 280698 - RNA, 22 nt, Human
uccuggcacccuuggguuggag

SEQ ID NO: 280699 - RNA, 19 nt, Human
caugugucaauacuguacc

SEQ ID NO: 280700 - RNA, 22 nt, Human
uagggcaggugaagaaaagcua

SEQ ID NO: 280701 - RNA, 23 nt, Human
aguccuuuuuauaaaauugagga

SEQ ID NO: 280702 - RNA, 22 nt, Human
uugacccagcuuuccccacaau

SEQ ID NO: 280703 - RNA, 17 nt, Human
accaggcaacacgccca

SEQ ID NO: 280704 - RNA, 22 nt, Human
ugcaggugugggcaggggagca

SEQ ID NO: 280705 - RNA, 22 nt, Human
aaugaguuauuagguguaagug

SEQ ID NO: 280706 - RNA, 22 nt, Human
caggcuggagugcaauggcaca

SEQ ID NO: 280707 - RNA, 22 nt, Human
cuccuggaugcaggcugucugc

SEQ ID NO: 280708 - RNA, 22 nt, Human
aaaugaacaucaagaauagccu

SEQ ID NO: 280709 - RNA, 22 nt, Human
aucauucuaguccuuauggucu

SEQ ID NO: 280710 - RNA, 22 nt, Human
ugaauaauuccuuuuugucaag

SEQ ID NO: 280711 - RNA, 22 nt, Human
uggagcagggcaucacugugcg

SEQ ID NO: 280712 - RNA, 22 nt, Human
uacaagcucacaaauuuuuaag

SEQ ID NO: 280713 - RNA, 22 nt, Human
ccugagcuuuaaaagccaugua

SEQ ID NO: 280714 - RNA, 22 nt, Human
acaauacaggcuucuggacuua

SEQ ID NO: 280715 - RNA, 22 nt, Human
uuuacaauugguuuucucuaau

SEQ ID NO: 280716 - RNA, 22 nt, Human
ugacauuucuuguugauauaaa

SEQ ID NO: 280717 - RNA, 22 nt, Human
aaaccaucagauaauucauacu

SEQ ID NO: 280718 - RNA, 22 nt, Human
aggaggcuuuugcaggugccac

SEQ ID NO: 280719 - RNA, 22 nt, Human
acuguccauucacucauauuca

SEQ ID NO: 280720 - RNA, 22 nt, Human
uuugacucccaaacugugauuu

SEQ ID NO: 280721 - RNA, 22 nt, Human
ucuccgaucacagguuuucaau

SEQ ID NO: 280722 - RNA, 22 nt, Human
aggagggaauaagaaagaguca

SEQ ID NO: 280723 - RNA, 22 nt, Human
uagcugaugaauaauuauucuu

SEQ ID NO: 280724 - RNA, 22 nt, Human
cagagucaugggccgucaggca

SEQ ID NO: 280725 - RNA, 22 nt, Human
agcaccaucggguucuugcuuu

SEQ ID NO: 280726 - RNA, 20 nt, Human
cugaacacagaauaagcaca

SEQ ID NO: 280727 - RNA, 22 nt, Human
uuccugugcuuauucuucucug

SEQ ID NO: 280728 - RNA, 22 nt, Human
ugcagguggauucaauguggga

SEQ ID NO: 280729 - RNA, 22 nt, Human
ugaccaggauacugcagggaug

SEQ ID NO: 280730 - RNA, 22 nt, Human
agcaguccaacugagguggcau

SEQ ID NO: 280731 - RNA, 22 nt, Human
caaguccaagaucaagaagcca

SEQ ID NO: 280732 - RNA, 22 nt, Human
uaugcaaaguccuaagaaagaa

SEQ ID NO: 280733 - RNA, 22 nt, Human
cagcugucucagggaggugauc

SEQ ID NO: 280734 - RNA, 22 nt, Human
gacccagugacucgucucugug

SEQ ID NO: 280735 - RNA, 22 nt, Human
gauuuuacugucuguguaucuc

SEQ ID NO: 280736 - RNA, 22 nt, Human
uuucuuuguaguagcauaauca

SEQ ID NO: 280737 - RNA, 18 nt, Human
ucugagguggacgaggag

SEQ ID NO: 280738 - RNA, 22 nt, Human
gggaacagagugccagacugac

SEQ ID NO: 280739 - RNA, 19 nt, Human
uuaaagugcgagaagucuu

SEQ ID NO: 280740 - RNA, 22 nt, Human
aaggaaagacaggacggaauuc

SEQ ID NO: 280741 - RNA, 16 nt, Human
agcagguguauagugu

SEQ ID NO: 280742 - RNA, 22 nt, Human
acuuuuuaguuuccucaaacau

SEQ ID NO: 280743 - RNA, 22 nt, Human
aguaaaauuguauuggaaaaca

SEQ ID NO: 280744 - RNA, 18 nt, Human
ucccuucucccuugccuc

SEQ ID NO: 280745 - RNA, 22 nt, Human
uacugucugcuucuuauagcuu

SEQ ID NO: 280746 - RNA, 22 nt, Human
gacaggcugugauggccgggag

SEQ ID NO: 280747 - RNA, 22 nt, Human
agucaguuuucuccagggggcu

SEQ ID NO: 280748 - RNA, 22 nt, Human
cucacagcauggaauuuucugg

SEQ ID NO: 280749 - RNA, 19 nt, Human
cucuggagcagacacugga

SEQ ID NO: 280750 - RNA, 22 nt, Human
ggaaaaauagaguauacuuuaa

SEQ ID NO: 280751 - RNA, 19 nt, Human
gcagguggauguggucagc

SEQ ID NO: 280752 - RNA, 22 nt, Human
uuugacuccugccuucuccugu

SEQ ID NO: 280753 - RNA, 22 nt, Human
cuccuggcacucaguguggaag

SEQ ID NO: 280754 - RNA, 22 nt, Human
gccacugcacuccagcccaggc

SEQ ID NO: 280755 - RNA, 20 nt, Human
ccaggccugggccugcucua

SEQ ID NO: 280756 - RNA, 23 nt, Human
agcuucugguucaggucaagcag

SEQ ID NO: 280757 - RNA, 22 nt, Human
caggauggucagaugcauuguc

SEQ ID NO: 280758 - RNA, 22 nt, Human
ucaguuuaagaugacuaacaau

SEQ ID NO: 280759 - RNA, 22 nt, Human
gcccucucuucugcagccucca

SEQ ID NO: 280760 - RNA, 22 nt, Human
auuuauuaugggauuuggcaca

SEQ ID NO: 280761 - RNA, 20 nt, Human
uucugcuugcaaauaucaag

SEQ ID NO: 280762 - RNA, 22 nt, Human
ucugagauuuguauggugagac

SEQ ID NO: 280763 - RNA, 22 nt, Human
agcaaacagaugucuccuuuag

SEQ ID NO: 280764 - RNA, 22 nt, Human
cccaggcacaccccgaacggaa

SEQ ID NO: 280765 - RNA, 22 nt, Human
cugcccucgggcccucccauag

SEQ ID NO: 280766 - RNA, 22 nt, Human
aggcagguccccuggaaggcac

SEQ ID NO: 280767 - RNA, 22 nt, Human
uuugacucuugcuuugguggcu

SEQ ID NO: 280768 - RNA, 22 nt, Human
ccacugccuauuugcagggccc

SEQ ID NO: 280769 - RNA, 22 nt, Human
uccaggcuggagugcaguggcg

SEQ ID NO: 280770 - RNA, 22 nt, Human
gacagacaugggacuucauacu

SEQ ID NO: 280771 - RNA, 22 nt, Human
cacagcauucacagaaagacau

SEQ ID NO: 280772 - RNA, 22 nt, Human
uugaagagaaucagaagguuga

SEQ ID NO: 280773 - RNA, 22 nt, Human
aucagagacaaaaccagcacuu

SEQ ID NO: 280774 - RNA, 22 nt, Human
ggugccagaguggcccaggggc

SEQ ID NO: 280775 - RNA, 22 nt, Human
ucccaaggugcucggcaacagg

SEQ ID NO: 280776 - RNA, 22 nt, Human
cagugaggaagcugucuggacc

SEQ ID NO: 280777 - RNA, 22 nt, Human
auaugcagagagcaugaauagg

SEQ ID NO: 280778 - RNA, 22 nt, Human
uuugacauuaaggaacauauau

SEQ ID NO: 280779 - RNA, 22 nt, Human
cugaggugagaggaggccaugu

SEQ ID NO: 280780 - RNA, 22 nt, Human
uuuauauguuuguacaauuaag

SEQ ID NO: 280781 - RNA, 22 nt, Human
gccugggugaauuugauccuaa

SEQ ID NO: 280782 - RNA, 22 nt, Human
uugguacagaugagguauucuc

SEQ ID NO: 280783 - RNA, 22 nt, Human
aagcuuuaugaucucucagcua

SEQ ID NO: 280784 - RNA, 22 nt, Human
uuucugaggaauuaauacagaa

SEQ ID NO: 280785 - RNA, 22 nt, Human
cuggauguccagguagaaguuu

SEQ ID NO: 280786 - RNA, 22 nt, Human
ugcuauuuggcacuuuugaccu

SEQ ID NO: 280787 - RNA, 22 nt, Human
ccagccacagcuuccagcuccu

SEQ ID NO: 280788 - RNA, 22 nt, Human
uuuuauugggaguccucuacug

SEQ ID NO: 280789 - RNA, 22 nt, Human
aaguccagugauacuggcagga

SEQ ID NO: 280790 - RNA, 18 nt, Human
ccauguguuccuuuuggg

SEQ ID NO: 280791 - RNA, 22 nt, Human
ugcucuucaccauuacaucaug

SEQ ID NO: 280792 - RNA, 22 nt, Human
aaguccaugaucaagauguggc

SEQ ID NO: 280793 - RNA, 22 nt, Human
uauugcugccaggacccuaucc

SEQ ID NO: 280794 - RNA, 22 nt, Human
ucuucucuguggccugguggug

SEQ ID NO: 280795 - RNA, 22 nt, Human
ugagucagugacaugaacuugu

SEQ ID NO: 280796 - RNA, 22 nt, Human
aacaaugugaagugcuguucag

SEQ ID NO: 280797 - RNA, 22 nt, Human
acucacuuuccauucaagcacc

SEQ ID NO: 280798 - RNA, 22 nt, Human
auucuucaaagagugucaaagu

SEQ ID NO: 280799 - RNA, 22 nt, Human
uccugcagccuugggcuggagc

SEQ ID NO: 280800 - RNA, 22 nt, Human
aagcccugucacccugacuuca

SEQ ID NO: 280801 - RNA, 22 nt, Human
ucuguggcauagugcuugggaa

SEQ ID NO: 280802 - RNA, 22 nt, Human
cacucugugauugcagcauucc

SEQ ID NO: 280803 - RNA, 22 nt, Human
uucauacaguggcugcacucca

SEQ ID NO: 280804 - RNA, 22 nt, Human
cauuuguuaaugcugcuuuuaa

SEQ ID NO: 280805 - RNA, 22 nt, Human
aaggugcuguggacuugggagc

SEQ ID NO: 280806 - RNA, 22 nt, Human
aggacaguccgggguccuccac

SEQ ID NO: 280807 - RNA, 22 nt, Human
acccuccaggcugcagcuccug

SEQ ID NO: 280808 - RNA, 22 nt, Human
ucccacccauccugcaucucuu

SEQ ID NO: 280809 - RNA, 19 nt, Human
agguggucuaggcuggaga

SEQ ID NO: 280810 - RNA, 22 nt, Human
uauacaguuugaguucuugcau

SEQ ID NO: 280811 - RNA, 22 nt, Human
agaaaaaucuuggcgcuugucu

SEQ ID NO: 280812 - RNA, 22 nt, Human
uucagcaaacacgaugcuuguu

SEQ ID NO: 280813 - RNA, 19 nt, Human
cucagcaagauagaaaugg

SEQ ID NO: 280814 - RNA, 22 nt, Human
cugugaccuccaggaaggggug

SEQ ID NO: 280815 - RNA, 22 nt, Human
agccagaggaacuugaugacug

SEQ ID NO: 280816 - RNA, 22 nt, Human
aaaguccuagcgauccacagaa

SEQ ID NO: 280817 - RNA, 22 nt, Human
uucacauuauaaucaguucugc

SEQ ID NO: 280818 - RNA, 22 nt, Human
uugcuugacuuuguguaccugu

SEQ ID NO: 280819 - RNA, 23 nt, Human
aacugucuugcaagugugauacc

SEQ ID NO: 280820 - RNA, 22 nt, Human
auugauaucaguuugcugauug

SEQ ID NO: 280821 - RNA, 22 nt, Human
cugggcugcuguccacuagggu

SEQ ID NO: 280822 - RNA, 19 nt, Human
ggcaagcacaaaagcuuug

SEQ ID NO: 280823 - RNA, 22 nt, Human
agggaccugcucacugccuggc

SEQ ID NO: 280824 - RNA, 22 nt, Human
cucauggcagagucaccugucc

SEQ ID NO: 280825 - RNA, 22 nt, Human
ccugcucccgggacgcguucac

SEQ ID NO: 280826 - RNA, 22 nt, Human
uuuccucacucaugucaucagu

SEQ ID NO: 280827 - RNA, 22 nt, Human
agagccagagaccuggguucac

SEQ ID NO: 280828 - RNA, 22 nt, Human
cagaagcagaacacuagauuua

SEQ ID NO: 280829 - RNA, 22 nt, Human
guuuacauugcuguuugugucu

SEQ ID NO: 280830 - RNA, 22 nt, Human
gagcagugaugggaggacguca

SEQ ID NO: 280831 - RNA, 18 nt, Human
ucagagagaauaguaauu

SEQ ID NO: 280832 - RNA, 22 nt, Human
uacugucuuuccauccuugccu

SEQ ID NO: 280833 - RNA, 22 nt, Human
gcuguguaucagaugccacggg

SEQ ID NO: 280834 - RNA, 22 nt, Human
ggcagggcaggaaagucaggaa

SEQ ID NO: 280835 - RNA, 22 nt, Human
ucucugaagauauuuauuauua

SEQ ID NO: 280836 - RNA, 22 nt, Human
uuugaaauguaucaguauaggu

SEQ ID NO: 280837 - RNA, 22 nt, Human
gguuucaacuaaaucaagaagg

SEQ ID NO: 280838 - RNA, 22 nt, Human
ucuccuggcucuaaaaggcugu

SEQ ID NO: 280839 - RNA, 22 nt, Human
ccuccuggauggauuuggugga

SEQ ID NO: 280840 - RNA, 22 nt, Human
ggguuucaugguucucacaaug

SEQ ID NO: 280841 - RNA, 22 nt, Human
uuuagaauuggcuagugggaau

SEQ ID NO: 280842 - RNA, 21 nt, Human
cagugaggcccuccuguuccc

SEQ ID NO: 280843 - RNA, 22 nt, Human
gaggccuggugugucucccgcu

SEQ ID NO: 280844 - RNA, 22 nt, Human
cccagagauguccugagugaua

SEQ ID NO: 280845 - RNA, 16 nt, Human
ccuggaggucacuuca

SEQ ID NO: 280846 - RNA, 22 nt, Human
gcccagguuggagagcaguggc

SEQ ID NO: 280847 - RNA, 20 nt, Human
ugagccaggcuaggaagggc

SEQ ID NO: 280848 - RNA, 22 nt, Human
aggaaaaauaaggcagcagggc

SEQ ID NO: 280849 - RNA, 22 nt, Human
cuuaaauuuucaucuacaagaa

SEQ ID NO: 280850 - RNA, 22 nt, Human
caaacauuugacuucucucagg

SEQ ID NO: 280851 - RNA, 22 nt, Human
gccugcagcaugcuaggucuug

SEQ ID NO: 280852 - RNA, 20 nt, Human
auaaaauaacugccacaaga

SEQ ID NO: 280853 - RNA, 22 nt, Human
uuucacauaucaacucuauccu

SEQ ID NO: 280854 - RNA, 22 nt, Human
uucuguaucuuucuucaagauu

SEQ ID NO: 280855 - RNA, 20 nt, Human
ucagugucaguagccacuac

SEQ ID NO: 280856 - RNA, 22 nt, Human
augcacaagaggcuagaaaaga

SEQ ID NO: 280857 - RNA, 22 nt, Human
gcagccacucucauuccacgug

SEQ ID NO: 280858 - RNA, 22 nt, Human
agugcuuuauguuguugugcaa

SEQ ID NO: 280859 - RNA, 22 nt, Human
ggugcaggagcggggugcucgg

SEQ ID NO: 280860 - RNA, 23 nt, Human
aaguucuuagguugauacuaaug

SEQ ID NO: 280861 - RNA, 22 nt, Human
gagaacacaugcagacugggua

SEQ ID NO: 280862 - RNA, 22 nt, Human
ugcuggguuaccuaagccuaaa

SEQ ID NO: 280863 - RNA, 22 nt, Human
agacagagauacuauguuguca

SEQ ID NO: 280864 - RNA, 22 nt, Human
cacaugacucuggcuacccaga

SEQ ID NO: 280865 - RNA, 23 nt, Human
auuucuaggggauuuucuggugc

SEQ ID NO: 280866 - RNA, 22 nt, Human
cucccagagaccaagcugagaa

SEQ ID NO: 280867 - RNA, 22 nt, Human
ugcagggcccuugggguugaac

SEQ ID NO: 280868 - RNA, 19 nt, Human
uggccagguacugucugcu

SEQ ID NO: 280869 - RNA, 22 nt, Human
uacccagcaaucccuagagguu

SEQ ID NO: 280870 - RNA, 22 nt, Human
acagacagacagauugcauaug

SEQ ID NO: 280871 - RNA, 22 nt, Human
gucauuccuauccauuugauac

SEQ ID NO: 280872 - RNA, 21 nt, Human
augugaaauaucaucagagca

SEQ ID NO: 280873 - RNA, 22 nt, Human
caggugguugagagcuguaggc

SEQ ID NO: 280874 - RNA, 22 nt, Human
agaaauaugcugauuagaugaa

SEQ ID NO: 280875 - RNA, 22 nt, Human
agcauaaaggcacuagaaagag

SEQ ID NO: 280876 - RNA, 22 nt, Human
uuucugcauuguccucuugguu

SEQ ID NO: 280877 - RNA, 22 nt, Human
cagcuauugauaaauguugggg

SEQ ID NO: 280878 - RNA, 22 nt, Human
augaaauucaucugagaaugcu

SEQ ID NO: 280879 - RNA, 22 nt, Human
auauuagguuggugcaaaagua

SEQ ID NO: 280880 - RNA, 22 nt, Human
uucccagaaugaauggauggag

SEQ ID NO: 280881 - RNA, 22 nt, Human
ugacauguguaaucagcuccgu

SEQ ID NO: 280882 - RNA, 22 nt, Human
uuauuuaaugugaucugaagag

SEQ ID NO: 280883 - RNA, 22 nt, Human
ucaggaaaguguucucagagga

SEQ ID NO: 280884 - RNA, 22 nt, Human
agggcugacaaauggcagugac

SEQ ID NO: 280885 - RNA, 22 nt, Human
cacaucugaaaagaugcacaag

SEQ ID NO: 280886 - RNA, 22 nt, Human
gagcugaacaucauggaaaggc

SEQ ID NO: 280887 - RNA, 22 nt, Human
cagggaugagcagauggagcaa

SEQ ID NO: 280888 - RNA, 22 nt, Human
ucuguucagaagaggugaaagu

SEQ ID NO: 280889 - RNA, 22 nt, Human
uaaaguuauaaauuaccuguca

SEQ ID NO: 280890 - RNA, 22 nt, Human
ugcaaacaccacagagacaauu

SEQ ID NO: 280891 - RNA, 22 nt, Human
ggagcaguuguugagcaagcca

SEQ ID NO: 280892 - RNA, 22 nt, Human
accagagcuuacaugcuagaaa

SEQ ID NO: 280893 - RNA, 22 nt, Human
cagucucucuuguagugcagcu

SEQ ID NO: 280894 - RNA, 22 nt, Human
ccugagucuuggcuucuuggcu

SEQ ID NO: 280895 - RNA, 22 nt, Human
uucauagagcagcucacugaau

SEQ ID NO: 280896 - RNA, 22 nt, Human
cauaauccugguguagcccucu

SEQ ID NO: 280897 - RNA, 22 nt, Human
gcugaaauucagauuccuaggc

SEQ ID NO: 280898 - RNA, 22 nt, Human
uccaugcagaguccaggccuca

SEQ ID NO: 280899 - RNA, 22 nt, Human
uauccaaaggaacaaucacagc

SEQ ID NO: 280900 - RNA, 23 nt, Human
ucugucuuguuuaggccacuguu

SEQ ID NO: 280901 - RNA, 22 nt, Human
acuguagucuaaauauagucuu

SEQ ID NO: 280902 - RNA, 22 nt, Human
uuuuccuuucaucaggacaaag

SEQ ID NO: 280903 - RNA, 22 nt, Human
guuaaacaauaacuggcacaca

SEQ ID NO: 280904 - RNA, 22 nt, Human
aguuuuauuccaaugugcagca

SEQ ID NO: 280905 - RNA, 22 nt, Human
ugacccaucaggccacaugagg

SEQ ID NO: 280906 - RNA, 22 nt, Human
aggcagcccugugcuggaugcu

SEQ ID NO: 280907 - RNA, 22 nt, Human
uccaggcuagguuuacaggaca

SEQ ID NO: 280908 - RNA, 22 nt, Human
agggauguuaguugugagcuca

SEQ ID NO: 280909 - RNA, 22 nt, Human
auucuucacaccuguuccuguu

SEQ ID NO: 280910 - RNA, 22 nt, Human
uccugcagcugcagaccugggg

SEQ ID NO: 280911 - RNA, 22 nt, Human
uuaaagaggcagguuaaauaau

SEQ ID NO: 280912 - RNA, 23 nt, Human
uugauuucaaaugcagagaacac

SEQ ID NO: 280913 - RNA, 22 nt, Human
aggcuugguuaauucuguguga

SEQ ID NO: 280914 - RNA, 22 nt, Human
cccagagggcugaggauaugaa

SEQ ID NO: 280915 - RNA, 22 nt, Human
gggccugaggcccagacacugg

SEQ ID NO: 280916 - RNA, 22 nt, Human
acaugucuaaguacucaacaaa

SEQ ID NO: 280917 - RNA, 22 nt, Human
acuuugcagggcuugauaucca

SEQ ID NO: 280918 - RNA, 22 nt, Human
gugggguagaucuuucucagga

SEQ ID NO: 280919 - RNA, 23 nt, Human
guaggaauuuucacuuccucuug

SEQ ID NO: 280920 - RNA, 22 nt, Human
gagagaaaagggggaauugauu

SEQ ID NO: 280921 - RNA, 22 nt, Human
aaaauugaagugaucaggaacu

SEQ ID NO: 280922 - RNA, 22 nt, Human
ugagcaggagauaaacagguag

SEQ ID NO: 280923 - RNA, 22 nt, Human
agcugaaaggguguuggagugu

SEQ ID NO: 280924 - RNA, 22 nt, Human
uaaaagauaucuuagggauuug

SEQ ID NO: 280925 - RNA, 22 nt, Human
auucaaauuaaguuaauucagc

SEQ ID NO: 280926 - RNA, 22 nt, Human
uuucagaaacgauuaugaacac

SEQ ID NO: 280927 - RNA, 22 nt, Human
agcccaugcaacaggccuagcg

SEQ ID NO: 280928 - RNA, 22 nt, Human
agguguccaauccugguuggau

SEQ ID NO: 280929 - RNA, 22 nt, Human
agcagguggccacgaggaggag

SEQ ID NO: 280930 - RNA, 22 nt, Human
aggccaggccuuucuccauucc

SEQ ID NO: 280931 - RNA, 22 nt, Human
guccugaggcaggauggguuuc

SEQ ID NO: 280932 - RNA, 20 nt, Human
aggccaggaaauguaguucu

SEQ ID NO: 280933 - RNA, 22 nt, Human
uugagcaggauggcuaugcaca

SEQ ID NO: 280934 - RNA, 22 nt, Human
agucucucacagaggauucucc

SEQ ID NO: 280935 - RNA, 22 nt, Human
agaccuggauuccaauccuacc

SEQ ID NO: 280936 - RNA, 22 nt, Human
auaacagauacucucugugagg

SEQ ID NO: 280937 - RNA, 22 nt, Human
ccagccccgggaaccuggccgu

SEQ ID NO: 280938 - RNA, 22 nt, Human
uagccauuuuuauuaaugcugg

SEQ ID NO: 280939 - RNA, 22 nt, Human
caggcuugagggcaggcccagu

SEQ ID NO: 280940 - RNA, 22 nt, Human
uagggauggaugaugccuggca

SEQ ID NO: 280941 - RNA, 22 nt, Human
cuccuggcuuucccagaccagg

SEQ ID NO: 280942 - RNA, 22 nt, Human
auauuacauaaacaugagugaa

SEQ ID NO: 280943 - RNA, 22 nt, Human
aggagggauagaaaaauacuug

SEQ ID NO: 280944 - RNA, 22 nt, Human
aaccccgcucaggcugggugag

SEQ ID NO: 280945 - RNA, 22 nt, Human
uagaaucuaguucauucauuug

SEQ ID NO: 280946 - RNA, 22 nt, Human
ucccagccaggcucuaccacuu

SEQ ID NO: 280947 - RNA, 22 nt, Human
uauuccagugugaucuuuguag

SEQ ID NO: 280948 - RNA, 22 nt, Human
ucuguucaugaaauaucuuuuu

SEQ ID NO: 280949 - RNA, 22 nt, Human
uuccuggccucucucugagcag

SEQ ID NO: 280950 - RNA, 19 nt, Human
uugcuggagaaaaaggaga

SEQ ID NO: 280951 - RNA, 22 nt, Human
ccuggcagcgugccgagcugcg

SEQ ID NO: 280952 - RNA, 22 nt, Human
caaaauguucuggcaccuuuaa

SEQ ID NO: 280953 - RNA, 22 nt, Human
uacacaugacaguggacugaga

SEQ ID NO: 280954 - RNA, 22 nt, Human
gagaaaaucuugggucaagaau

SEQ ID NO: 280955 - RNA, 20 nt, Human
ccaagagcaugcaugaggaa

SEQ ID NO: 280956 - RNA, 22 nt, Human
uuucauguauuucccaaagcuu

SEQ ID NO: 280957 - RNA, 22 nt, Human
cugccugcucaccagggcucug

SEQ ID NO: 280958 - RNA, 22 nt, Human
uuacaguuuauccaggaagagc

SEQ ID NO: 280959 - RNA, 22 nt, Human
uuuagcuuuugugucagauaag

SEQ ID NO: 280960 - RNA, 22 nt, Human
cagguggcuuauuagggucagu

SEQ ID NO: 280961 - RNA, 22 nt, Human
uacaacaugugguccuuuauga

SEQ ID NO: 280962 - RNA, 22 nt, Human
gguguccugucagcuagaguga

SEQ ID NO: 280963 - RNA, 22 nt, Human
uuagaaagcuuuccauagucaa

SEQ ID NO: 280964 - RNA, 22 nt, Human
gaaggagagggucaaggauaau

SEQ ID NO: 280965 - RNA, 22 nt, Human
uacaugcaauuaagagggugaa

SEQ ID NO: 280966 - RNA, 22 nt, Human
ucuccugggugcuuuaucagaa

SEQ ID NO: 280967 - RNA, 22 nt, Human
uacagacagacuucccacccuc

SEQ ID NO: 280968 - RNA, 22 nt, Human
ucucugaacuuccuggaaaggc

SEQ ID NO: 280969 - RNA, 22 nt, Human
cuuucccuuagccccauucuau

SEQ ID NO: 280970 - RNA, 22 nt, Human
gugugggaaggcuaggaugcug

SEQ ID NO: 280971 - RNA, 20 nt, Human
uagacuuuucaucaaccuua

SEQ ID NO: 280972 - RNA, 22 nt, Human
uagcuuuagugaaaaauaucag

SEQ ID NO: 280973 - RNA, 22 nt, Human
aauggcuucugaagcacacuuu

SEQ ID NO: 280974 - RNA, 22 nt, Human
agcugucaggcagaacugagcu

SEQ ID NO: 280975 - RNA, 22 nt, Human
auacagauguugaauguuauau

SEQ ID NO: 280976 - RNA, 22 nt, Human
guuuaaauaauuaggggccugu

SEQ ID NO: 280977 - RNA, 22 nt, Human
ggcucccacccauagggcgagu

SEQ ID NO: 280978 - RNA, 20 nt, Human
ucuguucaaaucuuaguucc

SEQ ID NO: 280979 - RNA, 22 nt, Human
ugcaagcaaguuuuugaagugg

SEQ ID NO: 280980 - RNA, 22 nt, Human
gugauuuugagaccuauauagu

SEQ ID NO: 280981 - RNA, 22 nt, Human
uuuuucaucugauugauaacuc

SEQ ID NO: 280982 - RNA, 22 nt, Human
cuuaaauucuuaaugcccucau

SEQ ID NO: 280983 - RNA, 20 nt, Human
gauaaauugucucuuaagug

SEQ ID NO: 280984 - RNA, 19 nt, Human
ugguggaggugcaccugac

SEQ ID NO: 280985 - RNA, 22 nt, Human
agugugaguaauucagggaggg

SEQ ID NO: 280986 - RNA, 22 nt, Human
gggaccugccaaggccacccag

SEQ ID NO: 280987 - RNA, 22 nt, Human
aggagcugugaaugggaggggu

SEQ ID NO: 280988 - RNA, 22 nt, Human
uugcuuuauuuggcaugccacu

SEQ ID NO: 280989 - RNA, 22 nt, Human
gccuccggagucacagugucuu

SEQ ID NO: 280990 - RNA, 22 nt, Human
aagggcucccaacucaucuuuu

SEQ ID NO: 280991 - RNA, 22 nt, Human
cuucuucauaggcaguccuguu

SEQ ID NO: 280992 - RNA, 22 nt, Human
ucauuuguugaacuuuagugcg

SEQ ID NO: 280993 - RNA, 16 nt, Human
aauugcuucuugcugc

SEQ ID NO: 280994 - RNA, 22 nt, Human
cacuugauggaagagcagaaga

SEQ ID NO: 280995 - RNA, 22 nt, Human
accugccuauggagccacaugg

SEQ ID NO: 280996 - RNA, 22 nt, Human
acacuaauuaagcugcuuuacu

SEQ ID NO: 280997 - RNA, 22 nt, Human
uguuccaauaaggaguugaaau

SEQ ID NO: 280998 - RNA, 22 nt, Human
accugccagaauccaagccaca

SEQ ID NO: 280999 - RNA, 22 nt, Human
cagggaugaccagagggaugug

SEQ ID NO: 281000 - RNA, 22 nt, Human
uaguuaggguucugcagagaca

SEQ ID NO: 281001 - RNA, 22 nt, Human
gcugucuugcucacucuugcag

SEQ ID NO: 281002 - RNA, 22 nt, Human
aaaacuuagcuaggcaaguuuu

SEQ ID NO: 281003 - RNA, 22 nt, Human
guuaaauaaccucauguccguu

SEQ ID NO: 281004 - RNA, 22 nt, Human
auggcuugauagaaagcuaguu

SEQ ID NO: 281005 - RNA, 22 nt, Human
ggacaaaauccaaacuucuuag

SEQ ID NO: 281006 - RNA, 20 nt, Human
ucauuacagugcuaagaugu

SEQ ID NO: 281007 - RNA, 18 nt, Human
ucuguggcagcagugcac

SEQ ID NO: 281008 - RNA, 22 nt, Human
guggaggaagggauucagacca

SEQ ID NO: 281009 - RNA, 22 nt, Human
uguccagugauucucaugagcc

SEQ ID NO: 281010 - RNA, 22 nt, Human
ucucuuaauuuuggaauagugu

SEQ ID NO: 281011 - RNA, 22 nt, Human
gcuccugggcucuaccuugcua

SEQ ID NO: 281012 - RNA, 22 nt, Human
gagggggaaagucccuggaguc

SEQ ID NO: 281013 - RNA, 20 nt, Human
uuccuggggaaugauagaag

SEQ ID NO: 281014 - RNA, 17 nt, Human
aggccucccuccaggcc

SEQ ID NO: 281015 - RNA, 22 nt, Human
guagcuauuuaugauacucaug

SEQ ID NO: 281016 - RNA, 19 nt, Human
aucagcaagguaggaugug

SEQ ID NO: 281017 - RNA, 22 nt, Human
ucaugaacaucucaaauaacca

SEQ ID NO: 281018 - RNA, 22 nt, Human
uacagacauuuacuccacuccu

SEQ ID NO: 281019 - RNA, 22 nt, Human
ccaggcuguaagagugauguug

SEQ ID NO: 281020 - RNA, 22 nt, Human
uacaaaaaauugauacugacga

SEQ ID NO: 281021 - RNA, 22 nt, Human
ucauggcuggaagcucaguuag

SEQ ID NO: 281022 - RNA, 22 nt, Human
caaauggcuggcauccuucuac

SEQ ID NO: 281023 - RNA, 22 nt, Human
cacauaauugaacgugaugagu

SEQ ID NO: 281024 - RNA, 22 nt, Human
agcaugaaaggcgugccaacuu

SEQ ID NO: 281025 - RNA, 22 nt, Human
uugcugaugguauuaugcuagu

SEQ ID NO: 281026 - RNA, 18 nt, Human
ucuagaaacccagacucu

SEQ ID NO: 281027 - RNA, 22 nt, Human
ucuguucauaguaguguauaug

SEQ ID NO: 281028 - RNA, 22 nt, Human
uucuggcucgauucucugaccg

SEQ ID NO: 281029 - RNA, 22 nt, Human
gagaaaugcaugcaugucauca

SEQ ID NO: 281030 - RNA, 21 nt, Human
ucuguucaaggaacuacggau

SEQ ID NO: 281031 - RNA, 22 nt, Human
ucugugccaucagucuccagag

SEQ ID NO: 281032 - RNA, 21 nt, Human
agacagagugcagucuacaua

SEQ ID NO: 281033 - RNA, 22 nt, Human
agggaaaggcugaugcuguggg

SEQ ID NO: 281034 - RNA, 22 nt, Human
uccagcucaaagugcuccuguc

SEQ ID NO: 281035 - RNA, 22 nt, Human
aaagugaggacuugaguacugu

SEQ ID NO: 281036 - RNA, 23 nt, Human
acuugauuauuguugauagauuc

SEQ ID NO: 281037 - RNA, 22 nt, Human
acuugguucuaacuaguguaua

SEQ ID NO: 281038 - RNA, 22 nt, Human
agacauauauugcaauucacug

SEQ ID NO: 281039 - RNA, 17 nt, Human
agagggaaaaugcgguu

SEQ ID NO: 281040 - RNA, 22 nt, Human
gcaccugcuggggcugaugaga

SEQ ID NO: 281041 - RNA, 22 nt, Human
gaguuaaaaaugccuccaugga

SEQ ID NO: 281042 - RNA, 22 nt, Human
ucccacaccugucuauuccuag

SEQ ID NO: 281043 - RNA, 22 nt, Human
agugcaugccuuccuguggaug

SEQ ID NO: 281044 - RNA, 22 nt, Human
uccaggcauguugggaagauga

SEQ ID NO: 281045 - RNA, 22 nt, Human
uuucuuuccaugagccuaugua

SEQ ID NO: 281046 - RNA, 22 nt, Human
caggaggcagcgcucucaggac

SEQ ID NO: 281047 - RNA, 19 nt, Human
ccagagagcuagguacaga

SEQ ID NO: 281048 - RNA, 19 nt, Human
gcgaggaagucacuguggu

SEQ ID NO: 281049 - RNA, 22 nt, Human
gggucccuggaauuacuugaca

SEQ ID NO: 281050 - RNA, 22 nt, Human
ccuggcaagugggcucccagau

SEQ ID NO: 281051 - RNA, 22 nt, Human
cuuucuuauaccugucagggcc

SEQ ID NO: 281052 - RNA, 22 nt, Human
ugguucagagaguugcugacca

SEQ ID NO: 281053 - RNA, 22 nt, Human
gcugcagggagcuggaaggcuc

SEQ ID NO: 281054 - RNA, 22 nt, Human
acaagacugugcucuaagagug

SEQ ID NO: 281055 - RNA, 22 nt, Human
cagaugaaggccugaaugucua

SEQ ID NO: 281056 - RNA, 22 nt, Human
augugcaacuuuucugucuuuu

SEQ ID NO: 281057 - RNA, 22 nt, Human
gcagacaggauuggguuaauag

SEQ ID NO: 281058 - RNA, 22 nt, Human
uuacagaucaucaagguauaau

SEQ ID NO: 281059 - RNA, 22 nt, Human
uaagaaacauuuuuaugacagu

SEQ ID NO: 281060 - RNA, 22 nt, Human
gcugcaaaccugccaccuggug

SEQ ID NO: 281061 - RNA, 22 nt, Human
uuacagugaaguaccauuaaaa

SEQ ID NO: 281062 - RNA, 22 nt, Human
uuuauuagugcuuguaucacug

SEQ ID NO: 281063 - RNA, 22 nt, Human
ugugcacauucuaggacuagua

SEQ ID NO: 281064 - RNA, 22 nt, Human
ucuucagauggccaguuguccc

SEQ ID NO: 281065 - RNA, 22 nt, Human
acagcuguauccccagagcuca

SEQ ID NO: 281066 - RNA, 22 nt, Human
uguuucaaagaaagaaaauaua

SEQ ID NO: 281067 - RNA, 22 nt, Human
uccuggcauaauggcuuugcuc

SEQ ID NO: 281068 - RNA, 22 nt, Human
uggaaagucucuuuugacugua

SEQ ID NO: 281069 - RNA, 18 nt, Human
uguuaaaugaagauuugc

SEQ ID NO: 281070 - RNA, 22 nt, Human
ucuggaugaaagggcuauauau

SEQ ID NO: 281071 - RNA, 22 nt, Human
uauacacauuacaguuucagga

SEQ ID NO: 281072 - RNA, 22 nt, Human
uuuuuauaacucuuuugugaca

SEQ ID NO: 281073 - RNA, 22 nt, Human
cuccuacacauagaugcuuuca

SEQ ID NO: 281074 - RNA, 22 nt, Human
uggccagguugggcuuugcagc

SEQ ID NO: 281075 - RNA, 22 nt, Human
aaggcagcuucaccacagcauu

SEQ ID NO: 281076 - RNA, 23 nt, Human
agagcaucaugaugcuaagucug

SEQ ID NO: 281077 - RNA, 22 nt, Human
guuuuauaugucucugcugaca

SEQ ID NO: 281078 - RNA, 22 nt, Human
ucaugccaguuaaaggcuguga

SEQ ID NO: 281079 - RNA, 22 nt, Human
ucugaaauggggcugaagcacu

SEQ ID NO: 281080 - RNA, 22 nt, Human
aguaaaauuucugcugaggaga

SEQ ID NO: 281081 - RNA, 22 nt, Human
aaauccuaaugacaaguuuagu

SEQ ID NO: 281082 - RNA, 22 nt, Human
gagggcagagucuaaugaugca

SEQ ID NO: 281083 - RNA, 22 nt, Human
uauguacaagcacacaugugac

SEQ ID NO: 281084 - RNA, 22 nt, Human
uucaguuucuaaagauguuccu

SEQ ID NO: 281085 - RNA, 22 nt, Human
uggcaaauauuuuguuuuguaa

SEQ ID NO: 281086 - RNA, 22 nt, Human
uccaggcaguuuuccagguugu

SEQ ID NO: 281087 - RNA, 22 nt, Human
ucccagggccgcaaacgaguuu

SEQ ID NO: 281088 - RNA, 22 nt, Human
uacaaaguaauguauaauaucg

SEQ ID NO: 281089 - RNA, 22 nt, Human
uauuccaaaaucccaaacugcc

SEQ ID NO: 281090 - RNA, 22 nt, Human
aaagucuuuauuuuguaucuuu

SEQ ID NO: 281091 - RNA, 22 nt, Human
ggcaggcagaaaaauagaauau

SEQ ID NO: 281092 - RNA, 22 nt, Human
ugaugaaaguucaguagugaau

SEQ ID NO: 281093 - RNA, 22 nt, Human
uagcuuuaauaagcugcugaau

SEQ ID NO: 281094 - RNA, 22 nt, Human
cagcccugagagaaccaucuau

SEQ ID NO: 281095 - RNA, 22 nt, Human
ugucaaguuguggcaugucuaa

SEQ ID NO: 281096 - RNA, 22 nt, Human
ucagguguuuaaggauagugau

SEQ ID NO: 281097 - RNA, 22 nt, Human
uugguaaaaucauagugguaac

SEQ ID NO: 281098 - RNA, 22 nt, Human
agcaaagaaauggaggcucaga

SEQ ID NO: 281099 - RNA, 22 nt, Human
ugggcagcagcaaagccagacu

SEQ ID NO: 281100 - RNA, 22 nt, Human
gacagacagggguucuccugga

SEQ ID NO: 281101 - RNA, 22 nt, Human
ccagcuuuauagcuucaaagga

SEQ ID NO: 281102 - RNA, 22 nt, Human
auucagcaguuccugcuucagu

SEQ ID NO: 281103 - RNA, 22 nt, Human
cagggaugggauggagucaguu

SEQ ID NO: 281104 - RNA, 22 nt, Human
gugcaugcaaauuacuguaaag

SEQ ID NO: 281105 - RNA, 19 nt, Human
gcaugcagaguaagaaggu

SEQ ID NO: 281106 - RNA, 22 nt, Human
ugugacccccgucacggcugcu

SEQ ID NO: 281107 - RNA, 22 nt, Human
uacaugugcacgugugacuuug

SEQ ID NO: 281108 - RNA, 20 nt, Human
agagagagguaaauugagca

SEQ ID NO: 281109 - RNA, 22 nt, Human
uuagugguaaggaugaaauuuc

SEQ ID NO: 281110 - RNA, 22 nt, Human
gaaaguuucucacacaugcaga

SEQ ID NO: 281111 - RNA, 22 nt, Human
uaguuaaagauucuguuaagag

SEQ ID NO: 281112 - RNA, 22 nt, Human
aguuaaaugucaguagcuuaac

SEQ ID NO: 281113 - RNA, 22 nt, Human
ccacaggauccaagggaaggca

SEQ ID NO: 281114 - RNA, 20 nt, Human
cuacuuuaggcacugagaau

SEQ ID NO: 281115 - RNA, 22 nt, Human
ggccucucaugcccagagccaa

SEQ ID NO: 281116 - RNA, 22 nt, Human
ccacagcugaccgcaggugagc

SEQ ID NO: 281117 - RNA, 22 nt, Human
aauaauaguugcaaaguguuua

SEQ ID NO: 281118 - RNA, 22 nt, Human
uguuucuuuguagauauucuuu

SEQ ID NO: 281119 - RNA, 22 nt, Human
uuagaaaggggugaaucaaugg

SEQ ID NO: 281120 - RNA, 22 nt, Human
uaccuguuuuaaagcuaaaagg

SEQ ID NO: 281121 - RNA, 22 nt, Human
uaguauagauugaagcagauca

SEQ ID NO: 281122 - RNA, 22 nt, Human
augcagaagacugaaaagcuga

SEQ ID NO: 281123 - RNA, 22 nt, Human
uuugcugucagccgcuauuuuc

SEQ ID NO: 281124 - RNA, 21 nt, Human
gccugcaguuuugaagcccuu

SEQ ID NO: 281125 - RNA, 22 nt, Human
gcuuuucuccuuagugucccug

SEQ ID NO: 281126 - RNA, 22 nt, Human
ucuggaugaagacccagaggcu

SEQ ID NO: 281127 - RNA, 21 nt, Human
uuggaacaagcagcaguuugc

SEQ ID NO: 281128 - RNA, 22 nt, Human
ccugucucuuucaaucugagag

SEQ ID NO: 281129 - RNA, 22 nt, Human
caugccauuucuucucuuuaug

SEQ ID NO: 281130 - RNA, 22 nt, Human
gacagacaaauguuuuuaacuu

SEQ ID NO: 281131 - RNA, 22 nt, Human
uuucauugagaauauaagauuu

SEQ ID NO: 281132 - RNA, 22 nt, Human
aaugaccugggugucauuucau

SEQ ID NO: 281133 - RNA, 22 nt, Human
ugucugucugcacagcucaugg

SEQ ID NO: 281134 - RNA, 23 nt, Human
caggugguagagaaaaauccaga

SEQ ID NO: 281135 - RNA, 22 nt, Human
acauguaaaaauuaagguaaga

SEQ ID NO: 281136 - RNA, 22 nt, Human
gucugcccucacgccagcuggg

SEQ ID NO: 281137 - RNA, 22 nt, Human
agaagggaacucagagaugauu

SEQ ID NO: 281138 - RNA, 22 nt, Human
uacagucaacauugaugaugau

SEQ ID NO: 281139 - RNA, 22 nt, Human
cagggaugcugcuuaggcaguu

SEQ ID NO: 281140 - RNA, 19 nt, Human
gccagcagaaugaugaggc

SEQ ID NO: 281141 - RNA, 22 nt, Human
augauucuuuuggauagaugau

SEQ ID NO: 281142 - RNA, 23 nt, Human
acuauaaaguuguucugauuuac

SEQ ID NO: 281143 - RNA, 22 nt, Human
aaagcugcccuugugaaacaag

SEQ ID NO: 281144 - RNA, 22 nt, Human
acagacagauuuugucugaugu

SEQ ID NO: 281145 - RNA, 22 nt, Human
uggaaaacaaagcucucauuau

SEQ ID NO: 281146 - RNA, 22 nt, Human
cagccagguucaaguccuuaua

SEQ ID NO: 281147 - RNA, 22 nt, Human
gccaggcaggugucggagcccu

SEQ ID NO: 281148 - RNA, 22 nt, Human
aaagugguucuuacauccgugg

SEQ ID NO: 281149 - RNA, 22 nt, Human
agugucacagacccaaucagga

SEQ ID NO: 281150 - RNA, 22 nt, Human
uagaauaugauuaauuuucuua

SEQ ID NO: 281151 - RNA, 23 nt, Human
ccaaagucgaagucuaguccaga

SEQ ID NO: 281152 - RNA, 22 nt, Human
ugcagggaagcaaggguggcuc

SEQ ID NO: 281153 - RNA, 19 nt, Human
gugaggaguguuuacagaa

SEQ ID NO: 281154 - RNA, 22 nt, Human
cuggcacucauaggccaguuca

SEQ ID NO: 281155 - RNA, 22 nt, Human
uccaggcacgaggcccugugca

SEQ ID NO: 281156 - RNA, 22 nt, Human
acaguuuauaaaaauaaugagg

SEQ ID NO: 281157 - RNA, 22 nt, Human
ucauaaauucuggugcugugag

SEQ ID NO: 281158 - RNA, 22 nt, Human
agacaugucaccaauucuuacu

SEQ ID NO: 281159 - RNA, 22 nt, Human
cacaguuugguauagaagugau

SEQ ID NO: 281160 - RNA, 22 nt, Human
ucuguggccugccuccucauuu

SEQ ID NO: 281161 - RNA, 22 nt, Human
ugagcccuaauuuacaacaucu

SEQ ID NO: 281162 - RNA, 22 nt, Human
gacauaauaaucugaccuagau

SEQ ID NO: 281163 - RNA, 22 nt, Human
agcagggcaguuaaaggguccu

SEQ ID NO: 281164 - RNA, 22 nt, Human
uuccuggcugaacugaacuccu

SEQ ID NO: 281165 - RNA, 22 nt, Human
ggcauccaguucugaucaacaa

SEQ ID NO: 281166 - RNA, 22 nt, Human
ucuucacaugaccuucaugucu

SEQ ID NO: 281167 - RNA, 22 nt, Human
uaaggaggcugcugugaagaaa

SEQ ID NO: 281168 - RNA, 22 nt, Human
gggcugacaguuuccccugaaa

SEQ ID NO: 281169 - RNA, 20 nt, Human
cauuugaaucuccauucugc

SEQ ID NO: 281170 - RNA, 22 nt, Human
uuccucagggaggcuagcagua

SEQ ID NO: 281171 - RNA, 22 nt, Human
aauuucagaccauuugcaauua

SEQ ID NO: 281172 - RNA, 22 nt, Human
caggcugccgugaagcaggccu

SEQ ID NO: 281173 - RNA, 22 nt, Human
ccuggcagcgccgaagcuggcc

SEQ ID NO: 281174 - RNA, 22 nt, Human
gguuacauggaagaaauauaau

SEQ ID NO: 281175 - RNA, 18 nt, Human
uggcaggaaaugcacuuu

SEQ ID NO: 281176 - RNA, 22 nt, Human
uagcuuuaggcacguuugaauu

SEQ ID NO: 281177 - RNA, 17 nt, Human
ccagagaguaguuagga

SEQ ID NO: 281178 - RNA, 22 nt, Human
gaauguuaaugcacuucuagcu

SEQ ID NO: 281179 - RNA, 21 nt, Human
cuguuucuugugaagugacac

SEQ ID NO: 281180 - RNA, 20 nt, Human
cagcuuuagaucuuugauua

SEQ ID NO: 281181 - RNA, 22 nt, Human
aauccugaccugggcaugcuug

SEQ ID NO: 281182 - RNA, 22 nt, Human
aucucagaucuacagaucuaca

SEQ ID NO: 281183 - RNA, 22 nt, Human
auacauauaugguacuuccugg

SEQ ID NO: 281184 - RNA, 20 nt, Human
cagaacaugagcaucgagcc

SEQ ID NO: 281185 - RNA, 22 nt, Human
agauggucuaguugaaccauau

SEQ ID NO: 281186 - RNA, 22 nt, Human
ggaaagcucagaucuuguugga

SEQ ID NO: 281187 - RNA, 22 nt, Human
caggugucaaaauacuaagugg

SEQ ID NO: 281188 - RNA, 22 nt, Human
gcaaauucuuaacuggacugug

SEQ ID NO: 281189 - RNA, 22 nt, Human
gcugccacauuuucaggacuaa

SEQ ID NO: 281190 - RNA, 22 nt, Human
aaggaccugauuuugagcaucu

SEQ ID NO: 281191 - RNA, 22 nt, Human
acugaauuagggaacacugaac

SEQ ID NO: 281192 - RNA, 22 nt, Human
auaucuguguuucccuuuugcu

SEQ ID NO: 281193 - RNA, 18 nt, Human
uccucucuuuccccaggg

SEQ ID NO: 281194 - RNA, 22 nt, Human
acacacaauuaguuuuaugcuu

SEQ ID NO: 281195 - RNA, 22 nt, Human
aagcaaaggcaggagcuuguga

SEQ ID NO: 281196 - RNA, 22 nt, Human
ucuucagacuccaaauguuuua

SEQ ID NO: 281197 - RNA, 22 nt, Human
ucauggcucuaaagacauagau

SEQ ID NO: 281198 - RNA, 22 nt, Human
caugcuguccugccagggaugg

SEQ ID NO: 281199 - RNA, 22 nt, Human
agccaugcaccuuacucuugcu

SEQ ID NO: 281200 - RNA, 22 nt, Human
uuuauaaacaguaccacggugc

SEQ ID NO: 281201 - RNA, 22 nt, Human
guccaugacugugacucacaug

SEQ ID NO: 281202 - RNA, 22 nt, Human
gguaggaguauuuugcagcagu

SEQ ID NO: 281203 - RNA, 22 nt, Human
gggcuggacaucuaagguagcu

SEQ ID NO: 281204 - RNA, 22 nt, Human
cuauuaggcuuccauuucaugc

SEQ ID NO: 281205 - RNA, 22 nt, Human
aucuuuacaguguaagugcaga

SEQ ID NO: 281206 - RNA, 22 nt, Human
cagaugaacucuauccuguggc

SEQ ID NO: 281207 - RNA, 22 nt, Human
cagauaauaauaugacuucacu

SEQ ID NO: 281208 - RNA, 18 nt, Human
cuggauuaagacagugcu

SEQ ID NO: 281209 - RNA, 22 nt, Human
caugaguuuuuuaguucaugca

SEQ ID NO: 281210 - RNA, 21 nt, Human
acagaugggaugagcacacug

SEQ ID NO: 281211 - RNA, 22 nt, Human
acuggcagagggaaaaccauuc

SEQ ID NO: 281212 - RNA, 22 nt, Human
ucagagaaugugaauauuaaac

SEQ ID NO: 281213 - RNA, 22 nt, Human
uggaccugggguggccuccucu

SEQ ID NO: 281214 - RNA, 22 nt, Human
aagcuguguauuacagaauauu

SEQ ID NO: 281215 - RNA, 22 nt, Human
ugacgucaacugcaaaggccuu

SEQ ID NO: 281216 - RNA, 22 nt, Human
ccaggugucauggauaaugggu

SEQ ID NO: 281217 - RNA, 21 nt, Human
ggaaaacuuuccuugucugaa

SEQ ID NO: 281218 - RNA, 22 nt, Human
aaguucuugaagacuuuaaaua

SEQ ID NO: 281219 - RNA, 21 nt, Human
ggcaggugggucucuguugcu

SEQ ID NO: 281220 - RNA, 22 nt, Human
cagugcagccaaggacaggcac

SEQ ID NO: 281221 - RNA, 22 nt, Human
ccuggcagggcugcaguaaugg

SEQ ID NO: 281222 - RNA, 22 nt, Human
uccugagcacagagacaaggaa

SEQ ID NO: 281223 - RNA, 22 nt, Human
uucucuucccacuuucuguauu

SEQ ID NO: 281224 - RNA, 22 nt, Human
cucugcaggcacccaggguggg

SEQ ID NO: 281225 - RNA, 22 nt, Human
ccagcaucuaugugcuguugau

SEQ ID NO: 281226 - RNA, 21 nt, Human
aauucccagaaacagcacaag

SEQ ID NO: 281227 - RNA, 22 nt, Human
uugaggaggaaaaggggguacc

SEQ ID NO: 281228 - RNA, 22 nt, Human
aguguuagugaaagguguuuau

SEQ ID NO: 281229 - RNA, 21 nt, Human
cugugaccuuucuuuccuccu

SEQ ID NO: 281230 - RNA, 22 nt, Human
ggcaggcaggucuucauggccc

SEQ ID NO: 281231 - RNA, 22 nt, Human
aaaugaguuuccucaauguccu

SEQ ID NO: 281232 - RNA, 22 nt, Human
agaagcugcguuuauuuaaauc

SEQ ID NO: 281233 - RNA, 19 nt, Human
uccugaaaacuucuggaau

SEQ ID NO: 281234 - RNA, 22 nt, Human
ucccaggcugggggccugaagu

SEQ ID NO: 281235 - RNA, 22 nt, Human
gaggugucacuauuuugcuuau

SEQ ID NO: 281236 - RNA, 22 nt, Human
ccacagcaccgcugccaguccc

SEQ ID NO: 281237 - RNA, 22 nt, Human
aaagcuauuuauuacagagaau

SEQ ID NO: 281238 - RNA, 19 nt, Human
guucuuucauaguaagagc

SEQ ID NO: 281239 - RNA, 22 nt, Human
auuuugaugcuaucuaaugaau

SEQ ID NO: 281240 - RNA, 22 nt, Human
agacagacuugaaaauguucuu

SEQ ID NO: 281241 - RNA, 22 nt, Human
cuuugcaauagaggcacacaug

SEQ ID NO: 281242 - RNA, 22 nt, Human
gcagggcagcucacugugguuc

SEQ ID NO: 281243 - RNA, 22 nt, Human
ggcuuuaugcagggauagaaau

SEQ ID NO: 281244 - RNA, 21 nt, Human
uccugcagggcagcagagugg

SEQ ID NO: 281245 - RNA, 22 nt, Human
uucauagugcuuaauuugauaa

SEQ ID NO: 281246 - RNA, 22 nt, Human
gugccaaaagcuauaauuuggu

SEQ ID NO: 281247 - RNA, 22 nt, Human
ccagggcaacgcugucucagag

SEQ ID NO: 281248 - RNA, 22 nt, Human
agcuuccuugaauucuguagaa

SEQ ID NO: 281249 - RNA, 22 nt, Human
auuuaagacugacuucaccagu

SEQ ID NO: 281250 - RNA, 22 nt, Human
cucaggaguaguucagcagcug

SEQ ID NO: 281251 - RNA, 22 nt, Human
cuccugugcaugcaucucccua

SEQ ID NO: 281252 - RNA, 20 nt, Human
aaaauauguauaacucuucu

SEQ ID NO: 281253 - RNA, 22 nt, Human
gucaguuacagccacggcgggu

SEQ ID NO: 281254 - RNA, 22 nt, Human
gggaccagaagaaggaugguga

SEQ ID NO: 281255 - RNA, 22 nt, Human
cuuacauacugagaaaauaucc

SEQ ID NO: 281256 - RNA, 16 nt, Human
gcuggagggagggguu

SEQ ID NO: 281257 - RNA, 22 nt, Human
ugugggaggauucagaauuggg

SEQ ID NO: 281258 - RNA, 22 nt, Human
uaaaauguguuucuguaugguu

SEQ ID NO: 281259 - RNA, 22 nt, Human
augcuuagguuaaauuuguaau

SEQ ID NO: 281260 - RNA, 22 nt, Human
uuucuucauucaccuucacccc

SEQ ID NO: 281261 - RNA, 22 nt, Human
cagcucauuccucaaucuagga

SEQ ID NO: 281262 - RNA, 22 nt, Human
guuauugagacauagaguuaug

SEQ ID NO: 281263 - RNA, 22 nt, Human
aaugucuucccuggcaggccaa

SEQ ID NO: 281264 - RNA, 21 nt, Human
uuacuucugcuuguuauuguc

SEQ ID NO: 281265 - RNA, 22 nt, Human
gagccuccuccuggugugccga

SEQ ID NO: 281266 - RNA, 22 nt, Human
gcccagggugcuuagaacccau

SEQ ID NO: 281267 - RNA, 22 nt, Human
gugccccagacacgcauguggg

SEQ ID NO: 281268 - RNA, 20 nt, Human
cucuuaaauguaaaguaggc

SEQ ID NO: 281269 - RNA, 22 nt, Human
aaaaguguucaggaagaauaau

SEQ ID NO: 281270 - RNA, 22 nt, Human
uuauacacugcagaaccagcau

SEQ ID NO: 281271 - RNA, 22 nt, Human
cuggcugaucucaaucauggcu

SEQ ID NO: 281272 - RNA, 22 nt, Human
ggaggggucucuagcgaggaga

SEQ ID NO: 281273 - RNA, 22 nt, Human
aaacuaaaccuggcuuaguaag

SEQ ID NO: 281274 - RNA, 22 nt, Human
uguggggcugugguguucuucu

SEQ ID NO: 281275 - RNA, 22 nt, Human
agagccaguuguuaagcacuua

SEQ ID NO: 281276 - RNA, 19 nt, Human
ccugggucugcagcauuca

SEQ ID NO: 281277 - RNA, 22 nt, Human
cuguccucaacccauccuucuc

SEQ ID NO: 281278 - RNA, 22 nt, Human
ugcagggaggccccgcagcccu

SEQ ID NO: 281279 - RNA, 22 nt, Human
ucagugugaguaccaugcucag

SEQ ID NO: 281280 - RNA, 22 nt, Human
uucucagugaaguuuagaacau

SEQ ID NO: 281281 - RNA, 22 nt, Human
ucagcauguucuuaggucacag

SEQ ID NO: 281282 - RNA, 22 nt, Human
caggcuugauuauucagacaau

SEQ ID NO: 281283 - RNA, 22 nt, Human
acacugucugggacucaggagu

SEQ ID NO: 281284 - RNA, 22 nt, Human
aucuguaaagauaaucauaugu

SEQ ID NO: 281285 - RNA, 22 nt, Human
uccuggccaugcaagaugagga

SEQ ID NO: 281286 - RNA, 22 nt, Human
gggguuaacaguauugcucaug

SEQ ID NO: 281287 - RNA, 22 nt, Human
uugcccagaguccacagcguac

SEQ ID NO: 281288 - RNA, 22 nt, Human
acagagcaugcucaguguguga

SEQ ID NO: 281289 - RNA, 22 nt, Human
cccaugccuucugacucacagg

SEQ ID NO: 281290 - RNA, 22 nt, Human
ucucagugagcuuuucuauguu

SEQ ID NO: 281291 - RNA, 22 nt, Human
uauacacacaugcuccggccuu

SEQ ID NO: 281292 - RNA, 22 nt, Human
gucacaggccuggaugaggggc

SEQ ID NO: 281293 - RNA, 18 nt, Human
uggcagggaggaaauaua

SEQ ID NO: 281294 - RNA, 22 nt, Human
cuauuauuauguuaacuggacu

SEQ ID NO: 281295 - RNA, 22 nt, Human
uccauucuuuuuaccucucaga

SEQ ID NO: 281296 - RNA, 14 nt, Human
gcaggcagaucacu

SEQ ID NO: 281297 - RNA, 22 nt, Human
gaaagcacaguucugaccaugu

SEQ ID NO: 281298 - RNA, 22 nt, Human
ccaguuuagguacuaggcucua

SEQ ID NO: 281299 - RNA, 22 nt, Human
agagggcugcugcacagugcuc

SEQ ID NO: 281300 - RNA, 22 nt, Human
ugggguggaacccuucugcugg

SEQ ID NO: 281301 - RNA, 22 nt, Human
cagcaugaugagugcaguuugg

SEQ ID NO: 281302 - RNA, 22 nt, Human
ccuggcagguggcgcccucggc

SEQ ID NO: 281303 - RNA, 22 nt, Human
uguccuggagacacaagguggu

SEQ ID NO: 281304 - RNA, 22 nt, Human
uuguccugugauuucagggccu

SEQ ID NO: 281305 - RNA, 22 nt, Human
cagagccuggcgaugucaugga

SEQ ID NO: 281306 - RNA, 22 nt, Human
auguccuuuuauuuaaagcagg

SEQ ID NO: 281307 - RNA, 22 nt, Human
cugcucuucacacuacacccgu

SEQ ID NO: 281308 - RNA, 19 nt, Human
cuguugcuggggcucucuu

SEQ ID NO: 281309 - RNA, 22 nt, Human
aggaggaaggcuucauuagguu

SEQ ID NO: 281310 - RNA, 22 nt, Human
agagcugaauuuggguggugga

SEQ ID NO: 281311 - RNA, 22 nt, Human
cugccucuauaggaguccacca

SEQ ID NO: 281312 - RNA, 22 nt, Human
uccucccaacuuuuccaucuca

SEQ ID NO: 281313 - RNA, 22 nt, Human
ggaggacacuggcucugccuuc

SEQ ID NO: 281314 - RNA, 22 nt, Human
uagggcagcugcaucaggcacu

SEQ ID NO: 281315 - RNA, 22 nt, Human
ucacacuaagacaaaauaauuu

SEQ ID NO: 281316 - RNA, 22 nt, Human
uuguuaaagaugcagauuccau

SEQ ID NO: 281317 - RNA, 22 nt, Human
accaggcagagcugggccuuaa

SEQ ID NO: 281318 - RNA, 22 nt, Human
uucuagaaacuggagcaaacag

SEQ ID NO: 281319 - RNA, 22 nt, Human
acggggcuagagaagguuucuu

SEQ ID NO: 281320 - RNA, 22 nt, Human
uucuaguuaaaguauguauuag

SEQ ID NO: 281321 - RNA, 22 nt, Human
auagucagugucuauaucguug

SEQ ID NO: 281322 - RNA, 22 nt, Human
ccugcagaaaggguccccagga

SEQ ID NO: 281323 - RNA, 22 nt, Human
gauuuuauuagcccaaacuuug

SEQ ID NO: 281324 - RNA, 22 nt, Human
acugaggacagugaggagggcu

SEQ ID NO: 281325 - RNA, 22 nt, Human
ccagagaguaaacauuuuccgg

SEQ ID NO: 281326 - RNA, 22 nt, Human
ggaaguuguaugaucggggaau

SEQ ID NO: 281327 - RNA, 22 nt, Human
uggccuggggaagaccaugggc

SEQ ID NO: 281328 - RNA, 22 nt, Human
uccaaggacauuguucuaguug

SEQ ID NO: 281329 - RNA, 22 nt, Human
uuguguccuaagcaccagaugg

SEQ ID NO: 281330 - RNA, 22 nt, Human
auucuucaccauggauaauuug

SEQ ID NO: 281331 - RNA, 22 nt, Human
ugguggggccagacuucagcuc

SEQ ID NO: 281332 - RNA, 22 nt, Human
uuggcaaaauuuaaagaaguga

SEQ ID NO: 281333 - RNA, 22 nt, Human
aagcauuuuguuuuaagaauga

SEQ ID NO: 281334 - RNA, 22 nt, Human
uggcagguuuccuccucauagu

SEQ ID NO: 281335 - RNA, 22 nt, Human
cagagcauaauugacaugaggu

SEQ ID NO: 281336 - RNA, 22 nt, Human
ccguggcuucccaggcggaugu

SEQ ID NO: 281337 - RNA, 15 nt, Human
cuccaugauuuugca

SEQ ID NO: 281338 - RNA, 22 nt, Human
aaauuaagggugagaagaguug

SEQ ID NO: 281339 - RNA, 22 nt, Human
agaggggaggcgaaccagaguc

SEQ ID NO: 281340 - RNA, 22 nt, Human
ccuggcccacauggcuucuccc

SEQ ID NO: 281341 - RNA, 22 nt, Human
uagguagauacauguguuggcu

SEQ ID NO: 281342 - RNA, 21 nt, Human
acauuacagggugaugugucu

SEQ ID NO: 281343 - RNA, 22 nt, Human
caggccuggcccccggcacacc

SEQ ID NO: 281344 - RNA, 22 nt, Human
cucuggaagugauggcagguca

SEQ ID NO: 281345 - RNA, 19 nt, Human
cucucacucgccacauccu

SEQ ID NO: 281346 - RNA, 22 nt, Human
cuucaguuagccaauucagguc

SEQ ID NO: 281347 - RNA, 22 nt, Human
uggccaggggaguuccccucca

SEQ ID NO: 281348 - RNA, 22 nt, Human
cuucucaguugcaagugucaga

SEQ ID NO: 281349 - RNA, 22 nt, Human
caaagauaugacauggaaaaug

SEQ ID NO: 281350 - RNA, 22 nt, Human
ggaccugaacauaaaacgaggc

SEQ ID NO: 281351 - RNA, 22 nt, Human
guuuauuaacugucaagugauu

SEQ ID NO: 281352 - RNA, 22 nt, Human
gcucucagaagagccaggcuac

SEQ ID NO: 281353 - RNA, 22 nt, Human
agggcacuugaggcugggccug

SEQ ID NO: 281354 - RNA, 23 nt, Human
uguuuucuuguccugguauaauu

SEQ ID NO: 281355 - RNA, 22 nt, Human
ugaggaggugggcacacagagu

SEQ ID NO: 281356 - RNA, 17 nt, Human
gccuucucugcccucac

SEQ ID NO: 281357 - RNA, 22 nt, Human
guccugagaugucacaagguuu

SEQ ID NO: 281358 - RNA, 22 nt, Human
uccuuccuggggucucugcugc

SEQ ID NO: 281359 - RNA, 20 nt, Human
ccugggcucaaagcauccuc

SEQ ID NO: 281360 - RNA, 22 nt, Human
cucagagaaccuaagcggagga

SEQ ID NO: 281361 - RNA, 22 nt, Human
uugagguaguacuuauuauugg

SEQ ID NO: 281362 - RNA, 22 nt, Human
agugcaggagccuggccagagc

SEQ ID NO: 281363 - RNA, 22 nt, Human
ccaucagauuagcaaaauccag

SEQ ID NO: 281364 - RNA, 22 nt, Human
aggcaguggcugagaccagggg

SEQ ID NO: 281365 - RNA, 20 nt, Human
cugcuccacccggcucucag

SEQ ID NO: 281366 - RNA, 22 nt, Human
guccacugcugugugcuucacc

SEQ ID NO: 281367 - RNA, 22 nt, Human
uuguauuggcaaagaacuugag

SEQ ID NO: 281368 - RNA, 21 nt, Human
ugucuuuaggaccuguuaaau

SEQ ID NO: 281369 - RNA, 22 nt, Human
agugugagauuaaaccgaauca

SEQ ID NO: 281370 - RNA, 22 nt, Human
acaguauuugcgauacugauga

SEQ ID NO: 281371 - RNA, 22 nt, Human
gacagagauugaaucaggaaau

SEQ ID NO: 281372 - RNA, 22 nt, Human
ggagaagggccaauuccaugua

SEQ ID NO: 281373 - RNA, 17 nt, Human
agacagaccucugcauc

SEQ ID NO: 281374 - RNA, 22 nt, Human
ucuggcucauacaagccugcaa

SEQ ID NO: 281375 - RNA, 22 nt, Human
auuucauagauuguaaaucccu

SEQ ID NO: 281376 - RNA, 22 nt, Human
cauucccacguguucuuugcuu

SEQ ID NO: 281377 - RNA, 18 nt, Human
acaggcugugggaauggu

SEQ ID NO: 281378 - RNA, 22 nt, Human
cccagcuugcgggcggcaggag

SEQ ID NO: 281379 - RNA, 23 nt, Human
uuucuguuggguauauauccaag

SEQ ID NO: 281380 - RNA, 22 nt, Human
auauuaggugcucaauacaugc

SEQ ID NO: 281381 - RNA, 22 nt, Human
gcagguguggauuugcauccag

SEQ ID NO: 281382 - RNA, 22 nt, Human
agagccagccuucucagcuuac

SEQ ID NO: 281383 - RNA, 22 nt, Human
agaggccggccgagcccauggg

SEQ ID NO: 281384 - RNA, 22 nt, Human
ucugggaauuuauuggcacuuu

SEQ ID NO: 281385 - RNA, 22 nt, Human
uccaggaguuugagacugcagu

SEQ ID NO: 281386 - RNA, 22 nt, Human
uuuguucaacaggugaaauaga

SEQ ID NO: 281387 - RNA, 22 nt, Human
ucucuguguguuggcuguauau

SEQ ID NO: 281388 - RNA, 22 nt, Human
acuguccaagcaugccuggcuu

SEQ ID NO: 281389 - RNA, 22 nt, Human
cuguccugggggugguccuugc

SEQ ID NO: 281390 - RNA, 22 nt, Human
ugagagaguaauugagugguaa

SEQ ID NO: 281391 - RNA, 22 nt, Human
acacuuggagcaacacuuaugg

SEQ ID NO: 281392 - RNA, 22 nt, Human
caugacaauauguucuuucauu

SEQ ID NO: 281393 - RNA, 22 nt, Human
uuucucucuggcccugauuguc

SEQ ID NO: 281394 - RNA, 17 nt, Human
uccuuucuuuaccuguu

SEQ ID NO: 281395 - RNA, 22 nt, Human
gcagucuaucuugugauuuaac

SEQ ID NO: 281396 - RNA, 23 nt, Human
ucuagaaaaugaaagaaugcagu

SEQ ID NO: 281397 - RNA, 23 nt, Human
uugcugccugagccuuccucugg

SEQ ID NO: 281398 - RNA, 20 nt, Human
agcauacaucauaagaaacc

SEQ ID NO: 281399 - RNA, 22 nt, Human
gaggcauaaaucacaguguuca

SEQ ID NO: 281400 - RNA, 22 nt, Human
uugccuauuguucuuacauguu

SEQ ID NO: 281401 - RNA, 22 nt, Human
auuuugacugcauuacagaaca

SEQ ID NO: 281402 - RNA, 22 nt, Human
uagggcaggggaggaaucugaa

SEQ ID NO: 281403 - RNA, 22 nt, Human
ccaggagcagaguagguguuca

SEQ ID NO: 281404 - RNA, 22 nt, Human
gaaacuguuucuggcuuuggug

SEQ ID NO: 281405 - RNA, 22 nt, Human
gaucauuugcaggaaacauuaa

SEQ ID NO: 281406 - RNA, 22 nt, Human
cauuuguuaaccaguguggauu

SEQ ID NO: 281407 - RNA, 22 nt, Human
aagcugugcaggaacugcuugc

SEQ ID NO: 281408 - RNA, 22 nt, Human
guuucuuuugugaucaccaacc

SEQ ID NO: 281409 - RNA, 22 nt, Human
uucuucaguguagcaacuguau

SEQ ID NO: 281410 - RNA, 22 nt, Human
aggagccaugagcaggaggcaa

SEQ ID NO: 281411 - RNA, 22 nt, Human
acagucucuccacacugcaggg

SEQ ID NO: 281412 - RNA, 22 nt, Human
uauuuccauguuagaacuaagu

SEQ ID NO: 281413 - RNA, 22 nt, Human
aguccaaagcagaugagggcca

SEQ ID NO: 281414 - RNA, 22 nt, Human
cuuuccaaugucacuaugaauc

SEQ ID NO: 281415 - RNA, 22 nt, Human
aucagaguguaaguucuuuccu

SEQ ID NO: 281416 - RNA, 22 nt, Human
ucucuuucuauaugugagucuu

SEQ ID NO: 281417 - RNA, 22 nt, Human
cacaguuucuauaggucagaau

SEQ ID NO: 281418 - RNA, 22 nt, Human
aggcccugcccagugccacaag

SEQ ID NO: 281419 - RNA, 20 nt, Human
auucaccaaaucaucccagg

SEQ ID NO: 281420 - RNA, 22 nt, Human
ucaagaaacugugcuacagagu

SEQ ID NO: 281421 - RNA, 22 nt, Human
aaucugcacaauucaguuucag

SEQ ID NO: 281422 - RNA, 22 nt, Human
uucuacaugagaaaauguauuu

SEQ ID NO: 281423 - RNA, 21 nt, Human
agacaugugaacuaaagguga

SEQ ID NO: 281424 - RNA, 22 nt, Human
guacaaguucuacucuauaaau

SEQ ID NO: 281425 - RNA, 22 nt, Human
ugcuauuuuggucuacagcacu

SEQ ID NO: 281426 - RNA, 22 nt, Human
agugccccaugggugccugggg

SEQ ID NO: 281427 - RNA, 20 nt, Human
agcaaaaugcaagauuuuca

SEQ ID NO: 281428 - RNA, 22 nt, Human
uuugcauuaguuuagauuucaa

SEQ ID NO: 281429 - RNA, 22 nt, Human
gaucuucuagcagaaguaauuu

SEQ ID NO: 281430 - RNA, 22 nt, Human
agcugcaggauuauggaaugga

SEQ ID NO: 281431 - RNA, 22 nt, Human
auguuaaagauggugggaaauu

SEQ ID NO: 281432 - RNA, 22 nt, Human
ugcucccaaaccugacaggcuc

SEQ ID NO: 281433 - RNA, 22 nt, Human
acugagcacucacuuuuguuau

SEQ ID NO: 281434 - RNA, 22 nt, Human
cagagcagugaggaguugugua

SEQ ID NO: 281435 - RNA, 22 nt, Human
aaugcauauguaggcaagcagu

SEQ ID NO: 281436 - RNA, 22 nt, Human
caggcucagucagaaaauguau

SEQ ID NO: 281437 - RNA, 22 nt, Human
uaaaauguagcuucuaggcugg

SEQ ID NO: 281438 - RNA, 22 nt, Human
auuuauuaagcaucugcuaugu

SEQ ID NO: 281439 - RNA, 22 nt, Human
agaaauguggaucguuuuaaaa

SEQ ID NO: 281440 - RNA, 22 nt, Human
agcucccagaagccagagucgg

SEQ ID NO: 281441 - RNA, 22 nt, Human
ugugcauguauugauuuguacc

SEQ ID NO: 281442 - RNA, 22 nt, Human
gaacaucaugaagaaaacauau

SEQ ID NO: 281443 - RNA, 22 nt, Human
ugucaguucaauuauaguaauu

SEQ ID NO: 281444 - RNA, 22 nt, Human
aguauaaagugguuuucagcac

SEQ ID NO: 281445 - RNA, 22 nt, Human
ucccaguggugggugcacauuu

SEQ ID NO: 281446 - RNA, 22 nt, Human
cagcuuugccaaguaaggucuu

SEQ ID NO: 281447 - RNA, 17 nt, Human
cucuggaauuggugaag

SEQ ID NO: 281448 - RNA, 22 nt, Human
gccaggcuccaggcccuccuga

SEQ ID NO: 281449 - RNA, 22 nt, Human
agcugugggauuugggugugcc

SEQ ID NO: 281450 - RNA, 22 nt, Human
uugguuuguucaccaucaagca

SEQ ID NO: 281451 - RNA, 21 nt, Human
acagcuggugcagggcgggga

SEQ ID NO: 281452 - RNA, 22 nt, Human
auucaacuagugauuguguuau

SEQ ID NO: 281453 - RNA, 22 nt, Human
ugcuuuauucaggguuuacccc

SEQ ID NO: 281454 - RNA, 22 nt, Human
accaaggaguuugguauuuuag

SEQ ID NO: 281455 - RNA, 22 nt, Human
aacauuucauuggaagcuaugu

SEQ ID NO: 281456 - RNA, 22 nt, Human
cagcugucuggggagugcucgc

SEQ ID NO: 281457 - RNA, 22 nt, Human
uccaggcaaagugcugggcugc

SEQ ID NO: 281458 - RNA, 22 nt, Human
ugcccugggaacacagaugcca

SEQ ID NO: 281459 - RNA, 22 nt, Human
ggcugaguugagaggauuacuu

SEQ ID NO: 281460 - RNA, 22 nt, Human
cagcacaguuugcuuggcagag

SEQ ID NO: 281461 - RNA, 22 nt, Human
guacaaauguacacuuguauaa

SEQ ID NO: 281462 - RNA, 22 nt, Human
cuuuaguuauuuagacuacagu

SEQ ID NO: 281463 - RNA, 22 nt, Human
gcacagaggaagcacagacucu

SEQ ID NO: 281464 - RNA, 22 nt, Human
cauggcugaggcagaggacuga

SEQ ID NO: 281465 - RNA, 22 nt, Human
uuacagugcucuucaagacuuc

SEQ ID NO: 281466 - RNA, 22 nt, Human
ccugcaggcugcaggccaguuc

SEQ ID NO: 281467 - RNA, 21 nt, Human
cccaccccauaaggcagaacc

SEQ ID NO: 281468 - RNA, 20 nt, Human
uccaggccuuguucucagau

SEQ ID NO: 281469 - RNA, 22 nt, Human
auaaugagcuuuugaauacuga

SEQ ID NO: 281470 - RNA, 22 nt, Human
cagcaugaaaaguguugcuauc

SEQ ID NO: 281471 - RNA, 22 nt, Human
auucugggaacuuugucucuca

SEQ ID NO: 281472 - RNA, 21 nt, Human
cucugcugucuaccagcuguu

SEQ ID NO: 281473 - RNA, 22 nt, Human
cagaagcaaguagugauucuuu

SEQ ID NO: 281474 - RNA, 22 nt, Human
gguuucacaauuuagagcagug

SEQ ID NO: 281475 - RNA, 22 nt, Human
ucucagggugaggaaagaauuu

SEQ ID NO: 281476 - RNA, 22 nt, Human
uuccuggcacauaguuagugcu

SEQ ID NO: 281477 - RNA, 22 nt, Human
gcuccaggaggaugaccuuccu

SEQ ID NO: 281478 - RNA, 22 nt, Human
cagugggacaugggcacugggc

SEQ ID NO: 281479 - RNA, 22 nt, Human
gacacuguuauggugagguaag

SEQ ID NO: 281480 - RNA, 22 nt, Human
cccaguggggagcugagguuca

SEQ ID NO: 281481 - RNA, 22 nt, Human
aauguuauuucugcauaguagu

SEQ ID NO: 281482 - RNA, 22 nt, Human
cuauuguuucuaugcucugagg

SEQ ID NO: 281483 - RNA, 22 nt, Human
ucuauuuuguuuccagcucuac

SEQ ID NO: 281484 - RNA, 22 nt, Human
caaauucagaaaauugguagag

SEQ ID NO: 281485 - RNA, 22 nt, Human
auggaaugugaacaugauggca

SEQ ID NO: 281486 - RNA, 22 nt, Human
uagggaugauggagccuaugua

SEQ ID NO: 281487 - RNA, 22 nt, Human
acagugucaugucguguucccc

SEQ ID NO: 281488 - RNA, 22 nt, Human
ucugugucccuucuaauuucag

SEQ ID NO: 281489 - RNA, 22 nt, Human
ccucucagccggacugucaggc

SEQ ID NO: 281490 - RNA, 22 nt, Human
gcugguccagggccucuguggg

SEQ ID NO: 281491 - RNA, 22 nt, Human
uugaggaguacaaagcaugcuu

SEQ ID NO: 281492 - RNA, 20 nt, Human
ugucuucauuauggugcccu

SEQ ID NO: 281493 - RNA, 22 nt, Human
ccaaagcaagucacaugaucaa

SEQ ID NO: 281494 - RNA, 22 nt, Human
ugagcucuguuagggcuggaac

SEQ ID NO: 281495 - RNA, 22 nt, Human
agcccuaacucccaguaucuug

SEQ ID NO: 281496 - RNA, 22 nt, Human
cuuguaaaugcagauucugauu

SEQ ID NO: 281497 - RNA, 22 nt, Human
ugguuaaaugggaagagcaaca

SEQ ID NO: 281498 - RNA, 22 nt, Human
uggaaagacauguccuucauua

SEQ ID NO: 281499 - RNA, 21 nt, Human
aguuuugagaguggguagugu

SEQ ID NO: 281500 - RNA, 22 nt, Human
uacaaaugaaccaacuuugaug

SEQ ID NO: 281501 - RNA, 22 nt, Human
uaccugcaaaguuccuuuugcc

SEQ ID NO: 281502 - RNA, 22 nt, Human
cuugaaaugacaggagcacauc

SEQ ID NO: 281503 - RNA, 22 nt, Human
uggucaggggcuucugagcugu

SEQ ID NO: 281504 - RNA, 22 nt, Human
aggcaucuaacagagaucuuua

SEQ ID NO: 281505 - RNA, 20 nt, Human
uuugacucaggccuuuagcc

SEQ ID NO: 281506 - RNA, 22 nt, Human
uacauaauugucuuuguccuca

SEQ ID NO: 281507 - RNA, 20 nt, Human
aaaaucucccagaaacuuau

SEQ ID NO: 281508 - RNA, 22 nt, Human
cuuccucugccucccgugcuca

SEQ ID NO: 281509 - RNA, 22 nt, Human
uggcucagagcagggacucugg

SEQ ID NO: 281510 - RNA, 22 nt, Human
ucauuauuuuggacuggagugu

SEQ ID NO: 281511 - RNA, 22 nt, Human
auguuuauggagcagguauuag

SEQ ID NO: 281512 - RNA, 22 nt, Human
ucccacacuugaaacaaggcug

SEQ ID NO: 281513 - RNA, 22 nt, Human
aaagcucuuuuccaaguauuga

SEQ ID NO: 281514 - RNA, 22 nt, Human
ccucuccaguuuuaacgugacc

SEQ ID NO: 281515 - RNA, 22 nt, Human
ugguccugagaauccuguccuc

SEQ ID NO: 281516 - RNA, 22 nt, Human
uaugugucuuuaucuggcucuu

SEQ ID NO: 281517 - RNA, 22 nt, Human
ugggaccugcuccuggaaugag

SEQ ID NO: 281518 - RNA, 22 nt, Human
cuguugucuucauugucauauc

SEQ ID NO: 281519 - RNA, 22 nt, Human
aaacaauguuccuauauuagag

SEQ ID NO: 281520 - RNA, 21 nt, Human
auauuguagguaaagugcagg

SEQ ID NO: 281521 - RNA, 19 nt, Human
aggcuuggauuguggccaa

SEQ ID NO: 281522 - RNA, 22 nt, Human
uuugucaucccuuuugaaacug

SEQ ID NO: 281523 - RNA, 22 nt, Human
ucuggcagcuauccucuggcca

SEQ ID NO: 281524 - RNA, 22 nt, Human
auauauaucgaguucaugucuc

SEQ ID NO: 281525 - RNA, 23 nt, Human
ucugucuguguaugugcagaaag

SEQ ID NO: 281526 - RNA, 22 nt, Human
auguuaaauaaucccuuaaagc

SEQ ID NO: 281527 - RNA, 22 nt, Human
acagcuuuuuacuaauagauug

SEQ ID NO: 281528 - RNA, 22 nt, Human
guuugaaugcaguaugcauuuu

SEQ ID NO: 281529 - RNA, 22 nt, Human
uagaaaagaauuuuauuugaua

SEQ ID NO: 281530 - RNA, 22 nt, Human
agauuuaaauuugcuacaauuc

SEQ ID NO: 281531 - RNA, 22 nt, Human
cuacauuaaauuggcuuacuua

SEQ ID NO: 281532 - RNA, 22 nt, Human
agcaaagcaccauauggcaguu

SEQ ID NO: 281533 - RNA, 22 nt, Human
cuggcuggucaugucaugagcc

SEQ ID NO: 281534 - RNA, 22 nt, Human
uucugcuuuuagcuaaacuaua

SEQ ID NO: 281535 - RNA, 22 nt, Human
uacugucuuuuccuaaaugggu

SEQ ID NO: 281536 - RNA, 22 nt, Human
cagacaggagacuggaucaugg

SEQ ID NO: 281537 - RNA, 22 nt, Human
gcuccaggagagggaagcagau

SEQ ID NO: 281538 - RNA, 22 nt, Human
acccagccauguucaguucucu

SEQ ID NO: 281539 - RNA, 19 nt, Human
acagccuguugguggggcu

SEQ ID NO: 281540 - RNA, 22 nt, Human
uuuuauugucaaugaagacaga

SEQ ID NO: 281541 - RNA, 22 nt, Human
aaucuucacagaaaaaugucug

SEQ ID NO: 281542 - RNA, 22 nt, Human
ugucauuuauucucuuauucua

SEQ ID NO: 281543 - RNA, 22 nt, Human
agcugaaucucaggcauccuuu

SEQ ID NO: 281544 - RNA, 22 nt, Human
uauuggauagcuugugcagaau

SEQ ID NO: 281545 - RNA, 22 nt, Human
uggcaguggauaggggagcggu

SEQ ID NO: 281546 - RNA, 22 nt, Human
aucaaaguaucucaauauggua

SEQ ID NO: 281547 - RNA, 22 nt, Human
uggcaggguggcaacuuuuggu

SEQ ID NO: 281548 - RNA, 22 nt, Human
aguugacauccagagacauucu

SEQ ID NO: 281549 - RNA, 22 nt, Human
ccaggaggucugaguguggaca

SEQ ID NO: 281550 - RNA, 23 nt, Human
uucuuuauaaaucaaugggaugu

SEQ ID NO: 281551 - RNA, 22 nt, Human
guuaucaugcuucaucaucacu

SEQ ID NO: 281552 - RNA, 23 nt, Human
ccugucugugcuggguggacaca

SEQ ID NO: 281553 - RNA, 22 nt, Human
aauucaaauuacaauaguuguu

SEQ ID NO: 281554 - RNA, 22 nt, Human
auuucccuccagggaaagcuua

SEQ ID NO: 281555 - RNA, 22 nt, Human
uugucuggucaaaucacuugua

SEQ ID NO: 281556 - RNA, 22 nt, Human
uuagcucagaaaauuuaaacuu

SEQ ID NO: 281557 - RNA, 22 nt, Human
uuuucuguaagaggacuuuaau

SEQ ID NO: 281558 - RNA, 22 nt, Human
cacaggaggcaaugguaagauu

SEQ ID NO: 281559 - RNA, 23 nt, Human
uggccaggcauaaaggugggugg

SEQ ID NO: 281560 - RNA, 22 nt, Human
ugucaaaaccagcaauuuuguu

SEQ ID NO: 281561 - RNA, 22 nt, Human
aaguguauauaugacuuauaaa

SEQ ID NO: 281562 - RNA, 22 nt, Human
ggcuuuauuaagcaggguaagu

SEQ ID NO: 281563 - RNA, 22 nt, Human
ugcauggacucaucagacaaga

SEQ ID NO: 281564 - RNA, 22 nt, Human
ggcccaguguaccccaggcagu

SEQ ID NO: 281565 - RNA, 22 nt, Human
uuuuauuggagugauaccaagc

SEQ ID NO: 281566 - RNA, 22 nt, Human
uuuuagaagugccuauccuaug

SEQ ID NO: 281567 - RNA, 22 nt, Human
gcuuccagcaaacacuggcugc

SEQ ID NO: 281568 - RNA, 21 nt, Human
acaugucuggucauuuuuagc

SEQ ID NO: 281569 - RNA, 22 nt, Human
ccaggcaggcuagaauguaaau

SEQ ID NO: 281570 - RNA, 22 nt, Human
cagaggcagccgggggagaacg

SEQ ID NO: 281571 - RNA, 22 nt, Human
auucuucaccugagucagucua

SEQ ID NO: 281572 - RNA, 22 nt, Human
acagauuuaggacuguagcgau

SEQ ID NO: 281573 - RNA, 22 nt, Human
cuccuggcaguuccccuuguca

SEQ ID NO: 281574 - RNA, 21 nt, Human
ucuuucugaaaucucagucug

SEQ ID NO: 281575 - RNA, 22 nt, Human
aguaggcagaaguggcauucgg

SEQ ID NO: 281576 - RNA, 23 nt, Human
gucuuuauaguggggcacuuugu

SEQ ID NO: 281577 - RNA, 22 nt, Human
ccagguggugccucuguucgca

SEQ ID NO: 281578 - RNA, 22 nt, Human
uccugugccaucucuagagacu

SEQ ID NO: 281579 - RNA, 22 nt, Human
cucuccacucagcgucaugucc

SEQ ID NO: 281580 - RNA, 22 nt, Human
ugacccauuaaccacuuucccu

SEQ ID NO: 281581 - RNA, 22 nt, Human
aaugucucaccguaaauguaac

SEQ ID NO: 281582 - RNA, 22 nt, Human
gcaugugucaucugccuuucgu

SEQ ID NO: 281583 - RNA, 22 nt, Human
uauugagaacccucaggaggca

SEQ ID NO: 281584 - RNA, 22 nt, Human
uguuccuguuuaaugugcucau

SEQ ID NO: 281585 - RNA, 22 nt, Human
agggaccuugauggguuuggga

SEQ ID NO: 281586 - RNA, 22 nt, Human
cucuggccuggggccugcuccc

SEQ ID NO: 281587 - RNA, 22 nt, Human
cccagcuugcaaauggguugcu

SEQ ID NO: 281588 - RNA, 22 nt, Human
acauguaaaagauaaauuaaca

SEQ ID NO: 281589 - RNA, 22 nt, Human
cucuuaaagaauguuccagcug

SEQ ID NO: 281590 - RNA, 22 nt, Human
uuaugauuuagaaagauucacu

SEQ ID NO: 281591 - RNA, 22 nt, Human
uauugcuggaaaauggugugau

SEQ ID NO: 281592 - RNA, 22 nt, Human
caguucuuuguggggaguucuc

SEQ ID NO: 281593 - RNA, 22 nt, Human
acuucuaugcacagagcuugga

SEQ ID NO: 281594 - RNA, 22 nt, Human
ccugccagugccucccacuggu

SEQ ID NO: 281595 - RNA, 22 nt, Human
auugcuugaauuaccauguaau

SEQ ID NO: 281596 - RNA, 22 nt, Human
ucccacaggagccugaguccca

SEQ ID NO: 281597 - RNA, 22 nt, Human
uuuccuaagguagugauaauuu

SEQ ID NO: 281598 - RNA, 22 nt, Human
uuccuaaucacgaacauuauuu

SEQ ID NO: 281599 - RNA, 22 nt, Human
cagggcaguuugugccuaugag

SEQ ID NO: 281600 - RNA, 22 nt, Human
agagccagcauuugacacuggc

SEQ ID NO: 281601 - RNA, 22 nt, Human
agcccugauuaaccuuggcuuu

SEQ ID NO: 281602 - RNA, 21 nt, Human
aaauuucugcaagccucaacu

SEQ ID NO: 281603 - RNA, 22 nt, Human
uuccucucaacaugccugccgg

SEQ ID NO: 281604 - RNA, 22 nt, Human
gagccugaugaaacaggcagac

SEQ ID NO: 281605 - RNA, 22 nt, Human
uuguacaaguuuugagcuuaag

SEQ ID NO: 281606 - RNA, 22 nt, Human
gccaaaucuugcacacucuugu

SEQ ID NO: 281607 - RNA, 22 nt, Human
auuauauaggacuugcccuucc

SEQ ID NO: 281608 - RNA, 22 nt, Human
guuauucuaccacuauguacag

SEQ ID NO: 281609 - RNA, 22 nt, Human
auccucaguguuucugacaucu

SEQ ID NO: 281610 - RNA, 22 nt, Human
uguacauagaaaggauacagcu

SEQ ID NO: 281611 - RNA, 22 nt, Human
cuucuucaucuguaaaacuugg

SEQ ID NO: 281612 - RNA, 22 nt, Human
uccuggcaaagcaaguuaugaa

SEQ ID NO: 281613 - RNA, 22 nt, Human
cucuuuccaggguaccccaggu

SEQ ID NO: 281614 - RNA, 20 nt, Human
agcucuuacuuugcagcagc

SEQ ID NO: 281615 - RNA, 22 nt, Human
cucccagguugauucuuucccu

SEQ ID NO: 281616 - RNA, 22 nt, Human
caaaagcaguucuaucugaguu

SEQ ID NO: 281617 - RNA, 22 nt, Human
acagguguacaaugcaugacag

SEQ ID NO: 281618 - RNA, 22 nt, Human
cccagagguuccuuagggacca

SEQ ID NO: 281619 - RNA, 22 nt, Human
auuuguuaauuaugaggcauac

SEQ ID NO: 281620 - RNA, 22 nt, Human
gauuuucauuauagcuaguuuc

SEQ ID NO: 281621 - RNA, 22 nt, Human
auugucagugggauuugucaac

SEQ ID NO: 281622 - RNA, 22 nt, Human
gugggugucaguaucuuuaacg

SEQ ID NO: 281623 - RNA, 22 nt, Human
caauuucuaacauuccauggau

SEQ ID NO: 281624 - RNA, 22 nt, Human
auguucuauaucauuauuguga

SEQ ID NO: 281625 - RNA, 22 nt, Human
agucucagaaaagaagcaugga

SEQ ID NO: 281626 - RNA, 22 nt, Human
agaaucagaugaagacuccugc

SEQ ID NO: 281627 - RNA, 22 nt, Human
gcagccuuuggaauuagagacu

SEQ ID NO: 281628 - RNA, 22 nt, Human
ccccagggaagcuuugcuuacu

SEQ ID NO: 281629 - RNA, 18 nt, Human
aggcuugggcccagcagc

SEQ ID NO: 281630 - RNA, 22 nt, Human
agagccagguguagucucggag

SEQ ID NO: 281631 - RNA, 22 nt, Human
aaaacaggugucagcaaacuau

SEQ ID NO: 281632 - RNA, 22 nt, Human
auugggaugccggcugauaaga

SEQ ID NO: 281633 - RNA, 22 nt, Human
uguuaaauguauuauguguucu

SEQ ID NO: 281634 - RNA, 22 nt, Human
agucccaacagcuuacaaggaa

SEQ ID NO: 281635 - RNA, 22 nt, Human
auagcacaauauuaccuuuaug

SEQ ID NO: 281636 - RNA, 21 nt, Human
gccuggcuucacaggcacuga

SEQ ID NO: 281637 - RNA, 22 nt, Human
agcugaaauuuuacugaguaua

SEQ ID NO: 281638 - RNA, 22 nt, Human
agggccagcacuccuggcagga

SEQ ID NO: 281639 - RNA, 22 nt, Human
acaguuaucuuugaaauagaga

SEQ ID NO: 281640 - RNA, 22 nt, Human
cucccuucaggagaggcucaca

SEQ ID NO: 281641 - RNA, 22 nt, Human
auauuucuggggguguguuucu

SEQ ID NO: 281642 - RNA, 22 nt, Human
ccaaggcuccucagcuggucuu

SEQ ID NO: 281643 - RNA, 22 nt, Human
uccugugaagaauagcacucaa

SEQ ID NO: 281644 - RNA, 22 nt, Human
cacaugacacuauuuuguucua

SEQ ID NO: 281645 - RNA, 22 nt, Human
ggagcccugcugacaugggugu

SEQ ID NO: 281646 - RNA, 22 nt, Human
uucaugaaaguguaucuugugg

SEQ ID NO: 281647 - RNA, 22 nt, Human
uucagauguggcuuugucaggc

SEQ ID NO: 281648 - RNA, 22 nt, Human
gagaaagauuguccuucagggg

SEQ ID NO: 281649 - RNA, 22 nt, Human
uugcacuccagcccgagcaaca

SEQ ID NO: 281650 - RNA, 22 nt, Human
aagcaaagugcuuugccuccag

SEQ ID NO: 281651 - RNA, 22 nt, Human
uauuccaagcacagcaacccag

SEQ ID NO: 281652 - RNA, 22 nt, Human
aacaguuugccugaaauguauu

SEQ ID NO: 281653 - RNA, 22 nt, Human
agguagggaagaaggcaugaaa

SEQ ID NO: 281654 - RNA, 22 nt, Human
agagccagcaacucuagcccug

SEQ ID NO: 281655 - RNA, 23 nt, Human
ucagggacaugaugugucauauc

SEQ ID NO: 281656 - RNA, 19 nt, Human
auuuuucuuccucugugca

SEQ ID NO: 281657 - RNA, 22 nt, Human
guauuaggaggaacacaggccu

SEQ ID NO: 281658 - RNA, 22 nt, Human
auaguacaagggaagagugaag

SEQ ID NO: 281659 - RNA, 22 nt, Human
ucuucacaggagccugccugcc

SEQ ID NO: 281660 - RNA, 22 nt, Human
caggacaauggucauacuggau

SEQ ID NO: 281661 - RNA, 21 nt, Human
aaauacagaaacuuguuuuca

SEQ ID NO: 281662 - RNA, 22 nt, Human
ccagggcaaaugagaucauagc

SEQ ID NO: 281663 - RNA, 22 nt, Human
acagggcagugucuugaaaaau

SEQ ID NO: 281664 - RNA, 22 nt, Human
auguuuuacccuuugcacaaac

SEQ ID NO: 281665 - RNA, 22 nt, Human
ugugaaaagcaggcuacuuucu

SEQ ID NO: 281666 - RNA, 22 nt, Human
ucuggcaguggaugagggcagc

SEQ ID NO: 281667 - RNA, 22 nt, Human
acauucuucuugugaauuuacu

SEQ ID NO: 281668 - RNA, 22 nt, Human
aggaccauccuaagguaggcaa

SEQ ID NO: 281669 - RNA, 22 nt, Human
cuguuguauuauucaauauuau

SEQ ID NO: 281670 - RNA, 22 nt, Human
gccacagguacuaugggagaga

SEQ ID NO: 281671 - RNA, 22 nt, Human
cgucuuccucuuacgaugcgcu

SEQ ID NO: 281672 - RNA, 22 nt, Human
ucuggaggcaggcugccaggau

SEQ ID NO: 281673 - RNA, 22 nt, Human
ccuggcucuagaggccacuccu

SEQ ID NO: 281674 - RNA, 17 nt, Human
uugggagagaaagguau

SEQ ID NO: 281675 - RNA, 22 nt, Human
ucccagagcaguacuccaggag

SEQ ID NO: 281676 - RNA, 22 nt, Human
aauugcuuugaagaagggagcg

SEQ ID NO: 281677 - RNA, 22 nt, Human
ugguaucguguuggcacucagu

SEQ ID NO: 281678 - RNA, 21 nt, Human
auggugagauacugggugugg

SEQ ID NO: 281679 - RNA, 22 nt, Human
uccuuucccuuuccauccuggc

SEQ ID NO: 281680 - RNA, 22 nt, Human
ugcagggcuccuggcuccaauc

SEQ ID NO: 281681 - RNA, 22 nt, Human
ucguuaaaugcuaaaacugaca

SEQ ID NO: 281682 - RNA, 22 nt, Human
cuggcuugcagcucaucauaaa

SEQ ID NO: 281683 - RNA, 22 nt, Human
uggcaaagaccgcaauuacuuu

SEQ ID NO: 281684 - RNA, 22 nt, Human
acuuagauaacaaaccuguggu

SEQ ID NO: 281685 - RNA, 22 nt, Human
uucaguaugauuccuccaguag

SEQ ID NO: 281686 - RNA, 22 nt, Human
uguccuuuacugauugcuucug

SEQ ID NO: 281687 - RNA, 22 nt, Human
aggcagggcucauuucuuaggc

SEQ ID NO: 281688 - RNA, 22 nt, Human
acugucuuguguuaaagaacca

SEQ ID NO: 281689 - RNA, 22 nt, Human
auuugggaaugugcauuauacu

SEQ ID NO: 281690 - RNA, 22 nt, Human
ccuuccaagugcugcuuuuucc

SEQ ID NO: 281691 - RNA, 22 nt, Human
acagucuucaugcuagaauggc

SEQ ID NO: 281692 - RNA, 22 nt, Human
augucugcggcccaggccaggg

SEQ ID NO: 281693 - RNA, 22 nt, Human
ugggaccugaagcagguuggca

SEQ ID NO: 281694 - RNA, 22 nt, Human
uucuauuaauauguuaauucug

SEQ ID NO: 281695 - RNA, 21 nt, Human
cuguccaguaauuccuggcac

SEQ ID NO: 281696 - RNA, 19 nt, Human
ucucaauucuccccacugc

SEQ ID NO: 281697 - RNA, 22 nt, Human
ugguggcuucugaggauggcga

SEQ ID NO: 281698 - RNA, 22 nt, Human
ccuucuccccucugcagggugu

SEQ ID NO: 281699 - RNA, 22 nt, Human
ggacagguucagcaguuuauaa

SEQ ID NO: 281700 - RNA, 22 nt, Human
agaaaugucaggaaagaagucc

SEQ ID NO: 281701 - RNA, 22 nt, Human
uaugaaauugccauuuuuaugg

SEQ ID NO: 281702 - RNA, 22 nt, Human
cugaggagaaaugggaugguuc

SEQ ID NO: 281703 - RNA, 23 nt, Human
cuccccaguguccucaugcaucu

SEQ ID NO: 281704 - RNA, 22 nt, Human
agacuucuuugugagcauuuuc

SEQ ID NO: 281705 - RNA, 19 nt, Human
ucuugcagccccagcaggc

SEQ ID NO: 281706 - RNA, 22 nt, Human
ggcucacgcaauuaucccggcc

SEQ ID NO: 281707 - RNA, 22 nt, Human
cagugagguagacagcuuuuuc

SEQ ID NO: 281708 - RNA, 22 nt, Human
ucugggaaguccucugucaugc

SEQ ID NO: 281709 - RNA, 22 nt, Human
ugguucagauauggagcuggga

SEQ ID NO: 281710 - RNA, 22 nt, Human
aacaggcaauuuaggacucuuu

SEQ ID NO: 281711 - RNA, 22 nt, Human
uggguggagaaguggaccugcu

SEQ ID NO: 281712 - RNA, 22 nt, Human
ucuucauuuuacaggcagaccu

SEQ ID NO: 281713 - RNA, 22 nt, Human
uauuaaauauaucuguuaguug

SEQ ID NO: 281714 - RNA, 22 nt, Human
agugugagccuacaggccaaag

SEQ ID NO: 281715 - RNA, 22 nt, Human
ggccuugacaguuaagagaccu

SEQ ID NO: 281716 - RNA, 22 nt, Human
uggcagguagucagaggcgaca

SEQ ID NO: 281717 - RNA, 22 nt, Human
ucuguucaugucuuuuuaagug

SEQ ID NO: 281718 - RNA, 22 nt, Human
ggcaggugacggggaugaguau

SEQ ID NO: 281719 - RNA, 22 nt, Human
gccgggaccaaggccacggagc

SEQ ID NO: 281720 - RNA, 19 nt, Human
uuucuguuugcuucugguu

SEQ ID NO: 281721 - RNA, 22 nt, Human
gggaacuucagaaagucgcugc

SEQ ID NO: 281722 - RNA, 22 nt, Human
aggccuuaccauagcuguagca

SEQ ID NO: 281723 - RNA, 22 nt, Human
uuuagggaagaagcccauggcc

SEQ ID NO: 281724 - RNA, 22 nt, Human
ccuagaugggauggcggccggg

SEQ ID NO: 281725 - RNA, 22 nt, Human
agagggugaaugagauagaaaa

SEQ ID NO: 281726 - RNA, 22 nt, Human
uucacugcuacauccaggugcc

SEQ ID NO: 281727 - RNA, 22 nt, Human
uuuuugaaggcugaugugauua

SEQ ID NO: 281728 - RNA, 22 nt, Human
cccagcagccagaaugaggagc

SEQ ID NO: 281729 - RNA, 22 nt, Human
cuucucagcuuagguaugguuu

SEQ ID NO: 281730 - RNA, 22 nt, Human
cucuggaagaauacacuuagaa

SEQ ID NO: 281731 - RNA, 22 nt, Human
cugagcccucuguuuucccucu

SEQ ID NO: 281732 - RNA, 22 nt, Human
guuuauaaggcccaauauuucu

SEQ ID NO: 281733 - RNA, 22 nt, Human
uaucuauuauguucuauguguc

SEQ ID NO: 281734 - RNA, 22 nt, Human
aacaugauggggaagaacaaga

SEQ ID NO: 281735 - RNA, 22 nt, Human
cagacagcaggccuggaugugu

SEQ ID NO: 281736 - RNA, 21 nt, Human
cccaggagaagaaaagaugca

SEQ ID NO: 281737 - RNA, 22 nt, Human
acagcuggcaggggggcaugaa

SEQ ID NO: 281738 - RNA, 22 nt, Human
uagggaugacgaaaggacagag

SEQ ID NO: 281739 - RNA, 22 nt, Human
uuuuacaccucagaugagcaga

SEQ ID NO: 281740 - RNA, 22 nt, Human
aagcaccugcaguugacaaaaa

SEQ ID NO: 281741 - RNA, 22 nt, Human
ucuguucaguugauguaguuuu

SEQ ID NO: 281742 - RNA, 22 nt, Human
uagcacaguucacuaugauaca

SEQ ID NO: 281743 - RNA, 22 nt, Human
ucccaaggccaggcaucuagaa

SEQ ID NO: 281744 - RNA, 22 nt, Human
agacugaauaacaagcaaauaa

SEQ ID NO: 281745 - RNA, 22 nt, Human
ugaaugauacagaauuauguag

SEQ ID NO: 281746 - RNA, 22 nt, Human
ccaaguacagauuccuccacug

SEQ ID NO: 281747 - RNA, 22 nt, Human
auuccacagcucagccucucuu

SEQ ID NO: 281748 - RNA, 22 nt, Human
auaaagauuucuuuuucucuac

SEQ ID NO: 281749 - RNA, 23 nt, Human
uggaccugaaccagugccucugu

SEQ ID NO: 281750 - RNA, 22 nt, Human
auaugauuccacuauuguaugg

SEQ ID NO: 281751 - RNA, 22 nt, Human
gcuuccagaccccagucccuca

SEQ ID NO: 281752 - RNA, 22 nt, Human
uccaggaggccucauuuccugu

SEQ ID NO: 281753 - RNA, 22 nt, Human
uauuccuaagucccaacuacau

SEQ ID NO: 281754 - RNA, 22 nt, Human
ggguguagacacauguucaucu

SEQ ID NO: 281755 - RNA, 22 nt, Human
ugcaugaaauauuuucuguagg

SEQ ID NO: 281756 - RNA, 22 nt, Human
cagagcacagagcuugggacaa

SEQ ID NO: 281757 - RNA, 22 nt, Human
agagccaggcucuaccuggguu

SEQ ID NO: 281758 - RNA, 22 nt, Human
uuggguuuucccuugaaacuga

SEQ ID NO: 281759 - RNA, 22 nt, Human
ggcaggugaggcaugugccugg

SEQ ID NO: 281760 - RNA, 22 nt, Human
cucugagaagaguucaaguaaa

SEQ ID NO: 281761 - RNA, 22 nt, Human
ucuggagggggaugccucaucc

SEQ ID NO: 281762 - RNA, 22 nt, Human
agcuguuuccauaaaugagaca

SEQ ID NO: 281763 - RNA, 22 nt, Human
aauuagggagccaucauaaggu

SEQ ID NO: 281764 - RNA, 22 nt, Human
caucuguugcuuccuaacaagu

SEQ ID NO: 281765 - RNA, 22 nt, Human
auuagaaugcaggguucauugu

SEQ ID NO: 281766 - RNA, 22 nt, Human
uggcuucauucuccugugaaua

SEQ ID NO: 281767 - RNA, 19 nt, Human
ugacagguuuuauguguuu

SEQ ID NO: 281768 - RNA, 22 nt, Human
cugcaggggaccaaagucugac

SEQ ID NO: 281769 - RNA, 22 nt, Human
uuguguccauuugagucaugug

SEQ ID NO: 281770 - RNA, 22 nt, Human
ucugaaauuguuaguaaaaaug

SEQ ID NO: 281771 - RNA, 22 nt, Human
aaacuacaucucauggaugagg

SEQ ID NO: 281772 - RNA, 22 nt, Human
guguguccucauaagauggagg

SEQ ID NO: 281773 - RNA, 22 nt, Human
uucacauuugcccuuaugugug

SEQ ID NO: 281774 - RNA, 22 nt, Human
cugauugagaaggaaggggauc

SEQ ID NO: 281775 - RNA, 22 nt, Human
acaauaguaagguauauuguca

SEQ ID NO: 281776 - RNA, 22 nt, Human
auaaguaggaaaauuugaauau

SEQ ID NO: 281777 - RNA, 22 nt, Human
gcugggugauucauuuccauaa

SEQ ID NO: 281778 - RNA, 22 nt, Human
aauguugaggauaucagaaaau

SEQ ID NO: 281779 - RNA, 22 nt, Human
aggcaguuuaggcagcgauuua

SEQ ID NO: 281780 - RNA, 22 nt, Human
agcauuccacacugaagucugc

SEQ ID NO: 281781 - RNA, 22 nt, Human
gaugccuguggugagcacacau

SEQ ID NO: 281782 - RNA, 22 nt, Human
gagguucugggggucugccugg

SEQ ID NO: 281783 - RNA, 22 nt, Human
acuagaaauguauugguagcug

SEQ ID NO: 281784 - RNA, 22 nt, Human
ggcaggugugagcuguaaagga

SEQ ID NO: 281785 - RNA, 22 nt, Human
ugaggaauggcuuaauguggga

SEQ ID NO: 281786 - RNA, 22 nt, Human
acuaggaaggcauaugggcaga

SEQ ID NO: 281787 - RNA, 22 nt, Human
cccugccuuguuggagccuaug

SEQ ID NO: 281788 - RNA, 20 nt, Human
ucuggccccuuccuguccug

SEQ ID NO: 281789 - RNA, 22 nt, Human
ccuggcucugcgugcagcuccg

SEQ ID NO: 281790 - RNA, 22 nt, Human
cuccagugcacccagaggauuu

SEQ ID NO: 281791 - RNA, 22 nt, Human
ccugugggagcccaggcagaua

SEQ ID NO: 281792 - RNA, 22 nt, Human
ucuuccuucgcccuugcuguuu

SEQ ID NO: 281793 - RNA, 22 nt, Human
ucccagaggaaauggcagcuga

SEQ ID NO: 281794 - RNA, 22 nt, Human
ccugaggucagccauucuugcc

SEQ ID NO: 281795 - RNA, 22 nt, Human
ggccugagggugggcucucagu

SEQ ID NO: 281796 - RNA, 22 nt, Human
agccuucaguaaauccacugug

SEQ ID NO: 281797 - RNA, 22 nt, Human
auguauacgugcaggucacagg

SEQ ID NO: 281798 - RNA, 22 nt, Human
uuucuacagcuggugcaacuuu

SEQ ID NO: 281799 - RNA, 20 nt, Human
ggcucuggaaucuggugggc

SEQ ID NO: 281800 - RNA, 22 nt, Human
acaauacuauuuucaguauccu

SEQ ID NO: 281801 - RNA, 22 nt, Human
ugcugccaucucaacugcccuu

SEQ ID NO: 281802 - RNA, 22 nt, Human
acauguuugccugcaggcuuag

SEQ ID NO: 281803 - RNA, 22 nt, Human
cccaguggcccagcauguggug

SEQ ID NO: 281804 - RNA, 22 nt, Human
uggaaugagcuggcuaauaacc

SEQ ID NO: 281805 - RNA, 22 nt, Human
ucuuaaaccacaaaauucagag

SEQ ID NO: 281806 - RNA, 22 nt, Human
auauuacacacgguaucacggg

SEQ ID NO: 281807 - RNA, 20 nt, Human
ucccucccuccagcucuggg

SEQ ID NO: 281808 - RNA, 22 nt, Human
ucucuucacauuccuggcaaac

SEQ ID NO: 281809 - RNA, 22 nt, Human
aguggcagaucucuggucugga

SEQ ID NO: 281810 - RNA, 22 nt, Human
uaauaaaugaaagugcuggcau

SEQ ID NO: 281811 - RNA, 22 nt, Human
uucuuugcccuuaaugaaauaa

SEQ ID NO: 281812 - RNA, 22 nt, Human
ccagagagagaggucaauggca

SEQ ID NO: 281813 - RNA, 22 nt, Human
ccagcauggcaccugagaugag

SEQ ID NO: 281814 - RNA, 22 nt, Human
acagcuggaguguuggugaggu

SEQ ID NO: 281815 - RNA, 22 nt, Human
aagaaauggcuucaucugagua

SEQ ID NO: 281816 - RNA, 22 nt, Human
aaaguauuugugauuuuuacca

SEQ ID NO: 281817 - RNA, 22 nt, Human
ucuggaggccauagggaaggau

SEQ ID NO: 281818 - RNA, 22 nt, Human
acagguggggcacuuggagccu

SEQ ID NO: 281819 - RNA, 22 nt, Human
uccuuccugcucuaacauucag

SEQ ID NO: 281820 - RNA, 22 nt, Human
cuauuagguuggugcaaaagua

SEQ ID NO: 281821 - RNA, 22 nt, Human
auugcagauucuucucagggag

SEQ ID NO: 281822 - RNA, 22 nt, Human
ggggagaauuaccaaaagcgcu

SEQ ID NO: 281823 - RNA, 20 nt, Human
uugagcuuuuaguacagaca

SEQ ID NO: 281824 - RNA, 22 nt, Human
aggcccugagaaaaucccugca

SEQ ID NO: 281825 - RNA, 22 nt, Human
acauucccuuggcuugaagcag

SEQ ID NO: 281826 - RNA, 23 nt, Human
gguuccaggaacacagccugaug

SEQ ID NO: 281827 - RNA, 22 nt, Human
gggugacauuaggaagauagac

SEQ ID NO: 281828 - RNA, 22 nt, Human
uuuguguuguuuuaagccacua

SEQ ID NO: 281829 - RNA, 22 nt, Human
uagguucagagaacugaaaaua

SEQ ID NO: 281830 - RNA, 22 nt, Human
ucccucucuggcuggggugcgg

SEQ ID NO: 281831 - RNA, 22 nt, Human
cauucccuuggggaguucaugc

SEQ ID NO: 281832 - RNA, 22 nt, Human
ggccacugcccuggcuacaccg

SEQ ID NO: 281833 - RNA, 22 nt, Human
ugcuggagcccaggcggccuuu

SEQ ID NO: 281834 - RNA, 22 nt, Human
cagguacauucguagacccauu

SEQ ID NO: 281835 - RNA, 23 nt, Human
uugagcucaguagcucugcuggu

SEQ ID NO: 281836 - RNA, 22 nt, Human
ucugaacauccagcaaugcaca

SEQ ID NO: 281837 - RNA, 20 nt, Human
cccagccccuaccuguugcc

SEQ ID NO: 281838 - RNA, 17 nt, Human
uccuggcaguccccugg

SEQ ID NO: 281839 - RNA, 22 nt, Human
ugguacaaucacagcucacugu

SEQ ID NO: 281840 - RNA, 22 nt, Human
cugaggagagguggccuguguu

SEQ ID NO: 281841 - RNA, 22 nt, Human
auuguaaauagugccacaauaa

SEQ ID NO: 281842 - RNA, 22 nt, Human
ucugaaaugcaggcaauuugcu

SEQ ID NO: 281843 - RNA, 22 nt, Human
ugcaggaauauugaugaacuua

SEQ ID NO: 281844 - RNA, 22 nt, Human
uaugaaggauacaccucugauu

SEQ ID NO: 281845 - RNA, 22 nt, Human
uuuaauguauucuuuggaacca

SEQ ID NO: 281846 - RNA, 19 nt, Human
aaagcagaggagcaucuga

SEQ ID NO: 281847 - RNA, 22 nt, Human
uuacuuuguucucaagauaugu

SEQ ID NO: 281848 - RNA, 22 nt, Human
agugucagccugggcaaggaac

SEQ ID NO: 281849 - RNA, 22 nt, Human
agagcauccaucggccaggacc

SEQ ID NO: 281850 - RNA, 22 nt, Human
ucuuagcacagcuauauaaguu

SEQ ID NO: 281851 - RNA, 22 nt, Human
cacacacaguuuuguauucugu

SEQ ID NO: 281852 - RNA, 22 nt, Human
uucacacugucccggguggaaa

SEQ ID NO: 281853 - RNA, 22 nt, Human
uuggagguuugaaaauaugugu

SEQ ID NO: 281854 - RNA, 18 nt, Human
cuguucuagaacuccugu

SEQ ID NO: 281855 - RNA, 22 nt, Human
aagggcagagggaaucccacau

SEQ ID NO: 281856 - RNA, 20 nt, Human
auauaauaaauuuugguuac

SEQ ID NO: 281857 - RNA, 22 nt, Human
cuucucagcaugguuacuguga

SEQ ID NO: 281858 - RNA, 22 nt, Human
aggcuucccagcugagcucagc

SEQ ID NO: 281859 - RNA, 22 nt, Human
cccaggcagugcugaucccuca

SEQ ID NO: 281860 - RNA, 22 nt, Human
uugcuuuauauucaagagagga

SEQ ID NO: 281861 - RNA, 22 nt, Human
uccaugcaaacaguggcuagcu

SEQ ID NO: 281862 - RNA, 22 nt, Human
ccaggagagcauugcacagagg

SEQ ID NO: 281863 - RNA, 22 nt, Human
gcucaaagguugauagcugugc

SEQ ID NO: 281864 - RNA, 22 nt, Human
augacugcucugggcucccaug

SEQ ID NO: 281865 - RNA, 22 nt, Human
aaguuucugauauuguuaaagc

SEQ ID NO: 281866 - RNA, 22 nt, Human
uuugcaguguucaucaguauuu

SEQ ID NO: 281867 - RNA, 22 nt, Human
uuugacaaaggaaaaaugcaca

SEQ ID NO: 281868 - RNA, 22 nt, Human
ccugggugaugugcugcccucg

SEQ ID NO: 281869 - RNA, 22 nt, Human
guucucccuguccccugagcuu

SEQ ID NO: 281870 - RNA, 22 nt, Human
caguguggagggagagagccug

SEQ ID NO: 281871 - RNA, 22 nt, Human
uaugugucccugcuacucaaca

SEQ ID NO: 281872 - RNA, 22 nt, Human
ggauggcagacagugaguggcu

SEQ ID NO: 281873 - RNA, 22 nt, Human
uaaauuagagccagguaaguuu

SEQ ID NO: 281874 - RNA, 22 nt, Human
gggagggacacaaagaguuccc

SEQ ID NO: 281875 - RNA, 22 nt, Human
ggucuggaagcgcaguaggcug

SEQ ID NO: 281876 - RNA, 22 nt, Human
uauugguaucugagacagaguu

SEQ ID NO: 281877 - RNA, 22 nt, Human
auucacauuuagacaucaggua

SEQ ID NO: 281878 - RNA, 22 nt, Human
ugcuccugcugcaugcaucucc

SEQ ID NO: 281879 - RNA, 23 nt, Human
cucccuggaguuucuggaagaug

SEQ ID NO: 281880 - RNA, 22 nt, Human
ucuggguguagggccuggcaac

SEQ ID NO: 281881 - RNA, 22 nt, Human
ccuggcacaagagcagcauugg

SEQ ID NO: 281882 - RNA, 22 nt, Human
ggugggugcagggggcuucuua

SEQ ID NO: 281883 - RNA, 22 nt, Human
uuauuaggaacucaggauuuuu

SEQ ID NO: 281884 - RNA, 22 nt, Human
uucaauuuagugauguuguugg

SEQ ID NO: 281885 - RNA, 22 nt, Human
uuaaauuagucaagcuucucug

SEQ ID NO: 281886 - RNA, 22 nt, Human
aucuucaaggaaaaaauacagu

SEQ ID NO: 281887 - RNA, 22 nt, Human
uauuaagauacguaguuguaaa

SEQ ID NO: 281888 - RNA, 22 nt, Human
ggagaaggugcuggucacugug

SEQ ID NO: 281889 - RNA, 22 nt, Human
ggagggaagugaguucucagcu

SEQ ID NO: 281890 - RNA, 21 nt, Human
uggccaaaaccauauuauuaa

SEQ ID NO: 281891 - RNA, 22 nt, Human
agauugaauauagagauucuug

SEQ ID NO: 281892 - RNA, 22 nt, Human
uuuuguguugccauguuaagca

SEQ ID NO: 281893 - RNA, 22 nt, Human
ucaaaguaagaauuuauuacaa

SEQ ID NO: 281894 - RNA, 22 nt, Human
acaacacagcaaaaccccaucu

SEQ ID NO: 281895 - RNA, 21 nt, Human
ugaagggguggcagugugcuu

SEQ ID NO: 281896 - RNA, 22 nt, Human
uucaugaaacuuaacuguuggg

SEQ ID NO: 281897 - RNA, 22 nt, Human
cuccuggccacguucuugcugg

SEQ ID NO: 281898 - RNA, 22 nt, Human
gggcccuggccgaaucccucug

SEQ ID NO: 281899 - RNA, 22 nt, Human
auagacaaucccccauccuacc

SEQ ID NO: 281900 - RNA, 22 nt, Human
uuccuggcugaucuaccaaagu

SEQ ID NO: 281901 - RNA, 22 nt, Human
agagugauucuaguuagggaau

SEQ ID NO: 281902 - RNA, 22 nt, Human
ucuaauccuugcuaccugggug

SEQ ID NO: 281903 - RNA, 22 nt, Human
agauaaguacuguuauuauugc

SEQ ID NO: 281904 - RNA, 21 nt, Human
auacacauacacauaaaugug

SEQ ID NO: 281905 - RNA, 21 nt, Human
uuuucuggaguaugucuccuc

SEQ ID NO: 281906 - RNA, 22 nt, Human
cugggaggcagucucucuagaa

SEQ ID NO: 281907 - RNA, 22 nt, Human
uuuacaggguucaagaaugaaa

SEQ ID NO: 281908 - RNA, 22 nt, Human
ccagggcauguaacuaauggug

SEQ ID NO: 281909 - RNA, 22 nt, Human
uccuguuuccaauuuguugggu

SEQ ID NO: 281910 - RNA, 22 nt, Human
ucauuguauacuuuauuuauga

SEQ ID NO: 281911 - RNA, 22 nt, Human
uugcuuuaaugagauuuugcca

SEQ ID NO: 281912 - RNA, 18 nt, Human
ucagagagcagcuuuauu

SEQ ID NO: 281913 - RNA, 22 nt, Human
gugcccaguaaaugaaagcuuu

SEQ ID NO: 281914 - RNA, 22 nt, Human
uuccuggggggauagauuucac

SEQ ID NO: 281915 - RNA, 22 nt, Human
ggcaggugcuaagagagguaaa

SEQ ID NO: 281916 - RNA, 22 nt, Human
aauauugagaaccagcauguuu

SEQ ID NO: 281917 - RNA, 22 nt, Human
acuuucauuugugaagacugua

SEQ ID NO: 281918 - RNA, 22 nt, Human
gcugccaguguggcaugaugca

SEQ ID NO: 281919 - RNA, 22 nt, Human
ucuggcaggaccaugaagcgua

SEQ ID NO: 281920 - RNA, 22 nt, Human
uuugcaauuugugcugcaaaug

SEQ ID NO: 281921 - RNA, 21 nt, Human
ccaagagcaaugcuaaggaga

SEQ ID NO: 281922 - RNA, 22 nt, Human
ugauaacucucaguuucucaug

SEQ ID NO: 281923 - RNA, 22 nt, Human
gcauccaggacuauaugaugau

SEQ ID NO: 281924 - RNA, 22 nt, Human
acuuagauuccugguaccuccg

SEQ ID NO: 281925 - RNA, 22 nt, Human
ugauucacagacuucacaaggc

SEQ ID NO: 281926 - RNA, 22 nt, Human
uuuguguuuaugaaguuauucu

SEQ ID NO: 281927 - RNA, 22 nt, Human
gacauaauccuccucaccuacu

SEQ ID NO: 281928 - RNA, 22 nt, Human
uucuugccugcccugugucgua

SEQ ID NO: 281929 - RNA, 22 nt, Human
ugcaggugguacuucuuuuucu

SEQ ID NO: 281930 - RNA, 22 nt, Human
augcaggaguuggaaaaaauga

SEQ ID NO: 281931 - RNA, 20 nt, Human
agaucuuuucuauagaagug

SEQ ID NO: 281932 - RNA, 22 nt, Human
cgcagguguguuuucaggacua

SEQ ID NO: 281933 - RNA, 22 nt, Human
acugaagaacgcaucagugguu

SEQ ID NO: 281934 - RNA, 22 nt, Human
guuauuaguaagacucgcacau

SEQ ID NO: 281935 - RNA, 22 nt, Human
gucuuuauuacaaauccuuuuc

SEQ ID NO: 281936 - RNA, 22 nt, Human
ugggaccagauaaagggagguc

SEQ ID NO: 281937 - RNA, 22 nt, Human
gggucugggcaggcgcuuccuc

SEQ ID NO: 281938 - RNA, 22 nt, Human
acuacaguacuauaucuauagg

SEQ ID NO: 281939 - RNA, 22 nt, Human
agugugagugcucauguccauc

SEQ ID NO: 281940 - RNA, 22 nt, Human
ggcaggcauuagagauucccag

SEQ ID NO: 281941 - RNA, 22 nt, Human
uaguucuagccagugaaaugua

SEQ ID NO: 281942 - RNA, 23 nt, Human
gaggccuggcccugccacaucuc

SEQ ID NO: 281943 - RNA, 22 nt, Human
uuuccaugaucguuauagaacu

SEQ ID NO: 281944 - RNA, 22 nt, Human
ggagggagcauccccuugcuga

SEQ ID NO: 281945 - RNA, 22 nt, Human
ucugucauguuuccauuacaug

SEQ ID NO: 281946 - RNA, 22 nt, Human
gcuccuggcuucacugacauca

SEQ ID NO: 281947 - RNA, 22 nt, Human
ccagccacgaagcucccuucau

SEQ ID NO: 281948 - RNA, 22 nt, Human
ugagcccuggcucuuucacuua

SEQ ID NO: 281949 - RNA, 22 nt, Human
uaggcugcucaccaggcucaga

SEQ ID NO: 281950 - RNA, 22 nt, Human
uuucuucagagagagcuuuccc

SEQ ID NO: 281951 - RNA, 22 nt, Human
gccuggcaaggcccuguugacu

SEQ ID NO: 281952 - RNA, 22 nt, Human
acuagaaagaaguuuuuugaga

SEQ ID NO: 281953 - RNA, 22 nt, Human
agggccagagucuguguagaua

SEQ ID NO: 281954 - RNA, 22 nt, Human
cagugcaggcugggggcccugc

SEQ ID NO: 281955 - RNA, 21 nt, Human
agguggucugcagcagcugaa

SEQ ID NO: 281956 - RNA, 22 nt, Human
auaguacagagggcuacugguu

SEQ ID NO: 281957 - RNA, 22 nt, Human
ucaagcagcagaucaagagcua

SEQ ID NO: 281958 - RNA, 22 nt, Human
cugggugaguugaugaaggaga

SEQ ID NO: 281959 - RNA, 22 nt, Human
uagggauggcagcauguagcuu

SEQ ID NO: 281960 - RNA, 22 nt, Human
augaggaggccaguaagagccu

SEQ ID NO: 281961 - RNA, 22 nt, Human
uacaguuacuguuauaugugcu

SEQ ID NO: 281962 - RNA, 22 nt, Human
augaagggugucccugugagca

SEQ ID NO: 281963 - RNA, 22 nt, Human
uguguaaauuuauuuacauaaa

SEQ ID NO: 281964 - RNA, 22 nt, Human
aagugcuguuucugaugaaugc

SEQ ID NO: 281965 - RNA, 21 nt, Human
uauuuauuaauuuguaaggcu

SEQ ID NO: 281966 - RNA, 22 nt, Human
uucacauuucucugcuguuuga

SEQ ID NO: 281967 - RNA, 23 nt, Human
cuucuggcucuauaucagaauuc

SEQ ID NO: 281968 - RNA, 22 nt, Human
acaugauuuuuaaagagauaau

SEQ ID NO: 281969 - RNA, 23 nt, Human
agcucugaaauagggaaagagga

SEQ ID NO: 281970 - RNA, 22 nt, Human
uaucagauuuagaggagucaua

SEQ ID NO: 281971 - RNA, 22 nt, Human
aaagcagaggugauaugacuua

SEQ ID NO: 281972 - RNA, 23 nt, Human
auuuuuugucuuuguaacuagau

SEQ ID NO: 281973 - RNA, 22 nt, Human
uuuuuauaccaccucucacuua

SEQ ID NO: 281974 - RNA, 23 nt, Human
uuccugagugcuggagagagugc

SEQ ID NO: 281975 - RNA, 22 nt, Human
auacuuuuaauuccuucugagu

SEQ ID NO: 281976 - RNA, 22 nt, Human
cuguccugaaagggagauuggg

SEQ ID NO: 281977 - RNA, 22 nt, Human
ucuuccugaaacccuguuccag

SEQ ID NO: 281978 - RNA, 22 nt, Human
cuggcucugagcccaccuccag

SEQ ID NO: 281979 - RNA, 15 nt, Human
agacagacaguggga

SEQ ID NO: 281980 - RNA, 22 nt, Human
ucuuccaagguugcacacuauc

SEQ ID NO: 281981 - RNA, 22 nt, Human
auuuacagaaacuuaaucauag

SEQ ID NO: 281982 - RNA, 22 nt, Human
ccuggcucuggggcggacagcu

SEQ ID NO: 281983 - RNA, 22 nt, Human
uuccaggaagauucaacaaaag

SEQ ID NO: 281984 - RNA, 22 nt, Human
ugguucaguugcacaggcuguu

SEQ ID NO: 281985 - RNA, 22 nt, Human
uaaacauuuguuauucuuguuu

SEQ ID NO: 281986 - RNA, 22 nt, Human
uuaagcauggaagugaaauaau

SEQ ID NO: 281987 - RNA, 22 nt, Human
acuccuggguugcaguccucaa

SEQ ID NO: 281988 - RNA, 22 nt, Human
cgcaggugaacuguucugcagu

SEQ ID NO: 281989 - RNA, 22 nt, Human
auggguuucccucugaaauuau

SEQ ID NO: 281990 - RNA, 22 nt, Human
ucccagggacuggaugaugcag

SEQ ID NO: 281991 - RNA, 22 nt, Human
acagaugaguuaaagcagagug

SEQ ID NO: 281992 - RNA, 22 nt, Human
ccugguccuuacgucauugcuu

SEQ ID NO: 281993 - RNA, 22 nt, Human
acaaaugucuccucuuuuguua

SEQ ID NO: 281994 - RNA, 22 nt, Human
uuccuggcuugucacaucuacg

SEQ ID NO: 281995 - RNA, 22 nt, Human
uuccugggcucuggcuggccua

SEQ ID NO: 281996 - RNA, 22 nt, Human
acacaugauuaaugccaagcau

SEQ ID NO: 281997 - RNA, 22 nt, Human
ugcagggcaguuuguuucggca

SEQ ID NO: 281998 - RNA, 22 nt, Human
uucacaauagcuggcaucaucu

SEQ ID NO: 281999 - RNA, 22 nt, Human
aaauuccagaaacucaguauau

SEQ ID NO: 282000 - RNA, 22 nt, Human
uauacacauauacguuugugug

SEQ ID NO: 282001 - RNA, 22 nt, Human
cauuuucagcacccaucugaaa

SEQ ID NO: 282002 - RNA, 22 nt, Human
gcccaagcuccgccuccugucg

SEQ ID NO: 282003 - RNA, 22 nt, Human
aagauuuucagugccuaaaaca

SEQ ID NO: 282004 - RNA, 22 nt, Human
uuuucauuguuccucgagcauu

SEQ ID NO: 282005 - RNA, 22 nt, Human
gcaaagcagucuucugugccua

SEQ ID NO: 282006 - RNA, 22 nt, Human
aagauguugucguuagugauga

SEQ ID NO: 282007 - RNA, 22 nt, Human
augaugaaacuaggaacuagag

SEQ ID NO: 282008 - RNA, 22 nt, Human
gggauggaggguagagcaagug

SEQ ID NO: 282009 - RNA, 22 nt, Human
cacacaugacccacuuuuaccg

SEQ ID NO: 282010 - RNA, 22 nt, Human
gggugggguguaucggauccua

SEQ ID NO: 282011 - RNA, 18 nt, Human
ucuguccuuccauucuuc

SEQ ID NO: 282012 - RNA, 22 nt, Human
uuauuuacaacucuucucuucc

SEQ ID NO: 282013 - RNA, 22 nt, Human
uggcagggccuaccccaauauc

SEQ ID NO: 282014 - RNA, 22 nt, Human
aaggugguuguaggcuggucug

SEQ ID NO: 282015 - RNA, 22 nt, Human
gaaggaggcuccccaaagucug

SEQ ID NO: 282016 - RNA, 22 nt, Human
ucccacccccuccaaggaggaa

SEQ ID NO: 282017 - RNA, 22 nt, Human
ugucuucagcagucaucugggg

SEQ ID NO: 282018 - RNA, 22 nt, Human
cuguacaaaguagcugcuggga

SEQ ID NO: 282019 - RNA, 22 nt, Human
guuacaaaugccaaagcugaga

SEQ ID NO: 282020 - RNA, 22 nt, Human
ggcacugggagaggugagacgg

SEQ ID NO: 282021 - RNA, 22 nt, Human
cuggguccugcucucccuaaga

SEQ ID NO: 282022 - RNA, 22 nt, Human
uuuacuguguccaucugugacu

SEQ ID NO: 282023 - RNA, 22 nt, Human
ggcuccaggcuccuauuucacu

SEQ ID NO: 282024 - RNA, 22 nt, Human
uuuucuuuaaucugguggggug

SEQ ID NO: 282025 - RNA, 22 nt, Human
ggaauguuuuucauugcucucu

SEQ ID NO: 282026 - RNA, 22 nt, Human
gcaggcaguuugcuuuucccuc

SEQ ID NO: 282027 - RNA, 22 nt, Human
gugggugugauaagaccaaggg

SEQ ID NO: 282028 - RNA, 18 nt, Human
uuccaugauuccuuucac

SEQ ID NO: 282029 - RNA, 22 nt, Human
ucucaacuuugagaaacauugu

SEQ ID NO: 282030 - RNA, 22 nt, Human
guacacauagguuacugauuaa

SEQ ID NO: 282031 - RNA, 22 nt, Human
acauguguaagaugugauauau

SEQ ID NO: 282032 - RNA, 22 nt, Human
cuguccugaguucuuggagguc

SEQ ID NO: 282033 - RNA, 22 nt, Human
uauguguccuaagcaaucaucc

SEQ ID NO: 282034 - RNA, 22 nt, Human
uaauuucuagggacuaaggugc

SEQ ID NO: 282035 - RNA, 22 nt, Human
auguuacaaauccuacagguag

SEQ ID NO: 282036 - RNA, 22 nt, Human
acuguggcaaaagaacauugga

SEQ ID NO: 282037 - RNA, 22 nt, Human
aauuaacagagggcuuauuacu

SEQ ID NO: 282038 - RNA, 22 nt, Human
agacagacagagaauuuaaaua

SEQ ID NO: 282039 - RNA, 22 nt, Human
acuuguuuggucucauguuuaa

SEQ ID NO: 282040 - RNA, 22 nt, Human
acuuucauuuguaauaaacuuc

SEQ ID NO: 282041 - RNA, 22 nt, Human
aauugcuuuacaagccguuuaa

SEQ ID NO: 282042 - RNA, 22 nt, Human
auguguccugcugugucacaca

SEQ ID NO: 282043 - RNA, 22 nt, Human
aggaggugcuguuuguccugga

SEQ ID NO: 282044 - RNA, 22 nt, Human
ccucuccagcggccucagggcc

SEQ ID NO: 282045 - RNA, 22 nt, Human
auugcugguagucagugucccu

SEQ ID NO: 282046 - RNA, 22 nt, Human
ggagggggacugacacugauuu

SEQ ID NO: 282047 - RNA, 22 nt, Human
aaggugguaauagugcaggauu

SEQ ID NO: 282048 - RNA, 22 nt, Human
aggcaggugcuuaugacuugcu

SEQ ID NO: 282049 - RNA, 22 nt, Human
uuugacuccuuugugaaaagag

SEQ ID NO: 282050 - RNA, 22 nt, Human
uccuagaaucuuuguaagauug

SEQ ID NO: 282051 - RNA, 22 nt, Human
auucuucacauggauaggaucu

SEQ ID NO: 282052 - RNA, 22 nt, Human
gagcuccacuuagcaaggccac

SEQ ID NO: 282053 - RNA, 22 nt, Human
aggaauguaaaucuagauuuua

SEQ ID NO: 282054 - RNA, 22 nt, Human
gaggacagagccgccuggcaag

SEQ ID NO: 282055 - RNA, 22 nt, Human
accuucaagauugugggucaau

SEQ ID NO: 282056 - RNA, 22 nt, Human
uguacuuaugagauccuagucg

SEQ ID NO: 282057 - RNA, 22 nt, Human
ccaggccauucccagaguugcu

SEQ ID NO: 282058 - RNA, 22 nt, Human
uuccaggagccacacaggggcg

SEQ ID NO: 282059 - RNA, 22 nt, Human
uuaguguuagggccuguuaccu

SEQ ID NO: 282060 - RNA, 22 nt, Human
uucacauuucauaccacagcuu

SEQ ID NO: 282061 - RNA, 22 nt, Human
gaaucauuuauuuuugacagca

SEQ ID NO: 282062 - RNA, 22 nt, Human
uuuacagucuauguugaauuaa

SEQ ID NO: 282063 - RNA, 19 nt, Human
uuccuggcucuucuguuuu

SEQ ID NO: 282064 - RNA, 22 nt, Human
cugcaggacgaccgccucaucu

SEQ ID NO: 282065 - RNA, 22 nt, Human
aauucccacuauaugccaagca

SEQ ID NO: 282066 - RNA, 22 nt, Human
caaaagcaaagucccugaaugu

SEQ ID NO: 282067 - RNA, 17 nt, Human
uccaugagacaugaaga

SEQ ID NO: 282068 - RNA, 22 nt, Human
auucacaugauguauguagggc

SEQ ID NO: 282069 - RNA, 22 nt, Human
auuuaaugucgagcuauuguag

SEQ ID NO: 282070 - RNA, 22 nt, Human
cacccccaccugugggcuccug

SEQ ID NO: 282071 - RNA, 22 nt, Human
gacugucuuuugaauaaaaaug

SEQ ID NO: 282072 - RNA, 22 nt, Human
gugaaaaaucaucaugacuuga

SEQ ID NO: 282073 - RNA, 22 nt, Human
gggagggaaagcuugaucuguc

SEQ ID NO: 282074 - RNA, 22 nt, Human
gaacaaauucucaucaacuugu

SEQ ID NO: 282075 - RNA, 22 nt, Human
aggaaugucugagaaagaggca

SEQ ID NO: 282076 - RNA, 22 nt, Human
uguguccucagggaagcagaga

SEQ ID NO: 282077 - RNA, 22 nt, Human
cugugugugucugcagcauacu

SEQ ID NO: 282078 - RNA, 22 nt, Human
aagacagaagugauuugaugug

SEQ ID NO: 282079 - RNA, 22 nt, Human
uuugcaaauaccaugaaacuug

SEQ ID NO: 282080 - RNA, 22 nt, Human
uuuauuggauggauggauggau

SEQ ID NO: 282081 - RNA, 22 nt, Human
cagguaguccacagugagggag

SEQ ID NO: 282082 - RNA, 22 nt, Human
aaauuucuugaggcucucuagc

SEQ ID NO: 282083 - RNA, 18 nt, Human
acuguggcucagaguugc

SEQ ID NO: 282084 - RNA, 22 nt, Human
cugugucccaguaccuugggua

SEQ ID NO: 282085 - RNA, 22 nt, Human
gcugaaaugggcacugaaggcc

SEQ ID NO: 282086 - RNA, 22 nt, Human
gaauuagacaugcuuugcuuuu

SEQ ID NO: 282087 - RNA, 22 nt, Human
ugaggugguuuguaucacuggg

SEQ ID NO: 282088 - RNA, 22 nt, Human
uacaagcuuuuguguauaaaug

SEQ ID NO: 282089 - RNA, 22 nt, Human
gaggcugguaggaaaggaaaca

SEQ ID NO: 282090 - RNA, 22 nt, Human
augagagguuucgucagaggaa

SEQ ID NO: 282091 - RNA, 22 nt, Human
aguucgagaucugcugaugaga

SEQ ID NO: 282092 - RNA, 22 nt, Human
augauucuggcaaauuuauuau

SEQ ID NO: 282093 - RNA, 22 nt, Human
uccaggaggugaggggaccaaa

SEQ ID NO: 282094 - RNA, 22 nt, Human
uuaagcauaauuaaagugaaau

SEQ ID NO: 282095 - RNA, 17 nt, Human
ugggguccccgauggug

SEQ ID NO: 282096 - RNA, 22 nt, Human
caguguuuguauagaauaugca

SEQ ID NO: 282097 - RNA, 22 nt, Human
ggagcccucaccggcgagugcc

SEQ ID NO: 282098 - RNA, 22 nt, Human
uggcagugucuuaucaggagug

SEQ ID NO: 282099 - RNA, 22 nt, Human
ggcaggugcugggagcaucuca

SEQ ID NO: 282100 - RNA, 20 nt, Human
accagagcucucaguaugug

SEQ ID NO: 282101 - RNA, 22 nt, Human
cauucacauucuucuuacuguu

SEQ ID NO: 282102 - RNA, 22 nt, Human
cucccuggugacucccaaagcu

SEQ ID NO: 282103 - RNA, 22 nt, Human
agaucugaguggcugcauguaa

SEQ ID NO: 282104 - RNA, 22 nt, Human
ccugagagccagugccugccca

SEQ ID NO: 282105 - RNA, 22 nt, Human
ugucaacugugaugucaacacu

SEQ ID NO: 282106 - RNA, 22 nt, Human
auuugcuuucagguauaaaagg

SEQ ID NO: 282107 - RNA, 22 nt, Human
aggaccuguaccucagcaucua

SEQ ID NO: 282108 - RNA, 22 nt, Human
ucacauucuuuauuugccaucc

SEQ ID NO: 282109 - RNA, 19 nt, Human
ucagugucccuguuaauau

SEQ ID NO: 282110 - RNA, 22 nt, Human
aggugggguguuggauguuuau

SEQ ID NO: 282111 - RNA, 22 nt, Human
gccuggcacaguagggacccaa

SEQ ID NO: 282112 - RNA, 22 nt, Human
augguacauaguuuaaauaagg

SEQ ID NO: 282113 - RNA, 22 nt, Human
cuggaaauuggagaugauguuu

SEQ ID NO: 282114 - RNA, 22 nt, Human
uaacaagucauuuuaaauuaug

SEQ ID NO: 282115 - RNA, 22 nt, Human
aguuuacauauuugucggaguc

SEQ ID NO: 282116 - RNA, 22 nt, Human
aaggccuccgccaauggcagag

SEQ ID NO: 282117 - RNA, 22 nt, Human
uccuggauuaauagggagcugu

SEQ ID NO: 282118 - RNA, 22 nt, Human
ccugagccugcagccgagcaga

SEQ ID NO: 282119 - RNA, 22 nt, Human
gccuccugacuuacacugagcu

SEQ ID NO: 282120 - RNA, 22 nt, Human
uccuggcccaaucugcccauga

SEQ ID NO: 282121 - RNA, 22 nt, Human
gggauugaauugggggaucaca

SEQ ID NO: 282122 - RNA, 22 nt, Human
agaaugcaagauaaacuuuauu

SEQ ID NO: 282123 - RNA, 22 nt, Human
aucuuagagagucguguuuugu

SEQ ID NO: 282124 - RNA, 22 nt, Human
agauaaugucaaauucugucug

SEQ ID NO: 282125 - RNA, 22 nt, Human
ucuggcagaaggcagaaauuca

SEQ ID NO: 282126 - RNA, 22 nt, Human
auccuggcccucaugaccccuu

SEQ ID NO: 282127 - RNA, 22 nt, Human
uucuucagucccacuagccaca

SEQ ID NO: 282128 - RNA, 22 nt, Human
uaggaaauacuguaaguuuggg

SEQ ID NO: 282129 - RNA, 23 nt, Human
ggagaggggugugggcaucuuua

SEQ ID NO: 282130 - RNA, 22 nt, Human
augacaagggaggguccugcua

SEQ ID NO: 282131 - RNA, 21 nt, Human
uggacauuauggagagaguag

SEQ ID NO: 282132 - RNA, 22 nt, Human
guucuucagauuccauuucagu

SEQ ID NO: 282133 - RNA, 22 nt, Human
uugaaaucaccacuagcauuug

SEQ ID NO: 282134 - RNA, 22 nt, Human
acugaaauauuuagaagugaag

SEQ ID NO: 282135 - RNA, 22 nt, Human
ugacagacuuuacuucuccuau

SEQ ID NO: 282136 - RNA, 22 nt, Human
ggaaaacaagagaaugauguuu

SEQ ID NO: 282137 - RNA, 22 nt, Human
augguacaaaauguauaaaguc

SEQ ID NO: 282138 - RNA, 22 nt, Human
aggccaggaauccuugucccag

SEQ ID NO: 282139 - RNA, 22 nt, Human
agaacagaggccuuauguuuca

SEQ ID NO: 282140 - RNA, 20 nt, Human
cugaagaguggccugaucug

SEQ ID NO: 282141 - RNA, 22 nt, Human
ugcagggcagcuagggagcuuu

SEQ ID NO: 282142 - RNA, 21 nt, Human
ucugggcccaugcugccucac

SEQ ID NO: 282143 - RNA, 22 nt, Human
cagagacuggagugcaguggcg

SEQ ID NO: 282144 - RNA, 21 nt, Human
ucuguggcggacucuaggccc

SEQ ID NO: 282145 - RNA, 22 nt, Human
gugaggugccuaauaccgugac

SEQ ID NO: 282146 - RNA, 22 nt, Human
gcuguggcaauguuuauaauua

SEQ ID NO: 282147 - RNA, 22 nt, Human
gcccaguuucagcucugccuuu

SEQ ID NO: 282148 - RNA, 22 nt, Human
uaauuacagguccaaaacaauc

SEQ ID NO: 282149 - RNA, 22 nt, Human
uggagcaggaagucuauggcug

SEQ ID NO: 282150 - RNA, 22 nt, Human
ccuuccucauccauuucucuug

SEQ ID NO: 282151 - RNA, 22 nt, Human
cagaggcauacucccagucuug

SEQ ID NO: 282152 - RNA, 22 nt, Human
cuccaguggcaaguccgggcgg

SEQ ID NO: 282153 - RNA, 22 nt, Human
uccugcagcucugagaagcauc

SEQ ID NO: 282154 - RNA, 23 nt, Human
auguuuuaugucucuagcugcca

SEQ ID NO: 282155 - RNA, 22 nt, Human
cauucauuuacuuucaacagcu

SEQ ID NO: 282156 - RNA, 22 nt, Human
gaaaauguuagcuucauaguca

SEQ ID NO: 282157 - RNA, 23 nt, Human
auaaauuacuaucucccuagagc

SEQ ID NO: 282158 - RNA, 22 nt, Human
caagcagguuugcuauuuucuu

SEQ ID NO: 282159 - RNA, 22 nt, Human
gaggugucugcuguguucaaag

SEQ ID NO: 282160 - RNA, 14 nt, Human
gcaggcagaucacc

SEQ ID NO: 282161 - RNA, 22 nt, Human
ucuugcacuucaugaauauguu

SEQ ID NO: 282162 - RNA, 22 nt, Human
uugugagaugauuugaaagugu

SEQ ID NO: 282163 - RNA, 22 nt, Human
aaacuuucauguaucucuuuca

SEQ ID NO: 282164 - RNA, 21 nt, Human
cugcaucugagucauuaugcc

SEQ ID NO: 282165 - RNA, 22 nt, Human
uucccucuccuacucaggaaag

SEQ ID NO: 282166 - RNA, 22 nt, Human
ggaggacaggggcugcagcaca

SEQ ID NO: 282167 - RNA, 22 nt, Human
gaaaguuuauagguuauauaau

SEQ ID NO: 282168 - RNA, 22 nt, Human
ucucugcagcuaagaaauuaau

SEQ ID NO: 282169 - RNA, 22 nt, Human
cagggaugcuguuaaacauccu

SEQ ID NO: 282170 - RNA, 22 nt, Human
uauauguagucagucagaguaa

SEQ ID NO: 282171 - RNA, 22 nt, Human
uucucagaaaauguagagaaaa

SEQ ID NO: 282172 - RNA, 22 nt, Human
guuagaauaaaaggucagagag

SEQ ID NO: 282173 - RNA, 22 nt, Human
gcuggcagaauuucuucuugcu

SEQ ID NO: 282174 - RNA, 22 nt, Human
ucccagggucaguggugaggcc

SEQ ID NO: 282175 - RNA, 22 nt, Human
ugcaggugagugcaggggcuca

SEQ ID NO: 282176 - RNA, 22 nt, Human
caaagcuggaaaaggaggcugg

SEQ ID NO: 282177 - RNA, 22 nt, Human
caauuucaugccauguauugcu

SEQ ID NO: 282178 - RNA, 20 nt, Human
auuugggacgauuggccacc

SEQ ID NO: 282179 - RNA, 22 nt, Human
ugagccaggcucaagugauccu

SEQ ID NO: 282180 - RNA, 22 nt, Human
cacaagauggucacauaagugc

SEQ ID NO: 282181 - RNA, 22 nt, Human
uggaggcaacugaagauguagu

SEQ ID NO: 282182 - RNA, 22 nt, Human
cugaaauuauuguuuaaucaaa

SEQ ID NO: 282183 - RNA, 22 nt, Human
ggcaggcacugugauagauucu

SEQ ID NO: 282184 - RNA, 22 nt, Human
uagagaauggccuugaaguagu

SEQ ID NO: 282185 - RNA, 22 nt, Human
gugcugugcgcuuuuucuguau

SEQ ID NO: 282186 - RNA, 22 nt, Human
ggcagacuguaauaggagaauu

SEQ ID NO: 282187 - RNA, 22 nt, Human
ccacguguagguggacaggauc

SEQ ID NO: 282188 - RNA, 22 nt, Human
agaauucugacaauagaauugg

SEQ ID NO: 282189 - RNA, 22 nt, Human
uccucagucacgguagcacauu

SEQ ID NO: 282190 - RNA, 22 nt, Human
accucaagaauguauaacacag

SEQ ID NO: 282191 - RNA, 22 nt, Human
cucugcugcuuugccaguggaa

SEQ ID NO: 282192 - RNA, 22 nt, Human
agcuaggacagguagagauggg

SEQ ID NO: 282193 - RNA, 22 nt, Human
ccagggcauccucacaucgcag

SEQ ID NO: 282194 - RNA, 22 nt, Human
acaucuggaaaguuacuugaga

SEQ ID NO: 282195 - RNA, 22 nt, Human
ccagguggacaaggcuuucaca

SEQ ID NO: 282196 - RNA, 22 nt, Human
uuuuggaauuuauacaguaaug

SEQ ID NO: 282197 - RNA, 22 nt, Human
auggccugcagugcugccacag

SEQ ID NO: 282198 - RNA, 22 nt, Human
ucuggcagagucagugcacaca

SEQ ID NO: 282199 - RNA, 22 nt, Human
aggcuugggacugcuuaggagc

SEQ ID NO: 282200 - RNA, 18 nt, Human
uuauuggugcugcuguuc

SEQ ID NO: 282201 - RNA, 22 nt, Human
cucuggccugcuuccucaggua

SEQ ID NO: 282202 - RNA, 22 nt, Human
agacacagugcugggugcugag

SEQ ID NO: 282203 - RNA, 22 nt, Human
cugcagggcagaagggcauaga

SEQ ID NO: 282204 - RNA, 22 nt, Human
acacagauauuuugaauacaua

SEQ ID NO: 282205 - RNA, 22 nt, Human
uucaacaaguaguacacacagu

SEQ ID NO: 282206 - RNA, 18 nt, Human
cugaaggauccaggugua

SEQ ID NO: 282207 - RNA, 20 nt, Human
auuagcucaggugaggucau

SEQ ID NO: 282208 - RNA, 22 nt, Human
aauucuagcauugugaaaauau

SEQ ID NO: 282209 - RNA, 22 nt, Human
auuugguuacucaguugucuga

SEQ ID NO: 282210 - RNA, 22 nt, Human
ucagugucauaucaagaagaug

SEQ ID NO: 282211 - RNA, 22 nt, Human
gccuguuugagaauagucaggg

SEQ ID NO: 282212 - RNA, 22 nt, Human
gagucuaaguagaaugugaaaa

SEQ ID NO: 282213 - RNA, 22 nt, Human
uggcagggugccaguugcgagu

SEQ ID NO: 282214 - RNA, 22 nt, Human
ucaguucuuuauuucacaguga

SEQ ID NO: 282215 - RNA, 22 nt, Human
ccugagagagaagcgaccuggu

SEQ ID NO: 282216 - RNA, 22 nt, Human
uuaaaauagccagugccccucu

SEQ ID NO: 282217 - RNA, 22 nt, Human
uccaugaguuugaggaaaagag

SEQ ID NO: 282218 - RNA, 22 nt, Human
accaggcagucaccguccagga

SEQ ID NO: 282219 - RNA, 22 nt, Human
uuauuaggaaaaggucagaugu

SEQ ID NO: 282220 - RNA, 22 nt, Human
guggaggagaggcgccuugcgg

SEQ ID NO: 282221 - RNA, 22 nt, Human
cacauaaucaccaaguccuuuc

SEQ ID NO: 282222 - RNA, 21 nt, Human
cagacaugagucucagcuuug

SEQ ID NO: 282223 - RNA, 22 nt, Human
uugguacaugcagauauuuagu

SEQ ID NO: 282224 - RNA, 22 nt, Human
auaaaaggaaagccuguuguga

SEQ ID NO: 282225 - RNA, 22 nt, Human
gagguguccuagaaguauucag

SEQ ID NO: 282226 - RNA, 22 nt, Human
gagcucagguggucaaaacaau

SEQ ID NO: 282227 - RNA, 22 nt, Human
augcuuuauuauuuugcaggga

SEQ ID NO: 282228 - RNA, 22 nt, Human
gaaagauauuuauuggcaacag

SEQ ID NO: 282229 - RNA, 22 nt, Human
gaauaauauugacuuugcaggc

SEQ ID NO: 282230 - RNA, 19 nt, Human
ucucuggggacacuuucac

SEQ ID NO: 282231 - RNA, 22 nt, Human
agggaagaaaauccaucgcugc

SEQ ID NO: 282232 - RNA, 22 nt, Human
gcugucuucacuuccugguuuc

SEQ ID NO: 282233 - RNA, 22 nt, Human
acacaaguucuaaagauugcgc

SEQ ID NO: 282234 - RNA, 22 nt, Human
acagggcaccugagguaggaag

SEQ ID NO: 282235 - RNA, 22 nt, Human
ggcagguggacgugcuaaagcu

SEQ ID NO: 282236 - RNA, 22 nt, Human
gucuuuaugguaugaaaacuga

SEQ ID NO: 282237 - RNA, 22 nt, Human
agaaggaguguacaggucaugc

SEQ ID NO: 282238 - RNA, 22 nt, Human
ggaagugaggaaauauuuuguu

SEQ ID NO: 282239 - RNA, 22 nt, Human
gacuuuaugaagagaugaccaa

SEQ ID NO: 282240 - RNA, 22 nt, Human
uuucuuuaauucucacagcaau

SEQ ID NO: 282241 - RNA, 22 nt, Human
aaagccuucuucggucugugau

SEQ ID NO: 282242 - RNA, 22 nt, Human
uaacacauagauauuuuaacuu

SEQ ID NO: 282243 - RNA, 22 nt, Human
uagagcuagcuucaaaaugcga

SEQ ID NO: 282244 - RNA, 22 nt, Human
ccagggcaugggaagaacugaa

SEQ ID NO: 282245 - RNA, 22 nt, Human
cagacagguagggacagaacau

SEQ ID NO: 282246 - RNA, 18 nt, Human
ucaaaauauuucugugga

SEQ ID NO: 282247 - RNA, 22 nt, Human
ucuguuuaaugggaaugauacu

SEQ ID NO: 282248 - RNA, 22 nt, Human
auccaugaagguacuucucagg

SEQ ID NO: 282249 - RNA, 22 nt, Human
uacaguuauaugugauaaguaa

SEQ ID NO: 282250 - RNA, 22 nt, Human
uacuuuauauuguggcuggcca

SEQ ID NO: 282251 - RNA, 22 nt, Human
gacuuuaaaaguuugugcuugg

SEQ ID NO: 282252 - RNA, 22 nt, Human
agggaagaggaccagagucucu

SEQ ID NO: 282253 - RNA, 22 nt, Human
aggcucaguauagcuggcaagu

SEQ ID NO: 282254 - RNA, 21 nt, Human
caguguggugaccagggucuc

SEQ ID NO: 282255 - RNA, 22 nt, Human
gcugcucucauagauggcuuca

SEQ ID NO: 282256 - RNA, 22 nt, Human
gguuuauuaaugugaacuguau

SEQ ID NO: 282257 - RNA, 22 nt, Human
ucaagaaagggcuucaccagga

SEQ ID NO: 282258 - RNA, 22 nt, Human
agcagggcuuugcagacuuggg

SEQ ID NO: 282259 - RNA, 22 nt, Human
gccaggcagccacccucugcga

SEQ ID NO: 282260 - RNA, 22 nt, Human
agcauacaggucugaaacagcu

SEQ ID NO: 282261 - RNA, 22 nt, Human
ucaauaaauagcuuggcucagc

SEQ ID NO: 282262 - RNA, 23 nt, Human
aguuucuuugagacuugcccugu

SEQ ID NO: 282263 - RNA, 22 nt, Human
aguggcaaagucuucagaaguu

SEQ ID NO: 282264 - RNA, 22 nt, Human
aggggagaauuucaacucaggu

SEQ ID NO: 282265 - RNA, 22 nt, Human
gcauggcuucugccaggcaccu

SEQ ID NO: 282266 - RNA, 22 nt, Human
uuguguuucuggccaagaugga

SEQ ID NO: 282267 - RNA, 23 nt, Human
uuucaacuccugccauuauuucu

SEQ ID NO: 282268 - RNA, 22 nt, Human
uucucugagauagacuaagugg

SEQ ID NO: 282269 - RNA, 22 nt, Human
uacauucccccaauuaccaaug

SEQ ID NO: 282270 - RNA, 22 nt, Human
aaaguucuaaaacucuuuguga

SEQ ID NO: 282271 - RNA, 22 nt, Human
guaaacauuacugugcuguaua

SEQ ID NO: 282272 - RNA, 22 nt, Human
ccagcccuuagauaaaccuggc

SEQ ID NO: 282273 - RNA, 22 nt, Human
ucagguggcugguugcuggcua

SEQ ID NO: 282274 - RNA, 22 nt, Human
caacauuugaguaaagaaaugg

SEQ ID NO: 282275 - RNA, 22 nt, Human
auccuggcgccacacggcucua

SEQ ID NO: 282276 - RNA, 22 nt, Human
uuugaaaauuagacacaggcua

SEQ ID NO: 282277 - RNA, 22 nt, Human
ugccuccaccauugcucacuuu

SEQ ID NO: 282278 - RNA, 22 nt, Human
augauauuuuaguaaagugaua

SEQ ID NO: 282279 - RNA, 22 nt, Human
ccagguggaaggucugugcucu

SEQ ID NO: 282280 - RNA, 22 nt, Human
uagggcucugagaguucagccu

SEQ ID NO: 282281 - RNA, 22 nt, Human
ugggccaguccagccccaggga

SEQ ID NO: 282282 - RNA, 22 nt, Human
ugggcuccguugccuggggcag

SEQ ID NO: 282283 - RNA, 22 nt, Human
uauuuccaaaagccuauuauga

SEQ ID NO: 282284 - RNA, 22 nt, Human
uuucgucaauuguaacaaaugu

SEQ ID NO: 282285 - RNA, 22 nt, Human
gcuccuggcauccugcuuuuaa

SEQ ID NO: 282286 - RNA, 22 nt, Human
gcagagaaggauugaaaccaga

SEQ ID NO: 282287 - RNA, 22 nt, Human
cugcccacaguucucugccaug

SEQ ID NO: 282288 - RNA, 22 nt, Human
cucuuccucucaugcggucaua

SEQ ID NO: 282289 - RNA, 22 nt, Human
agauaauuauuuacuucaaagu

SEQ ID NO: 282290 - RNA, 22 nt, Human
agagagcauggcacagaggggu

SEQ ID NO: 282291 - RNA, 22 nt, Human
uaaggcacccuucugaguagag

SEQ ID NO: 282292 - RNA, 22 nt, Human
ggcucuggugggaagguuagau

SEQ ID NO: 282293 - RNA, 22 nt, Human
uccacacacauuucuaugugca

SEQ ID NO: 282294 - RNA, 22 nt, Human
uacagacauucaauuuugaccc

SEQ ID NO: 282295 - RNA, 22 nt, Human
cucuucuuggcccccaugaggg

SEQ ID NO: 282296 - RNA, 22 nt, Human
gcuggccuugugucugaggaag

SEQ ID NO: 282297 - RNA, 22 nt, Human
ggcacagaguuggcagagcugc

SEQ ID NO: 282298 - RNA, 22 nt, Human
aacuugguaaauugugucagau

SEQ ID NO: 282299 - RNA, 22 nt, Human
ugaagcuuuaggauggguucau

SEQ ID NO: 282300 - RNA, 22 nt, Human
acagucauuagauacaaugucu

SEQ ID NO: 282301 - RNA, 22 nt, Human
ugagaugcaggagaugggacug

SEQ ID NO: 282302 - RNA, 22 nt, Human
caaauucacaugauugcuucug

SEQ ID NO: 282303 - RNA, 22 nt, Human
ugaaagcaggcgggcuacuuua

SEQ ID NO: 282304 - RNA, 22 nt, Human
gcaggggcuaaggacacagaga

SEQ ID NO: 282305 - RNA, 22 nt, Human
ucagucuucccuccagugcaac

SEQ ID NO: 282306 - RNA, 22 nt, Human
cagguggcuucucccuaggcca

SEQ ID NO: 282307 - RNA, 22 nt, Human
acugagaacucaagagaaaagg

SEQ ID NO: 282308 - RNA, 22 nt, Human
uucugagcugcaacacuaacau

SEQ ID NO: 282309 - RNA, 22 nt, Human
ccagcuuuucagaaucugccug

SEQ ID NO: 282310 - RNA, 22 nt, Human
auuugaaguaaguaaugaguau

SEQ ID NO: 282311 - RNA, 22 nt, Human
cauaaaagccaccuauuuaaag

SEQ ID NO: 282312 - RNA, 22 nt, Human
caggaguccaucuggccuggug

SEQ ID NO: 282313 - RNA, 22 nt, Human
uucugcuuagagggcauuugca

SEQ ID NO: 282314 - RNA, 22 nt, Human
agggagacacaugaggaaguca

SEQ ID NO: 282315 - RNA, 22 nt, Human
ucaggugguccuaagugccauc

SEQ ID NO: 282316 - RNA, 22 nt, Human
ccucuuccugcacugacauuuu

SEQ ID NO: 282317 - RNA, 22 nt, Human
cuagagaaucuuuuaagaagug

SEQ ID NO: 282318 - RNA, 22 nt, Human
agaguacugccucaguuaugaa

SEQ ID NO: 282319 - RNA, 20 nt, Human
ucagggcaugggacagcccc

SEQ ID NO: 282320 - RNA, 20 nt, Human
ccagcucugugguuagauac

SEQ ID NO: 282321 - RNA, 22 nt, Human
aagagcuggauggaaucuggga

SEQ ID NO: 282322 - RNA, 22 nt, Human
uucugugauuccuccagccagc

SEQ ID NO: 282323 - RNA, 22 nt, Human
agcaaacaguuucuggggaucu

SEQ ID NO: 282324 - RNA, 18 nt, Human
ggacaucaucaggugcuu

SEQ ID NO: 282325 - RNA, 22 nt, Human
uugaggagaagacuuugcuucc

SEQ ID NO: 282326 - RNA, 22 nt, Human
acaaggaggauauguuuaaggg

SEQ ID NO: 282327 - RNA, 22 nt, Human
gucucuaucauagcugaacccu

SEQ ID NO: 282328 - RNA, 22 nt, Human
cuguauuucuuggacaguugcu

SEQ ID NO: 282329 - RNA, 22 nt, Human
guacccagaggcaugaucccag

SEQ ID NO: 282330 - RNA, 18 nt, Human
gcagcuuuugauucaccc

SEQ ID NO: 282331 - RNA, 22 nt, Human
cuggguguagcccaguaugagg

SEQ ID NO: 282332 - RNA, 21 nt, Human
ccuuuacaauuuugcauuccu

SEQ ID NO: 282333 - RNA, 19 nt, Human
accaggcuuauggucagug

SEQ ID NO: 282334 - RNA, 22 nt, Human
aagaaucauuguaaaguucugu

SEQ ID NO: 282335 - RNA, 22 nt, Human
gacagacaggaggcauucaggg

SEQ ID NO: 282336 - RNA, 23 nt, Human
ucuccaggccuuacuccaggccu

SEQ ID NO: 282337 - RNA, 22 nt, Human
uuuuacagucagucaaacucag

SEQ ID NO: 282338 - RNA, 22 nt, Human
ccagguggcccugcccuacucu

SEQ ID NO: 282339 - RNA, 22 nt, Human
aaagugguuuuucagacuuuga

SEQ ID NO: 282340 - RNA, 22 nt, Human
aaggcagaggaaggucuaguuu

SEQ ID NO: 282341 - RNA, 22 nt, Human
gaggagcugggacccugucauc

SEQ ID NO: 282342 - RNA, 22 nt, Human
ucagguguagguuguucaguuu

SEQ ID NO: 282343 - RNA, 22 nt, Human
uucuucaaauagcagggaguca

SEQ ID NO: 282344 - RNA, 22 nt, Human
uguuccugaggcaugugucaau

SEQ ID NO: 282345 - RNA, 22 nt, Human
guuuauuggguauuguggagcc

SEQ ID NO: 282346 - RNA, 22 nt, Human
uuauuccauagaagucaaggaa

SEQ ID NO: 282347 - RNA, 22 nt, Human
uaggauuuuuuggauucuggau

SEQ ID NO: 282348 - RNA, 22 nt, Human
agucucagcaagcauggcuagu

SEQ ID NO: 282349 - RNA, 17 nt, Human
acagggcagaaacagcu

SEQ ID NO: 282350 - RNA, 22 nt, Human
aaauguguguauguacauauau

SEQ ID NO: 282351 - RNA, 22 nt, Human
uuuuaauugcaauuaugguccc

SEQ ID NO: 282352 - RNA, 22 nt, Human
ucacuggcaacuugugcucccu

SEQ ID NO: 282353 - RNA, 22 nt, Human
ucaguuaacggaaaggggugug

SEQ ID NO: 282354 - RNA, 22 nt, Human
ggcugcaagacaagguugguuu

SEQ ID NO: 282355 - RNA, 22 nt, Human
ccaaggaggccccaggucagcu

SEQ ID NO: 282356 - RNA, 22 nt, Human
ggcuugaucacauaggucuccc

SEQ ID NO: 282357 - RNA, 22 nt, Human
cucuguguucagccuagcagaa

SEQ ID NO: 282358 - RNA, 22 nt, Human
auagacaacacuuauuauuccu

SEQ ID NO: 282359 - RNA, 22 nt, Human
ccaaaugugccuguuucaacaa

SEQ ID NO: 282360 - RNA, 22 nt, Human
caagggcucuaagucacaagau

SEQ ID NO: 282361 - RNA, 22 nt, Human
uucauuuuuaccgcgugucaaa

SEQ ID NO: 282362 - RNA, 22 nt, Human
ggagucugcucccagacaugau

SEQ ID NO: 282363 - RNA, 22 nt, Human
acauauaagggaucagugacag

SEQ ID NO: 282364 - RNA, 22 nt, Human
cuggcccagagagcagagcuua

SEQ ID NO: 282365 - RNA, 22 nt, Human
acaauguuuuuguucaaagagu

SEQ ID NO: 282366 - RNA, 22 nt, Human
aaaacuaaauacgcuuugccuc

SEQ ID NO: 282367 - RNA, 21 nt, Human
aagcuuccaaacugcuggacu

SEQ ID NO: 282368 - RNA, 22 nt, Human
uuuccucuuugugacacagcug

SEQ ID NO: 282369 - RNA, 22 nt, Human
gucuucuuuaaccuacuaaagc

SEQ ID NO: 282370 - RNA, 22 nt, Human
augguacagauaauacaugcug

SEQ ID NO: 282371 - RNA, 22 nt, Human
ugcacacacucugcauauacuu

SEQ ID NO: 282372 - RNA, 22 nt, Human
uaaagcuguucagugcagaaag

SEQ ID NO: 282373 - RNA, 15 nt, Human
ggcagguggaucacu

SEQ ID NO: 282374 - RNA, 20 nt, Human
ucugucucugagcuagacuu

SEQ ID NO: 282375 - RNA, 22 nt, Human
cauaauuuuuuuaagucagaac

SEQ ID NO: 282376 - RNA, 22 nt, Human
gagucaggaugcaaggggaugg

SEQ ID NO: 282377 - RNA, 22 nt, Human
uggcagguggcacagccuggga

SEQ ID NO: 282378 - RNA, 22 nt, Human
ccagagcaauucucacagaacu

SEQ ID NO: 282379 - RNA, 22 nt, Human
uauuucuuucagguauguguug

SEQ ID NO: 282380 - RNA, 22 nt, Human
aucugaagaggucauggcugac

SEQ ID NO: 282381 - RNA, 23 nt, Human
uugaggagcagcgcuuuuuaccg

SEQ ID NO: 282382 - RNA, 22 nt, Human
agcagcaaguguaacugaauau

SEQ ID NO: 282383 - RNA, 22 nt, Human
cagggauggcugucaggaugua

SEQ ID NO: 282384 - RNA, 22 nt, Human
uccugucugcucacagagcugg

SEQ ID NO: 282385 - RNA, 22 nt, Human
cucuccagccuuuagcccacgc

SEQ ID NO: 282386 - RNA, 22 nt, Human
guaagccuggaauuuuugacuu

SEQ ID NO: 282387 - RNA, 22 nt, Human
uuugucauaucacacaauuuug

SEQ ID NO: 282388 - RNA, 22 nt, Human
gaggugucaggguagucaugau

SEQ ID NO: 282389 - RNA, 22 nt, Human
augugucuuugagacucugcua

SEQ ID NO: 282390 - RNA, 22 nt, Human
cucaggagguuuccugucuagg

SEQ ID NO: 282391 - RNA, 22 nt, Human
ccaugccccaccaggacgcugc

SEQ ID NO: 282392 - RNA, 22 nt, Human
augccaggccccacgcugggca

SEQ ID NO: 282393 - RNA, 22 nt, Human
uccuucaacuuuuuacuugccc

SEQ ID NO: 282394 - RNA, 23 nt, Human
ucugccagugugugccaggagcc

SEQ ID NO: 282395 - RNA, 22 nt, Human
ucuccucccaggcucuuccagg

SEQ ID NO: 282396 - RNA, 22 nt, Human
gaaggggaguggcuagugugug

SEQ ID NO: 282397 - RNA, 22 nt, Human
gugcaguguguaauccaggaac

SEQ ID NO: 282398 - RNA, 22 nt, Human
cgguggucauaaguggcuggcg

SEQ ID NO: 282399 - RNA, 22 nt, Human
agauguuuguguuaucuccauu

SEQ ID NO: 282400 - RNA, 22 nt, Human
uucuguuuauaauuugcaguug

SEQ ID NO: 282401 - RNA, 22 nt, Human
ccaggugugguggcauacaccu

SEQ ID NO: 282402 - RNA, 22 nt, Human
gugcagggagcccagaaggucc

SEQ ID NO: 282403 - RNA, 22 nt, Human
ucccagaggucucugcugguuc

SEQ ID NO: 282404 - RNA, 22 nt, Human
uguguccugugcaaggggauga

SEQ ID NO: 282405 - RNA, 22 nt, Human
uuugacucugggugcuuuuucg

SEQ ID NO: 282406 - RNA, 22 nt, Human
cugcaucugcauaaucaacuuc

SEQ ID NO: 282407 - RNA, 22 nt, Human
uccaaggagcagauccagagga

SEQ ID NO: 282408 - RNA, 22 nt, Human
caugcucacuuuuauacuguaa

SEQ ID NO: 282409 - RNA, 17 nt, Human
ggaggcaacagacaggg

SEQ ID NO: 282410 - RNA, 22 nt, Human
agucugucagucauucuaacaa

SEQ ID NO: 282411 - RNA, 22 nt, Human
cacugucuguguguccuugggg

SEQ ID NO: 282412 - RNA, 22 nt, Human
cuuuacuucucaaaauaaagca

SEQ ID NO: 282413 - RNA, 22 nt, Human
auucuucacuguuucagaauga

SEQ ID NO: 282414 - RNA, 22 nt, Human
agcagguggucuguugcugcug

SEQ ID NO: 282415 - RNA, 22 nt, Human
gugggggacccaggugcugucc

SEQ ID NO: 282416 - RNA, 18 nt, Human
aaaggcugaauauagaag

SEQ ID NO: 282417 - RNA, 22 nt, Human
gcauggcucuggccucagugug

SEQ ID NO: 282418 - RNA, 22 nt, Human
ugggugugcccagauggugucc

SEQ ID NO: 282419 - RNA, 22 nt, Human
ucugaaaucuaaugcucugugg

SEQ ID NO: 282420 - RNA, 22 nt, Human
cuccaggcuggauccaagucaa

SEQ ID NO: 282421 - RNA, 22 nt, Human
accugagacuugggaugggaau

SEQ ID NO: 282422 - RNA, 22 nt, Human
ccauucauacaauuuuguucua

SEQ ID NO: 282423 - RNA, 22 nt, Human
cauucggagguaguugagguua

SEQ ID NO: 282424 - RNA, 22 nt, Human
uauuuaaaaagaggccagcugg

SEQ ID NO: 282425 - RNA, 22 nt, Human
uuugcuuuugugcucuaguggu

SEQ ID NO: 282426 - RNA, 22 nt, Human
gcugagguggcugccuuaguaa

SEQ ID NO: 282427 - RNA, 22 nt, Human
gagauggccagugccaggacaa

SEQ ID NO: 282428 - RNA, 22 nt, Human
gggaccugggccagaggacagu

SEQ ID NO: 282429 - RNA, 22 nt, Human
aaucugaauauuuauguguauu

SEQ ID NO: 282430 - RNA, 22 nt, Human
cacagcauuaacugggacagcu

SEQ ID NO: 282431 - RNA, 22 nt, Human
cuuuuucuucuaggugugccug

SEQ ID NO: 282432 - RNA, 22 nt, Human
cuccucagcugggaggaguccc

SEQ ID NO: 282433 - RNA, 22 nt, Human
ucacauucauggugcuaauaaa

SEQ ID NO: 282434 - RNA, 22 nt, Human
aacauucuauuuugcuaaaaca

SEQ ID NO: 282435 - RNA, 22 nt, Human
gaggccuggguuggaggugcau

SEQ ID NO: 282436 - RNA, 22 nt, Human
ucuguuucuucuucuguuauau

SEQ ID NO: 282437 - RNA, 22 nt, Human
uggugcagacaggagccccgcu

SEQ ID NO: 282438 - RNA, 18 nt, Human
ugaacagaugaguugaag

SEQ ID NO: 282439 - RNA, 22 nt, Human
agcugcaaccuuagcuauaggc

SEQ ID NO: 282440 - RNA, 22 nt, Human
ucaguguuuguggcaaauguua

SEQ ID NO: 282441 - RNA, 22 nt, Human
acauuucaguaaguguuaauuu

SEQ ID NO: 282442 - RNA, 22 nt, Human
ugggguccagugccuggcaagg

SEQ ID NO: 282443 - RNA, 21 nt, Human
uccuugcuauuuuccucagcu

SEQ ID NO: 282444 - RNA, 22 nt, Human
ggcaggcaggagcucugucucc

SEQ ID NO: 282445 - RNA, 22 nt, Human
cagagcugauuggauccagaga

SEQ ID NO: 282446 - RNA, 22 nt, Human
ccucuuccagcuguugcuucca

SEQ ID NO: 282447 - RNA, 22 nt, Human
uucuuuucuuggcaggaguaga

SEQ ID NO: 282448 - RNA, 22 nt, Human
guaagccugagaaacaccaccu

SEQ ID NO: 282449 - RNA, 22 nt, Human
cuggaggaccccugccuggaag

SEQ ID NO: 282450 - RNA, 22 nt, Human
ggcaggugcuugucgaaggccu

SEQ ID NO: 282451 - RNA, 22 nt, Human
ucccagagacagagccuccucc

SEQ ID NO: 282452 - RNA, 22 nt, Human
guuuuuaucuaauagcaguuau

SEQ ID NO: 282453 - RNA, 22 nt, Human
gccaggcacaguucuaggugcu

SEQ ID NO: 282454 - RNA, 22 nt, Human
agagccaggccaggccggggca

SEQ ID NO: 282455 - RNA, 22 nt, Human
caguagacacauuaauauggaa

SEQ ID NO: 282456 - RNA, 22 nt, Human
gaggcaggcacuguuaucagca

SEQ ID NO: 282457 - RNA, 22 nt, Human
ggggcugagucagugggaagag

SEQ ID NO: 282458 - RNA, 22 nt, Human
acuguaaaauacauaaguauug

SEQ ID NO: 282459 - RNA, 22 nt, Human
ugccuucacugagcuuauggga

SEQ ID NO: 282460 - RNA, 22 nt, Human
aggaauguaacaggaguaaaaa

SEQ ID NO: 282461 - RNA, 23 nt, Human
uuguccugccgaucucugagaau

SEQ ID NO: 282462 - RNA, 22 nt, Human
uacaugagggcacucugcaucu

SEQ ID NO: 282463 - RNA, 22 nt, Human
gaggagcucugcuccauccuuc

SEQ ID NO: 282464 - RNA, 22 nt, Human
cuggguguagauggaaguuugg

SEQ ID NO: 282465 - RNA, 22 nt, Human
aggaaagauggaaggaggauaa

SEQ ID NO: 282466 - RNA, 22 nt, Human
gcuagaaacuguuuaaucucuu

SEQ ID NO: 282467 - RNA, 22 nt, Human
guucuucagcauuagaagucau

SEQ ID NO: 282468 - RNA, 18 nt, Human
ugcuuuaugcuuauauaa

SEQ ID NO: 282469 - RNA, 22 nt, Human
ggcugccacgucgaggguccaa

SEQ ID NO: 282470 - RNA, 22 nt, Human
gagguucagcugcugccuggua

SEQ ID NO: 282471 - RNA, 23 nt, Human
aaggcauuggcuucucucauuuc

SEQ ID NO: 282472 - RNA, 22 nt, Human
ccugagagagugagcccugaca

SEQ ID NO: 282473 - RNA, 22 nt, Human
cuucucccgaagccgguucugc

SEQ ID NO: 282474 - RNA, 22 nt, Human
gacacuuuaggauuuaaaaguc

SEQ ID NO: 282475 - RNA, 22 nt, Human
ucccaggcaaaggcagcucauu

SEQ ID NO: 282476 - RNA, 22 nt, Human
ucagagagugcaaaauauagcu

SEQ ID NO: 282477 - RNA, 22 nt, Human
uguacauuuagagcucaauaga

SEQ ID NO: 282478 - RNA, 22 nt, Human
aagaaaugcagaaaugugcugg

SEQ ID NO: 282479 - RNA, 22 nt, Human
gggaggaaagagaaguggucca

SEQ ID NO: 282480 - RNA, 22 nt, Human
augggugugaaaauggucaucu

SEQ ID NO: 282481 - RNA, 22 nt, Human
auugucaucgauguuagccagu

SEQ ID NO: 282482 - RNA, 22 nt, Human
ucaguguccauaaauaaaguuu

SEQ ID NO: 282483 - RNA, 22 nt, Human
uucaagcagagauauuucaaga

SEQ ID NO: 282484 - RNA, 22 nt, Human
ucucuguacaguacaugccgug

SEQ ID NO: 282485 - RNA, 22 nt, Human
aaggcauaugcauagaagacag

SEQ ID NO: 282486 - RNA, 22 nt, Human
agguagaaggaccagaauuuau

SEQ ID NO: 282487 - RNA, 17 nt, Human
ucuguucaagugagagg

SEQ ID NO: 282488 - RNA, 22 nt, Human
ggacaugugcaacuucuuugga

SEQ ID NO: 282489 - RNA, 22 nt, Human
ugguggggucaucgucagaugc

SEQ ID NO: 282490 - RNA, 22 nt, Human
caauguuuuuccuuccuuaaua

SEQ ID NO: 282491 - RNA, 23 nt, Human
ggccucuguguucugcccacaug

SEQ ID NO: 282492 - RNA, 22 nt, Human
guggcagugaaggucauagcau

SEQ ID NO: 282493 - RNA, 22 nt, Human
uagacaggaaacauuaggaugg

SEQ ID NO: 282494 - RNA, 22 nt, Human
ucaguaaaguucuuucuugcug

SEQ ID NO: 282495 - RNA, 22 nt, Human
guuggugaguuucugaucacaa

SEQ ID NO: 282496 - RNA, 21 nt, Human
cuggaggcagguggugccagg

SEQ ID NO: 282497 - RNA, 21 nt, Human
agucucucuaauaaaugcuug

SEQ ID NO: 282498 - RNA, 22 nt, Human
uccugguaggcuaugucauguc

SEQ ID NO: 282499 - RNA, 22 nt, Human
caaauuuaaguuagaaagcaau

SEQ ID NO: 282500 - RNA, 22 nt, Human
ugcagggcaguggagguugagu

SEQ ID NO: 282501 - RNA, 22 nt, Human
cugggaggcaccgcgucgugcu

SEQ ID NO: 282502 - RNA, 22 nt, Human
uuuaagcuguggcauuaauucu

SEQ ID NO: 282503 - RNA, 22 nt, Human
caggcauagguaggauguuucu

SEQ ID NO: 282504 - RNA, 22 nt, Human
ucuuccuugccuugcuucauca

SEQ ID NO: 282505 - RNA, 22 nt, Human
agggauggaagacuugaagacc

SEQ ID NO: 282506 - RNA, 22 nt, Human
uggaagggguuacgcagcagga

SEQ ID NO: 282507 - RNA, 17 nt, Human
gcucagaguacacgugu

SEQ ID NO: 282508 - RNA, 22 nt, Human
gcccaggauucuuucuuccuua

SEQ ID NO: 282509 - RNA, 21 nt, Human
uaaaagaugacaagacagcuc

SEQ ID NO: 282510 - RNA, 21 nt, Human
agcugcaagagcaacaucuuu

SEQ ID NO: 282511 - RNA, 20 nt, Human
ucccaggcuccacccuagac

SEQ ID NO: 282512 - RNA, 22 nt, Human
agcccagaugguagcccuagaa

SEQ ID NO: 282513 - RNA, 22 nt, Human
aauggaauaccuagguggccca

SEQ ID NO: 282514 - RNA, 22 nt, Human
auuucacaaagaacagaugcag

SEQ ID NO: 282515 - RNA, 22 nt, Human
ucagggaagaaaugggacuuua

SEQ ID NO: 282516 - RNA, 18 nt, Human
uccagagagggagaagug

SEQ ID NO: 282517 - RNA, 22 nt, Human
caaaugauacuguuuuuagucu

SEQ ID NO: 282518 - RNA, 22 nt, Human
cagcuucuggcguggagccuga

SEQ ID NO: 282519 - RNA, 22 nt, Human
uuacauguuuacggauacacuu

SEQ ID NO: 282520 - RNA, 22 nt, Human
uccucaguggggcauucauuau

SEQ ID NO: 282521 - RNA, 22 nt, Human
gauuagaugacuaaugagcugu

SEQ ID NO: 282522 - RNA, 22 nt, Human
ugagggacucccggcccugcca

SEQ ID NO: 282523 - RNA, 22 nt, Human
guggcagucgcugacagauaca

SEQ ID NO: 282524 - RNA, 22 nt, Human
uagaaaugugauaauagcuuaa

SEQ ID NO: 282525 - RNA, 22 nt, Human
auccaugauuaguaggauaaag

SEQ ID NO: 282526 - RNA, 22 nt, Human
aguuugaaaguauugacagaag

SEQ ID NO: 282527 - RNA, 22 nt, Human
aucucccaaacucauuucuuca

SEQ ID NO: 282528 - RNA, 22 nt, Human
auuuaugacaaccaaagaguga

SEQ ID NO: 282529 - RNA, 22 nt, Human
aggaguuuggggauuagucagg

SEQ ID NO: 282530 - RNA, 22 nt, Human
cccugagcgugaggaggaagua

SEQ ID NO: 282531 - RNA, 20 nt, Human
aaaugcuguaauguuuggga

SEQ ID NO: 282532 - RNA, 22 nt, Human
uuguucaugguuguaaguuuga

SEQ ID NO: 282533 - RNA, 22 nt, Human
uuugacucagcaaauucacagg

SEQ ID NO: 282534 - RNA, 22 nt, Human
aguauugugacucaaguauucu

SEQ ID NO: 282535 - RNA, 22 nt, Human
auauauuugagaauauucauga

SEQ ID NO: 282536 - RNA, 22 nt, Human
ugcuuuauggauuuguguccug

SEQ ID NO: 282537 - RNA, 22 nt, Human
cuuagggaauugggaggaugcc

SEQ ID NO: 282538 - RNA, 22 nt, Human
agggacccauagagagaccagu

SEQ ID NO: 282539 - RNA, 22 nt, Human
uggcuuuaggagcuauauaccu

SEQ ID NO: 282540 - RNA, 22 nt, Human
agcugcaagauuucuuuuguau

SEQ ID NO: 282541 - RNA, 22 nt, Human
gccuggcaggccucaugagggg

SEQ ID NO: 282542 - RNA, 22 nt, Human
cccaggaguaagugacauuguu

SEQ ID NO: 282543 - RNA, 22 nt, Human
ggagccugaaaagucugcauuu

SEQ ID NO: 282544 - RNA, 22 nt, Human
gacaagauuaaccauaguuaag

SEQ ID NO: 282545 - RNA, 22 nt, Human
uccauucuaugcuuacauuuau

SEQ ID NO: 282546 - RNA, 22 nt, Human
auucagcagccauggcuucuga

SEQ ID NO: 282547 - RNA, 22 nt, Human
gacauggauacuugauaagggg

SEQ ID NO: 282548 - RNA, 22 nt, Human
uccaggcaggguuaaggguccu

SEQ ID NO: 282549 - RNA, 22 nt, Human
agguggcuucuggccaggugug

SEQ ID NO: 282550 - RNA, 18 nt, Human
uuucacagauucaugacu

SEQ ID NO: 282551 - RNA, 22 nt, Human
uuccuggggcgacuguaucuga

SEQ ID NO: 282552 - RNA, 22 nt, Human
uguccuggaaaaauggagaguu

SEQ ID NO: 282553 - RNA, 22 nt, Human
gaaagcagcuaagucuuaugau

SEQ ID NO: 282554 - RNA, 18 nt, Human
uuggcuuugagaacuggu

SEQ ID NO: 282555 - RNA, 22 nt, Human
gaucaguaagugaauaaugagu

SEQ ID NO: 282556 - RNA, 22 nt, Human
aacaugaaaagcccagagaggu

SEQ ID NO: 282557 - RNA, 22 nt, Human
aaaauucauagaacuguacgcu

SEQ ID NO: 282558 - RNA, 22 nt, Human
auguacuaugcagucaacuguu

SEQ ID NO: 282559 - RNA, 19 nt, Human
cucuggagaacaauagugc

SEQ ID NO: 282560 - RNA, 22 nt, Human
cuguccugguacuuugagguuc

SEQ ID NO: 282561 - RNA, 22 nt, Human
uuaggaaaggaacauugaaacg

SEQ ID NO: 282562 - RNA, 22 nt, Human
uagaaagcguuaaaucuacaga

SEQ ID NO: 282563 - RNA, 22 nt, Human
ucugaagacauaugauauggug

SEQ ID NO: 282564 - RNA, 22 nt, Human
uugcuaauuuaacuaccuuguu

SEQ ID NO: 282565 - RNA, 22 nt, Human
cagggcucccaaauaucucuuc

SEQ ID NO: 282566 - RNA, 22 nt, Human
uuaggagaugguccucuaggga

SEQ ID NO: 282567 - RNA, 22 nt, Human
cuggugcaagauucccugcuuc

SEQ ID NO: 282568 - RNA, 22 nt, Human
cugucugucaaguucaucucca

SEQ ID NO: 282569 - RNA, 22 nt, Human
agggcucugagcuggaccaccu

SEQ ID NO: 282570 - RNA, 22 nt, Human
uguccucacaugguggggagag

SEQ ID NO: 282571 - RNA, 22 nt, Human
uuugaaauuaagauauugucca

SEQ ID NO: 282572 - RNA, 22 nt, Human
agggaaugcuccguauaaaucu

SEQ ID NO: 282573 - RNA, 22 nt, Human
uauuucaggggguacaagaaga

SEQ ID NO: 282574 - RNA, 22 nt, Human
aaaauacuguggaguguugaaa

SEQ ID NO: 282575 - RNA, 22 nt, Human
aaauaucauucuggugcacaga

SEQ ID NO: 282576 - RNA, 17 nt, Human
uaggugguugcuggucu

SEQ ID NO: 282577 - RNA, 22 nt, Human
uaguuaggaauagcagcgacuc

SEQ ID NO: 282578 - RNA, 22 nt, Human
uucuaacucuacacuagcuuug

SEQ ID NO: 282579 - RNA, 22 nt, Human
uuuccuuccauguugggcaaaa

SEQ ID NO: 282580 - RNA, 22 nt, Human
ccaaagucagugcucagucguc

SEQ ID NO: 282581 - RNA, 20 nt, Human
agcauuugaaauaugacuau

SEQ ID NO: 282582 - RNA, 22 nt, Human
gccaggcauuauuccgaucccu

SEQ ID NO: 282583 - RNA, 22 nt, Human
gacaugugcugucucuuaaauu

SEQ ID NO: 282584 - RNA, 22 nt, Human
gcuguucagggcacucaugggc

SEQ ID NO: 282585 - RNA, 22 nt, Human
gccucugggguggagcccagca

SEQ ID NO: 282586 - RNA, 22 nt, Human
uuauuuaauuuucucacucaga

SEQ ID NO: 282587 - RNA, 22 nt, Human
uauuuucaccauguaucccugu

SEQ ID NO: 282588 - RNA, 20 nt, Human
uuuauugagcacguacugug

SEQ ID NO: 282589 - RNA, 22 nt, Human
accugcagcuaaagauguaggg

SEQ ID NO: 282590 - RNA, 22 nt, Human
aagugucugcaaaaugacagag

SEQ ID NO: 282591 - RNA, 22 nt, Human
cugggucuaaaaauucucagau

SEQ ID NO: 282592 - RNA, 19 nt, Human
ucuguggcaccugggaggg

SEQ ID NO: 282593 - RNA, 22 nt, Human
guaugaaagcaucauuccugcu

SEQ ID NO: 282594 - RNA, 22 nt, Human
uagcacccauggaaucugcugg

SEQ ID NO: 282595 - RNA, 21 nt, Human
ucugaugguagaugagaugug

SEQ ID NO: 282596 - RNA, 22 nt, Human
cauucccugucucuucaauccu

SEQ ID NO: 282597 - RNA, 22 nt, Human
acuuuguuuucaugaaacagcu

SEQ ID NO: 282598 - RNA, 22 nt, Human
gaguaaaaguuggauuacaaag

SEQ ID NO: 282599 - RNA, 22 nt, Human
cagcaggacguccaagugcuau

SEQ ID NO: 282600 - RNA, 22 nt, Human
ucuguucagaaauggaagugcc

SEQ ID NO: 282601 - RNA, 22 nt, Human
accaggcacucuuguggcagug

SEQ ID NO: 282602 - RNA, 22 nt, Human
caguuucuguuuuaaauagcag

SEQ ID NO: 282603 - RNA, 16 nt, Human
ucagugucagcuccug

SEQ ID NO: 282604 - RNA, 22 nt, Human
gggcagguggccucuuguacua

SEQ ID NO: 282605 - RNA, 20 nt, Human
aggaggggauagaaucaaag

SEQ ID NO: 282606 - RNA, 22 nt, Human
uuuacagcacugaagccagggg

SEQ ID NO: 282607 - RNA, 21 nt, Human
ucuuuucucagcuuugugguu

SEQ ID NO: 282608 - RNA, 22 nt, Human
ccuggccacccagccuuggcca

SEQ ID NO: 282609 - RNA, 22 nt, Human
auuuuagauuuaagaauaaggu

SEQ ID NO: 282610 - RNA, 22 nt, Human
ucugagcuauguaagacuugga

SEQ ID NO: 282611 - RNA, 22 nt, Human
gggagggaucugcuaggcaaug

SEQ ID NO: 282612 - RNA, 22 nt, Human
auucagcaaacauuuauugugu

SEQ ID NO: 282613 - RNA, 22 nt, Human
uccaggcaucccccaggacaga

SEQ ID NO: 282614 - RNA, 22 nt, Human
cauuccaaguauauacaugaua

SEQ ID NO: 282615 - RNA, 22 nt, Human
cuugccagcacuuggccagcug

SEQ ID NO: 282616 - RNA, 22 nt, Human
cagucuaagacucacgccaaga

SEQ ID NO: 282617 - RNA, 22 nt, Human
uacccaggggcugagcagaggu

SEQ ID NO: 282618 - RNA, 19 nt, Human
cuguuucugagcuugcuuu

SEQ ID NO: 282619 - RNA, 16 nt, Human
uccaggcauaucugag

SEQ ID NO: 282620 - RNA, 22 nt, Human
agcuuacaguucaaugacaaag

SEQ ID NO: 282621 - RNA, 22 nt, Human
uggaggaaucagggcuuaggcu

SEQ ID NO: 282622 - RNA, 22 nt, Human
cuuuacagccuccagaaggaac

SEQ ID NO: 282623 - RNA, 22 nt, Human
uacagugcuagaaccugcugua

SEQ ID NO: 282624 - RNA, 22 nt, Human
ugucauuuucugguuaguuaau

SEQ ID NO: 282625 - RNA, 23 nt, Human
ugguggggucuuggagacagcac

SEQ ID NO: 282626 - RNA, 23 nt, Human
ugagggacaugguggcuucugag

SEQ ID NO: 282627 - RNA, 22 nt, Human
agcagggcucacauuaguggau

SEQ ID NO: 282628 - RNA, 22 nt, Human
uuacauucccagugugcagcau

SEQ ID NO: 282629 - RNA, 21 nt, Human
agagccugagaucuuccagca

SEQ ID NO: 282630 - RNA, 22 nt, Human
uucauucacccaggaaacaucu

SEQ ID NO: 282631 - RNA, 22 nt, Human
auuuccagcagcauauuugucu

SEQ ID NO: 282632 - RNA, 22 nt, Human
ugguuuaccccuguccuauauc

SEQ ID NO: 282633 - RNA, 22 nt, Human
acuugaaaccuuggcaaacaau

SEQ ID NO: 282634 - RNA, 22 nt, Human
acuuuacucuucauaugugaca

SEQ ID NO: 282635 - RNA, 22 nt, Human
agcagggcucuguggagggugg

SEQ ID NO: 282636 - RNA, 22 nt, Human
caguaucugucaguaaucaggu

SEQ ID NO: 282637 - RNA, 22 nt, Human
agagguugggucugaggugaga

SEQ ID NO: 282638 - RNA, 22 nt, Human
cauucuuacacaauauuuuaau

SEQ ID NO: 282639 - RNA, 22 nt, Human
uccuggcagaaauggggcugug

SEQ ID NO: 282640 - RNA, 22 nt, Human
cacuggcccagccaggccuguu

SEQ ID NO: 282641 - RNA, 22 nt, Human
cagaagcauugacuccuugcuc

SEQ ID NO: 282642 - RNA, 18 nt, Human
agugaguuguugaaagaa

SEQ ID NO: 282643 - RNA, 22 nt, Human
cucucuggaauuaaagcccaau

SEQ ID NO: 282644 - RNA, 22 nt, Human
agaaaaagaaaguggauuuguc

SEQ ID NO: 282645 - RNA, 22 nt, Human
auguguccauuaucaguucugg

SEQ ID NO: 282646 - RNA, 18 nt, Human
ugccauccccagucaagu

SEQ ID NO: 282647 - RNA, 22 nt, Human
aagaugcagcuuuacaauaagg

SEQ ID NO: 282648 - RNA, 22 nt, Human
uauuuuacaugauccagaguug

SEQ ID NO: 282649 - RNA, 22 nt, Human
agcaaagcuaucucuauggaga

SEQ ID NO: 282650 - RNA, 22 nt, Human
augguacaaugauggauagugg

SEQ ID NO: 282651 - RNA, 22 nt, Human
uauccuguuuugcacaauuaua

SEQ ID NO: 282652 - RNA, 22 nt, Human
acccagagaacugugccuugag

SEQ ID NO: 282653 - RNA, 22 nt, Human
ggaaacacaugaucagacaucu

SEQ ID NO: 282654 - RNA, 22 nt, Human
ugcuccagugagcuggccaucc

SEQ ID NO: 282655 - RNA, 22 nt, Human
ggaggauuugucaucugaagau

SEQ ID NO: 282656 - RNA, 22 nt, Human
gauggcuuaagaguaaaaggca

SEQ ID NO: 282657 - RNA, 22 nt, Human
uauauauaugcacacacaccua

SEQ ID NO: 282658 - RNA, 22 nt, Human
acaugccaucacuuucauuccu

SEQ ID NO: 282659 - RNA, 22 nt, Human
augagugugaaguuagcucagu

SEQ ID NO: 282660 - RNA, 22 nt, Human
auuucucaguguacauuauguu

SEQ ID NO: 282661 - RNA, 22 nt, Human
ccauggcaauggucagucuauu

SEQ ID NO: 282662 - RNA, 22 nt, Human
aaacaaacauagguuugaaagu

SEQ ID NO: 282663 - RNA, 22 nt, Human
cugggugauuccuguccaggca

SEQ ID NO: 282664 - RNA, 22 nt, Human
ugguacaacuguauuaggcaaa

SEQ ID NO: 282665 - RNA, 22 nt, Human
cuaugaaaugucagauucugca

SEQ ID NO: 282666 - RNA, 20 nt, Human
uccaggagaacugggagccg

SEQ ID NO: 282667 - RNA, 22 nt, Human
gguggggcccuggcacugguau

SEQ ID NO: 282668 - RNA, 18 nt, Human
ugcuggcaacuacuauug

SEQ ID NO: 282669 - RNA, 22 nt, Human
gaggagaagcuaagaaacacag

SEQ ID NO: 282670 - RNA, 22 nt, Human
acaaggaggucuggggggcccu

SEQ ID NO: 282671 - RNA, 22 nt, Human
ugauaacuuuaauuugaucuga

SEQ ID NO: 282672 - RNA, 22 nt, Human
agaaaugaaaccaaagccuaga

SEQ ID NO: 282673 - RNA, 22 nt, Human
guucauauucuaaguaacuggc

SEQ ID NO: 282674 - RNA, 22 nt, Human
aaacuguugugguuuaucauua

SEQ ID NO: 282675 - RNA, 22 nt, Human
uacauguauguguuaauaucug

SEQ ID NO: 282676 - RNA, 22 nt, Human
cugcaucuuagucaaaaucugu

SEQ ID NO: 282677 - RNA, 22 nt, Human
gaacaacuccaagggacaucau

SEQ ID NO: 282678 - RNA, 22 nt, Human
ucauuuguucaucugcucuucu

SEQ ID NO: 282679 - RNA, 22 nt, Human
uuuaguagaaugauacagggca

SEQ ID NO: 282680 - RNA, 22 nt, Human
aauaucucaccaugacaaagca

SEQ ID NO: 282681 - RNA, 21 nt, Human
cccugcaggccagggcugagc

SEQ ID NO: 282682 - RNA, 22 nt, Human
aguggcagagcaggugcuggaa

SEQ ID NO: 282683 - RNA, 22 nt, Human
uuguaaauaguaguaagaugcc

SEQ ID NO: 282684 - RNA, 22 nt, Human
agcagggcaaagucaggcuaac

SEQ ID NO: 282685 - RNA, 19 nt, Human
aagcauggugccucaccuc

SEQ ID NO: 282686 - RNA, 22 nt, Human
cccaguguuccuugaggggcug

SEQ ID NO: 282687 - RNA, 22 nt, Human
auggucaguugcagcuaauguu

SEQ ID NO: 282688 - RNA, 22 nt, Human
uuuguucugaaaacucaagucc

SEQ ID NO: 282689 - RNA, 22 nt, Human
ggcuguugacagacauagguuu

SEQ ID NO: 282690 - RNA, 22 nt, Human
cacacauuucagaugcuacaau

SEQ ID NO: 282691 - RNA, 22 nt, Human
auccagagagguuaggugacau

SEQ ID NO: 282692 - RNA, 22 nt, Human
cagagcaacacccuuuacaucg

SEQ ID NO: 282693 - RNA, 22 nt, Human
uuuuaaaucuccaguugacccc

SEQ ID NO: 282694 - RNA, 22 nt, Human
aggaauguggccuagggaggag

SEQ ID NO: 282695 - RNA, 22 nt, Human
aaacaccagucccaguauacac

SEQ ID NO: 282696 - RNA, 22 nt, Human
aauuuacaguugcugaugguac

SEQ ID NO: 282697 - RNA, 22 nt, Human
uggccugacugucaggcuguau

SEQ ID NO: 282698 - RNA, 17 nt, Human
acaggccugcuugcacu

SEQ ID NO: 282699 - RNA, 23 nt, Human
uguuuguuucuaugagagauagc

SEQ ID NO: 282700 - RNA, 22 nt, Human
gcauuuaaauuugaacuucaga

SEQ ID NO: 282701 - RNA, 22 nt, Human
uaguauuuuagaaaaccaugaa

SEQ ID NO: 282702 - RNA, 22 nt, Human
ccaguguauuauuugagaaauu

SEQ ID NO: 282703 - RNA, 22 nt, Human
auauuauucuaguaacagugau

SEQ ID NO: 282704 - RNA, 22 nt, Human
gggcagguuggcaucccgggca

SEQ ID NO: 282705 - RNA, 22 nt, Human
uuagagaauuccaaaugacuac

SEQ ID NO: 282706 - RNA, 22 nt, Human
cagccuucaaggcuuagcucag

SEQ ID NO: 282707 - RNA, 22 nt, Human
aaaugaguuugccucuagauag

SEQ ID NO: 282708 - RNA, 22 nt, Human
ugagcaguaacagcucacaggg

SEQ ID NO: 282709 - RNA, 22 nt, Human
gggggucccaagcugggcugcu

SEQ ID NO: 282710 - RNA, 22 nt, Human
auuuauugagccuuuccuaugu

SEQ ID NO: 282711 - RNA, 22 nt, Human
cauguuucugagaaaaguagga

SEQ ID NO: 282712 - RNA, 22 nt, Human
uaugcuauucuucagaguguuc

SEQ ID NO: 282713 - RNA, 22 nt, Human
auaguacagauccauuaauuau

SEQ ID NO: 282714 - RNA, 22 nt, Human
uuucacauuggcuucuauuucu

SEQ ID NO: 282715 - RNA, 22 nt, Human
agcucagaacugcagacaugug

SEQ ID NO: 282716 - RNA, 22 nt, Human
cauuccuauuaugucccuagug

SEQ ID NO: 282717 - RNA, 22 nt, Human
uucaucaauguguuuaauaaug

SEQ ID NO: 282718 - RNA, 22 nt, Human
aauaacuggcacauaucacaua

SEQ ID NO: 282719 - RNA, 22 nt, Human
cugagggucaacuugauuguau

SEQ ID NO: 282720 - RNA, 22 nt, Human
auggcagggacuguggcccuug

SEQ ID NO: 282721 - RNA, 22 nt, Human
gcagagcagugcuugcccagcg

SEQ ID NO: 282722 - RNA, 22 nt, Human
uaguguauguucagcuuauaug

SEQ ID NO: 282723 - RNA, 22 nt, Human
agacaugacagauaguugcuag

SEQ ID NO: 282724 - RNA, 22 nt, Human
caagauuuuaucuccguuucug

SEQ ID NO: 282725 - RNA, 22 nt, Human
uuaguuuucucaucuaucucac

SEQ ID NO: 282726 - RNA, 22 nt, Human
acaugccaucuuugucaggagu

SEQ ID NO: 282727 - RNA, 22 nt, Human
uucaauuucauaauaucuagcu

SEQ ID NO: 282728 - RNA, 22 nt, Human
cagauuuacucccugcugcugc

SEQ ID NO: 282729 - RNA, 22 nt, Human
ugauuucauaguauauacauga

SEQ ID NO: 282730 - RNA, 17 nt, Human
cuuguuuuccacuggga

SEQ ID NO: 282731 - RNA, 22 nt, Human
ggaaggggugucgcccauggau

SEQ ID NO: 282732 - RNA, 22 nt, Human
gcugggugucacggggcucgug

SEQ ID NO: 282733 - RNA, 22 nt, Human
uccugggaccaggcaccuacug

SEQ ID NO: 282734 - RNA, 22 nt, Human
gugugucccuuggaaccucagc

SEQ ID NO: 282735 - RNA, 22 nt, Human
uagaaacauucaguugcagucc

SEQ ID NO: 282736 - RNA, 21 nt, Human
aacugagaccagcuaaagugg

SEQ ID NO: 282737 - RNA, 22 nt, Human
cugagcccgggugcucuacccc

SEQ ID NO: 282738 - RNA, 21 nt, Human
ucuggguguaaaucuuauuug

SEQ ID NO: 282739 - RNA, 22 nt, Human
cacuuuuaaauggguccguguu

SEQ ID NO: 282740 - RNA, 22 nt, Human
agaucuuuaaaaguuauuauua

SEQ ID NO: 282741 - RNA, 22 nt, Human
cagugcagaacacauggaaaau

SEQ ID NO: 282742 - RNA, 22 nt, Human
auauauaugcugauggcugcca

SEQ ID NO: 282743 - RNA, 22 nt, Human
agucaaagaugaccgaguuccu

SEQ ID NO: 282744 - RNA, 22 nt, Human
ggccgugcuccaaagucaucgu

SEQ ID NO: 282745 - RNA, 22 nt, Human
uauuucuuguuauucucguuga

SEQ ID NO: 282746 - RNA, 22 nt, Human
uacaguuccucucguggaggug

SEQ ID NO: 282747 - RNA, 22 nt, Human
cacagcaaagacacucucaacu

SEQ ID NO: 282748 - RNA, 22 nt, Human
agacugaaguaagaaugcagcu

SEQ ID NO: 282749 - RNA, 22 nt, Human
cacaaaugugcagaaaugugag

SEQ ID NO: 282750 - RNA, 22 nt, Human
gcaggcagagucaauuugaucc

SEQ ID NO: 282751 - RNA, 22 nt, Human
aguccuuugggaaaaaugacua

SEQ ID NO: 282752 - RNA, 22 nt, Human
caugccauuuacuuggaggaga

SEQ ID NO: 282753 - RNA, 22 nt, Human
cccagccugugacagccguccu

SEQ ID NO: 282754 - RNA, 22 nt, Human
ugucauuuucagcuuaugcuuc

SEQ ID NO: 282755 - RNA, 22 nt, Human
uuuaagaaguuauguuauaaau

SEQ ID NO: 282756 - RNA, 22 nt, Human
agcccggcuuccccgguugcua

SEQ ID NO: 282757 - RNA, 22 nt, Human
auuuacauaauagacuuuaggu

SEQ ID NO: 282758 - RNA, 22 nt, Human
uuccugugaagccgguggucuc

SEQ ID NO: 282759 - RNA, 22 nt, Human
uuacauguacugguuugacuua

SEQ ID NO: 282760 - RNA, 22 nt, Human
ucuucugugagaauucaagcaa

SEQ ID NO: 282761 - RNA, 22 nt, Human
gagcuggaggcagugcugaggu

SEQ ID NO: 282762 - RNA, 22 nt, Human
cuucuuuaauguauacaaaaga

SEQ ID NO: 282763 - RNA, 22 nt, Human
gggcgagggcgaaagcgagagc

SEQ ID NO: 282764 - RNA, 22 nt, Human
aaacaaugaaauauuuuuaugg

SEQ ID NO: 282765 - RNA, 22 nt, Human
aaggugucaaacuagaagaugu

SEQ ID NO: 282766 - RNA, 22 nt, Human
uguauugaauuguguuauaucu

SEQ ID NO: 282767 - RNA, 22 nt, Human
gaugagguuuuugaaaugugga

SEQ ID NO: 282768 - RNA, 22 nt, Human
uuacaguuuaguccaagccaga

SEQ ID NO: 282769 - RNA, 22 nt, Human
aacugucuaaggagaauaugaa

SEQ ID NO: 282770 - RNA, 22 nt, Human
cugagccagggccacacaugga

SEQ ID NO: 282771 - RNA, 22 nt, Human
gcaggugggagccgcugccuga

SEQ ID NO: 282772 - RNA, 23 nt, Human
ccacuagcaccuguucaacuucu

SEQ ID NO: 282773 - RNA, 19 nt, Human
gcugggugggguccacagc

SEQ ID NO: 282774 - RNA, 22 nt, Human
uuuugcuuuuguaacacagugu

SEQ ID NO: 282775 - RNA, 19 nt, Human
acccaggguugauguccag

SEQ ID NO: 282776 - RNA, 22 nt, Human
agcagggcuugccgcuuguccu

SEQ ID NO: 282777 - RNA, 22 nt, Human
ucucacaagcucaaggauuagu

SEQ ID NO: 282778 - RNA, 22 nt, Human
ugucagugccaacuuugcuggu

SEQ ID NO: 282779 - RNA, 22 nt, Human
uuauagaauccaguuguuguau

SEQ ID NO: 282780 - RNA, 22 nt, Human
caagauaauuuauucugaguuu

SEQ ID NO: 282781 - RNA, 22 nt, Human
uggccucugggaaagcagauuc

SEQ ID NO: 282782 - RNA, 22 nt, Human
gaccuggugcuagcuggugugu

SEQ ID NO: 282783 - RNA, 22 nt, Human
agacuacauaugccacaugaag

SEQ ID NO: 282784 - RNA, 22 nt, Human
gggcaggugugcagagcuguug

SEQ ID NO: 282785 - RNA, 22 nt, Human
ucacagaaaagcugagcaucag

SEQ ID NO: 282786 - RNA, 22 nt, Human
cuauugcuuuugugugcuccca

SEQ ID NO: 282787 - RNA, 22 nt, Human
cuauuucaaggcccagauauga

SEQ ID NO: 282788 - RNA, 17 nt, Human
aggcagcucagaacauc

SEQ ID NO: 282789 - RNA, 22 nt, Human
ccuggcucuucgggaguuuguu

SEQ ID NO: 282790 - RNA, 19 nt, Human
guuucauuaagauaggaaa

SEQ ID NO: 282791 - RNA, 22 nt, Human
ugguggcuaccagguccugggg

SEQ ID NO: 282792 - RNA, 22 nt, Human
uccugaugauauugcucuuucu

SEQ ID NO: 282793 - RNA, 20 nt, Human
agugcauggagggagagggc

SEQ ID NO: 282794 - RNA, 22 nt, Human
uucuucagagaguagaagcaag

SEQ ID NO: 282795 - RNA, 22 nt, Human
ugucucagggcagcagcagggg

SEQ ID NO: 282796 - RNA, 20 nt, Human
ucacuggccagaguagcccu

SEQ ID NO: 282797 - RNA, 22 nt, Human
gcuuccaaaucuguucaaaaug

SEQ ID NO: 282798 - RNA, 22 nt, Human
uuuuaucauuacccagcugaaa

SEQ ID NO: 282799 - RNA, 22 nt, Human
aggcucugguucaucaugaugg

SEQ ID NO: 282800 - RNA, 22 nt, Human
ugagaaaacaguuuguaauaau

SEQ ID NO: 282801 - RNA, 22 nt, Human
uuguacaaaggauuuggaagag

SEQ ID NO: 282802 - RNA, 22 nt, Human
uuuucauuguaaaucaggaaac

SEQ ID NO: 282803 - RNA, 22 nt, Human
agugugaguaauugagucuguc

SEQ ID NO: 282804 - RNA, 22 nt, Human
uuguaagaauaugaauacaaau

SEQ ID NO: 282805 - RNA, 22 nt, Human
cucuuaaagcuuccaguuucaa

SEQ ID NO: 282806 - RNA, 22 nt, Human
uccuaguucucugccagucgcu

SEQ ID NO: 282807 - RNA, 22 nt, Human
cuugaagaaaguauguugggau

SEQ ID NO: 282808 - RNA, 22 nt, Human
ggcuaccagauaaauuacagag

SEQ ID NO: 282809 - RNA, 22 nt, Human
aggaaugugaccacuagacucu

SEQ ID NO: 282810 - RNA, 22 nt, Human
agggcuccuaugaugcucugcc

SEQ ID NO: 282811 - RNA, 22 nt, Human
uuaaaagggauguuaucuguaa

SEQ ID NO: 282812 - RNA, 22 nt, Human
uuccugugguccagagucaucc

SEQ ID NO: 282813 - RNA, 22 nt, Human
cagaagucacccucagaauaac

SEQ ID NO: 282814 - RNA, 22 nt, Human
aacaaccaaaaagaugaaugua

SEQ ID NO: 282815 - RNA, 22 nt, Human
aggaaagccaaucucucuugac

SEQ ID NO: 282816 - RNA, 22 nt, Human
aaagugguuuaugauauuccaa

SEQ ID NO: 282817 - RNA, 22 nt, Human
agaugguccaugcacagauaug

SEQ ID NO: 282818 - RNA, 22 nt, Human
cuugcuucauuagugucuuagu

SEQ ID NO: 282819 - RNA, 22 nt, Human
uuugggaacucuaucauggaaa

SEQ ID NO: 282820 - RNA, 23 nt, Human
uccaugagaugugggcuucuagu

SEQ ID NO: 282821 - RNA, 22 nt, Human
augcaccugaacuccaucagcu

SEQ ID NO: 282822 - RNA, 20 nt, Human
cugcaggguuagaggcucca

SEQ ID NO: 282823 - RNA, 22 nt, Human
cagcuugugcaaagguccuggg

SEQ ID NO: 282824 - RNA, 22 nt, Human
accuugaugccuuuccaagaug

SEQ ID NO: 282825 - RNA, 17 nt, Human
uccuggcucugccacug

SEQ ID NO: 282826 - RNA, 22 nt, Human
caagggccaucugagggcacug

SEQ ID NO: 282827 - RNA, 21 nt, Human
uaacacauuuugguacuuugg

SEQ ID NO: 282828 - RNA, 17 nt, Human
ccugcccagagacagau

SEQ ID NO: 282829 - RNA, 22 nt, Human
caguguaucauuagugugauga

SEQ ID NO: 282830 - RNA, 22 nt, Human
aggaauguauuauuccuucugg

SEQ ID NO: 282831 - RNA, 22 nt, Human
agcccuugguauuuuccgaucc

SEQ ID NO: 282832 - RNA, 19 nt, Human
cuggguccuguucuuuuac

SEQ ID NO: 282833 - RNA, 17 nt, Human
ccugucuuguuucugcc

SEQ ID NO: 282834 - RNA, 19 nt, Human
uuuacagggaauggagacc

SEQ ID NO: 282835 - RNA, 22 nt, Human
ucagagaguuggaaagaauuaa

SEQ ID NO: 282836 - RNA, 22 nt, Human
gagccagggcugugagcugagc

SEQ ID NO: 282837 - RNA, 22 nt, Human
uuuagcuucaguucuagcuucu

SEQ ID NO: 282838 - RNA, 22 nt, Human
ugauuuccuaggucuggagaag

SEQ ID NO: 282839 - RNA, 22 nt, Human
ugcaaaaacugcaauugcuuuu

SEQ ID NO: 282840 - RNA, 21 nt, Human
uucucaguguccauguuaguu

SEQ ID NO: 282841 - RNA, 22 nt, Human
aaauacagauuccagggucuua

SEQ ID NO: 282842 - RNA, 21 nt, Human
uucuucaguuuaauauaaaau

SEQ ID NO: 282843 - RNA, 22 nt, Human
agcuuuauuaacucuccaggug

SEQ ID NO: 282844 - RNA, 22 nt, Human
uuaagucaauaucaaucucagc

SEQ ID NO: 282845 - RNA, 22 nt, Human
aaguuuuugguagagaaaagua

SEQ ID NO: 282846 - RNA, 20 nt, Human
aggaaaaauggaaacuggag

SEQ ID NO: 282847 - RNA, 22 nt, Human
auguuucagauacagaucaaau

SEQ ID NO: 282848 - RNA, 22 nt, Human
ggcagggaguggagacucccua

SEQ ID NO: 282849 - RNA, 20 nt, Human
uagggaugccaguacuucuc

SEQ ID NO: 282850 - RNA, 19 nt, Human
uccugcagguggcuugcag

SEQ ID NO: 282851 - RNA, 20 nt, Human
uccugcaguuccuaggaggg

SEQ ID NO: 282852 - RNA, 22 nt, Human
uuuauauguauugacuuugaug

SEQ ID NO: 282853 - RNA, 22 nt, Human
uccuucucugguuuuuacugua

SEQ ID NO: 282854 - RNA, 22 nt, Human
uuagccauucugauagguaugu

SEQ ID NO: 282855 - RNA, 22 nt, Human
gugcagcugccgaucagauagg

SEQ ID NO: 282856 - RNA, 22 nt, Human
acaaucuggaaaaguuaacuau

SEQ ID NO: 282857 - RNA, 22 nt, Human
cagggcagugaagaacacacgu

SEQ ID NO: 282858 - RNA, 22 nt, Human
acauucccaccaacaguguaaa

SEQ ID NO: 282859 - RNA, 22 nt, Human
auugaguaccuccagauucaua

SEQ ID NO: 282860 - RNA, 22 nt, Human
ggcaguggaggacccugugucu

SEQ ID NO: 282861 - RNA, 22 nt, Human
agcugcaaguguugccuccuac

SEQ ID NO: 282862 - RNA, 22 nt, Human
uuccuuucccuugcuucugugc

SEQ ID NO: 282863 - RNA, 22 nt, Human
ucuguucaucucaugggagaau

SEQ ID NO: 282864 - RNA, 22 nt, Human
uuguauuucgaugcacguguag

SEQ ID NO: 282865 - RNA, 22 nt, Human
cacuggcccauaaaggccuggg

SEQ ID NO: 282866 - RNA, 22 nt, Human
guacuaagucaggagaagaauu

SEQ ID NO: 282867 - RNA, 22 nt, Human
uaagguuucuaguuucuaaacu

SEQ ID NO: 282868 - RNA, 22 nt, Human
aggcagguuggugagaagacug

SEQ ID NO: 282869 - RNA, 22 nt, Human
cuggguaaguuccuaaggcuca

SEQ ID NO: 282870 - RNA, 22 nt, Human
agggccaguucuaccucugaau

SEQ ID NO: 282871 - RNA, 21 nt, Human
uaaaugugagcagggcugggc

SEQ ID NO: 282872 - RNA, 22 nt, Human
uccugcaguuacaucccagcca

SEQ ID NO: 282873 - RNA, 22 nt, Human
cucagccaugggguggaucagc

SEQ ID NO: 282874 - RNA, 22 nt, Human
uuucugauauacuguagaaucc

SEQ ID NO: 282875 - RNA, 22 nt, Human
uuacaguagcuuuauuuggagu

SEQ ID NO: 282876 - RNA, 22 nt, Human
gagcaaacaucagugaugucug

SEQ ID NO: 282877 - RNA, 22 nt, Human
gauccugugguuuuccugugca

SEQ ID NO: 282878 - RNA, 22 nt, Human
caggaaaugcuaucauagcuga

SEQ ID NO: 282879 - RNA, 22 nt, Human
gacccuguuucuacaaauaauu

SEQ ID NO: 282880 - RNA, 23 nt, Human
cuuucauugugguuucacagagc

SEQ ID NO: 282881 - RNA, 22 nt, Human
uuuguacaauuagcagaggcua

SEQ ID NO: 282882 - RNA, 22 nt, Human
auugaaaaauucacaauucugg

SEQ ID NO: 282883 - RNA, 22 nt, Human
cuuccuuccuuccccgaaaugc

SEQ ID NO: 282884 - RNA, 22 nt, Human
gggguacuggcuggagccccac

SEQ ID NO: 282885 - RNA, 22 nt, Human
aguggcuucauuucugccagaa

SEQ ID NO: 282886 - RNA, 22 nt, Human
auacauacauguaugcacauac

SEQ ID NO: 282887 - RNA, 22 nt, Human
ccugggucuucagucugcuggu

SEQ ID NO: 282888 - RNA, 22 nt, Human
agagauggagagcacuggggcu

SEQ ID NO: 282889 - RNA, 22 nt, Human
uggcagggugggcuucagcccc

SEQ ID NO: 282890 - RNA, 22 nt, Human
aagucacauucugagguauugg

SEQ ID NO: 282891 - RNA, 22 nt, Human
cagcuccucuggccagcccugc

SEQ ID NO: 282892 - RNA, 22 nt, Human
ucuggcagugaagucaugaggu

SEQ ID NO: 282893 - RNA, 22 nt, Human
uggcaaagauuaccacaucuac

SEQ ID NO: 282894 - RNA, 22 nt, Human
ucuuuccaaggacucuguagca

SEQ ID NO: 282895 - RNA, 22 nt, Human
guuuauuauacaacaaaagcua

SEQ ID NO: 282896 - RNA, 22 nt, Human
uccucuggcucuuucccuagga

SEQ ID NO: 282897 - RNA, 22 nt, Human
ucaugcagagccagucaggaua

SEQ ID NO: 282898 - RNA, 22 nt, Human
aguacaaagugcuccugguucu

SEQ ID NO: 282899 - RNA, 22 nt, Human
cacccagcacagagggaggcga

SEQ ID NO: 282900 - RNA, 22 nt, Human
aggcucugaggcagauuuucgu

SEQ ID NO: 282901 - RNA, 22 nt, Human
uuaguuuauaauucauuucugu

SEQ ID NO: 282902 - RNA, 22 nt, Human
aaggcucucugauggcagcagu

SEQ ID NO: 282903 - RNA, 22 nt, Human
augucucugccccagagagcuu

SEQ ID NO: 282904 - RNA, 22 nt, Human
guucagcagcagugauuuugug

SEQ ID NO: 282905 - RNA, 22 nt, Human
ugagcccuugacaucgcccacu

SEQ ID NO: 282906 - RNA, 22 nt, Human
gaggcuggaggucaaagaugaa

SEQ ID NO: 282907 - RNA, 22 nt, Human
cucugaccauucccuugauuuu

SEQ ID NO: 282908 - RNA, 22 nt, Human
cauauaaauacaacauguguua

SEQ ID NO: 282909 - RNA, 22 nt, Human
ucagacagcuugggauaacuga

SEQ ID NO: 282910 - RNA, 22 nt, Human
ucauuuguggaagugauugugg

SEQ ID NO: 282911 - RNA, 22 nt, Human
gagaugguugcaauaguuuaaa

SEQ ID NO: 282912 - RNA, 18 nt, Human
cuguccaguagacucugc

SEQ ID NO: 282913 - RNA, 22 nt, Human
aucugaaaagcuuuaaugagcu

SEQ ID NO: 282914 - RNA, 22 nt, Human
caucacagggggcuagaagucu

SEQ ID NO: 282915 - RNA, 22 nt, Human
cuggcaggcagacuucugcaag

SEQ ID NO: 282916 - RNA, 21 nt, Human
uccuggccagggcacuaggca

SEQ ID NO: 282917 - RNA, 22 nt, Human
gagucucugcuauguuuucucu

SEQ ID NO: 282918 - RNA, 22 nt, Human
caugcuguugaauaugacauug

SEQ ID NO: 282919 - RNA, 22 nt, Human
uccuggcuccagcagcucuucc

SEQ ID NO: 282920 - RNA, 20 nt, Human
ucccaggcugggcuccagcu

SEQ ID NO: 282921 - RNA, 22 nt, Human
cuaaauuauuugcacauuagag

SEQ ID NO: 282922 - RNA, 22 nt, Human
gaaugaaucuguaagugacaag

SEQ ID NO: 282923 - RNA, 22 nt, Human
uggaauguaaacucugugaggg

SEQ ID NO: 282924 - RNA, 19 nt, Human
gauuuaaacguggcucuau

SEQ ID NO: 282925 - RNA, 22 nt, Human
aguggagaccccacuucuacau

SEQ ID NO: 282926 - RNA, 22 nt, Human
guggcaguuuugacaucacaaa

SEQ ID NO: 282927 - RNA, 21 nt, Human
uuacaaagcaagugcuguguc

SEQ ID NO: 282928 - RNA, 23 nt, Human
aagugguuuugaacccggacccu

SEQ ID NO: 282929 - RNA, 22 nt, Human
uauuuagaaugcguguacgugu

SEQ ID NO: 282930 - RNA, 22 nt, Human
uuauugaguuguaagagcucuu

SEQ ID NO: 282931 - RNA, 22 nt, Human
cagucacuggaauagcugagga

SEQ ID NO: 282932 - RNA, 22 nt, Human
acagggcagcaacuuugugccu

SEQ ID NO: 282933 - RNA, 22 nt, Human
uacaugugaucagaaagugaaa

SEQ ID NO: 282934 - RNA, 22 nt, Human
auuucugugcaguaaaugguga

SEQ ID NO: 282935 - RNA, 22 nt, Human
ucuccuggccgggcuguccccu

SEQ ID NO: 282936 - RNA, 22 nt, Human
gcuguacaaggccucugccauc

SEQ ID NO: 282937 - RNA, 22 nt, Human
cacagguguccaauaccugcuu

SEQ ID NO: 282938 - RNA, 22 nt, Human
aagggcucacccaacucacuuc

SEQ ID NO: 282939 - RNA, 18 nt, Human
uggaggaaucacaauggc

SEQ ID NO: 282940 - RNA, 22 nt, Human
acuuuacaggcacuucaaguau

SEQ ID NO: 282941 - RNA, 22 nt, Human
gacaagcucuuguuucaugguu

SEQ ID NO: 282942 - RNA, 22 nt, Human
gcagagugguuucagaguugag

SEQ ID NO: 282943 - RNA, 22 nt, Human
cauuuacaauguacagguugug

SEQ ID NO: 282944 - RNA, 22 nt, Human
auagcaaaaggcaccagaguga

SEQ ID NO: 282945 - RNA, 22 nt, Human
aguguaugcagguuuucaaugu

SEQ ID NO: 282946 - RNA, 22 nt, Human
uucuauugggaagugugagagu

SEQ ID NO: 282947 - RNA, 22 nt, Human
gcagggcagggcaagaacuggg

SEQ ID NO: 282948 - RNA, 22 nt, Human
uuucugcauauguauguaugga

SEQ ID NO: 282949 - RNA, 22 nt, Human
ucaguguccugugcggugcagc

SEQ ID NO: 282950 - RNA, 22 nt, Human
gagggaugugccugaaggcagg

SEQ ID NO: 282951 - RNA, 22 nt, Human
agcuccaggauaagacaggugc

SEQ ID NO: 282952 - RNA, 22 nt, Human
ccuggcucugguucccucagcu

SEQ ID NO: 282953 - RNA, 22 nt, Human
cagcaggugucuagcaaggguc

SEQ ID NO: 282954 - RNA, 22 nt, Human
aguauucuggaauucuauguga

SEQ ID NO: 282955 - RNA, 22 nt, Human
uuaagacaguguauuuguuuuc

SEQ ID NO: 282956 - RNA, 22 nt, Human
agcagggcuuuggcuggcuuuc

SEQ ID NO: 282957 - RNA, 22 nt, Human
cuccugcaagccuccccaagca

SEQ ID NO: 282958 - RNA, 22 nt, Human
gugaacaggagaaagugaugga

SEQ ID NO: 282959 - RNA, 22 nt, Human
agcaagcagaaaugccauggca

SEQ ID NO: 282960 - RNA, 22 nt, Human
aaaguguugggauuacaggcau

SEQ ID NO: 282961 - RNA, 22 nt, Human
auccuucuucugcuagugucua

SEQ ID NO: 282962 - RNA, 17 nt, Human
ccaggcuccaucacugu

SEQ ID NO: 282963 - RNA, 22 nt, Human
uaaugucuaugggccagauaau

SEQ ID NO: 282964 - RNA, 22 nt, Human
aggagccaugagugacaucaca

SEQ ID NO: 282965 - RNA, 22 nt, Human
uggcaggaaccaggaggcucuc

SEQ ID NO: 282966 - RNA, 22 nt, Human
gggcuccaccuagggacacugg

SEQ ID NO: 282967 - RNA, 20 nt, Human
ucuggcucuuugcuccuccc

SEQ ID NO: 282968 - RNA, 22 nt, Human
guccuggcccaggaguacacau

SEQ ID NO: 282969 - RNA, 22 nt, Human
aagauuuacuuucuuuguaaua

SEQ ID NO: 282970 - RNA, 22 nt, Human
uuucuguaaguggcaaauaaug

SEQ ID NO: 282971 - RNA, 20 nt, Human
uauuuugcaauuaugguuca

SEQ ID NO: 282972 - RNA, 20 nt, Human
acuguucaagggccuggugg

SEQ ID NO: 282973 - RNA, 22 nt, Human
ggggagaauuacauggcgugga

SEQ ID NO: 282974 - RNA, 22 nt, Human
caaauguauaaauguacuuucu

SEQ ID NO: 282975 - RNA, 22 nt, Human
agcuggcaguaugacuggugac

SEQ ID NO: 282976 - RNA, 22 nt, Human
ugcuuaaaaugaugauuauuuu

SEQ ID NO: 282977 - RNA, 22 nt, Human
auuuucugaguccagaauuuac

SEQ ID NO: 282978 - RNA, 22 nt, Human
uuccuucuggaagcuucagggg

SEQ ID NO: 282979 - RNA, 22 nt, Human
ggagcugaggaauagcuuugau

SEQ ID NO: 282980 - RNA, 22 nt, Human
aggcugugaaauguggcaagga

SEQ ID NO: 282981 - RNA, 22 nt, Human
aggccugggcaagaaggggcgu

SEQ ID NO: 282982 - RNA, 22 nt, Human
acaguuuaucgauucaccuacc

SEQ ID NO: 282983 - RNA, 22 nt, Human
ccuuccuggagcccaugcagau

SEQ ID NO: 282984 - RNA, 22 nt, Human
ggcagugggaaauaagugagaa

SEQ ID NO: 282985 - RNA, 22 nt, Human
ccugggugcccggcccuucucu

SEQ ID NO: 282986 - RNA, 22 nt, Human
aacaucuacuaagugccaggca

SEQ ID NO: 282987 - RNA, 22 nt, Human
uagacaggagucaggcuagaau

SEQ ID NO: 282988 - RNA, 22 nt, Human
uagcaaaaacugcaguuacuuu

SEQ ID NO: 282989 - RNA, 20 nt, Human
agcuaggagaaagcauggag

SEQ ID NO: 282990 - RNA, 20 nt, Human
ugccccaggccugcaccugc

SEQ ID NO: 282991 - RNA, 22 nt, Human
guucucucagcgauagugaugg

SEQ ID NO: 282992 - RNA, 22 nt, Human
uccuggacaagcccuucacccu

SEQ ID NO: 282993 - RNA, 22 nt, Human
ccuuccuuugcaucauuucuag

SEQ ID NO: 282994 - RNA, 22 nt, Human
uuccuggcauagagagggcaca

SEQ ID NO: 282995 - RNA, 22 nt, Human
ucagcugugauccaucuaucua

SEQ ID NO: 282996 - RNA, 22 nt, Human
agagccaggaugucuucugggg

SEQ ID NO: 282997 - RNA, 17 nt, Human
aauugcuuguacuccca

SEQ ID NO: 282998 - RNA, 22 nt, Human
ugcugagggagggguuuuccag

SEQ ID NO: 282999 - RNA, 22 nt, Human
aagaugcaugcugaagcuggcu

SEQ ID NO: 283000 - RNA, 22 nt, Human
aaaggaggaauggagagaugcu

SEQ ID NO: 283001 - RNA, 22 nt, Human
ucauucuugcguaugccauggu

SEQ ID NO: 283002 - RNA, 22 nt, Human
accuucaaugaaaauaauaguc

SEQ ID NO: 283003 - RNA, 19 nt, Human
agugcaugggcgaggugca

SEQ ID NO: 283004 - RNA, 22 nt, Human
ugcuggcuccucgaggcuucgu

SEQ ID NO: 283005 - RNA, 22 nt, Human
cccagcccacgguccugggugg

SEQ ID NO: 283006 - RNA, 22 nt, Human
ucaggcccuucucccaggacuc

SEQ ID NO: 283007 - RNA, 22 nt, Human
uaucuuuugaguucucaagaug

SEQ ID NO: 283008 - RNA, 22 nt, Human
aagggcagcuauuaucgucauc

SEQ ID NO: 283009 - RNA, 22 nt, Human
cuggguggagccuggucaucug

SEQ ID NO: 283010 - RNA, 22 nt, Human
cauuuauugguuaggccagcag

SEQ ID NO: 283011 - RNA, 22 nt, Human
agaaaagguugaaaguaggauu

SEQ ID NO: 283012 - RNA, 22 nt, Human
gagcaguaggagaacccugagc

SEQ ID NO: 283013 - RNA, 22 nt, Human
ugccccagacucugcucaccuc

SEQ ID NO: 283014 - RNA, 22 nt, Human
aauagaauguaaucuaauacau

SEQ ID NO: 283015 - RNA, 22 nt, Human
caugcagcagaauaaugacuau

SEQ ID NO: 283016 - RNA, 20 nt, Human
ccacccugcuaagaauacac

SEQ ID NO: 283017 - RNA, 22 nt, Human
guauucuuaaggauugagcaaa

SEQ ID NO: 283018 - RNA, 22 nt, Human
aguguccuacagcuccugccug

SEQ ID NO: 283019 - RNA, 22 nt, Human
acagggcaugugcaagagacau

SEQ ID NO: 283020 - RNA, 22 nt, Human
ccaggcacuggcuggguucuuu

SEQ ID NO: 283021 - RNA, 22 nt, Human
uuuacagaucuguugauuuguu

SEQ ID NO: 283022 - RNA, 20 nt, Human
uguguccaucaucugggcac

SEQ ID NO: 283023 - RNA, 22 nt, Human
cuggaaugccucccugucagag

SEQ ID NO: 283024 - RNA, 22 nt, Human
uggaggaaaaaaccaggcagag

SEQ ID NO: 283025 - RNA, 22 nt, Human
ucuggcagcaagucuguuucuc

SEQ ID NO: 283026 - RNA, 22 nt, Human
agccuugaacacugacugaagg

SEQ ID NO: 283027 - RNA, 22 nt, Human
accugcagccacuucucuccuu

SEQ ID NO: 283028 - RNA, 22 nt, Human
ucugucuuugagaucucagccu

SEQ ID NO: 283029 - RNA, 22 nt, Human
ucagggacagggugcugcugcg

SEQ ID NO: 283030 - RNA, 22 nt, Human
aauucuuggaaacauuacugga

SEQ ID NO: 283031 - RNA, 22 nt, Human
gaaacuuuggcuaaaagccaga

SEQ ID NO: 283032 - RNA, 22 nt, Human
aggagggacaccaauauauguu

SEQ ID NO: 283033 - RNA, 22 nt, Human
caggaagggggauccuuggaag

SEQ ID NO: 283034 - RNA, 22 nt, Human
aauuagggaaaauuuacuugua

SEQ ID NO: 283035 - RNA, 22 nt, Human
gaauguaagugggcagaagaca

SEQ ID NO: 283036 - RNA, 22 nt, Human
cacuuuauaugcauuaccucau

SEQ ID NO: 283037 - RNA, 22 nt, Human
cagggacaauggcagagccuga

SEQ ID NO: 283038 - RNA, 22 nt, Human
ggcaggcugggagucaucagag

SEQ ID NO: 283039 - RNA, 22 nt, Human
ggccugaucuuugacccucauc

SEQ ID NO: 283040 - RNA, 22 nt, Human
ugucuuuagaaagaagcagaca

SEQ ID NO: 283041 - RNA, 22 nt, Human
uacauguuuacuccaagucagg

SEQ ID NO: 283042 - RNA, 22 nt, Human
cuggcaggaagaggaaagguca

SEQ ID NO: 283043 - RNA, 22 nt, Human
aaauuauucucauguguuucuu

SEQ ID NO: 283044 - RNA, 22 nt, Human
agccuauuccaggaugagcuca

SEQ ID NO: 283045 - RNA, 22 nt, Human
ugcaaacagccuugaaagaggg

SEQ ID NO: 283046 - RNA, 22 nt, Human
ugggguccucucacuuggaggg

SEQ ID NO: 283047 - RNA, 22 nt, Human
guggcagugccguuugguucag

SEQ ID NO: 283048 - RNA, 22 nt, Human
uauuugauagagauaaaugaua

SEQ ID NO: 283049 - RNA, 22 nt, Human
uauuucauucuuuaucaggagc

SEQ ID NO: 283050 - RNA, 21 nt, Human
gcucuccagggccagcccagg

SEQ ID NO: 283051 - RNA, 22 nt, Human
uugaggagcaggaugggaggcu

SEQ ID NO: 283052 - RNA, 20 nt, Human
gcauguguauggaaggggga

SEQ ID NO: 283053 - RNA, 22 nt, Human
uuugggaacaaugaggaucuga

SEQ ID NO: 283054 - RNA, 22 nt, Human
gggggaugcucaggaggcugcu

SEQ ID NO: 283055 - RNA, 22 nt, Human
cuguccugauggugccacuggu

SEQ ID NO: 283056 - RNA, 17 nt, Human
auacaguuuauuuuaca

SEQ ID NO: 283057 - RNA, 22 nt, Human
acauucuugaagugaaguuuau

SEQ ID NO: 283058 - RNA, 22 nt, Human
cuugucuugcacacgguugcca

SEQ ID NO: 283059 - RNA, 22 nt, Human
aaggccaucuacuuacggaauu

SEQ ID NO: 283060 - RNA, 21 nt, Human
ucugccagcugaagaggugga

SEQ ID NO: 283061 - RNA, 22 nt, Human
aaauucaauuaacuuucaugcu

SEQ ID NO: 283062 - RNA, 22 nt, Human
ucuggcagaucuucccacguuu

SEQ ID NO: 283063 - RNA, 22 nt, Human
gacauguugaagaauauuugga

SEQ ID NO: 283064 - RNA, 22 nt, Human
auggcuggauuugauccauggg

SEQ ID NO: 283065 - RNA, 22 nt, Human
acuccagguuuuuucacugaag

SEQ ID NO: 283066 - RNA, 22 nt, Human
ugcucccaggcauucucuguug

SEQ ID NO: 283067 - RNA, 22 nt, Human
ccaggcccaggguacugaccaa

SEQ ID NO: 283068 - RNA, 22 nt, Human
agggaauucacuggaacgcccu

SEQ ID NO: 283069 - RNA, 22 nt, Human
acuucaaauuuucagaagaaau

SEQ ID NO: 283070 - RNA, 22 nt, Human
gacccagcuaaccaggugggga

SEQ ID NO: 283071 - RNA, 22 nt, Human
uccaguggcaccuuggcccuca

SEQ ID NO: 283072 - RNA, 22 nt, Human
ugaaggagaauuaauaggcauu

SEQ ID NO: 283073 - RNA, 22 nt, Human
acagguguagguacauuugcau

SEQ ID NO: 283074 - RNA, 22 nt, Human
aaagaaggaugggagaaauccu

SEQ ID NO: 283075 - RNA, 22 nt, Human
caugagauaauuuuucuccagu

SEQ ID NO: 283076 - RNA, 22 nt, Human
uggccaggccucuuggugccca

SEQ ID NO: 283077 - RNA, 22 nt, Human
ugguggcagcugagugucaggu

SEQ ID NO: 283078 - RNA, 22 nt, Human
gccuggguccacugaucaugcu

SEQ ID NO: 283079 - RNA, 22 nt, Human
cuucuuaaucccuuauauauuu

SEQ ID NO: 283080 - RNA, 22 nt, Human
auguaaauuguacugacacacg

SEQ ID NO: 283081 - RNA, 22 nt, Human
ggcaaaguuuucaucucauaac

SEQ ID NO: 283082 - RNA, 22 nt, Human
aauucccauuugcagaaaauca

SEQ ID NO: 283083 - RNA, 22 nt, Human
agugucugaucaguugacuaga

SEQ ID NO: 283084 - RNA, 22 nt, Human
cagggcagaacauauagauagu

SEQ ID NO: 283085 - RNA, 22 nt, Human
uauuagggaacugcaagacuaa

SEQ ID NO: 283086 - RNA, 22 nt, Human
uuccagaagccuccauauuacu

SEQ ID NO: 283087 - RNA, 22 nt, Human
ucccuucuggcagcagugugag

SEQ ID NO: 283088 - RNA, 22 nt, Human
auucagagcacuggguagaauu

SEQ ID NO: 283089 - RNA, 22 nt, Human
aagggcaggcacccacccucac

SEQ ID NO: 283090 - RNA, 19 nt, Human
uuuaaagugacugguauuu

SEQ ID NO: 283091 - RNA, 22 nt, Human
guggaggaaaagaaguugggug

SEQ ID NO: 283092 - RNA, 21 nt, Human
ucauuuuuauugcuaccuugc

SEQ ID NO: 283093 - RNA, 22 nt, Human
aaaacugaaccuugagaucuuu

SEQ ID NO: 283094 - RNA, 20 nt, Human
auguccagugacuggaccau

SEQ ID NO: 283095 - RNA, 22 nt, Human
uccaggaaagugggaugugugu

SEQ ID NO: 283096 - RNA, 22 nt, Human
ucuaacuugaacucaugacugu

SEQ ID NO: 283097 - RNA, 22 nt, Human
aguguguccagaaaucuguauu

SEQ ID NO: 283098 - RNA, 20 nt, Human
uccaggcagcucagaguguc

SEQ ID NO: 283099 - RNA, 22 nt, Human
ucacauucuagaauguuaucgu

SEQ ID NO: 283100 - RNA, 22 nt, Human
cucccaagauaaauaaggcagu

SEQ ID NO: 283101 - RNA, 22 nt, Human
gcaggcagaucaccugucagga

SEQ ID NO: 283102 - RNA, 22 nt, Human
uggcaaaguaucugucccagcu

SEQ ID NO: 283103 - RNA, 22 nt, Human
cuucaguuaguuucaugugagc

SEQ ID NO: 283104 - RNA, 22 nt, Human
guuacaaaggucauaaaagugu

SEQ ID NO: 283105 - RNA, 22 nt, Human
auuucaguagaaaaucuugauu

SEQ ID NO: 283106 - RNA, 22 nt, Human
ugccuaguaggguuguuguagg

SEQ ID NO: 283107 - RNA, 22 nt, Human
gacagaaggcaucuagggcacg

SEQ ID NO: 283108 - RNA, 17 nt, Human
ccaggagcgugggucuc

SEQ ID NO: 283109 - RNA, 22 nt, Human
cacaggugucucuaguagcguu

SEQ ID NO: 283110 - RNA, 22 nt, Human
aaauuucaguuaccuuuacguu

SEQ ID NO: 283111 - RNA, 22 nt, Human
ucagggcaucucuuaaguggug

SEQ ID NO: 283112 - RNA, 22 nt, Human
auucucuuuguauaacaucuug

SEQ ID NO: 283113 - RNA, 22 nt, Human
cccaagagguggagguugcagu

SEQ ID NO: 283114 - RNA, 22 nt, Human
cagugagggcccccuuccaggu

SEQ ID NO: 283115 - RNA, 21 nt, Human
acucugaaaauuaauaguuau

SEQ ID NO: 283116 - RNA, 22 nt, Human
auuauuagugauguuguuacug

SEQ ID NO: 283117 - RNA, 20 nt, Human
ucuggcaggugaacgagcug

SEQ ID NO: 283118 - RNA, 22 nt, Human
acacauauauacauauuugugc

SEQ ID NO: 283119 - RNA, 22 nt, Human
ugucuucaucuccaugcacaga

SEQ ID NO: 283120 - RNA, 22 nt, Human
caugcagccugugaacaguguc

SEQ ID NO: 283121 - RNA, 18 nt, Human
caaauagcaugauguccu

SEQ ID NO: 283122 - RNA, 22 nt, Human
aaaagcagaucuccaaagucua

SEQ ID NO: 283123 - RNA, 22 nt, Human
uuugacucuugcccaguuuggc

SEQ ID NO: 283124 - RNA, 22 nt, Human
caaggcauuguguaagcacuug

SEQ ID NO: 283125 - RNA, 20 nt, Human
aauuagauguuuaaucaaua

SEQ ID NO: 283126 - RNA, 22 nt, Human
acuuuucuaagcaauggucuug

SEQ ID NO: 283127 - RNA, 22 nt, Human
auguaacacccacuuuuauagc

SEQ ID NO: 283128 - RNA, 22 nt, Human
uguguccugguguuaauuuuau

SEQ ID NO: 283129 - RNA, 22 nt, Human
ucagacaggccucuccagccuc

SEQ ID NO: 283130 - RNA, 21 nt, Human
ugcuuuaugggaaaaauguca

SEQ ID NO: 283131 - RNA, 22 nt, Human
auuuccaugaauucccacucau

SEQ ID NO: 283132 - RNA, 22 nt, Human
uucauaguguuuccuuccagug

SEQ ID NO: 283133 - RNA, 22 nt, Human
ggugccaggcuguagucagggu

SEQ ID NO: 283134 - RNA, 22 nt, Human
gguuucaaaguggacaguuagu

SEQ ID NO: 283135 - RNA, 22 nt, Human
acaagugugugcaguuuguaaa

SEQ ID NO: 283136 - RNA, 22 nt, Human
caguuaaaagaagucuaucuua

SEQ ID NO: 283137 - RNA, 23 nt, Human
cagcuuucagggcuuuagggaag

SEQ ID NO: 283138 - RNA, 22 nt, Human
uucacauuaagccuccuccuac

SEQ ID NO: 283139 - RNA, 22 nt, Human
cugaaggauuuaguucuuugcu

SEQ ID NO: 283140 - RNA, 22 nt, Human
cuuaaagaguauuuaauauaau

SEQ ID NO: 283141 - RNA, 22 nt, Human
aggcucugacgucacacguggc

SEQ ID NO: 283142 - RNA, 23 nt, Human
aaaaaaccauguaggcacucagu

SEQ ID NO: 283143 - RNA, 22 nt, Human
ucaagcugcaucagugcaguga

SEQ ID NO: 283144 - RNA, 22 nt, Human
uucuaacucuguuauguguuuc

SEQ ID NO: 283145 - RNA, 22 nt, Human
aauuugcaugaugagaacaaua

SEQ ID NO: 283146 - RNA, 22 nt, Human
uggugcagguguugaugcagga

SEQ ID NO: 283147 - RNA, 22 nt, Human
auuuacagaagcauguaauagc

SEQ ID NO: 283148 - RNA, 22 nt, Human
cuucucccugggggcucuuuau

SEQ ID NO: 283149 - RNA, 22 nt, Human
cuccagggaggagcacggguuc

SEQ ID NO: 283150 - RNA, 22 nt, Human
aggcccagcuggacaaacugcu

SEQ ID NO: 283151 - RNA, 22 nt, Human
auugcuuuguacaugccuagca

SEQ ID NO: 283152 - RNA, 22 nt, Human
uuuaagcuaaugucauaauuag

SEQ ID NO: 283153 - RNA, 22 nt, Human
acagcuuuuaugggaccagcca

SEQ ID NO: 283154 - RNA, 22 nt, Human
uuuuagcuguugauuguucccc

SEQ ID NO: 283155 - RNA, 22 nt, Human
agaaguuugguccuauaaacuc

SEQ ID NO: 283156 - RNA, 22 nt, Human
uuuauugacccaaagcgagagu

SEQ ID NO: 283157 - RNA, 22 nt, Human
uucaguuucguuaucuaugaga

SEQ ID NO: 283158 - RNA, 22 nt, Human
ggcaggugaucuagagucaaua

SEQ ID NO: 283159 - RNA, 22 nt, Human
ccaggccuagccccugagggua

SEQ ID NO: 283160 - RNA, 22 nt, Human
cugaaaaacgggauuuggcugg

SEQ ID NO: 283161 - RNA, 22 nt, Human
auguguccuuguucccauucca

SEQ ID NO: 283162 - RNA, 22 nt, Human
acacugcucacuucuucccuug

SEQ ID NO: 283163 - RNA, 22 nt, Human
cuguggcuggcucaucauaggu

SEQ ID NO: 283164 - RNA, 22 nt, Human
aaagauucgagcgauguauaaa

SEQ ID NO: 283165 - RNA, 22 nt, Human
ucagcuuuuuggauugcccaag

SEQ ID NO: 283166 - RNA, 22 nt, Human
ggaagaaaaugggcaacaggug

SEQ ID NO: 283167 - RNA, 22 nt, Human
cuuuaguuuaagaacaugauga

SEQ ID NO: 283168 - RNA, 22 nt, Human
uucuuucuuuguaguccugaac

SEQ ID NO: 283169 - RNA, 22 nt, Human
uccaggcaaagccuuguagacg

SEQ ID NO: 283170 - RNA, 22 nt, Human
uacagucucuuugagugauugu

SEQ ID NO: 283171 - RNA, 22 nt, Human
uguagaaagaauauguuucaua

SEQ ID NO: 283172 - RNA, 22 nt, Human
ccuggacucaggcugugggcac

SEQ ID NO: 283173 - RNA, 22 nt, Human
ccucccucccucuuaugguuua

SEQ ID NO: 283174 - RNA, 22 nt, Human
uccagaggggcagcccugugcu

SEQ ID NO: 283175 - RNA, 21 nt, Human
ucacguggucacaugagcuuu

SEQ ID NO: 283176 - RNA, 22 nt, Human
cuccaggccauggcugcggagg

SEQ ID NO: 283177 - RNA, 22 nt, Human
aguucaguaguccuucauugua

SEQ ID NO: 283178 - RNA, 22 nt, Human
cacagguggcuucuuucaucuu

SEQ ID NO: 283179 - RNA, 22 nt, Human
agcugugugcccaugguggagg

SEQ ID NO: 283180 - RNA, 22 nt, Human
gcaaaaaaugcuuguugcuuag

SEQ ID NO: 283181 - RNA, 22 nt, Human
ugcuuaaaauaguucauuuuug

SEQ ID NO: 283182 - RNA, 22 nt, Human
cagcuuuccagagaccugcccc

SEQ ID NO: 283183 - RNA, 22 nt, Human
auaucaguaucuauguauuugu

SEQ ID NO: 283184 - RNA, 19 nt, Human
gcagagugggguggagggu

SEQ ID NO: 283185 - RNA, 22 nt, Human
ccuggcagaauauuaaagugca

SEQ ID NO: 283186 - RNA, 22 nt, Human
uuuccuuccaaaugcccgggag

SEQ ID NO: 283187 - RNA, 22 nt, Human
ccuccugggagagcacggaggg

SEQ ID NO: 283188 - RNA, 23 nt, Human
ugcaggugauuaauccaguuuca

SEQ ID NO: 283189 - RNA, 22 nt, Human
ucuauaaaacucaagagcaauu

SEQ ID NO: 283190 - RNA, 22 nt, Human
uuacagucagugaauggaaggg

SEQ ID NO: 283191 - RNA, 22 nt, Human
ucuguggcacgauugcacugca

SEQ ID NO: 283192 - RNA, 22 nt, Human
cuucuuuaccaagagauagagu

SEQ ID NO: 283193 - RNA, 22 nt, Human
gucacaggcaguaacuaggacc

SEQ ID NO: 283194 - RNA, 22 nt, Human
ucugaaauuuuaguuauagaaa

SEQ ID NO: 283195 - RNA, 22 nt, Human
caaaguccuagaacagugcuug

SEQ ID NO: 283196 - RNA, 22 nt, Human
auguuuuauauuuugcagcagu

SEQ ID NO: 283197 - RNA, 22 nt, Human
uugugcaauuuaaaaucuuccu

SEQ ID NO: 283198 - RNA, 22 nt, Human
cacaugaugguggaagccauag

SEQ ID NO: 283199 - RNA, 22 nt, Human
ucuaacuugugaguauagauga

SEQ ID NO: 283200 - RNA, 22 nt, Human
ugguaaaaaccgcaauuacauu

SEQ ID NO: 283201 - RNA, 22 nt, Human
ccagagagucgaugggggacac

SEQ ID NO: 283202 - RNA, 22 nt, Human
cauuuuacugacucuugaauua

SEQ ID NO: 283203 - RNA, 22 nt, Human
uccagagagaaaaacaagcuuu

SEQ ID NO: 283204 - RNA, 22 nt, Human
auguccucaaaacugauugcag

SEQ ID NO: 283205 - RNA, 22 nt, Human
ucuuuacacaagacaagaauaa

SEQ ID NO: 283206 - RNA, 21 nt, Human
cacauuccaugggucuauuua

SEQ ID NO: 283207 - RNA, 22 nt, Human
acaggcaggcuucggccagagc

SEQ ID NO: 283208 - RNA, 22 nt, Human
auacacauauauacacguuuaa

SEQ ID NO: 283209 - RNA, 22 nt, Human
gaaugaagcaggucacacaguu

SEQ ID NO: 283210 - RNA, 22 nt, Human
uagagucagagaaucauuacag

SEQ ID NO: 283211 - RNA, 22 nt, Human
gguucccggaucuccgaguccc

SEQ ID NO: 283212 - RNA, 22 nt, Human
auuuuacuuugugaauauugac

SEQ ID NO: 283213 - RNA, 22 nt, Human
cacaguuucaauaauuauucuu

SEQ ID NO: 283214 - RNA, 22 nt, Human
uugcuggcaauuuagagauuuc

SEQ ID NO: 283215 - RNA, 22 nt, Human
ucuacaaagaagaauuaauguc

SEQ ID NO: 283216 - RNA, 23 nt, Human
uccucccaaauuucagccucauu

SEQ ID NO: 283217 - RNA, 21 nt, Human
agcaacucugacuagaugagg

SEQ ID NO: 283218 - RNA, 22 nt, Human
gcacacuuaauacucacugugc

SEQ ID NO: 283219 - RNA, 22 nt, Human
ucucuuaaaagauuuuaaugac

SEQ ID NO: 283220 - RNA, 21 nt, Human
uuucugaaggcaacaucuauc

SEQ ID NO: 283221 - RNA, 22 nt, Human
caaguuuugauuuugcaguaaa

SEQ ID NO: 283222 - RNA, 22 nt, Human
cacagccuuacugagauccacu

SEQ ID NO: 283223 - RNA, 22 nt, Human
uuucagaaagcugaacauauga

SEQ ID NO: 283224 - RNA, 22 nt, Human
uucuuuaucaguuacucauagg

SEQ ID NO: 283225 - RNA, 22 nt, Human
cuggaggaccacagaagcuggu

SEQ ID NO: 283226 - RNA, 22 nt, Human
gaguuaauucgaauauucuagc

SEQ ID NO: 283227 - RNA, 22 nt, Human
ggcaggcaaggcagccugguga

SEQ ID NO: 283228 - RNA, 22 nt, Human
auccuggacaguuuccccuauu

SEQ ID NO: 283229 - RNA, 22 nt, Human
cugaagaggacgcagcagcaag

SEQ ID NO: 283230 - RNA, 22 nt, Human
cuggcugggagcgagcugcuca

SEQ ID NO: 283231 - RNA, 22 nt, Human
ugauuuuacuuagcaugauguu

SEQ ID NO: 283232 - RNA, 22 nt, Human
uuucuucucuaaucucaaugau

SEQ ID NO: 283233 - RNA, 22 nt, Human
uucuggauaugggagagggagc

SEQ ID NO: 283234 - RNA, 22 nt, Human
cagcuguccuuccuggugggcg

SEQ ID NO: 283235 - RNA, 22 nt, Human
ucuggagaaaguugaguuugug

SEQ ID NO: 283236 - RNA, 22 nt, Human
auuucuuucuggccacgguuuu

SEQ ID NO: 283237 - RNA, 22 nt, Human
cagagaaaaaauccugcucuca

SEQ ID NO: 283238 - RNA, 22 nt, Human
accaaggagaaggugcaagcuu

SEQ ID NO: 283239 - RNA, 19 nt, Human
gggcucucgagcaaccaac

SEQ ID NO: 283240 - RNA, 22 nt, Human
gagcuucauauguugcagagaa

SEQ ID NO: 283241 - RNA, 17 nt, Human
cuaaauacuugcguuuc

SEQ ID NO: 283242 - RNA, 22 nt, Human
ucucuucuauuugagacuauuu

SEQ ID NO: 283243 - RNA, 22 nt, Human
agaaguuguagguuugcauauu

SEQ ID NO: 283244 - RNA, 22 nt, Human
auuaagggccaauccuccagcc

SEQ ID NO: 283245 - RNA, 22 nt, Human
gucugcccugcugaucucaccc

SEQ ID NO: 283246 - RNA, 22 nt, Human
aggcacagauuuggggaaagca

SEQ ID NO: 283247 - RNA, 22 nt, Human
gcagcuuucuacuuccuacagc

SEQ ID NO: 283248 - RNA, 22 nt, Human
caguguauaaacuuuaacauag

SEQ ID NO: 283249 - RNA, 22 nt, Human
ccuuaggggugacagaaauacc

SEQ ID NO: 283250 - RNA, 22 nt, Human
cauguuuaauugcgauguuuga

SEQ ID NO: 283251 - RNA, 22 nt, Human
uccaggcacagaguuggucagu

SEQ ID NO: 283252 - RNA, 18 nt, Human
ucuguguucugucauugc

SEQ ID NO: 283253 - RNA, 22 nt, Human
uuuauugaacacuugcacuggc

SEQ ID NO: 283254 - RNA, 23 nt, Human
uuuguucaucauuagagucuagc

SEQ ID NO: 283255 - RNA, 23 nt, Human
aucauucuccaaucuggagcagg

SEQ ID NO: 283256 - RNA, 22 nt, Human
uuuuaguuuggauuucuaaagc

SEQ ID NO: 283257 - RNA, 22 nt, Human
cagaaagcgggaugcagcaugu

SEQ ID NO: 283258 - RNA, 22 nt, Human
gcagguguggagaguggucggg

SEQ ID NO: 283259 - RNA, 22 nt, Human
ccuggcucccugcacagggcuc

SEQ ID NO: 283260 - RNA, 22 nt, Human
auauuagggucucuaaauucua

SEQ ID NO: 283261 - RNA, 22 nt, Human
cagcuucuccggccuggugcgg

SEQ ID NO: 283262 - RNA, 21 nt, Human
gcaguuuauguaauaugcacu

SEQ ID NO: 283263 - RNA, 22 nt, Human
auuauuauuguugauguuaggg

SEQ ID NO: 283264 - RNA, 22 nt, Human
gccaggcauguccucugcagaa

SEQ ID NO: 283265 - RNA, 22 nt, Human
uagcacccaccucgugggguuu

SEQ ID NO: 283266 - RNA, 22 nt, Human
agggaagaagcugguaguaggu

SEQ ID NO: 283267 - RNA, 22 nt, Human
uaaauucagugaguaauuucug

SEQ ID NO: 283268 - RNA, 20 nt, Human
uuucuggguacucucccucu

SEQ ID NO: 283269 - RNA, 19 nt, Human
ggcauccagaacuaccagu

SEQ ID NO: 283270 - RNA, 21 nt, Human
ccuggcugcacaguugcuggu

SEQ ID NO: 283271 - RNA, 18 nt, Human
agauuuugagaaauacaa

SEQ ID NO: 283272 - RNA, 22 nt, Human
aaaugucaaggugauagaugca

SEQ ID NO: 283273 - RNA, 22 nt, Human
acagauuuuauuauucagguau

SEQ ID NO: 283274 - RNA, 22 nt, Human
uuacuaaguuuuaugcaacuua

SEQ ID NO: 283275 - RNA, 22 nt, Human
ccauuugugauguggcagcauc

SEQ ID NO: 283276 - RNA, 22 nt, Human
gucugucucccugugacugaga

SEQ ID NO: 283277 - RNA, 22 nt, Human
uauuaaagagagaaucaucauc

SEQ ID NO: 283278 - RNA, 22 nt, Human
ucuuugguugcacugcaggugu

SEQ ID NO: 283279 - RNA, 22 nt, Human
uacaccauuuucugcaguguuu

SEQ ID NO: 283280 - RNA, 22 nt, Human
ucuggcagugauuucugugauc

SEQ ID NO: 283281 - RNA, 22 nt, Human
ucaacuaacucuauuauuugaa

SEQ ID NO: 283282 - RNA, 22 nt, Human
uuuauacuccacucugcaagcg

SEQ ID NO: 283283 - RNA, 22 nt, Human
cagagucauugacuuccaggag

SEQ ID NO: 283284 - RNA, 22 nt, Human
ucccaggaauugaagccagugu

SEQ ID NO: 283285 - RNA, 22 nt, Human
aacuugaaacuguuccagaaaa

SEQ ID NO: 283286 - RNA, 22 nt, Human
aggcucagaggugagcaucugc

SEQ ID NO: 283287 - RNA, 22 nt, Human
cuccucaaggucucaggaauaa

SEQ ID NO: 283288 - RNA, 22 nt, Human
aggacacagugguggggaaaag

SEQ ID NO: 283289 - RNA, 22 nt, Human
cuucucagaggccagaagcuau

SEQ ID NO: 283290 - RNA, 22 nt, Human
aauguuaauucacagccaaaua

SEQ ID NO: 283291 - RNA, 22 nt, Human
uguuuucuagaaacaaugccua

SEQ ID NO: 283292 - RNA, 22 nt, Human
ccaggugggaggaaagcagaga

SEQ ID NO: 283293 - RNA, 22 nt, Human
gagggcagaaaauuaugcggug

SEQ ID NO: 283294 - RNA, 22 nt, Human
caugcuuuucaaucuaucuuaa

SEQ ID NO: 283295 - RNA, 22 nt, Human
ggaggccaaggcagguggaucg

SEQ ID NO: 283296 - RNA, 22 nt, Human
uagcuguccagugagucccuuu

SEQ ID NO: 283297 - RNA, 22 nt, Human
gcuggcagagacaagaagacua

SEQ ID NO: 283298 - RNA, 22 nt, Human
auuucucagcacuuccuaucuc

SEQ ID NO: 283299 - RNA, 22 nt, Human
cauuagggccaccauaacaaaa

SEQ ID NO: 283300 - RNA, 22 nt, Human
uccuguuuaggcuguggucugg

SEQ ID NO: 283301 - RNA, 22 nt, Human
aaggugucacuguuucuggccu

SEQ ID NO: 283302 - RNA, 22 nt, Human
accuguuuguguuuggacugca

SEQ ID NO: 283303 - RNA, 22 nt, Human
auuuccugcaggggcugguggg

SEQ ID NO: 283304 - RNA, 22 nt, Human
uuccugagucgccgagucuaug

SEQ ID NO: 283305 - RNA, 22 nt, Human
uuauuuugccacaggugaccuu

SEQ ID NO: 283306 - RNA, 22 nt, Human
uccuggcagcccgcaggugcug

SEQ ID NO: 283307 - RNA, 22 nt, Human
cccaggcugcguauccacaaua

SEQ ID NO: 283308 - RNA, 22 nt, Human
uagggcucugcucaucaguugu

SEQ ID NO: 283309 - RNA, 22 nt, Human
cagagacaggagugcucccagu

SEQ ID NO: 283310 - RNA, 20 nt, Human
uugauucaagggcugaugga

SEQ ID NO: 283311 - RNA, 22 nt, Human
gggcuuggcuggggccaccaga

SEQ ID NO: 283312 - RNA, 22 nt, Human
gggcagguacaagaugcuucuu

SEQ ID NO: 283313 - RNA, 22 nt, Human
cugaaggagaaggccacuguuc

SEQ ID NO: 283314 - RNA, 22 nt, Human
cauguuaauaugcauugaguac

SEQ ID NO: 283315 - RNA, 22 nt, Human
accaaggagccacauacaaccu

SEQ ID NO: 283316 - RNA, 22 nt, Human
ccuggcucugggaucuucgcuu

SEQ ID NO: 283317 - RNA, 22 nt, Human
aagucucuaagacugugccauc

SEQ ID NO: 283318 - RNA, 22 nt, Human
uuuuuuguagcaagcgcagaua

SEQ ID NO: 283319 - RNA, 22 nt, Human
acugcacuucacccugggugac

SEQ ID NO: 283320 - RNA, 21 nt, Human
ggcugguguuuagcugugaua

SEQ ID NO: 283321 - RNA, 22 nt, Human
cuccuacauaacccagcgaacu

SEQ ID NO: 283322 - RNA, 22 nt, Human
cagcuuuccccgugccucagcc

SEQ ID NO: 283323 - RNA, 19 nt, Human
ucuguggcuguggggagga

SEQ ID NO: 283324 - RNA, 22 nt, Human
uucugucuguaaacuucucaau

SEQ ID NO: 283325 - RNA, 22 nt, Human
cugcaaaauuguucuuugcucc

SEQ ID NO: 283326 - RNA, 22 nt, Human
uuacuuuggauggucaagaaag

SEQ ID NO: 283327 - RNA, 22 nt, Human
uuccugguuggauucugauuaa

SEQ ID NO: 283328 - RNA, 22 nt, Human
uguuuuggaacaaaagcuauuc

SEQ ID NO: 283329 - RNA, 22 nt, Human
uuuacaguuccaugugauaggc

SEQ ID NO: 283330 - RNA, 22 nt, Human
guggcaguucugugucucuugu

SEQ ID NO: 283331 - RNA, 22 nt, Human
guaaacaugcuguguacucagc

SEQ ID NO: 283332 - RNA, 22 nt, Human
auuacaaaagaagggagaaggu

SEQ ID NO: 283333 - RNA, 22 nt, Human
ucagcacuuugaagcagaagga

SEQ ID NO: 283334 - RNA, 22 nt, Human
uuuauugaguaucuacuaugug

SEQ ID NO: 283335 - RNA, 22 nt, Human
ugaacaaacugcauucuucacu

SEQ ID NO: 283336 - RNA, 23 nt, Human
guccagaacccaggcuggggugg

SEQ ID NO: 283337 - RNA, 22 nt, Human
aggcucucuagaaacugugccu

SEQ ID NO: 283338 - RNA, 22 nt, Human
acugugccuuucacuugcacuu

SEQ ID NO: 283339 - RNA, 22 nt, Human
ucuggcagggguucugcacuug

SEQ ID NO: 283340 - RNA, 22 nt, Human
ucuguacuuccuuuaaacuuua

SEQ ID NO: 283341 - RNA, 22 nt, Human
ggucucugacuuagagauggau

SEQ ID NO: 283342 - RNA, 17 nt, Human
auccuucuguucuuucu

SEQ ID NO: 283343 - RNA, 22 nt, Human
agucugcuuccuggagaacuca

SEQ ID NO: 283344 - RNA, 22 nt, Human
uaguacaacucacuugauuuua

SEQ ID NO: 283345 - RNA, 22 nt, Human
uauguacaaucagcaguucaua

SEQ ID NO: 283346 - RNA, 19 nt, Human
aggcaggugcagagguccc

SEQ ID NO: 283347 - RNA, 22 nt, Human
acaaaagugagugugucucaga

SEQ ID NO: 283348 - RNA, 22 nt, Human
uucuuaaaacuuauggacaggu

SEQ ID NO: 283349 - RNA, 22 nt, Human
caguccucucacucaggccuuu

SEQ ID NO: 283350 - RNA, 22 nt, Human
cagguucugaggauggugccug

SEQ ID NO: 283351 - RNA, 22 nt, Human
acagguguggggcugugguacu

SEQ ID NO: 283352 - RNA, 22 nt, Human
cugugucccagccaggauaaug

SEQ ID NO: 283353 - RNA, 22 nt, Human
acaagcuuugugauaguagaga

SEQ ID NO: 283354 - RNA, 19 nt, Human
uaguacaaaagcagccaua

SEQ ID NO: 283355 - RNA, 22 nt, Human
uuuauugcccuguaguacagga

SEQ ID NO: 283356 - RNA, 22 nt, Human
cuagggacagaaagaggguaga

SEQ ID NO: 283357 - RNA, 21 nt, Human
ccauucuuagucaagugucuc

SEQ ID NO: 283358 - RNA, 22 nt, Human
cucuaggggcuggucagcgucu

SEQ ID NO: 283359 - RNA, 22 nt, Human
uaaggcauaaggccagaggcua

SEQ ID NO: 283360 - RNA, 22 nt, Human
uaaaggcuuuuacaggagugca

SEQ ID NO: 283361 - RNA, 22 nt, Human
gguaaaaaucacaaauacuuua

SEQ ID NO: 283362 - RNA, 22 nt, Human
accugccuaucagcugccugcu

SEQ ID NO: 283363 - RNA, 22 nt, Human
uugcugggugcuauuaugaaca

SEQ ID NO: 283364 - RNA, 22 nt, Human
uggucaaggcuuggagauagua

SEQ ID NO: 283365 - RNA, 22 nt, Human
aguaaagcagaguugcaguaca

SEQ ID NO: 283366 - RNA, 22 nt, Human
gcaggugguccccguggagugg

SEQ ID NO: 283367 - RNA, 22 nt, Human
uguuugcuuacuuguaugcugc

SEQ ID NO: 283368 - RNA, 22 nt, Human
cugggacauauugcuaguguug

SEQ ID NO: 283369 - RNA, 21 nt, Human
gggcaggucucugaugucaac

SEQ ID NO: 283370 - RNA, 22 nt, Human
cuuuuuguguaugcuacaguug

SEQ ID NO: 283371 - RNA, 22 nt, Human
gagggcuccauuccccgugccc

SEQ ID NO: 283372 - RNA, 22 nt, Human
cauuuguugguugcugucuuau

SEQ ID NO: 283373 - RNA, 22 nt, Human
uagguucacugucuugaggagc

SEQ ID NO: 283374 - RNA, 23 nt, Human
auaguuuucccugguucuugcca

SEQ ID NO: 283375 - RNA, 22 nt, Human
uugguaaauccccuuacacaaa

SEQ ID NO: 283376 - RNA, 22 nt, Human
auauaaguuaguggucauguuu

SEQ ID NO: 283377 - RNA, 22 nt, Human
ugcaggugcguuuucaagccuc

SEQ ID NO: 283378 - RNA, 22 nt, Human
aaauuagucgguuuaggaauuu

SEQ ID NO: 283379 - RNA, 22 nt, Human
ucuguaguagguuguaguucuu

SEQ ID NO: 283380 - RNA, 22 nt, Human
aguccagugucaaggugccauu

SEQ ID NO: 283381 - RNA, 22 nt, Human
ucagguggcuuggagggggacg

SEQ ID NO: 283382 - RNA, 22 nt, Human
gggugggacucuuuggccugag

SEQ ID NO: 283383 - RNA, 22 nt, Human
uugaggaguggcgcuggacuua

SEQ ID NO: 283384 - RNA, 22 nt, Human
ucagggcagaauccaaagaauu

SEQ ID NO: 283385 - RNA, 22 nt, Human
aggcaagauuaggaccagaaga

SEQ ID NO: 283386 - RNA, 23 nt, Human
cuguggcccugcuucaugcagcc

SEQ ID NO: 283387 - RNA, 22 nt, Human
uggacaugagcugagugggugu

SEQ ID NO: 283388 - RNA, 22 nt, Human
uugacaauguccuuugaauuuc

SEQ ID NO: 283389 - RNA, 22 nt, Human
uugcuauuuugagagucauagu

SEQ ID NO: 283390 - RNA, 22 nt, Human
guguccugagugaggccuggcc

SEQ ID NO: 283391 - RNA, 20 nt, Human
cccagagccauagccagaca

SEQ ID NO: 283392 - RNA, 21 nt, Human
aggcucucauccagggaccca

SEQ ID NO: 283393 - RNA, 22 nt, Human
augcuauacauaugacaucaca

SEQ ID NO: 283394 - RNA, 21 nt, Human
uccuuccuugagguccuuucc

SEQ ID NO: 283395 - RNA, 22 nt, Human
gggagggauuaguucugccugg

SEQ ID NO: 283396 - RNA, 22 nt, Human
gggaccuggggacuccuuguuc

SEQ ID NO: 283397 - RNA, 22 nt, Human
gucugccccacaggcucaguug

SEQ ID NO: 283398 - RNA, 22 nt, Human
aguggcaucaacuuuaucugua

SEQ ID NO: 283399 - RNA, 22 nt, Human
uuaauagugcuaaaccauugac

SEQ ID NO: 283400 - RNA, 22 nt, Human
aguuuucacacucaccaaaagg

SEQ ID NO: 283401 - RNA, 22 nt, Human
acagauguacacucauauauaa

SEQ ID NO: 283402 - RNA, 22 nt, Human
ggcaaacaccaggcgagggagc

SEQ ID NO: 283403 - RNA, 22 nt, Human
ugucagcaucauuuguugaagg

SEQ ID NO: 283404 - RNA, 22 nt, Human
acaagauucaaugaauugauug

SEQ ID NO: 283405 - RNA, 22 nt, Human
cuuuacauuaauuucuacugau

SEQ ID NO: 283406 - RNA, 22 nt, Human
cugccugcaggacaccucgcua

SEQ ID NO: 283407 - RNA, 22 nt, Human
ucugagguggacgauggagccu

SEQ ID NO: 283408 - RNA, 21 nt, Human
ucuggcaguggucuuucaaau

SEQ ID NO: 283409 - RNA, 22 nt, Human
aauuauguagccauaugaaaca

SEQ ID NO: 283410 - RNA, 22 nt, Human
cucagucugucuugucuguguu

SEQ ID NO: 283411 - RNA, 21 nt, Human
aacuuguauuucuccuuauuc

SEQ ID NO: 283412 - RNA, 22 nt, Human
cacccagcuuuugcauccuccg

SEQ ID NO: 283413 - RNA, 21 nt, Human
ccuccaggagcagagcccuga

SEQ ID NO: 283414 - RNA, 22 nt, Human
ccacaaaacugugugucaaaga

SEQ ID NO: 283415 - RNA, 22 nt, Human
aacaaagucguugccuagaaga

SEQ ID NO: 283416 - RNA, 22 nt, Human
gcgagugccgagagggcagggc

SEQ ID NO: 283417 - RNA, 22 nt, Human
uaguauuuauaaucaugcuuaa

SEQ ID NO: 283418 - RNA, 22 nt, Human
uucuauugacauucacuguaac

SEQ ID NO: 283419 - RNA, 22 nt, Human
ugcuuuauuuuaaauaugccau

SEQ ID NO: 283420 - RNA, 22 nt, Human
augguaaauuuuaccuuaugua

SEQ ID NO: 283421 - RNA, 22 nt, Human
uaggaaugauuggaauuccagg

SEQ ID NO: 283422 - RNA, 22 nt, Human
cuuuuguuaggagaaaacauca

SEQ ID NO: 283423 - RNA, 22 nt, Human
agugcagugaugaauaaugguu

SEQ ID NO: 283424 - RNA, 22 nt, Human
ccagcauucacacugguuccuu

SEQ ID NO: 283425 - RNA, 22 nt, Human
cuugcaugcauuugaagaucau

SEQ ID NO: 283426 - RNA, 19 nt, Human
uucauucucuuauuguugu

SEQ ID NO: 283427 - RNA, 22 nt, Human
ccaaggcuucccagagaugcuc

SEQ ID NO: 283428 - RNA, 23 nt, Human
ccugacccugucucccucacaug

SEQ ID NO: 283429 - RNA, 22 nt, Human
aucugguuuuggcugugucccu

SEQ ID NO: 283430 - RNA, 22 nt, Human
uggcccagugcuuaugcucuga

SEQ ID NO: 283431 - RNA, 22 nt, Human
ugaaaaugcacgcuggaaagca

SEQ ID NO: 283432 - RNA, 22 nt, Human
ggggugugaguagagcugggga

SEQ ID NO: 283433 - RNA, 22 nt, Human
accuacaucaagggagugguag

SEQ ID NO: 283434 - RNA, 22 nt, Human
uuuagaaugugacuguauuuga

SEQ ID NO: 283435 - RNA, 22 nt, Human
caguucuuaauaccaugugguu

SEQ ID NO: 283436 - RNA, 22 nt, Human
aaucugucccuuaacuagucau

SEQ ID NO: 283437 - RNA, 22 nt, Human
uugaaguuguaguucagugaag

SEQ ID NO: 283438 - RNA, 22 nt, Human
cuacccuugccugccaggugac

SEQ ID NO: 283439 - RNA, 22 nt, Human
ucaaaaguuucacauagagaua

SEQ ID NO: 283440 - RNA, 22 nt, Human
uccagggagcaagucaggccgg

SEQ ID NO: 283441 - RNA, 22 nt, Human
aaguuugucgaaauuaucagca

SEQ ID NO: 283442 - RNA, 22 nt, Human
ggagcugagacccaguggcuga

SEQ ID NO: 283443 - RNA, 22 nt, Human
ccugggucccagccaggcuuug

SEQ ID NO: 283444 - RNA, 22 nt, Human
auauugagaugaggauauuaac

SEQ ID NO: 283445 - RNA, 22 nt, Human
acaaguaccaaaugcucaagua

SEQ ID NO: 283446 - RNA, 22 nt, Human
uguggggcuuacaaaggcagau

SEQ ID NO: 283447 - RNA, 22 nt, Human
uuccuuccuccuccaguucugg

SEQ ID NO: 283448 - RNA, 22 nt, Human
ggcuuuauguuuuucauguggu

SEQ ID NO: 283449 - RNA, 22 nt, Human
aaggugguugcaauuaccauaa

SEQ ID NO: 283450 - RNA, 22 nt, Human
uccugguggucugugcuucuuc

SEQ ID NO: 283451 - RNA, 22 nt, Human
cuucuucaauagcaagcgcaua

SEQ ID NO: 283452 - RNA, 22 nt, Human
gagccagaaaagcugccugacu

SEQ ID NO: 283453 - RNA, 22 nt, Human
agcccugucucucacuccaggu

SEQ ID NO: 283454 - RNA, 22 nt, Human
cugagguagccauggcccaagu

SEQ ID NO: 283455 - RNA, 22 nt, Human
cucccaagcugugcugaacugu

SEQ ID NO: 283456 - RNA, 22 nt, Human
aaguuuuugauucuaagagaga

SEQ ID NO: 283457 - RNA, 22 nt, Human
uagggaugaugucuaaaaucau

SEQ ID NO: 283458 - RNA, 22 nt, Human
augccccaggaggugccaucca

SEQ ID NO: 283459 - RNA, 22 nt, Human
aggcuuggcucuccuaugagaa

SEQ ID NO: 283460 - RNA, 22 nt, Human
ucuuccugcuuggugugucugg

SEQ ID NO: 283461 - RNA, 22 nt, Human
uuugcuuguucaagauuucugu

SEQ ID NO: 283462 - RNA, 19 nt, Human
ccagagacauuggcaucuu

SEQ ID NO: 283463 - RNA, 22 nt, Human
uuguacaaaugcauauuccugg

SEQ ID NO: 283464 - RNA, 22 nt, Human
ucaaaaauggucuuugagcugc

SEQ ID NO: 283465 - RNA, 22 nt, Human
ugaaaauggccugaagaagcaa

SEQ ID NO: 283466 - RNA, 22 nt, Human
uucuuguucuccucauuuagag

SEQ ID NO: 283467 - RNA, 22 nt, Human
ggcaggcauggggucugccauu

SEQ ID NO: 283468 - RNA, 22 nt, Human
cugccugcucuauccaggccug

SEQ ID NO: 283469 - RNA, 22 nt, Human
uugcuuuacggcaaggccccag

SEQ ID NO: 283470 - RNA, 22 nt, Human
uggcacagacagaucaggaguc

SEQ ID NO: 283471 - RNA, 22 nt, Human
cccucuccuggcugcauggagc

SEQ ID NO: 283472 - RNA, 22 nt, Human
uccuggcagagggcggccucga

SEQ ID NO: 283473 - RNA, 22 nt, Human
acaugauauuaaugucuuauuu

SEQ ID NO: 283474 - RNA, 21 nt, Human
uuucugucucugccacuaguu

SEQ ID NO: 283475 - RNA, 22 nt, Human
gggccagcucugugauguaggg

SEQ ID NO: 283476 - RNA, 22 nt, Human
aagaguuuaauuuugucuagac

SEQ ID NO: 283477 - RNA, 22 nt, Human
gcagggcaggauuugaacccag

SEQ ID NO: 283478 - RNA, 22 nt, Human
ggcaggugggaacccuccccac

SEQ ID NO: 283479 - RNA, 22 nt, Human
gauagucaccucccuuaacuuu

SEQ ID NO: 283480 - RNA, 22 nt, Human
cucuuccuuucccuugagggug

SEQ ID NO: 283481 - RNA, 22 nt, Human
aaagagggacaggcgcagacac

SEQ ID NO: 283482 - RNA, 22 nt, Human
aggagggcuaggaaaaccagga

SEQ ID NO: 283483 - RNA, 22 nt, Human
gauucuuuacucagauuuuguu

SEQ ID NO: 283484 - RNA, 22 nt, Human
gaaaugauuuuaguuuaucaug

SEQ ID NO: 283485 - RNA, 22 nt, Human
cauccaggcaccacaaccagcu

SEQ ID NO: 283486 - RNA, 22 nt, Human
gggugggaacaggaugccagga

SEQ ID NO: 283487 - RNA, 20 nt, Human
gggugugugcagggccuggu

SEQ ID NO: 283488 - RNA, 22 nt, Human
aucuuccuucacuuucucccac

SEQ ID NO: 283489 - RNA, 22 nt, Human
ccaugccccaauacaggacacc

SEQ ID NO: 283490 - RNA, 22 nt, Human
cuuuuugucucuguccugauga

SEQ ID NO: 283491 - RNA, 22 nt, Human
auguguuuauaauuacucaauc

SEQ ID NO: 283492 - RNA, 22 nt, Human
gcuuuaaugcuucguggggcca

SEQ ID NO: 283493 - RNA, 19 nt, Human
ggacagacgcagagaucug

SEQ ID NO: 283494 - RNA, 22 nt, Human
gggaaugugaaacaguaaggga

SEQ ID NO: 283495 - RNA, 22 nt, Human
agggcuccgggcaggcgaugga

SEQ ID NO: 283496 - RNA, 22 nt, Human
ucucuguggguuucaccagcgc

SEQ ID NO: 283497 - RNA, 22 nt, Human
uaauuuuaacugugcuguuugg

SEQ ID NO: 283498 - RNA, 22 nt, Human
uucaaagugcuuuuaaccuuua

SEQ ID NO: 283499 - RNA, 22 nt, Human
aucuuucuaugguacuuucucc

SEQ ID NO: 283500 - RNA, 22 nt, Human
uagguuuacugaauuaguggaa

SEQ ID NO: 283501 - RNA, 22 nt, Human
uuucuuaggcucuaaaaugacu

SEQ ID NO: 283502 - RNA, 22 nt, Human
guucuucaguucaggcuguuca

SEQ ID NO: 283503 - RNA, 22 nt, Human
gcugucaccaaagcaggcacug

SEQ ID NO: 283504 - RNA, 22 nt, Human
gagggaugguaguugacacuga

SEQ ID NO: 283505 - RNA, 22 nt, Human
cuggaugugguaaugacuuuga

SEQ ID NO: 283506 - RNA, 22 nt, Human
cagcaugaucccaguugauugc

SEQ ID NO: 283507 - RNA, 22 nt, Human
uccaggcaaaaggaacugcuug

SEQ ID NO: 283508 - RNA, 22 nt, Human
uuacaguaauguauuauuuaac

SEQ ID NO: 283509 - RNA, 22 nt, Human
ucucuuaggagaaauucauaaa

SEQ ID NO: 283510 - RNA, 22 nt, Human
caguuaaagugcuuaucacaga

SEQ ID NO: 283511 - RNA, 22 nt, Human
aacaugcaugaagaaguuauau

SEQ ID NO: 283512 - RNA, 22 nt, Human
acaguuuaggaugagagaacac

SEQ ID NO: 283513 - RNA, 22 nt, Human
uaggugucuguccugggcugug

SEQ ID NO: 283514 - RNA, 22 nt, Human
gcuuccagacgaucauguaaga

SEQ ID NO: 283515 - RNA, 22 nt, Human
aggggagacuggaaucuaacau

SEQ ID NO: 283516 - RNA, 22 nt, Human
acauguguggccgcuguagaca

SEQ ID NO: 283517 - RNA, 22 nt, Human
ggagcugaugguagaagaauga

SEQ ID NO: 283518 - RNA, 22 nt, Human
auaauauuuggauaggacagua

SEQ ID NO: 283519 - RNA, 22 nt, Human
uuuuacaguuccaugcaaagcg

SEQ ID NO: 283520 - RNA, 22 nt, Human
gcacccaguuugucucaggguu

SEQ ID NO: 283521 - RNA, 22 nt, Human
aagaaaacguuuugaggaguuu

SEQ ID NO: 283522 - RNA, 22 nt, Human
ggccccaggccuuuggucuggc

SEQ ID NO: 283523 - RNA, 22 nt, Human
aaacugucauuuuauauaguua

SEQ ID NO: 283524 - RNA, 22 nt, Human
uaggugguugucugcuuuccua

SEQ ID NO: 283525 - RNA, 22 nt, Human
uccaggcucuaggcugcucucc

SEQ ID NO: 283526 - RNA, 22 nt, Human
uguuauugagguuacuuauaag

SEQ ID NO: 283527 - RNA, 22 nt, Human
aaagcaagaugcauccgucaag

SEQ ID NO: 283528 - RNA, 22 nt, Human
gugcaaaagcaguugugguuuu

SEQ ID NO: 283529 - RNA, 22 nt, Human
agagugaaguucaucgugcagc

SEQ ID NO: 283530 - RNA, 22 nt, Human
guuuuugucgaguuccuugacc

SEQ ID NO: 283531 - RNA, 19 nt, Human
ccaggccugcgggcguugg

SEQ ID NO: 283532 - RNA, 22 nt, Human
cagagucagcuagucuugggau

SEQ ID NO: 283533 - RNA, 22 nt, Human
uucuuucugucaugguguacug

SEQ ID NO: 283534 - RNA, 22 nt, Human
acgucuucguuggcagagauuu

SEQ ID NO: 283535 - RNA, 22 nt, Human
ucaacaauaggauauagcaggu

SEQ ID NO: 283536 - RNA, 22 nt, Human
ccuggcaggcuggggacagugc

SEQ ID NO: 283537 - RNA, 22 nt, Human
cuucauuaaccaaaaugcaaua

SEQ ID NO: 283538 - RNA, 22 nt, Human
cccaggcagccccagaagcuug

SEQ ID NO: 283539 - RNA, 22 nt, Human
auucugggcgccuauggcugca

SEQ ID NO: 283540 - RNA, 22 nt, Human
uguaaauugaaggaaauuugug

SEQ ID NO: 283541 - RNA, 23 nt, Human
ccuccugggcacaggccugaugg

SEQ ID NO: 283542 - RNA, 22 nt, Human
uacaaagucagaauaacaggug

SEQ ID NO: 283543 - RNA, 22 nt, Human
agaagcacaccugaccucuagc

SEQ ID NO: 283544 - RNA, 22 nt, Human
ugcuggcugccagguucccugu

SEQ ID NO: 283545 - RNA, 22 nt, Human
acagagcugggaucugaaccca

SEQ ID NO: 283546 - RNA, 22 nt, Human
cuguggcuuuuccggggagccu

SEQ ID NO: 283547 - RNA, 22 nt, Human
ugcuagugugugagauguucaa

SEQ ID NO: 283548 - RNA, 22 nt, Human
ucccugcccucagugcacccgg

SEQ ID NO: 283549 - RNA, 22 nt, Human
uuagcuuuuaagugugcuacau

SEQ ID NO: 283550 - RNA, 22 nt, Human
cuggaggaggaagucuacaaug

SEQ ID NO: 283551 - RNA, 22 nt, Human
aaaaaucuaugacugcuucucc

SEQ ID NO: 283552 - RNA, 22 nt, Human
auguccaggaucuauccccaga

SEQ ID NO: 283553 - RNA, 22 nt, Human
auuaguaguaguuagcagccuc

SEQ ID NO: 283554 - RNA, 23 nt, Human
gagugcagaauagacaugcagug

SEQ ID NO: 283555 - RNA, 22 nt, Human
aucagagauuguaguaugugca

SEQ ID NO: 283556 - RNA, 22 nt, Human
uggcacagcccagagcucuuga

SEQ ID NO: 283557 - RNA, 22 nt, Human
auguuucaugacugagcaaaau

SEQ ID NO: 283558 - RNA, 22 nt, Human
cugcccaccacaccugcuccug

SEQ ID NO: 283559 - RNA, 20 nt, Human
uggagggauuguuggcaaau

SEQ ID NO: 283560 - RNA, 22 nt, Human
caguuaaauuuggcuguuuucu

SEQ ID NO: 283561 - RNA, 22 nt, Human
acuggcaguuugagaaugcauu

SEQ ID NO: 283562 - RNA, 22 nt, Human
gggcucucgauuagacccuggg

SEQ ID NO: 283563 - RNA, 22 nt, Human
acagugcauaaaaacaacuuuu

SEQ ID NO: 283564 - RNA, 22 nt, Human
aaacuucagugaaugacuuaug

SEQ ID NO: 283565 - RNA, 22 nt, Human
ugacccauggucugaucauagg

SEQ ID NO: 283566 - RNA, 21 nt, Human
ccugucuuggacugaggcacc

SEQ ID NO: 283567 - RNA, 22 nt, Human
uggagcugacucacaccagcua

SEQ ID NO: 283568 - RNA, 22 nt, Human
uaauuucaccguugcuagaaau

SEQ ID NO: 283569 - RNA, 22 nt, Human
uuguacaaagauuucacagcuc

SEQ ID NO: 283570 - RNA, 18 nt, Human
uacuguggaucagggguu

SEQ ID NO: 283571 - RNA, 20 nt, Human
agucucucccagaaugagca

SEQ ID NO: 283572 - RNA, 22 nt, Human
ggcacugggaaugcagugauga

SEQ ID NO: 283573 - RNA, 22 nt, Human
ucaguaauauucuuuaaaauac

SEQ ID NO: 283574 - RNA, 22 nt, Human
agcagggcagcugaugcgcacg

SEQ ID NO: 283575 - RNA, 22 nt, Human
cccaggcacauccacucuguga

SEQ ID NO: 283576 - RNA, 22 nt, Human
accuccuggcuuaucauggaca

SEQ ID NO: 283577 - RNA, 22 nt, Human
aggaaugugccuagccucccug

SEQ ID NO: 283578 - RNA, 22 nt, Human
acccagggaccccgcugacgcc

SEQ ID NO: 283579 - RNA, 22 nt, Human
aguuauuuaaaaugauuguccu

SEQ ID NO: 283580 - RNA, 22 nt, Human
uucugaggcauagaggaugaga

SEQ ID NO: 283581 - RNA, 22 nt, Human
uuguaagucacaccagggcagg

SEQ ID NO: 283582 - RNA, 22 nt, Human
gugugucccuacaacagcuuca

SEQ ID NO: 283583 - RNA, 22 nt, Human
ucuacauuccuuuuauaauauc

SEQ ID NO: 283584 - RNA, 22 nt, Human
gaucugaagauaugaaauauuu

SEQ ID NO: 283585 - RNA, 22 nt, Human
auugcugacucaauaauugaag

SEQ ID NO: 283586 - RNA, 23 nt, Human
acugagcauuaguauuuuuauaa

SEQ ID NO: 283587 - RNA, 22 nt, Human
cauaaucccccauuugugacau

SEQ ID NO: 283588 - RNA, 23 nt, Human
agcugcaagacucccugucugag

SEQ ID NO: 283589 - RNA, 22 nt, Human
cuucuucaguugcauguauugg

SEQ ID NO: 283590 - RNA, 22 nt, Human
gcuuuacugagaugacacaggg

SEQ ID NO: 283591 - RNA, 22 nt, Human
ccagcccuugcugaaggguggc

SEQ ID NO: 283592 - RNA, 22 nt, Human
aggcucuguuugcugugguacc

SEQ ID NO: 283593 - RNA, 22 nt, Human
uucaaguuuacuuugaaguuua

SEQ ID NO: 283594 - RNA, 22 nt, Human
cugcugccggcgagccucccuu

SEQ ID NO: 283595 - RNA, 22 nt, Human
gccuguuucuaaucucauuucu

SEQ ID NO: 283596 - RNA, 22 nt, Human
gcagguggggcugcuaccagaa

SEQ ID NO: 283597 - RNA, 23 nt, Human
gcugugcacgagccacugccugu

SEQ ID NO: 283598 - RNA, 22 nt, Human
auguuaaaagucugagugggag

SEQ ID NO: 283599 - RNA, 22 nt, Human
aagaauguucuuguagucauga

SEQ ID NO: 283600 - RNA, 22 nt, Human
gcaaacaugugcucauuuugug

SEQ ID NO: 283601 - RNA, 22 nt, Human
aaaucucaggccucuauuuacu

SEQ ID NO: 283602 - RNA, 22 nt, Human
gaagaaagauuggcaugcuuca

SEQ ID NO: 283603 - RNA, 22 nt, Human
cucaggaggccauucucaaggu

SEQ ID NO: 283604 - RNA, 22 nt, Human
cuccugcaugguugugcuauug

SEQ ID NO: 283605 - RNA, 22 nt, Human
uuauuauagauuaugcaagauu

SEQ ID NO: 283606 - RNA, 22 nt, Human
agagccaaggcugagagcuauu

SEQ ID NO: 283607 - RNA, 22 nt, Human
uuuaaauuuguguuuagagggu

SEQ ID NO: 283608 - RNA, 22 nt, Human
cccagcugauuuuugcagagau

SEQ ID NO: 283609 - RNA, 20 nt, Human
augcaucugguaucuuuccu

SEQ ID NO: 283610 - RNA, 20 nt, Human
gucuuuauguuuuaugaccu

SEQ ID NO: 283611 - RNA, 21 nt, Human
ucuguuggaggccucucuucc

SEQ ID NO: 283612 - RNA, 22 nt, Human
guucuucaggcugugcucuaga

SEQ ID NO: 283613 - RNA, 22 nt, Human
auauguuuuuggaaagaacaca

SEQ ID NO: 283614 - RNA, 22 nt, Human
gggucucuccuccccagcugug

SEQ ID NO: 283615 - RNA, 22 nt, Human
cagcacaguacaaggcacggau

SEQ ID NO: 283616 - RNA, 22 nt, Human
aaccuuuugcaagugccuugac

SEQ ID NO: 283617 - RNA, 22 nt, Human
cuucuucccagcuucccucacc

SEQ ID NO: 283618 - RNA, 22 nt, Human
cuaggguggauuugugcagagu

SEQ ID NO: 283619 - RNA, 22 nt, Human
cagggaaaguucuuguccacuc

SEQ ID NO: 283620 - RNA, 19 nt, Human
cucagagaggggcagugcc

SEQ ID NO: 283621 - RNA, 22 nt, Human
cccaugagaccugguuuaaggc

SEQ ID NO: 283622 - RNA, 22 nt, Human
gcuguucaaaagccacaguuac

SEQ ID NO: 283623 - RNA, 22 nt, Human
gcugccacuuggucaugucaug

SEQ ID NO: 283624 - RNA, 22 nt, Human
gcaggcaggaaggacuaaguaa

SEQ ID NO: 283625 - RNA, 22 nt, Human
uugucauugggguuauuuguua

SEQ ID NO: 283626 - RNA, 20 nt, Human
aggaggaagaaagcacacug

SEQ ID NO: 283627 - RNA, 22 nt, Human
gcuguggccaacaaaccacuuu

SEQ ID NO: 283628 - RNA, 22 nt, Human
gguguccuucguccgcuggcau

SEQ ID NO: 283629 - RNA, 22 nt, Human
aggcacugacucaagggagcca

SEQ ID NO: 283630 - RNA, 22 nt, Human
aggcuggugcuuccuagggcag

SEQ ID NO: 283631 - RNA, 22 nt, Human
auugcuuucuuuggggaacugu

SEQ ID NO: 283632 - RNA, 22 nt, Human
ugccuacauuccuugcuuaugg

SEQ ID NO: 283633 - RNA, 22 nt, Human
uggcuggagcgcccuccucugc

SEQ ID NO: 283634 - RNA, 22 nt, Human
acuguucacagauuagucgaug

SEQ ID NO: 283635 - RNA, 22 nt, Human
uucaaaaugcacaaagggcuag

SEQ ID NO: 283636 - RNA, 23 nt, Human
uggcaaagcauucuuauaacagu

SEQ ID NO: 283637 - RNA, 22 nt, Human
uacagacaaagagcaugcggua

SEQ ID NO: 283638 - RNA, 22 nt, Human
uagaguccauuaaugcaaguuu

SEQ ID NO: 283639 - RNA, 22 nt, Human
gaggccuguagucauggaugua

SEQ ID NO: 283640 - RNA, 22 nt, Human
ccugagauuucauugucuggcc

SEQ ID NO: 283641 - RNA, 20 nt, Human
guaaaauauggucuuugggu

SEQ ID NO: 283642 - RNA, 22 nt, Human
agcugaaauucuuuguccucag

SEQ ID NO: 283643 - RNA, 22 nt, Human
gcuccuggugcaaaguuucuuc

SEQ ID NO: 283644 - RNA, 22 nt, Human
gcagguggagcaguagucuggu

SEQ ID NO: 283645 - RNA, 22 nt, Human
uuguguccuaacaucuaguuaa

SEQ ID NO: 283646 - RNA, 22 nt, Human
ucugggugucacuccugccugc

SEQ ID NO: 283647 - RNA, 22 nt, Human
augaugaaauuuucuaucaugu

SEQ ID NO: 283648 - RNA, 21 nt, Human
aaggcuggagaugcaggucug

SEQ ID NO: 283649 - RNA, 22 nt, Human
acagcaggcaugaaugacacug

SEQ ID NO: 283650 - RNA, 22 nt, Human
aggaccaacauagcagcagugg

SEQ ID NO: 283651 - RNA, 22 nt, Human
ucagugucccgucucuuaacuc

SEQ ID NO: 283652 - RNA, 22 nt, Human
gaagccucaacaucucugcguc

SEQ ID NO: 283653 - RNA, 22 nt, Human
uggcagguuaacuuacaacugu

SEQ ID NO: 283654 - RNA, 22 nt, Human
auuccacuccaauaagugucaa

SEQ ID NO: 283655 - RNA, 22 nt, Human
aaccugcauguuucuaaaagca

SEQ ID NO: 283656 - RNA, 22 nt, Human
uaaaagaucacuggcugcuuua

SEQ ID NO: 283657 - RNA, 22 nt, Human
acaaauguggacauggauaaug

SEQ ID NO: 283658 - RNA, 22 nt, Human
gucuucuuguuuugaaggaaau

SEQ ID NO: 283659 - RNA, 18 nt, Human
aggaaagaaaggcaggug

SEQ ID NO: 283660 - RNA, 22 nt, Human
gaagaaggaagaucaugcuuga

SEQ ID NO: 283661 - RNA, 22 nt, Human
guagaauauaugguuaguauug

SEQ ID NO: 283662 - RNA, 22 nt, Human
aaggcauaccugaauguuugug

SEQ ID NO: 283663 - RNA, 22 nt, Human
gcaggcagagguggaggagaca

SEQ ID NO: 283664 - RNA, 22 nt, Human
uuuguucuaacuucugcagaca

SEQ ID NO: 283665 - RNA, 22 nt, Human
agugugagaacggacuaauaaa

SEQ ID NO: 283666 - RNA, 22 nt, Human
ccauguguugagauuccagccu

SEQ ID NO: 283667 - RNA, 22 nt, Human
aacuuucagcaaguaauucugg

SEQ ID NO: 283668 - RNA, 22 nt, Human
acaaaaguguaggaauuccuua

SEQ ID NO: 283669 - RNA, 19 nt, Human
ccuguucuuggcugaggcu

SEQ ID NO: 283670 - RNA, 22 nt, Human
gcauguguugguuuaugcaugu

SEQ ID NO: 283671 - RNA, 22 nt, Human
uccuguuucaacccuuacacug

SEQ ID NO: 283672 - RNA, 22 nt, Human
cagacagggaccucgcuccaga

SEQ ID NO: 283673 - RNA, 22 nt, Human
uaagaaauuuaguuauagaaug

SEQ ID NO: 283674 - RNA, 22 nt, Human
aagcagguuaugaaauauagaa

SEQ ID NO: 283675 - RNA, 22 nt, Human
gcaggugucaguccccaaggug

SEQ ID NO: 283676 - RNA, 22 nt, Human
ucuggcucugacacuacuguua

SEQ ID NO: 283677 - RNA, 22 nt, Human
cagaugaggcaaccucauugcu

SEQ ID NO: 283678 - RNA, 22 nt, Human
uuccuucugaagccuuuguguu

SEQ ID NO: 283679 - RNA, 22 nt, Human
ucagcuuuggucacauugaguu

SEQ ID NO: 283680 - RNA, 22 nt, Human
ucaguuuaauacccagaugccu

SEQ ID NO: 283681 - RNA, 22 nt, Human
ugucuucaguaaaauacacuau

SEQ ID NO: 283682 - RNA, 22 nt, Human
cacaaggacuggauggaguggg

SEQ ID NO: 283683 - RNA, 22 nt, Human
ugucauuuuauguauguggucu

SEQ ID NO: 283684 - RNA, 22 nt, Human
ccauuugugguuuauuugcucu

SEQ ID NO: 283685 - RNA, 22 nt, Human
aggcuuggcugcacgccucgcu

SEQ ID NO: 283686 - RNA, 22 nt, Human
gaguaguugcugcagagaauac

SEQ ID NO: 283687 - RNA, 22 nt, Human
ucaacuuugaaaccauagugaa

SEQ ID NO: 283688 - RNA, 22 nt, Human
uaaacauguugacaucuuaccu

SEQ ID NO: 283689 - RNA, 22 nt, Human
ggccaggcugcccugggagcag

SEQ ID NO: 283690 - RNA, 22 nt, Human
ugcuucuuuaugauguaugauu

SEQ ID NO: 283691 - RNA, 20 nt, Human
ccuguucacugcgcaguuuc

SEQ ID NO: 283692 - RNA, 22 nt, Human
uuccuggcagaggccccgacag

SEQ ID NO: 283693 - RNA, 22 nt, Human
agcauuuagucuuuauugcagc

SEQ ID NO: 283694 - RNA, 22 nt, Human
cagaggcugacccugcuguugu

SEQ ID NO: 283695 - RNA, 22 nt, Human
ucugucuuuagaggccugugcu

SEQ ID NO: 283696 - RNA, 22 nt, Human
uguuuacaaggaguuuauauug

SEQ ID NO: 283697 - RNA, 22 nt, Human
ucuguugacuccuagcagccau

SEQ ID NO: 283698 - RNA, 17 nt, Human
uuucagauucacuuucu

SEQ ID NO: 283699 - RNA, 22 nt, Human
ugaaauucaaaacacauuuguc

SEQ ID NO: 283700 - RNA, 22 nt, Human
acaauauuguacccagaaguuu

SEQ ID NO: 283701 - RNA, 22 nt, Human
ugcauacacaagcauacaugua

SEQ ID NO: 283702 - RNA, 22 nt, Human
uucucccaucucagucuuacau

SEQ ID NO: 283703 - RNA, 19 nt, Human
auuguacauugaguuuggc

SEQ ID NO: 283704 - RNA, 22 nt, Human
guauucuugguuaucaaaauac

SEQ ID NO: 283705 - RNA, 22 nt, Human
uggauuaguuuaacaauguggc

SEQ ID NO: 283706 - RNA, 22 nt, Human
ggucacugagcuguaauucugu

SEQ ID NO: 283707 - RNA, 22 nt, Human
cuuggcugucauaagguccugg

SEQ ID NO: 283708 - RNA, 20 nt, Human
acccagcucugugcccuggg

SEQ ID NO: 283709 - RNA, 22 nt, Human
ccaggccuggccaggggaugcc

SEQ ID NO: 283710 - RNA, 22 nt, Human
gccagcauaguaagcagucauc

SEQ ID NO: 283711 - RNA, 22 nt, Human
uuguauguuucugugcacauga

SEQ ID NO: 283712 - RNA, 22 nt, Human
cauccagaguccaaggcugggc

SEQ ID NO: 283713 - RNA, 22 nt, Human
aaaugcuagggagaaacucucc

SEQ ID NO: 283714 - RNA, 22 nt, Human
uuuauuuaaagucguguguuaa

SEQ ID NO: 283715 - RNA, 22 nt, Human
uggccucaaucuguccuccagc

SEQ ID NO: 283716 - RNA, 22 nt, Human
aucuuucaguuucauaccaauu

SEQ ID NO: 283717 - RNA, 22 nt, Human
gaaggcuguuucugguagugau

SEQ ID NO: 283718 - RNA, 22 nt, Human
ucacacacauuugcugucugau

SEQ ID NO: 283719 - RNA, 22 nt, Human
ucuuuucuucuuaaugguuaau

SEQ ID NO: 283720 - RNA, 19 nt, Human
cacuuuauuucuguuuugu

SEQ ID NO: 283721 - RNA, 22 nt, Human
uucuggguuuacaucugacuuc

SEQ ID NO: 283722 - RNA, 22 nt, Human
gagccaccuucaacucaggaau

SEQ ID NO: 283723 - RNA, 22 nt, Human
uagacauuuucucaacaucucu

SEQ ID NO: 283724 - RNA, 22 nt, Human
ucuucuccaguucauccuacca

SEQ ID NO: 283725 - RNA, 22 nt, Human
cauaaguuggguaauauaauga

SEQ ID NO: 283726 - RNA, 22 nt, Human
acuguggcaaagaagcaggcuc

SEQ ID NO: 283727 - RNA, 22 nt, Human
gaggccuggcugggaggaggug

SEQ ID NO: 283728 - RNA, 22 nt, Human
uaacauuagguagacauaagcc

SEQ ID NO: 283729 - RNA, 22 nt, Human
acugaugaagaguaccacuguu

SEQ ID NO: 283730 - RNA, 22 nt, Human
ugcuccagugccugccccacag

SEQ ID NO: 283731 - RNA, 22 nt, Human
ugucauuuucauccuaaggagc

SEQ ID NO: 283732 - RNA, 22 nt, Human
uuacaaguacugaauaugauuu

SEQ ID NO: 283733 - RNA, 22 nt, Human
ugagaaaagguugagaugauaa

SEQ ID NO: 283734 - RNA, 22 nt, Human
uguuucuuacguuuuuagaggc

SEQ ID NO: 283735 - RNA, 22 nt, Human
uauguuuuuaagagaaugcauu

SEQ ID NO: 283736 - RNA, 22 nt, Human
gcaugcagaaaaugaacaacga

SEQ ID NO: 283737 - RNA, 22 nt, Human
aggaauguuuacacgacagaaa

SEQ ID NO: 283738 - RNA, 22 nt, Human
aaguuacagucagagguuaaca

SEQ ID NO: 283739 - RNA, 22 nt, Human
ccugcaccaggcccagcauggu

SEQ ID NO: 283740 - RNA, 22 nt, Human
gccuggcaggccugggccagca

SEQ ID NO: 283741 - RNA, 22 nt, Human
ugucauuuaauagauaugaugg

SEQ ID NO: 283742 - RNA, 22 nt, Human
guauuaggaaauaugaagaaag

SEQ ID NO: 283743 - RNA, 22 nt, Human
gaauggcugaaugucuuaaauu

SEQ ID NO: 283744 - RNA, 22 nt, Human
uuuuguguuguaaugucagcua

SEQ ID NO: 283745 - RNA, 22 nt, Human
cagagcaugucaacuagcuuua

SEQ ID NO: 283746 - RNA, 22 nt, Human
uaggagggggaacaaggcauac

SEQ ID NO: 283747 - RNA, 22 nt, Human
cacaauuuguuuuaucaguauu

SEQ ID NO: 283748 - RNA, 22 nt, Human
aggucucaauuccugcuccugu

SEQ ID NO: 283749 - RNA, 20 nt, Human
ucaaguuuugcuugacaaga

SEQ ID NO: 283750 - RNA, 22 nt, Human
ccaggcuucugauuccaggcac

SEQ ID NO: 283751 - RNA, 22 nt, Human
uucagcacuguuauggauuugc

SEQ ID NO: 283752 - RNA, 22 nt, Human
cuguguccugucuccuaaggug

SEQ ID NO: 283753 - RNA, 22 nt, Human
cugaggcagagggcagaccaga

SEQ ID NO: 283754 - RNA, 22 nt, Human
gagugcuugcauauuuauuguc

SEQ ID NO: 283755 - RNA, 22 nt, Human
ugauauuuaagcaaaaauaugg

SEQ ID NO: 283756 - RNA, 22 nt, Human
ugcaggugcagcgauacuguga

SEQ ID NO: 283757 - RNA, 22 nt, Human
ccuguucacugcacaguuuccg

SEQ ID NO: 283758 - RNA, 22 nt, Human
ccaggcugggcggggaaccugg

SEQ ID NO: 283759 - RNA, 22 nt, Human
uccuggcucgauugcuaccaau

SEQ ID NO: 283760 - RNA, 22 nt, Human
cuggguguuggguacugaccgu

SEQ ID NO: 283761 - RNA, 22 nt, Human
gacuguggucuguucuccaggu

SEQ ID NO: 283762 - RNA, 22 nt, Human
aacauucugguucuaaaaaccu

SEQ ID NO: 283763 - RNA, 22 nt, Human
aguuuaaaucauguuuuguaac

SEQ ID NO: 283764 - RNA, 22 nt, Human
uccagaccauggauggcugcaa

SEQ ID NO: 283765 - RNA, 22 nt, Human
gucuuucugccaugugaagaga

SEQ ID NO: 283766 - RNA, 22 nt, Human
gggcaaagugguggaggcaguu

SEQ ID NO: 283767 - RNA, 22 nt, Human
gaguuagaagacagaauguaaa

SEQ ID NO: 283768 - RNA, 22 nt, Human
ugcagggaugcuagagguaaga

SEQ ID NO: 283769 - RNA, 22 nt, Human
cauucauucacauuuugucuau

SEQ ID NO: 283770 - RNA, 22 nt, Human
uuuaguuauuguuacaguauga

SEQ ID NO: 283771 - RNA, 22 nt, Human
auucuucauuuacuguuacuug

SEQ ID NO: 283772 - RNA, 19 nt, Human
uuugcagugguuccuuugu

SEQ ID NO: 283773 - RNA, 22 nt, Human
ucuguauuuuaagaugcuguuu

SEQ ID NO: 283774 - RNA, 22 nt, Human
cagagacaaccugguagagaaa

SEQ ID NO: 283775 - RNA, 22 nt, Human
gacagguguguguauauuaggg

SEQ ID NO: 283776 - RNA, 22 nt, Human
uuucaguuguccuguuaauagc

SEQ ID NO: 283777 - RNA, 19 nt, Human
gcuucccaccagccagccc

SEQ ID NO: 283778 - RNA, 22 nt, Human
uauguagcaauagcaucauacu

SEQ ID NO: 283779 - RNA, 22 nt, Human
gauuuacaaagcucucuagugu

SEQ ID NO: 283780 - RNA, 18 nt, Human
acauuucuccuucugacc

SEQ ID NO: 283781 - RNA, 22 nt, Human
guggcagagauagaacuggaau

SEQ ID NO: 283782 - RNA, 22 nt, Human
agguggggcugggaaagauucc

SEQ ID NO: 283783 - RNA, 22 nt, Human
ucuggcuccugaguccaugcuc

SEQ ID NO: 283784 - RNA, 22 nt, Human
ucucucccaaaucugcagauag

SEQ ID NO: 283785 - RNA, 22 nt, Human
uauacacauaucuucuaggccu

SEQ ID NO: 283786 - RNA, 18 nt, Human
uggaggaaaaaucucaug

SEQ ID NO: 283787 - RNA, 22 nt, Human
cagcccugaaacaaccuccucu

SEQ ID NO: 283788 - RNA, 22 nt, Human
uaugaaaugauggggaaaauag

SEQ ID NO: 283789 - RNA, 22 nt, Human
aaauguaagucuuuguuucuua

SEQ ID NO: 283790 - RNA, 22 nt, Human
agcagguugugauacacucaga

SEQ ID NO: 283791 - RNA, 22 nt, Human
ggcaggugugagaucgaggcca

SEQ ID NO: 283792 - RNA, 22 nt, Human
gcaaagcaagauucagauguag

SEQ ID NO: 283793 - RNA, 22 nt, Human
guccaguguguuuaucuuggau

SEQ ID NO: 283794 - RNA, 22 nt, Human
ugacaaauucauauuucagagg

SEQ ID NO: 283795 - RNA, 22 nt, Human
agcuuugggauucaggcaggaa

SEQ ID NO: 283796 - RNA, 17 nt, Human
ugaaagaaucagggaga

SEQ ID NO: 283797 - RNA, 22 nt, Human
gugagcaggauuucauggugua

SEQ ID NO: 283798 - RNA, 22 nt, Human
uagaguaacacaaacgaauugg

SEQ ID NO: 283799 - RNA, 22 nt, Human
cugcaaaaguaauugcagguuu

SEQ ID NO: 283800 - RNA, 22 nt, Human
ucucagguggcccccaugagug

SEQ ID NO: 283801 - RNA, 22 nt, Human
agaaggaagccaggagggugca

SEQ ID NO: 283802 - RNA, 22 nt, Human
cccaggguggaugcaagcagca

SEQ ID NO: 283803 - RNA, 22 nt, Human
ugagccaggucucacucaccuu

SEQ ID NO: 283804 - RNA, 22 nt, Human
cccagagggaagggaaugaggu

SEQ ID NO: 283805 - RNA, 22 nt, Human
uuucauugaugggugauagaaa

SEQ ID NO: 283806 - RNA, 22 nt, Human
cuagagaacaacauucauaugg

SEQ ID NO: 283807 - RNA, 22 nt, Human
cacacaggaaaauuggaauuaa

SEQ ID NO: 283808 - RNA, 23 nt, Human
augcaggacuuauaagguaaggu

SEQ ID NO: 283809 - RNA, 22 nt, Human
guaaacaucagccacucuauuu

SEQ ID NO: 283810 - RNA, 22 nt, Human
uuucagaaaacuuaucaucagu

SEQ ID NO: 283811 - RNA, 22 nt, Human
aaguccuucccaagcauguacc

SEQ ID NO: 283812 - RNA, 22 nt, Human
uccaggcagagcaacaaaauau

SEQ ID NO: 283813 - RNA, 22 nt, Human
gccuggguuccaugaucuccag

SEQ ID NO: 283814 - RNA, 22 nt, Human
cuguugcucccagggagagggu

SEQ ID NO: 283815 - RNA, 22 nt, Human
cugggaggauucauugagguga

SEQ ID NO: 283816 - RNA, 22 nt, Human
aacugucuuauuuauauuucug

SEQ ID NO: 283817 - RNA, 22 nt, Human
caggugguuccauguuucauga

SEQ ID NO: 283818 - RNA, 22 nt, Human
uuuuauugguaaugauaaaagu

SEQ ID NO: 283819 - RNA, 22 nt, Human
ucagagaguccuggucauuugc

SEQ ID NO: 283820 - RNA, 22 nt, Human
acagguguaaaacccaggaugg

SEQ ID NO: 283821 - RNA, 20 nt, Human
cagaaagcauguuccagggc

SEQ ID NO: 283822 - RNA, 22 nt, Human
uggccuccccuaacagccucuu

SEQ ID NO: 283823 - RNA, 22 nt, Human
uuccuguguccuauuucgacuu

SEQ ID NO: 283824 - RNA, 22 nt, Human
ugacaggugaaauguccuuauu

SEQ ID NO: 283825 - RNA, 22 nt, Human
cugccugaguacaagucccaga

SEQ ID NO: 283826 - RNA, 22 nt, Human
auauucuuauccuuuucucugu

SEQ ID NO: 283827 - RNA, 22 nt, Human
acaacaaagacacuugaaauga

SEQ ID NO: 283828 - RNA, 22 nt, Human
ugggcaguggcugggccucucu

SEQ ID NO: 283829 - RNA, 22 nt, Human
aucauuuuauggcugagaggac

SEQ ID NO: 283830 - RNA, 22 nt, Human
caggugucagcagcacuguacu

SEQ ID NO: 283831 - RNA, 22 nt, Human
uagaaagcagaaaccaucagag

SEQ ID NO: 283832 - RNA, 22 nt, Human
caaauguaaauucuuuugaagc

SEQ ID NO: 283833 - RNA, 22 nt, Human
auuuaagauugcguauucaugu

SEQ ID NO: 283834 - RNA, 22 nt, Human
ugaaaaaccucaguccgcuuua

SEQ ID NO: 283835 - RNA, 22 nt, Human
gaacaaaucccuuccugucucc

SEQ ID NO: 283836 - RNA, 22 nt, Human
uacauguggccagaaauuugag

SEQ ID NO: 283837 - RNA, 22 nt, Human
ggaggcagaauagagugugggu

SEQ ID NO: 283838 - RNA, 22 nt, Human
cagcuuuauugagguauaauug

SEQ ID NO: 283839 - RNA, 23 nt, Human
ucauuccacaaauacuuaucuag

SEQ ID NO: 283840 - RNA, 22 nt, Human
ugccuugcacauaauauacauu

SEQ ID NO: 283841 - RNA, 17 nt, Human
uauacacagacagacug

SEQ ID NO: 283842 - RNA, 22 nt, Human
uuuauuuauaagccacuugcug

SEQ ID NO: 283843 - RNA, 22 nt, Human
aaugauuuggcaaaggaaucca

SEQ ID NO: 283844 - RNA, 22 nt, Human
gcccagggcagggcaagaguga

SEQ ID NO: 283845 - RNA, 22 nt, Human
gucuggcucuggaaggcaaagg

SEQ ID NO: 283846 - RNA, 22 nt, Human
uucaaacaguguagaauauaug

SEQ ID NO: 283847 - RNA, 22 nt, Human
ugucaaaaugacuuuacuacag

SEQ ID NO: 283848 - RNA, 22 nt, Human
ugagccagguuuuccaucauuc

SEQ ID NO: 283849 - RNA, 20 nt, Human
uucuaguuuggaguuauuaa

SEQ ID NO: 283850 - RNA, 22 nt, Human
uguacauacauagauauacaca

SEQ ID NO: 283851 - RNA, 22 nt, Human
uccuggagaauccugccaccug

SEQ ID NO: 283852 - RNA, 19 nt, Human
ccucaucuuggugugugca

SEQ ID NO: 283853 - RNA, 22 nt, Human
gagggcucuaccaaguaacucu

SEQ ID NO: 283854 - RNA, 22 nt, Human
uugggucuguuuagcugagaag

SEQ ID NO: 283855 - RNA, 20 nt, Human
gccaaggaggagaaacaggc

SEQ ID NO: 283856 - RNA, 23 nt, Human
guguguccauucgcacucuuagg

SEQ ID NO: 283857 - RNA, 22 nt, Human
cuggaagcuuguuugccagucu

SEQ ID NO: 283858 - RNA, 22 nt, Human
gcuuucagggucacugucaaca

SEQ ID NO: 283859 - RNA, 22 nt, Human
uuuacagaaugucaauuucuau

SEQ ID NO: 283860 - RNA, 22 nt, Human
uucugucucuguguuuacauua

SEQ ID NO: 283861 - RNA, 22 nt, Human
uuccagaacucaagaaaugccc

SEQ ID NO: 283862 - RNA, 22 nt, Human
aacaugugucuggcuagauugu

SEQ ID NO: 283863 - RNA, 22 nt, Human
cauaacaguggcuucagcaagu

SEQ ID NO: 283864 - RNA, 22 nt, Human
ccuggcagaaagaguuacaccu

SEQ ID NO: 283865 - RNA, 22 nt, Human
cuggaggaaaacaacugcagac

SEQ ID NO: 283866 - RNA, 19 nt, Human
ugacaagauaauagccuug

SEQ ID NO: 283867 - RNA, 22 nt, Human
acuggcuuugagggaauagcua

SEQ ID NO: 283868 - RNA, 22 nt, Human
cacuggaauauggcguugaacc

SEQ ID NO: 283869 - RNA, 22 nt, Human
cagaugcacauucucaucagca

SEQ ID NO: 283870 - RNA, 22 nt, Human
auaccuguguauccacaagcgu

SEQ ID NO: 283871 - RNA, 22 nt, Human
acaaagggggacugcagagggu

SEQ ID NO: 283872 - RNA, 22 nt, Human
agggcugcuuaccuggaauggc

SEQ ID NO: 283873 - RNA, 22 nt, Human
agucuuuacauguguuauauau

SEQ ID NO: 283874 - RNA, 19 nt, Human
ccuggaggugaagguucuc

SEQ ID NO: 283875 - RNA, 22 nt, Human
ugugccagccucuggcuguguc

SEQ ID NO: 283876 - RNA, 21 nt, Human
gcaggggauagaaauggucug

SEQ ID NO: 283877 - RNA, 22 nt, Human
uuucuaacagcaaauguuuauc

SEQ ID NO: 283878 - RNA, 19 nt, Human
ucaaaggcuuuuaggagac

SEQ ID NO: 283879 - RNA, 22 nt, Human
aaaguucuggagaaaauaauga

SEQ ID NO: 283880 - RNA, 22 nt, Human
uguuaaaaaugcagauuccuau

SEQ ID NO: 283881 - RNA, 22 nt, Human
ugaagggguucagcaugggggu

SEQ ID NO: 283882 - RNA, 19 nt, Human
aauagauuaauuauccucu

SEQ ID NO: 283883 - RNA, 22 nt, Human
gccuccggaguugcagugucuu

SEQ ID NO: 283884 - RNA, 22 nt, Human
ucuggcagcaagauaacaaugg

SEQ ID NO: 283885 - RNA, 22 nt, Human
caugaaugcuggguucauguaa

SEQ ID NO: 283886 - RNA, 22 nt, Human
cuuuauuccuacaagauuuucu

SEQ ID NO: 283887 - RNA, 22 nt, Human
uacauuccacaagcauugcuuu

SEQ ID NO: 283888 - RNA, 20 nt, Human
uaggugucuuugccagcuuu

SEQ ID NO: 283889 - RNA, 20 nt, Human
cuguggaauuuuaccaugcg

SEQ ID NO: 283890 - RNA, 22 nt, Human
uacacacagaggccaugggauu

SEQ ID NO: 283891 - RNA, 22 nt, Human
cuagggaccucagcuccuggag

SEQ ID NO: 283892 - RNA, 22 nt, Human
cucuucuuauggccguggcuga

SEQ ID NO: 283893 - RNA, 22 nt, Human
gcagggacgcagcacucuccgu

SEQ ID NO: 283894 - RNA, 22 nt, Human
ucccagggacaccaagcuguuu

SEQ ID NO: 283895 - RNA, 22 nt, Human
ucuggagaggggccuagaauuu

SEQ ID NO: 283896 - RNA, 22 nt, Human
uggcuucaagucuagguucuac

SEQ ID NO: 283897 - RNA, 21 nt, Human
gggugggguuccagccuuuuc

SEQ ID NO: 283898 - RNA, 22 nt, Human
aaagaaaccuaucagccacaug

SEQ ID NO: 283899 - RNA, 17 nt, Human
ucacugggccugcuccc

SEQ ID NO: 283900 - RNA, 22 nt, Human
ggagagcugacaucaugauguu

SEQ ID NO: 283901 - RNA, 22 nt, Human
uuuagggaauagaagaucugaa

SEQ ID NO: 283902 - RNA, 22 nt, Human
ugcaggugguccuuccucugcu

SEQ ID NO: 283903 - RNA, 22 nt, Human
cugguaaaugaugagaagcacc

SEQ ID NO: 283904 - RNA, 22 nt, Human
gaggccugaaaggggaccuaug

SEQ ID NO: 283905 - RNA, 22 nt, Human
aagucuuaaccaaauaaauguu

SEQ ID NO: 283906 - RNA, 22 nt, Human
ugcagaaauaacucauauugca

SEQ ID NO: 283907 - RNA, 22 nt, Human
gaaaauguuuguccggagcuga

SEQ ID NO: 283908 - RNA, 22 nt, Human
caguaaacacuagcauucuugg

SEQ ID NO: 283909 - RNA, 22 nt, Human
ucaaagcaucagucaauuuagg

SEQ ID NO: 283910 - RNA, 22 nt, Human
uccuggcuccuggagaccugcu

SEQ ID NO: 283911 - RNA, 22 nt, Human
aggcaggcccucuggaaaggua

SEQ ID NO: 283912 - RNA, 22 nt, Human
guuuauaaugucugugccaaaa

SEQ ID NO: 283913 - RNA, 22 nt, Human
cugagcaccccaggaccugcgc

SEQ ID NO: 283914 - RNA, 21 nt, Human
aucauucuggaaaauucaagc

SEQ ID NO: 283915 - RNA, 22 nt, Human
gugcaggguccuaauuguuaag

SEQ ID NO: 283916 - RNA, 22 nt, Human
uacuacaaggccgaagcucuca

SEQ ID NO: 283917 - RNA, 22 nt, Human
uucagcaaauggcuugagauaa

SEQ ID NO: 283918 - RNA, 22 nt, Human
uccugggucucuuccuuaguuc

SEQ ID NO: 283919 - RNA, 22 nt, Human
gaucaauacuauuaagaucaua

SEQ ID NO: 283920 - RNA, 22 nt, Human
acaggcaagaggaaagcaagua

SEQ ID NO: 283921 - RNA, 22 nt, Human
uuacuucuuacaaaagaaauau

SEQ ID NO: 283922 - RNA, 22 nt, Human
uuauuuaggagaaggaacccug

SEQ ID NO: 283923 - RNA, 23 nt, Human
gugacccaaggaccuuccagaau

SEQ ID NO: 283924 - RNA, 21 nt, Human
aggaauguguauauauacaau

SEQ ID NO: 283925 - RNA, 22 nt, Human
aaauuaacuaucacuuuuguga

SEQ ID NO: 283926 - RNA, 22 nt, Human
gcaggugguuaaggucccaugu

SEQ ID NO: 283927 - RNA, 20 nt, Human
ccuggcaggcggguuacuua

SEQ ID NO: 283928 - RNA, 22 nt, Human
aggagccauuuuccaagggcga

SEQ ID NO: 283929 - RNA, 22 nt, Human
acuguucauauucuuagaaauu

SEQ ID NO: 283930 - RNA, 22 nt, Human
cagguaaggucacauucugaag

SEQ ID NO: 283931 - RNA, 19 nt, Human
agaaucaucuugaagugau

SEQ ID NO: 283932 - RNA, 22 nt, Human
gaaccauuguugaaaagaauag

SEQ ID NO: 283933 - RNA, 22 nt, Human
aggcugugcaauuaggguaaga

SEQ ID NO: 283934 - RNA, 22 nt, Human
aggcugcuucaauggauaagau

SEQ ID NO: 283935 - RNA, 22 nt, Human
aaagcuuuucaguauguucaug

SEQ ID NO: 283936 - RNA, 22 nt, Human
uuuaauaucucacacuuccaug

SEQ ID NO: 283937 - RNA, 22 nt, Human
gcuaggcucggaagcagcaggg

SEQ ID NO: 283938 - RNA, 22 nt, Human
guuuuauuggaacacagccaug

SEQ ID NO: 283939 - RNA, 22 nt, Human
uccuggcaggucagcaggagca

SEQ ID NO: 283940 - RNA, 22 nt, Human
aaauauguaagauuagcacuag

SEQ ID NO: 283941 - RNA, 22 nt, Human
cauggcuuuuagcccuacauga

SEQ ID NO: 283942 - RNA, 22 nt, Human
acuguacuuuagaaaguguagu

SEQ ID NO: 283943 - RNA, 20 nt, Human
aacuuguucuaccuguuuca

SEQ ID NO: 283944 - RNA, 22 nt, Human
gaaucauuuagcucugcaugga

SEQ ID NO: 283945 - RNA, 22 nt, Human
cagagcacccaaggagcauuug

SEQ ID NO: 283946 - RNA, 22 nt, Human
uccacccugcuuuugucuuuga

SEQ ID NO: 283947 - RNA, 22 nt, Human
aaaguguuuuugagcuguaguu

SEQ ID NO: 283948 - RNA, 22 nt, Human
gacagacaggagcucacaggca

SEQ ID NO: 283949 - RNA, 22 nt, Human
uuucuggaaacggguucaagcu

SEQ ID NO: 283950 - RNA, 22 nt, Human
ccauguguucaauaagggaguu

SEQ ID NO: 283951 - RNA, 22 nt, Human
aguggcagguguuucguggugc

SEQ ID NO: 283952 - RNA, 22 nt, Human
ugggccaggucugugucagcug

SEQ ID NO: 283953 - RNA, 22 nt, Human
aauuucagagguagagauucua

SEQ ID NO: 283954 - RNA, 22 nt, Human
uauuccagaugaaaucauucag

SEQ ID NO: 283955 - RNA, 22 nt, Human
ucagagaguuuucacuagggug

SEQ ID NO: 283956 - RNA, 19 nt, Human
ugagccagggaggccaugc

SEQ ID NO: 283957 - RNA, 22 nt, Human
uucugucuucccacugaggagc

SEQ ID NO: 283958 - RNA, 22 nt, Human
cuguggaaauaaacaaugcuaa

SEQ ID NO: 283959 - RNA, 22 nt, Human
ugguuccacuaaccugagagcc

SEQ ID NO: 283960 - RNA, 22 nt, Human
agcucccagcuccuuugagaga

SEQ ID NO: 283961 - RNA, 22 nt, Human
cuuuuuguuguauaagcccuuu

SEQ ID NO: 283962 - RNA, 22 nt, Human
aauuuuacaaaauaccuccgau

SEQ ID NO: 283963 - RNA, 22 nt, Human
ucagacagagaaguacaaugag

SEQ ID NO: 283964 - RNA, 22 nt, Human
gacaagucaucuggggccugug

SEQ ID NO: 283965 - RNA, 18 nt, Human
augcuucugauagaagca

SEQ ID NO: 283966 - RNA, 23 nt, Human
gauugcuguaugcaggagcauuc

SEQ ID NO: 283967 - RNA, 22 nt, Human
ggcugcucaaggacucugaucg

SEQ ID NO: 283968 - RNA, 22 nt, Human
aguugcuggcaccugugaguau

SEQ ID NO: 283969 - RNA, 22 nt, Human
uggcugacaauguagcaguaac

SEQ ID NO: 283970 - RNA, 22 nt, Human
uuucagaugugugucucugaag

SEQ ID NO: 283971 - RNA, 22 nt, Human
uuuuggaacacagacauuagaa

SEQ ID NO: 283972 - RNA, 22 nt, Human
agguggggugagcugcagacua

SEQ ID NO: 283973 - RNA, 22 nt, Human
guacaaaaguuauugcgguuuu

SEQ ID NO: 283974 - RNA, 22 nt, Human
uaaugcuuaauuuucacaagcc

SEQ ID NO: 283975 - RNA, 22 nt, Human
uagaaagcugaguaauacauuu

SEQ ID NO: 283976 - RNA, 22 nt, Human
ucucccuggagcccugaagcau

SEQ ID NO: 283977 - RNA, 22 nt, Human
uggacaacauagugagaccuca

SEQ ID NO: 283978 - RNA, 22 nt, Human
aaggccagcccuaaugaugcuc

SEQ ID NO: 283979 - RNA, 22 nt, Human
gcuguggcuguacagagaccau

SEQ ID NO: 283980 - RNA, 22 nt, Human
auauuaaugggauuuagucagg

SEQ ID NO: 283981 - RNA, 22 nt, Human
aaaucaugaggacauuaugcca

SEQ ID NO: 283982 - RNA, 22 nt, Human
gguguccucacuauagcaaguc

SEQ ID NO: 283983 - RNA, 22 nt, Human
gacccagcuuaagucacauguu

SEQ ID NO: 283984 - RNA, 22 nt, Human
agugaaaacacuaguucuugcc

SEQ ID NO: 283985 - RNA, 22 nt, Human
aggucaaaaugcuuuucagguc

SEQ ID NO: 283986 - RNA, 22 nt, Human
uccccacacuuucacuccuggc

SEQ ID NO: 283987 - RNA, 22 nt, Human
ccagagagguagcuuacccucu

SEQ ID NO: 283988 - RNA, 22 nt, Human
cacuccagccucagugacagag

SEQ ID NO: 283989 - RNA, 19 nt, Human
cuucuucuuggcagccaag

SEQ ID NO: 283990 - RNA, 22 nt, Human
agaauacaguaugcaaaaagau

SEQ ID NO: 283991 - RNA, 22 nt, Human
agucaaagaagaugguuccaaa

SEQ ID NO: 283992 - RNA, 22 nt, Human
cccugcagaucagugagaacuu

SEQ ID NO: 283993 - RNA, 22 nt, Human
gccaggcagagccccgugcagc

SEQ ID NO: 283994 - RNA, 22 nt, Human
cugcagggugacguugcccacc

SEQ ID NO: 283995 - RNA, 22 nt, Human
cauuucaaugccuucaacauag

SEQ ID NO: 283996 - RNA, 22 nt, Human
gcagggcacagacagugccaag

SEQ ID NO: 283997 - RNA, 22 nt, Human
aggcagguuggggaaaagcacu

SEQ ID NO: 283998 - RNA, 22 nt, Human
aaauguguauaugaaacaugau

SEQ ID NO: 283999 - RNA, 22 nt, Human
gugcaaagugcauggggaaggg

SEQ ID NO: 284000 - RNA, 22 nt, Human
ugcaggcugcuggcaguagcuu

SEQ ID NO: 284001 - RNA, 22 nt, Human
cuggaauugcauaauauguccu

SEQ ID NO: 284002 - RNA, 22 nt, Human
uuagcuuuucacuugcauuauc

SEQ ID NO: 284003 - RNA, 22 nt, Human
aagugaugcuacgacuuugaca

SEQ ID NO: 284004 - RNA, 22 nt, Human
gauuaagagaaguuucuuaucg

SEQ ID NO: 284005 - RNA, 22 nt, Human
auugcuuuuccuuaacacaugc

SEQ ID NO: 284006 - RNA, 22 nt, Human
aggaguuauggcagaaucaaau

SEQ ID NO: 284007 - RNA, 22 nt, Human
auaaguuugucuuuguaaagau

SEQ ID NO: 284008 - RNA, 22 nt, Human
cuccuggcucgcccccagcuga

SEQ ID NO: 284009 - RNA, 22 nt, Human
gcagggcaaacccagguguuca

SEQ ID NO: 284010 - RNA, 22 nt, Human
uugugaguagugccgcaauaaa

SEQ ID NO: 284011 - RNA, 22 nt, Human
cacaguuucugaacacuuugca

SEQ ID NO: 284012 - RNA, 22 nt, Human
uaguuuacuguucacuuugccc

SEQ ID NO: 284013 - RNA, 22 nt, Human
uauuucagggagaauaaauuug

SEQ ID NO: 284014 - RNA, 22 nt, Human
agaggucagagcaggaaaggca

SEQ ID NO: 284015 - RNA, 22 nt, Human
acuuuauuuccuauugcaucca

SEQ ID NO: 284016 - RNA, 22 nt, Human
agugaggggcagcugagugggc

SEQ ID NO: 284017 - RNA, 22 nt, Human
uaggugucuaacaauaagugua

SEQ ID NO: 284018 - RNA, 22 nt, Human
uucuuuuaaugucuggcuuuca

SEQ ID NO: 284019 - RNA, 23 nt, Human
acuagaaaaugacuuucucccug

SEQ ID NO: 284020 - RNA, 20 nt, Human
ugauuucucuucuauuccuu

SEQ ID NO: 284021 - RNA, 22 nt, Human
uacagagaguacagcauccaca

SEQ ID NO: 284022 - RNA, 22 nt, Human
ccugagagggggcccuagaaau

SEQ ID NO: 284023 - RNA, 22 nt, Human
uuugacuccagagcccauuuuu

SEQ ID NO: 284024 - RNA, 22 nt, Human
acugucugcuggccccugguua

SEQ ID NO: 284025 - RNA, 22 nt, Human
ugauggaaauaaaagcauagcu

SEQ ID NO: 284026 - RNA, 22 nt, Human
agagggcuggacgcagguugga

SEQ ID NO: 284027 - RNA, 22 nt, Human
uaaugcuuuuccuucaaauaag

SEQ ID NO: 284028 - RNA, 19 nt, Human
ggggagaacuagagacagc

SEQ ID NO: 284029 - RNA, 22 nt, Human
uacauucagaagaauggacacg

SEQ ID NO: 284030 - RNA, 22 nt, Human
caguguucccugaacauauguu

SEQ ID NO: 284031 - RNA, 22 nt, Human
agauuucucuuucccuggcuga

SEQ ID NO: 284032 - RNA, 22 nt, Human
uauuuuacuuuaaagcgagaga

SEQ ID NO: 284033 - RNA, 19 nt, Human
ccuuccuccccagggccau

SEQ ID NO: 284034 - RNA, 22 nt, Human
auuucuguuugcuacuauaagu

SEQ ID NO: 284035 - RNA, 22 nt, Human
agucacauggacucaggaugac

SEQ ID NO: 284036 - RNA, 22 nt, Human
uggcccagggaguucauggugu

SEQ ID NO: 284037 - RNA, 22 nt, Human
caggauggucucgaucuccuga

SEQ ID NO: 284038 - RNA, 22 nt, Human
gagugaggcuggaaucauggcu

SEQ ID NO: 284039 - RNA, 23 nt, Human
auuuacagcugugugagcaaguu

SEQ ID NO: 284040 - RNA, 22 nt, Human
gaggagguggagucaugcagag

SEQ ID NO: 284041 - RNA, 22 nt, Human
auguuuguagguaagugacacu

SEQ ID NO: 284042 - RNA, 22 nt, Human
aagcugugaaaucucuagugca

SEQ ID NO: 284043 - RNA, 22 nt, Human
guggcagugggaugcuaucagg

SEQ ID NO: 284044 - RNA, 22 nt, Human
gucuagaauggaugagcauuuu

SEQ ID NO: 284045 - RNA, 22 nt, Human
ugcagggaaucuguggcuggac

SEQ ID NO: 284046 - RNA, 22 nt, Human
uuucuucucacccaggacagag

SEQ ID NO: 284047 - RNA, 22 nt, Human
gcuguggccgucagggaaaugg

SEQ ID NO: 284048 - RNA, 22 nt, Human
gcaggcagucaucuuucauauu

SEQ ID NO: 284049 - RNA, 22 nt, Human
uaaaaugacuuccuccaacauc

SEQ ID NO: 284050 - RNA, 22 nt, Human
auaguuuucuaugcacuguuau

SEQ ID NO: 284051 - RNA, 22 nt, Human
gcauucuuuagacugagagaua

SEQ ID NO: 284052 - RNA, 22 nt, Human
uuggcugagagcugcucugcag

SEQ ID NO: 284053 - RNA, 22 nt, Human
acuguucaaguuuuaugcugga

SEQ ID NO: 284054 - RNA, 22 nt, Human
agguggggaaaccagcgauccc

SEQ ID NO: 284055 - RNA, 22 nt, Human
auccaggcuuaaugggagccac

SEQ ID NO: 284056 - RNA, 22 nt, Human
aggcacaguggcccuguuuggg

SEQ ID NO: 284057 - RNA, 22 nt, Human
acagacuggaggagaauaguuu

SEQ ID NO: 284058 - RNA, 22 nt, Human
gcuauguucccuuuugcuauaa

SEQ ID NO: 284059 - RNA, 20 nt, Human
auguaaaagacagggaguag

SEQ ID NO: 284060 - RNA, 22 nt, Human
uuauuguuuacuaguuugcaga

SEQ ID NO: 284061 - RNA, 22 nt, Human
ucugacuugcaucuuaaaggag

SEQ ID NO: 284062 - RNA, 22 nt, Human
cuggaggagcauggacuggagu

SEQ ID NO: 284063 - RNA, 22 nt, Human
ccuggacaaugagaugucaggg

SEQ ID NO: 284064 - RNA, 22 nt, Human
uccuucaaagcuccuagugagc

SEQ ID NO: 284065 - RNA, 22 nt, Human
aaguaaaccacagagaagccac

SEQ ID NO: 284066 - RNA, 22 nt, Human
aagucucucugugugggauaag

SEQ ID NO: 284067 - RNA, 22 nt, Human
uaacuuuaguguaugagguaag

SEQ ID NO: 284068 - RNA, 20 nt, Human
aacacagauaccaaagguug

SEQ ID NO: 284069 - RNA, 22 nt, Human
uuccucaacaacuucccuacag

SEQ ID NO: 284070 - RNA, 22 nt, Human
uauuuuaaagugaagggucuug

SEQ ID NO: 284071 - RNA, 22 nt, Human
ugacaaagcaugauggugacag

SEQ ID NO: 284072 - RNA, 22 nt, Human
gagguucaguaaggaauacuga

SEQ ID NO: 284073 - RNA, 22 nt, Human
uccaggagguugagacugcagu

SEQ ID NO: 284074 - RNA, 22 nt, Human
agggaagaaucacugggauguu

SEQ ID NO: 284075 - RNA, 22 nt, Human
ugucacagagcgugcaacagaa

SEQ ID NO: 284076 - RNA, 22 nt, Human
aggcaaagcgauaccagagcua

SEQ ID NO: 284077 - RNA, 22 nt, Human
acuuccagugucugcugcuagc

SEQ ID NO: 284078 - RNA, 22 nt, Human
acacaugaaucacugguggaag

SEQ ID NO: 284079 - RNA, 22 nt, Human
agcauccaacuuugauuagaga

SEQ ID NO: 284080 - RNA, 22 nt, Human
uccuucuggaggcucuaagggg

SEQ ID NO: 284081 - RNA, 22 nt, Human
uaccucaaguuccaggaaagcg

SEQ ID NO: 284082 - RNA, 22 nt, Human
uaggugucagguauagaauuua

SEQ ID NO: 284083 - RNA, 22 nt, Human
cccugccuugggguccacaccg

SEQ ID NO: 284084 - RNA, 22 nt, Human
aggaaacuaauuaguagaauaa

SEQ ID NO: 284085 - RNA, 22 nt, Human
cagcauuuucuuaauguaggug

SEQ ID NO: 284086 - RNA, 22 nt, Human
auaaaagucugcuuauuugggc

SEQ ID NO: 284087 - RNA, 22 nt, Human
aggaaucagaauucuuagaauu

SEQ ID NO: 284088 - RNA, 22 nt, Human
uuuccauguguacuggccagaa

SEQ ID NO: 284089 - RNA, 22 nt, Human
agcagguggccuccugucuguc

SEQ ID NO: 284090 - RNA, 22 nt, Human
acacaugaggaaggccucaccc

SEQ ID NO: 284091 - RNA, 22 nt, Human
gauuuguuucaaguuagcaucu

SEQ ID NO: 284092 - RNA, 22 nt, Human
ugucucaucucuuaaccccacu

SEQ ID NO: 284093 - RNA, 22 nt, Human
cccagacauugcagggacuggu

SEQ ID NO: 284094 - RNA, 22 nt, Human
agaaagcacccugcacuuucug

SEQ ID NO: 284095 - RNA, 22 nt, Human
guuauugagguggagucucacu

SEQ ID NO: 284096 - RNA, 22 nt, Human
uccucaggaucuaggagugcuu

SEQ ID NO: 284097 - RNA, 23 nt, Human
cagaugagguuggcagcaugguc

SEQ ID NO: 284098 - RNA, 19 nt, Human
acauggcucuccagucugg

SEQ ID NO: 284099 - RNA, 22 nt, Human
uuccugagggccccagaggagg

SEQ ID NO: 284100 - RNA, 22 nt, Human
ugacagaccacugcaacucugu

SEQ ID NO: 284101 - RNA, 22 nt, Human
caauaauauccugugcuguuug

SEQ ID NO: 284102 - RNA, 22 nt, Human
agaggcuucucggauggggcag

SEQ ID NO: 284103 - RNA, 22 nt, Human
ucaaagagcuauucaguugugg

SEQ ID NO: 284104 - RNA, 18 nt, Human
ugagaggcuauuuuuugc

SEQ ID NO: 284105 - RNA, 22 nt, Human
uccaggagagguguggggacug

SEQ ID NO: 284106 - RNA, 22 nt, Human
augauucuggggcaaaagcugg

SEQ ID NO: 284107 - RNA, 22 nt, Human
aggaucaggcccucuaggguag

SEQ ID NO: 284108 - RNA, 22 nt, Human
uauguuuguuaucacaacuagg

SEQ ID NO: 284109 - RNA, 22 nt, Human
cauauuuauagaucuggcauuu

SEQ ID NO: 284110 - RNA, 22 nt, Human
gaauuuaaggaccaagcauuuu

SEQ ID NO: 284111 - RNA, 22 nt, Human
uuaauuuuaaccuguuuguguc

SEQ ID NO: 284112 - RNA, 22 nt, Human
uuugcugauauuuugcugauac

SEQ ID NO: 284113 - RNA, 23 nt, Human
uuuugacaggaggaagguguuga

SEQ ID NO: 284114 - RNA, 22 nt, Human
gggagcuguaagggacagguag

SEQ ID NO: 284115 - RNA, 20 nt, Human
agugacugggagaauggauu

SEQ ID NO: 284116 - RNA, 22 nt, Human
agacaggugcucgcccaagucc

SEQ ID NO: 284117 - RNA, 22 nt, Human
uacaugcauguguguaaauaua

SEQ ID NO: 284118 - RNA, 22 nt, Human
uuuaucuguuguacauuuaugc

SEQ ID NO: 284119 - RNA, 22 nt, Human
ugucucagguacaugcguccug

SEQ ID NO: 284120 - RNA, 22 nt, Human
uccaggcuagagugcaguggcc

SEQ ID NO: 284121 - RNA, 22 nt, Human
uuccucagcuguguccuggcga

SEQ ID NO: 284122 - RNA, 22 nt, Human
guagggacaugccauuaucuca

SEQ ID NO: 284123 - RNA, 22 nt, Human
cuuccagagauccaugaauacc

SEQ ID NO: 284124 - RNA, 22 nt, Human
ucauuucaaguucugacagcua

SEQ ID NO: 284125 - RNA, 23 nt, Human
uuucacagcuuuuauucugcauc

SEQ ID NO: 284126 - RNA, 22 nt, Human
acuucuuucacaauguuucuag

SEQ ID NO: 284127 - RNA, 22 nt, Human
auuaagacugcccauguuuuua

SEQ ID NO: 284128 - RNA, 22 nt, Human
acuugucuggcagaucaugcaa

SEQ ID NO: 284129 - RNA, 22 nt, Human
ugcagggaaaguguuggcagca

SEQ ID NO: 284130 - RNA, 22 nt, Human
aaacaaagcaucuugcuaugca

SEQ ID NO: 284131 - RNA, 22 nt, Human
aaaugucagaggaacauauuga

SEQ ID NO: 284132 - RNA, 22 nt, Human
ucccagccuuccagucugguuu

SEQ ID NO: 284133 - RNA, 22 nt, Human
uugcugaucugaaacguuacug

SEQ ID NO: 284134 - RNA, 22 nt, Human
ccaggagguggcaggacuugcc

SEQ ID NO: 284135 - RNA, 22 nt, Human
uucugucauccuuucuagaugu

SEQ ID NO: 284136 - RNA, 22 nt, Human
uaguuucuaaagcuuccuaggu

SEQ ID NO: 284137 - RNA, 20 nt, Human
uugauucccucuaaacucgc

SEQ ID NO: 284138 - RNA, 22 nt, Human
uugguacauuacaguuugauug

SEQ ID NO: 284139 - RNA, 23 nt, Human
uagggcagcugggagggacaugc

SEQ ID NO: 284140 - RNA, 22 nt, Human
uacaucuaucuagaugcucaga

SEQ ID NO: 284141 - RNA, 22 nt, Human
aguguggcugcguagggcucuc

SEQ ID NO: 284142 - RNA, 22 nt, Human
auuuaugauuagccuauuguug

SEQ ID NO: 284143 - RNA, 22 nt, Human
uguguguguuuacaguuucuca

SEQ ID NO: 284144 - RNA, 22 nt, Human
aauacauauggaauuccauguu

SEQ ID NO: 284145 - RNA, 22 nt, Human
agaugaaagauuuuuauagaga

SEQ ID NO: 284146 - RNA, 22 nt, Human
cacauucacuucucuguccacc

SEQ ID NO: 284147 - RNA, 22 nt, Human
auuuccuguaggggcuugcgaa

SEQ ID NO: 284148 - RNA, 22 nt, Human
auguccuuccugagaucccugu

SEQ ID NO: 284149 - RNA, 22 nt, Human
aauguuguuuuucugcaugucu

SEQ ID NO: 284150 - RNA, 21 nt, Human
uucaaaaugguguguuugucu

SEQ ID NO: 284151 - RNA, 22 nt, Human
uugcuuuaacuaguaaaugggg

SEQ ID NO: 284152 - RNA, 19 nt, Human
uccugcagaccagaccugu

SEQ ID NO: 284153 - RNA, 22 nt, Human
agugucaauucucaaaucucgg

SEQ ID NO: 284154 - RNA, 20 nt, Human
ucauuccaaauaguucagca

SEQ ID NO: 284155 - RNA, 22 nt, Human
ugcuguguaaaaggugauugaa

SEQ ID NO: 284156 - RNA, 22 nt, Human
agggaugauuucagugucugcc

SEQ ID NO: 284157 - RNA, 22 nt, Human
uugauacauuuuuaggauaaac

SEQ ID NO: 284158 - RNA, 20 nt, Human
ggcccagugaaccaggacgg

SEQ ID NO: 284159 - RNA, 22 nt, Human
ucucagguaagcuucuuugaug

SEQ ID NO: 284160 - RNA, 22 nt, Human
agaauauugaaaguucuugaca

SEQ ID NO: 284161 - RNA, 19 nt, Human
agaguauugaauuugcccu

SEQ ID NO: 284162 - RNA, 22 nt, Human
cucuucuugaaagaggaauuca

SEQ ID NO: 284163 - RNA, 22 nt, Human
ccuccuggccugugcagagccc

SEQ ID NO: 284164 - RNA, 22 nt, Human
cacaauguauauguauaucaaa

SEQ ID NO: 284165 - RNA, 22 nt, Human
ucaguguccggagccugagugc

SEQ ID NO: 284166 - RNA, 22 nt, Human
aauauaugugguauugaccagc

SEQ ID NO: 284167 - RNA, 22 nt, Human
gguuucaacuucaaccucucca

SEQ ID NO: 284168 - RNA, 22 nt, Human
ggagcugaguggguuuauugau

SEQ ID NO: 284169 - RNA, 22 nt, Human
ugggcagguuguuauuugacau

SEQ ID NO: 284170 - RNA, 22 nt, Human
uagaaaugaauguuuaaaaguc

SEQ ID NO: 284171 - RNA, 22 nt, Human
ucuuucuguaagcuccauggaa

SEQ ID NO: 284172 - RNA, 22 nt, Human
ucauguguugcacugaggaccu

SEQ ID NO: 284173 - RNA, 22 nt, Human
agggccaguaaauguuuccuca

SEQ ID NO: 284174 - RNA, 22 nt, Human
gagaggaacucccagugccugg

SEQ ID NO: 284175 - RNA, 22 nt, Human
uuccugugaagaucugggugcu

SEQ ID NO: 284176 - RNA, 19 nt, Human
gagacauguagauagaaga

SEQ ID NO: 284177 - RNA, 22 nt, Human
aggcaugacuuuggcugaagaa

SEQ ID NO: 284178 - RNA, 22 nt, Human
ugcuauauaauggaauuucuaa

SEQ ID NO: 284179 - RNA, 22 nt, Human
gcauacaaagguuuacaacuga

SEQ ID NO: 284180 - RNA, 20 nt, Human
ugacuucuucaugcuguacu

SEQ ID NO: 284181 - RNA, 19 nt, Human
ggcuucgaggcuggggaag

SEQ ID NO: 284182 - RNA, 22 nt, Human
aggccuccuggcuccaggccuu

SEQ ID NO: 284183 - RNA, 22 nt, Human
gauugagucugaggaugcugca

SEQ ID NO: 284184 - RNA, 22 nt, Human
ggcaggcaucaucaguugauca

SEQ ID NO: 284185 - RNA, 22 nt, Human
auugaaaaaugacuauugcuua

SEQ ID NO: 284186 - RNA, 22 nt, Human
ugcagggagcucuggggugcag

SEQ ID NO: 284187 - RNA, 22 nt, Human
uuucaaagaguuguaaauuacu

SEQ ID NO: 284188 - RNA, 22 nt, Human
caugcaaaggucaagaucagga

SEQ ID NO: 284189 - RNA, 22 nt, Human
gcaccugccugggacugaagau

SEQ ID NO: 284190 - RNA, 22 nt, Human
cuuguauuaggaagaaugcuuu

SEQ ID NO: 284191 - RNA, 23 nt, Human
aaccuagacuacuuacuaugugg

SEQ ID NO: 284192 - RNA, 22 nt, Human
caaucugaguugggaauguauu

SEQ ID NO: 284193 - RNA, 22 nt, Human
caagccuuggaaauccauucug

SEQ ID NO: 284194 - RNA, 22 nt, Human
ggucaaaguugaagaagggcau

SEQ ID NO: 284195 - RNA, 22 nt, Human
ggaugucuggucuauuucaagu

SEQ ID NO: 284196 - RNA, 22 nt, Human
agaaacaucauuggaacacaag

SEQ ID NO: 284197 - RNA, 18 nt, Human
acugaagaugcaagaccu

SEQ ID NO: 284198 - RNA, 22 nt, Human
ucauagaaauggaaaguauauu

SEQ ID NO: 284199 - RNA, 22 nt, Human
uccucuccauauuuucugauuu

SEQ ID NO: 284200 - RNA, 22 nt, Human
aggccagguuccucaaucuuga

SEQ ID NO: 284201 - RNA, 22 nt, Human
uuuucagugggcaaugauguga

SEQ ID NO: 284202 - RNA, 22 nt, Human
aauaaaauggucaguuuucuca

SEQ ID NO: 284203 - RNA, 22 nt, Human
cugaggcucccucgggucugcu

SEQ ID NO: 284204 - RNA, 23 nt, Human
aggcccugccugucccucuuuuu

SEQ ID NO: 284205 - RNA, 22 nt, Human
auauuauaaguuauuucaaguu

SEQ ID NO: 284206 - RNA, 22 nt, Human
cugccuggccacaacccagggu

SEQ ID NO: 284207 - RNA, 22 nt, Human
gugaggcaggcauucuccuuuc

SEQ ID NO: 284208 - RNA, 22 nt, Human
agaggggaaguaaugaaugaua

SEQ ID NO: 284209 - RNA, 22 nt, Human
acuaaagcucacagaguugaac

SEQ ID NO: 284210 - RNA, 22 nt, Human
cuuccuggcucggugccucacc

SEQ ID NO: 284211 - RNA, 22 nt, Human
aucagcaagcauuuauugagug

SEQ ID NO: 284212 - RNA, 22 nt, Human
cauaauccuugauucaaauaau

SEQ ID NO: 284213 - RNA, 22 nt, Human
uuucccaguucccugcucuaua

SEQ ID NO: 284214 - RNA, 22 nt, Human
caagaucuuccucaauagaccu

SEQ ID NO: 284215 - RNA, 22 nt, Human
ugaaagcagugccaugauuaug

SEQ ID NO: 284216 - RNA, 22 nt, Human
acuccuggggauccauuccuuu

SEQ ID NO: 284217 - RNA, 22 nt, Human
ucaaugauaguacaaucagccu

SEQ ID NO: 284218 - RNA, 22 nt, Human
ucugguaauaggcaauagcuug

SEQ ID NO: 284219 - RNA, 22 nt, Human
auaagguaaggguauugucaga

SEQ ID NO: 284220 - RNA, 22 nt, Human
aucaaaauggaagaauuuggcu

SEQ ID NO: 284221 - RNA, 22 nt, Human
uuucaggaaggugaggcacaug

SEQ ID NO: 284222 - RNA, 22 nt, Human
auuuauugaagcuuauuacguu

SEQ ID NO: 284223 - RNA, 22 nt, Human
ucugucuuugucaggaccagag

SEQ ID NO: 284224 - RNA, 22 nt, Human
ucccagggacugggcuaggcuu

SEQ ID NO: 284225 - RNA, 22 nt, Human
cuuuaagacucugcucuuggug

SEQ ID NO: 284226 - RNA, 22 nt, Human
gcccaguaguucaagguugcag

SEQ ID NO: 284227 - RNA, 22 nt, Human
uacacaguaaaugguaaauaca

SEQ ID NO: 284228 - RNA, 22 nt, Human
uguuucaggaccuaucuuuuag

SEQ ID NO: 284229 - RNA, 22 nt, Human
ucagcuuucucucgccaucagg

SEQ ID NO: 284230 - RNA, 23 nt, Human
gaggcagcuccugcagugcccug

SEQ ID NO: 284231 - RNA, 22 nt, Human
ucagguggagaccuccuuggcc

SEQ ID NO: 284232 - RNA, 21 nt, Human
cauuuacaugacagauugguu

SEQ ID NO: 284233 - RNA, 22 nt, Human
gcuuggcuugggcucagaggcc

SEQ ID NO: 284234 - RNA, 22 nt, Human
ggguggcacugauaaugagacg

SEQ ID NO: 284235 - RNA, 22 nt, Human
gggcaggggucaguggccccaa

SEQ ID NO: 284236 - RNA, 22 nt, Human
gcugucuuguauguuguaggac

SEQ ID NO: 284237 - RNA, 22 nt, Human
acugaggagaaauuugagugaa

SEQ ID NO: 284238 - RNA, 22 nt, Human
gccugaagaacagcugugagga

SEQ ID NO: 284239 - RNA, 22 nt, Human
aguguucacucuguggagccca

SEQ ID NO: 284240 - RNA, 22 nt, Human
accuuuauagcugauuaugaca

SEQ ID NO: 284241 - RNA, 22 nt, Human
acaaauuuggugagaguaaaua

SEQ ID NO: 284242 - RNA, 22 nt, Human
auguguuuguccugcagaaaua

SEQ ID NO: 284243 - RNA, 22 nt, Human
gccuguuuuugcuucguuuaag

SEQ ID NO: 284244 - RNA, 22 nt, Human
uuccaugaaggagacugagaag

SEQ ID NO: 284245 - RNA, 22 nt, Human
ggaagaaagguggacaacaggu

SEQ ID NO: 284246 - RNA, 22 nt, Human
auaaacugguaggaaaacagua

SEQ ID NO: 284247 - RNA, 22 nt, Human
ugcagggccccucugcaugagu

SEQ ID NO: 284248 - RNA, 22 nt, Human
cacagcugaaguagccaugugg

SEQ ID NO: 284249 - RNA, 22 nt, Human
guuucuuucuauugacugaaca

SEQ ID NO: 284250 - RNA, 22 nt, Human
ggaaagcuuuguuuuccucacc

SEQ ID NO: 284251 - RNA, 17 nt, Human
ucuccuggcucuaucag

SEQ ID NO: 284252 - RNA, 22 nt, Human
uucaguguggugcacaguuuug

SEQ ID NO: 284253 - RNA, 23 nt, Human
uuuuaauuuggacauaagaagau

SEQ ID NO: 284254 - RNA, 22 nt, Human
aagugccaucauagcauggcug

SEQ ID NO: 284255 - RNA, 22 nt, Human
guucacaucccagaaagagcau

SEQ ID NO: 284256 - RNA, 22 nt, Human
aguguccuggggcccuaaggcc

SEQ ID NO: 284257 - RNA, 22 nt, Human
agcaggagcugugggaagaugg

SEQ ID NO: 284258 - RNA, 22 nt, Human
aaggaggguucccagguccugg

SEQ ID NO: 284259 - RNA, 22 nt, Human
ugagauguaagguaugcuuacu

SEQ ID NO: 284260 - RNA, 22 nt, Human
ucugcaugaugaacaaaugagc

SEQ ID NO: 284261 - RNA, 22 nt, Human
gccugcagacguguuuuccuca

SEQ ID NO: 284262 - RNA, 22 nt, Human
ucugucuuagcaucuuugcuca

SEQ ID NO: 284263 - RNA, 22 nt, Human
uuuagaauguuagcguuaaagg

SEQ ID NO: 284264 - RNA, 23 nt, Human
uuaggcacuuaguagggccagag

SEQ ID NO: 284265 - RNA, 19 nt, Human
aggaggccaugccacuaga

SEQ ID NO: 284266 - RNA, 20 nt, Human
gcuguggcaaagcuuugugu

SEQ ID NO: 284267 - RNA, 22 nt, Human
cuuuacaauucaagggaacucu

SEQ ID NO: 284268 - RNA, 22 nt, Human
ucagggauugcaaaauucaucc

SEQ ID NO: 284269 - RNA, 20 nt, Human
ugcccagcaagagugcaguu

SEQ ID NO: 284270 - RNA, 22 nt, Human
uuaaaauuuccccaccauguau

SEQ ID NO: 284271 - RNA, 22 nt, Human
uguccugcaagcccuaaugaau

SEQ ID NO: 284272 - RNA, 22 nt, Human
gcagacagggcuacagagguac

SEQ ID NO: 284273 - RNA, 22 nt, Human
acauuucagauguaaugugaug

SEQ ID NO: 284274 - RNA, 22 nt, Human
uuucuucuugaguaaccagauu

SEQ ID NO: 284275 - RNA, 22 nt, Human
caauaauugcuuuccagaguua

SEQ ID NO: 284276 - RNA, 22 nt, Human
gcaaggaccuuugagcgugcca

SEQ ID NO: 284277 - RNA, 22 nt, Human
ugaugucuaguacauacaagag

SEQ ID NO: 284278 - RNA, 22 nt, Human
agucuagggugggguccacagg

SEQ ID NO: 284279 - RNA, 22 nt, Human
ugucagugucuaugaagaauuu

SEQ ID NO: 284280 - RNA, 22 nt, Human
agccaagaggagccuaaagcga

SEQ ID NO: 284281 - RNA, 22 nt, Human
gaagcuucguggcucuucaaau

SEQ ID NO: 284282 - RNA, 22 nt, Human
cauaauccuguccuggauucuu

SEQ ID NO: 284283 - RNA, 22 nt, Human
aaguagcauuuucaaaauguau

SEQ ID NO: 284284 - RNA, 18 nt, Human
ugcuggguaacuguaugg

SEQ ID NO: 284285 - RNA, 22 nt, Human
uauucacagcugccgcacucag

SEQ ID NO: 284286 - RNA, 22 nt, Human
caagauuuccaacccuggguaa

SEQ ID NO: 284287 - RNA, 22 nt, Human
auaugagagaggaaagauuuua

SEQ ID NO: 284288 - RNA, 22 nt, Human
ucacugggagaugugggaaggg

SEQ ID NO: 284289 - RNA, 22 nt, Human
uuucuuuguuguuaucacauca

SEQ ID NO: 284290 - RNA, 22 nt, Human
aguuucagaauuuaugcagaca

SEQ ID NO: 284291 - RNA, 22 nt, Human
auguauuugcuuguuauggauu

SEQ ID NO: 284292 - RNA, 22 nt, Human
aggccaggacacuuaaguaaga

SEQ ID NO: 284293 - RNA, 22 nt, Human
auuuugcacacuaugcagcuuu

SEQ ID NO: 284294 - RNA, 22 nt, Human
acuggcagggggagccccgaga

SEQ ID NO: 284295 - RNA, 22 nt, Human
guccugugugacuucccaaaug

SEQ ID NO: 284296 - RNA, 22 nt, Human
agcuccuggcaaggucauggug

SEQ ID NO: 284297 - RNA, 22 nt, Human
uagggaugacuaugauucccac

SEQ ID NO: 284298 - RNA, 22 nt, Human
ggucuccuugggaaagcaggaa

SEQ ID NO: 284299 - RNA, 23 nt, Human
ucaauuaucaauggaaagaaguu

SEQ ID NO: 284300 - RNA, 22 nt, Human
gggcuggaggagauccagaggc

SEQ ID NO: 284301 - RNA, 22 nt, Human
uguuuucauuugauguaacaaa

SEQ ID NO: 284302 - RNA, 22 nt, Human
uacauucauaugugugcauaca

SEQ ID NO: 284303 - RNA, 22 nt, Human
acaaauuuguguaguuauggca

SEQ ID NO: 284304 - RNA, 22 nt, Human
ugucauuuacuccauacccuca

SEQ ID NO: 284305 - RNA, 22 nt, Human
ccagggcaauuauuuggagggu

SEQ ID NO: 284306 - RNA, 22 nt, Human
cagaaaauaaaguuucuacgca

SEQ ID NO: 284307 - RNA, 21 nt, Human
ccugugccagucuauguguuc

SEQ ID NO: 284308 - RNA, 22 nt, Human
ucuguggcuuucuuauguugua

SEQ ID NO: 284309 - RNA, 22 nt, Human
uccuuccugcaggccaaguccu

SEQ ID NO: 284310 - RNA, 22 nt, Human
ucagagaaguaggcuaauggug

SEQ ID NO: 284311 - RNA, 22 nt, Human
uuugcagagugcagaagcaucu

SEQ ID NO: 284312 - RNA, 22 nt, Human
cugaaauucugccucugcacaa

SEQ ID NO: 284313 - RNA, 22 nt, Human
gcaucuaauccaguccagcauc

SEQ ID NO: 284314 - RNA, 22 nt, Human
ugccugccucuggcagcccugc

SEQ ID NO: 284315 - RNA, 22 nt, Human
auuucaaggcuauuaauauaaa

SEQ ID NO: 284316 - RNA, 22 nt, Human
acagcaggcaugaagaaauguu

SEQ ID NO: 284317 - RNA, 21 nt, Human
uaauaauuccacuacagagua

SEQ ID NO: 284318 - RNA, 22 nt, Human
auagccuugacucacagcucuu

SEQ ID NO: 284319 - RNA, 22 nt, Human
agcaggugggaucaagcuggca

SEQ ID NO: 284320 - RNA, 23 nt, Human
augggcuuagaaagcaaguggga

SEQ ID NO: 284321 - RNA, 22 nt, Human
cauuauugccagccauacugaa

SEQ ID NO: 284322 - RNA, 22 nt, Human
ucucuaggggagccccguuugu

SEQ ID NO: 284323 - RNA, 22 nt, Human
guaggcagggcuguggggagaa

SEQ ID NO: 284324 - RNA, 22 nt, Human
ggcucaggacugcagcguagag

SEQ ID NO: 284325 - RNA, 19 nt, Human
aggcuugguguugaauggg

SEQ ID NO: 284326 - RNA, 22 nt, Human
guacauuuacugaugaaaagua

SEQ ID NO: 284327 - RNA, 22 nt, Human
gcuccuggugcuguagagauuu

SEQ ID NO: 284328 - RNA, 22 nt, Human
uucuggcuuaguuguuguauau

SEQ ID NO: 284329 - RNA, 22 nt, Human
cugccuggcauagucuggucga

SEQ ID NO: 284330 - RNA, 22 nt, Human
uuauugagaccguaagucaggu

SEQ ID NO: 284331 - RNA, 22 nt, Human
auaaauuaugaauggcccuuuu

SEQ ID NO: 284332 - RNA, 22 nt, Human
auuuccauagagcgucucacag

SEQ ID NO: 284333 - RNA, 22 nt, Human
cauuugaaauaguucauucuug

SEQ ID NO: 284334 - RNA, 22 nt, Human
ucuggcuggcagugauggugug

SEQ ID NO: 284335 - RNA, 22 nt, Human
gcucccucccaccagccugcag

SEQ ID NO: 284336 - RNA, 22 nt, Human
ugaggugggcuuguggauuugc

SEQ ID NO: 284337 - RNA, 22 nt, Human
cuguuuucccuggaguucagca

SEQ ID NO: 284338 - RNA, 22 nt, Human
aucauuuuuaagagacucuucu

SEQ ID NO: 284339 - RNA, 22 nt, Human
cacagguguucuugcagugaaa

SEQ ID NO: 284340 - RNA, 22 nt, Human
aacuguggacuugagacugaug

SEQ ID NO: 284341 - RNA, 22 nt, Human
ccuguguuaguuaugggucucu

SEQ ID NO: 284342 - RNA, 22 nt, Human
acaugcauacacguacauaccu

SEQ ID NO: 284343 - RNA, 22 nt, Human
ugucucagcugugcuucauugg

SEQ ID NO: 284344 - RNA, 22 nt, Human
aagaaaggauauaugggaggua

SEQ ID NO: 284345 - RNA, 22 nt, Human
ugucugaagcagccagugcugu

SEQ ID NO: 284346 - RNA, 22 nt, Human
aacuggaaagaucaguaggaag

SEQ ID NO: 284347 - RNA, 22 nt, Human
uucaggcccaacgcacagcuuc

SEQ ID NO: 284348 - RNA, 22 nt, Human
uacagugcacauuucuuaggaa

SEQ ID NO: 284349 - RNA, 22 nt, Human
uggcccugguggcacagccugc

SEQ ID NO: 284350 - RNA, 22 nt, Human
ugaaaucaauugcaauguuuau

SEQ ID NO: 284351 - RNA, 22 nt, Human
cagaugaggacagaugacuggg

SEQ ID NO: 284352 - RNA, 18 nt, Human
uucuggcucacucaugcu

SEQ ID NO: 284353 - RNA, 22 nt, Human
auucagcaaugagcuuggauuu

SEQ ID NO: 284354 - RNA, 22 nt, Human
uacaguaccagaaaugcuaaga

SEQ ID NO: 284355 - RNA, 22 nt, Human
ucuucuccagugcuucugcaca

SEQ ID NO: 284356 - RNA, 22 nt, Human
gcuuucugauugcgaaaacaaa

SEQ ID NO: 284357 - RNA, 22 nt, Human
auucaacuuacaaaggagaaga

SEQ ID NO: 284358 - RNA, 22 nt, Human
guccuggugcuggucauugucg

SEQ ID NO: 284359 - RNA, 22 nt, Human
uguaaacauauguauguaugua

SEQ ID NO: 284360 - RNA, 22 nt, Human
cuggauggucccaugagcagcu

SEQ ID NO: 284361 - RNA, 22 nt, Human
uaaagguuuauucaacaaaaua

SEQ ID NO: 284362 - RNA, 22 nt, Human
uugguaaauaacaaucacagug

SEQ ID NO: 284363 - RNA, 22 nt, Human
agucucuccacauuguuauaaa

SEQ ID NO: 284364 - RNA, 22 nt, Human
caaaugaauagggagugugaug

SEQ ID NO: 284365 - RNA, 22 nt, Human
uguagcucuccagccagcaagg

SEQ ID NO: 284366 - RNA, 22 nt, Human
gccauguccugggcaucugcca

SEQ ID NO: 284367 - RNA, 22 nt, Human
gacauuaauggcaaauuaauua

SEQ ID NO: 284368 - RNA, 22 nt, Human
auucuggggcugguuauuuuga

SEQ ID NO: 284369 - RNA, 22 nt, Human
uuggguuuugauacaugucuaa

SEQ ID NO: 284370 - RNA, 22 nt, Human
aucuaaaaggagcucuuuaucu

SEQ ID NO: 284371 - RNA, 22 nt, Human
ucagggacugcagagggaagcu

SEQ ID NO: 284372 - RNA, 22 nt, Human
caauuucaucuugugcuucaau

SEQ ID NO: 284373 - RNA, 22 nt, Human
gagagcccugcauggcugauga

SEQ ID NO: 284374 - RNA, 17 nt, Human
uuaguguaucuguuuug

SEQ ID NO: 284375 - RNA, 22 nt, Human
caggcauagaagggcaagaaua

SEQ ID NO: 284376 - RNA, 22 nt, Human
uguguacacaaguauauauaca

SEQ ID NO: 284377 - RNA, 22 nt, Human
ccacccuaacaauccuuacugu

SEQ ID NO: 284378 - RNA, 22 nt, Human
acacaguugguggcucagucug

SEQ ID NO: 284379 - RNA, 22 nt, Human
agguacagaugaaagucuaguu

SEQ ID NO: 284380 - RNA, 22 nt, Human
auaagcauguuagaauauuuga

SEQ ID NO: 284381 - RNA, 22 nt, Human
gcagggaccucacuacccccag

SEQ ID NO: 284382 - RNA, 22 nt, Human
ccuggcaggcaagaggaaggga

SEQ ID NO: 284383 - RNA, 22 nt, Human
uauaaagaaggcacagcaagac

SEQ ID NO: 284384 - RNA, 22 nt, Human
uuuuuggcagcucagaaacuuc

SEQ ID NO: 284385 - RNA, 21 nt, Human
uccaaaucccauucuguaguc

SEQ ID NO: 284386 - RNA, 22 nt, Human
uccuucugaaaaaugcacacga

SEQ ID NO: 284387 - RNA, 22 nt, Human
uucuucaaccaucuacauaaac

SEQ ID NO: 284388 - RNA, 22 nt, Human
aaguguuuacuuaaagucaugg

SEQ ID NO: 284389 - RNA, 22 nt, Human
agcacuguaguuauagcuaaca

SEQ ID NO: 284390 - RNA, 22 nt, Human
ugcuguggcaguuuauguauag

SEQ ID NO: 284391 - RNA, 22 nt, Human
ccucaggauccgcaggugcagu

SEQ ID NO: 284392 - RNA, 21 nt, Human
cuggcauuaugauagcguccu

SEQ ID NO: 284393 - RNA, 20 nt, Human
agugauuuguuaguacauug

SEQ ID NO: 284394 - RNA, 22 nt, Human
uauuguacauuucaaaguagcu

SEQ ID NO: 284395 - RNA, 22 nt, Human
uccaggcagggcagccaucaag

SEQ ID NO: 284396 - RNA, 22 nt, Human
cugcacaggggaugagggcagu

SEQ ID NO: 284397 - RNA, 20 nt, Human
uauugaguaccuacuguaua

SEQ ID NO: 284398 - RNA, 22 nt, Human
aguagauuuuugaauguaaguu

SEQ ID NO: 284399 - RNA, 22 nt, Human
uccuggcccacuccuagcuucu

SEQ ID NO: 284400 - RNA, 22 nt, Human
gggagggucugagagcugcacc

SEQ ID NO: 284401 - RNA, 22 nt, Human
guccuggcugucuuauguugaa

SEQ ID NO: 284402 - RNA, 22 nt, Human
augaaaauguacauguguauaa

SEQ ID NO: 284403 - RNA, 22 nt, Human
uuggaggaggcauuggaggauu

SEQ ID NO: 284404 - RNA, 22 nt, Human
auguuacaacccugaggagccg

SEQ ID NO: 284405 - RNA, 19 nt, Human
uccuucuccggccaccccg

SEQ ID NO: 284406 - RNA, 22 nt, Human
ucaugcaguuacuguuaugcaa

SEQ ID NO: 284407 - RNA, 22 nt, Human
uugguaaauacuauaaucaaau

SEQ ID NO: 284408 - RNA, 22 nt, Human
accuacauggcuuuaaguaagu

SEQ ID NO: 284409 - RNA, 22 nt, Human
uagucagugaucaguggaguug

SEQ ID NO: 284410 - RNA, 21 nt, Human
ucccagggccaggugccauca

SEQ ID NO: 284411 - RNA, 22 nt, Human
gcuggcaguaaaggguuuggca

SEQ ID NO: 284412 - RNA, 22 nt, Human
gaauguuauugaacuacgagcu

SEQ ID NO: 284413 - RNA, 22 nt, Human
acuagaaaauuccuagaaacua

SEQ ID NO: 284414 - RNA, 22 nt, Human
ccugugggcuugaguguagggu

SEQ ID NO: 284415 - RNA, 22 nt, Human
uucuuuucaagaggggcaagga

SEQ ID NO: 284416 - RNA, 22 nt, Human
gugguaucugucucccccacug

SEQ ID NO: 284417 - RNA, 22 nt, Human
ccuuuucuacaagcaaaugugc

SEQ ID NO: 284418 - RNA, 23 nt, Human
uuccagaguccacaucugccacc

SEQ ID NO: 284419 - RNA, 22 nt, Human
agucacaguuucccugagagag

SEQ ID NO: 284420 - RNA, 22 nt, Human
cugugaaacuggacagcacuug

SEQ ID NO: 284421 - RNA, 22 nt, Human
ggcaggcagaggcugagacagg

SEQ ID NO: 284422 - RNA, 22 nt, Human
cuuaagcaaaauauucuuucac

SEQ ID NO: 284423 - RNA, 18 nt, Human
cuuuaugugcagagcuuu

SEQ ID NO: 284424 - RNA, 22 nt, Human
ggggugugucugacaaugguau

SEQ ID NO: 284425 - RNA, 22 nt, Human
uccuucuuugacaaguggcaga

SEQ ID NO: 284426 - RNA, 22 nt, Human
cuucuguggauauguucucucu

SEQ ID NO: 284427 - RNA, 22 nt, Human
accuguuuacccugggcucccc

SEQ ID NO: 284428 - RNA, 22 nt, Human
aggaggcugcaacccugaggcc

SEQ ID NO: 284429 - RNA, 22 nt, Human
gcaguguuaggaauaaaaauga

SEQ ID NO: 284430 - RNA, 22 nt, Human
cuaauacacccuauugcuuguu

SEQ ID NO: 284431 - RNA, 22 nt, Human
ucaugccaaacugaacacaguu

SEQ ID NO: 284432 - RNA, 22 nt, Human
ucuguuuagacucaguugaaac

SEQ ID NO: 284433 - RNA, 22 nt, Human
uuuaucuggacugugauauaaa

SEQ ID NO: 284434 - RNA, 22 nt, Human
acuguacauauggauucuaaga

SEQ ID NO: 284435 - RNA, 22 nt, Human
gcuauuuuugagccauuuauaa

SEQ ID NO: 284436 - RNA, 22 nt, Human
gcagguguggguggcugccagg

SEQ ID NO: 284437 - RNA, 22 nt, Human
gcaugguggccuuaggguagcc

SEQ ID NO: 284438 - RNA, 22 nt, Human
augugucucuaccaaugcaauu

SEQ ID NO: 284439 - RNA, 20 nt, Human
uuaagaaaagcacauccugc

SEQ ID NO: 284440 - RNA, 22 nt, Human
aagcugcaaaaaauuucugucu

SEQ ID NO: 284441 - RNA, 22 nt, Human
accugggaaagccguggaaagg

SEQ ID NO: 284442 - RNA, 21 nt, Human
uccuccuucaaguccuggccu

SEQ ID NO: 284443 - RNA, 22 nt, Human
uuuguucaccuagcaaacuuuu

SEQ ID NO: 284444 - RNA, 22 nt, Human
ccugagagugagggccuccuua

SEQ ID NO: 284445 - RNA, 22 nt, Human
ccaaaguauuaaaucuuagcaa

SEQ ID NO: 284446 - RNA, 22 nt, Human
uuacaguggucauuugggaaaa

SEQ ID NO: 284447 - RNA, 22 nt, Human
caugauguuaucuaaaucuggu

SEQ ID NO: 284448 - RNA, 22 nt, Human
uuaaggaaagccaaaaugaauu

SEQ ID NO: 284449 - RNA, 22 nt, Human
cagggcacggagaagucacccc

SEQ ID NO: 284450 - RNA, 22 nt, Human
ucuguggcuguuaucuuuauau

SEQ ID NO: 284451 - RNA, 22 nt, Human
uaacuugguuggugggcaggag

SEQ ID NO: 284452 - RNA, 22 nt, Human
uguccuuuuccccaaauucacu

SEQ ID NO: 284453 - RNA, 22 nt, Human
augaagcaacagcccuccuauu

SEQ ID NO: 284454 - RNA, 22 nt, Human
agcugcaacaucugcuuguccc

SEQ ID NO: 284455 - RNA, 22 nt, Human
uaugucuuuugcuugcaaauag

SEQ ID NO: 284456 - RNA, 22 nt, Human
acugugauguuugugaucaucu

SEQ ID NO: 284457 - RNA, 22 nt, Human
ugcagggcaucuuugaagugug

SEQ ID NO: 284458 - RNA, 22 nt, Human
auuaauauacacuguuagcaug

SEQ ID NO: 284459 - RNA, 22 nt, Human
uauucauaguaaacaaaagugg

SEQ ID NO: 284460 - RNA, 23 nt, Human
ucccagggaaggugagcgaggcu

SEQ ID NO: 284461 - RNA, 22 nt, Human
cugcucuugagggacugcgguc

SEQ ID NO: 284462 - RNA, 22 nt, Human
acagucuuugcaaaguccuggu

SEQ ID NO: 284463 - RNA, 22 nt, Human
gugaccauaauagauuaugagu

SEQ ID NO: 284464 - RNA, 19 nt, Human
agccagaacuaguguuucu

SEQ ID NO: 284465 - RNA, 22 nt, Human
cagugcaguuucccagaugcug

SEQ ID NO: 284466 - RNA, 22 nt, Human
ucucuguggagcaguguguuca

SEQ ID NO: 284467 - RNA, 22 nt, Human
cauaauuucuguaucagcacca

SEQ ID NO: 284468 - RNA, 22 nt, Human
ugacacauaccgaaaauauuug

SEQ ID NO: 284469 - RNA, 22 nt, Human
cuucuggcaaaacaggcagaaa

SEQ ID NO: 284470 - RNA, 22 nt, Human
uccaggccauugacugcauccu

SEQ ID NO: 284471 - RNA, 22 nt, Human
cacugucuuuugugaagacaau

SEQ ID NO: 284472 - RNA, 22 nt, Human
aauaguacaaucuacagacaua

SEQ ID NO: 284473 - RNA, 22 nt, Human
aucuuuuuugucuuggucacug

SEQ ID NO: 284474 - RNA, 23 nt, Human
uuucugaaguugagauggacuuu

SEQ ID NO: 284475 - RNA, 20 nt, Human
gaugaaaucacugggcagcc

SEQ ID NO: 284476 - RNA, 22 nt, Human
agaaggaaaaccugucuuaugu

SEQ ID NO: 284477 - RNA, 22 nt, Human
cccugcagagaccacugaccuu

SEQ ID NO: 284478 - RNA, 22 nt, Human
aaauguaguauguugcauguau

SEQ ID NO: 284479 - RNA, 22 nt, Human
uucuuggccaccagaucucacu

SEQ ID NO: 284480 - RNA, 22 nt, Human
ccuggaucccgauggcugugag

SEQ ID NO: 284481 - RNA, 22 nt, Human
aaagauguuaugaaauaacuau

SEQ ID NO: 284482 - RNA, 22 nt, Human
uauuucugggaguucagaaauu

SEQ ID NO: 284483 - RNA, 17 nt, Human
gggcagggacuccuggg

SEQ ID NO: 284484 - RNA, 22 nt, Human
ucucagaaaugacaggagguac

SEQ ID NO: 284485 - RNA, 22 nt, Human
aggucagcaggccaggggcgaa

SEQ ID NO: 284486 - RNA, 22 nt, Human
auguuucugaaguuuacagaua

SEQ ID NO: 284487 - RNA, 22 nt, Human
gcaggggaguggaugauggauu

SEQ ID NO: 284488 - RNA, 22 nt, Human
acuggcagcuguaggaugcaug

SEQ ID NO: 284489 - RNA, 22 nt, Human
cugaaauaaaguugcuaaaauu

SEQ ID NO: 284490 - RNA, 23 nt, Human
cggcugcucggccgaguccucgg

SEQ ID NO: 284491 - RNA, 22 nt, Human
uaauugcuuuauccuguuagaa

SEQ ID NO: 284492 - RNA, 22 nt, Human
gucaguuauucaauugguuuaa

SEQ ID NO: 284493 - RNA, 22 nt, Human
cccagcuggccagguggcuuug

SEQ ID NO: 284494 - RNA, 22 nt, Human
gccaaggaaggcuuccuggaag

SEQ ID NO: 284495 - RNA, 22 nt, Human
uaaaugagggcugacaugauug

SEQ ID NO: 284496 - RNA, 22 nt, Human
aauucuauguucuugaguaaga

SEQ ID NO: 284497 - RNA, 22 nt, Human
ugagguggugcuaaucucugcu

SEQ ID NO: 284498 - RNA, 22 nt, Human
uuucuacaauuuuuggcaugag

SEQ ID NO: 284499 - RNA, 22 nt, Human
uuuagcagugaagugaagugaa

SEQ ID NO: 284500 - RNA, 22 nt, Human
uugcuuuaggauuuaaguggca

SEQ ID NO: 284501 - RNA, 18 nt, Human
uaggaggauacugagaug

SEQ ID NO: 284502 - RNA, 22 nt, Human
uggccugccacugccacgccac

SEQ ID NO: 284503 - RNA, 22 nt, Human
uuuuauguaauccuuacugucg

SEQ ID NO: 284504 - RNA, 20 nt, Human
gagggcaggcacccauuuca

SEQ ID NO: 284505 - RNA, 22 nt, Human
ggguggggcccaggaaaucuau

SEQ ID NO: 284506 - RNA, 22 nt, Human
uucaggcccagcacagcgcgug

SEQ ID NO: 284507 - RNA, 22 nt, Human
caggccuccacuccacgcagac

SEQ ID NO: 284508 - RNA, 22 nt, Human
ggaugagguagaugaacaaggg

SEQ ID NO: 284509 - RNA, 22 nt, Human
ccuuuauucaauuaguccuaau

SEQ ID NO: 284510 - RNA, 22 nt, Human
uuagagaagcuguaauuauuca

SEQ ID NO: 284511 - RNA, 22 nt, Human
cagggcaggaugcugugauuau

SEQ ID NO: 284512 - RNA, 20 nt, Human
caugccugcugguaucuggc

SEQ ID NO: 284513 - RNA, 22 nt, Human
ccauccugucuguggccucagg

SEQ ID NO: 284514 - RNA, 22 nt, Human
agcagggcuuugucucugugaa

SEQ ID NO: 284515 - RNA, 22 nt, Human
uaggugucugcucuuauuuaac

SEQ ID NO: 284516 - RNA, 22 nt, Human
uuccggaagguucucuagaauu

SEQ ID NO: 284517 - RNA, 22 nt, Human
aauaauauuccucugugugcgu

SEQ ID NO: 284518 - RNA, 22 nt, Human
uucacuuauagggauguuauug

SEQ ID NO: 284519 - RNA, 22 nt, Human
gaccucagugaauggucaugua

SEQ ID NO: 284520 - RNA, 22 nt, Human
uuuacauuucccucugucaguu

SEQ ID NO: 284521 - RNA, 22 nt, Human
ggcaggcagccuccauccacag

SEQ ID NO: 284522 - RNA, 20 nt, Human
gcuucccaauucuugaucug

SEQ ID NO: 284523 - RNA, 22 nt, Human
uguuucugucuguuuucuacau

SEQ ID NO: 284524 - RNA, 22 nt, Human
ggagucacacaggaagaaggac

SEQ ID NO: 284525 - RNA, 18 nt, Human
cuaaacugcaccuaauga

SEQ ID NO: 284526 - RNA, 22 nt, Human
gaaugaauuuuggauggugaag

SEQ ID NO: 284527 - RNA, 22 nt, Human
ugcagaaacagucauuaaugua

SEQ ID NO: 284528 - RNA, 22 nt, Human
ggguauuaaaaugaaggagaaa

SEQ ID NO: 284529 - RNA, 22 nt, Human
cuggcaugaaauggcaucucau

SEQ ID NO: 284530 - RNA, 22 nt, Human
cucugccacucgaagucaagga

SEQ ID NO: 284531 - RNA, 22 nt, Human
ccacgacgagucaucagggcga

SEQ ID NO: 284532 - RNA, 22 nt, Human
acauguguggacaugaaucuac

SEQ ID NO: 284533 - RNA, 22 nt, Human
ugcaggugcugugucaagagag

SEQ ID NO: 284534 - RNA, 16 nt, Human
gcagguggaucaccug

SEQ ID NO: 284535 - RNA, 22 nt, Human
aagcauguacaaugagugucuc

SEQ ID NO: 284536 - RNA, 22 nt, Human
agucacagaaacccaggugugg

SEQ ID NO: 284537 - RNA, 22 nt, Human
aggaaaaaccuguuaaugguag

SEQ ID NO: 284538 - RNA, 22 nt, Human
uugugucccugcggcugaggag

SEQ ID NO: 284539 - RNA, 22 nt, Human
agaggacaaaaugagaagugcu

SEQ ID NO: 284540 - RNA, 22 nt, Human
cacaguuuuaucuuauacugau

SEQ ID NO: 284541 - RNA, 22 nt, Human
uagaagauucauuuccucugaa

SEQ ID NO: 284542 - RNA, 22 nt, Human
gagaaagcuucagaaauggccu

SEQ ID NO: 284543 - RNA, 22 nt, Human
aucuuuuugacauggugauggu

SEQ ID NO: 284544 - RNA, 22 nt, Human
acuggcagguccaucgcccuuu

SEQ ID NO: 284545 - RNA, 22 nt, Human
aagggcagaauagagaagaugg

SEQ ID NO: 284546 - RNA, 22 nt, Human
cacaugcccagaacuucucauu

SEQ ID NO: 284547 - RNA, 22 nt, Human
uuucucagcucagcaucugggu

SEQ ID NO: 284548 - RNA, 22 nt, Human
gaaggcugcgaggggagugccg

SEQ ID NO: 284549 - RNA, 22 nt, Human
uggcauuucuggccauuugugu

SEQ ID NO: 284550 - RNA, 22 nt, Human
acagguguccaacauuuaccuu

SEQ ID NO: 284551 - RNA, 22 nt, Human
uuucacaugguacugccuguuu

SEQ ID NO: 284552 - RNA, 22 nt, Human
aucgccaauggggaggaaagaa

SEQ ID NO: 284553 - RNA, 22 nt, Human
auuguauaauuguauugccaaa

SEQ ID NO: 284554 - RNA, 22 nt, Human
acacauucaugagugcaugcac

SEQ ID NO: 284555 - RNA, 22 nt, Human
uuguccagagccaggcugucgg

SEQ ID NO: 284556 - RNA, 22 nt, Human
uauuuaagaugugucauaaaga

SEQ ID NO: 284557 - RNA, 22 nt, Human
gaggcauaaguagaagagauug

SEQ ID NO: 284558 - RNA, 23 nt, Human
ugcugggguaguuuguggcacag

SEQ ID NO: 284559 - RNA, 22 nt, Human
gacuuuaucuuguccuuccugc

SEQ ID NO: 284560 - RNA, 20 nt, Human
ugagccagucaagcuacauu

SEQ ID NO: 284561 - RNA, 23 nt, Human
guacacauaguguaguuauauuu

SEQ ID NO: 284562 - RNA, 22 nt, Human
agccagggucucucgcucuguu

SEQ ID NO: 284563 - RNA, 22 nt, Human
uuacaucacuuuacuuaauaau

SEQ ID NO: 284564 - RNA, 22 nt, Human
gucaggucuuggaagauaggcu

SEQ ID NO: 284565 - RNA, 22 nt, Human
acagguggacacagcagcaguc

SEQ ID NO: 284566 - RNA, 22 nt, Human
cacccacauggaaauucacagu

SEQ ID NO: 284567 - RNA, 22 nt, Human
gaaggggaaaguugagcaaaua

SEQ ID NO: 284568 - RNA, 22 nt, Human
uauaucagcaaagcauuuaaaa

SEQ ID NO: 284569 - RNA, 22 nt, Human
auugcuuuagaaagaaaaauau

SEQ ID NO: 284570 - RNA, 22 nt, Human
uucauaaugagguccuagaggc

SEQ ID NO: 284571 - RNA, 22 nt, Human
ccagguggcuucugcccgaugu

SEQ ID NO: 284572 - RNA, 22 nt, Human
ggcugaucaggugcaaaugcau

SEQ ID NO: 284573 - RNA, 22 nt, Human
gcauucuucacuaggugagagc

SEQ ID NO: 284574 - RNA, 22 nt, Human
cugagcccaggcgggagcugag

SEQ ID NO: 284575 - RNA, 22 nt, Human
ucaguuuauaaauuguauuuag

SEQ ID NO: 284576 - RNA, 22 nt, Human
aaacaaauagugcaugggaauu

SEQ ID NO: 284577 - RNA, 22 nt, Human
aagcugaaucugaaauagaauu

SEQ ID NO: 284578 - RNA, 22 nt, Human
gacccugccaugagugacaggg

SEQ ID NO: 284579 - RNA, 22 nt, Human
uuggucagcuaauaaggacagg

SEQ ID NO: 284580 - RNA, 22 nt, Human
auauuuucacugaaccaaagua

SEQ ID NO: 284581 - RNA, 22 nt, Human
agagcaucuaacacauaagccu

SEQ ID NO: 284582 - RNA, 22 nt, Human
acagggcagagggcaguuggua

SEQ ID NO: 284583 - RNA, 22 nt, Human
acuugguugcaaaugaauuauu

SEQ ID NO: 284584 - RNA, 22 nt, Human
gccugaugagcuuccagcugag

SEQ ID NO: 284585 - RNA, 23 nt, Human
cuguccuguaguucacguuggcc

SEQ ID NO: 284586 - RNA, 22 nt, Human
ggccuugagcagggagaaacca

SEQ ID NO: 284587 - RNA, 19 nt, Human
uggcagguagugagcaguc

SEQ ID NO: 284588 - RNA, 22 nt, Human
cuguccucaccuuggcaggggg

SEQ ID NO: 284589 - RNA, 22 nt, Human
agaaagaacguugguuaucuua

SEQ ID NO: 284590 - RNA, 22 nt, Human
acuguggccaaagccucuggga

SEQ ID NO: 284591 - RNA, 22 nt, Human
gcuggcagccaagugaagaggg

SEQ ID NO: 284592 - RNA, 22 nt, Human
uucucuagguuuuagaugaaga

SEQ ID NO: 284593 - RNA, 22 nt, Human
aagcaauagcaacaacuuuaca

SEQ ID NO: 284594 - RNA, 20 nt, Human
agggucaguagcacagagcu

SEQ ID NO: 284595 - RNA, 22 nt, Human
cugcguguuugcacccugucug

SEQ ID NO: 284596 - RNA, 22 nt, Human
ccuggguccaauucuggcuugu

SEQ ID NO: 284597 - RNA, 22 nt, Human
uaucuauuccaaauaucagcgu

SEQ ID NO: 284598 - RNA, 22 nt, Human
caaaugauaccuauuacuaggc

SEQ ID NO: 284599 - RNA, 22 nt, Human
uccuccuucgggacugcuugac

SEQ ID NO: 284600 - RNA, 22 nt, Human
gauguuuggcucaaacgagugu

SEQ ID NO: 284601 - RNA, 22 nt, Human
uugaggagcacuagucagguau

SEQ ID NO: 284602 - RNA, 22 nt, Human
uaugaaacauucauacaaauaa

SEQ ID NO: 284603 - RNA, 22 nt, Human
ugagccagauaagggcucacgc

SEQ ID NO: 284604 - RNA, 22 nt, Human
uuugagaagauguaauguuaag

SEQ ID NO: 284605 - RNA, 22 nt, Human
ugcacccucaucagucaaaugg

SEQ ID NO: 284606 - RNA, 22 nt, Human
cagcugaacauguagagcaucu

SEQ ID NO: 284607 - RNA, 22 nt, Human
aaaugcagauugucauucagga

SEQ ID NO: 284608 - RNA, 22 nt, Human
uccuguuucuccugcaaaaucc

SEQ ID NO: 284609 - RNA, 22 nt, Human
uaguaaauuaaaauauugacuu

SEQ ID NO: 284610 - RNA, 18 nt, Human
ucuagaaacuucucuccu

SEQ ID NO: 284611 - RNA, 22 nt, Human
uuuccagggcucuguagaagaa

SEQ ID NO: 284612 - RNA, 22 nt, Human
uuggaggauugcucucagccca

SEQ ID NO: 284613 - RNA, 22 nt, Human
guacuucuuuagucaauaugua

SEQ ID NO: 284614 - RNA, 22 nt, Human
ggccaggccaagaggguuggaa

SEQ ID NO: 284615 - RNA, 22 nt, Human
cugacagaugcugcuggcagua

SEQ ID NO: 284616 - RNA, 22 nt, Human
aaaauucucuugaucuugacag

SEQ ID NO: 284617 - RNA, 22 nt, Human
gcaguggcccagcuugcaggcu

SEQ ID NO: 284618 - RNA, 18 nt, Human
ccuggaccugucuccuuu

SEQ ID NO: 284619 - RNA, 22 nt, Human
uggaaagagguagaggaucugg

SEQ ID NO: 284620 - RNA, 22 nt, Human
acugaaaaugaauuagaaacag

SEQ ID NO: 284621 - RNA, 22 nt, Human
cagggcucgcugccagcuucag

SEQ ID NO: 284622 - RNA, 22 nt, Human
cuaugaaaggauuuggaguugu

SEQ ID NO: 284623 - RNA, 22 nt, Human
uuacagugugcaaucccagaau

SEQ ID NO: 284624 - RNA, 22 nt, Human
uuuccuuccagguuccuaaggc

SEQ ID NO: 284625 - RNA, 22 nt, Human
uugugucccuguaagacaaagc

SEQ ID NO: 284626 - RNA, 22 nt, Human
cugguacauaguaagaacacaa

SEQ ID NO: 284627 - RNA, 22 nt, Human
gcauguguggaggagaugugcu

SEQ ID NO: 284628 - RNA, 22 nt, Human
cuagagaauggcaaagauuaga

SEQ ID NO: 284629 - RNA, 22 nt, Human
ugcucuucacaguuucagcauc

SEQ ID NO: 284630 - RNA, 22 nt, Human
uagaagaaagugaagcugggga

SEQ ID NO: 284631 - RNA, 22 nt, Human
ggagcugaaggggugggcucag

SEQ ID NO: 284632 - RNA, 21 nt, Human
auuuucauuuccaggggagga

SEQ ID NO: 284633 - RNA, 22 nt, Human
uguggggcucccuggcagccug

SEQ ID NO: 284634 - RNA, 22 nt, Human
aaguuuaacuugaauucuuucu

SEQ ID NO: 284635 - RNA, 22 nt, Human
ccaaggcaggggaucaaaguuu

SEQ ID NO: 284636 - RNA, 22 nt, Human
ucaaggagcccacagucuaaug

SEQ ID NO: 284637 - RNA, 22 nt, Human
aucgagggugaguacagcggac

SEQ ID NO: 284638 - RNA, 22 nt, Human
aaggaggccuggcagaugaaga

SEQ ID NO: 284639 - RNA, 19 nt, Human
uugaaauuguuugauaugg

SEQ ID NO: 284640 - RNA, 22 nt, Human
ucugggaaugaauaagaccugu

SEQ ID NO: 284641 - RNA, 22 nt, Human
ucagcauaucuugagcuucaug

SEQ ID NO: 284642 - RNA, 22 nt, Human
cuucaguucuaaaguagaaugu

SEQ ID NO: 284643 - RNA, 20 nt, Human
acaguuuauccaguuagcag

SEQ ID NO: 284644 - RNA, 22 nt, Human
agcccccucccuagugacugga

SEQ ID NO: 284645 - RNA, 22 nt, Human
ugguauuuccaggcuuauggua

SEQ ID NO: 284646 - RNA, 22 nt, Human
gccuguuuggcaucauugguug

SEQ ID NO: 284647 - RNA, 22 nt, Human
uagcaggguuuugaagaggguu

SEQ ID NO: 284648 - RNA, 22 nt, Human
auuaagugacuaaaguaaugcu

SEQ ID NO: 284649 - RNA, 22 nt, Human
cucggcagguggagguuguagu

SEQ ID NO: 284650 - RNA, 22 nt, Human
gcuccuggguguggcugccccu

SEQ ID NO: 284651 - RNA, 22 nt, Human
uuuuauuaguggcuagaugggg

SEQ ID NO: 284652 - RNA, 22 nt, Human
cauucauuuaugaaauaucuau

SEQ ID NO: 284653 - RNA, 22 nt, Human
ucucacugauuugagaccaagg

SEQ ID NO: 284654 - RNA, 22 nt, Human
cucagcaacccacacacggucu

SEQ ID NO: 284655 - RNA, 22 nt, Human
ucuaacuuagggaauacuuuag

SEQ ID NO: 284656 - RNA, 22 nt, Human
aaggugcucacgggcucaggga

SEQ ID NO: 284657 - RNA, 22 nt, Human
acucuucaccgcuacugaaaua

SEQ ID NO: 284658 - RNA, 21 nt, Human
cagacccucuagaggccaccu

SEQ ID NO: 284659 - RNA, 22 nt, Human
uguguuucagaaccuucuuuca

SEQ ID NO: 284660 - RNA, 22 nt, Human
uucugugaaucuuuuuucccac

SEQ ID NO: 284661 - RNA, 22 nt, Human
caugugucacagccuuuuauug

SEQ ID NO: 284662 - RNA, 20 nt, Human
uccuaauaaccugaagaaau

SEQ ID NO: 284663 - RNA, 22 nt, Human
aaauuagaaauacuuucaaagc

SEQ ID NO: 284664 - RNA, 18 nt, Human
gccugcucugcucucccc

SEQ ID NO: 284665 - RNA, 22 nt, Human
ugacccuuucauuauucucauu

SEQ ID NO: 284666 - RNA, 22 nt, Human
auucuuucaaggaauaguuauu

SEQ ID NO: 284667 - RNA, 22 nt, Human
aucuuguuaaaaagcagauucu

SEQ ID NO: 284668 - RNA, 22 nt, Human
aggcagguguugggagacacca

SEQ ID NO: 284669 - RNA, 22 nt, Human
aaauacacguacauguguaaaa

SEQ ID NO: 284670 - RNA, 22 nt, Human
ucucauucauacccuacaugcu

SEQ ID NO: 284671 - RNA, 22 nt, Human
ucuucagauaaagggagaguau

SEQ ID NO: 284672 - RNA, 22 nt, Human
aguaugcauauuucaaaguaag

SEQ ID NO: 284673 - RNA, 22 nt, Human
ccuguucaugaaacugcuuucc

SEQ ID NO: 284674 - RNA, 22 nt, Human
cagggcagggagcuuagaauga

SEQ ID NO: 284675 - RNA, 22 nt, Human
ccuguucaccauggucacgugc

SEQ ID NO: 284676 - RNA, 20 nt, Human
aggucucagagcaagagccc

SEQ ID NO: 284677 - RNA, 22 nt, Human
guguccauguuguucaggguga

SEQ ID NO: 284678 - RNA, 22 nt, Human
cucagcaagauuaagcagcuug

SEQ ID NO: 284679 - RNA, 22 nt, Human
ggcuguggcauuaggugaggcc

SEQ ID NO: 284680 - RNA, 21 nt, Human
uugggaucugagaagugaaaa

SEQ ID NO: 284681 - RNA, 19 nt, Human
guguccauggagcauggag

SEQ ID NO: 284682 - RNA, 23 nt, Human
ucauaaauauuagcacaguagga

SEQ ID NO: 284683 - RNA, 23 nt, Human
gacagagugagaccuugucuuac

SEQ ID NO: 284684 - RNA, 20 nt, Human
ucacaucuggcagcugauga

SEQ ID NO: 284685 - RNA, 23 nt, Human
ucauucaaggcugguaucuuuca

SEQ ID NO: 284686 - RNA, 20 nt, Human
gggaucuuccaggcucuccu

SEQ ID NO: 284687 - RNA, 22 nt, Human
ugcccuccuccugagcccaugu

SEQ ID NO: 284688 - RNA, 22 nt, Human
cagacaggcuagccagacucac

SEQ ID NO: 284689 - RNA, 19 nt, Human
uuucccagucccaggagug

SEQ ID NO: 284690 - RNA, 22 nt, Human
gaaaauacuucaguguucuggc

SEQ ID NO: 284691 - RNA, 18 nt, Human
aaauuagauggaccugug

SEQ ID NO: 284692 - RNA, 22 nt, Human
uauaaagagucucaaagaaguu

SEQ ID NO: 284693 - RNA, 22 nt, Human
auugucauuccagucauuguua

SEQ ID NO: 284694 - RNA, 22 nt, Human
cugcacagcugggcaagauaua

SEQ ID NO: 284695 - RNA, 22 nt, Human
cagucuggaggucagcuggcuu

SEQ ID NO: 284696 - RNA, 22 nt, Human
uauuagguaaaggacuugcagg

SEQ ID NO: 284697 - RNA, 22 nt, Human
accacagcuuugcaccaggugu

SEQ ID NO: 284698 - RNA, 22 nt, Human
guuguacauaugaggauaaguu

SEQ ID NO: 284699 - RNA, 22 nt, Human
cccaggcuccugacucauucua

SEQ ID NO: 284700 - RNA, 20 nt, Human
ucucaggguucagcaaagua

SEQ ID NO: 284701 - RNA, 22 nt, Human
agacacuguguacagaaaaaga

SEQ ID NO: 284702 - RNA, 22 nt, Human
acuguuuucuguaaagggccag

SEQ ID NO: 284703 - RNA, 23 nt, Human
caugccaguuugugcaggcagau

SEQ ID NO: 284704 - RNA, 22 nt, Human
gugaccaucagagaauaacaaa

SEQ ID NO: 284705 - RNA, 22 nt, Human
uccuggacuggcucagcacccu

SEQ ID NO: 284706 - RNA, 22 nt, Human
auucuucaguauguguggauug

SEQ ID NO: 284707 - RNA, 22 nt, Human
cucaguuucugacauuaaaauc

SEQ ID NO: 284708 - RNA, 22 nt, Human
uacauucucuucccauugucuc

SEQ ID NO: 284709 - RNA, 22 nt, Human
gucucuuagaaucgcauauugu

SEQ ID NO: 284710 - RNA, 22 nt, Human
cugaaggcuaaaauggacugaa

SEQ ID NO: 284711 - RNA, 20 nt, Human
aaaagagugcuucaacugcu

SEQ ID NO: 284712 - RNA, 22 nt, Human
gacuguggcaggcucagcacug

SEQ ID NO: 284713 - RNA, 22 nt, Human
guguuuuaucagacaaaguaua

SEQ ID NO: 284714 - RNA, 22 nt, Human
ugacaagaggcagaaucagcug

SEQ ID NO: 284715 - RNA, 22 nt, Human
aacuuuauuguuaggggcuaaa

SEQ ID NO: 284716 - RNA, 22 nt, Human
uucagaaguagcuaagcaguca

SEQ ID NO: 284717 - RNA, 20 nt, Human
gcuuccaggagggcugauau

SEQ ID NO: 284718 - RNA, 22 nt, Human
gaauaauuuugaucagaaggga

SEQ ID NO: 284719 - RNA, 22 nt, Human
aggagauagucaaagcuucuug

SEQ ID NO: 284720 - RNA, 22 nt, Human
acauacuuaugcuaaaaauaua

SEQ ID NO: 284721 - RNA, 22 nt, Human
augaggagcuccuugaaaugag

SEQ ID NO: 284722 - RNA, 22 nt, Human
uuuuugcugauaagcagaauuc

SEQ ID NO: 284723 - RNA, 22 nt, Human
guauuacaaauaaauguuacug

SEQ ID NO: 284724 - RNA, 22 nt, Human
uucuaccuacccucugcauaca

SEQ ID NO: 284725 - RNA, 22 nt, Human
cucuccagaauaugccgccgug

SEQ ID NO: 284726 - RNA, 23 nt, Human
uguguccuuaacuguauauacua

SEQ ID NO: 284727 - RNA, 20 nt, Human
uggcagguggccucaguucc

SEQ ID NO: 284728 - RNA, 22 nt, Human
cagguugaaaguggaggagcua

SEQ ID NO: 284729 - RNA, 17 nt, Human
gcaaaggugaggagaga

SEQ ID NO: 284730 - RNA, 22 nt, Human
gccaaggagacacgguguugua

SEQ ID NO: 284731 - RNA, 22 nt, Human
ccaaggcuguggggcugugcag

SEQ ID NO: 284732 - RNA, 22 nt, Human
aacuauguuaauaaguuucauu

SEQ ID NO: 284733 - RNA, 22 nt, Human
uaugacaagguggaguaugagu

SEQ ID NO: 284734 - RNA, 22 nt, Human
gggagaaggagcuaguucuuga

SEQ ID NO: 284735 - RNA, 22 nt, Human
uauugcuguucuuuaaaugaag

SEQ ID NO: 284736 - RNA, 22 nt, Human
acuacauuaugaggaaagagug

SEQ ID NO: 284737 - RNA, 23 nt, Human
ccucuccagacacugggccuugu

SEQ ID NO: 284738 - RNA, 22 nt, Human
gaggugucuagaucuaccagua

SEQ ID NO: 284739 - RNA, 22 nt, Human
gucaguuauuuugagcaauugg

SEQ ID NO: 284740 - RNA, 22 nt, Human
uuacuaguggagaaacugaggc

SEQ ID NO: 284741 - RNA, 22 nt, Human
uuugaagacauuugaauacuuu

SEQ ID NO: 284742 - RNA, 23 nt, Human
cccugcagucagggugagauggu

SEQ ID NO: 284743 - RNA, 22 nt, Human
aggcuguguuuaagugguaaug

SEQ ID NO: 284744 - RNA, 22 nt, Human
ugcuggaggccagaagucugag

SEQ ID NO: 284745 - RNA, 22 nt, Human
ggccuuugcguccacgccgcuu

SEQ ID NO: 284746 - RNA, 22 nt, Human
uuguuucuggaaaaggcgagaa

SEQ ID NO: 284747 - RNA, 22 nt, Human
ccaaggagcaaguuuacaccug

SEQ ID NO: 284748 - RNA, 22 nt, Human
ccugcugucccucugggcucca

SEQ ID NO: 284749 - RNA, 22 nt, Human
uuagaaucuaacauucuuaucu

SEQ ID NO: 284750 - RNA, 22 nt, Human
ggcucugguugaccaugauggc

SEQ ID NO: 284751 - RNA, 22 nt, Human
acauucuuucaccuugugucca

SEQ ID NO: 284752 - RNA, 22 nt, Human
cugccccagugccaggcaggug

SEQ ID NO: 284753 - RNA, 22 nt, Human
gcagguguccugggcuggcagu

SEQ ID NO: 284754 - RNA, 21 nt, Human
uccaggcuggaaggggcguug

SEQ ID NO: 284755 - RNA, 22 nt, Human
uguuuucucuugaaaagcaguc

SEQ ID NO: 284756 - RNA, 22 nt, Human
ugauuucucuccguuauuucag

SEQ ID NO: 284757 - RNA, 22 nt, Human
cucagucucuugggcugugaag

SEQ ID NO: 284758 - RNA, 22 nt, Human
uucagagaguccaguaugcagu

SEQ ID NO: 284759 - RNA, 22 nt, Human
uccuggccauaggcuauuucag

SEQ ID NO: 284760 - RNA, 20 nt, Human
cugugaccagagacccagga

SEQ ID NO: 284761 - RNA, 22 nt, Human
caucugaagugaauugcuuuuu

SEQ ID NO: 284762 - RNA, 21 nt, Human
ucauuugugaucugauuucca

SEQ ID NO: 284763 - RNA, 22 nt, Human
agucagaguuuugaggugugac

SEQ ID NO: 284764 - RNA, 22 nt, Human
ugucacaaaaaucaguaauugc

SEQ ID NO: 284765 - RNA, 22 nt, Human
guaagccucugcucuaucuggu

SEQ ID NO: 284766 - RNA, 22 nt, Human
agcuuuaugaggagaccuuagu

SEQ ID NO: 284767 - RNA, 22 nt, Human
uugcauuccaugguuuuccuuc

SEQ ID NO: 284768 - RNA, 22 nt, Human
uguguaaaaucugauuaauacu

SEQ ID NO: 284769 - RNA, 22 nt, Human
cuauuagguaugcagccuauuu

SEQ ID NO: 284770 - RNA, 22 nt, Human
gcagggaccagggccagaucca

SEQ ID NO: 284771 - RNA, 22 nt, Human
ucaggugucugccucuuugagu

SEQ ID NO: 284772 - RNA, 21 nt, Human
aggcuuggauagauauucaua

SEQ ID NO: 284773 - RNA, 22 nt, Human
agucucucuccucgugguaacc

SEQ ID NO: 284774 - RNA, 22 nt, Human
gggcagguggagggcccagcca

SEQ ID NO: 284775 - RNA, 22 nt, Human
uaguuaacucuugguaauaggu

SEQ ID NO: 284776 - RNA, 22 nt, Human
auaaggcacacauagauagggu

SEQ ID NO: 284777 - RNA, 22 nt, Human
uuguauuuuguuaugcuacugc

SEQ ID NO: 284778 - RNA, 22 nt, Human
acagacagaggcuccaugagga

SEQ ID NO: 284779 - RNA, 22 nt, Human
uggcaagagggaugcaagguuu

SEQ ID NO: 284780 - RNA, 22 nt, Human
cuggugcacguggcugcagucg

SEQ ID NO: 284781 - RNA, 22 nt, Human
acuccagggcuccaccccagau

SEQ ID NO: 284782 - RNA, 22 nt, Human
ugucugggucaccccuccuggc

SEQ ID NO: 284783 - RNA, 22 nt, Human
uucacauuacaaggccauauuu

SEQ ID NO: 284784 - RNA, 17 nt, Human
ucauuuguugugacuag

SEQ ID NO: 284785 - RNA, 22 nt, Human
auucaguuucaaucauuguagu

SEQ ID NO: 284786 - RNA, 19 nt, Human
auacacauacguaaacuga

SEQ ID NO: 284787 - RNA, 22 nt, Human
uuugggauuuuacauuguaugg

SEQ ID NO: 284788 - RNA, 21 nt, Human
ucagggcagugggagguuccu

SEQ ID NO: 284789 - RNA, 22 nt, Human
uguguccugugaucucuagggu

SEQ ID NO: 284790 - RNA, 22 nt, Human
gccuggacaccgcccuugcaga

SEQ ID NO: 284791 - RNA, 22 nt, Human
aauguuaaguuuagauuauaac

SEQ ID NO: 284792 - RNA, 22 nt, Human
cacaguuugggucuccggggca

SEQ ID NO: 284793 - RNA, 22 nt, Human
uacagagaugugaaaagcucua

SEQ ID NO: 284794 - RNA, 22 nt, Human
caucuucagguucauggucaua

SEQ ID NO: 284795 - RNA, 23 nt, Human
uuguuucuuuguauugucucuau

SEQ ID NO: 284796 - RNA, 22 nt, Human
auuccuucuauucucugugggu

SEQ ID NO: 284797 - RNA, 22 nt, Human
aucuuuagcauuacuuuauuca

SEQ ID NO: 284798 - RNA, 22 nt, Human
cuucuuugaaaaaggcagucag

SEQ ID NO: 284799 - RNA, 22 nt, Human
caguguaagcucuagacuagaa

SEQ ID NO: 284800 - RNA, 22 nt, Human
aaugagauggcaaugacuuaaa

SEQ ID NO: 284801 - RNA, 22 nt, Human
cacagguuagguauuauacuau

SEQ ID NO: 284802 - RNA, 22 nt, Human
auuacaguggguaaacagaauu

SEQ ID NO: 284803 - RNA, 22 nt, Human
ucagggcaccaaaaaagaugcc

SEQ ID NO: 284804 - RNA, 22 nt, Human
uagggcagagcuuguacacgau

SEQ ID NO: 284805 - RNA, 22 nt, Human
acaggcagguccugucccagcu

SEQ ID NO: 284806 - RNA, 22 nt, Human
agaaggcagguuuuaaaauguc

SEQ ID NO: 284807 - RNA, 22 nt, Human
acagguguugaaugaugucaca

SEQ ID NO: 284808 - RNA, 22 nt, Human
ccaugagcuuccuauauagggu

SEQ ID NO: 284809 - RNA, 22 nt, Human
ugcuuuauguggcugauacuca

SEQ ID NO: 284810 - RNA, 22 nt, Human
ggcuugggagcaggcaugugac

SEQ ID NO: 284811 - RNA, 22 nt, Human
uguuucuucucacacaaacuca

SEQ ID NO: 284812 - RNA, 22 nt, Human
cacaauuuccuugcuucacuuu

SEQ ID NO: 284813 - RNA, 22 nt, Human
aaaguguuaugcaaaacucugu

SEQ ID NO: 284814 - RNA, 22 nt, Human
uuccuacauuugccucacuccc

SEQ ID NO: 284815 - RNA, 22 nt, Human
auuuuucagcuucauugaggca

SEQ ID NO: 284816 - RNA, 22 nt, Human
cuugggugcuggaggcugccgc

SEQ ID NO: 284817 - RNA, 22 nt, Human
uugcaagguuucucucugccua

SEQ ID NO: 284818 - RNA, 22 nt, Human
uaggcuugcuucuccuccacag

SEQ ID NO: 284819 - RNA, 22 nt, Human
augcauugucugguuucauuuu

SEQ ID NO: 284820 - RNA, 22 nt, Human
uuauugagcaacucuggggcuc

SEQ ID NO: 284821 - RNA, 16 nt, Human
uggcagguuuuuaucu

SEQ ID NO: 284822 - RNA, 22 nt, Human
agggagaagagaacaaagcccu

SEQ ID NO: 284823 - RNA, 22 nt, Human
aacuagaaaacaagaugcugau

SEQ ID NO: 284824 - RNA, 22 nt, Human
aaauuauuuucagaauggagaa

SEQ ID NO: 284825 - RNA, 20 nt, Human
uugaggagauauugaauacu

SEQ ID NO: 284826 - RNA, 22 nt, Human
auccucagaccucagcaaagcc

SEQ ID NO: 284827 - RNA, 22 nt, Human
uugauaaaaugauaucuucuuu

SEQ ID NO: 284828 - RNA, 22 nt, Human
gcccggcagucacacacccagg

SEQ ID NO: 284829 - RNA, 22 nt, Human
uacuguauuugauaagugaagu

SEQ ID NO: 284830 - RNA, 23 nt, Human
uggaagaaaaugguuuggcugug

SEQ ID NO: 284831 - RNA, 22 nt, Human
agccuugacacuggggaaacug

SEQ ID NO: 284832 - RNA, 19 nt, Human
uacaugcagcaggcacgca

SEQ ID NO: 284833 - RNA, 22 nt, Human
cagaaauucccauuucagauuc

SEQ ID NO: 284834 - RNA, 18 nt, Human
cuucucccaucuuggcca

SEQ ID NO: 284835 - RNA, 22 nt, Human
ugcuacuacuugucaacgguca

SEQ ID NO: 284836 - RNA, 22 nt, Human
uuccuucuccagaacuucuagg

SEQ ID NO: 284837 - RNA, 22 nt, Human
gcacagagacaguccugagauc

SEQ ID NO: 284838 - RNA, 22 nt, Human
ggaggugggagccuccaguggu

SEQ ID NO: 284839 - RNA, 22 nt, Human
uuguacaacacauauucuacag

SEQ ID NO: 284840 - RNA, 22 nt, Human
uacauuaucuuguuaucuuuca

SEQ ID NO: 284841 - RNA, 22 nt, Human
gggcaacagagcgagggccugu

SEQ ID NO: 284842 - RNA, 22 nt, Human
aguguccuugagguuccuagga

SEQ ID NO: 284843 - RNA, 22 nt, Human
ugucucuccacacagccagugc

SEQ ID NO: 284844 - RNA, 20 nt, Human
ugccuggccuuucucugccc

SEQ ID NO: 284845 - RNA, 22 nt, Human
gaugugucuccguuucaaggca

SEQ ID NO: 284846 - RNA, 22 nt, Human
aaggccugggaggccucucuuc

SEQ ID NO: 284847 - RNA, 22 nt, Human
aagagaaagcagacuuugucau

SEQ ID NO: 284848 - RNA, 22 nt, Human
aagcgccaugguuccugcgcag

SEQ ID NO: 284849 - RNA, 22 nt, Human
gugggagaaauuagcucuaguu

SEQ ID NO: 284850 - RNA, 22 nt, Human
ucuaacuuguauguauaguuuu

SEQ ID NO: 284851 - RNA, 22 nt, Human
ugcagggagggcccagcaaucu

SEQ ID NO: 284852 - RNA, 22 nt, Human
caguuuuaucaucugugaaaug

SEQ ID NO: 284853 - RNA, 22 nt, Human
guuauuuuaacuucucaguaau

SEQ ID NO: 284854 - RNA, 22 nt, Human
acagugcagggcgggaagaagg

SEQ ID NO: 284855 - RNA, 22 nt, Human
ugucuccugggucccuuccacc

SEQ ID NO: 284856 - RNA, 22 nt, Human
uuuacaugaguagcagauguuc

SEQ ID NO: 284857 - RNA, 22 nt, Human
cuggcugugcugacugagaggg

SEQ ID NO: 284858 - RNA, 22 nt, Human
auugcugggaggauguguguuc

SEQ ID NO: 284859 - RNA, 22 nt, Human
gcagggcacacaagaaugauaa

SEQ ID NO: 284860 - RNA, 22 nt, Human
uaaagugcaggcuacucagaag

SEQ ID NO: 284861 - RNA, 22 nt, Human
acccacccuacuagcagugucc

SEQ ID NO: 284862 - RNA, 22 nt, Human
auucaacuuauaagauauuaau

SEQ ID NO: 284863 - RNA, 22 nt, Human
cuuugucauuuugucucucagu

SEQ ID NO: 284864 - RNA, 22 nt, Human
aauuagaguggcgagugauuua

SEQ ID NO: 284865 - RNA, 22 nt, Human
cuccaugaauuugagcuuugug

SEQ ID NO: 284866 - RNA, 22 nt, Human
ugccagugcuugugucugagca

SEQ ID NO: 284867 - RNA, 22 nt, Human
ucugcugcugcagcuacacuau

SEQ ID NO: 284868 - RNA, 22 nt, Human
cggggucccugcccacccauac

SEQ ID NO: 284869 - RNA, 17 nt, Human
aaugaaugaauucuuug

SEQ ID NO: 284870 - RNA, 22 nt, Human
acuacauuugcagagaagcaau

SEQ ID NO: 284871 - RNA, 22 nt, Human
gugagaagauaaguauugcaaa

SEQ ID NO: 284872 - RNA, 19 nt, Human
aguucuuguccugucuguu

SEQ ID NO: 284873 - RNA, 22 nt, Human
ucauucaugaggugcuagugcu

SEQ ID NO: 284874 - RNA, 22 nt, Human
cagcuuuauuucacguguuugu

SEQ ID NO: 284875 - RNA, 22 nt, Human
ucugucuuggccagccaucugg

SEQ ID NO: 284876 - RNA, 22 nt, Human
uacauagugaacauuuacagag

SEQ ID NO: 284877 - RNA, 22 nt, Human
ucagugucucauaugagguuuc

SEQ ID NO: 284878 - RNA, 17 nt, Human
agcugaaauugcugaag

SEQ ID NO: 284879 - RNA, 19 nt, Human
gaguccugugcuccuuguu

SEQ ID NO: 284880 - RNA, 22 nt, Human
ggcugaggcucaugccaucuug

SEQ ID NO: 284881 - RNA, 22 nt, Human
ucugugcucaaguucugccucu

SEQ ID NO: 284882 - RNA, 22 nt, Human
ggaagcuggacaggcuuugagu

SEQ ID NO: 284883 - RNA, 20 nt, Human
augugagggguugaaguggg

SEQ ID NO: 284884 - RNA, 22 nt, Human
augcuuuauuguuaggucaugu

SEQ ID NO: 284885 - RNA, 22 nt, Human
ugcagggauccuagcugaagag

SEQ ID NO: 284886 - RNA, 22 nt, Human
gcugggaagugcaagaucaagg

SEQ ID NO: 284887 - RNA, 22 nt, Human
uggcagggucuugcuguguugc

SEQ ID NO: 284888 - RNA, 22 nt, Human
gcagggcaugggcccugucugc

SEQ ID NO: 284889 - RNA, 20 nt, Human
aaagagcccuuggagcaggc

SEQ ID NO: 284890 - RNA, 22 nt, Human
gacccauauauacguaauuugu

SEQ ID NO: 284891 - RNA, 20 nt, Human
uagauuucauacuucucuuu

SEQ ID NO: 284892 - RNA, 22 nt, Human
ugaucuuuacugcuguuuauaa

SEQ ID NO: 284893 - RNA, 22 nt, Human
uuuaaacaaauaggauugccua

SEQ ID NO: 284894 - RNA, 22 nt, Human
gcuccuggauguucaagucggc

SEQ ID NO: 284895 - RNA, 22 nt, Human
aaguaucucaaaaacaguaauc

SEQ ID NO: 284896 - RNA, 22 nt, Human
caguuucugagcccugucauuu

SEQ ID NO: 284897 - RNA, 22 nt, Human
uagcaggguccaaugugaggca

SEQ ID NO: 284898 - RNA, 22 nt, Human
caaaaguucucacccagacaug

SEQ ID NO: 284899 - RNA, 22 nt, Human
ggugagaaagggauuccuguuc

SEQ ID NO: 284900 - RNA, 22 nt, Human
cugucuucccgaggcccuggag

SEQ ID NO: 284901 - RNA, 22 nt, Human
aguuuauguaaaauuaguaaug

SEQ ID NO: 284902 - RNA, 22 nt, Human
aggagggaccuaggaauauugc

SEQ ID NO: 284903 - RNA, 22 nt, Human
ugcuuaaaggauaguuuaaacu

SEQ ID NO: 284904 - RNA, 22 nt, Human
uaugaacugcucuuguguuuug

SEQ ID NO: 284905 - RNA, 22 nt, Human
uuuauuuggcaucucugccaag

SEQ ID NO: 284906 - RNA, 22 nt, Human
aggacacaggcaggaggagauc

SEQ ID NO: 284907 - RNA, 22 nt, Human
gcugccacgaucucugcuguag

SEQ ID NO: 284908 - RNA, 22 nt, Human
auuuugcugugguacauuagga

SEQ ID NO: 284909 - RNA, 22 nt, Human
ucugcccaggaggucccauggg

SEQ ID NO: 284910 - RNA, 22 nt, Human
auuugaagaaaguuuucuagau

SEQ ID NO: 284911 - RNA, 22 nt, Human
ggcucugggccuccaaggucug

SEQ ID NO: 284912 - RNA, 22 nt, Human
aggccaggauagcauggaucag

SEQ ID NO: 284913 - RNA, 22 nt, Human
caggacaaagcccuuugagaaa

SEQ ID NO: 284914 - RNA, 22 nt, Human
aggcugcugccuuggagagugu

SEQ ID NO: 284915 - RNA, 22 nt, Human
caugcagggacuagagaacagg

SEQ ID NO: 284916 - RNA, 22 nt, Human
uaaacuguguaauaugaugucu

SEQ ID NO: 284917 - RNA, 23 nt, Human
ugguaauagggagcagaagguag

SEQ ID NO: 284918 - RNA, 22 nt, Human
ucugaagagaaugcugcugaac

SEQ ID NO: 284919 - RNA, 22 nt, Human
uacuaaauaguuuaauuccuca

SEQ ID NO: 284920 - RNA, 22 nt, Human
auuuccaugaaguuuaguuaua

SEQ ID NO: 284921 - RNA, 22 nt, Human
uuuauacauggagaauuuuugc

SEQ ID NO: 284922 - RNA, 22 nt, Human
uucaguuccauuucaggugggu

SEQ ID NO: 284923 - RNA, 22 nt, Human
augucacuguuguuauuguuau

SEQ ID NO: 284924 - RNA, 22 nt, Human
cuggauuaaguaaaauagagga

SEQ ID NO: 284925 - RNA, 22 nt, Human
auguuuacaauucaguauuaca

SEQ ID NO: 284926 - RNA, 22 nt, Human
ucacauuugcaauugcauuguu

SEQ ID NO: 284927 - RNA, 22 nt, Human
guuggcuaugagagcuuuagug

SEQ ID NO: 284928 - RNA, 22 nt, Human
uguuucuagagaaaauauuuac

SEQ ID NO: 284929 - RNA, 22 nt, Human
ucagugucuugaccugggugug

SEQ ID NO: 284930 - RNA, 22 nt, Human
cccugcaggcucagacuggagu

SEQ ID NO: 284931 - RNA, 22 nt, Human
uccacuccuuaugccagacggu

SEQ ID NO: 284932 - RNA, 22 nt, Human
gaacucagagccugagcuagga

SEQ ID NO: 284933 - RNA, 22 nt, Human
agggugugcuguugggucuuuc

SEQ ID NO: 284934 - RNA, 22 nt, Human
gaugaaggggcuggugcccucu

SEQ ID NO: 284935 - RNA, 22 nt, Human
uucuuggaaacugauuccuugu

SEQ ID NO: 284936 - RNA, 22 nt, Human
cacaaauaccaguuuccuaaca

SEQ ID NO: 284937 - RNA, 22 nt, Human
uaaaucuccuguuuuucaucua

SEQ ID NO: 284938 - RNA, 22 nt, Human
cuagagaaaccccaugagcuuu

SEQ ID NO: 284939 - RNA, 22 nt, Human
acaguggcaguauuagggcaga

SEQ ID NO: 284940 - RNA, 22 nt, Human
gugcuggcaccccucuccaguu

SEQ ID NO: 284941 - RNA, 22 nt, Human
aagcugucagugucaggcuaaa

SEQ ID NO: 284942 - RNA, 22 nt, Human
uaucacaucaauguuuuaaaau

SEQ ID NO: 284943 - RNA, 22 nt, Human
uuacagugaagauucagguucc

SEQ ID NO: 284944 - RNA, 22 nt, Human
gggguguggacggcugugccag

SEQ ID NO: 284945 - RNA, 22 nt, Human
ugccuucaaucaggauggucuc

SEQ ID NO: 284946 - RNA, 22 nt, Human
cauuuauugaguggccacagug

SEQ ID NO: 284947 - RNA, 22 nt, Human
guguccaucucuguaugcugcu

SEQ ID NO: 284948 - RNA, 22 nt, Human
uucauucuuauuugugaucugg

SEQ ID NO: 284949 - RNA, 22 nt, Human
guuuuuguccauggaggcaaac

SEQ ID NO: 284950 - RNA, 22 nt, Human
ucuccuggaagugauuccccug

SEQ ID NO: 284951 - RNA, 22 nt, Human
acagguggaaacaugguguugg

SEQ ID NO: 284952 - RNA, 22 nt, Human
cccagugucucuugugccuuuc

SEQ ID NO: 284953 - RNA, 22 nt, Human
cugcaggagcaaagccucugcu

SEQ ID NO: 284954 - RNA, 22 nt, Human
accccccagauaaucccuugag

SEQ ID NO: 284955 - RNA, 22 nt, Human
agaugggugccuucuuucuuua

SEQ ID NO: 284956 - RNA, 22 nt, Human
cccagugugguucuuuggagaa

SEQ ID NO: 284957 - RNA, 22 nt, Human
cucccugggccucaguuucucu

SEQ ID NO: 284958 - RNA, 22 nt, Human
ucugccaggccacacagggcac

SEQ ID NO: 284959 - RNA, 22 nt, Human
ucugggaagcugcgugccuguu

SEQ ID NO: 284960 - RNA, 22 nt, Human
ccagcuuuaucaagucugagcu

SEQ ID NO: 284961 - RNA, 22 nt, Human
acagguggcagaagcauuuacu

SEQ ID NO: 284962 - RNA, 22 nt, Human
uagggauggaaacuaggaaucu

SEQ ID NO: 284963 - RNA, 22 nt, Human
aggccagguggucaugcuugcu

SEQ ID NO: 284964 - RNA, 22 nt, Human
aaacuguaagagaauaaacuac

SEQ ID NO: 284965 - RNA, 20 nt, Human
ccucuguguccugugucaua

SEQ ID NO: 284966 - RNA, 22 nt, Human
uccugcagugugucuccugcac

SEQ ID NO: 284967 - RNA, 14 nt, Human
agcugcaagcaucc

SEQ ID NO: 284968 - RNA, 22 nt, Human
gcucagaguuaaauauagugcu

SEQ ID NO: 284969 - RNA, 22 nt, Human
uuagaagucaucuagucuaaaa

SEQ ID NO: 284970 - RNA, 22 nt, Human
aaucauucuuauuucacagcaa

SEQ ID NO: 284971 - RNA, 22 nt, Human
cuagcuguguaaaccgagcugc

SEQ ID NO: 284972 - RNA, 22 nt, Human
cccugguucagguuucucugaa

SEQ ID NO: 284973 - RNA, 22 nt, Human
agugucuuacucccucaggcac

SEQ ID NO: 284974 - RNA, 22 nt, Human
gcccaggggcagcgcauagugg

SEQ ID NO: 284975 - RNA, 22 nt, Human
ugacaggucauauaagcuugca

SEQ ID NO: 284976 - RNA, 22 nt, Human
ggauccugauauguguuucuca

SEQ ID NO: 284977 - RNA, 22 nt, Human
ggcccagucuggggcccuguga

SEQ ID NO: 284978 - RNA, 22 nt, Human
uguccuuuaugaaaugguguuu

SEQ ID NO: 284979 - RNA, 22 nt, Human
guuauuuucauuggcucagacu

SEQ ID NO: 284980 - RNA, 22 nt, Human
auuagggaaacugacuugucuc

SEQ ID NO: 284981 - RNA, 22 nt, Human
agugucaaauuaaauaaucugg

SEQ ID NO: 284982 - RNA, 22 nt, Human
acagucuacuaaacaucaucag

SEQ ID NO: 284983 - RNA, 20 nt, Human
gcucaguggagaaaugcacc

SEQ ID NO: 284984 - RNA, 22 nt, Human
ucuggguggugucuuccaagac

SEQ ID NO: 284985 - RNA, 22 nt, Human
gcaaacaugcugagaaauaaga

SEQ ID NO: 284986 - RNA, 22 nt, Human
agcagguuuaaacucuaaugca

SEQ ID NO: 284987 - RNA, 21 nt, Human
agggucaggaaccaggguacc

SEQ ID NO: 284988 - RNA, 22 nt, Human
agucauuuaucuuagccauuau

SEQ ID NO: 284989 - RNA, 22 nt, Human
ucagaacaauuccuuuauaaca

SEQ ID NO: 284990 - RNA, 22 nt, Human
ucuccacaaguguugagaguac

SEQ ID NO: 284991 - RNA, 22 nt, Human
uccugggucugggugucugagg

SEQ ID NO: 284992 - RNA, 22 nt, Human
acagcuuugggcaaugcuauga

SEQ ID NO: 284993 - RNA, 22 nt, Human
ccaggcuuccuaaugugugcag

SEQ ID NO: 284994 - RNA, 19 nt, Human
guccaguguuuuccaguca

SEQ ID NO: 284995 - RNA, 22 nt, Human
uccaggcaaagggacuagcagg

SEQ ID NO: 284996 - RNA, 22 nt, Human
cagaggaaguuccuugaugaga

SEQ ID NO: 284997 - RNA, 22 nt, Human
uuagcuucuuacauuucauccu

SEQ ID NO: 284998 - RNA, 22 nt, Human
gagcugugaaaagugccugggg

SEQ ID NO: 284999 - RNA, 22 nt, Human
uaggugucaggccuccuccagc

SEQ ID NO: 285000 - RNA, 22 nt, Human
auaguuuuaaaaccucaggaag

SEQ ID NO: 285001 - RNA, 22 nt, Human
agcugccagcaaguuucaaaca

SEQ ID NO: 285002 - RNA, 22 nt, Human
agagggcaugcuugguggccug

SEQ ID NO: 285003 - RNA, 22 nt, Human
auuauuuuaugugcggccugau

SEQ ID NO: 285004 - RNA, 22 nt, Human
uuucugcaaguguagauaccca

SEQ ID NO: 285005 - RNA, 22 nt, Human
acugaggauggauaggucauau

SEQ ID NO: 285006 - RNA, 22 nt, Human
auaguacaaucaguuaauuagu

SEQ ID NO: 285007 - RNA, 22 nt, Human
ucagcacugaaauucuucacau

SEQ ID NO: 285008 - RNA, 22 nt, Human
ugcuggagcaacauuauugugc

SEQ ID NO: 285009 - RNA, 22 nt, Human
caugauaauuguuaacaaagua

SEQ ID NO: 285010 - RNA, 22 nt, Human
aagucacuggcaaaagcugcag

SEQ ID NO: 285011 - RNA, 22 nt, Human
aucacacuguuauuuuaguuaa

SEQ ID NO: 285012 - RNA, 22 nt, Human
cccucucccugcagaauguggc

SEQ ID NO: 285013 - RNA, 22 nt, Human
ccugccuguacuagagacccag

SEQ ID NO: 285014 - RNA, 19 nt, Human
ccaggccucuggggccugu

SEQ ID NO: 285015 - RNA, 22 nt, Human
aaggugucauuguuuauggaga

SEQ ID NO: 285016 - RNA, 23 nt, Human
uauuagggccaggacuggcaaau

SEQ ID NO: 285017 - RNA, 22 nt, Human
caguuuugguccuuucuaggua

SEQ ID NO: 285018 - RNA, 22 nt, Human
ucuggcagcagcaucaguggcu

SEQ ID NO: 285019 - RNA, 22 nt, Human
uccuggcccgaucccugugaag

SEQ ID NO: 285020 - RNA, 22 nt, Human
augguacagugcacugaaugga

SEQ ID NO: 285021 - RNA, 22 nt, Human
aagucuaaguuuguaacuugga

SEQ ID NO: 285022 - RNA, 22 nt, Human
ugcccugggaggcuuuccuguu

SEQ ID NO: 285023 - RNA, 22 nt, Human
ggggcaggagguguucucuuuu

SEQ ID NO: 285024 - RNA, 21 nt, Human
agccugcaauguagguaccgg

SEQ ID NO: 285025 - RNA, 22 nt, Human
ggcaguagccagggacuggcag

SEQ ID NO: 285026 - RNA, 22 nt, Human
auuucuguugcuuauaaauuac

SEQ ID NO: 285027 - RNA, 22 nt, Human
gagagucuagugcaccuaguuu

SEQ ID NO: 285028 - RNA, 22 nt, Human
ggagggggaauucagccccagc

SEQ ID NO: 285029 - RNA, 22 nt, Human
gucugcccuuggcucagccaua

SEQ ID NO: 285030 - RNA, 20 nt, Human
cugcagggugagugggcgau

SEQ ID NO: 285031 - RNA, 21 nt, Human
aaaaaugaaguuguucaggaa

SEQ ID NO: 285032 - RNA, 22 nt, Human
ucccagugagaugaaacaggua

SEQ ID NO: 285033 - RNA, 22 nt, Human
ggcagcuucucccaggcuguuu

SEQ ID NO: 285034 - RNA, 23 nt, Human
ucaggugugcggacugcugaguc

SEQ ID NO: 285035 - RNA, 22 nt, Human
agggcagcaaugcagcugcugc

SEQ ID NO: 285036 - RNA, 22 nt, Human
ucccagaagugaaauuucuaga

SEQ ID NO: 285037 - RNA, 22 nt, Human
uuacagugagggugacauuuac

SEQ ID NO: 285038 - RNA, 22 nt, Human
ucaggaaacuacaguugaacua

SEQ ID NO: 285039 - RNA, 22 nt, Human
ccucagcugcuucccuggagcc

SEQ ID NO: 285040 - RNA, 22 nt, Human
ucuuuauuuuaugcuugugcaa

SEQ ID NO: 285041 - RNA, 23 nt, Human
ucugcaagauaaugaagaugaua

SEQ ID NO: 285042 - RNA, 22 nt, Human
ugcauaaagugccauaguauua

SEQ ID NO: 285043 - RNA, 22 nt, Human
cagcucagacgcaggucgagca

SEQ ID NO: 285044 - RNA, 22 nt, Human
caggauggccccggggcugugc

SEQ ID NO: 285045 - RNA, 22 nt, Human
ggcugucucugugacugccacc

SEQ ID NO: 285046 - RNA, 22 nt, Human
aauaugaauuauuguuacaagu

SEQ ID NO: 285047 - RNA, 22 nt, Human
uccugagguauaugcuuugcag

SEQ ID NO: 285048 - RNA, 22 nt, Human
agaggggaaggaugugauguga

SEQ ID NO: 285049 - RNA, 22 nt, Human
ugcagguggcagcggggcacca

SEQ ID NO: 285050 - RNA, 22 nt, Human
cagugcaguugguggcaggggu

SEQ ID NO: 285051 - RNA, 22 nt, Human
aagucuuuuugaaucuauaacu

SEQ ID NO: 285052 - RNA, 22 nt, Human
gccccaccugcuaccuuccagc

SEQ ID NO: 285053 - RNA, 22 nt, Human
ccugugacauuagaauuucauu

SEQ ID NO: 285054 - RNA, 22 nt, Human
aagcugcagacccccugucuca

SEQ ID NO: 285055 - RNA, 22 nt, Human
aacucuuuggucucaggaaagg

SEQ ID NO: 285056 - RNA, 22 nt, Human
guacaaaugcagguuuguuaca

SEQ ID NO: 285057 - RNA, 22 nt, Human
ugaccugucacauuuugaugaa

SEQ ID NO: 285058 - RNA, 22 nt, Human
uccuucuuucccccuagucauu

SEQ ID NO: 285059 - RNA, 22 nt, Human
gagcuuuagcugagaccugcuu

SEQ ID NO: 285060 - RNA, 22 nt, Human
aaaggaggccacauggcuagga

SEQ ID NO: 285061 - RNA, 22 nt, Human
aagauuuuuuuccacagacuca

SEQ ID NO: 285062 - RNA, 22 nt, Human
cccaggcaguagaaagaagagg

SEQ ID NO: 285063 - RNA, 22 nt, Human
agcauguucaucuucuguuggu

SEQ ID NO: 285064 - RNA, 22 nt, Human
gaggcuggcagaaaagcacagg

SEQ ID NO: 285065 - RNA, 22 nt, Human
ugagccaguucuucagauccau

SEQ ID NO: 285066 - RNA, 22 nt, Human
aucugacaaggccacauauucu

SEQ ID NO: 285067 - RNA, 22 nt, Human
guuacaaaggacugggggccac

SEQ ID NO: 285068 - RNA, 22 nt, Human
caggcagcugcgacaagagagc

SEQ ID NO: 285069 - RNA, 22 nt, Human
ucugggugcuacaaacaguauu

SEQ ID NO: 285070 - RNA, 22 nt, Human
ugggccagcacugggugcucau

SEQ ID NO: 285071 - RNA, 22 nt, Human
cacaagcugggcaaguguauau

SEQ ID NO: 285072 - RNA, 22 nt, Human
guugcugggagcagggauccug

SEQ ID NO: 285073 - RNA, 22 nt, Human
augaaaauugacagcggaagua

SEQ ID NO: 285074 - RNA, 22 nt, Human
agagccaggaaguggcgugggg

SEQ ID NO: 285075 - RNA, 20 nt, Human
uugaagagucagguagggcc

SEQ ID NO: 285076 - RNA, 22 nt, Human
uggguagaguggagggauaaga

SEQ ID NO: 285077 - RNA, 19 nt, Human
uccuggcacaguggaacca

SEQ ID NO: 285078 - RNA, 18 nt, Human
aggcaggugcuggaaguc

SEQ ID NO: 285079 - RNA, 22 nt, Human
caguuucuucuauuuugaacua

SEQ ID NO: 285080 - RNA, 22 nt, Human
caugcagucaauaaacaugugu

SEQ ID NO: 285081 - RNA, 19 nt, Human
ugcuguccucagaguaagu

SEQ ID NO: 285082 - RNA, 20 nt, Human
agggcugagaagggacuagc

SEQ ID NO: 285083 - RNA, 22 nt, Human
cuuauauuuuaggaacagacaa

SEQ ID NO: 285084 - RNA, 22 nt, Human
cuggaggaauaaucuccuaccc

SEQ ID NO: 285085 - RNA, 22 nt, Human
cauaugaaauaugaguugaaca

SEQ ID NO: 285086 - RNA, 22 nt, Human
aaugugucccuuauuucacagg

SEQ ID NO: 285087 - RNA, 22 nt, Human
gaaggcaucacagaggcuguga

SEQ ID NO: 285088 - RNA, 19 nt, Human
ucacauucagccuugcuga

SEQ ID NO: 285089 - RNA, 22 nt, Human
cucuuaaaaacuugauauauuu

SEQ ID NO: 285090 - RNA, 22 nt, Human
uagggagaggaagcaggccgcu

SEQ ID NO: 285091 - RNA, 22 nt, Human
gggguggauuccuacaggucca

SEQ ID NO: 285092 - RNA, 22 nt, Human
cccagugucauucuaagggagg

SEQ ID NO: 285093 - RNA, 22 nt, Human
ccugggugaaugauauucuaaa

SEQ ID NO: 285094 - RNA, 22 nt, Human
gccugcagugagugcagaaggu

SEQ ID NO: 285095 - RNA, 19 nt, Human
gcugggugaggucguugga

SEQ ID NO: 285096 - RNA, 23 nt, Human
agaggggagcaucugcuggcuga

SEQ ID NO: 285097 - RNA, 22 nt, Human
cagaggcugccagccaugugca

SEQ ID NO: 285098 - RNA, 18 nt, Human
ugcuuggagcauuuacca

SEQ ID NO: 285099 - RNA, 22 nt, Human
uacaguuuacaugagaggaagc

SEQ ID NO: 285100 - RNA, 22 nt, Human
aaauaauugaguuggucaauau

SEQ ID NO: 285101 - RNA, 19 nt, Human
agcaguuauaugcauggga

SEQ ID NO: 285102 - RNA, 22 nt, Human
gcagcuuuaaucugaauaagua

SEQ ID NO: 285103 - RNA, 22 nt, Human
uucaugugauaaaugugugacu

SEQ ID NO: 285104 - RNA, 22 nt, Human
ucccaccccuugacucuuuaag

SEQ ID NO: 285105 - RNA, 22 nt, Human
cugaggagaccaucaacuaauu

SEQ ID NO: 285106 - RNA, 20 nt, Human
uucaggaauaagauagcagc

SEQ ID NO: 285107 - RNA, 22 nt, Human
ucaggauggagggaagcacaga

SEQ ID NO: 285108 - RNA, 22 nt, Human
uguuuggaaacacuggcagaaa

SEQ ID NO: 285109 - RNA, 22 nt, Human
uacugcaugguggaguggagcu

SEQ ID NO: 285110 - RNA, 22 nt, Human
ucuggcaggauaucgaagugaa

SEQ ID NO: 285111 - RNA, 22 nt, Human
uuccuacauuuguacaauaaga

SEQ ID NO: 285112 - RNA, 22 nt, Human
aacuaaaucuggcauuuagagc

SEQ ID NO: 285113 - RNA, 19 nt, Human
cucagucuggcucugccug

SEQ ID NO: 285114 - RNA, 22 nt, Human
ugagcuggucuugaguguagcu

SEQ ID NO: 285115 - RNA, 22 nt, Human
ucuacauuuucuuuauguacau

SEQ ID NO: 285116 - RNA, 22 nt, Human
gaggugucuggccuuuguagga

SEQ ID NO: 285117 - RNA, 22 nt, Human
uuagcuuucuuggagaauuaca

SEQ ID NO: 285118 - RNA, 22 nt, Human
uuucuacuuuggaaugcacuga

SEQ ID NO: 285119 - RNA, 22 nt, Human
ccauaaucuggcuuugagagag

SEQ ID NO: 285120 - RNA, 22 nt, Human
aagcccuggcccaaccuugauu

SEQ ID NO: 285121 - RNA, 22 nt, Human
uuauauaaagauaacuuuucuu

SEQ ID NO: 285122 - RNA, 22 nt, Human
ucugaagaauaggauguugugu

SEQ ID NO: 285123 - RNA, 22 nt, Human
uguccugggccggcgacugguc

SEQ ID NO: 285124 - RNA, 22 nt, Human
ugguuccaagauggcugccaca

SEQ ID NO: 285125 - RNA, 22 nt, Human
aauugcuugucuucuucccuac

SEQ ID NO: 285126 - RNA, 22 nt, Human
gccuguuuccaucaacacaugc

SEQ ID NO: 285127 - RNA, 22 nt, Human
caugugucuuuauggagccaca

SEQ ID NO: 285128 - RNA, 23 nt, Human
aaugacagugugugauugaagaa

SEQ ID NO: 285129 - RNA, 22 nt, Human
uauaauuuuagaagagauggaa

SEQ ID NO: 285130 - RNA, 22 nt, Human
ugggcagacuaaggucaaagcu

SEQ ID NO: 285131 - RNA, 22 nt, Human
ucuccccaaccauggcacucac

SEQ ID NO: 285132 - RNA, 22 nt, Human
uaugaaaauuuagcugaagcau

SEQ ID NO: 285133 - RNA, 22 nt, Human
gcauguguuauuuuauguauga

SEQ ID NO: 285134 - RNA, 22 nt, Human
acagguggggaggcugagguuc

SEQ ID NO: 285135 - RNA, 22 nt, Human
uugaaucuauaauuucaguauu

SEQ ID NO: 285136 - RNA, 22 nt, Human
cacccagcagcacuuaagacua

SEQ ID NO: 285137 - RNA, 22 nt, Human
caagcguggcugcucugaugga

SEQ ID NO: 285138 - RNA, 18 nt, Human
agcaggugugcagaaugu

SEQ ID NO: 285139 - RNA, 22 nt, Human
ggggcuccagucuucacauuuu

SEQ ID NO: 285140 - RNA, 22 nt, Human
ugacauguuagggaaaugugau

SEQ ID NO: 285141 - RNA, 22 nt, Human
ggggaccuuuccauuucugaga

SEQ ID NO: 285142 - RNA, 22 nt, Human
uagggcaguuucauguuaucuu

SEQ ID NO: 285143 - RNA, 22 nt, Human
acuuucuuggucccauguuuga

SEQ ID NO: 285144 - RNA, 22 nt, Human
cgggcuccgggucuuugcaguc

SEQ ID NO: 285145 - RNA, 22 nt, Human
ggcaggcaaugaggaugggaag

SEQ ID NO: 285146 - RNA, 22 nt, Human
uaaaugagauguacauaacuca

SEQ ID NO: 285147 - RNA, 22 nt, Human
ccuccagcgcgauccacuccgg

SEQ ID NO: 285148 - RNA, 22 nt, Human
agcaaacauucagcagauuggc

SEQ ID NO: 285149 - RNA, 21 nt, Human
uggccaaacuggagcauuuga

SEQ ID NO: 285150 - RNA, 22 nt, Human
uuauauuguguaauaagugaag

SEQ ID NO: 285151 - RNA, 22 nt, Human
augcagcuucaggauuaugaug

SEQ ID NO: 285152 - RNA, 22 nt, Human
uacauuccugggcuccacccua

SEQ ID NO: 285153 - RNA, 22 nt, Human
aggccaaguagccgcuguccua

SEQ ID NO: 285154 - RNA, 22 nt, Human
ggugagggaguggaacgaggug

SEQ ID NO: 285155 - RNA, 21 nt, Human
aguuugaugcaauuucugaga

SEQ ID NO: 285156 - RNA, 22 nt, Human
caguuaaagcugcaugugucag

SEQ ID NO: 285157 - RNA, 22 nt, Human
gucuucuuuucagucugcuugu

SEQ ID NO: 285158 - RNA, 22 nt, Human
cuaacugucaugcacauguguu

SEQ ID NO: 285159 - RNA, 22 nt, Human
acuguggccggaacagugggac

SEQ ID NO: 285160 - RNA, 22 nt, Human
ucgccauggaaguccuugcgga

SEQ ID NO: 285161 - RNA, 22 nt, Human
gaggggucuuuuguugucaggg

SEQ ID NO: 285162 - RNA, 23 nt, Human
acagacuguauucaaaguaggac

SEQ ID NO: 285163 - RNA, 22 nt, Human
ucugggaacucugucauuuccc

SEQ ID NO: 285164 - RNA, 22 nt, Human
cuucagaggggacucaaaguca

SEQ ID NO: 285165 - RNA, 22 nt, Human
ugccauccuugaggaagggcaa

SEQ ID NO: 285166 - RNA, 22 nt, Human
uguccuuuguucccugucucug

SEQ ID NO: 285167 - RNA, 22 nt, Human
uguccuagaguacauuccacug

SEQ ID NO: 285168 - RNA, 22 nt, Human
aguaaaauuaauggaucagaag

SEQ ID NO: 285169 - RNA, 22 nt, Human
ucugucaucuguucagugcuca

SEQ ID NO: 285170 - RNA, 19 nt, Human
cagggauggguagggacuc

SEQ ID NO: 285171 - RNA, 18 nt, Human
aggagaaagggaccaggg

SEQ ID NO: 285172 - RNA, 22 nt, Human
cccccagaugcgagccauagcc

SEQ ID NO: 285173 - RNA, 22 nt, Human
agauuccagaucccaaaaauga

SEQ ID NO: 285174 - RNA, 22 nt, Human
guucuucaucuuaaccaucugu

SEQ ID NO: 285175 - RNA, 22 nt, Human
uauuccagguauucuucaagag

SEQ ID NO: 285176 - RNA, 22 nt, Human
agagaggcgaguuaccugugcu

SEQ ID NO: 285177 - RNA, 22 nt, Human
gguaauaagaucuguuacaugg

SEQ ID NO: 285178 - RNA, 22 nt, Human
caguuucuuuccauuguuaccu

SEQ ID NO: 285179 - RNA, 22 nt, Human
auaaaugugaauuagagcuuug

SEQ ID NO: 285180 - RNA, 22 nt, Human
aucugcuugaaugagcaacagg

SEQ ID NO: 285181 - RNA, 22 nt, Human
ugccaguguggaacuaggaaga

SEQ ID NO: 285182 - RNA, 21 nt, Human
gcuuuuuguauggcccaggaa

SEQ ID NO: 285183 - RNA, 22 nt, Human
caggaacacaaugagucucaaa

SEQ ID NO: 285184 - RNA, 22 nt, Human
uuccuagaaugguuagaaaaua

SEQ ID NO: 285185 - RNA, 22 nt, Human
uccugagcugccgcaucagcag

SEQ ID NO: 285186 - RNA, 22 nt, Human
aucugguaugagguuuugcuuu

SEQ ID NO: 285187 - RNA, 22 nt, Human
ugucauuuaugcuucuucagug

SEQ ID NO: 285188 - RNA, 22 nt, Human
aaagccuuugucucaggcucug

SEQ ID NO: 285189 - RNA, 21 nt, Human
aggcucccagaaaugggcauc

SEQ ID NO: 285190 - RNA, 22 nt, Human
gcugccacucugagcuugcuuc

SEQ ID NO: 285191 - RNA, 22 nt, Human
gggaucuugaaacagcuggauu

SEQ ID NO: 285192 - RNA, 22 nt, Human
aacauacauauuucagugucca

SEQ ID NO: 285193 - RNA, 22 nt, Human
uuguagaaucauuauuucuagu

SEQ ID NO: 285194 - RNA, 22 nt, Human
aacauucaccucuaccuccuuc

SEQ ID NO: 285195 - RNA, 22 nt, Human
uuacagcauuuaaugagaucug

SEQ ID NO: 285196 - RNA, 22 nt, Human
aacauucaauugaggaaguuaa

SEQ ID NO: 285197 - RNA, 22 nt, Human
ccacccagcagaggaggcaaga

SEQ ID NO: 285198 - RNA, 22 nt, Human
cauauucuuuaagcaaugcucu

SEQ ID NO: 285199 - RNA, 22 nt, Human
cauucauuagaauagauaugua

SEQ ID NO: 285200 - RNA, 22 nt, Human
gcugggcucauuugugugucug

SEQ ID NO: 285201 - RNA, 22 nt, Human
agccuucagcaguucaggugcc

SEQ ID NO: 285202 - RNA, 22 nt, Human
agaguuggcccacguguaggcg

SEQ ID NO: 285203 - RNA, 22 nt, Human
aggauccuuuuucugcuguuug

SEQ ID NO: 285204 - RNA, 22 nt, Human
uuccagauguuuaaguucugcu

SEQ ID NO: 285205 - RNA, 22 nt, Human
acauguguuuuccuacuuauga

SEQ ID NO: 285206 - RNA, 22 nt, Human
uggcuugggagauucucgaacu

SEQ ID NO: 285207 - RNA, 22 nt, Human
gaaguuuucugaggcuguagcu

SEQ ID NO: 285208 - RNA, 22 nt, Human
aagaaucauccugcaagagucu

SEQ ID NO: 285209 - RNA, 22 nt, Human
uucuaaauuuuggaagaugcag

SEQ ID NO: 285210 - RNA, 22 nt, Human
ucaccaaguccauaugcaucau

SEQ ID NO: 285211 - RNA, 22 nt, Human
gugaaaaaugauuuguuaacug

SEQ ID NO: 285212 - RNA, 22 nt, Human
uuccagaaaguucuggaacugg

SEQ ID NO: 285213 - RNA, 22 nt, Human
cuuguucugugcuucuuacauu

SEQ ID NO: 285214 - RNA, 22 nt, Human
auauuccauugguuucccuucu

SEQ ID NO: 285215 - RNA, 22 nt, Human
aggugggguucagucucagccg

SEQ ID NO: 285216 - RNA, 22 nt, Human
uuucuagaugcggggcuugugc

SEQ ID NO: 285217 - RNA, 22 nt, Human
aacagacauauuuuuaauaugc

SEQ ID NO: 285218 - RNA, 22 nt, Human
caagagcugaggcuggagaggu

SEQ ID NO: 285219 - RNA, 22 nt, Human
caggcugcggccgugugagcau

SEQ ID NO: 285220 - RNA, 22 nt, Human
uaauaauuggcuaacccuggga

SEQ ID NO: 285221 - RNA, 19 nt, Human
gccucugagggcaggacac

SEQ ID NO: 285222 - RNA, 22 nt, Human
gagcccagcugcggcccucagc

SEQ ID NO: 285223 - RNA, 22 nt, Human
gaaacaugucugacaauuuacc

SEQ ID NO: 285224 - RNA, 22 nt, Human
acuguacugaaaaguaagcaag

SEQ ID NO: 285225 - RNA, 22 nt, Human
cuuuauggaaucaaagacugga

SEQ ID NO: 285226 - RNA, 22 nt, Human
ucaaggcacuucaugucucagu

SEQ ID NO: 285227 - RNA, 20 nt, Human
cguguccuuggcgggagagc

SEQ ID NO: 285228 - RNA, 22 nt, Human
aacaguaaaaaucauuuaguug

SEQ ID NO: 285229 - RNA, 22 nt, Human
uuuagguucuuggaaucagucu

SEQ ID NO: 285230 - RNA, 22 nt, Human
caguggcugguuagggacagga

SEQ ID NO: 285231 - RNA, 22 nt, Human
caucacuguccucagcauucca

SEQ ID NO: 285232 - RNA, 22 nt, Human
ccauguguaaauuagauaacuc

SEQ ID NO: 285233 - RNA, 22 nt, Human
auuugcuuuaagguauaaaagg

SEQ ID NO: 285234 - RNA, 22 nt, Human
ucucuucugaaaccugucuuua

SEQ ID NO: 285235 - RNA, 22 nt, Human
cacuuuauaaaauuggugugag

SEQ ID NO: 285236 - RNA, 22 nt, Human
agcuccugugugcccaccugcu

SEQ ID NO: 285237 - RNA, 22 nt, Human
uccagagguauguagagaguau

SEQ ID NO: 285238 - RNA, 22 nt, Human
uguaaaaccaaaucaaucuagu

SEQ ID NO: 285239 - RNA, 22 nt, Human
gacaggugagaugaggaacacc

SEQ ID NO: 285240 - RNA, 22 nt, Human
uacauguggguuaaaaacacuc

SEQ ID NO: 285241 - RNA, 22 nt, Human
ucugaaaugcaaauuugacuga

SEQ ID NO: 285242 - RNA, 22 nt, Human
cuggcccuugacuuacagcagg

SEQ ID NO: 285243 - RNA, 22 nt, Human
agggccucuaccauccaagguu

SEQ ID NO: 285244 - RNA, 22 nt, Human
gccuccugaaaggaagagcucc

SEQ ID NO: 285245 - RNA, 23 nt, Human
cugguaaaucacuaaaauuacaa

SEQ ID NO: 285246 - RNA, 22 nt, Human
aggaucugugccucaacccaga

SEQ ID NO: 285247 - RNA, 22 nt, Human
cauuccugagggcccccuacuu

SEQ ID NO: 285248 - RNA, 22 nt, Human
aaguccuuuaauaucacauagu

SEQ ID NO: 285249 - RNA, 22 nt, Human
auucauaacggcaaaugucacc

SEQ ID NO: 285250 - RNA, 22 nt, Human
uauagauagacugacgauacag

SEQ ID NO: 285251 - RNA, 22 nt, Human
cuguggaaggccuguccugaaa

SEQ ID NO: 285252 - RNA, 22 nt, Human
ucagagagguuggugauaagaa

SEQ ID NO: 285253 - RNA, 22 nt, Human
gggccaggucggugaaugguca

SEQ ID NO: 285254 - RNA, 22 nt, Human
ugagccaggaguuugaggcugu

SEQ ID NO: 285255 - RNA, 21 nt, Human
uucucagaucgaguagugaga

SEQ ID NO: 285256 - RNA, 22 nt, Human
acaccuuugccccaagucauag

SEQ ID NO: 285257 - RNA, 22 nt, Human
auugaaaauauaauucuaggag

SEQ ID NO: 285258 - RNA, 22 nt, Human
cugggugaguauaggaaaggga

SEQ ID NO: 285259 - RNA, 22 nt, Human
agaaugcaguuugaaauaaggu

SEQ ID NO: 285260 - RNA, 22 nt, Human
aaagcaaacagaaccccaagcu

SEQ ID NO: 285261 - RNA, 21 nt, Human
auucaacuagaugauuauuuc

SEQ ID NO: 285262 - RNA, 22 nt, Human
ucuucuuccucauuuauacaua

SEQ ID NO: 285263 - RNA, 22 nt, Human
auauuuuggcaaaugucuagau

SEQ ID NO: 285264 - RNA, 22 nt, Human
guauuagguuggugcaaaagua

SEQ ID NO: 285265 - RNA, 22 nt, Human
cuuagugaggaaugaauuuguu

SEQ ID NO: 285266 - RNA, 22 nt, Human
aucugaagggaaguggaaggca

SEQ ID NO: 285267 - RNA, 22 nt, Human
uucuggguaacaaggcaagaau

SEQ ID NO: 285268 - RNA, 22 nt, Human
aggcuuagaaaggguaagugac

SEQ ID NO: 285269 - RNA, 21 nt, Human
ugcuauuuaauuuuucuguuc

SEQ ID NO: 285270 - RNA, 22 nt, Human
uucauucaagggguuccugauu

SEQ ID NO: 285271 - RNA, 22 nt, Human
ggaggugaucagaguuuugagg

SEQ ID NO: 285272 - RNA, 22 nt, Human
uccugaggcacaauccuagaau

SEQ ID NO: 285273 - RNA, 22 nt, Human
cagcugucuaaguugagcagga

SEQ ID NO: 285274 - RNA, 22 nt, Human
augaggaggucaggccuuacaa

SEQ ID NO: 285275 - RNA, 21 nt, Human
cauuagggcagaagcaggaag

SEQ ID NO: 285276 - RNA, 22 nt, Human
ucuuggaaguagaacacagucu

SEQ ID NO: 285277 - RNA, 20 nt, Human
uuccuggcucuaggaccuug

SEQ ID NO: 285278 - RNA, 22 nt, Human
acgugcaggaucugguuggcga

SEQ ID NO: 285279 - RNA, 22 nt, Human
uggugcagucauuggcccaggg

SEQ ID NO: 285280 - RNA, 22 nt, Human
gucaggaaaaauugauaauuuu

SEQ ID NO: 285281 - RNA, 22 nt, Human
agagagcaguggaucaccuagc

SEQ ID NO: 285282 - RNA, 22 nt, Human
uguauguauguauguauuuggg

SEQ ID NO: 285283 - RNA, 20 nt, Human
aggaggcaauguagauaagc

SEQ ID NO: 285284 - RNA, 22 nt, Human
caagauuugccaguggccaacu

SEQ ID NO: 285285 - RNA, 22 nt, Human
agcagguguagggcucuuugua

SEQ ID NO: 285286 - RNA, 22 nt, Human
aacucaguuacauauuagaaua

SEQ ID NO: 285287 - RNA, 22 nt, Human
uucuucuuuaucucaguauccu

SEQ ID NO: 285288 - RNA, 21 nt, Human
ccugggugggaccccucuucc

SEQ ID NO: 285289 - RNA, 22 nt, Human
ugcaggaaguuuccugaacuuu

SEQ ID NO: 285290 - RNA, 22 nt, Human
aaauauuguuuugguaagcuuc

SEQ ID NO: 285291 - RNA, 22 nt, Human
cagaugcagcaaaaugacaggc

SEQ ID NO: 285292 - RNA, 22 nt, Human
aaggaucugacagacuauagaa

SEQ ID NO: 285293 - RNA, 22 nt, Human
agggcuccgggccaccggccug

SEQ ID NO: 285294 - RNA, 22 nt, Human
ugagggagcacacacugaagug

SEQ ID NO: 285295 - RNA, 22 nt, Human
caccugccugcaggggcuccac

SEQ ID NO: 285296 - RNA, 22 nt, Human
ugcaaccugcacucugucuuua

SEQ ID NO: 285297 - RNA, 22 nt, Human
aguagcacaauuuugucccuaa

SEQ ID NO: 285298 - RNA, 23 nt, Human
gccaggcacaugguggacacgca

SEQ ID NO: 285299 - RNA, 22 nt, Human
uaggugucuugucacuaccguu

SEQ ID NO: 285300 - RNA, 22 nt, Human
cagacaugauguaagcagaggc

SEQ ID NO: 285301 - RNA, 22 nt, Human
cauuuauuggcauguaguaggu

SEQ ID NO: 285302 - RNA, 22 nt, Human
ccugugaccacucugguucugc

SEQ ID NO: 285303 - RNA, 22 nt, Human
gagaaaugcuagcuuaggaauc

SEQ ID NO: 285304 - RNA, 22 nt, Human
gcuguacauucugcacaggccc

SEQ ID NO: 285305 - RNA, 22 nt, Human
uaagaaacaugauacuuuuccu

SEQ ID NO: 285306 - RNA, 22 nt, Human
uccaggaacucuugauggugau

SEQ ID NO: 285307 - RNA, 20 nt, Human
acuccugguaacuuuuguga

SEQ ID NO: 285308 - RNA, 22 nt, Human
ucagggcugcagaagaggcagg

SEQ ID NO: 285309 - RNA, 17 nt, Human
cccaggccgccgggagc

SEQ ID NO: 285310 - RNA, 22 nt, Human
gagaaugggaaugaaaguagca

SEQ ID NO: 285311 - RNA, 22 nt, Human
gcagagugaagggagaggugug

SEQ ID NO: 285312 - RNA, 22 nt, Human
auuuuaguaccucaaguaucca

SEQ ID NO: 285313 - RNA, 22 nt, Human
caaaugauagagccgauuauca

SEQ ID NO: 285314 - RNA, 22 nt, Human
gccaggcacugcucuaagcccu

SEQ ID NO: 285315 - RNA, 22 nt, Human
aaaagucucucugaguaaaagu

SEQ ID NO: 285316 - RNA, 22 nt, Human
cugucucugauaagcucgaggg

SEQ ID NO: 285317 - RNA, 22 nt, Human
gccuuccuuuuaccaccagcca

SEQ ID NO: 285318 - RNA, 22 nt, Human
uuuguguuuguacaaugcacua

SEQ ID NO: 285319 - RNA, 23 nt, Human
aaugggugcaacuauccaugaca

SEQ ID NO: 285320 - RNA, 19 nt, Human
gggaccugacuaauuggca

SEQ ID NO: 285321 - RNA, 22 nt, Human
aucagagaaguuucacuggcau

SEQ ID NO: 285322 - RNA, 20 nt, Human
aggucugauuccagaaucag

SEQ ID NO: 285323 - RNA, 22 nt, Human
auggaagacagauaaggcagaa

SEQ ID NO: 285324 - RNA, 22 nt, Human
agaauaauacugaaaugcugaa

SEQ ID NO: 285325 - RNA, 22 nt, Human
agguaaaaugagucuccauuau

SEQ ID NO: 285326 - RNA, 22 nt, Human
uccuggcauuuacaaacccacc

SEQ ID NO: 285327 - RNA, 20 nt, Human
agcaccuguguagaagcauc

SEQ ID NO: 285328 - RNA, 22 nt, Human
agggaccugucaaugacaguua

SEQ ID NO: 285329 - RNA, 22 nt, Human
ccucccugcuccucaacuggca

SEQ ID NO: 285330 - RNA, 22 nt, Human
augugcccucuuagagucucug

SEQ ID NO: 285331 - RNA, 22 nt, Human
acagucuacuugagcuuguaua

SEQ ID NO: 285332 - RNA, 18 nt, Human
aguaaagcuuauuacaug

SEQ ID NO: 285333 - RNA, 22 nt, Human
gaggaaugucagcacaggccuc

SEQ ID NO: 285334 - RNA, 22 nt, Human
aaaguuguucaguaagaaacuc

SEQ ID NO: 285335 - RNA, 19 nt, Human
ggccccucucacaggaguu

SEQ ID NO: 285336 - RNA, 19 nt, Human
ccaggccuggcgucuccgc

SEQ ID NO: 285337 - RNA, 22 nt, Human
ucugguaacucagaagaaagga

SEQ ID NO: 285338 - RNA, 22 nt, Human
cagccaggcccccgagucguug

SEQ ID NO: 285339 - RNA, 22 nt, Human
agacaaauggaguaugagcaac

SEQ ID NO: 285340 - RNA, 22 nt, Human
ucaaauuauuuaggauagugcu

SEQ ID NO: 285341 - RNA, 22 nt, Human
uucacauuaucaggauuguuuc

SEQ ID NO: 285342 - RNA, 22 nt, Human
gcagggcucaacaggacacccc

SEQ ID NO: 285343 - RNA, 22 nt, Human
ucuucagagugaaagucuguga

SEQ ID NO: 285344 - RNA, 22 nt, Human
gcucagagaaauuauaggaauu

SEQ ID NO: 285345 - RNA, 22 nt, Human
cuuauuagaaagaaaagacaug

SEQ ID NO: 285346 - RNA, 22 nt, Human
gaucugaaucaauagaauaacu

SEQ ID NO: 285347 - RNA, 22 nt, Human
caggaacaauguaagucucauu

SEQ ID NO: 285348 - RNA, 23 nt, Human
aggaaagcauucauuuuuaccau

SEQ ID NO: 285349 - RNA, 22 nt, Human
aaggaggaauaaagagguggug

SEQ ID NO: 285350 - RNA, 22 nt, Human
ucccucucccuauugccuggag

SEQ ID NO: 285351 - RNA, 22 nt, Human
caggccuugucaagaaaaugcc

SEQ ID NO: 285352 - RNA, 21 nt, Human
uguuuuccaccuugaggcaag

SEQ ID NO: 285353 - RNA, 22 nt, Human
uccaugguuucagucuggcugg

SEQ ID NO: 285354 - RNA, 22 nt, Human
auuguacaugcagugagucauc

SEQ ID NO: 285355 - RNA, 22 nt, Human
cagggcucagggacugcagaaa

SEQ ID NO: 285356 - RNA, 22 nt, Human
auuauuaggugcucucugacaa

SEQ ID NO: 285357 - RNA, 22 nt, Human
uuccugugucccgggcacccug

SEQ ID NO: 285358 - RNA, 22 nt, Human
aacagagcauucugcacuacaa

SEQ ID NO: 285359 - RNA, 22 nt, Human
uuucuguuguauggcuucugca

SEQ ID NO: 285360 - RNA, 22 nt, Human
aaagcugcuuuaaacaucuaug

SEQ ID NO: 285361 - RNA, 22 nt, Human
cuuuucauuguuuguacaugca

SEQ ID NO: 285362 - RNA, 22 nt, Human
uugcagggucccagaggccugg

SEQ ID NO: 285363 - RNA, 22 nt, Human
ugguacaauggcaucuaucuau

SEQ ID NO: 285364 - RNA, 22 nt, Human
uuaggaagaaggaggcaguauu

SEQ ID NO: 285365 - RNA, 22 nt, Human
gccucuagggcuguugggaauu

SEQ ID NO: 285366 - RNA, 22 nt, Human
agagucaguaacauauauggua

SEQ ID NO: 285367 - RNA, 22 nt, Human
cacugucuucaguuucacugca

SEQ ID NO: 285368 - RNA, 22 nt, Human
aauugcuuguuucuuuaacuga

SEQ ID NO: 285369 - RNA, 22 nt, Human
auuugaauggcuuaacacaacg

SEQ ID NO: 285370 - RNA, 22 nt, Human
uguccugggucccugcuagaag

SEQ ID NO: 285371 - RNA, 22 nt, Human
cugaccaacauggugaaaccuu

SEQ ID NO: 285372 - RNA, 18 nt, Human
agcaggugcuguuucuuu

SEQ ID NO: 285373 - RNA, 22 nt, Human
cuaaucaucuuucucuuaaagc

SEQ ID NO: 285374 - RNA, 22 nt, Human
cauuuguuuauaaguuccccag

SEQ ID NO: 285375 - RNA, 22 nt, Human
uuucucucuuaaggaguuuaaa

SEQ ID NO: 285376 - RNA, 20 nt, Human
ugcagcacgggcccuuucca

SEQ ID NO: 285377 - RNA, 22 nt, Human
cuuccucccggcccaugcucug

SEQ ID NO: 285378 - RNA, 22 nt, Human
augccugcuuacuccaggugcu

SEQ ID NO: 285379 - RNA, 22 nt, Human
uaguuaaagcccuaaauugaua

SEQ ID NO: 285380 - RNA, 22 nt, Human
uuccuagggcagagccgcuggg

SEQ ID NO: 285381 - RNA, 22 nt, Human
aggaauguaguuugaguagaaa

SEQ ID NO: 285382 - RNA, 22 nt, Human
uaggaaaagucuagauugauga

SEQ ID NO: 285383 - RNA, 22 nt, Human
agucucaagggaugucucuaua

SEQ ID NO: 285384 - RNA, 22 nt, Human
uuauccaagcagaagcugcaca

SEQ ID NO: 285385 - RNA, 22 nt, Human
gauucccaugucugaggaggug

SEQ ID NO: 285386 - RNA, 22 nt, Human
uuucugcagcagacucagugug

SEQ ID NO: 285387 - RNA, 22 nt, Human
ucuaugaaaagucuauucauuc

SEQ ID NO: 285388 - RNA, 22 nt, Human
uauacacaaacaagggguuaag

SEQ ID NO: 285389 - RNA, 21 nt, Human
uuaaugcuaugcagaaaaucu

SEQ ID NO: 285390 - RNA, 22 nt, Human
uccuucaagugcaguaccugag

SEQ ID NO: 285391 - RNA, 22 nt, Human
ucagguggccaaaugggagcgc

SEQ ID NO: 285392 - RNA, 22 nt, Human
ggcuccacccugcuuccagaag

SEQ ID NO: 285393 - RNA, 22 nt, Human
aaggcauaugcuguguacaguu

SEQ ID NO: 285394 - RNA, 22 nt, Human
gccaggcagcuagcaaccccug

SEQ ID NO: 285395 - RNA, 22 nt, Human
ugacaagaauuugggacuguua

SEQ ID NO: 285396 - RNA, 22 nt, Human
ucuagaaagccaaauuaggaau

SEQ ID NO: 285397 - RNA, 22 nt, Human
uaaaauugcggugaauauuucc

SEQ ID NO: 285398 - RNA, 22 nt, Human
acuuggauauguucacuagacc

SEQ ID NO: 285399 - RNA, 22 nt, Human
agaaaugaagcaggaguuauua

SEQ ID NO: 285400 - RNA, 22 nt, Human
cucugaauggacacuccagugu

SEQ ID NO: 285401 - RNA, 22 nt, Human
agcaaucaccaccucuauauuu

SEQ ID NO: 285402 - RNA, 22 nt, Human
uuucauaauacuguacaugaaa

SEQ ID NO: 285403 - RNA, 22 nt, Human
cagugaggcucugcugagcggu

SEQ ID NO: 285404 - RNA, 22 nt, Human
ugaggcaaggcugaaugaaggc

SEQ ID NO: 285405 - RNA, 22 nt, Human
caauauauaggaacaacuuagg

SEQ ID NO: 285406 - RNA, 22 nt, Human
uacaaaugaguuguaugaacca

SEQ ID NO: 285407 - RNA, 22 nt, Human
agaggcaugcacagaugugcug

SEQ ID NO: 285408 - RNA, 22 nt, Human
cuuuuuguuguccacacuagga

SEQ ID NO: 285409 - RNA, 22 nt, Human
cacaggccugucucuuucuaac

SEQ ID NO: 285410 - RNA, 18 nt, Human
ucagcuuuugaaaaccaa

SEQ ID NO: 285411 - RNA, 22 nt, Human
uggcuuuacuuaaacugaauca

SEQ ID NO: 285412 - RNA, 22 nt, Human
agguggggcccaccaauuugca

SEQ ID NO: 285413 - RNA, 22 nt, Human
ccagagaggggaagggcuugcc

SEQ ID NO: 285414 - RNA, 22 nt, Human
ucuuuuuuuccugugcagagcu

SEQ ID NO: 285415 - RNA, 22 nt, Human
uguuuuccuccugguuucugcc

SEQ ID NO: 285416 - RNA, 22 nt, Human
gccaucuggcauugcagcaccu

SEQ ID NO: 285417 - RNA, 22 nt, Human
uccuggccuagaguuuguguuc

SEQ ID NO: 285418 - RNA, 22 nt, Human
gaggcacagucccgaggcaagg

SEQ ID NO: 285419 - RNA, 22 nt, Human
aggcacaggaaugucauccagu

SEQ ID NO: 285420 - RNA, 22 nt, Human
cacagcuggggaagcugaggcc

SEQ ID NO: 285421 - RNA, 22 nt, Human
gucucaagggggaacucacugu

SEQ ID NO: 285422 - RNA, 22 nt, Human
uguguucaucaugauaucaggu

SEQ ID NO: 285423 - RNA, 22 nt, Human
ggcaggcacaguaauacauguu

SEQ ID NO: 285424 - RNA, 22 nt, Human
auuuccuugcaaguuucuguaa

SEQ ID NO: 285425 - RNA, 20 nt, Human
guguuucaugugauacaaug

SEQ ID NO: 285426 - RNA, 22 nt, Human
aaggggccucacagaugggcuu

SEQ ID NO: 285427 - RNA, 22 nt, Human
aggacaguggacacuagucccu

SEQ ID NO: 285428 - RNA, 18 nt, Human
agacagacagguuugugc

SEQ ID NO: 285429 - RNA, 22 nt, Human
uauuuaaaauagugcuccagca

SEQ ID NO: 285430 - RNA, 22 nt, Human
ucuauugcagauggaugcccuc

SEQ ID NO: 285431 - RNA, 22 nt, Human
cuccuugguguaguacugagca

SEQ ID NO: 285432 - RNA, 22 nt, Human
cccugaggaaaggguggagggc

SEQ ID NO: 285433 - RNA, 22 nt, Human
caaauuaaugugucucaaaaua

SEQ ID NO: 285434 - RNA, 22 nt, Human
uauaaauuauuaggcugcuaaa

SEQ ID NO: 285435 - RNA, 22 nt, Human
ucuccuggagcaggaagguggg

SEQ ID NO: 285436 - RNA, 22 nt, Human
guguggcugauugacaugguca

SEQ ID NO: 285437 - RNA, 22 nt, Human
cagucuaacuucacagccugga

SEQ ID NO: 285438 - RNA, 22 nt, Human
uugcuguaguguucugauguca

SEQ ID NO: 285439 - RNA, 22 nt, Human
uuuccuguugccaucaagaaug

SEQ ID NO: 285440 - RNA, 22 nt, Human
aggguggcaccuggaagggaug

SEQ ID NO: 285441 - RNA, 22 nt, Human
agguggcuguauucagcuguaa

SEQ ID NO: 285442 - RNA, 22 nt, Human
gccuguuuguuaugucauggua

SEQ ID NO: 285443 - RNA, 22 nt, Human
ugcugucugcaacaguacuaca

SEQ ID NO: 285444 - RNA, 22 nt, Human
gagaaaaugucagacuuggucg

SEQ ID NO: 285445 - RNA, 22 nt, Human
acuguucacuagugaggguuga

SEQ ID NO: 285446 - RNA, 22 nt, Human
agagccagaccauugccgugca

SEQ ID NO: 285447 - RNA, 22 nt, Human
agcuccuggggguuccaagcag

SEQ ID NO: 285448 - RNA, 21 nt, Human
aaucugcuucccugugacuug

SEQ ID NO: 285449 - RNA, 22 nt, Human
uccaggagguagugcuuaauuu

SEQ ID NO: 285450 - RNA, 22 nt, Human
aauauucaaguuauucuuucuu

SEQ ID NO: 285451 - RNA, 22 nt, Human
cucuuagauauggagaauuacc

SEQ ID NO: 285452 - RNA, 22 nt, Human
uguguucauguauguauacaua

SEQ ID NO: 285453 - RNA, 22 nt, Human
cccuuccuugauuuuaacugga

SEQ ID NO: 285454 - RNA, 22 nt, Human
uuauauguuucuguuuggaggc

SEQ ID NO: 285455 - RNA, 22 nt, Human
gagugcauggacuacuggcuug

SEQ ID NO: 285456 - RNA, 22 nt, Human
uguggcugcucaggugcagacc

SEQ ID NO: 285457 - RNA, 22 nt, Human
uggcaggguuggccaccuuacc

SEQ ID NO: 285458 - RNA, 20 nt, Human
uucagagucagcaaaugcag

SEQ ID NO: 285459 - RNA, 21 nt, Human
gcugcaaauucuaacaauuau

SEQ ID NO: 285460 - RNA, 22 nt, Human
acuaucaacaucauugcucuag

SEQ ID NO: 285461 - RNA, 22 nt, Human
uuaguacaagagauuaauuacu

SEQ ID NO: 285462 - RNA, 22 nt, Human
ugggggagccuucacaguagcu

SEQ ID NO: 285463 - RNA, 23 nt, Human
auagucauguaaaauauuugaag

SEQ ID NO: 285464 - RNA, 22 nt, Human
aaaagcacuacaauuucgcuuc

SEQ ID NO: 285465 - RNA, 22 nt, Human
ugcaggguauccuugucucugc

SEQ ID NO: 285466 - RNA, 22 nt, Human
aaguccugugugcuuacacuug

SEQ ID NO: 285467 - RNA, 22 nt, Human
cuuuauguucaguacaaugcuu

SEQ ID NO: 285468 - RNA, 22 nt, Human
uaugcagugguaucauuuuaaa

SEQ ID NO: 285469 - RNA, 22 nt, Human
aaagcagacugauuugcaucac

SEQ ID NO: 285470 - RNA, 22 nt, Human
augugucuaauuccaggagcac

SEQ ID NO: 285471 - RNA, 22 nt, Human
uaauuuaugaugcaaagaaaag

SEQ ID NO: 285472 - RNA, 22 nt, Human
ggagcccuucuauuccauggag

SEQ ID NO: 285473 - RNA, 23 nt, Human
ucuguggccccuucgccccacuc

SEQ ID NO: 285474 - RNA, 22 nt, Human
ccacaggaccagaggagaucac

SEQ ID NO: 285475 - RNA, 23 nt, Human
acauucuugauucaggccuuagc

SEQ ID NO: 285476 - RNA, 22 nt, Human
aguguccuugauuccuguuguu

SEQ ID NO: 285477 - RNA, 22 nt, Human
auggaggaugugcagcaugggc

SEQ ID NO: 285478 - RNA, 22 nt, Human
uccaggcuccccugcgugcucc

SEQ ID NO: 285479 - RNA, 22 nt, Human
ugagaggagugauuguaaaauu

SEQ ID NO: 285480 - RNA, 23 nt, Human
ucuaaaauucaucauuuacguuc

SEQ ID NO: 285481 - RNA, 22 nt, Human
cuaaaugucauggaguuguaga

SEQ ID NO: 285482 - RNA, 22 nt, Human
uccugugagcagcacagagaca

SEQ ID NO: 285483 - RNA, 22 nt, Human
gacucagugauuugacaugccu

SEQ ID NO: 285484 - RNA, 22 nt, Human
acagagagguaaaauauauagu

SEQ ID NO: 285485 - RNA, 20 nt, Human
agaaggcaggagacaaaagg

SEQ ID NO: 285486 - RNA, 22 nt, Human
aacaaucaaguuucuaaaugac

SEQ ID NO: 285487 - RNA, 22 nt, Human
acaggccuggugcugcugacag

SEQ ID NO: 285488 - RNA, 22 nt, Human
auauuuugguagcucucaauga

SEQ ID NO: 285489 - RNA, 22 nt, Human
caggugguuaugaggaagguga

SEQ ID NO: 285490 - RNA, 22 nt, Human
augaaauguaugagucuggguu

SEQ ID NO: 285491 - RNA, 22 nt, Human
agucacacacugucaguucugc

SEQ ID NO: 285492 - RNA, 23 nt, Human
ucuccuggcugcacuguggccac

SEQ ID NO: 285493 - RNA, 22 nt, Human
ucaaucacguguuccauguucu

SEQ ID NO: 285494 - RNA, 22 nt, Human
aaugaucuggcucaggauauca

SEQ ID NO: 285495 - RNA, 22 nt, Human
auguccagccaaccacuggauu

SEQ ID NO: 285496 - RNA, 22 nt, Human
aaaagagaauccuguacagaga

SEQ ID NO: 285497 - RNA, 22 nt, Human
augugcccuuucugcuuugcag

SEQ ID NO: 285498 - RNA, 22 nt, Human
uacuaucucuucuaacuucaga

SEQ ID NO: 285499 - RNA, 22 nt, Human
agucucagaguaccugagggac

SEQ ID NO: 285500 - RNA, 22 nt, Human
uauuucagcaagaagaaugugg

SEQ ID NO: 285501 - RNA, 22 nt, Human
ggcaggcacugugcuaggcgcu

SEQ ID NO: 285502 - RNA, 22 nt, Human
gccaaaucuggauuuagcaaga

SEQ ID NO: 285503 - RNA, 22 nt, Human
uauuuccaagcugaauccaaug

SEQ ID NO: 285504 - RNA, 22 nt, Human
agaggaggcagcuuaacucagu

SEQ ID NO: 285505 - RNA, 22 nt, Human
cagagagagcaggaaaccuccg

SEQ ID NO: 285506 - RNA, 22 nt, Human
uuugaagacauauuguuacaua

SEQ ID NO: 285507 - RNA, 22 nt, Human
caaauacuggguaaguuaauuu

SEQ ID NO: 285508 - RNA, 22 nt, Human
caggcacaagaucggcuagaua

SEQ ID NO: 285509 - RNA, 22 nt, Human
gggucuggcaugcugagaugga

SEQ ID NO: 285510 - RNA, 23 nt, Human
cuccuggaggguccggcccugcc

SEQ ID NO: 285511 - RNA, 22 nt, Human
caggauggagggagggcuguua

SEQ ID NO: 285512 - RNA, 22 nt, Human
acuggacagaggaaauauggag

SEQ ID NO: 285513 - RNA, 22 nt, Human
agacagacuuugaucuggaugu

SEQ ID NO: 285514 - RNA, 22 nt, Human
auccaggaaggauggcauugag

SEQ ID NO: 285515 - RNA, 22 nt, Human
acuagaaacuaauggauuauua

SEQ ID NO: 285516 - RNA, 22 nt, Human
uccuggccacccgacagaaguc

SEQ ID NO: 285517 - RNA, 22 nt, Human
uauuuucauucugugugacugu

SEQ ID NO: 285518 - RNA, 22 nt, Human
ucucagacucuuuagugaaggu

SEQ ID NO: 285519 - RNA, 22 nt, Human
uuaaucugaaucaguaaacacu

SEQ ID NO: 285520 - RNA, 22 nt, Human
cacaaaguguuagaugccacuc

SEQ ID NO: 285521 - RNA, 22 nt, Human
ucugccagguggggagaggcca

SEQ ID NO: 285522 - RNA, 22 nt, Human
gagcaguggugguguguuagag

SEQ ID NO: 285523 - RNA, 22 nt, Human
uucucuuuucaccaguugcuaa

SEQ ID NO: 285524 - RNA, 19 nt, Human
augucacucauguucccug

SEQ ID NO: 285525 - RNA, 22 nt, Human
auauaauacaaccugcuaagug

SEQ ID NO: 285526 - RNA, 23 nt, Human
uucaggaaaugaauacagacaca

SEQ ID NO: 285527 - RNA, 22 nt, Human
auuagauuguaaauguuuucac

SEQ ID NO: 285528 - RNA, 22 nt, Human
ugaccauuugaucuacauucca

SEQ ID NO: 285529 - RNA, 22 nt, Human
uccaggcaugucugaguccuuc

SEQ ID NO: 285530 - RNA, 22 nt, Human
ucauucccccauaaugguauuu

SEQ ID NO: 285531 - RNA, 22 nt, Human
ucucuucauagugacacccauc

SEQ ID NO: 285532 - RNA, 22 nt, Human
aaugcacacauuugguacugaa

SEQ ID NO: 285533 - RNA, 22 nt, Human
aaaacaguuuaggcaucacagu

SEQ ID NO: 285534 - RNA, 22 nt, Human
ucagguguaucauggaguugaa

SEQ ID NO: 285535 - RNA, 22 nt, Human
ugcuagggauauaguggcgagu

SEQ ID NO: 285536 - RNA, 22 nt, Human
cauggcggucaggauguaggug

SEQ ID NO: 285537 - RNA, 22 nt, Human
aaauuauuaugccccucuauaa

SEQ ID NO: 285538 - RNA, 18 nt, Human
auauucaagaagacagag

SEQ ID NO: 285539 - RNA, 22 nt, Human
cuggagggcugcagcgaggcug

SEQ ID NO: 285540 - RNA, 22 nt, Human
ggcuggcuugccaagcucaggg

SEQ ID NO: 285541 - RNA, 22 nt, Human
gccucugucauagcucauguga

SEQ ID NO: 285542 - RNA, 22 nt, Human
acugaaaaagacaucuugguaa

SEQ ID NO: 285543 - RNA, 22 nt, Human
uuacaaagcguugagacaagua

SEQ ID NO: 285544 - RNA, 22 nt, Human
agccuucauaaucuugggcuuu

SEQ ID NO: 285545 - RNA, 22 nt, Human
guucuucagaggggaaagaacc

SEQ ID NO: 285546 - RNA, 22 nt, Human
caacuuuagcaauguuaguaua

SEQ ID NO: 285547 - RNA, 22 nt, Human
ccagguggacggcgaguacagg

SEQ ID NO: 285548 - RNA, 22 nt, Human
aguccaguguguucuggcagca

SEQ ID NO: 285549 - RNA, 22 nt, Human
acugagguuuacuugaaggaga

SEQ ID NO: 285550 - RNA, 22 nt, Human
augcaggauuagaaaguugccu

SEQ ID NO: 285551 - RNA, 23 nt, Human
aaacaagucucucaauggcuugc

SEQ ID NO: 285552 - RNA, 22 nt, Human
auacuucuuuagcauauugaac

SEQ ID NO: 285553 - RNA, 20 nt, Human
cugcaaaaugacauuaggaa

SEQ ID NO: 285554 - RNA, 22 nt, Human
ccuguucaaugcccuggcuuca

SEQ ID NO: 285555 - RNA, 22 nt, Human
gcagguggauuaucagaagugc

SEQ ID NO: 285556 - RNA, 22 nt, Human
uuaaaagaauccuguuauccuc

SEQ ID NO: 285557 - RNA, 22 nt, Human
ccagugugguagguccacaggu

SEQ ID NO: 285558 - RNA, 22 nt, Human
cugaggaggcuaauuugaggau

SEQ ID NO: 285559 - RNA, 22 nt, Human
agucucagccacacagaccuau

SEQ ID NO: 285560 - RNA, 22 nt, Human
uugguaaauuauuucuuccaau

SEQ ID NO: 285561 - RNA, 23 nt, Human
uucuggguugcugugcuuggaau

SEQ ID NO: 285562 - RNA, 22 nt, Human
ucauuuguucucauucucuacu

SEQ ID NO: 285563 - RNA, 22 nt, Human
ucucuuaauaaguaaauacuga

SEQ ID NO: 285564 - RNA, 22 nt, Human
aagugaaucuccuuucuuuauu

SEQ ID NO: 285565 - RNA, 22 nt, Human
uauacacaccuccaaagcagga

SEQ ID NO: 285566 - RNA, 19 nt, Human
ccagugucuagcgcacagc

SEQ ID NO: 285567 - RNA, 23 nt, Human
ugcuggcuuuuaucuggucccua

SEQ ID NO: 285568 - RNA, 22 nt, Human
acuccugggugcugaccagcgu

SEQ ID NO: 285569 - RNA, 22 nt, Human
uuucuggguuuaugucacagcu

SEQ ID NO: 285570 - RNA, 22 nt, Human
gcagcuuuaaaggaggcucuga

SEQ ID NO: 285571 - RNA, 22 nt, Human
gccaccaggagcccaguccaaa

SEQ ID NO: 285572 - RNA, 22 nt, Human
aauugcuuagagaauccaggua

SEQ ID NO: 285573 - RNA, 22 nt, Human
acagugcaaauaggacugucuu

SEQ ID NO: 285574 - RNA, 18 nt, Human
aucaaggaggggaagguc

SEQ ID NO: 285575 - RNA, 22 nt, Human
cuuggcuguaaaaucagaggcu

SEQ ID NO: 285576 - RNA, 22 nt, Human
agugucuguugaguuucaaaag

SEQ ID NO: 285577 - RNA, 22 nt, Human
ugucugggauguaauuccugcc

SEQ ID NO: 285578 - RNA, 22 nt, Human
uacccagggcuuuucugaugca

SEQ ID NO: 285579 - RNA, 22 nt, Human
auguuuugcuggauguuggcua

SEQ ID NO: 285580 - RNA, 18 nt, Human
ccugugacagaggcauca

SEQ ID NO: 285581 - RNA, 22 nt, Human
uuccugggugguccugguagag

SEQ ID NO: 285582 - RNA, 22 nt, Human
cuccaggcucguccaagaucga

SEQ ID NO: 285583 - RNA, 20 nt, Human
auacacaugcagacagaugc

SEQ ID NO: 285584 - RNA, 22 nt, Human
uaugauguguaccuaagucacc

SEQ ID NO: 285585 - RNA, 22 nt, Human
ccugcagguccccggaugcgca

SEQ ID NO: 285586 - RNA, 22 nt, Human
aaauggaucuguggaauacauu

SEQ ID NO: 285587 - RNA, 22 nt, Human
ugucucugaggugagggucagc

SEQ ID NO: 285588 - RNA, 22 nt, Human
uuguugcucuuguugccacaug

SEQ ID NO: 285589 - RNA, 22 nt, Human
aacucaguguguuucuuaguau

SEQ ID NO: 285590 - RNA, 22 nt, Human
cauuuguagcuauuuacuguau

SEQ ID NO: 285591 - RNA, 22 nt, Human
aagacacagcgaaauguuccug

SEQ ID NO: 285592 - RNA, 22 nt, Human
uuucucucugacugggagcuga

SEQ ID NO: 285593 - RNA, 22 nt, Human
cagaacagacuuaacagggcug

SEQ ID NO: 285594 - RNA, 22 nt, Human
agggcagcucucaccucuggcc

SEQ ID NO: 285595 - RNA, 22 nt, Human
cauuggaaugcauuugaagaga

SEQ ID NO: 285596 - RNA, 22 nt, Human
gcuggaggaggaagugugaggg

SEQ ID NO: 285597 - RNA, 22 nt, Human
aggccagggcacugcucuuuag

SEQ ID NO: 285598 - RNA, 22 nt, Human
cauuuguacagaacagcuuuau

SEQ ID NO: 285599 - RNA, 22 nt, Human
acauuuuacaguugucuggcua

SEQ ID NO: 285600 - RNA, 22 nt, Human
uucccucucuccagggcugccu

SEQ ID NO: 285601 - RNA, 22 nt, Human
cccagccuuccacccuggacua

SEQ ID NO: 285602 - RNA, 22 nt, Human
aauguuuugcauuaguuuucua

SEQ ID NO: 285603 - RNA, 22 nt, Human
uuccaggauggcaauaaugaau

SEQ ID NO: 285604 - RNA, 22 nt, Human
ugccuggaaggcccaugggaag

SEQ ID NO: 285605 - RNA, 22 nt, Human
uauugguauaggcauugaaacu

SEQ ID NO: 285606 - RNA, 22 nt, Human
acuggcagaacgugaugcgggu

SEQ ID NO: 285607 - RNA, 22 nt, Human
uuuuauagcugaauaguauucc

SEQ ID NO: 285608 - RNA, 22 nt, Human
acacaguugauugucacucagg

SEQ ID NO: 285609 - RNA, 22 nt, Human
gacugggguaaggugaggaggu

SEQ ID NO: 285610 - RNA, 22 nt, Human
gucuuuauauuuacuaaagaau

SEQ ID NO: 285611 - RNA, 22 nt, Human
ucugggaaccagugcggcuggg

SEQ ID NO: 285612 - RNA, 22 nt, Human
gguggggccugcuccagcggcc

SEQ ID NO: 285613 - RNA, 22 nt, Human
aggcucagccugggccuagagc

SEQ ID NO: 285614 - RNA, 22 nt, Human
ucccagggggaugaacacugcc

SEQ ID NO: 285615 - RNA, 22 nt, Human
ccuccugguugcaaugaaaugg

SEQ ID NO: 285616 - RNA, 22 nt, Human
cuccagggaugagacagaguag

SEQ ID NO: 285617 - RNA, 22 nt, Human
gccuggcaauggccucaggaag

SEQ ID NO: 285618 - RNA, 22 nt, Human
uuauguacucugcaauguuuga

SEQ ID NO: 285619 - RNA, 22 nt, Human
agccuugagcaguucacuuggu

SEQ ID NO: 285620 - RNA, 22 nt, Human
auuugaagucuucaugauuucu

SEQ ID NO: 285621 - RNA, 20 nt, Human
ucauguguguccuacagaga

SEQ ID NO: 285622 - RNA, 22 nt, Human
ucugaaaugaacucuugaacuu

SEQ ID NO: 285623 - RNA, 22 nt, Human
gucaaaaaguagucauuucugu

SEQ ID NO: 285624 - RNA, 22 nt, Human
auacaacuuuacaugcaauucc

SEQ ID NO: 285625 - RNA, 22 nt, Human
uggcaaaggcgcucacaugccu

SEQ ID NO: 285626 - RNA, 22 nt, Human
cucccaguguuguuuucugaug

SEQ ID NO: 285627 - RNA, 22 nt, Human
ccugcaggggagagacuucuag

SEQ ID NO: 285628 - RNA, 19 nt, Human
ugagacagaagaugagccu

SEQ ID NO: 285629 - RNA, 15 nt, Human
gcaggcaggucaccu

SEQ ID NO: 285630 - RNA, 22 nt, Human
uaggaaaugcuccauugcauaa

SEQ ID NO: 285631 - RNA, 22 nt, Human
ucauuguauuaaaauauugguu

SEQ ID NO: 285632 - RNA, 23 nt, Human
uccaggagcaugcuggcuggcga

SEQ ID NO: 285633 - RNA, 22 nt, Human
aaaaguaauugcaauuuuguag

SEQ ID NO: 285634 - RNA, 22 nt, Human
cagagacaccccagaaaauaag

SEQ ID NO: 285635 - RNA, 22 nt, Human
uauguucaugucaaacaaaugc

SEQ ID NO: 285636 - RNA, 22 nt, Human
ucgggcucgcucuccuagcgga

SEQ ID NO: 285637 - RNA, 20 nt, Human
caccacagaauuggggacag

SEQ ID NO: 285638 - RNA, 22 nt, Human
uugcuuuaucucuuaugccuca

SEQ ID NO: 285639 - RNA, 20 nt, Human
uuaaaaagagucacaggaga

SEQ ID NO: 285640 - RNA, 22 nt, Human
uguucucuuuuccugcugagcc

SEQ ID NO: 285641 - RNA, 22 nt, Human
cccugcagacgucuugaugccu

SEQ ID NO: 285642 - RNA, 22 nt, Human
cauuuguaauacugacuugcag

SEQ ID NO: 285643 - RNA, 22 nt, Human
uggcacagaaaaaugcuccauu

SEQ ID NO: 285644 - RNA, 22 nt, Human
uuacuuuugcaccaaacuaaua

SEQ ID NO: 285645 - RNA, 22 nt, Human
ggguaccaagcugcuugggggc

SEQ ID NO: 285646 - RNA, 22 nt, Human
cugggcacagacccccugggcc

SEQ ID NO: 285647 - RNA, 22 nt, Human
uggguccuuuuuggacuucuuc

SEQ ID NO: 285648 - RNA, 22 nt, Human
cuggguguucaggagcugggcu

SEQ ID NO: 285649 - RNA, 22 nt, Human
ucaucucagagagguauguuag

SEQ ID NO: 285650 - RNA, 22 nt, Human
caggcacaggggaaugucuuuu

SEQ ID NO: 285651 - RNA, 22 nt, Human
ucagcuuugccaccagcuguaa

SEQ ID NO: 285652 - RNA, 22 nt, Human
gaaucauuggaaccacauccaa

SEQ ID NO: 285653 - RNA, 22 nt, Human
acucuuauuuugaaguaauaau

SEQ ID NO: 285654 - RNA, 20 nt, Human
uccaugaguuagagacuaua

SEQ ID NO: 285655 - RNA, 22 nt, Human
aaacacaccuuuggaacuguga

SEQ ID NO: 285656 - RNA, 22 nt, Human
uguucaaaugaucuucuuaaau

SEQ ID NO: 285657 - RNA, 22 nt, Human
caggcuuuuucugcuguccucu

SEQ ID NO: 285658 - RNA, 22 nt, Human
ucagagaaucucuccuuaguuu

SEQ ID NO: 285659 - RNA, 17 nt, Human
agucagaggaguaucug

SEQ ID NO: 285660 - RNA, 19 nt, Human
gcagugucaugguaggagc

SEQ ID NO: 285661 - RNA, 22 nt, Human
uaauuccuagaaauuauucuca

SEQ ID NO: 285662 - RNA, 22 nt, Human
uaguuuugaggauuauauguga

SEQ ID NO: 285663 - RNA, 22 nt, Human
aauuuguuagcauacucuaguu

SEQ ID NO: 285664 - RNA, 22 nt, Human
caaauucucacccuguuugauu

SEQ ID NO: 285665 - RNA, 19 nt, Human
ggcugugguggugccuugc

SEQ ID NO: 285666 - RNA, 22 nt, Human
ucuggagaacuugcaagaggau

SEQ ID NO: 285667 - RNA, 22 nt, Human
ucuggcaguaauaggggagaga

SEQ ID NO: 285668 - RNA, 22 nt, Human
auugucuuuaaaaauauacaac

SEQ ID NO: 285669 - RNA, 21 nt, Human
aguguccuugaucuugccuug

SEQ ID NO: 285670 - RNA, 22 nt, Human
cuguucagaaaaaaucuucaug

SEQ ID NO: 285671 - RNA, 22 nt, Human
uuccugcuuccuggccucacaa

SEQ ID NO: 285672 - RNA, 22 nt, Human
uacauguacaugcauagguaga

SEQ ID NO: 285673 - RNA, 22 nt, Human
cauuucuagggaucauaaagua

SEQ ID NO: 285674 - RNA, 22 nt, Human
uuggaauuugcuucagcuaaua

SEQ ID NO: 285675 - RNA, 22 nt, Human
caggaucugcccaggccuuugg

SEQ ID NO: 285676 - RNA, 22 nt, Human
gaugugucuauucaacaugaaa

SEQ ID NO: 285677 - RNA, 22 nt, Human
ccaugugucgggccugcagugg

SEQ ID NO: 285678 - RNA, 22 nt, Human
acaauagucaaugcacgucauu

SEQ ID NO: 285679 - RNA, 22 nt, Human
ugcucagagcuccagcucuccu

SEQ ID NO: 285680 - RNA, 22 nt, Human
ucacaaaugaggaaaucgagca

SEQ ID NO: 285681 - RNA, 22 nt, Human
ccaggcucuguuccccgaggag

SEQ ID NO: 285682 - RNA, 22 nt, Human
ccuggcagcuguuuggcuuggc

SEQ ID NO: 285683 - RNA, 22 nt, Human
cccaaggaagacgcuugugaua

SEQ ID NO: 285684 - RNA, 22 nt, Human
agcucugacauugauucucagc

SEQ ID NO: 285685 - RNA, 22 nt, Human
uaauuauuugaagacauuagag

SEQ ID NO: 285686 - RNA, 22 nt, Human
cuauuagacacaauuagugauu

SEQ ID NO: 285687 - RNA, 22 nt, Human
caagauuugacuucgugguuug

SEQ ID NO: 285688 - RNA, 22 nt, Human
uuaccugugucaguauaugaga

SEQ ID NO: 285689 - RNA, 15 nt, Human
uuggaggauguagua

SEQ ID NO: 285690 - RNA, 22 nt, Human
gcacagagcuggcccuccaggc

SEQ ID NO: 285691 - RNA, 22 nt, Human
gugcaguggcagauccuagcuc

SEQ ID NO: 285692 - RNA, 22 nt, Human
aguagaaauguaagaaggauua

SEQ ID NO: 285693 - RNA, 22 nt, Human
guacauuucucccaacacuaaa

SEQ ID NO: 285694 - RNA, 22 nt, Human
uuccugaggcucaucggagucg

SEQ ID NO: 285695 - RNA, 22 nt, Human
cugcaaaaguaauuggggcuuu

SEQ ID NO: 285696 - RNA, 22 nt, Human
gccuuaggggucagacagagcu

SEQ ID NO: 285697 - RNA, 18 nt, Human
cccucuccugcuaguggg

SEQ ID NO: 285698 - RNA, 23 nt, Human
gaauucuuaaggucacuaaaguc

SEQ ID NO: 285699 - RNA, 22 nt, Human
uuuagccaacuauaugacuagu

SEQ ID NO: 285700 - RNA, 22 nt, Human
acuaaauagccucugguaguug

SEQ ID NO: 285701 - RNA, 22 nt, Human
uacuagaagcuguaauuuuuca

SEQ ID NO: 285702 - RNA, 22 nt, Human
accuguuuggaggagguguuag

SEQ ID NO: 285703 - RNA, 22 nt, Human
ucuucuuugaaucauagugacc

SEQ ID NO: 285704 - RNA, 22 nt, Human
gggugggaucuguggagccuca

SEQ ID NO: 285705 - RNA, 22 nt, Human
cuugaaucuggcuuugccacuu

SEQ ID NO: 285706 - RNA, 22 nt, Human
acauugugauccgacugauuaa

SEQ ID NO: 285707 - RNA, 22 nt, Human
ggaauguugucauuuacauuau

SEQ ID NO: 285708 - RNA, 22 nt, Human
aguuuacaugacguguauuuca

SEQ ID NO: 285709 - RNA, 22 nt, Human
uucuguguugugacauucuaga

SEQ ID NO: 285710 - RNA, 22 nt, Human
cugggucuggcuacugcuuccu

SEQ ID NO: 285711 - RNA, 22 nt, Human
aaauuucuggaagugucagagu

SEQ ID NO: 285712 - RNA, 22 nt, Human
aacaagucuuugguuuuggcua

SEQ ID NO: 285713 - RNA, 22 nt, Human
ggcaguggcuguagucucuugg

SEQ ID NO: 285714 - RNA, 22 nt, Human
uggucaaagaccaggaaaugcu

SEQ ID NO: 285715 - RNA, 18 nt, Human
uggcaggggcaguacgcc

SEQ ID NO: 285716 - RNA, 22 nt, Human
cacaaaaguaggaggcaggcgg

SEQ ID NO: 285717 - RNA, 22 nt, Human
aggaggcuguggagcacuccau

SEQ ID NO: 285718 - RNA, 22 nt, Human
ccuccagggccccucucacugg

SEQ ID NO: 285719 - RNA, 22 nt, Human
caguuuuauugguugaaaucug

SEQ ID NO: 285720 - RNA, 22 nt, Human
ucuguggcuuucguguaagaug

SEQ ID NO: 285721 - RNA, 22 nt, Human
auuaagcuccaaguugcucuga

SEQ ID NO: 285722 - RNA, 22 nt, Human
uuauuugcccauguuuagcaga

SEQ ID NO: 285723 - RNA, 22 nt, Human
uucucuuuugugaugugagaug

SEQ ID NO: 285724 - RNA, 22 nt, Human
ugucccagucaaggcugucauc

SEQ ID NO: 285725 - RNA, 22 nt, Human
ccaggaggcucuugucccuggu

SEQ ID NO: 285726 - RNA, 22 nt, Human
uguucuuugccagugauuuaau

SEQ ID NO: 285727 - RNA, 22 nt, Human
aauuuuacuaaucugaguguga

SEQ ID NO: 285728 - RNA, 22 nt, Human
cuucccuuucuggugacuucuc

SEQ ID NO: 285729 - RNA, 22 nt, Human
gcuggcuugacagaggccuggg

SEQ ID NO: 285730 - RNA, 22 nt, Human
agacagacguagugugagagua

SEQ ID NO: 285731 - RNA, 22 nt, Human
uuuuuuggauaauaaacgaucu

SEQ ID NO: 285732 - RNA, 22 nt, Human
gagggcuccucacauucucuau

SEQ ID NO: 285733 - RNA, 18 nt, Human
agugcaugcuaggggaag

SEQ ID NO: 285734 - RNA, 22 nt, Human
cuuugcugagcugguuguucaa

SEQ ID NO: 285735 - RNA, 22 nt, Human
gaaggaggucugcauucuacag

SEQ ID NO: 285736 - RNA, 22 nt, Human
cccugagaugccucacccuagu

SEQ ID NO: 285737 - RNA, 22 nt, Human
uguguccuccagggagauguaa

SEQ ID NO: 285738 - RNA, 22 nt, Human
gggcagguggcaaagccagagg

SEQ ID NO: 285739 - RNA, 17 nt, Human
ugcucaaauacuuuuga

SEQ ID NO: 285740 - RNA, 19 nt, Human
ugugaccccagacaagcug

SEQ ID NO: 285741 - RNA, 22 nt, Human
uuuuuuaucuaugguaguacca

SEQ ID NO: 285742 - RNA, 22 nt, Human
uacauuccuucguuuagagauu

SEQ ID NO: 285743 - RNA, 22 nt, Human
agacagugauggacaggcagac

SEQ ID NO: 285744 - RNA, 22 nt, Human
ugggcuccaauuuguccuuuca

SEQ ID NO: 285745 - RNA, 22 nt, Human
auuuuacuacuccaauuaauga

SEQ ID NO: 285746 - RNA, 22 nt, Human
uugcugggcucuucaacacaca

SEQ ID NO: 285747 - RNA, 22 nt, Human
ugagguggguggcuucuguuau

SEQ ID NO: 285748 - RNA, 21 nt, Human
guagauaaagcauuuucauua

SEQ ID NO: 285749 - RNA, 22 nt, Human
auuuuaguuuuagcauccaugc

SEQ ID NO: 285750 - RNA, 22 nt, Human
uuggaggacuaguuaagagacc

SEQ ID NO: 285751 - RNA, 22 nt, Human
ccuccuggaggcucuaagggag

SEQ ID NO: 285752 - RNA, 22 nt, Human
guacaaauacauucugaaggua

SEQ ID NO: 285753 - RNA, 19 nt, Human
aauguuuaagagaaaaagg

SEQ ID NO: 285754 - RNA, 20 nt, Human
uuucacaucugucccuuuaa

SEQ ID NO: 285755 - RNA, 18 nt, Human
ccuggcagccaugcgcgc

SEQ ID NO: 285756 - RNA, 22 nt, Human
gagcaaaauaaauucugacaaa

SEQ ID NO: 285757 - RNA, 22 nt, Human
aaaaaccuuucauugcaaaugu

SEQ ID NO: 285758 - RNA, 21 nt, Human
aggcuuggauagguuauguga

SEQ ID NO: 285759 - RNA, 22 nt, Human
gguccuuugaaagggguguguc

SEQ ID NO: 285760 - RNA, 22 nt, Human
gcuggagguagggagguccugu

SEQ ID NO: 285761 - RNA, 22 nt, Human
gggacauggaggcgcgcaggca

SEQ ID NO: 285762 - RNA, 22 nt, Human
cuccugugaggcuuaagcccag

SEQ ID NO: 285763 - RNA, 22 nt, Human
caggagaugacagggaagaacc

SEQ ID NO: 285764 - RNA, 22 nt, Human
ggucccaugacugacacagcag

SEQ ID NO: 285765 - RNA, 22 nt, Human
uccugcugccauuucaagugcu

SEQ ID NO: 285766 - RNA, 22 nt, Human
gcuuccaguaaguugcugccau

SEQ ID NO: 285767 - RNA, 19 nt, Human
ccuggcucugagcccagcc

SEQ ID NO: 285768 - RNA, 22 nt, Human
cugaggagcaaccccgugcccu

SEQ ID NO: 285769 - RNA, 22 nt, Human
gccuguuuggaaucuguuuaau

SEQ ID NO: 285770 - RNA, 22 nt, Human
gcaggugguggggcuaugaucu

SEQ ID NO: 285771 - RNA, 22 nt, Human
aaauguuucuacuugugagcau

SEQ ID NO: 285772 - RNA, 22 nt, Human
cuuucauaaaggaaaugaugag

SEQ ID NO: 285773 - RNA, 22 nt, Human
ugcacuucaaaaaugucacuga

SEQ ID NO: 285774 - RNA, 22 nt, Human
ggaauguuuuagcuugacuuuu

SEQ ID NO: 285775 - RNA, 22 nt, Human
gaauguuauuggacagcagugg

SEQ ID NO: 285776 - RNA, 22 nt, Human
uuuuggcuccagugguuugugc

SEQ ID NO: 285777 - RNA, 22 nt, Human
ucuguggcuucuauuuaacuuu

SEQ ID NO: 285778 - RNA, 22 nt, Human
auugcugaaaugaaaggauaug

SEQ ID NO: 285779 - RNA, 22 nt, Human
acuuagauuuccuuacugggug

SEQ ID NO: 285780 - RNA, 22 nt, Human
aucuuguuaaagugcagauuuu

SEQ ID NO: 285781 - RNA, 22 nt, Human
cagggcagaaggcacucuacuc

SEQ ID NO: 285782 - RNA, 21 nt, Human
ugucagagcuuguaggacauu

SEQ ID NO: 285783 - RNA, 19 nt, Human
gacauuccugacacuggcu

SEQ ID NO: 285784 - RNA, 22 nt, Human
auggguuuauagguggacuuuu

SEQ ID NO: 285785 - RNA, 22 nt, Human
caugaaggaauuaagguaagga

SEQ ID NO: 285786 - RNA, 22 nt, Human
ugaaagcagugauuucuccuuc

SEQ ID NO: 285787 - RNA, 22 nt, Human
cuuucauucuuagauauuagug

SEQ ID NO: 285788 - RNA, 22 nt, Human
aaauuguugaucuacaguaagg

SEQ ID NO: 285789 - RNA, 20 nt, Human
auagacaaagacaugccaga

SEQ ID NO: 285790 - RNA, 22 nt, Human
uggcaggugaaguuguuaggga

SEQ ID NO: 285791 - RNA, 22 nt, Human
uugcagcuuagugauguuaucu

SEQ ID NO: 285792 - RNA, 22 nt, Human
aaggugucggcagagccgcuuc

SEQ ID NO: 285793 - RNA, 22 nt, Human
ucagguguguggcucuggacca

SEQ ID NO: 285794 - RNA, 22 nt, Human
gguguccugggcaggcagcuga

SEQ ID NO: 285795 - RNA, 22 nt, Human
uucauguauuuaucauguaaau

SEQ ID NO: 285796 - RNA, 22 nt, Human
uguaaaauaauucuccauguuu

SEQ ID NO: 285797 - RNA, 22 nt, Human
aggcuuucgaugaacgcuugcu

SEQ ID NO: 285798 - RNA, 22 nt, Human
aucuuguuaaagugcagauucu

SEQ ID NO: 285799 - RNA, 22 nt, Human
uuccagaaaaaaauguauaucu

SEQ ID NO: 285800 - RNA, 23 nt, Human
aaugaacugagaaucuguacagu

SEQ ID NO: 285801 - RNA, 22 nt, Human
cuguugcugagguucaaggguc

SEQ ID NO: 285802 - RNA, 22 nt, Human
aaaauagaugaaaggaagucug

SEQ ID NO: 285803 - RNA, 22 nt, Human
gacaggugugaugauuuaggcu

SEQ ID NO: 285804 - RNA, 23 nt, Human
auucuucauuaucuucuagaaaa

SEQ ID NO: 285805 - RNA, 22 nt, Human
cugccuggguucaaguccuguu

SEQ ID NO: 285806 - RNA, 22 nt, Human
aucaaguuuucuuaguugacug

SEQ ID NO: 285807 - RNA, 22 nt, Human
gaggccuggguuaccuacucgu

SEQ ID NO: 285808 - RNA, 22 nt, Human
aguuuaugucuuuacuucagcu

SEQ ID NO: 285809 - RNA, 22 nt, Human
gcuggcagguaaagccccgggg

SEQ ID NO: 285810 - RNA, 22 nt, Human
aaaaaauuaucauaguuccuga

SEQ ID NO: 285811 - RNA, 22 nt, Human
uggacaugaccucgagcgagau

SEQ ID NO: 285812 - RNA, 17 nt, Human
aggcagguaagaguuau

SEQ ID NO: 285813 - RNA, 22 nt, Human
aagaaagugcuuuguaaauuau

SEQ ID NO: 285814 - RNA, 22 nt, Human
gaggggcacaguaaaggguccc

SEQ ID NO: 285815 - RNA, 20 nt, Human
agguauaagaaaugugauuu

SEQ ID NO: 285816 - RNA, 22 nt, Human
gcuuuuacaagagccagagagg

SEQ ID NO: 285817 - RNA, 22 nt, Human
aaaaaaucagaucuuugguuaa

SEQ ID NO: 285818 - RNA, 22 nt, Human
guuagggaagcgcuguguucuu

SEQ ID NO: 285819 - RNA, 22 nt, Human
uuucaggauuuuaugagauagu

SEQ ID NO: 285820 - RNA, 22 nt, Human
agccagagcagggaauuggaca

SEQ ID NO: 285821 - RNA, 22 nt, Human
agaggccuaauugcuacccuuu

SEQ ID NO: 285822 - RNA, 22 nt, Human
acuccaggcaucugcuucugcu

SEQ ID NO: 285823 - RNA, 22 nt, Human
uuaagacauucagauauuucua

SEQ ID NO: 285824 - RNA, 22 nt, Human
agguggucuuaaacugcucugg

SEQ ID NO: 285825 - RNA, 22 nt, Human
ccaggcuugguguguggucagg

SEQ ID NO: 285826 - RNA, 22 nt, Human
cguguccuuuuagcuucagguc

SEQ ID NO: 285827 - RNA, 22 nt, Human
aggggagguguccccaaaucuc

SEQ ID NO: 285828 - RNA, 22 nt, Human
uuucuuucucguaaacuuaguu

SEQ ID NO: 285829 - RNA, 22 nt, Human
uccaggaaagcacugggcuggg

SEQ ID NO: 285830 - RNA, 21 nt, Human
acagugugcuucucucccucc

SEQ ID NO: 285831 - RNA, 22 nt, Human
ucucacugggucacagcagagg

SEQ ID NO: 285832 - RNA, 22 nt, Human
ugcuggagaugaaagggcccug

SEQ ID NO: 285833 - RNA, 21 nt, Human
aguaguuuagcacaggguuug

SEQ ID NO: 285834 - RNA, 17 nt, Human
caucaaagaaauuucca

SEQ ID NO: 285835 - RNA, 22 nt, Human
agcaggugucggcgagggucuu

SEQ ID NO: 285836 - RNA, 22 nt, Human
ucauuuugccugccauuugagu

SEQ ID NO: 285837 - RNA, 22 nt, Human
aucuuuagugugaauuuauuga

SEQ ID NO: 285838 - RNA, 22 nt, Human
aguuuccucaucuguaaaauga

SEQ ID NO: 285839 - RNA, 22 nt, Human
ugccuggcuaauuuuuguaucc

SEQ ID NO: 285840 - RNA, 22 nt, Human
uccaggcaugguguaauuuugc

SEQ ID NO: 285841 - RNA, 22 nt, Human
aaggcauagucuuuaaguucug

SEQ ID NO: 285842 - RNA, 22 nt, Human
gggaaagaccuuccuggggugu

SEQ ID NO: 285843 - RNA, 22 nt, Human
ucaauucuagagccuuacauug

SEQ ID NO: 285844 - RNA, 22 nt, Human
agugugaguuugguugagacuu

SEQ ID NO: 285845 - RNA, 21 nt, Human
agacaggucagggagagguga

SEQ ID NO: 285846 - RNA, 22 nt, Human
cucugaaaguuagagaaaauag

SEQ ID NO: 285847 - RNA, 22 nt, Human
ugccagaacagcucaucuggcc

SEQ ID NO: 285848 - RNA, 22 nt, Human
acauguguacuuuuaaggaugu

SEQ ID NO: 285849 - RNA, 23 nt, Human
acuccccagucucuucuugccaa

SEQ ID NO: 285850 - RNA, 22 nt, Human
ucugaaauggcgauggccguug

SEQ ID NO: 285851 - RNA, 22 nt, Human
acacaaauuguaggauaauugc

SEQ ID NO: 285852 - RNA, 22 nt, Human
gagcuccuggauugcuccuagg

SEQ ID NO: 285853 - RNA, 22 nt, Human
gcugcgguggcuggcgauggga

SEQ ID NO: 285854 - RNA, 22 nt, Human
aauagcuuuggucaccaucugg

SEQ ID NO: 285855 - RNA, 22 nt, Human
ggaggaaaugaaaggaggguuu

SEQ ID NO: 285856 - RNA, 22 nt, Human
auacuucuggugacaaagucuu

SEQ ID NO: 285857 - RNA, 22 nt, Human
uuuguagcagcaugauuuauaa

SEQ ID NO: 285858 - RNA, 22 nt, Human
agcagggcuguguagguaauga

SEQ ID NO: 285859 - RNA, 22 nt, Human
cagggcuccccgcaccgcagcc

SEQ ID NO: 285860 - RNA, 22 nt, Human
agcccagaggcugggcgugcau

SEQ ID NO: 285861 - RNA, 22 nt, Human
gagggaaaauaaaauugcagua

SEQ ID NO: 285862 - RNA, 22 nt, Human
ucugucuucaucagcaugugau

SEQ ID NO: 285863 - RNA, 22 nt, Human
agguaaaauagauaguauuucu

SEQ ID NO: 285864 - RNA, 22 nt, Human
aacaugauuuaguauaaugcag

SEQ ID NO: 285865 - RNA, 22 nt, Human
ccccaggcagggccuaacagag

SEQ ID NO: 285866 - RNA, 22 nt, Human
aaauuagauaugugugagacuc

SEQ ID NO: 285867 - RNA, 22 nt, Human
aggacacacugcaagagccugg

SEQ ID NO: 285868 - RNA, 22 nt, Human
aucaagaaaagugcuuucggcu

SEQ ID NO: 285869 - RNA, 22 nt, Human
ccugggucuugguucaugcucu

SEQ ID NO: 285870 - RNA, 17 nt, Human
uacauguguaucugauu

SEQ ID NO: 285871 - RNA, 22 nt, Human
gcaguccaaaguggcucucacc

SEQ ID NO: 285872 - RNA, 17 nt, Human
acauuuccuaacugaag

SEQ ID NO: 285873 - RNA, 22 nt, Human
ugcacccauagcacacacuccu

SEQ ID NO: 285874 - RNA, 22 nt, Human
cuucuauucacuggucacaguu

SEQ ID NO: 285875 - RNA, 21 nt, Human
uucccagcaccuagcacaggu

SEQ ID NO: 285876 - RNA, 22 nt, Human
ggaauguuugcucccuucaggg

SEQ ID NO: 285877 - RNA, 22 nt, Human
uccugaagucacaggcucugag

SEQ ID NO: 285878 - RNA, 22 nt, Human
ccuuuggucaccuccacucuua

SEQ ID NO: 285879 - RNA, 22 nt, Human
aucuguucuugugucaguaauu

SEQ ID NO: 285880 - RNA, 21 nt, Human
auaagcaugcugauuacauuu

SEQ ID NO: 285881 - RNA, 22 nt, Human
aggcagcuggaaaacuccaggc

SEQ ID NO: 285882 - RNA, 23 nt, Human
cagaccuuucuguaucaguuauc

SEQ ID NO: 285883 - RNA, 22 nt, Human
gaggccagaaugagcugaaugc

SEQ ID NO: 285884 - RNA, 22 nt, Human
aagccuuccugagugcaaggcc

SEQ ID NO: 285885 - RNA, 21 nt, Human
ccugugccaaaguguguuagg

SEQ ID NO: 285886 - RNA, 22 nt, Human
caaggaggaagaugcaggggac

SEQ ID NO: 285887 - RNA, 22 nt, Human
gacuccuggcuuucccucuuag

SEQ ID NO: 285888 - RNA, 22 nt, Human
uguuccugguuccugcaugaug

SEQ ID NO: 285889 - RNA, 22 nt, Human
cuuccccaggaccucugcuaaa

SEQ ID NO: 285890 - RNA, 22 nt, Human
agggcucccgcgguguccggga

SEQ ID NO: 285891 - RNA, 22 nt, Human
uuuuaccugaaccacacaguau

SEQ ID NO: 285892 - RNA, 22 nt, Human
ggagacucggguucuagccuug

SEQ ID NO: 285893 - RNA, 22 nt, Human
ucagggcaagauugguuaauaa

SEQ ID NO: 285894 - RNA, 22 nt, Human
cgacugucauacacaagacaug

SEQ ID NO: 285895 - RNA, 22 nt, Human
aauucauugccagaaucuauga

SEQ ID NO: 285896 - RNA, 22 nt, Human
ccagugugauuguugcaagaau

SEQ ID NO: 285897 - RNA, 22 nt, Human
gucuuuauuugagauugucauu

SEQ ID NO: 285898 - RNA, 22 nt, Human
uccacccccagacagcugguga

SEQ ID NO: 285899 - RNA, 22 nt, Human
cucagggugcagcacaguuccu

SEQ ID NO: 285900 - RNA, 22 nt, Human
ugguuccucaagcgcuggcggc

SEQ ID NO: 285901 - RNA, 22 nt, Human
ucagacagaaagaugaguaugg

SEQ ID NO: 285902 - RNA, 22 nt, Human
acaacaaucuacccuagcuucu

SEQ ID NO: 285903 - RNA, 22 nt, Human
auaguuuuauagauauugugua

SEQ ID NO: 285904 - RNA, 22 nt, Human
cauauuugguauaacuuaagca

SEQ ID NO: 285905 - RNA, 22 nt, Human
ugcauaaacagauacuucaugu

SEQ ID NO: 285906 - RNA, 22 nt, Human
aaucuucuacuugacaguucuc

SEQ ID NO: 285907 - RNA, 22 nt, Human
ccuccccacagcccaggagacu

SEQ ID NO: 285908 - RNA, 22 nt, Human
uuucuuucaauucuccuaaugc

SEQ ID NO: 285909 - RNA, 22 nt, Human
uccaggcuggaaaugucaaacu

SEQ ID NO: 285910 - RNA, 22 nt, Human
uuagauaaauugcaacuugauu

SEQ ID NO: 285911 - RNA, 19 nt, Human
gcuggcagauguggccgug

SEQ ID NO: 285912 - RNA, 21 nt, Human
cuggcucuguugucacccggc

SEQ ID NO: 285913 - RNA, 22 nt, Human
gggaucuuucugaugcuguggc

SEQ ID NO: 285914 - RNA, 22 nt, Human
ucagguguguuguauuuuacca

SEQ ID NO: 285915 - RNA, 22 nt, Human
gcugucuuuuccuggcaguaaa

SEQ ID NO: 285916 - RNA, 22 nt, Human
cccugagcucaggcccuugggg

SEQ ID NO: 285917 - RNA, 20 nt, Human
ucagacagucgcaguucugg

SEQ ID NO: 285918 - RNA, 22 nt, Human
uguaagaaaaguaaauagugac

SEQ ID NO: 285919 - RNA, 22 nt, Human
uccuuggcaugccgucuucucc

SEQ ID NO: 285920 - RNA, 22 nt, Human
cauucuuauauuuacucauuca

SEQ ID NO: 285921 - RNA, 22 nt, Human
agugugucugaucacuugugag

SEQ ID NO: 285922 - RNA, 22 nt, Human
uugaggaggaacugugaggcaa

SEQ ID NO: 285923 - RNA, 22 nt, Human
guuucuuagguaaauucuuuga

SEQ ID NO: 285924 - RNA, 22 nt, Human
aaugcuaacauugguuuauauc

SEQ ID NO: 285925 - RNA, 22 nt, Human
caggagcaaggagcagugggau

SEQ ID NO: 285926 - RNA, 22 nt, Human
caggcagcugacugucagauau

SEQ ID NO: 285927 - RNA, 19 nt, Human
ggaacuuggccuuuaccca

SEQ ID NO: 285928 - RNA, 16 nt, Human
caggugucagucaccu

SEQ ID NO: 285929 - RNA, 22 nt, Human
cuguggcucagcacggggucag

SEQ ID NO: 285930 - RNA, 22 nt, Human
ugucccagcugucucuguuuuu

SEQ ID NO: 285931 - RNA, 20 nt, Human
ugucauuuauuuaucaaaug

SEQ ID NO: 285932 - RNA, 22 nt, Human
ugucuguauuagucagcauucu

SEQ ID NO: 285933 - RNA, 20 nt, Human
uccaggcagacagcuauggg

SEQ ID NO: 285934 - RNA, 22 nt, Human
cagcuucugucugauuagcaag

SEQ ID NO: 285935 - RNA, 21 nt, Human
gacaggugauucagagcaggg

SEQ ID NO: 285936 - RNA, 23 nt, Human
uccaauucaauugggucaggaag

SEQ ID NO: 285937 - RNA, 22 nt, Human
acagggcagguggcuacugguc

SEQ ID NO: 285938 - RNA, 19 nt, Human
uucacauuggaagaaguag

SEQ ID NO: 285939 - RNA, 22 nt, Human
aggaaaacacaguauugaugga

SEQ ID NO: 285940 - RNA, 22 nt, Human
uagugcaggguuuuaagcacug

SEQ ID NO: 285941 - RNA, 22 nt, Human
gggcagguuauuggaguaggga

SEQ ID NO: 285942 - RNA, 22 nt, Human
ugccugccaugcagaaagcuga

SEQ ID NO: 285943 - RNA, 22 nt, Human
gacagacacuauugguaugccu

SEQ ID NO: 285944 - RNA, 22 nt, Human
cuucucucccuggcacucagac

SEQ ID NO: 285945 - RNA, 22 nt, Human
ccugggagaacugcuggguugg

SEQ ID NO: 285946 - RNA, 19 nt, Human
gcccaggggcccgaugcug

SEQ ID NO: 285947 - RNA, 22 nt, Human
gugugucccuccucuccugagu

SEQ ID NO: 285948 - RNA, 22 nt, Human
ugagcaggcgcagcaggagguc

SEQ ID NO: 285949 - RNA, 22 nt, Human
caggcugcagugcaguggcuau

SEQ ID NO: 285950 - RNA, 22 nt, Human
uggccaggaggcugcuucugac

SEQ ID NO: 285951 - RNA, 22 nt, Human
ccagucuguacuuugcucuguu

SEQ ID NO: 285952 - RNA, 22 nt, Human
agauguguuucuaguuccugca

SEQ ID NO: 285953 - RNA, 22 nt, Human
uccaggcaaaaaccaacuacag

SEQ ID NO: 285954 - RNA, 22 nt, Human
cuuauuagugucugucugaguu

SEQ ID NO: 285955 - RNA, 22 nt, Human
uuucuucagccuucacaaccug

SEQ ID NO: 285956 - RNA, 22 nt, Human
gaauuguaaguaccagcaugcu

SEQ ID NO: 285957 - RNA, 22 nt, Human
uaauuauuaugacaacaauugc

SEQ ID NO: 285958 - RNA, 22 nt, Human
cgaggcagggaagcugcaaaag

SEQ ID NO: 285959 - RNA, 22 nt, Human
uccugucuuaaugaucucgugc

SEQ ID NO: 285960 - RNA, 22 nt, Human
aaaucacuguuauugaucuuaa

SEQ ID NO: 285961 - RNA, 22 nt, Human
aucuuguuaaaaugcagaaacu

SEQ ID NO: 285962 - RNA, 22 nt, Human
cuucucagucuugguuagagag

SEQ ID NO: 285963 - RNA, 22 nt, Human
aggaauguauugaccuguugca

SEQ ID NO: 285964 - RNA, 22 nt, Human
aaaggccucuguccuagugccu

SEQ ID NO: 285965 - RNA, 22 nt, Human
ucaguuuauggucuaguucaug

SEQ ID NO: 285966 - RNA, 21 nt, Human
uccuggcccacucuaucccca

SEQ ID NO: 285967 - RNA, 22 nt, Human
ccuuggcccuagccucaggcaa

SEQ ID NO: 285968 - RNA, 22 nt, Human
acuguugaagugccagcuugau

SEQ ID NO: 285969 - RNA, 22 nt, Human
cagccaggauggagaacuguug

SEQ ID NO: 285970 - RNA, 22 nt, Human
guuuucugauuagcaaaucuga

SEQ ID NO: 285971 - RNA, 22 nt, Human
aaacauuugcaacucgguuugg

SEQ ID NO: 285972 - RNA, 22 nt, Human
ucuccugcucagaacagccuca

SEQ ID NO: 285973 - RNA, 22 nt, Human
gcauaguaggcugucaaaaaug

SEQ ID NO: 285974 - RNA, 22 nt, Human
auacauguugagaaaauaucug

SEQ ID NO: 285975 - RNA, 22 nt, Human
uggcagugggaauggacaaaca

SEQ ID NO: 285976 - RNA, 22 nt, Human
uaaugaaugagaauauaacaga

SEQ ID NO: 285977 - RNA, 22 nt, Human
uugaaaugagcaaacugucagc

SEQ ID NO: 285978 - RNA, 22 nt, Human
ccugggucuggucacuaaguca

SEQ ID NO: 285979 - RNA, 22 nt, Human
uauauucacuuguguccaacca

SEQ ID NO: 285980 - RNA, 22 nt, Human
ucugaagagucuugcaagaaag

SEQ ID NO: 285981 - RNA, 22 nt, Human
gguguccucggauucagggcag

SEQ ID NO: 285982 - RNA, 22 nt, Human
ugagugaggcugggcagucccu

SEQ ID NO: 285983 - RNA, 22 nt, Human
cuuuuacaguggaccugccauu

SEQ ID NO: 285984 - RNA, 22 nt, Human
aaggccucuucucucuggagau

SEQ ID NO: 285985 - RNA, 22 nt, Human
ugucuuuagccagcagucuucu

SEQ ID NO: 285986 - RNA, 19 nt, Human
cuguccuuggcugcacugu

SEQ ID NO: 285987 - RNA, 22 nt, Human
guucuucagucacaucacagaa

SEQ ID NO: 285988 - RNA, 22 nt, Human
uagugcagguuaauaggacuuc

SEQ ID NO: 285989 - RNA, 22 nt, Human
cagaguggcgacccccucagcu

SEQ ID NO: 285990 - RNA, 22 nt, Human
aguggacuuuuaguauccuuau

SEQ ID NO: 285991 - RNA, 23 nt, Human
cacaugaccugaccuaggcuagg

SEQ ID NO: 285992 - RNA, 21 nt, Human
ugccuggccuuugcuuuuccu

SEQ ID NO: 285993 - RNA, 22 nt, Human
uccuggcagguguauuggcugu

SEQ ID NO: 285994 - RNA, 17 nt, Human
uguccauuugccuggag

SEQ ID NO: 285995 - RNA, 21 nt, Human
ucauguguaacuuuugaccac

SEQ ID NO: 285996 - RNA, 22 nt, Human
aaagccuucugucuagcagaua

SEQ ID NO: 285997 - RNA, 22 nt, Human
uucuuuucuuuaggcauugugu

SEQ ID NO: 285998 - RNA, 22 nt, Human
ccacccaugugacuaccucaug

SEQ ID NO: 285999 - RNA, 22 nt, Human
cauguuaaaauauacauucuga

SEQ ID NO: 286000 - RNA, 22 nt, Human
aaauuucuguuguuuugagcca

SEQ ID NO: 286001 - RNA, 22 nt, Human
uugguacaaaaccaugaaagaa

SEQ ID NO: 286002 - RNA, 22 nt, Human
cuuugcaaacgauuaccacaug

SEQ ID NO: 286003 - RNA, 22 nt, Human
ggcuuugacaugcugaauuaaa

SEQ ID NO: 286004 - RNA, 22 nt, Human
uccugcagccauuagaggucaa

SEQ ID NO: 286005 - RNA, 22 nt, Human
uagcuuuaaaaaucaucaaagc

SEQ ID NO: 286006 - RNA, 22 nt, Human
uuugacucaguggacguacuag

SEQ ID NO: 286007 - RNA, 22 nt, Human
ucagaacaguucuuaauauugc

SEQ ID NO: 286008 - RNA, 22 nt, Human
ugguaaaaacugcaauuacuuu

SEQ ID NO: 286009 - RNA, 22 nt, Human
ccuggcaguucaucaaauggca

SEQ ID NO: 286010 - RNA, 22 nt, Human
agucaggauuuuggauuauucg

SEQ ID NO: 286011 - RNA, 22 nt, Human
cacagcugaccacccugcuccc

SEQ ID NO: 286012 - RNA, 22 nt, Human
ccaccauucaaggucuucacag

SEQ ID NO: 286013 - RNA, 22 nt, Human
uggcauuuggcuuacuuauguu

SEQ ID NO: 286014 - RNA, 20 nt, Human
cagggcucugggccuggccu

SEQ ID NO: 286015 - RNA, 22 nt, Human
auauguauugagugccaacugu

SEQ ID NO: 286016 - RNA, 22 nt, Human
uccuggcccacuaugccagcau

SEQ ID NO: 286017 - RNA, 22 nt, Human
uaacuuuaggaauagguaaucu

SEQ ID NO: 286018 - RNA, 22 nt, Human
uauaaaugcacuuuugaaauau

SEQ ID NO: 286019 - RNA, 22 nt, Human
auucuacacaacaugaugaugg

SEQ ID NO: 286020 - RNA, 19 nt, Human
acacaugaggagggacccc

SEQ ID NO: 286021 - RNA, 22 nt, Human
ucuuuauuuaagucuguuguaa

SEQ ID NO: 286022 - RNA, 22 nt, Human
uuugacucuuaaguggcucaau

SEQ ID NO: 286023 - RNA, 22 nt, Human
agcuuuauggugccucacuuga

SEQ ID NO: 286024 - RNA, 19 nt, Human
agcugcagaccagaagugc

SEQ ID NO: 286025 - RNA, 22 nt, Human
aguguccucaggcuuuguuccu

SEQ ID NO: 286026 - RNA, 22 nt, Human
ggagaaggcgaagucauucuuu

SEQ ID NO: 286027 - RNA, 22 nt, Human
uauugcugacugucuucugagu

SEQ ID NO: 286028 - RNA, 22 nt, Human
uggaaaacauugagauaccaag

SEQ ID NO: 286029 - RNA, 22 nt, Human
agccacccauucccgagcccua

SEQ ID NO: 286030 - RNA, 22 nt, Human
gaggagcacaugaggcugaggg

SEQ ID NO: 286031 - RNA, 22 nt, Human
uguguccuuucuuaagagugag

SEQ ID NO: 286032 - RNA, 22 nt, Human
ugagaaaauuacuauaauuguc

SEQ ID NO: 286033 - RNA, 22 nt, Human
aucugagucucugacagcaugu

SEQ ID NO: 286034 - RNA, 22 nt, Human
ugcccugguuacacuggagucc

SEQ ID NO: 286035 - RNA, 22 nt, Human
caaauaguuuuucauguauuau

SEQ ID NO: 286036 - RNA, 22 nt, Human
auuacacuaaugugacaacaau

SEQ ID NO: 286037 - RNA, 22 nt, Human
gucugucuguuguugagaagca

SEQ ID NO: 286038 - RNA, 22 nt, Human
ucccagaguuuccuguguccca

SEQ ID NO: 286039 - RNA, 22 nt, Human
ugaaacauuugaugaucuuugg

SEQ ID NO: 286040 - RNA, 22 nt, Human
uucaagcaccaaauuaguaggc

SEQ ID NO: 286041 - RNA, 22 nt, Human
ugucaaagacagaaggaaaugg

SEQ ID NO: 286042 - RNA, 22 nt, Human
uuugcacuagcauuuguccaug

SEQ ID NO: 286043 - RNA, 22 nt, Human
uauguuauuuucauacaacaga

SEQ ID NO: 286044 - RNA, 22 nt, Human
ggcccucuguggcugccaugga

SEQ ID NO: 286045 - RNA, 22 nt, Human
aaaaaguauuggccaugguuga

SEQ ID NO: 286046 - RNA, 22 nt, Human
aagcagacagagaauggguuug

SEQ ID NO: 286047 - RNA, 22 nt, Human
uguccugggaaaucccuuaggc

SEQ ID NO: 286048 - RNA, 22 nt, Human
uacauguuauuucacuauuggu

SEQ ID NO: 286049 - RNA, 22 nt, Human
uuguuuuaucuuucuacagacu

SEQ ID NO: 286050 - RNA, 22 nt, Human
caacuuuaugauugguuuguca

SEQ ID NO: 286051 - RNA, 22 nt, Human
aauaauguacauacauauuucg

SEQ ID NO: 286052 - RNA, 22 nt, Human
uaguaguaauuguuaucuuauu

SEQ ID NO: 286053 - RNA, 22 nt, Human
ucacaaauagcuauauuaagga

SEQ ID NO: 286054 - RNA, 18 nt, Human
cucagagaugcccuuauu

SEQ ID NO: 286055 - RNA, 22 nt, Human
ggagaagggcaugguaguuuua

SEQ ID NO: 286056 - RNA, 22 nt, Human
aauauuaguuucucaagagaga

SEQ ID NO: 286057 - RNA, 23 nt, Human
cagugcagggcaacucagacucc

SEQ ID NO: 286058 - RNA, 22 nt, Human
cagggcuccccagagagccucu

SEQ ID NO: 286059 - RNA, 22 nt, Human
ucauuugucuggcacagggaau

SEQ ID NO: 286060 - RNA, 22 nt, Human
augggagaaacaucaugaggca

SEQ ID NO: 286061 - RNA, 22 nt, Human
auauaauaguuucauaaaggcu

SEQ ID NO: 286062 - RNA, 22 nt, Human
acaagauuuugucugguagggu

SEQ ID NO: 286063 - RNA, 22 nt, Human
ucuccacaagcugaugcuagga

SEQ ID NO: 286064 - RNA, 19 nt, Human
uggcagggagaguuugaag

SEQ ID NO: 286065 - RNA, 22 nt, Human
caguuuuagggcaaugugaaga

SEQ ID NO: 286066 - RNA, 22 nt, Human
caggagucucucuugagcccag

SEQ ID NO: 286067 - RNA, 22 nt, Human
accuacauaguuaaguaacaaa

SEQ ID NO: 286068 - RNA, 22 nt, Human
agauauuaaucguacauaaggu

SEQ ID NO: 286069 - RNA, 22 nt, Human
gacagacaccugggggguugcu

SEQ ID NO: 286070 - RNA, 22 nt, Human
uuucaaaauuuugcagugguaa

SEQ ID NO: 286071 - RNA, 22 nt, Human
gcacccaggccggcgacugcag

SEQ ID NO: 286072 - RNA, 22 nt, Human
uaauuagagucacaaguaacca

SEQ ID NO: 286073 - RNA, 22 nt, Human
ucuucaaguuccaaagugcagg

SEQ ID NO: 286074 - RNA, 22 nt, Human
cugaggagaacaaugagaucaa

SEQ ID NO: 286075 - RNA, 22 nt, Human
ggcuguggccagcggggcugag

SEQ ID NO: 286076 - RNA, 22 nt, Human
cuuggcagagggcugggcucag

SEQ ID NO: 286077 - RNA, 22 nt, Human
caugaggugauaaagcugggau

SEQ ID NO: 286078 - RNA, 22 nt, Human
cccaaggaauaggaucccagga

SEQ ID NO: 286079 - RNA, 22 nt, Human
uucaaaguugcaugacagcuua

SEQ ID NO: 286080 - RNA, 22 nt, Human
caugcaggaggaaaaagcagcu

SEQ ID NO: 286081 - RNA, 20 nt, Human
gcaaaauaggcucuguuggu

SEQ ID NO: 286082 - RNA, 22 nt, Human
caguuaaacgggccaugugagu

SEQ ID NO: 286083 - RNA, 22 nt, Human
aggaccugaaauucuugcuuuu

SEQ ID NO: 286084 - RNA, 22 nt, Human
cugccuggcuaaacucaagucg

SEQ ID NO: 286085 - RNA, 22 nt, Human
cagguggucaggcagaugggcu

SEQ ID NO: 286086 - RNA, 22 nt, Human
aaauucaaugaucacuggcuca

SEQ ID NO: 286087 - RNA, 22 nt, Human
aggacaugaagaaagggcaagg

SEQ ID NO: 286088 - RNA, 22 nt, Human
uuacaaguauuuaagaugcugu

SEQ ID NO: 286089 - RNA, 22 nt, Human
gacaugcaugaaugcaggucuc

SEQ ID NO: 286090 - RNA, 18 nt, Human
uauauuucacacauauuc

SEQ ID NO: 286091 - RNA, 22 nt, Human
caaaauucugcauuucuaauaa

SEQ ID NO: 286092 - RNA, 22 nt, Human
uguccuuugggagggcacagcu

SEQ ID NO: 286093 - RNA, 22 nt, Human
uuccuggccucuuccaccacca

SEQ ID NO: 286094 - RNA, 21 nt, Human
uuuaauuugcauguaugacgc

SEQ ID NO: 286095 - RNA, 22 nt, Human
gcuguggcuuucuguuucuguu

SEQ ID NO: 286096 - RNA, 22 nt, Human
uuuguuuucuguaggccuuucc

SEQ ID NO: 286097 - RNA, 22 nt, Human
cuuggaauggggcagaaaaugg

SEQ ID NO: 286098 - RNA, 22 nt, Human
cagcaucauacuaccuaaauga

SEQ ID NO: 286099 - RNA, 22 nt, Human
agugcagggccugcccagcagg

SEQ ID NO: 286100 - RNA, 22 nt, Human
gggcuuggguauugugagaggu

SEQ ID NO: 286101 - RNA, 22 nt, Human
uggcaaagacgcuagcuaagau

SEQ ID NO: 286102 - RNA, 21 nt, Human
ucugugguauggccaucuucc

SEQ ID NO: 286103 - RNA, 22 nt, Human
auuuccuguugcuuuugccacu

SEQ ID NO: 286104 - RNA, 22 nt, Human
acccagccacagcauugaggga

SEQ ID NO: 286105 - RNA, 22 nt, Human
agugcuuuccuucuugugacau

SEQ ID NO: 286106 - RNA, 22 nt, Human
aaucauaauuguauacauucau

SEQ ID NO: 286107 - RNA, 22 nt, Human
uuuuucugagaauaugagagga

SEQ ID NO: 286108 - RNA, 18 nt, Human
gccaguggguccaggugc

SEQ ID NO: 286109 - RNA, 22 nt, Human
uccaggcauguggccaguacuc

SEQ ID NO: 286110 - RNA, 22 nt, Human
ccuggcucgcugaccucagggg

SEQ ID NO: 286111 - RNA, 22 nt, Human
aauguuuucucugugaacacau

SEQ ID NO: 286112 - RNA, 22 nt, Human
ggagaggggcaaguuuaucuag

SEQ ID NO: 286113 - RNA, 22 nt, Human
cugcccaggggagugcugucgg

SEQ ID NO: 286114 - RNA, 22 nt, Human
caaaguuuaaaguagauuucag

SEQ ID NO: 286115 - RNA, 22 nt, Human
gcuguggccuccagcacucccc

SEQ ID NO: 286116 - RNA, 22 nt, Human
agcuccugcagacuccugcuca

SEQ ID NO: 286117 - RNA, 22 nt, Human
uauacaagugagaagaagaguu

SEQ ID NO: 286118 - RNA, 22 nt, Human
cugcagagcaaguucucuguug

SEQ ID NO: 286119 - RNA, 22 nt, Human
ccaggaagccucagaugcugag

SEQ ID NO: 286120 - RNA, 22 nt, Human
uugcuuuacauguucugguaaa

SEQ ID NO: 286121 - RNA, 22 nt, Human
agcaaaauaagguaauuuauug

SEQ ID NO: 286122 - RNA, 22 nt, Human
aggaggaacucagaaagaaggu

SEQ ID NO: 286123 - RNA, 22 nt, Human
ucauuuauaaggaugcaauuaa

SEQ ID NO: 286124 - RNA, 22 nt, Human
ccuguucacgguguguuguuag

SEQ ID NO: 286125 - RNA, 22 nt, Human
ggggcaggagcccuucuucagc

SEQ ID NO: 286126 - RNA, 22 nt, Human
cuuucacacacauacauuugga

SEQ ID NO: 286127 - RNA, 22 nt, Human
auguaauaggguaacauaacau

SEQ ID NO: 286128 - RNA, 21 nt, Human
ucagugcaauucuauggggaa

SEQ ID NO: 286129 - RNA, 22 nt, Human
aaaaaccauugucuucagucuc

SEQ ID NO: 286130 - RNA, 22 nt, Human
ucauuucaaugauacuacuaag

SEQ ID NO: 286131 - RNA, 22 nt, Human
ccagugcauaaucaauacagcc

SEQ ID NO: 286132 - RNA, 22 nt, Human
ucaggagugauaccauuuguca

SEQ ID NO: 286133 - RNA, 22 nt, Human
uuucaacaccagagaccaugcg

SEQ ID NO: 286134 - RNA, 22 nt, Human
uucucauggugucuuuauacau

SEQ ID NO: 286135 - RNA, 22 nt, Human
uggccugggcaugaagcaucgu

SEQ ID NO: 286136 - RNA, 22 nt, Human
uuccuucucagcccucgaggau

SEQ ID NO: 286137 - RNA, 22 nt, Human
ugaggcucaagaauagacagua

SEQ ID NO: 286138 - RNA, 22 nt, Human
gggcuuggaguaggcugaugaa

SEQ ID NO: 286139 - RNA, 22 nt, Human
gacagcagccacagggagaggg

SEQ ID NO: 286140 - RNA, 22 nt, Human
ucuggcaguuccuuguugauau

SEQ ID NO: 286141 - RNA, 22 nt, Human
uugggucuuauggcuggaguag

SEQ ID NO: 286142 - RNA, 21 nt, Human
uuuuacagaugaggggaaggg

SEQ ID NO: 286143 - RNA, 22 nt, Human
ucuucccagcugcugcgaugcc

SEQ ID NO: 286144 - RNA, 19 nt, Human
uggaggaaguauauuucau

SEQ ID NO: 286145 - RNA, 22 nt, Human
guauuagacugagaaauggagu

SEQ ID NO: 286146 - RNA, 21 nt, Human
cuguggaagggaacuagaggg

SEQ ID NO: 286147 - RNA, 22 nt, Human
uggaaaacuuugguggugaggg

SEQ ID NO: 286148 - RNA, 22 nt, Human
gaugguccuccugcugccucuc

SEQ ID NO: 286149 - RNA, 22 nt, Human
cauagcuuagggguuaaacuca

SEQ ID NO: 286150 - RNA, 22 nt, Human
ucaaauuaguggaauaauaaug

SEQ ID NO: 286151 - RNA, 22 nt, Human
ugcccuggaggggcuuacaguc

SEQ ID NO: 286152 - RNA, 22 nt, Human
ugaaagcauaugcuaaagacca

SEQ ID NO: 286153 - RNA, 22 nt, Human
gcugaaaugaaaacacaggucg

SEQ ID NO: 286154 - RNA, 22 nt, Human
ggcucugggaaauggucuuccu

SEQ ID NO: 286155 - RNA, 22 nt, Human
aagauagaugucaucagcauau

SEQ ID NO: 286156 - RNA, 20 nt, Human
aaagagaagccucaccuugu

SEQ ID NO: 286157 - RNA, 22 nt, Human
gugcagggcccuccuaacaucu

SEQ ID NO: 286158 - RNA, 22 nt, Human
ggagaagggaacugaguuuuug

SEQ ID NO: 286159 - RNA, 22 nt, Human
ugcauuuuuaacaaggcuaauu

SEQ ID NO: 286160 - RNA, 22 nt, Human
agaaaugacacacaugagacau

SEQ ID NO: 286161 - RNA, 22 nt, Human
cugagccaugggucuaagcacu

SEQ ID NO: 286162 - RNA, 22 nt, Human
caaauguauucucacuucaggg

SEQ ID NO: 286163 - RNA, 22 nt, Human
caaaugcuacuaauaggcaagu

SEQ ID NO: 286164 - RNA, 22 nt, Human
agacagacuguguuugaauccu

SEQ ID NO: 286165 - RNA, 22 nt, Human
uuuauugucuaugaacugcuug

SEQ ID NO: 286166 - RNA, 20 nt, Human
ccagcuuucccugcagcauc

SEQ ID NO: 286167 - RNA, 22 nt, Human
cuuuauguacuguguauuugaa

SEQ ID NO: 286168 - RNA, 22 nt, Human
gcccagggcuucaaagagagaa

SEQ ID NO: 286169 - RNA, 22 nt, Human
guugggaaggugaacaugaugc

SEQ ID NO: 286170 - RNA, 22 nt, Human
gaaagccaucuggcugcuggga

SEQ ID NO: 286171 - RNA, 22 nt, Human
ugcugggucaggcaucugcaga

SEQ ID NO: 286172 - RNA, 21 nt, Human
aucuuuauuacgcagagaaga

SEQ ID NO: 286173 - RNA, 22 nt, Human
acagggcagagugaaaugcuau

SEQ ID NO: 286174 - RNA, 22 nt, Human
agcuuguuaaggaugcauauua

SEQ ID NO: 286175 - RNA, 22 nt, Human
ggugcauguagccaucaagaua

SEQ ID NO: 286176 - RNA, 22 nt, Human
ucagguguuucuggagaaguaa

SEQ ID NO: 286177 - RNA, 22 nt, Human
acugugccuucuuauugggucc

SEQ ID NO: 286178 - RNA, 22 nt, Human
guauucauauuaaacauaucaa

SEQ ID NO: 286179 - RNA, 22 nt, Human
ucucuggggguagaacucaggc

SEQ ID NO: 286180 - RNA, 22 nt, Human
cuguccuuacugcuucuggcuu

SEQ ID NO: 286181 - RNA, 17 nt, Human
agugagaaugucaugua

SEQ ID NO: 286182 - RNA, 22 nt, Human
uuucacauaaauauuaugccua

SEQ ID NO: 286183 - RNA, 22 nt, Human
cuggaguuagaguagacacuga

SEQ ID NO: 286184 - RNA, 22 nt, Human
augcaugcagggaagacaguag

SEQ ID NO: 286185 - RNA, 22 nt, Human
gcagcuuuuuggaugucaguua

SEQ ID NO: 286186 - RNA, 21 nt, Human
ucugucuuccucagccuaagg

SEQ ID NO: 286187 - RNA, 22 nt, Human
uccuguuuaucugugugacucg

SEQ ID NO: 286188 - RNA, 22 nt, Human
guacauuuauuuuugcagcaua

SEQ ID NO: 286189 - RNA, 22 nt, Human
auuauuaggacuacugggguug

SEQ ID NO: 286190 - RNA, 22 nt, Human
aggaauguuaggagaugagucu

SEQ ID NO: 286191 - RNA, 22 nt, Human
auuucucaguaggugcacagug

SEQ ID NO: 286192 - RNA, 22 nt, Human
acugagcagaagagaucuguga

SEQ ID NO: 286193 - RNA, 19 nt, Human
aaggugucccaacugcguu

SEQ ID NO: 286194 - RNA, 22 nt, Human
ucuaaacacuaagucuugaugc

SEQ ID NO: 286195 - RNA, 22 nt, Human
uuuuuuggugcuccuaggaagg

SEQ ID NO: 286196 - RNA, 22 nt, Human
uucuaacuuucaagguccuuuc

SEQ ID NO: 286197 - RNA, 22 nt, Human
gccagcagccacagaagucacu

SEQ ID NO: 286198 - RNA, 22 nt, Human
aguguacaaaaugauagauaaa

SEQ ID NO: 286199 - RNA, 22 nt, Human
cuguucuaucauuaaaagcuau

SEQ ID NO: 286200 - RNA, 20 nt, Human
uuuaucugugggaguggaga

SEQ ID NO: 286201 - RNA, 22 nt, Human
uaagaacuucggacauguuauc

SEQ ID NO: 286202 - RNA, 21 nt, Human
aggaugccgcaggcggagaag

SEQ ID NO: 286203 - RNA, 22 nt, Human
auucagcauucauuaugcgcca

SEQ ID NO: 286204 - RNA, 22 nt, Human
cugguuugucuugggaggaugu

SEQ ID NO: 286205 - RNA, 23 nt, Human
gggggccguccuggggauuauag

SEQ ID NO: 286206 - RNA, 22 nt, Human
uauacacaaggugugcauuugu

SEQ ID NO: 286207 - RNA, 22 nt, Human
cucugagggucuaaggagucac

SEQ ID NO: 286208 - RNA, 22 nt, Human
acaugagaucacaaagauaaau

SEQ ID NO: 286209 - RNA, 20 nt, Human
gcuguucacauuauuaguag

SEQ ID NO: 286210 - RNA, 22 nt, Human
gggaccugaggcccugcuccac

SEQ ID NO: 286211 - RNA, 23 nt, Human
uggaggaaacacaucagaagacc

SEQ ID NO: 286212 - RNA, 22 nt, Human
aagcuuuaaggaauuuuaugga

SEQ ID NO: 286213 - RNA, 22 nt, Human
acaugcuuuucccacaauuaua

SEQ ID NO: 286214 - RNA, 22 nt, Human
acuagaaaguuuccagaguuau

SEQ ID NO: 286215 - RNA, 22 nt, Human
gaugaugaggccaugaggcagg

SEQ ID NO: 286216 - RNA, 22 nt, Human
cagguucuggguccuggguccu

SEQ ID NO: 286217 - RNA, 22 nt, Human
uuaaauaguaggucuauuuugg

SEQ ID NO: 286218 - RNA, 22 nt, Human
uggcaauguuagcaaagcauuu

SEQ ID NO: 286219 - RNA, 22 nt, Human
gcagguggauauugcuacuuga

SEQ ID NO: 286220 - RNA, 22 nt, Human
auggagggugguaagacagaga

SEQ ID NO: 286221 - RNA, 22 nt, Human
auuuuagagcuccaaguacagc

SEQ ID NO: 286222 - RNA, 22 nt, Human
ugucuuuagagucacaaaacca

SEQ ID NO: 286223 - RNA, 22 nt, Human
ugggacucacucuuuuggccag

SEQ ID NO: 286224 - RNA, 22 nt, Human
uccaggcaaggauaauaaacau

SEQ ID NO: 286225 - RNA, 22 nt, Human
aguuuacaaaguuucacuguuc

SEQ ID NO: 286226 - RNA, 22 nt, Human
aggaccuguguuuuccuugaau

SEQ ID NO: 286227 - RNA, 22 nt, Human
ugggugugccauauuccauuuc

SEQ ID NO: 286228 - RNA, 22 nt, Human
uacaaguccguaaagggcagau

SEQ ID NO: 286229 - RNA, 22 nt, Human
acagaugaggaagagucagcca

SEQ ID NO: 286230 - RNA, 22 nt, Human
cuuugguggaggggugcaggca

SEQ ID NO: 286231 - RNA, 22 nt, Human
ucugugugaccauaagccagcu

SEQ ID NO: 286232 - RNA, 22 nt, Human
acuaaaaacuacugccaauagc

SEQ ID NO: 286233 - RNA, 22 nt, Human
aucauucugauggucaaugcua

SEQ ID NO: 286234 - RNA, 22 nt, Human
uuuccagguauuaauacuguau

SEQ ID NO: 286235 - RNA, 22 nt, Human
uucauucauucaugaauguuaa

SEQ ID NO: 286236 - RNA, 23 nt, Human
ucuggaggggacacugcagaugc

SEQ ID NO: 286237 - RNA, 20 nt, Human
ugggguccuggaggggaucc

SEQ ID NO: 286238 - RNA, 22 nt, Human
uuucucuucacugugugccuca

SEQ ID NO: 286239 - RNA, 22 nt, Human
uucaacuagauuuauacaauuc

SEQ ID NO: 286240 - RNA, 22 nt, Human
cauuugaaauucuuagaacaaa

SEQ ID NO: 286241 - RNA, 22 nt, Human
uacaaaaggaagagggaucuua

SEQ ID NO: 286242 - RNA, 22 nt, Human
cuaguguuuggaagucauagcc

SEQ ID NO: 286243 - RNA, 22 nt, Human
agcuuuauuugucauucacggc

SEQ ID NO: 286244 - RNA, 19 nt, Human
ggacacagaaagcugcauu

SEQ ID NO: 286245 - RNA, 22 nt, Human
auguguccaaggccacaauagc

SEQ ID NO: 286246 - RNA, 22 nt, Human
uucugguuacauuguuacagcu

SEQ ID NO: 286247 - RNA, 22 nt, Human
agagaacaaauuaaaggugguu

SEQ ID NO: 286248 - RNA, 22 nt, Human
cuuagcaguggguaccagggcu

SEQ ID NO: 286249 - RNA, 22 nt, Human
ggugggcagcucuuggcaggca

SEQ ID NO: 286250 - RNA, 22 nt, Human
caauuucagguggauagguuuu

SEQ ID NO: 286251 - RNA, 22 nt, Human
uucagcaguuucugagaagcaa

SEQ ID NO: 286252 - RNA, 22 nt, Human
gguccugggaagaugcucauga

SEQ ID NO: 286253 - RNA, 21 nt, Human
uuucacaaaaguaugugacaa

SEQ ID NO: 286254 - RNA, 22 nt, Human
aaaugcagguaguauuuauuuu

SEQ ID NO: 286255 - RNA, 22 nt, Human
ucauuauccuaguaucuugaau

SEQ ID NO: 286256 - RNA, 22 nt, Human
uugaaaaaauugguagaggaug

SEQ ID NO: 286257 - RNA, 22 nt, Human
gcugauagacugaauguuggga

SEQ ID NO: 286258 - RNA, 22 nt, Human
uucuuuucccaauauuuugcug

SEQ ID NO: 286259 - RNA, 22 nt, Human
cagaagaggacuggguagcuca

SEQ ID NO: 286260 - RNA, 22 nt, Human
gugcaaaaggcauugugguuuu

SEQ ID NO: 286261 - RNA, 22 nt, Human
ucaguccauaggugggccugag

SEQ ID NO: 286262 - RNA, 20 nt, Human
auguaaaauuauaaggcuga

SEQ ID NO: 286263 - RNA, 19 nt, Human
uuccugggguuccauugug

SEQ ID NO: 286264 - RNA, 22 nt, Human
gccagccuucuguggccugcaa

SEQ ID NO: 286265 - RNA, 22 nt, Human
caaggaaaagaaguauuucaga

SEQ ID NO: 286266 - RNA, 22 nt, Human
ccaggccucuggcugcuuaguc

SEQ ID NO: 286267 - RNA, 22 nt, Human
aacaguuugcuuuaagaggcac

SEQ ID NO: 286268 - RNA, 22 nt, Human
auuguauaagucuauuuacaau

SEQ ID NO: 286269 - RNA, 17 nt, Human
guaaggcuugcagaugc

SEQ ID NO: 286270 - RNA, 22 nt, Human
auacacauuugcuagagauggg

SEQ ID NO: 286271 - RNA, 22 nt, Human
aaugugucagcuugucgaucuu

SEQ ID NO: 286272 - RNA, 21 nt, Human
cauuucuaagccuggcuauag

SEQ ID NO: 286273 - RNA, 22 nt, Human
acuguacaugcaucuugucuau

SEQ ID NO: 286274 - RNA, 22 nt, Human
aaugugucuaugugguucacag

SEQ ID NO: 286275 - RNA, 22 nt, Human
ucauucuugaucacuaguuagu

SEQ ID NO: 286276 - RNA, 22 nt, Human
acagugucuccugguacccagu

SEQ ID NO: 286277 - RNA, 22 nt, Human
uuucauugucuacauaugacau

SEQ ID NO: 286278 - RNA, 21 nt, Human
ucucuguauccauggguucca

SEQ ID NO: 286279 - RNA, 22 nt, Human
gggcagguacuggguggugagc

SEQ ID NO: 286280 - RNA, 22 nt, Human
cagggagcuggugccagccgac

SEQ ID NO: 286281 - RNA, 22 nt, Human
uagaaacauauguuugagacau

SEQ ID NO: 286282 - RNA, 22 nt, Human
ucugaaaugaccuuuccccacu

SEQ ID NO: 286283 - RNA, 22 nt, Human
ucuucagaggaagucagucuuu

SEQ ID NO: 286284 - RNA, 19 nt, Human
ggccuugaugaguggggag

SEQ ID NO: 286285 - RNA, 22 nt, Human
agcuccaagguugaggagugag

SEQ ID NO: 286286 - RNA, 22 nt, Human
aauauguugagucuaucuuuau

SEQ ID NO: 286287 - RNA, 22 nt, Human
caguuaccaucuucagugauga

SEQ ID NO: 286288 - RNA, 22 nt, Human
cauuuuguaagucucucuuguu

SEQ ID NO: 286289 - RNA, 22 nt, Human
ggaacugaggaacgaacuggga

SEQ ID NO: 286290 - RNA, 22 nt, Human
aaggugguuugcuaaucccaac

SEQ ID NO: 286291 - RNA, 22 nt, Human
cuguuggccuuucaucaguaau

SEQ ID NO: 286292 - RNA, 22 nt, Human
ggcagguggauuuucuacucua

SEQ ID NO: 286293 - RNA, 22 nt, Human
acccggagucggagguugcagu

SEQ ID NO: 286294 - RNA, 22 nt, Human
ucuagaaacagguuucuagaaa

SEQ ID NO: 286295 - RNA, 22 nt, Human
aggcuugguuuauagaaguaau

SEQ ID NO: 286296 - RNA, 22 nt, Human
uguacauagaucuugaaaauua

SEQ ID NO: 286297 - RNA, 22 nt, Human
acauuucagcgugcaugacaug

SEQ ID NO: 286298 - RNA, 22 nt, Human
aagauuauuuaagacaggaacc

SEQ ID NO: 286299 - RNA, 22 nt, Human
caaggaaggagagaugaugggu

SEQ ID NO: 286300 - RNA, 22 nt, Human
uagggauguaaacauaguaauu

SEQ ID NO: 286301 - RNA, 22 nt, Human
ccccaaggugcucacugucugg

SEQ ID NO: 286302 - RNA, 18 nt, Human
uguuuauuuuucucuuac

SEQ ID NO: 286303 - RNA, 22 nt, Human
aacuagaacgucuaguugcugg

SEQ ID NO: 286304 - RNA, 22 nt, Human
augcaucuuuucaagguauuuc

SEQ ID NO: 286305 - RNA, 22 nt, Human
cuuucuuuguccaccaacaaug

SEQ ID NO: 286306 - RNA, 22 nt, Human
gcuggcuggcgggugcguccuc

SEQ ID NO: 286307 - RNA, 22 nt, Human
gcacaguuaaagggucauguga

SEQ ID NO: 286308 - RNA, 22 nt, Human
gcaugcagggagggucuggcug

SEQ ID NO: 286309 - RNA, 22 nt, Human
agucaguuaaccucacagcauc

SEQ ID NO: 286310 - RNA, 17 nt, Human
gagugcagacacaagca

SEQ ID NO: 286311 - RNA, 22 nt, Human
uuuaauugcauuuaaagaugga

SEQ ID NO: 286312 - RNA, 22 nt, Human
ggcuagggaucuagaccaggac

SEQ ID NO: 286313 - RNA, 21 nt, Human
uaucuacuggugucuuucaga

SEQ ID NO: 286314 - RNA, 23 nt, Human
uaauuagauguugauuccugaga

SEQ ID NO: 286315 - RNA, 23 nt, Human
ucuguacaauugagaagagaaca

SEQ ID NO: 286316 - RNA, 22 nt, Human
caauauauaaugaguacuuucc

SEQ ID NO: 286317 - RNA, 22 nt, Human
uucaaacaaaacuguucccaua

SEQ ID NO: 286318 - RNA, 22 nt, Human
ggagagaauuccauggacaugu

SEQ ID NO: 286319 - RNA, 22 nt, Human
gccugcagggcccuuguggguc

SEQ ID NO: 286320 - RNA, 22 nt, Human
uggcugugauuugcacgagaug

SEQ ID NO: 286321 - RNA, 22 nt, Human
cccaucaggaacccaggagccc

SEQ ID NO: 286322 - RNA, 22 nt, Human
ucuuuccauggccacacagucu

SEQ ID NO: 286323 - RNA, 20 nt, Human
uuucuuguacuuggagaagg

SEQ ID NO: 286324 - RNA, 22 nt, Human
uuccuggccagcuguggugagu

SEQ ID NO: 286325 - RNA, 22 nt, Human
aauguauucugggaaaauguua

SEQ ID NO: 286326 - RNA, 17 nt, Human
uuccugugguuugaucu

SEQ ID NO: 286327 - RNA, 19 nt, Human
ugcauaaauuauauacuuu

SEQ ID NO: 286328 - RNA, 22 nt, Human
ugagccagucucucagaacccu

SEQ ID NO: 286329 - RNA, 22 nt, Human
acucuuauaguauugguuauua

SEQ ID NO: 286330 - RNA, 22 nt, Human
cugucucagcaggaagucauca

SEQ ID NO: 286331 - RNA, 23 nt, Human
agguggucuuguggaugcugcaa

SEQ ID NO: 286332 - RNA, 22 nt, Human
uucuuucucaacaugaauguuu

SEQ ID NO: 286333 - RNA, 22 nt, Human
gaguuauaaccuaguuuaacug

SEQ ID NO: 286334 - RNA, 22 nt, Human
cagugucugggacagaaaguca

SEQ ID NO: 286335 - RNA, 22 nt, Human
agagcagauuucaaauauuggc

SEQ ID NO: 286336 - RNA, 22 nt, Human
uauuccuauuucuaaacauaug

SEQ ID NO: 286337 - RNA, 21 nt, Human
ucuccaguauccuucucugag

SEQ ID NO: 286338 - RNA, 21 nt, Human
gcaaguacuaucaucauuauc

SEQ ID NO: 286339 - RNA, 22 nt, Human
cacaagucuguggucuccaaca

SEQ ID NO: 286340 - RNA, 22 nt, Human
uggcugcugagaaggcagcugu

SEQ ID NO: 286341 - RNA, 22 nt, Human
uauuacagcuuugauuaucugg

SEQ ID NO: 286342 - RNA, 22 nt, Human
ccagccuggggaggcagcuucu

SEQ ID NO: 286343 - RNA, 21 nt, Human
uccuggcaggcccaggacccu

SEQ ID NO: 286344 - RNA, 22 nt, Human
cugaggcuuguccucucagcuu

SEQ ID NO: 286345 - RNA, 22 nt, Human
gcuuggccagcagccgggaugc

SEQ ID NO: 286346 - RNA, 22 nt, Human
auccuggcaagcagaggagaac

SEQ ID NO: 286347 - RNA, 22 nt, Human
auugcuuuugagcuagaauuuu

SEQ ID NO: 286348 - RNA, 22 nt, Human
aguauuuagagacacaagaugg

SEQ ID NO: 286349 - RNA, 22 nt, Human
ugcagggccuucuagaccaugg

SEQ ID NO: 286350 - RNA, 22 nt, Human
acaugauuuuaguaucauaaua

SEQ ID NO: 286351 - RNA, 22 nt, Human
uaggauuuggcuuuagucaggu

SEQ ID NO: 286352 - RNA, 22 nt, Human
ucugauguggagacacuguuuu

SEQ ID NO: 286353 - RNA, 22 nt, Human
aaaacauucugugaacucucaa

SEQ ID NO: 286354 - RNA, 22 nt, Human
guuuacuguuaaccaacgaaug

SEQ ID NO: 286355 - RNA, 22 nt, Human
ggagaaggaagaaagcuacuau

SEQ ID NO: 286356 - RNA, 22 nt, Human
aauugcuuuuauuuagggccag

SEQ ID NO: 286357 - RNA, 22 nt, Human
uuauuccauuauuucacuuagg

SEQ ID NO: 286358 - RNA, 22 nt, Human
aaaaagucugcaaaggagguug

SEQ ID NO: 286359 - RNA, 22 nt, Human
acagagucugacagguaggcgc

SEQ ID NO: 286360 - RNA, 22 nt, Human
auuagggaaggauuuggccuga

SEQ ID NO: 286361 - RNA, 22 nt, Human
acagacagacagagaacuauuc

SEQ ID NO: 286362 - RNA, 22 nt, Human
aguguccuggcaaggguuucag

SEQ ID NO: 286363 - RNA, 22 nt, Human
auuggcuuucuuuugugaaaau

SEQ ID NO: 286364 - RNA, 18 nt, Human
uccaaagccagagaaguu

SEQ ID NO: 286365 - RNA, 22 nt, Human
gucucugagcucugagcuggcu

SEQ ID NO: 286366 - RNA, 22 nt, Human
uuuaucuuuaggacuuugcaga

SEQ ID NO: 286367 - RNA, 22 nt, Human
agaaaauuuaaagagacacaca

SEQ ID NO: 286368 - RNA, 22 nt, Human
agagccaggaucuguuuugggg

SEQ ID NO: 286369 - RNA, 19 nt, Human
auggaaaaugccagacuga

SEQ ID NO: 286370 - RNA, 22 nt, Human
uaucaaaaggaguugaaagggg

SEQ ID NO: 286371 - RNA, 22 nt, Human
gaagacaauucuggguggagga

SEQ ID NO: 286372 - RNA, 22 nt, Human
aacuuguauauguuauucagag

SEQ ID NO: 286373 - RNA, 22 nt, Human
aaggugguaggcuauaucagua

SEQ ID NO: 286374 - RNA, 22 nt, Human
uguaaacuguagaaaauacuuu

SEQ ID NO: 286375 - RNA, 22 nt, Human
aggaaugucauagaauaaucau

SEQ ID NO: 286376 - RNA, 22 nt, Human
cugccuguauugucugcuuggg

SEQ ID NO: 286377 - RNA, 22 nt, Human
cagggaugucucuggaagggag

SEQ ID NO: 286378 - RNA, 22 nt, Human
uuccugaagucaaagaucuaaa

SEQ ID NO: 286379 - RNA, 22 nt, Human
uucuuguauauaaaaaucauuu

SEQ ID NO: 286380 - RNA, 22 nt, Human
ccauccugcaggaccuccauau

SEQ ID NO: 286381 - RNA, 22 nt, Human
acagcagcugccuucaggcucu

SEQ ID NO: 286382 - RNA, 18 nt, Human
cauuuguuauugugugug

SEQ ID NO: 286383 - RNA, 22 nt, Human
uccaggcucccucaggaugcac

SEQ ID NO: 286384 - RNA, 22 nt, Human
uuucacaugcagcagggaagug

SEQ ID NO: 286385 - RNA, 22 nt, Human
acuauuagcauaucaugaaugg

SEQ ID NO: 286386 - RNA, 22 nt, Human
cugaaugaaaucaaggacugag

SEQ ID NO: 286387 - RNA, 22 nt, Human
ugcuucaaguugaaauauucuu

SEQ ID NO: 286388 - RNA, 22 nt, Human
uccaggcuaauuuugcauuguu

SEQ ID NO: 286389 - RNA, 22 nt, Human
aaagacagacggaaaccugagg

SEQ ID NO: 286390 - RNA, 22 nt, Human
cacagaaaaaggcuugaaaauc

SEQ ID NO: 286391 - RNA, 22 nt, Human
acuaacuugcugagugaccaug

SEQ ID NO: 286392 - RNA, 22 nt, Human
gauuguaaaacagaucauuauc

SEQ ID NO: 286393 - RNA, 22 nt, Human
agggcuacugccugccuucagg

SEQ ID NO: 286394 - RNA, 22 nt, Human
agggcuccuccccggccuccac

SEQ ID NO: 286395 - RNA, 22 nt, Human
guccuggcuagucguccgcgac

SEQ ID NO: 286396 - RNA, 22 nt, Human
agcagguggugggccagauuug

SEQ ID NO: 286397 - RNA, 22 nt, Human
ucuggagagcagaugccucugg

SEQ ID NO: 286398 - RNA, 22 nt, Human
augaaauggugguuuuccauuu

SEQ ID NO: 286399 - RNA, 22 nt, Human
uguaaaugaaguaugcuuuacu

SEQ ID NO: 286400 - RNA, 22 nt, Human
guacacauacuauucaaagaga

SEQ ID NO: 286401 - RNA, 22 nt, Human
uacagagacuuuauggcacaaa

SEQ ID NO: 286402 - RNA, 22 nt, Human
ggaaggaaguaaaugaugcuau

SEQ ID NO: 286403 - RNA, 22 nt, Human
uccaggcacuauauauacuuuu

SEQ ID NO: 286404 - RNA, 22 nt, Human
acagauggaauguguuauggga

SEQ ID NO: 286405 - RNA, 22 nt, Human
ugacaagagcauucccacaccu

SEQ ID NO: 286406 - RNA, 21 nt, Human
caggcuugaggaaugugccug

SEQ ID NO: 286407 - RNA, 22 nt, Human
uaaguucaagucuuggauauaa

SEQ ID NO: 286408 - RNA, 22 nt, Human
aggagaggcaucaagaaaaucg

SEQ ID NO: 286409 - RNA, 22 nt, Human
aggcuuuaauuaucuacaggag

SEQ ID NO: 286410 - RNA, 22 nt, Human
cagcccugugcuaagcacccuc

SEQ ID NO: 286411 - RNA, 22 nt, Human
uugacacagaucaauauucaac

SEQ ID NO: 286412 - RNA, 17 nt, Human
gggcugacaguggccuc

SEQ ID NO: 286413 - RNA, 20 nt, Human
cugccuggaggccucuaccu

SEQ ID NO: 286414 - RNA, 22 nt, Human
ggaagaaagcacacaaacuuga

SEQ ID NO: 286415 - RNA, 22 nt, Human
ugaaauuagugaaguuacaguu

SEQ ID NO: 286416 - RNA, 19 nt, Human
agggagaauuccaagagga

SEQ ID NO: 286417 - RNA, 22 nt, Human
caguuaaacagauugaguguua

SEQ ID NO: 286418 - RNA, 22 nt, Human
gggagccaugcuggucuucuuu

SEQ ID NO: 286419 - RNA, 22 nt, Human
ucaggugggucuacaauuaguu

SEQ ID NO: 286420 - RNA, 22 nt, Human
ugggccaggggccucuucugau

SEQ ID NO: 286421 - RNA, 22 nt, Human
agagucagacuaagccauggug

SEQ ID NO: 286422 - RNA, 22 nt, Human
ucuggcccaucuucugccacca

SEQ ID NO: 286423 - RNA, 22 nt, Human
uccugcagcauccgucgucugu

SEQ ID NO: 286424 - RNA, 22 nt, Human
gccggggcuggggagagacaug

SEQ ID NO: 286425 - RNA, 22 nt, Human
cauuuaauagaugcuguuucag

SEQ ID NO: 286426 - RNA, 22 nt, Human
ccccagccagcaggaccucuga

SEQ ID NO: 286427 - RNA, 22 nt, Human
aaaguuuuagaacuaggaagca

SEQ ID NO: 286428 - RNA, 22 nt, Human
aaauccuaaggagaauaugauu

SEQ ID NO: 286429 - RNA, 22 nt, Human
uaagaaacuaaugcaauaagag

SEQ ID NO: 286430 - RNA, 22 nt, Human
acugucuuuauuagaaucuuau

SEQ ID NO: 286431 - RNA, 22 nt, Human
uuguacaaguauuaugugaaca

SEQ ID NO: 286432 - RNA, 22 nt, Human
gauucuuuggccuuuauugaca

SEQ ID NO: 286433 - RNA, 22 nt, Human
gagaggagguggcuaugacagc

SEQ ID NO: 286434 - RNA, 21 nt, Human
aaugucuuuguccaugcucug

SEQ ID NO: 286435 - RNA, 22 nt, Human
aucuuucuauuucuaaaaacua

SEQ ID NO: 286436 - RNA, 23 nt, Human
acacauauauucagauacagaug

SEQ ID NO: 286437 - RNA, 22 nt, Human
ccagggcaucacauccaguguu

SEQ ID NO: 286438 - RNA, 22 nt, Human
gccagcucaguuucaaaguagg

SEQ ID NO: 286439 - RNA, 22 nt, Human
cauuuguaggaugcuucuuguu

SEQ ID NO: 286440 - RNA, 21 nt, Human
ugaccagugccccauccuguc

SEQ ID NO: 286441 - RNA, 22 nt, Human
agguuuaugccuuggagcuggg

SEQ ID NO: 286442 - RNA, 22 nt, Human
uuuacacaaaagauagcacacc

SEQ ID NO: 286443 - RNA, 22 nt, Human
guaacauaguuugugcuucauc

SEQ ID NO: 286444 - RNA, 22 nt, Human
uucacacuuguuaggauggcuu

SEQ ID NO: 286445 - RNA, 22 nt, Human
aaauguacgggaguagaauuag

SEQ ID NO: 286446 - RNA, 22 nt, Human
cugaggcugggcauggggucca

SEQ ID NO: 286447 - RNA, 22 nt, Human
caguggugaagagcaggggcuc

SEQ ID NO: 286448 - RNA, 20 nt, Human
uugcuuuaucagacaugaua

SEQ ID NO: 286449 - RNA, 22 nt, Human
ucagacagaaggacuauuugaa

SEQ ID NO: 286450 - RNA, 22 nt, Human
acagucuacaaagugaugugug

SEQ ID NO: 286451 - RNA, 23 nt, Human
uccuggguuugaauucuagucuu

SEQ ID NO: 286452 - RNA, 22 nt, Human
agagccagcaagugaauaguga

SEQ ID NO: 286453 - RNA, 22 nt, Human
aggcugugcgaggucucagagu

SEQ ID NO: 286454 - RNA, 22 nt, Human
agaggcaagauuaucagggcau

SEQ ID NO: 286455 - RNA, 22 nt, Human
ggaccugccagaacucaggcua

SEQ ID NO: 286456 - RNA, 18 nt, Human
ucuggagggaagcuuuga

SEQ ID NO: 286457 - RNA, 22 nt, Human
aagcugcaaggaagugugccag

SEQ ID NO: 286458 - RNA, 22 nt, Human
ccugagaauguuuaacagagaa

SEQ ID NO: 286459 - RNA, 22 nt, Human
aagcaaagagauaaccuuuugg

SEQ ID NO: 286460 - RNA, 22 nt, Human
ggcuuuauuucacuguaccaua

SEQ ID NO: 286461 - RNA, 22 nt, Human
ucugaaaucuguaagcacuagc

SEQ ID NO: 286462 - RNA, 17 nt, Human
aguguuuccuuaucauu

SEQ ID NO: 286463 - RNA, 20 nt, Human
acaaagacuggaaaagcaag

SEQ ID NO: 286464 - RNA, 22 nt, Human
ucauugcaguugaguuguguua

SEQ ID NO: 286465 - RNA, 22 nt, Human
uugcugggucagaagccaggag

SEQ ID NO: 286466 - RNA, 22 nt, Human
cccagagcaugugcugccuuug

SEQ ID NO: 286467 - RNA, 22 nt, Human
auguaaaagauuauuuuccugu

SEQ ID NO: 286468 - RNA, 22 nt, Human
agggagaguagauaucaggugu

SEQ ID NO: 286469 - RNA, 22 nt, Human
ggaggggagucucccaaagccg

SEQ ID NO: 286470 - RNA, 19 nt, Human
uucuaccuuacuguaggcu

SEQ ID NO: 286471 - RNA, 23 nt, Human
uggacagcagcagcagugucacc

SEQ ID NO: 286472 - RNA, 22 nt, Human
gacccagccugguuuuuauagg

SEQ ID NO: 286473 - RNA, 22 nt, Human
aacaguuucaguuacugaugag

SEQ ID NO: 286474 - RNA, 22 nt, Human
acucaguuaucauguguccaca

SEQ ID NO: 286475 - RNA, 22 nt, Human
uccagggagagccgcugcucca

SEQ ID NO: 286476 - RNA, 22 nt, Human
ccuccugggccuugcucuguga

SEQ ID NO: 286477 - RNA, 22 nt, Human
ucccagaggcuccagucucuau

SEQ ID NO: 286478 - RNA, 22 nt, Human
aauuccucuaucuuucuucaag

SEQ ID NO: 286479 - RNA, 22 nt, Human
aaauguguuccuuugcuacaga

SEQ ID NO: 286480 - RNA, 22 nt, Human
uaaggaggcagucauuaucagg

SEQ ID NO: 286481 - RNA, 22 nt, Human
aacaagaagggaaggcaugauu

SEQ ID NO: 286482 - RNA, 22 nt, Human
cugggaaauggcuucgagcuca

SEQ ID NO: 286483 - RNA, 22 nt, Human
gaccuggaggauccucuucuug

SEQ ID NO: 286484 - RNA, 22 nt, Human
uucacaaaacacuauuuucugg

SEQ ID NO: 286485 - RNA, 22 nt, Human
auccuggcccagguguggaggg

SEQ ID NO: 286486 - RNA, 22 nt, Human
uuuuuagaauuggcugagaauu

SEQ ID NO: 286487 - RNA, 22 nt, Human
auucuucauacagacaaguccu

SEQ ID NO: 286488 - RNA, 22 nt, Human
cagagcugucauuugccaguga

SEQ ID NO: 286489 - RNA, 22 nt, Human
acuguggcucagggaaugcaug

SEQ ID NO: 286490 - RNA, 22 nt, Human
ugcacaagucagaguaacauuu

SEQ ID NO: 286491 - RNA, 20 nt, Human
guauuaggagguaaauguaa

SEQ ID NO: 286492 - RNA, 22 nt, Human
uuuuucuugugcuggaucuaau

SEQ ID NO: 286493 - RNA, 22 nt, Human
aucauaaaccacuuuguaaucu

SEQ ID NO: 286494 - RNA, 22 nt, Human
cuggcugguucccugcuccagg

SEQ ID NO: 286495 - RNA, 22 nt, Human
gacuuuauuacuaacccuguga

SEQ ID NO: 286496 - RNA, 22 nt, Human
ggcagggcagcgcugauuaggg

SEQ ID NO: 286497 - RNA, 22 nt, Human
ccuccuucuggggccuucugcu

SEQ ID NO: 286498 - RNA, 22 nt, Human
ugcccaggcuggagugcagagg

SEQ ID NO: 286499 - RNA, 22 nt, Human
aagugagguuucugcuuucaga

SEQ ID NO: 286500 - RNA, 22 nt, Human
ucagggcugcauacaggagaua

SEQ ID NO: 286501 - RNA, 22 nt, Human
cuucagugaauguugaguaagg

SEQ ID NO: 286502 - RNA, 22 nt, Human
gcgggccaccuuggagagcgcu

SEQ ID NO: 286503 - RNA, 22 nt, Human
gaagucuucauucucucugaga

SEQ ID NO: 286504 - RNA, 21 nt, Human
agaugaggauacugaggccua

SEQ ID NO: 286505 - RNA, 22 nt, Human
aaauauacggucccuaacaguc

SEQ ID NO: 286506 - RNA, 22 nt, Human
ugagacagcagucagggaaaua

SEQ ID NO: 286507 - RNA, 20 nt, Human
ugcugggugggcagcuguaa

SEQ ID NO: 286508 - RNA, 22 nt, Human
uuucuauaugaggagcuaaagu

SEQ ID NO: 286509 - RNA, 22 nt, Human
uaacaguugguguaauuucuug

SEQ ID NO: 286510 - RNA, 20 nt, Human
ccagagaguagguuagugau

SEQ ID NO: 286511 - RNA, 22 nt, Human
guggcaggagacuggaagaugg

SEQ ID NO: 286512 - RNA, 22 nt, Human
gaggaaaauauucagggagguu

SEQ ID NO: 286513 - RNA, 22 nt, Human
uuuacagaauguugaauuuggg

SEQ ID NO: 286514 - RNA, 19 nt, Human
uccaguguagcuggucauu

SEQ ID NO: 286515 - RNA, 21 nt, Human
agugccaguagguauggagga

SEQ ID NO: 286516 - RNA, 22 nt, Human
uucuucuucuggcugcaccugg

SEQ ID NO: 286517 - RNA, 22 nt, Human
cuggaggccacuguacagauug

SEQ ID NO: 286518 - RNA, 22 nt, Human
ucagaugagugcuuucagcugc

SEQ ID NO: 286519 - RNA, 22 nt, Human
cacugagcugauagaauuccag

SEQ ID NO: 286520 - RNA, 22 nt, Human
uccagcauuuuucaauagaauu

SEQ ID NO: 286521 - RNA, 22 nt, Human
ccauggcucuuaccuuguuaua

SEQ ID NO: 286522 - RNA, 22 nt, Human
gggagggaagguaccuguguga

SEQ ID NO: 286523 - RNA, 22 nt, Human
aauguuuucauuauccuaacug

SEQ ID NO: 286524 - RNA, 22 nt, Human
gcuggcagagagcuggugagga

SEQ ID NO: 286525 - RNA, 23 nt, Human
uugcuugagcccaggaaguggag

SEQ ID NO: 286526 - RNA, 22 nt, Human
aguccuuugcugaacugucaca

SEQ ID NO: 286527 - RNA, 22 nt, Human
gaggcugcccacaccugcgccg

SEQ ID NO: 286528 - RNA, 22 nt, Human
ggcuacugugauggucugcaag

SEQ ID NO: 286529 - RNA, 22 nt, Human
ucagaggugcaagaaguucuga

SEQ ID NO: 286530 - RNA, 22 nt, Human
gggucuccauguuaacaucacu

SEQ ID NO: 286531 - RNA, 19 nt, Human
ccuggguccacucagacua

SEQ ID NO: 286532 - RNA, 22 nt, Human
auuuccaucaucauuaggccua

SEQ ID NO: 286533 - RNA, 15 nt, Human
uccaggcauucauuc

SEQ ID NO: 286534 - RNA, 22 nt, Human
ggaacugauuaagucaugagaa

SEQ ID NO: 286535 - RNA, 22 nt, Human
ucagaggccuaugucuacaacu

SEQ ID NO: 286536 - RNA, 18 nt, Human
gcuuucugugcagcggag

SEQ ID NO: 286537 - RNA, 20 nt, Human
aguaggcaaaggaaagaucu

SEQ ID NO: 286538 - RNA, 22 nt, Human
uaggaggguuagagggaaauau

SEQ ID NO: 286539 - RNA, 22 nt, Human
ccacaugcucuuguuacagugu

SEQ ID NO: 286540 - RNA, 17 nt, Human
ggaaggucaaggggagg

SEQ ID NO: 286541 - RNA, 22 nt, Human
ucucaaggaaaagugauggcau

SEQ ID NO: 286542 - RNA, 22 nt, Human
cucuggaaaauugugugggggu

SEQ ID NO: 286543 - RNA, 22 nt, Human
aagugugauuuguagaaugccu

SEQ ID NO: 286544 - RNA, 22 nt, Human
ucagcuuuccuugcuuuagauu

SEQ ID NO: 286545 - RNA, 22 nt, Human
aaguuugcauagauuaagcauu

SEQ ID NO: 286546 - RNA, 22 nt, Human
caauucuuggagaagaagcaua

SEQ ID NO: 286547 - RNA, 22 nt, Human
ccuccugggcuccugucugcac

SEQ ID NO: 286548 - RNA, 22 nt, Human
cuccaggacugaggacagagcu

SEQ ID NO: 286549 - RNA, 22 nt, Human
agugugagcuaauagcagagcc

SEQ ID NO: 286550 - RNA, 22 nt, Human
ucucugggccuguuuucucauc

SEQ ID NO: 286551 - RNA, 22 nt, Human
uuuucuaacaucuaguaauuug

SEQ ID NO: 286552 - RNA, 22 nt, Human
cacaguuuugcccagggcuucu

SEQ ID NO: 286553 - RNA, 20 nt, Human
cuuuaguuauuaacagcacu

SEQ ID NO: 286554 - RNA, 22 nt, Human
uauuuuugccucucagauaaaa

SEQ ID NO: 286555 - RNA, 22 nt, Human
ugcaggugacaccacucuuccu

SEQ ID NO: 286556 - RNA, 22 nt, Human
ucagagaauuguuuaauggaau

SEQ ID NO: 286557 - RNA, 22 nt, Human
uuuagauaaugcucaagcaauu

SEQ ID NO: 286558 - RNA, 22 nt, Human
cagaagcuuugucuagucuuga

SEQ ID NO: 286559 - RNA, 22 nt, Human
aaaugccaaggagagacuguua

SEQ ID NO: 286560 - RNA, 22 nt, Human
aaacuacacuuugggaccagca

SEQ ID NO: 286561 - RNA, 22 nt, Human
ccugagcucaagaaggugacca

SEQ ID NO: 286562 - RNA, 22 nt, Human
agagucagaaagcagacagggg

SEQ ID NO: 286563 - RNA, 22 nt, Human
auuuacagccuugaaaacagca

SEQ ID NO: 286564 - RNA, 22 nt, Human
uucacauuugaaaggaaagaua

SEQ ID NO: 286565 - RNA, 22 nt, Human
uuaccaaaugaaauagagauuu

SEQ ID NO: 286566 - RNA, 22 nt, Human
uuuuugcuaauccccagccacu

SEQ ID NO: 286567 - RNA, 22 nt, Human
gucccagggcaaggcuguuucu

SEQ ID NO: 286568 - RNA, 22 nt, Human
uaaauuagggacuuuaguuaau

SEQ ID NO: 286569 - RNA, 22 nt, Human
acagaugguuauugucauuucu

SEQ ID NO: 286570 - RNA, 22 nt, Human
uacagugcgauuuuuaggccuc

SEQ ID NO: 286571 - RNA, 22 nt, Human
aguguucuagcgcugugcuugu

SEQ ID NO: 286572 - RNA, 22 nt, Human
cagauucucacuguauucaggu

SEQ ID NO: 286573 - RNA, 22 nt, Human
gcuccuggcucuggccaaggga

SEQ ID NO: 286574 - RNA, 18 nt, Human
ucuugccugcacccucuc

SEQ ID NO: 286575 - RNA, 22 nt, Human
auuuauaacgugcagccagggu

SEQ ID NO: 286576 - RNA, 20 nt, Human
uuccagagaucugcauuuua

SEQ ID NO: 286577 - RNA, 22 nt, Human
gucugcccucacaugcacucuu

SEQ ID NO: 286578 - RNA, 22 nt, Human
acacuuuacagaauguuuugau

SEQ ID NO: 286579 - RNA, 22 nt, Human
ccuguggccugaauuugguaaa

SEQ ID NO: 286580 - RNA, 22 nt, Human
gcagggcagagggagaaucucu

SEQ ID NO: 286581 - RNA, 22 nt, Human
uucacugccaacuaacauggaa

SEQ ID NO: 286582 - RNA, 17 nt, Human
ucagcaaagacaaagga

SEQ ID NO: 286583 - RNA, 22 nt, Human
gcauucuucgaaguaaguagug

SEQ ID NO: 286584 - RNA, 22 nt, Human
agaaagcuggagucaagcagag

SEQ ID NO: 286585 - RNA, 22 nt, Human
uggcuuggacuaaauggaccgu

SEQ ID NO: 286586 - RNA, 22 nt, Human
cccaggcagccugcagggaagg

SEQ ID NO: 286587 - RNA, 22 nt, Human
aggcuuggaaaauuuacagugu

SEQ ID NO: 286588 - RNA, 22 nt, Human
uuggaacauccaggacagauau

SEQ ID NO: 286589 - RNA, 22 nt, Human
aagcaauauacugauaugauua

SEQ ID NO: 286590 - RNA, 22 nt, Human
guuauaaauaccuaauaggauu

SEQ ID NO: 286591 - RNA, 22 nt, Human
gcucuucuaaagaauguacagg

SEQ ID NO: 286592 - RNA, 22 nt, Human
gcugucuuccuugcuccaaggg

SEQ ID NO: 286593 - RNA, 22 nt, Human
uguuuacuuaaauguuuucaua

SEQ ID NO: 286594 - RNA, 22 nt, Human
gggagcauuucccuguguugaa

SEQ ID NO: 286595 - RNA, 22 nt, Human
uccugaaauucugguugucacu

SEQ ID NO: 286596 - RNA, 22 nt, Human
accuugaacccagcuugcugca

SEQ ID NO: 286597 - RNA, 22 nt, Human
cagagucagagcuccauggagu

SEQ ID NO: 286598 - RNA, 17 nt, Human
ccaggugggaggugggg

SEQ ID NO: 286599 - RNA, 22 nt, Human
agauuugaaacuugcuucauaa

SEQ ID NO: 286600 - RNA, 22 nt, Human
agacugaaauagugcacaccaa

SEQ ID NO: 286601 - RNA, 18 nt, Human
agucuuuauuucuuucau

SEQ ID NO: 286602 - RNA, 22 nt, Human
aauguuaauguguuugcuuaug

SEQ ID NO: 286603 - RNA, 22 nt, Human
agggcuccaggggaccaucagu

SEQ ID NO: 286604 - RNA, 22 nt, Human
aacuccugaggaaauggucuca

SEQ ID NO: 286605 - RNA, 22 nt, Human
ggccucuguuuggagccaggau

SEQ ID NO: 286606 - RNA, 22 nt, Human
cuucugugcuaaaugcaaaacc

SEQ ID NO: 286607 - RNA, 22 nt, Human
uaugaacugugagugugauggg

SEQ ID NO: 286608 - RNA, 22 nt, Human
uuaaacugcagacucaguguuc

SEQ ID NO: 286609 - RNA, 18 nt, Human
cccacacagcaguagcuc

SEQ ID NO: 286610 - RNA, 22 nt, Human
gaggugucccugacccuuugca

SEQ ID NO: 286611 - RNA, 22 nt, Human
caguucucugugccucgcuggg

SEQ ID NO: 286612 - RNA, 17 nt, Human
cugccuggagucccauc

SEQ ID NO: 286613 - RNA, 22 nt, Human
uugguacaaaaguaacuguggu

SEQ ID NO: 286614 - RNA, 22 nt, Human
acauucuuggacuccacucuag

SEQ ID NO: 286615 - RNA, 23 nt, Human
ucccuggccgcaauggccgccuu

SEQ ID NO: 286616 - RNA, 22 nt, Human
cauuuuacgacauagggcaggc

SEQ ID NO: 286617 - RNA, 22 nt, Human
acuuggaaagaugcaacacagu

SEQ ID NO: 286618 - RNA, 20 nt, Human
uuguuucugcuauuuucuaa

SEQ ID NO: 286619 - RNA, 22 nt, Human
uccagaaaaaguaauuuauuug

SEQ ID NO: 286620 - RNA, 21 nt, Human
ucugggcugcugcugcccauc

SEQ ID NO: 286621 - RNA, 22 nt, Human
aucuuuuuacuaacacugcuua

SEQ ID NO: 286622 - RNA, 19 nt, Human
ggcaggugugcuuaugcuu

SEQ ID NO: 286623 - RNA, 22 nt, Human
agagugagggggcacugagacg

SEQ ID NO: 286624 - RNA, 22 nt, Human
ccaggccucccuuuuccagcca

SEQ ID NO: 286625 - RNA, 22 nt, Human
uuauacauguuuauaagguuga

SEQ ID NO: 286626 - RNA, 22 nt, Human
gcuugggaaacguaguuccuag

SEQ ID NO: 286627 - RNA, 23 nt, Human
ccuggcagcaaacgaggagguua

SEQ ID NO: 286628 - RNA, 22 nt, Human
uuuguuagagugugggaggcug

SEQ ID NO: 286629 - RNA, 22 nt, Human
uuggaaaaugaggcacagagag

SEQ ID NO: 286630 - RNA, 22 nt, Human
cucugggcaaagaugccucauc

SEQ ID NO: 286631 - RNA, 22 nt, Human
ugagucacacauuucuucauac

SEQ ID NO: 286632 - RNA, 22 nt, Human
gggagggaaggaggcgccgugu

SEQ ID NO: 286633 - RNA, 22 nt, Human
uuucaaauggagucgugaaaug

SEQ ID NO: 286634 - RNA, 22 nt, Human
cuguccagucuuuagcaagcug

SEQ ID NO: 286635 - RNA, 22 nt, Human
gguagggcaaaguagggcaccu

SEQ ID NO: 286636 - RNA, 22 nt, Human
agauaaaaugguucaaaggcua

SEQ ID NO: 286637 - RNA, 22 nt, Human
uaauacagaaguguauuaaaau

SEQ ID NO: 286638 - RNA, 22 nt, Human
gucuggcuuuauauuugcuauu

SEQ ID NO: 286639 - RNA, 22 nt, Human
auguguuuaccaggggaacaug

SEQ ID NO: 286640 - RNA, 22 nt, Human
uggccaggcagguagaacggcc

SEQ ID NO: 286641 - RNA, 22 nt, Human
uggcagguggcucuggcauucu

SEQ ID NO: 286642 - RNA, 22 nt, Human
gagaggcugaaaucacaggagc

SEQ ID NO: 286643 - RNA, 20 nt, Human
uucuucucuaguuaucuuca

SEQ ID NO: 286644 - RNA, 23 nt, Human
uuauugaggguguagauuggugu

SEQ ID NO: 286645 - RNA, 22 nt, Human
gccaggcagcagcgaggauggu

SEQ ID NO: 286646 - RNA, 22 nt, Human
gagcuguguaugcaucauucug

SEQ ID NO: 286647 - RNA, 19 nt, Human
uacaagcuuuuuuggcagg

SEQ ID NO: 286648 - RNA, 22 nt, Human
accuuuauaugaaagaugacau

SEQ ID NO: 286649 - RNA, 22 nt, Human
uguaauuuccugauguuagaac

SEQ ID NO: 286650 - RNA, 22 nt, Human
cuguucaguaaccuauaaaaca

SEQ ID NO: 286651 - RNA, 22 nt, Human
auuccagauggcuucaaguaag

SEQ ID NO: 286652 - RNA, 22 nt, Human
cccagugucaccaacaggacac

SEQ ID NO: 286653 - RNA, 22 nt, Human
aauaucaacaguguccuucuaa

SEQ ID NO: 286654 - RNA, 22 nt, Human
cccaggcagugugugcaugcgu

SEQ ID NO: 286655 - RNA, 22 nt, Human
ucuuggcaguggaauaccagga

SEQ ID NO: 286656 - RNA, 22 nt, Human
caagcuuguuucuccugggggu

SEQ ID NO: 286657 - RNA, 22 nt, Human
ccagagagaaauggauuugagu

SEQ ID NO: 286658 - RNA, 22 nt, Human
uuuguaaaggccugaauuucag

SEQ ID NO: 286659 - RNA, 22 nt, Human
aacagacagaaaaaugugaucu

SEQ ID NO: 286660 - RNA, 22 nt, Human
uucccucucacuuaaagcuugg

SEQ ID NO: 286661 - RNA, 22 nt, Human
auccuggcuuuaggucagaggc

SEQ ID NO: 286662 - RNA, 22 nt, Human
ggugggaggacuguuugaggca

SEQ ID NO: 286663 - RNA, 22 nt, Human
gaggagggagaauuaggcuuaa

SEQ ID NO: 286664 - RNA, 22 nt, Human
ucagacaggcuggacagcuugc

SEQ ID NO: 286665 - RNA, 22 nt, Human
gagggcucaacuacuacuaggc

SEQ ID NO: 286666 - RNA, 22 nt, Human
auuucuguaacuuaugaaaguu

SEQ ID NO: 286667 - RNA, 22 nt, Human
caauuuuauugguccaaauaca

SEQ ID NO: 286668 - RNA, 22 nt, Human
ugcauacacaugugcacauacg

SEQ ID NO: 286669 - RNA, 22 nt, Human
gauaauauuagaagauacaaau

SEQ ID NO: 286670 - RNA, 22 nt, Human
gcagguguucucagaggaggcu

SEQ ID NO: 286671 - RNA, 22 nt, Human
ugcaggcuggggaggcagacuu

SEQ ID NO: 286672 - RNA, 22 nt, Human
uuucaaggauguuauauaaaug

SEQ ID NO: 286673 - RNA, 22 nt, Human
ucuccacaccagaaggagcuga

SEQ ID NO: 286674 - RNA, 22 nt, Human
gcuggagguuucaccugaguuu

SEQ ID NO: 286675 - RNA, 22 nt, Human
aagccuucccuuuuugagcuca

SEQ ID NO: 286676 - RNA, 23 nt, Human
cuuuucauugccuuagcgcagag

SEQ ID NO: 286677 - RNA, 20 nt, Human
acaguuuauuuuacuugguu

SEQ ID NO: 286678 - RNA, 22 nt, Human
auuccucauuuguugagaacca

SEQ ID NO: 286679 - RNA, 22 nt, Human
ucccuccccacuucugagcuuu

SEQ ID NO: 286680 - RNA, 22 nt, Human
aggaaagcuuggcaaacuaaau

SEQ ID NO: 286681 - RNA, 22 nt, Human
aguccaagauuagggugacagc

SEQ ID NO: 286682 - RNA, 22 nt, Human
uugcuuuacaaaaauugauggu

SEQ ID NO: 286683 - RNA, 22 nt, Human
aagucuaaacacauauuuaaaa

SEQ ID NO: 286684 - RNA, 22 nt, Human
auucuucauguugaagcuguca

SEQ ID NO: 286685 - RNA, 22 nt, Human
agaguccaaaugugcaguuaug

SEQ ID NO: 286686 - RNA, 20 nt, Human
acugcuguagaccaucugca

SEQ ID NO: 286687 - RNA, 22 nt, Human
cagcuuuaccuuuaggaguaac

SEQ ID NO: 286688 - RNA, 22 nt, Human
gcuggcaggauaacuucuaagc

SEQ ID NO: 286689 - RNA, 22 nt, Human
aaaauucugucauuaaauugug

SEQ ID NO: 286690 - RNA, 22 nt, Human
gcuuccaccuacuaaaugccac

SEQ ID NO: 286691 - RNA, 22 nt, Human
ugggcagggagcuggaaccaca

SEQ ID NO: 286692 - RNA, 20 nt, Human
guauuacaggcuuagaacca

SEQ ID NO: 286693 - RNA, 22 nt, Human
ugacaagaagaccugguaauga

SEQ ID NO: 286694 - RNA, 22 nt, Human
cagugucaggaucaguauauuu

SEQ ID NO: 286695 - RNA, 22 nt, Human
acagucuugagcaucagccaga

SEQ ID NO: 286696 - RNA, 22 nt, Human
cagagaaagggugaauuccuuc

SEQ ID NO: 286697 - RNA, 22 nt, Human
ugguuaaguccagaaaggaagc

SEQ ID NO: 286698 - RNA, 22 nt, Human
uuccugguuugccuggaaucca

SEQ ID NO: 286699 - RNA, 22 nt, Human
auaguuugugaaacacagcagu

SEQ ID NO: 286700 - RNA, 22 nt, Human
cuuaaauuggaugaguuaaguu

SEQ ID NO: 286701 - RNA, 22 nt, Human
guaaaauagaauaacguggcua

SEQ ID NO: 286702 - RNA, 22 nt, Human
cugcugcccuagacccaguccu

SEQ ID NO: 286703 - RNA, 22 nt, Human
ugugugugacaaccuaguucag

SEQ ID NO: 286704 - RNA, 23 nt, Human
ucuaaugcaauuagaaauuaggg

SEQ ID NO: 286705 - RNA, 22 nt, Human
uucccacauucuuuacauucau

SEQ ID NO: 286706 - RNA, 22 nt, Human
acuagaaagcaaaagccauuuc

SEQ ID NO: 286707 - RNA, 22 nt, Human
aaggcauuuguuggauuucuca

SEQ ID NO: 286708 - RNA, 22 nt, Human
cauuucuaccaaaugugacugg

SEQ ID NO: 286709 - RNA, 22 nt, Human
agauacacagcccugccaucac

SEQ ID NO: 286710 - RNA, 22 nt, Human
uacaugcaugauacaaaguugc

SEQ ID NO: 286711 - RNA, 21 nt, Human
ucuggcaggaagacggauggg

SEQ ID NO: 286712 - RNA, 22 nt, Human
auugcugaaaguauuuuaugac

SEQ ID NO: 286713 - RNA, 22 nt, Human
aagauuuucucaacuguauuug

SEQ ID NO: 286714 - RNA, 22 nt, Human
caauuucugggccucacacaag

SEQ ID NO: 286715 - RNA, 22 nt, Human
cagaggcucagauggcccuggc

SEQ ID NO: 286716 - RNA, 20 nt, Human
cccaguguccagccuugcca

SEQ ID NO: 286717 - RNA, 22 nt, Human
cuccuccuaaaugauucuuccu

SEQ ID NO: 286718 - RNA, 22 nt, Human
ucauagcuaagcuccagagugc

SEQ ID NO: 286719 - RNA, 22 nt, Human
ggcuuuuguuucagcucugcua

SEQ ID NO: 286720 - RNA, 22 nt, Human
gcucagcacuuucuccaaccac

SEQ ID NO: 286721 - RNA, 19 nt, Human
uuagguauuauugcuuucc

SEQ ID NO: 286722 - RNA, 22 nt, Human
uuuuucaugagacuagaaguca

SEQ ID NO: 286723 - RNA, 22 nt, Human
agaagcuauaacaacaauuaua

SEQ ID NO: 286724 - RNA, 22 nt, Human
ccucuuggagucuaucauucug

SEQ ID NO: 286725 - RNA, 20 nt, Human
aggaggaaaaaaugacgagc

SEQ ID NO: 286726 - RNA, 22 nt, Human
accuguuuguuaagaaagcuuc

SEQ ID NO: 286727 - RNA, 22 nt, Human
gaggacaagcugugaguggggu

SEQ ID NO: 286728 - RNA, 19 nt, Human
aauuagggagucgguuaag

SEQ ID NO: 286729 - RNA, 22 nt, Human
uaauucagggccagaaucccca

SEQ ID NO: 286730 - RNA, 22 nt, Human
aguccggggucuggacaccugg

SEQ ID NO: 286731 - RNA, 22 nt, Human
uuccugugugacucaagugguu

SEQ ID NO: 286732 - RNA, 21 nt, Human
agggaaaaggcugagugaggg

SEQ ID NO: 286733 - RNA, 21 nt, Human
uccagaccucccucuccuagc

SEQ ID NO: 286734 - RNA, 22 nt, Human
aacaugaaguuuucuauaguga

SEQ ID NO: 286735 - RNA, 22 nt, Human
agagccagcauuugggcccugc

SEQ ID NO: 286736 - RNA, 20 nt, Human
uuacagugggaccuuccuga

SEQ ID NO: 286737 - RNA, 22 nt, Human
aaguauuucguucugaaaaagu

SEQ ID NO: 286738 - RNA, 22 nt, Human
ccauucuuucagugucucaugu

SEQ ID NO: 286739 - RNA, 22 nt, Human
uggcaaagugacuccuuggggc

SEQ ID NO: 286740 - RNA, 21 nt, Human
caugugucauuggagagcaau

SEQ ID NO: 286741 - RNA, 22 nt, Human
ugaagcuuuccuguggucagga

SEQ ID NO: 286742 - RNA, 22 nt, Human
uuuauuggauauuuacaagaua

SEQ ID NO: 286743 - RNA, 22 nt, Human
ugcaaacagaaaagcuacuuug

SEQ ID NO: 286744 - RNA, 22 nt, Human
ggucucugaacuuccacugcgc

SEQ ID NO: 286745 - RNA, 22 nt, Human
uccagacccaugacccugggga

SEQ ID NO: 286746 - RNA, 20 nt, Human
ggaaucaggguaauguacug

SEQ ID NO: 286747 - RNA, 22 nt, Human
gacaggcuucaugauggcagga

SEQ ID NO: 286748 - RNA, 22 nt, Human
gcugucuuggguagaaagaggu

SEQ ID NO: 286749 - RNA, 22 nt, Human
gacacugugcuagcugggcuua

SEQ ID NO: 286750 - RNA, 22 nt, Human
uuuauuguguugaaacugaauu

SEQ ID NO: 286751 - RNA, 21 nt, Human
auucaguuugacaucuagcag

SEQ ID NO: 286752 - RNA, 22 nt, Human
cucccagguuacaucugagccu

SEQ ID NO: 286753 - RNA, 22 nt, Human
uuccuggcaaagugagcaucac

SEQ ID NO: 286754 - RNA, 22 nt, Human
guguguccaaggccacaauagc

SEQ ID NO: 286755 - RNA, 22 nt, Human
uggcagguuggccuuugguuca

SEQ ID NO: 286756 - RNA, 22 nt, Human
ucugaaauaacugaugccagau

SEQ ID NO: 286757 - RNA, 22 nt, Human
uuccuggcugucaugcccuagu

SEQ ID NO: 286758 - RNA, 19 nt, Human
ggaagagaggaaaggugga

SEQ ID NO: 286759 - RNA, 22 nt, Human
aagagucauagagacauugauu

SEQ ID NO: 286760 - RNA, 22 nt, Human
guuauuagaagugaaggauugu

SEQ ID NO: 286761 - RNA, 22 nt, Human
cagcugaaagaaggaaguguca

SEQ ID NO: 286762 - RNA, 21 nt, Human
aagaaagauaauuaaggaccc

SEQ ID NO: 286763 - RNA, 22 nt, Human
ugggcaggugcuauuuuccaug

SEQ ID NO: 286764 - RNA, 22 nt, Human
ucaggcaguagaauugcuugaa

SEQ ID NO: 286765 - RNA, 22 nt, Human
agggaccaaucaccgacaggcu

SEQ ID NO: 286766 - RNA, 22 nt, Human
gggccaagggugcguggcagga

SEQ ID NO: 286767 - RNA, 22 nt, Human
gacuuuauccugccugaccacg

SEQ ID NO: 286768 - RNA, 22 nt, Human
ggcuuuauauuguuugagcaga

SEQ ID NO: 286769 - RNA, 22 nt, Human
agacagguagcaggacagauau

SEQ ID NO: 286770 - RNA, 22 nt, Human
cagacaggguccuguccgucac

SEQ ID NO: 286771 - RNA, 22 nt, Human
cauuaaaauaucucaugguguu

SEQ ID NO: 286772 - RNA, 22 nt, Human
aggggcagccucacaauccucu

SEQ ID NO: 286773 - RNA, 22 nt, Human
aaagcugcccuacacggaagca

SEQ ID NO: 286774 - RNA, 22 nt, Human
gguucucuuccuccugacugag

SEQ ID NO: 286775 - RNA, 22 nt, Human
caagauaagaucauuuacacua

SEQ ID NO: 286776 - RNA, 18 nt, Human
cugugggcuggugcauga

SEQ ID NO: 286777 - RNA, 22 nt, Human
uaugccagacugugagcuucuu

SEQ ID NO: 286778 - RNA, 22 nt, Human
gcaugcagucaaccaguaaggg

SEQ ID NO: 286779 - RNA, 22 nt, Human
uucuuagugguagucaucuuug

SEQ ID NO: 286780 - RNA, 22 nt, Human
ccagggcagcagaauuggggca

SEQ ID NO: 286781 - RNA, 22 nt, Human
cuaaaauuaccuaccaguuuag

SEQ ID NO: 286782 - RNA, 22 nt, Human
gaggagggagcuggaagcucuu

SEQ ID NO: 286783 - RNA, 22 nt, Human
aaauuuucucucuaagacuuaa

SEQ ID NO: 286784 - RNA, 22 nt, Human
cuauuuucugucucuauagagu

SEQ ID NO: 286785 - RNA, 22 nt, Human
gaacuguguacauuguagauaa

SEQ ID NO: 286786 - RNA, 22 nt, Human
uccuggcauccgugggucugug

SEQ ID NO: 286787 - RNA, 22 nt, Human
uuccuucuucauuguguuacag

SEQ ID NO: 286788 - RNA, 22 nt, Human
ggacuccucuagaaguugaggc

SEQ ID NO: 286789 - RNA, 22 nt, Human
uuucacaacugcuuauuugaga

SEQ ID NO: 286790 - RNA, 21 nt, Human
ucuuccuccacagcgugccac

SEQ ID NO: 286791 - RNA, 22 nt, Human
cuuaaucucaccugcaaagucc

SEQ ID NO: 286792 - RNA, 22 nt, Human
augcaaacaugaagagaaagag

SEQ ID NO: 286793 - RNA, 21 nt, Human
agcagguguaaaggaggaaau

SEQ ID NO: 286794 - RNA, 22 nt, Human
uauguacacacacaugcaugua

SEQ ID NO: 286795 - RNA, 22 nt, Human
cuauguuuaucuguauuucugu

SEQ ID NO: 286796 - RNA, 22 nt, Human
uaagccugcaugaaccaugaga

SEQ ID NO: 286797 - RNA, 22 nt, Human
aaguucuuagacaagcuugugg

SEQ ID NO: 286798 - RNA, 22 nt, Human
acuucaaacaauuaacagagaa

SEQ ID NO: 286799 - RNA, 22 nt, Human
gcugcuuuauaaucucggcaga

SEQ ID NO: 286800 - RNA, 21 nt, Human
augcacaaaaagacucuuucu

SEQ ID NO: 286801 - RNA, 22 nt, Human
ggauuucuuccuuccucagaag

SEQ ID NO: 286802 - RNA, 22 nt, Human
aagcccugccacccauucacug

SEQ ID NO: 286803 - RNA, 22 nt, Human
cuguccagaaagggggcaacaa

SEQ ID NO: 286804 - RNA, 22 nt, Human
ucagggaccccucugaguggag

SEQ ID NO: 286805 - RNA, 22 nt, Human
uggacaugucuucuccaagaaa

SEQ ID NO: 286806 - RNA, 22 nt, Human
agggcagcccuucugggagggc

SEQ ID NO: 286807 - RNA, 22 nt, Human
ugaggaaagaaaggcaugcaug

SEQ ID NO: 286808 - RNA, 23 nt, Human
uuuuauugauauguagcuguugu

SEQ ID NO: 286809 - RNA, 22 nt, Human
aagagaaggugaggaagccggu

SEQ ID NO: 286810 - RNA, 22 nt, Human
aggaggcugaacuagggucugg

SEQ ID NO: 286811 - RNA, 18 nt, Human
ucugaaagcaccggugaa

SEQ ID NO: 286812 - RNA, 22 nt, Human
acuucuucuucagcugggggau

SEQ ID NO: 286813 - RNA, 22 nt, Human
ccugccuucuaaagcgcccgcc

SEQ ID NO: 286814 - RNA, 22 nt, Human
cagcuauuggcaagaaguggug

SEQ ID NO: 286815 - RNA, 22 nt, Human
ugcagggcuuccucuuggaguu

SEQ ID NO: 286816 - RNA, 18 nt, Human
ugaggcagucagugaugg

SEQ ID NO: 286817 - RNA, 23 nt, Human
agcacagacuagaaaggucuuuc

SEQ ID NO: 286818 - RNA, 22 nt, Human
uucuuuugcaagacuauugauu

SEQ ID NO: 286819 - RNA, 22 nt, Human
aaaaucuugugacuuaggaagg

SEQ ID NO: 286820 - RNA, 22 nt, Human
uagacagauguuuucuggcugu

SEQ ID NO: 286821 - RNA, 22 nt, Human
acuggcaauagcaaaugcuugg

SEQ ID NO: 286822 - RNA, 22 nt, Human
ccaggucaagcuccccuguggu

SEQ ID NO: 286823 - RNA, 22 nt, Human
uccuggccacacauuaauagug

SEQ ID NO: 286824 - RNA, 22 nt, Human
aauuaguaaccuaauuccaucu

SEQ ID NO: 286825 - RNA, 22 nt, Human
ugguggcaauucaaagacagca

SEQ ID NO: 286826 - RNA, 17 nt, Human
uuucugcaugauuggac

SEQ ID NO: 286827 - RNA, 22 nt, Human
aggaagaaccuaagaaagucuc

SEQ ID NO: 286828 - RNA, 18 nt, Human
agcuccugaacucugugg

SEQ ID NO: 286829 - RNA, 22 nt, Human
aaguuuuccuguguccaagaug

SEQ ID NO: 286830 - RNA, 22 nt, Human
cuuuauauauucccaggcugcc

SEQ ID NO: 286831 - RNA, 22 nt, Human
caaaauaccacgacuuguuuua

SEQ ID NO: 286832 - RNA, 22 nt, Human
ccuggcagcuccguggccuucc

SEQ ID NO: 286833 - RNA, 22 nt, Human
cuguggcucauucuugguggca

SEQ ID NO: 286834 - RNA, 18 nt, Human
uucggcagauacgcuugg

SEQ ID NO: 286835 - RNA, 22 nt, Human
ugcaggugccucuugagcuugu

SEQ ID NO: 286836 - RNA, 22 nt, Human
uggagcugccuggcaccuacag

SEQ ID NO: 286837 - RNA, 22 nt, Human
uuucuuauacuauauugucauc

SEQ ID NO: 286838 - RNA, 22 nt, Human
agggccucugacgcccccagcc

SEQ ID NO: 286839 - RNA, 22 nt, Human
ggaguugauuuuggauauauua

SEQ ID NO: 286840 - RNA, 22 nt, Human
gacaggugcuaagggaccuggc

SEQ ID NO: 286841 - RNA, 19 nt, Human
caggaaugagguaauggcu

SEQ ID NO: 286842 - RNA, 22 nt, Human
uccaugagggacacuggaugcu

SEQ ID NO: 286843 - RNA, 22 nt, Human
auccugggcaagucaauguccc

SEQ ID NO: 286844 - RNA, 22 nt, Human
gaggaggggcacuugucuccua

SEQ ID NO: 286845 - RNA, 22 nt, Human
cauuuauucucagauccuuguc

SEQ ID NO: 286846 - RNA, 22 nt, Human
aauuagggagagguagcuaggu

SEQ ID NO: 286847 - RNA, 20 nt, Human
agggcagcuugaggagccgg

SEQ ID NO: 286848 - RNA, 22 nt, Human
aggcuuagacuaccuggucugu

SEQ ID NO: 286849 - RNA, 22 nt, Human
ucucuggguaaaguucucucau

SEQ ID NO: 286850 - RNA, 22 nt, Human
cuaguucuagaucccugaggaa

SEQ ID NO: 286851 - RNA, 22 nt, Human
uguccucuuccagugcuccuuc

SEQ ID NO: 286852 - RNA, 22 nt, Human
augaggagucaaggagucggag

SEQ ID NO: 286853 - RNA, 22 nt, Human
auccaggcugcuaugaggauga

SEQ ID NO: 286854 - RNA, 22 nt, Human
acuggcagaauugaauaguugu

SEQ ID NO: 286855 - RNA, 22 nt, Human
cccagaaggucgaggcugcagu

SEQ ID NO: 286856 - RNA, 22 nt, Human
agguggggccaaaugcuacagu

SEQ ID NO: 286857 - RNA, 22 nt, Human
cacugucuauuaauauaacuua

SEQ ID NO: 286858 - RNA, 22 nt, Human
ggacagacagugugagugaggc

SEQ ID NO: 286859 - RNA, 22 nt, Human
guacaaaugaaaauagaccacu

SEQ ID NO: 286860 - RNA, 22 nt, Human
acaaaugaacauauaagcuuga

SEQ ID NO: 286861 - RNA, 22 nt, Human
ugucugaugauagugucucucc

SEQ ID NO: 286862 - RNA, 23 nt, Human
ugcuggguaaauagcugaguaac

SEQ ID NO: 286863 - RNA, 22 nt, Human
aggcagcugaccacaguaugau

SEQ ID NO: 286864 - RNA, 22 nt, Human
aggaagccaagccugacacuca

SEQ ID NO: 286865 - RNA, 22 nt, Human
uucauugaaccacuuuauucuu

SEQ ID NO: 286866 - RNA, 22 nt, Human
agccagagacugugucuguaau

SEQ ID NO: 286867 - RNA, 22 nt, Human
ucaggaaagccuagaagagaac

SEQ ID NO: 286868 - RNA, 22 nt, Human
agacacagucugucuggaggag

SEQ ID NO: 286869 - RNA, 20 nt, Human
ucuucuguugccuuguucug

SEQ ID NO: 286870 - RNA, 22 nt, Human
augaaggauagggcaaaauuuu

SEQ ID NO: 286871 - RNA, 18 nt, Human
uggcagguagacucaggu

SEQ ID NO: 286872 - RNA, 22 nt, Human
gcagggauugucaaugcugcuc

SEQ ID NO: 286873 - RNA, 22 nt, Human
uucccucuuuuccaacaguugu

SEQ ID NO: 286874 - RNA, 22 nt, Human
ucucucuugucaccccaucugc

SEQ ID NO: 286875 - RNA, 22 nt, Human
ccaaggacuggacacacagguu

SEQ ID NO: 286876 - RNA, 22 nt, Human
ggaggccaggguggguggaucg

SEQ ID NO: 286877 - RNA, 21 nt, Human
ccugaaauucucacuagcuua

SEQ ID NO: 286878 - RNA, 22 nt, Human
aguguccuccucugggagccag

SEQ ID NO: 286879 - RNA, 22 nt, Human
cuuagcuuguuuucaccuaaga

SEQ ID NO: 286880 - RNA, 22 nt, Human
uccuggcacauugcaggggcuc

SEQ ID NO: 286881 - RNA, 22 nt, Human
uggaugcugcugucagggaugg

SEQ ID NO: 286882 - RNA, 22 nt, Human
gccuguuucccugacgcuuaca

SEQ ID NO: 286883 - RNA, 22 nt, Human
uccugcagucugcacucugccu

SEQ ID NO: 286884 - RNA, 22 nt, Human
ggcaauaguuguggguucuuua

SEQ ID NO: 286885 - RNA, 22 nt, Human
ccugugccauccugagcauccc

SEQ ID NO: 286886 - RNA, 23 nt, Human
ugcuggguaucagaaucacugag

SEQ ID NO: 286887 - RNA, 22 nt, Human
ucuguggcaaacacagugacca

SEQ ID NO: 286888 - RNA, 22 nt, Human
aaaccuuucugcucucagcgua

SEQ ID NO: 286889 - RNA, 22 nt, Human
uauuucagucacuucuucucug

SEQ ID NO: 286890 - RNA, 22 nt, Human
uccuggguuaauuaugauucac

SEQ ID NO: 286891 - RNA, 22 nt, Human
ugucauuuucuaaucuguuguc

SEQ ID NO: 286892 - RNA, 22 nt, Human
aucuuuauauaucuccucugaa

SEQ ID NO: 286893 - RNA, 22 nt, Human
uuccuccuacgcuuaucacuuu

SEQ ID NO: 286894 - RNA, 22 nt, Human
ugguacaagauguucuaacuga

SEQ ID NO: 286895 - RNA, 22 nt, Human
ucagcuuuuaaaaacaagaagu

SEQ ID NO: 286896 - RNA, 22 nt, Human
gcagggcaaugaucccgagagg

SEQ ID NO: 286897 - RNA, 22 nt, Human
aaagcagagaucauggcuugua

SEQ ID NO: 286898 - RNA, 22 nt, Human
uccuuagacaaagagugggcuu

SEQ ID NO: 286899 - RNA, 22 nt, Human
uccuggauggagcugcccucgc

SEQ ID NO: 286900 - RNA, 22 nt, Human
ucugccagaaguucugagagua

SEQ ID NO: 286901 - RNA, 22 nt, Human
agaggccugugugcuccagugg

SEQ ID NO: 286902 - RNA, 20 nt, Human
cucuggaagaguuuaaaugg

SEQ ID NO: 286903 - RNA, 22 nt, Human
ugcuuuaucaaagcuauaguga

SEQ ID NO: 286904 - RNA, 22 nt, Human
uuacauucagaaagauuugagu

SEQ ID NO: 286905 - RNA, 22 nt, Human
aaacauucacauuugcuaguaa

SEQ ID NO: 286906 - RNA, 22 nt, Human
uauuucugagaaccaacuuacc

SEQ ID NO: 286907 - RNA, 19 nt, Human
gagguucacgcgcuggaug

SEQ ID NO: 286908 - RNA, 22 nt, Human
uuuacuuugugucaagucaaga

SEQ ID NO: 286909 - RNA, 22 nt, Human
ggcagguggcacugcugcuccc

SEQ ID NO: 286910 - RNA, 22 nt, Human
uccugacccaccaagucuguaa

SEQ ID NO: 286911 - RNA, 22 nt, Human
uuucuuuaaaggaacucuguuu

SEQ ID NO: 286912 - RNA, 22 nt, Human
gcuggcaggagaaacggggugc

SEQ ID NO: 286913 - RNA, 22 nt, Human
ucugggugggcccgagaaaucu

SEQ ID NO: 286914 - RNA, 20 nt, Human
uuucaagucagcaauucuca

SEQ ID NO: 286915 - RNA, 21 nt, Human
agaaaaacacgauauaagccc

SEQ ID NO: 286916 - RNA, 22 nt, Human
ugacaagaaagcgucuucuuuu

SEQ ID NO: 286917 - RNA, 22 nt, Human
aggcugagcuggcccuugaaau

SEQ ID NO: 286918 - RNA, 22 nt, Human
aagcucuuuucaccauuaaagu

SEQ ID NO: 286919 - RNA, 22 nt, Human
uccaggcuagaagucacaggcc

SEQ ID NO: 286920 - RNA, 22 nt, Human
acauuaaaauggagaauuuuga

SEQ ID NO: 286921 - RNA, 22 nt, Human
cuuacauugugugcaugagggg

SEQ ID NO: 286922 - RNA, 22 nt, Human
aguuauaugugaaaacacguau

SEQ ID NO: 286923 - RNA, 22 nt, Human
aaguguguuuucaguguacuua

SEQ ID NO: 286924 - RNA, 22 nt, Human
agcucuuacauuuaggucuaug

SEQ ID NO: 286925 - RNA, 22 nt, Human
uggcucugugucucccagcagc

SEQ ID NO: 286926 - RNA, 22 nt, Human
aacauuuacaaauccuucugca

SEQ ID NO: 286927 - RNA, 22 nt, Human
agccucccuaugcaccuucagg

SEQ ID NO: 286928 - RNA, 22 nt, Human
uacacagugaguccucucugcc

SEQ ID NO: 286929 - RNA, 22 nt, Human
ucccuccuggccgucaccgcug

SEQ ID NO: 286930 - RNA, 22 nt, Human
agcugucuuucugccuccugau

SEQ ID NO: 286931 - RNA, 21 nt, Human
ucugggugcuaguguuugcuu

SEQ ID NO: 286932 - RNA, 22 nt, Human
uucuccaacacaagcaugaugu

SEQ ID NO: 286933 - RNA, 20 nt, Human
uuucaguugguuaauggcau

SEQ ID NO: 286934 - RNA, 22 nt, Human
ccaugaccccuggcauccaggg

SEQ ID NO: 286935 - RNA, 22 nt, Human
uuggaaaagugaaacuagaugc

SEQ ID NO: 286936 - RNA, 22 nt, Human
aaaguccugacugcaggggaug

SEQ ID NO: 286937 - RNA, 22 nt, Human
gaggugucccgcaguccccaag

SEQ ID NO: 286938 - RNA, 22 nt, Human
uucuggcuacccuccuaauguu

SEQ ID NO: 286939 - RNA, 22 nt, Human
acuccuggguucuaaauuugaa

SEQ ID NO: 286940 - RNA, 22 nt, Human
gccaccccaaccucccuaaguu

SEQ ID NO: 286941 - RNA, 22 nt, Human
ccaaggcuggagugcaguggcg

SEQ ID NO: 286942 - RNA, 22 nt, Human
uccacccugcuuucuuaucucc

SEQ ID NO: 286943 - RNA, 22 nt, Human
aguaaacauaauuuaccuguag

SEQ ID NO: 286944 - RNA, 22 nt, Human
gugaugucagcaagaauaggaa

SEQ ID NO: 286945 - RNA, 19 nt, Human
agagccagacagcauagga

SEQ ID NO: 286946 - RNA, 22 nt, Human
uuaaagcugagcccucagaagc

SEQ ID NO: 286947 - RNA, 22 nt, Human
agacccucuccaugcccacugc

SEQ ID NO: 286948 - RNA, 22 nt, Human
uguuccugaaugccuggcuggc

SEQ ID NO: 286949 - RNA, 22 nt, Human
uacucaguuuaugauuucaagu

SEQ ID NO: 286950 - RNA, 22 nt, Human
uucauucuuugaaucugaggua

SEQ ID NO: 286951 - RNA, 22 nt, Human
uacagauauuguacaguuauag

SEQ ID NO: 286952 - RNA, 22 nt, Human
ugacauguauaucuuacgcuau

SEQ ID NO: 286953 - RNA, 22 nt, Human
auucuacaugauagaagggaga

SEQ ID NO: 286954 - RNA, 22 nt, Human
cugaggaguuuggguuguucaa

SEQ ID NO: 286955 - RNA, 22 nt, Human
aaauaguuagcccugcauauau

SEQ ID NO: 286956 - RNA, 22 nt, Human
uuccagagguagcaaugacuug

SEQ ID NO: 286957 - RNA, 22 nt, Human
cacaguuuugucuugguuucca

SEQ ID NO: 286958 - RNA, 22 nt, Human
auacuacacuaugcauggaugu

SEQ ID NO: 286959 - RNA, 22 nt, Human
uugagggucuggaucugcugcu

SEQ ID NO: 286960 - RNA, 22 nt, Human
gcagggacaacugugcaccuga

SEQ ID NO: 286961 - RNA, 20 nt, Human
uguuucuuuuaaugagcggc

SEQ ID NO: 286962 - RNA, 22 nt, Human
uguauacaggauuacucauagc

SEQ ID NO: 286963 - RNA, 22 nt, Human
ucaguuaaucaauguggucuaa

SEQ ID NO: 286964 - RNA, 22 nt, Human
cccugaccaccagcuccauuug

SEQ ID NO: 286965 - RNA, 22 nt, Human
uguacuauuaagaggccuaaau

SEQ ID NO: 286966 - RNA, 22 nt, Human
caguccagagcccaccagagga

SEQ ID NO: 286967 - RNA, 22 nt, Human
uuccuacaauuagagccucuuu

SEQ ID NO: 286968 - RNA, 22 nt, Human
agaugguugucgcaaaugaaug

SEQ ID NO: 286969 - RNA, 22 nt, Human
auuaaauuaaguggcuaauuua

SEQ ID NO: 286970 - RNA, 22 nt, Human
gaguccagugauguuccugguc

SEQ ID NO: 286971 - RNA, 21 nt, Human
gaaaagcaagggaguagaaca

SEQ ID NO: 286972 - RNA, 18 nt, Human
ucucugaauauuuuaugu

SEQ ID NO: 286973 - RNA, 23 nt, Human
uaauucacauauacauugcuuca

SEQ ID NO: 286974 - RNA, 22 nt, Human
uguccuggagugcuugggggaa

SEQ ID NO: 286975 - RNA, 22 nt, Human
aaaugaucauguaauuucagaa

SEQ ID NO: 286976 - RNA, 22 nt, Human
ucacaugaguauuauuuuccaa

SEQ ID NO: 286977 - RNA, 22 nt, Human
caguggcuucucaugucauuca

SEQ ID NO: 286978 - RNA, 22 nt, Human
cuguacuaauugcuuuacaugu

SEQ ID NO: 286979 - RNA, 22 nt, Human
guuuacaguacucacuugcauu

SEQ ID NO: 286980 - RNA, 22 nt, Human
gucuggcucccacucuuacaaa

SEQ ID NO: 286981 - RNA, 22 nt, Human
ggucuggauuuuaucuacugua

SEQ ID NO: 286982 - RNA, 22 nt, Human
auuuacugagcagcuaccaugu

SEQ ID NO: 286983 - RNA, 22 nt, Human
guuaauuuaguagaguccagau

SEQ ID NO: 286984 - RNA, 22 nt, Human
gguguccuuagaaagcagaccu

SEQ ID NO: 286985 - RNA, 22 nt, Human
gcuguucagaugcgauucagga

SEQ ID NO: 286986 - RNA, 22 nt, Human
cagucucucagcuuucagcugu

SEQ ID NO: 286987 - RNA, 22 nt, Human
ggcaggcaguguggugugaaac

SEQ ID NO: 286988 - RNA, 22 nt, Human
uaaguuuuaagcaaucugauaa

SEQ ID NO: 286989 - RNA, 22 nt, Human
gguguccuuguugaacgaaaau

SEQ ID NO: 286990 - RNA, 22 nt, Human
aucuuucuccauauacaucuuu

SEQ ID NO: 286991 - RNA, 22 nt, Human
uaaauucacuccugguagaccu

SEQ ID NO: 286992 - RNA, 22 nt, Human
gcaggugucuucagcaggauga

SEQ ID NO: 286993 - RNA, 18 nt, Human
agggccagcugugaguag

SEQ ID NO: 286994 - RNA, 22 nt, Human
ccugggcuguugcaucauccuu

SEQ ID NO: 286995 - RNA, 22 nt, Human
aaacugugaagcaaguacaagg

SEQ ID NO: 286996 - RNA, 22 nt, Human
ucagcucuacacacaccugugu

SEQ ID NO: 286997 - RNA, 22 nt, Human
uuugauuuacuggauauucuca

SEQ ID NO: 286998 - RNA, 22 nt, Human
cgccccagccaguugagcggcg

SEQ ID NO: 286999 - RNA, 22 nt, Human
auuguauaacagcauguauuuu

SEQ ID NO: 287000 - RNA, 22 nt, Human
aacuagaaagaacauauuucca

SEQ ID NO: 287001 - RNA, 22 nt, Human
uacuaguucucauaugaaauaa

SEQ ID NO: 287002 - RNA, 22 nt, Human
uggucuggggaccgaggguuac

SEQ ID NO: 287003 - RNA, 20 nt, Human
ggaaggggcaaaguguguga

SEQ ID NO: 287004 - RNA, 22 nt, Human
ucuggcccuauggcauguaccu

SEQ ID NO: 287005 - RNA, 22 nt, Human
aauauuuguuaguguuuuaaug

SEQ ID NO: 287006 - RNA, 22 nt, Human
ggcagacuuuuucucugaaggg

SEQ ID NO: 287007 - RNA, 20 nt, Human
acuuuacugagcuguaauuc

SEQ ID NO: 287008 - RNA, 22 nt, Human
agccuucaaccuagcuagagca

SEQ ID NO: 287009 - RNA, 22 nt, Human
uccaagcucucuaugccaugau

SEQ ID NO: 287010 - RNA, 22 nt, Human
aagggggcggcagccaguggaa

SEQ ID NO: 287011 - RNA, 22 nt, Human
uuuacagucucuauagucaaaa

SEQ ID NO: 287012 - RNA, 22 nt, Human
uuagcaaauaucuugaaacagg

SEQ ID NO: 287013 - RNA, 22 nt, Human
uucuucuuuccuauaauuaauu

SEQ ID NO: 287014 - RNA, 22 nt, Human
uuucuugagcccaggaggugga

SEQ ID NO: 287015 - RNA, 22 nt, Human
acauggcucagucucaugacag

SEQ ID NO: 287016 - RNA, 22 nt, Human
cuggcaguuggcauuggcaucu

SEQ ID NO: 287017 - RNA, 22 nt, Human
ccagacccugcucuggggcucu

SEQ ID NO: 287018 - RNA, 22 nt, Human
gcuuuuggaccucugauguuuc

SEQ ID NO: 287019 - RNA, 22 nt, Human
ugaugagggagauuugagccca

SEQ ID NO: 287020 - RNA, 22 nt, Human
uuuaucuguuguaccugcauug

SEQ ID NO: 287021 - RNA, 22 nt, Human
auugcuggcagcuggaucugca

SEQ ID NO: 287022 - RNA, 22 nt, Human
ugcuauuuuuaucuugaucaaa

SEQ ID NO: 287023 - RNA, 22 nt, Human
aauuucagaacccaaauuagcg

SEQ ID NO: 287024 - RNA, 22 nt, Human
uuccuggcucucuguugcacag

SEQ ID NO: 287025 - RNA, 17 nt, Human
aaguccagaguugagca

SEQ ID NO: 287026 - RNA, 22 nt, Human
uaaggaggugcccacucucagg

SEQ ID NO: 287027 - RNA, 22 nt, Human
gugcagggcuggcaccggaggc

SEQ ID NO: 287028 - RNA, 22 nt, Human
aguccucugcugugcgucuuug

SEQ ID NO: 287029 - RNA, 22 nt, Human
uuauuugugaaucauuuaucua

SEQ ID NO: 287030 - RNA, 22 nt, Human
gaggccuggagccgccuaggcg

SEQ ID NO: 287031 - RNA, 22 nt, Human
ccugugugucugucacugcaca

SEQ ID NO: 287032 - RNA, 22 nt, Human
ucccugaaacauaauagaugcc

SEQ ID NO: 287033 - RNA, 22 nt, Human
ccacccugagccgcaagagcag

SEQ ID NO: 287034 - RNA, 22 nt, Human
caaggccuucgucuccuagcuu

SEQ ID NO: 287035 - RNA, 22 nt, Human
uuguacaaauaggaaccucuga

SEQ ID NO: 287036 - RNA, 22 nt, Human
uaguauaauuguucuggaauca

SEQ ID NO: 287037 - RNA, 22 nt, Human
ucugucaauauaugugcugcag

SEQ ID NO: 287038 - RNA, 20 nt, Human
ccagagcagccacugaaguu

SEQ ID NO: 287039 - RNA, 22 nt, Human
gcagguggcagaggugggaucu

SEQ ID NO: 287040 - RNA, 19 nt, Human
acuggcaguuucugcaugg

SEQ ID NO: 287041 - RNA, 22 nt, Human
gauggucuuugucucugauaag

SEQ ID NO: 287042 - RNA, 19 nt, Human
gaagcccugcauucuccgc

SEQ ID NO: 287043 - RNA, 22 nt, Human
agagucugaaugcucagaguug

SEQ ID NO: 287044 - RNA, 22 nt, Human
auucuuauuuaaauagagucug

SEQ ID NO: 287045 - RNA, 22 nt, Human
auaaaaguucaagagaguacag

SEQ ID NO: 287046 - RNA, 22 nt, Human
acaggugguagaguggaaagag

SEQ ID NO: 287047 - RNA, 22 nt, Human
ggcuuuauuugcagccauuguu

SEQ ID NO: 287048 - RNA, 20 nt, Human
cuguggugagcaggagagua

SEQ ID NO: 287049 - RNA, 20 nt, Human
caggcacacucauuccugcu

SEQ ID NO: 287050 - RNA, 20 nt, Human
uuugcgaggccaaggcgggc

SEQ ID NO: 287051 - RNA, 22 nt, Human
auccacagucuuagccaucaaa

SEQ ID NO: 287052 - RNA, 22 nt, Human
ugugauucucagaagagggaag

SEQ ID NO: 287053 - RNA, 22 nt, Human
acaauucucucauaucuuauua

SEQ ID NO: 287054 - RNA, 22 nt, Human
auguucuuccaaaucuguaaca

SEQ ID NO: 287055 - RNA, 22 nt, Human
uguuugaguucuagcgcauuua

SEQ ID NO: 287056 - RNA, 22 nt, Human
aauaucaguauauuguaucagu

SEQ ID NO: 287057 - RNA, 22 nt, Human
uugcugauuuccccuugagugu

SEQ ID NO: 287058 - RNA, 22 nt, Human
uaaugucagcauaguuuauuuu

SEQ ID NO: 287059 - RNA, 22 nt, Human
uaaauguuuagucuuauuuggg

SEQ ID NO: 287060 - RNA, 17 nt, Human
cagagucugucugcauc

SEQ ID NO: 287061 - RNA, 22 nt, Human
ucagggcauacucuucaagguc

SEQ ID NO: 287062 - RNA, 22 nt, Human
auaaucuggucuuuguaugagu

SEQ ID NO: 287063 - RNA, 22 nt, Human
uuggaggaugucggcauauuua

SEQ ID NO: 287064 - RNA, 22 nt, Human
gaggcugcuuuccuccuauccu

SEQ ID NO: 287065 - RNA, 22 nt, Human
gccagccauaggccagcacugg

SEQ ID NO: 287066 - RNA, 22 nt, Human
uucacacuguuuuucauagugg

SEQ ID NO: 287067 - RNA, 22 nt, Human
cuguguccuccccaucacuucu

SEQ ID NO: 287068 - RNA, 22 nt, Human
gcuggagggguaauaggauggg

SEQ ID NO: 287069 - RNA, 22 nt, Human
uauuuccaggccccacucuaga

SEQ ID NO: 287070 - RNA, 22 nt, Human
uagggcagauucgguggaguuu

SEQ ID NO: 287071 - RNA, 22 nt, Human
aagaacaacugcuuuaaaagca

SEQ ID NO: 287072 - RNA, 22 nt, Human
aacuagaaccacuuguauuucc

SEQ ID NO: 287073 - RNA, 21 nt, Human
cugcagagcaugcaaaauguu

SEQ ID NO: 287074 - RNA, 22 nt, Human
guggaauguccuugaucauaag

SEQ ID NO: 287075 - RNA, 22 nt, Human
gugagacacgugugugaccugg

SEQ ID NO: 287076 - RNA, 22 nt, Human
cuuuccaagaaugcagauaccu

SEQ ID NO: 287077 - RNA, 22 nt, Human
cuggcagcuuagcacucugguu

SEQ ID NO: 287078 - RNA, 22 nt, Human
uucagggcagagaguucaggga

SEQ ID NO: 287079 - RNA, 17 nt, Human
ucugugauaguguagau

SEQ ID NO: 287080 - RNA, 22 nt, Human
uggaaagaggaagugcccagca

SEQ ID NO: 287081 - RNA, 22 nt, Human
agagggcuuugauucucaguuc

SEQ ID NO: 287082 - RNA, 22 nt, Human
uuuucaguuccaucucugcucu

SEQ ID NO: 287083 - RNA, 22 nt, Human
ccaggugugagcauucugucuu

SEQ ID NO: 287084 - RNA, 22 nt, Human
gcaaggagccuggaggugagug

SEQ ID NO: 287085 - RNA, 22 nt, Human
agccuggaauuaaggaaaugca

SEQ ID NO: 287086 - RNA, 22 nt, Human
ucucagaguaauucuuuaaggu

SEQ ID NO: 287087 - RNA, 22 nt, Human
auagauuauuugcucauuacuu

SEQ ID NO: 287088 - RNA, 22 nt, Human
caggcacacauccgugagagau

SEQ ID NO: 287089 - RNA, 22 nt, Human
gaauguuauguauccagucaca

SEQ ID NO: 287090 - RNA, 22 nt, Human
auguuacagaaagcaaagauga

SEQ ID NO: 287091 - RNA, 22 nt, Human
ucuggcaggcaaucggcucugg

SEQ ID NO: 287092 - RNA, 17 nt, Human
cagugcagauaagugag

SEQ ID NO: 287093 - RNA, 22 nt, Human
aagaaauguagagccuaguaaa

SEQ ID NO: 287094 - RNA, 18 nt, Human
caaauucagugcuggaag

SEQ ID NO: 287095 - RNA, 22 nt, Human
uuccuucuuccaaacccaucau

SEQ ID NO: 287096 - RNA, 22 nt, Human
caguuaaaagguaugcuaccaa

SEQ ID NO: 287097 - RNA, 22 nt, Human
auuguaacauguucagaucacu

SEQ ID NO: 287098 - RNA, 22 nt, Human
cagcuucugcuaucgaacaucu

SEQ ID NO: 287099 - RNA, 22 nt, Human
gagcugguucuguccagggaau

SEQ ID NO: 287100 - RNA, 18 nt, Human
uggcagguccagcugugg

SEQ ID NO: 287101 - RNA, 22 nt, Human
cagaugaacuaggcugcacuug

SEQ ID NO: 287102 - RNA, 22 nt, Human
gagaggaguagacacuuugguu

SEQ ID NO: 287103 - RNA, 22 nt, Human
auuucacagcugcuguucaggu

SEQ ID NO: 287104 - RNA, 22 nt, Human
uagaaacaaagaccugggugcu

SEQ ID NO: 287105 - RNA, 22 nt, Human
ugagaaaauccagaggcuaguu

SEQ ID NO: 287106 - RNA, 22 nt, Human
agcucagagauaaucaagagac

SEQ ID NO: 287107 - RNA, 22 nt, Human
gauuguaauucuacuuuccgcu

SEQ ID NO: 287108 - RNA, 22 nt, Human
uagaaacagaauaugagugaga

SEQ ID NO: 287109 - RNA, 22 nt, Human
augaaacacacacgcgcauacu

SEQ ID NO: 287110 - RNA, 22 nt, Human
ggaggaaauccuuaguaaggca

SEQ ID NO: 287111 - RNA, 22 nt, Human
caugccauuuuucuagauugag

SEQ ID NO: 287112 - RNA, 22 nt, Human
ugggaagauggagugacaggca

SEQ ID NO: 287113 - RNA, 22 nt, Human
cuguggcucuccaauggaggga

SEQ ID NO: 287114 - RNA, 22 nt, Human
gugcaaaaguaauugugguuuu

SEQ ID NO: 287115 - RNA, 22 nt, Human
ccccaugaaguagggucucuga

SEQ ID NO: 287116 - RNA, 22 nt, Human
uccaggaacgagaggcugggca

SEQ ID NO: 287117 - RNA, 22 nt, Human
caggcaccccaggugagcacug

SEQ ID NO: 287118 - RNA, 22 nt, Human
gcaaagcagaacccucucuauc

SEQ ID NO: 287119 - RNA, 20 nt, Human
guuaaaagaguaauuugagg

SEQ ID NO: 287120 - RNA, 22 nt, Human
gcaggagcugcucuccugacga

SEQ ID NO: 287121 - RNA, 22 nt, Human
cuggcacgcccacguaggcacu

SEQ ID NO: 287122 - RNA, 22 nt, Human
uaaaaugaucucucauguucuu

SEQ ID NO: 287123 - RNA, 22 nt, Human
aacuagaaaaagacuuucugag

SEQ ID NO: 287124 - RNA, 22 nt, Human
uuucuagucuucccuaccuccc

SEQ ID NO: 287125 - RNA, 22 nt, Human
uuauuucauguaaaauuuaugu

SEQ ID NO: 287126 - RNA, 22 nt, Human
ugaaucauggauaaauagcuua

SEQ ID NO: 287127 - RNA, 22 nt, Human
uuuccuaggagauugaucacau

SEQ ID NO: 287128 - RNA, 22 nt, Human
cucuggaaauggccauagucau

SEQ ID NO: 287129 - RNA, 22 nt, Human
acauggcuggcaccuuaaauuu

SEQ ID NO: 287130 - RNA, 22 nt, Human
cccugccucugaagcugcucag

SEQ ID NO: 287131 - RNA, 22 nt, Human
cuguguccaauggccuuagcag

SEQ ID NO: 287132 - RNA, 22 nt, Human
cuggcccauggugagcucuggg

SEQ ID NO: 287133 - RNA, 22 nt, Human
gagcuucagcugccaugacugu

SEQ ID NO: 287134 - RNA, 22 nt, Human
ggugcaaacguaauugugguuu

SEQ ID NO: 287135 - RNA, 21 nt, Human
ugucacagauucucagcuugc

SEQ ID NO: 287136 - RNA, 22 nt, Human
gcuguggcugacauugcagaca

SEQ ID NO: 287137 - RNA, 22 nt, Human
cccaggcaggagugugguggcu

SEQ ID NO: 287138 - RNA, 22 nt, Human
acugccugccuuccagguacug

SEQ ID NO: 287139 - RNA, 22 nt, Human
uugaaucuggguacuuguaaua

SEQ ID NO: 287140 - RNA, 22 nt, Human
ccaaguacucucaccaaagcuu

SEQ ID NO: 287141 - RNA, 22 nt, Human
agacaucaaugaucagagguag

SEQ ID NO: 287142 - RNA, 23 nt, Human
ccuguggcaaguagaugagauga

SEQ ID NO: 287143 - RNA, 22 nt, Human
guguuugugagcuaggugacau

SEQ ID NO: 287144 - RNA, 22 nt, Human
uuugcagcaaggagagagcauu

SEQ ID NO: 287145 - RNA, 22 nt, Human
cagguggguguaugaaugcaaa

SEQ ID NO: 287146 - RNA, 20 nt, Human
ggcaggcaggagguuuccag

SEQ ID NO: 287147 - RNA, 20 nt, Human
ggcaggugcuguccccuccu

SEQ ID NO: 287148 - RNA, 22 nt, Human
agugucugcgggcagaggagcg

SEQ ID NO: 287149 - RNA, 22 nt, Human
gggcagggguagcauuccaagu

SEQ ID NO: 287150 - RNA, 22 nt, Human
agccuucaguaagggcuuagca

SEQ ID NO: 287151 - RNA, 22 nt, Human
acuaaagaagccaaaguuuucu

SEQ ID NO: 287152 - RNA, 22 nt, Human
acauucuuucucuucaggaaac

SEQ ID NO: 287153 - RNA, 17 nt, Human
uguuuucauucauugcu

SEQ ID NO: 287154 - RNA, 22 nt, Human
uguguaaagcuuguuccagaaa

SEQ ID NO: 287155 - RNA, 22 nt, Human
ucuggcaggacaugcugaccau

SEQ ID NO: 287156 - RNA, 22 nt, Human
uauuuauucuuuguacugccuu

SEQ ID NO: 287157 - RNA, 23 nt, Human
aggaaguuaaggcagacagacag

SEQ ID NO: 287158 - RNA, 22 nt, Human
uucuaagaggcuaaugaagaau

SEQ ID NO: 287159 - RNA, 22 nt, Human
uuugacuccacuccuaacuccu

SEQ ID NO: 287160 - RNA, 22 nt, Human
ugcuuaaacauacuauuuauau

SEQ ID NO: 287161 - RNA, 22 nt, Human
aaaaaugcuuggacuuaauaaa

SEQ ID NO: 287162 - RNA, 22 nt, Human
guuuuggagucaggcuuagaug

SEQ ID NO: 287163 - RNA, 22 nt, Human
ccauggcuucuuucucugccag

SEQ ID NO: 287164 - RNA, 17 nt, Human
cugagccccgggcagcu

SEQ ID NO: 287165 - RNA, 22 nt, Human
cagcuuguuaccgagggagggu

SEQ ID NO: 287166 - RNA, 19 nt, Human
ccuugccugucccugcagc

SEQ ID NO: 287167 - RNA, 22 nt, Human
ccugccagcgcuuaucucucgg

SEQ ID NO: 287168 - RNA, 22 nt, Human
uuccuucuuuuacaccauaaau

SEQ ID NO: 287169 - RNA, 20 nt, Human
aucaaaauccuauugagguu

SEQ ID NO: 287170 - RNA, 22 nt, Human
caaggcauacuccuuucucagc

SEQ ID NO: 287171 - RNA, 22 nt, Human
guuacagucaggagauauuuug

SEQ ID NO: 287172 - RNA, 22 nt, Human
guauacacugguaagauuuguc

SEQ ID NO: 287173 - RNA, 22 nt, Human
ccagagagaaaauggagggcca

SEQ ID NO: 287174 - RNA, 22 nt, Human
auacacauaucagguguauaca

SEQ ID NO: 287175 - RNA, 22 nt, Human
gauuuuauauggcauacugugg

SEQ ID NO: 287176 - RNA, 22 nt, Human
acagguguagaaaacagauuau

SEQ ID NO: 287177 - RNA, 22 nt, Human
auguguccuuauaagaagaaga

SEQ ID NO: 287178 - RNA, 22 nt, Human
cuggaggagaacuugaggaagg

SEQ ID NO: 287179 - RNA, 22 nt, Human
uacuuuauuguaaaugcugaug

SEQ ID NO: 287180 - RNA, 21 nt, Human
ucuuccugcuccacacucccc

SEQ ID NO: 287181 - RNA, 22 nt, Human
ucagggcaaagggcagaguuug

SEQ ID NO: 287182 - RNA, 22 nt, Human
uguccuuuguguaucuauagua

SEQ ID NO: 287183 - RNA, 22 nt, Human
ucagggcugccgggcagaccgu

SEQ ID NO: 287184 - RNA, 22 nt, Human
uccuggcaguucagcccccuaa

SEQ ID NO: 287185 - RNA, 22 nt, Human
cugucaaagacuaagguucuua

SEQ ID NO: 287186 - RNA, 22 nt, Human
uggcauguauacuugaguagga

SEQ ID NO: 287187 - RNA, 22 nt, Human
acagugucucacugcugaaauc

SEQ ID NO: 287188 - RNA, 22 nt, Human
uuuagggaugucagaacaggga

SEQ ID NO: 287189 - RNA, 22 nt, Human
gacuuuauucguuaacuguuaa

SEQ ID NO: 287190 - RNA, 22 nt, Human
acacaggaacucugagaggugg

SEQ ID NO: 287191 - RNA, 22 nt, Human
cagcacuugagcuuucauguaa

SEQ ID NO: 287192 - RNA, 22 nt, Human
cuucaagauauuucuagaauca

SEQ ID NO: 287193 - RNA, 22 nt, Human
ucugaaauaagggagaagggaa

SEQ ID NO: 287194 - RNA, 22 nt, Human
ucugaaauaggagccauguaga

SEQ ID NO: 287195 - RNA, 22 nt, Human
aacauuguuuugcacaacucuu

SEQ ID NO: 287196 - RNA, 22 nt, Human
acagcaggcacacaaggauaga

SEQ ID NO: 287197 - RNA, 22 nt, Human
cuggugcaggaaggagcuggca

SEQ ID NO: 287198 - RNA, 22 nt, Human
agguggaaauggcuuuccuagg

SEQ ID NO: 287199 - RNA, 22 nt, Human
caggcauggugagaacucagcc

SEQ ID NO: 287200 - RNA, 22 nt, Human
uccagagggcgauggcuggggg

SEQ ID NO: 287201 - RNA, 22 nt, Human
aagccuucaguccguugcagag

SEQ ID NO: 287202 - RNA, 21 nt, Human
uacuacagucucuuuaucagu

SEQ ID NO: 287203 - RNA, 22 nt, Human
cagcuuuuaggacugugagaaa

SEQ ID NO: 287204 - RNA, 19 nt, Human
cacagggagaccacauguc

SEQ ID NO: 287205 - RNA, 22 nt, Human
cacauucagguggcauguuaga

SEQ ID NO: 287206 - RNA, 22 nt, Human
uuccaggacuggguguuugaag

SEQ ID NO: 287207 - RNA, 22 nt, Human
auccacagagaggaagaauagu

SEQ ID NO: 287208 - RNA, 21 nt, Human
uacagaaugcgcuucagucug

SEQ ID NO: 287209 - RNA, 22 nt, Human
aucuuuauuuauugagcacuua

SEQ ID NO: 287210 - RNA, 18 nt, Human
uuucuuucugccuggggc

SEQ ID NO: 287211 - RNA, 22 nt, Human
uuugcauugcauuaaguauucu

SEQ ID NO: 287212 - RNA, 22 nt, Human
ucuuggaauaccccgaagguca

SEQ ID NO: 287213 - RNA, 22 nt, Human
auguuauaguuauaaaaugagg

SEQ ID NO: 287214 - RNA, 22 nt, Human
cagcugaagguaggaaccagga

SEQ ID NO: 287215 - RNA, 22 nt, Human
aauuucagaugucauaaauaua

SEQ ID NO: 287216 - RNA, 23 nt, Human
ccaucaggccuccguguccagcc

SEQ ID NO: 287217 - RNA, 22 nt, Human
ugcaggugccaucgcugcucau

SEQ ID NO: 287218 - RNA, 22 nt, Human
aaugauuuccccuacacagaag

SEQ ID NO: 287219 - RNA, 22 nt, Human
uugagaagguggucauuugcaa

SEQ ID NO: 287220 - RNA, 22 nt, Human
cuguaacuuaaugagaggcaga

SEQ ID NO: 287221 - RNA, 22 nt, Human
agggcgacaauggagagcguuu

SEQ ID NO: 287222 - RNA, 22 nt, Human
aagccagauagaagaacucauu

SEQ ID NO: 287223 - RNA, 19 nt, Human
ucuggcagguaauuaggga

SEQ ID NO: 287224 - RNA, 22 nt, Human
cccaggcagggacgugcucugg

SEQ ID NO: 287225 - RNA, 22 nt, Human
ccuccccaugacccggugcugg

SEQ ID NO: 287226 - RNA, 22 nt, Human
caggcuugggagcagagccacu

SEQ ID NO: 287227 - RNA, 22 nt, Human
aguuaacucauuuuauaaugcc

SEQ ID NO: 287228 - RNA, 22 nt, Human
aucucagucagguugaauuugg

SEQ ID NO: 287229 - RNA, 22 nt, Human
uuuccuuccuaaggugaagcaa

SEQ ID NO: 287230 - RNA, 22 nt, Human
ucccuggcacaagaaggcuguc

SEQ ID NO: 287231 - RNA, 22 nt, Human
uccugaccacacugccuucugc

SEQ ID NO: 287232 - RNA, 22 nt, Human
uucuccuuuguaauucucaucc

SEQ ID NO: 287233 - RNA, 22 nt, Human
gaggaaaauaacaacuaagggc

SEQ ID NO: 287234 - RNA, 22 nt, Human
ucaaaaauaagauauucuggac

SEQ ID NO: 287235 - RNA, 22 nt, Human
uagguucagugucuuguucugc

SEQ ID NO: 287236 - RNA, 22 nt, Human
uguuugcuaggguugguauuua

SEQ ID NO: 287237 - RNA, 22 nt, Human
ccuuuucuauguaccagcagug

SEQ ID NO: 287238 - RNA, 22 nt, Human
guucuucacauuucauugagga

SEQ ID NO: 287239 - RNA, 22 nt, Human
gcucucuugguggcuguccugg

SEQ ID NO: 287240 - RNA, 22 nt, Human
agaagaggggugucccuguggc

SEQ ID NO: 287241 - RNA, 22 nt, Human
uugguggaccucaucagaaccg

SEQ ID NO: 287242 - RNA, 22 nt, Human
uuucauaauagugcaguuuguu

SEQ ID NO: 287243 - RNA, 22 nt, Human
uucacauuagccaagagaugga

SEQ ID NO: 287244 - RNA, 22 nt, Human
gccugcagauauauaggauggu

SEQ ID NO: 287245 - RNA, 22 nt, Human
uuucaguguaucuuccaaaagc

SEQ ID NO: 287246 - RNA, 22 nt, Human
gcacagagucacuagcuaagca

SEQ ID NO: 287247 - RNA, 22 nt, Human
cauagcaacagcaucaagucaa

SEQ ID NO: 287248 - RNA, 22 nt, Human
ugggaccugcccuggccccauc

SEQ ID NO: 287249 - RNA, 22 nt, Human
auagcuguagaauguauacaca

SEQ ID NO: 287250 - RNA, 22 nt, Human
uccagauggauuuaagaccuaa

SEQ ID NO: 287251 - RNA, 20 nt, Human
uccuggccucccuggggcuc

SEQ ID NO: 287252 - RNA, 19 nt, Human
gguccucagcagagcaugc

SEQ ID NO: 287253 - RNA, 21 nt, Human
agguggggcugcaccucugcu

SEQ ID NO: 287254 - RNA, 22 nt, Human
ggagcugaggacacuacauuuu

SEQ ID NO: 287255 - RNA, 22 nt, Human
uuugaaguguaugaaaauacag

SEQ ID NO: 287256 - RNA, 22 nt, Human
auuauuguacuuucaauaaggu

SEQ ID NO: 287257 - RNA, 22 nt, Human
gaaugaauucagcacauggaau

SEQ ID NO: 287258 - RNA, 22 nt, Human
acacaguucuuagcaggugucu

SEQ ID NO: 287259 - RNA, 22 nt, Human
gccuuguuucauuacacguggu

SEQ ID NO: 287260 - RNA, 22 nt, Human
cuuccugcccacuuccugcugg

SEQ ID NO: 287261 - RNA, 22 nt, Human
aacauuguuuucccuauaucca

SEQ ID NO: 287262 - RNA, 19 nt, Human
guccucucaacaacccggg

SEQ ID NO: 287263 - RNA, 22 nt, Human
aaagcaguccuucccuuaaggu

SEQ ID NO: 287264 - RNA, 22 nt, Human
caggggagugagucccucucug

SEQ ID NO: 287265 - RNA, 22 nt, Human
ucauucauaaaaauuaguuggc

SEQ ID NO: 287266 - RNA, 23 nt, Human
aaugaguugggcagcauacaggc

SEQ ID NO: 287267 - RNA, 22 nt, Human
acuguguugccuucccccagcc

SEQ ID NO: 287268 - RNA, 22 nt, Human
uucuucugccucccaccugaua

SEQ ID NO: 287269 - RNA, 22 nt, Human
ugagcccuaagggucaagcagg

SEQ ID NO: 287270 - RNA, 22 nt, Human
uuaggaaaaucaugagagauga

SEQ ID NO: 287271 - RNA, 22 nt, Human
ugacauguauguuguuggcaug

SEQ ID NO: 287272 - RNA, 22 nt, Human
acacaggaagagagauaauaau

SEQ ID NO: 287273 - RNA, 22 nt, Human
ucugcgccaccuugugcuugug

SEQ ID NO: 287274 - RNA, 22 nt, Human
acuccugggugcauuucugauu

SEQ ID NO: 287275 - RNA, 22 nt, Human
aagacauugucauuuuauaauu

SEQ ID NO: 287276 - RNA, 22 nt, Human
acuggaggauuccuggaaggcg

SEQ ID NO: 287277 - RNA, 22 nt, Human
cagacugaguggauuaaacaau

SEQ ID NO: 287278 - RNA, 22 nt, Human
uccuggccuccguucucugcau

SEQ ID NO: 287279 - RNA, 22 nt, Human
gcaaaguaaaaauagauucuga

SEQ ID NO: 287280 - RNA, 22 nt, Human
gucaggccaauacucuccagca

SEQ ID NO: 287281 - RNA, 22 nt, Human
ugaaaugaaugugauucgauag

SEQ ID NO: 287282 - RNA, 22 nt, Human
ucaugcagauaagaauaaguaa

SEQ ID NO: 287283 - RNA, 22 nt, Human
caguuaaaggcccaauaucugg

SEQ ID NO: 287284 - RNA, 22 nt, Human
cguccuuugaauugaggucuuu

SEQ ID NO: 287285 - RNA, 22 nt, Human
ucuuucccgccagagcaugagu

SEQ ID NO: 287286 - RNA, 22 nt, Human
auguguccacaggugugagaga

SEQ ID NO: 287287 - RNA, 22 nt, Human
uguggggccucgugcuagcugg

SEQ ID NO: 287288 - RNA, 22 nt, Human
cauguuuuguguacagaauauu

SEQ ID NO: 287289 - RNA, 22 nt, Human
aaaucaugugcagagaucagga

SEQ ID NO: 287290 - RNA, 20 nt, Human
auguuaaauagcauuuagag

SEQ ID NO: 287291 - RNA, 22 nt, Human
gcugaaauuagacugcagaagu

SEQ ID NO: 287292 - RNA, 21 nt, Human
ggugacacguggccccgcucu

SEQ ID NO: 287293 - RNA, 19 nt, Human
acacauuugcacaauccac

SEQ ID NO: 287294 - RNA, 22 nt, Human
gaauaauugugaugcuugaagu

SEQ ID NO: 287295 - RNA, 19 nt, Human
ccagguggaacugagguag

SEQ ID NO: 287296 - RNA, 22 nt, Human
cuguccagcuuggcuccugggg

SEQ ID NO: 287297 - RNA, 22 nt, Human
cagcuuuauuaaugauugucuu

SEQ ID NO: 287298 - RNA, 22 nt, Human
aacaggccuuguuuuuguucau

SEQ ID NO: 287299 - RNA, 22 nt, Human
guccugguuuucacagaccuuu

SEQ ID NO: 287300 - RNA, 22 nt, Human
auuaauuuccaggcacugugcu

SEQ ID NO: 287301 - RNA, 22 nt, Human
gccugagaucagccaagccccu

SEQ ID NO: 287302 - RNA, 22 nt, Human
ugcugcauuugcaguccuuuaa

SEQ ID NO: 287303 - RNA, 22 nt, Human
gaauguaauagucaguagaaca

SEQ ID NO: 287304 - RNA, 22 nt, Human
gcaguggcuaagcucgcaugca

SEQ ID NO: 287305 - RNA, 22 nt, Human
cuccuggaccaccuuguggcca

SEQ ID NO: 287306 - RNA, 22 nt, Human
cugagagguaagcagcgcagug

SEQ ID NO: 287307 - RNA, 18 nt, Human
uaugugucuguuacaacu

SEQ ID NO: 287308 - RNA, 22 nt, Human
caugcagcggcguuugguuuaa

SEQ ID NO: 287309 - RNA, 19 nt, Human
ccagucccauacaggagau

SEQ ID NO: 287310 - RNA, 22 nt, Human
uuagaagugaaauagcuguaca

SEQ ID NO: 287311 - RNA, 22 nt, Human
auuagcaacauggugaauaugu

SEQ ID NO: 287312 - RNA, 22 nt, Human
agcgagggaggucugaggacag

SEQ ID NO: 287313 - RNA, 20 nt, Human
cugcccacuagaacuaccug

SEQ ID NO: 287314 - RNA, 22 nt, Human
gcccagggucuacaaaaauauu

SEQ ID NO: 287315 - RNA, 22 nt, Human
uccuggcuuccacuccucuguu

SEQ ID NO: 287316 - RNA, 22 nt, Human
gcauucuuuuugacuccugguu

SEQ ID NO: 287317 - RNA, 22 nt, Human
ucaauguuuguucaugaaaaua

SEQ ID NO: 287318 - RNA, 22 nt, Human
gugaaaauaaggcugguucuug

SEQ ID NO: 287319 - RNA, 21 nt, Human
uugaggagugagaguggguuu

SEQ ID NO: 287320 - RNA, 22 nt, Human
gcaguggccacauggaggagga

SEQ ID NO: 287321 - RNA, 22 nt, Human
agcauuuaggagaauuugagaa

SEQ ID NO: 287322 - RNA, 22 nt, Human
ggcuacuagguaccauuuagaa

SEQ ID NO: 287323 - RNA, 21 nt, Human
agaugcugaugcugcaggucc

SEQ ID NO: 287324 - RNA, 22 nt, Human
gagguaauuacuauguucagau

SEQ ID NO: 287325 - RNA, 22 nt, Human
uaucauuuaacagaaucauugc

SEQ ID NO: 287326 - RNA, 22 nt, Human
gcaguucuacuuauccauagac

SEQ ID NO: 287327 - RNA, 20 nt, Human
uguuucugacgguaggagag

SEQ ID NO: 287328 - RNA, 22 nt, Human
ccagcuuuuagugggcuuauua

SEQ ID NO: 287329 - RNA, 22 nt, Human
agcuuuguggcuuugcaagacu

SEQ ID NO: 287330 - RNA, 22 nt, Human
cuucuucacacuggucugaagc

SEQ ID NO: 287331 - RNA, 22 nt, Human
gagaaagacguaggcugggagg

SEQ ID NO: 287332 - RNA, 22 nt, Human
ucugggaacugagcuccccuag

SEQ ID NO: 287333 - RNA, 22 nt, Human
uguccuauuucucugugcauga

SEQ ID NO: 287334 - RNA, 22 nt, Human
augaggcagcuggcuuucuccc

SEQ ID NO: 287335 - RNA, 22 nt, Human
uuuacauguaauguuauacaaa

SEQ ID NO: 287336 - RNA, 22 nt, Human
auguguccucuggcagguuuag

SEQ ID NO: 287337 - RNA, 22 nt, Human
cggcaggguugguuuucucuga

SEQ ID NO: 287338 - RNA, 22 nt, Human
ccagagaguaggaggcauuauu

SEQ ID NO: 287339 - RNA, 22 nt, Human
guuuacaugcagaaaaucaaug

SEQ ID NO: 287340 - RNA, 22 nt, Human
aaagccacguggccuggggagc

SEQ ID NO: 287341 - RNA, 22 nt, Human
auaagccugauucacuugucau

SEQ ID NO: 287342 - RNA, 22 nt, Human
ugcauugauagaaaaacaugga

SEQ ID NO: 287343 - RNA, 22 nt, Human
cccugcagagccagcccugacc

SEQ ID NO: 287344 - RNA, 22 nt, Human
gcucuaggaggugugcuuagaa

SEQ ID NO: 287345 - RNA, 22 nt, Human
ucugugcccucggugcugggcc

SEQ ID NO: 287346 - RNA, 22 nt, Human
uugcuuuaccugugguauauuu

SEQ ID NO: 287347 - RNA, 22 nt, Human
cagcauuuagaauuugaagugu

SEQ ID NO: 287348 - RNA, 22 nt, Human
uguuaauauacuaaaauccacu

SEQ ID NO: 287349 - RNA, 22 nt, Human
gccaggcaguucaaguacacca

SEQ ID NO: 287350 - RNA, 23 nt, Human
uaucucagaggaauguaguuacu

SEQ ID NO: 287351 - RNA, 22 nt, Human
aauaaauguuuguuggauguuu

SEQ ID NO: 287352 - RNA, 22 nt, Human
ggaagagaauuucucucuuuuu

SEQ ID NO: 287353 - RNA, 22 nt, Human
uucugucacagugcugguauca

SEQ ID NO: 287354 - RNA, 22 nt, Human
uggaggaaaauuacuggggucu

SEQ ID NO: 287355 - RNA, 22 nt, Human
caaauggucauuucucuuuugu

SEQ ID NO: 287356 - RNA, 22 nt, Human
cagggagcuuucccaggacccu

SEQ ID NO: 287357 - RNA, 22 nt, Human
agcagguguuuguaucauaagg

SEQ ID NO: 287358 - RNA, 22 nt, Human
cgcagggccgcgagcgggacca

SEQ ID NO: 287359 - RNA, 23 nt, Human
uuguccucuggaucgguuugguu

SEQ ID NO: 287360 - RNA, 20 nt, Human
uuucauugucagaaucuuau

SEQ ID NO: 287361 - RNA, 22 nt, Human
aauaaugagcuugucuaauugu

SEQ ID NO: 287362 - RNA, 22 nt, Human
uagggacaaagagcugaggccu

SEQ ID NO: 287363 - RNA, 22 nt, Human
ugagaggaacaggcaguagguu

SEQ ID NO: 287364 - RNA, 22 nt, Human
ugauggcuuaguggcagggcga

SEQ ID NO: 287365 - RNA, 22 nt, Human
cuuagggaaucuuagagcugga

SEQ ID NO: 287366 - RNA, 21 nt, Human
ugggaccuagcuuugcacagg

SEQ ID NO: 287367 - RNA, 22 nt, Human
ugcuggagaucauuaauguuca

SEQ ID NO: 287368 - RNA, 22 nt, Human
ugcuuucuuuagcuccugaguc

SEQ ID NO: 287369 - RNA, 22 nt, Human
cuauaaaucuacccagcauugg

SEQ ID NO: 287370 - RNA, 18 nt, Human
cauaauuuucuuucuuua

SEQ ID NO: 287371 - RNA, 22 nt, Human
uucccaguuagucauuuuuaca

SEQ ID NO: 287372 - RNA, 22 nt, Human
uuacagauacuuuguaggcaag

SEQ ID NO: 287373 - RNA, 22 nt, Human
ucaggugggcaguggguugagc

SEQ ID NO: 287374 - RNA, 22 nt, Human
aguguuuuauuagaacacagcc

SEQ ID NO: 287375 - RNA, 22 nt, Human
uggcaggugccuguaaucucag

SEQ ID NO: 287376 - RNA, 22 nt, Human
ccagguggaggugugagguccu

SEQ ID NO: 287377 - RNA, 22 nt, Human
aacuuguaaugaaaggcaauag

SEQ ID NO: 287378 - RNA, 22 nt, Human
acagguguccucacagggggug

SEQ ID NO: 287379 - RNA, 22 nt, Human
ucuugaaagcaugagauggaca

SEQ ID NO: 287380 - RNA, 22 nt, Human
ugaucauuaucaaacuggucau

SEQ ID NO: 287381 - RNA, 22 nt, Human
auugcuuuucagacaaugaggc

SEQ ID NO: 287382 - RNA, 22 nt, Human
ccuguucaaguugcagggcugg

SEQ ID NO: 287383 - RNA, 23 nt, Human
ggcugcucuuuucaugcuguuuc

SEQ ID NO: 287384 - RNA, 22 nt, Human
cuucuucuuuuaauaaaugucu

SEQ ID NO: 287385 - RNA, 22 nt, Human
ugacauguccugagaagauggc

SEQ ID NO: 287386 - RNA, 16 nt, Human
uuauugaggccaagga

SEQ ID NO: 287387 - RNA, 22 nt, Human
agcugaaauucacaaggaucca

SEQ ID NO: 287388 - RNA, 21 nt, Human
ugagcaggugcagggaagugg

SEQ ID NO: 287389 - RNA, 22 nt, Human
gcagcuuuaaacauuggaaaua

SEQ ID NO: 287390 - RNA, 19 nt, Human
gcagacagguccagagagg

SEQ ID NO: 287391 - RNA, 22 nt, Human
auguguuuguaccuuuaaauau

SEQ ID NO: 287392 - RNA, 22 nt, Human
aguauuugauacagucuucuag

SEQ ID NO: 287393 - RNA, 22 nt, Human
uuuguccucuccauguacaaua

SEQ ID NO: 287394 - RNA, 22 nt, Human
cuucuuaacuguauauacuaug

SEQ ID NO: 287395 - RNA, 22 nt, Human
agcaggugucacuuucacucca

SEQ ID NO: 287396 - RNA, 22 nt, Human
augaguugaagcuacaagaggc

SEQ ID NO: 287397 - RNA, 22 nt, Human
cagugauauuuauccuacucac

SEQ ID NO: 287398 - RNA, 22 nt, Human
aggaugccuucauugcauggcc

SEQ ID NO: 287399 - RNA, 22 nt, Human
uuuaguguaagcauaaagaaca

SEQ ID NO: 287400 - RNA, 22 nt, Human
aacugugggaugcauuaauuca

SEQ ID NO: 287401 - RNA, 22 nt, Human
cucagcucaaaauucaccuuug

SEQ ID NO: 287402 - RNA, 22 nt, Human
ccugcuguaaugugucuuuauu

SEQ ID NO: 287403 - RNA, 21 nt, Human
aaagagcccgcugagagguuc

SEQ ID NO: 287404 - RNA, 22 nt, Human
cccaguuguugccggcucugga

SEQ ID NO: 287405 - RNA, 22 nt, Human
acagugucugacacguaggaag

SEQ ID NO: 287406 - RNA, 22 nt, Human
ggccugacuugaucggcucucu

SEQ ID NO: 287407 - RNA, 22 nt, Human
ggaaagcuuuguacuugaaaac

SEQ ID NO: 287408 - RNA, 22 nt, Human
cuccuggcaggcugagugaaau

SEQ ID NO: 287409 - RNA, 23 nt, Human
gcacagagcaguuaggggaagau

SEQ ID NO: 287410 - RNA, 22 nt, Human
gcaggcaggagcccaacugccu

SEQ ID NO: 287411 - RNA, 23 nt, Human
uuucuucagaagccuugcgaggc

SEQ ID NO: 287412 - RNA, 22 nt, Human
gcaugucuguaauuacagagcc

SEQ ID NO: 287413 - RNA, 22 nt, Human
acagaaagauaggcacaagguc

SEQ ID NO: 287414 - RNA, 22 nt, Human
ugauguccucaugucaagcucc

SEQ ID NO: 287415 - RNA, 22 nt, Human
acauuaaaauugggugggguaa

SEQ ID NO: 287416 - RNA, 22 nt, Human
ugauuucuucuaauuuccauca

SEQ ID NO: 287417 - RNA, 22 nt, Human
cuugcacacauguacaugugua

SEQ ID NO: 287418 - RNA, 22 nt, Human
gaugugucuccauacaccaccc

SEQ ID NO: 287419 - RNA, 22 nt, Human
gaagaggcaauugaauaagcua

SEQ ID NO: 287420 - RNA, 22 nt, Human
ggcaaggggucaggcugagaca

SEQ ID NO: 287421 - RNA, 22 nt, Human
ucuggcagaggaaggaggccug

SEQ ID NO: 287422 - RNA, 20 nt, Human
aagagucuuuacugagcuaa

SEQ ID NO: 287423 - RNA, 22 nt, Human
aaacaaguguaaacuagucugu

SEQ ID NO: 287424 - RNA, 22 nt, Human
auuugcuucugugaaaucaagu

SEQ ID NO: 287425 - RNA, 22 nt, Human
guucuucaucauuuuagauagg

SEQ ID NO: 287426 - RNA, 22 nt, Human
ugcucagcgccaaagcugaugg

SEQ ID NO: 287427 - RNA, 22 nt, Human
cucaggcugugaugugauggca

SEQ ID NO: 287428 - RNA, 22 nt, Human
uagguucacacaucuuccagau

SEQ ID NO: 287429 - RNA, 22 nt, Human
cagugcagucaaggaagaacca

SEQ ID NO: 287430 - RNA, 22 nt, Human
caggauaaauaguaaauguaag

SEQ ID NO: 287431 - RNA, 22 nt, Human
guuuuauaggcuguugcuauau

SEQ ID NO: 287432 - RNA, 22 nt, Human
auuauucuuaugucaucauggc

SEQ ID NO: 287433 - RNA, 22 nt, Human
auugugcaaauauuaucuguag

SEQ ID NO: 287434 - RNA, 22 nt, Human
ccagcuuuucuuaucauuauaa

SEQ ID NO: 287435 - RNA, 22 nt, Human
uuucagauggagguuuaggaca

SEQ ID NO: 287436 - RNA, 22 nt, Human
guguaaaaacauacuauuucua

SEQ ID NO: 287437 - RNA, 22 nt, Human
cuuaauuuaaaauaguucaggc

SEQ ID NO: 287438 - RNA, 22 nt, Human
cugcagggagaggggacagccu

SEQ ID NO: 287439 - RNA, 22 nt, Human
ugcaaacaggagaguaaguaua

SEQ ID NO: 287440 - RNA, 22 nt, Human
gaucuucucuuuaguagaaaca

SEQ ID NO: 287441 - RNA, 22 nt, Human
cauuuguaguaucuguuuauau

SEQ ID NO: 287442 - RNA, 22 nt, Human
acuugccuguuacauuucuagu

SEQ ID NO: 287443 - RNA, 22 nt, Human
cuuccuggccauugccauggca

SEQ ID NO: 287444 - RNA, 22 nt, Human
ucagauagugauaauagcaugu

SEQ ID NO: 287445 - RNA, 22 nt, Human
ccugugacuuggcaaaccucca

SEQ ID NO: 287446 - RNA, 22 nt, Human
ugucugagugcauaugugcugg

SEQ ID NO: 287447 - RNA, 22 nt, Human
uccugguggcuuucccugccuu

SEQ ID NO: 287448 - RNA, 20 nt, Human
ucaaaauaggugugggcgga

SEQ ID NO: 287449 - RNA, 22 nt, Human
ucacauuuuuuacuggacuuaa

SEQ ID NO: 287450 - RNA, 21 nt, Human
gcaaauguucaggaaaaaaga

SEQ ID NO: 287451 - RNA, 22 nt, Human
gcuuugugaauuauuacucaca

SEQ ID NO: 287452 - RNA, 22 nt, Human
ugcuuuauuaagagagaaauuu

SEQ ID NO: 287453 - RNA, 22 nt, Human
uauugauaaggauggcugcaau

SEQ ID NO: 287454 - RNA, 22 nt, Human
ccuuugguaauucuguguagag

SEQ ID NO: 287455 - RNA, 22 nt, Human
guuucauacagauuauucaugg

SEQ ID NO: 287456 - RNA, 22 nt, Human
uccaggcauaaugcccaguggu

SEQ ID NO: 287457 - RNA, 22 nt, Human
uuauuacacugaaagaauugcg

SEQ ID NO: 287458 - RNA, 23 nt, Human
cuucaugagagcccugaggaaaa

SEQ ID NO: 287459 - RNA, 22 nt, Human
uuucaaagcaacugaaaaggaa

SEQ ID NO: 287460 - RNA, 22 nt, Human
gauguacuugccuuaucuaucc

SEQ ID NO: 287461 - RNA, 22 nt, Human
augguaaacauuuaacaacuag

SEQ ID NO: 287462 - RNA, 22 nt, Human
aucuuucucugcacuauacaau

SEQ ID NO: 287463 - RNA, 22 nt, Human
uuucaguugccaagcuaauucu

SEQ ID NO: 287464 - RNA, 22 nt, Human
gcuuuggaaauauagacucaag

SEQ ID NO: 287465 - RNA, 22 nt, Human
accaaggagacaaagguguauu

SEQ ID NO: 287466 - RNA, 22 nt, Human
ugcaggcucaucucaagaguag

SEQ ID NO: 287467 - RNA, 22 nt, Human
ggaacaggaaaggagggaugcu

SEQ ID NO: 287468 - RNA, 22 nt, Human
aaaagcaagaggcuggauuaaa

SEQ ID NO: 287469 - RNA, 22 nt, Human
uuguuagugcaauguuugguga

SEQ ID NO: 287470 - RNA, 22 nt, Human
uggcagguacccauuggcugua

SEQ ID NO: 287471 - RNA, 22 nt, Human
cuugccuguggcuaguuggcuc

SEQ ID NO: 287472 - RNA, 22 nt, Human
guuacaaauguaaauucugggg

SEQ ID NO: 287473 - RNA, 22 nt, Human
ccuucuucaccaguuuaccuga

SEQ ID NO: 287474 - RNA, 22 nt, Human
uuccugguuuauaccuguauca

SEQ ID NO: 287475 - RNA, 22 nt, Human
cagucuaaucuguuacucauua

SEQ ID NO: 287476 - RNA, 22 nt, Human
aacaugaaaacuaccugugauu

SEQ ID NO: 287477 - RNA, 22 nt, Human
agacagacauagaaauuaguaa

SEQ ID NO: 287478 - RNA, 22 nt, Human
gaauugcuaaccaauucaaaau

SEQ ID NO: 287479 - RNA, 21 nt, Human
uucauaaaccauucucaugca

SEQ ID NO: 287480 - RNA, 22 nt, Human
agaaugcuccagagcugaaaga

SEQ ID NO: 287481 - RNA, 22 nt, Human
ucagaaaauaacuguuaguuug

SEQ ID NO: 287482 - RNA, 22 nt, Human
aaagauuauggcauugaaauac

SEQ ID NO: 287483 - RNA, 23 nt, Human
uuuuccagaaucgacucuguaga

SEQ ID NO: 287484 - RNA, 22 nt, Human
gcuguucacaucuggaccauuu

SEQ ID NO: 287485 - RNA, 22 nt, Human
uauugcugccauuuuccaaugu

SEQ ID NO: 287486 - RNA, 22 nt, Human
aaauacaaaaauuagccaggca

SEQ ID NO: 287487 - RNA, 22 nt, Human
ucccagccuuucuuuucugcug

SEQ ID NO: 287488 - RNA, 22 nt, Human
aauuuuacaagaaggccucgua

SEQ ID NO: 287489 - RNA, 22 nt, Human
uuucuaguucuaccacaguaau

SEQ ID NO: 287490 - RNA, 22 nt, Human
gacaugcaguucucaaggguag

SEQ ID NO: 287491 - RNA, 23 nt, Human
aggcagguuugggcucuucuugu

SEQ ID NO: 287492 - RNA, 22 nt, Human
cauuuugugcuagacacuaugg

SEQ ID NO: 287493 - RNA, 22 nt, Human
uuuucauuagaaugacugagaa

SEQ ID NO: 287494 - RNA, 22 nt, Human
uuccaggacucguucuggcuca

SEQ ID NO: 287495 - RNA, 21 nt, Human
gcaugugugggacuggauccu

SEQ ID NO: 287496 - RNA, 22 nt, Human
uuuaguauauaaaaagagaagu

SEQ ID NO: 287497 - RNA, 21 nt, Human
gccugcagaccccaccaggcu

SEQ ID NO: 287498 - RNA, 22 nt, Human
uuucaaaguugggaauuguaau

SEQ ID NO: 287499 - RNA, 22 nt, Human
uuucacuagaacguucuuguuu

SEQ ID NO: 287500 - RNA, 22 nt, Human
cauuucacaguaaagugauuuc

SEQ ID NO: 287501 - RNA, 22 nt, Human
accugcaggcacaggugugcgc

SEQ ID NO: 287502 - RNA, 22 nt, Human
ugucucagaguguuguauuaga

SEQ ID NO: 287503 - RNA, 22 nt, Human
gagcucagcacuaaaaucaugu

SEQ ID NO: 287504 - RNA, 22 nt, Human
ucacccagcgggcgcacacucg

SEQ ID NO: 287505 - RNA, 20 nt, Human
aaaguguaagcauauaauua

SEQ ID NO: 287506 - RNA, 22 nt, Human
cuucagaaccagccagaagagg

SEQ ID NO: 287507 - RNA, 22 nt, Human
aagcacagacucccucugagug

SEQ ID NO: 287508 - RNA, 22 nt, Human
ucaggagcuugguagugugauu

SEQ ID NO: 287509 - RNA, 22 nt, Human
gcagagaggaaugaagccaucc

SEQ ID NO: 287510 - RNA, 22 nt, Human
cuuccugcuccccugccaauuc

SEQ ID NO: 287511 - RNA, 22 nt, Human
uaaaacuuaacuauccagauua

SEQ ID NO: 287512 - RNA, 21 nt, Human
uggcagggguaguaguacagc

SEQ ID NO: 287513 - RNA, 22 nt, Human
auuugcauaauagugauuugua

SEQ ID NO: 287514 - RNA, 22 nt, Human
uucauauaaauggaaucagaau

SEQ ID NO: 287515 - RNA, 22 nt, Human
agggccaggaacaccugaaggg

SEQ ID NO: 287516 - RNA, 22 nt, Human
agauggcuuagccuggcuccca

SEQ ID NO: 287517 - RNA, 22 nt, Human
guuacaaaggaagcuucacugc

SEQ ID NO: 287518 - RNA, 22 nt, Human
augacagaggagugcaggugau

SEQ ID NO: 287519 - RNA, 22 nt, Human
ugaauaugugacuuugauuuca

SEQ ID NO: 287520 - RNA, 22 nt, Human
aucauucuauuguugagcugcc

SEQ ID NO: 287521 - RNA, 22 nt, Human
cacuggucagucggucagucuc

SEQ ID NO: 287522 - RNA, 22 nt, Human
aaauuagaagugcucaggaaua

SEQ ID NO: 287523 - RNA, 22 nt, Human
auuucuacaguacacaugcauu

SEQ ID NO: 287524 - RNA, 22 nt, Human
ccuccugguaauuagcgaaagg

SEQ ID NO: 287525 - RNA, 22 nt, Human
ugacauuuaucuucuacaauga

SEQ ID NO: 287526 - RNA, 22 nt, Human
aagucucuuuucuuccuguauu

SEQ ID NO: 287527 - RNA, 22 nt, Human
ucugucccugagagcucaggag

SEQ ID NO: 287528 - RNA, 22 nt, Human
uccaggcuggcucuucaaaauu

SEQ ID NO: 287529 - RNA, 22 nt, Human
gcuggcaggagaccauacccua

SEQ ID NO: 287530 - RNA, 22 nt, Human
caugagagauccuucaugagag

SEQ ID NO: 287531 - RNA, 22 nt, Human
uggaccugcguaggugcugggc

SEQ ID NO: 287532 - RNA, 22 nt, Human
aagguggugaguacaguuaggu

SEQ ID NO: 287533 - RNA, 22 nt, Human
ggagagcugguauaugaagaca

SEQ ID NO: 287534 - RNA, 22 nt, Human
uacauucacuuguugaaggugg

SEQ ID NO: 287535 - RNA, 22 nt, Human
gaggccuggaauuccagccugg

SEQ ID NO: 287536 - RNA, 22 nt, Human
cuggaggcaguugccccaguca

SEQ ID NO: 287537 - RNA, 22 nt, Human
cuguccagucagaacgucauua

SEQ ID NO: 287538 - RNA, 22 nt, Human
gcauucuuguuuuuccuacccu

SEQ ID NO: 287539 - RNA, 22 nt, Human
uguguccugcagacagacucag

SEQ ID NO: 287540 - RNA, 22 nt, Human
gagacaaagcuuccugugggua

SEQ ID NO: 287541 - RNA, 22 nt, Human
uagggcucagcucuagcuccug

SEQ ID NO: 287542 - RNA, 22 nt, Human
ucccaggcuggcaggcagcagu

SEQ ID NO: 287543 - RNA, 22 nt, Human
uggggaggaagucagauuucag

SEQ ID NO: 287544 - RNA, 22 nt, Human
auuaaauuggaucugcauaguu

SEQ ID NO: 287545 - RNA, 22 nt, Human
gggcaggugaccucuuguccug

SEQ ID NO: 287546 - RNA, 22 nt, Human
uggagcagaguucagcggggag

SEQ ID NO: 287547 - RNA, 21 nt, Human
agcacagcuuuaagccaugug

SEQ ID NO: 287548 - RNA, 22 nt, Human
ugggaugucuuuaggggaagag

SEQ ID NO: 287549 - RNA, 16 nt, Human
cuacccagugagaagg

SEQ ID NO: 287550 - RNA, 22 nt, Human
gaauugcuaauccaagugacug

SEQ ID NO: 287551 - RNA, 22 nt, Human
uucccucucuagcuuuccccaa

SEQ ID NO: 287552 - RNA, 22 nt, Human
agauaacugguuuacauuauug

SEQ ID NO: 287553 - RNA, 22 nt, Human
uuagaaaauuugcuucuuugga

SEQ ID NO: 287554 - RNA, 22 nt, Human
aaggucaaagacaguaacuuuu

SEQ ID NO: 287555 - RNA, 22 nt, Human
cuggcucuaucuccaaggcugg

SEQ ID NO: 287556 - RNA, 22 nt, Human
ucauuuggaagccugagagugu

SEQ ID NO: 287557 - RNA, 22 nt, Human
acacaagauuguguauugaauu

SEQ ID NO: 287558 - RNA, 22 nt, Human
ucuaggguccacagggucagcc

SEQ ID NO: 287559 - RNA, 23 nt, Human
gagagcccauuggcagggguacc

SEQ ID NO: 287560 - RNA, 22 nt, Human
cuggaggaauaauggcaucuug

SEQ ID NO: 287561 - RNA, 16 nt, Human
uccuggccccuaugga

SEQ ID NO: 287562 - RNA, 22 nt, Human
ucagcuuucucagaggccuaac

SEQ ID NO: 287563 - RNA, 22 nt, Human
ugcaguggaaagacucagacuu

SEQ ID NO: 287564 - RNA, 22 nt, Human
aggaugggucagcuagagucca

SEQ ID NO: 287565 - RNA, 22 nt, Human
gguggggcuaggaccucaggau

SEQ ID NO: 287566 - RNA, 22 nt, Human
aacaugaaaguugcuaagugca

SEQ ID NO: 287567 - RNA, 22 nt, Human
ugucaguuuggcucuaaaguuu

SEQ ID NO: 287568 - RNA, 22 nt, Human
acagaaaugauguuuggcaaua

SEQ ID NO: 287569 - RNA, 19 nt, Human
acauuuaaauucagaucuc

SEQ ID NO: 287570 - RNA, 22 nt, Human
uccuggcuucugucuccuuauu

SEQ ID NO: 287571 - RNA, 22 nt, Human
uguuuuaguucugucuugcaug

SEQ ID NO: 287572 - RNA, 22 nt, Human
uugcuuuaccauuugaucucua

SEQ ID NO: 287573 - RNA, 18 nt, Human
aguuuuuaggaagaaaug

SEQ ID NO: 287574 - RNA, 22 nt, Human
ugagaugucauaguucaguuca

SEQ ID NO: 287575 - RNA, 22 nt, Human
acauaucuuucccucuccugaa

SEQ ID NO: 287576 - RNA, 22 nt, Human
aguguugggucuuuagaauuua

SEQ ID NO: 287577 - RNA, 23 nt, Human
gcucagagguuuuucucuggaug

SEQ ID NO: 287578 - RNA, 22 nt, Human
gcuguggccgggcccaggccgc

SEQ ID NO: 287579 - RNA, 22 nt, Human
ggaucuguuuugccucugaggg

SEQ ID NO: 287580 - RNA, 22 nt, Human
uuucauuauacagcuucauaaa

SEQ ID NO: 287581 - RNA, 22 nt, Human
agagaaaacucauugagguguc

SEQ ID NO: 287582 - RNA, 17 nt, Human
cccguucucuucgcugg

SEQ ID NO: 287583 - RNA, 22 nt, Human
guguguucagcaagagguaagg

SEQ ID NO: 287584 - RNA, 22 nt, Human
uguaaacaaaugcauucuugcu

SEQ ID NO: 287585 - RNA, 22 nt, Human
cagaaagaccugauuggcaguu

SEQ ID NO: 287586 - RNA, 22 nt, Human
uucuuguucugguucuguuagc

SEQ ID NO: 287587 - RNA, 22 nt, Human
uagcuuuaagacauggugaaug

SEQ ID NO: 287588 - RNA, 22 nt, Human
caggcugcguuugugaaaggua

SEQ ID NO: 287589 - RNA, 23 nt, Human
gcagacagagcagacuaagacaa

SEQ ID NO: 287590 - RNA, 22 nt, Human
ucuuuggucaucaugggaagca

SEQ ID NO: 287591 - RNA, 22 nt, Human
cuguccugucugcuuuuaauuu

SEQ ID NO: 287592 - RNA, 22 nt, Human
cuggaggagcaauaugguuagg

SEQ ID NO: 287593 - RNA, 22 nt, Human
gcaaauacauguugagcaccua

SEQ ID NO: 287594 - RNA, 22 nt, Human
agaagucauuuauguuagauga

SEQ ID NO: 287595 - RNA, 22 nt, Human
ggaacuggguuagggucucuuc

SEQ ID NO: 287596 - RNA, 22 nt, Human
aaacaguggccaauucuggaga

SEQ ID NO: 287597 - RNA, 22 nt, Human
uuccagaaaacucugccuggua

SEQ ID NO: 287598 - RNA, 22 nt, Human
uucuuacaaguauuccaggucc

SEQ ID NO: 287599 - RNA, 22 nt, Human
uauuccaguucaccuuuucauc

SEQ ID NO: 287600 - RNA, 23 nt, Human
uggucucagccugugagagcuga

SEQ ID NO: 287601 - RNA, 22 nt, Human
ccagagacgucggucagggcgc

SEQ ID NO: 287602 - RNA, 22 nt, Human
agcauucaaguaauucacuugg

SEQ ID NO: 287603 - RNA, 22 nt, Human
caguaaaagauggaaauagaau

SEQ ID NO: 287604 - RNA, 22 nt, Human
uguuuucuuccuaauugcucau

SEQ ID NO: 287605 - RNA, 22 nt, Human
ucuuccuggcauugaugcugca

SEQ ID NO: 287606 - RNA, 18 nt, Human
uuaaggauaagcagacua

SEQ ID NO: 287607 - RNA, 22 nt, Human
uuucaaguacuguaaacaugcu

SEQ ID NO: 287608 - RNA, 22 nt, Human
ucagagaaaugaaguagggauu

SEQ ID NO: 287609 - RNA, 22 nt, Human
uaaagauaagacaucaacugag

SEQ ID NO: 287610 - RNA, 22 nt, Human
ggcugcaaaggaaaagugguga

SEQ ID NO: 287611 - RNA, 22 nt, Human
uuuaugaacuacagauauaacu

SEQ ID NO: 287612 - RNA, 22 nt, Human
gagugucagugccuggcuuguu

SEQ ID NO: 287613 - RNA, 22 nt, Human
uuccugggauuauugucaagca

SEQ ID NO: 287614 - RNA, 22 nt, Human
agucuucacucuucacuacuau

SEQ ID NO: 287615 - RNA, 20 nt, Human
uauuuguauuugggaaaguu

SEQ ID NO: 287616 - RNA, 22 nt, Human
ucacuggguaggacaugcugau

SEQ ID NO: 287617 - RNA, 22 nt, Human
auguccagagccggccugcuga

SEQ ID NO: 287618 - RNA, 22 nt, Human
augaggagcccucauuuagguu

SEQ ID NO: 287619 - RNA, 22 nt, Human
aaaagacaucuauuucaggcag

SEQ ID NO: 287620 - RNA, 22 nt, Human
uccaaggacuaaauucuagauu

SEQ ID NO: 287621 - RNA, 22 nt, Human
uggcugugccucuuuccaggcc

SEQ ID NO: 287622 - RNA, 17 nt, Human
agugucagaagacaguu

SEQ ID NO: 287623 - RNA, 22 nt, Human
aguccaugguucugacucaucu

SEQ ID NO: 287624 - RNA, 22 nt, Human
gcagguggaucaccacgucagg

SEQ ID NO: 287625 - RNA, 22 nt, Human
aguauacaguaaugacauaucu

SEQ ID NO: 287626 - RNA, 22 nt, Human
uugguaaauguugauuguggcu

SEQ ID NO: 287627 - RNA, 22 nt, Human
guccugucccccaaggcugugg

SEQ ID NO: 287628 - RNA, 22 nt, Human
ugcagggcacggugcgcguggg

SEQ ID NO: 287629 - RNA, 22 nt, Human
uauacauguuuuacauaaguga

SEQ ID NO: 287630 - RNA, 22 nt, Human
uuacauucuuaucucaguuauu

SEQ ID NO: 287631 - RNA, 22 nt, Human
acaacauuauacauagaaagcu

SEQ ID NO: 287632 - RNA, 22 nt, Human
auacaaaaauuagccgggagua

SEQ ID NO: 287633 - RNA, 22 nt, Human
uuugacaugcaaagcacuuuag

SEQ ID NO: 287634 - RNA, 22 nt, Human
acaaaugugucuaauugugccu

SEQ ID NO: 287635 - RNA, 22 nt, Human
uggaauuuaguuaauuccauuu

SEQ ID NO: 287636 - RNA, 22 nt, Human
uuccagaacaauguggacguau

SEQ ID NO: 287637 - RNA, 22 nt, Human
guaaucucagcuacuugggagg

SEQ ID NO: 287638 - RNA, 22 nt, Human
aaggagggaaagcagugcuucu

SEQ ID NO: 287639 - RNA, 22 nt, Human
uuucuuuaggcuguguugccaa

SEQ ID NO: 287640 - RNA, 22 nt, Human
aaguaaaauucaaucuucacug

SEQ ID NO: 287641 - RNA, 22 nt, Human
aagcugugaaauagauuacaca

SEQ ID NO: 287642 - RNA, 17 nt, Human
uuuaaacuacuacaagg

SEQ ID NO: 287643 - RNA, 22 nt, Human
uggaaugucauaccauaaaaga

SEQ ID NO: 287644 - RNA, 22 nt, Human
uccugcaggggcugaggaacca

SEQ ID NO: 287645 - RNA, 17 nt, Human
ucuucucuuccagucuu

SEQ ID NO: 287646 - RNA, 22 nt, Human
aacugacagcaggaaccauucc

SEQ ID NO: 287647 - RNA, 22 nt, Human
ugcccagccaguuuaugguaau

SEQ ID NO: 287648 - RNA, 22 nt, Human
cacauuaaaauccuaacuucca

SEQ ID NO: 287649 - RNA, 22 nt, Human
agguucaaauuguugcaguuuc

SEQ ID NO: 287650 - RNA, 22 nt, Human
auuucuucagguucuucuagga

SEQ ID NO: 287651 - RNA, 22 nt, Human
ccuggcugguggcagcgacaag

SEQ ID NO: 287652 - RNA, 22 nt, Human
uugcaggguuaaaguaagguag

SEQ ID NO: 287653 - RNA, 22 nt, Human
ggccucagagaaggcugugcgg

SEQ ID NO: 287654 - RNA, 22 nt, Human
acauucuggaugucugaugaga

SEQ ID NO: 287655 - RNA, 22 nt, Human
uauguacauacaugugcauacg

SEQ ID NO: 287656 - RNA, 22 nt, Human
ggccugagucccaccuggcugu

SEQ ID NO: 287657 - RNA, 22 nt, Human
uccuggcucaggccccuggugc

SEQ ID NO: 287658 - RNA, 22 nt, Human
acaagucucaacagcagccagc

SEQ ID NO: 287659 - RNA, 22 nt, Human
cucugugugguccucuguauug

SEQ ID NO: 287660 - RNA, 22 nt, Human
uuauuguagcacuuuggcagug

SEQ ID NO: 287661 - RNA, 22 nt, Human
agcagggcagugaucagaaagg

SEQ ID NO: 287662 - RNA, 22 nt, Human
aaggaugaacauuaauacauca

SEQ ID NO: 287663 - RNA, 22 nt, Human
gugucacuggaauacugucugu

SEQ ID NO: 287664 - RNA, 22 nt, Human
uuccagaauugggagccuugag

SEQ ID NO: 287665 - RNA, 22 nt, Human
cuuaaagaugucaaggcuguuu

SEQ ID NO: 287666 - RNA, 22 nt, Human
acagggcauuuccucuaugugu

SEQ ID NO: 287667 - RNA, 22 nt, Human
ucuagggugugcggcagggcua

SEQ ID NO: 287668 - RNA, 22 nt, Human
cauuuauucaugaucuguagcu

SEQ ID NO: 287669 - RNA, 22 nt, Human
aagccuuggggcuccucuguau

SEQ ID NO: 287670 - RNA, 22 nt, Human
uuggcuuuuaugcagcuuaggu

SEQ ID NO: 287671 - RNA, 17 nt, Human
ccagguggaaucgugga

SEQ ID NO: 287672 - RNA, 22 nt, Human
guuucuuuuaaaauauguagac

SEQ ID NO: 287673 - RNA, 22 nt, Human
uccucuggggcgugguccugga

SEQ ID NO: 287674 - RNA, 22 nt, Human
cuuuauuagauguagacuuucu

SEQ ID NO: 287675 - RNA, 22 nt, Human
cagggacccgcacagguagcau

SEQ ID NO: 287676 - RNA, 22 nt, Human
cauuuguauguuccuccuuagg

SEQ ID NO: 287677 - RNA, 22 nt, Human
caacuucuuggcuuccuaaugg

SEQ ID NO: 287678 - RNA, 22 nt, Human
aaugagauggaggacucuuaau

SEQ ID NO: 287679 - RNA, 22 nt, Human
uggcagugggaagcuggaaguc

SEQ ID NO: 287680 - RNA, 22 nt, Human
gcaccuuucuauauucaguggc

SEQ ID NO: 287681 - RNA, 22 nt, Human
agaggcucugccgccucaggua

SEQ ID NO: 287682 - RNA, 22 nt, Human
cugaaagcaaaguaauucuuaa

SEQ ID NO: 287683 - RNA, 22 nt, Human
aaauggaauguguuuauaauuc

SEQ ID NO: 287684 - RNA, 22 nt, Human
uggcaaaguaauuggguuucuc

SEQ ID NO: 287685 - RNA, 20 nt, Human
ugugcccagcagaggcugcc

SEQ ID NO: 287686 - RNA, 22 nt, Human
caggcugcuccaggguaggaaa

SEQ ID NO: 287687 - RNA, 21 nt, Human
aaagaaaucucccauugguag

SEQ ID NO: 287688 - RNA, 23 nt, Human
gcucuggcagcuugugucagcac

SEQ ID NO: 287689 - RNA, 22 nt, Human
ucugggccucaguuucuucauc

SEQ ID NO: 287690 - RNA, 22 nt, Human
guguccugccacccugggcuuu

SEQ ID NO: 287691 - RNA, 22 nt, Human
uucacacuuuggaauuccaccu

SEQ ID NO: 287692 - RNA, 22 nt, Human
ugucucagaguaucccugaacu

SEQ ID NO: 287693 - RNA, 22 nt, Human
augaaaacggaccagagcuauu

SEQ ID NO: 287694 - RNA, 22 nt, Human
auguagagcuccuugauccucc

SEQ ID NO: 287695 - RNA, 22 nt, Human
acauuaaauuucauagugauua

SEQ ID NO: 287696 - RNA, 22 nt, Human
ccucuccuugcacccgucccgc

SEQ ID NO: 287697 - RNA, 22 nt, Human
agaguaaaguacuuggaauacc

SEQ ID NO: 287698 - RNA, 22 nt, Human
uggcaggaaaguaacagagcac

SEQ ID NO: 287699 - RNA, 22 nt, Human
uaagaauuaucucauggauaau

SEQ ID NO: 287700 - RNA, 22 nt, Human
cagagcaucgcgcagagagccu

SEQ ID NO: 287701 - RNA, 22 nt, Human
gggaggagggugcuggcuaaac

SEQ ID NO: 287702 - RNA, 22 nt, Human
acaugacaagguuuauaaggcu

SEQ ID NO: 287703 - RNA, 22 nt, Human
ccaaaauaacagcccaauucac

SEQ ID NO: 287704 - RNA, 22 nt, Human
ugcccuggggagcccagccagg

SEQ ID NO: 287705 - RNA, 22 nt, Human
gaucaugugauuugaaguaaug

SEQ ID NO: 287706 - RNA, 22 nt, Human
ucugagcuaauccuguugccga

SEQ ID NO: 287707 - RNA, 19 nt, Human
uauugguaugugugaggca

SEQ ID NO: 287708 - RNA, 22 nt, Human
cacagcugcccuacuccaugug

SEQ ID NO: 287709 - RNA, 22 nt, Human
cuggcugugcagucuuccagaa

SEQ ID NO: 287710 - RNA, 22 nt, Human
guucaaaauucaaaugguauac

SEQ ID NO: 287711 - RNA, 22 nt, Human
auggcuuguucauugguaccug

SEQ ID NO: 287712 - RNA, 22 nt, Human
agauauuuguaucuugcuauug

SEQ ID NO: 287713 - RNA, 22 nt, Human
aaaauugucgaacaguaguaac

SEQ ID NO: 287714 - RNA, 22 nt, Human
cagugucaccaggcgagucucc

SEQ ID NO: 287715 - RNA, 22 nt, Human
ccuggaagucauuccucguucc

SEQ ID NO: 287716 - RNA, 22 nt, Human
ugccaaauugcccuauaaauga

SEQ ID NO: 287717 - RNA, 22 nt, Human
ccagccuuacugcccuucagug

SEQ ID NO: 287718 - RNA, 22 nt, Human
aggagccaaauuuuagacucug

SEQ ID NO: 287719 - RNA, 22 nt, Human
ucuuaguuguuugcugucuaac

SEQ ID NO: 287720 - RNA, 22 nt, Human
aggaauguuaguucuguauaca

SEQ ID NO: 287721 - RNA, 22 nt, Human
cauuuguauagugcuuagacca

SEQ ID NO: 287722 - RNA, 22 nt, Human
ggaccugcauuuuaacaagauc

SEQ ID NO: 287723 - RNA, 22 nt, Human
auguuaaauagccauuuguuug

SEQ ID NO: 287724 - RNA, 22 nt, Human
gaaggagggugcggaucugagc

SEQ ID NO: 287725 - RNA, 22 nt, Human
auuugggaauuauuugccuaau

SEQ ID NO: 287726 - RNA, 22 nt, Human
augucagucuuucugucucaga

SEQ ID NO: 287727 - RNA, 22 nt, Human
cccagccagccucuucccauau

SEQ ID NO: 287728 - RNA, 22 nt, Human
gcugaaaugucuuuagcagugu

SEQ ID NO: 287729 - RNA, 23 nt, Human
ucagagaggcccccugcagagau

SEQ ID NO: 287730 - RNA, 21 nt, Human
cuguccuggucuagaggcaca

SEQ ID NO: 287731 - RNA, 22 nt, Human
acuacauucaugcucguguugg

SEQ ID NO: 287732 - RNA, 22 nt, Human
acagaagaccagagagcuaacu

SEQ ID NO: 287733 - RNA, 22 nt, Human
aaacaucaauugcaucucccaa

SEQ ID NO: 287734 - RNA, 22 nt, Human
cugggucccaauagcuuuuguu

SEQ ID NO: 287735 - RNA, 19 nt, Human
uuucuuuuccccucagcac

SEQ ID NO: 287736 - RNA, 22 nt, Human
gagagcacggucuugggcaugg

SEQ ID NO: 287737 - RNA, 22 nt, Human
acaagauuuuaugacucuuuuu

SEQ ID NO: 287738 - RNA, 22 nt, Human
aggccaggguagggcccauugu

SEQ ID NO: 287739 - RNA, 22 nt, Human
ccuugcucaucccccagugccu

SEQ ID NO: 287740 - RNA, 22 nt, Human
ucugaaauaggaaagcaaaugg

SEQ ID NO: 287741 - RNA, 22 nt, Human
uccaaggaggcuuugacgucca

SEQ ID NO: 287742 - RNA, 22 nt, Human
uguuugcucugacuaucuugcg

SEQ ID NO: 287743 - RNA, 22 nt, Human
auuugcuggugaauguauagcu

SEQ ID NO: 287744 - RNA, 22 nt, Human
cauguuaacuaagauuaacuau

SEQ ID NO: 287745 - RNA, 22 nt, Human
ucucuucacaugcuugcuccaa

SEQ ID NO: 287746 - RNA, 22 nt, Human
ccccacagcuuguggagagaau

SEQ ID NO: 287747 - RNA, 22 nt, Human
ucuguacaguaccagauaguaa

SEQ ID NO: 287748 - RNA, 22 nt, Human
acaaauauuuacugaauccacu

SEQ ID NO: 287749 - RNA, 21 nt, Human
uucuggguuguuaaucugaac

SEQ ID NO: 287750 - RNA, 20 nt, Human
cugagcccagaucccagguc

SEQ ID NO: 287751 - RNA, 22 nt, Human
cauagaauggauugacaagauu

SEQ ID NO: 287752 - RNA, 22 nt, Human
cauuuguaucugggcugcugug

SEQ ID NO: 287753 - RNA, 22 nt, Human
uccugagcuacaguaguaugau

SEQ ID NO: 287754 - RNA, 22 nt, Human
cccugagagugagugccaccuu

SEQ ID NO: 287755 - RNA, 22 nt, Human
gggaacuugccccagaggaauu

SEQ ID NO: 287756 - RNA, 22 nt, Human
cagugcagaggugcaagcaugu

SEQ ID NO: 287757 - RNA, 22 nt, Human
uuuguauaagaacauucuagca

SEQ ID NO: 287758 - RNA, 22 nt, Human
uugguaaauacucuuuggagac

SEQ ID NO: 287759 - RNA, 19 nt, Human
uucacaauuaugaaauuag

SEQ ID NO: 287760 - RNA, 22 nt, Human
uauuucaucuggaacaagguaa

SEQ ID NO: 287761 - RNA, 22 nt, Human
cugccguguuuuucauguuaaa

SEQ ID NO: 287762 - RNA, 22 nt, Human
ugucucaguucccuucucugga

SEQ ID NO: 287763 - RNA, 22 nt, Human
uauuucugaauccaaaagguca

SEQ ID NO: 287764 - RNA, 22 nt, Human
ugaaauguagauuaggcauucu

SEQ ID NO: 287765 - RNA, 22 nt, Human
cuauuagguaugugguugcuau

SEQ ID NO: 287766 - RNA, 22 nt, Human
uuccuacagcccugaaucucua

SEQ ID NO: 287767 - RNA, 22 nt, Human
uugccauuaaaacauguuaucu

SEQ ID NO: 287768 - RNA, 22 nt, Human
aagccuugauucacucugugga

SEQ ID NO: 287769 - RNA, 22 nt, Human
uaaaguagcaaguuuagacuga

SEQ ID NO: 287770 - RNA, 22 nt, Human
uuagauaauguagagauaugag

SEQ ID NO: 287771 - RNA, 21 nt, Human
ggcuuuaugcucacccagccu

SEQ ID NO: 287772 - RNA, 22 nt, Human
ucucagguaaaaggguaucuac

SEQ ID NO: 287773 - RNA, 22 nt, Human
cuccuggcucucuguuuagugu

SEQ ID NO: 287774 - RNA, 22 nt, Human
ugcuuagacgucaaguacagcc

SEQ ID NO: 287775 - RNA, 22 nt, Human
caaacuuacguagucuuacuac

SEQ ID NO: 287776 - RNA, 22 nt, Human
aagagcacuaacagagcugaua

SEQ ID NO: 287777 - RNA, 22 nt, Human
agcaggugggcaugaaagcuga

SEQ ID NO: 287778 - RNA, 22 nt, Human
uuaaagcuagguggaacaaauu

SEQ ID NO: 287779 - RNA, 22 nt, Human
gucuggaaauuuaagguaugag

SEQ ID NO: 287780 - RNA, 22 nt, Human
guuacaaagcacuucaagugaa

SEQ ID NO: 287781 - RNA, 22 nt, Human
guggaggacaaaagaagccuuu

SEQ ID NO: 287782 - RNA, 22 nt, Human
uugccuuacugcauucaguaaa

SEQ ID NO: 287783 - RNA, 22 nt, Human
gugaggcagcaggagccucugu

SEQ ID NO: 287784 - RNA, 22 nt, Human
cuggguuuuauuacagugagcu

SEQ ID NO: 287785 - RNA, 22 nt, Human
acauucuuccagcuggcuguug

SEQ ID NO: 287786 - RNA, 22 nt, Human
ccacccagccagaugcaggaag

SEQ ID NO: 287787 - RNA, 22 nt, Human
uuauccaacaugacuuaugucc

SEQ ID NO: 287788 - RNA, 22 nt, Human
cacccagccuucacacaggagu

SEQ ID NO: 287789 - RNA, 20 nt, Human
aggagcugaauuagaggguu

SEQ ID NO: 287790 - RNA, 22 nt, Human
uaaaagcucuucuguugaguua

SEQ ID NO: 287791 - RNA, 22 nt, Human
gaaaggcaucuucagucucuga

SEQ ID NO: 287792 - RNA, 22 nt, Human
agaggacacaucuuuccucaaa

SEQ ID NO: 287793 - RNA, 22 nt, Human
ugucucaguauacgaaacacuu

SEQ ID NO: 287794 - RNA, 22 nt, Human
ugguaugaccguggugcaagca

SEQ ID NO: 287795 - RNA, 22 nt, Human
aggcucuguaugaagguuuggg

SEQ ID NO: 287796 - RNA, 22 nt, Human
aguggcuugcucugccucagcc

SEQ ID NO: 287797 - RNA, 22 nt, Human
guauauaugugugaacauguau

SEQ ID NO: 287798 - RNA, 22 nt, Human
uguguccucauguggcagagag

SEQ ID NO: 287799 - RNA, 22 nt, Human
ucagugugaggucuuccacccg

SEQ ID NO: 287800 - RNA, 22 nt, Human
acagugcaggucucaacaauua

SEQ ID NO: 287801 - RNA, 22 nt, Human
gugcaugguaagaugcuucaca

SEQ ID NO: 287802 - RNA, 21 nt, Human
aagcuguguuccacugauagc

SEQ ID NO: 287803 - RNA, 22 nt, Human
guacuacaguuucucauuaaau

SEQ ID NO: 287804 - RNA, 22 nt, Human
agaggccucuguuguucagacg

SEQ ID NO: 287805 - RNA, 22 nt, Human
cugaaaauguuacacaggaaga

SEQ ID NO: 287806 - RNA, 22 nt, Human
uacaacauuguguugcuucaua

SEQ ID NO: 287807 - RNA, 22 nt, Human
aaggaagggaaauagugauguc

SEQ ID NO: 287808 - RNA, 22 nt, Human
acagguguagcaggagcaucaa

SEQ ID NO: 287809 - RNA, 20 nt, Human
ccuguggcucuuguaauuca

SEQ ID NO: 287810 - RNA, 22 nt, Human
augucacuccagggacacaggu

SEQ ID NO: 287811 - RNA, 22 nt, Human
guguccugggcauuaggcuuag

SEQ ID NO: 287812 - RNA, 22 nt, Human
ggaggccagccugaggcugagg

SEQ ID NO: 287813 - RNA, 21 nt, Human
uuguguuuccccagucacuuu

SEQ ID NO: 287814 - RNA, 22 nt, Human
aguacaaacuguuucaaaguag

SEQ ID NO: 287815 - RNA, 19 nt, Human
uagcugauagcuacuuuau

SEQ ID NO: 287816 - RNA, 22 nt, Human
agcuccaggugcaagucauggu

SEQ ID NO: 287817 - RNA, 19 nt, Human
uacaagcuuaaaguaaugu

SEQ ID NO: 287818 - RNA, 22 nt, Human
cugagcccuggcucgccuggag

SEQ ID NO: 287819 - RNA, 22 nt, Human
caguauuuauggcuugaguauu

SEQ ID NO: 287820 - RNA, 19 nt, Human
gggagcugaggucuuuggu

SEQ ID NO: 287821 - RNA, 22 nt, Human
gggaggugauggcaagcagcgg

SEQ ID NO: 287822 - RNA, 22 nt, Human
gaggccuggcucugcccuccug

SEQ ID NO: 287823 - RNA, 22 nt, Human
uucuggaucugagggggaagau

SEQ ID NO: 287824 - RNA, 22 nt, Human
gcuuuuggccagauggggaaac

SEQ ID NO: 287825 - RNA, 22 nt, Human
aauugcuucauuaacauuuagg

SEQ ID NO: 287826 - RNA, 22 nt, Human
ccuggaucagucacuguugcug

SEQ ID NO: 287827 - RNA, 22 nt, Human
ucccugccugacagcacccacc

SEQ ID NO: 287828 - RNA, 22 nt, Human
ggagcugagguaacagugagug

SEQ ID NO: 287829 - RNA, 22 nt, Human
uuauuccagcuaagaguccugg

SEQ ID NO: 287830 - RNA, 22 nt, Human
uagggcucgggcacaggacagg

SEQ ID NO: 287831 - RNA, 22 nt, Human
ucaggcccuuugcugcugcccc

SEQ ID NO: 287832 - RNA, 22 nt, Human
ugucagagcaaggccaggccag

SEQ ID NO: 287833 - RNA, 22 nt, Human
uacauguggaguuuucuaguca

SEQ ID NO: 287834 - RNA, 22 nt, Human
gcuaaugacugaguuuuuagca

SEQ ID NO: 287835 - RNA, 22 nt, Human
uagcuauuguugguaguuaccc

SEQ ID NO: 287836 - RNA, 22 nt, Human
ccccagggucaguguguggagg

SEQ ID NO: 287837 - RNA, 22 nt, Human
uagcugacagauacaaucagau

SEQ ID NO: 287838 - RNA, 22 nt, Human
uugcugauucaugauuugagaa

SEQ ID NO: 287839 - RNA, 22 nt, Human
auauuaggaguuaaauguauua

SEQ ID NO: 287840 - RNA, 22 nt, Human
aacuuucuuggaugucucaaca

SEQ ID NO: 287841 - RNA, 22 nt, Human
ucauguuuguuggaaauguggc

SEQ ID NO: 287842 - RNA, 22 nt, Human
uguaaaauaccauuccuuguca

SEQ ID NO: 287843 - RNA, 22 nt, Human
ucugauuagagcauucuugagu

SEQ ID NO: 287844 - RNA, 19 nt, Human
auucuucagcagugagacc

SEQ ID NO: 287845 - RNA, 22 nt, Human
gagacacaggcacagaagaggc

SEQ ID NO: 287846 - RNA, 19 nt, Human
aaaauugcguauuuugagg

SEQ ID NO: 287847 - RNA, 22 nt, Human
uggcaaggcugugggggcagag

SEQ ID NO: 287848 - RNA, 22 nt, Human
aagacauguuuuaagaauauuu

SEQ ID NO: 287849 - RNA, 22 nt, Human
uuccacuuuucucucucaugcc

SEQ ID NO: 287850 - RNA, 22 nt, Human
uauuugaaaguguacaaaaacu

SEQ ID NO: 287851 - RNA, 22 nt, Human
cagaugaaguaggugacgagca

SEQ ID NO: 287852 - RNA, 22 nt, Human
ggguggagcuuggacaccagua

SEQ ID NO: 287853 - RNA, 22 nt, Human
uggcugcugcagacagacagga

SEQ ID NO: 287854 - RNA, 22 nt, Human
gcaugugugagaccuuuuagca

SEQ ID NO: 287855 - RNA, 22 nt, Human
gauaaauugcacuuuuucuuac

SEQ ID NO: 287856 - RNA, 21 nt, Human
uucaacaaagggaauaaguuu

SEQ ID NO: 287857 - RNA, 22 nt, Human
ggcagagguagcuggaaccagg

SEQ ID NO: 287858 - RNA, 22 nt, Human
auaugaaaauguuuuagcugua

SEQ ID NO: 287859 - RNA, 16 nt, Human
ucagggcagaauggca

SEQ ID NO: 287860 - RNA, 17 nt, Human
acaggcagaucaccuga

SEQ ID NO: 287861 - RNA, 22 nt, Human
gugacccagguagguaagcaau

SEQ ID NO: 287862 - RNA, 22 nt, Human
uacauucagcaaaagaaugguu

SEQ ID NO: 287863 - RNA, 22 nt, Human
auggccugaugcaccuguccca

SEQ ID NO: 287864 - RNA, 23 nt, Human
ccugugacacuguuugugguaag

SEQ ID NO: 287865 - RNA, 22 nt, Human
ccagggcacguugggacaguac

SEQ ID NO: 287866 - RNA, 22 nt, Human
gggaacacuccagggcuuggaa

SEQ ID NO: 287867 - RNA, 22 nt, Human
ugccagcacuucuggcugucug

SEQ ID NO: 287868 - RNA, 22 nt, Human
aucucacagaggcccaccagga

SEQ ID NO: 287869 - RNA, 22 nt, Human
acacacagguaaaggagccugg

SEQ ID NO: 287870 - RNA, 22 nt, Human
uuuagggaaauugaggguuaag

SEQ ID NO: 287871 - RNA, 22 nt, Human
aaacaugaauagauauuaaaca

SEQ ID NO: 287872 - RNA, 22 nt, Human
gacuguggggggcggacacaag

SEQ ID NO: 287873 - RNA, 22 nt, Human
cccuccucaacucuggcuucca

SEQ ID NO: 287874 - RNA, 22 nt, Human
gucaggcagccuggagauucag

SEQ ID NO: 287875 - RNA, 22 nt, Human
accucacaagucucugucagcu

SEQ ID NO: 287876 - RNA, 22 nt, Human
uucuaucauacuugaauacauu

SEQ ID NO: 287877 - RNA, 22 nt, Human
uucagaaaggauaauuggaagg

SEQ ID NO: 287878 - RNA, 22 nt, Human
gugggugugagugacggcgucc

SEQ ID NO: 287879 - RNA, 22 nt, Human
cucaaaaugguuaauuuuaaua

SEQ ID NO: 287880 - RNA, 22 nt, Human
gaaucaaugguagauuaaguaa

SEQ ID NO: 287881 - RNA, 22 nt, Human
augaaauugaucuugaacuuuu

SEQ ID NO: 287882 - RNA, 22 nt, Human
aaagcagaacugagagagcugg

SEQ ID NO: 287883 - RNA, 22 nt, Human
ccagggcagugggagaaggugc

SEQ ID NO: 287884 - RNA, 22 nt, Human
uuccugagaacauggcagcuua

SEQ ID NO: 287885 - RNA, 22 nt, Human
gcagucuauaaaucagcuuugc

SEQ ID NO: 287886 - RNA, 22 nt, Human
guggcagguuccguagacagca

SEQ ID NO: 287887 - RNA, 22 nt, Human
agcuggagcuucaagcagguaa

SEQ ID NO: 287888 - RNA, 22 nt, Human
uugugcagaguugccuuuauuu

SEQ ID NO: 287889 - RNA, 22 nt, Human
auccaaaaccagugcauuuucc

SEQ ID NO: 287890 - RNA, 22 nt, Human
gacuuuggcaucuagacauugu

SEQ ID NO: 287891 - RNA, 22 nt, Human
gcaaaugaagguggugcuacag

SEQ ID NO: 287892 - RNA, 22 nt, Human
gccugcagccucaagggcugag

SEQ ID NO: 287893 - RNA, 22 nt, Human
aauuuucacagugcugugagau

SEQ ID NO: 287894 - RNA, 22 nt, Human
acauucaagaugcauucacuua

SEQ ID NO: 287895 - RNA, 23 nt, Human
agcuucauugaccuccgcagggg

SEQ ID NO: 287896 - RNA, 22 nt, Human
uaauaauuaacagugauggguc

SEQ ID NO: 287897 - RNA, 22 nt, Human
aaaugcuacacaggaauucuca

SEQ ID NO: 287898 - RNA, 22 nt, Human
ucaucaguguccuuaucacuua

SEQ ID NO: 287899 - RNA, 21 nt, Human
uagggcaggcauuggaagaga

SEQ ID NO: 287900 - RNA, 22 nt, Human
caggcagaaauuuuguuucauu

SEQ ID NO: 287901 - RNA, 22 nt, Human
aacuggaaccuuuuauucaguc

SEQ ID NO: 287902 - RNA, 22 nt, Human
gauaccagacagggagggagaa

SEQ ID NO: 287903 - RNA, 22 nt, Human
ugcuggagaccugcuugcacca

SEQ ID NO: 287904 - RNA, 21 nt, Human
uucagcaguccucuagagaua

SEQ ID NO: 287905 - RNA, 22 nt, Human
gagcuuuaccuuagguucuguu

SEQ ID NO: 287906 - RNA, 22 nt, Human
cauguugaauggccuugauuuu

SEQ ID NO: 287907 - RNA, 22 nt, Human
cuauuuuccgcagcaggaagua

SEQ ID NO: 287908 - RNA, 19 nt, Human
uuccaaaaucaggauuuga

SEQ ID NO: 287909 - RNA, 22 nt, Human
agccggccauguggucuugugc

SEQ ID NO: 287910 - RNA, 22 nt, Human
aggcuguguggucaugguggcu

SEQ ID NO: 287911 - RNA, 22 nt, Human
ccaaggcugagguuuccaguug

SEQ ID NO: 287912 - RNA, 22 nt, Human
agcaccuccuuagcuaugacca

SEQ ID NO: 287913 - RNA, 22 nt, Human
gcuccaggugucccagguaaaa

SEQ ID NO: 287914 - RNA, 21 nt, Human
ucuggcaggcacgggcccagc

SEQ ID NO: 287915 - RNA, 22 nt, Human
uuucaaagucaauaucauuacc

SEQ ID NO: 287916 - RNA, 22 nt, Human
uucaugaauggaaucaaugcuc

SEQ ID NO: 287917 - RNA, 22 nt, Human
ucauuuuuuuccgguaggaaua

SEQ ID NO: 287918 - RNA, 22 nt, Human
ugugugucagagucuccauggu

SEQ ID NO: 287919 - RNA, 22 nt, Human
uucaauaucucuaagaaugagg

SEQ ID NO: 287920 - RNA, 22 nt, Human
ccaggccuuccaguacgcagaa

SEQ ID NO: 287921 - RNA, 22 nt, Human
ccauuugugcuucuucaaagca

SEQ ID NO: 287922 - RNA, 22 nt, Human
uggcacagagggacccagcagc

SEQ ID NO: 287923 - RNA, 23 nt, Human
cauggaaaacugaaagcugaccu

SEQ ID NO: 287924 - RNA, 22 nt, Human
aggcaggggagcuggaagggua

SEQ ID NO: 287925 - RNA, 22 nt, Human
cagacaggcaggugcugcuuug

SEQ ID NO: 287926 - RNA, 22 nt, Human
gacccaggcccaaggcugccag

SEQ ID NO: 287927 - RNA, 22 nt, Human
uuccagugacuaagcuucugcu

SEQ ID NO: 287928 - RNA, 22 nt, Human
uuucauugagacuauagacauc

SEQ ID NO: 287929 - RNA, 22 nt, Human
uguguccuuucuaaugcccaga

SEQ ID NO: 287930 - RNA, 22 nt, Human
gauccugugcauggggugaugg

SEQ ID NO: 287931 - RNA, 22 nt, Human
acagccagguaaaggcauggca

SEQ ID NO: 287932 - RNA, 22 nt, Human
aaacuucauggauaauauaaag

SEQ ID NO: 287933 - RNA, 22 nt, Human
uccugcagagacagaggccuca

SEQ ID NO: 287934 - RNA, 22 nt, Human
uucuucaaagaugucuguugga

SEQ ID NO: 287935 - RNA, 22 nt, Human
gggaccugaggagggguuucag

SEQ ID NO: 287936 - RNA, 22 nt, Human
gaaggccuagggaugcucugcg

SEQ ID NO: 287937 - RNA, 22 nt, Human
agguuaaaaaggauucaguuaa

SEQ ID NO: 287938 - RNA, 22 nt, Human
gagggaccuuuacacagacauu

SEQ ID NO: 287939 - RNA, 22 nt, Human
gaggugucaucaggcagcucug

SEQ ID NO: 287940 - RNA, 22 nt, Human
uuuaucugagcugauagauagu

SEQ ID NO: 287941 - RNA, 22 nt, Human
uugacacaguuuucucauuaag

SEQ ID NO: 287942 - RNA, 22 nt, Human
uacaugugauaaauugauuaaa

SEQ ID NO: 287943 - RNA, 22 nt, Human
uagucaguugggucuaguggca

SEQ ID NO: 287944 - RNA, 22 nt, Human
ggccagccuggggcucccagac

SEQ ID NO: 287945 - RNA, 22 nt, Human
ccauccugaauggucucagcca

SEQ ID NO: 287946 - RNA, 22 nt, Human
gcagcuuucuuuuugcaugucu

SEQ ID NO: 287947 - RNA, 17 nt, Human
cagcuuuaugcuacugu

SEQ ID NO: 287948 - RNA, 22 nt, Human
ugcuuuauaucucucuucuuag

SEQ ID NO: 287949 - RNA, 22 nt, Human
aaauuucaagcaaaguagcuau

SEQ ID NO: 287950 - RNA, 22 nt, Human
aggagcaaaugaugagacagca

SEQ ID NO: 287951 - RNA, 22 nt, Human
cuuguccuuuacuugagacuca

SEQ ID NO: 287952 - RNA, 22 nt, Human
cgacccuacagacagugcugag

SEQ ID NO: 287953 - RNA, 22 nt, Human
ucacugugcucucuagauaggc

SEQ ID NO: 287954 - RNA, 22 nt, Human
uuaugauuugccacagauuggu

SEQ ID NO: 287955 - RNA, 22 nt, Human
auaacauuuugacaacugguga

SEQ ID NO: 287956 - RNA, 22 nt, Human
uagaaacagaaaacuguaauag

SEQ ID NO: 287957 - RNA, 22 nt, Human
uguccuggugcuucuugggauu

SEQ ID NO: 287958 - RNA, 22 nt, Human
uacagugcaaugugauguagau

SEQ ID NO: 287959 - RNA, 22 nt, Human
gacagacauuuccugauccaau

SEQ ID NO: 287960 - RNA, 22 nt, Human
acagggcaaccucugggagacu

SEQ ID NO: 287961 - RNA, 22 nt, Human
cacaaggagguccugaggaagc

SEQ ID NO: 287962 - RNA, 22 nt, Human
aggugucuggauggguguccuu

SEQ ID NO: 287963 - RNA, 22 nt, Human
cuuccugggcaauguucugcuu

SEQ ID NO: 287964 - RNA, 22 nt, Human
aaauuucuaagucaagaagaac

SEQ ID NO: 287965 - RNA, 22 nt, Human
guuuauuauucaacuucauguu

SEQ ID NO: 287966 - RNA, 22 nt, Human
uagggaugaagaugguauuucu

SEQ ID NO: 287967 - RNA, 23 nt, Human
caggacaugggaggaaguauggc

SEQ ID NO: 287968 - RNA, 22 nt, Human
uuaaauuuuagaaacagacucu

SEQ ID NO: 287969 - RNA, 22 nt, Human
uggucugguuauuucuuaauga

SEQ ID NO: 287970 - RNA, 22 nt, Human
aaucucuuuggcucaaggaucc

SEQ ID NO: 287971 - RNA, 22 nt, Human
cuguggaaaauuuguauguaau

SEQ ID NO: 287972 - RNA, 22 nt, Human
aaaagugaugggauggcacuuc

SEQ ID NO: 287973 - RNA, 22 nt, Human
augauugcagcccuacagcugu

SEQ ID NO: 287974 - RNA, 22 nt, Human
ccuucccaggcuagaccaacau

SEQ ID NO: 287975 - RNA, 22 nt, Human
auguaauuugcccucaaguuaa

SEQ ID NO: 287976 - RNA, 22 nt, Human
ucugaaauacugcagguucucu

SEQ ID NO: 287977 - RNA, 22 nt, Human
auacacauguguaugugcaugc

SEQ ID NO: 287978 - RNA, 22 nt, Human
acacagcuucaaagucuaauuc

SEQ ID NO: 287979 - RNA, 22 nt, Human
aguauuugaucagaugauagua

SEQ ID NO: 287980 - RNA, 22 nt, Human
aaguguuuaacggugauugagc

SEQ ID NO: 287981 - RNA, 22 nt, Human
gguguccuuguccuuugguacc

SEQ ID NO: 287982 - RNA, 22 nt, Human
ggcucccaggagggccuggagg

SEQ ID NO: 287983 - RNA, 22 nt, Human
ucugcauauuguuaauggaaug

SEQ ID NO: 287984 - RNA, 22 nt, Human
aaauauaguaaaugcauaguuc

SEQ ID NO: 287985 - RNA, 22 nt, Human
cugagcaggauauucacagcag

SEQ ID NO: 287986 - RNA, 22 nt, Human
uauuuguagaauggauuaaggg

SEQ ID NO: 287987 - RNA, 22 nt, Human
ugcuuucauauugccuaugacu

SEQ ID NO: 287988 - RNA, 22 nt, Human
agcgugaauuaguugguacaca

SEQ ID NO: 287989 - RNA, 22 nt, Human
cugaggaguuggugaauaagcc

SEQ ID NO: 287990 - RNA, 22 nt, Human
ucccugaugccuugauccgugg

SEQ ID NO: 287991 - RNA, 22 nt, Human
gaaaauuauugaaaauggcucu

SEQ ID NO: 287992 - RNA, 22 nt, Human
agcucccauuaucuucugaaac

SEQ ID NO: 287993 - RNA, 22 nt, Human
caaauaguaugagcaaugauuc

SEQ ID NO: 287994 - RNA, 22 nt, Human
gcuggaggauggacuggaagaa

SEQ ID NO: 287995 - RNA, 17 nt, Human
uuucuggaaugggcaaa

SEQ ID NO: 287996 - RNA, 22 nt, Human
uaagcaaugcuguaguucaguc

SEQ ID NO: 287997 - RNA, 22 nt, Human
uaguuuuuacugcgaguuauaa

SEQ ID NO: 287998 - RNA, 19 nt, Human
auucuuguuaagugucauc

SEQ ID NO: 287999 - RNA, 21 nt, Human
cuggacugaggagacagucgc

SEQ ID NO: 288000 - RNA, 22 nt, Human
uagcuauuuggaaaauuccaau

SEQ ID NO: 288001 - RNA, 22 nt, Human
ugauuauauucuaacuucauaa

SEQ ID NO: 288002 - RNA, 22 nt, Human
uauuuccaccuauuauuuucug

SEQ ID NO: 288003 - RNA, 22 nt, Human
uuucauugucaauaaacuguau

SEQ ID NO: 288004 - RNA, 22 nt, Human
acaugacagugcuuagcaaacu

SEQ ID NO: 288005 - RNA, 22 nt, Human
cuguccugaaguuuucaugaga

SEQ ID NO: 288006 - RNA, 22 nt, Human
gccaggcucuugguuauguuuu

SEQ ID NO: 288007 - RNA, 22 nt, Human
aggcuuagaaauucagcugagu

SEQ ID NO: 288008 - RNA, 22 nt, Human
aauugcuuguuuucggucauaa

SEQ ID NO: 288009 - RNA, 22 nt, Human
auuauuauauagggaaaguccc

SEQ ID NO: 288010 - RNA, 22 nt, Human
uuccuggccccauccaucuuca

SEQ ID NO: 288011 - RNA, 22 nt, Human
ugccugggaucugugcccuuug

SEQ ID NO: 288012 - RNA, 17 nt, Human
ggaagaaaaggaucauc

SEQ ID NO: 288013 - RNA, 22 nt, Human
agguggggaguauauguaauug

SEQ ID NO: 288014 - RNA, 22 nt, Human
cucugcccucgcacaucugcca

SEQ ID NO: 288015 - RNA, 22 nt, Human
aagggcucugugcuugucccau

SEQ ID NO: 288016 - RNA, 22 nt, Human
uuccccaggcuggagugcagug

SEQ ID NO: 288017 - RNA, 22 nt, Human
agaaagcaucuccauuguaggu

SEQ ID NO: 288018 - RNA, 22 nt, Human
agcuuuauagaaaggaucagug

SEQ ID NO: 288019 - RNA, 22 nt, Human
aaagcuaccuuuguguucauag

SEQ ID NO: 288020 - RNA, 22 nt, Human
ucuucaaacugaaaauuuagaa

SEQ ID NO: 288021 - RNA, 22 nt, Human
aaguaacaucugaacaugaugu

SEQ ID NO: 288022 - RNA, 20 nt, Human
agugucuggauuuuguaacc

SEQ ID NO: 288023 - RNA, 22 nt, Human
aauaucuucuaaggauagaacu

SEQ ID NO: 288024 - RNA, 22 nt, Human
cuucauuaaugucuauaaguuu

SEQ ID NO: 288025 - RNA, 22 nt, Human
ccaaggagaaaugcugugcuuu

SEQ ID NO: 288026 - RNA, 22 nt, Human
gucccaggugggcuccaccucu

SEQ ID NO: 288027 - RNA, 22 nt, Human
ugcuuucagauaucuguuucaa

SEQ ID NO: 288028 - RNA, 22 nt, Human
acaguuuggcgugauugauagu

SEQ ID NO: 288029 - RNA, 22 nt, Human
agacagacauucuagagccacc

SEQ ID NO: 288030 - RNA, 22 nt, Human
aagcugauucuaaaauuuauua

SEQ ID NO: 288031 - RNA, 22 nt, Human
aucaaaaugcuccagugauggu

SEQ ID NO: 288032 - RNA, 19 nt, Human
uucacauuuuuguggcacu

SEQ ID NO: 288033 - RNA, 22 nt, Human
auaguacacauccuacaauguu

SEQ ID NO: 288034 - RNA, 22 nt, Human
auucacaugugcuucuuaucac

SEQ ID NO: 288035 - RNA, 22 nt, Human
cuuaauuuuuguaguagaugga

SEQ ID NO: 288036 - RNA, 22 nt, Human
agggccagccgacuuccagccu

SEQ ID NO: 288037 - RNA, 22 nt, Human
auuuaaaugcuuaagaggguuu

SEQ ID NO: 288038 - RNA, 22 nt, Human
uuucaaacauaucuucauuacu

SEQ ID NO: 288039 - RNA, 22 nt, Human
gagggauggugugagaggcuca

SEQ ID NO: 288040 - RNA, 22 nt, Human
uuuauauuguaaaaaugguucu

SEQ ID NO: 288041 - RNA, 22 nt, Human
uucccucuccaggagcccugag

SEQ ID NO: 288042 - RNA, 23 nt, Human
agacagaggcugaggcuggccgc

SEQ ID NO: 288043 - RNA, 22 nt, Human
ccugaccuauuuuucucagcug

SEQ ID NO: 288044 - RNA, 22 nt, Human
aggcaguguauugcuagcggcu

SEQ ID NO: 288045 - RNA, 22 nt, Human
aaacuugaggcaaugaaggugu

SEQ ID NO: 288046 - RNA, 17 nt, Human
agccugccccaugcugc

SEQ ID NO: 288047 - RNA, 22 nt, Human
cagaggaaaugggaaggagaua

SEQ ID NO: 288048 - RNA, 22 nt, Human
uuuaaauuuagaagaaacacug

SEQ ID NO: 288049 - RNA, 22 nt, Human
uuucccaggcuggaaugcagug

SEQ ID NO: 288050 - RNA, 22 nt, Human
ugcuuuauaggggauugcaggc

SEQ ID NO: 288051 - RNA, 22 nt, Human
aggaccuggaucacagagaucu

SEQ ID NO: 288052 - RNA, 22 nt, Human
gugcagggcagccgaaugggcu

SEQ ID NO: 288053 - RNA, 22 nt, Human
caucuaaauuugacuccaagga

SEQ ID NO: 288054 - RNA, 22 nt, Human
cacaugugcaaauacugaggcu

SEQ ID NO: 288055 - RNA, 22 nt, Human
gaauacaugauacaugaacugc

SEQ ID NO: 288056 - RNA, 22 nt, Human
ucuuucuugguauucugagcua

SEQ ID NO: 288057 - RNA, 22 nt, Human
auucuucauuguugauucaugu

SEQ ID NO: 288058 - RNA, 22 nt, Human
guccuggcugguucuguggggc

SEQ ID NO: 288059 - RNA, 22 nt, Human
cagagcagggguuucccagguu

SEQ ID NO: 288060 - RNA, 22 nt, Human
uaguccuugcugggcacagagu

SEQ ID NO: 288061 - RNA, 23 nt, Human
acugaaaggauccuagcagagac

SEQ ID NO: 288062 - RNA, 22 nt, Human
guguccugggucucugauucuu

SEQ ID NO: 288063 - RNA, 22 nt, Human
gaucugaaauagcuacugcaga

SEQ ID NO: 288064 - RNA, 22 nt, Human
ucuggcuccacaccucacugca

SEQ ID NO: 288065 - RNA, 22 nt, Human
aggaauguaauaguguggcuca

SEQ ID NO: 288066 - RNA, 22 nt, Human
aacaaaggccguuaauaaccac

SEQ ID NO: 288067 - RNA, 22 nt, Human
aacuuaggaaaauaaggcauga

SEQ ID NO: 288068 - RNA, 22 nt, Human
uucaguuucuucccugugaaau

SEQ ID NO: 288069 - RNA, 22 nt, Human
gcucucagaugcuccagcagcc

SEQ ID NO: 288070 - RNA, 22 nt, Human
ucuucaaagaauuuuaguaauu

SEQ ID NO: 288071 - RNA, 22 nt, Human
uccuggcccuguggccugcagu

SEQ ID NO: 288072 - RNA, 22 nt, Human
ucccagggacucucugccuucc

SEQ ID NO: 288073 - RNA, 22 nt, Human
guuuccaaccccaccaaagugc

SEQ ID NO: 288074 - RNA, 22 nt, Human
cagguucucagaaggcagucac

SEQ ID NO: 288075 - RNA, 22 nt, Human
uucuucaaaacaacacuggccu

SEQ ID NO: 288076 - RNA, 22 nt, Human
gcauucuugagguguggacuca

SEQ ID NO: 288077 - RNA, 22 nt, Human
uagucagucuuacauauuugaa

SEQ ID NO: 288078 - RNA, 22 nt, Human
cucucagugccugcccuaggcu

SEQ ID NO: 288079 - RNA, 22 nt, Human
aggcaguggagcuggaauaggc

SEQ ID NO: 288080 - RNA, 23 nt, Human
aaugauuucaugaugauagcagc

SEQ ID NO: 288081 - RNA, 22 nt, Human
ucacuuuacagaugggaaaacu

SEQ ID NO: 288082 - RNA, 22 nt, Human
ucaggcaccccuugaguagggg

SEQ ID NO: 288083 - RNA, 22 nt, Human
ggagagguguauucaguggguc

SEQ ID NO: 288084 - RNA, 22 nt, Human
guguguccacacauacauacau

SEQ ID NO: 288085 - RNA, 22 nt, Human
ugcuuucauugugauaggaagc

SEQ ID NO: 288086 - RNA, 22 nt, Human
aauguuuuagauuacugcuggg

SEQ ID NO: 288087 - RNA, 22 nt, Human
caacagaagguguacuacugaa

SEQ ID NO: 288088 - RNA, 22 nt, Human
gucacacucuucccuccacaug

SEQ ID NO: 288089 - RNA, 22 nt, Human
agccucuggcccuagacugcuu

SEQ ID NO: 288090 - RNA, 22 nt, Human
uccaugagacagauacuguaag

SEQ ID NO: 288091 - RNA, 22 nt, Human
uuccucagcucagcgagagaga

SEQ ID NO: 288092 - RNA, 22 nt, Human
ucagggcaggacaguguaggcc

SEQ ID NO: 288093 - RNA, 22 nt, Human
aaggccuugguucugagcaaua

SEQ ID NO: 288094 - RNA, 22 nt, Human
caagauuuaagagucagccuug

SEQ ID NO: 288095 - RNA, 22 nt, Human
ccuuccagaguucagucugccc

SEQ ID NO: 288096 - RNA, 22 nt, Human
uuucuguaaggacuuaaugcaa

SEQ ID NO: 288097 - RNA, 22 nt, Human
ucagcuuugggggucucaggag

SEQ ID NO: 288098 - RNA, 22 nt, Human
uguuuacugcauucuauuugcu

SEQ ID NO: 288099 - RNA, 22 nt, Human
cucuccaggacuuuggcccaau

SEQ ID NO: 288100 - RNA, 21 nt, Human
ugagucucccuuagcccacgc

SEQ ID NO: 288101 - RNA, 22 nt, Human
gccuggcacucaaucaucugcu

SEQ ID NO: 288102 - RNA, 22 nt, Human
uccuggcuccugaucugucacu

SEQ ID NO: 288103 - RNA, 22 nt, Human
cucugugaaccccuccuuucuu

SEQ ID NO: 288104 - RNA, 22 nt, Human
cugcagggaccacaagcagguu

SEQ ID NO: 288105 - RNA, 22 nt, Human
agacagguaaauagagaugcug

SEQ ID NO: 288106 - RNA, 22 nt, Human
acagcuuuucaauucugcugag

SEQ ID NO: 288107 - RNA, 18 nt, Human
auugcuuuuguaccaacc

SEQ ID NO: 288108 - RNA, 22 nt, Human
uuuuuguagucauuagaagagg

SEQ ID NO: 288109 - RNA, 22 nt, Human
uccugggcuucacagacucugu

SEQ ID NO: 288110 - RNA, 22 nt, Human
auauuuaaacaggguaccaaua

SEQ ID NO: 288111 - RNA, 22 nt, Human
ccuguggccgcgucgggcggcg

SEQ ID NO: 288112 - RNA, 22 nt, Human
gucucaguaagaaaggcuccug

SEQ ID NO: 288113 - RNA, 22 nt, Human
agagccaguuacaacuguggag

SEQ ID NO: 288114 - RNA, 22 nt, Human
ggcugcucugccuuccagcugg

SEQ ID NO: 288115 - RNA, 22 nt, Human
guuucgucaggcuuauucuauc

SEQ ID NO: 288116 - RNA, 22 nt, Human
ccugcaagaccugagacacacc

SEQ ID NO: 288117 - RNA, 22 nt, Human
uggguggauuaggauaggguau

SEQ ID NO: 288118 - RNA, 20 nt, Human
gcuguggcaagugcucacug

SEQ ID NO: 288119 - RNA, 22 nt, Human
uccaugcagagaacugaaguac

SEQ ID NO: 288120 - RNA, 22 nt, Human
guuuuucuagaaaucuccuccu

SEQ ID NO: 288121 - RNA, 22 nt, Human
acuagaaauuacucagaauaaa

SEQ ID NO: 288122 - RNA, 22 nt, Human
cucaggcuaagaaggccaagug

SEQ ID NO: 288123 - RNA, 22 nt, Human
ccugcuccugcuauucuucugg

SEQ ID NO: 288124 - RNA, 22 nt, Human
cccaggccuggucugggccagu

SEQ ID NO: 288125 - RNA, 20 nt, Human
gcugaggucauuaugccuca

SEQ ID NO: 288126 - RNA, 22 nt, Human
aaagcugcugccaaucaggcuu

SEQ ID NO: 288127 - RNA, 22 nt, Human
ucugggugaugaaaugcacugu

SEQ ID NO: 288128 - RNA, 22 nt, Human
uucauuccugagcccauauuua

SEQ ID NO: 288129 - RNA, 22 nt, Human
acacauauauuugcauauacac

SEQ ID NO: 288130 - RNA, 22 nt, Human
ugcuggaauaauuucauguuaa

SEQ ID NO: 288131 - RNA, 23 nt, Human
ccaauucagauauuggcuugugc

SEQ ID NO: 288132 - RNA, 22 nt, Human
uacacaguagaguauaaugcgu

SEQ ID NO: 288133 - RNA, 22 nt, Human
agagggugggcacgugauggau

SEQ ID NO: 288134 - RNA, 22 nt, Human
auguccuuuguaucccuaggca

SEQ ID NO: 288135 - RNA, 18 nt, Human
aagucucugaaagcuuuu

SEQ ID NO: 288136 - RNA, 22 nt, Human
aagagucagcuucuguaugggu

SEQ ID NO: 288137 - RNA, 22 nt, Human
gcugguccacucccuggaggcu

SEQ ID NO: 288138 - RNA, 22 nt, Human
auccacccugugguggcuuucu

SEQ ID NO: 288139 - RNA, 22 nt, Human
gcuugccuaucugguggucguu

SEQ ID NO: 288140 - RNA, 22 nt, Human
uuaaaaaccaucuuccuuuccu

SEQ ID NO: 288141 - RNA, 22 nt, Human
uagucuaagaaaucuuuacuuu

SEQ ID NO: 288142 - RNA, 22 nt, Human
cacaguuugcauaggaaaaaca

SEQ ID NO: 288143 - RNA, 22 nt, Human
cucagagaaaugucacaacaau

SEQ ID NO: 288144 - RNA, 19 nt, Human
uggcucuguuucucuggag

SEQ ID NO: 288145 - RNA, 20 nt, Human
aggagggaccuggauuggcg

SEQ ID NO: 288146 - RNA, 22 nt, Human
ugaccugcguaggugguuucug

SEQ ID NO: 288147 - RNA, 22 nt, Human
uaauaauuuuaaagaaggcuag

SEQ ID NO: 288148 - RNA, 22 nt, Human
uccuagagaguaauacaguuuu

SEQ ID NO: 288149 - RNA, 22 nt, Human
uaaugucaaggugauagauuug

SEQ ID NO: 288150 - RNA, 22 nt, Human
acucugcuguuuacucucuaua

SEQ ID NO: 288151 - RNA, 21 nt, Human
uuugacuccucauuuuuauau

SEQ ID NO: 288152 - RNA, 22 nt, Human
ccugauuagggucuuucaaaug

SEQ ID NO: 288153 - RNA, 22 nt, Human
ucaguuaauggauucugucaga

SEQ ID NO: 288154 - RNA, 22 nt, Human
gcagggaaggggcaugcuggag

SEQ ID NO: 288155 - RNA, 22 nt, Human
uuaguuguaaaauggaauuugu

SEQ ID NO: 288156 - RNA, 22 nt, Human
cuuuuucugauguuccaugauu

SEQ ID NO: 288157 - RNA, 22 nt, Human
guuguaaguuuaaugucaauug

SEQ ID NO: 288158 - RNA, 22 nt, Human
uaggugguuaugucagccuaga

SEQ ID NO: 288159 - RNA, 22 nt, Human
acaagauuuggcugaaacucca

SEQ ID NO: 288160 - RNA, 22 nt, Human
uucacaguggcugugccauuug

SEQ ID NO: 288161 - RNA, 22 nt, Human
acacaugaccuccgcagcagca

SEQ ID NO: 288162 - RNA, 22 nt, Human
uucugugcccauuuuaaaaugg

SEQ ID NO: 288163 - RNA, 22 nt, Human
ugccuugaacauaguggacagu

SEQ ID NO: 288164 - RNA, 17 nt, Human
ucccaggaacagggaau

SEQ ID NO: 288165 - RNA, 22 nt, Human
ucauguguccuaguucauauaa

SEQ ID NO: 288166 - RNA, 22 nt, Human
aaggcuggcaauauauuuguua

SEQ ID NO: 288167 - RNA, 22 nt, Human
cuguccccauuguuugaggguu

SEQ ID NO: 288168 - RNA, 21 nt, Human
ugucacuuuaagcuagcucua

SEQ ID NO: 288169 - RNA, 22 nt, Human
auuucucaucuuugugaauggu

SEQ ID NO: 288170 - RNA, 22 nt, Human
uguguucagaauuugcugcuuu

SEQ ID NO: 288171 - RNA, 20 nt, Human
ugggugagaguguuugcucu

SEQ ID NO: 288172 - RNA, 22 nt, Human
auucucugaagucuuucagggc

SEQ ID NO: 288173 - RNA, 21 nt, Human
agcuguuugaagcuauauugg

SEQ ID NO: 288174 - RNA, 22 nt, Human
agugucugccugggaggagcau

SEQ ID NO: 288175 - RNA, 22 nt, Human
auagagugauguaagguaugug

SEQ ID NO: 288176 - RNA, 22 nt, Human
ucugcccaguuugugcucaggu

SEQ ID NO: 288177 - RNA, 22 nt, Human
uucuuccucacacucucaccca

SEQ ID NO: 288178 - RNA, 16 nt, Human
ucaggugugacuuuuu

SEQ ID NO: 288179 - RNA, 21 nt, Human
acagacaguccagagaaaaga

SEQ ID NO: 288180 - RNA, 19 nt, Human
ucagggcaguccggucccc

SEQ ID NO: 288181 - RNA, 22 nt, Human
uacaugugguagggagggcagu

SEQ ID NO: 288182 - RNA, 22 nt, Human
guucuucaguaaaauuaaaugu

SEQ ID NO: 288183 - RNA, 22 nt, Human
agacacagcugcaggagguggg

SEQ ID NO: 288184 - RNA, 22 nt, Human
aaacaucauaggcaugcaugau

SEQ ID NO: 288185 - RNA, 22 nt, Human
gccgugcgugcgcaggugcugu

SEQ ID NO: 288186 - RNA, 19 nt, Human
cccagagagaucucuugcc

SEQ ID NO: 288187 - RNA, 22 nt, Human
caauuucuggaacuaauucuga

SEQ ID NO: 288188 - RNA, 22 nt, Human
guuguacaggcagggaaacuga

SEQ ID NO: 288189 - RNA, 22 nt, Human
ucugaaauaaaugcacuguuag

SEQ ID NO: 288190 - RNA, 22 nt, Human
ucuggcagagauauccauccca

SEQ ID NO: 288191 - RNA, 22 nt, Human
uguauacaugucugugugcaca

SEQ ID NO: 288192 - RNA, 22 nt, Human
agaaaauauucauugagaggcu

SEQ ID NO: 288193 - RNA, 22 nt, Human
acagugugugcuuucccuuacg

SEQ ID NO: 288194 - RNA, 21 nt, Human
ugagcaggagucaugggaaug

SEQ ID NO: 288195 - RNA, 22 nt, Human
uuccuucuaauauucugccugu

SEQ ID NO: 288196 - RNA, 22 nt, Human
aaaagcaaggcagucugucuga

SEQ ID NO: 288197 - RNA, 22 nt, Human
ucacauucucagcaucuauaca

SEQ ID NO: 288198 - RNA, 22 nt, Human
ccagcuuuuggggugacaauuu

SEQ ID NO: 288199 - RNA, 22 nt, Human
uuucuuauauucugucauuguu

SEQ ID NO: 288200 - RNA, 20 nt, Human
guuuagcauggcagugaaag

SEQ ID NO: 288201 - RNA, 22 nt, Human
cagccaggccuggugaccaaag

SEQ ID NO: 288202 - RNA, 22 nt, Human
aacaggcaacaguugacucuga

SEQ ID NO: 288203 - RNA, 22 nt, Human
caggcugccaaggcuggggagg

SEQ ID NO: 288204 - RNA, 22 nt, Human
cucuggaagaugaccuggguaa

SEQ ID NO: 288205 - RNA, 21 nt, Human
cagugcagggguuagcgugua

SEQ ID NO: 288206 - RNA, 22 nt, Human
uggcaaaguuuaucaggaauau

SEQ ID NO: 288207 - RNA, 22 nt, Human
cuguccuggccgcccuugugag

SEQ ID NO: 288208 - RNA, 20 nt, Human
agcugcaacagacuguaugg

SEQ ID NO: 288209 - RNA, 22 nt, Human
caguguuuaaucauugugaauu

SEQ ID NO: 288210 - RNA, 22 nt, Human
ugggaguccaagguuuuuauag

SEQ ID NO: 288211 - RNA, 22 nt, Human
gccagugggacccgcugugggc

SEQ ID NO: 288212 - RNA, 22 nt, Human
gggacuuaaugcagagagggac

SEQ ID NO: 288213 - RNA, 22 nt, Human
uagacacaagagaaggguauaa

SEQ ID NO: 288214 - RNA, 22 nt, Human
gucauauacacugcauguaauc

SEQ ID NO: 288215 - RNA, 22 nt, Human
aguucuucauaaccuuacugug

SEQ ID NO: 288216 - RNA, 22 nt, Human
auucuucaucagagaugcacua

SEQ ID NO: 288217 - RNA, 22 nt, Human
cugcccgucccuuugcucucgc

SEQ ID NO: 288218 - RNA, 22 nt, Human
ugccucccucucugccacugga

SEQ ID NO: 288219 - RNA, 22 nt, Human
cucccugguguccccuccagga

SEQ ID NO: 288220 - RNA, 22 nt, Human
acaugccaugguuguuugcugc

SEQ ID NO: 288221 - RNA, 22 nt, Human
acuguggccugcuguaugggcu

SEQ ID NO: 288222 - RNA, 20 nt, Human
ugcagguguuggagaaggua

SEQ ID NO: 288223 - RNA, 22 nt, Human
agucaguuuucuuaaagggaag

SEQ ID NO: 288224 - RNA, 21 nt, Human
uuacagcaauguuagcaggaa

SEQ ID NO: 288225 - RNA, 22 nt, Human
ucugaaagaagggcagucuuuu

SEQ ID NO: 288226 - RNA, 18 nt, Human
gggcccuggcguccgccc

SEQ ID NO: 288227 - RNA, 22 nt, Human
agggaauggaugauggcagguu

SEQ ID NO: 288228 - RNA, 22 nt, Human
gcccagagagaugcuguagacc

SEQ ID NO: 288229 - RNA, 22 nt, Human
agcacaggaccaaggaagcugu

SEQ ID NO: 288230 - RNA, 22 nt, Human
guuuauugauaaaagcuggaca

SEQ ID NO: 288231 - RNA, 22 nt, Human
agugcagguuaaggaacuggcc

SEQ ID NO: 288232 - RNA, 22 nt, Human
uccaaggagcagucuucaaccu

SEQ ID NO: 288233 - RNA, 22 nt, Human
aucuccaggauuuucacacuca

SEQ ID NO: 288234 - RNA, 22 nt, Human
ucagggcauggcugcacuuggc

SEQ ID NO: 288235 - RNA, 22 nt, Human
cuuuacauccuguuucccguuu

SEQ ID NO: 288236 - RNA, 22 nt, Human
uuucacauguauauaggcauua

SEQ ID NO: 288237 - RNA, 22 nt, Human
guccuucaagaguccccuacug

SEQ ID NO: 288238 - RNA, 22 nt, Human
uaugugaagagauuaaaaaaua

SEQ ID NO: 288239 - RNA, 22 nt, Human
uuguauuuggguaguauagaga

SEQ ID NO: 288240 - RNA, 22 nt, Human
aaaugucagaagcuuuacuucu

SEQ ID NO: 288241 - RNA, 22 nt, Human
ccuggaucuaaggaagcuggga

SEQ ID NO: 288242 - RNA, 22 nt, Human
acugggaggcaaagagcaagga

SEQ ID NO: 288243 - RNA, 22 nt, Human
ugcuugaacccaggaaguggag

SEQ ID NO: 288244 - RNA, 22 nt, Human
ccugggagagucuguggucucc

SEQ ID NO: 288245 - RNA, 22 nt, Human
cccuguuuauuuuuggagagaa

SEQ ID NO: 288246 - RNA, 22 nt, Human
ccuugguccaacccugcacagc

SEQ ID NO: 288247 - RNA, 22 nt, Human
acagacaguaaauaguguggcu

SEQ ID NO: 288248 - RNA, 22 nt, Human
agacagacugguuugaauuggu

SEQ ID NO: 288249 - RNA, 22 nt, Human
ugguggagccuaggcuaagucu

SEQ ID NO: 288250 - RNA, 22 nt, Human
gucuggccugccagcucuggug

SEQ ID NO: 288251 - RNA, 22 nt, Human
gccucaagacauuuuuaauugc

SEQ ID NO: 288252 - RNA, 22 nt, Human
uucuuggaaauacauucaauaa

SEQ ID NO: 288253 - RNA, 22 nt, Human
uuguccugcaaccucacauggc

SEQ ID NO: 288254 - RNA, 22 nt, Human
aguuaggaguauaggaaugccu

SEQ ID NO: 288255 - RNA, 22 nt, Human
aucagcaagauguaauuucuau

SEQ ID NO: 288256 - RNA, 22 nt, Human
uuagggacaaauuugcagaacc

SEQ ID NO: 288257 - RNA, 22 nt, Human
aaggugcucguuauggccagug

SEQ ID NO: 288258 - RNA, 22 nt, Human
uuucagacuccaaauucauaag

SEQ ID NO: 288259 - RNA, 22 nt, Human
ucagaagaaagauguuauuacu

SEQ ID NO: 288260 - RNA, 22 nt, Human
acuccuggugcugaugaagaga

SEQ ID NO: 288261 - RNA, 22 nt, Human
uagaaagagcauaguauuauaa

SEQ ID NO: 288262 - RNA, 14 nt, Human
gcaggcagaccacc

SEQ ID NO: 288263 - RNA, 22 nt, Human
uguuuagcauaaagauuuucca

SEQ ID NO: 288264 - RNA, 22 nt, Human
agcauauaggaaauguugaauc

SEQ ID NO: 288265 - RNA, 21 nt, Human
ucccagggucuuaugggaugu

SEQ ID NO: 288266 - RNA, 22 nt, Human
cuuggcaggguggaggaugcag

SEQ ID NO: 288267 - RNA, 22 nt, Human
auuacaguucuacacauccuuu

SEQ ID NO: 288268 - RNA, 22 nt, Human
uuguguccugauuugacacaau

SEQ ID NO: 288269 - RNA, 22 nt, Human
aagcccugggguugcacaaggc

SEQ ID NO: 288270 - RNA, 22 nt, Human
ucacagacgccuccccucgccu

SEQ ID NO: 288271 - RNA, 22 nt, Human
cggcagggcuccaugcauuucu

SEQ ID NO: 288272 - RNA, 22 nt, Human
agaaaguuuugugcuauauaug

SEQ ID NO: 288273 - RNA, 22 nt, Human
gcuuugcuggcuugaaaugcug

SEQ ID NO: 288274 - RNA, 22 nt, Human
gcauucuuuuuaggagguuccu

SEQ ID NO: 288275 - RNA, 22 nt, Human
uaguuuuagucccauuuuacag

SEQ ID NO: 288276 - RNA, 22 nt, Human
cugggaggugaacagaaaaacu

SEQ ID NO: 288277 - RNA, 22 nt, Human
acaggugucuaaggcagacagc

SEQ ID NO: 288278 - RNA, 22 nt, Human
cagugaggaguccagggcagag

SEQ ID NO: 288279 - RNA, 21 nt, Human
uguuucaugcuauuuucuugu

SEQ ID NO: 288280 - RNA, 22 nt, Human
uaugugucccuugguguagcaa

SEQ ID NO: 288281 - RNA, 22 nt, Human
ggccucucagggcagagacccu

SEQ ID NO: 288282 - RNA, 22 nt, Human
acuugguggcgaacgaggguca

SEQ ID NO: 288283 - RNA, 22 nt, Human
accuucaaguaugugggcugaa

SEQ ID NO: 288284 - RNA, 22 nt, Human
acagugugguuugagcacuggg

SEQ ID NO: 288285 - RNA, 22 nt, Human
uauugcugacuuguucaguguu

SEQ ID NO: 288286 - RNA, 22 nt, Human
gcacagcuccugguaagcuggg

SEQ ID NO: 288287 - RNA, 22 nt, Human
ugguggggcuuuccuucugcuu

SEQ ID NO: 288288 - RNA, 22 nt, Human
cugguacagggaaauaaaggaa

SEQ ID NO: 288289 - RNA, 22 nt, Human
gucuucuuguguugccugucuu

SEQ ID NO: 288290 - RNA, 19 nt, Human
acaaagugcgugcucuuuu

SEQ ID NO: 288291 - RNA, 22 nt, Human
gacagacagagaaugggcuuga

SEQ ID NO: 288292 - RNA, 21 nt, Human
uuauugagacauuuguggaaa

SEQ ID NO: 288293 - RNA, 22 nt, Human
ccuuccuugagaagcaauuccu

SEQ ID NO: 288294 - RNA, 22 nt, Human
uccuggcagugcuuguuuugga

SEQ ID NO: 288295 - RNA, 22 nt, Human
aagugugacacuguguuaauua

SEQ ID NO: 288296 - RNA, 22 nt, Human
uaaacaucugucauguguuuau

SEQ ID NO: 288297 - RNA, 22 nt, Human
acaagauuuaaugcaacccaag

SEQ ID NO: 288298 - RNA, 22 nt, Human
auauuugucaauucacuguuca

SEQ ID NO: 288299 - RNA, 22 nt, Human
uauuaggguaaauuugacaugc

SEQ ID NO: 288300 - RNA, 23 nt, Human
uucaugagauuaucugcaugugu

SEQ ID NO: 288301 - RNA, 22 nt, Human
ugacaggaggcuugaggccagg

SEQ ID NO: 288302 - RNA, 22 nt, Human
aaauucuaaggucacaauguug

SEQ ID NO: 288303 - RNA, 22 nt, Human
agcagggccucuggcacugguc

SEQ ID NO: 288304 - RNA, 22 nt, Human
cucugaagccccaaauaguccg

SEQ ID NO: 288305 - RNA, 22 nt, Human
gcaguguuuguguucucacaug

SEQ ID NO: 288306 - RNA, 22 nt, Human
ugucaguuaccuagcacaagaa

SEQ ID NO: 288307 - RNA, 22 nt, Human
cauuucacaaauggccacauca

SEQ ID NO: 288308 - RNA, 22 nt, Human
uucaggaagguccuauagcaga

SEQ ID NO: 288309 - RNA, 22 nt, Human
ugcuagggauacaguggugaau

SEQ ID NO: 288310 - RNA, 22 nt, Human
aacaucaucaugaacaacuaau

SEQ ID NO: 288311 - RNA, 22 nt, Human
caguguggugugcacagcuuag

SEQ ID NO: 288312 - RNA, 22 nt, Human
cuggcuuucucugugguguuca

SEQ ID NO: 288313 - RNA, 22 nt, Human
gucugcccugagcucccagugc

SEQ ID NO: 288314 - RNA, 22 nt, Human
cuucuuuccuuccuccaguggc

SEQ ID NO: 288315 - RNA, 22 nt, Human
uuaaauuccagccucauaauag

SEQ ID NO: 288316 - RNA, 22 nt, Human
cacaugaccacucuuuacuucu

SEQ ID NO: 288317 - RNA, 22 nt, Human
uccugugauauuguuuguuaua

SEQ ID NO: 288318 - RNA, 22 nt, Human
cugugacccaguuccuggcacc

SEQ ID NO: 288319 - RNA, 22 nt, Human
gucagcaaggugcaagcggcug

SEQ ID NO: 288320 - RNA, 23 nt, Human
uuuauauuccuaaugucuugagc

SEQ ID NO: 288321 - RNA, 22 nt, Human
uccauguguuuuccuguccaca

SEQ ID NO: 288322 - RNA, 22 nt, Human
guauuuucaagagcaguaguau

SEQ ID NO: 288323 - RNA, 22 nt, Human
uaauaguugugacuuuguaaag

SEQ ID NO: 288324 - RNA, 22 nt, Human
gcauggcuauuaugaggcagaa

SEQ ID NO: 288325 - RNA, 22 nt, Human
uugcuaggauucauucuauacu

SEQ ID NO: 288326 - RNA, 22 nt, Human
uauugguagauggagagagaca

SEQ ID NO: 288327 - RNA, 22 nt, Human
guuuacauuaaguauuagcauc

SEQ ID NO: 288328 - RNA, 22 nt, Human
uguuuccuucugucucuuugga

SEQ ID NO: 288329 - RNA, 22 nt, Human
agcccuuaguacauuucucaag

SEQ ID NO: 288330 - RNA, 22 nt, Human
ugguggggauucccucccuggc

SEQ ID NO: 288331 - RNA, 22 nt, Human
uacaugugcuauuuguuuugua

SEQ ID NO: 288332 - RNA, 20 nt, Human
uucuuaaagaccucacuuug

SEQ ID NO: 288333 - RNA, 22 nt, Human
uccugugauggcuugcgaugug

SEQ ID NO: 288334 - RNA, 22 nt, Human
ccuggccagcagccccuuccuc

SEQ ID NO: 288335 - RNA, 22 nt, Human
ucagggcagguuaacuugggug

SEQ ID NO: 288336 - RNA, 19 nt, Human
ugugugguuggugaaacuc

SEQ ID NO: 288337 - RNA, 22 nt, Human
accacugcccauggugaaaacu

SEQ ID NO: 288338 - RNA, 22 nt, Human
auguauuucuauguagugaaga

SEQ ID NO: 288339 - RNA, 22 nt, Human
uucacauucucacaagaggaaa

SEQ ID NO: 288340 - RNA, 23 nt, Human
caugacaaaggaucucaugggcc

SEQ ID NO: 288341 - RNA, 22 nt, Human
auccuggcgggggaacugccca

SEQ ID NO: 288342 - RNA, 19 nt, Human
uguguccuagcagccaguc

SEQ ID NO: 288343 - RNA, 22 nt, Human
augacaugauugccauuugaua

SEQ ID NO: 288344 - RNA, 22 nt, Human
acaggugugggcugggcucuga

SEQ ID NO: 288345 - RNA, 22 nt, Human
gaggaaaugguuguucaggugg

SEQ ID NO: 288346 - RNA, 22 nt, Human
uccugugacggagcgccagagg

SEQ ID NO: 288347 - RNA, 22 nt, Human
agcuccugcuugacagaagagg

SEQ ID NO: 288348 - RNA, 22 nt, Human
ugccucagucuaaagucucuca

SEQ ID NO: 288349 - RNA, 22 nt, Human
ucucugugucucauguuccuau

SEQ ID NO: 288350 - RNA, 22 nt, Human
uccuggccuugcuccugaugcc

SEQ ID NO: 288351 - RNA, 22 nt, Human
cgcgguggcggccuccagcgcc

SEQ ID NO: 288352 - RNA, 19 nt, Human
guccuggcgccgccacacc

SEQ ID NO: 288353 - RNA, 22 nt, Human
acuuucugcaguguuggaaaug

SEQ ID NO: 288354 - RNA, 22 nt, Human
agaaauuccuaagguacacaag

SEQ ID NO: 288355 - RNA, 22 nt, Human
uauugcuggggugggccauguu

SEQ ID NO: 288356 - RNA, 22 nt, Human
ucaguuaagcacuauacccuaa

SEQ ID NO: 288357 - RNA, 22 nt, Human
agacagcuagggcugcagggac

SEQ ID NO: 288358 - RNA, 22 nt, Human
agacauauuggcuugcuuuaau

SEQ ID NO: 288359 - RNA, 22 nt, Human
auuucucaguuccuacuguuua

SEQ ID NO: 288360 - RNA, 22 nt, Human
uuaauuuuuauguauagugugu

SEQ ID NO: 288361 - RNA, 22 nt, Human
ccagguggugaaagugggcccu

SEQ ID NO: 288362 - RNA, 22 nt, Human
aaugucaauaacuuuaucccuc

SEQ ID NO: 288363 - RNA, 18 nt, Human
uccuggcagucagagagg

SEQ ID NO: 288364 - RNA, 22 nt, Human
acccaggggcagccuugcugug

SEQ ID NO: 288365 - RNA, 22 nt, Human
uacacauguccaaggugucacc

SEQ ID NO: 288366 - RNA, 22 nt, Human
cagaaagcucuuucaaucuugc

SEQ ID NO: 288367 - RNA, 22 nt, Human
ucauuguaauuaucugugguau

SEQ ID NO: 288368 - RNA, 23 nt, Human
aaguucuuuuagaugucuucgug

SEQ ID NO: 288369 - RNA, 22 nt, Human
ugccagcuuguggucagaggcu

SEQ ID NO: 288370 - RNA, 22 nt, Human
ugcauauacccgcauuuacaua

SEQ ID NO: 288371 - RNA, 22 nt, Human
ugcagggauuauguagggguug

SEQ ID NO: 288372 - RNA, 22 nt, Human
guacacauuaugcuucucuaaa

SEQ ID NO: 288373 - RNA, 22 nt, Human
gugcgggccuggggguuucucu

SEQ ID NO: 288374 - RNA, 22 nt, Human
ccaggccugugcaaggagggag

SEQ ID NO: 288375 - RNA, 22 nt, Human
acagauuuuugguaaauaauuu

SEQ ID NO: 288376 - RNA, 22 nt, Human
guccuggcuuaguucgcuguaa

SEQ ID NO: 288377 - RNA, 22 nt, Human
aaauuugauaagccauuguuac

SEQ ID NO: 288378 - RNA, 22 nt, Human
uagcaaagaagauauuauugca

SEQ ID NO: 288379 - RNA, 22 nt, Human
cuccauugaacauccucucaga

SEQ ID NO: 288380 - RNA, 22 nt, Human
ucccagugagguccuggcuguc

SEQ ID NO: 288381 - RNA, 22 nt, Human
guccagaaagggcagugauuug

SEQ ID NO: 288382 - RNA, 22 nt, Human
uuucuagcuguaggaagcugag

SEQ ID NO: 288383 - RNA, 22 nt, Human
uggcuuggugagcagaguguag

SEQ ID NO: 288384 - RNA, 22 nt, Human
gucuggcuguuccugccuguga

SEQ ID NO: 288385 - RNA, 22 nt, Human
ccaugcugugacacaguaguua

SEQ ID NO: 288386 - RNA, 22 nt, Human
aagagguugucugugaugaguu

SEQ ID NO: 288387 - RNA, 22 nt, Human
ugggcagggaucucuuuugcaa

SEQ ID NO: 288388 - RNA, 22 nt, Human
caaaguuuuaguaaacauauau

SEQ ID NO: 288389 - RNA, 23 nt, Human
uggccagguagaggagguaguga

SEQ ID NO: 288390 - RNA, 22 nt, Human
uuuuguuuguguccacugcagu

SEQ ID NO: 288391 - RNA, 22 nt, Human
ucugccccugcugggcacagag

SEQ ID NO: 288392 - RNA, 22 nt, Human
augagauuuuaaaacuucacuu

SEQ ID NO: 288393 - RNA, 21 nt, Human
agacagacugccugacccacg

SEQ ID NO: 288394 - RNA, 22 nt, Human
ugaaagauugugauucaauaug

SEQ ID NO: 288395 - RNA, 22 nt, Human
cuugauuuauuacccacuauau

SEQ ID NO: 288396 - RNA, 21 nt, Human
uugcugcccucccuuuccuca

SEQ ID NO: 288397 - RNA, 22 nt, Human
acauauuuugaaagcuuucuaa

SEQ ID NO: 288398 - RNA, 22 nt, Human
agacagacaugcuaguuuucuu

SEQ ID NO: 288399 - RNA, 22 nt, Human
gcagggaccuugcccacccucc

SEQ ID NO: 288400 - RNA, 22 nt, Human
cugugauggucaggcccuaucu

SEQ ID NO: 288401 - RNA, 23 nt, Human
uugggaaauaguuaagacaugag

SEQ ID NO: 288402 - RNA, 22 nt, Human
gaaguuuauuucaaucuauuca

SEQ ID NO: 288403 - RNA, 22 nt, Human
uugauuucaaaauauaugcuug

SEQ ID NO: 288404 - RNA, 22 nt, Human
gcccagcuggcuuccagcacau

SEQ ID NO: 288405 - RNA, 22 nt, Human
gguuccugugccucuagcuggc

SEQ ID NO: 288406 - RNA, 22 nt, Human
uccagcauauauagagaaugag

SEQ ID NO: 288407 - RNA, 22 nt, Human
uguugcugacaagagaggagca

SEQ ID NO: 288408 - RNA, 22 nt, Human
uguuuuaaagccauugccuuuc

SEQ ID NO: 288409 - RNA, 22 nt, Human
cagcuauugguccacagguaug

SEQ ID NO: 288410 - RNA, 22 nt, Human
uagguucaugaaauuuucagga

SEQ ID NO: 288411 - RNA, 22 nt, Human
aaguuucuggaccuuaccugcu

SEQ ID NO: 288412 - RNA, 22 nt, Human
cuuaacauccugcauuuuucuu

SEQ ID NO: 288413 - RNA, 22 nt, Human
uuugcuuucuguugaacagagu

SEQ ID NO: 288414 - RNA, 22 nt, Human
aacuucugccaaacagcuguua

SEQ ID NO: 288415 - RNA, 22 nt, Human
augcagcugugggcaagaaaug

SEQ ID NO: 288416 - RNA, 22 nt, Human
aggaaacuguccccucauccua

SEQ ID NO: 288417 - RNA, 22 nt, Human
ccugugcccuggaaggagagag

SEQ ID NO: 288418 - RNA, 22 nt, Human
agcacuuuccuggcaaaugugg

SEQ ID NO: 288419 - RNA, 22 nt, Human
ugacaggugcugggggcagugu

SEQ ID NO: 288420 - RNA, 22 nt, Human
auauuuguuagagucuaugugu

SEQ ID NO: 288421 - RNA, 23 nt, Human
uuguccagcugguuugggccaca

SEQ ID NO: 288422 - RNA, 22 nt, Human
ucuggcaguugccgcuucaguc

SEQ ID NO: 288423 - RNA, 22 nt, Human
aggaaugugaaacagguggcug

SEQ ID NO: 288424 - RNA, 22 nt, Human
aacaaaagccgaaguagguguc

SEQ ID NO: 288425 - RNA, 18 nt, Human
cugcccagagcauuucau

SEQ ID NO: 288426 - RNA, 22 nt, Human
cccugcagaaccacagacaaac

SEQ ID NO: 288427 - RNA, 22 nt, Human
uucaacucuucaagaucacauc

SEQ ID NO: 288428 - RNA, 21 nt, Human
gugaauuaauuauaugccuua

SEQ ID NO: 288429 - RNA, 22 nt, Human
uuccucagcacaaagccaagau

SEQ ID NO: 288430 - RNA, 22 nt, Human
acagaauugaaaguauaaucug

SEQ ID NO: 288431 - RNA, 22 nt, Human
uaucuaaauggaauauuccaga

SEQ ID NO: 288432 - RNA, 23 nt, Human
uuggcaaagccuaugaaguccuc

SEQ ID NO: 288433 - RNA, 22 nt, Human
agacaugugguauaaucagggg

SEQ ID NO: 288434 - RNA, 22 nt, Human
ccugaguggugcuaagcagaua

SEQ ID NO: 288435 - RNA, 22 nt, Human
ucugggaacacacgucacuuca

SEQ ID NO: 288436 - RNA, 22 nt, Human
gguuucaacucagcuaguaagg

SEQ ID NO: 288437 - RNA, 22 nt, Human
cacauaauacauguuccacuua

SEQ ID NO: 288438 - RNA, 23 nt, Human
aaacuacaacgccaggcacugag

SEQ ID NO: 288439 - RNA, 21 nt, Human
ugaucauuuguguaaaggaga

SEQ ID NO: 288440 - RNA, 22 nt, Human
ucuugccucuuccccuuuccau

SEQ ID NO: 288441 - RNA, 22 nt, Human
ucagacaguuugcagugugccu

SEQ ID NO: 288442 - RNA, 22 nt, Human
gcauguaaucacucuaggaagg

SEQ ID NO: 288443 - RNA, 22 nt, Human
cagaguuuugugaacaacuugg

SEQ ID NO: 288444 - RNA, 22 nt, Human
ggcaggcacuguguuuuguguu

SEQ ID NO: 288445 - RNA, 22 nt, Human
ugacccauuggucccuagaucc

SEQ ID NO: 288446 - RNA, 22 nt, Human
ugccuuccugcuuugaguucug

SEQ ID NO: 288447 - RNA, 22 nt, Human
uugaggagucaggggcacggaa

SEQ ID NO: 288448 - RNA, 20 nt, Human
uacagaaugcaauaaaaugg

SEQ ID NO: 288449 - RNA, 22 nt, Human
uccugcagagccgcccucaggu

SEQ ID NO: 288450 - RNA, 22 nt, Human
acuagaaagcacuaagcuaggc

SEQ ID NO: 288451 - RNA, 22 nt, Human
ugaacaugcuguugauggccug

SEQ ID NO: 288452 - RNA, 22 nt, Human
aauuucagauauuaaagaauga

SEQ ID NO: 288453 - RNA, 22 nt, Human
gaagaagggagugacaaaugca

SEQ ID NO: 288454 - RNA, 22 nt, Human
ggauuaagaccugucaguacac

SEQ ID NO: 288455 - RNA, 22 nt, Human
gugagcagccucaccugagggu

SEQ ID NO: 288456 - RNA, 22 nt, Human
ucugugauaguuuuucagcuau

SEQ ID NO: 288457 - RNA, 22 nt, Human
agauaaauuccuaagauuucag

SEQ ID NO: 288458 - RNA, 22 nt, Human
ucuguggcauguugcacuugua

SEQ ID NO: 288459 - RNA, 18 nt, Human
uguuuauucuccugacag

SEQ ID NO: 288460 - RNA, 22 nt, Human
caggaggggguggaguuucgcc

SEQ ID NO: 288461 - RNA, 22 nt, Human
ucaauucugguccucaggaacu

SEQ ID NO: 288462 - RNA, 22 nt, Human
cagggcagggauguugcggcag

SEQ ID NO: 288463 - RNA, 22 nt, Human
cuggaaaaugaagaagcagagg

SEQ ID NO: 288464 - RNA, 22 nt, Human
agggcaugcuggaggagagaca

SEQ ID NO: 288465 - RNA, 22 nt, Human
gcagacaauuuauuagcagauu

SEQ ID NO: 288466 - RNA, 22 nt, Human
ugauggcucccaugggcauaug

SEQ ID NO: 288467 - RNA, 20 nt, Human
auauuucuuaagaacuuuca

SEQ ID NO: 288468 - RNA, 22 nt, Human
ggaaaaaugacacauaucucaa

SEQ ID NO: 288469 - RNA, 20 nt, Human
aguaacuuagcaacucuagg

SEQ ID NO: 288470 - RNA, 22 nt, Human
uccuggguaaacacugaccuuu

SEQ ID NO: 288471 - RNA, 22 nt, Human
ccagguguuuggccugcaugau

SEQ ID NO: 288472 - RNA, 22 nt, Human
ccuuacacugccuggggccacg

SEQ ID NO: 288473 - RNA, 22 nt, Human
ccauaaucguguguuaaauaau

SEQ ID NO: 288474 - RNA, 22 nt, Human
ugcccaggcuucacccucagag

SEQ ID NO: 288475 - RNA, 22 nt, Human
guacaaauugauacagauuuga

SEQ ID NO: 288476 - RNA, 22 nt, Human
agcugugugugcuugggauuau

SEQ ID NO: 288477 - RNA, 22 nt, Human
cuuguauugcaaacuggccagg

SEQ ID NO: 288478 - RNA, 22 nt, Human
uucagcaacucaaaccuauuag

SEQ ID NO: 288479 - RNA, 18 nt, Human
ugucucaggcugaaacag

SEQ ID NO: 288480 - RNA, 22 nt, Human
gaggcaggguguugauuacaga

SEQ ID NO: 288481 - RNA, 16 nt, Human
uaugugucucaucuac

SEQ ID NO: 288482 - RNA, 22 nt, Human
uuuccagagggugcucagggcg

SEQ ID NO: 288483 - RNA, 22 nt, Human
uacacauguauuuauguguaca

SEQ ID NO: 288484 - RNA, 22 nt, Human
ucggagcuguagaugaaacccu

SEQ ID NO: 288485 - RNA, 22 nt, Human
ccugaagaugcuguggccuggu

SEQ ID NO: 288486 - RNA, 22 nt, Human
aucagagaccggucaagucaug

SEQ ID NO: 288487 - RNA, 22 nt, Human
guuucauucggcagcucauaag

SEQ ID NO: 288488 - RNA, 22 nt, Human
gagcaguggucugaucuucuaa

SEQ ID NO: 288489 - RNA, 22 nt, Human
uuucaugagauuccuccacauc

SEQ ID NO: 288490 - RNA, 22 nt, Human
aaggugucauccaggauggugg

SEQ ID NO: 288491 - RNA, 22 nt, Human
gcagggacagggcagggccuuu

SEQ ID NO: 288492 - RNA, 22 nt, Human
cuguggucacuguuggggaaug

SEQ ID NO: 288493 - RNA, 22 nt, Human
uuaccuaaaauagcucaauuua

SEQ ID NO: 288494 - RNA, 22 nt, Human
gggcucugagcucugggaauua

SEQ ID NO: 288495 - RNA, 22 nt, Human
ggaaggggagcuggaaagggua

SEQ ID NO: 288496 - RNA, 21 nt, Human
gcaggugugguaucagcuucc

SEQ ID NO: 288497 - RNA, 22 nt, Human
ccagagaggccuuggcaagaca

SEQ ID NO: 288498 - RNA, 22 nt, Human
ugcugaggagguggcugugcuu

SEQ ID NO: 288499 - RNA, 22 nt, Human
uguuugcuauauccuacuucau

SEQ ID NO: 288500 - RNA, 19 nt, Human
ugaggcaagauggcucugg

SEQ ID NO: 288501 - RNA, 22 nt, Human
aagucacagaguuggaagucag

SEQ ID NO: 288502 - RNA, 22 nt, Human
acauguaaaaggaacaugcaug

SEQ ID NO: 288503 - RNA, 22 nt, Human
ccuugcucucccaagcccgcag

SEQ ID NO: 288504 - RNA, 22 nt, Human
guuagggagucagguggcucuu

SEQ ID NO: 288505 - RNA, 22 nt, Human
ccugagugaccugaggucuagu

SEQ ID NO: 288506 - RNA, 22 nt, Human
aggcuuggcuggcagcccuggg

SEQ ID NO: 288507 - RNA, 22 nt, Human
auccugagguacugcagggccg

SEQ ID NO: 288508 - RNA, 22 nt, Human
aaugaguucugguucauuuuau

SEQ ID NO: 288509 - RNA, 22 nt, Human
cuccccaagccuuggcuucucc

SEQ ID NO: 288510 - RNA, 22 nt, Human
uuuugcuguguccuugagccgg

SEQ ID NO: 288511 - RNA, 22 nt, Human
uauugaggaucuccugcuaauu

SEQ ID NO: 288512 - RNA, 22 nt, Human
agugauguugacuagcuauaag

SEQ ID NO: 288513 - RNA, 19 nt, Human
gcuaggguugguggcgugc

SEQ ID NO: 288514 - RNA, 22 nt, Human
cauguguguccaugugacuaag

SEQ ID NO: 288515 - RNA, 22 nt, Human
cugaggcuuggaggggucuggu

SEQ ID NO: 288516 - RNA, 22 nt, Human
cccugccaggguccugacagac

SEQ ID NO: 288517 - RNA, 22 nt, Human
accugguuccuccucacugcug

SEQ ID NO: 288518 - RNA, 22 nt, Human
cacaggcuuccaguccccagcu

SEQ ID NO: 288519 - RNA, 22 nt, Human
gcauguguaugguaggaauauu

SEQ ID NO: 288520 - RNA, 22 nt, Human
cagagcucugacagcuacagcc

SEQ ID NO: 288521 - RNA, 20 nt, Human
gaacuugggcaaguggcuua

SEQ ID NO: 288522 - RNA, 22 nt, Human
gcauucuuccugggcugggggc

SEQ ID NO: 288523 - RNA, 22 nt, Human
cagacaaggccaucuuucauuu

SEQ ID NO: 288524 - RNA, 22 nt, Human
ugugugaggugguucugagaag

SEQ ID NO: 288525 - RNA, 22 nt, Human
caggcacaugggagcucaucau

SEQ ID NO: 288526 - RNA, 22 nt, Human
augauucucauuuuauaaacuu

SEQ ID NO: 288527 - RNA, 22 nt, Human
cugaggagaugggcuuuuuagg

SEQ ID NO: 288528 - RNA, 22 nt, Human
aacuguuucagaaauauuguug

SEQ ID NO: 288529 - RNA, 22 nt, Human
gcucagagagaggauauguuau

SEQ ID NO: 288530 - RNA, 22 nt, Human
cucugagcagaggccguggcua

SEQ ID NO: 288531 - RNA, 22 nt, Human
ucacugcuuucaaaaauuauug

SEQ ID NO: 288532 - RNA, 22 nt, Human
ucuuuuguugccuacuuauuaa

SEQ ID NO: 288533 - RNA, 22 nt, Human
ugagguggcacacacuuccugc

SEQ ID NO: 288534 - RNA, 22 nt, Human
aaugucaguguuacugcuauug

SEQ ID NO: 288535 - RNA, 22 nt, Human
auguuacagagaaaguggaagc

SEQ ID NO: 288536 - RNA, 22 nt, Human
acacagaguaucuuuugccuag

SEQ ID NO: 288537 - RNA, 22 nt, Human
cccugcagugugaccucaccua

SEQ ID NO: 288538 - RNA, 22 nt, Human
ccugugcccucugcauagcagc

SEQ ID NO: 288539 - RNA, 22 nt, Human
uuacacagaugguuaguagagg

SEQ ID NO: 288540 - RNA, 22 nt, Human
aguuuacauaaaaaggcagagg

SEQ ID NO: 288541 - RNA, 22 nt, Human
ggcaggugcucaaaaauauuug

SEQ ID NO: 288542 - RNA, 22 nt, Human
ggcaggcuccagagcccucucc

SEQ ID NO: 288543 - RNA, 22 nt, Human
aguguauuaguuguccagcagu

SEQ ID NO: 288544 - RNA, 22 nt, Human
ucagggcacauucugcaguggc

SEQ ID NO: 288545 - RNA, 22 nt, Human
uacaucauaauaauacuuagaa

SEQ ID NO: 288546 - RNA, 22 nt, Human
gaggagcuggcagcgucuccgc

SEQ ID NO: 288547 - RNA, 22 nt, Human
gcaaggacucccugggucauuc

SEQ ID NO: 288548 - RNA, 22 nt, Human
ucccugccuccuggcagugcca

SEQ ID NO: 288549 - RNA, 22 nt, Human
acaagauugauaagucugcccu

SEQ ID NO: 288550 - RNA, 22 nt, Human
acuuuguuccuuucacaaagaa

SEQ ID NO: 288551 - RNA, 22 nt, Human
guuuucuuccugcaauuggcau

SEQ ID NO: 288552 - RNA, 22 nt, Human
ggcuccagguuuaaggguaugu

SEQ ID NO: 288553 - RNA, 21 nt, Human
auucagaaagggaauaaacuc

SEQ ID NO: 288554 - RNA, 21 nt, Human
acaugucucuaaucucaguga

SEQ ID NO: 288555 - RNA, 22 nt, Human
gggcuugguggagagaaugcug

SEQ ID NO: 288556 - RNA, 22 nt, Human
agucccuucucaaagugugcgg

SEQ ID NO: 288557 - RNA, 22 nt, Human
ugcuauuuuagacauacuuugu

SEQ ID NO: 288558 - RNA, 22 nt, Human
aggggauggagcuggaaggcag

SEQ ID NO: 288559 - RNA, 22 nt, Human
cauuuccacuucugaaaacugg

SEQ ID NO: 288560 - RNA, 22 nt, Human
auacuacaaucauaauuguaca

SEQ ID NO: 288561 - RNA, 22 nt, Human
aggagggagcuuaagccaggca

SEQ ID NO: 288562 - RNA, 18 nt, Human
aguccaugcauggcuaua

SEQ ID NO: 288563 - RNA, 22 nt, Human
ccagggcaggggcuggaguuca

SEQ ID NO: 288564 - RNA, 22 nt, Human
ccugguuuaaugcucacuguug

SEQ ID NO: 288565 - RNA, 22 nt, Human
cuguccuggagggcauaggacg

SEQ ID NO: 288566 - RNA, 22 nt, Human
agcuagaaguccuagauaaagg

SEQ ID NO: 288567 - RNA, 22 nt, Human
uuguuacagcagcaauagaaaa

SEQ ID NO: 288568 - RNA, 19 nt, Human
cuccucagucccagagguc

SEQ ID NO: 288569 - RNA, 22 nt, Human
uuugcaaauauguguuucuauu

SEQ ID NO: 288570 - RNA, 21 nt, Human
ugacagguuuaggauuaaaau

SEQ ID NO: 288571 - RNA, 22 nt, Human
ucacuccucaggcuagcaucau

SEQ ID NO: 288572 - RNA, 23 nt, Human
ggacaugucucuggguauuuuga

SEQ ID NO: 288573 - RNA, 22 nt, Human
ugcuuuaucugugagaaccuga

SEQ ID NO: 288574 - RNA, 22 nt, Human
gacaagaugacaucauggcuuc

SEQ ID NO: 288575 - RNA, 22 nt, Human
ucuagaaaguuuguacugauuu

SEQ ID NO: 288576 - RNA, 19 nt, Human
agaaucaggucaggugaca

SEQ ID NO: 288577 - RNA, 22 nt, Human
ugggugcucugcuucccugcac

SEQ ID NO: 288578 - RNA, 22 nt, Human
cccaggagcuucucucugccuc

SEQ ID NO: 288579 - RNA, 22 nt, Human
gacagacacaauugauccauga

SEQ ID NO: 288580 - RNA, 22 nt, Human
agagggaaaaacucaugucauu

SEQ ID NO: 288581 - RNA, 22 nt, Human
gaacuguggguaauauauuaga

SEQ ID NO: 288582 - RNA, 22 nt, Human
guuuccugcgugugccacucau

SEQ ID NO: 288583 - RNA, 22 nt, Human
gguggcagggagugucccuggg

SEQ ID NO: 288584 - RNA, 22 nt, Human
uggcaguagauccagucucucu

SEQ ID NO: 288585 - RNA, 22 nt, Human
gguggcucucuuaagggcagcg

SEQ ID NO: 288586 - RNA, 22 nt, Human
acuccccagacugccaugcugg

SEQ ID NO: 288587 - RNA, 22 nt, Human
uagggaccuuagaauuguaugu

SEQ ID NO: 288588 - RNA, 22 nt, Human
agggcagccucucagccuaggu

SEQ ID NO: 288589 - RNA, 22 nt, Human
acagugcaaacuuuugucuccu

SEQ ID NO: 288590 - RNA, 22 nt, Human
uuucauaaccucaagcuacagu

SEQ ID NO: 288591 - RNA, 22 nt, Human
uccuccuuguuuugucucugcu

SEQ ID NO: 288592 - RNA, 22 nt, Human
cagugagguggaguaguuccca

SEQ ID NO: 288593 - RNA, 22 nt, Human
aaagauuuaagaauaauuugug

SEQ ID NO: 288594 - RNA, 17 nt, Human
gaauuucuuggucaaaa

SEQ ID NO: 288595 - RNA, 19 nt, Human
uggucccauacugcuggcc

SEQ ID NO: 288596 - RNA, 22 nt, Human
ugcagcucauugguguccuggu

SEQ ID NO: 288597 - RNA, 22 nt, Human
aucuagauuagguauaagagcu

SEQ ID NO: 288598 - RNA, 22 nt, Human
ucuccauuuuauagauaaugaa

SEQ ID NO: 288599 - RNA, 22 nt, Human
auuuguucacaaucagggcagg

SEQ ID NO: 288600 - RNA, 22 nt, Human
uaauaauagcaguagcugccac

SEQ ID NO: 288601 - RNA, 22 nt, Human
aggggagaaaaaugccuucugu

SEQ ID NO: 288602 - RNA, 22 nt, Human
aggggugugcauccuggaggau

SEQ ID NO: 288603 - RNA, 22 nt, Human
uuugcugugggauauccaugug

SEQ ID NO: 288604 - RNA, 22 nt, Human
auguaauuuauguuauccauaa

SEQ ID NO: 288605 - RNA, 22 nt, Human
aagaaagggagaaggauggugu

SEQ ID NO: 288606 - RNA, 23 nt, Human
ucuuugguaaauaaaguggggau

SEQ ID NO: 288607 - RNA, 22 nt, Human
uuccuggccuaagguaggugac

SEQ ID NO: 288608 - RNA, 22 nt, Human
gcucccucugcucaggcacuug

SEQ ID NO: 288609 - RNA, 22 nt, Human
gauaauuugauaccucaaucag

SEQ ID NO: 288610 - RNA, 22 nt, Human
uugguacaaugugcuagguagg

SEQ ID NO: 288611 - RNA, 22 nt, Human
ucugaauucaguauggucuuuc

SEQ ID NO: 288612 - RNA, 22 nt, Human
gccagguggcugagcagcugca

SEQ ID NO: 288613 - RNA, 22 nt, Human
cagcuuugcaggcuggucagug

SEQ ID NO: 288614 - RNA, 22 nt, Human
accuaaauucuggcugauuagg

SEQ ID NO: 288615 - RNA, 22 nt, Human
gacugccagaaugugaggccug

SEQ ID NO: 288616 - RNA, 19 nt, Human
ugcagggcugcgccugggg

SEQ ID NO: 288617 - RNA, 22 nt, Human
aaggcuuuaugugaccaaaaga

SEQ ID NO: 288618 - RNA, 22 nt, Human
ugaguuuuuucaacauaugaag

SEQ ID NO: 288619 - RNA, 22 nt, Human
uugugcuccugugagaaucuag

SEQ ID NO: 288620 - RNA, 22 nt, Human
uggcccugcuggacacgccugc

SEQ ID NO: 288621 - RNA, 18 nt, Human
cccagcuuagcgccccuc

SEQ ID NO: 288622 - RNA, 22 nt, Human
uuuccccagguagauagauaau

SEQ ID NO: 288623 - RNA, 21 nt, Human
guuauugaccuccaggcuggc

SEQ ID NO: 288624 - RNA, 22 nt, Human
gagcuccagaguuagacacccg

SEQ ID NO: 288625 - RNA, 22 nt, Human
aagcuuucagagcagaauguga

SEQ ID NO: 288626 - RNA, 22 nt, Human
ggcuuuauuuugcaugaaugcu

SEQ ID NO: 288627 - RNA, 22 nt, Human
ccaguguccuuccuuuccaugg

SEQ ID NO: 288628 - RNA, 19 nt, Human
acuggcagggcugcggugg

SEQ ID NO: 288629 - RNA, 22 nt, Human
ucauaaaaugcuccugauauug

SEQ ID NO: 288630 - RNA, 22 nt, Human
acugccuucaaacagcgccacc

SEQ ID NO: 288631 - RNA, 22 nt, Human
caggaaggaaaggguguggaga

SEQ ID NO: 288632 - RNA, 17 nt, Human
agcugagcuggccaggg

SEQ ID NO: 288633 - RNA, 22 nt, Human
ucuccacauucuauuggcuaua

SEQ ID NO: 288634 - RNA, 22 nt, Human
gaggaauguuauuaaaggagcu

SEQ ID NO: 288635 - RNA, 22 nt, Human
ucccagggcuuuucucaugcuu

SEQ ID NO: 288636 - RNA, 22 nt, Human
ucuuccucuucugcugagaagu

SEQ ID NO: 288637 - RNA, 22 nt, Human
uuucuucuugauuuaaacaggg

SEQ ID NO: 288638 - RNA, 22 nt, Human
ucagagaguuagugucuuagcu

SEQ ID NO: 288639 - RNA, 22 nt, Human
ccugagcugaacuaagcaguuu

SEQ ID NO: 288640 - RNA, 22 nt, Human
auucuuuaauucaauugaagga

SEQ ID NO: 288641 - RNA, 22 nt, Human
uccaugaggcagggaggcuggc

SEQ ID NO: 288642 - RNA, 22 nt, Human
caaggcaugcaaugucuucagg

SEQ ID NO: 288643 - RNA, 22 nt, Human
ugcagggccuugggaugugucc

SEQ ID NO: 288644 - RNA, 20 nt, Human
ugacacaaauugcuuucuca

SEQ ID NO: 288645 - RNA, 22 nt, Human
uuuaugagcaaugcugagggga

SEQ ID NO: 288646 - RNA, 22 nt, Human
ccuggaccugcagcaucagcau

SEQ ID NO: 288647 - RNA, 22 nt, Human
uccaggaagccacacugggccu

SEQ ID NO: 288648 - RNA, 22 nt, Human
auucuuuggacaauaaguggug

SEQ ID NO: 288649 - RNA, 22 nt, Human
caaauaauuacuauccucacuu

SEQ ID NO: 288650 - RNA, 22 nt, Human
uccuccuuguuuuccuguuuac

SEQ ID NO: 288651 - RNA, 22 nt, Human
ucauuguuucugcuuuucauga

SEQ ID NO: 288652 - RNA, 22 nt, Human
uuggaggaugcaaugagggagu

SEQ ID NO: 288653 - RNA, 22 nt, Human
uuauucagucugucuagggagu

SEQ ID NO: 288654 - RNA, 19 nt, Human
guucaaacacugauucagc

SEQ ID NO: 288655 - RNA, 22 nt, Human
ucuuuucuguaacucagugucu

SEQ ID NO: 288656 - RNA, 22 nt, Human
aaaagcagguacucagcuuggg

SEQ ID NO: 288657 - RNA, 22 nt, Human
aaaguugaccgaaagauuuuga

SEQ ID NO: 288658 - RNA, 22 nt, Human
ugcuggguggacuuggcucuca

SEQ ID NO: 288659 - RNA, 22 nt, Human
ugcaggugucucugucuagcgu

SEQ ID NO: 288660 - RNA, 22 nt, Human
uuacaguguuacuugaugucca

SEQ ID NO: 288661 - RNA, 22 nt, Human
uugcuuuagaaucugcuucugg

SEQ ID NO: 288662 - RNA, 22 nt, Human
uaauuccaaguugagacaugca

SEQ ID NO: 288663 - RNA, 22 nt, Human
cagagcaugaauaaaaguuaca

SEQ ID NO: 288664 - RNA, 22 nt, Human
auuaagacuauugauauuuaca

SEQ ID NO: 288665 - RNA, 22 nt, Human
ucugcccuggggucagccucca

SEQ ID NO: 288666 - RNA, 22 nt, Human
gcauggcugguguccugaggga

SEQ ID NO: 288667 - RNA, 22 nt, Human
aacugucuuaauaacaaaagcu

SEQ ID NO: 288668 - RNA, 22 nt, Human
aggaauguuuagaaugucagaa

SEQ ID NO: 288669 - RNA, 22 nt, Human
ucuguucauguugggcuuuucc

SEQ ID NO: 288670 - RNA, 22 nt, Human
acuucuuuucaaaucaugcaaa

SEQ ID NO: 288671 - RNA, 22 nt, Human
uuauugacugaucagagaggga

SEQ ID NO: 288672 - RNA, 22 nt, Human
auuuuuaugacaaaccauccuc

SEQ ID NO: 288673 - RNA, 22 nt, Human
uuucuaaaauagauuuuauggu

SEQ ID NO: 288674 - RNA, 22 nt, Human
ucugaaauuccuuccagacuuu

SEQ ID NO: 288675 - RNA, 22 nt, Human
guaacagaaagucaugcucauu

SEQ ID NO: 288676 - RNA, 22 nt, Human
uguuuauucauggcuaaugaaa

SEQ ID NO: 288677 - RNA, 22 nt, Human
gaugaaaaaagacgagcauaua

SEQ ID NO: 288678 - RNA, 22 nt, Human
ucauggcauuguuaaggguuuu

SEQ ID NO: 288679 - RNA, 22 nt, Human
aaggucagagcaggaaggaguc

SEQ ID NO: 288680 - RNA, 22 nt, Human
cacauuccuggugcucagcagc

SEQ ID NO: 288681 - RNA, 22 nt, Human
aacaguuuggguagguauguag

SEQ ID NO: 288682 - RNA, 22 nt, Human
uacagugcauagaggcaugaua

SEQ ID NO: 288683 - RNA, 22 nt, Human
aauguaguucacaauugguacu

SEQ ID NO: 288684 - RNA, 23 nt, Human
agggaaaguaguaauggccuuug

SEQ ID NO: 288685 - RNA, 22 nt, Human
aauauguuuauaagauaucuuc

SEQ ID NO: 288686 - RNA, 22 nt, Human
acugugcugcucuccgcagccc

SEQ ID NO: 288687 - RNA, 22 nt, Human
aacaguuuaugagauaugcuau

SEQ ID NO: 288688 - RNA, 22 nt, Human
aauaauuuuagcucagaguugu

SEQ ID NO: 288689 - RNA, 22 nt, Human
uuccugagggacuuuugagauu

SEQ ID NO: 288690 - RNA, 22 nt, Human
guaaaauucuagcaucugaaag

SEQ ID NO: 288691 - RNA, 22 nt, Human
ggcugcugaaguguggcaaucu

SEQ ID NO: 288692 - RNA, 22 nt, Human
uuccaggaggagguacuagagg

SEQ ID NO: 288693 - RNA, 22 nt, Human
aaauacuagaauucagaguuga

SEQ ID NO: 288694 - RNA, 22 nt, Human
ucaagcaacugaauucuaaaag

SEQ ID NO: 288695 - RNA, 22 nt, Human
aaacacugaaaauuuuggucau

SEQ ID NO: 288696 - RNA, 22 nt, Human
ccagguguccccgucacugcag

SEQ ID NO: 288697 - RNA, 22 nt, Human
auuucacaucuaucucagauuu

SEQ ID NO: 288698 - RNA, 21 nt, Human
aagaguggcugaggaggugau

SEQ ID NO: 288699 - RNA, 22 nt, Human
gaaggaggcguuagcccuagga

SEQ ID NO: 288700 - RNA, 23 nt, Human
acagaaaucauuuguaagguacc

SEQ ID NO: 288701 - RNA, 22 nt, Human
uguggggcagcuagccggccug

SEQ ID NO: 288702 - RNA, 22 nt, Human
cccacucccuacgacacgcucc

SEQ ID NO: 288703 - RNA, 22 nt, Human
aaggguuggggaagagcaaauu

SEQ ID NO: 288704 - RNA, 22 nt, Human
ccuggaggagcgcugaccagcu

SEQ ID NO: 288705 - RNA, 22 nt, Human
uucaggaauaauuaucauauga

SEQ ID NO: 288706 - RNA, 22 nt, Human
gcagguaagagaggcuggcuuc

SEQ ID NO: 288707 - RNA, 22 nt, Human
aguuuacaucuucaaucucauu

SEQ ID NO: 288708 - RNA, 22 nt, Human
agaggcacaacagucccauugu

SEQ ID NO: 288709 - RNA, 19 nt, Human
uucagcagugucugcucuu

SEQ ID NO: 288710 - RNA, 21 nt, Human
agaagcuagucacuaaaucca

SEQ ID NO: 288711 - RNA, 22 nt, Human
gagcacagggaauagacagaua

SEQ ID NO: 288712 - RNA, 22 nt, Human
ucugaaauucacaguugaguca

SEQ ID NO: 288713 - RNA, 22 nt, Human
aauguaaaguugggcacaaaug

SEQ ID NO: 288714 - RNA, 22 nt, Human
gauaagcacuauauaaguauuu

SEQ ID NO: 288715 - RNA, 22 nt, Human
uucaggaaucaaccaagucauu

SEQ ID NO: 288716 - RNA, 22 nt, Human
ugggaagaguuagagacagcug

SEQ ID NO: 288717 - RNA, 22 nt, Human
uuucaaguucuguuccuaaacu

SEQ ID NO: 288718 - RNA, 22 nt, Human
uuucacaucagagguagauuag

SEQ ID NO: 288719 - RNA, 20 nt, Human
ggcaggugcucgcuuggucu

SEQ ID NO: 288720 - RNA, 22 nt, Human
uucuguuucuggggucucugac

SEQ ID NO: 288721 - RNA, 22 nt, Human
agggucaacauuucauugauuc

SEQ ID NO: 288722 - RNA, 22 nt, Human
aauaaauguuaagauugucuca

SEQ ID NO: 288723 - RNA, 19 nt, Human
ccugcagggaugagagguu

SEQ ID NO: 288724 - RNA, 19 nt, Human
uagaaagaugauggguggg

SEQ ID NO: 288725 - RNA, 22 nt, Human
gggcaaguccggugcccagagc

SEQ ID NO: 288726 - RNA, 22 nt, Human
ucugccugagcagagggaggcc

SEQ ID NO: 288727 - RNA, 22 nt, Human
caugacaauaagccagcagaaa

SEQ ID NO: 288728 - RNA, 22 nt, Human
gagggcagagacagugauucac

SEQ ID NO: 288729 - RNA, 22 nt, Human
gggacccugggaggcuggcgca

SEQ ID NO: 288730 - RNA, 23 nt, Human
uuucaguugagaaugcacggacc

SEQ ID NO: 288731 - RNA, 22 nt, Human
gcuggaggaucacuugagccca

SEQ ID NO: 288732 - RNA, 22 nt, Human
aggaggaagggaagacaaguaa

SEQ ID NO: 288733 - RNA, 22 nt, Human
aggcuguguucugguucuuagc

SEQ ID NO: 288734 - RNA, 22 nt, Human
aagugccccaggcuguuaacau

SEQ ID NO: 288735 - RNA, 22 nt, Human
auuuaagaggcugcuagaguau

SEQ ID NO: 288736 - RNA, 22 nt, Human
aagaaaacaaugacuugccagc

SEQ ID NO: 288737 - RNA, 16 nt, Human
ucuuaguuguguggua

SEQ ID NO: 288738 - RNA, 22 nt, Human
auuucuggauuuuggaugcugc

SEQ ID NO: 288739 - RNA, 22 nt, Human
gaaucagccugaguuugcagcu

SEQ ID NO: 288740 - RNA, 22 nt, Human
uucuuuauggaauggugauagu

SEQ ID NO: 288741 - RNA, 22 nt, Human
ggcucugggucuguggggagcg

SEQ ID NO: 288742 - RNA, 22 nt, Human
aaguccuuggagaauagaaagg

SEQ ID NO: 288743 - RNA, 22 nt, Human
cuguauuaguccauuugagcug

SEQ ID NO: 288744 - RNA, 22 nt, Human
acaggugguaaaauggacuguc

SEQ ID NO: 288745 - RNA, 22 nt, Human
uagcuucucauaauuuaugcug

SEQ ID NO: 288746 - RNA, 22 nt, Human
cagguuuacaaaguaaagugug

SEQ ID NO: 288747 - RNA, 22 nt, Human
gccuguuuguuugcaaaggagc

SEQ ID NO: 288748 - RNA, 22 nt, Human
gccuguuuggcugcugacauug

SEQ ID NO: 288749 - RNA, 22 nt, Human
aguccuggugacacuccucuuc

SEQ ID NO: 288750 - RNA, 22 nt, Human
accugcaggggugcucucuggg

SEQ ID NO: 288751 - RNA, 22 nt, Human
gcaugcaguaaaauucagcaac

SEQ ID NO: 288752 - RNA, 22 nt, Human
uccaggcuggagugcaguggca

SEQ ID NO: 288753 - RNA, 22 nt, Human
gcuggcagcauuagacccuggg

SEQ ID NO: 288754 - RNA, 22 nt, Human
uucuuuauagcuauuggaugag

SEQ ID NO: 288755 - RNA, 22 nt, Human
auuucacagcugucaguguuac

SEQ ID NO: 288756 - RNA, 22 nt, Human
uuccuuccauagcaaaacaugc

SEQ ID NO: 288757 - RNA, 21 nt, Human
gauuugcagaaacuagacagg

SEQ ID NO: 288758 - RNA, 22 nt, Human
agucucaagcaccgaaagcugu

SEQ ID NO: 288759 - RNA, 22 nt, Human
ucagagagcagaacuuuuuuac

SEQ ID NO: 288760 - RNA, 22 nt, Human
uggaaugaauuuggcuuccucc

SEQ ID NO: 288761 - RNA, 20 nt, Human
ccuucuccagcuuguucuug

SEQ ID NO: 288762 - RNA, 22 nt, Human
ucacagaaugucuagcauaauu

SEQ ID NO: 288763 - RNA, 22 nt, Human
cugccugccacguucagcugua

SEQ ID NO: 288764 - RNA, 22 nt, Human
ccuguggcucucuuuggagguc

SEQ ID NO: 288765 - RNA, 22 nt, Human
aggccaggcaacauucugaagu

SEQ ID NO: 288766 - RNA, 22 nt, Human
cuggggugucucgucugccauu

SEQ ID NO: 288767 - RNA, 21 nt, Human
ccuagccucuuacccagcuuu

SEQ ID NO: 288768 - RNA, 22 nt, Human
gcccagcaggggauggcagcuc

SEQ ID NO: 288769 - RNA, 22 nt, Human
gaaaacuaacggaaaaguuagg

SEQ ID NO: 288770 - RNA, 22 nt, Human
uguaauuauuucugugcaguca

SEQ ID NO: 288771 - RNA, 22 nt, Human
uguaagaauaaugauuucuaag

SEQ ID NO: 288772 - RNA, 18 nt, Human
cuccuggcugauggugag

SEQ ID NO: 288773 - RNA, 22 nt, Human
ugauggucaacaauuuugagug

SEQ ID NO: 288774 - RNA, 22 nt, Human
ggggcucaguucggacagccug

SEQ ID NO: 288775 - RNA, 22 nt, Human
cauaaauuguacccauuccaac

SEQ ID NO: 288776 - RNA, 22 nt, Human
aagaacuuccuaauauauuuuc

SEQ ID NO: 288777 - RNA, 22 nt, Human
agggccugggccagcacccuuu

SEQ ID NO: 288778 - RNA, 22 nt, Human
uuccaggcuauccggugaaggg

SEQ ID NO: 288779 - RNA, 22 nt, Human
cuguuauuuagaacauggaauc

SEQ ID NO: 288780 - RNA, 22 nt, Human
gucaauauagguuucaaacaug

SEQ ID NO: 288781 - RNA, 22 nt, Human
agauggucaaggauacuguuca

SEQ ID NO: 288782 - RNA, 22 nt, Human
cccuuccugggugucccggagu

SEQ ID NO: 288783 - RNA, 22 nt, Human
cugucccuucauuauucacuac

SEQ ID NO: 288784 - RNA, 22 nt, Human
aagcauuuuagauaaagcauca

SEQ ID NO: 288785 - RNA, 22 nt, Human
uauacaguuaaguuucuucagu

SEQ ID NO: 288786 - RNA, 22 nt, Human
ggacagacuuuacagccccggg

SEQ ID NO: 288787 - RNA, 22 nt, Human
caggacugauguuccuccagcc

SEQ ID NO: 288788 - RNA, 22 nt, Human
gcagacagcauguugggcuauu

SEQ ID NO: 288789 - RNA, 22 nt, Human
agggcuuucuuuguaaaagaag

SEQ ID NO: 288790 - RNA, 22 nt, Human
uuguagaaaauucucuuggaua

SEQ ID NO: 288791 - RNA, 22 nt, Human
ggcagaccucuccagccccaca

SEQ ID NO: 288792 - RNA, 20 nt, Human
cccagggaccugagcuccau

SEQ ID NO: 288793 - RNA, 22 nt, Human
aguuguaagaggcacaaggaag

SEQ ID NO: 288794 - RNA, 22 nt, Human
ccuccuggugacaaggcaaagc

SEQ ID NO: 288795 - RNA, 17 nt, Human
uuuacauugcucgcagu

SEQ ID NO: 288796 - RNA, 22 nt, Human
gcuggcagcuggaaguugggcu

SEQ ID NO: 288797 - RNA, 22 nt, Human
ucugaaagaugagugguccauu

SEQ ID NO: 288798 - RNA, 22 nt, Human
ucuggcucccagccugcucuca

SEQ ID NO: 288799 - RNA, 22 nt, Human
uugcagggaaaucagugaggau

SEQ ID NO: 288800 - RNA, 19 nt, Human
uccagaugauauggauuac

SEQ ID NO: 288801 - RNA, 22 nt, Human
agggccaguauuaagguaauua

SEQ ID NO: 288802 - RNA, 22 nt, Human
gcaguguuguuaaaagauuaga

SEQ ID NO: 288803 - RNA, 22 nt, Human
ucauggcuuuuauuauguugag

SEQ ID NO: 288804 - RNA, 22 nt, Human
ggaggccagggacccagucagc

SEQ ID NO: 288805 - RNA, 22 nt, Human
caccagccagagugacagcucc

SEQ ID NO: 288806 - RNA, 22 nt, Human
uuucuuuauccuccuuugcaca

SEQ ID NO: 288807 - RNA, 22 nt, Human
ucaaaguauaauugcuuuuuug

SEQ ID NO: 288808 - RNA, 22 nt, Human
ucugggugccacugucuguaca

SEQ ID NO: 288809 - RNA, 22 nt, Human
uugaauuauaagugugucuacu

SEQ ID NO: 288810 - RNA, 22 nt, Human
agucucagggccacccggggaa

SEQ ID NO: 288811 - RNA, 22 nt, Human
aaggugucucucugcuucuugg

SEQ ID NO: 288812 - RNA, 22 nt, Human
uuaugcaaaggggccucuuccu

SEQ ID NO: 288813 - RNA, 22 nt, Human
ucaucuguggcugcuuuugugc

SEQ ID NO: 288814 - RNA, 19 nt, Human
cugaaaaacauucucagga

SEQ ID NO: 288815 - RNA, 22 nt, Human
auguagaguagaauaguacaac

SEQ ID NO: 288816 - RNA, 23 nt, Human
aaauaggaguaucuggaucauga

SEQ ID NO: 288817 - RNA, 22 nt, Human
uguuuauugagugccuacuaua

SEQ ID NO: 288818 - RNA, 22 nt, Human
uuauguaccugaauuaguaaag

SEQ ID NO: 288819 - RNA, 21 nt, Human
ccuucuccacagggucuccgg

SEQ ID NO: 288820 - RNA, 23 nt, Human
cucaacccuaguaagggaguagg

SEQ ID NO: 288821 - RNA, 22 nt, Human
uggagagguuuaaacaaaaguu

SEQ ID NO: 288822 - RNA, 22 nt, Human
uuacauucauugaagugauuca

SEQ ID NO: 288823 - RNA, 22 nt, Human
agcuuuaugggagcuuagauaa

SEQ ID NO: 288824 - RNA, 22 nt, Human
guugucuuagucagaaauaugc

SEQ ID NO: 288825 - RNA, 22 nt, Human
aauuuuguuuaagugaucugcu

SEQ ID NO: 288826 - RNA, 22 nt, Human
aagggcucucugcauugaaauu

SEQ ID NO: 288827 - RNA, 22 nt, Human
cagugccacuuaaugaggcugc

SEQ ID NO: 288828 - RNA, 22 nt, Human
aucucccaaauuagccucuuga

SEQ ID NO: 288829 - RNA, 22 nt, Human
uauuugaagauucuucugaugu

SEQ ID NO: 288830 - RNA, 22 nt, Human
gcaaagcugggugugaaugcac

SEQ ID NO: 288831 - RNA, 22 nt, Human
gccuccuguuaugccaugugcc

SEQ ID NO: 288832 - RNA, 22 nt, Human
acagagcucccagccaucuccu

SEQ ID NO: 288833 - RNA, 22 nt, Human
cagcaacaugugguaguguagg

SEQ ID NO: 288834 - RNA, 23 nt, Human
cccagggacacgaugacaccucc

SEQ ID NO: 288835 - RNA, 22 nt, Human
aucaauaucagaucagacagga

SEQ ID NO: 288836 - RNA, 22 nt, Human
cuguccugaggcagguggccug

SEQ ID NO: 288837 - RNA, 21 nt, Human
agcuuacauuaccauuguugc

SEQ ID NO: 288838 - RNA, 22 nt, Human
cuaguuuaaagcagcugaaagg

SEQ ID NO: 288839 - RNA, 22 nt, Human
agcugcaacuguccuugccuug

SEQ ID NO: 288840 - RNA, 22 nt, Human
uauuuaauuagugauuguagag

SEQ ID NO: 288841 - RNA, 22 nt, Human
uaccugcacagccagccaugug

SEQ ID NO: 288842 - RNA, 18 nt, Human
aguguucucguuuuauaa

SEQ ID NO: 288843 - RNA, 22 nt, Human
gcugagcugggacaguccuggg

SEQ ID NO: 288844 - RNA, 22 nt, Human
auccuucuccagucguauuuuu

SEQ ID NO: 288845 - RNA, 22 nt, Human
acuuagaagaugcaguaaagca

SEQ ID NO: 288846 - RNA, 22 nt, Human
cauuuguaucauauguaucuua

SEQ ID NO: 288847 - RNA, 22 nt, Human
uuggugaauugagaccauuugu

SEQ ID NO: 288848 - RNA, 21 nt, Human
auuucagagcacacaaguaaa

SEQ ID NO: 288849 - RNA, 20 nt, Human
cauuuguuagcuuucuacug

SEQ ID NO: 288850 - RNA, 22 nt, Human
cccagugucuccaacaucagau

SEQ ID NO: 288851 - RNA, 22 nt, Human
cagcaugaauguguucguaggg

SEQ ID NO: 288852 - RNA, 22 nt, Human
acagcacuuuacuucucaguga

SEQ ID NO: 288853 - RNA, 22 nt, Human
auucgcacauuaacacucauau

SEQ ID NO: 288854 - RNA, 22 nt, Human
agcacaggaacauggagauggg

SEQ ID NO: 288855 - RNA, 19 nt, Human
cuguccugguuuggucccu

SEQ ID NO: 288856 - RNA, 22 nt, Human
ccuguggcugccccgcuguugg

SEQ ID NO: 288857 - RNA, 22 nt, Human
ucccagggugcgccugcccucg

SEQ ID NO: 288858 - RNA, 22 nt, Human
uauaaaacagaaagcacuaccu

SEQ ID NO: 288859 - RNA, 22 nt, Human
cccugcagcuuuugcauaguca

SEQ ID NO: 288860 - RNA, 22 nt, Human
uugggugguggggagaguucag

SEQ ID NO: 288861 - RNA, 22 nt, Human
uagggaugagcaacugguagug

SEQ ID NO: 288862 - RNA, 22 nt, Human
aguuauaaucugcuacugauau

SEQ ID NO: 288863 - RNA, 22 nt, Human
ccagagaaagcucacaggcagu

SEQ ID NO: 288864 - RNA, 22 nt, Human
uguagaaaauuggagcauucau

SEQ ID NO: 288865 - RNA, 22 nt, Human
acauuguaaauaccuuuaucac

SEQ ID NO: 288866 - RNA, 22 nt, Human
acuuaaaaacagauccagcagg

SEQ ID NO: 288867 - RNA, 22 nt, Human
ccuacaguuauauucuugauug

SEQ ID NO: 288868 - RNA, 22 nt, Human
aagagcaucaaugacucgcagu

SEQ ID NO: 288869 - RNA, 22 nt, Human
uuugcugaacuaaaauucugaa

SEQ ID NO: 288870 - RNA, 22 nt, Human
gcuggaggcaguucagacacca

SEQ ID NO: 288871 - RNA, 22 nt, Human
uuggaaaauguauuucuagaag

SEQ ID NO: 288872 - RNA, 22 nt, Human
ccugagugccaugagagcaccc

SEQ ID NO: 288873 - RNA, 21 nt, Human
aggcugcuggcucaggguccu

SEQ ID NO: 288874 - RNA, 22 nt, Human
gcaugugucuccccaguggagg

SEQ ID NO: 288875 - RNA, 22 nt, Human
accacuguacuauuugaguggc

SEQ ID NO: 288876 - RNA, 22 nt, Human
gagggcaggggucuugcacggu

SEQ ID NO: 288877 - RNA, 22 nt, Human
agaaagcacgggccccaggcuc

SEQ ID NO: 288878 - RNA, 22 nt, Human
gcuuccuggagggagagagcug

SEQ ID NO: 288879 - RNA, 22 nt, Human
guguaaguaucuuuguaucuuu

SEQ ID NO: 288880 - RNA, 22 nt, Human
ucuguucaagacugaggugaca

SEQ ID NO: 288881 - RNA, 22 nt, Human
acagucuaggccuaggucaaaa

SEQ ID NO: 288882 - RNA, 22 nt, Human
acagaggguguggaggaagacg

SEQ ID NO: 288883 - RNA, 22 nt, Human
uaacaguuuugaguuuugcuuc

SEQ ID NO: 288884 - RNA, 22 nt, Human
gcaggugguggcgcgcgcccug

SEQ ID NO: 288885 - RNA, 20 nt, Human
acuggcagccugccugcugu

SEQ ID NO: 288886 - RNA, 22 nt, Human
auuggcuuugauaucuaaaggg

SEQ ID NO: 288887 - RNA, 22 nt, Human
gagggaggugauacugaacgua

SEQ ID NO: 288888 - RNA, 22 nt, Human
auuguacaaugcugagguuugg

SEQ ID NO: 288889 - RNA, 20 nt, Human
accuacauguauagugaggg

SEQ ID NO: 288890 - RNA, 22 nt, Human
agagggugcuggagagacauug

SEQ ID NO: 288891 - RNA, 22 nt, Human
ggcaagagggcagauggagugc

SEQ ID NO: 288892 - RNA, 22 nt, Human
uguccaggucagcagcagggac

SEQ ID NO: 288893 - RNA, 22 nt, Human
caaagcaguuuuaaucaaguag

SEQ ID NO: 288894 - RNA, 23 nt, Human
gggcuccagucucugcucaguug

SEQ ID NO: 288895 - RNA, 22 nt, Human
cuggaggagagucugaaugaca

SEQ ID NO: 288896 - RNA, 22 nt, Human
uauuuuacuauuuggcaaaguc

SEQ ID NO: 288897 - RNA, 22 nt, Human
cugcugucuuuauuucacugcu

SEQ ID NO: 288898 - RNA, 22 nt, Human
uccuggguagagaccugaugaa

SEQ ID NO: 288899 - RNA, 22 nt, Human
gcaaggaggcugguggaggaag

SEQ ID NO: 288900 - RNA, 22 nt, Human
gacaguuuugcugaaauugagc

SEQ ID NO: 288901 - RNA, 22 nt, Human
uuauuuuuaaaaguucacacag

SEQ ID NO: 288902 - RNA, 22 nt, Human
cucagagaaaaggagcaagggu

SEQ ID NO: 288903 - RNA, 22 nt, Human
accauucuuuacacuuauuucu

SEQ ID NO: 288904 - RNA, 22 nt, Human
ucuaaccuuugaaacugcuuuc

SEQ ID NO: 288905 - RNA, 16 nt, Human
gcaggcagaucacaug

SEQ ID NO: 288906 - RNA, 22 nt, Human
cugucuguuaucucaccagucc

SEQ ID NO: 288907 - RNA, 22 nt, Human
gugcaggggaucagguugcagc

SEQ ID NO: 288908 - RNA, 22 nt, Human
cagcuuugugcaaugcagucuc

SEQ ID NO: 288909 - RNA, 22 nt, Human
gaaaaaugagcugaugucaggg

SEQ ID NO: 288910 - RNA, 22 nt, Human
ugcugugggauauauguucaaa

SEQ ID NO: 288911 - RNA, 22 nt, Human
ugcuggcugcagugcugucaaa

SEQ ID NO: 288912 - RNA, 22 nt, Human
ccuggcaguggugaagaagagg

SEQ ID NO: 288913 - RNA, 22 nt, Human
uucaacaaugaaagcuaaggaa

SEQ ID NO: 288914 - RNA, 22 nt, Human
ccagggcagggaccacgugucu

SEQ ID NO: 288915 - RNA, 22 nt, Human
uuucacauucagauauagacuu

SEQ ID NO: 288916 - RNA, 22 nt, Human
aauguuaaaaccuucagugcuu

SEQ ID NO: 288917 - RNA, 22 nt, Human
acauaacaaucauaggacauag

SEQ ID NO: 288918 - RNA, 22 nt, Human
gaggacucugggcguguauggg

SEQ ID NO: 288919 - RNA, 22 nt, Human
ucuuugaaagcuguucuagagu

SEQ ID NO: 288920 - RNA, 22 nt, Human
uaggaaauugccaauauaugac

SEQ ID NO: 288921 - RNA, 22 nt, Human
ugcaggugcuccgggggugccc

SEQ ID NO: 288922 - RNA, 19 nt, Human
auucagcauucugcacuuc

SEQ ID NO: 288923 - RNA, 22 nt, Human
cuucuucauguauugauagucu

SEQ ID NO: 288924 - RNA, 22 nt, Human
cacaggcuccggccuugcagcc

SEQ ID NO: 288925 - RNA, 22 nt, Human
aggggaaggccagccuguagag

SEQ ID NO: 288926 - RNA, 22 nt, Human
acauauuuccaugcagcauguc

SEQ ID NO: 288927 - RNA, 22 nt, Human
aggacuuagaacauuauguacu

SEQ ID NO: 288928 - RNA, 23 nt, Human
gagaccagggccagcugugucau

SEQ ID NO: 288929 - RNA, 22 nt, Human
cccuuccuugugacuggugggg

SEQ ID NO: 288930 - RNA, 22 nt, Human
cagggaugagaaagcucucuaa

SEQ ID NO: 288931 - RNA, 22 nt, Human
ggacagaggguugacagaguau

SEQ ID NO: 288932 - RNA, 22 nt, Human
uagcagggauacaaggucgccu

SEQ ID NO: 288933 - RNA, 22 nt, Human
acccagggcucaagcguaggca

SEQ ID NO: 288934 - RNA, 23 nt, Human
caugugugacaguaucacuguuu

SEQ ID NO: 288935 - RNA, 22 nt, Human
ucucuucccuuuaugguaugug

SEQ ID NO: 288936 - RNA, 22 nt, Human
aauguguuuuaugagagaauau

SEQ ID NO: 288937 - RNA, 21 nt, Human
ccuguggauuuuaaaauugga

SEQ ID NO: 288938 - RNA, 22 nt, Human
ucauuucuguugugcaucacug

SEQ ID NO: 288939 - RNA, 22 nt, Human
gccuacaugcuuuuaguguuuc

SEQ ID NO: 288940 - RNA, 22 nt, Human
gacuggggcucuagccaggccu

SEQ ID NO: 288941 - RNA, 22 nt, Human
acaugucaauuuaguacucuua

SEQ ID NO: 288942 - RNA, 22 nt, Human
ugaggaugguuaaagaacauug

SEQ ID NO: 288943 - RNA, 17 nt, Human
cagugcagagcccuuuc

SEQ ID NO: 288944 - RNA, 22 nt, Human
guguuuuggccauuagugugau

SEQ ID NO: 288945 - RNA, 22 nt, Human
cggacccacucggaucccagcc

SEQ ID NO: 288946 - RNA, 22 nt, Human
uccuggcccucugcaaacgcca

SEQ ID NO: 288947 - RNA, 22 nt, Human
caguauguucuuccaggacaga

SEQ ID NO: 288948 - RNA, 22 nt, Human
uccuggcacuuugggggcucgc

SEQ ID NO: 288949 - RNA, 22 nt, Human
augcaaacauguuuccucuaag

SEQ ID NO: 288950 - RNA, 22 nt, Human
cagagacaggaucucgaagacu

SEQ ID NO: 288951 - RNA, 23 nt, Human
aguuaggucaaguuaggucaauu

SEQ ID NO: 288952 - RNA, 22 nt, Human
ccacugucugugacaucagaaa

SEQ ID NO: 288953 - RNA, 17 nt, Human
ugccagccugucccagg

SEQ ID NO: 288954 - RNA, 18 nt, Human
agacccucuaagggcagu

SEQ ID NO: 288955 - RNA, 22 nt, Human
aagcccuguucuuucucucacc

SEQ ID NO: 288956 - RNA, 22 nt, Human
ucagggcauccauugccuguug

SEQ ID NO: 288957 - RNA, 22 nt, Human
ugauggcucauguuuggggaug

SEQ ID NO: 288958 - RNA, 21 nt, Human
acagcagggcuggcaugacag

SEQ ID NO: 288959 - RNA, 22 nt, Human
cauuuguuggucagauuguagu

SEQ ID NO: 288960 - RNA, 23 nt, Human
ucucuuucaagagcuuaaugugc

SEQ ID NO: 288961 - RNA, 22 nt, Human
uccaaggaggagcuggagauug

SEQ ID NO: 288962 - RNA, 22 nt, Human
agagggaaauccaggagugcuu

SEQ ID NO: 288963 - RNA, 22 nt, Human
cuuccagguccuucuugagaag

SEQ ID NO: 288964 - RNA, 22 nt, Human
uacacugugacaaucaugacag

SEQ ID NO: 288965 - RNA, 22 nt, Human
ugucugggagggacagggcuac

SEQ ID NO: 288966 - RNA, 22 nt, Human
cccaggcagcggggucuccuug

SEQ ID NO: 288967 - RNA, 22 nt, Human
ggcuguggacacugagcucaga

SEQ ID NO: 288968 - RNA, 22 nt, Human
uacccagcccaugccuaccuca

SEQ ID NO: 288969 - RNA, 22 nt, Human
caugaaacaucagagauuucuc

SEQ ID NO: 288970 - RNA, 22 nt, Human
gccauugagauugaaguaagca

SEQ ID NO: 288971 - RNA, 22 nt, Human
ugcucagcuucagaggaucccc

SEQ ID NO: 288972 - RNA, 22 nt, Human
aaacuucagacuccccacuucu

SEQ ID NO: 288973 - RNA, 22 nt, Human
auguuuguugaacaucuacugc

SEQ ID NO: 288974 - RNA, 22 nt, Human
augcaucuaugacuuagacauu

SEQ ID NO: 288975 - RNA, 22 nt, Human
cccaggcacacugaagugacau

SEQ ID NO: 288976 - RNA, 22 nt, Human
ugcuccaggugugccucucaug

SEQ ID NO: 288977 - RNA, 21 nt, Human
guuuucaugauagagucugua

SEQ ID NO: 288978 - RNA, 22 nt, Human
gcaggcagagagggguuuccag

SEQ ID NO: 288979 - RNA, 22 nt, Human
ugcccagcgcccacauucuguc

SEQ ID NO: 288980 - RNA, 22 nt, Human
cagaggccaggcugccugacug

SEQ ID NO: 288981 - RNA, 22 nt, Human
uauuuguauguguguacauaua

SEQ ID NO: 288982 - RNA, 22 nt, Human
gacacaguucuguucuaguagg

SEQ ID NO: 288983 - RNA, 22 nt, Human
cagggcuccaugcagggacucc

SEQ ID NO: 288984 - RNA, 22 nt, Human
uuucaaaccuacuuguauguuu

SEQ ID NO: 288985 - RNA, 22 nt, Human
gccucuguggcucagccuugcu

SEQ ID NO: 288986 - RNA, 22 nt, Human
uuuaaauguuuaaaacucguga

SEQ ID NO: 288987 - RNA, 22 nt, Human
cggccaggcacaguggcccacg

SEQ ID NO: 288988 - RNA, 22 nt, Human
ugaggccagugacauauauuaa

SEQ ID NO: 288989 - RNA, 22 nt, Human
aacaucagaauauccauguugg

SEQ ID NO: 288990 - RNA, 22 nt, Human
uuugcaaagaaauuauugcugu

SEQ ID NO: 288991 - RNA, 22 nt, Human
acauauauuacuaguaaagaca

SEQ ID NO: 288992 - RNA, 22 nt, Human
cucagagauauagucccugcuu

SEQ ID NO: 288993 - RNA, 22 nt, Human
accugccuucucaaggacauga

SEQ ID NO: 288994 - RNA, 22 nt, Human
cuccuggcagcaacauuuauau

SEQ ID NO: 288995 - RNA, 19 nt, Human
cagaugagaaaagugaggu

SEQ ID NO: 288996 - RNA, 22 nt, Human
ugggaucuuuugagauacugug

SEQ ID NO: 288997 - RNA, 20 nt, Human
gaggccucagccucagcucc

SEQ ID NO: 288998 - RNA, 22 nt, Human
uccaggcagucauuaaucucua

SEQ ID NO: 288999 - RNA, 22 nt, Human
augccaguaagucucagcuagg

SEQ ID NO: 289000 - RNA, 22 nt, Human
uguccuggccaaggccuugcuu

SEQ ID NO: 289001 - RNA, 22 nt, Human
guuauaaaugacugcaaaaguu

SEQ ID NO: 289002 - RNA, 23 nt, Human
aaaugacauaugguuucugaagg

SEQ ID NO: 289003 - RNA, 22 nt, Human
cagaagagaugaaauaguauua

SEQ ID NO: 289004 - RNA, 22 nt, Human
ggaggcaggaaagacagguuca

SEQ ID NO: 289005 - RNA, 22 nt, Human
uccuggcagggucuaggucuag

SEQ ID NO: 289006 - RNA, 22 nt, Human
uaucacaggugugauuuacauu

SEQ ID NO: 289007 - RNA, 23 nt, Human
uuaaggagcuugcacucugggug

SEQ ID NO: 289008 - RNA, 22 nt, Human
agaaagcuccccaugagaugau

SEQ ID NO: 289009 - RNA, 22 nt, Human
gagcccuguucaggccuccuca

SEQ ID NO: 289010 - RNA, 23 nt, Human
uguaaaaugggguaguguuacca

SEQ ID NO: 289011 - RNA, 22 nt, Human
gacuggaaagccuguccucaga

SEQ ID NO: 289012 - RNA, 22 nt, Human
aucaauucuuaggaaaauagcu

SEQ ID NO: 289013 - RNA, 22 nt, Human
ugacuuccagcaacuuccucca

SEQ ID NO: 289014 - RNA, 22 nt, Human
aaggccugaacaugaggagaug

SEQ ID NO: 289015 - RNA, 22 nt, Human
agaggccuuucuguugagugaa

SEQ ID NO: 289016 - RNA, 22 nt, Human
ucauguuucucuuacagcagcu

SEQ ID NO: 289017 - RNA, 22 nt, Human
caaauucaaauuucaucagugu

SEQ ID NO: 289018 - RNA, 22 nt, Human
caggcuugugucucagcugcag

SEQ ID NO: 289019 - RNA, 22 nt, Human
uaaaaaacauuacucuguccug

SEQ ID NO: 289020 - RNA, 22 nt, Human
cugccugccuuggccuccagga

SEQ ID NO: 289021 - RNA, 22 nt, Human
ucuccugggcuugguugaaguu

SEQ ID NO: 289022 - RNA, 22 nt, Human
gcuggcagggacagcugcgugu

SEQ ID NO: 289023 - RNA, 22 nt, Human
cccgagugucuacucacuccca

SEQ ID NO: 289024 - RNA, 19 nt, Human
ugucagugauacaugcuuu

SEQ ID NO: 289025 - RNA, 23 nt, Human
cacagguguuucaucuucucagu

SEQ ID NO: 289026 - RNA, 22 nt, Human
ugugcaggugcaggaagggggc

SEQ ID NO: 289027 - RNA, 22 nt, Human
acauuuuaauaugcuuagugug

SEQ ID NO: 289028 - RNA, 22 nt, Human
gaaacccaaacuaagacaguag

SEQ ID NO: 289029 - RNA, 22 nt, Human
acuggguguauuagugguguuu

SEQ ID NO: 289030 - RNA, 22 nt, Human
uugcuuuagggcaaauauuuca

SEQ ID NO: 289031 - RNA, 22 nt, Human
aacauuucagcaaauaagaaca

SEQ ID NO: 289032 - RNA, 22 nt, Human
agagccaggcucccauggggca

SEQ ID NO: 289033 - RNA, 22 nt, Human
ucucccucuuugucugcuuugg

SEQ ID NO: 289034 - RNA, 22 nt, Human
cggccgcagcagugucggccca

SEQ ID NO: 289035 - RNA, 22 nt, Human
ccuggcuccugcacagaucuuu

SEQ ID NO: 289036 - RNA, 22 nt, Human
cuggugcauguggccuugcucu

SEQ ID NO: 289037 - RNA, 22 nt, Human
acagguguaugaauauguucca

SEQ ID NO: 289038 - RNA, 23 nt, Human
uuuauccaacucuguaaucucuc

SEQ ID NO: 289039 - RNA, 22 nt, Human
ugcagguggcuccagggacugc

SEQ ID NO: 289040 - RNA, 22 nt, Human
gggagggagaggacaguucuau

SEQ ID NO: 289041 - RNA, 22 nt, Human
uccugcagcugaagcucaugug

SEQ ID NO: 289042 - RNA, 22 nt, Human
cccagcagccuugucccuucuc

SEQ ID NO: 289043 - RNA, 22 nt, Human
caggucccugcgccccggccuc

SEQ ID NO: 289044 - RNA, 22 nt, Human
ccagggaugccaagcuuuacca

SEQ ID NO: 289045 - RNA, 22 nt, Human
aauguuauuacacuugugaaau

SEQ ID NO: 289046 - RNA, 22 nt, Human
aacaggcagcagacugaaucug

SEQ ID NO: 289047 - RNA, 22 nt, Human
aaggccucaggugaggcugccc

SEQ ID NO: 289048 - RNA, 22 nt, Human
guccuggcccacuggcaggcug

SEQ ID NO: 289049 - RNA, 22 nt, Human
ugaggcuccagccaggccagca

SEQ ID NO: 289050 - RNA, 22 nt, Human
auagcaaauauuuuaaugagca

SEQ ID NO: 289051 - RNA, 22 nt, Human
cucuuccuacagucugcuaugc

SEQ ID NO: 289052 - RNA, 22 nt, Human
aagauuuucagcuaauggugca

SEQ ID NO: 289053 - RNA, 22 nt, Human
uucacauuccgcggcuauuuuc

SEQ ID NO: 289054 - RNA, 22 nt, Human
agguucuuggugagcauuuggu

SEQ ID NO: 289055 - RNA, 22 nt, Human
uauugcugcuauugucaguuca

SEQ ID NO: 289056 - RNA, 22 nt, Human
cucuuaguaaugccaugaagca

SEQ ID NO: 289057 - RNA, 22 nt, Human
augugguuuuggauuauucaug

SEQ ID NO: 289058 - RNA, 22 nt, Human
ccaggugucuguggccagcccu

SEQ ID NO: 289059 - RNA, 22 nt, Human
aggacaugugccuccagggcag

SEQ ID NO: 289060 - RNA, 22 nt, Human
ucagguagugguuaaguucugu

SEQ ID NO: 289061 - RNA, 22 nt, Human
ucaaauaccagcaauuucaugu

SEQ ID NO: 289062 - RNA, 22 nt, Human
gaugugucuggcuccccugcaa

SEQ ID NO: 289063 - RNA, 22 nt, Human
uugaggaggacagaaacauuua

SEQ ID NO: 289064 - RNA, 22 nt, Human
ugagggaauccucacaucaauc

SEQ ID NO: 289065 - RNA, 22 nt, Human
agucucucuugggugugguuug

SEQ ID NO: 289066 - RNA, 22 nt, Human
uacacaugugcacgcguguccu

SEQ ID NO: 289067 - RNA, 22 nt, Human
uuugacucaagccuuucuuuag

SEQ ID NO: 289068 - RNA, 22 nt, Human
aagaagaaguguuauuuuuaga

SEQ ID NO: 289069 - RNA, 22 nt, Human
aggccaagauuuuggaucagcu

SEQ ID NO: 289070 - RNA, 22 nt, Human
uauuguuucuggcuguggcagc

SEQ ID NO: 289071 - RNA, 22 nt, Human
gaggagggcuuuguugauguua

SEQ ID NO: 289072 - RNA, 22 nt, Human
agcuguggccagaugugagcgg

SEQ ID NO: 289073 - RNA, 22 nt, Human
aaagcagagguugcagugagcu

SEQ ID NO: 289074 - RNA, 22 nt, Human
aaagccuuuuaugaucaguuaa

SEQ ID NO: 289075 - RNA, 22 nt, Human
accuugucuuuuauagaacaag

SEQ ID NO: 289076 - RNA, 22 nt, Human
guuauacauauguguuaacaaa

SEQ ID NO: 289077 - RNA, 22 nt, Human
aguuagcagcuuauuagaaaca

SEQ ID NO: 289078 - RNA, 22 nt, Human
acccaggguagaaccucagagc

SEQ ID NO: 289079 - RNA, 22 nt, Human
ggcaggcauugcaacauguaca

SEQ ID NO: 289080 - RNA, 22 nt, Human
ggugcaugguggaggugacccu

SEQ ID NO: 289081 - RNA, 23 nt, Human
uucauucaaaaggaaaagucaug

SEQ ID NO: 289082 - RNA, 22 nt, Human
uuaacaaggugacugcauuaaa

SEQ ID NO: 289083 - RNA, 22 nt, Human
gauugcugaagaaagugaguga

SEQ ID NO: 289084 - RNA, 22 nt, Human
ccagugucuacuguggcauauc

SEQ ID NO: 289085 - RNA, 19 nt, Human
gaaggggaagguggguacc

SEQ ID NO: 289086 - RNA, 22 nt, Human
uucaaauacauucuuugccacu

SEQ ID NO: 289087 - RNA, 22 nt, Human
gcuguggcuugcagcuggggcu

SEQ ID NO: 289088 - RNA, 22 nt, Human
cauuuccacucugggagucaga

SEQ ID NO: 289089 - RNA, 22 nt, Human
ugggcaggauaauaucucaugu

SEQ ID NO: 289090 - RNA, 22 nt, Human
guuuauaaauucugcuuuuguu

SEQ ID NO: 289091 - RNA, 22 nt, Human
agggaugaucaggguagaggcu

SEQ ID NO: 289092 - RNA, 22 nt, Human
uuugaacugauaaucuucuguu

SEQ ID NO: 289093 - RNA, 22 nt, Human
caauaaagaagauuuuugcaau

SEQ ID NO: 289094 - RNA, 21 nt, Human
ucagagagucacagugaacug

SEQ ID NO: 289095 - RNA, 22 nt, Human
ucugcaaacuggcucuuacugc

SEQ ID NO: 289096 - RNA, 22 nt, Human
ugguccuggaagguccugaggg

SEQ ID NO: 289097 - RNA, 22 nt, Human
aggaauguguuucuaggcuguu

SEQ ID NO: 289098 - RNA, 22 nt, Human
ggucuggauaauuccaguaccu

SEQ ID NO: 289099 - RNA, 22 nt, Human
gccaggcaaauuaaggaaugca

SEQ ID NO: 289100 - RNA, 22 nt, Human
ccccagggacugguuucaugga

SEQ ID NO: 289101 - RNA, 22 nt, Human
ucucugggccucccuuuccaag

SEQ ID NO: 289102 - RNA, 22 nt, Human
gaaacugaauauaagaaaggua

SEQ ID NO: 289103 - RNA, 22 nt, Human
gugcaaaaguaaaugugguuuu

SEQ ID NO: 289104 - RNA, 22 nt, Human
uuucauuacguguuugacuugu

SEQ ID NO: 289105 - RNA, 22 nt, Human
gauaaauuaucagggguuuaaa

SEQ ID NO: 289106 - RNA, 23 nt, Human
acuuuauugaccccaggucaguu

SEQ ID NO: 289107 - RNA, 22 nt, Human
agcuuuaucccuugcccaucga

SEQ ID NO: 289108 - RNA, 22 nt, Human
ccuccuggaaaaauucccuggc

SEQ ID NO: 289109 - RNA, 22 nt, Human
uagacauuucugguuauugaca

SEQ ID NO: 289110 - RNA, 22 nt, Human
gaacuugguauuccuuuuaaca

SEQ ID NO: 289111 - RNA, 22 nt, Human
cagagcugcacauucuaugaug

SEQ ID NO: 289112 - RNA, 19 nt, Human
gucacauuugucucccagg

SEQ ID NO: 289113 - RNA, 19 nt, Human
aguuuauuauaggugauuc

SEQ ID NO: 289114 - RNA, 22 nt, Human
aagaaagauaagguuugcuugg

SEQ ID NO: 289115 - RNA, 22 nt, Human
ugucaaaaauaagagagauugu

SEQ ID NO: 289116 - RNA, 22 nt, Human
aaguuccugggccaaguccagg

SEQ ID NO: 289117 - RNA, 22 nt, Human
cuauuuucauucuuacauuguc

SEQ ID NO: 289118 - RNA, 22 nt, Human
gccaacaggccuugcucugcuc

SEQ ID NO: 289119 - RNA, 22 nt, Human
cugggcucagugucucacuccu

SEQ ID NO: 289120 - RNA, 22 nt, Human
ccauccaggcugugggugagcu

SEQ ID NO: 289121 - RNA, 22 nt, Human
uggcagaaagaaccaugugcaa

SEQ ID NO: 289122 - RNA, 23 nt, Human
cagaaagcccuuuccccacagua

SEQ ID NO: 289123 - RNA, 23 nt, Human
uuuguacauugaggaggcagaau

SEQ ID NO: 289124 - RNA, 22 nt, Human
caggcugcagcagcaguggccc

SEQ ID NO: 289125 - RNA, 21 nt, Human
uucaaaguuugccuaaagauu

SEQ ID NO: 289126 - RNA, 22 nt, Human
ucugggaacagccuggcugugu

SEQ ID NO: 289127 - RNA, 22 nt, Human
cacagacagugucccuuuguug

SEQ ID NO: 289128 - RNA, 21 nt, Human
uccugugaggaccugucagug

SEQ ID NO: 289129 - RNA, 22 nt, Human
ugagaugaauaacuccugcuaa

SEQ ID NO: 289130 - RNA, 22 nt, Human
acagucaaucagaacagcaugu

SEQ ID NO: 289131 - RNA, 22 nt, Human
uaucaucuuguugucaugcagc

SEQ ID NO: 289132 - RNA, 22 nt, Human
uuuuguguccuucacaucaugu

SEQ ID NO: 289133 - RNA, 17 nt, Human
gcuccuucuaacuucca

SEQ ID NO: 289134 - RNA, 22 nt, Human
uaggaaauauuugaacauagga

SEQ ID NO: 289135 - RNA, 22 nt, Human
uugcucauauuugcauguguuu

SEQ ID NO: 289136 - RNA, 22 nt, Human
aauuucaguugcuaauaaguuc

SEQ ID NO: 289137 - RNA, 22 nt, Human
uucuucugauugccuucugcaa

SEQ ID NO: 289138 - RNA, 22 nt, Human
aaauuagaccagggcuccugga

SEQ ID NO: 289139 - RNA, 22 nt, Human
agucaguugcaaacaucaggca

SEQ ID NO: 289140 - RNA, 22 nt, Human
guuaaagugaucuugucagguu

SEQ ID NO: 289141 - RNA, 22 nt, Human
gggccccuugcugcucugcugg

SEQ ID NO: 289142 - RNA, 22 nt, Human
gacuguggccuuggaccauggg

SEQ ID NO: 289143 - RNA, 22 nt, Human
acuguggccuuguggguucagg

SEQ ID NO: 289144 - RNA, 18 nt, Human
gguccugggccuggcuca

SEQ ID NO: 289145 - RNA, 22 nt, Human
ugcugggucagugagagcaggg

SEQ ID NO: 289146 - RNA, 22 nt, Human
uuuucauuguuacuaugagcua

SEQ ID NO: 289147 - RNA, 18 nt, Human
agcagguggcgucugcag

SEQ ID NO: 289148 - RNA, 22 nt, Human
gggccagcaguaucggaggcau

SEQ ID NO: 289149 - RNA, 22 nt, Human
cagcagccuacaaugcacagaa

SEQ ID NO: 289150 - RNA, 22 nt, Human
acacauaagaaacuacaaagag

SEQ ID NO: 289151 - RNA, 18 nt, Human
ccuguggcucagcccaca

SEQ ID NO: 289152 - RNA, 22 nt, Human
uguccucacacguagggaguaa

SEQ ID NO: 289153 - RNA, 22 nt, Human
cuuuccaaugcauuuccaaugu

SEQ ID NO: 289154 - RNA, 22 nt, Human
uggucaagggacagagcugaac

SEQ ID NO: 289155 - RNA, 22 nt, Human
gaaauguuuuacaaggcauacu

SEQ ID NO: 289156 - RNA, 22 nt, Human
uguguggauucaucucaaagag

SEQ ID NO: 289157 - RNA, 22 nt, Human
gugcccaguccugccuugacag

SEQ ID NO: 289158 - RNA, 23 nt, Human
auaagccuuuucuuucugcccca

SEQ ID NO: 289159 - RNA, 22 nt, Human
gcauucaggaaccggaagggua

SEQ ID NO: 289160 - RNA, 20 nt, Human
gggcuagguagccauuuggc

SEQ ID NO: 289161 - RNA, 22 nt, Human
ggcuuuugcuguguuuuccaga

SEQ ID NO: 289162 - RNA, 22 nt, Human
guuaggaacacuggagccuaaa

SEQ ID NO: 289163 - RNA, 22 nt, Human
cacaaugugguuugucaucuuu

SEQ ID NO: 289164 - RNA, 22 nt, Human
gacagacacuguguccucacuu

SEQ ID NO: 289165 - RNA, 22 nt, Human
aggcagguuucccggcugucaa

SEQ ID NO: 289166 - RNA, 22 nt, Human
ugcccuugggauuuagguaagg

SEQ ID NO: 289167 - RNA, 22 nt, Human
ucauggcuaaugcaguauauuc

SEQ ID NO: 289168 - RNA, 18 nt, Human
uccugccugugccccagg

SEQ ID NO: 289169 - RNA, 22 nt, Human
ucagcugcucaaauuuauguca

SEQ ID NO: 289170 - RNA, 22 nt, Human
aucuuguuaaaaugcagauucu

SEQ ID NO: 289171 - RNA, 22 nt, Human
agggcuccugaggcccuucugg

SEQ ID NO: 289172 - RNA, 22 nt, Human
aaggugguuugcagacagaaua

SEQ ID NO: 289173 - RNA, 22 nt, Human
cagcuuuuuagaaucuagggca

SEQ ID NO: 289174 - RNA, 22 nt, Human
guucuguacuccaagcucuucc

SEQ ID NO: 289175 - RNA, 20 nt, Human
uauucaacuuuaaaaacuua

SEQ ID NO: 289176 - RNA, 22 nt, Human
aagaauaaauuaagauacuuag

SEQ ID NO: 289177 - RNA, 22 nt, Human
aaaaccagguagcaaaggagac

SEQ ID NO: 289178 - RNA, 20 nt, Human
ccuuuauuauuuguaugaug

SEQ ID NO: 289179 - RNA, 22 nt, Human
cauagaaugcagcaggaaaguu

SEQ ID NO: 289180 - RNA, 21 nt, Human
aaucauacaaaacaugucagg

SEQ ID NO: 289181 - RNA, 22 nt, Human
aauacuauguagccaaaauaau

SEQ ID NO: 289182 - RNA, 22 nt, Human
guagccagaucugcugugucug

SEQ ID NO: 289183 - RNA, 22 nt, Human
ggauguagugcaaggagugaau

SEQ ID NO: 289184 - RNA, 20 nt, Human
agccaagaacaggcagaacc

SEQ ID NO: 289185 - RNA, 22 nt, Human
auacaugugugugcauacaugu

SEQ ID NO: 289186 - RNA, 22 nt, Human
ugaaagcagcaccaauaccauu

SEQ ID NO: 289187 - RNA, 22 nt, Human
ucccacacuacacgguuguugg

SEQ ID NO: 289188 - RNA, 22 nt, Human
aucugaaauagucuuaucugag

SEQ ID NO: 289189 - RNA, 22 nt, Human
aauguauuccucaugcaagagu

SEQ ID NO: 289190 - RNA, 22 nt, Human
caggaugggauguagugggccc

SEQ ID NO: 289191 - RNA, 22 nt, Human
gagggcaguagccucguacccu

SEQ ID NO: 289192 - RNA, 22 nt, Human
auauucuuccaaaacaucauuu

SEQ ID NO: 289193 - RNA, 22 nt, Human
cagcccuggcgcccccagaucu

SEQ ID NO: 289194 - RNA, 22 nt, Human
ucuguccuguuuccuccugaca

SEQ ID NO: 289195 - RNA, 22 nt, Human
gccugaaguuucaugccucuau

SEQ ID NO: 289196 - RNA, 22 nt, Human
uaaauuguuuucuagaaguugu

SEQ ID NO: 289197 - RNA, 22 nt, Human
gacugaggagguaagguuugaa

SEQ ID NO: 289198 - RNA, 22 nt, Human
gaugagguguguggccacuaga

SEQ ID NO: 289199 - RNA, 22 nt, Human
auucuuuacauuggcuucuucc

SEQ ID NO: 289200 - RNA, 22 nt, Human
gugaggcagaaguucccuuuua

SEQ ID NO: 289201 - RNA, 22 nt, Human
ccaggcucugcgcuggacaugg

SEQ ID NO: 289202 - RNA, 22 nt, Human
uaugccagggacuguuucacca

SEQ ID NO: 289203 - RNA, 22 nt, Human
agaaaauuagauuuuacugugu

SEQ ID NO: 289204 - RNA, 22 nt, Human
guccagaaggaggucaaguugg

SEQ ID NO: 289205 - RNA, 22 nt, Human
ucuuuccucugagcuccuguag

SEQ ID NO: 289206 - RNA, 22 nt, Human
uggaauguuuuccuaaaucaga

SEQ ID NO: 289207 - RNA, 22 nt, Human
uacuuuaucagcgucaaaggua

SEQ ID NO: 289208 - RNA, 22 nt, Human
ucuggcuucuccuagagcaaug

SEQ ID NO: 289209 - RNA, 22 nt, Human
gucaggaaaacccggguugacu

SEQ ID NO: 289210 - RNA, 23 nt, Human
uuccaggcagagcagggauuaga

SEQ ID NO: 289211 - RNA, 15 nt, Human
gcaggcagaucaccg

SEQ ID NO: 289212 - RNA, 22 nt, Human
aaaaaucacuuuuauaggcagc

SEQ ID NO: 289213 - RNA, 22 nt, Human
aagccuuuuccaccuaauagag

SEQ ID NO: 289214 - RNA, 19 nt, Human
uacauuccacacaaucucu

SEQ ID NO: 289215 - RNA, 22 nt, Human
gaggugagaagggggucagaug

SEQ ID NO: 289216 - RNA, 22 nt, Human
aggcaauccccugaggauacuu

SEQ ID NO: 289217 - RNA, 22 nt, Human
gggaccuggcgagggucacaca

SEQ ID NO: 289218 - RNA, 22 nt, Human
acuguucugccaacuuugguua

SEQ ID NO: 289219 - RNA, 22 nt, Human
cugucccaggauccugacucca

SEQ ID NO: 289220 - RNA, 22 nt, Human
cucuguuucucagccuauuucc

SEQ ID NO: 289221 - RNA, 22 nt, Human
acuguccucgaaguaccugugc

SEQ ID NO: 289222 - RNA, 22 nt, Human
cugugcugauucagcacaggcc

SEQ ID NO: 289223 - RNA, 22 nt, Human
uuccuucuuguaaugaucugcc

SEQ ID NO: 289224 - RNA, 22 nt, Human
uucugcuuauucaaaugaucuu

SEQ ID NO: 289225 - RNA, 22 nt, Human
uccuggguggcucugcccggcu

SEQ ID NO: 289226 - RNA, 22 nt, Human
auuuauuaccucggaguuucug

SEQ ID NO: 289227 - RNA, 22 nt, Human
gucaaaacaaaguuaagaauuc

SEQ ID NO: 289228 - RNA, 22 nt, Human
cagcaugaaacaauugagccca

SEQ ID NO: 289229 - RNA, 22 nt, Human
ucucagagugacaaugagaauu

SEQ ID NO: 289230 - RNA, 22 nt, Human
ugacaguuaagguauacauuca

SEQ ID NO: 289231 - RNA, 22 nt, Human
gaaaugaaacaggcuuuuaagg

SEQ ID NO: 289232 - RNA, 22 nt, Human
uucauucaucacaugcagcugg

SEQ ID NO: 289233 - RNA, 21 nt, Human
aggaagaucuggaggucggcg

SEQ ID NO: 289234 - RNA, 22 nt, Human
ucaagagauugaauaauaacug

SEQ ID NO: 289235 - RNA, 22 nt, Human
agaugcugauugaauagauuuc

SEQ ID NO: 289236 - RNA, 22 nt, Human
acacuuuacucuuacaccauug

SEQ ID NO: 289237 - RNA, 22 nt, Human
cuccuaggacgccgcugcuccu

SEQ ID NO: 289238 - RNA, 22 nt, Human
ccugaagagugaauguggcagu

SEQ ID NO: 289239 - RNA, 18 nt, Human
cacaauuuacagaugaca

SEQ ID NO: 289240 - RNA, 22 nt, Human
ucagggcauucaagaggccugg

SEQ ID NO: 289241 - RNA, 23 nt, Human
acauacauggagauaaagugaug

SEQ ID NO: 289242 - RNA, 19 nt, Human
uccaggcauccuucaggcu

SEQ ID NO: 289243 - RNA, 22 nt, Human
acagagagcugugauugaguua

SEQ ID NO: 289244 - RNA, 22 nt, Human
ugaaugauguauaauauugaga

SEQ ID NO: 289245 - RNA, 22 nt, Human
acaggacaggcugggcuagacu

SEQ ID NO: 289246 - RNA, 22 nt, Human
aguggcaaaagcaggcuuaggc

SEQ ID NO: 289247 - RNA, 22 nt, Human
auucuguuacuuggugaucuuc

SEQ ID NO: 289248 - RNA, 22 nt, Human
uuuguaaauagcaguacucaug

SEQ ID NO: 289249 - RNA, 22 nt, Human
acuguucaagcaaaugacauug

SEQ ID NO: 289250 - RNA, 22 nt, Human
ucugaggaccaucggggagcug

SEQ ID NO: 289251 - RNA, 22 nt, Human
cuuucucaaugccggaaggcac

SEQ ID NO: 289252 - RNA, 22 nt, Human
uuaaaugaggcugauguagauu

SEQ ID NO: 289253 - RNA, 22 nt, Human
agcugcaagucuguguggggag

SEQ ID NO: 289254 - RNA, 22 nt, Human
augacagacagaagggauuuuu

SEQ ID NO: 289255 - RNA, 22 nt, Human
uccuggcaguaauuugauguug

SEQ ID NO: 289256 - RNA, 22 nt, Human
uugucucugccaugcuugaggg

SEQ ID NO: 289257 - RNA, 22 nt, Human
acauguggaggaggcgagggua

SEQ ID NO: 289258 - RNA, 22 nt, Human
uuuauugacuucagugagucuu

SEQ ID NO: 289259 - RNA, 22 nt, Human
agguucaaaugcaagagaugcu

SEQ ID NO: 289260 - RNA, 22 nt, Human
auugagcuguuuuguaggauaa

SEQ ID NO: 289261 - RNA, 19 nt, Human
cuuccuggaggagagccuc

SEQ ID NO: 289262 - RNA, 22 nt, Human
ccuggcugcuuccucugccaug

SEQ ID NO: 289263 - RNA, 22 nt, Human
uccugcagccaagggucaucga

SEQ ID NO: 289264 - RNA, 17 nt, Human
ggcaguggaggaagaga

SEQ ID NO: 289265 - RNA, 22 nt, Human
aagccagauuucacucuuaauu

SEQ ID NO: 289266 - RNA, 22 nt, Human
agguauuauuagcaucucuauu

SEQ ID NO: 289267 - RNA, 22 nt, Human
uuucauguggcgaugucucugg

SEQ ID NO: 289268 - RNA, 22 nt, Human
cagagcugugauaaauagauau

SEQ ID NO: 289269 - RNA, 23 nt, Human
uggaauguuucuuguacugaaug

SEQ ID NO: 289270 - RNA, 20 nt, Human
cucucccagcacagcuuccu

SEQ ID NO: 289271 - RNA, 22 nt, Human
aacccgggaggcagagguugug

SEQ ID NO: 289272 - RNA, 22 nt, Human
aguuauuuacuccuuugucucu

SEQ ID NO: 289273 - RNA, 22 nt, Human
uuauucuucuucucuugccagg

SEQ ID NO: 289274 - RNA, 23 nt, Human
ugaaagcaaugggucuauaguau

SEQ ID NO: 289275 - RNA, 22 nt, Human
auguuuguguuucccauucagg

SEQ ID NO: 289276 - RNA, 22 nt, Human
acagaguccuagcugcaaagaa

SEQ ID NO: 289277 - RNA, 22 nt, Human
agcccaaggcuucccugcuggc

SEQ ID NO: 289278 - RNA, 22 nt, Human
gaggacagugugaucugccagc

SEQ ID NO: 289279 - RNA, 20 nt, Human
acaaaguauugaggacaagu

SEQ ID NO: 289280 - RNA, 22 nt, Human
ggaauguuuuccagaccuagau

SEQ ID NO: 289281 - RNA, 19 nt, Human
aaggaauggcuuuaaguag

SEQ ID NO: 289282 - RNA, 22 nt, Human
gaggcugggaaguccaagacca

SEQ ID NO: 289283 - RNA, 22 nt, Human
cuucuagauuuuuguaauuguu

SEQ ID NO: 289284 - RNA, 22 nt, Human
cucgggcaggagggcccucucc

SEQ ID NO: 289285 - RNA, 22 nt, Human
caugaaaaauuuacuguuaaca

SEQ ID NO: 289286 - RNA, 20 nt, Human
aggcagcuggccaggcaggu

SEQ ID NO: 289287 - RNA, 22 nt, Human
cuauugaggacauaaggacucu

SEQ ID NO: 289288 - RNA, 22 nt, Human
gacugccucaguuucccugcag

SEQ ID NO: 289289 - RNA, 22 nt, Human
gauguguccccagaggauugaa

SEQ ID NO: 289290 - RNA, 22 nt, Human
aaaucuguuguaauguuuuuua

SEQ ID NO: 289291 - RNA, 22 nt, Human
aagcacagcagagccuugcuug

SEQ ID NO: 289292 - RNA, 22 nt, Human
cuacauaaucuggauuugucug

SEQ ID NO: 289293 - RNA, 22 nt, Human
agcccagagccccggccauguu

SEQ ID NO: 289294 - RNA, 22 nt, Human
ccagguggacuugauuugaaua

SEQ ID NO: 289295 - RNA, 22 nt, Human
cagauggaaggcauagagguuu

SEQ ID NO: 289296 - RNA, 20 nt, Human
gauuacaaaaugaaaugcau

SEQ ID NO: 289297 - RNA, 22 nt, Human
uuauuuaaaagugguaagauuc

SEQ ID NO: 289298 - RNA, 22 nt, Human
ugugcccaucccucuggagugu

SEQ ID NO: 289299 - RNA, 22 nt, Human
agcugccauggccugaauuuac

SEQ ID NO: 289300 - RNA, 22 nt, Human
agcagguggacagaggaagaaa

SEQ ID NO: 289301 - RNA, 22 nt, Human
accaggcaaaaccacaggagca

SEQ ID NO: 289302 - RNA, 22 nt, Human
cuuguucaguccugacuuccug

SEQ ID NO: 289303 - RNA, 22 nt, Human
caagauuuguauugggccucug

SEQ ID NO: 289304 - RNA, 22 nt, Human
ucuggaggcaacuaaccuaguu

SEQ ID NO: 289305 - RNA, 22 nt, Human
ugucccugccugcccacucugu

SEQ ID NO: 289306 - RNA, 22 nt, Human
gacccauaggaaucuguugucc

SEQ ID NO: 289307 - RNA, 23 nt, Human
uucugaaaauagauaguggcucc

SEQ ID NO: 289308 - RNA, 22 nt, Human
uuguuucagcuguaugcuaugu

SEQ ID NO: 289309 - RNA, 22 nt, Human
agaaucaggaccuguggcuguc

SEQ ID NO: 289310 - RNA, 20 nt, Human
uuccuguauacaaagaguuc

SEQ ID NO: 289311 - RNA, 22 nt, Human
aguguggcaggaaugacuagaa

SEQ ID NO: 289312 - RNA, 22 nt, Human
uugguaaacuugacagagaauc

SEQ ID NO: 289313 - RNA, 22 nt, Human
uuuaauuuucugggcccagcag

SEQ ID NO: 289314 - RNA, 22 nt, Human
uuuuauacuuaagacagaguuu

SEQ ID NO: 289315 - RNA, 22 nt, Human
uucaugaaauucucguguaccu

SEQ ID NO: 289316 - RNA, 22 nt, Human
guuccuuccuaucccgagagcc

SEQ ID NO: 289317 - RNA, 22 nt, Human
gaaguacaguuuuaucuagcca

SEQ ID NO: 289318 - RNA, 19 nt, Human
acaugacaacaggggaggc

SEQ ID NO: 289319 - RNA, 22 nt, Human
aacuacaauauguauguaugua

SEQ ID NO: 289320 - RNA, 22 nt, Human
aagugaggccuaggcacugggu

SEQ ID NO: 289321 - RNA, 22 nt, Human
acuggcagaggauagcacuaau

SEQ ID NO: 289322 - RNA, 22 nt, Human
guccuuccccagccagcucugg

SEQ ID NO: 289323 - RNA, 22 nt, Human
agauuuuauagauaauuuccca

SEQ ID NO: 289324 - RNA, 22 nt, Human
uggcuaagcuggggaggccugg

SEQ ID NO: 289325 - RNA, 18 nt, Human
guguccuggcugcggcgc

SEQ ID NO: 289326 - RNA, 22 nt, Human
acagguggagugguuagcaggc

SEQ ID NO: 289327 - RNA, 22 nt, Human
uucuuuauaucugcuagugggu

SEQ ID NO: 289328 - RNA, 22 nt, Human
ucccagggacccagccugauac

SEQ ID NO: 289329 - RNA, 22 nt, Human
cugccugggccggccacccucu

SEQ ID NO: 289330 - RNA, 21 nt, Human
auuuuguacauagaauuuguc

SEQ ID NO: 289331 - RNA, 22 nt, Human
uggagggauacaaagaugaaaa

SEQ ID NO: 289332 - RNA, 22 nt, Human
agagagagggaaacugcuaaac

SEQ ID NO: 289333 - RNA, 20 nt, Human
aaaggaauauaugaaguaua

SEQ ID NO: 289334 - RNA, 22 nt, Human
aaggacucuccagcuagcaaau

SEQ ID NO: 289335 - RNA, 22 nt, Human
uuucauaaacaguagaagacua

SEQ ID NO: 289336 - RNA, 22 nt, Human
cuuagggagaaugccucugcag

SEQ ID NO: 289337 - RNA, 22 nt, Human
ugacaugugcucaucuuggcua

SEQ ID NO: 289338 - RNA, 22 nt, Human
caugaaggcugccagcaggcau

SEQ ID NO: 289339 - RNA, 22 nt, Human
aaaauuuugcccuauccuucau

SEQ ID NO: 289340 - RNA, 22 nt, Human
uccagaccuagggcaccccagu

SEQ ID NO: 289341 - RNA, 22 nt, Human
gcauccagucuuggcuccugga

SEQ ID NO: 289342 - RNA, 18 nt, Human
agagggaaucaguuggau

SEQ ID NO: 289343 - RNA, 22 nt, Human
gggcagguguugucaaucuaau

SEQ ID NO: 289344 - RNA, 22 nt, Human
aauguuuuguaugccucugagc

SEQ ID NO: 289345 - RNA, 22 nt, Human
uacagucaagcauaagaaguca

SEQ ID NO: 289346 - RNA, 21 nt, Human
gaguccuuccaauguccucag

SEQ ID NO: 289347 - RNA, 22 nt, Human
ugaauaaucuuggguauuaaua

SEQ ID NO: 289348 - RNA, 22 nt, Human
cuucuucaaccugaaaguuuca

SEQ ID NO: 289349 - RNA, 22 nt, Human
guccagaagcucaaguugaacu

SEQ ID NO: 289350 - RNA, 22 nt, Human
uucuuuauuaguuuagugagcu

SEQ ID NO: 289351 - RNA, 22 nt, Human
aaaauaacuucuacuauuugca

SEQ ID NO: 289352 - RNA, 22 nt, Human
aagugcuuaaaaggguggucua

SEQ ID NO: 289353 - RNA, 22 nt, Human
ccuggcucccggaacagggucu

SEQ ID NO: 289354 - RNA, 22 nt, Human
gcuguggcggcagcagcuggug

SEQ ID NO: 289355 - RNA, 22 nt, Human
gugcagagugucuguggacuga

SEQ ID NO: 289356 - RNA, 22 nt, Human
cguccucagaggccauccgaaa

SEQ ID NO: 289357 - RNA, 22 nt, Human
gcagcuuugaagacuuauuugc

SEQ ID NO: 289358 - RNA, 22 nt, Human
aaaguuuuauaugcugcagcga

SEQ ID NO: 289359 - RNA, 22 nt, Human
agcccaggugacucauacaccc

SEQ ID NO: 289360 - RNA, 22 nt, Human
cuacugaguccuucagcugcca

SEQ ID NO: 289361 - RNA, 22 nt, Human
ugaggcaaaguucaagcugaaa

SEQ ID NO: 289362 - RNA, 22 nt, Human
ugcagggcauaggguccaguuu

SEQ ID NO: 289363 - RNA, 22 nt, Human
uuucacauuuaggcgugaauug

SEQ ID NO: 289364 - RNA, 22 nt, Human
cugcccaggcugaaggaacauc

SEQ ID NO: 289365 - RNA, 22 nt, Human
gaaggcauucuauucuacauau

SEQ ID NO: 289366 - RNA, 22 nt, Human
accuguuucucucugaguuacu

SEQ ID NO: 289367 - RNA, 22 nt, Human
ugagcagagucgcuccagagug

SEQ ID NO: 289368 - RNA, 22 nt, Human
uggauaaaacguucugaaaaac

SEQ ID NO: 289369 - RNA, 17 nt, Human
ugguggcuggagucagg

SEQ ID NO: 289370 - RNA, 22 nt, Human
uagaaagaacuucauguaaaac

SEQ ID NO: 289371 - RNA, 22 nt, Human
gaauauuuuuaaagggacuaau

SEQ ID NO: 289372 - RNA, 22 nt, Human
agcagccacccagcugcucauu

SEQ ID NO: 289373 - RNA, 22 nt, Human
uuccaagagcuuuaauuguuga

SEQ ID NO: 289374 - RNA, 21 nt, Human
uuagaaagcucacuacaguua

SEQ ID NO: 289375 - RNA, 22 nt, Human
cuuucuuugcagugagccagag

SEQ ID NO: 289376 - RNA, 22 nt, Human
gagguggugguggaggcauagc

SEQ ID NO: 289377 - RNA, 22 nt, Human
uccugaagaacgaagucaugua

SEQ ID NO: 289378 - RNA, 23 nt, Human
agaggcaggaguggcuugcccgg

SEQ ID NO: 289379 - RNA, 22 nt, Human
gacagguggggaaacuaaggua

SEQ ID NO: 289380 - RNA, 18 nt, Human
gcuuucuguagaaaaggg

SEQ ID NO: 289381 - RNA, 22 nt, Human
gcuuuacaaguggugcagauua

SEQ ID NO: 289382 - RNA, 22 nt, Human
cuucaggaaaaucucuaaggau

SEQ ID NO: 289383 - RNA, 22 nt, Human
uggcuccuaaugcugcccagac

SEQ ID NO: 289384 - RNA, 22 nt, Human
aaagguuuugguaaggcuuuaa

SEQ ID NO: 289385 - RNA, 22 nt, Human
ggaugucuuuacuuugggauuu

SEQ ID NO: 289386 - RNA, 20 nt, Human
cccaggcagagcuagcggca

SEQ ID NO: 289387 - RNA, 22 nt, Human
ggcuuaggugucucucugcacc

SEQ ID NO: 289388 - RNA, 22 nt, Human
ucuguagucugugccauagcug

SEQ ID NO: 289389 - RNA, 22 nt, Human
aggcucaggucucaggucuggc

SEQ ID NO: 289390 - RNA, 22 nt, Human
ccuccuggggugaaggauggga

SEQ ID NO: 289391 - RNA, 22 nt, Human
guaaauauaaaugcuagcugcc

SEQ ID NO: 289392 - RNA, 22 nt, Human
uggucagguaccucuggcuguc

SEQ ID NO: 289393 - RNA, 22 nt, Human
augcauaauguauguauugacu

SEQ ID NO: 289394 - RNA, 22 nt, Human
ccuggcagacagcacugaagcu

SEQ ID NO: 289395 - RNA, 22 nt, Human
uuggaauucaaguuguagcuua

SEQ ID NO: 289396 - RNA, 22 nt, Human
cuuaggaacgcucugccuagug

SEQ ID NO: 289397 - RNA, 22 nt, Human
cucuuccuuaagacuauaaaga

SEQ ID NO: 289398 - RNA, 22 nt, Human
uuaguucucaugaauuuuaagu

SEQ ID NO: 289399 - RNA, 20 nt, Human
cuggguggcaagcaaggggg

SEQ ID NO: 289400 - RNA, 22 nt, Human
acugucuccucaucaugccugg

SEQ ID NO: 289401 - RNA, 22 nt, Human
cuuuaauuaggaaguauaauga

SEQ ID NO: 289402 - RNA, 22 nt, Human
agaucauaugcaguaaugaacu

SEQ ID NO: 289403 - RNA, 22 nt, Human
cagagggacaguguaaugcaua

SEQ ID NO: 289404 - RNA, 16 nt, Human
gagggcagaggcggaa

SEQ ID NO: 289405 - RNA, 22 nt, Human
uuacaaagugcugcaccauuuu

SEQ ID NO: 289406 - RNA, 22 nt, Human
gccagauguagauagcaaggua

SEQ ID NO: 289407 - RNA, 22 nt, Human
uguuucuuauccaaguggucug

SEQ ID NO: 289408 - RNA, 22 nt, Human
caagauuuggcauucugaggag

SEQ ID NO: 289409 - RNA, 23 nt, Human
ggcucugaggauggagcuggugg

SEQ ID NO: 289410 - RNA, 22 nt, Human
ugcaggugucugggggcaacag

SEQ ID NO: 289411 - RNA, 22 nt, Human
uauagacaagcguaacaagaag

SEQ ID NO: 289412 - RNA, 22 nt, Human
uuguaaagcugauuagaaagcc

SEQ ID NO: 289413 - RNA, 22 nt, Human
auucucaguucacuaguuucuu

SEQ ID NO: 289414 - RNA, 22 nt, Human
agaaagcuuaugaaugggcaag

SEQ ID NO: 289415 - RNA, 22 nt, Human
cugaugccccuggaccugugac

SEQ ID NO: 289416 - RNA, 22 nt, Human
gacuuuauuuuaacggagauuc

SEQ ID NO: 289417 - RNA, 22 nt, Human
gccugcaguucugugcuaggca

SEQ ID NO: 289418 - RNA, 22 nt, Human
uccuggccuuagcgaggcgguc

SEQ ID NO: 289419 - RNA, 22 nt, Human
agcagcuguuuguugaauuggu

SEQ ID NO: 289420 - RNA, 22 nt, Human
gcuguucaagacuaggaaauuu

SEQ ID NO: 289421 - RNA, 21 nt, Human
auaauguacaaaaacugucuu

SEQ ID NO: 289422 - RNA, 22 nt, Human
gaauucuuuucuuucugaaagu

SEQ ID NO: 289423 - RNA, 22 nt, Human
ucugcgcccugucgccugcucc

SEQ ID NO: 289424 - RNA, 22 nt, Human
aagguugcuguuuugcuucaaa

SEQ ID NO: 289425 - RNA, 22 nt, Human
uuauacuaaaacgcauugaauu

SEQ ID NO: 289426 - RNA, 23 nt, Human
uucucuuuagauuuacauuacuc

SEQ ID NO: 289427 - RNA, 22 nt, Human
caggcauaaguaauguuuuaug

SEQ ID NO: 289428 - RNA, 21 nt, Human
agguacaggucuugugagucu

SEQ ID NO: 289429 - RNA, 22 nt, Human
ugcuuuauucgacaucugguag

SEQ ID NO: 289430 - RNA, 22 nt, Human
uuacaucagcaagaguguaugu

SEQ ID NO: 289431 - RNA, 22 nt, Human
ucugacuuccuuuucugaucca

SEQ ID NO: 289432 - RNA, 22 nt, Human
uuuaaagugcugcuccuauccu

SEQ ID NO: 289433 - RNA, 22 nt, Human
auguucuacagauggaaagggg

SEQ ID NO: 289434 - RNA, 22 nt, Human
ggagaggggaacuuguugcuug

SEQ ID NO: 289435 - RNA, 22 nt, Human
gccuguuuacuuugccgcagga

SEQ ID NO: 289436 - RNA, 22 nt, Human
uuguuuuuaaacaugugacuga

SEQ ID NO: 289437 - RNA, 22 nt, Human
accaugaugggaagcucagggc

SEQ ID NO: 289438 - RNA, 22 nt, Human
ucaguaaaugaaugaauauaug

SEQ ID NO: 289439 - RNA, 22 nt, Human
gaccugccugagcugccucugc

SEQ ID NO: 289440 - RNA, 22 nt, Human
agcugcaauacccuucuuccuu

SEQ ID NO: 289441 - RNA, 22 nt, Human
auugguggugaggacaugccag

SEQ ID NO: 289442 - RNA, 22 nt, Human
uuuuauugucuguauugccuau

SEQ ID NO: 289443 - RNA, 22 nt, Human
gagccucguggcggccacugcg

SEQ ID NO: 289444 - RNA, 22 nt, Human
ucugaagaacugaguaaacaug

SEQ ID NO: 289445 - RNA, 22 nt, Human
aagggcuccauccuuauaaaug

SEQ ID NO: 289446 - RNA, 21 nt, Human
ucagcuuugcaacugcacauc

SEQ ID NO: 289447 - RNA, 16 nt, Human
gucuuuauucacuuag

SEQ ID NO: 289448 - RNA, 22 nt, Human
ggcaggugguaaggauuucaua

SEQ ID NO: 289449 - RNA, 22 nt, Human
agugcagggggaaagggugucu

SEQ ID NO: 289450 - RNA, 22 nt, Human
auucucagcuuucaaauagaca

SEQ ID NO: 289451 - RNA, 22 nt, Human
cucagauguguuggauggaaaa

SEQ ID NO: 289452 - RNA, 22 nt, Human
ccaaggacguacaggagauaau

SEQ ID NO: 289453 - RNA, 22 nt, Human
agcuuucguuccuuagacacau

SEQ ID NO: 289454 - RNA, 23 nt, Human
acagacauuccauaauguacacc

SEQ ID NO: 289455 - RNA, 22 nt, Human
uccaggcauaagccuugagugu

SEQ ID NO: 289456 - RNA, 22 nt, Human
cagguccuuguuuguaaagcag

SEQ ID NO: 289457 - RNA, 22 nt, Human
gggcaggucugggucagccuga

SEQ ID NO: 289458 - RNA, 20 nt, Human
acagaugaggaaaaugaagu

SEQ ID NO: 289459 - RNA, 22 nt, Human
acucuacuguaguaugggcacu

SEQ ID NO: 289460 - RNA, 22 nt, Human
cagacaggguuuuggucuuugg

SEQ ID NO: 289461 - RNA, 22 nt, Human
acugaaaugaaaucuaucaucu

SEQ ID NO: 289462 - RNA, 22 nt, Human
uaaaaugccagaccaguucacg

SEQ ID NO: 289463 - RNA, 22 nt, Human
cagcuauucucugaaaugaaua

SEQ ID NO: 289464 - RNA, 22 nt, Human
caauuucuuguuaauucucagg

SEQ ID NO: 289465 - RNA, 22 nt, Human
cacagguguaugaauaugucca

SEQ ID NO: 289466 - RNA, 22 nt, Human
cauuuguuuagaagucuuuaua

SEQ ID NO: 289467 - RNA, 22 nt, Human
ucuggcagcgaagcguguacuu

SEQ ID NO: 289468 - RNA, 22 nt, Human
aagguggugaucaucuugaagg

SEQ ID NO: 289469 - RNA, 22 nt, Human
gcaccaggcagcugagcaggcc

SEQ ID NO: 289470 - RNA, 22 nt, Human
ugcugaggcagaugucugugac

SEQ ID NO: 289471 - RNA, 22 nt, Human
auauauuuacucuccuguugca

SEQ ID NO: 289472 - RNA, 22 nt, Human
uaugaagaaaccuauccucuag

SEQ ID NO: 289473 - RNA, 22 nt, Human
auaguuuacaaaaaugaugcau

SEQ ID NO: 289474 - RNA, 22 nt, Human
agccucugcuggcccuggcacu

SEQ ID NO: 289475 - RNA, 20 nt, Human
aacuagaaagcacccaugga

SEQ ID NO: 289476 - RNA, 22 nt, Human
agaacaaaauuagaggagugca

SEQ ID NO: 289477 - RNA, 22 nt, Human
agggcuccaaggaaguguagcu

SEQ ID NO: 289478 - RNA, 21 nt, Human
auucagaguaauucaucuuua

SEQ ID NO: 289479 - RNA, 22 nt, Human
gcagggcagaaggugcugagga

SEQ ID NO: 289480 - RNA, 22 nt, Human
ccagcagggcagugcccuggac

SEQ ID NO: 289481 - RNA, 22 nt, Human
cuccagugagugagcaggcgac

SEQ ID NO: 289482 - RNA, 22 nt, Human
ucuggcagagugauaggauaag

SEQ ID NO: 289483 - RNA, 22 nt, Human
ccagguguggccacauggcugg

SEQ ID NO: 289484 - RNA, 22 nt, Human
ucugucaucuguaacaggaggg

SEQ ID NO: 289485 - RNA, 22 nt, Human
ggagggaaugucuagcauucuu

SEQ ID NO: 289486 - RNA, 20 nt, Human
auguccucagccacugcccu

SEQ ID NO: 289487 - RNA, 22 nt, Human
cagguugguauucaucuccaca

SEQ ID NO: 289488 - RNA, 23 nt, Human
uauacacauguggcaguauagug

SEQ ID NO: 289489 - RNA, 22 nt, Human
uuccugugcuuaauucucacug

SEQ ID NO: 289490 - RNA, 22 nt, Human
uguccucacaggaaugaacuuu

SEQ ID NO: 289491 - RNA, 22 nt, Human
cccaguggugcuggcaucugug

SEQ ID NO: 289492 - RNA, 22 nt, Human
uguguccucuuaccucugaccc

SEQ ID NO: 289493 - RNA, 22 nt, Human
ccucacccacuacacucaaggg

SEQ ID NO: 289494 - RNA, 22 nt, Human
ccuggguccuggcagccuccug

SEQ ID NO: 289495 - RNA, 22 nt, Human
cuguucuuuaguuccacugcaa

SEQ ID NO: 289496 - RNA, 22 nt, Human
uggacauguccggccagacaau

SEQ ID NO: 289497 - RNA, 22 nt, Human
auuuacauuuauuugagaaggu

SEQ ID NO: 289498 - RNA, 22 nt, Human
ucaggaaauggcuucaugguuu

SEQ ID NO: 289499 - RNA, 22 nt, Human
aaacaugagcacuugcuucaua

SEQ ID NO: 289500 - RNA, 22 nt, Human
gcacugguuacccugaguggcu

SEQ ID NO: 289501 - RNA, 22 nt, Human
aggcuguggugcugaaggaggg

SEQ ID NO: 289502 - RNA, 20 nt, Human
cuuaaacacagagauagauu

SEQ ID NO: 289503 - RNA, 22 nt, Human
cuagaaagauacuuaaaucaag

SEQ ID NO: 289504 - RNA, 22 nt, Human
aaagagaaaaugaucuguacau

SEQ ID NO: 289505 - RNA, 22 nt, Human
cuuggcaguuucggaaggauga

SEQ ID NO: 289506 - RNA, 22 nt, Human
ucaggcuuuuucucaaccucuu

SEQ ID NO: 289507 - RNA, 22 nt, Human
ucagacagucaucagagcuugu

SEQ ID NO: 289508 - RNA, 22 nt, Human
guguguccuguuuuaaaauagu

SEQ ID NO: 289509 - RNA, 22 nt, Human
aaagugcugugggcuguaagug

SEQ ID NO: 289510 - RNA, 22 nt, Human
ucuguucaucaucuggacacau

SEQ ID NO: 289511 - RNA, 22 nt, Human
cuuggcuguugggcauugagaa

SEQ ID NO: 289512 - RNA, 22 nt, Human
auaaauuaggaucugggguucc

SEQ ID NO: 289513 - RNA, 22 nt, Human
uuuaucagaaguuagagaaaga

SEQ ID NO: 289514 - RNA, 22 nt, Human
uuccuccacgugacaggagcca

SEQ ID NO: 289515 - RNA, 22 nt, Human
uuccugguuuauggaaagcaug

SEQ ID NO: 289516 - RNA, 22 nt, Human
ugcuggcacguggaccaggaga

SEQ ID NO: 289517 - RNA, 22 nt, Human
gaacuuggaacuggggcuacug

SEQ ID NO: 289518 - RNA, 22 nt, Human
aauguccuaggcaugauuuugu

SEQ ID NO: 289519 - RNA, 22 nt, Human
aacuucauggguucaaagcugg

SEQ ID NO: 289520 - RNA, 22 nt, Human
uuauugcuuuggaaaacacuca

SEQ ID NO: 289521 - RNA, 22 nt, Human
agcucagcuuccucuccaugcu

SEQ ID NO: 289522 - RNA, 22 nt, Human
ucagguguucuccacucaguuu

SEQ ID NO: 289523 - RNA, 22 nt, Human
ucuuuaaaguuggagcuugcaa

SEQ ID NO: 289524 - RNA, 22 nt, Human
ccacagagcauuagauuucaga

SEQ ID NO: 289525 - RNA, 22 nt, Human
gcaggggaguggcaggcccgga

SEQ ID NO: 289526 - RNA, 22 nt, Human
gucaggcauuuaggaugaguuc

SEQ ID NO: 289527 - RNA, 22 nt, Human
agacagugcaagaagagcaggc

SEQ ID NO: 289528 - RNA, 22 nt, Human
cacuguauuauuaggaaugaca

SEQ ID NO: 289529 - RNA, 22 nt, Human
caucaggaggagaugaagaaaa

SEQ ID NO: 289530 - RNA, 21 nt, Human
aauuagggugccucuuauaau

SEQ ID NO: 289531 - RNA, 22 nt, Human
gaggagcuguucccucaccucu

SEQ ID NO: 289532 - RNA, 22 nt, Human
ccagacaggaacacacaucucc

SEQ ID NO: 289533 - RNA, 22 nt, Human
uccuggcagagagcaugaggcc

SEQ ID NO: 289534 - RNA, 22 nt, Human
caggacauugauccauuggcac

SEQ ID NO: 289535 - RNA, 22 nt, Human
ucugccuguugcuagaauguca

SEQ ID NO: 289536 - RNA, 22 nt, Human
gaaacagcacguuuggagagau

SEQ ID NO: 289537 - RNA, 22 nt, Human
caaaagauacuugcaucuaacu

SEQ ID NO: 289538 - RNA, 22 nt, Human
gucccauaaguagugcaacuug

SEQ ID NO: 289539 - RNA, 17 nt, Human
auuuacauugucaccga

SEQ ID NO: 289540 - RNA, 20 nt, Human
agacaaaaugacuucaugca

SEQ ID NO: 289541 - RNA, 22 nt, Human
gccccaccuugagagcagaaac

SEQ ID NO: 289542 - RNA, 22 nt, Human
aggacccagaaggugcagcaga

SEQ ID NO: 289543 - RNA, 19 nt, Human
aguguccuagucauuugcc

SEQ ID NO: 289544 - RNA, 22 nt, Human
aacauuaauuacagucaaacau

SEQ ID NO: 289545 - RNA, 19 nt, Human
cuggaauguggcuggugca

SEQ ID NO: 289546 - RNA, 22 nt, Human
ugugauuucacuggugacaugu

SEQ ID NO: 289547 - RNA, 22 nt, Human
ccaggccuggaccaugccaggg

SEQ ID NO: 289548 - RNA, 22 nt, Human
ccugugacccuuccagucuacu

SEQ ID NO: 289549 - RNA, 22 nt, Human
gagucaggcaugaagguaauua

SEQ ID NO: 289550 - RNA, 22 nt, Human
cuggcacaacuccaccucagcg

SEQ ID NO: 289551 - RNA, 22 nt, Human
cuugcuuuugcugaugauuaag

SEQ ID NO: 289552 - RNA, 22 nt, Human
aaaguucauugaugacugaggu

SEQ ID NO: 289553 - RNA, 22 nt, Human
ggagcugaugacgucaccaugg

SEQ ID NO: 289554 - RNA, 22 nt, Human
cuucccagcaccucagucuggc

SEQ ID NO: 289555 - RNA, 22 nt, Human
augaggcagcccuucccuucuc

SEQ ID NO: 289556 - RNA, 22 nt, Human
cugugaccuuagcaagggaaau

SEQ ID NO: 289557 - RNA, 22 nt, Human
agauauuaggaggauucauaau

SEQ ID NO: 289558 - RNA, 23 nt, Human
uggcucuguggaucccucaggag

SEQ ID NO: 289559 - RNA, 22 nt, Human
cuccuggugacucccagauaaa

SEQ ID NO: 289560 - RNA, 22 nt, Human
uaguucaggaagagaaacaaca

SEQ ID NO: 289561 - RNA, 20 nt, Human
aagggcagagggaacagacu

SEQ ID NO: 289562 - RNA, 22 nt, Human
uccuggagugucuuccccaagg

SEQ ID NO: 289563 - RNA, 22 nt, Human
caaagcugacgaggucagcauc

SEQ ID NO: 289564 - RNA, 22 nt, Human
uagaaauaaaucugcagcuggg

SEQ ID NO: 289565 - RNA, 22 nt, Human
cagccagaucagggcagggguu

SEQ ID NO: 289566 - RNA, 22 nt, Human
agcugcaaagaugauuuguugu

SEQ ID NO: 289567 - RNA, 22 nt, Human
ccuccuggguucaagcgauucu

SEQ ID NO: 289568 - RNA, 22 nt, Human
acuuuuaaaugaguuucaguug

SEQ ID NO: 289569 - RNA, 22 nt, Human
aggccugccuggagccuggcug

SEQ ID NO: 289570 - RNA, 22 nt, Human
uccgggcaacugaagggagguu

SEQ ID NO: 289571 - RNA, 22 nt, Human
aggugagguuugggagguguca

SEQ ID NO: 289572 - RNA, 20 nt, Human
ucucgcacucggagcagccg

SEQ ID NO: 289573 - RNA, 22 nt, Human
ccagagaguaucauggagagua

SEQ ID NO: 289574 - RNA, 22 nt, Human
uuucaguuugaaggaaaggcca

SEQ ID NO: 289575 - RNA, 22 nt, Human
ucaaaggcauugccaauaagua

SEQ ID NO: 289576 - RNA, 22 nt, Human
gaaguuuuagucaaaauguaga

SEQ ID NO: 289577 - RNA, 22 nt, Human
acagaggccgccucucucacgg

SEQ ID NO: 289578 - RNA, 22 nt, Human
uuccuggcauuaugggaggcug

SEQ ID NO: 289579 - RNA, 22 nt, Human
uucagcaagaccaccauguacc

SEQ ID NO: 289580 - RNA, 22 nt, Human
gcugaaaugccuuguaaauauu

SEQ ID NO: 289581 - RNA, 22 nt, Human
ggcagguggccaagugucuaag

SEQ ID NO: 289582 - RNA, 22 nt, Human
ucuggguggcuucagaggccac

SEQ ID NO: 289583 - RNA, 22 nt, Human
acucugugaagaugcaggcuug

SEQ ID NO: 289584 - RNA, 22 nt, Human
auacaaauuuauagaugcauuu

SEQ ID NO: 289585 - RNA, 22 nt, Human
auguccucuucugccucaggcc

SEQ ID NO: 289586 - RNA, 22 nt, Human
ucuggcaggguguguauuuaca

SEQ ID NO: 289587 - RNA, 22 nt, Human
aguugcugauucugucugugau

SEQ ID NO: 289588 - RNA, 22 nt, Human
aaaguucucuaugguguaaaaa

SEQ ID NO: 289589 - RNA, 22 nt, Human
aauucuucaagugcuuuggaga

SEQ ID NO: 289590 - RNA, 22 nt, Human
agaguugcuauagaaggaugga

SEQ ID NO: 289591 - RNA, 22 nt, Human
agaggccucccucccagcuggu

SEQ ID NO: 289592 - RNA, 22 nt, Human
auaguguuacccuucuuaaagu

SEQ ID NO: 289593 - RNA, 22 nt, Human
ccaggccugcaucugcugcgca

SEQ ID NO: 289594 - RNA, 22 nt, Human
uaaaacuagugguugggacuaa

SEQ ID NO: 289595 - RNA, 22 nt, Human
uccccagcauugagggucucuc

SEQ ID NO: 289596 - RNA, 22 nt, Human
gagagucuaggaaccucauaua

SEQ ID NO: 289597 - RNA, 22 nt, Human
agaagccucauccucucuagug

SEQ ID NO: 289598 - RNA, 22 nt, Human
uuggaacacagcagcugauuuu

SEQ ID NO: 289599 - RNA, 22 nt, Human
agaugaguagguagcauuagua

SEQ ID NO: 289600 - RNA, 22 nt, Human
ccugcagguugcagaggcggaa

SEQ ID NO: 289601 - RNA, 22 nt, Human
auauuaggcaaggagauuauuu

SEQ ID NO: 289602 - RNA, 22 nt, Human
ugugcuugucguggagccaggc

SEQ ID NO: 289603 - RNA, 22 nt, Human
aggaggcugggcacaguggccu

SEQ ID NO: 289604 - RNA, 22 nt, Human
accucaaggaaaaucuagacag

SEQ ID NO: 289605 - RNA, 22 nt, Human
agagcccagguccuggagaggg

SEQ ID NO: 289606 - RNA, 22 nt, Human
uauugguaugguaagaauugaa

SEQ ID NO: 289607 - RNA, 22 nt, Human
gccaggcaauguguuagaagcg

SEQ ID NO: 289608 - RNA, 22 nt, Human
uucagagauggaaggcagaaug

SEQ ID NO: 289609 - RNA, 22 nt, Human
aggcuuggaaguggcagaacug

SEQ ID NO: 289610 - RNA, 22 nt, Human
uuucaguuaaguggcuaguccc

SEQ ID NO: 289611 - RNA, 22 nt, Human
uuccuccagccuggagcacuuc

SEQ ID NO: 289612 - RNA, 22 nt, Human
caaagagcuguucagugucgcu

SEQ ID NO: 289613 - RNA, 19 nt, Human
uccaccccagccagcucug

SEQ ID NO: 289614 - RNA, 22 nt, Human
acaguuuagagcaugaugacca

SEQ ID NO: 289615 - RNA, 22 nt, Human
ucauuguauucagaacugaaga

SEQ ID NO: 289616 - RNA, 22 nt, Human
uuuucuuccuggauuuuggcau

SEQ ID NO: 289617 - RNA, 22 nt, Human
auuauguauuugguauaguuug

SEQ ID NO: 289618 - RNA, 22 nt, Human
aaagugcuuucccacauuuguu

SEQ ID NO: 289619 - RNA, 22 nt, Human
ucagagucuaaauagaagaaua

SEQ ID NO: 289620 - RNA, 22 nt, Human
gcagguggugggggagccguuc

SEQ ID NO: 289621 - RNA, 22 nt, Human
ugaaagcagauagcucuguugu

SEQ ID NO: 289622 - RNA, 22 nt, Human
gggaauguaaucauggaaugcu

SEQ ID NO: 289623 - RNA, 22 nt, Human
gucuggcuuugcucagaugcug

SEQ ID NO: 289624 - RNA, 22 nt, Human
ccucucagcgauuccucuugga

SEQ ID NO: 289625 - RNA, 22 nt, Human
uuugauaauuaaaaauuguagu

SEQ ID NO: 289626 - RNA, 22 nt, Human
cagaaucucgacuucuggcccc

SEQ ID NO: 289627 - RNA, 22 nt, Human
aauggcuggguuucauuuugua

SEQ ID NO: 289628 - RNA, 20 nt, Human
ucuaaaguacaguuugugug

SEQ ID NO: 289629 - RNA, 22 nt, Human
uuccuucuauucagcuccaaga

SEQ ID NO: 289630 - RNA, 22 nt, Human
aaacacaagauggccucuucug

SEQ ID NO: 289631 - RNA, 22 nt, Human
auuuucaucauggguuuaacau

SEQ ID NO: 289632 - RNA, 22 nt, Human
cuguguccuuuuaguugcugug

SEQ ID NO: 289633 - RNA, 22 nt, Human
uuugacucuagucauagaagug

SEQ ID NO: 289634 - RNA, 22 nt, Human
ccauggcuccuugcccuguagc

SEQ ID NO: 289635 - RNA, 18 nt, Human
uguaaacacuuucauucu

SEQ ID NO: 289636 - RNA, 22 nt, Human
uugcuuuaucuaagcauggcca

SEQ ID NO: 289637 - RNA, 19 nt, Human
uuugauagggcauaauaua

SEQ ID NO: 289638 - RNA, 22 nt, Human
ugaaugaugcaguauaaugaua

SEQ ID NO: 289639 - RNA, 22 nt, Human
uaaguguugguaauuacaauga

SEQ ID NO: 289640 - RNA, 22 nt, Human
uguguccugcaggugcugccug

SEQ ID NO: 289641 - RNA, 21 nt, Human
guuauuuuaagugagcuuugc

SEQ ID NO: 289642 - RNA, 20 nt, Human
ucuuacaaucguuacaucca

SEQ ID NO: 289643 - RNA, 22 nt, Human
gcaaagcaaucaggaguagcau

SEQ ID NO: 289644 - RNA, 22 nt, Human
gccugggaaaugguggggucag

SEQ ID NO: 289645 - RNA, 22 nt, Human
cuguuauuucugccaggugagu

SEQ ID NO: 289646 - RNA, 22 nt, Human
gcuucuuuccuugggcuggaac

SEQ ID NO: 289647 - RNA, 22 nt, Human
uugggaucuacauagcuaugua

SEQ ID NO: 289648 - RNA, 22 nt, Human
gcuguggcugaagaugcaggga

SEQ ID NO: 289649 - RNA, 22 nt, Human
caugcaggccuauggagcagug

SEQ ID NO: 289650 - RNA, 22 nt, Human
cagggacugagauccagacugu

SEQ ID NO: 289651 - RNA, 22 nt, Human
gauugcugggucccacucccag

SEQ ID NO: 289652 - RNA, 20 nt, Human
ccacaggaguccagucgacc

SEQ ID NO: 289653 - RNA, 22 nt, Human
gacccugguguccagguccugc

SEQ ID NO: 289654 - RNA, 22 nt, Human
ccuggcacaucuaacucacucu

SEQ ID NO: 289655 - RNA, 22 nt, Human
auauaacauacauacagaaaag

SEQ ID NO: 289656 - RNA, 22 nt, Human
aagggcucugcugucucucccc

SEQ ID NO: 289657 - RNA, 22 nt, Human
cagauuuaccuaacuccaaguu

SEQ ID NO: 289658 - RNA, 23 nt, Human
uccugugaagccauguuuguugu

SEQ ID NO: 289659 - RNA, 22 nt, Human
caagauuugggggcacggaauc

SEQ ID NO: 289660 - RNA, 22 nt, Human
caucaguggauauagauuagcg

SEQ ID NO: 289661 - RNA, 22 nt, Human
cuuaauuacccaaugugguagg

SEQ ID NO: 289662 - RNA, 22 nt, Human
uccaguaugacugauguccuuc

SEQ ID NO: 289663 - RNA, 22 nt, Human
ucuggagggcccacauccacaa

SEQ ID NO: 289664 - RNA, 22 nt, Human
ugcuguaauacuuaagguuaag

SEQ ID NO: 289665 - RNA, 22 nt, Human
ugcucagcagaucucaggagau

SEQ ID NO: 289666 - RNA, 22 nt, Human
caguuaaaugaugugcccuaga

SEQ ID NO: 289667 - RNA, 22 nt, Human
uuuuuuauaucaacugaagucu

SEQ ID NO: 289668 - RNA, 22 nt, Human
ccuggcacaugcaguacucaag

SEQ ID NO: 289669 - RNA, 16 nt, Human
ccagguggggcuguga

SEQ ID NO: 289670 - RNA, 22 nt, Human
auuugggaguugcuagugaguu

SEQ ID NO: 289671 - RNA, 22 nt, Human
cuggcuggguuccaggauucca

SEQ ID NO: 289672 - RNA, 22 nt, Human
cuucauuggcuuccauagaugc

SEQ ID NO: 289673 - RNA, 22 nt, Human
cauuugcagagggugacacucu

SEQ ID NO: 289674 - RNA, 20 nt, Human
uuuuccagaaaguaucauug

SEQ ID NO: 289675 - RNA, 22 nt, Human
guccaggucuggacccugagcc

SEQ ID NO: 289676 - RNA, 22 nt, Human
aaggcuuuuguuccuauuuagu

SEQ ID NO: 289677 - RNA, 22 nt, Human
agcauccugcuugcugucugug

SEQ ID NO: 289678 - RNA, 22 nt, Human
uauuuuacaaaugggaaugcug

SEQ ID NO: 289679 - RNA, 22 nt, Human
caaaauuagggagugagcugga

SEQ ID NO: 289680 - RNA, 22 nt, Human
cccaguggggagcuucugccuu

SEQ ID NO: 289681 - RNA, 22 nt, Human
aggaaagcaauggcugagaaca

SEQ ID NO: 289682 - RNA, 22 nt, Human
cuucaguuagaguuuacaaagu

SEQ ID NO: 289683 - RNA, 22 nt, Human
aacuuucaggcaaugaauauuu

SEQ ID NO: 289684 - RNA, 22 nt, Human
gucucuguuauuuccaggguca

SEQ ID NO: 289685 - RNA, 22 nt, Human
uuccaugacaccgagggaaguc

SEQ ID NO: 289686 - RNA, 22 nt, Human
guuagggagggugcauaugugu

SEQ ID NO: 289687 - RNA, 22 nt, Human
ccaggugugucaccauugccca

SEQ ID NO: 289688 - RNA, 22 nt, Human
ucuuguuucuguauauaaugac

SEQ ID NO: 289689 - RNA, 18 nt, Human
gaauaucuagcacauagu

SEQ ID NO: 289690 - RNA, 19 nt, Human
uggugcuggccucccaugg

SEQ ID NO: 289691 - RNA, 22 nt, Human
gccagcagguggagagaucaag

SEQ ID NO: 289692 - RNA, 22 nt, Human
uuuuuacacuuagcauugagcg

SEQ ID NO: 289693 - RNA, 22 nt, Human
uuuccugagucagagacaccag

SEQ ID NO: 289694 - RNA, 22 nt, Human
cccaggacucugacacccccaa

SEQ ID NO: 289695 - RNA, 22 nt, Human
ggcacuggaagucccauugucu

SEQ ID NO: 289696 - RNA, 22 nt, Human
gcagggcagaccuccagccuau

SEQ ID NO: 289697 - RNA, 22 nt, Human
ugugugcuaauguaugcucuaa

SEQ ID NO: 289698 - RNA, 22 nt, Human
acagugcagugugaugaguauu

SEQ ID NO: 289699 - RNA, 22 nt, Human
auuuucauggcuucugcucagu

SEQ ID NO: 289700 - RNA, 22 nt, Human
ggucaaagggugagauggcagg

SEQ ID NO: 289701 - RNA, 22 nt, Human
gagguucacaggcuaucacagu

SEQ ID NO: 289702 - RNA, 22 nt, Human
gugucccaggccucuggaauua

SEQ ID NO: 289703 - RNA, 22 nt, Human
ucugaaauaggcuucuuuuggu

SEQ ID NO: 289704 - RNA, 22 nt, Human
agaaauguauucuguauguuuu

SEQ ID NO: 289705 - RNA, 22 nt, Human
uuguuucaaauauuucagaaua

SEQ ID NO: 289706 - RNA, 22 nt, Human
agcuuuauauaaaagaguacau

SEQ ID NO: 289707 - RNA, 22 nt, Human
ugauuuuauugaaacuucacuu

SEQ ID NO: 289708 - RNA, 22 nt, Human
uaauuucaauagcuugcauaau

SEQ ID NO: 289709 - RNA, 22 nt, Human
uuuaauuuuccugguaggccug

SEQ ID NO: 289710 - RNA, 22 nt, Human
ucuuccuugcuccuugucacuu

SEQ ID NO: 289711 - RNA, 22 nt, Human
cugaggagcagcuggcccgcua

SEQ ID NO: 289712 - RNA, 22 nt, Human
aagauaauauucauuaacuaga

SEQ ID NO: 289713 - RNA, 22 nt, Human
cugcauuagucaugcuuugcag

SEQ ID NO: 289714 - RNA, 21 nt, Human
gccuggcagguggaagggcuc

SEQ ID NO: 289715 - RNA, 22 nt, Human
acagagccacuuuggugccuac

SEQ ID NO: 289716 - RNA, 22 nt, Human
acuggcagaacuggugauuguc

SEQ ID NO: 289717 - RNA, 22 nt, Human
aaauguauugcauaggauauuu

SEQ ID NO: 289718 - RNA, 22 nt, Human
agucaaaggguauuuggauuga

SEQ ID NO: 289719 - RNA, 23 nt, Human
uggcaggugguuagauguuuugu

SEQ ID NO: 289720 - RNA, 22 nt, Human
ccaggccuucugaggacacucu

SEQ ID NO: 289721 - RNA, 17 nt, Human
aggggagagugggaaga

SEQ ID NO: 289722 - RNA, 21 nt, Human
ucuguacaucauugagucccc

SEQ ID NO: 289723 - RNA, 22 nt, Human
cuggugaccggaccucaguuuu

SEQ ID NO: 289724 - RNA, 22 nt, Human
auaugcaagcacauagaauacu

SEQ ID NO: 289725 - RNA, 22 nt, Human
auauucaaauuacauuuacuaa

SEQ ID NO: 289726 - RNA, 22 nt, Human
aggccucauaguagaccugccc

SEQ ID NO: 289727 - RNA, 22 nt, Human
ucuuucggccauagcgaugauu

SEQ ID NO: 289728 - RNA, 22 nt, Human
uucagaauauuuguuuuacaug

SEQ ID NO: 289729 - RNA, 22 nt, Human
gaggcugcagcuaucagacauu

SEQ ID NO: 289730 - RNA, 22 nt, Human
uuacacaucuagacccauuuuu

SEQ ID NO: 289731 - RNA, 22 nt, Human
ccucccaccauuuagagagagc

SEQ ID NO: 289732 - RNA, 22 nt, Human
acaguuauuuucccagcauuua

SEQ ID NO: 289733 - RNA, 22 nt, Human
aaggcucccucuucucgagugu

SEQ ID NO: 289734 - RNA, 22 nt, Human
cccucucagucagagccagaua

SEQ ID NO: 289735 - RNA, 22 nt, Human
gcugggucagaaucucccugug

SEQ ID NO: 289736 - RNA, 22 nt, Human
ucccagagauuuccucuccuuc

SEQ ID NO: 289737 - RNA, 22 nt, Human
gggccagguggaccccagccuc

SEQ ID NO: 289738 - RNA, 22 nt, Human
auuauuucucacucacauaaua

SEQ ID NO: 289739 - RNA, 22 nt, Human
cauggaaugguugaaugacgaa

SEQ ID NO: 289740 - RNA, 22 nt, Human
cacagugcaugaugggcagaag

SEQ ID NO: 289741 - RNA, 22 nt, Human
auucaguuuuuauuggaccagc

SEQ ID NO: 289742 - RNA, 22 nt, Human
aaaguauucuugacuguuuuuc

SEQ ID NO: 289743 - RNA, 22 nt, Human
ucuaggguguauaaggaagccu

SEQ ID NO: 289744 - RNA, 20 nt, Human
ucagauuuuucuaacuuuga

SEQ ID NO: 289745 - RNA, 22 nt, Human
uacacugaagugucuugguaua

SEQ ID NO: 289746 - RNA, 21 nt, Human
ugcucaugagcccacagcugc

SEQ ID NO: 289747 - RNA, 22 nt, Human
gaacaaauuggagaaaucagga

SEQ ID NO: 289748 - RNA, 22 nt, Human
agacaauggaccaagcaccuuc

SEQ ID NO: 289749 - RNA, 22 nt, Human
aagcauuucagguagagauauu

SEQ ID NO: 289750 - RNA, 17 nt, Human
ugaaacaccaagacugu

SEQ ID NO: 289751 - RNA, 22 nt, Human
cagcuauuuucucauuaaggau

SEQ ID NO: 289752 - RNA, 22 nt, Human
uuuuuacagucauggucacuca

SEQ ID NO: 289753 - RNA, 22 nt, Human
ucaagagaaggggaaauagacu

SEQ ID NO: 289754 - RNA, 22 nt, Human
gaggggcuggguagggcaaccc

SEQ ID NO: 289755 - RNA, 19 nt, Human
agaggcaaggguggaagua

SEQ ID NO: 289756 - RNA, 22 nt, Human
agagccaaucuucagagcagag

SEQ ID NO: 289757 - RNA, 22 nt, Human
gaggugucuguuaggaauaggc

SEQ ID NO: 289758 - RNA, 17 nt, Human
aggagggaaauagcuug

SEQ ID NO: 289759 - RNA, 20 nt, Human
aaagcauuuacuugugauug

SEQ ID NO: 289760 - RNA, 22 nt, Human
ccuggcaguuuugcccaggauu

SEQ ID NO: 289761 - RNA, 22 nt, Human
ucuccacaagcuuucuccuuuu

SEQ ID NO: 289762 - RNA, 22 nt, Human
aaagagucguguuccagguuug

SEQ ID NO: 289763 - RNA, 22 nt, Human
auguuucaaauauauagaguug

SEQ ID NO: 289764 - RNA, 22 nt, Human
uggaaauguauuugggcaugcc

SEQ ID NO: 289765 - RNA, 22 nt, Human
uggacacacauguaugucagag

SEQ ID NO: 289766 - RNA, 22 nt, Human
aggagcugcagauucugccuug

SEQ ID NO: 289767 - RNA, 22 nt, Human
uaaaagauuuuauaggaacaag

SEQ ID NO: 289768 - RNA, 22 nt, Human
uauccaaacauauagucucucu

SEQ ID NO: 289769 - RNA, 22 nt, Human
aggaccuguagggccugcaucc

SEQ ID NO: 289770 - RNA, 22 nt, Human
ucuguggcuuccuauuucuugg

SEQ ID NO: 289771 - RNA, 22 nt, Human
acuguauuuggauauaagaucu

SEQ ID NO: 289772 - RNA, 14 nt, Human
gcagguggaucacc

SEQ ID NO: 289773 - RNA, 22 nt, Human
ccuaaggaaagccaaagaggcc

SEQ ID NO: 289774 - RNA, 22 nt, Human
uaaugucuccaggguugaccua

SEQ ID NO: 289775 - RNA, 22 nt, Human
cuuuacagcuuagugguaugga

SEQ ID NO: 289776 - RNA, 22 nt, Human
aagaaucuccaucugauucacu

SEQ ID NO: 289777 - RNA, 18 nt, Human
uuugcaaaggaaguaugg

SEQ ID NO: 289778 - RNA, 22 nt, Human
uuacauguaaucuaaaauaauu

SEQ ID NO: 289779 - RNA, 22 nt, Human
gugcauuccaccgugcagguug

SEQ ID NO: 289780 - RNA, 23 nt, Human
agggcaugaagcagaggacgugg

SEQ ID NO: 289781 - RNA, 22 nt, Human
ccugcagguuucccccggacgg

SEQ ID NO: 289782 - RNA, 22 nt, Human
cauauuuaguguuuggagaucg

SEQ ID NO: 289783 - RNA, 22 nt, Human
gcuuccuuccuuacauuggugg

SEQ ID NO: 289784 - RNA, 22 nt, Human
cugaggagaaagaugguccaag

SEQ ID NO: 289785 - RNA, 22 nt, Human
cucuucuuuaguccagaccauc

SEQ ID NO: 289786 - RNA, 22 nt, Human
gggcuucuugcaggggcaacau

SEQ ID NO: 289787 - RNA, 22 nt, Human
agcuccugaaaagcgcuugcuu

SEQ ID NO: 289788 - RNA, 22 nt, Human
uggcauuucaccuuucauuucc

SEQ ID NO: 289789 - RNA, 22 nt, Human
aaugagaaccuugaaaggaacu

SEQ ID NO: 289790 - RNA, 22 nt, Human
cuucugugguaaacuuuguugu

SEQ ID NO: 289791 - RNA, 22 nt, Human
ggaagaaaugcucuucuaugcg

SEQ ID NO: 289792 - RNA, 17 nt, Human
uccaggcauaucuccua

SEQ ID NO: 289793 - RNA, 22 nt, Human
uuguagaacaugcagcacaaug

SEQ ID NO: 289794 - RNA, 22 nt, Human
ccagagaggcaaaacuccuucc

SEQ ID NO: 289795 - RNA, 22 nt, Human
ugguauuacuucuagacacaag

SEQ ID NO: 289796 - RNA, 22 nt, Human
uuaguacauagaugaugguuga

SEQ ID NO: 289797 - RNA, 22 nt, Human
uacaguauggaaaauguauagu

SEQ ID NO: 289798 - RNA, 22 nt, Human
ccagcuuucugggugguuucug

SEQ ID NO: 289799 - RNA, 22 nt, Human
cuuauuagaguuguguucuguu

SEQ ID NO: 289800 - RNA, 22 nt, Human
aguaauaauagcuguaaagugc

SEQ ID NO: 289801 - RNA, 22 nt, Human
guuucauuuacaucuguaggua

SEQ ID NO: 289802 - RNA, 19 nt, Human
gggcuuggggcugaagccu

SEQ ID NO: 289803 - RNA, 22 nt, Human
uuccagucuaguaccuggaugc

SEQ ID NO: 289804 - RNA, 22 nt, Human
ucagagaauucgauuaaaugca

SEQ ID NO: 289805 - RNA, 22 nt, Human
cuguccagcugaccagagcagc

SEQ ID NO: 289806 - RNA, 22 nt, Human
gaggccugaggcugccuggagc

SEQ ID NO: 289807 - RNA, 16 nt, Human
ugguggggaggacagc

SEQ ID NO: 289808 - RNA, 22 nt, Human
gcugggucuggcugugagccgg

SEQ ID NO: 289809 - RNA, 19 nt, Human
acagggcagcaauaggaua

SEQ ID NO: 289810 - RNA, 22 nt, Human
ccacugucuuuuccaggcugaa

SEQ ID NO: 289811 - RNA, 22 nt, Human
ugagaagcccacacucuuuccu

SEQ ID NO: 289812 - RNA, 22 nt, Human
uuagaaagaacuuuagauauca

SEQ ID NO: 289813 - RNA, 22 nt, Human
ggcagggaagcuggcaucacgg

SEQ ID NO: 289814 - RNA, 23 nt, Human
uuuuagugacuccuuuaucugcc

SEQ ID NO: 289815 - RNA, 22 nt, Human
ucaggugugaacuauuuggaaa

SEQ ID NO: 289816 - RNA, 19 nt, Human
ugguggaggccccauguuc

SEQ ID NO: 289817 - RNA, 22 nt, Human
uaugcacauucacacaaaaaug

SEQ ID NO: 289818 - RNA, 22 nt, Human
accauuugacucucuaaggaua

SEQ ID NO: 289819 - RNA, 22 nt, Human
uugaaucuauguauucagugua

SEQ ID NO: 289820 - RNA, 22 nt, Human
gugagggcagaacccccaggcc

SEQ ID NO: 289821 - RNA, 22 nt, Human
aaaagcaaguugccuagguuga

SEQ ID NO: 289822 - RNA, 23 nt, Human
uuucaguuccagaaaaggggagc

SEQ ID NO: 289823 - RNA, 22 nt, Human
acuaguuugaaaauaucugauu

SEQ ID NO: 289824 - RNA, 19 nt, Human
gcaucagagcagaaggggu

SEQ ID NO: 289825 - RNA, 22 nt, Human
acaugauuaaaagauuuuaaag

SEQ ID NO: 289826 - RNA, 22 nt, Human
gugugagagaagcugccaugga

SEQ ID NO: 289827 - RNA, 22 nt, Human
ucagaggcuugaagcccaagcc

SEQ ID NO: 289828 - RNA, 22 nt, Human
gggcuucuauucuggcacaaga

SEQ ID NO: 289829 - RNA, 22 nt, Human
cauagaaaagaguagguaaugu

SEQ ID NO: 289830 - RNA, 22 nt, Human
aaaaucuaaguagcgaguaagg

SEQ ID NO: 289831 - RNA, 22 nt, Human
uccuggccucgcuguccaccuu

SEQ ID NO: 289832 - RNA, 22 nt, Human
gucugcccuuccucuccacgau

SEQ ID NO: 289833 - RNA, 22 nt, Human
cagcgucucguugugggccucg

SEQ ID NO: 289834 - RNA, 22 nt, Human
uccugccuguuuaccuguacuu

SEQ ID NO: 289835 - RNA, 22 nt, Human
ucuguggcaugaggaaauaggc

SEQ ID NO: 289836 - RNA, 22 nt, Human
aaugaggucauuaaugguggga

SEQ ID NO: 289837 - RNA, 22 nt, Human
ucuagaauuugcguagguuaga

SEQ ID NO: 289838 - RNA, 22 nt, Human
cccagugugguugugaauucug

SEQ ID NO: 289839 - RNA, 22 nt, Human
ugcaaacagaaaguuuauugug

SEQ ID NO: 289840 - RNA, 22 nt, Human
agguauaugaagaugaaauaac

SEQ ID NO: 289841 - RNA, 22 nt, Human
ugagguggaaggauccuuugaa

SEQ ID NO: 289842 - RNA, 22 nt, Human
aauugcuuacuguuuuucaccu

SEQ ID NO: 289843 - RNA, 22 nt, Human
uuugagaaaaccagaaagaucu

SEQ ID NO: 289844 - RNA, 22 nt, Human
cuggauuuaauuaacuguugcu

SEQ ID NO: 289845 - RNA, 22 nt, Human
augaaggcaguuaaacgucauc

SEQ ID NO: 289846 - RNA, 22 nt, Human
cuuuauguccaccagacugcaa

SEQ ID NO: 289847 - RNA, 22 nt, Human
cccaggccagaacuugguugcu

SEQ ID NO: 289848 - RNA, 22 nt, Human
uuauuccauucaguucaacaag

SEQ ID NO: 289849 - RNA, 22 nt, Human
cugucuguucagauucauuacu

SEQ ID NO: 289850 - RNA, 19 nt, Human
uuuuguguagcugcugguu

SEQ ID NO: 289851 - RNA, 22 nt, Human
ggugcauggaaagaguaaguaa

SEQ ID NO: 289852 - RNA, 22 nt, Human
ggugaggaauuggggacugacc

SEQ ID NO: 289853 - RNA, 22 nt, Human
ucuuuuggaaaugaugugcagg

SEQ ID NO: 289854 - RNA, 22 nt, Human
gacugaaggucucagcauguga

SEQ ID NO: 289855 - RNA, 22 nt, Human
aagaacuagucuuacagccuca

SEQ ID NO: 289856 - RNA, 22 nt, Human
cuccugugggucaccaauaggc

SEQ ID NO: 289857 - RNA, 22 nt, Human
auguccaguuucuacacacaua

SEQ ID NO: 289858 - RNA, 22 nt, Human
uggagcugagagccaggcuggc

SEQ ID NO: 289859 - RNA, 22 nt, Human
acagacugugaguaugcauagu

SEQ ID NO: 289860 - RNA, 19 nt, Human
uaggaauguagaauccuag

SEQ ID NO: 289861 - RNA, 22 nt, Human
uacaagcugacccugaagauga

SEQ ID NO: 289862 - RNA, 22 nt, Human
ggccugacauuugcaucaacac

SEQ ID NO: 289863 - RNA, 22 nt, Human
agugaggggauucaggcaaggu

SEQ ID NO: 289864 - RNA, 22 nt, Human
acagucuaaucuuguguucugu

SEQ ID NO: 289865 - RNA, 22 nt, Human
cuggacccuguuucccuagguc

SEQ ID NO: 289866 - RNA, 19 nt, Human
ugcugggucauauggaaac

SEQ ID NO: 289867 - RNA, 22 nt, Human
auugcuuuuagugaaauuauau

SEQ ID NO: 289868 - RNA, 22 nt, Human
cuggaggugggggcaagagugu

SEQ ID NO: 289869 - RNA, 22 nt, Human
ucuggaugcucugagcccaagg

SEQ ID NO: 289870 - RNA, 23 nt, Human
uccaggcacgcauuucuucuagc

SEQ ID NO: 289871 - RNA, 22 nt, Human
uuccagugaaacaugaggugug

SEQ ID NO: 289872 - RNA, 22 nt, Human
ucagcuuugcaaguuagaaaau

SEQ ID NO: 289873 - RNA, 22 nt, Human
cacagggaggcggucacuggcu

SEQ ID NO: 289874 - RNA, 22 nt, Human
uuuguucugcaucacagaaaaa

SEQ ID NO: 289875 - RNA, 22 nt, Human
ggccacuguccucuagcccaga

SEQ ID NO: 289876 - RNA, 22 nt, Human
cuuuaagacuaaauuagaguuu

SEQ ID NO: 289877 - RNA, 22 nt, Human
uggauuauuguaagacaaagua

SEQ ID NO: 289878 - RNA, 22 nt, Human
uggccagguguggguucucaga

SEQ ID NO: 289879 - RNA, 22 nt, Human
uucacaauuaacuuuauacuua

SEQ ID NO: 289880 - RNA, 22 nt, Human
agagaucucugaagcugcugcu

SEQ ID NO: 289881 - RNA, 22 nt, Human
cuggccaccaagagcuugcuca

SEQ ID NO: 289882 - RNA, 22 nt, Human
ccagaugagaccacacugcugg

SEQ ID NO: 289883 - RNA, 22 nt, Human
ccacagaggacaacugccuggc

SEQ ID NO: 289884 - RNA, 22 nt, Human
cauguaaagaauuucacacaag

SEQ ID NO: 289885 - RNA, 22 nt, Human
ucuuccucaugaauucucguau

SEQ ID NO: 289886 - RNA, 20 nt, Human
ucuuuagauuuaucuuaugu

SEQ ID NO: 289887 - RNA, 22 nt, Human
uuaguuuucccaucuuuauggu

SEQ ID NO: 289888 - RNA, 22 nt, Human
ucaugccagcuuugcuuguccc

SEQ ID NO: 289889 - RNA, 21 nt, Human
uccuucucuaugauugucuga

SEQ ID NO: 289890 - RNA, 23 nt, Human
agucucagcuggaaacauguguc

SEQ ID NO: 289891 - RNA, 22 nt, Human
caguguggcugagacagaggcu

SEQ ID NO: 289892 - RNA, 22 nt, Human
uccuucaagaugccacagcuuu

SEQ ID NO: 289893 - RNA, 22 nt, Human
cagcuuauucaguaagcacaua

SEQ ID NO: 289894 - RNA, 21 nt, Human
uuucuggguggcugcauagug

SEQ ID NO: 289895 - RNA, 22 nt, Human
uuuuucauauuccccucucugg

SEQ ID NO: 289896 - RNA, 22 nt, Human
uuccuucuggagcccggggagc

SEQ ID NO: 289897 - RNA, 22 nt, Human
uacauguuugguaaaugauggc

SEQ ID NO: 289898 - RNA, 22 nt, Human
uugugucuaugguuugagcauc

SEQ ID NO: 289899 - RNA, 21 nt, Human
ucuuuuccuuucugugugcaa

SEQ ID NO: 289900 - RNA, 22 nt, Human
gagaaaagcgaaggaccuggag

SEQ ID NO: 289901 - RNA, 22 nt, Human
auaaucaaaguccuaugacauc

SEQ ID NO: 289902 - RNA, 22 nt, Human
cagggccagcgcccaggcccag

SEQ ID NO: 289903 - RNA, 22 nt, Human
ggcuggguacagggcagugugc

SEQ ID NO: 289904 - RNA, 22 nt, Human
caugugugaaucuugugaucau

SEQ ID NO: 289905 - RNA, 22 nt, Human
agacaaagacagcaucucaggu

SEQ ID NO: 289906 - RNA, 22 nt, Human
caaagcaggaagaauauugaaa

SEQ ID NO: 289907 - RNA, 23 nt, Human
cccagagcacagccuccagaugc

SEQ ID NO: 289908 - RNA, 22 nt, Human
gaggauggaggcaguuagggcc

SEQ ID NO: 289909 - RNA, 22 nt, Human
aguugcagacgcagagauguug

SEQ ID NO: 289910 - RNA, 22 nt, Human
ucuggcaguuugagaaaggcua

SEQ ID NO: 289911 - RNA, 22 nt, Human
gaagcacauggcuauagcuauu

SEQ ID NO: 289912 - RNA, 22 nt, Human
ugcaggugauucugaugcaguu

SEQ ID NO: 289913 - RNA, 22 nt, Human
uccuuucugucuuuacucugga

SEQ ID NO: 289914 - RNA, 22 nt, Human
ccaagcuacuuaggagucugag

SEQ ID NO: 289915 - RNA, 22 nt, Human
cacuuagucucaccaguucagu

SEQ ID NO: 289916 - RNA, 22 nt, Human
ucuccuggauagauacuaucca

SEQ ID NO: 289917 - RNA, 22 nt, Human
gaggccaaguuggagaccaggu

SEQ ID NO: 289918 - RNA, 22 nt, Human
uccugucuaaagaccugcaggc

SEQ ID NO: 289919 - RNA, 22 nt, Human
ucccaggguauccuguaguaaa

SEQ ID NO: 289920 - RNA, 22 nt, Human
aauauucauuugcagaagaagu

SEQ ID NO: 289921 - RNA, 22 nt, Human
gcugaggaaaggcuggaaggga

SEQ ID NO: 289922 - RNA, 17 nt, Human
ggcaggugcggggccgc

SEQ ID NO: 289923 - RNA, 22 nt, Human
cagcaugacagucugcagcaga

SEQ ID NO: 289924 - RNA, 22 nt, Human
ugcugauuuugccuacugaucc

SEQ ID NO: 289925 - RNA, 22 nt, Human
uuugguauugcacacugucuuc

SEQ ID NO: 289926 - RNA, 22 nt, Human
ggagaagggacagacucagcuu

SEQ ID NO: 289927 - RNA, 22 nt, Human
guuggugaugccacacauauuu

SEQ ID NO: 289928 - RNA, 22 nt, Human
ggcaggcaccagcucagcaaua

SEQ ID NO: 289929 - RNA, 22 nt, Human
uaaggaggcgagguggugagca

SEQ ID NO: 289930 - RNA, 22 nt, Human
acaaauuugaauccugacuucu

SEQ ID NO: 289931 - RNA, 22 nt, Human
caaagauaaucacagaauaccc

SEQ ID NO: 289932 - RNA, 23 nt, Human
uuuaccagaauagcaggggagag

SEQ ID NO: 289933 - RNA, 22 nt, Human
cagggccagagagggcuggcug

SEQ ID NO: 289934 - RNA, 22 nt, Human
guuuacauguaauguguuauug

SEQ ID NO: 289935 - RNA, 22 nt, Human
uuucagaaccgcuaaaauaaau

SEQ ID NO: 289936 - RNA, 22 nt, Human
guagcuuauuagggauaauagu

SEQ ID NO: 289937 - RNA, 22 nt, Human
ucugaacagaaaagaugcacaa

SEQ ID NO: 289938 - RNA, 22 nt, Human
ccucccaucccugcaagagagc

SEQ ID NO: 289939 - RNA, 15 nt, Human
uugcuuuaagacaug

SEQ ID NO: 289940 - RNA, 22 nt, Human
uaaacauggcuguuucaguuau

SEQ ID NO: 289941 - RNA, 22 nt, Human
ucaaaaauguuuuauauuggua

SEQ ID NO: 289942 - RNA, 22 nt, Human
cagcuggguuuaguggggugug

SEQ ID NO: 289943 - RNA, 22 nt, Human
gccaggcauuuauugauugaau

SEQ ID NO: 289944 - RNA, 23 nt, Human
ucuuuccuaaugaaacagugaaa

SEQ ID NO: 289945 - RNA, 22 nt, Human
ugugaaaaaaguucuagaagga

SEQ ID NO: 289946 - RNA, 22 nt, Human
gacaguuuuuaauccuuucaug

SEQ ID NO: 289947 - RNA, 23 nt, Human
cucuccaccuucccacccaggga

SEQ ID NO: 289948 - RNA, 23 nt, Human
uggccaggguacuacacccaccc

SEQ ID NO: 289949 - RNA, 22 nt, Human
ccagggagccuggugugucagc

SEQ ID NO: 289950 - RNA, 22 nt, Human
ugaauccagagcuauuucgucc

SEQ ID NO: 289951 - RNA, 22 nt, Human
uugcugaucugugaaucagcca

SEQ ID NO: 289952 - RNA, 22 nt, Human
ccuggcucugcagccacuccag

SEQ ID NO: 289953 - RNA, 22 nt, Human
guacccaggcacgccuugcuga

SEQ ID NO: 289954 - RNA, 22 nt, Human
ggaugaggaaaccacagugucc

SEQ ID NO: 289955 - RNA, 23 nt, Human
ugucuucgacuccugcgugcuuc

SEQ ID NO: 289956 - RNA, 22 nt, Human
gcauguuuugcaacaagugacc

SEQ ID NO: 289957 - RNA, 22 nt, Human
gagcugaauugcugccauuugc

SEQ ID NO: 289958 - RNA, 22 nt, Human
uauucaaaguaccuucauugcc

SEQ ID NO: 289959 - RNA, 22 nt, Human
gacauuucuagcccauaaaacu

SEQ ID NO: 289960 - RNA, 19 nt, Human
caagauuuguucacacaug

SEQ ID NO: 289961 - RNA, 22 nt, Human
gcuguggccuaguuuguuauau

SEQ ID NO: 289962 - RNA, 22 nt, Human
auauuaauuauuuacacaugag

SEQ ID NO: 289963 - RNA, 22 nt, Human
auagauauuugaguuguuucca

SEQ ID NO: 289964 - RNA, 22 nt, Human
aaaaaugucauuauggaacuga

SEQ ID NO: 289965 - RNA, 22 nt, Human
acacaugaggaugaggggauca

SEQ ID NO: 289966 - RNA, 22 nt, Human
uacauucaacaugucacuaugu

SEQ ID NO: 289967 - RNA, 22 nt, Human
cuuucauuugauaagaaugcca

SEQ ID NO: 289968 - RNA, 22 nt, Human
uuuacuugauauggagcugagg

SEQ ID NO: 289969 - RNA, 22 nt, Human
cuguauaaacauauuuucaagu

SEQ ID NO: 289970 - RNA, 22 nt, Human
uauuuccagcaguaagaagaca

SEQ ID NO: 289971 - RNA, 22 nt, Human
auggcaguguuucaguuuuugg

SEQ ID NO: 289972 - RNA, 22 nt, Human
ggccuugauguucuugggagau

SEQ ID NO: 289973 - RNA, 22 nt, Human
cauagacauucagcacucacua

SEQ ID NO: 289974 - RNA, 22 nt, Human
aguuuggaaaaugagacaagga

SEQ ID NO: 289975 - RNA, 22 nt, Human
cagccagagaggaaggaaugca

SEQ ID NO: 289976 - RNA, 22 nt, Human
gauguagacacuuggaggcuua

SEQ ID NO: 289977 - RNA, 22 nt, Human
aucauucuagcuguuguguuga

SEQ ID NO: 289978 - RNA, 20 nt, Human
cccugcagccaugggagugg

SEQ ID NO: 289979 - RNA, 22 nt, Human
auucaacuauguauagucuucu

SEQ ID NO: 289980 - RNA, 22 nt, Human
gagggugucugcguaacuggca

SEQ ID NO: 289981 - RNA, 22 nt, Human
uccaugagagguaacuuuacaa

SEQ ID NO: 289982 - RNA, 22 nt, Human
uuuucagaggccuaagagguuu

SEQ ID NO: 289983 - RNA, 22 nt, Human
ccugggagugugccaucucugu

SEQ ID NO: 289984 - RNA, 22 nt, Human
cuuguccagauguuuguuaggu

SEQ ID NO: 289985 - RNA, 22 nt, Human
ugaauagacuggggcugugaag

SEQ ID NO: 289986 - RNA, 22 nt, Human
gcuugggaagggcccuguguac

SEQ ID NO: 289987 - RNA, 22 nt, Human
aaauaugaaugauaagaguuau

SEQ ID NO: 289988 - RNA, 22 nt, Human
uuccaggcucccuuggaggugu

SEQ ID NO: 289989 - RNA, 22 nt, Human
agcacaggcuuuggugugaggg

SEQ ID NO: 289990 - RNA, 21 nt, Human
gcuccuggugcugcguggcgc

SEQ ID NO: 289991 - RNA, 22 nt, Human
ugaaaacuccaaguuucaucag

SEQ ID NO: 289992 - RNA, 22 nt, Human
gaugugucccuuucaacucaga

SEQ ID NO: 289993 - RNA, 22 nt, Human
gggacaugccccucagugggug

SEQ ID NO: 289994 - RNA, 22 nt, Human
cuugggaaugcuaacagaugac

SEQ ID NO: 289995 - RNA, 21 nt, Human
acagagaaagagcagccuccu

SEQ ID NO: 289996 - RNA, 22 nt, Human
ucagugucaucacuuaauauaa

SEQ ID NO: 289997 - RNA, 22 nt, Human
uuacaguaaucgaguguugugg

SEQ ID NO: 289998 - RNA, 22 nt, Human
uaugaacacacuuuggaaguga

SEQ ID NO: 289999 - RNA, 23 nt, Human
uuggagagggugaguagugucag

SEQ ID NO: 290000 - RNA, 22 nt, Human
ggcauccaaauaccaagaugua

SEQ ID NO: 290001 - RNA, 22 nt, Human
gccaggcagacaggucaucagg

SEQ ID NO: 290002 - RNA, 22 nt, Human
ggagcugagaguagucccuuuu

SEQ ID NO: 290003 - RNA, 22 nt, Human
gauugcugugcgccccaggugu

SEQ ID NO: 290004 - RNA, 22 nt, Human
agcuucuuggcucagcacuugg

SEQ ID NO: 290005 - RNA, 22 nt, Human
gcucucuuuuuccagugguggu

SEQ ID NO: 290006 - RNA, 22 nt, Human
caggcagcugcuggguucagcc

SEQ ID NO: 290007 - RNA, 19 nt, Human
aaaguuuuauucucauuug

SEQ ID NO: 290008 - RNA, 22 nt, Human
gguggggcugcaagcaguucgg

SEQ ID NO: 290009 - RNA, 22 nt, Human
uuccaggcuucucuggggcguc

SEQ ID NO: 290010 - RNA, 21 nt, Human
cucugcccagggccuccugcc

SEQ ID NO: 290011 - RNA, 22 nt, Human
uccccaccuaagauacccaucu

SEQ ID NO: 290012 - RNA, 22 nt, Human
uuacacaaaaauaagauauggc

SEQ ID NO: 290013 - RNA, 22 nt, Human
gccaccucuuugucucugccgc

SEQ ID NO: 290014 - RNA, 22 nt, Human
gauugcuggggcaggcuguagc

SEQ ID NO: 290015 - RNA, 22 nt, Human
ucuugggcauguguuugauuuc

SEQ ID NO: 290016 - RNA, 22 nt, Human
ggcaaagagacaugcaucgggg

SEQ ID NO: 290017 - RNA, 22 nt, Human
auuucucacugagcagauaaaa

SEQ ID NO: 290018 - RNA, 22 nt, Human
ugggcaggagagaagcuaaaga

SEQ ID NO: 290019 - RNA, 22 nt, Human
aguguccugugucccagacugu

SEQ ID NO: 290020 - RNA, 22 nt, Human
uuuugagauggagucuugcucu

SEQ ID NO: 290021 - RNA, 22 nt, Human
augagcaguuuuuaaguagcaa

SEQ ID NO: 290022 - RNA, 22 nt, Human
agcaagcagaauucuguccucu

SEQ ID NO: 290023 - RNA, 22 nt, Human
gcaccugcuggaaucagucugu

SEQ ID NO: 290024 - RNA, 22 nt, Human
gccugagauucccggagccgug

SEQ ID NO: 290025 - RNA, 22 nt, Human
gaaggagggagcggcgcggauu

SEQ ID NO: 290026 - RNA, 22 nt, Human
cuccagaauuguccauuggaaa

SEQ ID NO: 290027 - RNA, 22 nt, Human
gaaggcaucacagaggcugugg

SEQ ID NO: 290028 - RNA, 22 nt, Human
cugccugggccaugcccagucc

SEQ ID NO: 290029 - RNA, 22 nt, Human
acaaaugacuauuugguacagg

SEQ ID NO: 290030 - RNA, 22 nt, Human
uauuuguugaauaccccugucu

SEQ ID NO: 290031 - RNA, 22 nt, Human
ucuucagacccuuagcugugau

SEQ ID NO: 290032 - RNA, 22 nt, Human
acaauaugggauauacauuuua

SEQ ID NO: 290033 - RNA, 22 nt, Human
aaaauguaaagcuugaguguag

SEQ ID NO: 290034 - RNA, 22 nt, Human
acugagagcguguacaaacuua

SEQ ID NO: 290035 - RNA, 15 nt, Human
gcagguggaucacuu

SEQ ID NO: 290036 - RNA, 17 nt, Human
ucugaggccucuaggag

SEQ ID NO: 290037 - RNA, 22 nt, Human
aaguguuuauuuauaacgaucu

SEQ ID NO: 290038 - RNA, 23 nt, Human
ugggagcucaagggaggcugccc

SEQ ID NO: 290039 - RNA, 22 nt, Human
uuuagaaguucacacauuuaaa

SEQ ID NO: 290040 - RNA, 18 nt, Human
cagagcuccuggaugcag

SEQ ID NO: 290041 - RNA, 22 nt, Human
cacagcauaaugaaauauacuu

SEQ ID NO: 290042 - RNA, 22 nt, Human
gcuuuaaugcaauuucaccuca

SEQ ID NO: 290043 - RNA, 22 nt, Human
cuccugggcucauaucauucag

SEQ ID NO: 290044 - RNA, 22 nt, Human
uugcagggaaacaguuuaggaa

SEQ ID NO: 290045 - RNA, 22 nt, Human
uauccaauucaccauugauggg

SEQ ID NO: 290046 - RNA, 22 nt, Human
aaggcauaggacaaaucaguga

SEQ ID NO: 290047 - RNA, 22 nt, Human
agcaggugagcacagccaggcu

SEQ ID NO: 290048 - RNA, 22 nt, Human
aaagcagagcagggcacuuaug

SEQ ID NO: 290049 - RNA, 22 nt, Human
cauuguuaccaucuuuuaccua

SEQ ID NO: 290050 - RNA, 20 nt, Human
gccaggcacuguucucaaua

SEQ ID NO: 290051 - RNA, 22 nt, Human
cuggcccuguggccuaaggacu

SEQ ID NO: 290052 - RNA, 22 nt, Human
uaaaguguuuguaugcagauaa

SEQ ID NO: 290053 - RNA, 22 nt, Human
ugguaauauaugccagauaaaa

SEQ ID NO: 290054 - RNA, 22 nt, Human
ccuguggcugccacuuggguga

SEQ ID NO: 290055 - RNA, 22 nt, Human
gugagcagcucaggguggucuc

SEQ ID NO: 290056 - RNA, 22 nt, Human
ugucucuggcugcagccuguuc

SEQ ID NO: 290057 - RNA, 22 nt, Human
guguccugcauuggcucugccc

SEQ ID NO: 290058 - RNA, 22 nt, Human
augugaaaaauuucuuauuaca

SEQ ID NO: 290059 - RNA, 22 nt, Human
aguggcuuaucugggacagcua

SEQ ID NO: 290060 - RNA, 22 nt, Human
gggggaggugaaugcaauaagg

SEQ ID NO: 290061 - RNA, 22 nt, Human
agucugaagacucaugucugaa

SEQ ID NO: 290062 - RNA, 22 nt, Human
aguugggaguuauagacucuau

SEQ ID NO: 290063 - RNA, 22 nt, Human
acuuggaaaauucaaaauggca

SEQ ID NO: 290064 - RNA, 22 nt, Human
ugcuugucccucuuuaugaugg

SEQ ID NO: 290065 - RNA, 18 nt, Human
gaggccugagaaccaggu

SEQ ID NO: 290066 - RNA, 22 nt, Human
aucugguucuucuuaggcauca

SEQ ID NO: 290067 - RNA, 22 nt, Human
guaguucugcagugucaccuga

SEQ ID NO: 290068 - RNA, 22 nt, Human
cuucucagaucucagcuuugag

SEQ ID NO: 290069 - RNA, 22 nt, Human
ucagguggcuucggggaguggc

SEQ ID NO: 290070 - RNA, 22 nt, Human
agcaggugaugugagucuggaa

SEQ ID NO: 290071 - RNA, 22 nt, Human
uauuaggguuuugaagguuugu

SEQ ID NO: 290072 - RNA, 22 nt, Human
aacuaaaagugugucucuugua

SEQ ID NO: 290073 - RNA, 22 nt, Human
auuauucaaucauauuaaaagu

SEQ ID NO: 290074 - RNA, 22 nt, Human
gccuggcacaggaauuaggagg

SEQ ID NO: 290075 - RNA, 22 nt, Human
gacagacaggaggccaccugcu

SEQ ID NO: 290076 - RNA, 18 nt, Human
gcugggguugagcucucc

SEQ ID NO: 290077 - RNA, 23 nt, Human
uuucaacaaugcuuagagaaaac

SEQ ID NO: 290078 - RNA, 22 nt, Human
uugcugagcuuuggcaaggaag

SEQ ID NO: 290079 - RNA, 21 nt, Human
gggagggauggaaaugauguu

SEQ ID NO: 290080 - RNA, 22 nt, Human
gauggccuuguuuucucccuuc

SEQ ID NO: 290081 - RNA, 22 nt, Human
auacaaaauauauacuggagac

SEQ ID NO: 290082 - RNA, 22 nt, Human
gaugugucauuuggucaucugc

SEQ ID NO: 290083 - RNA, 22 nt, Human
ugguccuggggaucugcaguga

SEQ ID NO: 290084 - RNA, 22 nt, Human
ugcugguaccgcgccuccgcca

SEQ ID NO: 290085 - RNA, 22 nt, Human
caagaugugccuaaucagaccu

SEQ ID NO: 290086 - RNA, 22 nt, Human
aaaaguuuaagacucauucuag

SEQ ID NO: 290087 - RNA, 22 nt, Human
agagcacggccaccauuuacaa

SEQ ID NO: 290088 - RNA, 22 nt, Human
uagaaacauguucuguucuguu

SEQ ID NO: 290089 - RNA, 22 nt, Human
uccugcagcugauaaauacagu

SEQ ID NO: 290090 - RNA, 22 nt, Human
cccuguuuggauggggacccag

SEQ ID NO: 290091 - RNA, 20 nt, Human
gagucacagaagaagcugaa

SEQ ID NO: 290092 - RNA, 22 nt, Human
ucaaauaccagcuuuuccagaa

SEQ ID NO: 290093 - RNA, 22 nt, Human
ucuuccuucuuugaugacaagg

SEQ ID NO: 290094 - RNA, 22 nt, Human
guacaauaacuagucuuauagu

SEQ ID NO: 290095 - RNA, 22 nt, Human
uuagcuuucaugaaccuggucg

SEQ ID NO: 290096 - RNA, 22 nt, Human
aaaaaugugaccacaggguguu

SEQ ID NO: 290097 - RNA, 22 nt, Human
auauuucaugggguuccauacu

SEQ ID NO: 290098 - RNA, 22 nt, Human
uuuguacauauauaaaaucugu

SEQ ID NO: 290099 - RNA, 22 nt, Human
auagauacuggguauggagaug

SEQ ID NO: 290100 - RNA, 22 nt, Human
ggguaggaugguagaagggacc

SEQ ID NO: 290101 - RNA, 22 nt, Human
agccuugcaugauuucauucau

SEQ ID NO: 290102 - RNA, 22 nt, Human
augauacaagcaaaacuaauca

SEQ ID NO: 290103 - RNA, 22 nt, Human
uauuaugcauaggcaauaaugg

SEQ ID NO: 290104 - RNA, 22 nt, Human
ugcaaacacuucaacgugcauc

SEQ ID NO: 290105 - RNA, 22 nt, Human
ccacugaggcaggcaguaucua

SEQ ID NO: 290106 - RNA, 23 nt, Human
uccuuugucuuugcauagauggu

SEQ ID NO: 290107 - RNA, 22 nt, Human
cagccagaucaaacucagaugu

SEQ ID NO: 290108 - RNA, 22 nt, Human
aagcugucaauguaucuagucu

SEQ ID NO: 290109 - RNA, 22 nt, Human
uugaaauacugcauuguucagu

SEQ ID NO: 290110 - RNA, 22 nt, Human
cuaaauuaucaugagaauuaug

SEQ ID NO: 290111 - RNA, 22 nt, Human
uacaagucacuuccuuucuaaa

SEQ ID NO: 290112 - RNA, 19 nt, Human
ugccuggacaaaugugggg

SEQ ID NO: 290113 - RNA, 22 nt, Human
agaugaaaauacgugacuuuaa

SEQ ID NO: 290114 - RNA, 22 nt, Human
gcccuuggaacagccuccugcu

SEQ ID NO: 290115 - RNA, 17 nt, Human
gcaagggaugggagauu

SEQ ID NO: 290116 - RNA, 22 nt, Human
ucugaauuaaucaugccucuuu

SEQ ID NO: 290117 - RNA, 22 nt, Human
aagcuuuaagugucagucagcc

SEQ ID NO: 290118 - RNA, 22 nt, Human
acugucaugaucgaagauguca

SEQ ID NO: 290119 - RNA, 22 nt, Human
uggcuccuuccgcagcaugccu

SEQ ID NO: 290120 - RNA, 22 nt, Human
ugggaaagacucaggacaggag

SEQ ID NO: 290121 - RNA, 22 nt, Human
cuguuguucaucaucugucauu

SEQ ID NO: 290122 - RNA, 22 nt, Human
caaauucucaagguuuauccca

SEQ ID NO: 290123 - RNA, 22 nt, Human
aaguaaaauguuuccuuuauua

SEQ ID NO: 290124 - RNA, 22 nt, Human
uauucugugugauauguaaaug

SEQ ID NO: 290125 - RNA, 21 nt, Human
ugcauaaagaaauacaaauac

SEQ ID NO: 290126 - RNA, 22 nt, Human
ucccagccacaguuuccaccug

SEQ ID NO: 290127 - RNA, 18 nt, Human
uccaaagcugcugguuuu

SEQ ID NO: 290128 - RNA, 22 nt, Human
aagucagauaggugaguccaaa

SEQ ID NO: 290129 - RNA, 23 nt, Human
cucccuggcccuugggagaccug

SEQ ID NO: 290130 - RNA, 22 nt, Human
guacacagaugcuugagaaucu

SEQ ID NO: 290131 - RNA, 22 nt, Human
cauacuuuugcccugacauucu

SEQ ID NO: 290132 - RNA, 22 nt, Human
gagucagaaacucacucuauag

SEQ ID NO: 290133 - RNA, 23 nt, Human
uccuccuuuugcuugugcuuccc

SEQ ID NO: 290134 - RNA, 22 nt, Human
gagggagaaggacuaucaggcu

SEQ ID NO: 290135 - RNA, 22 nt, Human
guccuucucaaauccuguguuu

SEQ ID NO: 290136 - RNA, 22 nt, Human
ucaagcuggcuguugcuauuuc

SEQ ID NO: 290137 - RNA, 22 nt, Human
ugcagugccucggcagugcagc

SEQ ID NO: 290138 - RNA, 22 nt, Human
auaauucagguuuucuggcaca

SEQ ID NO: 290139 - RNA, 22 nt, Human
uucuuuuaauguucugaaguuu

SEQ ID NO: 290140 - RNA, 22 nt, Human
gcuggcagagcucugggcuggg

SEQ ID NO: 290141 - RNA, 22 nt, Human
ucccagggcagcuguccagaag

SEQ ID NO: 290142 - RNA, 22 nt, Human
uuccaggcaugucagacauagg

SEQ ID NO: 290143 - RNA, 19 nt, Human
aaauaucagagagaugaua

SEQ ID NO: 290144 - RNA, 18 nt, Human
auccaaaaagauggaagu

SEQ ID NO: 290145 - RNA, 22 nt, Human
auuauaaaccuuugaggguggg

SEQ ID NO: 290146 - RNA, 21 nt, Human
aaugcauuaacauaaagcuga

SEQ ID NO: 290147 - RNA, 22 nt, Human
gcuguggcugaccaccaggggg

SEQ ID NO: 290148 - RNA, 21 nt, Human
uauuaauaugucuaagcugau

SEQ ID NO: 290149 - RNA, 22 nt, Human
gugaggagucugaagcacauaa

SEQ ID NO: 290150 - RNA, 19 nt, Human
agcauccagucaugggauc

SEQ ID NO: 290151 - RNA, 22 nt, Human
uauaagcacauccuugacugau

SEQ ID NO: 290152 - RNA, 19 nt, Human
gacaggacgaagggaaguu

SEQ ID NO: 290153 - RNA, 22 nt, Human
aaugugaaaccgcacagaauaa

SEQ ID NO: 290154 - RNA, 22 nt, Human
uacauucaaacgauuuauugau

SEQ ID NO: 290155 - RNA, 22 nt, Human
ggucccaggaaucuguguucua

SEQ ID NO: 290156 - RNA, 22 nt, Human
uauacacauccuccaaagauag

SEQ ID NO: 290157 - RNA, 22 nt, Human
cucuuucucgccgcccgcaguc

SEQ ID NO: 290158 - RNA, 22 nt, Human
cauguccuucucauugccucau

SEQ ID NO: 290159 - RNA, 22 nt, Human
ccagguguggggaggacucaca

SEQ ID NO: 290160 - RNA, 22 nt, Human
cccacacauuuuucacuuaccg

SEQ ID NO: 290161 - RNA, 22 nt, Human
acagguguaauuugcccgaggu

SEQ ID NO: 290162 - RNA, 22 nt, Human
cucaggaggugguagaggcccu

SEQ ID NO: 290163 - RNA, 22 nt, Human
ugcaugaacacaugugcaugua

SEQ ID NO: 290164 - RNA, 22 nt, Human
uguuuacuccugauauauuuuu

SEQ ID NO: 290165 - RNA, 22 nt, Human
gaagauugaaggcugggaauua

SEQ ID NO: 290166 - RNA, 22 nt, Human
caggaggguguggaaaacuggg

SEQ ID NO: 290167 - RNA, 22 nt, Human
uguggucuuggaagaaguugcu

SEQ ID NO: 290168 - RNA, 22 nt, Human
cauagaaucauagcacauuuga

SEQ ID NO: 290169 - RNA, 22 nt, Human
uccuggcuuuucuuggcucauc

SEQ ID NO: 290170 - RNA, 22 nt, Human
ugucccuggagcuucugucccc

SEQ ID NO: 290171 - RNA, 22 nt, Human
uucccagagaaggaugaaaaag

SEQ ID NO: 290172 - RNA, 16 nt, Human
cacauauauuuauaug

SEQ ID NO: 290173 - RNA, 22 nt, Human
uuacacagugcacaagcagagu

SEQ ID NO: 290174 - RNA, 22 nt, Human
gaucuuuucagaauuuaucagu

SEQ ID NO: 290175 - RNA, 22 nt, Human
aguggggccggugaggccgagg

SEQ ID NO: 290176 - RNA, 22 nt, Human
aggcacaagaaacugcucccca

SEQ ID NO: 290177 - RNA, 22 nt, Human
agucacacugguuguuuacagu

SEQ ID NO: 290178 - RNA, 22 nt, Human
ucacaaaagcuuuugaauuugg

SEQ ID NO: 290179 - RNA, 22 nt, Human
uggcagggccugcucaucaucc

SEQ ID NO: 290180 - RNA, 22 nt, Human
aggcagguuuacucuuauuugg

SEQ ID NO: 290181 - RNA, 22 nt, Human
gaggaggguuggccuuagguag

SEQ ID NO: 290182 - RNA, 22 nt, Human
gggagccacaguagcagcuacu

SEQ ID NO: 290183 - RNA, 22 nt, Human
aagaggccuuggucugaccuga

SEQ ID NO: 290184 - RNA, 22 nt, Human
aggagaggcucuaacucugugu

SEQ ID NO: 290185 - RNA, 22 nt, Human
cuuucacagcacaagccugccu

SEQ ID NO: 290186 - RNA, 22 nt, Human
ucucuguaguugggcagcugcu

SEQ ID NO: 290187 - RNA, 22 nt, Human
uccuggcucugcugccuccuag

SEQ ID NO: 290188 - RNA, 22 nt, Human
ucaugaauauugaaugcuucau

SEQ ID NO: 290189 - RNA, 22 nt, Human
acuugguguauuagcucucacu

SEQ ID NO: 290190 - RNA, 22 nt, Human
aaaguucuuuuucuauaaaucc

SEQ ID NO: 290191 - RNA, 22 nt, Human
guccuggcuguguuugguuucu

SEQ ID NO: 290192 - RNA, 22 nt, Human
cuacaggucaagcaguagcucu

SEQ ID NO: 290193 - RNA, 22 nt, Human
ugcaguucaagguuguacagcu

SEQ ID NO: 290194 - RNA, 22 nt, Human
uuugacauggaauaacucauuu

SEQ ID NO: 290195 - RNA, 22 nt, Human
guccagucacugucaauguucc

SEQ ID NO: 290196 - RNA, 22 nt, Human
auaaugaggauuugcauauuag

SEQ ID NO: 290197 - RNA, 22 nt, Human
caaauagugucacauugugagg

SEQ ID NO: 290198 - RNA, 22 nt, Human
ggccacugccuccgccauggcu

SEQ ID NO: 290199 - RNA, 22 nt, Human
ccugccuucagcccugaagucu

SEQ ID NO: 290200 - RNA, 22 nt, Human
uuugugcagauguauauuugug

SEQ ID NO: 290201 - RNA, 22 nt, Human
caagauuuauauuuucacacaa

SEQ ID NO: 290202 - RNA, 22 nt, Human
agaauuguucuguagcuuggcu

SEQ ID NO: 290203 - RNA, 22 nt, Human
cgcaccacugaauuccagccug

SEQ ID NO: 290204 - RNA, 22 nt, Human
acagcauggauaacaaggcacu

SEQ ID NO: 290205 - RNA, 22 nt, Human
ucagacagauuuugacacuugc

SEQ ID NO: 290206 - RNA, 22 nt, Human
gcucugagacaguagagauggc

SEQ ID NO: 290207 - RNA, 22 nt, Human
uagaacauaagucauucauuug

SEQ ID NO: 290208 - RNA, 23 nt, Human
agcagcaaaaauuuaucuuucug

SEQ ID NO: 290209 - RNA, 22 nt, Human
ugaccaguuaagucauccuguc

SEQ ID NO: 290210 - RNA, 22 nt, Human
ccugagaguaggugucucuuua

SEQ ID NO: 290211 - RNA, 22 nt, Human
guccuuccugcagggauggaug

SEQ ID NO: 290212 - RNA, 22 nt, Human
aauauguucaaaauagaucacu

SEQ ID NO: 290213 - RNA, 22 nt, Human
agcacugauuuaaacuggauuu

SEQ ID NO: 290214 - RNA, 22 nt, Human
cuucucccuggcuucugcacac

SEQ ID NO: 290215 - RNA, 22 nt, Human
uuggaaaguuuuuacugaagac

SEQ ID NO: 290216 - RNA, 22 nt, Human
aaagcagguugcaauuacagug

SEQ ID NO: 290217 - RNA, 22 nt, Human
cuucagaauccagaaucagaau

SEQ ID NO: 290218 - RNA, 22 nt, Human
uagguggugugcgaagagcgug

SEQ ID NO: 290219 - RNA, 22 nt, Human
auucuucacauaagugcuguac

SEQ ID NO: 290220 - RNA, 22 nt, Human
gugaccauuugacauauccuug

SEQ ID NO: 290221 - RNA, 22 nt, Human
cuccuggccccagaucccaauc

SEQ ID NO: 290222 - RNA, 22 nt, Human
ucauuucucccggccaaaaacu

SEQ ID NO: 290223 - RNA, 22 nt, Human
cauucccaugacuccugcucag

SEQ ID NO: 290224 - RNA, 22 nt, Human
cucaggagaugacagaagguau

SEQ ID NO: 290225 - RNA, 22 nt, Human
gccuccccugcaauuguccuug

SEQ ID NO: 290226 - RNA, 22 nt, Human
ucuuauugugaugaugaagaac

SEQ ID NO: 290227 - RNA, 19 nt, Human
uuugugaagaaaaugaugc

SEQ ID NO: 290228 - RNA, 22 nt, Human
gaauuucuggacccuuugagaa

SEQ ID NO: 290229 - RNA, 22 nt, Human
ucuaaaaaagucuguucacuug

SEQ ID NO: 290230 - RNA, 22 nt, Human
accuguuuuccuaucuagauug

SEQ ID NO: 290231 - RNA, 22 nt, Human
acaguauacauugauuaggacc

SEQ ID NO: 290232 - RNA, 22 nt, Human
acaugccagcccauuuaaaugg

SEQ ID NO: 290233 - RNA, 22 nt, Human
agacaaaugguaauuaugucua

SEQ ID NO: 290234 - RNA, 20 nt, Human
ucccaaggaugccugggugu

SEQ ID NO: 290235 - RNA, 22 nt, Human
acacaguucuuucacuguuggu

SEQ ID NO: 290236 - RNA, 22 nt, Human
uuggaggaaauugcuuuugugg

SEQ ID NO: 290237 - RNA, 22 nt, Human
gagacacacauucuggagagaa

SEQ ID NO: 290238 - RNA, 22 nt, Human
acuuccaggaggugucacugaa

SEQ ID NO: 290239 - RNA, 22 nt, Human
agaugaagauaucugcaggggc

SEQ ID NO: 290240 - RNA, 22 nt, Human
ugggucuguagggcuguccaau

SEQ ID NO: 290241 - RNA, 22 nt, Human
gcuuucugguucucaaagcacu

SEQ ID NO: 290242 - RNA, 22 nt, Human
ucuggcaggccuugucaaucug

SEQ ID NO: 290243 - RNA, 22 nt, Human
auguaccucugcauuccugccu

SEQ ID NO: 290244 - RNA, 22 nt, Human
uccuucuguagucccugucccu

SEQ ID NO: 290245 - RNA, 22 nt, Human
ugcuggagucucuugacccugg

SEQ ID NO: 290246 - RNA, 22 nt, Human
acuaaauaguuuugacagaaca

SEQ ID NO: 290247 - RNA, 22 nt, Human
ugcuuuauagacaaggaaguag

SEQ ID NO: 290248 - RNA, 22 nt, Human
aguccaggcauuccagccauuc

SEQ ID NO: 290249 - RNA, 22 nt, Human
uguguuuugaacucaucuacug

SEQ ID NO: 290250 - RNA, 22 nt, Human
acagauggagcuacuagguaaa

SEQ ID NO: 290251 - RNA, 22 nt, Human
uuauuggaaaagggcuguaauu

SEQ ID NO: 290252 - RNA, 22 nt, Human
agccuucacugggaccuuggau

SEQ ID NO: 290253 - RNA, 22 nt, Human
aggaagaacagauaauggacgc

SEQ ID NO: 290254 - RNA, 22 nt, Human
cugauagacaaucaccauggga

SEQ ID NO: 290255 - RNA, 22 nt, Human
aaggcuuuugggaauuuucaac

SEQ ID NO: 290256 - RNA, 22 nt, Human
acagcaggauuuggcgauguug

SEQ ID NO: 290257 - RNA, 22 nt, Human
cuggcuguaacauuuugccaua

SEQ ID NO: 290258 - RNA, 22 nt, Human
cuagaugccaauuuuuauggau

SEQ ID NO: 290259 - RNA, 22 nt, Human
uaaaguuuauuugaacaucucu

SEQ ID NO: 290260 - RNA, 22 nt, Human
uccucuccaugucucacgccac

SEQ ID NO: 290261 - RNA, 20 nt, Human
gacaggugcuaaagaggggc

SEQ ID NO: 290262 - RNA, 20 nt, Human
uuagaaagagcgugauaaga

SEQ ID NO: 290263 - RNA, 22 nt, Human
aauauccacacugugucccugc

SEQ ID NO: 290264 - RNA, 23 nt, Human
agcuccugaggccagccucuccu

SEQ ID NO: 290265 - RNA, 22 nt, Human
uguucagagacagaaauucuaa

SEQ ID NO: 290266 - RNA, 22 nt, Human
auaguacagcauuuuuccugag

SEQ ID NO: 290267 - RNA, 19 nt, Human
auauauguauacaaugugg

SEQ ID NO: 290268 - RNA, 20 nt, Human
cuugguggcucugggaagug

SEQ ID NO: 290269 - RNA, 22 nt, Human
augacagaugcuguggggaggu

SEQ ID NO: 290270 - RNA, 22 nt, Human
ccuagacauuaagcuuggguuu

SEQ ID NO: 290271 - RNA, 22 nt, Human
uucuagaaugauaugagguacu

SEQ ID NO: 290272 - RNA, 22 nt, Human
ucacuggggagcacugacaugu

SEQ ID NO: 290273 - RNA, 22 nt, Human
ugaguacucggagugcuuugga

SEQ ID NO: 290274 - RNA, 22 nt, Human
uaaaaucagccgaccauggugg

SEQ ID NO: 290275 - RNA, 19 nt, Human
uuucagacauuucaaauuu

SEQ ID NO: 290276 - RNA, 22 nt, Human
uggagcaggugggaugucguga

SEQ ID NO: 290277 - RNA, 22 nt, Human
auucuggguucaugagugagcu

SEQ ID NO: 290278 - RNA, 22 nt, Human
gucugcccuggggcaucaguuu

SEQ ID NO: 290279 - RNA, 22 nt, Human
aagcugcagaugugccugugga

SEQ ID NO: 290280 - RNA, 23 nt, Human
uuuauacaagaaaccgcuggccu

SEQ ID NO: 290281 - RNA, 22 nt, Human
aggggagagaacauaaggaagu

SEQ ID NO: 290282 - RNA, 22 nt, Human
ugccuucaccaggccuucagcc

SEQ ID NO: 290283 - RNA, 22 nt, Human
agggccagcuagagcccucgcc

SEQ ID NO: 290284 - RNA, 23 nt, Human
ugcagggcaaguuagagacccca

SEQ ID NO: 290285 - RNA, 22 nt, Human
ugguggacauucuggaugugcu

SEQ ID NO: 290286 - RNA, 22 nt, Human
acaauuccugagaauacuuguu

SEQ ID NO: 290287 - RNA, 22 nt, Human
uuuacagucaccaaacuuugcu

SEQ ID NO: 290288 - RNA, 22 nt, Human
aaucaguuguccaaaguucaca

SEQ ID NO: 290289 - RNA, 22 nt, Human
gacagacaggugugguaggcac

SEQ ID NO: 290290 - RNA, 22 nt, Human
gcuaggaggaagaaugugaauu

SEQ ID NO: 290291 - RNA, 22 nt, Human
gagaaagauguaggcugggagg

SEQ ID NO: 290292 - RNA, 22 nt, Human
ggaggccaaggcagguggauca

SEQ ID NO: 290293 - RNA, 22 nt, Human
uaccuguugucacgauaacacu

SEQ ID NO: 290294 - RNA, 22 nt, Human
cucuuagaaagaaacacacugg

SEQ ID NO: 290295 - RNA, 22 nt, Human
accucaagugauccacucaccu

SEQ ID NO: 290296 - RNA, 22 nt, Human
auggaguucuuuaaauucacag

SEQ ID NO: 290297 - RNA, 21 nt, Human
gcugggucagcagguccucug

SEQ ID NO: 290298 - RNA, 22 nt, Human
uguccucagauaugucuacucu

SEQ ID NO: 290299 - RNA, 22 nt, Human
cagggcucccucuggcucccag

SEQ ID NO: 290300 - RNA, 19 nt, Human
uuuuuacaaguagguguga

SEQ ID NO: 290301 - RNA, 22 nt, Human
gcuggcagucccaucagcuggg

SEQ ID NO: 290302 - RNA, 22 nt, Human
ugagccagcuccuugccuguca

SEQ ID NO: 290303 - RNA, 22 nt, Human
gcacccagggacuuggcuggcc

SEQ ID NO: 290304 - RNA, 22 nt, Human
uccaggagggauugggcugugg

SEQ ID NO: 290305 - RNA, 22 nt, Human
caucuuuaguuauugaauauag

SEQ ID NO: 290306 - RNA, 22 nt, Human
ccaguccugugugacccugcac

SEQ ID NO: 290307 - RNA, 18 nt, Human
gcagguguggagaagggg

SEQ ID NO: 290308 - RNA, 17 nt, Human
ggcaggugacagacacc

SEQ ID NO: 290309 - RNA, 22 nt, Human
uggaaauggaucugaugagucu

SEQ ID NO: 290310 - RNA, 22 nt, Human
uuuacagugucuuguugacugu

SEQ ID NO: 290311 - RNA, 22 nt, Human
ccuggcacugaccaggcacuga

SEQ ID NO: 290312 - RNA, 17 nt, Human
gcagaaaagucaaggga

SEQ ID NO: 290313 - RNA, 22 nt, Human
uggggucccaacucugauugau

SEQ ID NO: 290314 - RNA, 22 nt, Human
uaggaaauggcucaguuacugc

SEQ ID NO: 290315 - RNA, 22 nt, Human
cccagcuugucugauucagccu

SEQ ID NO: 290316 - RNA, 22 nt, Human
auauuaaaacuaugguuuucag

SEQ ID NO: 290317 - RNA, 22 nt, Human
gcuagaaaaugaaagauaauuu

SEQ ID NO: 290318 - RNA, 22 nt, Human
aacaagauguuuugauauaugu

SEQ ID NO: 290319 - RNA, 18 nt, Human
uccugcagcuucuaugua

SEQ ID NO: 290320 - RNA, 15 nt, Human
uacauucauuuccac

SEQ ID NO: 290321 - RNA, 22 nt, Human
aggggaauggguagacuguuga

SEQ ID NO: 290322 - RNA, 22 nt, Human
uuuuauugucucccaguucugg

SEQ ID NO: 290323 - RNA, 22 nt, Human
ugucuucaucucagacacaguu

SEQ ID NO: 290324 - RNA, 21 nt, Human
cccuugccugcacuccucggc

SEQ ID NO: 290325 - RNA, 21 nt, Human
agcaggugaaccuccaguaca

SEQ ID NO: 290326 - RNA, 22 nt, Human
ccacaggcugcugcaggucccg

SEQ ID NO: 290327 - RNA, 22 nt, Human
cagcaugagaaaaugaaucaga

SEQ ID NO: 290328 - RNA, 22 nt, Human
ccuccugggacaggcuggcaca

SEQ ID NO: 290329 - RNA, 22 nt, Human
uuuuuauacuuugcucaagauu

SEQ ID NO: 290330 - RNA, 22 nt, Human
agcagguguuagggauccaaug

SEQ ID NO: 290331 - RNA, 22 nt, Human
augcuuuuaugucacaugguca

SEQ ID NO: 290332 - RNA, 22 nt, Human
caguucuuauuuggccaguguc

SEQ ID NO: 290333 - RNA, 22 nt, Human
aaacagcuaauggccaggaaua

SEQ ID NO: 290334 - RNA, 22 nt, Human
uuacacaacaucuguauuauua

SEQ ID NO: 290335 - RNA, 22 nt, Human
cuccuggcucugccacuuacua

SEQ ID NO: 290336 - RNA, 22 nt, Human
gggagggaggugcugguucacg

SEQ ID NO: 290337 - RNA, 22 nt, Human
uacauguggagauaacugaagc

SEQ ID NO: 290338 - RNA, 22 nt, Human
ucugacuuuucucacuguugug

SEQ ID NO: 290339 - RNA, 22 nt, Human
uggcagguuucguuaaaaaugg

SEQ ID NO: 290340 - RNA, 14 nt, Human
gcagguggaucacu

SEQ ID NO: 290341 - RNA, 22 nt, Human
gcuggaagaaugagugccucgu

SEQ ID NO: 290342 - RNA, 22 nt, Human
agcugugggccugggagagcug

SEQ ID NO: 290343 - RNA, 22 nt, Human
acaggcagcacuaaucucuggu

SEQ ID NO: 290344 - RNA, 22 nt, Human
aagggcucugggcuacgcacug

SEQ ID NO: 290345 - RNA, 22 nt, Human
auaugagaauuggaaaauauca

SEQ ID NO: 290346 - RNA, 22 nt, Human
agcaaacagugugcuaagaaau

SEQ ID NO: 290347 - RNA, 22 nt, Human
gcuggcuugauaguuucugcuu

SEQ ID NO: 290348 - RNA, 22 nt, Human
gaggccuggugcuguguccaca

SEQ ID NO: 290349 - RNA, 19 nt, Human
aaaaacuuaguccagaaag

SEQ ID NO: 290350 - RNA, 22 nt, Human
uccuucuccuccuugagugaca

SEQ ID NO: 290351 - RNA, 22 nt, Human
uuacauguggugugaagaagag

SEQ ID NO: 290352 - RNA, 22 nt, Human
acaugugucuaagaaugaaaga

SEQ ID NO: 290353 - RNA, 22 nt, Human
uuauguuuuaaguguguaucuu

SEQ ID NO: 290354 - RNA, 22 nt, Human
cagaucaagcuguauggucaga

SEQ ID NO: 290355 - RNA, 22 nt, Human
uuucacauuagauaugucauuu

SEQ ID NO: 290356 - RNA, 19 nt, Human
agguccucaggaugacccu

SEQ ID NO: 290357 - RNA, 22 nt, Human
aacuguuuggaacucuuccaca

SEQ ID NO: 290358 - RNA, 22 nt, Human
uuauuuguaaagguccauagua

SEQ ID NO: 290359 - RNA, 22 nt, Human
cacugucuugauuacuaugggu

SEQ ID NO: 290360 - RNA, 22 nt, Human
uauuuuagguaauauccauugu

SEQ ID NO: 290361 - RNA, 21 nt, Human
uuuaaagaauaggaagggagg

SEQ ID NO: 290362 - RNA, 22 nt, Human
acugugagugauuuccuucugg

SEQ ID NO: 290363 - RNA, 22 nt, Human
guagccauuggcaaugaagccu

SEQ ID NO: 290364 - RNA, 22 nt, Human
uuaugcaacaggugagcagaca

SEQ ID NO: 290365 - RNA, 22 nt, Human
ugacauuugagcauacauguaa

SEQ ID NO: 290366 - RNA, 22 nt, Human
uuuaauuugaaaugaguaaccc

SEQ ID NO: 290367 - RNA, 22 nt, Human
ugguuccaaucgcacuggcuca

SEQ ID NO: 290368 - RNA, 22 nt, Human
guguguccucaguaguggcaug

SEQ ID NO: 290369 - RNA, 19 nt, Human
gcuccugggccucacucau

SEQ ID NO: 290370 - RNA, 22 nt, Human
acagugcacauccugagugauu

SEQ ID NO: 290371 - RNA, 17 nt, Human
cauuuguugaucaguug

SEQ ID NO: 290372 - RNA, 22 nt, Human
ucaguguccuucguucuuguug

SEQ ID NO: 290373 - RNA, 22 nt, Human
uuauucuuuaaacauauauguu

SEQ ID NO: 290374 - RNA, 22 nt, Human
aggucagcccucucugggcagg

SEQ ID NO: 290375 - RNA, 22 nt, Human
gcccaggcuggagugcaguagc

SEQ ID NO: 290376 - RNA, 19 nt, Human
agcagguggguaagaaaau

SEQ ID NO: 290377 - RNA, 17 nt, Human
uuugauagaaucagagu

SEQ ID NO: 290378 - RNA, 22 nt, Human
ugucaguucagugauuacaaaa

SEQ ID NO: 290379 - RNA, 22 nt, Human
gguguccuugcagaaggcggcg

SEQ ID NO: 290380 - RNA, 22 nt, Human
uuaguacagaaucaaaagcaau

SEQ ID NO: 290381 - RNA, 22 nt, Human
gcaggugucuucauggaacucu

SEQ ID NO: 290382 - RNA, 22 nt, Human
cucuggaauugaccugggaggg

SEQ ID NO: 290383 - RNA, 22 nt, Human
guggacagcuucuaggugccag

SEQ ID NO: 290384 - RNA, 22 nt, Human
gccuguuuaaguauucugacau

SEQ ID NO: 290385 - RNA, 22 nt, Human
agacaucagcuugugugcaggg

SEQ ID NO: 290386 - RNA, 22 nt, Human
gagggcucugucuggaagggaa

SEQ ID NO: 290387 - RNA, 22 nt, Human
uuugacucuugucucuuguuag

SEQ ID NO: 290388 - RNA, 21 nt, Human
ucaugcaggcagaguuuggua

SEQ ID NO: 290389 - RNA, 22 nt, Human
ucuauuuuauacucaaaucuuc

SEQ ID NO: 290390 - RNA, 22 nt, Human
auuuauugagagggaggggaau

SEQ ID NO: 290391 - RNA, 22 nt, Human
agccauccuacuaccucagcau

SEQ ID NO: 290392 - RNA, 17 nt, Human
ucagggaaugagguugu

SEQ ID NO: 290393 - RNA, 22 nt, Human
uuugagguuagcuagcagauca

SEQ ID NO: 290394 - RNA, 22 nt, Human
cuuuucucugcgggucuuucau

SEQ ID NO: 290395 - RNA, 20 nt, Human
ucacaauaugagcucauaca

SEQ ID NO: 290396 - RNA, 22 nt, Human
uucugauugcugaugaggccca

SEQ ID NO: 290397 - RNA, 22 nt, Human
uuugaacagggaauguuccaca

SEQ ID NO: 290398 - RNA, 22 nt, Human
uucauucuugucuuuguauagu

SEQ ID NO: 290399 - RNA, 22 nt, Human
uuauacacguuuauggagcuac

SEQ ID NO: 290400 - RNA, 22 nt, Human
gaguccuuuucucuguccacug

SEQ ID NO: 290401 - RNA, 22 nt, Human
gccugcagggugaugggcugcc

SEQ ID NO: 290402 - RNA, 22 nt, Human
ucauuucucugagucugauaau

SEQ ID NO: 290403 - RNA, 22 nt, Human
caacaccuugaucuuggacuuc

SEQ ID NO: 290404 - RNA, 22 nt, Human
aggcagguguuaacccucugag

SEQ ID NO: 290405 - RNA, 22 nt, Human
ugacccauuugcuuuuccugua

SEQ ID NO: 290406 - RNA, 19 nt, Human
acagcagguguggggauaa

SEQ ID NO: 290407 - RNA, 22 nt, Human
ugaccuuucuuugagauuccug

SEQ ID NO: 290408 - RNA, 22 nt, Human
cauuaauaaacauuucagaaga

SEQ ID NO: 290409 - RNA, 22 nt, Human
aguuuucuguucuacaauuuga

SEQ ID NO: 290410 - RNA, 22 nt, Human
ucugaaauguucucuuguuuug

SEQ ID NO: 290411 - RNA, 22 nt, Human
auuuacaggacagcuuggcauu

SEQ ID NO: 290412 - RNA, 22 nt, Human
ccugugcccucagccuggcucu

SEQ ID NO: 290413 - RNA, 22 nt, Human
aaagcugcaagcuccugaggaa

SEQ ID NO: 290414 - RNA, 22 nt, Human
gagucagaauuguauuuuaaac

SEQ ID NO: 290415 - RNA, 22 nt, Human
agcuaggagauuuugugaggcu

SEQ ID NO: 290416 - RNA, 22 nt, Human
ccagacaguuccuugagguuca

SEQ ID NO: 290417 - RNA, 21 nt, Human
cuguggacaggcuggggcaug

SEQ ID NO: 290418 - RNA, 22 nt, Human
cuugaaguugcaaaacauuaau

SEQ ID NO: 290419 - RNA, 22 nt, Human
cccagcuucugagggggccuug

SEQ ID NO: 290420 - RNA, 22 nt, Human
ugagcccuccaaacccaggauu

SEQ ID NO: 290421 - RNA, 17 nt, Human
gcauccaguaacaugcc

SEQ ID NO: 290422 - RNA, 22 nt, Human
ucagcuuuccugcagcuaaggg

SEQ ID NO: 290423 - RNA, 21 nt, Human
uucuucuuggacuguuuuggc

SEQ ID NO: 290424 - RNA, 22 nt, Human
aagcacaggagacgcacagcca

SEQ ID NO: 290425 - RNA, 22 nt, Human
agcugcaaguaagcuugcuccu

SEQ ID NO: 290426 - RNA, 22 nt, Human
gcagggacaaggcagguguucu

SEQ ID NO: 290427 - RNA, 22 nt, Human
cugagcccuugaacccaagucc

SEQ ID NO: 290428 - RNA, 22 nt, Human
caggcucagcucuggccagugc

SEQ ID NO: 290429 - RNA, 22 nt, Human
cugccugcuucugagccagagg

SEQ ID NO: 290430 - RNA, 22 nt, Human
cagacagaccugcaagggcaca

SEQ ID NO: 290431 - RNA, 18 nt, Human
agcuccuggucucaggga

SEQ ID NO: 290432 - RNA, 22 nt, Human
gcugucuugaugauuggaugcu

SEQ ID NO: 290433 - RNA, 22 nt, Human
ugcugggugguugcuccucccg

SEQ ID NO: 290434 - RNA, 22 nt, Human
uccuggccgccgcguggggccg

SEQ ID NO: 290435 - RNA, 22 nt, Human
ggcuuuauaggguagaggauca

SEQ ID NO: 290436 - RNA, 22 nt, Human
uuccuuucccucacagccucgg

SEQ ID NO: 290437 - RNA, 22 nt, Human
cggcaggugugcucacucugcc

SEQ ID NO: 290438 - RNA, 22 nt, Human
auuucagaugaccaaauggaaa

SEQ ID NO: 290439 - RNA, 22 nt, Human
cacaggcuuuuuuggcugaugu

SEQ ID NO: 290440 - RNA, 18 nt, Human
gccucuguugcuugccug

SEQ ID NO: 290441 - RNA, 22 nt, Human
cuucuuuagggaucucuugcug

SEQ ID NO: 290442 - RNA, 22 nt, Human
ggaccugcucucccaguucucu

SEQ ID NO: 290443 - RNA, 22 nt, Human
aguggcaguagaugagcugguu

SEQ ID NO: 290444 - RNA, 22 nt, Human
gccuccuggccuuugcuccuca

SEQ ID NO: 290445 - RNA, 22 nt, Human
caugugucaaaugauguagcug

SEQ ID NO: 290446 - RNA, 22 nt, Human
gcagacaggcccaguggaggga

SEQ ID NO: 290447 - RNA, 22 nt, Human
gcugcgccggaucccacguucc

SEQ ID NO: 290448 - RNA, 22 nt, Human
ccagagcccagggucaugcagg

SEQ ID NO: 290449 - RNA, 22 nt, Human
agcuggucuuaaauguguccag

SEQ ID NO: 290450 - RNA, 22 nt, Human
caaggcauuucgcuuagagaga

SEQ ID NO: 290451 - RNA, 22 nt, Human
gauuuuuauauaaagugagaaa

SEQ ID NO: 290452 - RNA, 22 nt, Human
agaucauagcacaaaagugaca

SEQ ID NO: 290453 - RNA, 22 nt, Human
ccugaagaaaauuccacgagaa

SEQ ID NO: 290454 - RNA, 22 nt, Human
augaaaaguucgaucuagaagg

SEQ ID NO: 290455 - RNA, 22 nt, Human
ggcuguggucauuaggagguug

SEQ ID NO: 290456 - RNA, 22 nt, Human
gauucuuacuucuaagcaagcu

SEQ ID NO: 290457 - RNA, 22 nt, Human
ucccuagucgcaucuguggaga

SEQ ID NO: 290458 - RNA, 21 nt, Human
agagucugagugugcaagggc

SEQ ID NO: 290459 - RNA, 20 nt, Human
gauguguccucagcaguggu

SEQ ID NO: 290460 - RNA, 22 nt, Human
auauuaaugagcaaguaaguga

SEQ ID NO: 290461 - RNA, 22 nt, Human
ccagggcacuuaggcccagccc

SEQ ID NO: 290462 - RNA, 22 nt, Human
uauuuugcaaaccugaguuuga

SEQ ID NO: 290463 - RNA, 22 nt, Human
auccuucuaagagggacguaug

SEQ ID NO: 290464 - RNA, 22 nt, Human
aacuuaaacccacucauguaga

SEQ ID NO: 290465 - RNA, 22 nt, Human
gcgcacugggcgcacgcguagg

SEQ ID NO: 290466 - RNA, 22 nt, Human
cagauaugauaggauuagcaca

SEQ ID NO: 290467 - RNA, 22 nt, Human
acauuuaaguuaaaaccucagu

SEQ ID NO: 290468 - RNA, 22 nt, Human
cacauuccuuacauucauagag

SEQ ID NO: 290469 - RNA, 22 nt, Human
agcacagaguugcagagagcgu

SEQ ID NO: 290470 - RNA, 22 nt, Human
ccugugccuuccuuaggcaccu

SEQ ID NO: 290471 - RNA, 22 nt, Human
auuaaauuuucacuaggcuccc

SEQ ID NO: 290472 - RNA, 22 nt, Human
cugggugaauuugaaggaaagg

SEQ ID NO: 290473 - RNA, 22 nt, Human
uucugcuuucaguucuucuggg

SEQ ID NO: 290474 - RNA, 22 nt, Human
augguacaauuuucauuugugg

SEQ ID NO: 290475 - RNA, 22 nt, Human
auuuccauacacccauuucuga

SEQ ID NO: 290476 - RNA, 22 nt, Human
ccaaggagcugcaggcacuugu

SEQ ID NO: 290477 - RNA, 22 nt, Human
ucuucuggaucgaucacauugu

SEQ ID NO: 290478 - RNA, 22 nt, Human
ggaccugcccuggcucagaugc

SEQ ID NO: 290479 - RNA, 21 nt, Human
augauucugcaaaugaguagu

SEQ ID NO: 290480 - RNA, 22 nt, Human
agaggagguggugaugcuuuaa

SEQ ID NO: 290481 - RNA, 22 nt, Human
auuagauacacagauuuccacu

SEQ ID NO: 290482 - RNA, 21 nt, Human
uccugccuuaguccagagcag

SEQ ID NO: 290483 - RNA, 22 nt, Human
acuaaagaugucuaaauauauu

SEQ ID NO: 290484 - RNA, 22 nt, Human
cagguuggggacuuaggaugac

SEQ ID NO: 290485 - RNA, 21 nt, Human
uggaggaauaaagcacagaag

SEQ ID NO: 290486 - RNA, 22 nt, Human
uaguuuaauggucaacuaauga

SEQ ID NO: 290487 - RNA, 22 nt, Human
uauucccugauguacacuggca

SEQ ID NO: 290488 - RNA, 22 nt, Human
guguauguucuacuuaauauua

SEQ ID NO: 290489 - RNA, 22 nt, Human
gcauagucaguaggauucucaa

SEQ ID NO: 290490 - RNA, 22 nt, Human
acauguaacauauauguagcau

SEQ ID NO: 290491 - RNA, 22 nt, Human
uguauacauuuaacuagauaga

SEQ ID NO: 290492 - RNA, 22 nt, Human
uccuggcugucacucggguuga

SEQ ID NO: 290493 - RNA, 22 nt, Human
auucuuuaguuggcuucuugcc

SEQ ID NO: 290494 - RNA, 22 nt, Human
agcagcaauaauaaaguaauac

SEQ ID NO: 290495 - RNA, 22 nt, Human
cugaggagucagcuuacucacu

SEQ ID NO: 290496 - RNA, 22 nt, Human
uguaugcacauauauagguaca

SEQ ID NO: 290497 - RNA, 22 nt, Human
cacugucugagcuggugauuag

SEQ ID NO: 290498 - RNA, 22 nt, Human
cuggcagggugggcuuugcuuu

SEQ ID NO: 290499 - RNA, 22 nt, Human
aaaguguuuugauuuaguggua

SEQ ID NO: 290500 - RNA, 22 nt, Human
aggcaaagaggauauuuugggg

SEQ ID NO: 290501 - RNA, 22 nt, Human
uucuccauuuaacuuccuuaug

SEQ ID NO: 290502 - RNA, 22 nt, Human
ugccagccagggaagcucaccc

SEQ ID NO: 290503 - RNA, 22 nt, Human
ucauguguguuucauguaugga

SEQ ID NO: 290504 - RNA, 22 nt, Human
ggacacaaaagugaauaaaaua

SEQ ID NO: 290505 - RNA, 22 nt, Human
agccacugugugaccagcuguc

SEQ ID NO: 290506 - RNA, 22 nt, Human
uguuucauuaguacugacaaua

SEQ ID NO: 290507 - RNA, 22 nt, Human
ggcuuucucacagcauggcagc

SEQ ID NO: 290508 - RNA, 22 nt, Human
acagagagaaacaaucagcagc

SEQ ID NO: 290509 - RNA, 21 nt, Human
uaagugcaaagagacagauac

SEQ ID NO: 290510 - RNA, 22 nt, Human
ugacauuuuaucaauaucacag

SEQ ID NO: 290511 - RNA, 22 nt, Human
uauuuauuggacaguguugcug

SEQ ID NO: 290512 - RNA, 22 nt, Human
ugcagggccagacuggguugga

SEQ ID NO: 290513 - RNA, 22 nt, Human
ugauuucuuccuugucauuaga

SEQ ID NO: 290514 - RNA, 22 nt, Human
gcuggcaggagccuuucccuuu

SEQ ID NO: 290515 - RNA, 22 nt, Human
caaaaaacacagaugucugugu

SEQ ID NO: 290516 - RNA, 23 nt, Human
aaauauucuuuuuuaguaagugc

SEQ ID NO: 290517 - RNA, 22 nt, Human
uggcagggccugaaucuuauac

SEQ ID NO: 290518 - RNA, 22 nt, Human
uucuaagaaauggaaaacgauu

SEQ ID NO: 290519 - RNA, 22 nt, Human
gaacuguaguuaauacuacaca

SEQ ID NO: 290520 - RNA, 22 nt, Human
uuuaacauguucaagaaacaua

SEQ ID NO: 290521 - RNA, 22 nt, Human
uccuggccucugagucaagaac

SEQ ID NO: 290522 - RNA, 22 nt, Human
aggauucagaauguaugcagug

SEQ ID NO: 290523 - RNA, 22 nt, Human
gugagcauauauguaaucguuu

SEQ ID NO: 290524 - RNA, 22 nt, Human
gcaaagaaaugucagugagagg

SEQ ID NO: 290525 - RNA, 22 nt, Human
ugggcagggucucuguuaucag

SEQ ID NO: 290526 - RNA, 22 nt, Human
uugcaaguuccuuaugagaauc

SEQ ID NO: 290527 - RNA, 22 nt, Human
auuuccaggagaaaggauuuua

SEQ ID NO: 290528 - RNA, 19 nt, Human
ucucucuguacauuagaua

SEQ ID NO: 290529 - RNA, 22 nt, Human
acuguguggaccacucugaggc

SEQ ID NO: 290530 - RNA, 22 nt, Human
guuaaauucgaugauggauaaa

SEQ ID NO: 290531 - RNA, 22 nt, Human
ccuuuggucuugaugaacuguu

SEQ ID NO: 290532 - RNA, 22 nt, Human
agcuguggggcaggcagcgagg

SEQ ID NO: 290533 - RNA, 22 nt, Human
uugaauucauuucucauugagu

SEQ ID NO: 290534 - RNA, 22 nt, Human
auuuuguuauaggagcugaaau

SEQ ID NO: 290535 - RNA, 22 nt, Human
gaaauuauugcuagagacugca

SEQ ID NO: 290536 - RNA, 22 nt, Human
gauuucuaguaagucaugaagg

SEQ ID NO: 290537 - RNA, 22 nt, Human
uccuccuuguucuuuugccuac

SEQ ID NO: 290538 - RNA, 22 nt, Human
ucuccuggcccugucgccaucu

SEQ ID NO: 290539 - RNA, 22 nt, Human
ugcacaggaggcuguggagaag

SEQ ID NO: 290540 - RNA, 22 nt, Human
auuucucagugaaaugacaggc

SEQ ID NO: 290541 - RNA, 22 nt, Human
acaugacaaaaugcacaggauu

SEQ ID NO: 290542 - RNA, 22 nt, Human
uucuuucuguccauaaugagac

SEQ ID NO: 290543 - RNA, 22 nt, Human
uugcuaauaaaguuuuuaugug

SEQ ID NO: 290544 - RNA, 22 nt, Human
aguggggccgcgguccugcccu

SEQ ID NO: 290545 - RNA, 22 nt, Human
gugcccaggugucccugagaag

SEQ ID NO: 290546 - RNA, 22 nt, Human
uuuauuagauuaucaaagaggu

SEQ ID NO: 290547 - RNA, 22 nt, Human
cauuuucaugaguuucuguuca

SEQ ID NO: 290548 - RNA, 22 nt, Human
ccuuccuuucagggcuaugccu

SEQ ID NO: 290549 - RNA, 22 nt, Human
uuggaggaagcucaugggggau

SEQ ID NO: 290550 - RNA, 22 nt, Human
uuucaguuuaugucuugaauua

SEQ ID NO: 290551 - RNA, 22 nt, Human
agagccuugaagaucuggaaaa

SEQ ID NO: 290552 - RNA, 22 nt, Human
cucaggagacaguguccacaug

SEQ ID NO: 290553 - RNA, 22 nt, Human
uuccaggaccaggaagagggga

SEQ ID NO: 290554 - RNA, 22 nt, Human
uuguguccuauaugcauguucu

SEQ ID NO: 290555 - RNA, 22 nt, Human
acauuucuucccuuuagcagaa

SEQ ID NO: 290556 - RNA, 22 nt, Human
gacugugggcuccuugagggca

SEQ ID NO: 290557 - RNA, 22 nt, Human
gcauccagagguagccacugug

SEQ ID NO: 290558 - RNA, 22 nt, Human
cuguugcuaaguagugcaggua

SEQ ID NO: 290559 - RNA, 22 nt, Human
uuacauucaauuucuagaggua

SEQ ID NO: 290560 - RNA, 22 nt, Human
ucagggcaaugucccucagaag

SEQ ID NO: 290561 - RNA, 22 nt, Human
aacaggcaggagaauucugccu

SEQ ID NO: 290562 - RNA, 22 nt, Human
ccuucucccucugagaggaacc

SEQ ID NO: 290563 - RNA, 22 nt, Human
ggaaucagaugaggggcagagc

SEQ ID NO: 290564 - RNA, 22 nt, Human
uucaugugaauauauuugucuu

SEQ ID NO: 290565 - RNA, 22 nt, Human
ggccuugauccuccagagcacu

SEQ ID NO: 290566 - RNA, 23 nt, Human
agauuguuauucccaguucaugu

SEQ ID NO: 290567 - RNA, 22 nt, Human
uccaggcaugucccaagccgga

SEQ ID NO: 290568 - RNA, 22 nt, Human
cagcugucagccggugcaggcu

SEQ ID NO: 290569 - RNA, 22 nt, Human
ucuggaugggaugaggcaacaa

SEQ ID NO: 290570 - RNA, 22 nt, Human
acauuaaacuugcuuggcugua

SEQ ID NO: 290571 - RNA, 22 nt, Human
uuucuuuccauacauauugcua

SEQ ID NO: 290572 - RNA, 22 nt, Human
agggcagcuaaggugcugacug

SEQ ID NO: 290573 - RNA, 20 nt, Human
uucacauuucuguagugauu

SEQ ID NO: 290574 - RNA, 22 nt, Human
uggaauguaaaccucagguggg

SEQ ID NO: 290575 - RNA, 22 nt, Human
gcaaggagacuguagggccaag

SEQ ID NO: 290576 - RNA, 22 nt, Human
uuucacauucuucugaaucuac

SEQ ID NO: 290577 - RNA, 22 nt, Human
uuuguucaugccuauauucuca

SEQ ID NO: 290578 - RNA, 22 nt, Human
uaggaggcauuugcucccaggg

SEQ ID NO: 290579 - RNA, 22 nt, Human
uacauguaauuuucauaguaag

SEQ ID NO: 290580 - RNA, 22 nt, Human
uugugucccuggagcuucugug

SEQ ID NO: 290581 - RNA, 22 nt, Human
uacagguaaaauuaucagaaac

SEQ ID NO: 290582 - RNA, 22 nt, Human
acaggugugcggaaagcuguga

SEQ ID NO: 290583 - RNA, 22 nt, Human
caggagucccucuggccagcau

SEQ ID NO: 290584 - RNA, 22 nt, Human
ugcaggugcuacaagaacucac

SEQ ID NO: 290585 - RNA, 22 nt, Human
ggaaucagaauuacugaaugga

SEQ ID NO: 290586 - RNA, 22 nt, Human
cauguaaaaaauuaggucaucu

SEQ ID NO: 290587 - RNA, 22 nt, Human
aauucccaccuucucucuuuug

SEQ ID NO: 290588 - RNA, 22 nt, Human
agcacccuucagcccagccugg

SEQ ID NO: 290589 - RNA, 22 nt, Human
uguucugagugcagcuuaauaa

SEQ ID NO: 290590 - RNA, 22 nt, Human
uggcaggucaugaguggccacc

SEQ ID NO: 290591 - RNA, 22 nt, Human
gagguggucgaggagggguacc

SEQ ID NO: 290592 - RNA, 22 nt, Human
ugcaggcuccaugaggacaggc

SEQ ID NO: 290593 - RNA, 22 nt, Human
ggcagguguggugaccagagau

SEQ ID NO: 290594 - RNA, 22 nt, Human
uucuucaguuugguaaauguaa

SEQ ID NO: 290595 - RNA, 22 nt, Human
aaugugucauuucccacaggug

SEQ ID NO: 290596 - RNA, 22 nt, Human
acauucuuauaagagugaggca

SEQ ID NO: 290597 - RNA, 22 nt, Human
cccagcagugacccagugauac

SEQ ID NO: 290598 - RNA, 22 nt, Human
aacaguaacgagauguccuaac

SEQ ID NO: 290599 - RNA, 22 nt, Human
cagagugaaaacugagcucaaa

SEQ ID NO: 290600 - RNA, 23 nt, Human
uuucuguuccucuagcuuugcau

SEQ ID NO: 290601 - RNA, 23 nt, Human
uggaggcaggaugcuaaggaguc

SEQ ID NO: 290602 - RNA, 20 nt, Human
uggucuggagccagugagga

SEQ ID NO: 290603 - RNA, 22 nt, Human
uuucaaaagcguacguagugaa

SEQ ID NO: 290604 - RNA, 22 nt, Human
aaagagucaaaggcaugucucu

SEQ ID NO: 290605 - RNA, 22 nt, Human
uacugucuggcaauuaagaauc

SEQ ID NO: 290606 - RNA, 22 nt, Human
cagcaugauuggugucugguga

SEQ ID NO: 290607 - RNA, 22 nt, Human
uuccaggcugaugggccacagg

SEQ ID NO: 290608 - RNA, 22 nt, Human
cuuccuggcaugggucucauga

SEQ ID NO: 290609 - RNA, 22 nt, Human
augucuuuuauggagaugucau

SEQ ID NO: 290610 - RNA, 22 nt, Human
ugcuggguguuccgcacuugac

SEQ ID NO: 290611 - RNA, 22 nt, Human
agggaccucuucuugcagcuga

SEQ ID NO: 290612 - RNA, 22 nt, Human
gcaggcaguugcaguuuucuag

SEQ ID NO: 290613 - RNA, 22 nt, Human
ucccagagaaagucaaggucuu

SEQ ID NO: 290614 - RNA, 22 nt, Human
aagaguaaaugucuaauuagga

SEQ ID NO: 290615 - RNA, 17 nt, Human
ggaacaaauacuaugca

SEQ ID NO: 290616 - RNA, 22 nt, Human
uugggaagaauggaggugguua

SEQ ID NO: 290617 - RNA, 22 nt, Human
uuuccuuugcccaauacauguc

SEQ ID NO: 290618 - RNA, 22 nt, Human
agcagacauggcuuggaugugg

SEQ ID NO: 290619 - RNA, 22 nt, Human
uagucagugcacagacacuugu

SEQ ID NO: 290620 - RNA, 22 nt, Human
aaagaaauagauggcauuuaaa

SEQ ID NO: 290621 - RNA, 22 nt, Human
acagacaugggccgcucuugag

SEQ ID NO: 290622 - RNA, 23 nt, Human
gggcagguuuuuauaggcuucag

SEQ ID NO: 290623 - RNA, 22 nt, Human
cuauuacauuucuggacauuca

SEQ ID NO: 290624 - RNA, 22 nt, Human
ggaaggaagugcagacuuuaaa

SEQ ID NO: 290625 - RNA, 22 nt, Human
aaaguuuuauucaagcauuagu

SEQ ID NO: 290626 - RNA, 22 nt, Human
caaaugaauauuuccauggguu

SEQ ID NO: 290627 - RNA, 22 nt, Human
caacuuuaauuugggugucaga

SEQ ID NO: 290628 - RNA, 22 nt, Human
agacaucauguuacagauuaag

SEQ ID NO: 290629 - RNA, 22 nt, Human
ucccaccccggucaagggcuga

SEQ ID NO: 290630 - RNA, 22 nt, Human
gugcagggcagguguccuucca

SEQ ID NO: 290631 - RNA, 22 nt, Human
acccagggcuuaaggcggugca

SEQ ID NO: 290632 - RNA, 22 nt, Human
cuccuggacauggagcggagga

SEQ ID NO: 290633 - RNA, 22 nt, Human
gcaguggcaugaugugggcuca

SEQ ID NO: 290634 - RNA, 22 nt, Human
gaaagcugugaaauagugcucu

SEQ ID NO: 290635 - RNA, 22 nt, Human
cagagcauuuggaagccacgug

SEQ ID NO: 290636 - RNA, 22 nt, Human
aaagcugcccagcugccuguuu

SEQ ID NO: 290637 - RNA, 20 nt, Human
uggccucugagaugccacgg

SEQ ID NO: 290638 - RNA, 17 nt, Human
gugaagagucauugaau

SEQ ID NO: 290639 - RNA, 19 nt, Human
cugcagggaugugcagagu

SEQ ID NO: 290640 - RNA, 22 nt, Human
uuucaugaggggcaaaaucuca

SEQ ID NO: 290641 - RNA, 22 nt, Human
gaggugguucagguagagccca

SEQ ID NO: 290642 - RNA, 22 nt, Human
ggucacuggucucugcuuccau

SEQ ID NO: 290643 - RNA, 22 nt, Human
uucuucaaugugcccuguuuuc

SEQ ID NO: 290644 - RNA, 22 nt, Human
cuguggcccugugaucuggcac

SEQ ID NO: 290645 - RNA, 22 nt, Human
uuaauaauaaugagcccauuuu

SEQ ID NO: 290646 - RNA, 22 nt, Human
augaaacaguguguauagcaaa

SEQ ID NO: 290647 - RNA, 21 nt, Human
uuccuggggacuuccguggga

SEQ ID NO: 290648 - RNA, 22 nt, Human
gcaguagugucaguacagcaaa

SEQ ID NO: 290649 - RNA, 22 nt, Human
aaggcauauauucuaaacagga

SEQ ID NO: 290650 - RNA, 22 nt, Human
gccuggcaggccuguuggggcu

SEQ ID NO: 290651 - RNA, 22 nt, Human
gcaggcagguggcaucuuguga

SEQ ID NO: 290652 - RNA, 22 nt, Human
ucuguucuugcuuuucuccaac

SEQ ID NO: 290653 - RNA, 18 nt, Human
aauuuccauaugaauugc

SEQ ID NO: 290654 - RNA, 22 nt, Human
uugaaugaggaagagcacuggc

SEQ ID NO: 290655 - RNA, 22 nt, Human
uuguaaaugaccuuuucuaauu

SEQ ID NO: 290656 - RNA, 22 nt, Human
uauuuguugcgggaauugcuau

SEQ ID NO: 290657 - RNA, 22 nt, Human
ucuggcuuggacacaaucuucc

SEQ ID NO: 290658 - RNA, 22 nt, Human
uuucaacaggaugauaauaggc

SEQ ID NO: 290659 - RNA, 22 nt, Human
uuuuuauaugaaggauagugcg

SEQ ID NO: 290660 - RNA, 22 nt, Human
uucuuuauguuaaugaaucuau

SEQ ID NO: 290661 - RNA, 22 nt, Human
ccagugucuagcagaugacagg

SEQ ID NO: 290662 - RNA, 22 nt, Human
acaacauucuuaaauacacuga

SEQ ID NO: 290663 - RNA, 22 nt, Human
acagugcauuauugcugaaugc

SEQ ID NO: 290664 - RNA, 22 nt, Human
cugugucccuugucccagagcc

SEQ ID NO: 290665 - RNA, 22 nt, Human
uuugacucuuagcccaggacuc

SEQ ID NO: 290666 - RNA, 22 nt, Human
ggcaggcauggccacucccuag

SEQ ID NO: 290667 - RNA, 22 nt, Human
cuugaagaaauggagacaggau

SEQ ID NO: 290668 - RNA, 22 nt, Human
cuacagaaacacuggacaugug

SEQ ID NO: 290669 - RNA, 22 nt, Human
ggcucugccucugacccucugg

SEQ ID NO: 290670 - RNA, 22 nt, Human
ugucaguuaaaugagguacaag

SEQ ID NO: 290671 - RNA, 22 nt, Human
uuaaacauuuauggaggcagca

SEQ ID NO: 290672 - RNA, 22 nt, Human
aagugauuucugccugcauguu

SEQ ID NO: 290673 - RNA, 22 nt, Human
ugaagaaacagaccaagaggau

SEQ ID NO: 290674 - RNA, 22 nt, Human
uugaggagguccuggguuuacu

SEQ ID NO: 290675 - RNA, 18 nt, Human
ccugaagccugugucuuu

SEQ ID NO: 290676 - RNA, 22 nt, Human
ugcuuuauucagucucugccau

SEQ ID NO: 290677 - RNA, 20 nt, Human
ucccaagggcugagaggauc

SEQ ID NO: 290678 - RNA, 22 nt, Human
acccaggccugagagacaggag

SEQ ID NO: 290679 - RNA, 22 nt, Human
uggcaaagaugguucucaccau

SEQ ID NO: 290680 - RNA, 22 nt, Human
caggaaauaucuccuggcagag

SEQ ID NO: 290681 - RNA, 22 nt, Human
aggaaaaaagucugugauuaua

SEQ ID NO: 290682 - RNA, 22 nt, Human
ucaaaugcugccuuugugugcc

SEQ ID NO: 290683 - RNA, 22 nt, Human
aagaguuuaugauauaacaugu

SEQ ID NO: 290684 - RNA, 20 nt, Human
agaggcuuccuugggaggag

SEQ ID NO: 290685 - RNA, 22 nt, Human
uauugcugccucguccaggcug

SEQ ID NO: 290686 - RNA, 22 nt, Human
cacgccagccggacacugggcc

SEQ ID NO: 290687 - RNA, 22 nt, Human
ucuccuggcauuugguugagua

SEQ ID NO: 290688 - RNA, 22 nt, Human
aaugucuuuaaagugcaauaga

SEQ ID NO: 290689 - RNA, 22 nt, Human
augucugcuuuccuuuuaauca

SEQ ID NO: 290690 - RNA, 22 nt, Human
uuuccuacugcccuauacacac

SEQ ID NO: 290691 - RNA, 22 nt, Human
agugaugugggagaguauagcu

SEQ ID NO: 290692 - RNA, 22 nt, Human
uucacauugugcagauuauggu

SEQ ID NO: 290693 - RNA, 22 nt, Human
ccucccuucaguagagcccaau

SEQ ID NO: 290694 - RNA, 22 nt, Human
uucuggcuucaucugacaagcc

SEQ ID NO: 290695 - RNA, 22 nt, Human
gugcccagcuccaccucacaga

SEQ ID NO: 290696 - RNA, 22 nt, Human
cucucuccuuagcugcagacca

SEQ ID NO: 290697 - RNA, 22 nt, Human
acaguuuaugccucugagccug

SEQ ID NO: 290698 - RNA, 22 nt, Human
acaggugugagaacaugccuug

SEQ ID NO: 290699 - RNA, 22 nt, Human
acugucuuugagcuggaggagg

SEQ ID NO: 290700 - RNA, 22 nt, Human
ucuccucaccaccagcagcaga

SEQ ID NO: 290701 - RNA, 21 nt, Human
uggcagguucaaaggccuauc

SEQ ID NO: 290702 - RNA, 23 nt, Human
uugcacauuggagcuggucuucu

SEQ ID NO: 290703 - RNA, 22 nt, Human
cuuacaaauacacuuaggagag

SEQ ID NO: 290704 - RNA, 22 nt, Human
gagacacacccaagguuaugag

SEQ ID NO: 290705 - RNA, 22 nt, Human
ucaguuaagacugcacuggacu

SEQ ID NO: 290706 - RNA, 22 nt, Human
agucaguuaaacuuuguaaagu

SEQ ID NO: 290707 - RNA, 22 nt, Human
gcugucuuggaaaaggcaaaga

SEQ ID NO: 290708 - RNA, 22 nt, Human
uucuuuucggccugugagaagg

SEQ ID NO: 290709 - RNA, 20 nt, Human
gaggcugcggacugcuggac

SEQ ID NO: 290710 - RNA, 22 nt, Human
cuacuucuaaguacauggugau

SEQ ID NO: 290711 - RNA, 22 nt, Human
gcuggccugggcagccugucgg

SEQ ID NO: 290712 - RNA, 22 nt, Human
cagaggcagaggucaucucugg

SEQ ID NO: 290713 - RNA, 22 nt, Human
agaaucaggaagacagccuggc

SEQ ID NO: 290714 - RNA, 22 nt, Human
accuguuuuagucuuuaaucau

SEQ ID NO: 290715 - RNA, 22 nt, Human
uugcuguagcucauuucacucu

SEQ ID NO: 290716 - RNA, 22 nt, Human
uuugguuuagggucauuuaaca

SEQ ID NO: 290717 - RNA, 22 nt, Human
ugauguuuaauacuaugcuuuu

SEQ ID NO: 290718 - RNA, 21 nt, Human
ccauaaucuuaggaucaaaau

SEQ ID NO: 290719 - RNA, 22 nt, Human
gugaccauccugguaaugaauc

SEQ ID NO: 290720 - RNA, 22 nt, Human
uacccagcuucaagucaggacu

SEQ ID NO: 290721 - RNA, 20 nt, Human
gagcaguggaguuuccaggg

SEQ ID NO: 290722 - RNA, 22 nt, Human
acaugccagcacugcuuuucag

SEQ ID NO: 290723 - RNA, 22 nt, Human
ucagacagaggagcucgugcag

SEQ ID NO: 290724 - RNA, 22 nt, Human
uggcacucacucucagagucug

SEQ ID NO: 290725 - RNA, 22 nt, Human
aggagugggggcgagaaguuaa

SEQ ID NO: 290726 - RNA, 22 nt, Human
uaaagcagccagggucuaagcc

SEQ ID NO: 290727 - RNA, 22 nt, Human
cacccagggcugugccugccca

SEQ ID NO: 290728 - RNA, 22 nt, Human
aaugucuucaguguauacaugg

SEQ ID NO: 290729 - RNA, 22 nt, Human
uucucuggauguuucucaguca

SEQ ID NO: 290730 - RNA, 22 nt, Human
uagcuuuaggaugguucucuug

SEQ ID NO: 290731 - RNA, 23 nt, Human
uaaugagaagcuuuguuuccuga

SEQ ID NO: 290732 - RNA, 22 nt, Human
acccagcaaagauaaacuuaug

SEQ ID NO: 290733 - RNA, 22 nt, Human
auucuucacaaauauauagaag

SEQ ID NO: 290734 - RNA, 22 nt, Human
cuguguccauguucuaauuugg

SEQ ID NO: 290735 - RNA, 22 nt, Human
uaauaucuacuucauagaguuu

SEQ ID NO: 290736 - RNA, 22 nt, Human
cauccagggcagccauggccug

SEQ ID NO: 290737 - RNA, 22 nt, Human
cauggaaagcacucagcccagu

SEQ ID NO: 290738 - RNA, 22 nt, Human
ggcacagcucaggucccagcuc

SEQ ID NO: 290739 - RNA, 22 nt, Human
caugcaugccgggcugacagag

SEQ ID NO: 290740 - RNA, 22 nt, Human
gcagggcagcuuagucccuguc

SEQ ID NO: 290741 - RNA, 16 nt, Human
cccaaggagcuccagg

SEQ ID NO: 290742 - RNA, 22 nt, Human
cagagcauuaaaaccagcucug

SEQ ID NO: 290743 - RNA, 22 nt, Human
aaaauucauggcuugggaaaag

SEQ ID NO: 290744 - RNA, 22 nt, Human
aguguccuagcaagccgguccu

SEQ ID NO: 290745 - RNA, 22 nt, Human
gggcagguauuuaucuucuauu

SEQ ID NO: 290746 - RNA, 22 nt, Human
aaugaguucugacacuucacga

SEQ ID NO: 290747 - RNA, 22 nt, Human
uagaaaagauaacauucugugc

SEQ ID NO: 290748 - RNA, 22 nt, Human
aguccugggugugcaaggcaga

SEQ ID NO: 290749 - RNA, 22 nt, Human
ucucaggaucuaauacauggua

SEQ ID NO: 290750 - RNA, 22 nt, Human
uucuacaauaugaauaaugaag

SEQ ID NO: 290751 - RNA, 22 nt, Human
aacuaaaacugguuuguucucu

SEQ ID NO: 290752 - RNA, 22 nt, Human
aaggugucaccagauuggcagg

SEQ ID NO: 290753 - RNA, 22 nt, Human
aagaauaagaggauuuagaaca

SEQ ID NO: 290754 - RNA, 22 nt, Human
uuuguuacauuaaaaaguaggu

SEQ ID NO: 290755 - RNA, 22 nt, Human
uccgccaggacugagggcccau

SEQ ID NO: 290756 - RNA, 22 nt, Human
aaaccuuugugugucugugccu

SEQ ID NO: 290757 - RNA, 22 nt, Human
uauacagucuuuugcuauauuc

SEQ ID NO: 290758 - RNA, 22 nt, Human
agaaggcagaaaguccagguau

SEQ ID NO: 290759 - RNA, 19 nt, Human
ugggcagguucaguaaugg

SEQ ID NO: 290760 - RNA, 22 nt, Human
uaugugucucaguugugauuga

SEQ ID NO: 290761 - RNA, 22 nt, Human
caaguccauccuacugccuucu

SEQ ID NO: 290762 - RNA, 22 nt, Human
aaauagcuacaugaucucuagg

SEQ ID NO: 290763 - RNA, 22 nt, Human
acacaugaaauaauauuaugca

SEQ ID NO: 290764 - RNA, 22 nt, Human
ucagagaggcaauacuguuuaa

SEQ ID NO: 290765 - RNA, 22 nt, Human
gcaggggaguccacucuaugca

SEQ ID NO: 290766 - RNA, 20 nt, Human
ugcagggcucugcuucucuc

SEQ ID NO: 290767 - RNA, 22 nt, Human
ccagccucacuggcaucaccua

SEQ ID NO: 290768 - RNA, 22 nt, Human
caaggaaguuuuaggagaggaa

SEQ ID NO: 290769 - RNA, 22 nt, Human
uguaaaguuacuuuugaaagga

SEQ ID NO: 290770 - RNA, 22 nt, Human
aauuuguuaaaagugagugaca

SEQ ID NO: 290771 - RNA, 22 nt, Human
aagggcaggagaagacggauau

SEQ ID NO: 290772 - RNA, 22 nt, Human
cugcgugucucugucucauggc

SEQ ID NO: 290773 - RNA, 17 nt, Human
gugcagggaugaaggau

SEQ ID NO: 290774 - RNA, 22 nt, Human
guuuuauaauugcuucauaaga

SEQ ID NO: 290775 - RNA, 22 nt, Human
agacagacaaaauuccugccug

SEQ ID NO: 290776 - RNA, 22 nt, Human
gccauugggcuguaguuuuuug

SEQ ID NO: 290777 - RNA, 22 nt, Human
aaauuucuaagcagccacuucc

SEQ ID NO: 290778 - RNA, 16 nt, Human
acagugucucaagcac

SEQ ID NO: 290779 - RNA, 22 nt, Human
cuggcagucugccucuucacug

SEQ ID NO: 290780 - RNA, 22 nt, Human
guggauuacaagacaguugaga

SEQ ID NO: 290781 - RNA, 22 nt, Human
cugagaucuuuauacgaggcac

SEQ ID NO: 290782 - RNA, 22 nt, Human
ucagugucuauagauaagguuu

SEQ ID NO: 290783 - RNA, 22 nt, Human
aaaguauucaaaaauauuuggu

SEQ ID NO: 290784 - RNA, 22 nt, Human
agcagggcucugccaugggccc

SEQ ID NO: 290785 - RNA, 22 nt, Human
cugaagagcaaaccaacuggac

SEQ ID NO: 290786 - RNA, 22 nt, Human
uacccaggaggaaacugaggcu

SEQ ID NO: 290787 - RNA, 22 nt, Human
uuucacaaaugucuuuaacuug

SEQ ID NO: 290788 - RNA, 22 nt, Human
caggaggcuccuagggcucugu

SEQ ID NO: 290789 - RNA, 22 nt, Human
ccagggccugagggcgacgccc

SEQ ID NO: 290790 - RNA, 22 nt, Human
uucacaaagcuggagcauuucc

SEQ ID NO: 290791 - RNA, 22 nt, Human
cauccaaacucucauuaucugu

SEQ ID NO: 290792 - RNA, 22 nt, Human
ucuuuggaguguuaucaguaau

SEQ ID NO: 290793 - RNA, 22 nt, Human
gucaggacucugacccgucccg

SEQ ID NO: 290794 - RNA, 22 nt, Human
uucuggaagcugcagguggccg

SEQ ID NO: 290795 - RNA, 22 nt, Human
uuggccaacauggugaaacccc

SEQ ID NO: 290796 - RNA, 22 nt, Human
aggacauguaaauggagaggga

SEQ ID NO: 290797 - RNA, 22 nt, Human
uguuucuugagaguauuacccu

SEQ ID NO: 290798 - RNA, 22 nt, Human
acagguggucuuugcuccuuuu

SEQ ID NO: 290799 - RNA, 22 nt, Human
agauuugcggcuuuacuuugca

SEQ ID NO: 290800 - RNA, 18 nt, Human
gacaaaaguacagacaga

SEQ ID NO: 290801 - RNA, 22 nt, Human
aaagcucuuauagcagagugug

SEQ ID NO: 290802 - RNA, 18 nt, Human
gacaggugggugagacca

SEQ ID NO: 290803 - RNA, 17 nt, Human
ccaggucuccuugcuuu

SEQ ID NO: 290804 - RNA, 22 nt, Human
ccugggaggcugugggucugcu

SEQ ID NO: 290805 - RNA, 22 nt, Human
aauguguuaguauugauuuguc

SEQ ID NO: 290806 - RNA, 22 nt, Human
gaggaggaaguucucuguaggc

SEQ ID NO: 290807 - RNA, 22 nt, Human
ucagguguauugaugucuguga

SEQ ID NO: 290808 - RNA, 23 nt, Human
uuuauuuauuuaggcugagggau

SEQ ID NO: 290809 - RNA, 22 nt, Human
uuauuaaaaugcggauuuggcu

SEQ ID NO: 290810 - RNA, 22 nt, Human
cagcaccuguuagcauuaaaua

SEQ ID NO: 290811 - RNA, 22 nt, Human
uuuuccaaaguaccaugucccu

SEQ ID NO: 290812 - RNA, 22 nt, Human
gccugaaggagucagagagggc

SEQ ID NO: 290813 - RNA, 22 nt, Human
aggccacaguacuuugcagacc

SEQ ID NO: 290814 - RNA, 22 nt, Human
agguuucugcacugucacuggu

SEQ ID NO: 290815 - RNA, 22 nt, Human
ucaaaugaggcugaugaaugug

SEQ ID NO: 290816 - RNA, 22 nt, Human
ucuguucagguuucagagaacu

SEQ ID NO: 290817 - RNA, 22 nt, Human
ugacaaagacaaagauaugucc

SEQ ID NO: 290818 - RNA, 22 nt, Human
auuaaauguuccuuaaauuaua

SEQ ID NO: 290819 - RNA, 22 nt, Human
gaaccauuucugaauaguuugu

SEQ ID NO: 290820 - RNA, 22 nt, Human
ccuggaggcucugggagggcag

SEQ ID NO: 290821 - RNA, 22 nt, Human
aguguuugggggccuuguaaca

SEQ ID NO: 290822 - RNA, 20 nt, Human
cuucuucauuaacccuacug

SEQ ID NO: 290823 - RNA, 22 nt, Human
aacaaugaggaucuguucugag

SEQ ID NO: 290824 - RNA, 22 nt, Human
gacuuuauaaaugagaggcgga

SEQ ID NO: 290825 - RNA, 22 nt, Human
gcagggcagugugucugugggg

SEQ ID NO: 290826 - RNA, 22 nt, Human
uaggccauucuuggagcuuacu

SEQ ID NO: 290827 - RNA, 22 nt, Human
aaaugucuguaggggcugcagg

SEQ ID NO: 290828 - RNA, 21 nt, Human
acccaggggaagcagaaacug

SEQ ID NO: 290829 - RNA, 22 nt, Human
cuguccuccggccaccuacagu

SEQ ID NO: 290830 - RNA, 22 nt, Human
ugaaaauuguuguacuugauaa

SEQ ID NO: 290831 - RNA, 19 nt, Human
uuugcugguucaggaaaga

SEQ ID NO: 290832 - RNA, 22 nt, Human
aauguauaaaguguuaauaacu

SEQ ID NO: 290833 - RNA, 22 nt, Human
caagugucuauaucagugcuug

SEQ ID NO: 290834 - RNA, 22 nt, Human
agugcauguaucuacagucaca

SEQ ID NO: 290835 - RNA, 22 nt, Human
aggcagcaauugaaaucauugu

SEQ ID NO: 290836 - RNA, 20 nt, Human
acaauauguagaugaauagc

SEQ ID NO: 290837 - RNA, 22 nt, Human
accauucugucucuuuacaaau

SEQ ID NO: 290838 - RNA, 22 nt, Human
ugagccagcaggccuccagugg

SEQ ID NO: 290839 - RNA, 22 nt, Human
uuguuucauggggauguuuauu

SEQ ID NO: 290840 - RNA, 22 nt, Human
acagugucaucaguuucucaac

SEQ ID NO: 290841 - RNA, 22 nt, Human
uuuaccaaauagauuaugucag

SEQ ID NO: 290842 - RNA, 22 nt, Human
aagggaugcaggaaagaagguu

SEQ ID NO: 290843 - RNA, 22 nt, Human
uuacaugcagagggaagggaga

SEQ ID NO: 290844 - RNA, 22 nt, Human
gaggccaacuuuggagaacagg

SEQ ID NO: 290845 - RNA, 22 nt, Human
aagauaaacucuugauuucuga

SEQ ID NO: 290846 - RNA, 22 nt, Human
uagggcucacugagaugaauau

SEQ ID NO: 290847 - RNA, 22 nt, Human
ucagggcucagcaucuggcauu

SEQ ID NO: 290848 - RNA, 22 nt, Human
gucaaauauacuaagagguaaa

SEQ ID NO: 290849 - RNA, 22 nt, Human
aguguuuaccccaaucaguuua

SEQ ID NO: 290850 - RNA, 22 nt, Human
ugcuauuuaacuuuuaugugua

SEQ ID NO: 290851 - RNA, 22 nt, Human
ucuccuggcaugugggucaucu

SEQ ID NO: 290852 - RNA, 22 nt, Human
agcaaagcaguggcuaagcuga

SEQ ID NO: 290853 - RNA, 22 nt, Human
guucuuuaggggcccaauuucc

SEQ ID NO: 290854 - RNA, 22 nt, Human
caugucugaguagagugugauu

SEQ ID NO: 290855 - RNA, 22 nt, Human
aaguccagcucuaaauaucuga

SEQ ID NO: 290856 - RNA, 19 nt, Human
uagaaugcccacuuaaaaa

SEQ ID NO: 290857 - RNA, 22 nt, Human
cgggguccgggcaguaggcugc

SEQ ID NO: 290858 - RNA, 23 nt, Human
auguuauuauuagcagucuugcc

SEQ ID NO: 290859 - RNA, 22 nt, Human
auugcugacaccaaguaguagc

SEQ ID NO: 290860 - RNA, 22 nt, Human
guccacccaugacaccugccug

SEQ ID NO: 290861 - RNA, 22 nt, Human
agagggaagaugguccaaucuu

SEQ ID NO: 290862 - RNA, 22 nt, Human
caccugcaaggagcuuucauuu

SEQ ID NO: 290863 - RNA, 22 nt, Human
uuggaggauaaggauauugauu

SEQ ID NO: 290864 - RNA, 22 nt, Human
uuuauuuauccuucuggauugc

SEQ ID NO: 290865 - RNA, 22 nt, Human
ccucccagugccuccagagcag

SEQ ID NO: 290866 - RNA, 22 nt, Human
accuucaagaaacauuuccuug

SEQ ID NO: 290867 - RNA, 22 nt, Human
cagaggcagacccuccagggcg

SEQ ID NO: 290868 - RNA, 22 nt, Human
augcacauaggccaaaucauuu

SEQ ID NO: 290869 - RNA, 22 nt, Human
uccugagcuuuacaguaaggac

SEQ ID NO: 290870 - RNA, 22 nt, Human
gaaugauuugguuguuuagauu

SEQ ID NO: 290871 - RNA, 22 nt, Human
agcuucuugggcuuuacacaaa

SEQ ID NO: 290872 - RNA, 20 nt, Human
agcuucuucugucuaauuuu

SEQ ID NO: 290873 - RNA, 22 nt, Human
uucuucuuuccaauuacauggu

SEQ ID NO: 290874 - RNA, 22 nt, Human
acagugugaugggccugccuga

SEQ ID NO: 290875 - RNA, 22 nt, Human
uuucuaguaaaagcuaauuacc

SEQ ID NO: 290876 - RNA, 22 nt, Human
ggggcagggagguuaucgccga

SEQ ID NO: 290877 - RNA, 22 nt, Human
accuucaauuauuuuuguucca

SEQ ID NO: 290878 - RNA, 22 nt, Human
ccagcuuuccaggguugacugg

SEQ ID NO: 290879 - RNA, 22 nt, Human
aggccccaaagcagugcaagua

SEQ ID NO: 290880 - RNA, 22 nt, Human
cuguaaaacacuguaguaucug

SEQ ID NO: 290881 - RNA, 22 nt, Human
cagaggaguucaguacacagcc

SEQ ID NO: 290882 - RNA, 22 nt, Human
uguagaaauuaguaagaucaac

SEQ ID NO: 290883 - RNA, 22 nt, Human
uuccuguguacguguuucgcug

SEQ ID NO: 290884 - RNA, 21 nt, Human
uuccuuuuuauggcuuagugg

SEQ ID NO: 290885 - RNA, 22 nt, Human
acacugucucauaugaggggac

SEQ ID NO: 290886 - RNA, 22 nt, Human
uggcagggaauacagauguuua

SEQ ID NO: 290887 - RNA, 22 nt, Human
aaggugucggguuagcucagcc

SEQ ID NO: 290888 - RNA, 22 nt, Human
agcagacauaucucaugucaca

SEQ ID NO: 290889 - RNA, 22 nt, Human
aaacaaguuuagaauaaugaau

SEQ ID NO: 290890 - RNA, 20 nt, Human
aaugaggucccacugaggag

SEQ ID NO: 290891 - RNA, 20 nt, Human
ucaaagcacugccugucauc

SEQ ID NO: 290892 - RNA, 22 nt, Human
uccugcaggcuugaguccucag

SEQ ID NO: 290893 - RNA, 20 nt, Human
uuuauuggccuuucaggaac

SEQ ID NO: 290894 - RNA, 22 nt, Human
cacagguguguccuggucuugu

SEQ ID NO: 290895 - RNA, 22 nt, Human
gccaggguucgaauccguaugg

SEQ ID NO: 290896 - RNA, 22 nt, Human
auuuauugagacuuaacaaccc

SEQ ID NO: 290897 - RNA, 22 nt, Human
acaugaaguggucagaucaaac

SEQ ID NO: 290898 - RNA, 22 nt, Human
uuguaaaguucuuaggaagcuc

SEQ ID NO: 290899 - RNA, 22 nt, Human
ucucccauucagcuugcaguca

SEQ ID NO: 290900 - RNA, 22 nt, Human
accuuauuaaaaugaugaugua

SEQ ID NO: 290901 - RNA, 22 nt, Human
aggcucuggaguuagccaggca

SEQ ID NO: 290902 - RNA, 22 nt, Human
uugguggagucauuggcauaug

SEQ ID NO: 290903 - RNA, 22 nt, Human
uucugggucacccuucugcuca

SEQ ID NO: 290904 - RNA, 22 nt, Human
aggcaacauaacacgaaagucu

SEQ ID NO: 290905 - RNA, 22 nt, Human
gaggacaaagcccaggugcugg

SEQ ID NO: 290906 - RNA, 22 nt, Human
auagaagaggaaacugagguug

SEQ ID NO: 290907 - RNA, 22 nt, Human
ucaguguccaaaaagaggcaag

SEQ ID NO: 290908 - RNA, 22 nt, Human
uuauacauguguuuugagauga

SEQ ID NO: 290909 - RNA, 20 nt, Human
uacaaauuuuccauguuucc

SEQ ID NO: 290910 - RNA, 22 nt, Human
ucuguggcugugcugggccaga

SEQ ID NO: 290911 - RNA, 22 nt, Human
auguacauuuuccuaauguuuu

SEQ ID NO: 290912 - RNA, 22 nt, Human
gccuguuuuagaugcauugaug

SEQ ID NO: 290913 - RNA, 22 nt, Human
acagaaacccagaaaaccucuc

SEQ ID NO: 290914 - RNA, 22 nt, Human
acaaguuuauuugauuagaaca

SEQ ID NO: 290915 - RNA, 22 nt, Human
cugaggaggggccugagugaga

SEQ ID NO: 290916 - RNA, 22 nt, Human
gaaggaggugucaguuggacug

SEQ ID NO: 290917 - RNA, 22 nt, Human
ucaggauguccaaaauccagcc

SEQ ID NO: 290918 - RNA, 22 nt, Human
agcugcaagauaaaagugaugu

SEQ ID NO: 290919 - RNA, 22 nt, Human
acuuggcaaguaucuauaaagu

SEQ ID NO: 290920 - RNA, 19 nt, Human
ugcuggagguugacagggu

SEQ ID NO: 290921 - RNA, 22 nt, Human
uauuccagguuucuuguuguau

SEQ ID NO: 290922 - RNA, 22 nt, Human
uucaaaguccugucagguagcc

SEQ ID NO: 290923 - RNA, 18 nt, Human
ucuccuggguaggggccu

SEQ ID NO: 290924 - RNA, 22 nt, Human
aggcagggcugggauuagacuc

SEQ ID NO: 290925 - RNA, 22 nt, Human
ugugagguaacgcugcucuguu

SEQ ID NO: 290926 - RNA, 22 nt, Human
uucuuuauccuauuuguaggug

SEQ ID NO: 290927 - RNA, 22 nt, Human
acaguguuuuagaaaagcuuga

SEQ ID NO: 290928 - RNA, 22 nt, Human
cucucugggcccaguuggcacc

SEQ ID NO: 290929 - RNA, 22 nt, Human
uccuggcuuagguuuccagaac

SEQ ID NO: 290930 - RNA, 22 nt, Human
acagcuuuaguguggguggugc

SEQ ID NO: 290931 - RNA, 22 nt, Human
auuuacagacguggauuagugc

SEQ ID NO: 290932 - RNA, 22 nt, Human
agccucugauggcucccaagga

SEQ ID NO: 290933 - RNA, 23 nt, Human
ugcuguggauggcagguccuugc

SEQ ID NO: 290934 - RNA, 22 nt, Human
uacauaauaaggggcauggugu

SEQ ID NO: 290935 - RNA, 22 nt, Human
uuccugguaaauuauguccagg

SEQ ID NO: 290936 - RNA, 22 nt, Human
agguucuccuuaucaaugaaga

SEQ ID NO: 290937 - RNA, 22 nt, Human
uaggagggcccugaaaauggca

SEQ ID NO: 290938 - RNA, 20 nt, Human
auuugcaucugaauaacuua

SEQ ID NO: 290939 - RNA, 22 nt, Human
aaugcacauauauuuccuuauu

SEQ ID NO: 290940 - RNA, 22 nt, Human
cccaaggacacgggcagggaca

SEQ ID NO: 290941 - RNA, 22 nt, Human
gcagugucuuugaccuccaccc

SEQ ID NO: 290942 - RNA, 22 nt, Human
auggaguucugccagcgcugcu

SEQ ID NO: 290943 - RNA, 22 nt, Human
uccugaaaugugcacaugacau

SEQ ID NO: 290944 - RNA, 22 nt, Human
uaaaugucuguuaacaugaaug

SEQ ID NO: 290945 - RNA, 22 nt, Human
uuucucuuaaugucucugugcu

SEQ ID NO: 290946 - RNA, 22 nt, Human
aggggagaguuaaugugaaugu

SEQ ID NO: 290947 - RNA, 22 nt, Human
ucuguggcuggagaacuugucu

SEQ ID NO: 290948 - RNA, 16 nt, Human
gggagggaguuggugg

SEQ ID NO: 290949 - RNA, 22 nt, Human
gugaggagcucuuugacucacg

SEQ ID NO: 290950 - RNA, 22 nt, Human
uccugggcacaagugagucucc

SEQ ID NO: 290951 - RNA, 22 nt, Human
ucugugucugcagaaguucagc

SEQ ID NO: 290952 - RNA, 22 nt, Human
cuacccagcaccuaggcugccu

SEQ ID NO: 290953 - RNA, 22 nt, Human
gcuggcugaguucugucgucug

SEQ ID NO: 290954 - RNA, 22 nt, Human
gggagccagccauccagaaccu

SEQ ID NO: 290955 - RNA, 22 nt, Human
auugacagaaaauuggauggca

SEQ ID NO: 290956 - RNA, 22 nt, Human
aauuugauuuucuuaaaccaua

SEQ ID NO: 290957 - RNA, 22 nt, Human
cagucucuggugaguugacagu

SEQ ID NO: 290958 - RNA, 22 nt, Human
cagcugucuuugcacaguuuag

SEQ ID NO: 290959 - RNA, 22 nt, Human
uccuguuuuuguaaucgacucu

SEQ ID NO: 290960 - RNA, 22 nt, Human
uaaauuauggcuggcagagcag

SEQ ID NO: 290961 - RNA, 22 nt, Human
acagagcuaauguugcauaggc

SEQ ID NO: 290962 - RNA, 22 nt, Human
uaggugucuuucuguccuuguu

SEQ ID NO: 290963 - RNA, 18 nt, Human
cucaguguuugcugaaaa

SEQ ID NO: 290964 - RNA, 22 nt, Human
guuacaaacucaggugccaaaa

SEQ ID NO: 290965 - RNA, 22 nt, Human
caggcuuggagggcaguggcau

SEQ ID NO: 290966 - RNA, 23 nt, Human
acuuggaagcagugaacaacuuu

SEQ ID NO: 290967 - RNA, 22 nt, Human
uucagugucaauuuuuaaauau

SEQ ID NO: 290968 - RNA, 21 nt, Human
aguacaaaaauuccuuucuca

SEQ ID NO: 290969 - RNA, 22 nt, Human
aguccagucucacucuuggcag

SEQ ID NO: 290970 - RNA, 22 nt, Human
uucacauucagaaaaagcccgu

SEQ ID NO: 290971 - RNA, 22 nt, Human
uagguuuaggagugaaggugaa

SEQ ID NO: 290972 - RNA, 23 nt, Human
uccuuccuuugagaggcuccauc

SEQ ID NO: 290973 - RNA, 21 nt, Human
uucuuucugaaucugaaguau

SEQ ID NO: 290974 - RNA, 22 nt, Human
ugcuuccugaggccgucuucuc

SEQ ID NO: 290975 - RNA, 22 nt, Human
accaggcagcacuuuccuugca

SEQ ID NO: 290976 - RNA, 22 nt, Human
gcuccuggcuccaggcagccaa

SEQ ID NO: 290977 - RNA, 22 nt, Human
acacaggaagcaauuucagagc

SEQ ID NO: 290978 - RNA, 22 nt, Human
cacuuauuaugggcuaggaacu

SEQ ID NO: 290979 - RNA, 22 nt, Human
ugugugaguaaggcugagagag

SEQ ID NO: 290980 - RNA, 22 nt, Human
cuucuuucuuuugaucacaggu

SEQ ID NO: 290981 - RNA, 22 nt, Human
uuggaauuugagaccaagaaaa

SEQ ID NO: 290982 - RNA, 22 nt, Human
ucuuuucuggacucugcaugga

SEQ ID NO: 290983 - RNA, 21 nt, Human
ggguguggaaauuacauccug

SEQ ID NO: 290984 - RNA, 21 nt, Human
gaggaaugguuugcaaagcac

SEQ ID NO: 290985 - RNA, 22 nt, Human
auggcuugucuaugagugcucu

SEQ ID NO: 290986 - RNA, 22 nt, Human
uauauucaaugauuaguaucag

SEQ ID NO: 290987 - RNA, 22 nt, Human
gcuggcagugugaaugacaagc

SEQ ID NO: 290988 - RNA, 22 nt, Human
gauuucuugauaauucaaaucc

SEQ ID NO: 290989 - RNA, 22 nt, Human
gaaggggacuggcagcugcaga

SEQ ID NO: 290990 - RNA, 22 nt, Human
gagggucagaagggccugguuc

SEQ ID NO: 290991 - RNA, 22 nt, Human
ucccaggguuacagccagggca

SEQ ID NO: 290992 - RNA, 22 nt, Human
agugucuuugucucucaagcac

SEQ ID NO: 290993 - RNA, 22 nt, Human
auucaagagcccauguuuccug

SEQ ID NO: 290994 - RNA, 22 nt, Human
ucucuguggcaagcaugcugcu

SEQ ID NO: 290995 - RNA, 22 nt, Human
aucaagaacuuauuuuggaaau

SEQ ID NO: 290996 - RNA, 22 nt, Human
cucucuggcacuucauugcugu

SEQ ID NO: 290997 - RNA, 22 nt, Human
gcauacagagaggauguggcau

SEQ ID NO: 290998 - RNA, 22 nt, Human
uuucuucagccacuccaaacug

SEQ ID NO: 290999 - RNA, 22 nt, Human
uuccucagagggcgcuggggaa

SEQ ID NO: 291000 - RNA, 22 nt, Human
aggaccugccaggugcaaagca

SEQ ID NO: 291001 - RNA, 22 nt, Human
gcauguguuauuucucuguggg

SEQ ID NO: 291002 - RNA, 22 nt, Human
uugcaaaaccauccuaaguaaa

SEQ ID NO: 291003 - RNA, 22 nt, Human
agcuguuccaggccucauugcu

SEQ ID NO: 291004 - RNA, 22 nt, Human
cagcccugcuuccccgcuaguu

SEQ ID NO: 291005 - RNA, 22 nt, Human
acagacuggagugagagaaaua

SEQ ID NO: 291006 - RNA, 22 nt, Human
ucaugaaaauagaucagaaauu

SEQ ID NO: 291007 - RNA, 22 nt, Human
ucucugugacagcuggguaugu

SEQ ID NO: 291008 - RNA, 21 nt, Human
ucuggcagcaguuuguugagu

SEQ ID NO: 291009 - RNA, 22 nt, Human
aaaaucuugacuguuuuuagaa

SEQ ID NO: 291010 - RNA, 18 nt, Human
ccagguggugacagagau

SEQ ID NO: 291011 - RNA, 22 nt, Human
auuugcuggugaaauagugaca

SEQ ID NO: 291012 - RNA, 23 nt, Human
uacauucauuugcacagccagua

SEQ ID NO: 291013 - RNA, 22 nt, Human
aucuucaaagggauguccaugg

SEQ ID NO: 291014 - RNA, 22 nt, Human
caugccauuugguggauugaga

SEQ ID NO: 291015 - RNA, 19 nt, Human
aucugccuguuaucacaua

SEQ ID NO: 291016 - RNA, 22 nt, Human
ucuucccuaaucaccaucuuca

SEQ ID NO: 291017 - RNA, 22 nt, Human
ucuggguggcagugauggcgug

SEQ ID NO: 291018 - RNA, 22 nt, Human
uuugcugaccccauucugaguc

SEQ ID NO: 291019 - RNA, 22 nt, Human
caguuuuagcuagagcaaacca

SEQ ID NO: 291020 - RNA, 22 nt, Human
augagguuuugauuggcacagg

SEQ ID NO: 291021 - RNA, 22 nt, Human
uuuaggaugcucuauucugacu

SEQ ID NO: 291022 - RNA, 22 nt, Human
uuuguucauuuugagcucauca

SEQ ID NO: 291023 - RNA, 22 nt, Human
ccacagaaaauaaagcacgauu

SEQ ID NO: 291024 - RNA, 22 nt, Human
uuuccucacacagaagaucuug

SEQ ID NO: 291025 - RNA, 22 nt, Human
agcugcaaagaucugucaguca

SEQ ID NO: 291026 - RNA, 22 nt, Human
guuuacuguuuucugauaagug

SEQ ID NO: 291027 - RNA, 22 nt, Human
cuuuuucauuggcuuuaggaca

SEQ ID NO: 291028 - RNA, 22 nt, Human
gcaugugucccucagucugugc

SEQ ID NO: 291029 - RNA, 22 nt, Human
cccagcagccuggauguucuuu

SEQ ID NO: 291030 - RNA, 22 nt, Human
agacaagaaacugggagucucu

SEQ ID NO: 291031 - RNA, 20 nt, Human
cgggacacucaagcucuggg

SEQ ID NO: 291032 - RNA, 22 nt, Human
gaggccugcagcguggucccug

SEQ ID NO: 291033 - RNA, 22 nt, Human
augucuuuuaugauuacgggau

SEQ ID NO: 291034 - RNA, 22 nt, Human
ccaggugugccagcagggacug

SEQ ID NO: 291035 - RNA, 22 nt, Human
cagcucuuugaguauuccauuu

SEQ ID NO: 291036 - RNA, 18 nt, Human
gaggauggaaggagaugc

SEQ ID NO: 291037 - RNA, 19 nt, Human
aucuuuagcaacuuucaaa

SEQ ID NO: 291038 - RNA, 22 nt, Human
uccaggagaggccugaccaggu

SEQ ID NO: 291039 - RNA, 22 nt, Human
uaaguuuucuggaauaacuugg

SEQ ID NO: 291040 - RNA, 22 nt, Human
uggcaggugccaugggcucaga

SEQ ID NO: 291041 - RNA, 22 nt, Human
ccagcccugccagagagagcug

SEQ ID NO: 291042 - RNA, 19 nt, Human
acugccugaggcucacagg

SEQ ID NO: 291043 - RNA, 22 nt, Human
ccaggugucaugcgugugaccc

SEQ ID NO: 291044 - RNA, 22 nt, Human
ucugccaguuuauagacaagcc

SEQ ID NO: 291045 - RNA, 22 nt, Human
gggacagacccaugggccaggu

SEQ ID NO: 291046 - RNA, 22 nt, Human
acuacauuucucaguaccugaa

SEQ ID NO: 291047 - RNA, 22 nt, Human
ugugucaauuuucauuccuacu

SEQ ID NO: 291048 - RNA, 22 nt, Human
ucugggcuuuaagaacucuguu

SEQ ID NO: 291049 - RNA, 22 nt, Human
aaacuugacagugagacaguuu

SEQ ID NO: 291050 - RNA, 22 nt, Human
auaaaaaggacagauguggucu

SEQ ID NO: 291051 - RNA, 22 nt, Human
uuaugggagcaauuggggaggu

SEQ ID NO: 291052 - RNA, 22 nt, Human
aucuguaaaugcaaauguagcu

SEQ ID NO: 291053 - RNA, 22 nt, Human
uaagauguuuugguuugauaag

SEQ ID NO: 291054 - RNA, 22 nt, Human
uuaacauuguccuuagcagauu

SEQ ID NO: 291055 - RNA, 22 nt, Human
uuggagagauuuaggucucagu

SEQ ID NO: 291056 - RNA, 22 nt, Human
cuuaaaaucuggcaguuagcua

SEQ ID NO: 291057 - RNA, 22 nt, Human
guugcucaggcaggaguacagu

SEQ ID NO: 291058 - RNA, 17 nt, Human
uccuggccuggugugug

SEQ ID NO: 291059 - RNA, 22 nt, Human
ccuggcugaggggccaaggacc

SEQ ID NO: 291060 - RNA, 22 nt, Human
uuguauuugauugucauaucgu

SEQ ID NO: 291061 - RNA, 22 nt, Human
acaguugacagggagaggguua

SEQ ID NO: 291062 - RNA, 23 nt, Human
agugacaaugggccagagguggc

SEQ ID NO: 291063 - RNA, 22 nt, Human
ugaaagaaacagguauauuggg

SEQ ID NO: 291064 - RNA, 22 nt, Human
uuugucaaagaucagaugcuuu

SEQ ID NO: 291065 - RNA, 22 nt, Human
ggggaggaagcuggaacacggg

SEQ ID NO: 291066 - RNA, 22 nt, Human
gacuccugccuccucuguuugc

SEQ ID NO: 291067 - RNA, 22 nt, Human
ugguacaagcagacucagcaga

SEQ ID NO: 291068 - RNA, 22 nt, Human
gaggcaaggccgcacgucucag

SEQ ID NO: 291069 - RNA, 22 nt, Human
cauaaaagguagcaguuugaaa

SEQ ID NO: 291070 - RNA, 22 nt, Human
cagaagaaaguggggagacaag

SEQ ID NO: 291071 - RNA, 22 nt, Human
aacaguuuaugauaaauucuua

SEQ ID NO: 291072 - RNA, 22 nt, Human
cagaagaauggugucugagcuc

SEQ ID NO: 291073 - RNA, 23 nt, Human
aaacuugcuauggcugaaaucau

SEQ ID NO: 291074 - RNA, 19 nt, Human
augcuuuauguuauuucuu

SEQ ID NO: 291075 - RNA, 22 nt, Human
ucuguucaguuguaccuucccc

SEQ ID NO: 291076 - RNA, 22 nt, Human
uuuguucuugcaacaguuauua

SEQ ID NO: 291077 - RNA, 22 nt, Human
ucuucagugcaccugaugucuu

SEQ ID NO: 291078 - RNA, 22 nt, Human
uuuaaagagaaugugaaggagu

SEQ ID NO: 291079 - RNA, 22 nt, Human
ggagcugaguucuucagccggg

SEQ ID NO: 291080 - RNA, 22 nt, Human
gcccagggcgauggucggggcc

SEQ ID NO: 291081 - RNA, 22 nt, Human
gcuguagguucagucuccaugc

SEQ ID NO: 291082 - RNA, 22 nt, Human
uaacauguuaagaaauuagaua

SEQ ID NO: 291083 - RNA, 22 nt, Human
auguccagggcacacagcagug

SEQ ID NO: 291084 - RNA, 22 nt, Human
aucaguaaauauucauugugca

SEQ ID NO: 291085 - RNA, 22 nt, Human
uccaaggaagucauuuaaacug

SEQ ID NO: 291086 - RNA, 22 nt, Human
aagcaaaggaaagcugacuuuu

SEQ ID NO: 291087 - RNA, 22 nt, Human
ucauguuuuaguaaagugaagg

SEQ ID NO: 291088 - RNA, 22 nt, Human
uauuucuuuucgugacuuauug

SEQ ID NO: 291089 - RNA, 22 nt, Human
ccacagcaccugcagccaguug

SEQ ID NO: 291090 - RNA, 22 nt, Human
ucuaccagggucacagaggccc

SEQ ID NO: 291091 - RNA, 22 nt, Human
aagcugugaagagcaagugagg

SEQ ID NO: 291092 - RNA, 22 nt, Human
auacagggacauccaguuuuuc

SEQ ID NO: 291093 - RNA, 22 nt, Human
uguuaggguccugugcaggggc

SEQ ID NO: 291094 - RNA, 22 nt, Human
gaggcagcugggauacaaggga

SEQ ID NO: 291095 - RNA, 22 nt, Human
acuguggcuaauucauuugguc

SEQ ID NO: 291096 - RNA, 22 nt, Human
ucaauguaauaaaauacucuau

SEQ ID NO: 291097 - RNA, 22 nt, Human
aacaugugagcagguuuuuuau

SEQ ID NO: 291098 - RNA, 22 nt, Human
acauuguauaaugauuaucaca

SEQ ID NO: 291099 - RNA, 22 nt, Human
uaacugugaaguaauuguggau

SEQ ID NO: 291100 - RNA, 22 nt, Human
gugcagugacccuggagagcug

SEQ ID NO: 291101 - RNA, 22 nt, Human
guacaaauuaggaagcuuugug

SEQ ID NO: 291102 - RNA, 22 nt, Human
ugauagagcacuaaguagugua

SEQ ID NO: 291103 - RNA, 22 nt, Human
uucuucaaacaaaaguggcaug

SEQ ID NO: 291104 - RNA, 22 nt, Human
ugucagaggcucagggucucag

SEQ ID NO: 291105 - RNA, 22 nt, Human
cagauaaauagauagauaaacu

SEQ ID NO: 291106 - RNA, 22 nt, Human
ucauaggaguagcagugagagg

SEQ ID NO: 291107 - RNA, 22 nt, Human
gagagcugggggacuguggaug

SEQ ID NO: 291108 - RNA, 19 nt, Human
aaaagucuauucaauuaca

SEQ ID NO: 291109 - RNA, 22 nt, Human
uuuauugcuggccaccuguagc

SEQ ID NO: 291110 - RNA, 22 nt, Human
gcagcuuuagaaacaagggcug

SEQ ID NO: 291111 - RNA, 22 nt, Human
gucauaaagcuuguugcauuua

SEQ ID NO: 291112 - RNA, 22 nt, Human
aaacugaaacaucaucauguug

SEQ ID NO: 291113 - RNA, 22 nt, Human
gauggccuggguccccuuccgg

SEQ ID NO: 291114 - RNA, 22 nt, Human
ugcagugguugagagcccagac

SEQ ID NO: 291115 - RNA, 22 nt, Human
auuuauuaugggauuuggcuca

SEQ ID NO: 291116 - RNA, 23 nt, Human
cuccuugguaugccaugcccagc

SEQ ID NO: 291117 - RNA, 22 nt, Human
gggagggaaggaccuuaugaau

SEQ ID NO: 291118 - RNA, 22 nt, Human
gccuggcacauugcaguggauu

SEQ ID NO: 291119 - RNA, 22 nt, Human
aaugauugcaaacauugagaac

SEQ ID NO: 291120 - RNA, 22 nt, Human
acaugauucuugauaggcauug

SEQ ID NO: 291121 - RNA, 22 nt, Human
cugugggagcacaugacagaua

SEQ ID NO: 291122 - RNA, 22 nt, Human
uaacacuugaagccauuuuugc

SEQ ID NO: 291123 - RNA, 22 nt, Human
aauugcuuaguugcaacuaugc

SEQ ID NO: 291124 - RNA, 18 nt, Human
ggcggguguuuuauucac

SEQ ID NO: 291125 - RNA, 23 nt, Human
uucaaaacuggaaaaucagaugc

SEQ ID NO: 291126 - RNA, 22 nt, Human
cauuguuauagcauuacacacc

SEQ ID NO: 291127 - RNA, 20 nt, Human
uacauuguagaaauauucaa

SEQ ID NO: 291128 - RNA, 22 nt, Human
uuuuccuucugauacuccauuu

SEQ ID NO: 291129 - RNA, 22 nt, Human
acagacagggcaccugccuccu

SEQ ID NO: 291130 - RNA, 23 nt, Human
uuccuggcagguacaacuuuuac

SEQ ID NO: 291131 - RNA, 22 nt, Human
uccuggucuacacugcauuggg

SEQ ID NO: 291132 - RNA, 22 nt, Human
auugcuggcugccaucuugccc

SEQ ID NO: 291133 - RNA, 22 nt, Human
auauuuaacuggucccaauaua

SEQ ID NO: 291134 - RNA, 22 nt, Human
ugugauauuugaguauugucaa

SEQ ID NO: 291135 - RNA, 23 nt, Human
acugccugcuacuaugcccacgg

SEQ ID NO: 291136 - RNA, 22 nt, Human
acagugcaaacccucgggaaag

SEQ ID NO: 291137 - RNA, 22 nt, Human
ccugggucuauagacuucaaga

SEQ ID NO: 291138 - RNA, 21 nt, Human
uagcuuuaauauucccacauu

SEQ ID NO: 291139 - RNA, 22 nt, Human
uggucagcguuugucagagcag

SEQ ID NO: 291140 - RNA, 22 nt, Human
aaauaguucagcuuguaaaccc

SEQ ID NO: 291141 - RNA, 16 nt, Human
auuuccagauuaugca

SEQ ID NO: 291142 - RNA, 22 nt, Human
ugggaccugcucuuggaaugag

SEQ ID NO: 291143 - RNA, 22 nt, Human
uggcugaaucugcagcaggaag

SEQ ID NO: 291144 - RNA, 22 nt, Human
cuuauaaaguccaucugaacaa

SEQ ID NO: 291145 - RNA, 22 nt, Human
uucaaauuaccacauuugcuua

SEQ ID NO: 291146 - RNA, 22 nt, Human
ugccuggauucgguuguuguca

SEQ ID NO: 291147 - RNA, 22 nt, Human
ucgagcucuggagccaaggaug

SEQ ID NO: 291148 - RNA, 22 nt, Human
aaagugaugccaggagucuggu

SEQ ID NO: 291149 - RNA, 22 nt, Human
ggucugcccacuacucuccauu

SEQ ID NO: 291150 - RNA, 22 nt, Human
gguggggccagggcuccaaccu

SEQ ID NO: 291151 - RNA, 22 nt, Human
ucuggcucuccagugcucuuag

SEQ ID NO: 291152 - RNA, 22 nt, Human
gccugcagcugcuuccacacac

SEQ ID NO: 291153 - RNA, 21 nt, Human
aguccaggaggaggccagguu

SEQ ID NO: 291154 - RNA, 22 nt, Human
ccagcuuuggaguguuguugcu

SEQ ID NO: 291155 - RNA, 22 nt, Human
gucaccucucaucacaugcuac

SEQ ID NO: 291156 - RNA, 20 nt, Human
uuucuauggggccagcacau

SEQ ID NO: 291157 - RNA, 22 nt, Human
aacccagccguguagcugccgc

SEQ ID NO: 291158 - RNA, 22 nt, Human
auggcuugcuuuuagagagauc

SEQ ID NO: 291159 - RNA, 22 nt, Human
gugacccagaggcugacuaaca

SEQ ID NO: 291160 - RNA, 22 nt, Human
uaaugaauaaacuugagaguca

SEQ ID NO: 291161 - RNA, 22 nt, Human
gagcagugacuggagcaugaga

SEQ ID NO: 291162 - RNA, 22 nt, Human
aauucuacauugguucacauuu

SEQ ID NO: 291163 - RNA, 22 nt, Human
cuucugugcuucacaguugcca

SEQ ID NO: 291164 - RNA, 22 nt, Human
acaggcagauuaaggguaggca

SEQ ID NO: 291165 - RNA, 19 nt, Human
acagugucuguauauaaau

SEQ ID NO: 291166 - RNA, 22 nt, Human
auuuucaagggagaggccucug

SEQ ID NO: 291167 - RNA, 22 nt, Human
cuguccugagauaaagaugagg

SEQ ID NO: 291168 - RNA, 22 nt, Human
uugcuuuagguauagaauccau

SEQ ID NO: 291169 - RNA, 22 nt, Human
aaauucuuuggccuacuuugaa

SEQ ID NO: 291170 - RNA, 22 nt, Human
ccugggugaaauaguccucaag

SEQ ID NO: 291171 - RNA, 22 nt, Human
gucacuguauccagguuccagc

SEQ ID NO: 291172 - RNA, 22 nt, Human
aauuuccagaccccauccacag

SEQ ID NO: 291173 - RNA, 22 nt, Human
ggcagguguuuuuauauuaaag

SEQ ID NO: 291174 - RNA, 22 nt, Human
uacuaguuuuuaggaaaaguga

SEQ ID NO: 291175 - RNA, 22 nt, Human
agggcacccucucugcaguacc

SEQ ID NO: 291176 - RNA, 22 nt, Human
uucccucugcgcauugaauuuc

SEQ ID NO: 291177 - RNA, 22 nt, Human
uuucauuuugguuaugccauaa

SEQ ID NO: 291178 - RNA, 22 nt, Human
agggcugcaucugccuggugaa

SEQ ID NO: 291179 - RNA, 18 nt, Human
uugaggaguucacugucu

SEQ ID NO: 291180 - RNA, 18 nt, Human
cuuguucuucucuuggcg

SEQ ID NO: 291181 - RNA, 22 nt, Human
ugccugaugcaggaguaucaga

SEQ ID NO: 291182 - RNA, 22 nt, Human
auaugaagucagacaaacuggg

SEQ ID NO: 291183 - RNA, 22 nt, Human
aaguguuuccauugugcaggcu

SEQ ID NO: 291184 - RNA, 22 nt, Human
accagucuguuguugcagagug

SEQ ID NO: 291185 - RNA, 22 nt, Human
augaagcagaauuucccacucu

SEQ ID NO: 291186 - RNA, 20 nt, Human
agagguucagucuggagaag

SEQ ID NO: 291187 - RNA, 22 nt, Human
agauggcucuuugaaggggaau

SEQ ID NO: 291188 - RNA, 22 nt, Human
ccuggagggacccuggcccugu

SEQ ID NO: 291189 - RNA, 22 nt, Human
cugucuuuaguacaaaaaaugu

SEQ ID NO: 291190 - RNA, 22 nt, Human
ccagguguaagacaugguccua

SEQ ID NO: 291191 - RNA, 22 nt, Human
uggcagugguaccggcucucag

SEQ ID NO: 291192 - RNA, 22 nt, Human
agcagggcagguaaggaucaga

SEQ ID NO: 291193 - RNA, 16 nt, Human
aaggaaugucauucug

SEQ ID NO: 291194 - RNA, 22 nt, Human
uuuuauacacaugaacaugcag

SEQ ID NO: 291195 - RNA, 22 nt, Human
agcugugguucugggcagcgac

SEQ ID NO: 291196 - RNA, 22 nt, Human
uuccuggcuucauacuuuguac

SEQ ID NO: 291197 - RNA, 18 nt, Human
caggccucuugaucuucc

SEQ ID NO: 291198 - RNA, 22 nt, Human
auuuccugggucucacuccaga

SEQ ID NO: 291199 - RNA, 22 nt, Human
aaagcaugauuagauagaugau

SEQ ID NO: 291200 - RNA, 22 nt, Human
gccuguuuaucuaucaugaacu

SEQ ID NO: 291201 - RNA, 22 nt, Human
ggggaccuaggcucugucucuu

SEQ ID NO: 291202 - RNA, 22 nt, Human
ucuggcagugagcaacuugaca

SEQ ID NO: 291203 - RNA, 22 nt, Human
ugcagguguaaauuuucaagag

SEQ ID NO: 291204 - RNA, 22 nt, Human
ucccaggcuaggccucugcguu

SEQ ID NO: 291205 - RNA, 22 nt, Human
uuauugaguuuacagcuuuaga

SEQ ID NO: 291206 - RNA, 22 nt, Human
ugacuugucucuuugggagaca

SEQ ID NO: 291207 - RNA, 22 nt, Human
uguacagagguguacauaugau

SEQ ID NO: 291208 - RNA, 22 nt, Human
uacacuuuauggauccuacuuu

SEQ ID NO: 291209 - RNA, 19 nt, Human
gguguccuagagauaagag

SEQ ID NO: 291210 - RNA, 22 nt, Human
agcagggcagcuuuuuucagaa

SEQ ID NO: 291211 - RNA, 22 nt, Human
gaaugaauagguguccagaugg

SEQ ID NO: 291212 - RNA, 22 nt, Human
aaugccuuggagagccuagagg

SEQ ID NO: 291213 - RNA, 22 nt, Human
cuugauuucagccuugugauau

SEQ ID NO: 291214 - RNA, 22 nt, Human
accuuauuuugaaauagauugu

SEQ ID NO: 291215 - RNA, 22 nt, Human
uucuuguaauuuggagaaauga

SEQ ID NO: 291216 - RNA, 22 nt, Human
cagaagaguagcugaacaaguu

SEQ ID NO: 291217 - RNA, 22 nt, Human
agaggaguauuuucuaagggaa

SEQ ID NO: 291218 - RNA, 22 nt, Human
agcagggcugcagugugucuuu

SEQ ID NO: 291219 - RNA, 22 nt, Human
gcagcuuuguggagaggcccau

SEQ ID NO: 291220 - RNA, 22 nt, Human
agcacagggacaaugccaggug

SEQ ID NO: 291221 - RNA, 22 nt, Human
cugaaggagcauagucaguuuu

SEQ ID NO: 291222 - RNA, 22 nt, Human
augacaggaggcagcugggcag

SEQ ID NO: 291223 - RNA, 22 nt, Human
gcaugcaggauagguugagcuc

SEQ ID NO: 291224 - RNA, 22 nt, Human
auuucuuuucaagagggugcuu

SEQ ID NO: 291225 - RNA, 22 nt, Human
auccuucuccaaaacuggcucc

SEQ ID NO: 291226 - RNA, 22 nt, Human
uacaggagcugcucugugauac

SEQ ID NO: 291227 - RNA, 22 nt, Human
gauguacuuuaaaauacuucag

SEQ ID NO: 291228 - RNA, 22 nt, Human
cugcggugggcugggcuguccc

SEQ ID NO: 291229 - RNA, 22 nt, Human
ccagcuuucauaucaugaggua

SEQ ID NO: 291230 - RNA, 19 nt, Human
cccagcuugaccaccugcu

SEQ ID NO: 291231 - RNA, 22 nt, Human
aggguagggcccggagacagac

SEQ ID NO: 291232 - RNA, 22 nt, Human
ggccgcugcgccuccaaccgag

SEQ ID NO: 291233 - RNA, 22 nt, Human
guauuagguuggugcaaaauug

SEQ ID NO: 291234 - RNA, 20 nt, Human
ugcaaacacagaguguauga

SEQ ID NO: 291235 - RNA, 22 nt, Human
cugggcugauuuagucacguuu

SEQ ID NO: 291236 - RNA, 22 nt, Human
ccaggugugauuuggcaguguc

SEQ ID NO: 291237 - RNA, 22 nt, Human
uccaccauguaacaagcucugu

SEQ ID NO: 291238 - RNA, 20 nt, Human
ucuccuggucugguccgugc

SEQ ID NO: 291239 - RNA, 17 nt, Human
cagugaggccuuuccuc

SEQ ID NO: 291240 - RNA, 22 nt, Human
aggcucuggcaacagcuggugu

SEQ ID NO: 291241 - RNA, 22 nt, Human
cuucuucuggacaggcagcucc

SEQ ID NO: 291242 - RNA, 22 nt, Human
cauuaagauuuuuuucuacugg

SEQ ID NO: 291243 - RNA, 22 nt, Human
gcaggugggggagaaguuguga

SEQ ID NO: 291244 - RNA, 22 nt, Human
guucucauaguggaaaauaggu

SEQ ID NO: 291245 - RNA, 22 nt, Human
augacaaggguugacacauguc

SEQ ID NO: 291246 - RNA, 20 nt, Human
ugcugagguugacaugccca

SEQ ID NO: 291247 - RNA, 22 nt, Human
ccaauucauccucuggggcuuc

SEQ ID NO: 291248 - RNA, 22 nt, Human
agcuccugggccaucacaacca

SEQ ID NO: 291249 - RNA, 22 nt, Human
uuugcugaauaaaugugugacu

SEQ ID NO: 291250 - RNA, 22 nt, Human
gggcaggugcccagggccagag

SEQ ID NO: 291251 - RNA, 22 nt, Human
ccagcuuucucagaggcuucua

SEQ ID NO: 291252 - RNA, 22 nt, Human
aagcugaagccggaucaaaaag

SEQ ID NO: 291253 - RNA, 22 nt, Human
auuugcuugugcuaugaaaguu

SEQ ID NO: 291254 - RNA, 22 nt, Human
ucugaaauauauuuugaguguu

SEQ ID NO: 291255 - RNA, 22 nt, Human
ugagccagugugguaaagcuga

SEQ ID NO: 291256 - RNA, 22 nt, Human
gggucuggagggcagcccuucu

SEQ ID NO: 291257 - RNA, 22 nt, Human
gagguucacuuccuggauccuu

SEQ ID NO: 291258 - RNA, 22 nt, Human
uguaauuaaacugaagacagaa

SEQ ID NO: 291259 - RNA, 22 nt, Human
uacagauauagagauuuauaga

SEQ ID NO: 291260 - RNA, 22 nt, Human
aauacuuaugugaccucauuuu

SEQ ID NO: 291261 - RNA, 22 nt, Human
gggaaagaagaagagccauuuu

SEQ ID NO: 291262 - RNA, 22 nt, Human
ugccuucauccauguuauagug

SEQ ID NO: 291263 - RNA, 22 nt, Human
aucauguacuugacaaauaugu

SEQ ID NO: 291264 - RNA, 22 nt, Human
acuuuugaagaauuaugcaaaa

SEQ ID NO: 291265 - RNA, 22 nt, Human
agaggcuuggaggugcaagguu

SEQ ID NO: 291266 - RNA, 22 nt, Human
uuuaacacuaguuucuuuaacu

SEQ ID NO: 291267 - RNA, 22 nt, Human
agacaauuaaaaaauuaugcuu

SEQ ID NO: 291268 - RNA, 22 nt, Human
aagcugucaggagguuaccuuu

SEQ ID NO: 291269 - RNA, 22 nt, Human
gggaccugcgccacucacuguc

SEQ ID NO: 291270 - RNA, 22 nt, Human
cacagcugccaugcagucagug

SEQ ID NO: 291271 - RNA, 22 nt, Human
augcagcugacauuuucauguu

SEQ ID NO: 291272 - RNA, 22 nt, Human
aauaauuauuugagagcagacc

SEQ ID NO: 291273 - RNA, 17 nt, Human
ccuuccucaucuccuuc

SEQ ID NO: 291274 - RNA, 22 nt, Human
cacugaaauauuaauaucuuau

SEQ ID NO: 291275 - RNA, 22 nt, Human
uuaagauagaacccaguagucu

SEQ ID NO: 291276 - RNA, 22 nt, Human
auuuacugcuugacacauuggu

SEQ ID NO: 291277 - RNA, 22 nt, Human
aggaauguuaaagauuaagagc

SEQ ID NO: 291278 - RNA, 22 nt, Human
ggguggaagccagagaggucau

SEQ ID NO: 291279 - RNA, 22 nt, Human
auacaacagaaaaugauuauuc

SEQ ID NO: 291280 - RNA, 22 nt, Human
gaagcacauggcugugagcaac

SEQ ID NO: 291281 - RNA, 22 nt, Human
uguuaaaaauucagcucuagau

SEQ ID NO: 291282 - RNA, 22 nt, Human
agcaguaagugaagacuaguuu

SEQ ID NO: 291283 - RNA, 22 nt, Human
acaggccugagauuuugcauuu

SEQ ID NO: 291284 - RNA, 22 nt, Human
cauucauaagacuuugcucuug

SEQ ID NO: 291285 - RNA, 22 nt, Human
aaggcuuuuaacuacuguuuua

SEQ ID NO: 291286 - RNA, 22 nt, Human
aaaauacuacugucuucuuccc

SEQ ID NO: 291287 - RNA, 22 nt, Human
acauguguuaaaauucucacca

SEQ ID NO: 291288 - RNA, 22 nt, Human
gaguaaaauaggugagaaucaa

SEQ ID NO: 291289 - RNA, 22 nt, Human
acagcuuuaucucagggaucag

SEQ ID NO: 291290 - RNA, 22 nt, Human
auucugggucugggugugauca

SEQ ID NO: 291291 - RNA, 22 nt, Human
ggguugaggcggaugucggcgg

SEQ ID NO: 291292 - RNA, 21 nt, Human
cuguccaaauuucauaacuuu

SEQ ID NO: 291293 - RNA, 22 nt, Human
aacauguuuccaguguaaggcc

SEQ ID NO: 291294 - RNA, 22 nt, Human
acagacaguaugguggggcuga

SEQ ID NO: 291295 - RNA, 22 nt, Human
uucacauugugguucaugugaa

SEQ ID NO: 291296 - RNA, 22 nt, Human
aagagcaucuauuucacagugg

SEQ ID NO: 291297 - RNA, 22 nt, Human
uccugaccucuugcucugaccu

SEQ ID NO: 291298 - RNA, 22 nt, Human
ccccacccucgcuccauuucgg

SEQ ID NO: 291299 - RNA, 23 nt, Human
aucuguucaucugacacagauuc

SEQ ID NO: 291300 - RNA, 22 nt, Human
ucucagaggcccgacguucucc

SEQ ID NO: 291301 - RNA, 22 nt, Human
cacaggcugggaagccuaggcc

SEQ ID NO: 291302 - RNA, 22 nt, Human
agucucagaaaauaugcuuuuu

SEQ ID NO: 291303 - RNA, 22 nt, Human
cuccccagcucgcgggugacgg

SEQ ID NO: 291304 - RNA, 22 nt, Human
auuuguuccaugaguaaggcua

SEQ ID NO: 291305 - RNA, 22 nt, Human
auuggagaagaacaugaauuag

SEQ ID NO: 291306 - RNA, 22 nt, Human
caguuuuaugucgaauguauac

SEQ ID NO: 291307 - RNA, 22 nt, Human
gggcugacgaaggccaugugug

SEQ ID NO: 291308 - RNA, 22 nt, Human
ucacagcuuucagauuguuccc

SEQ ID NO: 291309 - RNA, 22 nt, Human
uauuccuauggccacugcuacu

SEQ ID NO: 291310 - RNA, 22 nt, Human
ugcagggcuacaggacuacaac

SEQ ID NO: 291311 - RNA, 22 nt, Human
uuuacuuucucaaguauauagg

SEQ ID NO: 291312 - RNA, 22 nt, Human
uuccaggaacagaugaagguug

SEQ ID NO: 291313 - RNA, 19 nt, Human
cacauuuugagucugagau

SEQ ID NO: 291314 - RNA, 22 nt, Human
uuggcaccucccuaggaagaag

SEQ ID NO: 291315 - RNA, 22 nt, Human
cauuuguuaauuacuauuaucu

SEQ ID NO: 291316 - RNA, 22 nt, Human
acaaacagaguugaaaaauagg

SEQ ID NO: 291317 - RNA, 22 nt, Human
uuccuccuucccauuccugggg

SEQ ID NO: 291318 - RNA, 22 nt, Human
uauuuuguaauuggucauagcu

SEQ ID NO: 291319 - RNA, 22 nt, Human
gcucagagagaggcucaccauu

SEQ ID NO: 291320 - RNA, 22 nt, Human
uuucucauuuagaguggcaggg

SEQ ID NO: 291321 - RNA, 22 nt, Human
guaggguuggagagcacaacca

SEQ ID NO: 291322 - RNA, 22 nt, Human
ccaggaggcucugacuggaccc

SEQ ID NO: 291323 - RNA, 22 nt, Human
uccucccacauaggacaauggg

SEQ ID NO: 291324 - RNA, 22 nt, Human
uagguauaauauuuugaagaaa

SEQ ID NO: 291325 - RNA, 22 nt, Human
aaggcauugcugauccucaggu

SEQ ID NO: 291326 - RNA, 18 nt, Human
cuccugggcugcagaugc

SEQ ID NO: 291327 - RNA, 20 nt, Human
aaauuuaggaaauuuuacgc

SEQ ID NO: 291328 - RNA, 22 nt, Human
gacaagauaaugaagugcaauu

SEQ ID NO: 291329 - RNA, 22 nt, Human
ucauauaaguuuaaaacuaucu

SEQ ID NO: 291330 - RNA, 22 nt, Human
guggcagggcaaugcucccucu

SEQ ID NO: 291331 - RNA, 22 nt, Human
agauuacagaagaauaaguaga

SEQ ID NO: 291332 - RNA, 22 nt, Human
uauguguccuguuaccggcagc

SEQ ID NO: 291333 - RNA, 22 nt, Human
guuugugucaaugacuucugca

SEQ ID NO: 291334 - RNA, 19 nt, Human
ugguacaaaccaagagaga

SEQ ID NO: 291335 - RNA, 19 nt, Human
aagaggcaacccucgagcc

SEQ ID NO: 291336 - RNA, 22 nt, Human
acugggagggucuugaagaggg

SEQ ID NO: 291337 - RNA, 22 nt, Human
cauuguuaauugguaucuuaca

SEQ ID NO: 291338 - RNA, 21 nt, Human
aggcuuggaucuagacaggcc

SEQ ID NO: 291339 - RNA, 22 nt, Human
auugcuaggaacagguugcacc

SEQ ID NO: 291340 - RNA, 22 nt, Human
cuucucaaaguugugaaucagg

SEQ ID NO: 291341 - RNA, 17 nt, Human
uaaguuauagcagaaga

SEQ ID NO: 291342 - RNA, 22 nt, Human
uuguccuggagguuaauagagu

SEQ ID NO: 291343 - RNA, 20 nt, Human
cacaggcuuacaguuuagau

SEQ ID NO: 291344 - RNA, 22 nt, Human
ggaugaggaagauuacugagaa

SEQ ID NO: 291345 - RNA, 22 nt, Human
uuuacucuugcuacacaacugu

SEQ ID NO: 291346 - RNA, 22 nt, Human
uauuuagaacagacaauagaaa

SEQ ID NO: 291347 - RNA, 21 nt, Human
ugacauuuaguagcauuguca

SEQ ID NO: 291348 - RNA, 22 nt, Human
uuucaguugauugcuuggguua

SEQ ID NO: 291349 - RNA, 19 nt, Human
agacaaguuuccagaagcc

SEQ ID NO: 291350 - RNA, 22 nt, Human
uauugguaggacucagcugaga

SEQ ID NO: 291351 - RNA, 22 nt, Human
uaaauuauguuccauguccuuu

SEQ ID NO: 291352 - RNA, 22 nt, Human
gcagggcagccacaggcccccu

SEQ ID NO: 291353 - RNA, 22 nt, Human
uauuaaagggaaguuaugcaug

SEQ ID NO: 291354 - RNA, 22 nt, Human
aggcugugggaguugagagucu

SEQ ID NO: 291355 - RNA, 22 nt, Human
ggcuuucugagucaaacacuga

SEQ ID NO: 291356 - RNA, 22 nt, Human
ggccacugaccuacaucugggg

SEQ ID NO: 291357 - RNA, 22 nt, Human
cuguccugcccacccugcaggg

SEQ ID NO: 291358 - RNA, 22 nt, Human
uuuauaugugaagguuugcaga

SEQ ID NO: 291359 - RNA, 22 nt, Human
ccugcaguuuguugugaccccg

SEQ ID NO: 291360 - RNA, 22 nt, Human
uagaugaagggguucagcaugg

SEQ ID NO: 291361 - RNA, 22 nt, Human
auuuguaauuucuuaucugugu

SEQ ID NO: 291362 - RNA, 22 nt, Human
uuaacugugacaguuucucaga

SEQ ID NO: 291363 - RNA, 22 nt, Human
cuccuggaagcccgcccugcug

SEQ ID NO: 291364 - RNA, 22 nt, Human
aaggguugcaaggucagaggaa

SEQ ID NO: 291365 - RNA, 22 nt, Human
cuguccagugcagagaacagag

SEQ ID NO: 291366 - RNA, 21 nt, Human
agcugcaaaaacauacaguuc

SEQ ID NO: 291367 - RNA, 22 nt, Human
gcagccucaaacuccccagcuc

SEQ ID NO: 291368 - RNA, 22 nt, Human
aagugguuuuaagagguuccuu

SEQ ID NO: 291369 - RNA, 22 nt, Human
ugaaugauuugggugcauucag

SEQ ID NO: 291370 - RNA, 22 nt, Human
uucuucuuaauguccugggaac

SEQ ID NO: 291371 - RNA, 22 nt, Human
cgcaggugggcccuucauugau

SEQ ID NO: 291372 - RNA, 22 nt, Human
auuuccauuuucagccauuacu

SEQ ID NO: 291373 - RNA, 22 nt, Human
uuagucuccagcuuaggguuug

SEQ ID NO: 291374 - RNA, 22 nt, Human
agcuguggcagcacuuuggagu

SEQ ID NO: 291375 - RNA, 22 nt, Human
guagggacaauauguuauuaga

SEQ ID NO: 291376 - RNA, 22 nt, Human
ucuccagggagguagcccagug

SEQ ID NO: 291377 - RNA, 22 nt, Human
gugcaaaaguaauuacaguuuu

SEQ ID NO: 291378 - RNA, 22 nt, Human
cagugauuaaaacaugacagcc

SEQ ID NO: 291379 - RNA, 22 nt, Human
cacugucuccuagggggacuuc

SEQ ID NO: 291380 - RNA, 22 nt, Human
uaggugucuuguguaugguaca

SEQ ID NO: 291381 - RNA, 22 nt, Human
gcagcuuucugggacagaaagg

SEQ ID NO: 291382 - RNA, 16 nt, Human
guuccuucccacaccu

SEQ ID NO: 291383 - RNA, 22 nt, Human
ucaggugugugguggaaggcag

SEQ ID NO: 291384 - RNA, 22 nt, Human
ucagucuuugcuuaugacaaua

SEQ ID NO: 291385 - RNA, 19 nt, Human
ugcuggaacaucaguagcu

SEQ ID NO: 291386 - RNA, 22 nt, Human
gacuucuucaugucuuuuccac

SEQ ID NO: 291387 - RNA, 23 nt, Human
agaccugcaucugauaggcccug

SEQ ID NO: 291388 - RNA, 22 nt, Human
guuauugacucucuuguggcuu

SEQ ID NO: 291389 - RNA, 22 nt, Human
ggcuuuguggggugaaguaaag

SEQ ID NO: 291390 - RNA, 22 nt, Human
uagccauugacuuaaagcuuau

SEQ ID NO: 291391 - RNA, 22 nt, Human
aauuguaacuacauugagaaca

SEQ ID NO: 291392 - RNA, 22 nt, Human
acugaggaacauauauaagaug

SEQ ID NO: 291393 - RNA, 22 nt, Human
aauuuccagaucagaugacuca

SEQ ID NO: 291394 - RNA, 22 nt, Human
ggagcugaaccccaucgugcug

SEQ ID NO: 291395 - RNA, 22 nt, Human
uauuuuacaugacagguguuua

SEQ ID NO: 291396 - RNA, 22 nt, Human
ucauguuuuagcugcaaaauga

SEQ ID NO: 291397 - RNA, 22 nt, Human
cuccuggaucuuagccagauuc

SEQ ID NO: 291398 - RNA, 22 nt, Human
ggugacggggcccagguuuccu

SEQ ID NO: 291399 - RNA, 23 nt, Human
auuuacagguuaaaugaaaucag

SEQ ID NO: 291400 - RNA, 22 nt, Human
caugucacuuuaacaaauuagu

SEQ ID NO: 291401 - RNA, 22 nt, Human
caggauggucuucauuuggcuc

SEQ ID NO: 291402 - RNA, 22 nt, Human
ucaggaguaaagaagacuugac

SEQ ID NO: 291403 - RNA, 22 nt, Human
caguaacauuucaagguagagg

SEQ ID NO: 291404 - RNA, 21 nt, Human
ucugauguucacacccuguau

SEQ ID NO: 291405 - RNA, 22 nt, Human
aggaaacuaaagcccagagagg

SEQ ID NO: 291406 - RNA, 22 nt, Human
ucuuacgaauucuuagaggaca

SEQ ID NO: 291407 - RNA, 22 nt, Human
uuuaauuuguauuucuagaggg

SEQ ID NO: 291408 - RNA, 22 nt, Human
aaaccacacuuagcaguuucgu

SEQ ID NO: 291409 - RNA, 20 nt, Human
acaugaaaggaaacaggaaa

SEQ ID NO: 291410 - RNA, 22 nt, Human
gacaagauuuagagucugcuaa

SEQ ID NO: 291411 - RNA, 17 nt, Human
cagacaggcugucaccc

SEQ ID NO: 291412 - RNA, 22 nt, Human
uggaccugaagaauaggaagua

SEQ ID NO: 291413 - RNA, 22 nt, Human
uuacauuuugggguaaggauaa

SEQ ID NO: 291414 - RNA, 22 nt, Human
uaagaaacccaggaauuucuua

SEQ ID NO: 291415 - RNA, 22 nt, Human
ugaacaacugcaaaaaucucca

SEQ ID NO: 291416 - RNA, 22 nt, Human
gagucaggaguccugugugaga

SEQ ID NO: 291417 - RNA, 22 nt, Human
cuggauguucuucugcaauuau

SEQ ID NO: 291418 - RNA, 22 nt, Human
cuacauaaauauuuaugugucu

SEQ ID NO: 291419 - RNA, 22 nt, Human
aaugaguuauuuaauagaaagg

SEQ ID NO: 291420 - RNA, 22 nt, Human
cccuuccuccucgccugucaga

SEQ ID NO: 291421 - RNA, 22 nt, Human
uuugcagugauucuugcaguga

SEQ ID NO: 291422 - RNA, 22 nt, Human
ccagggcagaaaaagagggaau

SEQ ID NO: 291423 - RNA, 22 nt, Human
aauugcuuuucaaggguacagc

SEQ ID NO: 291424 - RNA, 22 nt, Human
gcagggacaucuucagaucacu

SEQ ID NO: 291425 - RNA, 22 nt, Human
acugucuuguuccaagacuaaa

SEQ ID NO: 291426 - RNA, 22 nt, Human
uuccuucuggaggcuccagggg

SEQ ID NO: 291427 - RNA, 22 nt, Human
uugcugauucuguauuuaaggu

SEQ ID NO: 291428 - RNA, 22 nt, Human
ccugucuuagggaaagacugga

SEQ ID NO: 291429 - RNA, 22 nt, Human
cuugccucccucagcucacagc

SEQ ID NO: 291430 - RNA, 22 nt, Human
ggaugucugucauuaugcuuuc

SEQ ID NO: 291431 - RNA, 22 nt, Human
acacauaucuaagauagaugac

SEQ ID NO: 291432 - RNA, 20 nt, Human
accuccuggaagcaggugcc

SEQ ID NO: 291433 - RNA, 22 nt, Human
aaauaguaaagugguagccauc

SEQ ID NO: 291434 - RNA, 18 nt, Human
gcuuuauuucuuggggaa

SEQ ID NO: 291435 - RNA, 22 nt, Human
ucuagguggaugaggaacauag

SEQ ID NO: 291436 - RNA, 22 nt, Human
ugugaaaagggcuuuguacaaa

SEQ ID NO: 291437 - RNA, 22 nt, Human
agggcucccgugaggugacugc

SEQ ID NO: 291438 - RNA, 22 nt, Human
ugcagggccuugggucuuucuu

SEQ ID NO: 291439 - RNA, 22 nt, Human
aggccagggucccacacucgca

SEQ ID NO: 291440 - RNA, 22 nt, Human
ccuagggucaguguggcaggag

SEQ ID NO: 291441 - RNA, 22 nt, Human
uaggaaguagauagguuguucu

SEQ ID NO: 291442 - RNA, 22 nt, Human
aaggcagaaagggaugugagug

SEQ ID NO: 291443 - RNA, 22 nt, Human
uuuaagaucauuuguauuaucc

SEQ ID NO: 291444 - RNA, 22 nt, Human
uaugaaaugguaguaggaaggg

SEQ ID NO: 291445 - RNA, 22 nt, Human
gcauuauuaauagcugcaugag

SEQ ID NO: 291446 - RNA, 22 nt, Human
acagauuugacugguaccuggc

SEQ ID NO: 291447 - RNA, 22 nt, Human
cacacuuugugcuaaucuauuu

SEQ ID NO: 291448 - RNA, 22 nt, Human
agcuccuggcuuuccucucacc

SEQ ID NO: 291449 - RNA, 22 nt, Human
cacaagggcuuuguaggcuuug

SEQ ID NO: 291450 - RNA, 22 nt, Human
cuccuucuccucgggaggccag

SEQ ID NO: 291451 - RNA, 22 nt, Human
cuggaggacagaggccaugucu

SEQ ID NO: 291452 - RNA, 22 nt, Human
cucuguaugaaucauauggagu

SEQ ID NO: 291453 - RNA, 22 nt, Human
acaaaauagaguucuccccugg

SEQ ID NO: 291454 - RNA, 20 nt, Human
uccagaggccacauccagug

SEQ ID NO: 291455 - RNA, 22 nt, Human
gaaagcauguagccuguaucca

SEQ ID NO: 291456 - RNA, 22 nt, Human
aaggcacagccacuugaucauc

SEQ ID NO: 291457 - RNA, 22 nt, Human
aguaaaaucaccaucucuuugu

SEQ ID NO: 291458 - RNA, 22 nt, Human
uucugugauugacauguggcuu

SEQ ID NO: 291459 - RNA, 22 nt, Human
augaggagaccaaggccugaug

SEQ ID NO: 291460 - RNA, 22 nt, Human
acagcuuuguguuaaugggaag

SEQ ID NO: 291461 - RNA, 22 nt, Human
uguuauuuauuucaccuccaga

SEQ ID NO: 291462 - RNA, 22 nt, Human
ggucccagcugcucaagaggcu

SEQ ID NO: 291463 - RNA, 22 nt, Human
ccagaggcuggguucaccucag

SEQ ID NO: 291464 - RNA, 22 nt, Human
aaguguccucauucaacaugca

SEQ ID NO: 291465 - RNA, 22 nt, Human
ugagaaugaaucuuuugcuuuc

SEQ ID NO: 291466 - RNA, 22 nt, Human
ucugagacacucuugugauggg

SEQ ID NO: 291467 - RNA, 22 nt, Human
auuccacagaggacuccgauug

SEQ ID NO: 291468 - RNA, 22 nt, Human
uuacaguagauuuugaaugugg

SEQ ID NO: 291469 - RNA, 22 nt, Human
cccaggcacagauuaucccaau

SEQ ID NO: 291470 - RNA, 22 nt, Human
uguguccucaugagguuugcag

SEQ ID NO: 291471 - RNA, 22 nt, Human
uauuuguugaguuguuaugucu

SEQ ID NO: 291472 - RNA, 22 nt, Human
agcagggcuccugaaagccgcg

SEQ ID NO: 291473 - RNA, 22 nt, Human
uauugcugaaaugcugaguuca

SEQ ID NO: 291474 - RNA, 22 nt, Human
aaacaaguuuguagacuagcca

SEQ ID NO: 291475 - RNA, 21 nt, Human
uagggcucucugugucaggug

SEQ ID NO: 291476 - RNA, 21 nt, Human
uccuggcuuuaugcuaccucu

SEQ ID NO: 291477 - RNA, 22 nt, Human
gcgacuguacagaauugccccu

SEQ ID NO: 291478 - RNA, 22 nt, Human
cacagcuucccaaaguggaccu

SEQ ID NO: 291479 - RNA, 22 nt, Human
cagggaugguaaauauguaaag

SEQ ID NO: 291480 - RNA, 22 nt, Human
cuaaaugacuuccagugguuau

SEQ ID NO: 291481 - RNA, 22 nt, Human
uuuuuauaggucagggcaaguc

SEQ ID NO: 291482 - RNA, 20 nt, Human
uguaggaaggacccugucug

SEQ ID NO: 291483 - RNA, 22 nt, Human
uucuauugggcagcauugcuuc

SEQ ID NO: 291484 - RNA, 22 nt, Human
gugagauuugaguggggauaca

SEQ ID NO: 291485 - RNA, 19 nt, Human
auucauuggccaggguggu

SEQ ID NO: 291486 - RNA, 22 nt, Human
auagacauagccguaauuuauu

SEQ ID NO: 291487 - RNA, 22 nt, Human
aacuucuuugagcuccaguuuu

SEQ ID NO: 291488 - RNA, 22 nt, Human
gcauucuugguggagugcuaaa

SEQ ID NO: 291489 - RNA, 22 nt, Human
ccuguucauuuguauuugucuu

SEQ ID NO: 291490 - RNA, 22 nt, Human
aucuuuaccaccaaagaaugcu

SEQ ID NO: 291491 - RNA, 22 nt, Human
aagccuugccuauuugaugaca

SEQ ID NO: 291492 - RNA, 22 nt, Human
uuuaaugugacaucuuuuagag

SEQ ID NO: 291493 - RNA, 22 nt, Human
uggccugguuguugcugccguu

SEQ ID NO: 291494 - RNA, 22 nt, Human
uuucacagcuggguggcagagu

SEQ ID NO: 291495 - RNA, 22 nt, Human
cuuuguuaucuguaaaugguua

SEQ ID NO: 291496 - RNA, 22 nt, Human
gaaugagggagauguuggugca

SEQ ID NO: 291497 - RNA, 22 nt, Human
aauugcuuaugccaggugagag

SEQ ID NO: 291498 - RNA, 19 nt, Human
cucuuaaauugucucuugc

SEQ ID NO: 291499 - RNA, 22 nt, Human
cagguuuagguggacgugcagg

SEQ ID NO: 291500 - RNA, 19 nt, Human
gcaggugugaauccguaga

SEQ ID NO: 291501 - RNA, 22 nt, Human
gucucaguccgugcuguucagg

SEQ ID NO: 291502 - RNA, 22 nt, Human
uuuccuucaucaucugagagcu

SEQ ID NO: 291503 - RNA, 22 nt, Human
ucauuuguugcuguuaccugag

SEQ ID NO: 291504 - RNA, 22 nt, Human
aaaagagugacugauaaguaua

SEQ ID NO: 291505 - RNA, 22 nt, Human
cugcaggagugaaagcaggccu

SEQ ID NO: 291506 - RNA, 22 nt, Human
uuuacagagaauguacauaaag

SEQ ID NO: 291507 - RNA, 22 nt, Human
uggaccugcuggaugggcaggu

SEQ ID NO: 291508 - RNA, 22 nt, Human
ucaggugugggcagagaaacca

SEQ ID NO: 291509 - RNA, 22 nt, Human
uggucucccagagcagggacgc

SEQ ID NO: 291510 - RNA, 19 nt, Human
uagaaagccagaaaacaga

SEQ ID NO: 291511 - RNA, 18 nt, Human
uuuuaauuucaggggugg

SEQ ID NO: 291512 - RNA, 22 nt, Human
gacauuagacuaauguagcauu

SEQ ID NO: 291513 - RNA, 22 nt, Human
cccuugagccuggaggagcucu

SEQ ID NO: 291514 - RNA, 21 nt, Human
gauuuuaaagagacugccaca

SEQ ID NO: 291515 - RNA, 22 nt, Human
uaaaaguuuuaguuguacauaa

SEQ ID NO: 291516 - RNA, 23 nt, Human
uucuuucaagaaguucacagugc

SEQ ID NO: 291517 - RNA, 22 nt, Human
ugagcaggucaggaaguacauu

SEQ ID NO: 291518 - RNA, 22 nt, Human
aaacauuguaauuuuagcaugg

SEQ ID NO: 291519 - RNA, 22 nt, Human
ucaugucagcuguugaugugca

SEQ ID NO: 291520 - RNA, 22 nt, Human
cacgguggcccacaggugcaag

SEQ ID NO: 291521 - RNA, 22 nt, Human
uagguacagcuaaaaauuaucu

SEQ ID NO: 291522 - RNA, 22 nt, Human
aaaaugagcauauugauccuuu

SEQ ID NO: 291523 - RNA, 22 nt, Human
uuuaguucacaccaggguagca

SEQ ID NO: 291524 - RNA, 22 nt, Human
uggugggggaggcugucuagca

SEQ ID NO: 291525 - RNA, 21 nt, Human
uuacauucagaggaguggaag

SEQ ID NO: 291526 - RNA, 22 nt, Human
uccugugagacuuguccauuau

SEQ ID NO: 291527 - RNA, 22 nt, Human
uuguuucuucaggcuuuuagga

SEQ ID NO: 291528 - RNA, 19 nt, Human
uuuagcuuacguuucauug

SEQ ID NO: 291529 - RNA, 22 nt, Human
cagaguguuucuuugggugggu

SEQ ID NO: 291530 - RNA, 22 nt, Human
uggaggaauaacagcaaccuua

SEQ ID NO: 291531 - RNA, 22 nt, Human
ccuggcuccaaagcugugacuc

SEQ ID NO: 291532 - RNA, 22 nt, Human
ccagguguuacacgaguguuaa

SEQ ID NO: 291533 - RNA, 21 nt, Human
ccaggucuugguccuuggacu

SEQ ID NO: 291534 - RNA, 22 nt, Human
agagaaggaaagcugacauggg

SEQ ID NO: 291535 - RNA, 22 nt, Human
acugguaacaauggaagcuucu

SEQ ID NO: 291536 - RNA, 22 nt, Human
acugaaauggggacaguccuua

SEQ ID NO: 291537 - RNA, 22 nt, Human
ucaugugucugcugcagcuguu

SEQ ID NO: 291538 - RNA, 19 nt, Human
gaacuuggccaggcacagu

SEQ ID NO: 291539 - RNA, 22 nt, Human
aagaugauguuguguuuucacu

SEQ ID NO: 291540 - RNA, 22 nt, Human
agugaguugaacauugauaaug

SEQ ID NO: 291541 - RNA, 23 nt, Human
gagggcucugagugcuugggcca

SEQ ID NO: 291542 - RNA, 22 nt, Human
gaaaaugugccuuuggguauug

SEQ ID NO: 291543 - RNA, 22 nt, Human
uuaaauauuuucagcaggguca

SEQ ID NO: 291544 - RNA, 22 nt, Human
uugcugggcaugucuuaauucu

SEQ ID NO: 291545 - RNA, 22 nt, Human
cggcugcugccugagucgcugu

SEQ ID NO: 291546 - RNA, 22 nt, Human
caagcuuuccauuacacacauu

SEQ ID NO: 291547 - RNA, 23 nt, Human
ccaggccucucagagggugugcc

SEQ ID NO: 291548 - RNA, 21 nt, Human
acucaggagacuaacuauguc

SEQ ID NO: 291549 - RNA, 22 nt, Human
cagggcucccuugcaaggaggg

SEQ ID NO: 291550 - RNA, 22 nt, Human
ucccagccugacagugcaucaa

SEQ ID NO: 291551 - RNA, 21 nt, Human
aauuacagauggaauuacaga

SEQ ID NO: 291552 - RNA, 22 nt, Human
cugggugacagagugagauggu

SEQ ID NO: 291553 - RNA, 22 nt, Human
uuauacaccaucacugccuugg

SEQ ID NO: 291554 - RNA, 22 nt, Human
cagugagggaagaucucagcac

SEQ ID NO: 291555 - RNA, 22 nt, Human
ccuccccacccacggcuggugg

SEQ ID NO: 291556 - RNA, 22 nt, Human
uauaucauggagauuaacauuc

SEQ ID NO: 291557 - RNA, 17 nt, Human
aaggaaugucagaaguu

SEQ ID NO: 291558 - RNA, 22 nt, Human
uucugcuuauucuguagccuuu

SEQ ID NO: 291559 - RNA, 22 nt, Human
gagacaggcagcuaguggguca

SEQ ID NO: 291560 - RNA, 22 nt, Human
ccugcagggaaucgaggcagaa

SEQ ID NO: 291561 - RNA, 22 nt, Human
ugagcaccaggcaccacagcuc

SEQ ID NO: 291562 - RNA, 22 nt, Human
ccuccccacaggccaaauaggc

SEQ ID NO: 291563 - RNA, 22 nt, Human
gagaaacaacacuugaugccuu

SEQ ID NO: 291564 - RNA, 22 nt, Human
ggugaggaaagauggugacagu

SEQ ID NO: 291565 - RNA, 22 nt, Human
uguguacacacagauauauaca

SEQ ID NO: 291566 - RNA, 22 nt, Human
ucuuucuuauuagccauuguuc

SEQ ID NO: 291567 - RNA, 22 nt, Human
ggagaucuugcuugaaggcaug

SEQ ID NO: 291568 - RNA, 22 nt, Human
uuugacucauuaaagucuccgu

SEQ ID NO: 291569 - RNA, 22 nt, Human
uuggaacaggauucaauuaaag

SEQ ID NO: 291570 - RNA, 22 nt, Human
aauacaguagguaauaguucau

SEQ ID NO: 291571 - RNA, 22 nt, Human
ucuaccuggaguccguuguuaa

SEQ ID NO: 291572 - RNA, 22 nt, Human
gucugcccggccuuccuccacc

SEQ ID NO: 291573 - RNA, 21 nt, Human
gagccuucccucugcccuuuc

SEQ ID NO: 291574 - RNA, 22 nt, Human
cacgcauguggaucagaugaag

SEQ ID NO: 291575 - RNA, 22 nt, Human
uuauucuuuucuccagaauccc

SEQ ID NO: 291576 - RNA, 22 nt, Human
uuccaggagacuuccagaaaua

SEQ ID NO: 291577 - RNA, 22 nt, Human
cagacagggguaaccuuccuca

SEQ ID NO: 291578 - RNA, 22 nt, Human
aaaguugaguuuuauguguuac

SEQ ID NO: 291579 - RNA, 22 nt, Human
gucucccaucucuguccuugug

SEQ ID NO: 291580 - RNA, 22 nt, Human
aaacaucucaaagagguauuug

SEQ ID NO: 291581 - RNA, 22 nt, Human
ccaguguguuaguggauuuccc

SEQ ID NO: 291582 - RNA, 21 nt, Human
gggaucuuguacuggcgugga

SEQ ID NO: 291583 - RNA, 22 nt, Human
uauuaucauuaacuguugaauu

SEQ ID NO: 291584 - RNA, 22 nt, Human
aaugggaagucacuacuguuac

SEQ ID NO: 291585 - RNA, 22 nt, Human
gggcugacaccacccaggcgca

SEQ ID NO: 291586 - RNA, 20 nt, Human
cugcccagccacugagggau

SEQ ID NO: 291587 - RNA, 22 nt, Human
ggcugugggugugacaggccuc

SEQ ID NO: 291588 - RNA, 22 nt, Human
acugugccacaauucaccaggg

SEQ ID NO: 291589 - RNA, 22 nt, Human
agcuccuacucuaugccagaca

SEQ ID NO: 291590 - RNA, 22 nt, Human
aucauguguaauuucaagcuac

SEQ ID NO: 291591 - RNA, 18 nt, Human
uucuuuaauucaguuuga

SEQ ID NO: 291592 - RNA, 22 nt, Human
acuggaggggaaaaugguagua

SEQ ID NO: 291593 - RNA, 22 nt, Human
uucagccuguucaugcuguugc

SEQ ID NO: 291594 - RNA, 22 nt, Human
gggacauggcuaggauuccaau

SEQ ID NO: 291595 - RNA, 22 nt, Human
auacuucuuuaagaguaagucu

SEQ ID NO: 291596 - RNA, 22 nt, Human
auggccuggggauuccugagca

SEQ ID NO: 291597 - RNA, 22 nt, Human
auuuggaaacaauuauauucuu

SEQ ID NO: 291598 - RNA, 22 nt, Human
caggaguggugugagggacucc

SEQ ID NO: 291599 - RNA, 20 nt, Human
caauaauuuacuucccuauu

SEQ ID NO: 291600 - RNA, 22 nt, Human
ugcugccaauuucuggucuuga

SEQ ID NO: 291601 - RNA, 22 nt, Human
aaaaugaggucaauauccuuuu

SEQ ID NO: 291602 - RNA, 22 nt, Human
cagguucuauacugaauaauuu

SEQ ID NO: 291603 - RNA, 22 nt, Human
gugguaaagcugauugaauuga

SEQ ID NO: 291604 - RNA, 19 nt, Human
ccaugccaucauuuuaaag

SEQ ID NO: 291605 - RNA, 22 nt, Human
gcugagguuuucugccugcuca

SEQ ID NO: 291606 - RNA, 22 nt, Human
uaucaauaucucagugugcuuc

SEQ ID NO: 291607 - RNA, 18 nt, Human
guguggcugagaugaggc

SEQ ID NO: 291608 - RNA, 22 nt, Human
uugcaacuucucccaucacucu

SEQ ID NO: 291609 - RNA, 22 nt, Human
gugcaaaaauaauugugguuuu

SEQ ID NO: 291610 - RNA, 22 nt, Human
auacacauauguguguauaugu

SEQ ID NO: 291611 - RNA, 22 nt, Human
gcugucuuuccccugcuccaga

SEQ ID NO: 291612 - RNA, 22 nt, Human
auuucccaugugaaucaauugg

SEQ ID NO: 291613 - RNA, 16 nt, Human
uuuuauugugacagcc

SEQ ID NO: 291614 - RNA, 22 nt, Human
uuccugaggaggaccaggacca

SEQ ID NO: 291615 - RNA, 22 nt, Human
accugcagcugagaaaaugacu

SEQ ID NO: 291616 - RNA, 22 nt, Human
uggugcaguagagcugucuggg

SEQ ID NO: 291617 - RNA, 22 nt, Human
ggauguugauugaauggccauu

SEQ ID NO: 291618 - RNA, 22 nt, Human
uccuggaucuacucucaauugg

SEQ ID NO: 291619 - RNA, 22 nt, Human
aggccaggaccauuagcccaga

SEQ ID NO: 291620 - RNA, 22 nt, Human
acaugacagugacuuuauaaga

SEQ ID NO: 291621 - RNA, 22 nt, Human
auguuaaaagugaggauggcca

SEQ ID NO: 291622 - RNA, 23 nt, Human
augccaggcugccuggccagccu

SEQ ID NO: 291623 - RNA, 22 nt, Human
aguugaauaauuagacauaucu

SEQ ID NO: 291624 - RNA, 22 nt, Human
acacaugagaaacaucaguugu

SEQ ID NO: 291625 - RNA, 22 nt, Human
agaaugucaacagccucucaag

SEQ ID NO: 291626 - RNA, 23 nt, Human
auuuaaugcugaguugaauguua

SEQ ID NO: 291627 - RNA, 22 nt, Human
aagcccugggauguucagcagu

SEQ ID NO: 291628 - RNA, 22 nt, Human
uucaaaaagguauguucaaguc

SEQ ID NO: 291629 - RNA, 19 nt, Human
cuccuggcucugucauuuu

SEQ ID NO: 291630 - RNA, 22 nt, Human
ucuccccagcugagcugcccuu

SEQ ID NO: 291631 - RNA, 22 nt, Human
auacacauuacuuucugucuga

SEQ ID NO: 291632 - RNA, 22 nt, Human
auguucuuggauguuguguaua

SEQ ID NO: 291633 - RNA, 22 nt, Human
auggcagggcacagcucuaguu

SEQ ID NO: 291634 - RNA, 22 nt, Human
auauuuucacagaacuugcaaa

SEQ ID NO: 291635 - RNA, 22 nt, Human
ucccagggcacucacccucccu

SEQ ID NO: 291636 - RNA, 22 nt, Human
ucaugucaguuucuucuauaaa

SEQ ID NO: 291637 - RNA, 22 nt, Human
aaugaaauguagcuuauccaua

SEQ ID NO: 291638 - RNA, 22 nt, Human
acaggacauguaccaggugguc

SEQ ID NO: 291639 - RNA, 22 nt, Human
ugguguggggauaagcacucug

SEQ ID NO: 291640 - RNA, 22 nt, Human
cgucacuucuuagucuauuuuc

SEQ ID NO: 291641 - RNA, 22 nt, Human
cuagggacugggaccuuaguua

SEQ ID NO: 291642 - RNA, 22 nt, Human
uguguccuaugaaagaggguua

SEQ ID NO: 291643 - RNA, 22 nt, Human
uuugggaauaauugcacagauu

SEQ ID NO: 291644 - RNA, 22 nt, Human
uauguauccguguguguacaga

SEQ ID NO: 291645 - RNA, 22 nt, Human
gcuuccagaucccaugcucuua

SEQ ID NO: 291646 - RNA, 22 nt, Human
aggaaugugaggcaaguuguga

SEQ ID NO: 291647 - RNA, 22 nt, Human
ggagaaggguauguguggcgga

SEQ ID NO: 291648 - RNA, 22 nt, Human
cucuuuccucagccacagucua

SEQ ID NO: 291649 - RNA, 22 nt, Human
auucuuauuauaguaaaacagu

SEQ ID NO: 291650 - RNA, 22 nt, Human
ccugagagcccuagccaggcgc

SEQ ID NO: 291651 - RNA, 22 nt, Human
cccucagcuucucccugcagcu

SEQ ID NO: 291652 - RNA, 22 nt, Human
cccugcagaucuaggguccuuc

SEQ ID NO: 291653 - RNA, 22 nt, Human
acucugaaugugcauguaaauc

SEQ ID NO: 291654 - RNA, 22 nt, Human
acccaggcugcuucucaguggc

SEQ ID NO: 291655 - RNA, 22 nt, Human
uuccuucuuccagaggcugccc

SEQ ID NO: 291656 - RNA, 22 nt, Human
ccaugugucuccccuggaagua

SEQ ID NO: 291657 - RNA, 22 nt, Human
uuucuuuaucauagcaucuuug

SEQ ID NO: 291658 - RNA, 22 nt, Human
ugacaaguacauaauuucaugu

SEQ ID NO: 291659 - RNA, 22 nt, Human
aauuuacaggugcacucgccau

SEQ ID NO: 291660 - RNA, 23 nt, Human
aggauguaggauguauggcagag

SEQ ID NO: 291661 - RNA, 22 nt, Human
ugcagggcuaagucagagccug

SEQ ID NO: 291662 - RNA, 22 nt, Human
uggcaggggaggugcuugcuua

SEQ ID NO: 291663 - RNA, 22 nt, Human
ugagccaggcuccaugccaccu

SEQ ID NO: 291664 - RNA, 22 nt, Human
uuuuauaagcaagaaagggaaa

SEQ ID NO: 291665 - RNA, 22 nt, Human
auuguuaaacugaagcauuacu

SEQ ID NO: 291666 - RNA, 22 nt, Human
cuugcuggugucgugccuucac

SEQ ID NO: 291667 - RNA, 22 nt, Human
gccacuguuccaccaucuugau

SEQ ID NO: 291668 - RNA, 23 nt, Human
aacugagauaauguauguaaagc

SEQ ID NO: 291669 - RNA, 23 nt, Human
acaucaugauagccaacuuggga

SEQ ID NO: 291670 - RNA, 22 nt, Human
ucccaggguccucuucuggaau

SEQ ID NO: 291671 - RNA, 22 nt, Human
aggaaugucaaguagaugugcg

SEQ ID NO: 291672 - RNA, 22 nt, Human
uagcaaguagauacucauuuag

SEQ ID NO: 291673 - RNA, 22 nt, Human
auuucaggguaaaaaguguuca

SEQ ID NO: 291674 - RNA, 22 nt, Human
ggagaagguggcucagcaaagg

SEQ ID NO: 291675 - RNA, 22 nt, Human
acaggcauauuucuagauuaca

SEQ ID NO: 291676 - RNA, 22 nt, Human
aagggagacaguugugugagga

SEQ ID NO: 291677 - RNA, 22 nt, Human
agaggugacauaggagaggcuc

SEQ ID NO: 291678 - RNA, 22 nt, Human
acaguuauucuuuaugcaacca

SEQ ID NO: 291679 - RNA, 22 nt, Human
aauucuugguccuaguguauaa

SEQ ID NO: 291680 - RNA, 22 nt, Human
uggccugggccugccggugcaa

SEQ ID NO: 291681 - RNA, 20 nt, Human
cugcugcccugucagccucu

SEQ ID NO: 291682 - RNA, 22 nt, Human
agcuuuaucuucaccugggaau

SEQ ID NO: 291683 - RNA, 22 nt, Human
agcuggaggauaacucacuucu

SEQ ID NO: 291684 - RNA, 22 nt, Human
ucuguggcuugggccugccugu

SEQ ID NO: 291685 - RNA, 21 nt, Human
agggccagaucaccaaggagc

SEQ ID NO: 291686 - RNA, 22 nt, Human
auauuuugaaguuaauaaugug

SEQ ID NO: 291687 - RNA, 22 nt, Human
cacaucagguagaccuacagag

SEQ ID NO: 291688 - RNA, 22 nt, Human
uugcagcugcaguaaauguuca

SEQ ID NO: 291689 - RNA, 22 nt, Human
cacaccagagguuaccugcaaa

SEQ ID NO: 291690 - RNA, 23 nt, Human
uuccugugguauauuuuauaggg

SEQ ID NO: 291691 - RNA, 22 nt, Human
uuuugagauggugucucgcucc

SEQ ID NO: 291692 - RNA, 22 nt, Human
uugggacaucuggcauacaguu

SEQ ID NO: 291693 - RNA, 22 nt, Human
uagggacccucccugcucuaac

SEQ ID NO: 291694 - RNA, 22 nt, Human
gcuuucuugguucugcaggggc

SEQ ID NO: 291695 - RNA, 22 nt, Human
gguggcaguggucucugacaga

SEQ ID NO: 291696 - RNA, 22 nt, Human
uuuuuugucccagagagccugg

SEQ ID NO: 291697 - RNA, 22 nt, Human
aggcaucuauacauuauguuca

SEQ ID NO: 291698 - RNA, 22 nt, Human
ucuuucaaugagcauucuuucc

SEQ ID NO: 291699 - RNA, 20 nt, Human
acaugcaguggucauuucag

SEQ ID NO: 291700 - RNA, 20 nt, Human
caugccagaaugugagguag

SEQ ID NO: 291701 - RNA, 23 nt, Human
ugggaccuguuugcccacagaug

SEQ ID NO: 291702 - RNA, 22 nt, Human
gcagggcaaauguggaaaggag

SEQ ID NO: 291703 - RNA, 22 nt, Human
agcagggcuccauuucacugcc

SEQ ID NO: 291704 - RNA, 22 nt, Human
uuucagaaggggagaaagguca

SEQ ID NO: 291705 - RNA, 22 nt, Human
ggcuggcagugugagagaggga

SEQ ID NO: 291706 - RNA, 22 nt, Human
acaaugcuugguuuuucuagaa

SEQ ID NO: 291707 - RNA, 22 nt, Human
agagaaacaggucagcugggag

SEQ ID NO: 291708 - RNA, 20 nt, Human
agcaggugacggggccugcu

SEQ ID NO: 291709 - RNA, 22 nt, Human
caggacagagcccagacugugu

SEQ ID NO: 291710 - RNA, 22 nt, Human
gcaagcuguccuuuugcauggc

SEQ ID NO: 291711 - RNA, 22 nt, Human
uuccuggcaugaaaaauaucac

SEQ ID NO: 291712 - RNA, 22 nt, Human
agaagcuaauucaugucuuaug

SEQ ID NO: 291713 - RNA, 22 nt, Human
uaauucuucaggccuuuugucu

SEQ ID NO: 291714 - RNA, 22 nt, Human
ucagcaaaggaccagcacaggc

SEQ ID NO: 291715 - RNA, 22 nt, Human
uguuucauguggacauaguugu

SEQ ID NO: 291716 - RNA, 22 nt, Human
ccuguucaauauucuuccuugu

SEQ ID NO: 291717 - RNA, 22 nt, Human
cccagggaggcccaggcucugc

SEQ ID NO: 291718 - RNA, 22 nt, Human
acaguguccuuguggucccugu

SEQ ID NO: 291719 - RNA, 21 nt, Human
gcagccacugccuucaacaau

SEQ ID NO: 291720 - RNA, 22 nt, Human
gucugcccagaagacauccccu

SEQ ID NO: 291721 - RNA, 22 nt, Human
uaaauguaccuucugccuuacu

SEQ ID NO: 291722 - RNA, 21 nt, Human
ucuccuggguccaacccaugc

SEQ ID NO: 291723 - RNA, 22 nt, Human
gaugagguaagaauguaacacc

SEQ ID NO: 291724 - RNA, 22 nt, Human
auuuaacaagacagagaacugg

SEQ ID NO: 291725 - RNA, 22 nt, Human
ccagcuuuagguugccugccag

SEQ ID NO: 291726 - RNA, 22 nt, Human
auacuguaauaccuaaaugaac

SEQ ID NO: 291727 - RNA, 22 nt, Human
cucuggaaaaccacuagcagga

SEQ ID NO: 291728 - RNA, 22 nt, Human
uuacuucuuuggccuucagcca

SEQ ID NO: 291729 - RNA, 22 nt, Human
uccuucaaucacccagugggga

SEQ ID NO: 291730 - RNA, 22 nt, Human
aaugaaugaaccacauauaaca

SEQ ID NO: 291731 - RNA, 23 nt, Human
acacugucucauggauagacugc

SEQ ID NO: 291732 - RNA, 22 nt, Human
augcaacaaaugcuacgaaucg

SEQ ID NO: 291733 - RNA, 20 nt, Human
uauuuacaacuuagagccuc

SEQ ID NO: 291734 - RNA, 22 nt, Human
uccuggccuagcucacccugga

SEQ ID NO: 291735 - RNA, 22 nt, Human
uucaugaauauauugaauuagc

SEQ ID NO: 291736 - RNA, 22 nt, Human
uggaggaaguggacaguugugu

SEQ ID NO: 291737 - RNA, 22 nt, Human
auuuccauguccaaaaauuagu

SEQ ID NO: 291738 - RNA, 22 nt, Human
cuucuuccugcugcagccucca

SEQ ID NO: 291739 - RNA, 22 nt, Human
auuaauuuuucugacagccaca

SEQ ID NO: 291740 - RNA, 22 nt, Human
cuuccuuccacaccuucagaau

SEQ ID NO: 291741 - RNA, 22 nt, Human
ucuccuggccuuuagguuaagg

SEQ ID NO: 291742 - RNA, 22 nt, Human
cagugcagacguggagggggca

SEQ ID NO: 291743 - RNA, 20 nt, Human
aggugcaagcaguaaauugc

SEQ ID NO: 291744 - RNA, 22 nt, Human
auucuuuauugcugaugguuau

SEQ ID NO: 291745 - RNA, 22 nt, Human
gcuggcagaagagcugguucaa

SEQ ID NO: 291746 - RNA, 22 nt, Human
ugauggucaggaugcauggaga

SEQ ID NO: 291747 - RNA, 22 nt, Human
cccacccugggaagcuaggcag

SEQ ID NO: 291748 - RNA, 22 nt, Human
uauugcugaugcugaagggaag

SEQ ID NO: 291749 - RNA, 22 nt, Human
uucugggugccaccuaagacau

SEQ ID NO: 291750 - RNA, 22 nt, Human
uuuuauugcaauaaagugugua

SEQ ID NO: 291751 - RNA, 22 nt, Human
uccaaauucuagggccuugguu

SEQ ID NO: 291752 - RNA, 23 nt, Human
acagggcauugcuggccucgagg

SEQ ID NO: 291753 - RNA, 22 nt, Human
aauuuuacauaggggauauggg

SEQ ID NO: 291754 - RNA, 22 nt, Human
cugccaugugugaaaggggagg

SEQ ID NO: 291755 - RNA, 23 nt, Human
uggauaaaauacuuacauucaac

SEQ ID NO: 291756 - RNA, 22 nt, Human
auacacaugcacacaugugugu

SEQ ID NO: 291757 - RNA, 23 nt, Human
caugucugcuuucaugcuacaac

SEQ ID NO: 291758 - RNA, 20 nt, Human
agaggaggauuauuuuauuc

SEQ ID NO: 291759 - RNA, 22 nt, Human
ugcagggaaaacccaggaugcu

SEQ ID NO: 291760 - RNA, 22 nt, Human
ggcccagugucccggucguggc

SEQ ID NO: 291761 - RNA, 22 nt, Human
cugauuccagagucuguguucu

SEQ ID NO: 291762 - RNA, 22 nt, Human
aaguaacacauguuacuucugc

SEQ ID NO: 291763 - RNA, 22 nt, Human
ucuucaaaugcuaguaauauca

SEQ ID NO: 291764 - RNA, 22 nt, Human
ucuagaaaaccaauauuacaug

SEQ ID NO: 291765 - RNA, 22 nt, Human
acuggcaguagagggagcgcau

SEQ ID NO: 291766 - RNA, 22 nt, Human
auuucucauuuugcuucaaagg

SEQ ID NO: 291767 - RNA, 22 nt, Human
agcuuuauauguuguuucucca

SEQ ID NO: 291768 - RNA, 22 nt, Human
aagggcucugugugccucccca

SEQ ID NO: 291769 - RNA, 22 nt, Human
cuucucggccguguggaugcgc

SEQ ID NO: 291770 - RNA, 22 nt, Human
uggagggaacaaaggaguccca

SEQ ID NO: 291771 - RNA, 22 nt, Human
gguacaaaguuagauuuaacuu

SEQ ID NO: 291772 - RNA, 19 nt, Human
ugcucuggagccagcucuc

SEQ ID NO: 291773 - RNA, 23 nt, Human
ugugaccccuaggaguggggacc

SEQ ID NO: 291774 - RNA, 22 nt, Human
accauccugaaaccuucaugcu

SEQ ID NO: 291775 - RNA, 22 nt, Human
ccugccagucacuaugucaccu

SEQ ID NO: 291776 - RNA, 22 nt, Human
cacagaacauccuuagcucaug

SEQ ID NO: 291777 - RNA, 22 nt, Human
uacaagcucgggcagcucauua

SEQ ID NO: 291778 - RNA, 22 nt, Human
accauuuaaggaaaauguauca

SEQ ID NO: 291779 - RNA, 22 nt, Human
gaaaggccacgugccaagauua

SEQ ID NO: 291780 - RNA, 22 nt, Human
aaucuucuuucuuaacaguaca

SEQ ID NO: 291781 - RNA, 22 nt, Human
uaaauucugaucaaguuccuuc

SEQ ID NO: 291782 - RNA, 22 nt, Human
uguggugguaaugagccagaug

SEQ ID NO: 291783 - RNA, 22 nt, Human
uuaaauagucaaaucaguggca

SEQ ID NO: 291784 - RNA, 22 nt, Human
uuugcauuguaauauuuaguuc

SEQ ID NO: 291785 - RNA, 22 nt, Human
uuucaguuacugcuauaucauu

SEQ ID NO: 291786 - RNA, 22 nt, Human
uuucuaggucuuccauacugcc

SEQ ID NO: 291787 - RNA, 22 nt, Human
augcuucagugcuaccuucaaa

SEQ ID NO: 291788 - RNA, 22 nt, Human
uugcaaggagccacucugccug

SEQ ID NO: 291789 - RNA, 22 nt, Human
aggcugcucugcgaagucagcu

SEQ ID NO: 291790 - RNA, 22 nt, Human
uaaggagggggaaugauuggca

SEQ ID NO: 291791 - RNA, 22 nt, Human
agggaccucauguaaguggauu

SEQ ID NO: 291792 - RNA, 22 nt, Human
gcagagaggauauuauugucca

SEQ ID NO: 291793 - RNA, 22 nt, Human
aacaaguaaguuuauauauauu

SEQ ID NO: 291794 - RNA, 22 nt, Human
agggcugaagggaggugcucau

SEQ ID NO: 291795 - RNA, 22 nt, Human
ccccacccaccuaagagaaacu

SEQ ID NO: 291796 - RNA, 22 nt, Human
aaaugucauauuuaaguaggaa

SEQ ID NO: 291797 - RNA, 22 nt, Human
auggcucugcugggcaaagcaa

SEQ ID NO: 291798 - RNA, 22 nt, Human
uucaugagguaccugugaucau

SEQ ID NO: 291799 - RNA, 22 nt, Human
cagucuuauccugaaaacaaca

SEQ ID NO: 291800 - RNA, 22 nt, Human
cagggaugagagauggcacaga

SEQ ID NO: 291801 - RNA, 22 nt, Human
acuuuguucuaauaguaucucu

SEQ ID NO: 291802 - RNA, 23 nt, Human
uuuugugugacuuaauaucucuu

SEQ ID NO: 291803 - RNA, 22 nt, Human
uuaaaguguuaacugaagcuua

SEQ ID NO: 291804 - RNA, 22 nt, Human
uguguccucacuguaugcaagg

SEQ ID NO: 291805 - RNA, 22 nt, Human
guggaaugaauagauuugcauu

SEQ ID NO: 291806 - RNA, 22 nt, Human
guuuuacaaaugacggcauuca

SEQ ID NO: 291807 - RNA, 22 nt, Human
agacaggcagggcauggaaaaa

SEQ ID NO: 291808 - RNA, 22 nt, Human
cuggcagcauuaacagagagca

SEQ ID NO: 291809 - RNA, 22 nt, Human
uucucaacucucaagagaagcu

SEQ ID NO: 291810 - RNA, 22 nt, Human
cccaguauugagcuacaggccu

SEQ ID NO: 291811 - RNA, 22 nt, Human
acaagcaugggcuuugacauca

SEQ ID NO: 291812 - RNA, 22 nt, Human
ccagggcagccaacccagaugc

SEQ ID NO: 291813 - RNA, 22 nt, Human
cuugggauguaaccuuuguucc

SEQ ID NO: 291814 - RNA, 22 nt, Human
augugaaauagcuggauaugaa

SEQ ID NO: 291815 - RNA, 22 nt, Human
aggcagugagaaauagcaagau

SEQ ID NO: 291816 - RNA, 18 nt, Human
gcucuggcucaccuccag

SEQ ID NO: 291817 - RNA, 22 nt, Human
cacaggcugcccgcagcuggga

SEQ ID NO: 291818 - RNA, 22 nt, Human
cugagguguugaugaccuaugc

SEQ ID NO: 291819 - RNA, 22 nt, Human
ggcagcacugcagcuuguuggg

SEQ ID NO: 291820 - RNA, 16 nt, Human
gcugggagggagaggu

SEQ ID NO: 291821 - RNA, 22 nt, Human
aggcaggucuguaucuagucuc

SEQ ID NO: 291822 - RNA, 22 nt, Human
guucuauuccccuuaucuguga

SEQ ID NO: 291823 - RNA, 21 nt, Human
ucucugugguccaaucccagc

SEQ ID NO: 291824 - RNA, 22 nt, Human
uacuuguucuuucaagagauag

SEQ ID NO: 291825 - RNA, 18 nt, Human
gcugaaauucuaaacaaa

SEQ ID NO: 291826 - RNA, 22 nt, Human
gugguaaaaugugaaauggauu

SEQ ID NO: 291827 - RNA, 22 nt, Human
auauucacugagcauaaagcca

SEQ ID NO: 291828 - RNA, 22 nt, Human
aauaaugauaaugguuauagcu

SEQ ID NO: 291829 - RNA, 23 nt, Human
acaaugucuguucauaaaauacc

SEQ ID NO: 291830 - RNA, 22 nt, Human
gccccagcccuguggaccaugg

SEQ ID NO: 291831 - RNA, 22 nt, Human
acacacagaaggaagccccacu

SEQ ID NO: 291832 - RNA, 22 nt, Human
acauuuuacaccaagacuucuu

SEQ ID NO: 291833 - RNA, 22 nt, Human
ugacagacacaccuuaggaaag

SEQ ID NO: 291834 - RNA, 22 nt, Human
cauaauccauuugcacugcaga

SEQ ID NO: 291835 - RNA, 22 nt, Human
ucacuuuacuuuguuaaucugg

SEQ ID NO: 291836 - RNA, 22 nt, Human
cugcaggggcuggaguuggcuu

SEQ ID NO: 291837 - RNA, 22 nt, Human
auaguacauggguguccucaca

SEQ ID NO: 291838 - RNA, 22 nt, Human
uugcuucaguagcucuuuaaag

SEQ ID NO: 291839 - RNA, 22 nt, Human
auaucaaacgaaguuauuuuaa

SEQ ID NO: 291840 - RNA, 22 nt, Human
uggcuugggugucucagcucuu

SEQ ID NO: 291841 - RNA, 22 nt, Human
cuucugaaguguuugaugauug

SEQ ID NO: 291842 - RNA, 22 nt, Human
accuguuuagaaagcuuaugag

SEQ ID NO: 291843 - RNA, 22 nt, Human
gggccccuuguaucucuggcuc

SEQ ID NO: 291844 - RNA, 22 nt, Human
aaggcuuucagcuaacuugauu

SEQ ID NO: 291845 - RNA, 22 nt, Human
cacagcugcccccucucuaacu

SEQ ID NO: 291846 - RNA, 23 nt, Human
cacuccuguuucuaagccagcau

SEQ ID NO: 291847 - RNA, 23 nt, Human
cguguccuucagggagagugugg

SEQ ID NO: 291848 - RNA, 22 nt, Human
ucccaggauuuuaggcucucag

SEQ ID NO: 291849 - RNA, 19 nt, Human
cacaucagcagggcugugg

SEQ ID NO: 291850 - RNA, 22 nt, Human
ccacagagacaggguccuugcu

SEQ ID NO: 291851 - RNA, 22 nt, Human
agggaaggaggccauguguccc

SEQ ID NO: 291852 - RNA, 22 nt, Human
aucauuacuccuguaaaauugu

SEQ ID NO: 291853 - RNA, 22 nt, Human
aagcuuuagagaugaguuccuu

SEQ ID NO: 291854 - RNA, 22 nt, Human
uuugcuugacccuugugcugaa

SEQ ID NO: 291855 - RNA, 19 nt, Human
gcucagagacaccuguugc

SEQ ID NO: 291856 - RNA, 22 nt, Human
gaaucagauacugauuucaguc

SEQ ID NO: 291857 - RNA, 22 nt, Human
ucuguuaucucaagucacaaga

SEQ ID NO: 291858 - RNA, 22 nt, Human
ugacagacauggaagccagagu

SEQ ID NO: 291859 - RNA, 22 nt, Human
aaagccuucaaguagauguaag

SEQ ID NO: 291860 - RNA, 22 nt, Human
gcagggcagcugaagcuaggug

SEQ ID NO: 291861 - RNA, 22 nt, Human
acauggugagcggcaggccuau

SEQ ID NO: 291862 - RNA, 22 nt, Human
uuuacuucugcauuuccccuag

SEQ ID NO: 291863 - RNA, 22 nt, Human
caguuuauuuccaagaugacaa

SEQ ID NO: 291864 - RNA, 22 nt, Human
uucauucugcaguucucagcuc

SEQ ID NO: 291865 - RNA, 22 nt, Human
agggccaggaucacagccaaga

SEQ ID NO: 291866 - RNA, 22 nt, Human
ggcaggcaacggaccacuaguc

SEQ ID NO: 291867 - RNA, 22 nt, Human
gaggugucguagauuauucuca

SEQ ID NO: 291868 - RNA, 22 nt, Human
agcccuaaauuaucuuuauuuu

SEQ ID NO: 291869 - RNA, 22 nt, Human
gagauuuaauuggauuaacuua

SEQ ID NO: 291870 - RNA, 22 nt, Human
gcaaagcacacuggagaugucg

SEQ ID NO: 291871 - RNA, 22 nt, Human
uccucccuguaccauuccucug

SEQ ID NO: 291872 - RNA, 17 nt, Human
aagagaggcugagcugg

SEQ ID NO: 291873 - RNA, 22 nt, Human
caggagggcccgagacucuucc

SEQ ID NO: 291874 - RNA, 22 nt, Human
ggccuaggaaggggauguaacu

SEQ ID NO: 291875 - RNA, 22 nt, Human
cccuggcagagggggcaggugc

SEQ ID NO: 291876 - RNA, 22 nt, Human
ucaggagcugcacugggcccac

SEQ ID NO: 291877 - RNA, 23 nt, Human
uaggugucuaguguccacuaugu

SEQ ID NO: 291878 - RNA, 22 nt, Human
uucuguuuuagaaauaaguagu

SEQ ID NO: 291879 - RNA, 19 nt, Human
aggcuugguugcagcaagc

SEQ ID NO: 291880 - RNA, 18 nt, Human
guuuacauuacugaauag

SEQ ID NO: 291881 - RNA, 22 nt, Human
uucugguaccgugucagaaacc

SEQ ID NO: 291882 - RNA, 22 nt, Human
ugguggacaucccagggugaaa

SEQ ID NO: 291883 - RNA, 22 nt, Human
acacugaauaauugagaguuga

SEQ ID NO: 291884 - RNA, 22 nt, Human
agaggcaaggcaggauucuucu

SEQ ID NO: 291885 - RNA, 22 nt, Human
cccaugagguggagguugcagu

SEQ ID NO: 291886 - RNA, 22 nt, Human
uaggugucuggacaacuuugua

SEQ ID NO: 291887 - RNA, 22 nt, Human
uuagcuuuagagccauuacugg

SEQ ID NO: 291888 - RNA, 22 nt, Human
cucacagcagccagucugccuu

SEQ ID NO: 291889 - RNA, 22 nt, Human
ccacugcuccugaccaagguca

SEQ ID NO: 291890 - RNA, 22 nt, Human
cugaggagugggugggcaguga

SEQ ID NO: 291891 - RNA, 22 nt, Human
uagucaguagcaagguauuuug

SEQ ID NO: 291892 - RNA, 22 nt, Human
uggcaacaugucgaagugcugu

SEQ ID NO: 291893 - RNA, 22 nt, Human
agcuuguuagaaauguagacuc

SEQ ID NO: 291894 - RNA, 22 nt, Human
uccaaauucuauguucuuucca

SEQ ID NO: 291895 - RNA, 22 nt, Human
auccuucuucaaagagggaaaa

SEQ ID NO: 291896 - RNA, 22 nt, Human
auucuuaauugccaugcuguau

SEQ ID NO: 291897 - RNA, 22 nt, Human
uaccaugucuucaauaagucua

SEQ ID NO: 291898 - RNA, 22 nt, Human
ucugccugcaguguggcagggc

SEQ ID NO: 291899 - RNA, 22 nt, Human
aaaggccuugagcugggugcca

SEQ ID NO: 291900 - RNA, 22 nt, Human
gguguccuacugcuugguugcu

SEQ ID NO: 291901 - RNA, 22 nt, Human
acauucuauucugcaggacaag

SEQ ID NO: 291902 - RNA, 22 nt, Human
gcuguggcgauugguaucgauu

SEQ ID NO: 291903 - RNA, 22 nt, Human
uugcagcuucuaccacuguuuc

SEQ ID NO: 291904 - RNA, 22 nt, Human
ccugcagggugcugccacagau

SEQ ID NO: 291905 - RNA, 22 nt, Human
gaucuuuucagucuugguaguu

SEQ ID NO: 291906 - RNA, 22 nt, Human
ucuuauugguaaugauggcauu

SEQ ID NO: 291907 - RNA, 22 nt, Human
acuucuauuggucaugauaaaa

SEQ ID NO: 291908 - RNA, 22 nt, Human
cccugcagagggaugggggcag

SEQ ID NO: 291909 - RNA, 21 nt, Human
uggcuaaacccuaguaaauua

SEQ ID NO: 291910 - RNA, 22 nt, Human
agguucucacacgucuacaccc

SEQ ID NO: 291911 - RNA, 22 nt, Human
cugaggagcugaaggcccucca

SEQ ID NO: 291912 - RNA, 22 nt, Human
cuuccugggucagccuggaggu

SEQ ID NO: 291913 - RNA, 22 nt, Human
ugggcaggcaagugaauaccuu

SEQ ID NO: 291914 - RNA, 23 nt, Human
aaauaugucugagggcaaagaau

SEQ ID NO: 291915 - RNA, 22 nt, Human
gccaucugcgcgguguccagcu

SEQ ID NO: 291916 - RNA, 22 nt, Human
uucuuucaauagcuggcauaug

SEQ ID NO: 291917 - RNA, 22 nt, Human
uccucaguuauaaauaggaaac

SEQ ID NO: 291918 - RNA, 22 nt, Human
auuuacagguagaauuuuaagu

SEQ ID NO: 291919 - RNA, 20 nt, Human
aggccugagagaugacuggg

SEQ ID NO: 291920 - RNA, 22 nt, Human
gagagcuggauucuggauaggu

SEQ ID NO: 291921 - RNA, 22 nt, Human
uuccugaauauaaagacacuag

SEQ ID NO: 291922 - RNA, 20 nt, Human
gcacagagaugagcaaagua

SEQ ID NO: 291923 - RNA, 22 nt, Human
caggccugguugagcccugaga

SEQ ID NO: 291924 - RNA, 22 nt, Human
uucugggagagaaagggccuug

SEQ ID NO: 291925 - RNA, 22 nt, Human
uaaaaaucuuaugaauggcaag

SEQ ID NO: 291926 - RNA, 22 nt, Human
uuugaagacagaucaauauaag

SEQ ID NO: 291927 - RNA, 22 nt, Human
ccaggugugcucugcaguggau

SEQ ID NO: 291928 - RNA, 22 nt, Human
ccaggugucugucucuuuuuca

SEQ ID NO: 291929 - RNA, 22 nt, Human
guuuucauuacugcugugauuu

SEQ ID NO: 291930 - RNA, 22 nt, Human
cuggauguuuaugaaggaccca

SEQ ID NO: 291931 - RNA, 22 nt, Human
uccacagaauguaagauccaca

SEQ ID NO: 291932 - RNA, 22 nt, Human
auucuacauuuggagugauguc

SEQ ID NO: 291933 - RNA, 22 nt, Human
uauuauuaaauggcagaauuuu

SEQ ID NO: 291934 - RNA, 22 nt, Human
aagccuucagaguuggcugguc

SEQ ID NO: 291935 - RNA, 21 nt, Human
cuacuuaaguaggggauuagg

SEQ ID NO: 291936 - RNA, 22 nt, Human
aaugauuggcacuagauacaca

SEQ ID NO: 291937 - RNA, 22 nt, Human
guuucacagucugcagaauuuu

SEQ ID NO: 291938 - RNA, 22 nt, Human
uuaaagaugcagcuuuagagaa

SEQ ID NO: 291939 - RNA, 23 nt, Human
cacacccaucacuaagagcuccu

SEQ ID NO: 291940 - RNA, 22 nt, Human
gaagggagaagguugggugacg

SEQ ID NO: 291941 - RNA, 22 nt, Human
ggaaguagaaguaaugaaauca

SEQ ID NO: 291942 - RNA, 22 nt, Human
acauuuauauaacucacuagga

SEQ ID NO: 291943 - RNA, 22 nt, Human
ugggguccagugccaccccaag

SEQ ID NO: 291944 - RNA, 23 nt, Human
cagagcugauuaaacuuaaucuc

SEQ ID NO: 291945 - RNA, 22 nt, Human
uugaaaacuuucuagaccaaga

SEQ ID NO: 291946 - RNA, 21 nt, Human
ucucuuucuggaagcuucccu

SEQ ID NO: 291947 - RNA, 22 nt, Human
ccugggucuccuccugcuggcu

SEQ ID NO: 291948 - RNA, 22 nt, Human
gcauucuuugaaugcuucuaau

SEQ ID NO: 291949 - RNA, 22 nt, Human
cuccuggagcagcaggcgcagg

SEQ ID NO: 291950 - RNA, 20 nt, Human
ucugagacuuguagugugga

SEQ ID NO: 291951 - RNA, 22 nt, Human
aagggcuccaagagguagcugg

SEQ ID NO: 291952 - RNA, 21 nt, Human
uggcaggcagcuggaagcuug

SEQ ID NO: 291953 - RNA, 22 nt, Human
gcuggguccaugguccucgggu

SEQ ID NO: 291954 - RNA, 19 nt, Human
cugggccagagcuguccuc

SEQ ID NO: 291955 - RNA, 22 nt, Human
ggcaggugccuucugugcuagc

SEQ ID NO: 291956 - RNA, 22 nt, Human
uuugcagaagaaaacaugaaca

SEQ ID NO: 291957 - RNA, 22 nt, Human
cuguggaauugaugcuuagugu

SEQ ID NO: 291958 - RNA, 22 nt, Human
uuccuggcacccuuguuagccu

SEQ ID NO: 291959 - RNA, 21 nt, Human
ugagcaggugcugcuuuuaug

SEQ ID NO: 291960 - RNA, 22 nt, Human
gggagcuggagcuggaagacuc

SEQ ID NO: 291961 - RNA, 22 nt, Human
ggcagguguggaguguuauuuu

SEQ ID NO: 291962 - RNA, 22 nt, Human
ugcccagguuugagugcccaag

SEQ ID NO: 291963 - RNA, 22 nt, Human
uucacauuggugauauguuucu

SEQ ID NO: 291964 - RNA, 22 nt, Human
gcacagcucuccccaagacgaa

SEQ ID NO: 291965 - RNA, 22 nt, Human
ucuguucagacacuuuacaugu

SEQ ID NO: 291966 - RNA, 22 nt, Human
aguguucagugauugucaaccg

SEQ ID NO: 291967 - RNA, 22 nt, Human
aaaggcuggggacugaggaagg

SEQ ID NO: 291968 - RNA, 22 nt, Human
acauuccugaaugggcacauuu

SEQ ID NO: 291969 - RNA, 22 nt, Human
caguguggugagauuccaggug

SEQ ID NO: 291970 - RNA, 22 nt, Human
cugaggagcccccucucagcau

SEQ ID NO: 291971 - RNA, 22 nt, Human
augguguuuauaggcaaagauc

SEQ ID NO: 291972 - RNA, 22 nt, Human
aauuaaaaaaggagagcuugcu

SEQ ID NO: 291973 - RNA, 22 nt, Human
uagcuauuuagcccagauaagu

SEQ ID NO: 291974 - RNA, 22 nt, Human
ccagagaccagaacauggggau

SEQ ID NO: 291975 - RNA, 17 nt, Human
cucuuuauaaagaguua

SEQ ID NO: 291976 - RNA, 22 nt, Human
cuaaaauuaucaagauaauucc

SEQ ID NO: 291977 - RNA, 22 nt, Human
ucucuguauucugauauucacu

SEQ ID NO: 291978 - RNA, 22 nt, Human
acaagagcccuuucagauugac

SEQ ID NO: 291979 - RNA, 22 nt, Human
aaaaagauagcauugugcuccu

SEQ ID NO: 291980 - RNA, 22 nt, Human
ucugcaagaucauuaaagcaga

SEQ ID NO: 291981 - RNA, 20 nt, Human
uucuuuguuccuuacauuug

SEQ ID NO: 291982 - RNA, 22 nt, Human
ugcaaaaagagcgaggagcccu

SEQ ID NO: 291983 - RNA, 22 nt, Human
caucugaauuugccuuaguuuc

SEQ ID NO: 291984 - RNA, 22 nt, Human
ccugccagggccagaggccagc

SEQ ID NO: 291985 - RNA, 22 nt, Human
acauuucuauagugcaucuguu

SEQ ID NO: 291986 - RNA, 22 nt, Human
ucuagaaugacaugcaagagua

SEQ ID NO: 291987 - RNA, 22 nt, Human
cuguucauggaaaaauaguugg

SEQ ID NO: 291988 - RNA, 22 nt, Human
uuucugaacuugguacuggagc

SEQ ID NO: 291989 - RNA, 20 nt, Human
acugugaaugcugaauuagc

SEQ ID NO: 291990 - RNA, 22 nt, Human
uuuuauaaagagagucaguugg

SEQ ID NO: 291991 - RNA, 22 nt, Human
cagcaggggaacugugggccag

SEQ ID NO: 291992 - RNA, 23 nt, Human
uggucucacuugguaagaugaag

SEQ ID NO: 291993 - RNA, 22 nt, Human
uucuucagacuacugaugauug

SEQ ID NO: 291994 - RNA, 22 nt, Human
ugcaaacauccgacugaaagcc

SEQ ID NO: 291995 - RNA, 22 nt, Human
cuggcccuucucuugcuuccug

SEQ ID NO: 291996 - RNA, 22 nt, Human
auaaaauuugcuacuguuaaau

SEQ ID NO: 291997 - RNA, 22 nt, Human
caagauuuagcucccuuaucuc

SEQ ID NO: 291998 - RNA, 22 nt, Human
uuccuggccccaccccuggaga

SEQ ID NO: 291999 - RNA, 22 nt, Human
caggcauaucuacauuauccaa

SEQ ID NO: 292000 - RNA, 22 nt, Human
ugucuuuaagcaaacaguguuu

SEQ ID NO: 292001 - RNA, 22 nt, Human
agaaacucauccuggagaugac

SEQ ID NO: 292002 - RNA, 22 nt, Human
aagguugcagcaguguugauga

SEQ ID NO: 292003 - RNA, 21 nt, Human
uggcugacucuuccuaucauu

SEQ ID NO: 292004 - RNA, 22 nt, Human
uuguagcuagguuuuuguagaa

SEQ ID NO: 292005 - RNA, 22 nt, Human
gccuggagggauagaaugcaag

SEQ ID NO: 292006 - RNA, 23 nt, Human
accaugaugggagugcaaauaag

SEQ ID NO: 292007 - RNA, 22 nt, Human
ucucuagggaucuguuuuaauu

SEQ ID NO: 292008 - RNA, 21 nt, Human
uucaauacuauuucaauaguc

SEQ ID NO: 292009 - RNA, 22 nt, Human
ugacaauugugggcaguuugug

SEQ ID NO: 292010 - RNA, 22 nt, Human
uucagcaaauggacuguucagg

SEQ ID NO: 292011 - RNA, 22 nt, Human
uuccuggcacccuggacccggc

SEQ ID NO: 292012 - RNA, 22 nt, Human
cauuuauucauuugcuagggcu

SEQ ID NO: 292013 - RNA, 22 nt, Human
aggccuccagccacaugccagu

SEQ ID NO: 292014 - RNA, 22 nt, Human
uagcacagcuucuugaugucac

SEQ ID NO: 292015 - RNA, 22 nt, Human
gcuggcaggguucucacugaaa

SEQ ID NO: 292016 - RNA, 22 nt, Human
uacaaaaguaauuacgguuuuu

SEQ ID NO: 292017 - RNA, 22 nt, Human
uuucuguuguuggugucuggcu

SEQ ID NO: 292018 - RNA, 22 nt, Human
aaagauuucagaagccugugcc

SEQ ID NO: 292019 - RNA, 22 nt, Human
cgcagguguucaguaaauguau

SEQ ID NO: 292020 - RNA, 22 nt, Human
ggugcaaaaguaauuugguuuu

SEQ ID NO: 292021 - RNA, 22 nt, Human
cucugcccucacuuggggccug

SEQ ID NO: 292022 - RNA, 22 nt, Human
aaacucuguagcuaaacauaau

SEQ ID NO: 292023 - RNA, 22 nt, Human
uuccuacaucaccagggggagu

SEQ ID NO: 292024 - RNA, 22 nt, Human
cuucuucaagagaaugggagac

SEQ ID NO: 292025 - RNA, 22 nt, Human
ucagcuuuugucagaaauugua

SEQ ID NO: 292026 - RNA, 22 nt, Human
ggcuuuaugcacagcagauggu

SEQ ID NO: 292027 - RNA, 22 nt, Human
ucaguuaaugguaagggugaaa

SEQ ID NO: 292028 - RNA, 22 nt, Human
ucugggugugguaucuuagcca

SEQ ID NO: 292029 - RNA, 22 nt, Human
uuuuuaucuacagauucucagc

SEQ ID NO: 292030 - RNA, 22 nt, Human
uuggaggaaagaagguugauau

SEQ ID NO: 292031 - RNA, 20 nt, Human
guauuagguguuccucuuuc

SEQ ID NO: 292032 - RNA, 22 nt, Human
ugcauaaaacaugauuucugcu

SEQ ID NO: 292033 - RNA, 22 nt, Human
uguccagagucacagagcucaa

SEQ ID NO: 292034 - RNA, 22 nt, Human
aacugucuugccuacucagcau

SEQ ID NO: 292035 - RNA, 22 nt, Human
gcacuuuaaauguucacggaaa

SEQ ID NO: 292036 - RNA, 22 nt, Human
cucuggccgcagcucagcucug

SEQ ID NO: 292037 - RNA, 22 nt, Human
uuugaaauaugugaugagagag

SEQ ID NO: 292038 - RNA, 21 nt, Human
ucagaacuggugcagaugaau

SEQ ID NO: 292039 - RNA, 22 nt, Human
cagggauggagagacuacuggc

SEQ ID NO: 292040 - RNA, 22 nt, Human
agaggaggcuggguccagauaa

SEQ ID NO: 292041 - RNA, 22 nt, Human
caggugguuugauaggauaacu

SEQ ID NO: 292042 - RNA, 20 nt, Human
uccuucugaggugaggagga

SEQ ID NO: 292043 - RNA, 22 nt, Human
uaagagaacuggauagauagga

SEQ ID NO: 292044 - RNA, 18 nt, Human
aaagcuguuauuccagaa

SEQ ID NO: 292045 - RNA, 22 nt, Human
auuuucaugacuaccuuaaaua

SEQ ID NO: 292046 - RNA, 20 nt, Human
uccaggagguuaguguggcu

SEQ ID NO: 292047 - RNA, 22 nt, Human
aggcugcuucagcugcagggag

SEQ ID NO: 292048 - RNA, 22 nt, Human
cccagggaagggcuaccugagg

SEQ ID NO: 292049 - RNA, 22 nt, Human
cuccagauguauacuuuccaag

SEQ ID NO: 292050 - RNA, 22 nt, Human
uccugggcagccucucuggaag

SEQ ID NO: 292051 - RNA, 22 nt, Human
ugcagggaauccagucuagggu

SEQ ID NO: 292052 - RNA, 22 nt, Human
uucauugcaguucuucagguua

SEQ ID NO: 292053 - RNA, 23 nt, Human
aaggugucauugaugggauucua

SEQ ID NO: 292054 - RNA, 22 nt, Human
acuguggcacuaggcaccuuac

SEQ ID NO: 292055 - RNA, 22 nt, Human
ucuagaaaaacaaaguaucuga

SEQ ID NO: 292056 - RNA, 17 nt, Human
gcccacccuuaggagcu

SEQ ID NO: 292057 - RNA, 22 nt, Human
aggacauguuuguaucuuccuu

SEQ ID NO: 292058 - RNA, 22 nt, Human
ucagugucagucuuuuagauau

SEQ ID NO: 292059 - RNA, 22 nt, Human
agcugcaaaggcacacuugggc

SEQ ID NO: 292060 - RNA, 22 nt, Human
uaagguuuguggggagcaaaag

SEQ ID NO: 292061 - RNA, 22 nt, Human
cauccugguuaccccauaguca

SEQ ID NO: 292062 - RNA, 20 nt, Human
agguguccuguagcuugagu

SEQ ID NO: 292063 - RNA, 22 nt, Human
cauuuguuaagaaggaaaaagg

SEQ ID NO: 292064 - RNA, 22 nt, Human
uuauuuucuccucagaaagugg

SEQ ID NO: 292065 - RNA, 22 nt, Human
aacuugguaccaccuucugaag

SEQ ID NO: 292066 - RNA, 22 nt, Human
auucagugugagguuuucaagu

SEQ ID NO: 292067 - RNA, 22 nt, Human
aaggccuuugccccgauacagg

SEQ ID NO: 292068 - RNA, 22 nt, Human
acuuucuuaggcuguauaaaug

SEQ ID NO: 292069 - RNA, 22 nt, Human
ggaaggguuuaagcaggagagu

SEQ ID NO: 292070 - RNA, 22 nt, Human
gcacaggaugauggguugaggg

SEQ ID NO: 292071 - RNA, 22 nt, Human
gauuuauugucccuguccugcu

SEQ ID NO: 292072 - RNA, 22 nt, Human
agcagggcaugaauaaggguuu

SEQ ID NO: 292073 - RNA, 22 nt, Human
caucagugagccccuugaugag

SEQ ID NO: 292074 - RNA, 22 nt, Human
uugaaaauaucacaggagcagc

SEQ ID NO: 292075 - RNA, 22 nt, Human
ucaugcaguuugaaguucaggg

SEQ ID NO: 292076 - RNA, 22 nt, Human
aaaguaaccuaguaauaguguc

SEQ ID NO: 292077 - RNA, 22 nt, Human
auacuacacauugacuauauuu

SEQ ID NO: 292078 - RNA, 22 nt, Human
cucuucaaaagucuaauccuua

SEQ ID NO: 292079 - RNA, 22 nt, Human
cugaggaguuucuuauaugugu

SEQ ID NO: 292080 - RNA, 22 nt, Human
uuuguacauguaagauugcauc

SEQ ID NO: 292081 - RNA, 22 nt, Human
cacaugugugcugaggacugug

SEQ ID NO: 292082 - RNA, 22 nt, Human
gugccaggugcuaagcugugcu

SEQ ID NO: 292083 - RNA, 22 nt, Human
agucucaaguguuaguauuauu

SEQ ID NO: 292084 - RNA, 21 nt, Human
ucuaaugacauccucugacaa

SEQ ID NO: 292085 - RNA, 22 nt, Human
aucaaaguaauuaacacugaga

SEQ ID NO: 292086 - RNA, 22 nt, Human
uggaaauacaagaaguauguca

SEQ ID NO: 292087 - RNA, 22 nt, Human
ucuacauuuuaacaagaugccc

SEQ ID NO: 292088 - RNA, 22 nt, Human
cuccuggcuucugaaaucgugg

SEQ ID NO: 292089 - RNA, 22 nt, Human
ucaauuucuugguuugauaaua

SEQ ID NO: 292090 - RNA, 22 nt, Human
uaacauuugcugucuccuaugu

SEQ ID NO: 292091 - RNA, 18 nt, Human
gccugccaacuccugauc

SEQ ID NO: 292092 - RNA, 22 nt, Human
ccuggcagcuaagugcuuugag

SEQ ID NO: 292093 - RNA, 22 nt, Human
gggcugaccccaccccucacuc

SEQ ID NO: 292094 - RNA, 22 nt, Human
augucacuguuuaccagcucca

SEQ ID NO: 292095 - RNA, 22 nt, Human
agaaagacaaaaugcaguggcu

SEQ ID NO: 292096 - RNA, 22 nt, Human
aggcaguguucuucuaagggca

SEQ ID NO: 292097 - RNA, 22 nt, Human
gaaaagaguccugugugaggag

SEQ ID NO: 292098 - RNA, 22 nt, Human
uucuucaacaaggacacuguua

SEQ ID NO: 292099 - RNA, 22 nt, Human
acagacauuuuaagacacuuua

SEQ ID NO: 292100 - RNA, 21 nt, Human
cagaggcaggcucugugugug

SEQ ID NO: 292101 - RNA, 22 nt, Human
gugaccagccagugcugucugu

SEQ ID NO: 292102 - RNA, 22 nt, Human
gagucaggcuagaggugagucu

SEQ ID NO: 292103 - RNA, 22 nt, Human
aaggcagucaguuguuuugaaa

SEQ ID NO: 292104 - RNA, 22 nt, Human
ucauguuauugacucauaauau

SEQ ID NO: 292105 - RNA, 18 nt, Human
aaaaagugcucaggccua

SEQ ID NO: 292106 - RNA, 21 nt, Human
uuucuguccuuuccaucagcu

SEQ ID NO: 292107 - RNA, 22 nt, Human
ccagggcaggagaaagacucac

SEQ ID NO: 292108 - RNA, 22 nt, Human
auuacaguaacagcuacaaugc

SEQ ID NO: 292109 - RNA, 22 nt, Human
ugagaaggaaacaauggcuuuu

SEQ ID NO: 292110 - RNA, 22 nt, Human
ugacaggugauugugaacuaag

SEQ ID NO: 292111 - RNA, 22 nt, Human
uacaacauaacgggcauucagu

SEQ ID NO: 292112 - RNA, 22 nt, Human
auauacagggagaaacagcuua

SEQ ID NO: 292113 - RNA, 21 nt, Human
ugacagcauagagcagggagg

SEQ ID NO: 292114 - RNA, 22 nt, Human
acaguacauaauccugagucug

SEQ ID NO: 292115 - RNA, 22 nt, Human
uuguguacuguugguugauauu

SEQ ID NO: 292116 - RNA, 22 nt, Human
uccuggcacaacccuuuaccag

SEQ ID NO: 292117 - RNA, 17 nt, Human
ggccacagagcuugggg

SEQ ID NO: 292118 - RNA, 22 nt, Human
auccugaggaaggugcagagau

SEQ ID NO: 292119 - RNA, 22 nt, Human
uaagacugugagcucagagacu

SEQ ID NO: 292120 - RNA, 22 nt, Human
ucaggcaggaagggaggacuug

SEQ ID NO: 292121 - RNA, 22 nt, Human
cagaggccuggcuuggacaccu

SEQ ID NO: 292122 - RNA, 22 nt, Human
aacaagucauuccauuugacag

SEQ ID NO: 292123 - RNA, 22 nt, Human
ccagggcagcgccccuccacgc

SEQ ID NO: 292124 - RNA, 22 nt, Human
ugaaucaugccacugagcuccc

SEQ ID NO: 292125 - RNA, 22 nt, Human
ggacaaaaaucagccaucucua

SEQ ID NO: 292126 - RNA, 20 nt, Human
ugcagguguguccaagcacu

SEQ ID NO: 292127 - RNA, 22 nt, Human
ucuucuccuuugccauguguuu

SEQ ID NO: 292128 - RNA, 22 nt, Human
cucuggaauguuuacaugcccu

SEQ ID NO: 292129 - RNA, 22 nt, Human
cuuuaagagaucaccaaucaca

SEQ ID NO: 292130 - RNA, 22 nt, Human
uuuucauuuacauuagggaaga

SEQ ID NO: 292131 - RNA, 22 nt, Human
ggcaaacagacuugaccaucuu

SEQ ID NO: 292132 - RNA, 22 nt, Human
uggucucugcaggccaggcuca

SEQ ID NO: 292133 - RNA, 22 nt, Human
acuccuggggcugccaucacag

SEQ ID NO: 292134 - RNA, 22 nt, Human
agcuuuaugcuuccuacaagcu

SEQ ID NO: 292135 - RNA, 22 nt, Human
cagauucugggcccagcuuguc

SEQ ID NO: 292136 - RNA, 22 nt, Human
gggcaggugauuuuggcuccau

SEQ ID NO: 292137 - RNA, 22 nt, Human
cguggggcggguggacacuugc

SEQ ID NO: 292138 - RNA, 22 nt, Human
uucacauuuacugguuuguccg

SEQ ID NO: 292139 - RNA, 22 nt, Human
acggugcuggguauugggguuc

SEQ ID NO: 292140 - RNA, 22 nt, Human
agguauuucaaagcccacuucc

SEQ ID NO: 292141 - RNA, 23 nt, Human
ucucagaaaggagaaguaauuug

SEQ ID NO: 292142 - RNA, 22 nt, Human
cagacagguugcaaaacuucaa

SEQ ID NO: 292143 - RNA, 22 nt, Human
cauuagggucucucagcugaau

SEQ ID NO: 292144 - RNA, 22 nt, Human
acaaggagagcacacaugggga

SEQ ID NO: 292145 - RNA, 22 nt, Human
ucccagagguugagucacuuau

SEQ ID NO: 292146 - RNA, 23 nt, Human
uggcaaggaaugggauggagacu

SEQ ID NO: 292147 - RNA, 22 nt, Human
cagccagagaaagggcacugcc

SEQ ID NO: 292148 - RNA, 22 nt, Human
uacugugggauguugugauuag

SEQ ID NO: 292149 - RNA, 22 nt, Human
acagguggcacugcuguuacuc

SEQ ID NO: 292150 - RNA, 22 nt, Human
gcugaaaucccagcauucccca

SEQ ID NO: 292151 - RNA, 22 nt, Human
uuccaugcaagaaguauggcuc

SEQ ID NO: 292152 - RNA, 22 nt, Human
cuuaaacaggaaagagccaggu

SEQ ID NO: 292153 - RNA, 22 nt, Human
aucauuucccuuuagaucacaa

SEQ ID NO: 292154 - RNA, 22 nt, Human
acacuguuccacacuaagaagg

SEQ ID NO: 292155 - RNA, 22 nt, Human
ucauggauuaaauuauuaaguu

SEQ ID NO: 292156 - RNA, 22 nt, Human
acagggcagagaggcaggcuug

SEQ ID NO: 292157 - RNA, 23 nt, Human
ugguggcagaaguagcagaugac

SEQ ID NO: 292158 - RNA, 22 nt, Human
ucuggcaggucaaucauucuuu

SEQ ID NO: 292159 - RNA, 21 nt, Human
uauacaugugugcauacgugu

SEQ ID NO: 292160 - RNA, 22 nt, Human
uggcccaggggcucuugguguu

SEQ ID NO: 292161 - RNA, 23 nt, Human
cauccaggagcugagucugacug

SEQ ID NO: 292162 - RNA, 22 nt, Human
agcuccugcucuuugucccuaa

SEQ ID NO: 292163 - RNA, 22 nt, Human
cagucucugugccagauccugg

SEQ ID NO: 292164 - RNA, 22 nt, Human
acugccuguagcucuucaucuc

SEQ ID NO: 292165 - RNA, 22 nt, Human
cuacuucuugaucugucgaccu

SEQ ID NO: 292166 - RNA, 22 nt, Human
ucuggguggcugccaaucugcc

SEQ ID NO: 292167 - RNA, 22 nt, Human
ugcagguguagaguugggcucc

SEQ ID NO: 292168 - RNA, 22 nt, Human
agcuaggauaagcagagacugg

SEQ ID NO: 292169 - RNA, 22 nt, Human
uacaguuuaacacuuuggagaa

SEQ ID NO: 292170 - RNA, 22 nt, Human
aaguccaguuucauuugagguc

SEQ ID NO: 292171 - RNA, 22 nt, Human
ugucagagagcaggcaguagaa

SEQ ID NO: 292172 - RNA, 22 nt, Human
uguuucaugauugcugucauuu

SEQ ID NO: 292173 - RNA, 22 nt, Human
acaugagagaaaaguauucuga

SEQ ID NO: 292174 - RNA, 22 nt, Human
gggagggaggugaugcuuggcu

SEQ ID NO: 292175 - RNA, 22 nt, Human
agaggcaugaucuuauaauuua

SEQ ID NO: 292176 - RNA, 22 nt, Human
uuguuucugaguuuucauguau

SEQ ID NO: 292177 - RNA, 22 nt, Human
guccuggcaccucacuggcuac

SEQ ID NO: 292178 - RNA, 22 nt, Human
uuucuagggcucuugucuucug

SEQ ID NO: 292179 - RNA, 22 nt, Human
gagcacugauuuauuuuugucu

SEQ ID NO: 292180 - RNA, 21 nt, Human
aucuggaaauucugccagaga

SEQ ID NO: 292181 - RNA, 22 nt, Human
gaggugguuuguggugacucau

SEQ ID NO: 292182 - RNA, 22 nt, Human
ucauuuaauugguuuugcucgu

SEQ ID NO: 292183 - RNA, 22 nt, Human
gggcagguguuuccaaggugag

SEQ ID NO: 292184 - RNA, 22 nt, Human
ucuccugguauguaugcaccug

SEQ ID NO: 292185 - RNA, 22 nt, Human
agcagggcuggauuuggcaaga

SEQ ID NO: 292186 - RNA, 22 nt, Human
ugcccagcacccagcaugaugc

SEQ ID NO: 292187 - RNA, 22 nt, Human
acaguguccccagcucugugag

SEQ ID NO: 292188 - RNA, 22 nt, Human
uuugaaucugauauggcagcau

SEQ ID NO: 292189 - RNA, 22 nt, Human
gaggagcugagccacguccugg

SEQ ID NO: 292190 - RNA, 22 nt, Human
ucaguuugaauguuagcacagu

SEQ ID NO: 292191 - RNA, 22 nt, Human
uggggucccacucagcuccccu

SEQ ID NO: 292192 - RNA, 22 nt, Human
aagagccagcuagugaagaggc

SEQ ID NO: 292193 - RNA, 18 nt, Human
gcuccugguuggaaagaa

SEQ ID NO: 292194 - RNA, 20 nt, Human
gcuggcagaugucuugagau

SEQ ID NO: 292195 - RNA, 23 nt, Human
gugcgccaggacaaccugacgga

SEQ ID NO: 292196 - RNA, 22 nt, Human
cuacaaaaguaauugugguuuu

SEQ ID NO: 292197 - RNA, 22 nt, Human
uccugagcaacacagcuaagug

SEQ ID NO: 292198 - RNA, 22 nt, Human
aagggcagggaguuugugucua

SEQ ID NO: 292199 - RNA, 22 nt, Human
ccuggcccuggaauagggcagg

SEQ ID NO: 292200 - RNA, 22 nt, Human
aggcagguguuaccucugguuu

SEQ ID NO: 292201 - RNA, 18 nt, Human
ccagcaugccagaggcug

SEQ ID NO: 292202 - RNA, 22 nt, Human
aucaagaauugggagcuauuga

SEQ ID NO: 292203 - RNA, 23 nt, Human
uauuacaauuggucuuauuaaga

SEQ ID NO: 292204 - RNA, 22 nt, Human
aagugguuugagcacagugcug

SEQ ID NO: 292205 - RNA, 22 nt, Human
uugaagaguuugauagaguuga

SEQ ID NO: 292206 - RNA, 20 nt, Human
uauuugaaauggccaagugu

SEQ ID NO: 292207 - RNA, 22 nt, Human
auguccaagucacagauuuuca

SEQ ID NO: 292208 - RNA, 22 nt, Human
ccuggcuccgugucacgugccc

SEQ ID NO: 292209 - RNA, 22 nt, Human
acauguguaaaaguggauaaaa

SEQ ID NO: 292210 - RNA, 22 nt, Human
ugcacuccaggcugggugacag

SEQ ID NO: 292211 - RNA, 22 nt, Human
aaaucacugauuaaaguuagaa

SEQ ID NO: 292212 - RNA, 22 nt, Human
ucagagcuuaucucuugcugga

SEQ ID NO: 292213 - RNA, 22 nt, Human
uuauuuauguuaacagucgaga

SEQ ID NO: 292214 - RNA, 22 nt, Human
uauuuagaugcauuuggauugc

SEQ ID NO: 292215 - RNA, 22 nt, Human
uuuucuagggugcuaaaugaac

SEQ ID NO: 292216 - RNA, 22 nt, Human
ugagccagguuaagacaggagc

SEQ ID NO: 292217 - RNA, 22 nt, Human
ucagggacgugagcucagaguc

SEQ ID NO: 292218 - RNA, 22 nt, Human
gagaagcaaucaguggccaccc

SEQ ID NO: 292219 - RNA, 22 nt, Human
acaaaguauuuuuagguuugua

SEQ ID NO: 292220 - RNA, 22 nt, Human
ccugucacgaugacugcacucu

SEQ ID NO: 292221 - RNA, 22 nt, Human
aaaagucugcuuucuauuauca

SEQ ID NO: 292222 - RNA, 22 nt, Human
agaguuaaggccacugucagua

SEQ ID NO: 292223 - RNA, 22 nt, Human
ugcagguggacacgggagacgg

SEQ ID NO: 292224 - RNA, 22 nt, Human
aaaaucuggcaacacuaaguuu

SEQ ID NO: 292225 - RNA, 22 nt, Human
aaaagcagaccacgcuuugugg

SEQ ID NO: 292226 - RNA, 22 nt, Human
ccugacaggagaagcgcagcau

SEQ ID NO: 292227 - RNA, 22 nt, Human
uuaacaauagaguuucuucagg

SEQ ID NO: 292228 - RNA, 22 nt, Human
agcagguguauauaaggcugag

SEQ ID NO: 292229 - RNA, 22 nt, Human
auguauuugcguauggacauac

SEQ ID NO: 292230 - RNA, 22 nt, Human
uuugaaauaugaggcauuauga

SEQ ID NO: 292231 - RNA, 22 nt, Human
uuccuggcgccacggagccggu

SEQ ID NO: 292232 - RNA, 22 nt, Human
gggcuuggcucauaaguggaug

SEQ ID NO: 292233 - RNA, 22 nt, Human
cccaggcagaauuaguguuuca

SEQ ID NO: 292234 - RNA, 22 nt, Human
cuuucccacgcaguggaugaga

SEQ ID NO: 292235 - RNA, 22 nt, Human
cucuuaaauaacaucauugcuu

SEQ ID NO: 292236 - RNA, 22 nt, Human
ucagcuuucuauguugcuaaac

SEQ ID NO: 292237 - RNA, 22 nt, Human
auacuuuggucacuauuauugg

SEQ ID NO: 292238 - RNA, 22 nt, Human
ucugugugguaguuucagugaa

SEQ ID NO: 292239 - RNA, 22 nt, Human
uguucuugagccuuuagaccua

SEQ ID NO: 292240 - RNA, 22 nt, Human
uuuuacaggugugagccaccau

SEQ ID NO: 292241 - RNA, 22 nt, Human
ccuggcucucugcagauccugg

SEQ ID NO: 292242 - RNA, 22 nt, Human
gaugaaaaucuugagaugucga

SEQ ID NO: 292243 - RNA, 22 nt, Human
guuucauuaccugacccaugag

SEQ ID NO: 292244 - RNA, 22 nt, Human
caggaggccaacugugggacuu

SEQ ID NO: 292245 - RNA, 22 nt, Human
cuauaauuaugcucaaaaugua

SEQ ID NO: 292246 - RNA, 22 nt, Human
uugaauggcuucuagguucucc

SEQ ID NO: 292247 - RNA, 22 nt, Human
uuggaugagguugagaaucauu

SEQ ID NO: 292248 - RNA, 22 nt, Human
aggaaacugaagcccagagagg

SEQ ID NO: 292249 - RNA, 22 nt, Human
uuccuucuagagcuuguuuagg

SEQ ID NO: 292250 - RNA, 22 nt, Human
cccaggcagcccuucugacgca

SEQ ID NO: 292251 - RNA, 22 nt, Human
ucccagggugaaaugcaguagg

SEQ ID NO: 292252 - RNA, 17 nt, Human
cacaggugugguuugag

SEQ ID NO: 292253 - RNA, 22 nt, Human
uaggccucaggaccccagggcu

SEQ ID NO: 292254 - RNA, 22 nt, Human
aaguuacauuuuggucuaauug

SEQ ID NO: 292255 - RNA, 22 nt, Human
ucagggcaaaagggaaaccauu

SEQ ID NO: 292256 - RNA, 22 nt, Human
cccuguuuaagaaaccuguaaa

SEQ ID NO: 292257 - RNA, 20 nt, Human
acacacagagacaugcgcau

SEQ ID NO: 292258 - RNA, 22 nt, Human
aaggcauacauauuguuauagg

SEQ ID NO: 292259 - RNA, 22 nt, Human
uagggacacugcucaugaguuc

SEQ ID NO: 292260 - RNA, 22 nt, Human
gccugcagccccucugcaguag

SEQ ID NO: 292261 - RNA, 22 nt, Human
auaaauugugcuuuugacaucu

SEQ ID NO: 292262 - RNA, 22 nt, Human
cccacaggcaggggcagagaca

SEQ ID NO: 292263 - RNA, 22 nt, Human
auuuggcaacauuaauugaauc

SEQ ID NO: 292264 - RNA, 19 nt, Human
ugcagccacgugagagacu

SEQ ID NO: 292265 - RNA, 22 nt, Human
ggucacugcccucccuuuugca

SEQ ID NO: 292266 - RNA, 22 nt, Human
ccuguucaagggaugauugacc

SEQ ID NO: 292267 - RNA, 22 nt, Human
ugaaguaggcagcaugcugaga

SEQ ID NO: 292268 - RNA, 22 nt, Human
ucuuucauucuagucugagguu

SEQ ID NO: 292269 - RNA, 22 nt, Human
caggccugaguguggaagucuu

SEQ ID NO: 292270 - RNA, 22 nt, Human
uuacacuuuugacaaaccugag

SEQ ID NO: 292271 - RNA, 22 nt, Human
uagcucaaagguuaagugugga

SEQ ID NO: 292272 - RNA, 22 nt, Human
acacuaaugagaaaggaauuaa

SEQ ID NO: 292273 - RNA, 22 nt, Human
cugguccuaaagcccuacucca

SEQ ID NO: 292274 - RNA, 22 nt, Human
gcuggcagggugguugagagag

SEQ ID NO: 292275 - RNA, 22 nt, Human
agucaguguucuggguuguaau

SEQ ID NO: 292276 - RNA, 17 nt, Human
cuacuucuucuauucuu

SEQ ID NO: 292277 - RNA, 22 nt, Human
cagacacacaagcaaucuaagu

SEQ ID NO: 292278 - RNA, 19 nt, Human
uuagggacaugaauucuag

SEQ ID NO: 292279 - RNA, 22 nt, Human
cagggcaguuuuacuucucucu

SEQ ID NO: 292280 - RNA, 22 nt, Human
aggguggcaccacauaucauag

SEQ ID NO: 292281 - RNA, 22 nt, Human
aggcugugaguuuugucucaga

SEQ ID NO: 292282 - RNA, 22 nt, Human
augugcaaauccaaugugaaug

SEQ ID NO: 292283 - RNA, 22 nt, Human
ccagugcccagcugcccaggca

SEQ ID NO: 292284 - RNA, 22 nt, Human
aggcucccaagcacugacccca

SEQ ID NO: 292285 - RNA, 22 nt, Human
cuggccucuguguucaccauag

SEQ ID NO: 292286 - RNA, 22 nt, Human
uguuacagggauaaaugaggua

SEQ ID NO: 292287 - RNA, 22 nt, Human
gcaaauauucaagacuuuucca

SEQ ID NO: 292288 - RNA, 22 nt, Human
aaggcugcuuuuaacaugcaua

SEQ ID NO: 292289 - RNA, 22 nt, Human
uccugcagguggaugauucucu

SEQ ID NO: 292290 - RNA, 22 nt, Human
caggacagugcagguccauccu

SEQ ID NO: 292291 - RNA, 22 nt, Human
aaaucucaauuugaauuguagc

SEQ ID NO: 292292 - RNA, 22 nt, Human
cucagcaauuaccugugucucu

SEQ ID NO: 292293 - RNA, 22 nt, Human
ccaggcccugcuccucacacca

SEQ ID NO: 292294 - RNA, 22 nt, Human
ugggugggagcgcccugucugg

SEQ ID NO: 292295 - RNA, 22 nt, Human
gccaggcauucuagaaguagug

SEQ ID NO: 292296 - RNA, 22 nt, Human
gcaggugugcugaauuacguga

SEQ ID NO: 292297 - RNA, 22 nt, Human
uccaggaguccugggagugauu

SEQ ID NO: 292298 - RNA, 22 nt, Human
cuguccugugucagccugaaau

SEQ ID NO: 292299 - RNA, 22 nt, Human
aauguauucucuuuauaagaua

SEQ ID NO: 292300 - RNA, 22 nt, Human
uggaccacucuggugcccaugu

SEQ ID NO: 292301 - RNA, 22 nt, Human
ggacaggugugaggcuggcaca

SEQ ID NO: 292302 - RNA, 22 nt, Human
uagcaaacucauacaugugggu

SEQ ID NO: 292303 - RNA, 22 nt, Human
caggccugggcuucggggcuga

SEQ ID NO: 292304 - RNA, 22 nt, Human
augcuuguacuaaaaaaauauu

SEQ ID NO: 292305 - RNA, 22 nt, Human
auggcuuggcaccaucuccuug

SEQ ID NO: 292306 - RNA, 21 nt, Human
ccuggcagaagccugauaugc

SEQ ID NO: 292307 - RNA, 22 nt, Human
cagcacuucagcauucagauuu

SEQ ID NO: 292308 - RNA, 23 nt, Human
gcaggugguucgaacagaaguuu

SEQ ID NO: 292309 - RNA, 22 nt, Human
acagaaaaugccagaagggugg

SEQ ID NO: 292310 - RNA, 22 nt, Human
ucucugugcccaguaguucucu

SEQ ID NO: 292311 - RNA, 22 nt, Human
gacuuuauuauaguggcaauag

SEQ ID NO: 292312 - RNA, 22 nt, Human
uccaagagaauacuggagagua

SEQ ID NO: 292313 - RNA, 22 nt, Human
auguuacacauaggcauaaaug

SEQ ID NO: 292314 - RNA, 22 nt, Human
acaaagcuuagaccuaagagau

SEQ ID NO: 292315 - RNA, 22 nt, Human
cagagcugguguuacaagucca

SEQ ID NO: 292316 - RNA, 22 nt, Human
uguucucucuccuuuugaagug

SEQ ID NO: 292317 - RNA, 20 nt, Human
acuagaaagucacugggggg

SEQ ID NO: 292318 - RNA, 22 nt, Human
gaaggccucacucugcagcaua

SEQ ID NO: 292319 - RNA, 19 nt, Human
uucacauuuugcucugagg

SEQ ID NO: 292320 - RNA, 22 nt, Human
acuuccuuuugggaaacuguuu

SEQ ID NO: 292321 - RNA, 22 nt, Human
cccacccugggcuacacaucca

SEQ ID NO: 292322 - RNA, 22 nt, Human
aguuuccaaagcauguucacac

SEQ ID NO: 292323 - RNA, 22 nt, Human
ugcuggcuuuaagguuaaagug

SEQ ID NO: 292324 - RNA, 22 nt, Human
aaagaaucagaagucucaaaca

SEQ ID NO: 292325 - RNA, 22 nt, Human
agcagggcagugcuucagcucu

SEQ ID NO: 292326 - RNA, 22 nt, Human
ucacaaauauuuuaacaguagg

SEQ ID NO: 292327 - RNA, 22 nt, Human
ggcuguggggccggguacagug

SEQ ID NO: 292328 - RNA, 21 nt, Human
agaauuaaauuggauuugugu

SEQ ID NO: 292329 - RNA, 23 nt, Human
aucugaaaagcauuugcaguuug

SEQ ID NO: 292330 - RNA, 22 nt, Human
aggcacaggaggugguaagaag

SEQ ID NO: 292331 - RNA, 22 nt, Human
acagguguugacucacaggccc

SEQ ID NO: 292332 - RNA, 22 nt, Human
uuauugagcacauaguaugugg

SEQ ID NO: 292333 - RNA, 22 nt, Human
aggcuggauuuauggggacuuc

SEQ ID NO: 292334 - RNA, 22 nt, Human
gcuccugggcccugggcuaacu

SEQ ID NO: 292335 - RNA, 22 nt, Human
cacuccuguuccacuaaaugag

SEQ ID NO: 292336 - RNA, 22 nt, Human
cugcuuuagacaacugcuggga

SEQ ID NO: 292337 - RNA, 22 nt, Human
gcuuccucccugcugcucacua

SEQ ID NO: 292338 - RNA, 22 nt, Human
agaagggcuacacgggcucucc

SEQ ID NO: 292339 - RNA, 22 nt, Human
agaaaauuacuccagagacaag

SEQ ID NO: 292340 - RNA, 22 nt, Human
ugcuuuauugcaucaguguggg

SEQ ID NO: 292341 - RNA, 22 nt, Human
cagcuucuucaguccuggagcu

SEQ ID NO: 292342 - RNA, 22 nt, Human
gagagcugggcuuugggugaag

SEQ ID NO: 292343 - RNA, 22 nt, Human
ucugaggcagcuugccacucua

SEQ ID NO: 292344 - RNA, 22 nt, Human
uucucacuauguauguagauug

SEQ ID NO: 292345 - RNA, 22 nt, Human
uagcuuuaagaugagaugugga

SEQ ID NO: 292346 - RNA, 22 nt, Human
cagggcucccugcagccucugu

SEQ ID NO: 292347 - RNA, 22 nt, Human
acccagcuggaugcauggaggc

SEQ ID NO: 292348 - RNA, 22 nt, Human
acacauuuuggcuagguggaga

SEQ ID NO: 292349 - RNA, 22 nt, Human
aaauccuaauaaugcacuagug

SEQ ID NO: 292350 - RNA, 22 nt, Human
uuuaaaaucagaugggaguugg

SEQ ID NO: 292351 - RNA, 22 nt, Human
ggaacuugaaaaucaagguggu

SEQ ID NO: 292352 - RNA, 22 nt, Human
uggcucugagucugcccuuggc

SEQ ID NO: 292353 - RNA, 22 nt, Human
ggcugugggaugcauaggagcu

SEQ ID NO: 292354 - RNA, 22 nt, Human
augcuauguaacuggcagauag

SEQ ID NO: 292355 - RNA, 22 nt, Human
cagugcagaggccagggaggau

SEQ ID NO: 292356 - RNA, 22 nt, Human
ucagggcacugucaccugauau

SEQ ID NO: 292357 - RNA, 22 nt, Human
augcaaacauucgcuugucucu

SEQ ID NO: 292358 - RNA, 22 nt, Human
uuccuggguugugcauuguaca

SEQ ID NO: 292359 - RNA, 22 nt, Human
gaggacuaacuuggcagacgca

SEQ ID NO: 292360 - RNA, 22 nt, Human
uagugaaagucaaagacagcua

SEQ ID NO: 292361 - RNA, 22 nt, Human
uuguuucaggaugguuuguuac

SEQ ID NO: 292362 - RNA, 17 nt, Human
uuauuuuuugggcugag

SEQ ID NO: 292363 - RNA, 22 nt, Human
ucuguggcuaucauacugaagg

SEQ ID NO: 292364 - RNA, 22 nt, Human
uuccaggaggcacugacagagg

SEQ ID NO: 292365 - RNA, 22 nt, Human
cugcacagucauuuccucucaa

SEQ ID NO: 292366 - RNA, 22 nt, Human
guuauaaaaugcacaguuguuu

SEQ ID NO: 292367 - RNA, 22 nt, Human
uuccuaauggcaaaacauguuu

SEQ ID NO: 292368 - RNA, 22 nt, Human
guuauugacauguauuaagcac

SEQ ID NO: 292369 - RNA, 22 nt, Human
uucauagcagucccuuucuggg

SEQ ID NO: 292370 - RNA, 22 nt, Human
agauggucuucauaaguuuuaa

SEQ ID NO: 292371 - RNA, 22 nt, Human
uccaguguuuuucuucacaggu

SEQ ID NO: 292372 - RNA, 22 nt, Human
aagggcucuguugccauuucag

SEQ ID NO: 292373 - RNA, 22 nt, Human
gucuaugauauuuuguuauagc

SEQ ID NO: 292374 - RNA, 22 nt, Human
accacugucuacacauugacuc

SEQ ID NO: 292375 - RNA, 22 nt, Human
aggcuugggucagaaggcuugu

SEQ ID NO: 292376 - RNA, 22 nt, Human
acagaaauugggcaaauggaag

SEQ ID NO: 292377 - RNA, 22 nt, Human
uuccccaguagugacaaucaaa

SEQ ID NO: 292378 - RNA, 21 nt, Human
uucaaugaaaacaaagugagg

SEQ ID NO: 292379 - RNA, 22 nt, Human
aucacaauguacguuaaaaugu

SEQ ID NO: 292380 - RNA, 18 nt, Human
gcagugcaggaagaagag

SEQ ID NO: 292381 - RNA, 22 nt, Human
ccagguguagcacugcucacag

SEQ ID NO: 292382 - RNA, 22 nt, Human
cagcaggacauggaggaguaaa

SEQ ID NO: 292383 - RNA, 22 nt, Human
gggauggggagcuggaaagggg

SEQ ID NO: 292384 - RNA, 22 nt, Human
gguuucaaugagaagugcuugu

SEQ ID NO: 292385 - RNA, 22 nt, Human
aaagaaauaccuuucucagcuu

SEQ ID NO: 292386 - RNA, 18 nt, Human
agcagguggauuuauugg

SEQ ID NO: 292387 - RNA, 22 nt, Human
agccuucucugaaauucuguuu

SEQ ID NO: 292388 - RNA, 22 nt, Human
ugaaagcaugcuugccaagcuu

SEQ ID NO: 292389 - RNA, 22 nt, Human
uauuugagcgaagcaguguuuu

SEQ ID NO: 292390 - RNA, 22 nt, Human
aucuaucaccuuuagguuuguu

SEQ ID NO: 292391 - RNA, 22 nt, Human
ucagagaaguaagguggggugc

SEQ ID NO: 292392 - RNA, 22 nt, Human
augagacuaccuguaauguggc

SEQ ID NO: 292393 - RNA, 22 nt, Human
ugaagaaacgcagagagguagg

SEQ ID NO: 292394 - RNA, 22 nt, Human
cagggcauaagaugaggcugua

SEQ ID NO: 292395 - RNA, 22 nt, Human
uggaaaaaaauuggcuagcuuc

SEQ ID NO: 292396 - RNA, 22 nt, Human
aagggcaggugggcauuucugg

SEQ ID NO: 292397 - RNA, 22 nt, Human
agaaugcaucuaaaagcagaga

SEQ ID NO: 292398 - RNA, 22 nt, Human
ugaaagaagccucccuuuggag

SEQ ID NO: 292399 - RNA, 22 nt, Human
gagacacaaacacauuuagagg

SEQ ID NO: 292400 - RNA, 22 nt, Human
cuccuggagggccaaagaaaua

SEQ ID NO: 292401 - RNA, 22 nt, Human
ccaggaggcagagguuguagug

SEQ ID NO: 292402 - RNA, 22 nt, Human
cuggaugucuuggggacuccug

SEQ ID NO: 292403 - RNA, 22 nt, Human
auguucuuguucaaaugucagu

SEQ ID NO: 292404 - RNA, 22 nt, Human
uuucuuguaagauguuuauuaa

SEQ ID NO: 292405 - RNA, 22 nt, Human
agccuugaguucaagugcuggc

SEQ ID NO: 292406 - RNA, 22 nt, Human
auguacaaaauguuuugaaaug

SEQ ID NO: 292407 - RNA, 22 nt, Human
uugugcuccuaugagaaucuaa

SEQ ID NO: 292408 - RNA, 18 nt, Human
auggcacagucuuucccu

SEQ ID NO: 292409 - RNA, 22 nt, Human
uucacauuguuuuaaugugaau

SEQ ID NO: 292410 - RNA, 22 nt, Human
accugcaguggccacuccuaau

SEQ ID NO: 292411 - RNA, 22 nt, Human
gagauggagucuuuuucuguca

SEQ ID NO: 292412 - RNA, 22 nt, Human
agacgagggcccccaggacagc

SEQ ID NO: 292413 - RNA, 22 nt, Human
ucugccugugguggaggaaguu

SEQ ID NO: 292414 - RNA, 22 nt, Human
agcaggugcauggcgagcgcgg

SEQ ID NO: 292415 - RNA, 22 nt, Human
uacaaauuaaugggcauguuua

SEQ ID NO: 292416 - RNA, 22 nt, Human
uuacuucuugucucaugccuau

SEQ ID NO: 292417 - RNA, 22 nt, Human
auuuccaguccuaaugaucugg

SEQ ID NO: 292418 - RNA, 22 nt, Human
agauacaaaagauaagauuuag

SEQ ID NO: 292419 - RNA, 22 nt, Human
uguugcuguaugaauaggaagg

SEQ ID NO: 292420 - RNA, 23 nt, Human
caggagggaaugaaguuagacaa

SEQ ID NO: 292421 - RNA, 22 nt, Human
ccuguggcugguaguaucguuu

SEQ ID NO: 292422 - RNA, 20 nt, Human
ucaggcaguggggaaaggca

SEQ ID NO: 292423 - RNA, 22 nt, Human
cgcaggugaaagaggcugggca

SEQ ID NO: 292424 - RNA, 22 nt, Human
cugauaauguccugcaguaaau

SEQ ID NO: 292425 - RNA, 22 nt, Human
uuucauuggcucccugaugaau

SEQ ID NO: 292426 - RNA, 22 nt, Human
cagggcucaggcucugggauuc

SEQ ID NO: 292427 - RNA, 22 nt, Human
ugucuucagcaaaugccuuucu

SEQ ID NO: 292428 - RNA, 22 nt, Human
acuuguuugaaucucucuagag

SEQ ID NO: 292429 - RNA, 22 nt, Human
agucagagcaaacuggacagac

SEQ ID NO: 292430 - RNA, 22 nt, Human
ccuuuguucauugccuucaguc

SEQ ID NO: 292431 - RNA, 20 nt, Human
cuggaguguagcaguggcug

SEQ ID NO: 292432 - RNA, 22 nt, Human
caggaaguagaguuggccagcc

SEQ ID NO: 292433 - RNA, 21 nt, Human
acagcauguuuguguguuugc

SEQ ID NO: 292434 - RNA, 22 nt, Human
agagggaacggaucccagcgcg

SEQ ID NO: 292435 - RNA, 22 nt, Human
gagggcagugaauuuugaagcu

SEQ ID NO: 292436 - RNA, 22 nt, Human
ccaguguucauaauuuuacacu

SEQ ID NO: 292437 - RNA, 22 nt, Human
ggcuuucuaugaacucaaaggc

SEQ ID NO: 292438 - RNA, 22 nt, Human
agaggaauaugggugcacuaga

SEQ ID NO: 292439 - RNA, 20 nt, Human
gcaggcagggaaugggggug

SEQ ID NO: 292440 - RNA, 22 nt, Human
ccuggcacagauccuucauaca

SEQ ID NO: 292441 - RNA, 22 nt, Human
acuguggcucaucaggcuggug

SEQ ID NO: 292442 - RNA, 22 nt, Human
ucacauaaauuauacaauuuca

SEQ ID NO: 292443 - RNA, 22 nt, Human
uccucagagcauagcgcugucu

SEQ ID NO: 292444 - RNA, 22 nt, Human
cuugccaguguugcagaagcuc

SEQ ID NO: 292445 - RNA, 22 nt, Human
agcauaaguugguacagccacu

SEQ ID NO: 292446 - RNA, 22 nt, Human
cugacaagguugaauuguccca

SEQ ID NO: 292447 - RNA, 22 nt, Human
ucuucuucccaucccucaaaug

SEQ ID NO: 292448 - RNA, 22 nt, Human
uggcuacauuuauacucucauu

SEQ ID NO: 292449 - RNA, 22 nt, Human
aguggcagaagccaagucugca

SEQ ID NO: 292450 - RNA, 23 nt, Human
ucucugugugccucaguuucuuc

SEQ ID NO: 292451 - RNA, 22 nt, Human
ugcugggucccuugagagcuca

SEQ ID NO: 292452 - RNA, 22 nt, Human
gcauucuucacaguauuccucc

SEQ ID NO: 292453 - RNA, 22 nt, Human
cucuucccagcuccacgagagg

SEQ ID NO: 292454 - RNA, 22 nt, Human
cugcaucacagcaggaggcaca

SEQ ID NO: 292455 - RNA, 22 nt, Human
gaucuuuucagguuucucuagu

SEQ ID NO: 292456 - RNA, 22 nt, Human
cugaaggacuuggugauaguug

SEQ ID NO: 292457 - RNA, 20 nt, Human
auuccucagccccagccuca

SEQ ID NO: 292458 - RNA, 20 nt, Human
augugucuguaaacaacucu

SEQ ID NO: 292459 - RNA, 22 nt, Human
uuuaucuguuccucuuggaggc

SEQ ID NO: 292460 - RNA, 22 nt, Human
gggaccucuggagucggccuua

SEQ ID NO: 292461 - RNA, 22 nt, Human
aaacagauaagggacaauuuca

SEQ ID NO: 292462 - RNA, 22 nt, Human
uuccuggcuggcgguuuuggug

SEQ ID NO: 292463 - RNA, 22 nt, Human
uuuuagacuuguauguaaagcc

SEQ ID NO: 292464 - RNA, 22 nt, Human
cugccguugugaagcucuuaga

SEQ ID NO: 292465 - RNA, 22 nt, Human
acuguccagaagauagaaauau

SEQ ID NO: 292466 - RNA, 22 nt, Human
gugcccaggggccagcugccgg

SEQ ID NO: 292467 - RNA, 22 nt, Human
ucaggugucaagcagggagcug

SEQ ID NO: 292468 - RNA, 23 nt, Human
cccagcugcagacaagggagggu

SEQ ID NO: 292469 - RNA, 22 nt, Human
cauuuaaagguuguggguaaaa

SEQ ID NO: 292470 - RNA, 22 nt, Human
cacagccuuuaggguacacaca

SEQ ID NO: 292471 - RNA, 22 nt, Human
uuggaauuuuccagguacagug

SEQ ID NO: 292472 - RNA, 22 nt, Human
ggcuuuauuauguggccaugug

SEQ ID NO: 292473 - RNA, 22 nt, Human
agcaugaaaacaugaaacagca

SEQ ID NO: 292474 - RNA, 17 nt, Human
uccuggauccauggugg

SEQ ID NO: 292475 - RNA, 22 nt, Human
acagguggcuuccauuuucuaa

SEQ ID NO: 292476 - RNA, 22 nt, Human
uaagaguuagggcuagcaauau

SEQ ID NO: 292477 - RNA, 22 nt, Human
aauacaguaauuuugaugaguu

SEQ ID NO: 292478 - RNA, 22 nt, Human
cugaaagaauaagauguuuaca

SEQ ID NO: 292479 - RNA, 22 nt, Human
gucccaggcuccauggcagcca

SEQ ID NO: 292480 - RNA, 22 nt, Human
ucuugauuacaaauaacaucau

SEQ ID NO: 292481 - RNA, 20 nt, Human
ucaugcagguguucuagguu

SEQ ID NO: 292482 - RNA, 20 nt, Human
ucagguagaucuuugagguc

SEQ ID NO: 292483 - RNA, 22 nt, Human
ugaccagugaucuacugggauu

SEQ ID NO: 292484 - RNA, 22 nt, Human
aaugucuuuuaaauguugaggu

SEQ ID NO: 292485 - RNA, 21 nt, Human
uucuucaggccaaugcucauu

SEQ ID NO: 292486 - RNA, 22 nt, Human
ucugcuucuccuacuucauggg

SEQ ID NO: 292487 - RNA, 22 nt, Human
cuuuaguucuagaaagugaaac

SEQ ID NO: 292488 - RNA, 22 nt, Human
caggcagcccugcaccaagugu

SEQ ID NO: 292489 - RNA, 22 nt, Human
aggcugugacagggucauggag

SEQ ID NO: 292490 - RNA, 22 nt, Human
aggcaccuugagagcaggagcu

SEQ ID NO: 292491 - RNA, 22 nt, Human
aggaaugucgucauaaacauga

SEQ ID NO: 292492 - RNA, 22 nt, Human
gaugcauuacaaaagugauuau

SEQ ID NO: 292493 - RNA, 21 nt, Human
gggcuuuuuauuuagcacugu

SEQ ID NO: 292494 - RNA, 22 nt, Human
uucaguuugaauucuguagaac

SEQ ID NO: 292495 - RNA, 22 nt, Human
ugggaucugcaguuuaacaaaa

SEQ ID NO: 292496 - RNA, 18 nt, Human
aggcccuggccucgaaca

SEQ ID NO: 292497 - RNA, 22 nt, Human
cuccugaguaguagcauuguca

SEQ ID NO: 292498 - RNA, 22 nt, Human
cugccugcuuaccaugcaucag

SEQ ID NO: 292499 - RNA, 22 nt, Human
uuucuacauucaaaaacuacca

SEQ ID NO: 292500 - RNA, 22 nt, Human
ggaugucuaggguuuaugugcc

SEQ ID NO: 292501 - RNA, 22 nt, Human
uauuuccuguggauacuuuuag

SEQ ID NO: 292502 - RNA, 22 nt, Human
acuuaaaaagaaucuuuucacg

SEQ ID NO: 292503 - RNA, 22 nt, Human
aagcacagggugucugcauuca

SEQ ID NO: 292504 - RNA, 21 nt, Human
gugguucuagagaaacagaau

SEQ ID NO: 292505 - RNA, 22 nt, Human
ugcagauucaaaugaaaugcaa

SEQ ID NO: 292506 - RNA, 22 nt, Human
guagggacuuguuuuacuagua

SEQ ID NO: 292507 - RNA, 22 nt, Human
ugacauguauguauuuguuuau

SEQ ID NO: 292508 - RNA, 22 nt, Human
cagcuucaccagggccaugguu

SEQ ID NO: 292509 - RNA, 22 nt, Human
uuggaggauggaguuagcaucu

SEQ ID NO: 292510 - RNA, 22 nt, Human
agcuguggggaggaggcuagca

SEQ ID NO: 292511 - RNA, 20 nt, Human
uuugagaccagucugcccaa

SEQ ID NO: 292512 - RNA, 22 nt, Human
aauuagggaaaacauuugcuuu

SEQ ID NO: 292513 - RNA, 22 nt, Human
ccagguggauaagguuucugga

SEQ ID NO: 292514 - RNA, 22 nt, Human
cgugagcaaaauggacacuccc

SEQ ID NO: 292515 - RNA, 22 nt, Human
uuuccuuccuugcuagccugag

SEQ ID NO: 292516 - RNA, 22 nt, Human
cauaauauacuacauugaugaa

SEQ ID NO: 292517 - RNA, 22 nt, Human
ucugaaauccuuuaucuuggcu

SEQ ID NO: 292518 - RNA, 23 nt, Human
cacaggcugcgcauaagcuucuc

SEQ ID NO: 292519 - RNA, 22 nt, Human
agcauaaaggucaacguuuuag

SEQ ID NO: 292520 - RNA, 17 nt, Human
uggccaggccccgccag

SEQ ID NO: 292521 - RNA, 22 nt, Human
uaaaguguguauauacauaugg

SEQ ID NO: 292522 - RNA, 22 nt, Human
cagccaggacucccauuuagga

SEQ ID NO: 292523 - RNA, 22 nt, Human
ccugagaggcccucucacuguc

SEQ ID NO: 292524 - RNA, 19 nt, Human
uggaccugugcccauggcu

SEQ ID NO: 292525 - RNA, 22 nt, Human
gaggagggccuggugucccuuc

SEQ ID NO: 292526 - RNA, 21 nt, Human
uuguuacaaugcaagaguaug

SEQ ID NO: 292527 - RNA, 22 nt, Human
ggacaaaacuucuugcauuucu

SEQ ID NO: 292528 - RNA, 22 nt, Human
cucuagggcucugugagguugg

SEQ ID NO: 292529 - RNA, 22 nt, Human
auguuuaugaccuccauaagga

SEQ ID NO: 292530 - RNA, 22 nt, Human
caugaaaauaacauuguuguga

SEQ ID NO: 292531 - RNA, 22 nt, Human
uaagacuuccaggaaaaggugg

SEQ ID NO: 292532 - RNA, 17 nt, Human
ucugucuugacugucac

SEQ ID NO: 292533 - RNA, 22 nt, Human
aaaauuauucauggcuuuugga

SEQ ID NO: 292534 - RNA, 17 nt, Human
uucagaagcauuuuggc

SEQ ID NO: 292535 - RNA, 22 nt, Human
acacauuuauggaucgcagaaa

SEQ ID NO: 292536 - RNA, 22 nt, Human
auacuuuagagcuagauugccu

SEQ ID NO: 292537 - RNA, 22 nt, Human
uggcuggagcauuccuugucuu

SEQ ID NO: 292538 - RNA, 22 nt, Human
ugcuuuaucugacuuggcgcug

SEQ ID NO: 292539 - RNA, 22 nt, Human
uuuugcuugagugcacaaaaug

SEQ ID NO: 292540 - RNA, 22 nt, Human
ccauuguaguaucuguuuuagu

SEQ ID NO: 292541 - RNA, 22 nt, Human
uggccucugugggagcugagca

SEQ ID NO: 292542 - RNA, 22 nt, Human
acauuucuuccacaugcugcug

SEQ ID NO: 292543 - RNA, 22 nt, Human
gccucaggccgcccugcugcuc

SEQ ID NO: 292544 - RNA, 22 nt, Human
aagucucugacucacacaaugu

SEQ ID NO: 292545 - RNA, 22 nt, Human
gaugugagugguagcugggauu

SEQ ID NO: 292546 - RNA, 22 nt, Human
ugacccuuagugaacauuagaa

SEQ ID NO: 292547 - RNA, 22 nt, Human
ucucucuucaacccuuaacuag

SEQ ID NO: 292548 - RNA, 22 nt, Human
ugugagcuuaggacagggcuau

SEQ ID NO: 292549 - RNA, 22 nt, Human
uauaauuuuaagugguaaauua

SEQ ID NO: 292550 - RNA, 20 nt, Human
agauuauuccuaagauuucu

SEQ ID NO: 292551 - RNA, 22 nt, Human
ucauguguuaaacuccaagaua

SEQ ID NO: 292552 - RNA, 23 nt, Human
cgcccagccucagugaccugggc

SEQ ID NO: 292553 - RNA, 22 nt, Human
ucugaagaacugucuagagaac

SEQ ID NO: 292554 - RNA, 22 nt, Human
ugacauuuaaucccuaaauauu

SEQ ID NO: 292555 - RNA, 22 nt, Human
acauuaaagaguaagguuaguu

SEQ ID NO: 292556 - RNA, 22 nt, Human
agaaugcuuccuuugaaacuga

SEQ ID NO: 292557 - RNA, 22 nt, Human
cuuggggaugcaaagccagugu

SEQ ID NO: 292558 - RNA, 22 nt, Human
ucucuguguucccuguuuucuc

SEQ ID NO: 292559 - RNA, 22 nt, Human
ugaaaaacuuuaauccauaaag

SEQ ID NO: 292560 - RNA, 22 nt, Human
ucccagggauccuccgggucgc

SEQ ID NO: 292561 - RNA, 20 nt, Human
ucccaaaauucuacuuuauc

SEQ ID NO: 292562 - RNA, 22 nt, Human
auguccagagaacauuugcuuu

SEQ ID NO: 292563 - RNA, 22 nt, Human
gacaagaugagcagcucagugu

SEQ ID NO: 292564 - RNA, 22 nt, Human
aaauggcaguagaaaagaaucc

SEQ ID NO: 292565 - RNA, 22 nt, Human
uuucuagucucgaucucuuaau

SEQ ID NO: 292566 - RNA, 22 nt, Human
cugccuggaccggcagcccucc

SEQ ID NO: 292567 - RNA, 22 nt, Human
aggugggggcuguguccuugac

SEQ ID NO: 292568 - RNA, 22 nt, Human
uguccugggucaaauccugguc

SEQ ID NO: 292569 - RNA, 22 nt, Human
ucuguggauuuuaguguucaug

SEQ ID NO: 292570 - RNA, 22 nt, Human
uaaaagagaauggauaacagag

SEQ ID NO: 292571 - RNA, 22 nt, Human
aggcuuuaaguggccuacagcu

SEQ ID NO: 292572 - RNA, 22 nt, Human
uaguacacucuguaaguuuaaa

SEQ ID NO: 292573 - RNA, 22 nt, Human
uucuaaaauaaguuuaucuggu

SEQ ID NO: 292574 - RNA, 22 nt, Human
uuauagaaggagcauucacuua

SEQ ID NO: 292575 - RNA, 22 nt, Human
agagccaggcggcugggcaccu

SEQ ID NO: 292576 - RNA, 22 nt, Human
ggcuuggaaaugguaaugagcu

SEQ ID NO: 292577 - RNA, 22 nt, Human
caaauagauuguucaauccuga

SEQ ID NO: 292578 - RNA, 23 nt, Human
gucucuagaguguggagcaaaga

SEQ ID NO: 292579 - RNA, 22 nt, Human
agacagaccauggcuauucaga

SEQ ID NO: 292580 - RNA, 22 nt, Human
auucagcaaacauuuauuaucu

SEQ ID NO: 292581 - RNA, 22 nt, Human
cccugccaaucccgucucucug

SEQ ID NO: 292582 - RNA, 22 nt, Human
uccugagcaccuaugccauggc

SEQ ID NO: 292583 - RNA, 22 nt, Human
agcuuccugucuucugcacaaa

SEQ ID NO: 292584 - RNA, 22 nt, Human
ggcucugaagggugacagguuu

SEQ ID NO: 292585 - RNA, 22 nt, Human
auucacauuuacaaagcacuca

SEQ ID NO: 292586 - RNA, 22 nt, Human
uccuucccaggugucgccgccu

SEQ ID NO: 292587 - RNA, 22 nt, Human
ccugagauuggcuaguaugagu

SEQ ID NO: 292588 - RNA, 22 nt, Human
aggcucugcauccaggcuuuau

SEQ ID NO: 292589 - RNA, 22 nt, Human
ucuggccccuggcaguccugga

SEQ ID NO: 292590 - RNA, 22 nt, Human
gcucugaggagccaagaaugug

SEQ ID NO: 292591 - RNA, 22 nt, Human
uggcuguagaaucagagacuug

SEQ ID NO: 292592 - RNA, 22 nt, Human
acuguucauuuguccuguaucu

SEQ ID NO: 292593 - RNA, 22 nt, Human
agucagguacuccgagggcaug

SEQ ID NO: 292594 - RNA, 22 nt, Human
auacacgugccauguuggugug

SEQ ID NO: 292595 - RNA, 22 nt, Human
uagaaacagauguuuuugaaga

SEQ ID NO: 292596 - RNA, 22 nt, Human
agcaggugacccaagcaggcug

SEQ ID NO: 292597 - RNA, 22 nt, Human
ucucacagugcaggucugucuc

SEQ ID NO: 292598 - RNA, 22 nt, Human
aauucauauggauaugcuagua

SEQ ID NO: 292599 - RNA, 22 nt, Human
aaagaucaaguaggcauggccu

SEQ ID NO: 292600 - RNA, 22 nt, Human
aggcuguggcccuggucuagca

SEQ ID NO: 292601 - RNA, 22 nt, Human
uaaagcacgucuauuuaaugau

SEQ ID NO: 292602 - RNA, 23 nt, Human
augaaaugcuggcucagggaggu

SEQ ID NO: 292603 - RNA, 23 nt, Human
aggaaugugcccacccaucuccu

SEQ ID NO: 292604 - RNA, 22 nt, Human
cacauuccugagcuucgaccug

SEQ ID NO: 292605 - RNA, 22 nt, Human
acaaggccaagcauucuagcaa

SEQ ID NO: 292606 - RNA, 22 nt, Human
uuugacauuggcuuauucuguu

SEQ ID NO: 292607 - RNA, 22 nt, Human
agagcaggcauaaagcuuugaa

SEQ ID NO: 292608 - RNA, 22 nt, Human
aaaguggucaccuucucauuuc

SEQ ID NO: 292609 - RNA, 22 nt, Human
cccagaggugcuucagaggugc

SEQ ID NO: 292610 - RNA, 22 nt, Human
caauaauuuacauuggauacca

SEQ ID NO: 292611 - RNA, 22 nt, Human
ggugccacugcacucuggccug

SEQ ID NO: 292612 - RNA, 22 nt, Human
agagccaggacugugucucacu

SEQ ID NO: 292613 - RNA, 22 nt, Human
cagugugcugcagagaacauuu

SEQ ID NO: 292614 - RNA, 21 nt, Human
uucuucaaagaagaaggcaca

SEQ ID NO: 292615 - RNA, 22 nt, Human
cucaggaggaggaaguucauug

SEQ ID NO: 292616 - RNA, 22 nt, Human
guguucugggaugauuguagug

SEQ ID NO: 292617 - RNA, 22 nt, Human
cccagcaggcauguugggagga

SEQ ID NO: 292618 - RNA, 22 nt, Human
guuauuuuaucucugagagguu

SEQ ID NO: 292619 - RNA, 22 nt, Human
aggcuuggagguucuguagcca

SEQ ID NO: 292620 - RNA, 22 nt, Human
caaauuuagguaacagucugua

SEQ ID NO: 292621 - RNA, 22 nt, Human
cagaucuaucuguugauggugc

SEQ ID NO: 292622 - RNA, 22 nt, Human
uuauuucuacuauuuugccuga

SEQ ID NO: 292623 - RNA, 22 nt, Human
aguguuuggggugauuguaacc

SEQ ID NO: 292624 - RNA, 22 nt, Human
gucuucaauagagccucaauuu

SEQ ID NO: 292625 - RNA, 22 nt, Human
uuccuggcacugcagugguuga

SEQ ID NO: 292626 - RNA, 22 nt, Human
ggggaccuggccacccauccuu

SEQ ID NO: 292627 - RNA, 22 nt, Human
uacuuuuagccuauuugauucu

SEQ ID NO: 292628 - RNA, 22 nt, Human
cagggcagagggaaacuccuuu

SEQ ID NO: 292629 - RNA, 22 nt, Human
uggagcagcucuagcgggcgcc

SEQ ID NO: 292630 - RNA, 22 nt, Human
uuucaguuuccagcuuugucau

SEQ ID NO: 292631 - RNA, 22 nt, Human
aaaauucauuccucagacugcc

SEQ ID NO: 292632 - RNA, 20 nt, Human
auccaugagagucuggauuc

SEQ ID NO: 292633 - RNA, 22 nt, Human
uguggcagaggaggcagcgucc

SEQ ID NO: 292634 - RNA, 22 nt, Human
ucacaggcuugugaacauugca

SEQ ID NO: 292635 - RNA, 22 nt, Human
gagagggauacugaguuuuggu

SEQ ID NO: 292636 - RNA, 22 nt, Human
cagugagggcauucagugcugg

SEQ ID NO: 292637 - RNA, 22 nt, Human
agaggucagaacaggaaagugu

SEQ ID NO: 292638 - RNA, 22 nt, Human
uuuuugcuccacaacuuugaag

SEQ ID NO: 292639 - RNA, 22 nt, Human
gggaggugauuaggaccaugua

SEQ ID NO: 292640 - RNA, 22 nt, Human
uuuccagagcaugucugcucag

SEQ ID NO: 292641 - RNA, 22 nt, Human
aggcacaggaacaggaaaagag

SEQ ID NO: 292642 - RNA, 22 nt, Human
uucuuucugggguccuucggcu

SEQ ID NO: 292643 - RNA, 20 nt, Human
caugccaugucuacugaggc

SEQ ID NO: 292644 - RNA, 22 nt, Human
ugcaaucagaaaguucagcggu

SEQ ID NO: 292645 - RNA, 22 nt, Human
uacagagacccacaagagacug

SEQ ID NO: 292646 - RNA, 22 nt, Human
ggacauuuuucuuccuacaaug

SEQ ID NO: 292647 - RNA, 22 nt, Human
ucaaagcaauuucaccagugcc

SEQ ID NO: 292648 - RNA, 22 nt, Human
uugaagauucuuuuuguuagua

SEQ ID NO: 292649 - RNA, 22 nt, Human
caguuaaauucuccaguuacca

SEQ ID NO: 292650 - RNA, 17 nt, Human
ugcuggcaacauacaaa

SEQ ID NO: 292651 - RNA, 22 nt, Human
gcuuccugucccucagccauga

SEQ ID NO: 292652 - RNA, 22 nt, Human
gcuccuggcaggcagugugugu

SEQ ID NO: 292653 - RNA, 22 nt, Human
uucaacaacuugguucaaaugg

SEQ ID NO: 292654 - RNA, 22 nt, Human
cuuaauuuaagccuagaaugca

SEQ ID NO: 292655 - RNA, 16 nt, Human
gcagguggggcgcgca

SEQ ID NO: 292656 - RNA, 21 nt, Human
ccuucuccauuacaguaagcu

SEQ ID NO: 292657 - RNA, 22 nt, Human
cauguacaaaaggcaaaugccu

SEQ ID NO: 292658 - RNA, 22 nt, Human
uccaaggacgcuggaccccugc

SEQ ID NO: 292659 - RNA, 22 nt, Human
ucagacagcuugcagggaggug

SEQ ID NO: 292660 - RNA, 22 nt, Human
auaaagcauuuccccugugugg

SEQ ID NO: 292661 - RNA, 22 nt, Human
uauuuucaucuuguccuuggau

SEQ ID NO: 292662 - RNA, 22 nt, Human
ccauggcuuacagauggagcau

SEQ ID NO: 292663 - RNA, 22 nt, Human
uuggaucacucugaagccuuac

SEQ ID NO: 292664 - RNA, 22 nt, Human
auucuuuagccagcagguauau

SEQ ID NO: 292665 - RNA, 22 nt, Human
gacaauaaaaugaucuuacagu

SEQ ID NO: 292666 - RNA, 22 nt, Human
cccacccucaagggugucuaua

SEQ ID NO: 292667 - RNA, 22 nt, Human
acagaugaauuuuaauuguguu

SEQ ID NO: 292668 - RNA, 22 nt, Human
ccuggcagguggagguugcagu

SEQ ID NO: 292669 - RNA, 22 nt, Human
ggcaggugaccuggccucccag

SEQ ID NO: 292670 - RNA, 22 nt, Human
ggagaagaggagcuggaagccu

SEQ ID NO: 292671 - RNA, 22 nt, Human
gaggaggggacaguacuugugc

SEQ ID NO: 292672 - RNA, 22 nt, Human
uuauugcuauggugagagggau

SEQ ID NO: 292673 - RNA, 22 nt, Human
guuucaaauagguuucagcaaa

SEQ ID NO: 292674 - RNA, 22 nt, Human
caggcacaauuauuucccuuuc

SEQ ID NO: 292675 - RNA, 22 nt, Human
cuguuuucuagggcugagguga

SEQ ID NO: 292676 - RNA, 22 nt, Human
auauuuguugaguucuuaugau

SEQ ID NO: 292677 - RNA, 22 nt, Human
aggggagcuugaggcauggccu

SEQ ID NO: 292678 - RNA, 22 nt, Human
aagaaaugcugauguuggaugg

SEQ ID NO: 292679 - RNA, 22 nt, Human
cuuccuggaugaacaguagaaa

SEQ ID NO: 292680 - RNA, 19 nt, Human
ucuuuguacaagucucugc

SEQ ID NO: 292681 - RNA, 22 nt, Human
aaggcaggaugggaaaagauuu

SEQ ID NO: 292682 - RNA, 23 nt, Human
ggagacaagguaccacguuaaca

SEQ ID NO: 292683 - RNA, 18 nt, Human
aaugugaauauuuacuuc

SEQ ID NO: 292684 - RNA, 22 nt, Human
cauuucagugucuugugaugaa

SEQ ID NO: 292685 - RNA, 22 nt, Human
aaggugguucgcugguacccag

SEQ ID NO: 292686 - RNA, 22 nt, Human
cuuugcaaacugucacacuuuc

SEQ ID NO: 292687 - RNA, 17 nt, Human
acuccuggucugaaggg

SEQ ID NO: 292688 - RNA, 22 nt, Human
cuggagagaccgaaagaggcug

SEQ ID NO: 292689 - RNA, 22 nt, Human
agagcaauggcauccagcugau

SEQ ID NO: 292690 - RNA, 22 nt, Human
ucauuuguaccauuuuuuaaga

SEQ ID NO: 292691 - RNA, 22 nt, Human
uuugguaaguacccaccugggu

SEQ ID NO: 292692 - RNA, 22 nt, Human
gacccagaaggagugcccuaga

SEQ ID NO: 292693 - RNA, 22 nt, Human
ccagagagaguacugggcucug

SEQ ID NO: 292694 - RNA, 22 nt, Human
uuguuauaaagacuaaauaugu

SEQ ID NO: 292695 - RNA, 22 nt, Human
ugaggaauguuuugagugccga

SEQ ID NO: 292696 - RNA, 22 nt, Human
acagcuuuugaaaaauuacugg

SEQ ID NO: 292697 - RNA, 22 nt, Human
aaagaagguagggcuggugacu

SEQ ID NO: 292698 - RNA, 22 nt, Human
ccugagcuagggaaggaagacc

SEQ ID NO: 292699 - RNA, 22 nt, Human
cugucuguuuuguauacaggcc

SEQ ID NO: 292700 - RNA, 22 nt, Human
acuggaggccccucccagugaa

SEQ ID NO: 292701 - RNA, 22 nt, Human
aauaguuugaauuuaucagaug

SEQ ID NO: 292702 - RNA, 22 nt, Human
gcaguguccaggguggucugca

SEQ ID NO: 292703 - RNA, 22 nt, Human
uaaaggauuuuguauaauauaa

SEQ ID NO: 292704 - RNA, 22 nt, Human
ugucuggcauaguugcucccug

SEQ ID NO: 292705 - RNA, 22 nt, Human
uucagagacagcaaccaggaca

SEQ ID NO: 292706 - RNA, 22 nt, Human
aaaauuuccaccaucuuugugu

SEQ ID NO: 292707 - RNA, 22 nt, Human
guuuuacacaccuaugaaagac

SEQ ID NO: 292708 - RNA, 22 nt, Human
agcuuagaauguguuaggaaag

SEQ ID NO: 292709 - RNA, 22 nt, Human
cugagaggcagccagagaaaau

SEQ ID NO: 292710 - RNA, 22 nt, Human
acauccagaucucagcauggcu

SEQ ID NO: 292711 - RNA, 18 nt, Human
uuacacuagccuugguuc

SEQ ID NO: 292712 - RNA, 22 nt, Human
gacauaaaauggaauucuguug

SEQ ID NO: 292713 - RNA, 22 nt, Human
aagcauuuauagauaagaauuu

SEQ ID NO: 292714 - RNA, 22 nt, Human
uuucuguuguacuuaaacuagg

SEQ ID NO: 292715 - RNA, 22 nt, Human
augguauacaauuauggacugu

SEQ ID NO: 292716 - RNA, 17 nt, Human
uuauugcuauaagcuga

SEQ ID NO: 292717 - RNA, 22 nt, Human
aucuuuagacaggaagcaauca

SEQ ID NO: 292718 - RNA, 22 nt, Human
ccuucuccugccuuggguucau

SEQ ID NO: 292719 - RNA, 22 nt, Human
gcaguguuuacauauuagaaac

SEQ ID NO: 292720 - RNA, 22 nt, Human
uccugagcuucaguuucuucau

SEQ ID NO: 292721 - RNA, 22 nt, Human
cagaaagaccugggcucaagag

SEQ ID NO: 292722 - RNA, 22 nt, Human
gcuucuauuauuuggagcugag

SEQ ID NO: 292723 - RNA, 22 nt, Human
acauuucucuugaugucucuau

SEQ ID NO: 292724 - RNA, 19 nt, Human
aggcuuggcuagauuuacu

SEQ ID NO: 292725 - RNA, 23 nt, Human
uguccuuuuugaggccuccuccu

SEQ ID NO: 292726 - RNA, 22 nt, Human
uggaggcaggggauacagguca

SEQ ID NO: 292727 - RNA, 22 nt, Human
gcuaaugaaaaauagauuauag

SEQ ID NO: 292728 - RNA, 22 nt, Human
uccugcagaucaaagccuuuga

SEQ ID NO: 292729 - RNA, 22 nt, Human
ccacaagaugcaaacucuaaca

SEQ ID NO: 292730 - RNA, 22 nt, Human
guggcagaguugcugacuagaa

SEQ ID NO: 292731 - RNA, 22 nt, Human
gccugcagccagggaguucucu

SEQ ID NO: 292732 - RNA, 22 nt, Human
acaggcagugauuuccucuggu

SEQ ID NO: 292733 - RNA, 22 nt, Human
uccuggcuuccacaccugucau

SEQ ID NO: 292734 - RNA, 22 nt, Human
cagcaaucgggugauaugcaau

SEQ ID NO: 292735 - RNA, 22 nt, Human
ggcacuggaaggaucaugugag

SEQ ID NO: 292736 - RNA, 22 nt, Human
cuguugcucugaacaggucuug

SEQ ID NO: 292737 - RNA, 22 nt, Human
uaaaguguuguacaaauguaug

SEQ ID NO: 292738 - RNA, 22 nt, Human
uuuccuaguucuaagaaaugua

SEQ ID NO: 292739 - RNA, 19 nt, Human
uuccaccaucacucuguuu

SEQ ID NO: 292740 - RNA, 22 nt, Human
ggaggcaaagcacuuugcuugg

SEQ ID NO: 292741 - RNA, 20 nt, Human
cuuuuucuccagcucugagc

SEQ ID NO: 292742 - RNA, 22 nt, Human
ugaguagagaauucagcuaagg

SEQ ID NO: 292743 - RNA, 22 nt, Human
ccaggugguucaggucaccaua

SEQ ID NO: 292744 - RNA, 22 nt, Human
cucugcagauucaucccuucac

SEQ ID NO: 292745 - RNA, 22 nt, Human
cuccuggcuaugacuacauuuc

SEQ ID NO: 292746 - RNA, 23 nt, Human
uacugucuucuauuaaguaagga

SEQ ID NO: 292747 - RNA, 22 nt, Human
aggagggagaugcccauccugg

SEQ ID NO: 292748 - RNA, 22 nt, Human
aauauaauuuuauuccuagagu

SEQ ID NO: 292749 - RNA, 22 nt, Human
aaaguggugggcgaacucauca

SEQ ID NO: 292750 - RNA, 22 nt, Human
aauaucagcacuuuugugguau

SEQ ID NO: 292751 - RNA, 22 nt, Human
cuccgcagcgggccaauccgga

SEQ ID NO: 292752 - RNA, 22 nt, Human
gauccuguuagaucccauuaga

SEQ ID NO: 292753 - RNA, 23 nt, Human
ggaauguuuaccugugaauguca

SEQ ID NO: 292754 - RNA, 22 nt, Human
cuggucacuccuccaccugcuu

SEQ ID NO: 292755 - RNA, 22 nt, Human
auacuaaaguauagaacuuagu

SEQ ID NO: 292756 - RNA, 22 nt, Human
ucaggaaagaguaauguauaca

SEQ ID NO: 292757 - RNA, 23 nt, Human
auguauuuaaauuucagugauga

SEQ ID NO: 292758 - RNA, 22 nt, Human
guuuuauuuccaugagagaccg

SEQ ID NO: 292759 - RNA, 21 nt, Human
ugcagaaaugguuuuucuaag

SEQ ID NO: 292760 - RNA, 21 nt, Human
uuuguucauagcucacucuuu

SEQ ID NO: 292761 - RNA, 22 nt, Human
acccaggggcgaagcuggccac

SEQ ID NO: 292762 - RNA, 22 nt, Human
uccucagauauaaaugagggug

SEQ ID NO: 292763 - RNA, 18 nt, Human
caggaauggaugggauuu

SEQ ID NO: 292764 - RNA, 22 nt, Human
uuacauaacgguaugaaaaaug

SEQ ID NO: 292765 - RNA, 19 nt, Human
augcaacaaaaguguaaga

SEQ ID NO: 292766 - RNA, 22 nt, Human
ggcaggaggugaguggcgggug

SEQ ID NO: 292767 - RNA, 22 nt, Human
uuacaguggcagaguuggguag

SEQ ID NO: 292768 - RNA, 17 nt, Human
cugaagaguccuggcua

SEQ ID NO: 292769 - RNA, 22 nt, Human
uggaauguugauaaacauaggc

SEQ ID NO: 292770 - RNA, 22 nt, Human
ucuuugguauucacuugugaag

SEQ ID NO: 292771 - RNA, 22 nt, Human
caggaaagaaaugagaacacca

SEQ ID NO: 292772 - RNA, 16 nt, Human
gcuccugggcccucga

SEQ ID NO: 292773 - RNA, 20 nt, Human
cuccacaccuguucgcaggc

SEQ ID NO: 292774 - RNA, 23 nt, Human
ucuguucaaggcuuucuccuuga

SEQ ID NO: 292775 - RNA, 17 nt, Human
cugaggagaacagaaag

SEQ ID NO: 292776 - RNA, 20 nt, Human
uuugcuguggguguaagaau

SEQ ID NO: 292777 - RNA, 22 nt, Human
acaugacacaggccuggccaau

SEQ ID NO: 292778 - RNA, 17 nt, Human
uggucuggaagaacuga

SEQ ID NO: 292779 - RNA, 22 nt, Human
uugaucaaaucagcuacugagg

SEQ ID NO: 292780 - RNA, 22 nt, Human
gacagcaggaugugaggggaug

SEQ ID NO: 292781 - RNA, 22 nt, Human
ggaauguucuggaacaccgcuu

SEQ ID NO: 292782 - RNA, 22 nt, Human
acacaaaguuggaugacaaaau

SEQ ID NO: 292783 - RNA, 22 nt, Human
aaacaugcauucaagaaaaucu

SEQ ID NO: 292784 - RNA, 22 nt, Human
uugcuuauagagaguuucauac

SEQ ID NO: 292785 - RNA, 22 nt, Human
ucauugccauggcauuugcaga

SEQ ID NO: 292786 - RNA, 22 nt, Human
cagagcauugagggucugccaa

SEQ ID NO: 292787 - RNA, 22 nt, Human
cugccugcugcccuccagagcc

SEQ ID NO: 292788 - RNA, 22 nt, Human
uggcaaagacugcaaggacuuu

SEQ ID NO: 292789 - RNA, 22 nt, Human
auguccagggggcuugacuggu

SEQ ID NO: 292790 - RNA, 22 nt, Human
cccaggaggugugcccaacucg

SEQ ID NO: 292791 - RNA, 22 nt, Human
gagaaagaugaagaguggcguu

SEQ ID NO: 292792 - RNA, 22 nt, Human
uguguucaagauuaguucuagu

SEQ ID NO: 292793 - RNA, 22 nt, Human
gagauuuauugacuuaacagua

SEQ ID NO: 292794 - RNA, 22 nt, Human
ggucuggcaggugaggacucag

SEQ ID NO: 292795 - RNA, 22 nt, Human
uauguuuuaggaauuaauuguu

SEQ ID NO: 292796 - RNA, 22 nt, Human
aaacuguaaacacagcaguaca

SEQ ID NO: 292797 - RNA, 22 nt, Human
uuguuugucauaauaucauuac

SEQ ID NO: 292798 - RNA, 22 nt, Human
gcucucagggugauggcauacu

SEQ ID NO: 292799 - RNA, 22 nt, Human
caugauaacuucauuacacaau

SEQ ID NO: 292800 - RNA, 22 nt, Human
uacacaugaucauuuaguagca

SEQ ID NO: 292801 - RNA, 22 nt, Human
caggcacacugucuacacugag

SEQ ID NO: 292802 - RNA, 22 nt, Human
ucuuuacaaucuaagcauaguu

SEQ ID NO: 292803 - RNA, 22 nt, Human
gggacaugaagcaucggaggca

SEQ ID NO: 292804 - RNA, 22 nt, Human
aaauggauguugaguuaaaugu

SEQ ID NO: 292805 - RNA, 22 nt, Human
augcucagggcacacucuggac

SEQ ID NO: 292806 - RNA, 22 nt, Human
uccagaauacucugaaaucauu

SEQ ID NO: 292807 - RNA, 22 nt, Human
cugagcagugguucuugagcgc

SEQ ID NO: 292808 - RNA, 22 nt, Human
ugucuggggaacugugcaucca

SEQ ID NO: 292809 - RNA, 17 nt, Human
agggggaaccugggagg

SEQ ID NO: 292810 - RNA, 21 nt, Human
ggccucugccuugccccacuc

SEQ ID NO: 292811 - RNA, 22 nt, Human
cauguuaaugaauuuuugcagu

SEQ ID NO: 292812 - RNA, 22 nt, Human
ugcacuacugugauacacagcc

SEQ ID NO: 292813 - RNA, 22 nt, Human
acuuuagaaaagcauccauaga

SEQ ID NO: 292814 - RNA, 22 nt, Human
uucuuauagaagcaaccauugu

SEQ ID NO: 292815 - RNA, 22 nt, Human
cugccccaggaccucuucugga

SEQ ID NO: 292816 - RNA, 22 nt, Human
cagagagagucaaaucuuugcu

SEQ ID NO: 292817 - RNA, 22 nt, Human
aauguucagaggacaauauaaa

SEQ ID NO: 292818 - RNA, 21 nt, Human
gccacugcacuccagccuggg

SEQ ID NO: 292819 - RNA, 19 nt, Human
uccuggcaucuuccucccu

SEQ ID NO: 292820 - RNA, 22 nt, Human
cuagagaaaaagcuuagguacg

SEQ ID NO: 292821 - RNA, 22 nt, Human
auuuacagugugccuacuauau

SEQ ID NO: 292822 - RNA, 22 nt, Human
ucagagagaaauaguuuuugac

SEQ ID NO: 292823 - RNA, 22 nt, Human
acagcaggaagcuggagggaaa

SEQ ID NO: 292824 - RNA, 22 nt, Human
uuuguuuucaaugugucauuca

SEQ ID NO: 292825 - RNA, 22 nt, Human
ccuggcucccccaucauagcug

SEQ ID NO: 292826 - RNA, 22 nt, Human
uuacaaguucagauuuucucau

SEQ ID NO: 292827 - RNA, 22 nt, Human
uguuuuagcugacacauggagc

SEQ ID NO: 292828 - RNA, 22 nt, Human
ugcuccuucccuucccagugag

SEQ ID NO: 292829 - RNA, 22 nt, Human
auagaauagcauagaaaauuga

SEQ ID NO: 292830 - RNA, 22 nt, Human
ucuccccagacccuggacauaa

SEQ ID NO: 292831 - RNA, 22 nt, Human
uuuaugucccuucaaauguuua

SEQ ID NO: 292832 - RNA, 22 nt, Human
ugaggcucagaaauguaaguuu

SEQ ID NO: 292833 - RNA, 22 nt, Human
acagaugaggcccaucagucug

SEQ ID NO: 292834 - RNA, 21 nt, Human
gggugggaggacacagcaggc

SEQ ID NO: 292835 - RNA, 22 nt, Human
ccauggagcgggugagugagug

SEQ ID NO: 292836 - RNA, 22 nt, Human
gcaggcaggcuuccuugaacug

SEQ ID NO: 292837 - RNA, 22 nt, Human
aaggcugccucugccagaggag

SEQ ID NO: 292838 - RNA, 22 nt, Human
agcucccagaaggcccugcgcc

SEQ ID NO: 292839 - RNA, 22 nt, Human
uggugaggccaaagccaugaca

SEQ ID NO: 292840 - RNA, 22 nt, Human
uugcuggggugugaaaucugau

SEQ ID NO: 292841 - RNA, 22 nt, Human
uuucuaggcacagugucuuccc

SEQ ID NO: 292842 - RNA, 22 nt, Human
aggguauguuuuaggcugaguu

SEQ ID NO: 292843 - RNA, 22 nt, Human
cagcugucugaagcaggagucc

SEQ ID NO: 292844 - RNA, 21 nt, Human
ucuccccauucuuauucccau

SEQ ID NO: 292845 - RNA, 22 nt, Human
agggcagcagcuccuccuagcu

SEQ ID NO: 292846 - RNA, 22 nt, Human
cccugcaggggaccugcagccu

SEQ ID NO: 292847 - RNA, 22 nt, Human
gagggaugucaggggaccuugg

SEQ ID NO: 292848 - RNA, 22 nt, Human
auguuuguguuacacucugcag

SEQ ID NO: 292849 - RNA, 22 nt, Human
guauuagggccaaaggcaggaa

SEQ ID NO: 292850 - RNA, 22 nt, Human
gcauggcuguugaagucagcuc

SEQ ID NO: 292851 - RNA, 23 nt, Human
agccuucaggcaaugucaguaga

SEQ ID NO: 292852 - RNA, 22 nt, Human
ugcuuuauaaccauuucugugg

SEQ ID NO: 292853 - RNA, 19 nt, Human
gucagcuggaacucugaaa

SEQ ID NO: 292854 - RNA, 22 nt, Human
uccugggccuguacuccauccg

SEQ ID NO: 292855 - RNA, 22 nt, Human
gcugagguccagcauucgccua

SEQ ID NO: 292856 - RNA, 22 nt, Human
aaauauagugacacuuauaguc

SEQ ID NO: 292857 - RNA, 22 nt, Human
gaugcgggcccgcuccacugcc

SEQ ID NO: 292858 - RNA, 22 nt, Human
gcaggcaccggguugcuccccu

SEQ ID NO: 292859 - RNA, 22 nt, Human
uuggaagcaguguacacuguac

SEQ ID NO: 292860 - RNA, 22 nt, Human
aaaggcuaugagauagaagaua

SEQ ID NO: 292861 - RNA, 22 nt, Human
cagauucuucauugccccauuc

SEQ ID NO: 292862 - RNA, 22 nt, Human
acacauuuucaacacugucaag

SEQ ID NO: 292863 - RNA, 22 nt, Human
uuuaaaaaacuagucugagucu

SEQ ID NO: 292864 - RNA, 22 nt, Human
guguucauugcuagugaggugu

SEQ ID NO: 292865 - RNA, 22 nt, Human
uuggaauccugagaugagaauu

SEQ ID NO: 292866 - RNA, 22 nt, Human
uggucuggaacuccuggcuuca

SEQ ID NO: 292867 - RNA, 22 nt, Human
gguggcauaagaacacuaaaga

SEQ ID NO: 292868 - RNA, 22 nt, Human
ccauguguugauucucugcaga

SEQ ID NO: 292869 - RNA, 22 nt, Human
agccuuguuggucugaguuugg

SEQ ID NO: 292870 - RNA, 22 nt, Human
agcuugauuucucugcagugug

SEQ ID NO: 292871 - RNA, 20 nt, Human
gaguccaggggccuguagca

SEQ ID NO: 292872 - RNA, 22 nt, Human
gacccaggguggucaccugaaa

SEQ ID NO: 292873 - RNA, 19 nt, Human
gcaggcacagcccugggug

SEQ ID NO: 292874 - RNA, 22 nt, Human
acacaguucaggaucaaauagc

SEQ ID NO: 292875 - RNA, 22 nt, Human
aacuagaaaucacuacagguau

SEQ ID NO: 292876 - RNA, 22 nt, Human
ccucacccagucaccuaggugg

SEQ ID NO: 292877 - RNA, 22 nt, Human
auuuccaugccuuagcuuaagg

SEQ ID NO: 292878 - RNA, 22 nt, Human
uacagacaguuuuucagauauu

SEQ ID NO: 292879 - RNA, 23 nt, Human
aaauuauugcucuucaauugccu

SEQ ID NO: 292880 - RNA, 22 nt, Human
ccuggcagcagcacaugccuuc

SEQ ID NO: 292881 - RNA, 22 nt, Human
acuugguugaugucauaagguu

SEQ ID NO: 292882 - RNA, 22 nt, Human
ucuguacauuuguguugugaau

SEQ ID NO: 292883 - RNA, 22 nt, Human
uccugccaccugcacagcuccc

SEQ ID NO: 292884 - RNA, 22 nt, Human
auaugcauuuaccuggcauaua

SEQ ID NO: 292885 - RNA, 22 nt, Human
uacuacaagggcccuaaaaggu

SEQ ID NO: 292886 - RNA, 22 nt, Human
aguacaaaugcagccagaguag

SEQ ID NO: 292887 - RNA, 22 nt, Human
gauuuuucaguauaaaauauau

SEQ ID NO: 292888 - RNA, 22 nt, Human
ggccugaggcgucccagcugug

SEQ ID NO: 292889 - RNA, 22 nt, Human
agggcccuaaggaaggcacaca

SEQ ID NO: 292890 - RNA, 22 nt, Human
ucuuccucccuacagagcucag

SEQ ID NO: 292891 - RNA, 22 nt, Human
uucuuuccuugccucagugaag

SEQ ID NO: 292892 - RNA, 22 nt, Human
gggaggaaugcaacuuauuuag

SEQ ID NO: 292893 - RNA, 22 nt, Human
gaaaaguauguuuauuuugacu

SEQ ID NO: 292894 - RNA, 22 nt, Human
cucugaaaaugugguggggaaa

SEQ ID NO: 292895 - RNA, 21 nt, Human
cauuucuauugaugagaaaag

SEQ ID NO: 292896 - RNA, 22 nt, Human
ccuggcuccagcugccuguccu

SEQ ID NO: 292897 - RNA, 22 nt, Human
uugcuuuacuuugccauucguu

SEQ ID NO: 292898 - RNA, 22 nt, Human
aagggcucgguagcaguccuga

SEQ ID NO: 292899 - RNA, 22 nt, Human
gccugagaucaggagaaagcca

SEQ ID NO: 292900 - RNA, 22 nt, Human
gccuguuucuccuccuuggccc

SEQ ID NO: 292901 - RNA, 22 nt, Human
cuuccuccgaagaaguugcugg

SEQ ID NO: 292902 - RNA, 22 nt, Human
aacauauaaacucuuaaguuca

SEQ ID NO: 292903 - RNA, 22 nt, Human
uuccaugccucuauuuagaauu

SEQ ID NO: 292904 - RNA, 22 nt, Human
uucauguaauuccauaagguaa

SEQ ID NO: 292905 - RNA, 22 nt, Human
ugucaauauguaauaacugaau

SEQ ID NO: 292906 - RNA, 22 nt, Human
gcccagggcugcaaguggacgc

SEQ ID NO: 292907 - RNA, 22 nt, Human
ucuuuuaagccucuggcauagg

SEQ ID NO: 292908 - RNA, 22 nt, Human
cagcuuuguggccuugaccucg

SEQ ID NO: 292909 - RNA, 22 nt, Human
cagagccuuccuagcagacucu

SEQ ID NO: 292910 - RNA, 22 nt, Human
gggaccuggucuagcacugagc

SEQ ID NO: 292911 - RNA, 22 nt, Human
uuagguaaguaggaucaaaaaa

SEQ ID NO: 292912 - RNA, 22 nt, Human
caugcacaaagguaagaugcgu

SEQ ID NO: 292913 - RNA, 22 nt, Human
uggcaaaggggaccauguugaa

SEQ ID NO: 292914 - RNA, 22 nt, Human
ucuccuggguaaaaggguugau

SEQ ID NO: 292915 - RNA, 22 nt, Human
ccuucuucuguguggcccaaga

SEQ ID NO: 292916 - RNA, 22 nt, Human
uuugauagggaaguaagaauga

SEQ ID NO: 292917 - RNA, 22 nt, Human
agcuccugcccaggaaggcucu

SEQ ID NO: 292918 - RNA, 20 nt, Human
cagagaccaggccagguguc

SEQ ID NO: 292919 - RNA, 22 nt, Human
agcccuugcagacugucagcau

SEQ ID NO: 292920 - RNA, 22 nt, Human
uaauuuuaugacaguguauuuu

SEQ ID NO: 292921 - RNA, 22 nt, Human
ggcagguggaaggucuccauuc

SEQ ID NO: 292922 - RNA, 18 nt, Human
acuguucucuccugcccu

SEQ ID NO: 292923 - RNA, 22 nt, Human
cagggcaggacagauacauuac

SEQ ID NO: 292924 - RNA, 22 nt, Human
ggucaaagugaggagucagguu

SEQ ID NO: 292925 - RNA, 22 nt, Human
accaugaucugcucugguguuu

SEQ ID NO: 292926 - RNA, 22 nt, Human
auuuccauuaucaugacaaauu

SEQ ID NO: 292927 - RNA, 22 nt, Human
ucacugcucugaaaguacaggg

SEQ ID NO: 292928 - RNA, 22 nt, Human
uuccuguggcugucacuccugg

SEQ ID NO: 292929 - RNA, 22 nt, Human
uuguguccccuguucuaccugu

SEQ ID NO: 292930 - RNA, 22 nt, Human
ucagagcaaauuccugugagcc

SEQ ID NO: 292931 - RNA, 22 nt, Human
auuucauugaaguuaauucuuc

SEQ ID NO: 292932 - RNA, 22 nt, Human
uugaggagugugaggucuccca

SEQ ID NO: 292933 - RNA, 22 nt, Human
uaacacauaucuacaacaugug

SEQ ID NO: 292934 - RNA, 22 nt, Human
cuuuucaugagucuguuauggg

SEQ ID NO: 292935 - RNA, 19 nt, Human
uaaaaugucuguggucagu

SEQ ID NO: 292936 - RNA, 22 nt, Human
cuuuacagaauaagaauacugg

SEQ ID NO: 292937 - RNA, 22 nt, Human
cagagagcuuagugugcugcau

SEQ ID NO: 292938 - RNA, 22 nt, Human
ucuuuuucugcacacguguccc

SEQ ID NO: 292939 - RNA, 22 nt, Human
auauuuucuggaacuaugccug

SEQ ID NO: 292940 - RNA, 21 nt, Human
cagugagguccccagccuagg

SEQ ID NO: 292941 - RNA, 22 nt, Human
aucuguaauuuugaaugcaaau

SEQ ID NO: 292942 - RNA, 22 nt, Human
ucuggcagguucccauguuaug

SEQ ID NO: 292943 - RNA, 22 nt, Human
gguaacaaggccgauagaaaca

SEQ ID NO: 292944 - RNA, 21 nt, Human
gccaaggaggcuagagaacau

SEQ ID NO: 292945 - RNA, 22 nt, Human
uacagugcuuuuugguggagaa

SEQ ID NO: 292946 - RNA, 22 nt, Human
ucaggugucuugugggauuuua

SEQ ID NO: 292947 - RNA, 22 nt, Human
cagguucuggggcuccacugug

SEQ ID NO: 292948 - RNA, 22 nt, Human
agaagcuaggcuagacaaguga

SEQ ID NO: 292949 - RNA, 22 nt, Human
gcuguucacauuuugggccaaa

SEQ ID NO: 292950 - RNA, 22 nt, Human
acuuucaauuugcacuaaccua

SEQ ID NO: 292951 - RNA, 22 nt, Human
ccuacauucucugaguuuuccu

SEQ ID NO: 292952 - RNA, 22 nt, Human
uuccuggcucacagcagugggg

SEQ ID NO: 292953 - RNA, 22 nt, Human
uagagaaaagcagggaucagga

SEQ ID NO: 292954 - RNA, 22 nt, Human
gccaggcuaagaaaggugugau

SEQ ID NO: 292955 - RNA, 22 nt, Human
gcagugucagugccuggguggu

SEQ ID NO: 292956 - RNA, 22 nt, Human
agccagaguugaaugugagucu

SEQ ID NO: 292957 - RNA, 22 nt, Human
uucuucuucaagugcugcauuc

SEQ ID NO: 292958 - RNA, 22 nt, Human
aaucuucauuuugacaagauuc

SEQ ID NO: 292959 - RNA, 22 nt, Human
uccuggccaaguuacucucugc

SEQ ID NO: 292960 - RNA, 22 nt, Human
acuggcaguggcagcagaaaga

SEQ ID NO: 292961 - RNA, 22 nt, Human
ccuggcaggccccuccuggauu

SEQ ID NO: 292962 - RNA, 22 nt, Human
cugaggagcguuggucacgugu

SEQ ID NO: 292963 - RNA, 22 nt, Human
acuuccuguaaauagaauucca

SEQ ID NO: 292964 - RNA, 22 nt, Human
ucagggcaucaucaugaauaua

SEQ ID NO: 292965 - RNA, 22 nt, Human
gauuuucugagccuucaaauuu

SEQ ID NO: 292966 - RNA, 22 nt, Human
ccugccuggagcugagugugga

SEQ ID NO: 292967 - RNA, 22 nt, Human
cccaugagauucugaauuuggc

SEQ ID NO: 292968 - RNA, 22 nt, Human
uuauuuuaccuuccucugagcu

SEQ ID NO: 292969 - RNA, 22 nt, Human
ucccuggggauguuggccugcc

SEQ ID NO: 292970 - RNA, 22 nt, Human
uauucuuguauacuacaaucuu

SEQ ID NO: 292971 - RNA, 22 nt, Human
gagcuuuaagggauaaaaugau

SEQ ID NO: 292972 - RNA, 22 nt, Human
gcacucuccuggcugccacagu

SEQ ID NO: 292973 - RNA, 22 nt, Human
ucguccugugcaccugccugca

SEQ ID NO: 292974 - RNA, 23 nt, Human
acagaugaaaguguggcucagag

SEQ ID NO: 292975 - RNA, 22 nt, Human
guuuaagaggguuucauuccca

SEQ ID NO: 292976 - RNA, 22 nt, Human
aucuuucaaucaggaaaaaucu

SEQ ID NO: 292977 - RNA, 22 nt, Human
aacuucauguaauuuaaaacag

SEQ ID NO: 292978 - RNA, 22 nt, Human
cagauucugaagucuagcugcu

SEQ ID NO: 292979 - RNA, 22 nt, Human
gguguccuacagggccgcaggc

SEQ ID NO: 292980 - RNA, 22 nt, Human
aaguauaagcuauucuucauga

SEQ ID NO: 292981 - RNA, 22 nt, Human
uccagaccaugugagaggcgca

SEQ ID NO: 292982 - RNA, 23 nt, Human
auaauaauuauggcagcaaagug

SEQ ID NO: 292983 - RNA, 22 nt, Human
uacaagcuggcgcaguuaagau

SEQ ID NO: 292984 - RNA, 22 nt, Human
gcagucagacaggaggagcucc

SEQ ID NO: 292985 - RNA, 22 nt, Human
gcuucauagcauucauugccug

SEQ ID NO: 292986 - RNA, 22 nt, Human
uaaaguguggacaguaucuaua

SEQ ID NO: 292987 - RNA, 22 nt, Human
uaucaauacauguuaucagugu

SEQ ID NO: 292988 - RNA, 22 nt, Human
uucuuuaaaauagugagaaaga

SEQ ID NO: 292989 - RNA, 22 nt, Human
agggcagcuggaagguggcuuc

SEQ ID NO: 292990 - RNA, 22 nt, Human
acaauuucugaucagugaauuu

SEQ ID NO: 292991 - RNA, 22 nt, Human
uguuuucuauuaccugagauug

SEQ ID NO: 292992 - RNA, 22 nt, Human
guguacaguaagugaaucuagg

SEQ ID NO: 292993 - RNA, 22 nt, Human
cuggauguccuuccccugaagc

SEQ ID NO: 292994 - RNA, 20 nt, Human
aagucccuaagucucuggcc

SEQ ID NO: 292995 - RNA, 22 nt, Human
uuucacauguggaaugccaggu

SEQ ID NO: 292996 - RNA, 22 nt, Human
augugguugaagaauuacaucu

SEQ ID NO: 292997 - RNA, 22 nt, Human
ggcacagggggcugaggacuag

SEQ ID NO: 292998 - RNA, 22 nt, Human
gagcccaggcugggguucagag

SEQ ID NO: 292999 - RNA, 22 nt, Human
uauaaagaaaugauuuccagaa

SEQ ID NO: 293000 - RNA, 22 nt, Human
aguacauauaguaauuuagcca

SEQ ID NO: 293001 - RNA, 18 nt, Human
gcuccuggaccaggucac

SEQ ID NO: 293002 - RNA, 22 nt, Human
uacauucagagaaaguuuccau

SEQ ID NO: 293003 - RNA, 21 nt, Human
acagggcaugcagcuggcugu

SEQ ID NO: 293004 - RNA, 22 nt, Human
ggacaggcugcaucugagcaug

SEQ ID NO: 293005 - RNA, 22 nt, Human
ccaaggagaaugacaccaugga

SEQ ID NO: 293006 - RNA, 22 nt, Human
cuugccuuugucuucaaaggcu

SEQ ID NO: 293007 - RNA, 22 nt, Human
ccaugccauacuggccacccgg

SEQ ID NO: 293008 - RNA, 22 nt, Human
gcugaggacaucauggaaggaa

SEQ ID NO: 293009 - RNA, 22 nt, Human
cucuucuugccugaugaggcag

SEQ ID NO: 293010 - RNA, 22 nt, Human
ugcacagcgggugucugucagg

SEQ ID NO: 293011 - RNA, 22 nt, Human
gccccagccuaguuuucuuuca

SEQ ID NO: 293012 - RNA, 20 nt, Human
cuguccugaucuuuucagaa

SEQ ID NO: 293013 - RNA, 21 nt, Human
ucuguggcagcaugaugaggu

SEQ ID NO: 293014 - RNA, 22 nt, Human
cuguccugcaguugggggcagg

SEQ ID NO: 293015 - RNA, 22 nt, Human
gacaugugucugcaaguugauc

SEQ ID NO: 293016 - RNA, 22 nt, Human
auggcuggauaguugaagcucu

SEQ ID NO: 293017 - RNA, 19 nt, Human
uuugacuccucauuuuuau

SEQ ID NO: 293018 - RNA, 21 nt, Human
agaauaaugguaucauuugcu

SEQ ID NO: 293019 - RNA, 22 nt, Human
acaaauuucauaggcaaauuuu

SEQ ID NO: 293020 - RNA, 22 nt, Human
ucccaggccauaaaacucagag

SEQ ID NO: 293021 - RNA, 22 nt, Human
aagaguuucugggucaaggauu

SEQ ID NO: 293022 - RNA, 22 nt, Human
agaaagcacucugucuuuuacc

SEQ ID NO: 293023 - RNA, 22 nt, Human
ccaaggaguagagcaggaagcu

SEQ ID NO: 293024 - RNA, 22 nt, Human
uuccuggcuuuugggcuaauuc

SEQ ID NO: 293025 - RNA, 22 nt, Human
gaaggaggucugauacaauaug

SEQ ID NO: 293026 - RNA, 16 nt, Human
ugggaccuguggccaa

SEQ ID NO: 293027 - RNA, 22 nt, Human
ccaugccagcugcuaggucaca

SEQ ID NO: 293028 - RNA, 22 nt, Human
uugggcagguguggcucuccuu

SEQ ID NO: 293029 - RNA, 22 nt, Human
gaggcaacacauuuggaaagca

SEQ ID NO: 293030 - RNA, 22 nt, Human
acugugaugcaguugccaucca

SEQ ID NO: 293031 - RNA, 22 nt, Human
aaggccuugccgaaggaugcca

SEQ ID NO: 293032 - RNA, 22 nt, Human
aagugcaggaguggggaaagua

SEQ ID NO: 293033 - RNA, 21 nt, Human
ugaacaaaguucuuaucguga

SEQ ID NO: 293034 - RNA, 22 nt, Human
guguguccaaggcacggaugac

SEQ ID NO: 293035 - RNA, 22 nt, Human
aagaaaaucaguucuggucagu

SEQ ID NO: 293036 - RNA, 20 nt, Human
acagugcauggggggacagc

SEQ ID NO: 293037 - RNA, 22 nt, Human
uugaggagguaguacagaguau

SEQ ID NO: 293038 - RNA, 22 nt, Human
aagggcauugaggcugagagac

SEQ ID NO: 293039 - RNA, 22 nt, Human
acacuuuaugucuagaucuggg

SEQ ID NO: 293040 - RNA, 22 nt, Human
ucacaucuguugauacagcauc

SEQ ID NO: 293041 - RNA, 22 nt, Human
uuggaauugaggauuuacauag

SEQ ID NO: 293042 - RNA, 22 nt, Human
ucauucuuuaccaaguugucac

SEQ ID NO: 293043 - RNA, 22 nt, Human
uuucuucacaggguauugggug

SEQ ID NO: 293044 - RNA, 22 nt, Human
ucucagagcuucaguuauuuuc

SEQ ID NO: 293045 - RNA, 18 nt, Human
gagaaggccacuuguuuu

SEQ ID NO: 293046 - RNA, 22 nt, Human
ggcaggugcccagagagcacga

SEQ ID NO: 293047 - RNA, 22 nt, Human
acugucaaaugcaaugaacuca

SEQ ID NO: 293048 - RNA, 22 nt, Human
cuccaggaaagccugaggcccg

SEQ ID NO: 293049 - RNA, 20 nt, Human
cccugagacgacugagcucc

SEQ ID NO: 293050 - RNA, 21 nt, Human
uccugcaggaggccugagagg

SEQ ID NO: 293051 - RNA, 22 nt, Human
cagggcucgcucuugcccuucg

SEQ ID NO: 293052 - RNA, 22 nt, Human
ccuguggcuggucaggccagca

SEQ ID NO: 293053 - RNA, 22 nt, Human
gccaggcauuuguuaggugcug

SEQ ID NO: 293054 - RNA, 22 nt, Human
ggcuuggaaauugcaggacaca

SEQ ID NO: 293055 - RNA, 22 nt, Human
guuagggaucaggaacaagagc

SEQ ID NO: 293056 - RNA, 22 nt, Human
agaaauguugaauacacaaaau

SEQ ID NO: 293057 - RNA, 22 nt, Human
uaaauacuuuacaggaugucuc

SEQ ID NO: 293058 - RNA, 22 nt, Human
gcaggugucugacugccuucuu

SEQ ID NO: 293059 - RNA, 22 nt, Human
uucuuuuacauuaagauuucag

SEQ ID NO: 293060 - RNA, 22 nt, Human
caggugucggucaggcgguuuu

SEQ ID NO: 293061 - RNA, 22 nt, Human
uguguccuacugaggagcuccu

SEQ ID NO: 293062 - RNA, 18 nt, Human
gacccagcagaugggcuu

SEQ ID NO: 293063 - RNA, 22 nt, Human
cuuauacacgaacacaaggugu

SEQ ID NO: 293064 - RNA, 22 nt, Human
gggaugagagcugggacagaag

SEQ ID NO: 293065 - RNA, 22 nt, Human
uaaauuaugucacaugacucug

SEQ ID NO: 293066 - RNA, 22 nt, Human
uccaggcuugagaccaggcucu

SEQ ID NO: 293067 - RNA, 22 nt, Human
ucauuucccuccuacaaagagg

SEQ ID NO: 293068 - RNA, 22 nt, Human
gguuucaacuuuugugaggaau

SEQ ID NO: 293069 - RNA, 22 nt, Human
uccuggccuuauccccaaacug

SEQ ID NO: 293070 - RNA, 18 nt, Human
uacaugcauaaaugaagc

SEQ ID NO: 293071 - RNA, 22 nt, Human
aaagcagauucugaugcaguag

SEQ ID NO: 293072 - RNA, 20 nt, Human
uaaauuagccuugaagauua

SEQ ID NO: 293073 - RNA, 22 nt, Human
ugacagacuacugccucuauug

SEQ ID NO: 293074 - RNA, 23 nt, Human
ucuguggcuccuucaggcugcug

SEQ ID NO: 293075 - RNA, 22 nt, Human
uccaugagaacccuuggagaua

SEQ ID NO: 293076 - RNA, 22 nt, Human
gagaagccgagucagcugagcc

SEQ ID NO: 293077 - RNA, 22 nt, Human
agugcuccuauggaucaguugu

SEQ ID NO: 293078 - RNA, 19 nt, Human
auguucuauccuccaaguu

SEQ ID NO: 293079 - RNA, 22 nt, Human
ucugggugcccuuugcucuguu

SEQ ID NO: 293080 - RNA, 19 nt, Human
uccagaagucccugagcgg

SEQ ID NO: 293081 - RNA, 20 nt, Human
cuucuucaguaguuuguucu

SEQ ID NO: 293082 - RNA, 22 nt, Human
guccuggccucuggggguaugg

SEQ ID NO: 293083 - RNA, 22 nt, Human
agagcacagaagaauaggugcu

SEQ ID NO: 293084 - RNA, 22 nt, Human
uccuggcaaagauguugguguu

SEQ ID NO: 293085 - RNA, 22 nt, Human
uggauuaguuucaaggcagcaa

SEQ ID NO: 293086 - RNA, 22 nt, Human
cuguucacacacuuguacucuc

SEQ ID NO: 293087 - RNA, 22 nt, Human
uguaauauuguagugacaguac

SEQ ID NO: 293088 - RNA, 22 nt, Human
uauguacaugauuucauuugcu

SEQ ID NO: 293089 - RNA, 22 nt, Human
auuuggaaaugcaucucuugag

SEQ ID NO: 293090 - RNA, 22 nt, Human
ucuucaauuagauuuaccaauu

SEQ ID NO: 293091 - RNA, 22 nt, Human
acaauucauuaaugugagguag

SEQ ID NO: 293092 - RNA, 22 nt, Human
uuucacauauaggggaagcuac

SEQ ID NO: 293093 - RNA, 19 nt, Human
uacauugcugguggggaug

SEQ ID NO: 293094 - RNA, 22 nt, Human
auugcuggcccagaugcuuuag

SEQ ID NO: 293095 - RNA, 22 nt, Human
cugggaggacaacuuggagcuc

SEQ ID NO: 293096 - RNA, 22 nt, Human
ccagugucugugguauagaaag

SEQ ID NO: 293097 - RNA, 22 nt, Human
gguuauauaauucagugcuuuc

SEQ ID NO: 293098 - RNA, 22 nt, Human
aaauuuguucaaugucuauuug

SEQ ID NO: 293099 - RNA, 22 nt, Human
uuuauugaauuguaacccuauu

SEQ ID NO: 293100 - RNA, 22 nt, Human
gcuuggggucaugaggcugcug

SEQ ID NO: 293101 - RNA, 22 nt, Human
gagccaggguuugaaacuagac

SEQ ID NO: 293102 - RNA, 22 nt, Human
ggaucuucagccagcaggugcc

SEQ ID NO: 293103 - RNA, 19 nt, Human
cugaggugcaguaagaggc

SEQ ID NO: 293104 - RNA, 18 nt, Human
uagggcucuagggaguga

SEQ ID NO: 293105 - RNA, 23 nt, Human
cacaaagguuccauucucucacc

SEQ ID NO: 293106 - RNA, 22 nt, Human
aauguguuacuguguaagagca

SEQ ID NO: 293107 - RNA, 22 nt, Human
uggcuucuucauaugugaucuu

SEQ ID NO: 293108 - RNA, 22 nt, Human
uaauuucuucaucucugcagcu

SEQ ID NO: 293109 - RNA, 22 nt, Human
ucaugccauccacaucuguuuc

SEQ ID NO: 293110 - RNA, 21 nt, Human
ugguggaccagugcugggaga

SEQ ID NO: 293111 - RNA, 22 nt, Human
cagugggggggccaugcugcag

SEQ ID NO: 293112 - RNA, 22 nt, Human
ugucuuuaaaauuaaacacauc

SEQ ID NO: 293113 - RNA, 22 nt, Human
ucauuucuccgaccugcugucc

SEQ ID NO: 293114 - RNA, 22 nt, Human
ucugggccucaccugcugcuca

SEQ ID NO: 293115 - RNA, 22 nt, Human
cugaggagaugauaaugucauu

SEQ ID NO: 293116 - RNA, 22 nt, Human
acugucacuugcaacugugagg

SEQ ID NO: 293117 - RNA, 22 nt, Human
cagagcugcuucccaguuugug

SEQ ID NO: 293118 - RNA, 22 nt, Human
acccagggccacagcccgcagu

SEQ ID NO: 293119 - RNA, 22 nt, Human
uauauuuaaauccagguugaaa

SEQ ID NO: 293120 - RNA, 21 nt, Human
uguaaguuucaucugaauugg

SEQ ID NO: 293121 - RNA, 22 nt, Human
acauacauauguuuaaaugcau

SEQ ID NO: 293122 - RNA, 22 nt, Human
augauugaaaaugacauugcca

SEQ ID NO: 293123 - RNA, 22 nt, Human
uuucucagucacaugaaccaau

SEQ ID NO: 293124 - RNA, 22 nt, Human
aucaguuuggugcuuucaguga

SEQ ID NO: 293125 - RNA, 22 nt, Human
cagggaaacuaggaaauaagcu

SEQ ID NO: 293126 - RNA, 22 nt, Human
auuauaaagaacaugugugugg

SEQ ID NO: 293127 - RNA, 21 nt, Human
uuuagggaggauauuuaacuu

SEQ ID NO: 293128 - RNA, 22 nt, Human
acuguccuagaaccugcagcuc

SEQ ID NO: 293129 - RNA, 22 nt, Human
guccaugauucuguguaguaga

SEQ ID NO: 293130 - RNA, 22 nt, Human
guaaacaucgacccaacagggg

SEQ ID NO: 293131 - RNA, 22 nt, Human
uguacagacuguauuuacaagu

SEQ ID NO: 293132 - RNA, 22 nt, Human
aacuucaccuuuuugccacacu

SEQ ID NO: 293133 - RNA, 22 nt, Human
guuagguagaaguuuacuuuga

SEQ ID NO: 293134 - RNA, 22 nt, Human
gguuucaaauuaaagucuuaag

SEQ ID NO: 293135 - RNA, 22 nt, Human
acuuuaaagcagaauggcuaug

SEQ ID NO: 293136 - RNA, 22 nt, Human
uccugggagagugggacuguau

SEQ ID NO: 293137 - RNA, 22 nt, Human
ucagugucugugggcaggaugg

SEQ ID NO: 293138 - RNA, 22 nt, Human
aacaguuuaucaaguuuuuaca

SEQ ID NO: 293139 - RNA, 22 nt, Human
auguuucauuuagauaucaggc

SEQ ID NO: 293140 - RNA, 22 nt, Human
ugcuuuauaacuuaguuuaugg

SEQ ID NO: 293141 - RNA, 22 nt, Human
cauugaaaaacguugacugagu

SEQ ID NO: 293142 - RNA, 22 nt, Human
gagguucaggaaaugggcaaag

SEQ ID NO: 293143 - RNA, 22 nt, Human
acaagucuguuaugcaccugga

SEQ ID NO: 293144 - RNA, 22 nt, Human
acaggcagugggccagauuugu

SEQ ID NO: 293145 - RNA, 23 nt, Human
caggaaaugaauccaggaggaug

SEQ ID NO: 293146 - RNA, 22 nt, Human
uuccuucuaauuuuacaccuga

SEQ ID NO: 293147 - RNA, 22 nt, Human
acuuccugcaaucguccacucc

SEQ ID NO: 293148 - RNA, 22 nt, Human
cucugaaagcaaaacuagagaa

SEQ ID NO: 293149 - RNA, 22 nt, Human
acaguuuauguaaagcugccaa

SEQ ID NO: 293150 - RNA, 22 nt, Human
cagggcucagaagacagaccuc

SEQ ID NO: 293151 - RNA, 22 nt, Human
ccuggcagucaggggaguccuu

SEQ ID NO: 293152 - RNA, 22 nt, Human
uuaccuguuuuacaugcacaac

SEQ ID NO: 293153 - RNA, 22 nt, Human
aggaauguggaagguggcggcg

SEQ ID NO: 293154 - RNA, 19 nt, Human
ucacuucuguuagcaugga

SEQ ID NO: 293155 - RNA, 22 nt, Human
auuaauuuuaccuuuguaaaca

SEQ ID NO: 293156 - RNA, 22 nt, Human
cuagggucaggggccugcgucg

SEQ ID NO: 293157 - RNA, 23 nt, Human
gaggagggucugacaaguguagc

SEQ ID NO: 293158 - RNA, 18 nt, Human
uggcucugccacucaccg

SEQ ID NO: 293159 - RNA, 22 nt, Human
uccugggagcccuugcuccacc

SEQ ID NO: 293160 - RNA, 22 nt, Human
uauguacucaucaacuauugaa

SEQ ID NO: 293161 - RNA, 20 nt, Human
ggguaaaaggcaguguugca

SEQ ID NO: 293162 - RNA, 22 nt, Human
gaggaugguaugaggcaagcaa

SEQ ID NO: 293163 - RNA, 22 nt, Human
acucagagaacauucccagucu

SEQ ID NO: 293164 - RNA, 22 nt, Human
guguguccucuuaacuauuaug

SEQ ID NO: 293165 - RNA, 22 nt, Human
cccugcagccggccagcucauu

SEQ ID NO: 293166 - RNA, 22 nt, Human
uucuuucuuagcaaucuauggu

SEQ ID NO: 293167 - RNA, 22 nt, Human
cuuugcuuuacucccacugugu

SEQ ID NO: 293168 - RNA, 22 nt, Human
ccagugucuucagaguaaaucu

SEQ ID NO: 293169 - RNA, 22 nt, Human
uaccuucaccagcgaauguuug

SEQ ID NO: 293170 - RNA, 22 nt, Human
ucaugacaggugaguuuuuagg

SEQ ID NO: 293171 - RNA, 22 nt, Human
agaucagacuuugugacuagga

SEQ ID NO: 293172 - RNA, 22 nt, Human
gauaauuuuagucugaaaauug

SEQ ID NO: 293173 - RNA, 22 nt, Human
uucuucaugcuguugcugcuug

SEQ ID NO: 293174 - RNA, 22 nt, Human
gagggcucuacucaccacccug

SEQ ID NO: 293175 - RNA, 22 nt, Human
agggaaaguaagcauuucauua

SEQ ID NO: 293176 - RNA, 22 nt, Human
caacaucaguccucaugagaca

SEQ ID NO: 293177 - RNA, 22 nt, Human
acaggcaggagcuccccauucc

SEQ ID NO: 293178 - RNA, 22 nt, Human
ccaggcagagggaauagcaagu

SEQ ID NO: 293179 - RNA, 22 nt, Human
ccuccugguccagcaucucuuu

SEQ ID NO: 293180 - RNA, 22 nt, Human
aucagagaaauggagggcgcuu

SEQ ID NO: 293181 - RNA, 22 nt, Human
uucacauaaugauacaaagcuu

SEQ ID NO: 293182 - RNA, 22 nt, Human
acccagcuaacccuacccugga

SEQ ID NO: 293183 - RNA, 22 nt, Human
ggagcccaagucugcacucggc

SEQ ID NO: 293184 - RNA, 22 nt, Human
uuucugaagggcagcagacucu

SEQ ID NO: 293185 - RNA, 22 nt, Human
uaacacaaaagaauaugugugu

SEQ ID NO: 293186 - RNA, 22 nt, Human
uucaguaaaacacugcaauguc

SEQ ID NO: 293187 - RNA, 22 nt, Human
caguuuauaugucagagcugua

SEQ ID NO: 293188 - RNA, 22 nt, Human
caggccucuauggucagcugag

SEQ ID NO: 293189 - RNA, 18 nt, Human
agcugguggggagacagc

SEQ ID NO: 293190 - RNA, 22 nt, Human
aauuagggaggacaaagguaca

SEQ ID NO: 293191 - RNA, 22 nt, Human
uucaugaagggugaauauaguc

SEQ ID NO: 293192 - RNA, 22 nt, Human
gcuggccucaucacugacuucu

SEQ ID NO: 293193 - RNA, 22 nt, Human
cagggcaggaauuugacauugc

SEQ ID NO: 293194 - RNA, 22 nt, Human
uuauguuugaguauaugacuca

SEQ ID NO: 293195 - RNA, 22 nt, Human
aaagaguucuaugaucuuucca

SEQ ID NO: 293196 - RNA, 22 nt, Human
agcugaagcaacaacaggaugg

SEQ ID NO: 293197 - RNA, 22 nt, Human
agcuaggggaccaagguggccc

SEQ ID NO: 293198 - RNA, 22 nt, Human
caugccauuaacauuagcuagc

SEQ ID NO: 293199 - RNA, 22 nt, Human
gccaggcagcaggaagccagug

SEQ ID NO: 293200 - RNA, 22 nt, Human
cucccagguuccgacgccucuu

SEQ ID NO: 293201 - RNA, 21 nt, Human
uuugcugaagauuuuaggcug

SEQ ID NO: 293202 - RNA, 22 nt, Human
uauguacuacacuagaacauuu

SEQ ID NO: 293203 - RNA, 19 nt, Human
guacagugguaagcuauga

SEQ ID NO: 293204 - RNA, 18 nt, Human
agcagggcauuuugccau

SEQ ID NO: 293205 - RNA, 22 nt, Human
aggcagggaccaguuguuuucu

SEQ ID NO: 293206 - RNA, 19 nt, Human
acuguucuaacuugcagcu

SEQ ID NO: 293207 - RNA, 22 nt, Human
cagacagggcccugugauggua

SEQ ID NO: 293208 - RNA, 22 nt, Human
acaguuuagaaugccacauagu

SEQ ID NO: 293209 - RNA, 22 nt, Human
uugcauuccaguccccacugug

SEQ ID NO: 293210 - RNA, 22 nt, Human
caaggcagcguuccuuucugga

SEQ ID NO: 293211 - RNA, 22 nt, Human
uucuuuguuguacuuuccuaca

SEQ ID NO: 293212 - RNA, 22 nt, Human
cugcucuucccacucacuccca

SEQ ID NO: 293213 - RNA, 18 nt, Human
ucagggaagagaauauga

SEQ ID NO: 293214 - RNA, 22 nt, Human
ccucccuuuuggugucugcaua

SEQ ID NO: 293215 - RNA, 22 nt, Human
aaaagcaauugcaguucuugcc

SEQ ID NO: 293216 - RNA, 21 nt, Human
uucauucauggcauaauauag

SEQ ID NO: 293217 - RNA, 22 nt, Human
cagguggucaggcaaggacacg

SEQ ID NO: 293218 - RNA, 22 nt, Human
gcugggucucucccugguccug

SEQ ID NO: 293219 - RNA, 22 nt, Human
ugggacacaaaccagaccagga

SEQ ID NO: 293220 - RNA, 22 nt, Human
ugggcaggggcccugcuuccgu

SEQ ID NO: 293221 - RNA, 22 nt, Human
uccuggguagccuguccaagau

SEQ ID NO: 293222 - RNA, 22 nt, Human
ucagggcaggcgagcagcugcu

SEQ ID NO: 293223 - RNA, 22 nt, Human
agcuuucucucagccaggcugc

SEQ ID NO: 293224 - RNA, 22 nt, Human
uuguuucuccuggugccugaua

SEQ ID NO: 293225 - RNA, 22 nt, Human
gaggagcugcagggggagucua

SEQ ID NO: 293226 - RNA, 22 nt, Human
ucuuccugcuuuggugaggcuu

SEQ ID NO: 293227 - RNA, 22 nt, Human
gcugccaggggcagcugucuca

SEQ ID NO: 293228 - RNA, 22 nt, Human
aaaguuuuguugauuguggaau

SEQ ID NO: 293229 - RNA, 22 nt, Human
ccuggcagcuccuccccggcgg

SEQ ID NO: 293230 - RNA, 22 nt, Human
agcugcaauuaaagacugugaa

SEQ ID NO: 293231 - RNA, 22 nt, Human
guccagugacaaguagcuggcc

SEQ ID NO: 293232 - RNA, 22 nt, Human
ggcucucuggaggagcucaccc

SEQ ID NO: 293233 - RNA, 22 nt, Human
aguuauuacucuuuaacauauu

SEQ ID NO: 293234 - RNA, 22 nt, Human
gccaggcugcuggcugcugucc

SEQ ID NO: 293235 - RNA, 22 nt, Human
uucuuuuccuacacagcgauuu

SEQ ID NO: 293236 - RNA, 21 nt, Human
acuguucauuugaugaacugg

SEQ ID NO: 293237 - RNA, 22 nt, Human
uccuggccgcuggccccugaga

SEQ ID NO: 293238 - RNA, 22 nt, Human
ucaauuucauucuauuaguuaa

SEQ ID NO: 293239 - RNA, 22 nt, Human
agaaaacagaaagucauuggug

SEQ ID NO: 293240 - RNA, 19 nt, Human
gcuguucugaccaucaccc

SEQ ID NO: 293241 - RNA, 22 nt, Human
auauugagauaagaacugacau

SEQ ID NO: 293242 - RNA, 22 nt, Human
ucugggugacccugggcaaggc

SEQ ID NO: 293243 - RNA, 20 nt, Human
aaacauucauguacaaguga

SEQ ID NO: 293244 - RNA, 23 nt, Human
ucauuucauccagccuugagagu

SEQ ID NO: 293245 - RNA, 22 nt, Human
uuuaaauuauaguuaaugucug

SEQ ID NO: 293246 - RNA, 22 nt, Human
cccacacacauuuaugauagga

SEQ ID NO: 293247 - RNA, 22 nt, Human
aguggggcggacaggaccagga

SEQ ID NO: 293248 - RNA, 22 nt, Human
acagagcaguaagaacacagcu

SEQ ID NO: 293249 - RNA, 22 nt, Human
gacccggcuccaggcccagcag

SEQ ID NO: 293250 - RNA, 22 nt, Human
acauuguaguuguucugcagca

SEQ ID NO: 293251 - RNA, 22 nt, Human
guaaauuauuucaagaucaucu

SEQ ID NO: 293252 - RNA, 22 nt, Human
ugaaaugagauaauuuaagugc

SEQ ID NO: 293253 - RNA, 21 nt, Human
uaaaggcuuuagaauggcaaa

SEQ ID NO: 293254 - RNA, 22 nt, Human
ucauuuuuagcgcgcaaaaguu

SEQ ID NO: 293255 - RNA, 22 nt, Human
cagcucuguucauagauggugc

SEQ ID NO: 293256 - RNA, 22 nt, Human
ucuggcuguuuuagaugagcuc

SEQ ID NO: 293257 - RNA, 22 nt, Human
gaaaguuuucauauauaccaaa

SEQ ID NO: 293258 - RNA, 22 nt, Human
ucuguggccuccuuccacuuac

SEQ ID NO: 293259 - RNA, 22 nt, Human
uuccuggcacacuccugaaugu

SEQ ID NO: 293260 - RNA, 22 nt, Human
ccagggaugcagagguugcagu

SEQ ID NO: 293261 - RNA, 20 nt, Human
agcccuguaaauccccugga

SEQ ID NO: 293262 - RNA, 22 nt, Human
aguuuacagaugcuacaggagc

SEQ ID NO: 293263 - RNA, 21 nt, Human
ggaggaaaaaggaaugacuug

SEQ ID NO: 293264 - RNA, 21 nt, Human
ucuucccucaggauguccugc

SEQ ID NO: 293265 - RNA, 22 nt, Human
uauaauuuaucaugucacaguu

SEQ ID NO: 293266 - RNA, 22 nt, Human
ggcuuucaaggaaaggccucau

SEQ ID NO: 293267 - RNA, 22 nt, Human
cagagggcucggcggccgcucc

SEQ ID NO: 293268 - RNA, 22 nt, Human
agcuguguaagucauguaggug

SEQ ID NO: 293269 - RNA, 22 nt, Human
ggcagaggaagcuggaaguggg

SEQ ID NO: 293270 - RNA, 22 nt, Human
acuuucaugcucugagcacugg

SEQ ID NO: 293271 - RNA, 22 nt, Human
aguaggacuagggguugaggca

SEQ ID NO: 293272 - RNA, 22 nt, Human
auuauaggcuugagccaccgug

SEQ ID NO: 293273 - RNA, 22 nt, Human
uacaguuuguauggucaggaau

SEQ ID NO: 293274 - RNA, 22 nt, Human
uuugacucaagcccucauguua

SEQ ID NO: 293275 - RNA, 23 nt, Human
aaacaugcagcacaugaaugcua

SEQ ID NO: 293276 - RNA, 22 nt, Human
aaacagaugaguuauaauagcc

SEQ ID NO: 293277 - RNA, 22 nt, Human
cagaggcaaaagagguggaggu

SEQ ID NO: 293278 - RNA, 22 nt, Human
cagaugcuuguuggcuggucuc

SEQ ID NO: 293279 - RNA, 22 nt, Human
cccagcuugcccaggacugagg

SEQ ID NO: 293280 - RNA, 22 nt, Human
uucucuuuauguauuuaguggg

SEQ ID NO: 293281 - RNA, 22 nt, Human
uaccugcagcgggaauccauua

SEQ ID NO: 293282 - RNA, 22 nt, Human
ucaauuuauguggcuauucauu

SEQ ID NO: 293283 - RNA, 22 nt, Human
ucacugcgcugacugcuacgau

SEQ ID NO: 293284 - RNA, 22 nt, Human
gcugggcuugguuucccugcuu

SEQ ID NO: 293285 - RNA, 18 nt, Human
ucuuccaacacugacacc

SEQ ID NO: 293286 - RNA, 22 nt, Human
auacucagcugcuagacagaag

SEQ ID NO: 293287 - RNA, 22 nt, Human
guacaaaugagaguucuguuuu

SEQ ID NO: 293288 - RNA, 22 nt, Human
aauugcuucccaagggaggucu

SEQ ID NO: 293289 - RNA, 22 nt, Human
ccagacagcaguuaaaggacau

SEQ ID NO: 293290 - RNA, 22 nt, Human
agcagggccaacaguaaacacc

SEQ ID NO: 293291 - RNA, 22 nt, Human
cagcacacagugacucgcaccu

SEQ ID NO: 293292 - RNA, 22 nt, Human
gccaggcaugggcuucugggcg

SEQ ID NO: 293293 - RNA, 22 nt, Human
agaugguuuugucuuuaugauu

SEQ ID NO: 293294 - RNA, 22 nt, Human
agcuccugaaaauccagacugg

SEQ ID NO: 293295 - RNA, 22 nt, Human
aggcaggucacaugcuuggcga

SEQ ID NO: 293296 - RNA, 19 nt, Human
gaggugucuuuccugagua

SEQ ID NO: 293297 - RNA, 22 nt, Human
agcagggcuucugugccugugc

SEQ ID NO: 293298 - RNA, 22 nt, Human
uuacaagauaaccugaugcugu

SEQ ID NO: 293299 - RNA, 22 nt, Human
uauguagguaaacacagacaua

SEQ ID NO: 293300 - RNA, 22 nt, Human
ccauuguaaagaguauacuuug

SEQ ID NO: 293301 - RNA, 22 nt, Human
ucaaauaaugccauucaucauc

SEQ ID NO: 293302 - RNA, 22 nt, Human
uguguccuguccccuugcugcu

SEQ ID NO: 293303 - RNA, 22 nt, Human
guuuucaugucuauugggcaua

SEQ ID NO: 293304 - RNA, 22 nt, Human
uacaacauuuacguuaggcugu

SEQ ID NO: 293305 - RNA, 22 nt, Human
ccugaaaugaguucugcucacu

SEQ ID NO: 293306 - RNA, 22 nt, Human
acacugaauguuuaagaacuug

SEQ ID NO: 293307 - RNA, 22 nt, Human
gggcaggugccagcucccuguc

SEQ ID NO: 293308 - RNA, 22 nt, Human
cauugcaacuucaaacuccugg

SEQ ID NO: 293309 - RNA, 22 nt, Human
uuaguguuuaaagguuucagag

SEQ ID NO: 293310 - RNA, 22 nt, Human
gcuuugugugaaguccauggcg

SEQ ID NO: 293311 - RNA, 22 nt, Human
acauuucuggaguuucucaaca

SEQ ID NO: 293312 - RNA, 18 nt, Human
ggaagaaaaggaacucag

SEQ ID NO: 293313 - RNA, 22 nt, Human
ucuggcagcucaguucaggucu

SEQ ID NO: 293314 - RNA, 22 nt, Human
uucuuucugggaagaguucaga

SEQ ID NO: 293315 - RNA, 22 nt, Human
cuucuuucaagaauggauuagg

SEQ ID NO: 293316 - RNA, 22 nt, Human
uuuagcauauuuaaggaaugau

SEQ ID NO: 293317 - RNA, 22 nt, Human
ucuucacagaugcauauacuuc

SEQ ID NO: 293318 - RNA, 22 nt, Human
ucuguggcgcauaguugucucu

SEQ ID NO: 293319 - RNA, 22 nt, Human
cacaggugcaagaaguugcagu

SEQ ID NO: 293320 - RNA, 19 nt, Human
acuggcagcuguagucugu

SEQ ID NO: 293321 - RNA, 22 nt, Human
acuuucaaauaucaugauucua

SEQ ID NO: 293322 - RNA, 22 nt, Human
gguggggcucagcaaucugugu

SEQ ID NO: 293323 - RNA, 22 nt, Human
gagagaaaggcuugcaggcugu

SEQ ID NO: 293324 - RNA, 22 nt, Human
uacauaaugagcuaguuaaguu

SEQ ID NO: 293325 - RNA, 23 nt, Human
uuauaaauauuuucagguguguu

SEQ ID NO: 293326 - RNA, 22 nt, Human
gccuggccugaacuaggaggug

SEQ ID NO: 293327 - RNA, 22 nt, Human
uacauucacaguuguucaucuc

SEQ ID NO: 293328 - RNA, 22 nt, Human
ucagugucuugggcuugaaugc

SEQ ID NO: 293329 - RNA, 22 nt, Human
caguuaaacgaugaugggguca

SEQ ID NO: 293330 - RNA, 22 nt, Human
acugucaugugcuaacugucca

SEQ ID NO: 293331 - RNA, 22 nt, Human
gacagguugaaguaucaaaggu

SEQ ID NO: 293332 - RNA, 20 nt, Human
aguuuauuccaggagaacug

SEQ ID NO: 293333 - RNA, 22 nt, Human
acuccuggguuccggagauucu

SEQ ID NO: 293334 - RNA, 22 nt, Human
ucaguuaagaggccacggcagu

SEQ ID NO: 293335 - RNA, 22 nt, Human
aggaauguuaagaaggucuacc

SEQ ID NO: 293336 - RNA, 22 nt, Human
aaucaaagaaugggcuaguugg

SEQ ID NO: 293337 - RNA, 22 nt, Human
aaauugcugaccaaguauauuc

SEQ ID NO: 293338 - RNA, 22 nt, Human
acuuuaaaacugaucaucagag

SEQ ID NO: 293339 - RNA, 22 nt, Human
auguuugucaggauuguaauua

SEQ ID NO: 293340 - RNA, 21 nt, Human
aguguccuuuuacugugaaua

SEQ ID NO: 293341 - RNA, 22 nt, Human
cuucaaaagccagaagccugcg

SEQ ID NO: 293342 - RNA, 22 nt, Human
gccaggcgggucucaaacuccu

SEQ ID NO: 293343 - RNA, 22 nt, Human
aagguggugcuucugcuccucu

SEQ ID NO: 293344 - RNA, 19 nt, Human
cucuccaccuaacagguau

SEQ ID NO: 293345 - RNA, 22 nt, Human
uuccaagaguaaauucaaauug

SEQ ID NO: 293346 - RNA, 22 nt, Human
cugcaggguuuuucaaggacaa

SEQ ID NO: 293347 - RNA, 20 nt, Human
ucauggcugcugagagguuc

SEQ ID NO: 293348 - RNA, 22 nt, Human
gauugcugccagcguguccgug

SEQ ID NO: 293349 - RNA, 22 nt, Human
auuguggugucaguuauaggca

SEQ ID NO: 293350 - RNA, 22 nt, Human
uguccuuuuggcugucuauggu

SEQ ID NO: 293351 - RNA, 22 nt, Human
uucugggugcaacucuguucug

SEQ ID NO: 293352 - RNA, 22 nt, Human
aaagcuaugaggcaugcauuuc

SEQ ID NO: 293353 - RNA, 22 nt, Human
aagcuguucucuaaguuucaug

SEQ ID NO: 293354 - RNA, 22 nt, Human
aacaugugucuugcauuucuug

SEQ ID NO: 293355 - RNA, 22 nt, Human
gaggccugggagccuguccucc

SEQ ID NO: 293356 - RNA, 22 nt, Human
uaauuagaguuugguaaacaau

SEQ ID NO: 293357 - RNA, 22 nt, Human
cuugaaauccagauuucagagg

SEQ ID NO: 293358 - RNA, 20 nt, Human
caaguguuauugugcauuua

SEQ ID NO: 293359 - RNA, 22 nt, Human
uggcagguccacucacagaucu

SEQ ID NO: 293360 - RNA, 22 nt, Human
uguguccuuccaguuuuuccug

SEQ ID NO: 293361 - RNA, 22 nt, Human
uggagagcaagucgcagacaug

SEQ ID NO: 293362 - RNA, 21 nt, Human
accucaagcaacaaccaaggu

SEQ ID NO: 293363 - RNA, 22 nt, Human
gcaaacaucuuuauuuggcaag

SEQ ID NO: 293364 - RNA, 22 nt, Human
gcuggcaggauagaagucuaau

SEQ ID NO: 293365 - RNA, 19 nt, Human
acuaaaaaugauguuugag

SEQ ID NO: 293366 - RNA, 22 nt, Human
ucucaagcuaguguuuauagua

SEQ ID NO: 293367 - RNA, 22 nt, Human
uuucagauuaucucaacuuugg

SEQ ID NO: 293368 - RNA, 22 nt, Human
cuguggcugcgcccugggggag

SEQ ID NO: 293369 - RNA, 22 nt, Human
uuucagaaauuauauuagaugc

SEQ ID NO: 293370 - RNA, 22 nt, Human
caggaggcauauuuaaauccaa

SEQ ID NO: 293371 - RNA, 22 nt, Human
aaucagacaguucuggauucaa

SEQ ID NO: 293372 - RNA, 19 nt, Human
ccucccacggauuccuucc

SEQ ID NO: 293373 - RNA, 22 nt, Human
uggcaagggauuguggagaacu

SEQ ID NO: 293374 - RNA, 22 nt, Human
uuucuauugaucuaauaaacau

SEQ ID NO: 293375 - RNA, 22 nt, Human
agcucagcccuccugugcagcu

SEQ ID NO: 293376 - RNA, 22 nt, Human
gaggaaaaugcaacaggaaugc

SEQ ID NO: 293377 - RNA, 22 nt, Human
aucugagacugaguuuggauuu

SEQ ID NO: 293378 - RNA, 22 nt, Human
guuuuuacuaagguugcuaagu

SEQ ID NO: 293379 - RNA, 22 nt, Human
gcugcuguuccuccaguggauc

SEQ ID NO: 293380 - RNA, 22 nt, Human
gagcaaagcuuuuagggccuuu

SEQ ID NO: 293381 - RNA, 22 nt, Human
acauguaagacuagcuuaaagu

SEQ ID NO: 293382 - RNA, 22 nt, Human
aagaauguggcauuuauuuaua

SEQ ID NO: 293383 - RNA, 22 nt, Human
augaaugggucauuauuugauc

SEQ ID NO: 293384 - RNA, 22 nt, Human
uucaaaauccgggaggcgcccc

SEQ ID NO: 293385 - RNA, 22 nt, Human
gggaccugccauugcucacagg

SEQ ID NO: 293386 - RNA, 22 nt, Human
cugaaaaauauguuuuggagaa

SEQ ID NO: 293387 - RNA, 22 nt, Human
guccugagaccauggccuuagu

SEQ ID NO: 293388 - RNA, 22 nt, Human
acagauuuauugaagcugcugc

SEQ ID NO: 293389 - RNA, 22 nt, Human
cauuugaaccuggauguucuua

SEQ ID NO: 293390 - RNA, 22 nt, Human
uccugugaccagcuuccaugcu

SEQ ID NO: 293391 - RNA, 22 nt, Human
caggaaagccgagugccauagg

SEQ ID NO: 293392 - RNA, 22 nt, Human
uacagugcgggugcgggccucu

SEQ ID NO: 293393 - RNA, 22 nt, Human
caaaugaagguggugggucauu

SEQ ID NO: 293394 - RNA, 22 nt, Human
gaucuucuauguaaugaagugu

SEQ ID NO: 293395 - RNA, 20 nt, Human
cugagcccccagccugcagg

SEQ ID NO: 293396 - RNA, 22 nt, Human
auguuuauguugggcuauauuu

SEQ ID NO: 293397 - RNA, 22 nt, Human
gcaaggauguacugcaauagga

SEQ ID NO: 293398 - RNA, 22 nt, Human
gaagugaagagauuagaaauca

SEQ ID NO: 293399 - RNA, 22 nt, Human
uuauuacagucccagggaguag

SEQ ID NO: 293400 - RNA, 22 nt, Human
agggccagggaagcuguauuuu

SEQ ID NO: 293401 - RNA, 22 nt, Human
aucagguagauuuaauauucug

SEQ ID NO: 293402 - RNA, 22 nt, Human
cuagccugggauuugaacuuau

SEQ ID NO: 293403 - RNA, 22 nt, Human
aaaaagauguccugaaguuuag

SEQ ID NO: 293404 - RNA, 22 nt, Human
uucugggacaucuggacaguuu

SEQ ID NO: 293405 - RNA, 22 nt, Human
ucagggcaagucucagaagguu

SEQ ID NO: 293406 - RNA, 22 nt, Human
uuauuccaauuucuccuacaaa

SEQ ID NO: 293407 - RNA, 22 nt, Human
cuucuuuacuuucuagaaauaa

SEQ ID NO: 293408 - RNA, 22 nt, Human
acaugacaccucuggcugggug

SEQ ID NO: 293409 - RNA, 22 nt, Human
uccaggcauagaaggcacgcac

SEQ ID NO: 293410 - RNA, 22 nt, Human
gauauuuacaaauuugccaaua

SEQ ID NO: 293411 - RNA, 22 nt, Human
uacugucuggguucccaagcaa

SEQ ID NO: 293412 - RNA, 22 nt, Human
aagcuuuaugacuuggagacag

SEQ ID NO: 293413 - RNA, 22 nt, Human
gauucuugggccuucugaaguu

SEQ ID NO: 293414 - RNA, 22 nt, Human
aguaaacacuaaaaugacugcg

SEQ ID NO: 293415 - RNA, 22 nt, Human
agacagugcuaucccaucugug

SEQ ID NO: 293416 - RNA, 22 nt, Human
uuaguuauacuacugaauggag

SEQ ID NO: 293417 - RNA, 22 nt, Human
cccaggcacucuuggucauuuu

SEQ ID NO: 293418 - RNA, 22 nt, Human
caccuguuagcucuaauuuucu

SEQ ID NO: 293419 - RNA, 22 nt, Human
gaguuaaaggaaaauaacuuua

SEQ ID NO: 293420 - RNA, 22 nt, Human
acagcaugagaguagcaaaagg

SEQ ID NO: 293421 - RNA, 22 nt, Human
aucagacaauuguugaguacug

SEQ ID NO: 293422 - RNA, 22 nt, Human
ggaacuugcaaccucuggucac

SEQ ID NO: 293423 - RNA, 22 nt, Human
ggcaggcagauggcugcaccaa

SEQ ID NO: 293424 - RNA, 22 nt, Human
cccgggaggaggaaguugcagu

SEQ ID NO: 293425 - RNA, 22 nt, Human
ggcucugaauuauuccugaguc

SEQ ID NO: 293426 - RNA, 22 nt, Human
gcauucuuagggccuggggugu

SEQ ID NO: 293427 - RNA, 22 nt, Human
cuauugcuaucauucugguggu

SEQ ID NO: 293428 - RNA, 22 nt, Human
aagucucuggcaaaugaucuug

SEQ ID NO: 293429 - RNA, 22 nt, Human
gcuguggcuccaauggugagcc

SEQ ID NO: 293430 - RNA, 22 nt, Human
uacauucuacuuuuucacuccc

SEQ ID NO: 293431 - RNA, 22 nt, Human
agaaauuauuagugaauagucu

SEQ ID NO: 293432 - RNA, 22 nt, Human
cugcaaaagucauugugguuuu

SEQ ID NO: 293433 - RNA, 19 nt, Human
agucaguucugaggaggaa

SEQ ID NO: 293434 - RNA, 22 nt, Human
ggcucugaacauggggaggagu

SEQ ID NO: 293435 - RNA, 22 nt, Human
uggagcagcuaagccucugaga

SEQ ID NO: 293436 - RNA, 22 nt, Human
aggcagcuggaggcagagacua

SEQ ID NO: 293437 - RNA, 22 nt, Human
aaggagaaaugguagaugugca

SEQ ID NO: 293438 - RNA, 22 nt, Human
cagacaggaauucuggcguggu

SEQ ID NO: 293439 - RNA, 18 nt, Human
uuucacaaccuccagagg

SEQ ID NO: 293440 - RNA, 22 nt, Human
aucuuucagggccauuuguauu

SEQ ID NO: 293441 - RNA, 22 nt, Human
auaacaugaccugugcuucaca

SEQ ID NO: 293442 - RNA, 22 nt, Human
acaccauacucauguugguucc

SEQ ID NO: 293443 - RNA, 18 nt, Human
uuugggauccucuuuucu

SEQ ID NO: 293444 - RNA, 20 nt, Human
auucagaauaggcauguaaa

SEQ ID NO: 293445 - RNA, 22 nt, Human
accuccuggcugcucauggaac

SEQ ID NO: 293446 - RNA, 22 nt, Human
cagcuuuggcccagucgggagg

SEQ ID NO: 293447 - RNA, 22 nt, Human
uacaaaguagaaauucaguaaa

SEQ ID NO: 293448 - RNA, 22 nt, Human
gaggccugguuugcaugagaau

SEQ ID NO: 293449 - RNA, 22 nt, Human
auucacaaaaugauauagauac

SEQ ID NO: 293450 - RNA, 22 nt, Human
guccagagauggacgagcagau

SEQ ID NO: 293451 - RNA, 17 nt, Human
uuccagcauguuacuaa

SEQ ID NO: 293452 - RNA, 22 nt, Human
gaaaacauccagagauagaccu

SEQ ID NO: 293453 - RNA, 22 nt, Human
aucucagaaacauaucuaaucc

SEQ ID NO: 293454 - RNA, 22 nt, Human
acuugguugcuucugaaaugac

SEQ ID NO: 293455 - RNA, 17 nt, Human
cgggcauggagggcagg

SEQ ID NO: 293456 - RNA, 21 nt, Human
agggaaagaaaaugagcuaau

SEQ ID NO: 293457 - RNA, 22 nt, Human
auuaauauugguucauuagcug

SEQ ID NO: 293458 - RNA, 22 nt, Human
ugcuggagagccuuggccaagg

SEQ ID NO: 293459 - RNA, 22 nt, Human
auuaaauuagcaaacugugaaa

SEQ ID NO: 293460 - RNA, 22 nt, Human
uugcagggcaucuaugucuggu

SEQ ID NO: 293461 - RNA, 22 nt, Human
auaaacagaguaguugcuacug

SEQ ID NO: 293462 - RNA, 22 nt, Human
ugacagacagcuucucauuuua

SEQ ID NO: 293463 - RNA, 22 nt, Human
gggaggaaggcuugggugagua

SEQ ID NO: 293464 - RNA, 22 nt, Human
aaagugguugcugucagccucu

SEQ ID NO: 293465 - RNA, 22 nt, Human
caguccugggcacagcccuggg

SEQ ID NO: 293466 - RNA, 22 nt, Human
uauacacauguguguauucaua

SEQ ID NO: 293467 - RNA, 22 nt, Human
acuuucuucuacuacuuggaga

SEQ ID NO: 293468 - RNA, 22 nt, Human
uugcaacaucugaacauuuauc

SEQ ID NO: 293469 - RNA, 22 nt, Human
uacagguggaucacuaguauag

SEQ ID NO: 293470 - RNA, 22 nt, Human
uuuuuagaguguuaccaguaua

SEQ ID NO: 293471 - RNA, 22 nt, Human
acaagagcauugcagguguguu

SEQ ID NO: 293472 - RNA, 22 nt, Human
agucaguuucccuggaaagcag

SEQ ID NO: 293473 - RNA, 22 nt, Human
auuagggcuggaugcaaggaaa

SEQ ID NO: 293474 - RNA, 22 nt, Human
aguauacaaauaaauguguaau

SEQ ID NO: 293475 - RNA, 21 nt, Human
cagagcagcguucugcugugg

SEQ ID NO: 293476 - RNA, 22 nt, Human
cuucucccaaguaugcaguuug

SEQ ID NO: 293477 - RNA, 22 nt, Human
ucuugggauagugucucauggc

SEQ ID NO: 293478 - RNA, 22 nt, Human
uuaaauuaggacucuaguucug

SEQ ID NO: 293479 - RNA, 22 nt, Human
aaauccuaccaagaaauucccu

SEQ ID NO: 293480 - RNA, 22 nt, Human
ggucuggauuucugcuucuuuc

SEQ ID NO: 293481 - RNA, 22 nt, Human
auacagauugcuauacuuacaa

SEQ ID NO: 293482 - RNA, 22 nt, Human
caguuaaaaugugcuauaagaa

SEQ ID NO: 293483 - RNA, 22 nt, Human
aauauguuccacuuaaagcugg

SEQ ID NO: 293484 - RNA, 22 nt, Human
accugagaccuaaucugacugu

SEQ ID NO: 293485 - RNA, 22 nt, Human
uggaaagcaguucuuagaaucg

SEQ ID NO: 293486 - RNA, 22 nt, Human
uaguuucagcuccuucauccug

SEQ ID NO: 293487 - RNA, 22 nt, Human
aagagcauggaauggagaucca

SEQ ID NO: 293488 - RNA, 22 nt, Human
uccaugagcuagggauucauca

SEQ ID NO: 293489 - RNA, 22 nt, Human
acaagauuuagcuuaaagggcu

SEQ ID NO: 293490 - RNA, 22 nt, Human
aaccagaucgacuguuaacagc

SEQ ID NO: 293491 - RNA, 22 nt, Human
gcagggcauagaggcacggagg

SEQ ID NO: 293492 - RNA, 22 nt, Human
auucaguuucauggcacagcua

SEQ ID NO: 293493 - RNA, 20 nt, Human
ccagcauguacacaugugga

SEQ ID NO: 293494 - RNA, 18 nt, Human
uucauguuggcuuaggga

SEQ ID NO: 293495 - RNA, 22 nt, Human
ucugaauuuugaugugcauuga

SEQ ID NO: 293496 - RNA, 22 nt, Human
aguguccuuguuauuacugcuc

SEQ ID NO: 293497 - RNA, 22 nt, Human
agggcuccaggggcugggugac

SEQ ID NO: 293498 - RNA, 22 nt, Human
cuagagaagagguuaagcauga

SEQ ID NO: 293499 - RNA, 22 nt, Human
uguuuccauggugacagcagcu

SEQ ID NO: 293500 - RNA, 22 nt, Human
cagcuuuaggacucauaauaaa

SEQ ID NO: 293501 - RNA, 22 nt, Human
gguggcagaggugcaucagccc

SEQ ID NO: 293502 - RNA, 22 nt, Human
cauaaucccaggcuugcauuca

SEQ ID NO: 293503 - RNA, 22 nt, Human
uaucuuuguaucaaucuccauu

SEQ ID NO: 293504 - RNA, 20 nt, Human
caccuggcugacugucucca

SEQ ID NO: 293505 - RNA, 22 nt, Human
aguaucagaugugauuaaaggg

SEQ ID NO: 293506 - RNA, 22 nt, Human
acuaaauauuugagagguguag

SEQ ID NO: 293507 - RNA, 22 nt, Human
ugggcucaaucugcuucuguuu

SEQ ID NO: 293508 - RNA, 22 nt, Human
cccacccacucugaccagaagc

SEQ ID NO: 293509 - RNA, 23 nt, Human
agcagggccagaauacuugcugu

SEQ ID NO: 293510 - RNA, 22 nt, Human
uggaggcaguuuaagucugaga

SEQ ID NO: 293511 - RNA, 22 nt, Human
uugguacauguuaaggaagagu

SEQ ID NO: 293512 - RNA, 22 nt, Human
auuguuggguaguuuguucagc

SEQ ID NO: 293513 - RNA, 22 nt, Human
ggcuuuaucaaaugagacccug

SEQ ID NO: 293514 - RNA, 22 nt, Human
aguuuauucugcuuggcccucc

SEQ ID NO: 293515 - RNA, 22 nt, Human
cccagcagcuugcacagugcug

SEQ ID NO: 293516 - RNA, 22 nt, Human
cagcagccucuugugccugugg

SEQ ID NO: 293517 - RNA, 22 nt, Human
ggaauguucuggucugguucau

SEQ ID NO: 293518 - RNA, 22 nt, Human
acacauuuauuacaugcaugug

SEQ ID NO: 293519 - RNA, 22 nt, Human
cacaucugacuuccagugcagg

SEQ ID NO: 293520 - RNA, 21 nt, Human
aagaugauauuuuaucuguag

SEQ ID NO: 293521 - RNA, 22 nt, Human
uggucauuaauucuuaccuuua

SEQ ID NO: 293522 - RNA, 22 nt, Human
ggcaaacacaccucggugagaa

SEQ ID NO: 293523 - RNA, 22 nt, Human
ggaugcaggaacacagcgaccu

SEQ ID NO: 293524 - RNA, 22 nt, Human
uggcaggugcacuuuugguuuc

SEQ ID NO: 293525 - RNA, 22 nt, Human
uuucuucaauugcuaacaagga

SEQ ID NO: 293526 - RNA, 22 nt, Human
ccaggcagggcucaaggaaccu

SEQ ID NO: 293527 - RNA, 22 nt, Human
aagggcucccugccugaggugg

SEQ ID NO: 293528 - RNA, 22 nt, Human
gacuacucaaacuuucucuaua

SEQ ID NO: 293529 - RNA, 21 nt, Human
cagaggcagguccugggacgg

SEQ ID NO: 293530 - RNA, 22 nt, Human
uauguuuuucagacguccuaca

SEQ ID NO: 293531 - RNA, 22 nt, Human
uuucugagaaauuaaacacuuu

SEQ ID NO: 293532 - RNA, 22 nt, Human
uauuucugucagccagauaugg

SEQ ID NO: 293533 - RNA, 21 nt, Human
aagugguuuagguuaccgggg

SEQ ID NO: 293534 - RNA, 22 nt, Human
uaaauguauaggcacuaaaccu

SEQ ID NO: 293535 - RNA, 22 nt, Human
cuuuggaggaaaauugagguca

SEQ ID NO: 293536 - RNA, 22 nt, Human
cacagggagaggaacagcgcag

SEQ ID NO: 293537 - RNA, 22 nt, Human
ugcaaacaacuguuuaaugcug

SEQ ID NO: 293538 - RNA, 22 nt, Human
ucagggaagagagaucuccuag

SEQ ID NO: 293539 - RNA, 22 nt, Human
acaggcacugucaagucaugaa

SEQ ID NO: 293540 - RNA, 22 nt, Human
cagccagaaccuaggaugagcu

SEQ ID NO: 293541 - RNA, 22 nt, Human
uuugggaaauaguagaaaaugu

SEQ ID NO: 293542 - RNA, 22 nt, Human
aggccaggggugagcacuucug

SEQ ID NO: 293543 - RNA, 22 nt, Human
uggcuggaguauaggaguagga

SEQ ID NO: 293544 - RNA, 18 nt, Human
cuccagggaacucaguca

SEQ ID NO: 293545 - RNA, 22 nt, Human
uccuguuguucgccugcgaugg

SEQ ID NO: 293546 - RNA, 22 nt, Human
aauuuagauugauaaacaugga

SEQ ID NO: 293547 - RNA, 22 nt, Human
augaaaagggagugauauuugu

SEQ ID NO: 293548 - RNA, 22 nt, Human
acuuucaauucccuuagcaacu

SEQ ID NO: 293549 - RNA, 22 nt, Human
uucugugaggacuucucaagga

SEQ ID NO: 293550 - RNA, 22 nt, Human
uucaguuucaaauccugugaag

SEQ ID NO: 293551 - RNA, 20 nt, Human
caugugucaguucucaccca

SEQ ID NO: 293552 - RNA, 22 nt, Human
aucacaaaggcugcuucaugau

SEQ ID NO: 293553 - RNA, 22 nt, Human
ucagggaacaauguuauggcuu

SEQ ID NO: 293554 - RNA, 22 nt, Human
uugggaucucaaauccagcuau

SEQ ID NO: 293555 - RNA, 21 nt, Human
gggaggaagcugcuucucucu

SEQ ID NO: 293556 - RNA, 23 nt, Human
cucaccaagcgccgccgcugugu

SEQ ID NO: 293557 - RNA, 22 nt, Human
augcaugaaagaauccaagccu

SEQ ID NO: 293558 - RNA, 22 nt, Human
uuguguacuacaguaugccaca

SEQ ID NO: 293559 - RNA, 22 nt, Human
agugugagaugauugaggagca

SEQ ID NO: 293560 - RNA, 22 nt, Human
aaugggcuuuggccaguaggag

SEQ ID NO: 293561 - RNA, 22 nt, Human
aagcccucauuagccauagccc

SEQ ID NO: 293562 - RNA, 19 nt, Human
aggaaggaaccugagucug

SEQ ID NO: 293563 - RNA, 21 nt, Human
uguguaaaguugaaauccugu

SEQ ID NO: 293564 - RNA, 22 nt, Human
aauuuaagagcauagcuccaac

SEQ ID NO: 293565 - RNA, 22 nt, Human
ccacugccagccgcccggaggc

SEQ ID NO: 293566 - RNA, 22 nt, Human
ucacuuuacagcuaagguuguu

SEQ ID NO: 293567 - RNA, 22 nt, Human
ucuuucccuguguuagccugua

SEQ ID NO: 293568 - RNA, 22 nt, Human
agcaauaugacauugcuacauc

SEQ ID NO: 293569 - RNA, 22 nt, Human
cuucguuuuuaguagcaauguu

SEQ ID NO: 293570 - RNA, 22 nt, Human
gcauucuugguaugaaggacag

SEQ ID NO: 293571 - RNA, 22 nt, Human
uggcaguggcucagagugcaga

SEQ ID NO: 293572 - RNA, 22 nt, Human
acagggauuuuccaggcuaccc

SEQ ID NO: 293573 - RNA, 22 nt, Human
aagauuuauuagaugcuuaccu

SEQ ID NO: 293574 - RNA, 22 nt, Human
ucagagagccucaggcacugcc

SEQ ID NO: 293575 - RNA, 22 nt, Human
aacuuuaucggaacagguacuc

SEQ ID NO: 293576 - RNA, 23 nt, Human
ggcacucggccgugaacucgugc

SEQ ID NO: 293577 - RNA, 22 nt, Human
uuuguguuguacuucugugcau

SEQ ID NO: 293578 - RNA, 16 nt, Human
uggcuuggguuucaug

SEQ ID NO: 293579 - RNA, 23 nt, Human
agucuuacugucccagaacaggg

SEQ ID NO: 293580 - RNA, 22 nt, Human
aauuaagaaaauguuuuaugau

SEQ ID NO: 293581 - RNA, 22 nt, Human
cugggucugggccuccuggagu

SEQ ID NO: 293582 - RNA, 22 nt, Human
gcucucacuuuagguuggaccg

SEQ ID NO: 293583 - RNA, 22 nt, Human
cauguguccuagcuauucuccu

SEQ ID NO: 293584 - RNA, 22 nt, Human
gcccaggauaaugcugucccug

SEQ ID NO: 293585 - RNA, 22 nt, Human
uuccagaagauggcagcaaagg

SEQ ID NO: 293586 - RNA, 22 nt, Human
uuucacauacaguguauaguag

SEQ ID NO: 293587 - RNA, 22 nt, Human
uuugcuuugggagguugucugg

SEQ ID NO: 293588 - RNA, 22 nt, Human
ucuagaaaguacuagagcuggu

SEQ ID NO: 293589 - RNA, 22 nt, Human
gcuuuauuuugugagggauuac

SEQ ID NO: 293590 - RNA, 22 nt, Human
gaguugaucauuauuugguuuc

SEQ ID NO: 293591 - RNA, 22 nt, Human
cauguaaagcauccuucuaggg

SEQ ID NO: 293592 - RNA, 19 nt, Human
aaggugguuugucucugua

SEQ ID NO: 293593 - RNA, 22 nt, Human
agagccaguuaagcacuuacag

SEQ ID NO: 293594 - RNA, 22 nt, Human
caggcucacuguaaggucagcu

SEQ ID NO: 293595 - RNA, 22 nt, Human
uauuucagcccuacuacuuggc

SEQ ID NO: 293596 - RNA, 22 nt, Human
uuuguagauucauugaacuuuu

SEQ ID NO: 293597 - RNA, 22 nt, Human
cagggcaguaacgggaacaucu

SEQ ID NO: 293598 - RNA, 22 nt, Human
aaaugacacucauucaguguca

SEQ ID NO: 293599 - RNA, 22 nt, Human
gcacccagaggucagcagugcu

SEQ ID NO: 293600 - RNA, 22 nt, Human
cuccuggaccagggcuauuggg

SEQ ID NO: 293601 - RNA, 22 nt, Human
agcagggccuggcacuccuggg

SEQ ID NO: 293602 - RNA, 22 nt, Human
gagguguccucagccaacucug

SEQ ID NO: 293603 - RNA, 22 nt, Human
ucuuuauuucugaaucccccau

SEQ ID NO: 293604 - RNA, 19 nt, Human
gauagcugaugaccaucau

SEQ ID NO: 293605 - RNA, 22 nt, Human
auucauuuagguauucacuuac

SEQ ID NO: 293606 - RNA, 22 nt, Human
cuguguccucccgcugcaccca

SEQ ID NO: 293607 - RNA, 22 nt, Human
aaaguuuucugccuucauuaga

SEQ ID NO: 293608 - RNA, 21 nt, Human
ugggugggcagagucucuuca

SEQ ID NO: 293609 - RNA, 22 nt, Human
uuguagaauuuggaucucggca

SEQ ID NO: 293610 - RNA, 22 nt, Human
uucaugaaagacagcaacugug

SEQ ID NO: 293611 - RNA, 22 nt, Human
uauucuuguaccuuaaaugauu

SEQ ID NO: 293612 - RNA, 22 nt, Human
auagucuuacuuuucucugcua

SEQ ID NO: 293613 - RNA, 22 nt, Human
auuaggucauggggaggcccua

SEQ ID NO: 293614 - RNA, 21 nt, Human
gcuggcuuccugagggcugag

SEQ ID NO: 293615 - RNA, 22 nt, Human
ccagcccaaacaagccgccuuc

SEQ ID NO: 293616 - RNA, 22 nt, Human
caauucuuucagcugcauuugu

SEQ ID NO: 293617 - RNA, 20 nt, Human
caggagggacauuucagcau

SEQ ID NO: 293618 - RNA, 22 nt, Human
uacuuacagaaggaagcaauug

SEQ ID NO: 293619 - RNA, 22 nt, Human
cagcucuccacccuccugguuc

SEQ ID NO: 293620 - RNA, 22 nt, Human
ucugaggcugaauggacuccgu

SEQ ID NO: 293621 - RNA, 21 nt, Human
ggagaaggacaauguugagua

SEQ ID NO: 293622 - RNA, 22 nt, Human
acaaaguagucaaaguagauga

SEQ ID NO: 293623 - RNA, 22 nt, Human
ucuuuucuccagaccugggauc

SEQ ID NO: 293624 - RNA, 22 nt, Human
aacugcucauuugagaguaugc

SEQ ID NO: 293625 - RNA, 21 nt, Human
uaaauaauaaguugcugagau

SEQ ID NO: 293626 - RNA, 22 nt, Human
aauuaaaagauaacccaugagu

SEQ ID NO: 293627 - RNA, 22 nt, Human
agaaaugaagagagucaagguu

SEQ ID NO: 293628 - RNA, 22 nt, Human
uccaaggacucuugucagcugu

SEQ ID NO: 293629 - RNA, 22 nt, Human
ccugaaaauauccucuccuuug

SEQ ID NO: 293630 - RNA, 22 nt, Human
cuuccagaggaacucugcagug

SEQ ID NO: 293631 - RNA, 22 nt, Human
ucacaauuuggauacagcuaug

SEQ ID NO: 293632 - RNA, 22 nt, Human
uggaccugagccuggcccugcc

SEQ ID NO: 293633 - RNA, 22 nt, Human
ugggguggauagaaagugaugu

SEQ ID NO: 293634 - RNA, 22 nt, Human
caaggcaggccaguuucaaggc

SEQ ID NO: 293635 - RNA, 22 nt, Human
uccaaggcuccggcccuggcgu

SEQ ID NO: 293636 - RNA, 22 nt, Human
uagucaguaugaaauugcucaa

SEQ ID NO: 293637 - RNA, 22 nt, Human
aguggguguagucuuccuccug

SEQ ID NO: 293638 - RNA, 20 nt, Human
ugaucaugugaaagucaugu

SEQ ID NO: 293639 - RNA, 22 nt, Human
agaggacagguuuuccaugggc

SEQ ID NO: 293640 - RNA, 22 nt, Human
acuguacucuuauagccaucug

SEQ ID NO: 293641 - RNA, 22 nt, Human
uuauacacaauucuuuuacuac

SEQ ID NO: 293642 - RNA, 22 nt, Human
uuagauaacaguagaauaucaa

SEQ ID NO: 293643 - RNA, 22 nt, Human
uucuggaaagcauuugaggccc

SEQ ID NO: 293644 - RNA, 22 nt, Human
ccugagagugagugccuccuua

SEQ ID NO: 293645 - RNA, 22 nt, Human
ggcaggugcaccugagccaucu

SEQ ID NO: 293646 - RNA, 22 nt, Human
auucaaaagaccaugcagacuc

SEQ ID NO: 293647 - RNA, 22 nt, Human
gggcccugggauucagagcaag

SEQ ID NO: 293648 - RNA, 22 nt, Human
agggauguucauuuuguggcug

SEQ ID NO: 293649 - RNA, 22 nt, Human
aagagacaaugucuuuuggaua

SEQ ID NO: 293650 - RNA, 22 nt, Human
gagagacagcacacaguguggg

SEQ ID NO: 293651 - RNA, 22 nt, Human
gcaaagcacacccucagaguuu

SEQ ID NO: 293652 - RNA, 22 nt, Human
acuggcaggcugcuggccggcg

SEQ ID NO: 293653 - RNA, 22 nt, Human
gcucuggccagacccucagugg

SEQ ID NO: 293654 - RNA, 22 nt, Human
ugcucagcagucaaggucauag

SEQ ID NO: 293655 - RNA, 22 nt, Human
guagggacccacagucuauauu

SEQ ID NO: 293656 - RNA, 22 nt, Human
uucuguauguacauauguguau

SEQ ID NO: 293657 - RNA, 18 nt, Human
uacuuuauucccccucca

SEQ ID NO: 293658 - RNA, 20 nt, Human
auuagcuuggagacaguggc

SEQ ID NO: 293659 - RNA, 22 nt, Human
ucccagagccaagcuauggaug

SEQ ID NO: 293660 - RNA, 22 nt, Human
uuccugaacauuucuaaguuga

SEQ ID NO: 293661 - RNA, 22 nt, Human
gggcuuggcacaugggcucagc

SEQ ID NO: 293662 - RNA, 22 nt, Human
uagggcagaguccaggaugggc

SEQ ID NO: 293663 - RNA, 22 nt, Human
agauguuaucauucagaguagc

SEQ ID NO: 293664 - RNA, 22 nt, Human
caaaauuagaaaugcagcuguu

SEQ ID NO: 293665 - RNA, 22 nt, Human
gaaagacuuccuuugagaguac

SEQ ID NO: 293666 - RNA, 22 nt, Human
uguguguguuccuccucagcua

SEQ ID NO: 293667 - RNA, 22 nt, Human
caugaaaaugucaaguucugcu

SEQ ID NO: 293668 - RNA, 22 nt, Human
gccugcagggccugggccuacc

SEQ ID NO: 293669 - RNA, 22 nt, Human
aguguccucaucuguaaaauga

SEQ ID NO: 293670 - RNA, 22 nt, Human
ccugcagguaaggcuaacugcc

SEQ ID NO: 293671 - RNA, 22 nt, Human
uaguuaggaaaguccagggagc

SEQ ID NO: 293672 - RNA, 22 nt, Human
ugaaauguuaaucacacaaagg

SEQ ID NO: 293673 - RNA, 22 nt, Human
ucuggagggguuuagagggaca

SEQ ID NO: 293674 - RNA, 22 nt, Human
ccuguggcacaugcagggauuc

SEQ ID NO: 293675 - RNA, 22 nt, Human
accagcaagauuuugcuuugca

SEQ ID NO: 293676 - RNA, 22 nt, Human
ggacaggugacugcccagagug

SEQ ID NO: 293677 - RNA, 22 nt, Human
agugacuggugugaaguuaaau

SEQ ID NO: 293678 - RNA, 19 nt, Human
ccccaggguaggcuagggg

SEQ ID NO: 293679 - RNA, 19 nt, Human
ugugccucuauagcaugug

SEQ ID NO: 293680 - RNA, 22 nt, Human
gagcugaaggagaaagcagggg

SEQ ID NO: 293681 - RNA, 22 nt, Human
gggcuucuugccauggggacgg

SEQ ID NO: 293682 - RNA, 22 nt, Human
aacuucauuccuuuuuaugacu

SEQ ID NO: 293683 - RNA, 22 nt, Human
cccacaggcaggugcaugggcu

SEQ ID NO: 293684 - RNA, 22 nt, Human
agcagagacaugaaauaugcuu

SEQ ID NO: 293685 - RNA, 22 nt, Human
aaacugugagcuaguaaauagg

SEQ ID NO: 293686 - RNA, 22 nt, Human
ggaagaaaucugguuaagagau

SEQ ID NO: 293687 - RNA, 20 nt, Human
auguucuucauuuaauguuc

SEQ ID NO: 293688 - RNA, 20 nt, Human
aggcucagcugagcucuugg

SEQ ID NO: 293689 - RNA, 22 nt, Human
ccuuuucuggccaccaagcgcu

SEQ ID NO: 293690 - RNA, 22 nt, Human
gucucagguucgagccuccuua

SEQ ID NO: 293691 - RNA, 22 nt, Human
cugggugagcuggccagagggu

SEQ ID NO: 293692 - RNA, 17 nt, Human
gauuuccugaaguucuu

SEQ ID NO: 293693 - RNA, 22 nt, Human
ggauguucugggguucucuugu

SEQ ID NO: 293694 - RNA, 22 nt, Human
gcaaaucaccaccuagcuggau

SEQ ID NO: 293695 - RNA, 22 nt, Human
auuuacuggaaaaacuaugagc

SEQ ID NO: 293696 - RNA, 20 nt, Human
caaaagcaaugaaguuauga

SEQ ID NO: 293697 - RNA, 22 nt, Human
ugaaagcacaaguucuaacagg

SEQ ID NO: 293698 - RNA, 22 nt, Human
ggaugugaaucugggcugagac

SEQ ID NO: 293699 - RNA, 22 nt, Human
cuuauuuugcugaugacccagg

SEQ ID NO: 293700 - RNA, 19 nt, Human
cuugaaaugagacugaagg

SEQ ID NO: 293701 - RNA, 22 nt, Human
uuagcaauuccagguaaguuau

SEQ ID NO: 293702 - RNA, 22 nt, Human
aaacaucuauuaugugcugagc

SEQ ID NO: 293703 - RNA, 22 nt, Human
cuuuauuguccuucuuaggugg

SEQ ID NO: 293704 - RNA, 22 nt, Human
uucccacaguguugaauccucu

SEQ ID NO: 293705 - RNA, 22 nt, Human
cuggcaguuugccaggagcucg

SEQ ID NO: 293706 - RNA, 22 nt, Human
ccugccaggcgagucuaggcca

SEQ ID NO: 293707 - RNA, 23 nt, Human
ugcugcccacucuuccagcccuc

SEQ ID NO: 293708 - RNA, 22 nt, Human
caaaugcagauucaggaguucu

SEQ ID NO: 293709 - RNA, 18 nt, Human
acagggaugggguaagug

SEQ ID NO: 293710 - RNA, 22 nt, Human
cagugagguggauggauggccu

SEQ ID NO: 293711 - RNA, 17 nt, Human
acugucuuuuacacccu

SEQ ID NO: 293712 - RNA, 22 nt, Human
ccuggcagccucagccaauucu

SEQ ID NO: 293713 - RNA, 20 nt, Human
uuucugugcccaggucuguu

SEQ ID NO: 293714 - RNA, 23 nt, Human
acagugucugcugcaagauaucu

SEQ ID NO: 293715 - RNA, 22 nt, Human
agcuggagaauguggaugaucc

SEQ ID NO: 293716 - RNA, 22 nt, Human
cugagccacugcuuguucagug

SEQ ID NO: 293717 - RNA, 22 nt, Human
ccaaaauauuagugcuuaagua

SEQ ID NO: 293718 - RNA, 20 nt, Human
ccagacagcaccugccuggu

SEQ ID NO: 293719 - RNA, 22 nt, Human
aaagcugcugugaaugguuugg

SEQ ID NO: 293720 - RNA, 22 nt, Human
agaugguccaucuauuuucuau

SEQ ID NO: 293721 - RNA, 22 nt, Human
accugagaaugggggcaugugu

SEQ ID NO: 293722 - RNA, 22 nt, Human
uuucuuuuccaauaucccuacu

SEQ ID NO: 293723 - RNA, 22 nt, Human
cuguacaaguccuucaucaggg

SEQ ID NO: 293724 - RNA, 22 nt, Human
cuguccuguacuuugaggcccu

SEQ ID NO: 293725 - RNA, 22 nt, Human
ucaucuguuaugggaguuuuug

SEQ ID NO: 293726 - RNA, 22 nt, Human
acagagagaggcccgaggcugc

SEQ ID NO: 293727 - RNA, 22 nt, Human
ugacagguuguguagguggcca

SEQ ID NO: 293728 - RNA, 22 nt, Human
gcuuggcuguguucaagggcgg

SEQ ID NO: 293729 - RNA, 22 nt, Human
agauugaagacugguggagcug

SEQ ID NO: 293730 - RNA, 22 nt, Human
aguccugucaccucuacuuucg

SEQ ID NO: 293731 - RNA, 22 nt, Human
auuugcuuaucuccacaguugu

SEQ ID NO: 293732 - RNA, 22 nt, Human
uuuacuuguucugcugaauucu

SEQ ID NO: 293733 - RNA, 22 nt, Human
auuuacagaugaugcuauuuga

SEQ ID NO: 293734 - RNA, 22 nt, Human
cacaugugggaaauggugcuua

SEQ ID NO: 293735 - RNA, 22 nt, Human
ugugacccagacucaucuucuu

SEQ ID NO: 293736 - RNA, 22 nt, Human
cuccuacauuccaccuuggacu

SEQ ID NO: 293737 - RNA, 22 nt, Human
aggggagguggcagaaaugugc

SEQ ID NO: 293738 - RNA, 19 nt, Human
accugcaguaauaauuccu

SEQ ID NO: 293739 - RNA, 22 nt, Human
uuugaaugcaggacauacagaa

SEQ ID NO: 293740 - RNA, 22 nt, Human
acacauauucauauguacuuac

SEQ ID NO: 293741 - RNA, 22 nt, Human
uguauuaacauuaauaaaaugg

SEQ ID NO: 293742 - RNA, 22 nt, Human
uggaagggaaaguuuggggucc

SEQ ID NO: 293743 - RNA, 17 nt, Human
ggcuggaggggacccgg

SEQ ID NO: 293744 - RNA, 22 nt, Human
augaggagcuguuuuaacugcu

SEQ ID NO: 293745 - RNA, 22 nt, Human
uauaauuuggggaaaguggugu

SEQ ID NO: 293746 - RNA, 22 nt, Human
ucuguucagcugccucagggua

SEQ ID NO: 293747 - RNA, 22 nt, Human
aacauaauguggccaaagucac

SEQ ID NO: 293748 - RNA, 22 nt, Human
uggcagggagccaccggucaug

SEQ ID NO: 293749 - RNA, 22 nt, Human
caaagcuggacugcucaguuca

SEQ ID NO: 293750 - RNA, 22 nt, Human
accagaggcaguuucggcuggu

SEQ ID NO: 293751 - RNA, 22 nt, Human
agugucuguuguucagaacucu

SEQ ID NO: 293752 - RNA, 22 nt, Human
ugaagcaguucucagaaguggg

SEQ ID NO: 293753 - RNA, 22 nt, Human
caaggcagaauucagacucagg

SEQ ID NO: 293754 - RNA, 22 nt, Human
aguggcagggcuggcugcugca

SEQ ID NO: 293755 - RNA, 22 nt, Human
uccaggcugggcugaagggugc

SEQ ID NO: 293756 - RNA, 22 nt, Human
gaauaucccgcuaugcaaagua

SEQ ID NO: 293757 - RNA, 22 nt, Human
ggccucugguucacagggagga

SEQ ID NO: 293758 - RNA, 22 nt, Human
aucuucccaggcuggggagagg

SEQ ID NO: 293759 - RNA, 22 nt, Human
uacacaugcucagauuccugug

SEQ ID NO: 293760 - RNA, 22 nt, Human
accuccuggugcccaaguguuu

SEQ ID NO: 293761 - RNA, 22 nt, Human
gaacauuugaugaugacauugg

SEQ ID NO: 293762 - RNA, 22 nt, Human
uucugcaucugaauuuaaguac

SEQ ID NO: 293763 - RNA, 22 nt, Human
gacaucugaggcccucagagcc

SEQ ID NO: 293764 - RNA, 22 nt, Human
uaugcacacauguaugcaugug

SEQ ID NO: 293765 - RNA, 23 nt, Human
auugugagauuacuaucacacug

SEQ ID NO: 293766 - RNA, 22 nt, Human
ugcuggcuuugcgagaugcauu

SEQ ID NO: 293767 - RNA, 22 nt, Human
uucucuuugacauuauucaggu

SEQ ID NO: 293768 - RNA, 22 nt, Human
ggacauguuccuuuucaucuuu

SEQ ID NO: 293769 - RNA, 23 nt, Human
ucucagaggauuccugggccuug

SEQ ID NO: 293770 - RNA, 22 nt, Human
uugcuuuauucacaucuauauu

SEQ ID NO: 293771 - RNA, 22 nt, Human
uacaggugcucuacagacagga

SEQ ID NO: 293772 - RNA, 22 nt, Human
aaacagauaaugcuauaaaugg

SEQ ID NO: 293773 - RNA, 18 nt, Human
uuuauauggauagagacc

SEQ ID NO: 293774 - RNA, 19 nt, Human
acccagggguuuaugugug

SEQ ID NO: 293775 - RNA, 21 nt, Human
agcuguggcgaggggaacaug

SEQ ID NO: 293776 - RNA, 22 nt, Human
uuuauauauggcuggucuggau

SEQ ID NO: 293777 - RNA, 22 nt, Human
ugcagaaauucagaaagcauaa

SEQ ID NO: 293778 - RNA, 22 nt, Human
acaugagaagcugcaacaugac

SEQ ID NO: 293779 - RNA, 19 nt, Human
gcuccuggaugaccugugg

SEQ ID NO: 293780 - RNA, 22 nt, Human
aucaguuuggaacauucaggcc

SEQ ID NO: 293781 - RNA, 22 nt, Human
agagacaggguuuugucguguu

SEQ ID NO: 293782 - RNA, 22 nt, Human
ucauuacaguguuuauaugucu

SEQ ID NO: 293783 - RNA, 21 nt, Human
acauguaagagaguuucaaga

SEQ ID NO: 293784 - RNA, 22 nt, Human
acuuccagcuagguucugcuaa

SEQ ID NO: 293785 - RNA, 22 nt, Human
ggggagaauaaaucagauuuua

SEQ ID NO: 293786 - RNA, 22 nt, Human
ucaggagcucuucccuggugug

SEQ ID NO: 293787 - RNA, 22 nt, Human
acagauuuggcccagccaaugc

SEQ ID NO: 293788 - RNA, 22 nt, Human
cagugcaguggcugagcuggag

SEQ ID NO: 293789 - RNA, 22 nt, Human
uccagcaugaaggggcuuuuau

SEQ ID NO: 293790 - RNA, 22 nt, Human
uagcuuuaaugaguugguaaga

SEQ ID NO: 293791 - RNA, 22 nt, Human
aguuuacacuuuugauucuuau

SEQ ID NO: 293792 - RNA, 22 nt, Human
agcugcaauucuggacauaguc

SEQ ID NO: 293793 - RNA, 22 nt, Human
uaguuuguagaaaucuagaaau

SEQ ID NO: 293794 - RNA, 22 nt, Human
augcaucuguaguguuauauga

SEQ ID NO: 293795 - RNA, 22 nt, Human
gucuccuaaaccauccugguac

SEQ ID NO: 293796 - RNA, 22 nt, Human
aaugcuaaaacacagauuuuug

SEQ ID NO: 293797 - RNA, 22 nt, Human
uuuacaguuaagaaauguuacc

SEQ ID NO: 293798 - RNA, 21 nt, Human
aguugcauaggccagccaucc

SEQ ID NO: 293799 - RNA, 22 nt, Human
acagcagguuauuguuauggca

SEQ ID NO: 293800 - RNA, 20 nt, Human
aaguuuucuccaaauacagu

SEQ ID NO: 293801 - RNA, 22 nt, Human
ucauuguagggcauuuagagag

SEQ ID NO: 293802 - RNA, 22 nt, Human
aagugguuauuuugaucuagaa

SEQ ID NO: 293803 - RNA, 22 nt, Human
gauacaaaauauaaauggagag

SEQ ID NO: 293804 - RNA, 22 nt, Human
ccagcaugagacgaugaugaag

SEQ ID NO: 293805 - RNA, 22 nt, Human
ggcuguggggggagccugcccg

SEQ ID NO: 293806 - RNA, 22 nt, Human
caucauuuuauuaaccaagaaa

SEQ ID NO: 293807 - RNA, 23 nt, Human
agucuucauuguauuuccagacc

SEQ ID NO: 293808 - RNA, 22 nt, Human
ccaaggagcaaggcucaacaag

SEQ ID NO: 293809 - RNA, 22 nt, Human
agagccagauggagccgugugu

SEQ ID NO: 293810 - RNA, 22 nt, Human
uucauguuuguaggacugaggc

SEQ ID NO: 293811 - RNA, 18 nt, Human
cagucuaauucccuuccc

SEQ ID NO: 293812 - RNA, 22 nt, Human
ucuguuuaugcauauuuaaaac

SEQ ID NO: 293813 - RNA, 14 nt, Human
gcaggcagaucauu

SEQ ID NO: 293814 - RNA, 22 nt, Human
ucagagagcuggugggcagagg

SEQ ID NO: 293815 - RNA, 22 nt, Human
aaaugcuacauacacaucaggg

SEQ ID NO: 293816 - RNA, 22 nt, Human
ggguguccagggcgugucugga

SEQ ID NO: 293817 - RNA, 22 nt, Human
uaguuucauaugcaaaauagua

SEQ ID NO: 293818 - RNA, 22 nt, Human
gugacccaggacacuguguauc

SEQ ID NO: 293819 - RNA, 22 nt, Human
auccaggccccaagaccccgac

SEQ ID NO: 293820 - RNA, 22 nt, Human
gcuuggcuggaaauagguugag

SEQ ID NO: 293821 - RNA, 22 nt, Human
aacaucuuugauaaacuuagug

SEQ ID NO: 293822 - RNA, 22 nt, Human
ucauucaucaguugguagagau

SEQ ID NO: 293823 - RNA, 22 nt, Human
gaauuguauugauuuuucagag

SEQ ID NO: 293824 - RNA, 20 nt, Human
uaucuaaaugcuuacauuac

SEQ ID NO: 293825 - RNA, 22 nt, Human
agggcugcccagugugagagcu

SEQ ID NO: 293826 - RNA, 22 nt, Human
uacuagaaauuaccuucucacu

SEQ ID NO: 293827 - RNA, 22 nt, Human
ccuugguuuccaggaugaggcu

SEQ ID NO: 293828 - RNA, 22 nt, Human
ggagcacaccgggagcuugccu

SEQ ID NO: 293829 - RNA, 22 nt, Human
auuuguuccacacauauuuacu

SEQ ID NO: 293830 - RNA, 22 nt, Human
ugcagggcacacgcacgggugu

SEQ ID NO: 293831 - RNA, 22 nt, Human
gagcaccgccuccacgaugccc

SEQ ID NO: 293832 - RNA, 22 nt, Human
ugcaggugaaaauuaugaggau

SEQ ID NO: 293833 - RNA, 19 nt, Human
aaagcagugcauccucuuu

SEQ ID NO: 293834 - RNA, 22 nt, Human
acuuucaagcaagaacacuuug

SEQ ID NO: 293835 - RNA, 22 nt, Human
aauuaugauuggucuaaaccag

SEQ ID NO: 293836 - RNA, 22 nt, Human
aggaccugacuggcuccugcuu

SEQ ID NO: 293837 - RNA, 22 nt, Human
acaguuuacuggccuugccguu

SEQ ID NO: 293838 - RNA, 22 nt, Human
uucugaaauaggagauagcugu

SEQ ID NO: 293839 - RNA, 22 nt, Human
cagaugagaguggccaggguuc

SEQ ID NO: 293840 - RNA, 22 nt, Human
ugacaugugucuccuuccgucu

SEQ ID NO: 293841 - RNA, 22 nt, Human
aguguucuucugggguaugcuc

SEQ ID NO: 293842 - RNA, 22 nt, Human
uuguacaacguuuuaaauuuga

SEQ ID NO: 293843 - RNA, 22 nt, Human
agccacugucugaacuucugug

SEQ ID NO: 293844 - RNA, 22 nt, Human
uacaacauguaaagugguuuaa

SEQ ID NO: 293845 - RNA, 22 nt, Human
ccuggcacaugauagaugcuca

SEQ ID NO: 293846 - RNA, 22 nt, Human
uaggcuaggcugaagguuuugg

SEQ ID NO: 293847 - RNA, 22 nt, Human
ucaggcccagagucacggaucc

SEQ ID NO: 293848 - RNA, 22 nt, Human
uucaggugucaaggauaggcug

SEQ ID NO: 293849 - RNA, 22 nt, Human
uaaaugaguaauauagcuguuu

SEQ ID NO: 293850 - RNA, 22 nt, Human
gugacccaugcagugguuuugg

SEQ ID NO: 293851 - RNA, 23 nt, Human
agagugcagagauaugcuugugu

SEQ ID NO: 293852 - RNA, 22 nt, Human
cauuuccagcuccugcaucaug

SEQ ID NO: 293853 - RNA, 22 nt, Human
agugucugccuauuuuucaagc

SEQ ID NO: 293854 - RNA, 21 nt, Human
ccagcuuucccaagucccuuu

SEQ ID NO: 293855 - RNA, 22 nt, Human
accaggcagcugggggugaugu

SEQ ID NO: 293856 - RNA, 22 nt, Human
uguccuuuucuuuagugcagcu

SEQ ID NO: 293857 - RNA, 22 nt, Human
guaggcagugguuggaagagaa

SEQ ID NO: 293858 - RNA, 22 nt, Human
uguguucaaucccuagucucag

SEQ ID NO: 293859 - RNA, 22 nt, Human
uaaaguuuggcagacaauaaca

SEQ ID NO: 293860 - RNA, 20 nt, Human
ugugccuggcuuuguccuga

SEQ ID NO: 293861 - RNA, 22 nt, Human
aacagcaauagcacuauucauu

SEQ ID NO: 293862 - RNA, 22 nt, Human
gcccacaguguagcagguacuc

SEQ ID NO: 293863 - RNA, 22 nt, Human
auuugcugagcucaaagaaaag

SEQ ID NO: 293864 - RNA, 19 nt, Human
aggaauggaauuaauucug

SEQ ID NO: 293865 - RNA, 22 nt, Human
acaguguucacuuaacaaugga

SEQ ID NO: 293866 - RNA, 22 nt, Human
uagaucaggcugcuuagauaga

SEQ ID NO: 293867 - RNA, 22 nt, Human
uuaagaagguacucaaagaucu

SEQ ID NO: 293868 - RNA, 22 nt, Human
agugcaggccccaggccaggcc

SEQ ID NO: 293869 - RNA, 22 nt, Human
auauuucucucagacauggaag

SEQ ID NO: 293870 - RNA, 22 nt, Human
caaaucuauauguugauauucu

SEQ ID NO: 293871 - RNA, 22 nt, Human
ucagaguuucugauuuaguagg

SEQ ID NO: 293872 - RNA, 22 nt, Human
ucagggaaccucuccuguuucu

SEQ ID NO: 293873 - RNA, 22 nt, Human
cagccagggucaggcagcuucu

SEQ ID NO: 293874 - RNA, 22 nt, Human
auuaaacaauguaaaguucuug

SEQ ID NO: 293875 - RNA, 22 nt, Human
ggucuggccuccgggcaggugg

SEQ ID NO: 293876 - RNA, 22 nt, Human
ugagcagagacuucaagggcag

SEQ ID NO: 293877 - RNA, 22 nt, Human
ucuuuggacuuuccaauuuguu

SEQ ID NO: 293878 - RNA, 22 nt, Human
gaggaggaaaggaguugaaaug

SEQ ID NO: 293879 - RNA, 22 nt, Human
caacauauaauauuugaguucu

SEQ ID NO: 293880 - RNA, 22 nt, Human
aaugagauggaauucccgccua

SEQ ID NO: 293881 - RNA, 22 nt, Human
accuguuuaccugcaccuguuu

SEQ ID NO: 293882 - RNA, 22 nt, Human
ggccauggaccccgagcugacc

SEQ ID NO: 293883 - RNA, 22 nt, Human
gcauguguucuugaaaggccac

SEQ ID NO: 293884 - RNA, 22 nt, Human
ucagugucacaggaugcuaugc

SEQ ID NO: 293885 - RNA, 22 nt, Human
caggccucuccuuagucuggca

SEQ ID NO: 293886 - RNA, 22 nt, Human
ugcaggcugcagucucaggugg

SEQ ID NO: 293887 - RNA, 19 nt, Human
cgcagguggaaggagccgc

SEQ ID NO: 293888 - RNA, 22 nt, Human
gaauccaggguuguuugagcua

SEQ ID NO: 293889 - RNA, 22 nt, Human
uaggcucuagauguggucuuug

SEQ ID NO: 293890 - RNA, 22 nt, Human
uucuucuccuaaggagaguccu

SEQ ID NO: 293891 - RNA, 19 nt, Human
aggcuuggaacagccuuau

SEQ ID NO: 293892 - RNA, 22 nt, Human
accugccucagugcagcuggau

SEQ ID NO: 293893 - RNA, 22 nt, Human
uaucuaaaggauuuaauuuagu

SEQ ID NO: 293894 - RNA, 22 nt, Human
cagagccucagaauccugugga

SEQ ID NO: 293895 - RNA, 22 nt, Human
aaaaguuagcuauuaguaggug

SEQ ID NO: 293896 - RNA, 22 nt, Human
agggcccucugggcacuguggc

SEQ ID NO: 293897 - RNA, 22 nt, Human
cuuuaguucuaaugcauugaaa

SEQ ID NO: 293898 - RNA, 22 nt, Human
uagauaaauuagaaaguuuacu

SEQ ID NO: 293899 - RNA, 21 nt, Human
uacagaugaggagaccaaggc

SEQ ID NO: 293900 - RNA, 22 nt, Human
uuucauggcuaggacuagagug

SEQ ID NO: 293901 - RNA, 22 nt, Human
uaauaacaauuguaggacauga

SEQ ID NO: 293902 - RNA, 22 nt, Human
ggcuccacugcugaccacucca

SEQ ID NO: 293903 - RNA, 23 nt, Human
uuucucugagaagcaguucucua

SEQ ID NO: 293904 - RNA, 22 nt, Human
cugagguguggucugggaguau

SEQ ID NO: 293905 - RNA, 18 nt, Human
gggcucacacaggucauc

SEQ ID NO: 293906 - RNA, 22 nt, Human
uccugagccugacaaucaccau

SEQ ID NO: 293907 - RNA, 22 nt, Human
ggccuugaucucucuaacugcu

SEQ ID NO: 293908 - RNA, 22 nt, Human
ucuucagagcauuucugaggua

SEQ ID NO: 293909 - RNA, 22 nt, Human
augccccagugugugcuuccuu

SEQ ID NO: 293910 - RNA, 22 nt, Human
caaagugccuguaccacuuugc

SEQ ID NO: 293911 - RNA, 22 nt, Human
cacccaggacaggccagaugug

SEQ ID NO: 293912 - RNA, 22 nt, Human
aaggccucccugugugcaggug

SEQ ID NO: 293913 - RNA, 22 nt, Human
auuaguaaaacauuguauaugu

SEQ ID NO: 293914 - RNA, 22 nt, Human
cccuccagggagccaugcuggg

SEQ ID NO: 293915 - RNA, 22 nt, Human
cagggcucuucaucacacagua

SEQ ID NO: 293916 - RNA, 19 nt, Human
gcuggcagaauuuugaacc

SEQ ID NO: 293917 - RNA, 22 nt, Human
aaaucaaaagacauguguuuua

SEQ ID NO: 293918 - RNA, 21 nt, Human
ucaaggaguuucucuuuucca

SEQ ID NO: 293919 - RNA, 22 nt, Human
aaagauaauguuuccuuauucu

SEQ ID NO: 293920 - RNA, 22 nt, Human
acauacagaccugcagggcagc

SEQ ID NO: 293921 - RNA, 22 nt, Human
agaaagugugucauacuaagug

SEQ ID NO: 293922 - RNA, 22 nt, Human
cuuucagucuuuacaagguugc

SEQ ID NO: 293923 - RNA, 22 nt, Human
acaagauagcuuagaagauuca

SEQ ID NO: 293924 - RNA, 22 nt, Human
ccaaugauggugcccacgauga

SEQ ID NO: 293925 - RNA, 22 nt, Human
gaggccaggggccuggagauga

SEQ ID NO: 293926 - RNA, 22 nt, Human
aggauuuacaaugauucuaggu

SEQ ID NO: 293927 - RNA, 22 nt, Human
acuuuguuuggcuauuagaguc

SEQ ID NO: 293928 - RNA, 20 nt, Human
cugagccaacucucuucuug

SEQ ID NO: 293929 - RNA, 22 nt, Human
cacugcacaauguagcaaagaa

SEQ ID NO: 293930 - RNA, 22 nt, Human
ggaguauuguagcuuccaguuc

SEQ ID NO: 293931 - RNA, 22 nt, Human
aaaaugaugcuguaauuuggca

SEQ ID NO: 293932 - RNA, 22 nt, Human
uuaaauauuauguugucugcaa

SEQ ID NO: 293933 - RNA, 22 nt, Human
uuccaggacaagauguuucagg

SEQ ID NO: 293934 - RNA, 22 nt, Human
gacagcuuagugaaaauguaaa

SEQ ID NO: 293935 - RNA, 22 nt, Human
aagucucuuaguaauauccaac

SEQ ID NO: 293936 - RNA, 22 nt, Human
gggagguucuguucgcacuuga

SEQ ID NO: 293937 - RNA, 20 nt, Human
acuuggaacucauuuuucuu

SEQ ID NO: 293938 - RNA, 22 nt, Human
gacucguucauaguuccaauuu

SEQ ID NO: 293939 - RNA, 22 nt, Human
aacaaacaaacauuuugucauc

SEQ ID NO: 293940 - RNA, 22 nt, Human
gcuuacaagaucgugcuccagu

SEQ ID NO: 293941 - RNA, 22 nt, Human
uccuggccaggaugaccuaaca

SEQ ID NO: 293942 - RNA, 22 nt, Human
cuugaaucuucugaguauuugc

SEQ ID NO: 293943 - RNA, 22 nt, Human
gcuguucauagaaauggucuca

SEQ ID NO: 293944 - RNA, 22 nt, Human
gccuccugguugcuucuccaac

SEQ ID NO: 293945 - RNA, 22 nt, Human
gauauuuugagaaauccuauga

SEQ ID NO: 293946 - RNA, 22 nt, Human
aaaauccucuaauucuagaaua

SEQ ID NO: 293947 - RNA, 22 nt, Human
acauuaaaaaauguugcaugaa

SEQ ID NO: 293948 - RNA, 19 nt, Human
ccagcccauaguccaucac

SEQ ID NO: 293949 - RNA, 22 nt, Human
gcugcagugagccaagaucgug

SEQ ID NO: 293950 - RNA, 22 nt, Human
guccaugauucugugacacccu

SEQ ID NO: 293951 - RNA, 20 nt, Human
ucugggcuucccccagcucc

SEQ ID NO: 293952 - RNA, 22 nt, Human
aguaggcauugugaaacugcau

SEQ ID NO: 293953 - RNA, 22 nt, Human
cagggaugguugagaauuggua

SEQ ID NO: 293954 - RNA, 22 nt, Human
agguuaggaaauagggcuguaa

SEQ ID NO: 293955 - RNA, 22 nt, Human
agccaugcucaguuccuggagc

SEQ ID NO: 293956 - RNA, 19 nt, Human
auuucaagagguuuauugg

SEQ ID NO: 293957 - RNA, 22 nt, Human
guaaaacugucuaaugguauau

SEQ ID NO: 293958 - RNA, 20 nt, Human
cugaagagacuggaggggca

SEQ ID NO: 293959 - RNA, 22 nt, Human
ucagggaacaucguuaaacuag

SEQ ID NO: 293960 - RNA, 22 nt, Human
ucauagaugugcugugcacaaa

SEQ ID NO: 293961 - RNA, 22 nt, Human
acagaagagcacauuuaguaug

SEQ ID NO: 293962 - RNA, 22 nt, Human
gggaggacgguccagggcaaag

SEQ ID NO: 293963 - RNA, 22 nt, Human
gccuggcauauaguaguugugc

SEQ ID NO: 293964 - RNA, 22 nt, Human
aggaaauguacaaaugaagaug

SEQ ID NO: 293965 - RNA, 22 nt, Human
uacaugcaugucacagaaugaa

SEQ ID NO: 293966 - RNA, 21 nt, Human
uuguguccuucuaaagggcca

SEQ ID NO: 293967 - RNA, 22 nt, Human
auuucccagcuuugaucaguuu

SEQ ID NO: 293968 - RNA, 22 nt, Human
agcagggcugugcuccuuccga

SEQ ID NO: 293969 - RNA, 19 nt, Human
uuuacucuccaaggugagu

SEQ ID NO: 293970 - RNA, 22 nt, Human
caugaaggaccauuucacgguc

SEQ ID NO: 293971 - RNA, 20 nt, Human
gcuccaggucagagaggacg

SEQ ID NO: 293972 - RNA, 22 nt, Human
caggaagccuuccuugucugcu

SEQ ID NO: 293973 - RNA, 22 nt, Human
gcauucuuuccacgaggaggua

SEQ ID NO: 293974 - RNA, 22 nt, Human
ugugacccucuccgaugggcag

SEQ ID NO: 293975 - RNA, 22 nt, Human
auauaucaugaguaaaacuuga

SEQ ID NO: 293976 - RNA, 22 nt, Human
accaugaugcauccuuaaggaa

SEQ ID NO: 293977 - RNA, 22 nt, Human
ugaaagcaaccuguaacaguga

SEQ ID NO: 293978 - RNA, 22 nt, Human
uagaaggcuuugagagauacuu

SEQ ID NO: 293979 - RNA, 22 nt, Human
caagauuuagccugcugccugu

SEQ ID NO: 293980 - RNA, 22 nt, Human
cagaugaggggcauauaacaau

SEQ ID NO: 293981 - RNA, 22 nt, Human
agcuuuauucaugauuucaggg

SEQ ID NO: 293982 - RNA, 22 nt, Human
ccagcccugucaccaacuggag

SEQ ID NO: 293983 - RNA, 20 nt, Human
gcagggcaagggauaugaaa

SEQ ID NO: 293984 - RNA, 23 nt, Human
ugacagaccuucccagacaguca

SEQ ID NO: 293985 - RNA, 22 nt, Human
uagggcagccacccaggcugcu

SEQ ID NO: 293986 - RNA, 22 nt, Human
aaaagcagagacucuggagcua

SEQ ID NO: 293987 - RNA, 22 nt, Human
cagggugacugcccuggccacu

SEQ ID NO: 293988 - RNA, 22 nt, Human
uccagcucaggguuggcucaag

SEQ ID NO: 293989 - RNA, 22 nt, Human
uuugcuuucuugauucagauua

SEQ ID NO: 293990 - RNA, 22 nt, Human
ugguaaaauauuacaaggcacu

SEQ ID NO: 293991 - RNA, 19 nt, Human
ucaaagcaagcauguucug

SEQ ID NO: 293992 - RNA, 22 nt, Human
ugcuuuauguuaucagaagggu

SEQ ID NO: 293993 - RNA, 22 nt, Human
cuuguugcuaacauaugcuucu

SEQ ID NO: 293994 - RNA, 22 nt, Human
aagaaauauugggccuuauaaa

SEQ ID NO: 293995 - RNA, 22 nt, Human
gauggcuggcuauaucagggga

SEQ ID NO: 293996 - RNA, 22 nt, Human
ggcuguggucucaucuagccuu

SEQ ID NO: 293997 - RNA, 22 nt, Human
uugaggaggccuuucagggcuu

SEQ ID NO: 293998 - RNA, 22 nt, Human
auuaaaauuccaagguaugcca

SEQ ID NO: 293999 - RNA, 22 nt, Human
aggcaggugggagugauuccuu

SEQ ID NO: 294000 - RNA, 22 nt, Human
aggagcugauaaaaggggguca

SEQ ID NO: 294001 - RNA, 22 nt, Human
ucacuuuggauuauguaauuuc

SEQ ID NO: 294002 - RNA, 22 nt, Human
ccuuccuuuuacugucuccgga

SEQ ID NO: 294003 - RNA, 23 nt, Human
agcaauaagaagggauacaugug

SEQ ID NO: 294004 - RNA, 22 nt, Human
cuagagaaaaugauagcaggaa

SEQ ID NO: 294005 - RNA, 22 nt, Human
uugcuuuauguguaugacuuga

SEQ ID NO: 294006 - RNA, 22 nt, Human
agggucuguuguuuguucugga

SEQ ID NO: 294007 - RNA, 22 nt, Human
cagggcucaggaaaucagacgu

SEQ ID NO: 294008 - RNA, 22 nt, Human
uccuggcuggaauuucucacuc

SEQ ID NO: 294009 - RNA, 22 nt, Human
caugccaacaacaagcaaugag

SEQ ID NO: 294010 - RNA, 22 nt, Human
auuauuagauucuuaauuguaa

SEQ ID NO: 294011 - RNA, 22 nt, Human
gugagguagcagagacagugaa

SEQ ID NO: 294012 - RNA, 22 nt, Human
ugcagguggauaucucaucaga

SEQ ID NO: 294013 - RNA, 22 nt, Human
ccaugcagugcuggagcugauu

SEQ ID NO: 294014 - RNA, 22 nt, Human
aauguuaauuuacugucuucau

SEQ ID NO: 294015 - RNA, 22 nt, Human
uucuuuaugcuucuguuuaggc

SEQ ID NO: 294016 - RNA, 22 nt, Human
agggacuugaugucagggagau

SEQ ID NO: 294017 - RNA, 22 nt, Human
auuucucaucaagugccaacuc

SEQ ID NO: 294018 - RNA, 22 nt, Human
accuucaaacuagauagaaguu

SEQ ID NO: 294019 - RNA, 22 nt, Human
uggaauggaaacaaacugagga

SEQ ID NO: 294020 - RNA, 22 nt, Human
uagggcucagaguccaguuucu

SEQ ID NO: 294021 - RNA, 22 nt, Human
auuucuguaguccacauucuuu

SEQ ID NO: 294022 - RNA, 22 nt, Human
acugagauuuacauguucuagu

SEQ ID NO: 294023 - RNA, 22 nt, Human
gugaggagcugacacuggggug

SEQ ID NO: 294024 - RNA, 18 nt, Human
ucugucuguacaaguauc

SEQ ID NO: 294025 - RNA, 22 nt, Human
uugauuucuuacucuuccaagg

SEQ ID NO: 294026 - RNA, 22 nt, Human
ucuccugguuuguuaaauaauu

SEQ ID NO: 294027 - RNA, 22 nt, Human
aaucuuucccuauuaaaugugg

SEQ ID NO: 294028 - RNA, 21 nt, Human
ugggaccuauuucaacuggau

SEQ ID NO: 294029 - RNA, 22 nt, Human
gcaggcaguuauuuaguagaau

SEQ ID NO: 294030 - RNA, 22 nt, Human
ggagacaauggaggccaaaaga

SEQ ID NO: 294031 - RNA, 22 nt, Human
agagagcagucuggaagaaaca

SEQ ID NO: 294032 - RNA, 22 nt, Human
uguugauuaguguuuagacuua

SEQ ID NO: 294033 - RNA, 22 nt, Human
ggcugugggccagcuagacccu

SEQ ID NO: 294034 - RNA, 22 nt, Human
uuuugcuguuauaugcuauuau

SEQ ID NO: 294035 - RNA, 22 nt, Human
cacaggugugugccuuaucaaa

SEQ ID NO: 294036 - RNA, 22 nt, Human
uggcagucugccucuucaccau

SEQ ID NO: 294037 - RNA, 22 nt, Human
auuuauuauugugguuacuucu

SEQ ID NO: 294038 - RNA, 22 nt, Human
cugagccagcgggcucacuuuu

SEQ ID NO: 294039 - RNA, 20 nt, Human
uaaagacauaagcuacuauc

SEQ ID NO: 294040 - RNA, 22 nt, Human
caugugucuaaucuacuaauau

SEQ ID NO: 294041 - RNA, 22 nt, Human
agaguugcuaccaagaugcuag

SEQ ID NO: 294042 - RNA, 22 nt, Human
aaucuggaauauuugcauugua

SEQ ID NO: 294043 - RNA, 22 nt, Human
aaaugcacagguuuuaaauccu

SEQ ID NO: 294044 - RNA, 22 nt, Human
aaauucauuuuucuuagugugc

SEQ ID NO: 294045 - RNA, 22 nt, Human
acccuaauaaucacagacuagu

SEQ ID NO: 294046 - RNA, 22 nt, Human
gagggccaaagagcaagagccu

SEQ ID NO: 294047 - RNA, 22 nt, Human
ggccucucugagagcagacguu

SEQ ID NO: 294048 - RNA, 22 nt, Human
cagucuaaguuaauuuccacaa

SEQ ID NO: 294049 - RNA, 22 nt, Human
guuacucuugagaggcugaggu

SEQ ID NO: 294050 - RNA, 22 nt, Human
aguggaggcacuaauuggauuu

SEQ ID NO: 294051 - RNA, 22 nt, Human
agugcauguucacuggcauggu

SEQ ID NO: 294052 - RNA, 22 nt, Human
ucugcccucauugcugccugga

SEQ ID NO: 294053 - RNA, 22 nt, Human
cuugauugcuucuacgugacug

SEQ ID NO: 294054 - RNA, 22 nt, Human
uggucugggcaaauccuucuga

SEQ ID NO: 294055 - RNA, 22 nt, Human
auaguuugaaggcuguucuacu

SEQ ID NO: 294056 - RNA, 22 nt, Human
gacugucucugugaaugguagg

SEQ ID NO: 294057 - RNA, 22 nt, Human
acagaagaaguucaaggugaag

SEQ ID NO: 294058 - RNA, 22 nt, Human
gagcaggucuuucauggugcau

SEQ ID NO: 294059 - RNA, 22 nt, Human
guacaaauugauacagguuuuc

SEQ ID NO: 294060 - RNA, 22 nt, Human
uaguuuugauuaguauugucuu

SEQ ID NO: 294061 - RNA, 22 nt, Human
uuucaguugcagugguugucua

SEQ ID NO: 294062 - RNA, 22 nt, Human
cugggcugcaguuccugguccu

SEQ ID NO: 294063 - RNA, 22 nt, Human
gggccaggaguggagauauggg

SEQ ID NO: 294064 - RNA, 22 nt, Human
gacuuuauuuccuuauuuguga

SEQ ID NO: 294065 - RNA, 18 nt, Human
gccugagggucaagugug

SEQ ID NO: 294066 - RNA, 22 nt, Human
uuauuccaguaaucucuguaau

SEQ ID NO: 294067 - RNA, 22 nt, Human
uuagaaguucaggucuguaauc

SEQ ID NO: 294068 - RNA, 22 nt, Human
cagugcagcugccccgcuggua

SEQ ID NO: 294069 - RNA, 22 nt, Human
uguccucaaggagcuucagucu

SEQ ID NO: 294070 - RNA, 22 nt, Human
gaccuggugcagguggacagag

SEQ ID NO: 294071 - RNA, 22 nt, Human
caguauuuguucccuaucaaug

SEQ ID NO: 294072 - RNA, 22 nt, Human
gccugcagaacugugaggcaau

SEQ ID NO: 294073 - RNA, 22 nt, Human
uucaacuaauguuuauuuuaug

SEQ ID NO: 294074 - RNA, 22 nt, Human
cagcaggauuugaaaggaagag

SEQ ID NO: 294075 - RNA, 22 nt, Human
gcagacagacugcagugauuuu

SEQ ID NO: 294076 - RNA, 22 nt, Human
cacagguucaccucagguaggu

SEQ ID NO: 294077 - RNA, 22 nt, Human
gcuggcagacugggggcagaac

SEQ ID NO: 294078 - RNA, 22 nt, Human
cugaggaagacagcagcugugu

SEQ ID NO: 294079 - RNA, 22 nt, Human
gagucuaaggaaaaauagagua

SEQ ID NO: 294080 - RNA, 22 nt, Human
caaggcaggaagccugucuuau

SEQ ID NO: 294081 - RNA, 22 nt, Human
uagacacauacccuugcccaaa

SEQ ID NO: 294082 - RNA, 22 nt, Human
cuggcacugaguggcuuaugac

SEQ ID NO: 294083 - RNA, 22 nt, Human
auucaacuguaaacuuguucac

SEQ ID NO: 294084 - RNA, 22 nt, Human
uaaguucauaagcuuauucuua

SEQ ID NO: 294085 - RNA, 22 nt, Human
auuauuagacuuauaugguagu

SEQ ID NO: 294086 - RNA, 20 nt, Human
agcaaacaggcuccaccaga

SEQ ID NO: 294087 - RNA, 19 nt, Human
ccuguggcagaguggaaac

SEQ ID NO: 294088 - RNA, 22 nt, Human
uggcagguagaguucugagaug

SEQ ID NO: 294089 - RNA, 22 nt, Human
aacaguuuauguaaauguccag

SEQ ID NO: 294090 - RNA, 22 nt, Human
gccuccuggaagucacauguuu

SEQ ID NO: 294091 - RNA, 22 nt, Human
uuucaguuuuugcucgauguau

SEQ ID NO: 294092 - RNA, 22 nt, Human
ucuaaacaguuucacucuuaau

SEQ ID NO: 294093 - RNA, 22 nt, Human
agagcggggauaguuaauauuc

SEQ ID NO: 294094 - RNA, 22 nt, Human
uucucugacccccuuaaauauu

SEQ ID NO: 294095 - RNA, 22 nt, Human
aggaccugacauuguguuuucu

SEQ ID NO: 294096 - RNA, 22 nt, Human
ugcaaacaggcauuucacaaac

SEQ ID NO: 294097 - RNA, 22 nt, Human
auauaguuggguuucauucuac

SEQ ID NO: 294098 - RNA, 22 nt, Human
aggguggccaccaaguauguca

SEQ ID NO: 294099 - RNA, 22 nt, Human
accucccagaaaguuuugcagg

SEQ ID NO: 294100 - RNA, 22 nt, Human
acucauugaaacuuaagaucua

SEQ ID NO: 294101 - RNA, 22 nt, Human
ucaggcaaggcccuuagagugu

SEQ ID NO: 294102 - RNA, 22 nt, Human
uauuccaguccuauccucuuuu

SEQ ID NO: 294103 - RNA, 22 nt, Human
ugcauguuaagaaaauauugag

SEQ ID NO: 294104 - RNA, 22 nt, Human
ugaaagcuuugggacaguguga

SEQ ID NO: 294105 - RNA, 22 nt, Human
uuggugaacacauacacauuuu

SEQ ID NO: 294106 - RNA, 22 nt, Human
ugaacauugucacauuccuagc

SEQ ID NO: 294107 - RNA, 22 nt, Human
gauucuuuacaucucugcugac

SEQ ID NO: 294108 - RNA, 22 nt, Human
gaagagaaaggcaaggaguuuu

SEQ ID NO: 294109 - RNA, 22 nt, Human
ucagggcacaggccuguggguu

SEQ ID NO: 294110 - RNA, 21 nt, Human
acaguuuauuagaguaagugc

SEQ ID NO: 294111 - RNA, 15 nt, Human
uuucaaaaugaggcc

SEQ ID NO: 294112 - RNA, 22 nt, Human
ugcguacuguuuauacaugugu

SEQ ID NO: 294113 - RNA, 19 nt, Human
aguguauuuuuuucuguag

SEQ ID NO: 294114 - RNA, 22 nt, Human
uggagcugguaaacagugacau

SEQ ID NO: 294115 - RNA, 20 nt, Human
aaauuacugccacacauuuc

SEQ ID NO: 294116 - RNA, 21 nt, Human
uuuguucaggcaaguuacagu

SEQ ID NO: 294117 - RNA, 22 nt, Human
agcuguguuuccagaugguagc

SEQ ID NO: 294118 - RNA, 22 nt, Human
cuuaggaagcuuuugaggacaa

SEQ ID NO: 294119 - RNA, 20 nt, Human
ugaaagcaugugguauuugg

SEQ ID NO: 294120 - RNA, 22 nt, Human
agguguccaggaagaugcuggc

SEQ ID NO: 294121 - RNA, 22 nt, Human
gcagccacuaguuuuccuguuu

SEQ ID NO: 294122 - RNA, 22 nt, Human
uucaugaauguuccaugugagu

SEQ ID NO: 294123 - RNA, 22 nt, Human
ugagggaauauugauagauccg

SEQ ID NO: 294124 - RNA, 22 nt, Human
ucuuucuuuaucaccugauaug

SEQ ID NO: 294125 - RNA, 22 nt, Human
uggcucaguuuagcagcucagu

SEQ ID NO: 294126 - RNA, 22 nt, Human
aguuuguaaguucauuaugagu

SEQ ID NO: 294127 - RNA, 22 nt, Human
uuccugugaaauauagguccau

SEQ ID NO: 294128 - RNA, 22 nt, Human
aacaguuuguggauagcuugua

SEQ ID NO: 294129 - RNA, 22 nt, Human
auuguauuuguacaagacaugu

SEQ ID NO: 294130 - RNA, 22 nt, Human
ugacauguggcuuugacccagg

SEQ ID NO: 294131 - RNA, 22 nt, Human
agugucugagccagaauuagaa

SEQ ID NO: 294132 - RNA, 22 nt, Human
gcuggcaguguauuguuagcug

SEQ ID NO: 294133 - RNA, 19 nt, Human
uccugcugugugaagggga

SEQ ID NO: 294134 - RNA, 22 nt, Human
uccuggccagaggacaaagcug

SEQ ID NO: 294135 - RNA, 22 nt, Human
uuacacacaauuagcauaguaa

SEQ ID NO: 294136 - RNA, 22 nt, Human
uagggcagccuuauagcuccca

SEQ ID NO: 294137 - RNA, 22 nt, Human
uauuucuaagagauaucuguac

SEQ ID NO: 294138 - RNA, 22 nt, Human
uacauccaaaugaauuagaauu

SEQ ID NO: 294139 - RNA, 19 nt, Human
uccaggaggcugccauuga

SEQ ID NO: 294140 - RNA, 22 nt, Human
ugccugucuucaggagugucac

SEQ ID NO: 294141 - RNA, 22 nt, Human
uguggggccaaagcccagccac

SEQ ID NO: 294142 - RNA, 22 nt, Human
uggucacacauguaucucaaug

SEQ ID NO: 294143 - RNA, 22 nt, Human
gaugaggucauguuuuacauau

SEQ ID NO: 294144 - RNA, 22 nt, Human
aucuauuucugcuaauaacaau

SEQ ID NO: 294145 - RNA, 22 nt, Human
guaaaauugcaauuacuuuugc

SEQ ID NO: 294146 - RNA, 22 nt, Human
aagcagaguuagcuugucaccu

SEQ ID NO: 294147 - RNA, 18 nt, Human
ugucucaguucugcuaug

SEQ ID NO: 294148 - RNA, 22 nt, Human
ugacaagagaccccuccgcagg

SEQ ID NO: 294149 - RNA, 22 nt, Human
agagccaggugcugcuguuuga

SEQ ID NO: 294150 - RNA, 22 nt, Human
cauuguaagaggcuuugcagca

SEQ ID NO: 294151 - RNA, 21 nt, Human
uuucuuucuggcucucacagu

SEQ ID NO: 294152 - RNA, 22 nt, Human
aaauaaguuagcagauuccagu

SEQ ID NO: 294153 - RNA, 22 nt, Human
gauuuucaugauaaacuuguga

SEQ ID NO: 294154 - RNA, 22 nt, Human
agggacucccugggccgacacg

SEQ ID NO: 294155 - RNA, 22 nt, Human
acagugucugacacauuguagc

SEQ ID NO: 294156 - RNA, 22 nt, Human
uucuuaacucaaauauauaucc

SEQ ID NO: 294157 - RNA, 22 nt, Human
uuguuucuuugaaguuucuaga

SEQ ID NO: 294158 - RNA, 22 nt, Human
uuaaggagcagaaugcuuggac

SEQ ID NO: 294159 - RNA, 22 nt, Human
uuucacauaaauggaguaaaga

SEQ ID NO: 294160 - RNA, 22 nt, Human
uuggauuacaugaaaugcagaa

SEQ ID NO: 294161 - RNA, 18 nt, Human
gugcaaugaauagcagag

SEQ ID NO: 294162 - RNA, 22 nt, Human
uguuuacauggagguuuucagc

SEQ ID NO: 294163 - RNA, 22 nt, Human
aaguuuauguugguaagauauc

SEQ ID NO: 294164 - RNA, 22 nt, Human
uggcagguuaugcgggccacau

SEQ ID NO: 294165 - RNA, 22 nt, Human
uuccaugccuagaacaggauuc

SEQ ID NO: 294166 - RNA, 22 nt, Human
acaugccaagauccucgucuuu

SEQ ID NO: 294167 - RNA, 22 nt, Human
agggcccuagggaaugagacau

SEQ ID NO: 294168 - RNA, 22 nt, Human
uacaugugcuggguucuuggcc

SEQ ID NO: 294169 - RNA, 22 nt, Human
cuuguucaguugccucuccugc

SEQ ID NO: 294170 - RNA, 22 nt, Human
gguccuuugccaucucuccacc

SEQ ID NO: 294171 - RNA, 22 nt, Human
ugagggagucaugauuaaggaa

SEQ ID NO: 294172 - RNA, 22 nt, Human
cgcaggugccggcagauggggu

SEQ ID NO: 294173 - RNA, 22 nt, Human
gcagagcacccugcagugguau

SEQ ID NO: 294174 - RNA, 22 nt, Human
cugaggagagaucacguggugu

SEQ ID NO: 294175 - RNA, 22 nt, Human
agggacuauuuacccaucucac

SEQ ID NO: 294176 - RNA, 22 nt, Human
gaguccuuuugugccacaggga

SEQ ID NO: 294177 - RNA, 22 nt, Human
ugggugaggagaggcugucuaa

SEQ ID NO: 294178 - RNA, 21 nt, Human
gguggcucaccugauuggaua

SEQ ID NO: 294179 - RNA, 22 nt, Human
cugaggagauccccccagaagu

SEQ ID NO: 294180 - RNA, 22 nt, Human
accaggcaacugugaaugggcu

SEQ ID NO: 294181 - RNA, 22 nt, Human
aauuuguuauaacuugggcuga

SEQ ID NO: 294182 - RNA, 22 nt, Human
uaaagcugaaaugauuaugaca

SEQ ID NO: 294183 - RNA, 22 nt, Human
ugcagggccaugguggcggcug

SEQ ID NO: 294184 - RNA, 18 nt, Human
ccuagccuccaagcucau

SEQ ID NO: 294185 - RNA, 22 nt, Human
aagagcauauuaauaguggaga

SEQ ID NO: 294186 - RNA, 22 nt, Human
gcuggguggaucggaggcucug

SEQ ID NO: 294187 - RNA, 22 nt, Human
aauuaugagguagauaucacau

SEQ ID NO: 294188 - RNA, 22 nt, Human
guucauguggaaauuuaaaaca

SEQ ID NO: 294189 - RNA, 20 nt, Human
agacucaguuucuaugcucu

SEQ ID NO: 294190 - RNA, 22 nt, Human
gcagcucaguaaaagaggagca

SEQ ID NO: 294191 - RNA, 22 nt, Human
caucagugaaagugaauguucu

SEQ ID NO: 294192 - RNA, 22 nt, Human
uagaacacuugaccacugcucc

SEQ ID NO: 294193 - RNA, 22 nt, Human
acacaugaaagacauuaaggug

SEQ ID NO: 294194 - RNA, 22 nt, Human
acuucaugcagaagagagcugu

SEQ ID NO: 294195 - RNA, 19 nt, Human
auacagauguauccaugau

SEQ ID NO: 294196 - RNA, 22 nt, Human
agccuugaucuugguaacagga

SEQ ID NO: 294197 - RNA, 19 nt, Human
ucuguggccuucccugaug

SEQ ID NO: 294198 - RNA, 22 nt, Human
gacaggcuuccuaagugccaga

SEQ ID NO: 294199 - RNA, 22 nt, Human
uguuuuaagagcgcacuuuaua

SEQ ID NO: 294200 - RNA, 22 nt, Human
uucacaauaggagcaugcaaau

SEQ ID NO: 294201 - RNA, 23 nt, Human
ucugggccacuugucugcacuuc

SEQ ID NO: 294202 - RNA, 22 nt, Human
gcaggcagagaaggaacauuua

SEQ ID NO: 294203 - RNA, 22 nt, Human
agcugguccuuggcaguucuca

SEQ ID NO: 294204 - RNA, 19 nt, Human
agcuccuguucagcagcuc

SEQ ID NO: 294205 - RNA, 22 nt, Human
aauuaggggaggacguaucaua

SEQ ID NO: 294206 - RNA, 22 nt, Human
gccccagcucugccacaacuag

SEQ ID NO: 294207 - RNA, 19 nt, Human
ugucccagacuccgugucu

SEQ ID NO: 294208 - RNA, 22 nt, Human
uuaaaauuauggcccauuugga

SEQ ID NO: 294209 - RNA, 22 nt, Human
ugagcagggacuuugaguguag

SEQ ID NO: 294210 - RNA, 22 nt, Human
gucuuagauuucaccgauaaug

SEQ ID NO: 294211 - RNA, 22 nt, Human
cuugagaaaggaacaggaagcu

SEQ ID NO: 294212 - RNA, 22 nt, Human
cagagagcaugggaggcccgag

SEQ ID NO: 294213 - RNA, 19 nt, Human
uuugaauccagcugguaac

SEQ ID NO: 294214 - RNA, 22 nt, Human
uuccugugguguuucccagaca

SEQ ID NO: 294215 - RNA, 21 nt, Human
cuuuuacauucagucaugaug

SEQ ID NO: 294216 - RNA, 22 nt, Human
uucauuccuucuguaccuugcc

SEQ ID NO: 294217 - RNA, 22 nt, Human
augguaaaagauauacugugca

SEQ ID NO: 294218 - RNA, 22 nt, Human
cagauuuagaguggggcuugga

SEQ ID NO: 294219 - RNA, 22 nt, Human
auuuaaauuuucugauggagag

SEQ ID NO: 294220 - RNA, 22 nt, Human
acuggcagagacccugauggcc

SEQ ID NO: 294221 - RNA, 22 nt, Human
uuucaaauagaaucuuuccaaa

SEQ ID NO: 294222 - RNA, 22 nt, Human
agacauguccacaaagcauuca

SEQ ID NO: 294223 - RNA, 22 nt, Human
aggcucuggaguguggugcugg

SEQ ID NO: 294224 - RNA, 22 nt, Human
aacugauuguuggaugauagug

SEQ ID NO: 294225 - RNA, 22 nt, Human
aaauauguaaccaaggugaagu

SEQ ID NO: 294226 - RNA, 22 nt, Human
cagugaggugcccagccugccc

SEQ ID NO: 294227 - RNA, 22 nt, Human
gccugugaugcccccauaagua

SEQ ID NO: 294228 - RNA, 22 nt, Human
cacaugcauuggcaaaagugua

SEQ ID NO: 294229 - RNA, 22 nt, Human
uagcuuuaccauagaagaguau

SEQ ID NO: 294230 - RNA, 22 nt, Human
aagcccuguaaauugcccuuaa

SEQ ID NO: 294231 - RNA, 22 nt, Human
uacuuuaaaaacugauaauuca

SEQ ID NO: 294232 - RNA, 22 nt, Human
cuccuggcccugagcucccagg

SEQ ID NO: 294233 - RNA, 22 nt, Human
uacaaagagguaauugcauaua

SEQ ID NO: 294234 - RNA, 22 nt, Human
cccugcaguccuuucuuggcuc

SEQ ID NO: 294235 - RNA, 22 nt, Human
ccauggcuaaguaucuguagaa

SEQ ID NO: 294236 - RNA, 22 nt, Human
auaugaaaguaagcaugugugu

SEQ ID NO: 294237 - RNA, 22 nt, Human
ucuguggcaguucugguucauc

SEQ ID NO: 294238 - RNA, 20 nt, Human
agaaccuaaguuaaaacaca

SEQ ID NO: 294239 - RNA, 19 nt, Human
agggauauuuaaaaagcuc

SEQ ID NO: 294240 - RNA, 22 nt, Human
acaaauuauagaaaauugagcu

SEQ ID NO: 294241 - RNA, 22 nt, Human
ccaugcauauaauagugccugg

SEQ ID NO: 294242 - RNA, 22 nt, Human
agcagguggauuuagacgggag

SEQ ID NO: 294243 - RNA, 22 nt, Human
guguguccuugggccucugcag

SEQ ID NO: 294244 - RNA, 18 nt, Human
cuguucagcugaacuaca

SEQ ID NO: 294245 - RNA, 22 nt, Human
aauucaacagucaguuaucuca

SEQ ID NO: 294246 - RNA, 22 nt, Human
uggcaaggccacaggugcaguu

SEQ ID NO: 294247 - RNA, 22 nt, Human
agaggcaagggaccuuucuggg

SEQ ID NO: 294248 - RNA, 22 nt, Human
cugcagggaugugaggcccguu

SEQ ID NO: 294249 - RNA, 22 nt, Human
aaacaagucacuuuaucuugaa

SEQ ID NO: 294250 - RNA, 22 nt, Human
uugcagggaaauagaaauaaac

SEQ ID NO: 294251 - RNA, 22 nt, Human
ucugugcaggaagucauuauga

SEQ ID NO: 294252 - RNA, 22 nt, Human
ucacauuuucuacuacuguacg

SEQ ID NO: 294253 - RNA, 20 nt, Human
uuucuguagcucaguauuca

SEQ ID NO: 294254 - RNA, 22 nt, Human
aguuguaagagacagauauaaa

SEQ ID NO: 294255 - RNA, 22 nt, Human
cuaaagcucaacaggcacuauu

SEQ ID NO: 294256 - RNA, 18 nt, Human
agucaguugauggggacc

SEQ ID NO: 294257 - RNA, 22 nt, Human
uacaggugguaaaaauauuguu

SEQ ID NO: 294258 - RNA, 22 nt, Human
guaauagucucaaacuccugga

SEQ ID NO: 294259 - RNA, 22 nt, Human
cccacacacuggcugcugccaa

SEQ ID NO: 294260 - RNA, 22 nt, Human
acaaauaugguacucggagaaa

SEQ ID NO: 294261 - RNA, 22 nt, Human
agggaauguagcaagaugccaa

SEQ ID NO: 294262 - RNA, 22 nt, Human
ucucaguguguuuucucucaga

SEQ ID NO: 294263 - RNA, 22 nt, Human
auacaacuuuaucuguaaugag

SEQ ID NO: 294264 - RNA, 22 nt, Human
uaguuuuacuugcgaugauaau

SEQ ID NO: 294265 - RNA, 22 nt, Human
gaaugacauugaaaagacauug

SEQ ID NO: 294266 - RNA, 22 nt, Human
caaggaaacaugaaaugcauug

SEQ ID NO: 294267 - RNA, 22 nt, Human
auauuuuccgaacuugagguag

SEQ ID NO: 294268 - RNA, 22 nt, Human
cuuaauuucaaacugcuaguga

SEQ ID NO: 294269 - RNA, 22 nt, Human
guuaauuugcagcuuucgagcu

SEQ ID NO: 294270 - RNA, 18 nt, Human
cagagcagagguggagcg

SEQ ID NO: 294271 - RNA, 22 nt, Human
agucucuuuaaucacagugucu

SEQ ID NO: 294272 - RNA, 22 nt, Human
guauacaugugguaaaaugcac

SEQ ID NO: 294273 - RNA, 22 nt, Human
uaaauuuacccaaggaacaugu

SEQ ID NO: 294274 - RNA, 22 nt, Human
ugauagaaaggaaauuaauugg

SEQ ID NO: 294275 - RNA, 22 nt, Human
caccaucagcagcaggugucaa

SEQ ID NO: 294276 - RNA, 23 nt, Human
auguuaaacauaacugaagagcc

SEQ ID NO: 294277 - RNA, 22 nt, Human
gcagagaccccgcagugaggcc

SEQ ID NO: 294278 - RNA, 23 nt, Human
cuggccaccaucuuucuggcuuc

SEQ ID NO: 294279 - RNA, 19 nt, Human
aauacaguguuauagaauu

SEQ ID NO: 294280 - RNA, 22 nt, Human
uccucagaauggauggcagggg

SEQ ID NO: 294281 - RNA, 22 nt, Human
gaagggaaggaaagaaccagca

SEQ ID NO: 294282 - RNA, 22 nt, Human
uuuccaaauaaggucacauucu

SEQ ID NO: 294283 - RNA, 22 nt, Human
ugaugguuuuauuaauaggacc

SEQ ID NO: 294284 - RNA, 22 nt, Human
cauccaaagcaaauaucuuaaa

SEQ ID NO: 294285 - RNA, 20 nt, Human
uuucugugagaaacacuguu

SEQ ID NO: 294286 - RNA, 22 nt, Human
auucuuucauauaaaggcucag

SEQ ID NO: 294287 - RNA, 22 nt, Human
aaaaugaggaacggaucauggc

SEQ ID NO: 294288 - RNA, 22 nt, Human
cauuagggacugaggaauaagg

SEQ ID NO: 294289 - RNA, 22 nt, Human
gcagggcacaaggacgcacagg

SEQ ID NO: 294290 - RNA, 22 nt, Human
aaguaguuaguccgccugcucu

SEQ ID NO: 294291 - RNA, 22 nt, Human
cagggcucgcucgcucgcucgc

SEQ ID NO: 294292 - RNA, 22 nt, Human
uuuccaagagcuuauuucugaa

SEQ ID NO: 294293 - RNA, 22 nt, Human
gacagguggguucucguaucug

SEQ ID NO: 294294 - RNA, 22 nt, Human
cuccagugagcgcggggcaugg

SEQ ID NO: 294295 - RNA, 22 nt, Human
ugccuugacaguuguaagaccu

SEQ ID NO: 294296 - RNA, 22 nt, Human
uuucucauagucaugccucuua

SEQ ID NO: 294297 - RNA, 20 nt, Human
ucaggaugugcugagugaag

SEQ ID NO: 294298 - RNA, 22 nt, Human
cagguggugccuccaggcuggu

SEQ ID NO: 294299 - RNA, 22 nt, Human
gaagccuugaacugcaaacccc

SEQ ID NO: 294300 - RNA, 22 nt, Human
gauugcuguucccagggggcug

SEQ ID NO: 294301 - RNA, 22 nt, Human
acuuggugaagucaggugauua

SEQ ID NO: 294302 - RNA, 21 nt, Human
gcugccaccgcgugcuccagg

SEQ ID NO: 294303 - RNA, 22 nt, Human
cuuccuucaauauaauuuuuac

SEQ ID NO: 294304 - RNA, 22 nt, Human
uuaccuguguguuugauacaua

SEQ ID NO: 294305 - RNA, 22 nt, Human
gcaaggagcaccuuucuggaac

SEQ ID NO: 294306 - RNA, 22 nt, Human
agagcaauuagcuuagguaaaa

SEQ ID NO: 294307 - RNA, 22 nt, Human
agagucaguuagcgaauacuua

SEQ ID NO: 294308 - RNA, 19 nt, Human
acacaaugacacauauaua

SEQ ID NO: 294309 - RNA, 22 nt, Human
guucuucaucauuaacacucug

SEQ ID NO: 294310 - RNA, 22 nt, Human
uuaaauuauugagggauuguca

SEQ ID NO: 294311 - RNA, 22 nt, Human
uaguuuaccaaauugaucuucc

SEQ ID NO: 294312 - RNA, 22 nt, Human
cuugccugaggaacagagggua

SEQ ID NO: 294313 - RNA, 22 nt, Human
gacaagcucgccugccccggaa

SEQ ID NO: 294314 - RNA, 22 nt, Human
acagguguuuuggaggaugauu

SEQ ID NO: 294315 - RNA, 22 nt, Human
gcacccagagggcagggucucc

SEQ ID NO: 294316 - RNA, 22 nt, Human
caggcucacuuucucagucaca

SEQ ID NO: 294317 - RNA, 23 nt, Human
ugucucagacugagggguuuccc

SEQ ID NO: 294318 - RNA, 22 nt, Human
ggaacuggagaaugcccucuuu

SEQ ID NO: 294319 - RNA, 22 nt, Human
uuuauugucuucguggugccua

SEQ ID NO: 294320 - RNA, 22 nt, Human
acagagagaauuggguuuacag

SEQ ID NO: 294321 - RNA, 22 nt, Human
uaaagcuguuagaguaguaaga

SEQ ID NO: 294322 - RNA, 22 nt, Human
gucagcauaguucacacacagu

SEQ ID NO: 294323 - RNA, 22 nt, Human
ccuguucaagguauuaauuauc

SEQ ID NO: 294324 - RNA, 22 nt, Human
uuuacugaauuugguauauucc

SEQ ID NO: 294325 - RNA, 22 nt, Human
cuccugggcuucgaaggcuccc

SEQ ID NO: 294326 - RNA, 22 nt, Human
cuugcuggaaacucucucugcc

SEQ ID NO: 294327 - RNA, 22 nt, Human
acaguguagaauccuguacuua

SEQ ID NO: 294328 - RNA, 22 nt, Human
ccugaguguaauaaugaaggca

SEQ ID NO: 294329 - RNA, 22 nt, Human
acauuuaaauaccuauguuucu

SEQ ID NO: 294330 - RNA, 22 nt, Human
auccaugaucaauuuauuacua

SEQ ID NO: 294331 - RNA, 22 nt, Human
uguccucaggaccuggcacagu

SEQ ID NO: 294332 - RNA, 22 nt, Human
gccaggcaggccacgcuguguu

SEQ ID NO: 294333 - RNA, 17 nt, Human
uccaggcagcaacugag

SEQ ID NO: 294334 - RNA, 22 nt, Human
ugugcucuucuguuacuuguag

SEQ ID NO: 294335 - RNA, 22 nt, Human
ggccagggggcuucagacucca

SEQ ID NO: 294336 - RNA, 22 nt, Human
uaaagcacauaucuuacaauaa

SEQ ID NO: 294337 - RNA, 22 nt, Human
gauuguaauuuucaagagguaa

SEQ ID NO: 294338 - RNA, 22 nt, Human
ugcuggcuggagugccucugga

SEQ ID NO: 294339 - RNA, 22 nt, Human
agagggaaugugauugcaccau

SEQ ID NO: 294340 - RNA, 16 nt, Human
cagcuuuaugucagug

SEQ ID NO: 294341 - RNA, 22 nt, Human
acaggaggggcaugaaagacgg

SEQ ID NO: 294342 - RNA, 22 nt, Human
ucuggaugauaugugaacuuga

SEQ ID NO: 294343 - RNA, 22 nt, Human
ucagaagccaccuuuuguuggg

SEQ ID NO: 294344 - RNA, 22 nt, Human
uucucuuaucuggcauuauugg

SEQ ID NO: 294345 - RNA, 20 nt, Human
aauuuuacuguccuauagag

SEQ ID NO: 294346 - RNA, 22 nt, Human
uagggauguccugagacuuggc

SEQ ID NO: 294347 - RNA, 22 nt, Human
uuuguuacaaagaaagaagagc

SEQ ID NO: 294348 - RNA, 22 nt, Human
gagcacugaggaaagcugguua

SEQ ID NO: 294349 - RNA, 22 nt, Human
ucugaagagcuuuggaaguaug

SEQ ID NO: 294350 - RNA, 22 nt, Human
gagugcaggccugagcaccauc

SEQ ID NO: 294351 - RNA, 22 nt, Human
uuguuuuggaagaacuuacucu

SEQ ID NO: 294352 - RNA, 22 nt, Human
aagauuuaccacuuuauucaag

SEQ ID NO: 294353 - RNA, 22 nt, Human
ccagugucuagucacagguacu

SEQ ID NO: 294354 - RNA, 23 nt, Human
aguguugguugggaagccaagca

SEQ ID NO: 294355 - RNA, 22 nt, Human
ccccugaagacaauggagaggu

SEQ ID NO: 294356 - RNA, 22 nt, Human
uacagcuaggcaaaaaugacau

SEQ ID NO: 294357 - RNA, 22 nt, Human
cuucuucagcacaauauugaug

SEQ ID NO: 294358 - RNA, 22 nt, Human
uagcgagguguuucuaggacug

SEQ ID NO: 294359 - RNA, 22 nt, Human
cauaaauucaguucugccucuu

SEQ ID NO: 294360 - RNA, 22 nt, Human
uccuggcauugugcagggugug

SEQ ID NO: 294361 - RNA, 23 nt, Human
uacuauaacgcugugucagcucc

SEQ ID NO: 294362 - RNA, 22 nt, Human
aaaugaguagcgaugcacauua

SEQ ID NO: 294363 - RNA, 22 nt, Human
cuuuucaugccagcccaucaca

SEQ ID NO: 294364 - RNA, 22 nt, Human
acuguucauuuggauuucucug

SEQ ID NO: 294365 - RNA, 22 nt, Human
acaguguuuauguacagauugu

SEQ ID NO: 294366 - RNA, 17 nt, Human
ugacagacaucaugagc

SEQ ID NO: 294367 - RNA, 22 nt, Human
ccuggcagguuacaaccaguua

SEQ ID NO: 294368 - RNA, 22 nt, Human
cacuuuauuauaaauuugagag

SEQ ID NO: 294369 - RNA, 22 nt, Human
gagucagaugaagauaaaaggg

SEQ ID NO: 294370 - RNA, 22 nt, Human
ucugggcccuaaaccagcucua

SEQ ID NO: 294371 - RNA, 22 nt, Human
gagagaaaugugcaguuugggc

SEQ ID NO: 294372 - RNA, 22 nt, Human
agauuuacaaaggauuugcuuu

SEQ ID NO: 294373 - RNA, 22 nt, Human
agucagagaauguuuucaugga

SEQ ID NO: 294374 - RNA, 22 nt, Human
auuucuguggcuucauucuccu

SEQ ID NO: 294375 - RNA, 22 nt, Human
auguacaagcuguuuuacugca

SEQ ID NO: 294376 - RNA, 22 nt, Human
ugcagggauuagaggccgggga

SEQ ID NO: 294377 - RNA, 22 nt, Human
aaagugguuucccaguucagua

SEQ ID NO: 294378 - RNA, 22 nt, Human
gcugguagaccucacugcacuc

SEQ ID NO: 294379 - RNA, 19 nt, Human
agacacacuuacguggaau

SEQ ID NO: 294380 - RNA, 22 nt, Human
aguguccuuaguuagcuuuggg

SEQ ID NO: 294381 - RNA, 22 nt, Human
aggaggaauugacacagaagcc

SEQ ID NO: 294382 - RNA, 22 nt, Human
cuucuuucccaggcauguuuua

SEQ ID NO: 294383 - RNA, 22 nt, Human
aauguugagcuugaaaguaggu

SEQ ID NO: 294384 - RNA, 22 nt, Human
ucuucuguuaccacagcgauga

SEQ ID NO: 294385 - RNA, 22 nt, Human
ccagagagcuacaaggcauaaa

SEQ ID NO: 294386 - RNA, 22 nt, Human
agcagggcuggggcacgagcca

SEQ ID NO: 294387 - RNA, 22 nt, Human
uagcuauuuugcuuggaaauac

SEQ ID NO: 294388 - RNA, 22 nt, Human
ucaacguuuguuaaaugaguau

SEQ ID NO: 294389 - RNA, 22 nt, Human
augcaggagcccucuugagggc

SEQ ID NO: 294390 - RNA, 22 nt, Human
aggaaauguaguccucaucucc

SEQ ID NO: 294391 - RNA, 22 nt, Human
agguccugucuaucacccucgc

SEQ ID NO: 294392 - RNA, 22 nt, Human
ugcaggugguccauuugggaac

SEQ ID NO: 294393 - RNA, 22 nt, Human
aagugucuagcaccuggaugca

SEQ ID NO: 294394 - RNA, 22 nt, Human
cuuguuuuggcuaguaugaugu

SEQ ID NO: 294395 - RNA, 23 nt, Human
ccacagagcugccaauuccugug

SEQ ID NO: 294396 - RNA, 20 nt, Human
ugcuuuaugcuauacuuugu

SEQ ID NO: 294397 - RNA, 22 nt, Human
ucagcuuugaucucaggcaauc

SEQ ID NO: 294398 - RNA, 22 nt, Human
cuuccuucugaagcauagaagc

SEQ ID NO: 294399 - RNA, 22 nt, Human
uucagaaagugaaucuuguuau

SEQ ID NO: 294400 - RNA, 22 nt, Human
ucuacauuuucacaaggucucc

SEQ ID NO: 294401 - RNA, 20 nt, Human
gccugcagguuggaugggau

SEQ ID NO: 294402 - RNA, 22 nt, Human
aaaugcuaacaaggaaugcugc

SEQ ID NO: 294403 - RNA, 22 nt, Human
acagcuuuguuuucccugcuga

SEQ ID NO: 294404 - RNA, 22 nt, Human
ucccucucuagccuguucagua

SEQ ID NO: 294405 - RNA, 22 nt, Human
ucuugcagaggcacugugucag

SEQ ID NO: 294406 - RNA, 22 nt, Human
aggaauguguguccaccgggga

SEQ ID NO: 294407 - RNA, 22 nt, Human
gcaaagcaucaguagaaauguu

SEQ ID NO: 294408 - RNA, 22 nt, Human
ggagcccugcccuaggcagcuc

SEQ ID NO: 294409 - RNA, 22 nt, Human
ccuggcaggacuguuguaagaa

SEQ ID NO: 294410 - RNA, 18 nt, Human
uggcagugagguaggcau

SEQ ID NO: 294411 - RNA, 22 nt, Human
guuguaaauacagcagauaauu

SEQ ID NO: 294412 - RNA, 22 nt, Human
ucaauguucaaguaugacaaug

SEQ ID NO: 294413 - RNA, 22 nt, Human
gggugggguucaggaaucuuca

SEQ ID NO: 294414 - RNA, 22 nt, Human
aaggcagauaagaauucagcaa

SEQ ID NO: 294415 - RNA, 22 nt, Human
caagcuuuauccgccauguagg

SEQ ID NO: 294416 - RNA, 22 nt, Human
ugcuauuugggggcuacaugau

SEQ ID NO: 294417 - RNA, 22 nt, Human
acccagggucaccccguagggu

SEQ ID NO: 294418 - RNA, 22 nt, Human
ucugugccaccucuccaguguc

SEQ ID NO: 294419 - RNA, 22 nt, Human
gauuuuacaaacugcaggaccc

SEQ ID NO: 294420 - RNA, 22 nt, Human
uuuccauguuaucuugcagacu

SEQ ID NO: 294421 - RNA, 22 nt, Human
uuucaguucaguuuauuauauc

SEQ ID NO: 294422 - RNA, 22 nt, Human
acaugacauaguagaaaagccc

SEQ ID NO: 294423 - RNA, 22 nt, Human
gcauucauguccuuccugaacg

SEQ ID NO: 294424 - RNA, 22 nt, Human
uuugcugacuggaugcaguugg

SEQ ID NO: 294425 - RNA, 22 nt, Human
cuguuauuugagaguguugaau

SEQ ID NO: 294426 - RNA, 22 nt, Human
uuucacauuuguuuuaagaagu

SEQ ID NO: 294427 - RNA, 22 nt, Human
caaaagcagcaaguuuauaugu

SEQ ID NO: 294428 - RNA, 22 nt, Human
ccagcaggagaugccugugucu

SEQ ID NO: 294429 - RNA, 22 nt, Human
uuagcuuucagccuuucucacc

SEQ ID NO: 294430 - RNA, 22 nt, Human
ugaaaugauuauaugguguuug

SEQ ID NO: 294431 - RNA, 22 nt, Human
acccagggcagccagcggggag

SEQ ID NO: 294432 - RNA, 22 nt, Human
ucacauucuucccugacuucuu

SEQ ID NO: 294433 - RNA, 22 nt, Human
agucucaggcagaggaaggcua

SEQ ID NO: 294434 - RNA, 18 nt, Human
ccauggcucccuccugcc

SEQ ID NO: 294435 - RNA, 22 nt, Human
gguuccuucugaggucccugua

SEQ ID NO: 294436 - RNA, 22 nt, Human
gaggccugucgcuaggccucug

SEQ ID NO: 294437 - RNA, 21 nt, Human
uaaaucucuguauucuucagu

SEQ ID NO: 294438 - RNA, 20 nt, Human
ucagagagagggugccacuu

SEQ ID NO: 294439 - RNA, 22 nt, Human
cugucuguguggacacggcugc

SEQ ID NO: 294440 - RNA, 22 nt, Human
agcuucuguucaucuuccaggc

SEQ ID NO: 294441 - RNA, 22 nt, Human
agauguuuuggagacacuaacc

SEQ ID NO: 294442 - RNA, 18 nt, Human
ggugagggagcuggaagc

SEQ ID NO: 294443 - RNA, 21 nt, Human
aggaggaacccguggcugggc

SEQ ID NO: 294444 - RNA, 20 nt, Human
ccagguggugccuggagagg

SEQ ID NO: 294445 - RNA, 22 nt, Human
ccuggagggcagcccauucugg

SEQ ID NO: 294446 - RNA, 22 nt, Human
aucuuauuuaacacagcaaaac

SEQ ID NO: 294447 - RNA, 22 nt, Human
ugcugagcgcauccggcggccg

SEQ ID NO: 294448 - RNA, 19 nt, Human
gccugcagaaaaggcaggg

SEQ ID NO: 294449 - RNA, 21 nt, Human
cagcuucuucugugaccuggu

SEQ ID NO: 294450 - RNA, 22 nt, Human
gcugaaaggggugacauucuuu

SEQ ID NO: 294451 - RNA, 22 nt, Human
agucacccuccaacucuccacu

SEQ ID NO: 294452 - RNA, 22 nt, Human
cuuaggcaagcagagcccaucc

SEQ ID NO: 294453 - RNA, 22 nt, Human
cccuguuuuaaguugauauuga

SEQ ID NO: 294454 - RNA, 22 nt, Human
ucuggcuagauugaugaguccc

SEQ ID NO: 294455 - RNA, 19 nt, Human
gcaggcagcugggguaucc

SEQ ID NO: 294456 - RNA, 22 nt, Human
caaguguccaugauagucuuag

SEQ ID NO: 294457 - RNA, 22 nt, Human
uacaguaagaugaaauagcaau

SEQ ID NO: 294458 - RNA, 22 nt, Human
uuuguuuacaaaaauaagcagu

SEQ ID NO: 294459 - RNA, 22 nt, Human
auccagaacaccuguaucacca

SEQ ID NO: 294460 - RNA, 22 nt, Human
agaggacagacggaaagugcca

SEQ ID NO: 294461 - RNA, 22 nt, Human
uguccucaucuuuuccagaaau

SEQ ID NO: 294462 - RNA, 22 nt, Human
uuccaggauagcuuucaggaau

SEQ ID NO: 294463 - RNA, 19 nt, Human
uuucugucuguguuuugcc

SEQ ID NO: 294464 - RNA, 22 nt, Human
ugcaaaaacagccuugaggccu

SEQ ID NO: 294465 - RNA, 22 nt, Human
guuucaaagcacagcucacauu

SEQ ID NO: 294466 - RNA, 22 nt, Human
ccuggagguggagguugcagug

SEQ ID NO: 294467 - RNA, 22 nt, Human
uuuacaguccccaggugaggau

SEQ ID NO: 294468 - RNA, 22 nt, Human
uggaauguuuccccagccugca

SEQ ID NO: 294469 - RNA, 22 nt, Human
uauaguuucaugagcuuuuuaa

SEQ ID NO: 294470 - RNA, 22 nt, Human
ugcccacauggugccauggcca

SEQ ID NO: 294471 - RNA, 22 nt, Human
uugccaucccuuaccucaguca

SEQ ID NO: 294472 - RNA, 22 nt, Human
uuguuuaauaucgugaaguacu

SEQ ID NO: 294473 - RNA, 22 nt, Human
uccaugagcuagcuuuccaaag

SEQ ID NO: 294474 - RNA, 22 nt, Human
agauggucugguuauuuuuagu

SEQ ID NO: 294475 - RNA, 22 nt, Human
caggugguuguuuggauucuaa

SEQ ID NO: 294476 - RNA, 22 nt, Human
acuuguuucaacuguacucuca

SEQ ID NO: 294477 - RNA, 22 nt, Human
uaugugucaaaccauucaucug

SEQ ID NO: 294478 - RNA, 21 nt, Human
gccugcccucugugauggcca

SEQ ID NO: 294479 - RNA, 22 nt, Human
gggcugaccaaugccuugcuuu

SEQ ID NO: 294480 - RNA, 22 nt, Human
aaauucagcagugaaaugcccc

SEQ ID NO: 294481 - RNA, 22 nt, Human
ggacagacaaaaauaguaagca

SEQ ID NO: 294482 - RNA, 22 nt, Human
cacccaggcagguggcugagaa

SEQ ID NO: 294483 - RNA, 22 nt, Human
acugucaucuuguaagcaaugu

SEQ ID NO: 294484 - RNA, 22 nt, Human
ugaggcaaucccuaggguaagg

SEQ ID NO: 294485 - RNA, 22 nt, Human
cagguucuuaacuuguucuucc

SEQ ID NO: 294486 - RNA, 22 nt, Human
cccagccuuugcuuccugguuc

SEQ ID NO: 294487 - RNA, 22 nt, Human
cacauuccccagagcuggggcu

SEQ ID NO: 294488 - RNA, 22 nt, Human
uggcaaaggaaaugauuuaaga

SEQ ID NO: 294489 - RNA, 22 nt, Human
acauuccucagugccaguugag

SEQ ID NO: 294490 - RNA, 22 nt, Human
uuagggaaggcugcugucagcu

SEQ ID NO: 294491 - RNA, 22 nt, Human
ugaaacacugcgauaaaauccu

SEQ ID NO: 294492 - RNA, 22 nt, Human
acagguggccccgagggagugg

SEQ ID NO: 294493 - RNA, 22 nt, Human
uucucugaaggccaugcucacu

SEQ ID NO: 294494 - RNA, 22 nt, Human
caaauucucuuacuguuugaca

SEQ ID NO: 294495 - RNA, 22 nt, Human
aaaauaugaaguugucaguaug

SEQ ID NO: 294496 - RNA, 22 nt, Human
acuguucaucucuuagaaagua

SEQ ID NO: 294497 - RNA, 22 nt, Human
cagcuuuagagaaaacauauuu

SEQ ID NO: 294498 - RNA, 22 nt, Human
cacaucagggcugcuugggggu

SEQ ID NO: 294499 - RNA, 22 nt, Human
uaacaauaguguuugcuaguca

SEQ ID NO: 294500 - RNA, 22 nt, Human
ucuguucacugagcaauggcaa

SEQ ID NO: 294501 - RNA, 22 nt, Human
uuuuucauugcagccucucucc

SEQ ID NO: 294502 - RNA, 22 nt, Human
gugcaaaagucauugugguuuu

SEQ ID NO: 294503 - RNA, 22 nt, Human
agcaaggccgagaggaugcuau

SEQ ID NO: 294504 - RNA, 22 nt, Human
caauagugucugcuuguuucua

SEQ ID NO: 294505 - RNA, 21 nt, Human
gcagugucaugguuucaaguu

SEQ ID NO: 294506 - RNA, 21 nt, Human
acagauuuuauaucucugcug

SEQ ID NO: 294507 - RNA, 22 nt, Human
augacauaaagcuaugcuaggu

SEQ ID NO: 294508 - RNA, 22 nt, Human
uugcacuaggaaaaggcagcca

SEQ ID NO: 294509 - RNA, 22 nt, Human
gguggcagagaggagguaguuu

SEQ ID NO: 294510 - RNA, 22 nt, Human
aguucucaagacaauuaccugu

SEQ ID NO: 294511 - RNA, 22 nt, Human
agcuccugauacaugcaggaau

SEQ ID NO: 294512 - RNA, 22 nt, Human
uuguguccaaggcuauggugau

SEQ ID NO: 294513 - RNA, 22 nt, Human
ucaucaguuuagaaaaaauaug

SEQ ID NO: 294514 - RNA, 22 nt, Human
aauuuuacuucccucaguguag

SEQ ID NO: 294515 - RNA, 22 nt, Human
ccagguguaggacaccaaggga

SEQ ID NO: 294516 - RNA, 22 nt, Human
gugcaaaaguaacugugguuuu

SEQ ID NO: 294517 - RNA, 22 nt, Human
ugggcuucauaauugguccuag

SEQ ID NO: 294518 - RNA, 22 nt, Human
uucauguaguguaaugucuuca

SEQ ID NO: 294519 - RNA, 22 nt, Human
uuuggaguuuaacaacuugaag

SEQ ID NO: 294520 - RNA, 22 nt, Human
uuucacauggaagcucucgaga

SEQ ID NO: 294521 - RNA, 22 nt, Human
aggcagggugaugauaaugauu

SEQ ID NO: 294522 - RNA, 22 nt, Human
uucacuuaacaucauaucauga

SEQ ID NO: 294523 - RNA, 22 nt, Human
uucagagaagcaaaggcagauu

SEQ ID NO: 294524 - RNA, 22 nt, Human
uauauuauaagcccuuucagaa

SEQ ID NO: 294525 - RNA, 17 nt, Human
caguggcagaucuucuc

SEQ ID NO: 294526 - RNA, 22 nt, Human
cuggagugacuuuguuccuuuu

SEQ ID NO: 294527 - RNA, 22 nt, Human
uuagagguucuaugugucugga

SEQ ID NO: 294528 - RNA, 22 nt, Human
uucuuuauugagacuucauugu

SEQ ID NO: 294529 - RNA, 22 nt, Human
aacuugguuguuggcaauuugc

SEQ ID NO: 294530 - RNA, 22 nt, Human
ucagggcagccuaaggcaccuc

SEQ ID NO: 294531 - RNA, 22 nt, Human
gcaugugugucacuuuccugcc

SEQ ID NO: 294532 - RNA, 22 nt, Human
gcagaagucagaccaucugaau

SEQ ID NO: 294533 - RNA, 22 nt, Human
cucaccccacuaccccuuggug

SEQ ID NO: 294534 - RNA, 22 nt, Human
guuuacaaauauuuuaaauggu

SEQ ID NO: 294535 - RNA, 21 nt, Human
gcugcccaacccugcaucucc

SEQ ID NO: 294536 - RNA, 22 nt, Human
aggcucugaucagguggcugug

SEQ ID NO: 294537 - RNA, 22 nt, Human
acaggugucugcaaguuacugg

SEQ ID NO: 294538 - RNA, 22 nt, Human
gagacugcauagauggccacaa

SEQ ID NO: 294539 - RNA, 22 nt, Human
ucuguggcugucuuuccagagg

SEQ ID NO: 294540 - RNA, 22 nt, Human
acauucuuugaguuuuguuaaa

SEQ ID NO: 294541 - RNA, 22 nt, Human
auucugauaucuuauucuagcu

SEQ ID NO: 294542 - RNA, 22 nt, Human
aaacaugagcaucucuucaagc

SEQ ID NO: 294543 - RNA, 22 nt, Human
uauuucaacguaugaaaagcug

SEQ ID NO: 294544 - RNA, 22 nt, Human
uaugcauacaaugagauauucc

SEQ ID NO: 294545 - RNA, 22 nt, Human
gcccagcacauugcugaggacc

SEQ ID NO: 294546 - RNA, 22 nt, Human
aaagcugcuuugguuucuggaa

SEQ ID NO: 294547 - RNA, 22 nt, Human
ucaguguuggcauucagaaaug

SEQ ID NO: 294548 - RNA, 22 nt, Human
cugagccagcuggcaugugcua

SEQ ID NO: 294549 - RNA, 22 nt, Human
uccuggcucucuacaaaccaga

SEQ ID NO: 294550 - RNA, 22 nt, Human
ggagggaaccuuggcuggauug

SEQ ID NO: 294551 - RNA, 22 nt, Human
aagcugcacuacuugagggacc

SEQ ID NO: 294552 - RNA, 22 nt, Human
uucugaaagccaauucauugaa

SEQ ID NO: 294553 - RNA, 22 nt, Human
agaccuggagugaagaguuccc

SEQ ID NO: 294554 - RNA, 22 nt, Human
agcaggugaauuccuggaugug

SEQ ID NO: 294555 - RNA, 22 nt, Human
gccugggugagggucuccuuca

SEQ ID NO: 294556 - RNA, 22 nt, Human
gaggccuggucuaugagauguu

SEQ ID NO: 294557 - RNA, 22 nt, Human
acauggcuaaauuagcuuuacu

SEQ ID NO: 294558 - RNA, 22 nt, Human
auugaaucugcacuaguauuuu

SEQ ID NO: 294559 - RNA, 22 nt, Human
uggcugugaacaaagagaauaa

SEQ ID NO: 294560 - RNA, 22 nt, Human
cugaaugagggauucugagggc

SEQ ID NO: 294561 - RNA, 22 nt, Human
gcuggcagguccaagauagagc

SEQ ID NO: 294562 - RNA, 17 nt, Human
uuucuccuuccaucuca

SEQ ID NO: 294563 - RNA, 22 nt, Human
cagcaugaugcucacacaaaac

SEQ ID NO: 294564 - RNA, 22 nt, Human
uuucuuagcgaugcuugauaaa

SEQ ID NO: 294565 - RNA, 22 nt, Human
cucugugcccuacugcucagcu

SEQ ID NO: 294566 - RNA, 22 nt, Human
aagaugaaucaguauguguccu

SEQ ID NO: 294567 - RNA, 22 nt, Human
cacuggaauucaagauacugag

SEQ ID NO: 294568 - RNA, 22 nt, Human
agcauccaggccagguugggca

SEQ ID NO: 294569 - RNA, 22 nt, Human
uuuguucagcucucauugauua

SEQ ID NO: 294570 - RNA, 22 nt, Human
cagggcucugccuugagggaug

SEQ ID NO: 294571 - RNA, 22 nt, Human
accaggcaguauggugcugcaa

SEQ ID NO: 294572 - RNA, 22 nt, Human
gaagacaagcugaguguugucc

SEQ ID NO: 294573 - RNA, 22 nt, Human
uccuggucagugccaaacuggu

SEQ ID NO: 294574 - RNA, 22 nt, Human
uuccagagaaaagguuuauuuc

SEQ ID NO: 294575 - RNA, 22 nt, Human
guuuguuagaagagcagaaucu

SEQ ID NO: 294576 - RNA, 22 nt, Human
ugacaagauagauugaguuuua

SEQ ID NO: 294577 - RNA, 22 nt, Human
cugggcucaaauccuggcccug

SEQ ID NO: 294578 - RNA, 22 nt, Human
ccaggccucaccugcccaccua

SEQ ID NO: 294579 - RNA, 22 nt, Human
acugucuuccaggucuggaggu

SEQ ID NO: 294580 - RNA, 22 nt, Human
uugauuccuugaaauauccuug

SEQ ID NO: 294581 - RNA, 22 nt, Human
gauggugcaggugaagugcugg

SEQ ID NO: 294582 - RNA, 22 nt, Human
ucuccugguacccuuccuagca

SEQ ID NO: 294583 - RNA, 22 nt, Human
gccuguuugacuggucucugcu

SEQ ID NO: 294584 - RNA, 22 nt, Human
aagcaaaagguuacacuucugg

SEQ ID NO: 294585 - RNA, 22 nt, Human
auuagcuuuauuugaaauagga

SEQ ID NO: 294586 - RNA, 22 nt, Human
cauuuacacacagaggugugcu

SEQ ID NO: 294587 - RNA, 21 nt, Human
auacauucuauuaagcauuua

SEQ ID NO: 294588 - RNA, 22 nt, Human
agaggucauaucucagaagaga

SEQ ID NO: 294589 - RNA, 22 nt, Human
gcuccuggagagauugagaaag

SEQ ID NO: 294590 - RNA, 22 nt, Human
ccucccugguggcucuggucua

SEQ ID NO: 294591 - RNA, 22 nt, Human
gcaugaaaugagcgaauauaau

SEQ ID NO: 294592 - RNA, 22 nt, Human
ugcaggugugguuccucagcca

SEQ ID NO: 294593 - RNA, 22 nt, Human
ggucacuccaccuucuccaccu

SEQ ID NO: 294594 - RNA, 22 nt, Human
ugauguucuguauaucauauag

SEQ ID NO: 294595 - RNA, 22 nt, Human
uauacacaggaaucugugaaaa

SEQ ID NO: 294596 - RNA, 22 nt, Human
ucuaaagaagaggguucugcgg

SEQ ID NO: 294597 - RNA, 23 nt, Human
uugaaagauugcuaaguaaaaau

SEQ ID NO: 294598 - RNA, 22 nt, Human
ucagugauuucuggggugaggg

SEQ ID NO: 294599 - RNA, 22 nt, Human
auauguauguacgcacauauuc

SEQ ID NO: 294600 - RNA, 22 nt, Human
uugggcagggaaaggacaggca

SEQ ID NO: 294601 - RNA, 19 nt, Human
acaguuugggaaaugagca

SEQ ID NO: 294602 - RNA, 22 nt, Human
uaaaguuuguagcaauugauau

SEQ ID NO: 294603 - RNA, 22 nt, Human
ccccacaggugucugaggcagg

SEQ ID NO: 294604 - RNA, 22 nt, Human
uuuuuuauagcaaugaacccac

SEQ ID NO: 294605 - RNA, 22 nt, Human
auguccagaguaaagcacauuc

SEQ ID NO: 294606 - RNA, 22 nt, Human
aauucuuaaucccauaaaguga

SEQ ID NO: 294607 - RNA, 22 nt, Human
caggcagggagcuggaaaggau

SEQ ID NO: 294608 - RNA, 22 nt, Human
ucuaguucuagaucccugagga

SEQ ID NO: 294609 - RNA, 22 nt, Human
uuccugggaggcuguguacuug

SEQ ID NO: 294610 - RNA, 21 nt, Human
cacuccacuuagaacaggguu

SEQ ID NO: 294611 - RNA, 22 nt, Human
ggcuuucuagaucuagcucugu

SEQ ID NO: 294612 - RNA, 22 nt, Human
aacagcuuuuuuggucagcauu

SEQ ID NO: 294613 - RNA, 22 nt, Human
uccaggagcauccaggugaagc

SEQ ID NO: 294614 - RNA, 21 nt, Human
acaggcucacgauccauuucu

SEQ ID NO: 294615 - RNA, 22 nt, Human
uuuauucaucaucuguucauau

SEQ ID NO: 294616 - RNA, 22 nt, Human
auugguauguauucugaaaacu

SEQ ID NO: 294617 - RNA, 21 nt, Human
auauuuuuguuuggacuguca

SEQ ID NO: 294618 - RNA, 22 nt, Human
ggucuggaauaagguccaggaa

SEQ ID NO: 294619 - RNA, 22 nt, Human
gggcugacucugcacugagcca

SEQ ID NO: 294620 - RNA, 22 nt, Human
aguguccuuucuguuccagcca

SEQ ID NO: 294621 - RNA, 22 nt, Human
acuggcagagguuggacaccau

SEQ ID NO: 294622 - RNA, 22 nt, Human
acugaauuuuaauuagaucugc

SEQ ID NO: 294623 - RNA, 22 nt, Human
uugggaagaaacauguccauca

SEQ ID NO: 294624 - RNA, 22 nt, Human
gagucagaagaaacuauuuaca

SEQ ID NO: 294625 - RNA, 22 nt, Human
agaaaacuugucacagcucuca

SEQ ID NO: 294626 - RNA, 22 nt, Human
agcucccagcagagcuggccac

SEQ ID NO: 294627 - RNA, 22 nt, Human
uacacauguuuggcaaguaugu

SEQ ID NO: 294628 - RNA, 21 nt, Human
uuuacugagcacuuacuaugu

SEQ ID NO: 294629 - RNA, 22 nt, Human
ugccuggcccugacagcccugg

SEQ ID NO: 294630 - RNA, 22 nt, Human
cccagcaggucggugcugccug

SEQ ID NO: 294631 - RNA, 22 nt, Human
acagaguauuggaaaggcagug

SEQ ID NO: 294632 - RNA, 22 nt, Human
uucuuaaagaggcaaaacacag

SEQ ID NO: 294633 - RNA, 22 nt, Human
ugaucuccugaccuuguaaucc

SEQ ID NO: 294634 - RNA, 22 nt, Human
agcagacaauugccuggaugga

SEQ ID NO: 294635 - RNA, 22 nt, Human
uugcuuuauuccuagcccuugu

SEQ ID NO: 294636 - RNA, 22 nt, Human
ucagcuuuuuacaugugaaaua

SEQ ID NO: 294637 - RNA, 22 nt, Human
uguguucauuucucucugcugu

SEQ ID NO: 294638 - RNA, 22 nt, Human
uguuuagaugcaaagucucaca

SEQ ID NO: 294639 - RNA, 22 nt, Human
cccaguuucaacuuuccagugg

SEQ ID NO: 294640 - RNA, 22 nt, Human
gcaugugucuuuauagcagcau

SEQ ID NO: 294641 - RNA, 18 nt, Human
cucucuuuccacucuuug

SEQ ID NO: 294642 - RNA, 22 nt, Human
uucagaaugugaccuuauuugg

SEQ ID NO: 294643 - RNA, 21 nt, Human
cuguggccuggcuagcaccgu

SEQ ID NO: 294644 - RNA, 22 nt, Human
cugaggagucaguuccacucag

SEQ ID NO: 294645 - RNA, 22 nt, Human
aagcagacaucccauacuuuug

SEQ ID NO: 294646 - RNA, 22 nt, Human
gacucugggcugagccagggcc

SEQ ID NO: 294647 - RNA, 20 nt, Human
uacagacaugacaauaaugg

SEQ ID NO: 294648 - RNA, 22 nt, Human
uggaagcuguggcauaacugag

SEQ ID NO: 294649 - RNA, 20 nt, Human
cccucccagaugcuucccaa

SEQ ID NO: 294650 - RNA, 22 nt, Human
auuuaugacuggugaauagaac

SEQ ID NO: 294651 - RNA, 20 nt, Human
cuguggcucaugcaucugcc

SEQ ID NO: 294652 - RNA, 22 nt, Human
gggacagaaggaagugagcaca

SEQ ID NO: 294653 - RNA, 18 nt, Human
uccuggccacacuaccuu

SEQ ID NO: 294654 - RNA, 22 nt, Human
aacauuuaugguagucauugca

SEQ ID NO: 294655 - RNA, 22 nt, Human
aaauauaauuucugccucaaua

SEQ ID NO: 294656 - RNA, 22 nt, Human
cuauuaaauacucuucaaauug

SEQ ID NO: 294657 - RNA, 22 nt, Human
cagggacccuacuagcucacac

SEQ ID NO: 294658 - RNA, 22 nt, Human
cuauuuucccauaugguugaca

SEQ ID NO: 294659 - RNA, 22 nt, Human
acaguauauauagucuaaaagc

SEQ ID NO: 294660 - RNA, 22 nt, Human
uuagcucuuuguagcuauuucu

SEQ ID NO: 294661 - RNA, 22 nt, Human
cuggcagucugguggaaggccu

SEQ ID NO: 294662 - RNA, 22 nt, Human
agaggaauaaauuucuguagug

SEQ ID NO: 294663 - RNA, 22 nt, Human
auaacagaugugaagugcuaau

SEQ ID NO: 294664 - RNA, 22 nt, Human
cuccuggcacugucuugaccca

SEQ ID NO: 294665 - RNA, 22 nt, Human
cagggcucacucggcuggcguc

SEQ ID NO: 294666 - RNA, 23 nt, Human
uucagggccucagaggugaagcu

SEQ ID NO: 294667 - RNA, 22 nt, Human
uagguucacuuagcugugggaa

SEQ ID NO: 294668 - RNA, 22 nt, Human
auuucagauucagaaauguagg

SEQ ID NO: 294669 - RNA, 22 nt, Human
uugcagggcaaauggucagaua

SEQ ID NO: 294670 - RNA, 22 nt, Human
cagacaggguggguuucugggc

SEQ ID NO: 294671 - RNA, 22 nt, Human
ugaaaacuugacaagugaggua

SEQ ID NO: 294672 - RNA, 22 nt, Human
auucucugugcagauuuaagac

SEQ ID NO: 294673 - RNA, 23 nt, Human
gcaugaagugcuacgucuacagc

SEQ ID NO: 294674 - RNA, 22 nt, Human
ucagaguccucacccugaggau

SEQ ID NO: 294675 - RNA, 22 nt, Human
caccagggccccaggcugugcc

SEQ ID NO: 294676 - RNA, 22 nt, Human
acaucuuugcucuuauagagcu

SEQ ID NO: 294677 - RNA, 17 nt, Human
ucuguucaugcauaccu

SEQ ID NO: 294678 - RNA, 22 nt, Human
gcagguggaagcagcagacuca

SEQ ID NO: 294679 - RNA, 17 nt, Human
aguuuugauauaauggc

SEQ ID NO: 294680 - RNA, 22 nt, Human
gccaggcagcugggagggugcc

SEQ ID NO: 294681 - RNA, 22 nt, Human
gggcagguaggugaaauaauga

SEQ ID NO: 294682 - RNA, 22 nt, Human
gauuuauuuuuaaucagcaggg

SEQ ID NO: 294683 - RNA, 22 nt, Human
uauccaaaguuucucagaaacu

SEQ ID NO: 294684 - RNA, 22 nt, Human
agagcccaucaguggcagugga

SEQ ID NO: 294685 - RNA, 22 nt, Human
uugaggaguuaggauguuuaua

SEQ ID NO: 294686 - RNA, 22 nt, Human
ugauggcuaucccuggaagggc

SEQ ID NO: 294687 - RNA, 22 nt, Human
ucuguucuucuccacuguaugu

SEQ ID NO: 294688 - RNA, 22 nt, Human
gggagccagccuuugccuauaa

SEQ ID NO: 294689 - RNA, 22 nt, Human
uugcuuuauuggguuuacugcc

SEQ ID NO: 294690 - RNA, 22 nt, Human
ccccagcagcaccuggggcagu

SEQ ID NO: 294691 - RNA, 22 nt, Human
ucuaggguggagcugggaaucc

SEQ ID NO: 294692 - RNA, 22 nt, Human
ggguggggccaggcaauuugca

SEQ ID NO: 294693 - RNA, 22 nt, Human
cuggauguuuugcuaaggacuc

SEQ ID NO: 294694 - RNA, 22 nt, Human
uauuuguuccagagauaaaaau

SEQ ID NO: 294695 - RNA, 22 nt, Human
aagaaaagauguuugguuuuca

SEQ ID NO: 294696 - RNA, 22 nt, Human
gggaucuugggaacacccuuac

SEQ ID NO: 294697 - RNA, 22 nt, Human
caggccugugacaccgugucug

SEQ ID NO: 294698 - RNA, 22 nt, Human
agugucugcaaaaugaaagagc

SEQ ID NO: 294699 - RNA, 22 nt, Human
uccaaggaaguuugcacuauug

SEQ ID NO: 294700 - RNA, 22 nt, Human
uucuacauauauuuuucucacu

SEQ ID NO: 294701 - RNA, 22 nt, Human
ggcaggcuuucagcaucaaguc

SEQ ID NO: 294702 - RNA, 22 nt, Human
uauuuauucauucagcaagcau

SEQ ID NO: 294703 - RNA, 22 nt, Human
ucuccaaaucaaucaauaugaa

SEQ ID NO: 294704 - RNA, 22 nt, Human
cagcuuguuuuauuuggggacc

SEQ ID NO: 294705 - RNA, 22 nt, Human
agucacuucuauucuauuaagu

SEQ ID NO: 294706 - RNA, 22 nt, Human
cagugcagguggcagaggacag

SEQ ID NO: 294707 - RNA, 22 nt, Human
ucucagugguguuuugagucca

SEQ ID NO: 294708 - RNA, 22 nt, Human
cuucaagaagacagcagagcau

SEQ ID NO: 294709 - RNA, 22 nt, Human
aagaauuaucugaaagcugugu

SEQ ID NO: 294710 - RNA, 22 nt, Human
ucagacagggcuucucaaacuu

SEQ ID NO: 294711 - RNA, 22 nt, Human
uauuaauaagugacuacuagcu

SEQ ID NO: 294712 - RNA, 22 nt, Human
cccugcagagagugcuuuugug

SEQ ID NO: 294713 - RNA, 22 nt, Human
ucaacaaugggucuguaaugga

SEQ ID NO: 294714 - RNA, 22 nt, Human
ccaaggagcucauauucuuguu

SEQ ID NO: 294715 - RNA, 22 nt, Human
cuuuguugugccugagugcacc

SEQ ID NO: 294716 - RNA, 22 nt, Human
ucagagagguuaaauaucuugu

SEQ ID NO: 294717 - RNA, 22 nt, Human
uaugaagacaaugauagcauga

SEQ ID NO: 294718 - RNA, 22 nt, Human
aagggcaggaaaagauggaugu

SEQ ID NO: 294719 - RNA, 22 nt, Human
ugccuucaagacccauccucca

SEQ ID NO: 294720 - RNA, 19 nt, Human
caggugguaaucugagccu

SEQ ID NO: 294721 - RNA, 22 nt, Human
ggcagggcuugucucugugaug

SEQ ID NO: 294722 - RNA, 22 nt, Human
gcacugguaucaccugagagcu

SEQ ID NO: 294723 - RNA, 22 nt, Human
agaaagaggaugcagaucucau

SEQ ID NO: 294724 - RNA, 22 nt, Human
acaguaaaucaacagaauaucu

SEQ ID NO: 294725 - RNA, 22 nt, Human
uuauuguuagugagacuguaga

SEQ ID NO: 294726 - RNA, 22 nt, Human
acauuguuugagaauacagaug

SEQ ID NO: 294727 - RNA, 22 nt, Human
uguuuugcuucucuguuuccca

SEQ ID NO: 294728 - RNA, 22 nt, Human
ucagaaaagaccacauuauucu

SEQ ID NO: 294729 - RNA, 22 nt, Human
uagggaugaggauagauuuuuc

SEQ ID NO: 294730 - RNA, 22 nt, Human
agaguguaccaaauauccuaca

SEQ ID NO: 294731 - RNA, 22 nt, Human
ucacuggggcccacaucaacau

SEQ ID NO: 294732 - RNA, 22 nt, Human
aguccagggagcccaggcuuug

SEQ ID NO: 294733 - RNA, 22 nt, Human
accccagcucugagccacacca

SEQ ID NO: 294734 - RNA, 22 nt, Human
ucaccagggcuccagccagccu

SEQ ID NO: 294735 - RNA, 22 nt, Human
aaagacuuggcuuaugauuugc

SEQ ID NO: 294736 - RNA, 23 nt, Human
gcccagggacugggaaucagugg

SEQ ID NO: 294737 - RNA, 22 nt, Human
aaagagucuggcacuguaccag

SEQ ID NO: 294738 - RNA, 22 nt, Human
ucauacaucuguccuggagcuc

SEQ ID NO: 294739 - RNA, 22 nt, Human
ucucugaagagcucagacuagu

SEQ ID NO: 294740 - RNA, 22 nt, Human
uuagagaagaugaaccaucguu

SEQ ID NO: 294741 - RNA, 22 nt, Human
uacuuuauucaggaaggcuggu

SEQ ID NO: 294742 - RNA, 22 nt, Human
aaaauuaagugucugggaagcc

SEQ ID NO: 294743 - RNA, 22 nt, Human
auacuuucugaccaauuaauug

SEQ ID NO: 294744 - RNA, 22 nt, Human
aaugcagaccaguaugaaaaac

SEQ ID NO: 294745 - RNA, 22 nt, Human
gagacaguguccauccaggggc

SEQ ID NO: 294746 - RNA, 22 nt, Human
cucuccacuguccuuugcuggu

SEQ ID NO: 294747 - RNA, 22 nt, Human
aggcugugggaauggcugcuug

SEQ ID NO: 294748 - RNA, 22 nt, Human
cacagguguuuguuauacucag

SEQ ID NO: 294749 - RNA, 22 nt, Human
acauuuuuauucaucaaagcag

SEQ ID NO: 294750 - RNA, 22 nt, Human
ucagggcauguauguuucuuua

SEQ ID NO: 294751 - RNA, 22 nt, Human
acagcuguguuuuauaaucagc

SEQ ID NO: 294752 - RNA, 22 nt, Human
ggcaggugaguucauuaucugc

SEQ ID NO: 294753 - RNA, 22 nt, Human
cagaugaagaucauagaauagu

SEQ ID NO: 294754 - RNA, 23 nt, Human
uugaaaaauauagucccauuguc

SEQ ID NO: 294755 - RNA, 22 nt, Human
uuccuuguaagaccuauuuuug

SEQ ID NO: 294756 - RNA, 22 nt, Human
uaaaucuuuaggaagcucaaac

SEQ ID NO: 294757 - RNA, 22 nt, Human
augcuacuauccuucugcuuaa

SEQ ID NO: 294758 - RNA, 22 nt, Human
gucaaaaugagcuuuguuauug

SEQ ID NO: 294759 - RNA, 19 nt, Human
uucauucuuucuacuuacc

SEQ ID NO: 294760 - RNA, 22 nt, Human
uuacagugacucacauuaacaa

SEQ ID NO: 294761 - RNA, 22 nt, Human
aauucaugaguagaaucuauau

SEQ ID NO: 294762 - RNA, 22 nt, Human
acugucuucaaaugaauauauu

SEQ ID NO: 294763 - RNA, 18 nt, Human
gcuuccugaaagcugccc

SEQ ID NO: 294764 - RNA, 18 nt, Human
uccuaacuuagauacucc

SEQ ID NO: 294765 - RNA, 22 nt, Human
ucucuguaucccagaaccaaaa

SEQ ID NO: 294766 - RNA, 22 nt, Human
aaugaguuagaugagaaaauaa

SEQ ID NO: 294767 - RNA, 22 nt, Human
agcuccuguggcagcucuucug

SEQ ID NO: 294768 - RNA, 22 nt, Human
uagaaacaucagcuaaccaaaa

SEQ ID NO: 294769 - RNA, 17 nt, Human
uuaagguggaucagcac

SEQ ID NO: 294770 - RNA, 22 nt, Human
acugucacuccaacugagucgu

SEQ ID NO: 294771 - RNA, 22 nt, Human
uugcaggguacauucuuagaau

SEQ ID NO: 294772 - RNA, 22 nt, Human
gacaugugagagcucgguuuuc

SEQ ID NO: 294773 - RNA, 22 nt, Human
acaagucuuuuucaugucuucu

SEQ ID NO: 294774 - RNA, 22 nt, Human
uagggaugcuuaguaggaccca

SEQ ID NO: 294775 - RNA, 22 nt, Human
gagcacccuuugcacaucaguc

SEQ ID NO: 294776 - RNA, 22 nt, Human
uagguguccauauaugugugua

SEQ ID NO: 294777 - RNA, 22 nt, Human
auuaaagaaacccagcauguga

SEQ ID NO: 294778 - RNA, 22 nt, Human
ugggcuccggcggccucaggcu

SEQ ID NO: 294779 - RNA, 18 nt, Human
ggucacugagaugcuacu

SEQ ID NO: 294780 - RNA, 22 nt, Human
uaaaguguggauaugauuagua

SEQ ID NO: 294781 - RNA, 22 nt, Human
acacaggacagggauguguuuu

SEQ ID NO: 294782 - RNA, 22 nt, Human
cauuccagaugaggccaggccc

SEQ ID NO: 294783 - RNA, 22 nt, Human
acuguuaaaguaauuaauuguc

SEQ ID NO: 294784 - RNA, 22 nt, Human
ggcagggcccugauuccugggg

SEQ ID NO: 294785 - RNA, 22 nt, Human
uuuguuaaaaugcagauucugu

SEQ ID NO: 294786 - RNA, 17 nt, Human
gaugaaaugaugcacac

SEQ ID NO: 294787 - RNA, 22 nt, Human
cagguggugccuccucccuucc

SEQ ID NO: 294788 - RNA, 22 nt, Human
uuuauugagcacccguugugcg

SEQ ID NO: 294789 - RNA, 22 nt, Human
uaacacauaagcugagaccaug

SEQ ID NO: 294790 - RNA, 22 nt, Human
uccuggccaaguagauguggcg

SEQ ID NO: 294791 - RNA, 22 nt, Human
gacaguuuagguucaaaucuca

SEQ ID NO: 294792 - RNA, 22 nt, Human
ccugaaaaucaagguaguuugg

SEQ ID NO: 294793 - RNA, 22 nt, Human
uuccuggugguggugacagcac

SEQ ID NO: 294794 - RNA, 22 nt, Human
acaaaauuguguuaaacuuuau

SEQ ID NO: 294795 - RNA, 22 nt, Human
uuuuuucagccugucugugcca

SEQ ID NO: 294796 - RNA, 22 nt, Human
cagguguauaaacucagugacu

SEQ ID NO: 294797 - RNA, 22 nt, Human
aagcugaagacacagcuccagu

SEQ ID NO: 294798 - RNA, 15 nt, Human
gcauguguaauaggc

SEQ ID NO: 294799 - RNA, 22 nt, Human
uuacaguuuacauaagaauugu

SEQ ID NO: 294800 - RNA, 19 nt, Human
ucugaagaauuagagagca

SEQ ID NO: 294801 - RNA, 22 nt, Human
uguaucaaggguuuauguaagc

SEQ ID NO: 294802 - RNA, 22 nt, Human
gaggcugcaggcaaugcugccc

SEQ ID NO: 294803 - RNA, 22 nt, Human
aggcccugcccagagcuccucg

SEQ ID NO: 294804 - RNA, 22 nt, Human
uacugucuggaguugccaaagg

SEQ ID NO: 294805 - RNA, 22 nt, Human
guauagguuuggcucucuccag

SEQ ID NO: 294806 - RNA, 22 nt, Human
ucaugcuaguuaagaacacaau

SEQ ID NO: 294807 - RNA, 22 nt, Human
ucaaagcacacuuagugguaga

SEQ ID NO: 294808 - RNA, 22 nt, Human
ccugaaauuugaagaccugaau

SEQ ID NO: 294809 - RNA, 21 nt, Human
ugcaccuguucacugcaguuc

SEQ ID NO: 294810 - RNA, 18 nt, Human
auaaagugcuaauaaugg

SEQ ID NO: 294811 - RNA, 22 nt, Human
cucugagguccuacagugaccc

SEQ ID NO: 294812 - RNA, 22 nt, Human
guuauauauaguauuucucuga

SEQ ID NO: 294813 - RNA, 22 nt, Human
cugugugcuguuagggagcugc

SEQ ID NO: 294814 - RNA, 22 nt, Human
gcuguucauuagaaauagaaug

SEQ ID NO: 294815 - RNA, 22 nt, Human
cugagagaaucaugcugcaggu

SEQ ID NO: 294816 - RNA, 22 nt, Human
aggagguggcaacugucgacag

SEQ ID NO: 294817 - RNA, 22 nt, Human
cuugaauccaaaugggagauga

SEQ ID NO: 294818 - RNA, 22 nt, Human
aaugagcugcugcuguuccacc

SEQ ID NO: 294819 - RNA, 22 nt, Human
acuguacucuucuagccaucug

SEQ ID NO: 294820 - RNA, 21 nt, Human
gguguccugagggauagguag

SEQ ID NO: 294821 - RNA, 22 nt, Human
uaauuuuccacucuguuuaucu

SEQ ID NO: 294822 - RNA, 22 nt, Human
gcaugcaggagagaaagacggc

SEQ ID NO: 294823 - RNA, 22 nt, Human
agguuuauguuuggugcaggag

SEQ ID NO: 294824 - RNA, 22 nt, Human
guucucucugcuuccaagaugg

SEQ ID NO: 294825 - RNA, 22 nt, Human
aggcagguuacaaaaacuuuau

SEQ ID NO: 294826 - RNA, 23 nt, Human
gaagcccucauugguucuccaga

SEQ ID NO: 294827 - RNA, 22 nt, Human
aauagcaaaguuaucaaauuaa

SEQ ID NO: 294828 - RNA, 22 nt, Human
auccaggcgaaugcagaaggcc

SEQ ID NO: 294829 - RNA, 22 nt, Human
auuucaguguuuuaagaguuca

SEQ ID NO: 294830 - RNA, 22 nt, Human
guuuauaagguaaaggagagag

SEQ ID NO: 294831 - RNA, 22 nt, Human
caggugucuaauucucaccccc

SEQ ID NO: 294832 - RNA, 22 nt, Human
gaguccuuuguuccuugccaca

SEQ ID NO: 294833 - RNA, 18 nt, Human
aggcaggugcuaauauuu

SEQ ID NO: 294834 - RNA, 22 nt, Human
aggaaaugggaauagaugguau

SEQ ID NO: 294835 - RNA, 19 nt, Human
uggcuuggcugcagaugcu

SEQ ID NO: 294836 - RNA, 22 nt, Human
aggcugcagaacagucaggugc

SEQ ID NO: 294837 - RNA, 22 nt, Human
cccagugggucacugcaucuca

SEQ ID NO: 294838 - RNA, 22 nt, Human
uacauucauggugacuuguaug

SEQ ID NO: 294839 - RNA, 22 nt, Human
uacauucagaauugggaggcaa

SEQ ID NO: 294840 - RNA, 22 nt, Human
gugaggagggcuggucccaggc

SEQ ID NO: 294841 - RNA, 22 nt, Human
agcagggcugcggccccaccac

SEQ ID NO: 294842 - RNA, 16 nt, Human
aaggagggaagagaau

SEQ ID NO: 294843 - RNA, 22 nt, Human
agugucaaugccaacaguauau

SEQ ID NO: 294844 - RNA, 22 nt, Human
uuuccuucccuggaugagaagu

SEQ ID NO: 294845 - RNA, 22 nt, Human
uuccagagcaguuuucagauca

SEQ ID NO: 294846 - RNA, 22 nt, Human
uugcaggggaaggagcagagcu

SEQ ID NO: 294847 - RNA, 22 nt, Human
uucuuucucuccacaaggcuug

SEQ ID NO: 294848 - RNA, 21 nt, Human
aaaaagcuggggcaugcaugc

SEQ ID NO: 294849 - RNA, 22 nt, Human
cuguccuguggaccugaggacg

SEQ ID NO: 294850 - RNA, 22 nt, Human
ugagggaguuggguguauagga

SEQ ID NO: 294851 - RNA, 20 nt, Human
uuacuugucucagcauggag

SEQ ID NO: 294852 - RNA, 22 nt, Human
cagggauggccuggcgggccac

SEQ ID NO: 294853 - RNA, 22 nt, Human
ggcaguggguuccccaaggcac

SEQ ID NO: 294854 - RNA, 22 nt, Human
cuuuaaauaauacaagguccag

SEQ ID NO: 294855 - RNA, 22 nt, Human
aaaguccuguuaacuguuaaca

SEQ ID NO: 294856 - RNA, 20 nt, Human
gggcuuggaggacucgaggg

SEQ ID NO: 294857 - RNA, 22 nt, Human
cagggcagggccacacccccug

SEQ ID NO: 294858 - RNA, 22 nt, Human
cccagaugcagguucaagagua

SEQ ID NO: 294859 - RNA, 22 nt, Human
uccuacaucagcucucaguagc

SEQ ID NO: 294860 - RNA, 22 nt, Human
gcagucaguguugacuacaugc

SEQ ID NO: 294861 - RNA, 22 nt, Human
aaauaguccugggaauaguacu

SEQ ID NO: 294862 - RNA, 19 nt, Human
ucagucuaggaaugagcua

SEQ ID NO: 294863 - RNA, 22 nt, Human
ucucuggucccaccuggccauu

SEQ ID NO: 294864 - RNA, 19 nt, Human
cuuuucaucaacagccaau

SEQ ID NO: 294865 - RNA, 22 nt, Human
uuuaaauucugucugccgcuua

SEQ ID NO: 294866 - RNA, 22 nt, Human
gggcagguggcagggucucugg

SEQ ID NO: 294867 - RNA, 22 nt, Human
ucagccugcgucauggugacac

SEQ ID NO: 294868 - RNA, 22 nt, Human
aagauucagccaaauuguucau

SEQ ID NO: 294869 - RNA, 22 nt, Human
aauaagauccugaagauauguu

SEQ ID NO: 294870 - RNA, 21 nt, Human
cacaugugaauuacugaacug

SEQ ID NO: 294871 - RNA, 20 nt, Human
auuuggcaugaaguauugau

SEQ ID NO: 294872 - RNA, 22 nt, Human
ucagguguggucaccacagggu

SEQ ID NO: 294873 - RNA, 22 nt, Human
acaggaucgcccuguugcccag

SEQ ID NO: 294874 - RNA, 21 nt, Human
cauucacagucuggcucuuga

SEQ ID NO: 294875 - RNA, 22 nt, Human
uucauucuugggaucagagagu

SEQ ID NO: 294876 - RNA, 20 nt, Human
ggcagggcaucaacagcucu

SEQ ID NO: 294877 - RNA, 22 nt, Human
uacugucucugcccuggccagg

SEQ ID NO: 294878 - RNA, 22 nt, Human
gcagcuuucugcaaugucaucc

SEQ ID NO: 294879 - RNA, 22 nt, Human
aggugucuucagggugagacag

SEQ ID NO: 294880 - RNA, 22 nt, Human
aauagugaacaggaacaugcuu

SEQ ID NO: 294881 - RNA, 22 nt, Human
uuuaauuuuccucuuccuggag

SEQ ID NO: 294882 - RNA, 22 nt, Human
ucugcagguaagcguucuugga

SEQ ID NO: 294883 - RNA, 22 nt, Human
uucauguaggcugcaaugcaca

SEQ ID NO: 294884 - RNA, 22 nt, Human
ggagcugaggcugaggccucac

SEQ ID NO: 294885 - RNA, 22 nt, Human
uaccuggcagucagucuuuccg

SEQ ID NO: 294886 - RNA, 22 nt, Human
aauguaaacagcaagagaaggg

SEQ ID NO: 294887 - RNA, 17 nt, Human
uccuguuuaucauugau

SEQ ID NO: 294888 - RNA, 22 nt, Human
ccaggugugucuggccccgaag

SEQ ID NO: 294889 - RNA, 20 nt, Human
ugagaaggggucagcuguac

SEQ ID NO: 294890 - RNA, 22 nt, Human
uuugcuuugacugucagcaagu

SEQ ID NO: 294891 - RNA, 22 nt, Human
aaucaagaaaaugaggauucuu

SEQ ID NO: 294892 - RNA, 22 nt, Human
acagcuggagugaggauggagu

SEQ ID NO: 294893 - RNA, 22 nt, Human
gagcugaagcgcuacagcaucc

SEQ ID NO: 294894 - RNA, 22 nt, Human
gaaagcacccaagauuuccuuc

SEQ ID NO: 294895 - RNA, 22 nt, Human
guccugagggcccaggcauucu

SEQ ID NO: 294896 - RNA, 22 nt, Human
aaagcagggaugaggcuagagg

SEQ ID NO: 294897 - RNA, 22 nt, Human
gggaagggacuuguuuaagguc

SEQ ID NO: 294898 - RNA, 22 nt, Human
uucaaaauuguucuaagcucug

SEQ ID NO: 294899 - RNA, 22 nt, Human
ccaaggcugucauucaguagcu

SEQ ID NO: 294900 - RNA, 22 nt, Human
cagcuuuaguaacccacugcuc

SEQ ID NO: 294901 - RNA, 22 nt, Human
ccuggguggcugccugccuuuc

SEQ ID NO: 294902 - RNA, 22 nt, Human
aagauguaaaggcaauauaaag

SEQ ID NO: 294903 - RNA, 22 nt, Human
ccagagguuacuuugccuugga

SEQ ID NO: 294904 - RNA, 22 nt, Human
aggcacagcacaccuggccccc

SEQ ID NO: 294905 - RNA, 22 nt, Human
ugcucauuggcgaucugaggga

SEQ ID NO: 294906 - RNA, 22 nt, Human
ugcugaggucauuuccaaguga

SEQ ID NO: 294907 - RNA, 22 nt, Human
gccccagccaaggugacacgaa

SEQ ID NO: 294908 - RNA, 21 nt, Human
acagagcauaaugguguggca

SEQ ID NO: 294909 - RNA, 22 nt, Human
caaaagucuuccuauucucuua

SEQ ID NO: 294910 - RNA, 19 nt, Human
ucccaguggggagaggugu

SEQ ID NO: 294911 - RNA, 22 nt, Human
aggagggagcacuauaugggga

SEQ ID NO: 294912 - RNA, 22 nt, Human
uuugacucuucuagcaagugug

SEQ ID NO: 294913 - RNA, 22 nt, Human
ggcaggugcucugugggccugg

SEQ ID NO: 294914 - RNA, 22 nt, Human
uagggcucagagaaguggggcc

SEQ ID NO: 294915 - RNA, 18 nt, Human
caguggcauaguugagua

SEQ ID NO: 294916 - RNA, 22 nt, Human
ccaggugggcgugucuucaccu

SEQ ID NO: 294917 - RNA, 17 nt, Human
uguuuucugcuaccuuu

SEQ ID NO: 294918 - RNA, 22 nt, Human
uucugagggcuaauguacugua

SEQ ID NO: 294919 - RNA, 22 nt, Human
cauuaggguaauugaacacuua

SEQ ID NO: 294920 - RNA, 22 nt, Human
caaggccuugcugucuccuccu

SEQ ID NO: 294921 - RNA, 22 nt, Human
agagucagcuuaugacacaguc

SEQ ID NO: 294922 - RNA, 22 nt, Human
aaguaacaugggaacaucugaa

SEQ ID NO: 294923 - RNA, 22 nt, Human
uccuucuggaggcuguaaagga

SEQ ID NO: 294924 - RNA, 22 nt, Human
ucaggcaggaucccagggaagg

SEQ ID NO: 294925 - RNA, 22 nt, Human
cuuuuacauuuguugaagagua

SEQ ID NO: 294926 - RNA, 22 nt, Human
ccuccuggcuuuucccauugaa

SEQ ID NO: 294927 - RNA, 22 nt, Human
uauuuucaccuucucuggauau

SEQ ID NO: 294928 - RNA, 22 nt, Human
ggcucuggugcccuggcuccca

SEQ ID NO: 294929 - RNA, 22 nt, Human
cccaggacucuucacugcagcc

SEQ ID NO: 294930 - RNA, 22 nt, Human
gguggggcccaggcaucugaug

SEQ ID NO: 294931 - RNA, 22 nt, Human
acugucaagagauucaaauuca

SEQ ID NO: 294932 - RNA, 22 nt, Human
ccuggaggggaccaggaccagg

SEQ ID NO: 294933 - RNA, 22 nt, Human
uuauugcucuauuauggccuaa

SEQ ID NO: 294934 - RNA, 22 nt, Human
aauugcuuuugggggcaguuac

SEQ ID NO: 294935 - RNA, 22 nt, Human
uuccugugauauuagccacugu

SEQ ID NO: 294936 - RNA, 22 nt, Human
uuuccuucucagggagcuucaa

SEQ ID NO: 294937 - RNA, 22 nt, Human
guggauggagcuggaagccauu

SEQ ID NO: 294938 - RNA, 22 nt, Human
gacaggguccaaaggcagggga

SEQ ID NO: 294939 - RNA, 22 nt, Human
ugcaggugcugauaccuacucc

SEQ ID NO: 294940 - RNA, 22 nt, Human
agcauccacucacugggagagg

SEQ ID NO: 294941 - RNA, 22 nt, Human
uuccuucuuugugguagaaagu

SEQ ID NO: 294942 - RNA, 22 nt, Human
caauuucucgaacucuaaucca

SEQ ID NO: 294943 - RNA, 22 nt, Human
agucccagcuucccccaugcag

SEQ ID NO: 294944 - RNA, 22 nt, Human
caggucuguuuucaaggucagu

SEQ ID NO: 294945 - RNA, 22 nt, Human
gcaaagcaagcugucagccuca

SEQ ID NO: 294946 - RNA, 22 nt, Human
ucugugaaugugaccuuauuug

SEQ ID NO: 294947 - RNA, 18 nt, Human
gcuccuggagucugacuc

SEQ ID NO: 294948 - RNA, 22 nt, Human
aauuuacacuucauuuggaggg

SEQ ID NO: 294949 - RNA, 22 nt, Human
ucaggugggaguagaaugcuag

SEQ ID NO: 294950 - RNA, 22 nt, Human
uagcaaaguuuuguggugauua

SEQ ID NO: 294951 - RNA, 22 nt, Human
ggagaaggaauauuggaguagg

SEQ ID NO: 294952 - RNA, 22 nt, Human
gagggcugcuggaaaaaugcag

SEQ ID NO: 294953 - RNA, 22 nt, Human
agcugcaaguccaaaggaauua

SEQ ID NO: 294954 - RNA, 22 nt, Human
ugcaaaaauugcuggaaucuuu

SEQ ID NO: 294955 - RNA, 22 nt, Human
uagggauggaaacccguuuucu

SEQ ID NO: 294956 - RNA, 22 nt, Human
cacagguggcuccaaguuagag

SEQ ID NO: 294957 - RNA, 22 nt, Human
ugcaaaagaauauagauauugu

SEQ ID NO: 294958 - RNA, 22 nt, Human
aguuaaaucauggccauuggaa

SEQ ID NO: 294959 - RNA, 22 nt, Human
uuuaaguuccuuuucaacaacu

SEQ ID NO: 294960 - RNA, 22 nt, Human
ucccagagcagaugugcuaaag

SEQ ID NO: 294961 - RNA, 22 nt, Human
gaaauguuugggaggagucaac

SEQ ID NO: 294962 - RNA, 22 nt, Human
cuagagaaaacuguguaucuug

SEQ ID NO: 294963 - RNA, 22 nt, Human
ucaauaauggcaggauaaauuu

SEQ ID NO: 294964 - RNA, 22 nt, Human
cuuuacugaagugaagaccugg

SEQ ID NO: 294965 - RNA, 22 nt, Human
ucaggcaggcucagaggaaaac

SEQ ID NO: 294966 - RNA, 20 nt, Human
uuucaguuaucuugaccuuc

SEQ ID NO: 294967 - RNA, 22 nt, Human
cuguccugugcauugucagaug

SEQ ID NO: 294968 - RNA, 22 nt, Human
agaggccuaaccaagauguccu

SEQ ID NO: 294969 - RNA, 22 nt, Human
cucuggaauggguguuucuaac

SEQ ID NO: 294970 - RNA, 22 nt, Human
ccacccagaccagggaucuggg

SEQ ID NO: 294971 - RNA, 22 nt, Human
agaacaucuaaauaucugagac

SEQ ID NO: 294972 - RNA, 22 nt, Human
uacagugcuugguaucuaguaa

SEQ ID NO: 294973 - RNA, 22 nt, Human
uugaggaguugugacagauacu

SEQ ID NO: 294974 - RNA, 22 nt, Human
uuuaacauguaauugcugcuuu

SEQ ID NO: 294975 - RNA, 22 nt, Human
ccuggaggcagaaauaggacuu

SEQ ID NO: 294976 - RNA, 19 nt, Human
ccacaaaauuauuuuaguu

SEQ ID NO: 294977 - RNA, 22 nt, Human
ucuuauuuuuuaaugacagaga

SEQ ID NO: 294978 - RNA, 22 nt, Human
uguuuuucaaauauugcucugu

SEQ ID NO: 294979 - RNA, 23 nt, Human
uccuucaaguuaggaagugaaca

SEQ ID NO: 294980 - RNA, 22 nt, Human
auugcuuuuaagcaccaccuaa

SEQ ID NO: 294981 - RNA, 22 nt, Human
ugaggugguucaagagccuugu

SEQ ID NO: 294982 - RNA, 22 nt, Human
ucauuugugugagugauuugac

SEQ ID NO: 294983 - RNA, 22 nt, Human
uuucuucauagaccuugucuug

SEQ ID NO: 294984 - RNA, 22 nt, Human
cacagagaauucccauauguga

SEQ ID NO: 294985 - RNA, 22 nt, Human
cagggcucuuccggagcaggga

SEQ ID NO: 294986 - RNA, 22 nt, Human
agucuuacaugagaaagaaccu

SEQ ID NO: 294987 - RNA, 22 nt, Human
aaaauccuuagccgagugaggu

SEQ ID NO: 294988 - RNA, 23 nt, Human
uuucaaauuacucugcagaugac

SEQ ID NO: 294989 - RNA, 21 nt, Human
agaaaaguauuugaaucaaga

SEQ ID NO: 294990 - RNA, 21 nt, Human
uuuagggaccaggucauaggc

SEQ ID NO: 294991 - RNA, 22 nt, Human
aggcucugggcucuagauuuug

SEQ ID NO: 294992 - RNA, 23 nt, Human
ugaaauauucuuuugcaugagcu

SEQ ID NO: 294993 - RNA, 22 nt, Human
gaaaaugugucaucccuacugu

SEQ ID NO: 294994 - RNA, 22 nt, Human
uguggggcugucaggcaacugg

SEQ ID NO: 294995 - RNA, 22 nt, Human
aaaaauguuaucuacuguccga

SEQ ID NO: 294996 - RNA, 22 nt, Human
gacaggcuuugagucccagaac

SEQ ID NO: 294997 - RNA, 22 nt, Human
uagaaagcccuguguucacugc

SEQ ID NO: 294998 - RNA, 22 nt, Human
uauuuaaaauaagccccagugg

SEQ ID NO: 294999 - RNA, 22 nt, Human
gggcccuggacguggcggcaga

SEQ ID NO: 295000 - RNA, 22 nt, Human
aucaaaguucguaacugauaac

SEQ ID NO: 295001 - RNA, 22 nt, Human
cagugcagguuuagggcugggg

SEQ ID NO: 295002 - RNA, 22 nt, Human
augcaauauagggaagauagau

SEQ ID NO: 295003 - RNA, 21 nt, Human
uggaccuguccuucucgcugu

SEQ ID NO: 295004 - RNA, 22 nt, Human
aaauuauaggugccaccuugga

SEQ ID NO: 295005 - RNA, 22 nt, Human
uuauuagggugguuuauguucu

SEQ ID NO: 295006 - RNA, 22 nt, Human
aacaagucuaagagaauggcag

SEQ ID NO: 295007 - RNA, 22 nt, Human
ugcaaaauaaugaacgauuuuu

SEQ ID NO: 295008 - RNA, 22 nt, Human
guuuacauauuuuaauugguga

SEQ ID NO: 295009 - RNA, 22 nt, Human
aagugguugcuugugagucccc

SEQ ID NO: 295010 - RNA, 22 nt, Human
ucugcaacauuccucuccccac

SEQ ID NO: 295011 - RNA, 22 nt, Human
caggaaaggugugucaugaugg

SEQ ID NO: 295012 - RNA, 22 nt, Human
aaacagcuggucucaaauguuc

SEQ ID NO: 295013 - RNA, 22 nt, Human
acagugcagggugggaagaagg

SEQ ID NO: 295014 - RNA, 22 nt, Human
uuucuuuccagagugauuggca

SEQ ID NO: 295015 - RNA, 22 nt, Human
ugacauguaguuagaaaauagg

SEQ ID NO: 295016 - RNA, 22 nt, Human
aaauuuaaggaggugcucacuu

SEQ ID NO: 295017 - RNA, 22 nt, Human
uuauccuggauuauauauguga

SEQ ID NO: 295018 - RNA, 22 nt, Human
uuauuagcugggcuucagggug

SEQ ID NO: 295019 - RNA, 22 nt, Human
aaacaacuucugcacuaugggu

SEQ ID NO: 295020 - RNA, 19 nt, Human
ccugugacuaucuuuguaa

SEQ ID NO: 295021 - RNA, 22 nt, Human
uguauuuuuagaccuuuagacc

SEQ ID NO: 295022 - RNA, 22 nt, Human
gcaucuaaacuugcaucauugu

SEQ ID NO: 295023 - RNA, 22 nt, Human
gccagggaaacugcagaccagc

SEQ ID NO: 295024 - RNA, 22 nt, Human
auacacaucuauuuaagagaca

SEQ ID NO: 295025 - RNA, 22 nt, Human
auauaaagaaguggaaaaugag

SEQ ID NO: 295026 - RNA, 22 nt, Human
cagccagguuagugcuaauugu

SEQ ID NO: 295027 - RNA, 20 nt, Human
ucucaguuucuagagucagg

SEQ ID NO: 295028 - RNA, 22 nt, Human
augaagcaggcacagcuucagg

SEQ ID NO: 295029 - RNA, 22 nt, Human
aucagagauggcuccagugcuc

SEQ ID NO: 295030 - RNA, 22 nt, Human
cuggguuuagggucuccccuug

SEQ ID NO: 295031 - RNA, 22 nt, Human
uguccuggggcgacuuggggcc

SEQ ID NO: 295032 - RNA, 22 nt, Human
uccaaaacagaacucugugaau

SEQ ID NO: 295033 - RNA, 22 nt, Human
uagguguccucguccaaagauu

SEQ ID NO: 295034 - RNA, 22 nt, Human
accaggcaugauguggagcaca

SEQ ID NO: 295035 - RNA, 22 nt, Human
uguccccagagccuguuccugc

SEQ ID NO: 295036 - RNA, 22 nt, Human
uuucaaguggcgagauaaggaa

SEQ ID NO: 295037 - RNA, 22 nt, Human
cugaggagggaaguccccaaag

SEQ ID NO: 295038 - RNA, 22 nt, Human
aaauucuaugucaauguuuauu

SEQ ID NO: 295039 - RNA, 22 nt, Human
uccuuggcuaguacuggccagc

SEQ ID NO: 295040 - RNA, 22 nt, Human
ucugagcugcuagguaugcauu

SEQ ID NO: 295041 - RNA, 22 nt, Human
caaagaagagauuuacagagcu

SEQ ID NO: 295042 - RNA, 22 nt, Human
aaggugucaggcuugggaaagu

SEQ ID NO: 295043 - RNA, 22 nt, Human
aggaggaauacaauccagcagc

SEQ ID NO: 295044 - RNA, 21 nt, Human
gcauuaaaagcaguuguuggu

SEQ ID NO: 295045 - RNA, 22 nt, Human
aacugucugaaacugggguuuc

SEQ ID NO: 295046 - RNA, 22 nt, Human
acaugacagggaaugaggugaa

SEQ ID NO: 295047 - RNA, 22 nt, Human
ugggccaggcaugugaucagca

SEQ ID NO: 295048 - RNA, 20 nt, Human
uuuacauuuugaaacaguga

SEQ ID NO: 295049 - RNA, 22 nt, Human
gagaguucuugccuggguauua

SEQ ID NO: 295050 - RNA, 22 nt, Human
cccagugugaugagguugcuaa

SEQ ID NO: 295051 - RNA, 22 nt, Human
accuacauguuccacauaguug

SEQ ID NO: 295052 - RNA, 22 nt, Human
aaagaucacgucccaggacucg

SEQ ID NO: 295053 - RNA, 22 nt, Human
ccugggagccaagccucugugu

SEQ ID NO: 295054 - RNA, 22 nt, Human
accacuguacagcagauauagu

SEQ ID NO: 295055 - RNA, 16 nt, Human
cagaggcaccuggcuc

SEQ ID NO: 295056 - RNA, 22 nt, Human
acauucuuucgaugucugauuu

SEQ ID NO: 295057 - RNA, 22 nt, Human
ugcagggacaggcucuggggau

SEQ ID NO: 295058 - RNA, 22 nt, Human
uacccagcuccucagaagacca

SEQ ID NO: 295059 - RNA, 22 nt, Human
aauuugauucccugcaccuguu

SEQ ID NO: 295060 - RNA, 22 nt, Human
caaacugagcaucagaaaguuu

SEQ ID NO: 295061 - RNA, 22 nt, Human
ucagacagugugaucagucucu

SEQ ID NO: 295062 - RNA, 22 nt, Human
agagcacaggguuuugugccgg

SEQ ID NO: 295063 - RNA, 22 nt, Human
aguuugaauugaaaugcagaug

SEQ ID NO: 295064 - RNA, 22 nt, Human
cuccaggccccuggccuucugc

SEQ ID NO: 295065 - RNA, 22 nt, Human
cuggcaggagcauucacagagg

SEQ ID NO: 295066 - RNA, 22 nt, Human
cuagagaaacgccgugggagga

SEQ ID NO: 295067 - RNA, 22 nt, Human
gaacuugggagaagggagugug

SEQ ID NO: 295068 - RNA, 22 nt, Human
caugaggucagggggagccggu

SEQ ID NO: 295069 - RNA, 22 nt, Human
acaguugagaugcaacuuuggg

SEQ ID NO: 295070 - RNA, 22 nt, Human
ucaacaaauacuuaaagcagag

SEQ ID NO: 295071 - RNA, 18 nt, Human
gccugcaggcacgggggu

SEQ ID NO: 295072 - RNA, 22 nt, Human
auuuccuucccagauuugguuc

SEQ ID NO: 295073 - RNA, 22 nt, Human
ucucuguagggcugcuugagua

SEQ ID NO: 295074 - RNA, 22 nt, Human
ccugggugucaugggcagcugg

SEQ ID NO: 295075 - RNA, 22 nt, Human
aguacaaaggcccuugauuacu

SEQ ID NO: 295076 - RNA, 19 nt, Human
ugcuuccucaccaucuccc

SEQ ID NO: 295077 - RNA, 22 nt, Human
aaauaucauuuauaacuuuuaa

SEQ ID NO: 295078 - RNA, 22 nt, Human
uaaaguuuauuggcaccaccau

SEQ ID NO: 295079 - RNA, 22 nt, Human
uacugucuuuagggguagaaau

SEQ ID NO: 295080 - RNA, 22 nt, Human
ggagcugagcagcgauggcgga

SEQ ID NO: 295081 - RNA, 22 nt, Human
cuuguugcugaauucaggauuc

SEQ ID NO: 295082 - RNA, 22 nt, Human
aagccggcugggccgaggcugc

SEQ ID NO: 295083 - RNA, 22 nt, Human
cugcagcuaaggaaugugguug

SEQ ID NO: 295084 - RNA, 22 nt, Human
guccugaaugccuuuaggcaga

SEQ ID NO: 295085 - RNA, 22 nt, Human
aaagccuugggauuugugauca

SEQ ID NO: 295086 - RNA, 22 nt, Human
agcuuuaucagaggagucucua

SEQ ID NO: 295087 - RNA, 20 nt, Human
caaggcagaccagagugagu

SEQ ID NO: 295088 - RNA, 22 nt, Human
aguuaggacacuugagggcuaa

SEQ ID NO: 295089 - RNA, 22 nt, Human
uuuauuuggcauccagggagaa

SEQ ID NO: 295090 - RNA, 22 nt, Human
gaauguuugacuaaagguagcu

SEQ ID NO: 295091 - RNA, 22 nt, Human
gcaguaagauguaagugcuaua

SEQ ID NO: 295092 - RNA, 22 nt, Human
agacagguguuuuacaacuucg

SEQ ID NO: 295093 - RNA, 22 nt, Human
uucuucaauuuuccauauacug

SEQ ID NO: 295094 - RNA, 22 nt, Human
aaauugcugacacuugaccauu

SEQ ID NO: 295095 - RNA, 22 nt, Human
aggaagagcuggaccagaggac

SEQ ID NO: 295096 - RNA, 17 nt, Human
ugucuucugaagagagc

SEQ ID NO: 295097 - RNA, 22 nt, Human
uacaacagacaggaauaagauu

SEQ ID NO: 295098 - RNA, 22 nt, Human
cuggaggaaucacagaaggcuu

SEQ ID NO: 295099 - RNA, 22 nt, Human
cuuuaguuugugauacgaagau

SEQ ID NO: 295100 - RNA, 21 nt, Human
ucuagaauccuguauaagacu

SEQ ID NO: 295101 - RNA, 21 nt, Human
cuguccucagauguggacgag

SEQ ID NO: 295102 - RNA, 22 nt, Human
gagccuucaucgcagccuuguu

SEQ ID NO: 295103 - RNA, 22 nt, Human
uuuccuccuagccuccagccgc

SEQ ID NO: 295104 - RNA, 21 nt, Human
gcauguguggugugcuccaca

SEQ ID NO: 295105 - RNA, 22 nt, Human
aagggcagcuuaaauugguagc

SEQ ID NO: 295106 - RNA, 22 nt, Human
caagauuuggcaacuuugucau

SEQ ID NO: 295107 - RNA, 22 nt, Human
ucuguucaguugauuagacaga

SEQ ID NO: 295108 - RNA, 22 nt, Human
ugcuuaaacccugaucaugugu

SEQ ID NO: 295109 - RNA, 22 nt, Human
cuggcagcucuacucagagccu

SEQ ID NO: 295110 - RNA, 16 nt, Human
agcagggcgggaagga

SEQ ID NO: 295111 - RNA, 21 nt, Human
uagggcucuauuuuuauuuca

SEQ ID NO: 295112 - RNA, 22 nt, Human
ucuccacacuuucucucccagg

SEQ ID NO: 295113 - RNA, 19 nt, Human
gcgaggaagucacuguggc

SEQ ID NO: 295114 - RNA, 21 nt, Human
uuguaaagguuuagaagaaug

SEQ ID NO: 295115 - RNA, 22 nt, Human
ugcaugaacggaggguaagcug

SEQ ID NO: 295116 - RNA, 20 nt, Human
cuucuucagccuaugcuuca

SEQ ID NO: 295117 - RNA, 22 nt, Human
cacagguuugacaaggauaaaa

SEQ ID NO: 295118 - RNA, 22 nt, Human
cagugcaggaagugagaugccu

SEQ ID NO: 295119 - RNA, 23 nt, Human
ugccagcagggaaugggaaggac

SEQ ID NO: 295120 - RNA, 22 nt, Human
uugaggaguagaagcuuugaau

SEQ ID NO: 295121 - RNA, 22 nt, Human
uggcuucauucagcaugacagu

SEQ ID NO: 295122 - RNA, 22 nt, Human
uaaaauagcaugugcagugaaa

SEQ ID NO: 295123 - RNA, 22 nt, Human
cagcacuuugagggcucuuaau

SEQ ID NO: 295124 - RNA, 22 nt, Human
augauuucuauauaaacuuaaa

SEQ ID NO: 295125 - RNA, 22 nt, Human
agcacacaucacuucugcucau

SEQ ID NO: 295126 - RNA, 22 nt, Human
cagcuauuaauguuuuugcuga

SEQ ID NO: 295127 - RNA, 22 nt, Human
ggcagguggaaguuggcagagc

SEQ ID NO: 295128 - RNA, 22 nt, Human
uuauuucauugauuucuaagac

SEQ ID NO: 295129 - RNA, 22 nt, Human
agguggagaagagaugggcagu

SEQ ID NO: 295130 - RNA, 22 nt, Human
ugcauguguuugccacagugag

SEQ ID NO: 295131 - RNA, 22 nt, Human
gcagguggucacucauccccag

SEQ ID NO: 295132 - RNA, 22 nt, Human
aagccagaucaaaguguccagg

SEQ ID NO: 295133 - RNA, 22 nt, Human
gccauugaugugaaaguaagac

SEQ ID NO: 295134 - RNA, 19 nt, Human
ggcauccacgaaugcagag

SEQ ID NO: 295135 - RNA, 22 nt, Human
uuuccucugucaugacagcuga

SEQ ID NO: 295136 - RNA, 22 nt, Human
gaaaacuauuggccuagaacaa

SEQ ID NO: 295137 - RNA, 22 nt, Human
ucuucaaaaaauauccaucagu

SEQ ID NO: 295138 - RNA, 22 nt, Human
caguuuuaggacauguggaugu

SEQ ID NO: 295139 - RNA, 21 nt, Human
ggggaugcgaccacaggcucc

SEQ ID NO: 295140 - RNA, 21 nt, Human
uuccagagauuguuucaccug

SEQ ID NO: 295141 - RNA, 22 nt, Human
ugcaugcaugugagcaugcaua

SEQ ID NO: 295142 - RNA, 22 nt, Human
ucuguagucucugauauaucug

SEQ ID NO: 295143 - RNA, 22 nt, Human
cugguaaagaagacaaacaggg

SEQ ID NO: 295144 - RNA, 22 nt, Human
uuucuguagugugguauguagg

SEQ ID NO: 295145 - RNA, 22 nt, Human
ggccuugagagccagugcaggc

SEQ ID NO: 295146 - RNA, 22 nt, Human
gggccagguaucgucuuuagua

SEQ ID NO: 295147 - RNA, 22 nt, Human
agggcuccuaugccccauggac

SEQ ID NO: 295148 - RNA, 22 nt, Human
aauggcuuuuaaaaauagcauu

SEQ ID NO: 295149 - RNA, 22 nt, Human
caaggaggcagugggacuugaa

SEQ ID NO: 295150 - RNA, 22 nt, Human
cuaaaucaucauuuauguuugu

SEQ ID NO: 295151 - RNA, 22 nt, Human
cuuccuggaugagcaggcugau

SEQ ID NO: 295152 - RNA, 22 nt, Human
ugaaagcuguacaugugguaca

SEQ ID NO: 295153 - RNA, 19 nt, Human
cuuauuagagugagagcuu

SEQ ID NO: 295154 - RNA, 22 nt, Human
gagaagaaauagaaucacauuu

SEQ ID NO: 295155 - RNA, 22 nt, Human
uucaacuagaggugauuuugcc

SEQ ID NO: 295156 - RNA, 22 nt, Human
gccuggcaggggccugggagug

SEQ ID NO: 295157 - RNA, 22 nt, Human
auuucuuccucugucaguaacu

SEQ ID NO: 295158 - RNA, 22 nt, Human
ugguuugacaaugaggacuggu

SEQ ID NO: 295159 - RNA, 22 nt, Human
ucccucucuugggcguggcuca

SEQ ID NO: 295160 - RNA, 22 nt, Human
guguccuuaugcauaccagagu

SEQ ID NO: 295161 - RNA, 22 nt, Human
agcuccugauucucagagauag

SEQ ID NO: 295162 - RNA, 22 nt, Human
guauuaggagguggagccuuug

SEQ ID NO: 295163 - RNA, 21 nt, Human
aaagugguaaggauuauuuug

SEQ ID NO: 295164 - RNA, 22 nt, Human
cacccagcauuggcuaagagag

SEQ ID NO: 295165 - RNA, 22 nt, Human
uuggcuaugcuuguguucaguu

SEQ ID NO: 295166 - RNA, 22 nt, Human
augggcuugacccuacagaaag

SEQ ID NO: 295167 - RNA, 22 nt, Human
gccagguugcugacgacgaucu

SEQ ID NO: 295168 - RNA, 22 nt, Human
ugcauaaacuucucugguguga

SEQ ID NO: 295169 - RNA, 22 nt, Human
uauguacaucguugaauucaaa

SEQ ID NO: 295170 - RNA, 17 nt, Human
uucugggucccagggcc

SEQ ID NO: 295171 - RNA, 22 nt, Human
cuuacaaaggagaggagauagg

SEQ ID NO: 295172 - RNA, 22 nt, Human
gcacccaggcuugggcagcaac

SEQ ID NO: 295173 - RNA, 22 nt, Human
cuggauccaacagaguuggguu

SEQ ID NO: 295174 - RNA, 22 nt, Human
cccagcucugcagaccugcccu

SEQ ID NO: 295175 - RNA, 22 nt, Human
ugucaagucucugaaugaaaug

SEQ ID NO: 295176 - RNA, 22 nt, Human
ucugggauuuuauagacaugcu

SEQ ID NO: 295177 - RNA, 22 nt, Human
caugaguucaucugcuucucuu

SEQ ID NO: 295178 - RNA, 22 nt, Human
uuaaauagcucuuguagaagaa

SEQ ID NO: 295179 - RNA, 22 nt, Human
agcugugggagaaucucugggu

SEQ ID NO: 295180 - RNA, 22 nt, Human
ugcagggccgcuggaggucaug

SEQ ID NO: 295181 - RNA, 23 nt, Human
uugaggagugcuuuuucuaucca

SEQ ID NO: 295182 - RNA, 22 nt, Human
caguuuauagcucuagcagcuu

SEQ ID NO: 295183 - RNA, 22 nt, Human
ugcuuuauuuauaaaauagcaa

SEQ ID NO: 295184 - RNA, 22 nt, Human
aauucuuguuguuaguauauuu

SEQ ID NO: 295185 - RNA, 22 nt, Human
gguccucaaucccaacaaggca

SEQ ID NO: 295186 - RNA, 20 nt, Human
uugcugggaccuuuuucaac

SEQ ID NO: 295187 - RNA, 22 nt, Human
uccuccagcuguauccugccug

SEQ ID NO: 295188 - RNA, 22 nt, Human
aggcaguguguagcuggaagag

SEQ ID NO: 295189 - RNA, 22 nt, Human
cucccuggucuuucccaucauu

SEQ ID NO: 295190 - RNA, 22 nt, Human
uucugcauucaaauuaugugag

SEQ ID NO: 295191 - RNA, 22 nt, Human
cacaugugcaguuacaugaauu

SEQ ID NO: 295192 - RNA, 22 nt, Human
aggcaggugggucacuugaguc

SEQ ID NO: 295193 - RNA, 22 nt, Human
agaccugcagggccaggccugc

SEQ ID NO: 295194 - RNA, 22 nt, Human
caaauagaacucacagacaaga

SEQ ID NO: 295195 - RNA, 22 nt, Human
accaaggaagaaucuauuugag

SEQ ID NO: 295196 - RNA, 19 nt, Human
aggaaagguggccuuagca

SEQ ID NO: 295197 - RNA, 22 nt, Human
agcuuuauauuuaaugaauucu

SEQ ID NO: 295198 - RNA, 22 nt, Human
caugccaguuuugagaugcacc

SEQ ID NO: 295199 - RNA, 21 nt, Human
cacaggugggucagugaggcc

SEQ ID NO: 295200 - RNA, 22 nt, Human
aauuuccaaauuucugucacac

SEQ ID NO: 295201 - RNA, 22 nt, Human
aguaaggcauuuuucauguuua

SEQ ID NO: 295202 - RNA, 22 nt, Human
uuucacauaugguuguugauug

SEQ ID NO: 295203 - RNA, 22 nt, Human
gggacaugaggccauagugauu

SEQ ID NO: 295204 - RNA, 22 nt, Human
uaaauacuuaguuuugugucua

SEQ ID NO: 295205 - RNA, 22 nt, Human
gcagggcaguaagagcuagagu

SEQ ID NO: 295206 - RNA, 22 nt, Human
gaggagcucaugaaagcggugu

SEQ ID NO: 295207 - RNA, 22 nt, Human
uuucacagcuuccacuuaagga

SEQ ID NO: 295208 - RNA, 22 nt, Human
aauugcuuaucuuguugaauag

SEQ ID NO: 295209 - RNA, 22 nt, Human
acaguguguuggaggagacugu

SEQ ID NO: 295210 - RNA, 22 nt, Human
aaugagaucagagauaacucaa

SEQ ID NO: 295211 - RNA, 22 nt, Human
ggcaagugcuuccccaaccaca

SEQ ID NO: 295212 - RNA, 22 nt, Human
acuccugguuuguguccuggcu

SEQ ID NO: 295213 - RNA, 22 nt, Human
gaugauuuugaugcaguaaaga

SEQ ID NO: 295214 - RNA, 22 nt, Human
ucuagaaaaaaacugcugugga

SEQ ID NO: 295215 - RNA, 22 nt, Human
gagcugaauuacggugagucau

SEQ ID NO: 295216 - RNA, 22 nt, Human
guuuucuggcaguuauuccuua

SEQ ID NO: 295217 - RNA, 22 nt, Human
ugggcuccuugggagcaaguga

SEQ ID NO: 295218 - RNA, 22 nt, Human
augcaucaggcacuaggaauag

SEQ ID NO: 295219 - RNA, 22 nt, Human
cucaguuugugugauauugucu

SEQ ID NO: 295220 - RNA, 22 nt, Human
cauagaauguaauaaagaguag

SEQ ID NO: 295221 - RNA, 22 nt, Human
uuugaaguaccugguucugacu

SEQ ID NO: 295222 - RNA, 22 nt, Human
caagcugaacacugucuucaag

SEQ ID NO: 295223 - RNA, 22 nt, Human
ucuccacagaagguuccaggcc

SEQ ID NO: 295224 - RNA, 22 nt, Human
auguauuaugguuuuccuuaag

SEQ ID NO: 295225 - RNA, 22 nt, Human
ggcaggugccaguuggcuuggg

SEQ ID NO: 295226 - RNA, 22 nt, Human
uguccauggauagagcugcucg

SEQ ID NO: 295227 - RNA, 22 nt, Human
uuggagauaucacaccuucaca

SEQ ID NO: 295228 - RNA, 22 nt, Human
uccagaggcaaaaagguaugga

SEQ ID NO: 295229 - RNA, 22 nt, Human
acaagaaagguaggauucaggu

SEQ ID NO: 295230 - RNA, 22 nt, Human
gcugcccagacauugaaucagg

SEQ ID NO: 295231 - RNA, 22 nt, Human
acaguuuacagggauuugagcu

SEQ ID NO: 295232 - RNA, 22 nt, Human
acacuuuaagcauuucacacug

SEQ ID NO: 295233 - RNA, 22 nt, Human
ucagggcuggcuuuugcagagc

SEQ ID NO: 295234 - RNA, 22 nt, Human
cucugugauucucauguaccac

SEQ ID NO: 295235 - RNA, 22 nt, Human
uagggcuccacucccagagauu

SEQ ID NO: 295236 - RNA, 22 nt, Human
uuuacagugagagcuuagugag

SEQ ID NO: 295237 - RNA, 19 nt, Human
ucccucagucugccaggcc

SEQ ID NO: 295238 - RNA, 22 nt, Human
guucacaagaguuacagacaga

SEQ ID NO: 295239 - RNA, 22 nt, Human
uuccaggaagcaguuagcagcc

SEQ ID NO: 295240 - RNA, 22 nt, Human
augaggcauauccuccuauggu

SEQ ID NO: 295241 - RNA, 22 nt, Human
gcccaggccggagagcagugcu

SEQ ID NO: 295242 - RNA, 22 nt, Human
cauuuguaguuaaaaaugucuc

SEQ ID NO: 295243 - RNA, 22 nt, Human
uuauugaaauggaagcuauaac

SEQ ID NO: 295244 - RNA, 22 nt, Human
cuuuaauucucaggugcacaua

SEQ ID NO: 295245 - RNA, 22 nt, Human
ucaagucuggagaucuggaacu

SEQ ID NO: 295246 - RNA, 22 nt, Human
ugcugccaagcccgugcuccug

SEQ ID NO: 295247 - RNA, 22 nt, Human
cuagugaaauuugcaaguaauu

SEQ ID NO: 295248 - RNA, 22 nt, Human
agcucuguuacugauuuuccug

SEQ ID NO: 295249 - RNA, 22 nt, Human
gaggggaugcagagaggcuuau

SEQ ID NO: 295250 - RNA, 22 nt, Human
aaugaucuacucucauuaucuc

SEQ ID NO: 295251 - RNA, 23 nt, Human
uuuggacuugugacucuucuccu

SEQ ID NO: 295252 - RNA, 21 nt, Human
ucagggcagcugcucuucaga

SEQ ID NO: 295253 - RNA, 23 nt, Human
guuuuacaggugagaaaauggag

SEQ ID NO: 295254 - RNA, 22 nt, Human
acaguguguucugggaccucca

SEQ ID NO: 295255 - RNA, 23 nt, Human
acaagauagggauaaaaagauaa

SEQ ID NO: 295256 - RNA, 22 nt, Human
aagugguuugauucaguuuaug

SEQ ID NO: 295257 - RNA, 22 nt, Human
ccuccugggacucauuagcacc

SEQ ID NO: 295258 - RNA, 22 nt, Human
agcuguuuucuaaugcauuuga

SEQ ID NO: 295259 - RNA, 22 nt, Human
cuggcuuucauuucaagcacgu

SEQ ID NO: 295260 - RNA, 19 nt, Human
ccaggccuccugggagguc

SEQ ID NO: 295261 - RNA, 22 nt, Human
aaauuaguacauugcaaagucc

SEQ ID NO: 295262 - RNA, 22 nt, Human
uuuucucaggugcuuaucuaag

SEQ ID NO: 295263 - RNA, 22 nt, Human
ucuagggaacaugggucaagcu

SEQ ID NO: 295264 - RNA, 18 nt, Human
uuuuacucauagcaggcc

SEQ ID NO: 295265 - RNA, 22 nt, Human
uccucuguggaccgggcuuugg

SEQ ID NO: 295266 - RNA, 23 nt, Human
acucaaaauuuggcauuugagga

SEQ ID NO: 295267 - RNA, 22 nt, Human
ucaguuaauauggguaaagcau

SEQ ID NO: 295268 - RNA, 22 nt, Human
ggugccagugggucucaggaua

SEQ ID NO: 295269 - RNA, 23 nt, Human
caugaagguagcacaaagccucu

SEQ ID NO: 295270 - RNA, 22 nt, Human
guggcuugagcaggggcagagg

SEQ ID NO: 295271 - RNA, 22 nt, Human
uguacaaagaguauagcuuuga

SEQ ID NO: 295272 - RNA, 22 nt, Human
caggguuucaccauguuagcag

SEQ ID NO: 295273 - RNA, 22 nt, Human
auuacagaagauaugcucaaca

SEQ ID NO: 295274 - RNA, 22 nt, Human
uagguucauauucuagaaucau

SEQ ID NO: 295275 - RNA, 22 nt, Human
uuccuugguagagagaauauuu

SEQ ID NO: 295276 - RNA, 22 nt, Human
acugucuucauaucugugucuc

SEQ ID NO: 295277 - RNA, 22 nt, Human
ugcuggcaucuuaauguucugu

SEQ ID NO: 295278 - RNA, 22 nt, Human
uguaucaaaccaaauuaauucu

SEQ ID NO: 295279 - RNA, 19 nt, Human
ggccagccaccucgccugg

SEQ ID NO: 295280 - RNA, 22 nt, Human
ugaccugcagucaagaggggaa

SEQ ID NO: 295281 - RNA, 22 nt, Human
auacacagcuacauugaacaau

SEQ ID NO: 295282 - RNA, 22 nt, Human
ugguccuguguucuuccugccu

SEQ ID NO: 295283 - RNA, 22 nt, Human
ucuuuuagaaaaguugaaugua

SEQ ID NO: 295284 - RNA, 22 nt, Human
uggagcagugguccuggagaug

SEQ ID NO: 295285 - RNA, 22 nt, Human
uguguguguuucugcucauaca

SEQ ID NO: 295286 - RNA, 22 nt, Human
guaugcaucgacucaagucuga

SEQ ID NO: 295287 - RNA, 22 nt, Human
acuggcagcagcagcccuuggg

SEQ ID NO: 295288 - RNA, 22 nt, Human
ccuggcacacgguggcauucaa

SEQ ID NO: 295289 - RNA, 22 nt, Human
cuccugagcucugaggaagcuu

SEQ ID NO: 295290 - RNA, 22 nt, Human
cccagugucugggccugcaggg

SEQ ID NO: 295291 - RNA, 22 nt, Human
uuguuuuggagaugagcuaaaa

SEQ ID NO: 295292 - RNA, 22 nt, Human
cccagugugccccuccugcagc

SEQ ID NO: 295293 - RNA, 22 nt, Human
acuugguuguuuuaacuuggca

SEQ ID NO: 295294 - RNA, 22 nt, Human
cccagggaaugacucuggccuu

SEQ ID NO: 295295 - RNA, 22 nt, Human
agaaaugacaagacugaucagg

SEQ ID NO: 295296 - RNA, 22 nt, Human
caugcauguuuacuacagugac

SEQ ID NO: 295297 - RNA, 22 nt, Human
aguuguaauaacaauaccaaaa

SEQ ID NO: 295298 - RNA, 22 nt, Human
aauguaaagcucaggucaggag

SEQ ID NO: 295299 - RNA, 22 nt, Human
aacaguaaagacagaauuuauc

SEQ ID NO: 295300 - RNA, 22 nt, Human
acacuuuagaaaaaagaauggu

SEQ ID NO: 295301 - RNA, 22 nt, Human
cuguccucaucugccccaaggg

SEQ ID NO: 295302 - RNA, 22 nt, Human
aggggagaggugagcaacuucu

SEQ ID NO: 295303 - RNA, 22 nt, Human
ccaggcuucccugagaggcugc

SEQ ID NO: 295304 - RNA, 23 nt, Human
gugagcagcccacuaggaaugcc

SEQ ID NO: 295305 - RNA, 22 nt, Human
ugagaacauuugcagggagagu

SEQ ID NO: 295306 - RNA, 22 nt, Human
gcacagcucgagcucaggaggg

SEQ ID NO: 295307 - RNA, 22 nt, Human
cagugucuacaguggcuggagg

SEQ ID NO: 295308 - RNA, 17 nt, Human
cugcuggcuggggcuug

SEQ ID NO: 295309 - RNA, 23 nt, Human
ucuguucuuuuagcugaucauuu

SEQ ID NO: 295310 - RNA, 22 nt, Human
caggucuuuguugcagcaugga

SEQ ID NO: 295311 - RNA, 22 nt, Human
aggucaaaaucaggcagggaag

SEQ ID NO: 295312 - RNA, 22 nt, Human
uuccaugaagggcagccucuca

SEQ ID NO: 295313 - RNA, 22 nt, Human
uguucuucuagauugccuuuua

SEQ ID NO: 295314 - RNA, 22 nt, Human
gagggcaaaacagagaagaugu

SEQ ID NO: 295315 - RNA, 22 nt, Human
uuugaacuucuccauucugaug

SEQ ID NO: 295316 - RNA, 22 nt, Human
caaaucuuuaauugaggaauca

SEQ ID NO: 295317 - RNA, 22 nt, Human
auugucauuggcuucuaugucu

SEQ ID NO: 295318 - RNA, 22 nt, Human
aaauuagaccaguucaggucca

SEQ ID NO: 295319 - RNA, 22 nt, Human
auccuacaaagcagggcuaugg

SEQ ID NO: 295320 - RNA, 22 nt, Human
uccaaggagucuuaaguuacau

SEQ ID NO: 295321 - RNA, 22 nt, Human
uaguuaugucugcaugcauauu

SEQ ID NO: 295322 - RNA, 22 nt, Human
uucccucuuucacugugauuuu

SEQ ID NO: 295323 - RNA, 22 nt, Human
ugaaauguuuggguccagaagu

SEQ ID NO: 295324 - RNA, 22 nt, Human
acagguggcuuauuggcugauu

SEQ ID NO: 295325 - RNA, 17 nt, Human
aaaauucuguaaagagg

SEQ ID NO: 295326 - RNA, 22 nt, Human
uucacauugguucuugauagcu

SEQ ID NO: 295327 - RNA, 22 nt, Human
aguuugaaauguuggcaauauu

SEQ ID NO: 295328 - RNA, 19 nt, Human
ucaaaacacaaaugguuga

SEQ ID NO: 295329 - RNA, 22 nt, Human
ucaugccaaaauccaguggcuu

SEQ ID NO: 295330 - RNA, 22 nt, Human
cuucagagugcagaagauuggg

SEQ ID NO: 295331 - RNA, 22 nt, Human
cuuugugucuguuaauaauuau

SEQ ID NO: 295332 - RNA, 22 nt, Human
cucagugugaaugcucaguaaa

SEQ ID NO: 295333 - RNA, 18 nt, Human
uuggaggauguccaugaa

SEQ ID NO: 295334 - RNA, 22 nt, Human
caugaaggaauaauuguuuaga

SEQ ID NO: 295335 - RNA, 22 nt, Human
gcacaguugugacaaccaucgc

SEQ ID NO: 295336 - RNA, 22 nt, Human
ugggagaaacugucucucccac

SEQ ID NO: 295337 - RNA, 22 nt, Human
ugucucagaauggcucauaaua

SEQ ID NO: 295338 - RNA, 22 nt, Human
aggccaggcgagacacccggcu

SEQ ID NO: 295339 - RNA, 22 nt, Human
uuuuucucuaugccaggggccu

SEQ ID NO: 295340 - RNA, 19 nt, Human
agaaauagccuuccuuguc

SEQ ID NO: 295341 - RNA, 22 nt, Human
uccaguguugucagaucaucug

SEQ ID NO: 295342 - RNA, 22 nt, Human
guacaaauuuugacaucuagga

SEQ ID NO: 295343 - RNA, 22 nt, Human
caaugauugcuauuuacauaaa

SEQ ID NO: 295344 - RNA, 22 nt, Human
guugggguaccuugaggcuggg

SEQ ID NO: 295345 - RNA, 18 nt, Human
uucuggguguuauguuua

SEQ ID NO: 295346 - RNA, 22 nt, Human
cuccauggcuuucgcaucugca

SEQ ID NO: 295347 - RNA, 22 nt, Human
ggaaaacugaggcucucagcag

SEQ ID NO: 295348 - RNA, 22 nt, Human
uggcaaagaugaagcauuucgu

SEQ ID NO: 295349 - RNA, 22 nt, Human
gggagaaggaggacugugcugu

SEQ ID NO: 295350 - RNA, 22 nt, Human
uguccuuuuucuuaggaaauau

SEQ ID NO: 295351 - RNA, 22 nt, Human
guccuaaucucuucuuauaagg

SEQ ID NO: 295352 - RNA, 22 nt, Human
cagccgucagaugugccgcagc

SEQ ID NO: 295353 - RNA, 19 nt, Human
ggccugaggccacagaucc

SEQ ID NO: 295354 - RNA, 22 nt, Human
uuccaugagcucugaguucaca

SEQ ID NO: 295355 - RNA, 22 nt, Human
ucauuucaugucucaggcacug

SEQ ID NO: 295356 - RNA, 22 nt, Human
gcagcuuugucacggagugucg

SEQ ID NO: 295357 - RNA, 22 nt, Human
uuacauucaaggaacucauucu

SEQ ID NO: 295358 - RNA, 22 nt, Human
uuucccagagguaugaauaagu

SEQ ID NO: 295359 - RNA, 22 nt, Human
cauguguuucgagacuguugag

SEQ ID NO: 295360 - RNA, 22 nt, Human
auccugaaaacuuacgaagugg

SEQ ID NO: 295361 - RNA, 22 nt, Human
aagaaaugugaauauugaauag

SEQ ID NO: 295362 - RNA, 22 nt, Human
uauguguuugacacccugcaag

SEQ ID NO: 295363 - RNA, 18 nt, Human
uuaguauaacugccugug

SEQ ID NO: 295364 - RNA, 19 nt, Human
ugcuauuugaagaagugua

SEQ ID NO: 295365 - RNA, 22 nt, Human
gccugcaggcuguaguuuguga

SEQ ID NO: 295366 - RNA, 22 nt, Human
uucuggaaggguggaguagcuu

SEQ ID NO: 295367 - RNA, 22 nt, Human
ggacauuugcaccuaccucagc

SEQ ID NO: 295368 - RNA, 22 nt, Human
uuguugaauggauaaauaaauu

SEQ ID NO: 295369 - RNA, 22 nt, Human
uguuuacagcugaucaggcauc

SEQ ID NO: 295370 - RNA, 22 nt, Human
acuguggcgucaggaagaaauu

SEQ ID NO: 295371 - RNA, 22 nt, Human
cgagcaugaugacggcuguggc

SEQ ID NO: 295372 - RNA, 22 nt, Human
ggcaggcacauuugggggccgu

SEQ ID NO: 295373 - RNA, 22 nt, Human
cauuguaagcuguugaauccuc

SEQ ID NO: 295374 - RNA, 22 nt, Human
cuuagauacaguagaaagacuc

SEQ ID NO: 295375 - RNA, 22 nt, Human
gggaccuggcaccuuugcucug

SEQ ID NO: 295376 - RNA, 22 nt, Human
acaacucucaguuaaauaaaga

SEQ ID NO: 295377 - RNA, 21 nt, Human
aagaaguuuggauuuuguccu

SEQ ID NO: 295378 - RNA, 22 nt, Human
uucagagagaccaaguggcgug

SEQ ID NO: 295379 - RNA, 22 nt, Human
cacauguguauaugugaggggg

SEQ ID NO: 295380 - RNA, 22 nt, Human
uuucaagacucauugaguauug

SEQ ID NO: 295381 - RNA, 22 nt, Human
aggaccugagaguuggaaaucc

SEQ ID NO: 295382 - RNA, 21 nt, Human
uccacccucucugcucccagu

SEQ ID NO: 295383 - RNA, 22 nt, Human
uccaggaggguuuucugccuuc

SEQ ID NO: 295384 - RNA, 22 nt, Human
uugaggagguaugacuagguac

SEQ ID NO: 295385 - RNA, 22 nt, Human
ucagacaggcuucuuucucccu

SEQ ID NO: 295386 - RNA, 20 nt, Human
ucuguggcagguggcgcuug

SEQ ID NO: 295387 - RNA, 22 nt, Human
cauuucauuccuuugaaagugg

SEQ ID NO: 295388 - RNA, 22 nt, Human
ucuaaacacgucucuuugaaua

SEQ ID NO: 295389 - RNA, 22 nt, Human
agauggucuuuugaguaaugaa

SEQ ID NO: 295390 - RNA, 22 nt, Human
acaggugggcuuaagagucggc

SEQ ID NO: 295391 - RNA, 22 nt, Human
acauuucagugagcuauugaag

SEQ ID NO: 295392 - RNA, 22 nt, Human
acugguaaauuaugcgacuuug

SEQ ID NO: 295393 - RNA, 22 nt, Human
acccagccuacaaagcucaccu

SEQ ID NO: 295394 - RNA, 22 nt, Human
caguguuugcuuaaguuauaug

SEQ ID NO: 295395 - RNA, 22 nt, Human
aaggcauuaccuaaguuuggga

SEQ ID NO: 295396 - RNA, 22 nt, Human
aagucucuuuaccucuccaggc

SEQ ID NO: 295397 - RNA, 22 nt, Human
ugcagggaaugcuugcagcaug

SEQ ID NO: 295398 - RNA, 22 nt, Human
uguuuucuggguggaagguacu

SEQ ID NO: 295399 - RNA, 22 nt, Human
agcagguggaaaauucuuauca

SEQ ID NO: 295400 - RNA, 22 nt, Human
cuuuuccacugagccucacaaa

SEQ ID NO: 295401 - RNA, 22 nt, Human
acagauuuguucuuuugggcua

SEQ ID NO: 295402 - RNA, 22 nt, Human
uuaauuuucucaucugugaaau

SEQ ID NO: 295403 - RNA, 22 nt, Human
cacaaauggccguguucaaaga

SEQ ID NO: 295404 - RNA, 22 nt, Human
agcuggagaauaggaauuagug

SEQ ID NO: 295405 - RNA, 22 nt, Human
uuuaauugauucacagucugua

SEQ ID NO: 295406 - RNA, 22 nt, Human
agggggugucucugauuggguu

SEQ ID NO: 295407 - RNA, 22 nt, Human
caggcuugcugcuagagcacuu

SEQ ID NO: 295408 - RNA, 22 nt, Human
uuuuucagccaugaauuacacu

SEQ ID NO: 295409 - RNA, 22 nt, Human
gaggcuguuaggagggacucug

SEQ ID NO: 295410 - RNA, 22 nt, Human
auguccuugagacccuccucgg

SEQ ID NO: 295411 - RNA, 22 nt, Human
uagcaaaggccuuggacacgcu

SEQ ID NO: 295412 - RNA, 22 nt, Human
auguguguguuuaauccucaaa

SEQ ID NO: 295413 - RNA, 22 nt, Human
gggggcucugacucccucagcu

SEQ ID NO: 295414 - RNA, 22 nt, Human
caaaugaaguccaaagggcuua

SEQ ID NO: 295415 - RNA, 22 nt, Human
uaaggcaaagugauuucuuaaa

SEQ ID NO: 295416 - RNA, 22 nt, Human
gauguuuauaucuaacuuaagu

SEQ ID NO: 295417 - RNA, 23 nt, Human
agggcuccuuguugauuagcauu

SEQ ID NO: 295418 - RNA, 22 nt, Human
uuuuccagauuggacuuagucc

SEQ ID NO: 295419 - RNA, 22 nt, Human
ugcuccuggaugagguacucca

SEQ ID NO: 295420 - RNA, 22 nt, Human
uuuuggcuuuuccucagcaagc

SEQ ID NO: 295421 - RNA, 22 nt, Human
gcacccagccagcaucucagag

SEQ ID NO: 295422 - RNA, 22 nt, Human
gcagacaggggcuuaggaaagg

SEQ ID NO: 295423 - RNA, 22 nt, Human
ccuggcagcaggugggcccgug

SEQ ID NO: 295424 - RNA, 22 nt, Human
uacugcauaacuggcauguggg

SEQ ID NO: 295425 - RNA, 22 nt, Human
agaauacaguucaguaauggau

SEQ ID NO: 295426 - RNA, 22 nt, Human
aagaguggagcuggaaaguggg

SEQ ID NO: 295427 - RNA, 22 nt, Human
guucuuaagaccacaauaaaaa

SEQ ID NO: 295428 - RNA, 22 nt, Human
aggaaugugacuauuuuuucag

SEQ ID NO: 295429 - RNA, 20 nt, Human
acaaaauagguacuggguag

SEQ ID NO: 295430 - RNA, 22 nt, Human
cauuuaagagaaauauuuaguu

SEQ ID NO: 295431 - RNA, 22 nt, Human
uugcccagagucacccagcuca

SEQ ID NO: 295432 - RNA, 22 nt, Human
acaguuuauugcacagguaacc

SEQ ID NO: 295433 - RNA, 22 nt, Human
ccuguucacccuccaugcacag

SEQ ID NO: 295434 - RNA, 15 nt, Human
auacacaugagggag

SEQ ID NO: 295435 - RNA, 22 nt, Human
cagcaaagguagaagcacagga

SEQ ID NO: 295436 - RNA, 19 nt, Human
uguccucacagagcauaac

SEQ ID NO: 295437 - RNA, 22 nt, Human
agcaggugcguuacuucacucu

SEQ ID NO: 295438 - RNA, 22 nt, Human
gccugcagaggugcugcuagcu

SEQ ID NO: 295439 - RNA, 22 nt, Human
auccugugcaaugacugcaucu

SEQ ID NO: 295440 - RNA, 22 nt, Human
uuauuuauuguguaccuacugu

SEQ ID NO: 295441 - RNA, 22 nt, Human
aauuuguuuucaagucacugga

SEQ ID NO: 295442 - RNA, 22 nt, Human
caggaauccagagugagccucc

SEQ ID NO: 295443 - RNA, 22 nt, Human
auuuucauuuugcagggugaga

SEQ ID NO: 295444 - RNA, 22 nt, Human
aaauguuuugcucccauguggu

SEQ ID NO: 295445 - RNA, 22 nt, Human
uugcccagagcugccuguuaca

SEQ ID NO: 295446 - RNA, 22 nt, Human
ucucuucuuguguuuuccugcc

SEQ ID NO: 295447 - RNA, 22 nt, Human
augaacagaggaauagaauucu

SEQ ID NO: 295448 - RNA, 20 nt, Human
uccuggccuucucgggcagu

SEQ ID NO: 295449 - RNA, 22 nt, Human
uauugcuggugcuguucugaau

SEQ ID NO: 295450 - RNA, 21 nt, Human
ugacugaggcuucuucacaca

SEQ ID NO: 295451 - RNA, 20 nt, Human
ugcaggugggcccuucuggg

SEQ ID NO: 295452 - RNA, 22 nt, Human
uccugagcccuguaggacccug

SEQ ID NO: 295453 - RNA, 22 nt, Human
uccuggguucauguccuggugc

SEQ ID NO: 295454 - RNA, 19 nt, Human
acauucccaucagcaaugu

SEQ ID NO: 295455 - RNA, 22 nt, Human
gaaagcugggaaauaaauauua

SEQ ID NO: 295456 - RNA, 22 nt, Human
cacaaggcacauuccuugucca

SEQ ID NO: 295457 - RNA, 22 nt, Human
uguagaaagcucuucugaaauc

SEQ ID NO: 295458 - RNA, 22 nt, Human
cugugggaacacugaggacuuc

SEQ ID NO: 295459 - RNA, 22 nt, Human
gcuguggccuggcgcagagcug

SEQ ID NO: 295460 - RNA, 23 nt, Human
agguuaugauuauagagcgagga

SEQ ID NO: 295461 - RNA, 22 nt, Human
acaggcaggcgggacagcccga

SEQ ID NO: 295462 - RNA, 22 nt, Human
aaauucaguuuuaauaaucacu

SEQ ID NO: 295463 - RNA, 22 nt, Human
cuggccccaggcagccugcugg

SEQ ID NO: 295464 - RNA, 22 nt, Human
ucccugagagcacuggggagcc

SEQ ID NO: 295465 - RNA, 22 nt, Human
uggcagguggagacagcagagc

SEQ ID NO: 295466 - RNA, 22 nt, Human
aaggugguuugauuaucccacu

SEQ ID NO: 295467 - RNA, 22 nt, Human
ucagggcacguuucugcaaugc

SEQ ID NO: 295468 - RNA, 20 nt, Human
ucuuauugucuugaggaguu

SEQ ID NO: 295469 - RNA, 22 nt, Human
cuacuucugugaugaaacuaca

SEQ ID NO: 295470 - RNA, 18 nt, Human
agaguccagggugaggug

SEQ ID NO: 295471 - RNA, 22 nt, Human
ucuuagauguuagcucugugug

SEQ ID NO: 295472 - RNA, 22 nt, Human
caauuucucuuuauaucucaca

SEQ ID NO: 295473 - RNA, 22 nt, Human
cagggcucaucugugugaccag

SEQ ID NO: 295474 - RNA, 22 nt, Human
uugaaauaucaaguuauuagug

SEQ ID NO: 295475 - RNA, 22 nt, Human
ugacacaugcaccagucuuuaa

SEQ ID NO: 295476 - RNA, 22 nt, Human
uacacaugcauguacuccagga

SEQ ID NO: 295477 - RNA, 22 nt, Human
uggagcaggaaacaucuagagg

SEQ ID NO: 295478 - RNA, 22 nt, Human
gcagguguggaguggggugagc

SEQ ID NO: 295479 - RNA, 22 nt, Human
uauuacagaaucaggcauaacu

SEQ ID NO: 295480 - RNA, 23 nt, Human
gaggagggucgugcuguguuccu

SEQ ID NO: 295481 - RNA, 20 nt, Human
aggguggcaaguuagugaca

SEQ ID NO: 295482 - RNA, 22 nt, Human
acaagaauuuacauguagugga

SEQ ID NO: 295483 - RNA, 20 nt, Human
agggugugggccuuagccau

SEQ ID NO: 295484 - RNA, 22 nt, Human
auguuuuaaauauguguguaaa

SEQ ID NO: 295485 - RNA, 22 nt, Human
gauuuucauuugcacucuagaa

SEQ ID NO: 295486 - RNA, 22 nt, Human
cugccugcaugcugccauagcu

SEQ ID NO: 295487 - RNA, 22 nt, Human
uucuuaacuggaaaaugucaga

SEQ ID NO: 295488 - RNA, 22 nt, Human
uugcaggguugacacugccugc

SEQ ID NO: 295489 - RNA, 21 nt, Human
ucgugcagcagcugaggcuug

SEQ ID NO: 295490 - RNA, 23 nt, Human
uuucacauuaauguuuagcagga

SEQ ID NO: 295491 - RNA, 22 nt, Human
gacugugggaagacuguagguu

SEQ ID NO: 295492 - RNA, 22 nt, Human
acuugguuggucucacccuguu

SEQ ID NO: 295493 - RNA, 18 nt, Human
cuggcauucuucccugga

SEQ ID NO: 295494 - RNA, 22 nt, Human
ugcaggcucaccugccagggcc

SEQ ID NO: 295495 - RNA, 22 nt, Human
ucuguccucuuugaagcugcuc

SEQ ID NO: 295496 - RNA, 22 nt, Human
cauuugaagacuuagaagagga

SEQ ID NO: 295497 - RNA, 22 nt, Human
acacaugauaagaaaguuuaaa

SEQ ID NO: 295498 - RNA, 22 nt, Human
uguuaaaaccacaggugaggac

SEQ ID NO: 295499 - RNA, 18 nt, Human
acuguuaucugauaaggc

SEQ ID NO: 295500 - RNA, 22 nt, Human
cugggugugggucaagcaacca

SEQ ID NO: 295501 - RNA, 22 nt, Human
ucaguuaacaacuauuuauuga

SEQ ID NO: 295502 - RNA, 20 nt, Human
auacacauauucuugcaacu

SEQ ID NO: 295503 - RNA, 22 nt, Human
uuauugaaggaacugaaauaaa

SEQ ID NO: 295504 - RNA, 22 nt, Human
aaacaucaccauuuuaccuaau

SEQ ID NO: 295505 - RNA, 21 nt, Human
uugcuuauggcacugcuuugc

SEQ ID NO: 295506 - RNA, 22 nt, Human
ggggaccugggcuucaaggguu

SEQ ID NO: 295507 - RNA, 22 nt, Human
agaggucagcugcaugccacau

SEQ ID NO: 295508 - RNA, 19 nt, Human
cucugggcugcaucuuggu

SEQ ID NO: 295509 - RNA, 22 nt, Human
guuuacauguacucauuauacu

SEQ ID NO: 295510 - RNA, 22 nt, Human
augaggcucucaacaccuugag

SEQ ID NO: 295511 - RNA, 22 nt, Human
cugugucccccucagccaggug

SEQ ID NO: 295512 - RNA, 22 nt, Human
ccaugagcuucaacugacacag

SEQ ID NO: 295513 - RNA, 22 nt, Human
ucuuuguaaaugccuagcauaa

SEQ ID NO: 295514 - RNA, 22 nt, Human
acagcuggacaggggagaguuu

SEQ ID NO: 295515 - RNA, 22 nt, Human
cacaugcauaccuauguguaua

SEQ ID NO: 295516 - RNA, 22 nt, Human
aaagaucaauagauaaagcuac

SEQ ID NO: 295517 - RNA, 22 nt, Human
agucaguuuuaccaaucucagu

SEQ ID NO: 295518 - RNA, 22 nt, Human
cacaggugcuccucggggagcu

SEQ ID NO: 295519 - RNA, 22 nt, Human
uaguacuacguuuucuacuauc

SEQ ID NO: 295520 - RNA, 22 nt, Human
aggugcaugaugcagagugcag

SEQ ID NO: 295521 - RNA, 21 nt, Human
ggcuguggagccaugacucac

SEQ ID NO: 295522 - RNA, 22 nt, Human
agccagagaguguuggagaugu

SEQ ID NO: 295523 - RNA, 22 nt, Human
acaauucugaugguuucccagu

SEQ ID NO: 295524 - RNA, 22 nt, Human
cacaguuuaugaucucagugaa

SEQ ID NO: 295525 - RNA, 18 nt, Human
agagggaaagcaggcuga

SEQ ID NO: 295526 - RNA, 22 nt, Human
cuccugaggacuucuauugggu

SEQ ID NO: 295527 - RNA, 22 nt, Human
uucauugagugguuuauucuaa

SEQ ID NO: 295528 - RNA, 22 nt, Human
agcugagguuaguauaaaugug

SEQ ID NO: 295529 - RNA, 22 nt, Human
gauuuacagaucuaagggucac

SEQ ID NO: 295530 - RNA, 22 nt, Human
agggcaugugggagaggagccu

SEQ ID NO: 295531 - RNA, 22 nt, Human
guucuuuaaacugcugcucugu

SEQ ID NO: 295532 - RNA, 22 nt, Human
ucccuccaggcagcuggguacu

SEQ ID NO: 295533 - RNA, 20 nt, Human
gggugggagagucugagggu

SEQ ID NO: 295534 - RNA, 22 nt, Human
cccuuccucccaggcuucugug

SEQ ID NO: 295535 - RNA, 22 nt, Human
auucuucauaccuacugagguu

SEQ ID NO: 295536 - RNA, 22 nt, Human
cuccuggaggcuccaagggaga

SEQ ID NO: 295537 - RNA, 22 nt, Human
caugcagcaggaucucauuccc

SEQ ID NO: 295538 - RNA, 22 nt, Human
guugcacaguuccucaagcagg

SEQ ID NO: 295539 - RNA, 22 nt, Human
gcucaggagcugacagccucaa

SEQ ID NO: 295540 - RNA, 23 nt, Human
ccagucucacguauacaggauuu

SEQ ID NO: 295541 - RNA, 22 nt, Human
ucccaauuaacagguaucaggc

SEQ ID NO: 295542 - RNA, 22 nt, Human
ugggaccucucuugagagagca

SEQ ID NO: 295543 - RNA, 22 nt, Human
agaggccuccgaaaggugggcu

SEQ ID NO: 295544 - RNA, 22 nt, Human
ucaugccacuuacaaaauaaug

SEQ ID NO: 295545 - RNA, 22 nt, Human
acaugccaauuugguuaguuca

SEQ ID NO: 295546 - RNA, 20 nt, Human
cauauauaccuagaagugga

SEQ ID NO: 295547 - RNA, 22 nt, Human
ucugggugagcugccucggguc

SEQ ID NO: 295548 - RNA, 22 nt, Human
auuuacauuccauggugguuac

SEQ ID NO: 295549 - RNA, 22 nt, Human
gacugucuccugucaugaggga

SEQ ID NO: 295550 - RNA, 22 nt, Human
uggggagguucgggaaucuugu

SEQ ID NO: 295551 - RNA, 22 nt, Human
gccuacauuucccaguugaaug

SEQ ID NO: 295552 - RNA, 22 nt, Human
aauuucuccaagaaugcuuaga

SEQ ID NO: 295553 - RNA, 22 nt, Human
gaaauaguacagcauaguucuu

SEQ ID NO: 295554 - RNA, 22 nt, Human
uggaucugguucccugagccuu

SEQ ID NO: 295555 - RNA, 22 nt, Human
aacaugcccgcuguaugccauu

SEQ ID NO: 295556 - RNA, 21 nt, Human
auuuucauuaauucagugugg

SEQ ID NO: 295557 - RNA, 22 nt, Human
gccagcucucauuguauaggcu

SEQ ID NO: 295558 - RNA, 22 nt, Human
acuguucacccagcacuagcag

SEQ ID NO: 295559 - RNA, 22 nt, Human
uaugccuggaaccuuucucuuu

SEQ ID NO: 295560 - RNA, 22 nt, Human
uacauuccauguguguguauuc

SEQ ID NO: 295561 - RNA, 22 nt, Human
gaaauuuauuaucuacaucauu

SEQ ID NO: 295562 - RNA, 22 nt, Human
auuuccaugucgguauuuuaua

SEQ ID NO: 295563 - RNA, 22 nt, Human
ucccagggcucuagagugcugg

SEQ ID NO: 295564 - RNA, 22 nt, Human
cuccugacacaguccacacuug

SEQ ID NO: 295565 - RNA, 22 nt, Human
gaauuuccucuaaaccccugag

SEQ ID NO: 295566 - RNA, 20 nt, Human
uugaagaggauauaucgcuc

SEQ ID NO: 295567 - RNA, 22 nt, Human
auguuauuaaaguacagauucu

SEQ ID NO: 295568 - RNA, 22 nt, Human
acagguguguucccggaaagcc

SEQ ID NO: 295569 - RNA, 22 nt, Human
ucugcaggcucuagaugagguu

SEQ ID NO: 295570 - RNA, 22 nt, Human
uucaacuauuaugaauaaaauu

SEQ ID NO: 295571 - RNA, 19 nt, Human
ugguggcaaugucagcuaa

SEQ ID NO: 295572 - RNA, 21 nt, Human
ugacccuucuagcagaacaca

SEQ ID NO: 295573 - RNA, 22 nt, Human
uuuauucugugcuacaugaaga

SEQ ID NO: 295574 - RNA, 22 nt, Human
gcauccaaaccauucaucagcc

SEQ ID NO: 295575 - RNA, 20 nt, Human
gucugcccaggccaccacgg

SEQ ID NO: 295576 - RNA, 22 nt, Human
uuauugagagcuguuuuauggc

SEQ ID NO: 295577 - RNA, 22 nt, Human
uacuuucuuucccaagaggugg

SEQ ID NO: 295578 - RNA, 22 nt, Human
gugguggaugucuguaaucuca

SEQ ID NO: 295579 - RNA, 22 nt, Human
gaggccugguuuccagcauccu

SEQ ID NO: 295580 - RNA, 22 nt, Human
gcccucucggcauagcaggggc

SEQ ID NO: 295581 - RNA, 22 nt, Human
ugucccucugaggcuucccugg

SEQ ID NO: 295582 - RNA, 22 nt, Human
aauacaaucaaauucacuagca

SEQ ID NO: 295583 - RNA, 22 nt, Human
ugcuggaguucgacauugcaaa

SEQ ID NO: 295584 - RNA, 22 nt, Human
uccugaggcucacuuugaaugu

SEQ ID NO: 295585 - RNA, 22 nt, Human
uucauuugccaucaguguaaug

SEQ ID NO: 295586 - RNA, 22 nt, Human
acauucuuaacaguuaaaaacu

SEQ ID NO: 295587 - RNA, 22 nt, Human
cagcuuuaccaauauuuggaaa

SEQ ID NO: 295588 - RNA, 17 nt, Human
ccugagugggagaggaa

SEQ ID NO: 295589 - RNA, 22 nt, Human
uuugcugaauagauuguaaacu

SEQ ID NO: 295590 - RNA, 22 nt, Human
caccugcagggggagucaagag

SEQ ID NO: 295591 - RNA, 22 nt, Human
uuuccuucuuagcgguguucuu

SEQ ID NO: 295592 - RNA, 22 nt, Human
cugauguucauuucuuuuguac

SEQ ID NO: 295593 - RNA, 22 nt, Human
gaggcuccccaugaggccccag

SEQ ID NO: 295594 - RNA, 22 nt, Human
ucaaggagacagaaagcaaugg

SEQ ID NO: 295595 - RNA, 22 nt, Human
gucuuucuaugaugaacuguug

SEQ ID NO: 295596 - RNA, 22 nt, Human
uuccugcagcaaggagaagcug

SEQ ID NO: 295597 - RNA, 22 nt, Human
gccacugucaucuugugaagca

SEQ ID NO: 295598 - RNA, 22 nt, Human
acauguguauagccuguauaga

SEQ ID NO: 295599 - RNA, 22 nt, Human
ggacggggagcuggaaagggga

SEQ ID NO: 295600 - RNA, 21 nt, Human
agacaacugugacuauucccu

SEQ ID NO: 295601 - RNA, 22 nt, Human
uucuuuccccauggaguucgga

SEQ ID NO: 295602 - RNA, 22 nt, Human
ucccagggauuaggacauggau

SEQ ID NO: 295603 - RNA, 22 nt, Human
agaggccucuagggccccucag

SEQ ID NO: 295604 - RNA, 22 nt, Human
aagcugcagguugaauccaggu

SEQ ID NO: 295605 - RNA, 22 nt, Human
gaggaaugggugucucgugauu

SEQ ID NO: 295606 - RNA, 22 nt, Human
uuccaugaaauguguuaugcuu

SEQ ID NO: 295607 - RNA, 22 nt, Human
ggcaggugcgcauguugcauua

SEQ ID NO: 295608 - RNA, 22 nt, Human
agcagggcacuggaaggcacug

SEQ ID NO: 295609 - RNA, 22 nt, Human
gcuguggucccucuguccucau

SEQ ID NO: 295610 - RNA, 22 nt, Human
uacagaauguuaugaagcauag

SEQ ID NO: 295611 - RNA, 22 nt, Human
aagucucuggugaugcaggaaa

SEQ ID NO: 295612 - RNA, 22 nt, Human
uagaaggcccauucauuuguuc

SEQ ID NO: 295613 - RNA, 22 nt, Human
uccuuuaugugaguuguuuccc

SEQ ID NO: 295614 - RNA, 22 nt, Human
ugguauguaaauuguaacucaa

SEQ ID NO: 295615 - RNA, 20 nt, Human
gccugcagagaaggucagag

SEQ ID NO: 295616 - RNA, 22 nt, Human
uuuauguuugcauuuucaaaga

SEQ ID NO: 295617 - RNA, 22 nt, Human
gaacuuggaccugguccuuugg

SEQ ID NO: 295618 - RNA, 22 nt, Human
uucuuacagaguuuacagagcc

SEQ ID NO: 295619 - RNA, 22 nt, Human
aaauccuaagcagaggaauuua

SEQ ID NO: 295620 - RNA, 22 nt, Human
ccuguucacuuugacuucucca

SEQ ID NO: 295621 - RNA, 23 nt, Human
uguguacacaauagaugagguuu

SEQ ID NO: 295622 - RNA, 22 nt, Human
uaggaaauucucuugcuaaguu

SEQ ID NO: 295623 - RNA, 21 nt, Human
ucucuguguacagucucaccc

SEQ ID NO: 295624 - RNA, 22 nt, Human
aagacaauuugauacuaguugc

SEQ ID NO: 295625 - RNA, 22 nt, Human
ggccccaguucacuccuggccg

SEQ ID NO: 295626 - RNA, 22 nt, Human
agaugugacugggcaaguuacu

SEQ ID NO: 295627 - RNA, 22 nt, Human
ucugucuucuguagcuaauaau

SEQ ID NO: 295628 - RNA, 22 nt, Human
guucuucagcccucagguccua

SEQ ID NO: 295629 - RNA, 22 nt, Human
ggccuggaagaggacagagaaa

SEQ ID NO: 295630 - RNA, 22 nt, Human
ccuguucagagcuaagcaucau

SEQ ID NO: 295631 - RNA, 22 nt, Human
ccugggagcuguggaaaggcug

SEQ ID NO: 295632 - RNA, 22 nt, Human
uauuuuacagacuacuuuagau

SEQ ID NO: 295633 - RNA, 22 nt, Human
auaguguuagagccaguauguu

SEQ ID NO: 295634 - RNA, 20 nt, Human
cuguuaaaagguaugaauuc

SEQ ID NO: 295635 - RNA, 22 nt, Human
aaauaauuauagcgagucuauc

SEQ ID NO: 295636 - RNA, 22 nt, Human
uuuauaaaauagacugggucua

SEQ ID NO: 295637 - RNA, 22 nt, Human
uuucacaaugcaauccuacuuc

SEQ ID NO: 295638 - RNA, 22 nt, Human
agccauccucccaccucagccu

SEQ ID NO: 295639 - RNA, 22 nt, Human
gaauguuagagauucuuagguu

SEQ ID NO: 295640 - RNA, 22 nt, Human
ucauuugugcaauguagaugaa

SEQ ID NO: 295641 - RNA, 22 nt, Human
auuuccuucggacaguuugggu

SEQ ID NO: 295642 - RNA, 22 nt, Human
cauuuguugggacaaugaaaag

SEQ ID NO: 295643 - RNA, 22 nt, Human
acuuguucauugaguacauaug

SEQ ID NO: 295644 - RNA, 19 nt, Human
uggcagugugggguaugaa

SEQ ID NO: 295645 - RNA, 18 nt, Human
aaugaaauguacaccuuu

SEQ ID NO: 295646 - RNA, 21 nt, Human
agcaggugcuguuggaggaaa

SEQ ID NO: 295647 - RNA, 22 nt, Human
auucugcacuuccuuugcuucc

SEQ ID NO: 295648 - RNA, 22 nt, Human
ccugggugacagagugagaccu

SEQ ID NO: 295649 - RNA, 22 nt, Human
ucucuucuaacacuagaaauuc

SEQ ID NO: 295650 - RNA, 22 nt, Human
ugaguccgaaguugcagugagc

SEQ ID NO: 295651 - RNA, 22 nt, Human
ccagacaggggcuguuccugcu

SEQ ID NO: 295652 - RNA, 22 nt, Human
uggcagggaguucguucacaac

SEQ ID NO: 295653 - RNA, 22 nt, Human
ggaaggguuuggaaagccgaga

SEQ ID NO: 295654 - RNA, 22 nt, Human
gcuucuaucccuccacugcacu

SEQ ID NO: 295655 - RNA, 22 nt, Human
cagggcagcuuccuuuguuagg

SEQ ID NO: 295656 - RNA, 22 nt, Human
uucugucaugcucauguaauug

SEQ ID NO: 295657 - RNA, 19 nt, Human
gcaggcaguggcauucgga

SEQ ID NO: 295658 - RNA, 22 nt, Human
caaaaacugcaauuacuuuuac

SEQ ID NO: 295659 - RNA, 22 nt, Human
uguauuuucagaguggcauuuc

SEQ ID NO: 295660 - RNA, 22 nt, Human
aaaaaugcugugguagcugugu

SEQ ID NO: 295661 - RNA, 22 nt, Human
acaaggagaagaaauuggucau

SEQ ID NO: 295662 - RNA, 22 nt, Human
uucuuacauauuuucauauggu

SEQ ID NO: 295663 - RNA, 22 nt, Human
uagguaguuuccuguuguuggg

SEQ ID NO: 295664 - RNA, 22 nt, Human
gcugauggcuugcuggcugaca

SEQ ID NO: 295665 - RNA, 22 nt, Human
uucucaguuucacugauaacag

SEQ ID NO: 295666 - RNA, 20 nt, Human
ccuccuggucaggugugcag

SEQ ID NO: 295667 - RNA, 22 nt, Human
uuuagcaucgaaguaaauuuag

SEQ ID NO: 295668 - RNA, 22 nt, Human
guauuuucaugauuucagacca

SEQ ID NO: 295669 - RNA, 22 nt, Human
auccuucuaccuaggacuauuu

SEQ ID NO: 295670 - RNA, 22 nt, Human
auaugcauguacgugugcacaa

SEQ ID NO: 295671 - RNA, 22 nt, Human
ugccugacugcugccaccacua

SEQ ID NO: 295672 - RNA, 22 nt, Human
uccuggccugucuggaguagcu

SEQ ID NO: 295673 - RNA, 22 nt, Human
uuccugguaguaagacaucugg

SEQ ID NO: 295674 - RNA, 22 nt, Human
uguuugaacugaauaacauagu

SEQ ID NO: 295675 - RNA, 22 nt, Human
uuggcuuggagaguugaaaugu

SEQ ID NO: 295676 - RNA, 22 nt, Human
gcuuguuugugauuucuccaga

SEQ ID NO: 295677 - RNA, 22 nt, Human
cuguguccuuuaaaaaagacac

SEQ ID NO: 295678 - RNA, 21 nt, Human
ucucuccucaagcucgacccc

SEQ ID NO: 295679 - RNA, 22 nt, Human
cuuuccuccacucccuaggcuu

SEQ ID NO: 295680 - RNA, 21 nt, Human
aagagcuggaucaaggauaag

SEQ ID NO: 295681 - RNA, 22 nt, Human
ccugaaauccauaguuuacacu

SEQ ID NO: 295682 - RNA, 17 nt, Human
cuccuggccaccccucu

SEQ ID NO: 295683 - RNA, 22 nt, Human
ucugggaagcugguccuguucu

SEQ ID NO: 295684 - RNA, 22 nt, Human
uugagguauugauauuuuauga

SEQ ID NO: 295685 - RNA, 22 nt, Human
augagguuuuacugccauuuuc

SEQ ID NO: 295686 - RNA, 22 nt, Human
uuuguucaauccagacaauagc

SEQ ID NO: 295687 - RNA, 22 nt, Human
ggcaggcaagucugcucuguga

SEQ ID NO: 295688 - RNA, 22 nt, Human
augaaagaugauuuaaaguacu

SEQ ID NO: 295689 - RNA, 22 nt, Human
aggaaaagugugaaguauggag

SEQ ID NO: 295690 - RNA, 22 nt, Human
agcaggcacuaugccaggaucu

SEQ ID NO: 295691 - RNA, 22 nt, Human
uuuucaguaaugucuacauaau

SEQ ID NO: 295692 - RNA, 22 nt, Human
acagcuuuucugauagauccug

SEQ ID NO: 295693 - RNA, 22 nt, Human
aggacagugguguucuggagug

SEQ ID NO: 295694 - RNA, 22 nt, Human
uaacuuagaaguuuaauuguau

SEQ ID NO: 295695 - RNA, 22 nt, Human
ccuacaggaaauuguaucaaaa

SEQ ID NO: 295696 - RNA, 22 nt, Human
ugagcuuacgugggaacagacu

SEQ ID NO: 295697 - RNA, 22 nt, Human
ucagcuuucucaaagaagcugg

SEQ ID NO: 295698 - RNA, 22 nt, Human
uggaaaaacugagacuuagaca

SEQ ID NO: 295699 - RNA, 22 nt, Human
uucuaaaaccaauucugcuucu

SEQ ID NO: 295700 - RNA, 22 nt, Human
aggucagaaaaggagagcauug

SEQ ID NO: 295701 - RNA, 22 nt, Human
auguccucggcucugugcugcu

SEQ ID NO: 295702 - RNA, 22 nt, Human
auuccuucuuugagaauaagca

SEQ ID NO: 295703 - RNA, 19 nt, Human
ggguuguguggaagguauc

SEQ ID NO: 295704 - RNA, 20 nt, Human
uuucacagucccuguuuccu

SEQ ID NO: 295705 - RNA, 19 nt, Human
ugucugcugaugacucuau

SEQ ID NO: 295706 - RNA, 22 nt, Human
augcaaaaguaacugugauuuu

SEQ ID NO: 295707 - RNA, 22 nt, Human
gcuuggaaguaggauugggaga

SEQ ID NO: 295708 - RNA, 22 nt, Human
uagaaaauggccaagcaggacu

SEQ ID NO: 295709 - RNA, 19 nt, Human
cagcccucuuaccacugug

SEQ ID NO: 295710 - RNA, 22 nt, Human
ucuggcagggucagggcccagg

SEQ ID NO: 295711 - RNA, 21 nt, Human
cauuucaugauuauagaaaug

SEQ ID NO: 295712 - RNA, 22 nt, Human
ugggaccuguuacauugaguua

SEQ ID NO: 295713 - RNA, 22 nt, Human
gauucuuuagcccagaaaguua

SEQ ID NO: 295714 - RNA, 22 nt, Human
acauguguacauauauaugugc

SEQ ID NO: 295715 - RNA, 22 nt, Human
aacaguuugagcuuugaauuuc

SEQ ID NO: 295716 - RNA, 22 nt, Human
uuucaaagucaagaaggauacu

SEQ ID NO: 295717 - RNA, 22 nt, Human
aagccuugcucuugaaaaaguu

SEQ ID NO: 295718 - RNA, 22 nt, Human
ucuuuacaucacaauuguaugg

SEQ ID NO: 295719 - RNA, 22 nt, Human
cugugugugcuacaggcuucca

SEQ ID NO: 295720 - RNA, 20 nt, Human
aggaaagccugugugagucu

SEQ ID NO: 295721 - RNA, 22 nt, Human
caagggcucaaacggugguugc

SEQ ID NO: 295722 - RNA, 22 nt, Human
ugggcuccucgucacucgcugu

SEQ ID NO: 295723 - RNA, 22 nt, Human
gaugagcauuguuucauguguu

SEQ ID NO: 295724 - RNA, 22 nt, Human
cucuggaauuaaggaagccugu

SEQ ID NO: 295725 - RNA, 17 nt, Human
cuccuggcagccucagg

SEQ ID NO: 295726 - RNA, 22 nt, Human
gcacagugauaggcaguugugc

SEQ ID NO: 295727 - RNA, 22 nt, Human
gcauccaaauguuucauuucuu

SEQ ID NO: 295728 - RNA, 21 nt, Human
acacaaaccuccucagccugg

SEQ ID NO: 295729 - RNA, 22 nt, Human
ccagguguucuuugucccuguu

SEQ ID NO: 295730 - RNA, 22 nt, Human
ucugccugagggagcugaggaa

SEQ ID NO: 295731 - RNA, 22 nt, Human
auguucuuucagccagugcauc

SEQ ID NO: 295732 - RNA, 19 nt, Human
gagggcucauuugaacaau

SEQ ID NO: 295733 - RNA, 22 nt, Human
cuuccuucuguaagaccaguug

SEQ ID NO: 295734 - RNA, 22 nt, Human
cucacagcugcuucaggaucca

SEQ ID NO: 295735 - RNA, 20 nt, Human
gcagggcaucuuggccccca

SEQ ID NO: 295736 - RNA, 22 nt, Human
ccugguuuaugccagauccugu

SEQ ID NO: 295737 - RNA, 22 nt, Human
aaacauuagacaccauaugcuc

SEQ ID NO: 295738 - RNA, 23 nt, Human
ugcaggggaggcuuaaagcaggu

SEQ ID NO: 295739 - RNA, 22 nt, Human
gagaaggcuuccaaauucugug

SEQ ID NO: 295740 - RNA, 22 nt, Human
uccuggccucacaguccugggu

SEQ ID NO: 295741 - RNA, 22 nt, Human
ucucuguaaaauguggaugaua

SEQ ID NO: 295742 - RNA, 22 nt, Human
uauuucagacacugaucuugca

SEQ ID NO: 295743 - RNA, 21 nt, Human
acauuuucuguuuuaggaagu

SEQ ID NO: 295744 - RNA, 22 nt, Human
ucaucugaggcaccagagcaua

SEQ ID NO: 295745 - RNA, 22 nt, Human
uugugucccccuuugagagcca

SEQ ID NO: 295746 - RNA, 22 nt, Human
aaugucuuucucauaacagaua

SEQ ID NO: 295747 - RNA, 22 nt, Human
uguguccuuuggaggaucagcg

SEQ ID NO: 295748 - RNA, 22 nt, Human
ugcuuuaaccaucuuguuugga

SEQ ID NO: 295749 - RNA, 22 nt, Human
agggccagaggcaccuugcagc

SEQ ID NO: 295750 - RNA, 22 nt, Human
cuuauuuuaagucaguuugggu

SEQ ID NO: 295751 - RNA, 22 nt, Human
agcagguguaucggucaccuac

SEQ ID NO: 295752 - RNA, 22 nt, Human
aauaauuagugggacagagaac

SEQ ID NO: 295753 - RNA, 18 nt, Human
ggcugcuuaaggagaucc

SEQ ID NO: 295754 - RNA, 19 nt, Human
ucccagagucuagagguug

SEQ ID NO: 295755 - RNA, 22 nt, Human
uggaaugaaaaguacuucagaa

SEQ ID NO: 295756 - RNA, 22 nt, Human
agcaucugcuuaauggcuuaac

SEQ ID NO: 295757 - RNA, 22 nt, Human
cuuuacagaaagagaacucugg

SEQ ID NO: 295758 - RNA, 23 nt, Human
uagcaaaguuguuugggaaauuu

SEQ ID NO: 295759 - RNA, 22 nt, Human
uccucagaaaccccugugaggu

SEQ ID NO: 295760 - RNA, 22 nt, Human
ugcuggagugcaguggcuuaac

SEQ ID NO: 295761 - RNA, 23 nt, Human
ucuugaaaagccuacagcaguuc

SEQ ID NO: 295762 - RNA, 22 nt, Human
agggcugcaccggggcuucgcg

SEQ ID NO: 295763 - RNA, 22 nt, Human
aucuuuaggcaaguuacuuaac

SEQ ID NO: 295764 - RNA, 22 nt, Human
auguuucuacagcguccacuga

SEQ ID NO: 295765 - RNA, 22 nt, Human
gagcugcacuggggguggaaug

SEQ ID NO: 295766 - RNA, 22 nt, Human
cuuucuuucgaagacgugauua

SEQ ID NO: 295767 - RNA, 22 nt, Human
guuuaagaaaauucauguuguu

SEQ ID NO: 295768 - RNA, 23 nt, Human
cuggcuccgaagacuccaggauc

SEQ ID NO: 295769 - RNA, 22 nt, Human
gagggaugcagaaacagaggcc

SEQ ID NO: 295770 - RNA, 22 nt, Human
auccagagacuggggcugggau

SEQ ID NO: 295771 - RNA, 22 nt, Human
ugcugccagggcucugcccaca

SEQ ID NO: 295772 - RNA, 22 nt, Human
aggcugcuucuuguccuuggca

SEQ ID NO: 295773 - RNA, 22 nt, Human
uuccaugacugaagcaggggcg

SEQ ID NO: 295774 - RNA, 19 nt, Human
cccucauucacuuauucuc

SEQ ID NO: 295775 - RNA, 19 nt, Human
agcugcaaaagguggaacu

SEQ ID NO: 295776 - RNA, 22 nt, Human
uguggggaagaguaugacuugg

SEQ ID NO: 295777 - RNA, 22 nt, Human
ucagaggccuugguuaugguau

SEQ ID NO: 295778 - RNA, 22 nt, Human
agcagggcccacuaggggagau

SEQ ID NO: 295779 - RNA, 22 nt, Human
aguuggagugaacaugagauug

SEQ ID NO: 295780 - RNA, 19 nt, Human
ucuucccuggcugucaguc

SEQ ID NO: 295781 - RNA, 22 nt, Human
auuguacagguuggaggaagug

SEQ ID NO: 295782 - RNA, 22 nt, Human
acagagcuguacaugugccaug

SEQ ID NO: 295783 - RNA, 22 nt, Human
gaagauuuaagcacaauagucu

SEQ ID NO: 295784 - RNA, 22 nt, Human
ucagugaaaugcauauucuucg

SEQ ID NO: 295785 - RNA, 22 nt, Human
gggauggaucuuggcugaggcu

SEQ ID NO: 295786 - RNA, 22 nt, Human
aguugacauccauaacaggaag

SEQ ID NO: 295787 - RNA, 22 nt, Human
ccaggugugauuucaucugagg

SEQ ID NO: 295788 - RNA, 22 nt, Human
cucuucuugcuagacugagugc

SEQ ID NO: 295789 - RNA, 22 nt, Human
ugagcauuggaucaaaugacuu

SEQ ID NO: 295790 - RNA, 22 nt, Human
uccuggcagggaacuugucagc

SEQ ID NO: 295791 - RNA, 19 nt, Human
auuuauuguaugauuccau

SEQ ID NO: 295792 - RNA, 22 nt, Human
gcuggucuccgccgcucccuga

SEQ ID NO: 295793 - RNA, 22 nt, Human
ucuccuggauggaccuucucuu

SEQ ID NO: 295794 - RNA, 22 nt, Human
aaauuccauuuugugacuauuc

SEQ ID NO: 295795 - RNA, 22 nt, Human
cacugucugggacauguggucu

SEQ ID NO: 295796 - RNA, 22 nt, Human
acauucuucagcuuugucaggc

SEQ ID NO: 295797 - RNA, 22 nt, Human
cuggguguucacccgaggcgcu

SEQ ID NO: 295798 - RNA, 22 nt, Human
acugggagucaugaggaaggag

SEQ ID NO: 295799 - RNA, 22 nt, Human
caaauacuaaacauaagauuuu

SEQ ID NO: 295800 - RNA, 21 nt, Human
gugcucugggcagcagagggc

SEQ ID NO: 295801 - RNA, 22 nt, Human
ugucuucgcuacaaugaaaagg

SEQ ID NO: 295802 - RNA, 22 nt, Human
uguguuauugccacugaagacc

SEQ ID NO: 295803 - RNA, 22 nt, Human
uucuguauauuguaaagacuca

SEQ ID NO: 295804 - RNA, 22 nt, Human
uguuuugguagauugauuaugg

SEQ ID NO: 295805 - RNA, 22 nt, Human
caauucuuuguagaagcucucc

SEQ ID NO: 295806 - RNA, 18 nt, Human
gugggguguugugaggau

SEQ ID NO: 295807 - RNA, 22 nt, Human
ugucucagauacgccaucaagg

SEQ ID NO: 295808 - RNA, 22 nt, Human
uuccaggaaaacaguuggaagu

SEQ ID NO: 295809 - RNA, 22 nt, Human
uaugcagcaccacucacugcag

SEQ ID NO: 295810 - RNA, 22 nt, Human
aaaucagucccucuuggaauuu

SEQ ID NO: 295811 - RNA, 22 nt, Human
agcuccuguucugagagcagga

SEQ ID NO: 295812 - RNA, 22 nt, Human
agcagcauuaugauauaucuua

SEQ ID NO: 295813 - RNA, 22 nt, Human
uucuucagauggugagaccucc

SEQ ID NO: 295814 - RNA, 22 nt, Human
uguguccuuaugaaaauacugu

SEQ ID NO: 295815 - RNA, 20 nt, Human
ucugugugccaucaccuaac

SEQ ID NO: 295816 - RNA, 22 nt, Human
gaggugucauuuaguuaaucag

SEQ ID NO: 295817 - RNA, 22 nt, Human
gaaagaaugcuauagugacuuc

SEQ ID NO: 295818 - RNA, 22 nt, Human
uuuugcugggguggcuagcuua

SEQ ID NO: 295819 - RNA, 22 nt, Human
ucugagacaggaaguggagggu

SEQ ID NO: 295820 - RNA, 22 nt, Human
gccaucugcugcucuccagugu

SEQ ID NO: 295821 - RNA, 22 nt, Human
gcuccuggcucucugagggcug

SEQ ID NO: 295822 - RNA, 22 nt, Human
cuuuacagauggauaauuguuu

SEQ ID NO: 295823 - RNA, 22 nt, Human
aaugggaaaagaguaugauuua

SEQ ID NO: 295824 - RNA, 22 nt, Human
ccaugagccaggcugaggaagc

SEQ ID NO: 295825 - RNA, 22 nt, Human
cucaggaguuggaggcuacagu

SEQ ID NO: 295826 - RNA, 22 nt, Human
cagcugcaggaacaaaaaugug

SEQ ID NO: 295827 - RNA, 22 nt, Human
auucuucaucacuaccuuguga

SEQ ID NO: 295828 - RNA, 22 nt, Human
ugcagggaaagggcacugggcu

SEQ ID NO: 295829 - RNA, 22 nt, Human
uagaaacagcauauauuagccc

SEQ ID NO: 295830 - RNA, 22 nt, Human
auuuauugaacacugacuaugu

SEQ ID NO: 295831 - RNA, 22 nt, Human
uggcaaaggaaccuauuuuaaa

SEQ ID NO: 295832 - RNA, 22 nt, Human
agguauauauucugguccuuau

SEQ ID NO: 295833 - RNA, 22 nt, Human
aaucaguuucuuggcaaguuua

SEQ ID NO: 295834 - RNA, 22 nt, Human
aucuuuuuaucuguuuggaaca

SEQ ID NO: 295835 - RNA, 21 nt, Human
aaacaucucugcuuuuguguc

SEQ ID NO: 295836 - RNA, 22 nt, Human
agacaaguucugugggucaccu

SEQ ID NO: 295837 - RNA, 22 nt, Human
caggaucuuuuaaugucuccag

SEQ ID NO: 295838 - RNA, 22 nt, Human
ucuggagaggaggauguggaca

SEQ ID NO: 295839 - RNA, 22 nt, Human
cacagcuggugcacuagcucug

SEQ ID NO: 295840 - RNA, 22 nt, Human
uaaaaucauucuggugucagua

SEQ ID NO: 295841 - RNA, 22 nt, Human
augucuuggguuucaguuuacu

SEQ ID NO: 295842 - RNA, 18 nt, Human
gcacagcuaggagggucc

SEQ ID NO: 295843 - RNA, 22 nt, Human
aaaauuauggaguaucccaaag

SEQ ID NO: 295844 - RNA, 22 nt, Human
gcaaacauucaggaguacagga

SEQ ID NO: 295845 - RNA, 22 nt, Human
acaguggcucaugccugucauc

SEQ ID NO: 295846 - RNA, 22 nt, Human
ugcauuccauguguuuccugag

SEQ ID NO: 295847 - RNA, 22 nt, Human
cauuuacauuuaagguuaauau

SEQ ID NO: 295848 - RNA, 22 nt, Human
uugcagcuucgagucuaucugu

SEQ ID NO: 295849 - RNA, 22 nt, Human
uuguuucucuggucuugaguga

SEQ ID NO: 295850 - RNA, 22 nt, Human
agcugcaagaagaggucccuga

SEQ ID NO: 295851 - RNA, 22 nt, Human
ucuuagauggcagcuagagcuc

SEQ ID NO: 295852 - RNA, 22 nt, Human
agagucagaaccaagaugaggc

SEQ ID NO: 295853 - RNA, 22 nt, Human
uagggcaguuauaacauuagug

SEQ ID NO: 295854 - RNA, 22 nt, Human
guggcuuuggaauuguagacuc

SEQ ID NO: 295855 - RNA, 22 nt, Human
cugaggcucaagggcagguggg

SEQ ID NO: 295856 - RNA, 22 nt, Human
uccaguuuacaggguugcuuuu

SEQ ID NO: 295857 - RNA, 22 nt, Human
uuugcuuaaaguucuuucuggu

SEQ ID NO: 295858 - RNA, 22 nt, Human
acacauauaccacuguaaauga

SEQ ID NO: 295859 - RNA, 22 nt, Human
auguuucaucaguaagguuuug

SEQ ID NO: 295860 - RNA, 22 nt, Human
gcccaggggaguagucaauuua

SEQ ID NO: 295861 - RNA, 22 nt, Human
auacaaagacaaaucucaaucu

SEQ ID NO: 295862 - RNA, 22 nt, Human
acaaggcuguuggucacaaacc

SEQ ID NO: 295863 - RNA, 19 nt, Human
ugggugugaccaucucugc

SEQ ID NO: 295864 - RNA, 22 nt, Human
gauguguagagggaauuucaaa

SEQ ID NO: 295865 - RNA, 22 nt, Human
aaaaucugcuuccuuuuacaga

SEQ ID NO: 295866 - RNA, 22 nt, Human
caggacaaucucgucggguccu

SEQ ID NO: 295867 - RNA, 22 nt, Human
cuuguauucagaguggacauga

SEQ ID NO: 295868 - RNA, 22 nt, Human
aggaggaaagaaggcccccagc

SEQ ID NO: 295869 - RNA, 22 nt, Human
aagucucuuccucugccaaaga

SEQ ID NO: 295870 - RNA, 22 nt, Human
ggaugggagcagaggacgacca

SEQ ID NO: 295871 - RNA, 22 nt, Human
cccugcagccuugcaugccuuc

SEQ ID NO: 295872 - RNA, 22 nt, Human
aguguccucuauuaugacuuua

SEQ ID NO: 295873 - RNA, 22 nt, Human
gauucagugagggugagaagaa

SEQ ID NO: 295874 - RNA, 22 nt, Human
auaaacaguaaaugugagcagu

SEQ ID NO: 295875 - RNA, 22 nt, Human
agggccccauagucacugcccg

SEQ ID NO: 295876 - RNA, 22 nt, Human
ggcccucugcucacuuccuauu

SEQ ID NO: 295877 - RNA, 22 nt, Human
gguaaaaugcagauucuuagcc

SEQ ID NO: 295878 - RNA, 22 nt, Human
acuccugguucccaguugagau

SEQ ID NO: 295879 - RNA, 22 nt, Human
acagugcugucuaucucacuaa

SEQ ID NO: 295880 - RNA, 21 nt, Human
ucaggaagagccaguucaugc

SEQ ID NO: 295881 - RNA, 22 nt, Human
aguggcagagcugugucuugaa

SEQ ID NO: 295882 - RNA, 22 nt, Human
ucugaaaauguugacuuuguuu

SEQ ID NO: 295883 - RNA, 23 nt, Human
ugcaggugugcagagggcucuug

SEQ ID NO: 295884 - RNA, 22 nt, Human
aaaguuuuagcuguccaguucc

SEQ ID NO: 295885 - RNA, 22 nt, Human
ugacagagcauguagugacagc

SEQ ID NO: 295886 - RNA, 22 nt, Human
ugcuuuauucccuucugaugug

SEQ ID NO: 295887 - RNA, 21 nt, Human
uuucuucacuuugccccaugu

SEQ ID NO: 295888 - RNA, 22 nt, Human
acuuucaugguaguuguauucu

SEQ ID NO: 295889 - RNA, 22 nt, Human
gcuggagguggugagaaaaggu

SEQ ID NO: 295890 - RNA, 22 nt, Human
uggccaggcauucagauaagac

SEQ ID NO: 295891 - RNA, 22 nt, Human
aaagugcuuuaggauauuugga

SEQ ID NO: 295892 - RNA, 22 nt, Human
cagagaaagaagcccauucauu

SEQ ID NO: 295893 - RNA, 22 nt, Human
caaaugaagggagcugaagucu

SEQ ID NO: 295894 - RNA, 22 nt, Human
ugcuggaggaguuuacuguggc

SEQ ID NO: 295895 - RNA, 22 nt, Human
ggcccucuuuuauccaucauaa

SEQ ID NO: 295896 - RNA, 22 nt, Human
aacaaacaguuaaguguggaug

SEQ ID NO: 295897 - RNA, 22 nt, Human
ucucuggggaugcuuauucuug

SEQ ID NO: 295898 - RNA, 22 nt, Human
acccaggguuccugggucccag

SEQ ID NO: 295899 - RNA, 22 nt, Human
ucugccuggaugauggcagggc

SEQ ID NO: 295900 - RNA, 21 nt, Human
acuuuacaauuuacauaguga

SEQ ID NO: 295901 - RNA, 22 nt, Human
ggguuccuccaguuccuagagc

SEQ ID NO: 295902 - RNA, 22 nt, Human
aacagauaaguauaucuaugua

SEQ ID NO: 295903 - RNA, 22 nt, Human
gcuguucacagacucugcucug

SEQ ID NO: 295904 - RNA, 17 nt, Human
acagcagggaaguguug

SEQ ID NO: 295905 - RNA, 21 nt, Human
acagacagggccagugucccc

SEQ ID NO: 295906 - RNA, 22 nt, Human
uuggcugaugcaagagcuuccu

SEQ ID NO: 295907 - RNA, 22 nt, Human
cuguuauuuuccucugaacucu

SEQ ID NO: 295908 - RNA, 22 nt, Human
gcacaauuauuuaugcaguaug

SEQ ID NO: 295909 - RNA, 22 nt, Human
acaggccuuggcaggcauguga

SEQ ID NO: 295910 - RNA, 22 nt, Human
cccaggcaucccauuaaggagc

SEQ ID NO: 295911 - RNA, 22 nt, Human
uagcuuuacaaagugcugcacc

SEQ ID NO: 295912 - RNA, 19 nt, Human
ucuguucacauuguuucgc

SEQ ID NO: 295913 - RNA, 22 nt, Human
auauagaaggugcuauuuacau

SEQ ID NO: 295914 - RNA, 22 nt, Human
guuuuauaggugaaauauuacu

SEQ ID NO: 295915 - RNA, 22 nt, Human
gcaggugggggucggugcaucu

SEQ ID NO: 295916 - RNA, 22 nt, Human
ucaaggaggugcuuggcuucac

SEQ ID NO: 295917 - RNA, 22 nt, Human
uuuguuaaggaguauugcuucu

SEQ ID NO: 295918 - RNA, 22 nt, Human
gcaggacaggcguugguccagu

SEQ ID NO: 295919 - RNA, 21 nt, Human
guccagagagccggcuccuga

SEQ ID NO: 295920 - RNA, 19 nt, Human
uugagcagugcuuagcacc

SEQ ID NO: 295921 - RNA, 22 nt, Human
cucagcaacccuagaacauuug

SEQ ID NO: 295922 - RNA, 22 nt, Human
uuuccauguuggugaaaugagg

SEQ ID NO: 295923 - RNA, 22 nt, Human
uauaaaucuuuguuccuagaau

SEQ ID NO: 295924 - RNA, 22 nt, Human
gucuuuaucuuugaaauuaguc

SEQ ID NO: 295925 - RNA, 22 nt, Human
cacaggugccaucucuucaugg

SEQ ID NO: 295926 - RNA, 22 nt, Human
agggccagaaucccucagucua

SEQ ID NO: 295927 - RNA, 22 nt, Human
cagcugucacuucuaaguuuug

SEQ ID NO: 295928 - RNA, 22 nt, Human
aaauguaguugaaaaguuaagg

SEQ ID NO: 295929 - RNA, 22 nt, Human
aaggucucuguugagaacauuu

SEQ ID NO: 295930 - RNA, 22 nt, Human
ucauggcuuuuucacuguucgc

SEQ ID NO: 295931 - RNA, 22 nt, Human
aagaucagcucccgagucugag

SEQ ID NO: 295932 - RNA, 22 nt, Human
agcacaguuuucauugcagggu

SEQ ID NO: 295933 - RNA, 22 nt, Human
caaagucagccagcuaguaggu

SEQ ID NO: 295934 - RNA, 22 nt, Human
auucaguuagccacagcuauuc

SEQ ID NO: 295935 - RNA, 22 nt, Human
uaauuauucuagucacauagca

SEQ ID NO: 295936 - RNA, 22 nt, Human
cugaggagacagaagccaaaua

SEQ ID NO: 295937 - RNA, 22 nt, Human
aaauuuuaguaaggaaguugag

SEQ ID NO: 295938 - RNA, 22 nt, Human
uggccacaguguccagcagcag

SEQ ID NO: 295939 - RNA, 22 nt, Human
ugcuggcuuuuugguccuugcu

SEQ ID NO: 295940 - RNA, 22 nt, Human
uucagagagaaaccagugggaa

SEQ ID NO: 295941 - RNA, 22 nt, Human
agcagguguuggcugggccauc

SEQ ID NO: 295942 - RNA, 22 nt, Human
gcaggcagccacgauucccuug

SEQ ID NO: 295943 - RNA, 22 nt, Human
gcuccaggcagcauaguggaug

SEQ ID NO: 295944 - RNA, 22 nt, Human
uuuucauuuuuguagaugcaag

SEQ ID NO: 295945 - RNA, 22 nt, Human
ucuggaggcucugagggugagu

SEQ ID NO: 295946 - RNA, 22 nt, Human
uuugcaaagugacuauuauaug

SEQ ID NO: 295947 - RNA, 22 nt, Human
uaggugguuauaaauucaaggc

SEQ ID NO: 295948 - RNA, 23 nt, Human
uccugcagauaagcugguugaca

SEQ ID NO: 295949 - RNA, 22 nt, Human
agagguuguuagaauaguggag

SEQ ID NO: 295950 - RNA, 22 nt, Human
ugucaacacaccuaucucaauu

SEQ ID NO: 295951 - RNA, 22 nt, Human
agcaggugccagguguacccgc

SEQ ID NO: 295952 - RNA, 22 nt, Human
auucuuguuuaauuugcauccc

SEQ ID NO: 295953 - RNA, 22 nt, Human
gcaaguacaaacgcaucggcug

SEQ ID NO: 295954 - RNA, 22 nt, Human
ugucugguggguugacaggcag

SEQ ID NO: 295955 - RNA, 17 nt, Human
aguggcaggcagauggg

SEQ ID NO: 295956 - RNA, 23 nt, Human
uggcucugagagguucagaugcu

SEQ ID NO: 295957 - RNA, 22 nt, Human
uucauuccuucccuaagcaacu

SEQ ID NO: 295958 - RNA, 22 nt, Human
ggcucugaaggagacagcugcu

SEQ ID NO: 295959 - RNA, 22 nt, Human
aggaccaccgguccauccaccc

SEQ ID NO: 295960 - RNA, 17 nt, Human
uuuuguucaucuucaaa

SEQ ID NO: 295961 - RNA, 22 nt, Human
cccaggcuggagggcaguguca

SEQ ID NO: 295962 - RNA, 22 nt, Human
uuauuuaaaauguagguuggga

SEQ ID NO: 295963 - RNA, 20 nt, Human
ucaguuaaguugcugaaucu

SEQ ID NO: 295964 - RNA, 22 nt, Human
caguuugucuugauucagaaca

SEQ ID NO: 295965 - RNA, 22 nt, Human
uuuacagcauugcugaaaguuc

SEQ ID NO: 295966 - RNA, 22 nt, Human
gccaaggauaccagcugugaga

SEQ ID NO: 295967 - RNA, 22 nt, Human
ucuguggcccaagugauggcug

SEQ ID NO: 295968 - RNA, 22 nt, Human
gcuggccuugaggugucuuuau

SEQ ID NO: 295969 - RNA, 22 nt, Human
auacacuuuagaaaaacgcugc

SEQ ID NO: 295970 - RNA, 22 nt, Human
agcugaaacccaggccucagcu

SEQ ID NO: 295971 - RNA, 21 nt, Human
accuucaagccagaggugguc

SEQ ID NO: 295972 - RNA, 17 nt, Human
ugcaaacaaucacauau

SEQ ID NO: 295973 - RNA, 21 nt, Human
cucuuuauauaguaaagauau

SEQ ID NO: 295974 - RNA, 22 nt, Human
ugcagggcagauaugacuguag

SEQ ID NO: 295975 - RNA, 22 nt, Human
ugcugucuuuucccaauccugg

SEQ ID NO: 295976 - RNA, 22 nt, Human
agaagccaauccuugucucucu

SEQ ID NO: 295977 - RNA, 22 nt, Human
cugaaggaagcagguggccugu

SEQ ID NO: 295978 - RNA, 22 nt, Human
uuucaaagaccauuaacuauca

SEQ ID NO: 295979 - RNA, 23 nt, Human
uuugaaguugacugccuuccaga

SEQ ID NO: 295980 - RNA, 20 nt, Human
ucaaagcaaagggagaugau

SEQ ID NO: 295981 - RNA, 22 nt, Human
agugaaaaccuaaucaugcagu

SEQ ID NO: 295982 - RNA, 22 nt, Human
uagggaugggagauucucaaac

SEQ ID NO: 295983 - RNA, 22 nt, Human
gaagccuuaucagucacuuaua

SEQ ID NO: 295984 - RNA, 22 nt, Human
aagcugaauuuucuaaaagaau

SEQ ID NO: 295985 - RNA, 22 nt, Human
aagcacaggaucuugaggagcg

SEQ ID NO: 295986 - RNA, 22 nt, Human
uugauacaggcucuauuucauc

SEQ ID NO: 295987 - RNA, 17 nt, Human
agcuccuggggucuuua

SEQ ID NO: 295988 - RNA, 22 nt, Human
aagaggucauaccagauaaggg

SEQ ID NO: 295989 - RNA, 22 nt, Human
gaaggaagucauuagugcagac

SEQ ID NO: 295990 - RNA, 21 nt, Human
aagugguuuacauccagcugu

SEQ ID NO: 295991 - RNA, 22 nt, Human
aaaacacaagaagcaggguaca

SEQ ID NO: 295992 - RNA, 22 nt, Human
aggacacacaaagagugagaac

SEQ ID NO: 295993 - RNA, 22 nt, Human
gcagcccugcagcuccacaccg

SEQ ID NO: 295994 - RNA, 20 nt, Human
ugcagggccuaaaaagggaa

SEQ ID NO: 295995 - RNA, 22 nt, Human
ugcacaggugagacucaggaag

SEQ ID NO: 295996 - RNA, 22 nt, Human
aagauuuagggccaguuuacau

SEQ ID NO: 295997 - RNA, 22 nt, Human
agagggaucacccuguuucugg

SEQ ID NO: 295998 - RNA, 22 nt, Human
uaauaauuaguuauugaucgug

SEQ ID NO: 295999 - RNA, 22 nt, Human
ucuuaaagagcgcaauuugagg

SEQ ID NO: 296000 - RNA, 22 nt, Human
ccugugacgugucuccuggcac

SEQ ID NO: 296001 - RNA, 22 nt, Human
ugaacuuuuauuugaugacagg

SEQ ID NO: 296002 - RNA, 20 nt, Human
auggaggaagggcaagagaa

SEQ ID NO: 296003 - RNA, 22 nt, Human
ucugaagauggaggaacuuaga

SEQ ID NO: 296004 - RNA, 22 nt, Human
caggaaaugaacaggaaugaac

SEQ ID NO: 296005 - RNA, 22 nt, Human
gaaagaagcuuuagauggcuau

SEQ ID NO: 296006 - RNA, 22 nt, Human
caguuuuaaauuguuagauaau

SEQ ID NO: 296007 - RNA, 22 nt, Human
ggugggaguggaacguggaaga

SEQ ID NO: 296008 - RNA, 22 nt, Human
uguggcagcugcugcaggagcu

SEQ ID NO: 296009 - RNA, 22 nt, Human
cacaguuugguuuugcuguaau

SEQ ID NO: 296010 - RNA, 22 nt, Human
cagggcaguaccgcccucuggc

SEQ ID NO: 296011 - RNA, 22 nt, Human
aacacagcuaauuucugucaau

SEQ ID NO: 296012 - RNA, 22 nt, Human
acuggcagccacaacuggcagg

SEQ ID NO: 296013 - RNA, 22 nt, Human
uaaaauguuugcaagagaccag

SEQ ID NO: 296014 - RNA, 22 nt, Human
uuuuauuaucuuugaaugggac

SEQ ID NO: 296015 - RNA, 22 nt, Human
gacccauauaggacccuccaaa

SEQ ID NO: 296016 - RNA, 19 nt, Human
gggcaaagugaucguccug

SEQ ID NO: 296017 - RNA, 22 nt, Human
ugagguaggugucgagagaggu

SEQ ID NO: 296018 - RNA, 22 nt, Human
agaggcuguuacacucccagau

SEQ ID NO: 296019 - RNA, 22 nt, Human
ucaaagcaugguuuugaaagac

SEQ ID NO: 296020 - RNA, 22 nt, Human
acaugcauaggagaagucuuua

SEQ ID NO: 296021 - RNA, 22 nt, Human
agcuuuaccugccuuggggcac

SEQ ID NO: 296022 - RNA, 19 nt, Human
agugcagggagcacccuca

SEQ ID NO: 296023 - RNA, 22 nt, Human
ucucugugcaggaugcugaguu

SEQ ID NO: 296024 - RNA, 22 nt, Human
cacugggaguacaaagaauggg

SEQ ID NO: 296025 - RNA, 22 nt, Human
guuuauaauccaacucugcucc

SEQ ID NO: 296026 - RNA, 22 nt, Human
uuucagaaauggcacugaaauc

SEQ ID NO: 296027 - RNA, 22 nt, Human
aaaagcaguuuauagucaguug

SEQ ID NO: 296028 - RNA, 22 nt, Human
uccaggcuuuuucaugcugucu

SEQ ID NO: 296029 - RNA, 22 nt, Human
cagagcugagucuucaagguug

SEQ ID NO: 296030 - RNA, 23 nt, Human
accuacauuauagggauaugggu

SEQ ID NO: 296031 - RNA, 22 nt, Human
cagacccugggccacagaggag

SEQ ID NO: 296032 - RNA, 22 nt, Human
gaggugucaugagggccugcuc

SEQ ID NO: 296033 - RNA, 22 nt, Human
ucucuguagagacagcacugug

SEQ ID NO: 296034 - RNA, 22 nt, Human
aagggcagcugacagaugcuua

SEQ ID NO: 296035 - RNA, 22 nt, Human
cugugccaggcccagcugacuu

SEQ ID NO: 296036 - RNA, 22 nt, Human
ucagguggaauuaauuaagaga

SEQ ID NO: 296037 - RNA, 22 nt, Human
uucauagugauuguucagauag

SEQ ID NO: 296038 - RNA, 22 nt, Human
guuauaaaggugauaaugguca

SEQ ID NO: 296039 - RNA, 18 nt, Human
acucugcggaggccccag

SEQ ID NO: 296040 - RNA, 22 nt, Human
gagggcucugaaaggaggucac

SEQ ID NO: 296041 - RNA, 22 nt, Human
uuauucagcauuuagaggaagg

SEQ ID NO: 296042 - RNA, 22 nt, Human
cacauucagggaacauuggagg

SEQ ID NO: 296043 - RNA, 22 nt, Human
aacuggaaugaaauuuacgaug

SEQ ID NO: 296044 - RNA, 18 nt, Human
aucuuuccauagcauguu

SEQ ID NO: 296045 - RNA, 22 nt, Human
ugccucucuaacccaugcccaa

SEQ ID NO: 296046 - RNA, 22 nt, Human
cuccuacaguguuugaguccag

SEQ ID NO: 296047 - RNA, 22 nt, Human
uuuguacauccuaauucugagu

SEQ ID NO: 296048 - RNA, 22 nt, Human
uuauuguaggccuauuguagaa

SEQ ID NO: 296049 - RNA, 19 nt, Human
agcauuuggaauucuacac

SEQ ID NO: 296050 - RNA, 22 nt, Human
aaaaccaggcuugcugugcucg

SEQ ID NO: 296051 - RNA, 22 nt, Human
uuauuagguuuacauaaagguu

SEQ ID NO: 296052 - RNA, 22 nt, Human
ugcaggugucuccagggcaggu

SEQ ID NO: 296053 - RNA, 16 nt, Human
aggaauguggcggaac

SEQ ID NO: 296054 - RNA, 22 nt, Human
agagaauacaaagaagauaugu

SEQ ID NO: 296055 - RNA, 17 nt, Human
acagugucuaugaaaug

SEQ ID NO: 296056 - RNA, 22 nt, Human
aaucuucacagagaaaauuagg

SEQ ID NO: 296057 - RNA, 22 nt, Human
agaagggccagcuggacaccug

SEQ ID NO: 296058 - RNA, 22 nt, Human
gcccaggugcccucugccuuac

SEQ ID NO: 296059 - RNA, 22 nt, Human
uggugcagaugcaggucacugg

SEQ ID NO: 296060 - RNA, 22 nt, Human
ucuuacccggcaacgugugucg

SEQ ID NO: 296061 - RNA, 22 nt, Human
cagacaggcaggugagagcucc

SEQ ID NO: 296062 - RNA, 22 nt, Human
ugauggcuuauggagagagcaa

SEQ ID NO: 296063 - RNA, 22 nt, Human
agguaugccaauuaggucaagu

SEQ ID NO: 296064 - RNA, 22 nt, Human
uauuucuguaugcauaaaagga

SEQ ID NO: 296065 - RNA, 22 nt, Human
ucaguucugcuagaaaaacagu

SEQ ID NO: 296066 - RNA, 22 nt, Human
ugagcaucuuuuuacagguuua

SEQ ID NO: 296067 - RNA, 18 nt, Human
ucagguguuuucuguaua

SEQ ID NO: 296068 - RNA, 22 nt, Human
caaagucauggggaugcagguc

SEQ ID NO: 296069 - RNA, 22 nt, Human
aagacaaugcauuacuaagaag

SEQ ID NO: 296070 - RNA, 18 nt, Human
ucauggcuuuagucccuc

SEQ ID NO: 296071 - RNA, 22 nt, Human
agucauaugacccuucacaaac

SEQ ID NO: 296072 - RNA, 22 nt, Human
ccugagagugagugccaccuua

SEQ ID NO: 296073 - RNA, 22 nt, Human
gggugggaaggcuaagggauug

SEQ ID NO: 296074 - RNA, 22 nt, Human
ccucuaggauguggcuggagga

SEQ ID NO: 296075 - RNA, 21 nt, Human
ugcuggguuugcccaucaggc

SEQ ID NO: 296076 - RNA, 22 nt, Human
gaaaauguuuccuguuauuugc

SEQ ID NO: 296077 - RNA, 22 nt, Human
ucaggugggcguuccggugcgg

SEQ ID NO: 296078 - RNA, 22 nt, Human
uuccagauuucuacacaagacc

SEQ ID NO: 296079 - RNA, 22 nt, Human
ggcagugguuagaaacaugagc

SEQ ID NO: 296080 - RNA, 22 nt, Human
aacuguaagagaauaaaugugu

SEQ ID NO: 296081 - RNA, 19 nt, Human
agugugagacuccaucuca

SEQ ID NO: 296082 - RNA, 22 nt, Human
gcugggucucuggguguaacaa

SEQ ID NO: 296083 - RNA, 22 nt, Human
uucuuguacuggagauacauga

SEQ ID NO: 296084 - RNA, 22 nt, Human
uuucagaaagcaucaucaaagu

SEQ ID NO: 296085 - RNA, 22 nt, Human
uggauuaguuaagaaauguuag

SEQ ID NO: 296086 - RNA, 18 nt, Human
augcaagcuauggauuug

SEQ ID NO: 296087 - RNA, 22 nt, Human
ggguguggcugcgugccaauaa

SEQ ID NO: 296088 - RNA, 22 nt, Human
gguguccucaugauuuucuaga

SEQ ID NO: 296089 - RNA, 20 nt, Human
uccugcagucgcuagcgccc

SEQ ID NO: 296090 - RNA, 22 nt, Human
acuuucugugguuaccagggag

SEQ ID NO: 296091 - RNA, 22 nt, Human
uuauugagcaccuacuaugugu

SEQ ID NO: 296092 - RNA, 22 nt, Human
aucuuagaaguuugauaaaauc

SEQ ID NO: 296093 - RNA, 22 nt, Human
ugcagggcccucauuccugucc

SEQ ID NO: 296094 - RNA, 22 nt, Human
aaaguuuuuaagcaagacccuu

SEQ ID NO: 296095 - RNA, 22 nt, Human
caagugucuucaaaggcuaaaa

SEQ ID NO: 296096 - RNA, 22 nt, Human
acaaaugaaucauacauaaugu

SEQ ID NO: 296097 - RNA, 22 nt, Human
agcuggaggggccagcaggugu

SEQ ID NO: 296098 - RNA, 22 nt, Human
agcaaacacaagagguaauuuc

SEQ ID NO: 296099 - RNA, 21 nt, Human
cugcaggaugcugaagccagg

SEQ ID NO: 296100 - RNA, 20 nt, Human
uagggcucauuaugaucucc

SEQ ID NO: 296101 - RNA, 22 nt, Human
gugcuacuaguuucauuuuuca

SEQ ID NO: 296102 - RNA, 22 nt, Human
acagaugaaacccagcuaguug

SEQ ID NO: 296103 - RNA, 22 nt, Human
agcccagauaaaguacaaccau

SEQ ID NO: 296104 - RNA, 22 nt, Human
agaugaagaugccacuaagacc

SEQ ID NO: 296105 - RNA, 22 nt, Human
gcacccagcccagggcgugaug

SEQ ID NO: 296106 - RNA, 22 nt, Human
agugugagcccuggaguggugc

SEQ ID NO: 296107 - RNA, 22 nt, Human
ucuguauucuauggcaguuggu

SEQ ID NO: 296108 - RNA, 22 nt, Human
ucuuucuucuuucauaguguga

SEQ ID NO: 296109 - RNA, 22 nt, Human
uacacaaugacuuaagauguca

SEQ ID NO: 296110 - RNA, 17 nt, Human
cccaugagcccacuccc

SEQ ID NO: 296111 - RNA, 22 nt, Human
auagcuuuuugucauagagucu

SEQ ID NO: 296112 - RNA, 22 nt, Human
aaguuucaugauguaauuauug

SEQ ID NO: 296113 - RNA, 22 nt, Human
ugacugaaggacuagauugauu

SEQ ID NO: 296114 - RNA, 22 nt, Human
aaacaucuaucagcauuuuuua

SEQ ID NO: 296115 - RNA, 22 nt, Human
uaaaggcuucugcagggacuga

SEQ ID NO: 296116 - RNA, 22 nt, Human
ucaugugucugccaguguuuau

SEQ ID NO: 296117 - RNA, 22 nt, Human
uacaguuuuuauucaugacaag

SEQ ID NO: 296118 - RNA, 22 nt, Human
uuaauaaguaguaguuauuguu

SEQ ID NO: 296119 - RNA, 22 nt, Human
agagccuguuuugugggagaug

SEQ ID NO: 296120 - RNA, 22 nt, Human
uccagggagauacuggcugcca

SEQ ID NO: 296121 - RNA, 22 nt, Human
uuucugaagguuaaggaauuag

SEQ ID NO: 296122 - RNA, 21 nt, Human
acaguucaugauaacuccauc

SEQ ID NO: 296123 - RNA, 22 nt, Human
ugcaggggcuugucugggccug

SEQ ID NO: 296124 - RNA, 22 nt, Human
ucuggcagcucuccucggcgga

SEQ ID NO: 296125 - RNA, 22 nt, Human
agugcucaccugucaggucaag

SEQ ID NO: 296126 - RNA, 22 nt, Human
guauucuuauacucagugagcu

SEQ ID NO: 296127 - RNA, 22 nt, Human
ucauguuugcccuaagaaaaag

SEQ ID NO: 296128 - RNA, 22 nt, Human
ugagcaggcaaacaaugguuau

SEQ ID NO: 296129 - RNA, 22 nt, Human
caggccugucugcacaugaggc

SEQ ID NO: 296130 - RNA, 22 nt, Human
uuguuucagcccagaucuuuac

SEQ ID NO: 296131 - RNA, 23 nt, Human
cucuggguccgauguccugacag

SEQ ID NO: 296132 - RNA, 22 nt, Human
gcccagcagaucucagugucuc

SEQ ID NO: 296133 - RNA, 22 nt, Human
cagaagggcagcacugggaagg

SEQ ID NO: 296134 - RNA, 20 nt, Human
gcagagugugagagggugaa

SEQ ID NO: 296135 - RNA, 22 nt, Human
uggcagggaguugcaggauuuc

SEQ ID NO: 296136 - RNA, 22 nt, Human
ggaugucucccagcaccaaagu

SEQ ID NO: 296137 - RNA, 22 nt, Human
aaagcugcuaugaacauucuau

SEQ ID NO: 296138 - RNA, 22 nt, Human
ggcuuuugaauuccaaggcauu

SEQ ID NO: 296139 - RNA, 22 nt, Human
uguguucaccaaaguguagaaa

SEQ ID NO: 296140 - RNA, 22 nt, Human
uacaaagaguuuggucucuaga

SEQ ID NO: 296141 - RNA, 21 nt, Human
uaagcauaucagauagacucu

SEQ ID NO: 296142 - RNA, 22 nt, Human
uuacauguucucauacacagag

SEQ ID NO: 296143 - RNA, 22 nt, Human
ggcaggcaucauguggucauua

SEQ ID NO: 296144 - RNA, 22 nt, Human
ccuccuggaggcucuagggaaa

SEQ ID NO: 296145 - RNA, 22 nt, Human
uccaggcauuccagccauucca

SEQ ID NO: 296146 - RNA, 22 nt, Human
ccagugucagaaagauuauccu

SEQ ID NO: 296147 - RNA, 22 nt, Human
gcugaggauugaagaguugcca

SEQ ID NO: 296148 - RNA, 16 nt, Human
uccuggccuuuggaag

SEQ ID NO: 296149 - RNA, 22 nt, Human
cagggcagagccaggauuucaa

SEQ ID NO: 296150 - RNA, 22 nt, Human
gacaugugagcaagcgugcggc

SEQ ID NO: 296151 - RNA, 22 nt, Human
agacaggcuuugcuguauauca

SEQ ID NO: 296152 - RNA, 22 nt, Human
uaauuucuaauucauuuucagu

SEQ ID NO: 296153 - RNA, 22 nt, Human
cucaggagcuuccucagcccau

SEQ ID NO: 296154 - RNA, 22 nt, Human
gaggaagaaagcauaggugggg

SEQ ID NO: 296155 - RNA, 20 nt, Human
ggaaaaaugcaugcucaaga

SEQ ID NO: 296156 - RNA, 22 nt, Human
gggugugucuuuugcuccugga

SEQ ID NO: 296157 - RNA, 22 nt, Human
auacagaugggucagauuucau

SEQ ID NO: 296158 - RNA, 22 nt, Human
ucucccacagucucccauggcu

SEQ ID NO: 296159 - RNA, 22 nt, Human
acuccuggaaaagaacgcaggg

SEQ ID NO: 296160 - RNA, 22 nt, Human
gggcuucugcucuuuuggugcu

SEQ ID NO: 296161 - RNA, 22 nt, Human
caugagaaugaagaagacuuaa

SEQ ID NO: 296162 - RNA, 22 nt, Human
uuagcuuuccuacuaauaaaua

SEQ ID NO: 296163 - RNA, 22 nt, Human
ucauguacauguaagucagaaa

SEQ ID NO: 296164 - RNA, 22 nt, Human
caggcuugcuagaggagccaaa

SEQ ID NO: 296165 - RNA, 22 nt, Human
gcaagcaguuguggcuucugag

SEQ ID NO: 296166 - RNA, 22 nt, Human
cccugcagggaggauucugaag

SEQ ID NO: 296167 - RNA, 22 nt, Human
uucuucuuucccccugugguac

SEQ ID NO: 296168 - RNA, 22 nt, Human
uggccaggccggggacagaacu

SEQ ID NO: 296169 - RNA, 22 nt, Human
ugagcagaacacgggauccaug

SEQ ID NO: 296170 - RNA, 22 nt, Human
aggcuuggugccaaggagccug

SEQ ID NO: 296171 - RNA, 22 nt, Human
ugucucaguacacuccgauguu

SEQ ID NO: 296172 - RNA, 19 nt, Human
ugggaaaguaacauacaaa

SEQ ID NO: 296173 - RNA, 22 nt, Human
ucuauaaauuaugcagucucag

SEQ ID NO: 296174 - RNA, 19 nt, Human
gcauaaaaugucaaugugu

SEQ ID NO: 296175 - RNA, 22 nt, Human
gauuaguugauuaagagucaga

SEQ ID NO: 296176 - RNA, 22 nt, Human
ucugucuuagccaucucaggcu

SEQ ID NO: 296177 - RNA, 22 nt, Human
ggggugggcgugcagggacacc

SEQ ID NO: 296178 - RNA, 22 nt, Human
agcagggccugagugaccuaac

SEQ ID NO: 296179 - RNA, 22 nt, Human
augauauuugcaaugugcuugc

SEQ ID NO: 296180 - RNA, 22 nt, Human
aaaauccugcugacucgagaug

SEQ ID NO: 296181 - RNA, 22 nt, Human
aggaaaugcaggcaaauacucu

SEQ ID NO: 296182 - RNA, 22 nt, Human
gaggcagcgggucaggaccgug

SEQ ID NO: 296183 - RNA, 22 nt, Human
uucuggguggccaguauuuaga

SEQ ID NO: 296184 - RNA, 22 nt, Human
auuucaguguugguuagcaagc

SEQ ID NO: 296185 - RNA, 19 nt, Human
guugaaaguaggugagggu

SEQ ID NO: 296186 - RNA, 22 nt, Human
uuaucaguuguguguauacacg

SEQ ID NO: 296187 - RNA, 22 nt, Human
acagauggccauauuacuauau

SEQ ID NO: 296188 - RNA, 22 nt, Human
ucccaggcucuucaaggaagac

SEQ ID NO: 296189 - RNA, 22 nt, Human
guuugcaaauuguguuaaagcu

SEQ ID NO: 296190 - RNA, 22 nt, Human
uucuguuugccauauauaguag

SEQ ID NO: 296191 - RNA, 20 nt, Human
ucuguuauugcauguacaua

SEQ ID NO: 296192 - RNA, 22 nt, Human
cagauggagucccguggaguuc

SEQ ID NO: 296193 - RNA, 22 nt, Human
accaaggaagagauucucaguu

SEQ ID NO: 296194 - RNA, 22 nt, Human
guucuuuaaccuagucucauuu

SEQ ID NO: 296195 - RNA, 22 nt, Human
uuugucuuggccucaguuuucu

SEQ ID NO: 296196 - RNA, 22 nt, Human
uaauuucuggagggagaaagag

SEQ ID NO: 296197 - RNA, 22 nt, Human
gacagggaaacauugaaguguc

SEQ ID NO: 296198 - RNA, 22 nt, Human
uauuuguuucuaguggcagcaa

SEQ ID NO: 296199 - RNA, 20 nt, Human
agguggcucuuccugggcuu

SEQ ID NO: 296200 - RNA, 22 nt, Human
uugaggaguguuuagggugagg

SEQ ID NO: 296201 - RNA, 19 nt, Human
ucuuauugagcagcugagg

SEQ ID NO: 296202 - RNA, 22 nt, Human
agggacccugaugacugaggag

SEQ ID NO: 296203 - RNA, 22 nt, Human
uuguacuuaaauaugcaaauag

SEQ ID NO: 296204 - RNA, 22 nt, Human
gaggagggcaguuccucuuuua

SEQ ID NO: 296205 - RNA, 23 nt, Human
ucagagagcuguugagagcugcc

SEQ ID NO: 296206 - RNA, 22 nt, Human
auuauaugugggauagaauuua

SEQ ID NO: 296207 - RNA, 22 nt, Human
guucuguagucauagagcaauu

SEQ ID NO: 296208 - RNA, 22 nt, Human
uagacaggguggcuuagaaaca

SEQ ID NO: 296209 - RNA, 22 nt, Human
aggaccugcuaaugugccaagu

SEQ ID NO: 296210 - RNA, 19 nt, Human
agugugaguaauuggaguu

SEQ ID NO: 296211 - RNA, 21 nt, Human
cuucuuggggagcagcuagac

SEQ ID NO: 296212 - RNA, 22 nt, Human
cacaagcuccuuauguggagaa

SEQ ID NO: 296213 - RNA, 22 nt, Human
auguuacaauucaaaaugcugc

SEQ ID NO: 296214 - RNA, 22 nt, Human
aagaugauaggacuugcuuaag

SEQ ID NO: 296215 - RNA, 22 nt, Human
auuugcaugcuucuauugugaa

SEQ ID NO: 296216 - RNA, 22 nt, Human
aaugcacauguuguaauaaaua

SEQ ID NO: 296217 - RNA, 22 nt, Human
gacagggaggagcagagcuucu

SEQ ID NO: 296218 - RNA, 22 nt, Human
cucuucuugucucugguuagaa

SEQ ID NO: 296219 - RNA, 22 nt, Human
gaugaggucuacauuguuaaaa

SEQ ID NO: 296220 - RNA, 22 nt, Human
cacaugaguccugccagguaug

SEQ ID NO: 296221 - RNA, 22 nt, Human
uuccccaggggcuccugccuuu

SEQ ID NO: 296222 - RNA, 22 nt, Human
ugcuuuauuggaaccucauccu

SEQ ID NO: 296223 - RNA, 22 nt, Human
uagggcucuggugggcucuguu

SEQ ID NO: 296224 - RNA, 22 nt, Human
guugggaagcagauggaugagc

SEQ ID NO: 296225 - RNA, 22 nt, Human
uaugagcaagaguuugugaagg

SEQ ID NO: 296226 - RNA, 22 nt, Human
auuaaauuggacgcugggggaa

SEQ ID NO: 296227 - RNA, 22 nt, Human
caggggaguuuuaugcaacaga

SEQ ID NO: 296228 - RNA, 22 nt, Human
uauaaauuaaugugcccaugag

SEQ ID NO: 296229 - RNA, 21 nt, Human
aggcuuggguaaaaaggucau

SEQ ID NO: 296230 - RNA, 22 nt, Human
agggucagugaugagggagccc

SEQ ID NO: 296231 - RNA, 22 nt, Human
auucuacacaaagcaagaagac

SEQ ID NO: 296232 - RNA, 22 nt, Human
uucugggugacucacgcucccc

SEQ ID NO: 296233 - RNA, 22 nt, Human
ucaggaaagaguuagaugauua

SEQ ID NO: 296234 - RNA, 19 nt, Human
gucaggcacgugagagcau

SEQ ID NO: 296235 - RNA, 23 nt, Human
uggagcugggcucagacccuggg

SEQ ID NO: 296236 - RNA, 22 nt, Human
ucucucagggggaaggcugaag

SEQ ID NO: 296237 - RNA, 22 nt, Human
ucuucaguauuuggauaacauu

SEQ ID NO: 296238 - RNA, 22 nt, Human
auucuuuccagacacugauugc

SEQ ID NO: 296239 - RNA, 22 nt, Human
ugcugccacauuuaaagagggg

SEQ ID NO: 296240 - RNA, 22 nt, Human
uucuuuuggacucaaagagaac

SEQ ID NO: 296241 - RNA, 22 nt, Human
uuaaauuauuucuagugaggug

SEQ ID NO: 296242 - RNA, 22 nt, Human
uagcuuuuaguacuuaauggcu

SEQ ID NO: 296243 - RNA, 22 nt, Human
cuacaacauuaugcuuucuguc

SEQ ID NO: 296244 - RNA, 22 nt, Human
ccagaggcagacuuacacucca

SEQ ID NO: 296245 - RNA, 22 nt, Human
acuuguuucaacuguacucucc

SEQ ID NO: 296246 - RNA, 22 nt, Human
uagguauacagagauuucuggg

SEQ ID NO: 296247 - RNA, 22 nt, Human
aguacaaauuauagcgcuugga

SEQ ID NO: 296248 - RNA, 22 nt, Human
gcuggcaguuuccucaccgagg

SEQ ID NO: 296249 - RNA, 22 nt, Human
ugcagggcuauaacuccauucu

SEQ ID NO: 296250 - RNA, 22 nt, Human
uaggaaauuugaaauauguggg

SEQ ID NO: 296251 - RNA, 22 nt, Human
uuugggaugcuagacaccucag

SEQ ID NO: 296252 - RNA, 22 nt, Human
uccugggcccaggcugccaggg

SEQ ID NO: 296253 - RNA, 22 nt, Human
uuauugaguaucugcuuggugu

SEQ ID NO: 296254 - RNA, 22 nt, Human
gguaggggaagacaagugaaaa

SEQ ID NO: 296255 - RNA, 22 nt, Human
ucuuuucugccacagccugagc

SEQ ID NO: 296256 - RNA, 22 nt, Human
gaggggcaaugagggaaagagu

SEQ ID NO: 296257 - RNA, 22 nt, Human
uagaaauggagaacagauuaau

SEQ ID NO: 296258 - RNA, 22 nt, Human
uaaagcauaaugaauaucuaga

SEQ ID NO: 296259 - RNA, 22 nt, Human
gcuguggcucucacaagcaaau

SEQ ID NO: 296260 - RNA, 22 nt, Human
gaauguaaaauugccuacaaga

SEQ ID NO: 296261 - RNA, 22 nt, Human
aacagacaacuccuguggcuca

SEQ ID NO: 296262 - RNA, 22 nt, Human
acauuuaaugauccuacuguga

SEQ ID NO: 296263 - RNA, 22 nt, Human
ucucaguguggugcuuaggaua

SEQ ID NO: 296264 - RNA, 22 nt, Human
agaguggcagcaagucagguag

SEQ ID NO: 296265 - RNA, 19 nt, Human
auucuuggugcaccuugua

SEQ ID NO: 296266 - RNA, 23 nt, Human
ugcuggcuuccagcugcucccuc

SEQ ID NO: 296267 - RNA, 22 nt, Human
cuccugaggaaaagcuugguca

SEQ ID NO: 296268 - RNA, 20 nt, Human
aggcuuggcuuggcaggaac

SEQ ID NO: 296269 - RNA, 22 nt, Human
caguucuggaggauagaagucu

SEQ ID NO: 296270 - RNA, 22 nt, Human
ugaaagcuuguuggaaauguag

SEQ ID NO: 296271 - RNA, 22 nt, Human
uggugcagagagggaucuaggg

SEQ ID NO: 296272 - RNA, 22 nt, Human
cuggagggcuggacuaaggaaa

SEQ ID NO: 296273 - RNA, 22 nt, Human
uggcuaggaauccaugacucuc

SEQ ID NO: 296274 - RNA, 22 nt, Human
gcuucacagaaucaauaguugg

SEQ ID NO: 296275 - RNA, 19 nt, Human
ucccaggaagcaaauguca

SEQ ID NO: 296276 - RNA, 22 nt, Human
gaaguucaacugccaugcuugg

SEQ ID NO: 296277 - RNA, 22 nt, Human
gucuauauauugcuugaauaau

SEQ ID NO: 296278 - RNA, 22 nt, Human
auguuaaaugguuuauuauuaa

SEQ ID NO: 296279 - RNA, 22 nt, Human
uucuucugacacugaugcugua

SEQ ID NO: 296280 - RNA, 22 nt, Human
ccauuuguuguguauuaauauu

SEQ ID NO: 296281 - RNA, 22 nt, Human
ugaggacauuaggaagugaagg

SEQ ID NO: 296282 - RNA, 22 nt, Human
uggcuugguccuggcccuuccc

SEQ ID NO: 296283 - RNA, 22 nt, Human
gauuuugucaaauuccaaaugu

SEQ ID NO: 296284 - RNA, 22 nt, Human
caaguuuuagcaaguggaaagg

SEQ ID NO: 296285 - RNA, 22 nt, Human
ugacauuuuuaaaaccacuagu

SEQ ID NO: 296286 - RNA, 21 nt, Human
agaaaauggcguuuuagauuu

SEQ ID NO: 296287 - RNA, 22 nt, Human
gcagagaguugggcugcgccag

SEQ ID NO: 296288 - RNA, 22 nt, Human
ucauacaacuaagaguuucaga

SEQ ID NO: 296289 - RNA, 23 nt, Human
uccaggcaugagcucuggaugga

SEQ ID NO: 296290 - RNA, 19 nt, Human
acaaaugauguugcacuga

SEQ ID NO: 296291 - RNA, 22 nt, Human
ucucuggggccuuucuacauca

SEQ ID NO: 296292 - RNA, 22 nt, Human
uccuggacagauccccaucauc

SEQ ID NO: 296293 - RNA, 22 nt, Human
uggagggcuaagcugagggaua

SEQ ID NO: 296294 - RNA, 22 nt, Human
uuuacagucugucuagcaaugu

SEQ ID NO: 296295 - RNA, 22 nt, Human
cucuguauagaaaggaaacauu

SEQ ID NO: 296296 - RNA, 22 nt, Human
aaaccuuuucagcugaauggag

SEQ ID NO: 296297 - RNA, 22 nt, Human
gagggcuccacacgggcccagc

SEQ ID NO: 296298 - RNA, 22 nt, Human
aauuagggaaguauuuaguagu

SEQ ID NO: 296299 - RNA, 17 nt, Human
uuuagaauacaauguuu

SEQ ID NO: 296300 - RNA, 22 nt, Human
aguuauuucaguaacauaauag

SEQ ID NO: 296301 - RNA, 22 nt, Human
uauuucugaggcccaggaagug

SEQ ID NO: 296302 - RNA, 18 nt, Human
agcaugagagaggcugug

SEQ ID NO: 296303 - RNA, 22 nt, Human
aaaaugagacacaugugacucc

SEQ ID NO: 296304 - RNA, 22 nt, Human
uggaagaauaggauagaagaac

SEQ ID NO: 296305 - RNA, 22 nt, Human
gcgcaccaccuccagguggccg

SEQ ID NO: 296306 - RNA, 22 nt, Human
uuccuggccaagcagaguggaa

SEQ ID NO: 296307 - RNA, 22 nt, Human
aggacaagcuaaaggacuuccu

SEQ ID NO: 296308 - RNA, 22 nt, Human
ugucccagcacuuugggagucu

SEQ ID NO: 296309 - RNA, 22 nt, Human
uauuuaacuggaaacacaauga

SEQ ID NO: 296310 - RNA, 22 nt, Human
aaaagguuuugaguacaaauau

SEQ ID NO: 296311 - RNA, 22 nt, Human
ucagcuuucucuucuaucgaua

SEQ ID NO: 296312 - RNA, 21 nt, Human
ucagguggcagaguguuuaug

SEQ ID NO: 296313 - RNA, 22 nt, Human
ggcaggugagagcucuuugaaa

SEQ ID NO: 296314 - RNA, 22 nt, Human
guuucucacuuaccaacacaug

SEQ ID NO: 296315 - RNA, 22 nt, Human
accuucugaccaguuaucuuga

SEQ ID NO: 296316 - RNA, 23 nt, Human
agcuccuguaagguggucgucac

SEQ ID NO: 296317 - RNA, 22 nt, Human
ucuguggcugguaauugcaugu

SEQ ID NO: 296318 - RNA, 22 nt, Human
cuccuucugaggcucuggguuc

SEQ ID NO: 296319 - RNA, 22 nt, Human
aauuguaagugcugaguuaagg

SEQ ID NO: 296320 - RNA, 22 nt, Human
ucuagaaacaugacauugaucu

SEQ ID NO: 296321 - RNA, 22 nt, Human
agcucccaauugacuugaacua

SEQ ID NO: 296322 - RNA, 22 nt, Human
augaaggacaacaggggagcag

SEQ ID NO: 296323 - RNA, 22 nt, Human
cuggauccuucucuguguauuu

SEQ ID NO: 296324 - RNA, 22 nt, Human
acuucauuguaauauuauagca

SEQ ID NO: 296325 - RNA, 22 nt, Human
uggcucucaauggcuguacuau

SEQ ID NO: 296326 - RNA, 22 nt, Human
ugaaagcacucacuucugcucu

SEQ ID NO: 296327 - RNA, 22 nt, Human
uccugugucaauuccucauucu

SEQ ID NO: 296328 - RNA, 22 nt, Human
aaaucuuucccuuuacuaucca

SEQ ID NO: 296329 - RNA, 22 nt, Human
aagaauaaguagaugggagaag

SEQ ID NO: 296330 - RNA, 23 nt, Human
gguccacccgagccugcagcuuc

SEQ ID NO: 296331 - RNA, 22 nt, Human
cucccuggaggcccagaccugg

SEQ ID NO: 296332 - RNA, 22 nt, Human
uauguuuaguauccauuuucag

SEQ ID NO: 296333 - RNA, 18 nt, Human
cagaugagaugcaaucuc

SEQ ID NO: 296334 - RNA, 22 nt, Human
uuguguguagacucagccauug

SEQ ID NO: 296335 - RNA, 22 nt, Human
uagggauguggugagaacugag

SEQ ID NO: 296336 - RNA, 22 nt, Human
acuacauuuccugaccccugug

SEQ ID NO: 296337 - RNA, 22 nt, Human
uuuccaagacuccaguucuccc

SEQ ID NO: 296338 - RNA, 22 nt, Human
ucaugcaguuucuuaucugcca

SEQ ID NO: 296339 - RNA, 22 nt, Human
gguguugggcucacugguccuu

SEQ ID NO: 296340 - RNA, 21 nt, Human
agguacuaaugaaaagugauu

SEQ ID NO: 296341 - RNA, 22 nt, Human
ucccaaaguauuagcauuucaa

SEQ ID NO: 296342 - RNA, 23 nt, Human
uucagaagaaaugaguacaggag

SEQ ID NO: 296343 - RNA, 22 nt, Human
aggcaggugagucaaaacagac

SEQ ID NO: 296344 - RNA, 22 nt, Human
uggcuggaggguuagugagaua

SEQ ID NO: 296345 - RNA, 22 nt, Human
guuuauuagaguuuucugucug

SEQ ID NO: 296346 - RNA, 23 nt, Human
auauuagggagauuagcccucua

SEQ ID NO: 296347 - RNA, 22 nt, Human
cuuguccccagcagguugguuu

SEQ ID NO: 296348 - RNA, 22 nt, Human
uugcuauuuccugaaauaagca

SEQ ID NO: 296349 - RNA, 20 nt, Human
auuucaguguuugcaauuuc

SEQ ID NO: 296350 - RNA, 22 nt, Human
uaguuauauccagucuuuaaaa

SEQ ID NO: 296351 - RNA, 18 nt, Human
agaagccugccucaaugc

SEQ ID NO: 296352 - RNA, 22 nt, Human
gugcaggguagcgacggcagga

SEQ ID NO: 296353 - RNA, 22 nt, Human
agggauggaagcucgucugcaa

SEQ ID NO: 296354 - RNA, 22 nt, Human
agugugaguuacaaagugugaa

SEQ ID NO: 296355 - RNA, 22 nt, Human
acaugugugacaacagagguga

SEQ ID NO: 296356 - RNA, 22 nt, Human
uagaaaauagggccuguggagc

SEQ ID NO: 296357 - RNA, 22 nt, Human
agaaucuaaguacacagacaga

SEQ ID NO: 296358 - RNA, 22 nt, Human
uggcuguagaacaguggauauu

SEQ ID NO: 296359 - RNA, 19 nt, Human
ugacagagagcaggguggu

SEQ ID NO: 296360 - RNA, 22 nt, Human
ggaucuuuaaguucuuuuccau

SEQ ID NO: 296361 - RNA, 22 nt, Human
aagucuaaccuauuccgguguu

SEQ ID NO: 296362 - RNA, 22 nt, Human
cccaggcagucuggcucuaaag

SEQ ID NO: 296363 - RNA, 17 nt, Human
uguagcuucuccuucuc

SEQ ID NO: 296364 - RNA, 22 nt, Human
gauuuuacaugucauaucuauu

SEQ ID NO: 296365 - RNA, 22 nt, Human
ccagguguguacagaacagcac

SEQ ID NO: 296366 - RNA, 22 nt, Human
aagggacccuggaucaaaugga

SEQ ID NO: 296367 - RNA, 22 nt, Human
uaacuucuggaaaugcaucugc

SEQ ID NO: 296368 - RNA, 22 nt, Human
uagggaugagccaguggguagu

SEQ ID NO: 296369 - RNA, 19 nt, Human
agaggccucagcagcuggc

SEQ ID NO: 296370 - RNA, 22 nt, Human
agucaguugcaguuuauggaug

SEQ ID NO: 296371 - RNA, 22 nt, Human
auauaauucucagguuugacua

SEQ ID NO: 296372 - RNA, 22 nt, Human
ccagagagauugcuucuaaaga

SEQ ID NO: 296373 - RNA, 19 nt, Human
uuccugugcugcugugucc

SEQ ID NO: 296374 - RNA, 17 nt, Human
ucuggaugucauggaag

SEQ ID NO: 296375 - RNA, 22 nt, Human
aaauccuaaaaguuugacuuaa

SEQ ID NO: 296376 - RNA, 22 nt, Human
aggaggaaaaaggccacagcaa

SEQ ID NO: 296377 - RNA, 22 nt, Human
uguaaauaaugcauguaaauca

SEQ ID NO: 296378 - RNA, 21 nt, Human
uaucaagauguuaugguugaa

SEQ ID NO: 296379 - RNA, 20 nt, Human
uuucuugucggcuguugcug

SEQ ID NO: 296380 - RNA, 22 nt, Human
agagggcauaaaauagagcacg

SEQ ID NO: 296381 - RNA, 22 nt, Human
uauuugaaggcauacauuuuga

SEQ ID NO: 296382 - RNA, 22 nt, Human
acaguucugcaagauauuuuuu

SEQ ID NO: 296383 - RNA, 22 nt, Human
agggauguugucaaggaugugg

SEQ ID NO: 296384 - RNA, 22 nt, Human
gauguuaagaaggaauugaagu

SEQ ID NO: 296385 - RNA, 22 nt, Human
uuucucugugccauuuccauaa

SEQ ID NO: 296386 - RNA, 22 nt, Human
ccagagaggccaaggucguggu

SEQ ID NO: 296387 - RNA, 22 nt, Human
caggugguacuuaaagucagaa

SEQ ID NO: 296388 - RNA, 17 nt, Human
cauccgugagcucggca

SEQ ID NO: 296389 - RNA, 22 nt, Human
uaggugguagagccuggcuugc

SEQ ID NO: 296390 - RNA, 22 nt, Human
guguccucuuauugcucuuggc

SEQ ID NO: 296391 - RNA, 20 nt, Human
ugcaaacauuacuugggugu

SEQ ID NO: 296392 - RNA, 22 nt, Human
aauuuguuacacagcaauauaa

SEQ ID NO: 296393 - RNA, 22 nt, Human
ugucucaggcccaagccaguaa

SEQ ID NO: 296394 - RNA, 22 nt, Human
gcucagaggagcaucauaagga

SEQ ID NO: 296395 - RNA, 22 nt, Human
uccauugugauuauauacaaaa

SEQ ID NO: 296396 - RNA, 22 nt, Human
ucagaaaagagaaaaucuuaua

SEQ ID NO: 296397 - RNA, 22 nt, Human
ccauggcagccuggccuggcuu

SEQ ID NO: 296398 - RNA, 22 nt, Human
uaaauguuaugcccaucaucca

SEQ ID NO: 296399 - RNA, 23 nt, Human
uuucucauccagagagucagucc

SEQ ID NO: 296400 - RNA, 22 nt, Human
aguccuuuuguuuugagaugag

SEQ ID NO: 296401 - RNA, 22 nt, Human
cuguccuggugcuggggauccc

SEQ ID NO: 296402 - RNA, 22 nt, Human
ucuguuuauucaauuucuauau

SEQ ID NO: 296403 - RNA, 20 nt, Human
caugguggaggagcagggcc

SEQ ID NO: 296404 - RNA, 22 nt, Human
gguguucaaaugaacacaugca

SEQ ID NO: 296405 - RNA, 22 nt, Human
ucuguucagaauuguaacacuc

SEQ ID NO: 296406 - RNA, 22 nt, Human
uuaguuaguggggcugucaguc

SEQ ID NO: 296407 - RNA, 22 nt, Human
agacagacggcuuuauacacag

SEQ ID NO: 296408 - RNA, 20 nt, Human
ucuccuggugacaguaccca

SEQ ID NO: 296409 - RNA, 23 nt, Human
cuguggcugaguccuguuggagu

SEQ ID NO: 296410 - RNA, 22 nt, Human
ucagguguuagaagaaauuuca

SEQ ID NO: 296411 - RNA, 22 nt, Human
aaacaaauuucaagcugugaca

SEQ ID NO: 296412 - RNA, 22 nt, Human
uacacaaucuguuuuuccauuu

SEQ ID NO: 296413 - RNA, 22 nt, Human
cucuucaauagauuguugaggg

SEQ ID NO: 296414 - RNA, 19 nt, Human
uguacaaggauuaugcagg

SEQ ID NO: 296415 - RNA, 22 nt, Human
ggcuuuauuaacucauccguaa

SEQ ID NO: 296416 - RNA, 22 nt, Human
ccucucccgggugccgcugggc

SEQ ID NO: 296417 - RNA, 22 nt, Human
ugcucccacacuacucggaggc

SEQ ID NO: 296418 - RNA, 22 nt, Human
gccagcaguccugcugugugcc

SEQ ID NO: 296419 - RNA, 22 nt, Human
cagauucuccaggggcugcaga

SEQ ID NO: 296420 - RNA, 22 nt, Human
cugaggcuggggaagggaagug

SEQ ID NO: 296421 - RNA, 22 nt, Human
aagaaauggaagauccauggug

SEQ ID NO: 296422 - RNA, 20 nt, Human
gggagaagggcugaugagag

SEQ ID NO: 296423 - RNA, 21 nt, Human
uuccuggcggcagaaacguga

SEQ ID NO: 296424 - RNA, 22 nt, Human
uuauucugcacuuuuaaaauau

SEQ ID NO: 296425 - RNA, 21 nt, Human
caugugucuuguguuacugcu

SEQ ID NO: 296426 - RNA, 22 nt, Human
ccuggcagcauugguagagauu

SEQ ID NO: 296427 - RNA, 22 nt, Human
aggacaguguggaagagggugc

SEQ ID NO: 296428 - RNA, 22 nt, Human
augaggcacguguuacuggccu

SEQ ID NO: 296429 - RNA, 22 nt, Human
agaggugggagccuggucacau

SEQ ID NO: 296430 - RNA, 22 nt, Human
ugaggggccgcccaagcacuuc

SEQ ID NO: 296431 - RNA, 22 nt, Human
auacuucuagaaauacuaugca

SEQ ID NO: 296432 - RNA, 23 nt, Human
aaggccagaauuucaauggugcc

SEQ ID NO: 296433 - RNA, 23 nt, Human
ccauaaucaggguuguggggucc

SEQ ID NO: 296434 - RNA, 22 nt, Human
guauuaggugguggaauuguag

SEQ ID NO: 296435 - RNA, 22 nt, Human
uauacacauuuuuaccuauagu

SEQ ID NO: 296436 - RNA, 22 nt, Human
gguucaguggaauguguugacc

SEQ ID NO: 296437 - RNA, 22 nt, Human
ccugagagugcgugccuccuua

SEQ ID NO: 296438 - RNA, 22 nt, Human
guccacagagggcugggcaggc

SEQ ID NO: 296439 - RNA, 22 nt, Human
gcugcucucagagcucaugcug

SEQ ID NO: 296440 - RNA, 22 nt, Human
acacaaugcauauuuuuccaga

SEQ ID NO: 296441 - RNA, 22 nt, Human
agcaggugaucgcgugugcucc

SEQ ID NO: 296442 - RNA, 22 nt, Human
uguuacaagucuugagguacuu

SEQ ID NO: 296443 - RNA, 22 nt, Human
ugggcaggaugcguugauucuu

SEQ ID NO: 296444 - RNA, 22 nt, Human
gcccagggugaagugcaguugu

SEQ ID NO: 296445 - RNA, 22 nt, Human
uucuuucugaauacaguugagu

SEQ ID NO: 296446 - RNA, 22 nt, Human
acaacaggguaaggcaggccau

SEQ ID NO: 296447 - RNA, 22 nt, Human
uucuucuugucugcccucacau

SEQ ID NO: 296448 - RNA, 22 nt, Human
gggcucucaaggcagggcccca

SEQ ID NO: 296449 - RNA, 22 nt, Human
aauggcacuuuauaaauguuaa

SEQ ID NO: 296450 - RNA, 22 nt, Human
cagugcaggcuuguggccgcag

SEQ ID NO: 296451 - RNA, 22 nt, Human
ugaaagauaaguuauuauguac

SEQ ID NO: 296452 - RNA, 22 nt, Human
uuauuaagugcguacuguaugc

SEQ ID NO: 296453 - RNA, 23 nt, Human
auuuuacaggucaguuccuugaa

SEQ ID NO: 296454 - RNA, 22 nt, Human
aggccagggccagauuagccac

SEQ ID NO: 296455 - RNA, 22 nt, Human
uauguauucucagauuuacuaa

SEQ ID NO: 296456 - RNA, 22 nt, Human
ggucucagagguuucugcucag

SEQ ID NO: 296457 - RNA, 22 nt, Human
uggcagugugggaggaagguac

SEQ ID NO: 296458 - RNA, 22 nt, Human
caggcacaaauuucuagauaag

SEQ ID NO: 296459 - RNA, 22 nt, Human
caguccugaggaagagcugcug

SEQ ID NO: 296460 - RNA, 22 nt, Human
gcagcuuucuaagcuuuauugc

SEQ ID NO: 296461 - RNA, 22 nt, Human
uugcuguaaguaucuuucuacc

SEQ ID NO: 296462 - RNA, 22 nt, Human
ucuggcagaagugcugucagua

SEQ ID NO: 296463 - RNA, 22 nt, Human
cuggauguaacgaagguuucac

SEQ ID NO: 296464 - RNA, 22 nt, Human
gucuucaacaauaacuaccacu

SEQ ID NO: 296465 - RNA, 22 nt, Human
ucucagaagugaucaggauguu

SEQ ID NO: 296466 - RNA, 22 nt, Human
gagcagugccaaagaauuugcg

SEQ ID NO: 296467 - RNA, 22 nt, Human
accuguuuguguccauuaguga

SEQ ID NO: 296468 - RNA, 22 nt, Human
aauugcuuuaguuaccauagug

SEQ ID NO: 296469 - RNA, 22 nt, Human
caggucuccauuuugaugaguu

SEQ ID NO: 296470 - RNA, 22 nt, Human
aagugugaauuuuagagucagg

SEQ ID NO: 296471 - RNA, 23 nt, Human
cauaaaauauuaguaugguagca

SEQ ID NO: 296472 - RNA, 21 nt, Human
caagccagaccaauagcagcc

SEQ ID NO: 296473 - RNA, 22 nt, Human
acuugaaacaucuuuaaaugua

SEQ ID NO: 296474 - RNA, 22 nt, Human
gagguucacuuccugaaauagc

SEQ ID NO: 296475 - RNA, 22 nt, Human
acaaauuuauugaagggcauau

SEQ ID NO: 296476 - RNA, 22 nt, Human
caucagugcccuuggggaugcc

SEQ ID NO: 296477 - RNA, 22 nt, Human
uggaggaaguugcuggaaguca

SEQ ID NO: 296478 - RNA, 22 nt, Human
aaaagucugcucucauuucaga

SEQ ID NO: 296479 - RNA, 22 nt, Human
acagagagggagugauaaaucc

SEQ ID NO: 296480 - RNA, 22 nt, Human
gcucugagugaucagcugggaa

SEQ ID NO: 296481 - RNA, 22 nt, Human
agggacagucuacuguucacug

SEQ ID NO: 296482 - RNA, 20 nt, Human
agcaccucccauaugcuaga

SEQ ID NO: 296483 - RNA, 22 nt, Human
agggggcccuugcaggugagcg

SEQ ID NO: 296484 - RNA, 22 nt, Human
aagucucuuuggguacuuuauu

SEQ ID NO: 296485 - RNA, 22 nt, Human
gcucccuccaugaggcagaccg

SEQ ID NO: 296486 - RNA, 22 nt, Human
auccaaaauuuacuguagcauu

SEQ ID NO: 296487 - RNA, 22 nt, Human
gcacugcaucuacuggcaagua

SEQ ID NO: 296488 - RNA, 22 nt, Human
cuuucuucaucaagugccacgu

SEQ ID NO: 296489 - RNA, 22 nt, Human
ugcuugaacaaggauaaauuug

SEQ ID NO: 296490 - RNA, 22 nt, Human
cuggggggcuacugacagagga

SEQ ID NO: 296491 - RNA, 22 nt, Human
ccagcuuuugcacuggacuggg

SEQ ID NO: 296492 - RNA, 22 nt, Human
cauaauaucuccgauuacuugc

SEQ ID NO: 296493 - RNA, 22 nt, Human
gacugucuuguuucuaagauga

SEQ ID NO: 296494 - RNA, 18 nt, Human
uuccuucugauguauaug

SEQ ID NO: 296495 - RNA, 23 nt, Human
uguuuuucauucacaugggcugu

SEQ ID NO: 296496 - RNA, 22 nt, Human
uggcuggagagggucccaugag

SEQ ID NO: 296497 - RNA, 22 nt, Human
uccaugcagaggagcugguggc

SEQ ID NO: 296498 - RNA, 22 nt, Human
uuccaggccgggcaggaaacac

SEQ ID NO: 296499 - RNA, 22 nt, Human
ugggacacagaaaaggcagguu

SEQ ID NO: 296500 - RNA, 22 nt, Human
gacuuccuaagauucaggaaug

SEQ ID NO: 296501 - RNA, 22 nt, Human
cugcaucuguuagauuaucacc

SEQ ID NO: 296502 - RNA, 22 nt, Human
aagucguggcaggcuugcacga

SEQ ID NO: 296503 - RNA, 22 nt, Human
auuccuucuaaaacgcugcccu

SEQ ID NO: 296504 - RNA, 22 nt, Human
gauuuaaaguagaccuuuguuu

SEQ ID NO: 296505 - RNA, 22 nt, Human
gauggaaugaauggcagauaca

SEQ ID NO: 296506 - RNA, 22 nt, Human
uccugcagagucccacugauuu

SEQ ID NO: 296507 - RNA, 22 nt, Human
cauggaauuuucuaggcauaaa

SEQ ID NO: 296508 - RNA, 22 nt, Human
cagaguggugcaagggcagugu

SEQ ID NO: 296509 - RNA, 22 nt, Human
uucuuguauguaugcaaaauca

SEQ ID NO: 296510 - RNA, 22 nt, Human
uccugugaguagauaguauugu

SEQ ID NO: 296511 - RNA, 22 nt, Human
uuuaagagcuaguaugucauuu

SEQ ID NO: 296512 - RNA, 22 nt, Human
cauggcucacaggaugggcuag

SEQ ID NO: 296513 - RNA, 22 nt, Human
uuccuguguguugguggcagaa

SEQ ID NO: 296514 - RNA, 20 nt, Human
gagggcucguggauggauaa

SEQ ID NO: 296515 - RNA, 22 nt, Human
cuguccuguggugacagguaca

SEQ ID NO: 296516 - RNA, 20 nt, Human
ggcaggaccccaguggcauc

SEQ ID NO: 296517 - RNA, 19 nt, Human
aaaugugaugguacaauuc

SEQ ID NO: 296518 - RNA, 19 nt, Human
ccuguucaugacucugucc

SEQ ID NO: 296519 - RNA, 22 nt, Human
cagaaaggacagagugagggug

SEQ ID NO: 296520 - RNA, 22 nt, Human
ucuguggcaugguaucuggagg

SEQ ID NO: 296521 - RNA, 22 nt, Human
ucuccacagucccaccucgcuu

SEQ ID NO: 296522 - RNA, 22 nt, Human
agggaugguggaggaauuucaa

SEQ ID NO: 296523 - RNA, 22 nt, Human
uucuucuaaaugugcuuauuaa

SEQ ID NO: 296524 - RNA, 22 nt, Human
uauggcuucugggccaaauuua

SEQ ID NO: 296525 - RNA, 22 nt, Human
uguccauggagaagcucagggc

SEQ ID NO: 296526 - RNA, 22 nt, Human
acccaggguuugagcucugcag

SEQ ID NO: 296527 - RNA, 22 nt, Human
acagguggcauaggcaguuuga

SEQ ID NO: 296528 - RNA, 22 nt, Human
agcccuagagaaccagccugug

SEQ ID NO: 296529 - RNA, 22 nt, Human
aacacaaagaagcugcaggauc

SEQ ID NO: 296530 - RNA, 22 nt, Human
agagcacagccaccauuuacaa

SEQ ID NO: 296531 - RNA, 22 nt, Human
uggcugugucccuguccagagu

SEQ ID NO: 296532 - RNA, 22 nt, Human
gcacuuuguggauuguauuucc

SEQ ID NO: 296533 - RNA, 22 nt, Human
gcagcuuuguaaaguaugaagc

SEQ ID NO: 296534 - RNA, 22 nt, Human
auuuaauuuacauuugacagag

SEQ ID NO: 296535 - RNA, 22 nt, Human
uaucagcaacucagagcagucu

SEQ ID NO: 296536 - RNA, 22 nt, Human
caggaggcaguggguguugucu

SEQ ID NO: 296537 - RNA, 22 nt, Human
ugagguggccgaggagcaggac

SEQ ID NO: 296538 - RNA, 22 nt, Human
ugcaggugguuuggacacugcu

SEQ ID NO: 296539 - RNA, 22 nt, Human
ugcagggccuuguugaugugcu

SEQ ID NO: 296540 - RNA, 22 nt, Human
guguccugguuccuuguggcug

SEQ ID NO: 296541 - RNA, 22 nt, Human
acuguccuggagcucacacucu

SEQ ID NO: 296542 - RNA, 18 nt, Human
cuccuccacagccccugc

SEQ ID NO: 296543 - RNA, 22 nt, Human
uuuaaaauuuagaccucuccac

SEQ ID NO: 296544 - RNA, 22 nt, Human
ugccucaguuucaucugcagaa

SEQ ID NO: 296545 - RNA, 22 nt, Human
ucuccuggcucaccaggcugga

SEQ ID NO: 296546 - RNA, 22 nt, Human
cauuuguucaaccauucucgcu

SEQ ID NO: 296547 - RNA, 22 nt, Human
cagguuggucggcaaguacaca

SEQ ID NO: 296548 - RNA, 22 nt, Human
gagaggcuggguuggagaucga

SEQ ID NO: 296549 - RNA, 22 nt, Human
gaaaacacuuugaucugaaagu

SEQ ID NO: 296550 - RNA, 22 nt, Human
uuuaucuauuguauuguugaug

SEQ ID NO: 296551 - RNA, 22 nt, Human
uagcaaagaaccugauacccca

SEQ ID NO: 296552 - RNA, 22 nt, Human
aauugcuugaugacuaguaauu

SEQ ID NO: 296553 - RNA, 22 nt, Human
ucuuauugucuagauugagaug

SEQ ID NO: 296554 - RNA, 21 nt, Human
cucaaaauucuuucuguugga

SEQ ID NO: 296555 - RNA, 22 nt, Human
guggcacaaggcuuacacagca

SEQ ID NO: 296556 - RNA, 22 nt, Human
gggagcugagcuggaagagaau

SEQ ID NO: 296557 - RNA, 22 nt, Human
uccugcagaccucagucagguc

SEQ ID NO: 296558 - RNA, 22 nt, Human
ugcacuuuaaaaaauggugaug

SEQ ID NO: 296559 - RNA, 22 nt, Human
gagaggcuggcagugccagguu

SEQ ID NO: 296560 - RNA, 22 nt, Human
agaggcaaaaaucuauggcaac

SEQ ID NO: 296561 - RNA, 22 nt, Human
ucagagaggauuuuaauaagug

SEQ ID NO: 296562 - RNA, 22 nt, Human
ggcuguggcagcuggaaguggu

SEQ ID NO: 296563 - RNA, 22 nt, Human
ggaggucaaauggagggcuggg

SEQ ID NO: 296564 - RNA, 22 nt, Human
uauggcuucuuuugcaacuacu

SEQ ID NO: 296565 - RNA, 21 nt, Human
agcagacacuugugaccuucc

SEQ ID NO: 296566 - RNA, 22 nt, Human
cagcuugaaauauuaggagaug

SEQ ID NO: 296567 - RNA, 22 nt, Human
guagggacuguucucaccugag

SEQ ID NO: 296568 - RNA, 22 nt, Human
aaggaaagauucucucucuaga

SEQ ID NO: 296569 - RNA, 22 nt, Human
ccuggcagguagcauugaggag

SEQ ID NO: 296570 - RNA, 21 nt, Human
accaaaaccuauacuuucugu

SEQ ID NO: 296571 - RNA, 22 nt, Human
uaaggagguugguggguuggau

SEQ ID NO: 296572 - RNA, 22 nt, Human
uuuauuauccaguguugucaug

SEQ ID NO: 296573 - RNA, 22 nt, Human
uuccagugaugggcaauuuggu

SEQ ID NO: 296574 - RNA, 22 nt, Human
ucaguucuaacaguuuagaaca

SEQ ID NO: 296575 - RNA, 22 nt, Human
ggaccuggcaauuugcaucucu

SEQ ID NO: 296576 - RNA, 22 nt, Human
gcagucccauaucuuuaacaua

SEQ ID NO: 296577 - RNA, 22 nt, Human
uuugcucaguucucuguauuuu

SEQ ID NO: 296578 - RNA, 19 nt, Human
uauucuguuaaccuuuguc

SEQ ID NO: 296579 - RNA, 22 nt, Human
agucacaguuccuacccaguaa

SEQ ID NO: 296580 - RNA, 22 nt, Human
ugacagaggagcuggaaugauu

SEQ ID NO: 296581 - RNA, 22 nt, Human
guucuuuaaguggagaaggaaa

SEQ ID NO: 296582 - RNA, 22 nt, Human
uucuguuugugaacuggcugag

SEQ ID NO: 296583 - RNA, 22 nt, Human
uuaacauacaucaugaacaaug

SEQ ID NO: 296584 - RNA, 22 nt, Human
agaagaaaugaggccguucugc

SEQ ID NO: 296585 - RNA, 22 nt, Human
ccugacaggcggaggcugcagu

SEQ ID NO: 296586 - RNA, 22 nt, Human
agaaauuaugcaguaguuuuau

SEQ ID NO: 296587 - RNA, 22 nt, Human
ucagugucuagggacaguaauc

SEQ ID NO: 296588 - RNA, 22 nt, Human
acaaagauguuuaaagcauuua

SEQ ID NO: 296589 - RNA, 22 nt, Human
ugcuggaggggaugccuucacu

SEQ ID NO: 296590 - RNA, 22 nt, Human
acccagcaugacaccugcacau

SEQ ID NO: 296591 - RNA, 18 nt, Human
uagcaaagauguggauug

SEQ ID NO: 296592 - RNA, 22 nt, Human
acagguggaggcuuuaggaggu

SEQ ID NO: 296593 - RNA, 22 nt, Human
auguuucuaguuguaugucacu

SEQ ID NO: 296594 - RNA, 22 nt, Human
agcuccugugugaagccucccu

SEQ ID NO: 296595 - RNA, 22 nt, Human
uggcuuggcuaagaucuaagcu

SEQ ID NO: 296596 - RNA, 20 nt, Human
uacaauauucccacuuugcu

SEQ ID NO: 296597 - RNA, 22 nt, Human
ucaugaaucguggaaugauuua

SEQ ID NO: 296598 - RNA, 22 nt, Human
aaacacugaagaccuaucuggu

SEQ ID NO: 296599 - RNA, 22 nt, Human
acacauuuucuaacagggauca

SEQ ID NO: 296600 - RNA, 22 nt, Human
auguccagaguguccuggaaag

SEQ ID NO: 296601 - RNA, 22 nt, Human
ugggcuccagcaccugugcucu

SEQ ID NO: 296602 - RNA, 23 nt, Human
ccaggcucuuucaccugcuauuc

SEQ ID NO: 296603 - RNA, 22 nt, Human
guuuagaauggcaaaauuaagu

SEQ ID NO: 296604 - RNA, 22 nt, Human
cccugcagcauucucuaacugg

SEQ ID NO: 296605 - RNA, 22 nt, Human
aggacaaaggaccagaucugga

SEQ ID NO: 296606 - RNA, 22 nt, Human
aaaagagucuuaggcagucaua

SEQ ID NO: 296607 - RNA, 22 nt, Human
ucaauauucuucuuuaguagga

SEQ ID NO: 296608 - RNA, 23 nt, Human
agcuuugugaaagcagacauggg

SEQ ID NO: 296609 - RNA, 21 nt, Human
ugacagguauuuaucuggaaa

SEQ ID NO: 296610 - RNA, 22 nt, Human
aggaauguggcaaucuucaagu

SEQ ID NO: 296611 - RNA, 22 nt, Human
aaauggauggaauugacauuua

SEQ ID NO: 296612 - RNA, 22 nt, Human
uucuuuuuaaaguguguaugca

SEQ ID NO: 296613 - RNA, 22 nt, Human
aagagagggacuuauuaaaguc

SEQ ID NO: 296614 - RNA, 22 nt, Human
cagugggauugggauuggaacc

SEQ ID NO: 296615 - RNA, 22 nt, Human
aauaauguugacgauagucuua

SEQ ID NO: 296616 - RNA, 22 nt, Human
gagggaccccaggcuggcccuu

SEQ ID NO: 296617 - RNA, 21 nt, Human
uaugugucuguggaaaacuag

SEQ ID NO: 296618 - RNA, 22 nt, Human
cacugucacguucugaaacugu

SEQ ID NO: 296619 - RNA, 22 nt, Human
aaaguggucugcaucccuucug

SEQ ID NO: 296620 - RNA, 22 nt, Human
auucugggugacuacgugauca

SEQ ID NO: 296621 - RNA, 22 nt, Human
gggaggaaaugugcagcgaauu

SEQ ID NO: 296622 - RNA, 22 nt, Human
cccuagggcuaagcaggacugc

SEQ ID NO: 296623 - RNA, 22 nt, Human
ugguaagaacccaucagagaag

SEQ ID NO: 296624 - RNA, 17 nt, Human
gagccacccugugcgag

SEQ ID NO: 296625 - RNA, 22 nt, Human
aaccugcaguuuuuauucugag

SEQ ID NO: 296626 - RNA, 21 nt, Human
uaucaaggcacuuuuuaaaga

SEQ ID NO: 296627 - RNA, 22 nt, Human
aucuuacagcagcaaggaagua

SEQ ID NO: 296628 - RNA, 22 nt, Human
acaguuuaugguguuuuauaua

SEQ ID NO: 296629 - RNA, 22 nt, Human
gcagguguuuuaagacauugaa

SEQ ID NO: 296630 - RNA, 22 nt, Human
uucuggguaguaugguuaguuu

SEQ ID NO: 296631 - RNA, 14 nt, Human
aggaauguccuagg

SEQ ID NO: 296632 - RNA, 22 nt, Human
uucauucugggcucuaaggaac

SEQ ID NO: 296633 - RNA, 22 nt, Human
uggaggaaguggcuggccagaa

SEQ ID NO: 296634 - RNA, 22 nt, Human
uuccuggcaccaccacuucuag

SEQ ID NO: 296635 - RNA, 22 nt, Human
gucuggaaggaggagauggagc

SEQ ID NO: 296636 - RNA, 22 nt, Human
ucagacagggagucagaaaaua

SEQ ID NO: 296637 - RNA, 21 nt, Human
ccuguucacagaucuguaacu

SEQ ID NO: 296638 - RNA, 22 nt, Human
aagacaggaaaagcuccaggcc

SEQ ID NO: 296639 - RNA, 22 nt, Human
uuccucaguuagugccugaggc

SEQ ID NO: 296640 - RNA, 22 nt, Human
aaaguauuuuugacaggcauua

SEQ ID NO: 296641 - RNA, 22 nt, Human
aguuaaauguguuagccagggu

SEQ ID NO: 296642 - RNA, 22 nt, Human
cuuuaauucagauuugaaggga

SEQ ID NO: 296643 - RNA, 22 nt, Human
uuacauucuuggaaucuuguuu

SEQ ID NO: 296644 - RNA, 22 nt, Human
gcuuuuucaaaugaaagcuggu

SEQ ID NO: 296645 - RNA, 22 nt, Human
gucuuacccacagcaucuagaa

SEQ ID NO: 296646 - RNA, 22 nt, Human
uccaggcagcccuuccugacuc

SEQ ID NO: 296647 - RNA, 22 nt, Human
uacugucuauacacuugauuac

SEQ ID NO: 296648 - RNA, 22 nt, Human
acaguaaaaagccuuagaauuu

SEQ ID NO: 296649 - RNA, 22 nt, Human
gagggaaagguuaauacaugau

SEQ ID NO: 296650 - RNA, 22 nt, Human
aucucuguaauuacaugauauu

SEQ ID NO: 296651 - RNA, 22 nt, Human
ggcaaacaggagaguaaagaga

SEQ ID NO: 296652 - RNA, 22 nt, Human
uagaaacauauaggauggcagg

SEQ ID NO: 296653 - RNA, 22 nt, Human
accuacauacggaaauauuuac

SEQ ID NO: 296654 - RNA, 22 nt, Human
uacauguguucuguuucaaguu

SEQ ID NO: 296655 - RNA, 22 nt, Human
agcaguguucaaugauacacug

SEQ ID NO: 296656 - RNA, 21 nt, Human
acuuuaauauacaugaggagg

SEQ ID NO: 296657 - RNA, 22 nt, Human
aggucagcuagacagcucucug

SEQ ID NO: 296658 - RNA, 22 nt, Human
gaggugucugaguggggaccug

SEQ ID NO: 296659 - RNA, 22 nt, Human
ggucucuguugccuccaucaag

SEQ ID NO: 296660 - RNA, 22 nt, Human
aggcagggucuugcuauguugc

SEQ ID NO: 296661 - RNA, 22 nt, Human
accaggcacuccugaggucuga

SEQ ID NO: 296662 - RNA, 22 nt, Human
ggcuuggaccagucacaguggu

SEQ ID NO: 296663 - RNA, 22 nt, Human
aacaaauuaguugcaagacugg

SEQ ID NO: 296664 - RNA, 22 nt, Human
caaugauuuuuccauugcagga

SEQ ID NO: 296665 - RNA, 20 nt, Human
aagauucauuguaauuaggg

SEQ ID NO: 296666 - RNA, 22 nt, Human
ucugaaauauugguaauacuuu

SEQ ID NO: 296667 - RNA, 22 nt, Human
ccugcaagacuauuuaguucca

SEQ ID NO: 296668 - RNA, 22 nt, Human
aaaauuauagaucuagugccug

SEQ ID NO: 296669 - RNA, 20 nt, Human
uuucaaaggcaccuaugaag

SEQ ID NO: 296670 - RNA, 19 nt, Human
uggcagggagugauauuag

SEQ ID NO: 296671 - RNA, 22 nt, Human
cccuaggguuuggccagagccc

SEQ ID NO: 296672 - RNA, 22 nt, Human
ucagagcauucgggugacaaau

SEQ ID NO: 296673 - RNA, 22 nt, Human
ccuggagaggcgcugcagagga

SEQ ID NO: 296674 - RNA, 22 nt, Human
ccagagagggcgccaccuggag

SEQ ID NO: 296675 - RNA, 22 nt, Human
gaugugaggacucauguggagg

SEQ ID NO: 296676 - RNA, 23 nt, Human
ugagcaucacaggagaaccaggc

SEQ ID NO: 296677 - RNA, 22 nt, Human
cauccugagaggucucucuacc

SEQ ID NO: 296678 - RNA, 22 nt, Human
aaauauuauugcuuaaggggag

SEQ ID NO: 296679 - RNA, 22 nt, Human
uacauaauuaaucuuuaaguuc

SEQ ID NO: 296680 - RNA, 22 nt, Human
gccuguuuuccugcugugguug

SEQ ID NO: 296681 - RNA, 22 nt, Human
guauacagauacuuagacgugc

SEQ ID NO: 296682 - RNA, 22 nt, Human
aggcagguagaaggaucuuuau

SEQ ID NO: 296683 - RNA, 22 nt, Human
acugccuggccuggccucacug

SEQ ID NO: 296684 - RNA, 20 nt, Human
augauuuugcacuaacuuca

SEQ ID NO: 296685 - RNA, 22 nt, Human
cagggcucaccacugggauccu

SEQ ID NO: 296686 - RNA, 22 nt, Human
auguaguugaagugcuauaaag

SEQ ID NO: 296687 - RNA, 22 nt, Human
ucaguaaauaacucagaugcuc

SEQ ID NO: 296688 - RNA, 22 nt, Human
agaaucagugcuggcuauuagc

SEQ ID NO: 296689 - RNA, 22 nt, Human
gagcugcagcggcugacgcaac

SEQ ID NO: 296690 - RNA, 22 nt, Human
gucacuuuacacuccuacuaaa

SEQ ID NO: 296691 - RNA, 22 nt, Human
gaauacauuggaaaucagaaua

SEQ ID NO: 296692 - RNA, 22 nt, Human
ugcagguggccaucuucguucu

SEQ ID NO: 296693 - RNA, 22 nt, Human
uccugcaggccuguucccagua

SEQ ID NO: 296694 - RNA, 22 nt, Human
uucugugucuucuuguucugug

SEQ ID NO: 296695 - RNA, 22 nt, Human
gaauguuacuuugauuuugucc

SEQ ID NO: 296696 - RNA, 22 nt, Human
augcacaagguagauuauuauu

SEQ ID NO: 296697 - RNA, 22 nt, Human
agguuucaugggagacaacuca

SEQ ID NO: 296698 - RNA, 22 nt, Human
cugcaucaguggauaugauggu

SEQ ID NO: 296699 - RNA, 22 nt, Human
aaacugacaaucucaguccuau

SEQ ID NO: 296700 - RNA, 22 nt, Human
ucauuucagaugcauuuagaau

SEQ ID NO: 296701 - RNA, 22 nt, Human
aaucaucuccgaaaaaagagua

SEQ ID NO: 296702 - RNA, 22 nt, Human
gggaucuuguuuaauauuguuu

SEQ ID NO: 296703 - RNA, 22 nt, Human
uccaggcuagccugguagagaa

SEQ ID NO: 296704 - RNA, 20 nt, Human
gcauccagacacccagcugc

SEQ ID NO: 296705 - RNA, 22 nt, Human
caggccuuugcagggagagaga

SEQ ID NO: 296706 - RNA, 20 nt, Human
uauaaauucagagcuuuggu

SEQ ID NO: 296707 - RNA, 22 nt, Human
gagugagggcagcaggggcugc

SEQ ID NO: 296708 - RNA, 22 nt, Human
aacuuucagaauccuaugcauu

SEQ ID NO: 296709 - RNA, 20 nt, Human
accccagccccucuaucuga

SEQ ID NO: 296710 - RNA, 22 nt, Human
uuuacaguauaguaggacucau

SEQ ID NO: 296711 - RNA, 22 nt, Human
aagcugcaugaaguugaguaga

SEQ ID NO: 296712 - RNA, 22 nt, Human
gggagaagaaugugucaauugu

SEQ ID NO: 296713 - RNA, 22 nt, Human
uauuucugauugcucaugaggc

SEQ ID NO: 296714 - RNA, 22 nt, Human
agagggcugccucagucagcua

SEQ ID NO: 296715 - RNA, 22 nt, Human
agaaaugaauauguagugguua

SEQ ID NO: 296716 - RNA, 22 nt, Human
aaacaugagcauuucuguuuaa

SEQ ID NO: 296717 - RNA, 22 nt, Human
aagggcaggcagagaucauaua

SEQ ID NO: 296718 - RNA, 22 nt, Human
gauguguccuaguacggguggg

SEQ ID NO: 296719 - RNA, 20 nt, Human
uggaccugucucuuuaggga

SEQ ID NO: 296720 - RNA, 22 nt, Human
ucuggccugaaaguccaugcuu

SEQ ID NO: 296721 - RNA, 22 nt, Human
aaggugaacugguaaugacaga

SEQ ID NO: 296722 - RNA, 22 nt, Human
caauguaucaaccagaaaguuc

SEQ ID NO: 296723 - RNA, 22 nt, Human
gagcuuuacuucugacuggugc

SEQ ID NO: 296724 - RNA, 22 nt, Human
uaucucuagcgcacagaagaaa

SEQ ID NO: 296725 - RNA, 22 nt, Human
gggcccuggauuuaagcaugga

SEQ ID NO: 296726 - RNA, 22 nt, Human
ccagccacugggccacugccag

SEQ ID NO: 296727 - RNA, 22 nt, Human
acaugccaugaagguauuuuug

SEQ ID NO: 296728 - RNA, 22 nt, Human
uuucuuuugaauaguguguggu

SEQ ID NO: 296729 - RNA, 22 nt, Human
agggccagucguguauuacugu

SEQ ID NO: 296730 - RNA, 22 nt, Human
gggccaugagagguucaucaac

SEQ ID NO: 296731 - RNA, 22 nt, Human
ccugugacaaacccgccuauuc

SEQ ID NO: 296732 - RNA, 22 nt, Human
uccuggauuuaacccuggcucu

SEQ ID NO: 296733 - RNA, 22 nt, Human
ccaggcucacagcaucccagga

SEQ ID NO: 296734 - RNA, 22 nt, Human
ugcuggcuggaucagagauugg

SEQ ID NO: 296735 - RNA, 20 nt, Human
uucuggcaaacagaguucuu

SEQ ID NO: 296736 - RNA, 22 nt, Human
gggcuuggccccagaagagcua

SEQ ID NO: 296737 - RNA, 22 nt, Human
ccuguucauuuuuugacucugc

SEQ ID NO: 296738 - RNA, 22 nt, Human
auaaauaucacuguugucccuc

SEQ ID NO: 296739 - RNA, 22 nt, Human
aauaauagcagaguuuacaauc

SEQ ID NO: 296740 - RNA, 22 nt, Human
ucagaguuggccuuucuguauu

SEQ ID NO: 296741 - RNA, 22 nt, Human
ucuuucccaguagcucucccag

SEQ ID NO: 296742 - RNA, 22 nt, Human
uggcaucuccgacagucuugau

SEQ ID NO: 296743 - RNA, 22 nt, Human
guuggcagagagaagccuagca

SEQ ID NO: 296744 - RNA, 22 nt, Human
ccugccucccagagguccucua

SEQ ID NO: 296745 - RNA, 22 nt, Human
uuuaaagaaauuccucaucuuu

SEQ ID NO: 296746 - RNA, 22 nt, Human
uggacauguaaaggcucaaggu

SEQ ID NO: 296747 - RNA, 22 nt, Human
ggcacugggugagggucacugg

SEQ ID NO: 296748 - RNA, 22 nt, Human
auuugcaaagucguaucuguga

SEQ ID NO: 296749 - RNA, 22 nt, Human
cuguccuguagcuccaucaguc

SEQ ID NO: 296750 - RNA, 22 nt, Human
aagucucucauggcugacagca

SEQ ID NO: 296751 - RNA, 22 nt, Human
ucuuuauugcuacugguuuguc

SEQ ID NO: 296752 - RNA, 22 nt, Human
cacugaaacagguauugcuggu

SEQ ID NO: 296753 - RNA, 22 nt, Human
aucuggcuuaccuagggugccu

SEQ ID NO: 296754 - RNA, 17 nt, Human
auuucacuuagcaugag

SEQ ID NO: 296755 - RNA, 18 nt, Human
gccaggcaggguggggaa

SEQ ID NO: 296756 - RNA, 22 nt, Human
aaucucuucccaguaaaaaugg

SEQ ID NO: 296757 - RNA, 22 nt, Human
ccucaugcugcaucucugaggu

SEQ ID NO: 296758 - RNA, 22 nt, Human
ggguggagaggcuaaguccagu

SEQ ID NO: 296759 - RNA, 21 nt, Human
ccagagagagggaaguggguu

SEQ ID NO: 296760 - RNA, 22 nt, Human
uauuucuguuuauuuguacauc

SEQ ID NO: 296761 - RNA, 22 nt, Human
cugugucccacacgagguguau

SEQ ID NO: 296762 - RNA, 22 nt, Human
acaggcagagaacucagccaga

SEQ ID NO: 296763 - RNA, 22 nt, Human
aaauacagaguugcuuaaaagc

SEQ ID NO: 296764 - RNA, 22 nt, Human
caggaucuguuaaguuguucca

SEQ ID NO: 296765 - RNA, 22 nt, Human
ucuccuggucaccucagaaguc

SEQ ID NO: 296766 - RNA, 22 nt, Human
ugcaaacaguuaagaugcaggc

SEQ ID NO: 296767 - RNA, 22 nt, Human
uuucacaucaugggauggaagc

SEQ ID NO: 296768 - RNA, 22 nt, Human
gcuccuggucuggagcuucaag

SEQ ID NO: 296769 - RNA, 22 nt, Human
cagggaugugaugagcugagcc

SEQ ID NO: 296770 - RNA, 22 nt, Human
cuguuucuccacacucuuccca

SEQ ID NO: 296771 - RNA, 22 nt, Human
acauuuccuaacguauacacug

SEQ ID NO: 296772 - RNA, 22 nt, Human
aaaaaccucaauuacuuuugca

SEQ ID NO: 296773 - RNA, 22 nt, Human
auacacauguuauuguggaagc

SEQ ID NO: 296774 - RNA, 22 nt, Human
uucauagguuugcugugaacau

SEQ ID NO: 296775 - RNA, 22 nt, Human
aguaggcauuuaauaaacauga

SEQ ID NO: 296776 - RNA, 23 nt, Human
ucagugucuaguuguggaauuga

SEQ ID NO: 296777 - RNA, 22 nt, Human
caggcuugaagcuucagaguau

SEQ ID NO: 296778 - RNA, 23 nt, Human
agucucaagcuggagaauuaccu

SEQ ID NO: 296779 - RNA, 22 nt, Human
cuggagggagauucaaaggagg

SEQ ID NO: 296780 - RNA, 22 nt, Human
uuggcucugaaacccaagcucu

SEQ ID NO: 296781 - RNA, 22 nt, Human
ccugugccagccccuucugcug

SEQ ID NO: 296782 - RNA, 22 nt, Human
ucuguuuagaugcuuuaucugu

SEQ ID NO: 296783 - RNA, 22 nt, Human
ugauucuauggaaggcauaagg

SEQ ID NO: 296784 - RNA, 22 nt, Human
auauaaagagcuuaguauagug

SEQ ID NO: 296785 - RNA, 22 nt, Human
uugaaucucuugaaucucuguu

SEQ ID NO: 296786 - RNA, 22 nt, Human
cacacagugggaaaaccugaag

SEQ ID NO: 296787 - RNA, 22 nt, Human
aaauaaguaguuuaguguugug

SEQ ID NO: 296788 - RNA, 22 nt, Human
auuucucacucacaguccaugu

SEQ ID NO: 296789 - RNA, 22 nt, Human
uguguccuucugggagucccag

SEQ ID NO: 296790 - RNA, 22 nt, Human
cagggcagccaggccccguggg

SEQ ID NO: 296791 - RNA, 22 nt, Human
agaaaagugcucuagugagagc

SEQ ID NO: 296792 - RNA, 22 nt, Human
agugugagggguucuuugauau

SEQ ID NO: 296793 - RNA, 22 nt, Human
uggccaggcuggucuggaacgc

SEQ ID NO: 296794 - RNA, 22 nt, Human
aaaaaauuccauucugugccuu

SEQ ID NO: 296795 - RNA, 22 nt, Human
aagauuauggcagauaacaauu

SEQ ID NO: 296796 - RNA, 22 nt, Human
ggagagggggcucccugcuugg

SEQ ID NO: 296797 - RNA, 22 nt, Human
ucuggcucucauacucgccagu

SEQ ID NO: 296798 - RNA, 19 nt, Human
cacacccaugcuugccaag

SEQ ID NO: 296799 - RNA, 22 nt, Human
cacuuuaugggaagcaaaaauu

SEQ ID NO: 296800 - RNA, 22 nt, Human
ccuggcucuguccucgcgcaaa

SEQ ID NO: 296801 - RNA, 22 nt, Human
auuuagguagcugucuaagugu

SEQ ID NO: 296802 - RNA, 22 nt, Human
ugcaaacaauuuccuauaaagu

SEQ ID NO: 296803 - RNA, 22 nt, Human
aaaucagugcucauuugaaagg

SEQ ID NO: 296804 - RNA, 22 nt, Human
gcacaauaauuuuuuuaagagg

SEQ ID NO: 296805 - RNA, 22 nt, Human
auguuaaaaaccaguacaguug

SEQ ID NO: 296806 - RNA, 22 nt, Human
gcuguucacggaggaggauggg

SEQ ID NO: 296807 - RNA, 22 nt, Human
cuugagaaucuucucugaagag

SEQ ID NO: 296808 - RNA, 22 nt, Human
gaaaaucugcuuauauuauuuu

SEQ ID NO: 296809 - RNA, 22 nt, Human
cagagggacaguaugaugaaag

SEQ ID NO: 296810 - RNA, 22 nt, Human
uugggaaguuuaaugacagacu

SEQ ID NO: 296811 - RNA, 22 nt, Human
ggcuuugggcccucaagucucc

SEQ ID NO: 296812 - RNA, 22 nt, Human
ucaaaggcgguccaggaauaaa

SEQ ID NO: 296813 - RNA, 22 nt, Human
uggaucucggcaaugcgggacu

SEQ ID NO: 296814 - RNA, 22 nt, Human
uugacaaguggagauauuuaag

SEQ ID NO: 296815 - RNA, 22 nt, Human
uucugucaaaugccaguagaga

SEQ ID NO: 296816 - RNA, 22 nt, Human
gcuggaggcuggagugcagugg

SEQ ID NO: 296817 - RNA, 22 nt, Human
acugagcaggguuccgcaugga

SEQ ID NO: 296818 - RNA, 22 nt, Human
uccaggaaugugugugggcuag

SEQ ID NO: 296819 - RNA, 22 nt, Human
ugucugucuguccuucucauua

SEQ ID NO: 296820 - RNA, 22 nt, Human
agcauuuucugagaguauagau

SEQ ID NO: 296821 - RNA, 23 nt, Human
uucugucuugcugucagcuuucu

SEQ ID NO: 296822 - RNA, 22 nt, Human
aaaguagcuuaguugauauuuc

SEQ ID NO: 296823 - RNA, 19 nt, Human
ugccuggcaccagcuccac

SEQ ID NO: 296824 - RNA, 22 nt, Human
gcagacagaagcuaaguagaca

SEQ ID NO: 296825 - RNA, 22 nt, Human
caugggggucuggacaacaggc

SEQ ID NO: 296826 - RNA, 22 nt, Human
uguuggaauuaggauacagagg

SEQ ID NO: 296827 - RNA, 22 nt, Human
ccgcgagguggagguugcagug

SEQ ID NO: 296828 - RNA, 22 nt, Human
ccaagaggggaagggccgcagc

SEQ ID NO: 296829 - RNA, 22 nt, Human
ggagaggguguggaaaguuauc

SEQ ID NO: 296830 - RNA, 22 nt, Human
cagagggagcccuccaggagca

SEQ ID NO: 296831 - RNA, 22 nt, Human
ggagggaaccuuggcuggauug

SEQ ID NO: 296832 - RNA, 22 nt, Human
gaaagagaaccugggccuagau

SEQ ID NO: 296833 - RNA, 22 nt, Human
agaguggagagaaacaacucug

SEQ ID NO: 296834 - RNA, 22 nt, Human
gccagaggggcucgaaggcgcg

SEQ ID NO: 296835 - RNA, 22 nt, Human
gcggcccgagcaggacgggugg

SEQ ID NO: 296836 - RNA, 20 nt, Human
uccuccuugcagagcccaga

SEQ ID NO: 296837 - RNA, 17 nt, Human
gagguaggaagugaguc

SEQ ID NO: 296838 - RNA, 22 nt, Human
aggagcggauguguccugccag

SEQ ID NO: 296839 - RNA, 22 nt, Human
agggaugcaguaaaaacuguag

SEQ ID NO: 296840 - RNA, 22 nt, Human
gcggcccggguccccagcagca

SEQ ID NO: 296841 - RNA, 22 nt, Human
cgaggaggaaacgcggagaacu

SEQ ID NO: 296842 - RNA, 22 nt, Human
aagggugguguaggagaucaaa

SEQ ID NO: 296843 - RNA, 22 nt, Human
ggaggugacuggaucaugggca

SEQ ID NO: 296844 - RNA, 22 nt, Human
ugaguggacgugaggcugagua

SEQ ID NO: 296845 - RNA, 22 nt, Human
gaggaggcuuccgggaggcacg

SEQ ID NO: 296846 - RNA, 22 nt, Human
aagagagaacucccuucgccag

SEQ ID NO: 296847 - RNA, 22 nt, Human
caggggacacuccugcuugggc

SEQ ID NO: 296848 - RNA, 22 nt, Human
agaaagcacccugcacuuucug

SEQ ID NO: 296849 - RNA, 22 nt, Human
uggcccagcucagggugggcgg

SEQ ID NO: 296850 - RNA, 22 nt, Human
agacagcgaggacagaggggug

SEQ ID NO: 296851 - RNA, 19 nt, Human
cccagaggaaugccuggaa

SEQ ID NO: 296852 - RNA, 22 nt, Human
cuccagagagaaaggaggccgc

SEQ ID NO: 296853 - RNA, 21 nt, Human
cagaggggcuagccuggcugc

SEQ ID NO: 296854 - RNA, 22 nt, Human
auggaggaugugcagcaugggc

SEQ ID NO: 296855 - RNA, 22 nt, Human
cacagagagcuacgugcagcgu

SEQ ID NO: 296856 - RNA, 22 nt, Human
ggagaggguagggguccugccc

SEQ ID NO: 296857 - RNA, 22 nt, Human
aggagggagcuuaagccaggca

SEQ ID NO: 296858 - RNA, 22 nt, Human
cacagaggaugcccaagcgauc

SEQ ID NO: 296859 - RNA, 22 nt, Human
ggaaggguuuaagcaggagagu

SEQ ID NO: 296860 - RNA, 22 nt, Human
uggcuggggccugaauccugca

SEQ ID NO: 296861 - RNA, 22 nt, Human
uccuucccaggugucgccgccu

SEQ ID NO: 296862 - RNA, 22 nt, Human
uagcaggaggcaguuccucgcu

SEQ ID NO: 296863 - RNA, 22 nt, Human
agagcgagucuggggcucggau

SEQ ID NO: 296864 - RNA, 22 nt, Human
ccagagagggcgccaccuggag

SEQ ID NO: 296865 - RNA, 21 nt, Human
ucagagggcccuggaggcuca

SEQ ID NO: 296866 - RNA, 22 nt, Human
gccagagggauuccuggugugu

SEQ ID NO: 296867 - RNA, 22 nt, Human
ggagguggagcuggaaguucca

SEQ ID NO: 296868 - RNA, 23 nt, Human
agguggagcugugcagccggggc

SEQ ID NO: 296869 - RNA, 22 nt, Human
agagaugcuguggguagaggca

SEQ ID NO: 296870 - RNA, 22 nt, Human
caggaggaaaguuccacucaac

SEQ ID NO: 296871 - RNA, 22 nt, Human
ccagcaggagacuagcaacaua

SEQ ID NO: 296872 - RNA, 23 nt, Human
ggaagcucacguaguccugcacu

SEQ ID NO: 296873 - RNA, 22 nt, Human
ggaggaggggugacugaaugcu

SEQ ID NO: 296874 - RNA, 22 nt, Human
ggagaggggaacuuguugcuug

SEQ ID NO: 296875 - RNA, 20 nt, Human
acagaugaggaugcggaggc

SEQ ID NO: 296876 - RNA, 22 nt, Human
uaaagcaaugaaaguuuugcag

SEQ ID NO: 296877 - RNA, 22 nt, Human
guagcccaccuggggagggcga

SEQ ID NO: 296878 - RNA, 22 nt, Human
cccagaggcugaguugggagca

SEQ ID NO: 296879 - RNA, 22 nt, Human
uggaaagaggaagugcccagca

SEQ ID NO: 296880 - RNA, 22 nt, Human
gagcuccugaaacguuccugcc

SEQ ID NO: 296881 - RNA, 22 nt, Human
uaggcagggauuaggguugauu

SEQ ID NO: 296882 - RNA, 22 nt, Human
aggugggacccguggggugcga

SEQ ID NO: 296883 - RNA, 22 nt, Human
ggagggaguuucauuccugccc

SEQ ID NO: 296884 - RNA, 22 nt, Human
gagaggaagccuucuguacuug

SEQ ID NO: 296885 - RNA, 22 nt, Human
gagagaagggggauaugagccu

SEQ ID NO: 296886 - RNA, 22 nt, Human
ccagagaggccuuggcaagaca

SEQ ID NO: 296887 - RNA, 21 nt, Human
agggaaaaggcugagugaggg

SEQ ID NO: 296888 - RNA, 22 nt, Human
gaggagaggcuggacgcgguga

SEQ ID NO: 296889 - RNA, 22 nt, Human
agaacagaggccuuauguuuca

SEQ ID NO: 296890 - RNA, 23 nt, Human
ugaaagcaaugggucuauaguau

SEQ ID NO: 296891 - RNA, 22 nt, Human
uggcuuccagaacugagcaaca

SEQ ID NO: 296892 - RNA, 22 nt, Human
gcccagaguuugaagauacagu

SEQ ID NO: 296893 - RNA, 22 nt, Human
acagagggucugggcacaggac

SEQ ID NO: 296894 - RNA, 22 nt, Human
gggaggaaggcuugggugagua

SEQ ID NO: 296895 - RNA, 22 nt, Human
cgccccagccaguugagcggcg

SEQ ID NO: 296896 - RNA, 22 nt, Human
uggaaggggccaggcgcggagu

SEQ ID NO: 296897 - RNA, 22 nt, Human
agaggagguccuuuucugaugu

SEQ ID NO: 296898 - RNA, 22 nt, Human
ucuaggaguugauaaaagggcu

SEQ ID NO: 296899 - RNA, 22 nt, Human
agguggagaagagaugggcagu

SEQ ID NO: 296900 - RNA, 22 nt, Human
uuccagagaguuauuccccugg

SEQ ID NO: 296901 - RNA, 22 nt, Human
ucucuccuccacaccgggugcu

SEQ ID NO: 296902 - RNA, 22 nt, Human
acacuccagggagggagggaau

SEQ ID NO: 296903 - RNA, 22 nt, Human
cuaagaaggaggaaaagugcca

SEQ ID NO: 296904 - RNA, 22 nt, Human
ccaagaggggcagagggcugca

SEQ ID NO: 296905 - RNA, 22 nt, Human
ggggaggaagcuggaacacggg

SEQ ID NO: 296906 - RNA, 22 nt, Human
agaggaaguaaucaggaccugc

SEQ ID NO: 296907 - RNA, 22 nt, Human
ugaggaggugggcacacagagu

SEQ ID NO: 296908 - RNA, 22 nt, Human
aaaagagaaaguggcaggcuuu

SEQ ID NO: 296909 - RNA, 22 nt, Human
aggaagagcuggaccagaggac

SEQ ID NO: 296910 - RNA, 22 nt, Human
uccuuucugucuuuacucugga

SEQ ID NO: 296911 - RNA, 22 nt, Hepatitis E virus
caccgcccggucagccgucugg

SEQ ID NO: 296912 - RNA, 22 nt, Hepatitis E virus
cgcagcggcgguuccggcggug

SEQ ID NO: 296913 - RNA, 22 nt, Hepatitis E virus
agagauuguggcgcucugggcc

SEQ ID NO: 296914 - RNA, 22 nt, Hepatitis E virus
cgcagcggcgguuccggcggug

SEQ ID NO: 296915 - RNA, 22 nt, Hepatitis E virus
gaccuugguuaauguagcgacc

SEQ ID NO: 296916 - RNA, 23 nt, Hepatitis E virus
ccagacggcugaccgggcggugg

SEQ ID NO: 296917 - RNA, 22 nt, Hepatitis E virus
caccgccggaaccgccgcugcg

SEQ ID NO: 296918 - RNA, 23 nt, Hepatitis E virus
ucgcuacauuaaccaaggucaca

SEQ ID NO: 296919 - RNA, 22 nt, Hepatitis E virus
ugaccuugguccagucgagcga

SEQ ID NO: 296920 - RNA, 22 nt, Human
cccagugucaccaacaggacac

SEQ ID NO: 296921 - RNA, 22 nt, Human
ggcucugggccuccaaggucug

SEQ ID NO: 296922 - RNA, 22 nt, Human
aaauccuaauaaugcacuagug

SEQ ID NO: 296923 - RNA, 18 nt, Human
acagggaugggguaagug

SEQ ID NO: 296924 - RNA, 22 nt, Human
gcagcuuucuacuuccuacagc

SEQ ID NO: 296925 - RNA, 22 nt, Human
aggcagguguuaacccucugag

SEQ ID NO: 296926 - RNA, 22 nt, Human
aagggcucugcugucucucccc

SEQ ID NO: 296927 - RNA, 22 nt, Human
gcucuggccagacccucagugg

SEQ ID NO: 296928 - RNA, 22 nt, Human
ugguccugcccacgcccaucug

SEQ ID NO: 296929 - RNA, 22 nt, Human
uaguuuacuguucacuuugccc

SEQ ID NO: 296930 - RNA, 22 nt, Human
aagucacagaguuggaagucag

SEQ ID NO: 296931 - RNA, 22 nt, Human
uacauguguucuguuucaaguu

SEQ ID NO: 296932 - RNA, 22 nt, Human
uuguuucaggaugguuuguuac

SEQ ID NO: 296933 - RNA, 20 nt, Human
gcauguguauggaaggggga

SEQ ID NO: 296934 - RNA, 22 nt, Human
gcagguguuuuaagacauugaa

SEQ ID NO: 296935 - RNA, 22 nt, Human
ugguggggauucccucccuggc

SEQ ID NO: 296936 - RNA, 18 nt, Human
gcuuuauuucuuggggaa

SEQ ID NO: 296937 - RNA, 22 nt, Human
ggucucuguugccuccaucaag

SEQ ID NO: 296938 - RNA, 22 nt, Human
aagggcaggugggcauuucugg

SEQ ID NO: 296939 - RNA, 22 nt, Human
acuuccuugucaggugcaucau

SEQ ID NO: 296940 - RNA, 22 nt, Human
uaugugucccuugguguagcaa

SEQ ID NO: 296941 - RNA, 22 nt, Human
aagggcagggaguuugugucua

SEQ ID NO: 296942 - RNA, 22 nt, Human
ugugugcuaauguaugcucuaa

SEQ ID NO: 296943 - RNA, 22 nt, Human
acuggguguauuagugguguuu

SEQ ID NO: 296944 - RNA, 22 nt, Human
agcugccagcaaguuucaaaca

SEQ ID NO: 296945 - RNA, 22 nt, Human
ucugcuucuccuacuucauggg

SEQ ID NO: 296946 - RNA, 22 nt, Human
cucagccaugggguggaucagc

SEQ ID NO: 296947 - RNA, 22 nt, Human
cccaggaguaagugacauuguu

SEQ ID NO: 296948 - RNA, 22 nt, Human
uuucugaauaacucuaugauau

SEQ ID NO: 296949 - RNA, 22 nt, Human
ugagcaucuuuuuacagguuua

SEQ ID NO: 296950 - RNA, 22 nt, Human
acauguguaagaugugauauau

SEQ ID NO: 296951 - RNA, 22 nt, Human
uucuucuucauuucugacgaug

SEQ ID NO: 296952 - RNA, 22 nt, Human
gcagggaccuugcccacccucc

SEQ ID NO: 296953 - RNA, 19 nt, Human
uccagaugauauggauuac

SEQ ID NO: 296954 - RNA, 18 nt, Human
uuuauauggauagagacc

SEQ ID NO: 296955 - RNA, 22 nt, Human
gauugcugugcgccccaggugu

SEQ ID NO: 296956 - RNA, 22 nt, Human
aaaauacuguggaguguugaaa

SEQ ID NO: 296957 - RNA, 22 nt, Human
uuucaguuuaugucuugaauua

SEQ ID NO: 296958 - RNA, 20 nt, Human
acuguucaagggccuggugg

SEQ ID NO: 296959 - RNA, 22 nt, Human
cagacagggcccugugauggua

SEQ ID NO: 296960 - RNA, 22 nt, Human
agaggugacauaggagaggcuc

SEQ ID NO: 296961 - RNA, 22 nt, Human
ccuggguggcugccugccuuuc

SEQ ID NO: 296962 - RNA, 22 nt, Human
ggcagggaguggagacucccua

SEQ ID NO: 296963 - RNA, 22 nt, Human
auguucuuccaaaucuguaaca

SEQ ID NO: 296964 - RNA, 22 nt, Human
acucuacuguaguaugggcacu

SEQ ID NO: 296965 - RNA, 22 nt, Human
ucugaagauggaggaacuuaga

SEQ ID NO: 296966 - RNA, 21 nt, Human
aagugguuuagguuaccgggg

SEQ ID NO: 296967 - RNA, 21 nt, Human
uacagaaugcgcuucagucug

SEQ ID NO: 296968 - RNA, 22 nt, Human
aucuguaaaugcaaauguagcu

SEQ ID NO: 296969 - RNA, 22 nt, Human
ucaggugggucuacaauuaguu

SEQ ID NO: 296970 - RNA, 22 nt, Human
uaauuucuggagggagaaagag

SEQ ID NO: 296971 - RNA, 22 nt, Human
agagaggcgaguuaccugugcu

SEQ ID NO: 296972 - RNA, 22 nt, Human
uuccuucuuguaaugaucugcc

SEQ ID NO: 296973 - RNA, 22 nt, Human
aaacaugaauagauauuaaaca

SEQ ID NO: 296974 - RNA, 22 nt, Human
ucugggauuuuauagacaugcu

SEQ ID NO: 296975 - RNA, 22 nt, Human
uucuauugacauucacuguaac

SEQ ID NO: 296976 - RNA, 22 nt, Human
ugcuuccugaggccgucuucuc

SEQ ID NO: 296977 - RNA, 22 nt, Human
ucaggugggcguuccggugcgg

SEQ ID NO: 296978 - RNA, 22 nt, Human
guuuacuguuuucugauaagug

SEQ ID NO: 296979 - RNA, 22 nt, Human
aaagcugcuaugaacauucuau

SEQ ID NO: 296980 - RNA, 22 nt, Human
aguuugaauugaaaugcagaug

SEQ ID NO: 296981 - RNA, 22 nt, Human
aaguuuuccuguguccaagaug

SEQ ID NO: 296982 - RNA, 22 nt, Human
auuuaagacugacuucaccagu

SEQ ID NO: 296983 - RNA, 21 nt, Human
agacaugugaacuaaagguga

SEQ ID NO: 296984 - RNA, 22 nt, Human
aauugcuucauuaacauuuagg

SEQ ID NO: 296985 - RNA, 19 nt, Human
agaaauagccuuccuuguc

SEQ ID NO: 296986 - RNA, 22 nt, Human
ugucugaugauagugucucucc

SEQ ID NO: 296987 - RNA, 22 nt, Human
gccgugcgugcgcaggugcugu

SEQ ID NO: 296988 - RNA, 22 nt, Human
acagguggcauaggcaguuuga

SEQ ID NO: 296989 - RNA, 22 nt, Human
acagguguugacucacaggccc

SEQ ID NO: 296990 - RNA, 22 nt, Human
gucaccucucaucacaugcuac

SEQ ID NO: 296991 - RNA, 22 nt, Human
ggcuuuauuugcagccauuguu

SEQ ID NO: 296992 - RNA, 22 nt, Human
uggcaaaguuuaucaggaauau

SEQ ID NO: 296993 - RNA, 22 nt, Human
ucucccucuuugucugcuuugg

SEQ ID NO: 296994 - RNA, 22 nt, Human
uuagggacaaauuugcagaacc

SEQ ID NO: 296995 - RNA, 22 nt, Human
ugcuagggauauaguggcgagu

SEQ ID NO: 296996 - RNA, 22 nt, Human
uagaaacagcauauauuagccc

SEQ ID NO: 296997 - RNA, 21 nt, Human
ucuggguguaaaucuuauuug

SEQ ID NO: 296998 - RNA, 22 nt, Human
aacaaucaaguuucuaaaugac

SEQ ID NO: 296999 - RNA, 19 nt, Human
cuguugcuggggcucucuu

SEQ ID NO: 297000 - RNA, 22 nt, Human
uggcagguuuccuccucauagu

SEQ ID NO: 297001 - RNA, 22 nt, Human
acaauauuguacccagaaguuu

SEQ ID NO: 297002 - RNA, 22 nt, Human
agcugcaagaagaggucccuga

SEQ ID NO: 297003 - RNA, 22 nt, Human
uucuucaaaacaacacuggccu

SEQ ID NO: 297004 - RNA, 22 nt, Human
ucagggcauccauugccuguug

SEQ ID NO: 297005 - RNA, 22 nt, Human
uguaauuaaacugaagacagaa

SEQ ID NO: 297006 - RNA, 22 nt, Human
gcagguggugggggagccguuc

SEQ ID NO: 297007 - RNA, 22 nt, Human
ucuuauugucuagauugagaug

SEQ ID NO: 297008 - RNA, 22 nt, Human
auugcuugaauuaccauguaau

SEQ ID NO: 297009 - RNA, 22 nt, Human
ccugcagguugcagaggcggaa

SEQ ID NO: 297010 - RNA, 22 nt, Human
uaugcacacauguaugcaugug

SEQ ID NO: 297011 - RNA, 22 nt, Human
auauuaggcaaggagauuauuu

SEQ ID NO: 297012 - RNA, 22 nt, Human
agcaggugucggcgagggucuu

SEQ ID NO: 297013 - RNA, 22 nt, Human
cuuucuuuguccaccaacaaug

SEQ ID NO: 297014 - RNA, 22 nt, Human
gagaugguugcaauaguuuaaa

SEQ ID NO: 297015 - RNA, 23 nt, Human
gggaccugguaggaggugauugg

SEQ ID NO: 297016 - RNA, 22 nt, Human
gcugggaagugcaagaucaagg

SEQ ID NO: 297017 - RNA, 22 nt, Human
cugcagggaacugaggcccaga

SEQ ID NO: 297018 - RNA, 22 nt, Human
gcuguucagaugcgauucagga

SEQ ID NO: 297019 - RNA, 19 nt, Human
ccuguucaugacucugucc

SEQ ID NO: 297020 - RNA, 20 nt, Human
acuuuacugagcuguaauuc

SEQ ID NO: 297021 - RNA, 22 nt, Human
uuugcucaguucucuguauuuu

SEQ ID NO: 297022 - RNA, 22 nt, Human
gcaaaucaccaccuagcuggau

SEQ ID NO: 297023 - RNA, 18 nt, Human
uggcagguagacucaggu

SEQ ID NO: 297024 - RNA, 22 nt, Human
aauuuccagaccccauccacag

SEQ ID NO: 297025 - RNA, 22 nt, Human
agcagggcucugccaugggccc

SEQ ID NO: 297026 - RNA, 22 nt, Human
uguauacauuuaacuagauaga

SEQ ID NO: 297027 - RNA, 22 nt, Human
ucagguguauugaugucuguga

SEQ ID NO: 297028 - RNA, 22 nt, Human
gacauuagacuaauguagcauu

SEQ ID NO: 297029 - RNA, 22 nt, Human
ucagcuuucucucgccaucagg

SEQ ID NO: 297030 - RNA, 20 nt, Human
aagauucauuguaauuaggg

SEQ ID NO: 297031 - RNA, 22 nt, Human
aagggcuccaagagguagcugg

SEQ ID NO: 297032 - RNA, 22 nt, Human
uggcaaaggcgcucacaugccu

SEQ ID NO: 297033 - RNA, 18 nt, Human
ggacaucaucaggugcuu

SEQ ID NO: 297034 - RNA, 22 nt, Human
caguuucuuuccauuguuaccu

SEQ ID NO: 297035 - RNA, 22 nt, Human
uacagagacuuuauggcacaaa

SEQ ID NO: 297036 - RNA, 22 nt, Human
gcugguccacucccuggaggcu

SEQ ID NO: 297037 - RNA, 22 nt, Human
uugcagggucccagaggccugg

SEQ ID NO: 297038 - RNA, 22 nt, Human
ccuggaggggaccaggaccagg

SEQ ID NO: 297039 - RNA, 22 nt, Human
gguggggcccaggcaucugaug

SEQ ID NO: 297040 - RNA, 22 nt, Human
cagcuugaaauauuaggagaug

SEQ ID NO: 297041 - RNA, 22 nt, Human
cuucuuccugcugcagccucca

SEQ ID NO: 297042 - RNA, 22 nt, Human
uugcugggcucuucaacacaca

SEQ ID NO: 297043 - RNA, 22 nt, Human
uccuggcugccgucguccugcg

SEQ ID NO: 297044 - RNA, 22 nt, Human
uugcagggaaacaguuuaggaa

SEQ ID NO: 297045 - RNA, 22 nt, Human
gagcuuuaagggauaaaaugau

SEQ ID NO: 297046 - RNA, 22 nt, Human
ucauguguccuaguucauauaa

SEQ ID NO: 297047 - RNA, 22 nt, Human
uggaggaaucagggcuuaggcu

SEQ ID NO: 297048 - RNA, 22 nt, Human
ugcaggugagugcaggggcuca

SEQ ID NO: 297049 - RNA, 22 nt, Human
uaggugucaggccuccuccagc

SEQ ID NO: 297050 - RNA, 22 nt, Human
acaauguguuuuuauacauuug

SEQ ID NO: 297051 - RNA, 22 nt, Human
ggcaggcagauggcugcaccaa

SEQ ID NO: 297052 - RNA, 22 nt, Human
uacccaggggcugagcagaggu

SEQ ID NO: 297053 - RNA, 22 nt, Human
augcauugucugguuucauuuu

SEQ ID NO: 297054 - RNA, 22 nt, Human
aggcagguguugggagacacca

SEQ ID NO: 297055 - RNA, 22 nt, Human
aacaguaaagacagaauuuauc

SEQ ID NO: 297056 - RNA, 20 nt, Human
gcagggcaucuuggccccca

SEQ ID NO: 297057 - RNA, 22 nt, Human
caaggcauuguguaagcacuug

SEQ ID NO: 297058 - RNA, 17 nt, Human
acaggccugcuugcacu

SEQ ID NO: 297059 - RNA, 22 nt, Human
aauuguaagugcugaguuaagg

SEQ ID NO: 297060 - RNA, 22 nt, Human
aguuauaugugaaaacacguau

SEQ ID NO: 297061 - RNA, 22 nt, Human
acuuaaaaacagauccagcagg

SEQ ID NO: 297062 - RNA, 22 nt, Human
ccuguucaagguauuaauuauc

SEQ ID NO: 297063 - RNA, 22 nt, Human
agcagguggaaaauucuuauca

SEQ ID NO: 297064 - RNA, 22 nt, Human
aucuuucagggccauuuguauu

SEQ ID NO: 297065 - RNA, 22 nt, Human
ucagacaggcuucuuucucccu

SEQ ID NO: 297066 - RNA, 22 nt, Human
cacauaauaaauguuccugaug

SEQ ID NO: 297067 - RNA, 22 nt, Human
ucgggcucgcucuccuagcgga

SEQ ID NO: 297068 - RNA, 22 nt, Human
aguguccucuauuaugacuuua

SEQ ID NO: 297069 - RNA, 22 nt, Human
ugcuuuauguuaucagaagggu

SEQ ID NO: 297070 - RNA, 22 nt, Human
auaaacagaguaguugcuacug

SEQ ID NO: 297071 - RNA, 22 nt, Human
gacaugugagcaagcgugcggc

SEQ ID NO: 297072 - RNA, 22 nt, Human
caugcagcaggaucucauuccc

SEQ ID NO: 297073 - RNA, 23 nt, Human
aagugguuuugaacccggacccu

SEQ ID NO: 297074 - RNA, 22 nt, Human
aagggcuccacuugaaucacac

SEQ ID NO: 297075 - RNA, 22 nt, Human
uccuuccugcaggccaaguccu

SEQ ID NO: 297076 - RNA, 22 nt, Human
aaagcagaacugagagagcugg

SEQ ID NO: 297077 - RNA, 15 nt, Human
uugcuuuaagacaug

SEQ ID NO: 297078 - RNA, 17 nt, Human
cacaggugugguuugag

SEQ ID NO: 297079 - RNA, 21 nt, Human
agaaaaacacgauauaagccc

SEQ ID NO: 297080 - RNA, 22 nt, Human
gcaggcagagagggguuuccag

SEQ ID NO: 297081 - RNA, 22 nt, Human
gaggcaggcacuguuaucagca

SEQ ID NO: 297082 - RNA, 22 nt, Human
uguuucuuuguagauauucuuu

SEQ ID NO: 297083 - RNA, 22 nt, Human
auuugcuggugaauguauagcu

SEQ ID NO: 297084 - RNA, 22 nt, Human
gaggugucuggccuuuguagga

SEQ ID NO: 297085 - RNA, 22 nt, Human
aacaucuacuaagugccaggca

SEQ ID NO: 297086 - RNA, 22 nt, Human
acacauauucauauguacuuac

SEQ ID NO: 297087 - RNA, 22 nt, Human
aggcugagcuggcccuugaaau

SEQ ID NO: 297088 - RNA, 22 nt, Human
ucugcgcccugucgccugcucc

SEQ ID NO: 297089 - RNA, 21 nt, Human
agccugcaauguagguaccgg

SEQ ID NO: 297090 - RNA, 22 nt, Human
gcagcuuuagaaacaagggcug

SEQ ID NO: 297091 - RNA, 22 nt, Human
cagagacuggagugcaguggcg

SEQ ID NO: 297092 - RNA, 22 nt, Human
uggaaugagcuggcuaauaacc

SEQ ID NO: 297093 - RNA, 22 nt, Human
cucuggaauuaaggaagccugu

SEQ ID NO: 297094 - RNA, 22 nt, Human
ucagaaauguaagcugaugacu

SEQ ID NO: 297095 - RNA, 21 nt, Human
uauacaugugugcauacgugu

SEQ ID NO: 297096 - RNA, 22 nt, Human
uuacaagauaaccugaugcugu

SEQ ID NO: 297097 - RNA, 22 nt, Human
acuuggcaaguaucuauaaagu

SEQ ID NO: 297098 - RNA, 22 nt, Human
aauguuuuguaugccucugagc

SEQ ID NO: 297099 - RNA, 22 nt, Human
gcauguguuagagugugcaugc

SEQ ID NO: 297100 - RNA, 22 nt, Human
uuugcagugucagcuucugugu

SEQ ID NO: 297101 - RNA, 22 nt, Human
caguauuuauggcuugaguauu

SEQ ID NO: 297102 - RNA, 22 nt, Human
ucuugauuacaaauaacaucau

SEQ ID NO: 297103 - RNA, 22 nt, Human
gcugggucuggcugugagccgg

SEQ ID NO: 297104 - RNA, 22 nt, Human
guguguccaaggcacggaugac

SEQ ID NO: 297105 - RNA, 22 nt, Human
auuucccaugugaaucaauugg

SEQ ID NO: 297106 - RNA, 22 nt, Human
ucagagagguuaaauaucuugu

SEQ ID NO: 297107 - RNA, 19 nt, Human
ugcagccacgugagagacu

SEQ ID NO: 297108 - RNA, 22 nt, Human
ucuuauugugaugaugaagaac

SEQ ID NO: 297109 - RNA, 22 nt, Human
acaagcaugggcuuugacauca

SEQ ID NO: 297110 - RNA, 22 nt, Human
guuagggagggugcauaugugu

SEQ ID NO: 297111 - RNA, 22 nt, Human
gauuuauuuuuaaucagcaggg

SEQ ID NO: 297112 - RNA, 22 nt, Human
gcacccaguuugucucaggguu

SEQ ID NO: 297113 - RNA, 22 nt, Human
acuguccucgaaguaccugugc

SEQ ID NO: 297114 - RNA, 22 nt, Human
uacccagcaaucccuagagguu

SEQ ID NO: 297115 - RNA, 22 nt, Human
cuucuucaauagcaagcgcaua

SEQ ID NO: 297116 - RNA, 22 nt, Human
aguaccaugcuuccugacuggu

SEQ ID NO: 297117 - RNA, 18 nt, Human
acugaagaugcaagaccu

SEQ ID NO: 297118 - RNA, 22 nt, Human
auucuucaaagagugucaaagu

SEQ ID NO: 297119 - RNA, 22 nt, Human
aaagcugcugugaaugguuugg

SEQ ID NO: 297120 - RNA, 22 nt, Human
ugcuuuauuuuaaauaugccau

SEQ ID NO: 297121 - RNA, 22 nt, Human
cugggugaauuugaaggaaagg

SEQ ID NO: 297122 - RNA, 22 nt, Human
uguguccugcagacagacucag

SEQ ID NO: 297123 - RNA, 22 nt, Human
aguugaauaauuagacauaucu

SEQ ID NO: 297124 - RNA, 22 nt, Human
uuucacaacugcuuauuugaga

SEQ ID NO: 297125 - RNA, 22 nt, Human
cuuucacagcacaagccugccu

SEQ ID NO: 297126 - RNA, 22 nt, Human
aagggcagcuuaaauugguagc

SEQ ID NO: 297127 - RNA, 22 nt, Human
cagcuugugcaaagguccuggg

SEQ ID NO: 297128 - RNA, 22 nt, Human
cuucuuucccaggcauguuuua

SEQ ID NO: 297129 - RNA, 22 nt, Human
uucccaguuagucauuuuuaca

SEQ ID NO: 297130 - RNA, 22 nt, Human
uuugacucuugucucuuguuag

SEQ ID NO: 297131 - RNA, 22 nt, Human
gcuggagguagggagguccugu

SEQ ID NO: 297132 - RNA, 22 nt, Human
guucuucaggccauccucccag

SEQ ID NO: 297133 - RNA, 22 nt, Human
gaucugaaucaauagaauaacu

SEQ ID NO: 297134 - RNA, 22 nt, Human
accugcaguggccacuccuaau

SEQ ID NO: 297135 - RNA, 21 nt, Human
ccuguucacagaucuguaacu

SEQ ID NO: 297136 - RNA, 22 nt, Human
acaacauuauacauagaaagcu

SEQ ID NO: 297137 - RNA, 22 nt, Human
ccaugugucuccccuggaagua

SEQ ID NO: 297138 - RNA, 22 nt, Human
gcaggugguggggcuaugaucu

SEQ ID NO: 297139 - RNA, 22 nt, Human
auuuauugagagggaggggaau

SEQ ID NO: 297140 - RNA, 22 nt, Human
gcuuggaaguaggauugggaga

SEQ ID NO: 297141 - RNA, 20 nt, Human
auuucaguguuugcaauuuc

SEQ ID NO: 297142 - RNA, 22 nt, Human
cauaaguuggguaauauaauga

SEQ ID NO: 297143 - RNA, 22 nt, Human
uccaguggcaccuuggcccuca

SEQ ID NO: 297144 - RNA, 22 nt, Human
ugcuggguuaccuaagccuaaa

SEQ ID NO: 297145 - RNA, 22 nt, Human
uauugcuggaaaauggugugau

SEQ ID NO: 297146 - RNA, 22 nt, Human
uguccucaucuuuuccagaaau

SEQ ID NO: 297147 - RNA, 22 nt, Human
ucuuuauugcuacugguuuguc

SEQ ID NO: 297148 - RNA, 22 nt, Human
ugcuguggcaguuuauguauag

SEQ ID NO: 297149 - RNA, 21 nt, Human
ugacagguauuuaucuggaaa

SEQ ID NO: 297150 - RNA, 22 nt, Human
gacccugccaugagugacaggg

SEQ ID NO: 297151 - RNA, 22 nt, Human
cauuuauugaguggccacagug

SEQ ID NO: 297152 - RNA, 22 nt, Human
gaugaggucauguuuuacauau

SEQ ID NO: 297153 - RNA, 22 nt, Human
agaggcaugcacagaugugcug

SEQ ID NO: 297154 - RNA, 22 nt, Human
uguggggcugugguguucuucu

SEQ ID NO: 297155 - RNA, 22 nt, Human
ucaaagagcuauucaguugugg

SEQ ID NO: 297156 - RNA, 22 nt, Human
guccuucaagaguccccuacug

SEQ ID NO: 297157 - RNA, 22 nt, Human
auacuaaaguauagaacuuagu

SEQ ID NO: 297158 - RNA, 20 nt, Human
ccuguucacugcgcaguuuc

SEQ ID NO: 297159 - RNA, 22 nt, Human
uugcugaucugaaacguuacug

SEQ ID NO: 297160 - RNA, 22 nt, Human
cuccucagcugggaggaguccc

SEQ ID NO: 297161 - RNA, 22 nt, Human
uggcagguagucagaggcgaca

SEQ ID NO: 297162 - RNA, 22 nt, Human
aagguggugcuucugcuccucu

SEQ ID NO: 297163 - RNA, 22 nt, Human
gaaggcugcgaggggagugccg

SEQ ID NO: 297164 - RNA, 22 nt, Human
aauguuuucucugugaacacau

SEQ ID NO: 297165 - RNA, 22 nt, Human
uggcaauguuagcaaagcauuu

SEQ ID NO: 297166 - RNA, 22 nt, Human
aacacaaagaagcugcaggauc

SEQ ID NO: 297167 - RNA, 22 nt, Human
guucuucagaggggaaagaacc

SEQ ID NO: 297168 - RNA, 22 nt, Human
gcagggaccucacuacccccag

SEQ ID NO: 297169 - RNA, 22 nt, Human
ucuggguguagggccuggcaac

SEQ ID NO: 297170 - RNA, 22 nt, Human
aagggcucuguugccauuucag

SEQ ID NO: 297171 - RNA, 21 nt, Human
uuucuggguggcugcauagug

SEQ ID NO: 297172 - RNA, 22 nt, Human
cuugaaucuucugaguauuugc

SEQ ID NO: 297173 - RNA, 22 nt, Human
uugcuuuaccugugguauauuu

SEQ ID NO: 297174 - RNA, 22 nt, Human
auaugcauuuaccuggcauaua

SEQ ID NO: 297175 - RNA, 22 nt, Human
agcagcauuaugauauaucuua

SEQ ID NO: 297176 - RNA, 22 nt, Human
agucuucacucuucacuacuau

SEQ ID NO: 297177 - RNA, 22 nt, Human
uaccucaaguuccaggaaagcg

SEQ ID NO: 297178 - RNA, 22 nt, Human
aaauguuucuacuugugagcau

SEQ ID NO: 297179 - RNA, 22 nt, Human
ggcuuuauuaagcaggguaagu

SEQ ID NO: 297180 - RNA, 22 nt, Human
auguucuuguucaaaugucagu

SEQ ID NO: 297181 - RNA, 21 nt, Human
uuauugagacauuuguggaaa

SEQ ID NO: 297182 - RNA, 22 nt, Human
uguuuagcauaaagauuuucca

SEQ ID NO: 297183 - RNA, 22 nt, Human
gcagguguucucagaggaggcu

SEQ ID NO: 297184 - RNA, 21 nt, Human
cagaggcaggcucugugugug

SEQ ID NO: 297185 - RNA, 22 nt, Human
acaaggcuguuggucacaaacc

SEQ ID NO: 297186 - RNA, 22 nt, Human
uucaugaaaguguaucuugugg

SEQ ID NO: 297187 - RNA, 22 nt, Human
uuuacauguaauguuauacaaa

SEQ ID NO: 297188 - RNA, 22 nt, Human
auuuggaaacaauuauauucuu

SEQ ID NO: 297189 - RNA, 22 nt, Human
cuucauuaaugucuauaaguuu

SEQ ID NO: 297190 - RNA, 22 nt, Human
ucugggugcuacaaacaguauu

SEQ ID NO: 297191 - RNA, 22 nt, Human
ggaugaggaaaccacagugucc

SEQ ID NO: 297192 - RNA, 22 nt, Human
agcuuuauuugucauucacggc

SEQ ID NO: 297193 - RNA, 23 nt, Human
ccaggccucucagagggugugcc

SEQ ID NO: 297194 - RNA, 23 nt, Human
ugguggcagaaguagcagaugac

SEQ ID NO: 297195 - RNA, 22 nt, Human
cacaugugugcugaggacugug

SEQ ID NO: 297196 - RNA, 17 nt, Human
gagccacccugugcgag

SEQ ID NO: 297197 - RNA, 22 nt, Human
ucagcuuuccugcagcuaaggg

SEQ ID NO: 297198 - RNA, 22 nt, Human
acagcaugucuaguuaaauacu

SEQ ID NO: 297199 - RNA, 23 nt, Human
uuuugacaggaggaagguguuga

SEQ ID NO: 297200 - RNA, 22 nt, Human
uggcaaaggaaccuauuuuaaa

SEQ ID NO: 297201 - RNA, 22 nt, Human
ugaccauuugaucuacauucca

SEQ ID NO: 297202 - RNA, 22 nt, Human
uguguccuuaugaaaauacugu

SEQ ID NO: 297203 - RNA, 22 nt, Human
gggaccuggucuagcacugagc

SEQ ID NO: 297204 - RNA, 22 nt, Human
cccaguuucaacuuuccagugg

SEQ ID NO: 297205 - RNA, 22 nt, Human
uaggcuaggcugaagguuuugg

SEQ ID NO: 297206 - RNA, 22 nt, Human
agagcugaauuuggguggugga

SEQ ID NO: 297207 - RNA, 22 nt, Human
ccuuccuugagaagcaauuccu

SEQ ID NO: 297208 - RNA, 22 nt, Human
cuucacauguuggaguccuuug

SEQ ID NO: 297209 - RNA, 22 nt, Human
gaauuguaaguaccagcaugcu

SEQ ID NO: 297210 - RNA, 22 nt, Human
uucuucuugaaacuuuagguug

SEQ ID NO: 297211 - RNA, 22 nt, Human
auuucaguagaaaaucuugauu

SEQ ID NO: 297212 - RNA, 22 nt, Human
ggaagagaauuucucucuuuuu

SEQ ID NO: 297213 - RNA, 22 nt, Human
cagggcaggaugcugugauuau

SEQ ID NO: 297214 - RNA, 22 nt, Human
uguccucacaugguggggagag

SEQ ID NO: 297215 - RNA, 22 nt, Human
aaauuguugaucuacaguaagg

SEQ ID NO: 297216 - RNA, 22 nt, Human
uccugcagugugucuccugcac

SEQ ID NO: 297217 - RNA, 22 nt, Human
caugaguucaucugcuucucuu

SEQ ID NO: 297218 - RNA, 22 nt, Human
acaugauuuuuaaagagauaau

SEQ ID NO: 297219 - RNA, 22 nt, Human
uccaugaggcagggaggcuggc

SEQ ID NO: 297220 - RNA, 22 nt, Human
caaaugcagauucaggaguucu

SEQ ID NO: 297221 - RNA, 22 nt, Human
uauugcuggggugggccauguu

SEQ ID NO: 297222 - RNA, 23 nt, Human
uuauugaggguguagauuggugu

SEQ ID NO: 297223 - RNA, 22 nt, Human
uugcuuuaacuaguaaaugggg

SEQ ID NO: 297224 - RNA, 22 nt, Human
uaggugucuguccugggcugug

SEQ ID NO: 297225 - RNA, 22 nt, Human
ccaggugugauuuggcaguguc

SEQ ID NO: 297226 - RNA, 22 nt, Human
uccagaauacucugaaaucauu

SEQ ID NO: 297227 - RNA, 22 nt, Human
uugcagggcaaauggucagaua

SEQ ID NO: 297228 - RNA, 22 nt, Human
ugacagaccacugcaacucugu

SEQ ID NO: 297229 - RNA, 22 nt, Human
gcaggugucaguccccaaggug

SEQ ID NO: 297230 - RNA, 22 nt, Human
cuuaaagaugucaaggcuguuu

SEQ ID NO: 297231 - RNA, 22 nt, Human
gggacaugaagcaucggaggca

SEQ ID NO: 297232 - RNA, 22 nt, Human
ggcuuuauuuugcaugaaugcu

SEQ ID NO: 297233 - RNA, 22 nt, Human
uuugcuuugacugucagcaagu

SEQ ID NO: 297234 - RNA, 22 nt, Human
acuuuugaagaauuaugcaaaa

SEQ ID NO: 297235 - RNA, 22 nt, Human
uucaaaauuguucuaagcucug

SEQ ID NO: 297236 - RNA, 22 nt, Human
ucagcuuuuaaaaacaagaagu

SEQ ID NO: 297237 - RNA, 18 nt, Human
gccugcaggcacgggggu

SEQ ID NO: 297238 - RNA, 21 nt, Human
ucagcuuugcaacugcacauc

SEQ ID NO: 297239 - RNA, 22 nt, Human
ugacauguauguuguuggcaug

SEQ ID NO: 297240 - RNA, 22 nt, Human
cagacagggaccucgcuccaga

SEQ ID NO: 297241 - RNA, 22 nt, Human
agguggaaauggcuuuccuagg

SEQ ID NO: 297242 - RNA, 22 nt, Human
auguguccaaggccacaauagc

SEQ ID NO: 297243 - RNA, 22 nt, Human
ucccaguggugggugcacauuu

SEQ ID NO: 297244 - RNA, 22 nt, Human
uuugucaucccuuuugaaacug

SEQ ID NO: 297245 - RNA, 22 nt, Human
uuccagagaaaagguuuauuuc

SEQ ID NO: 297246 - RNA, 17 nt, Human
ucagcaaagacaaagga

SEQ ID NO: 297247 - RNA, 22 nt, Human
ccuggaggcucugggagggcag

SEQ ID NO: 297248 - RNA, 21 nt, Human
auacauucuauuaagcauuua

SEQ ID NO: 297249 - RNA, 22 nt, Human
uagacauuuucucaacaucucu

SEQ ID NO: 297250 - RNA, 22 nt, Human
cccagcuucugagggggccuug

SEQ ID NO: 297251 - RNA, 22 nt, Human
ccagggcagcagaauuggggca

SEQ ID NO: 297252 - RNA, 18 nt, Human
auggucucauacugggag

SEQ ID NO: 297253 - RNA, 22 nt, Human
cauuuauuggcauguaguaggu

SEQ ID NO: 297254 - RNA, 22 nt, Human
augugucuuugagacucugcua

SEQ ID NO: 297255 - RNA, 22 nt, Human
uugcagcuucuaccacuguuuc

SEQ ID NO: 297256 - RNA, 22 nt, Human
gaggugucaggguagucaugau

SEQ ID NO: 297257 - RNA, 22 nt, Human
uguacauagaaaggauacagcu

SEQ ID NO: 297258 - RNA, 22 nt, Human
gcaggcaguuugcuuuucccuc

SEQ ID NO: 297259 - RNA, 22 nt, Human
uuuuaccugaaccacacaguau

SEQ ID NO: 297260 - RNA, 22 nt, Human
agcagggcagcuuuuuucagaa

SEQ ID NO: 297261 - RNA, 21 nt, Human
gggugggaggacacagcaggc

SEQ ID NO: 297262 - RNA, 22 nt, Human
accaggcacuccugaggucuga

SEQ ID NO: 297263 - RNA, 22 nt, Human
ugcaaaaauugcuggaaucuuu

SEQ ID NO: 297264 - RNA, 22 nt, Human
ggacauuuuucuuccuacaaug

SEQ ID NO: 297265 - RNA, 22 nt, Human
cuuuaugguaaguauagaugac

SEQ ID NO: 297266 - RNA, 22 nt, Human
ggcagguggccaagugucuaag

SEQ ID NO: 297267 - RNA, 22 nt, Human
gucacuuuacacuccuacuaaa

SEQ ID NO: 297268 - RNA, 22 nt, Human
uacagauauagagauuuauaga

SEQ ID NO: 297269 - RNA, 22 nt, Human
cagcuauuuucucauuaaggau

SEQ ID NO: 297270 - RNA, 22 nt, Human
uaggugucuugucacuaccguu

SEQ ID NO: 297271 - RNA, 23 nt, Human
ugcugcccacucuuccagcccuc

SEQ ID NO: 297272 - RNA, 14 nt, Human
gcaggcagaucacu

SEQ ID NO: 297273 - RNA, 22 nt, Human
uguaaaguuacuuuugaaagga

SEQ ID NO: 297274 - RNA, 22 nt, Human
acaggcagauuaaggguaggca

SEQ ID NO: 297275 - RNA, 22 nt, Human
ucuggguggcuucagaggccac

SEQ ID NO: 297276 - RNA, 22 nt, Human
cucuucaaaagucuaauccuua

SEQ ID NO: 297277 - RNA, 22 nt, Human
cacaugugcaaauacugaggcu

SEQ ID NO: 297278 - RNA, 22 nt, Human
uccugcugccauuucaagugcu

SEQ ID NO: 297279 - RNA, 22 nt, Human
cuauuucaaggcccagauauga

SEQ ID NO: 297280 - RNA, 22 nt, Human
aguacauauaguaauuuagcca

SEQ ID NO: 297281 - RNA, 22 nt, Human
ucuguccucuuugaagcugcuc

SEQ ID NO: 297282 - RNA, 22 nt, Human
cagagcauuuggaagccacgug

SEQ ID NO: 297283 - RNA, 22 nt, Human
agugugagaugauugaggagca

SEQ ID NO: 297284 - RNA, 22 nt, Human
aggcagguagaaggaucuuuau

SEQ ID NO: 297285 - RNA, 22 nt, Human
auguucuuucagccagugcauc

SEQ ID NO: 297286 - RNA, 22 nt, Human
auuauuagauucuuaauuguaa

SEQ ID NO: 297287 - RNA, 22 nt, Human
aaauacuagaauucagaguuga

SEQ ID NO: 297288 - RNA, 22 nt, Human
ccagcuuuuccucucauugcuu

SEQ ID NO: 297289 - RNA, 22 nt, Human
gaaacaugucugacaauuuacc

SEQ ID NO: 297290 - RNA, 22 nt, Human
aucaaguuuucuuaguugacug

SEQ ID NO: 297291 - RNA, 22 nt, Human
auguccuugagacccuccucgg

SEQ ID NO: 297292 - RNA, 22 nt, Human
agcuuuaugaggagaccuuagu

SEQ ID NO: 297293 - RNA, 22 nt, Human
aucagagauuguaguaugugca

SEQ ID NO: 297294 - RNA, 22 nt, Human
ggcaggcaguguggugugaaac

SEQ ID NO: 297295 - RNA, 22 nt, Human
agcuuuguggcuuugcaagacu

SEQ ID NO: 297296 - RNA, 22 nt, Human
gaaacccaaacuaagacaguag

SEQ ID NO: 297297 - RNA, 22 nt, Human
ccagagaggggaagggcuugcc

SEQ ID NO: 297298 - RNA, 22 nt, Human
uaaugucaaggugauagauuug

SEQ ID NO: 297299 - RNA, 22 nt, Human
aauacaaucaaauucacuagca

SEQ ID NO: 297300 - RNA, 22 nt, Human
ugcuggaguucgacauugcaaa

SEQ ID NO: 297301 - RNA, 22 nt, Human
ggcaggugccuucugugcuagc

SEQ ID NO: 297302 - RNA, 22 nt, Human
gggugggagaaaugaguaucua

SEQ ID NO: 297303 - RNA, 23 nt, Human
uccaggcacgcauuucuucuagc

SEQ ID NO: 297304 - RNA, 22 nt, Human
gggagcuggagcuggaagacuc

SEQ ID NO: 297305 - RNA, 22 nt, Human
ucagguguggucaccacagggu

SEQ ID NO: 297306 - RNA, 22 nt, Human
agauuuaaauuugcuacaauuc

SEQ ID NO: 297307 - RNA, 22 nt, Human
aaauuucuaagcagccacuucc

SEQ ID NO: 297308 - RNA, 22 nt, Human
uucucuuugacauuauucaggu

SEQ ID NO: 297309 - RNA, 22 nt, Human
cacugagcugauagaauuccag

SEQ ID NO: 297310 - RNA, 22 nt, Human
uauguguccuguuaccggcagc

SEQ ID NO: 297311 - RNA, 22 nt, Human
gacccagaaggagugcccuaga

SEQ ID NO: 297312 - RNA, 23 nt, Human
accaugaugggagugcaaauaag

SEQ ID NO: 297313 - RNA, 22 nt, Human
guacccagaggcaugaucccag

SEQ ID NO: 297314 - RNA, 22 nt, Human
uuugacucaagccuuucuuuag

SEQ ID NO: 297315 - RNA, 22 nt, Human
ucuguucagcugccucagggua

SEQ ID NO: 297316 - RNA, 22 nt, Human
uccaggcauaaugcccaguggu

SEQ ID NO: 297317 - RNA, 22 nt, Human
agcagggcuccauuucacugcc

SEQ ID NO: 297318 - RNA, 22 nt, Human
gggcugaccccaccccucacuc

SEQ ID NO: 297319 - RNA, 22 nt, Human
aaggugucauccaggauggugg

SEQ ID NO: 297320 - RNA, 22 nt, Human
gagcugaagcgcuacagcaucc

SEQ ID NO: 297321 - RNA, 22 nt, Human
acauuguaguuguucugcagca

SEQ ID NO: 297322 - RNA, 22 nt, Human
cuacugaguccuucagcugcca

SEQ ID NO: 297323 - RNA, 22 nt, Human
gagacaggccaggugguacuua

SEQ ID NO: 297324 - RNA, 22 nt, Human
agcugccauggccugaauuuac

SEQ ID NO: 297325 - RNA, 22 nt, Human
ccagggcaggagaaagacucac

SEQ ID NO: 297326 - RNA, 22 nt, Human
ugcugcauuugcaguccuuuaa

SEQ ID NO: 297327 - RNA, 22 nt, Human
gcagcuuugucacggagugucg

SEQ ID NO: 297328 - RNA, 19 nt, Human
cccagcuugaccaccugcu

SEQ ID NO: 297329 - RNA, 22 nt, Human
ugagagaguaauugagugguaa

SEQ ID NO: 297330 - RNA, 22 nt, Human
ccagguggcccugcccuacucu

SEQ ID NO: 297331 - RNA, 22 nt, Human
caugaaaaugucaaguucugcu

SEQ ID NO: 297332 - RNA, 22 nt, Human
cagcuuuaggacucauaauaaa

SEQ ID NO: 297333 - RNA, 22 nt, Human
aauugcuuacuguuuuucaccu

SEQ ID NO: 297334 - RNA, 22 nt, Human
auuuacugagcagcuaccaugu

SEQ ID NO: 297335 - RNA, 22 nt, Human
uccuucucugguuuuuacugua

SEQ ID NO: 297336 - RNA, 22 nt, Human
gaucugaagauaugaaauauuu

SEQ ID NO: 297337 - RNA, 22 nt, Human
ucuguucagacacuuuacaugu

SEQ ID NO: 297338 - RNA, 19 nt, Human
ucuuauugagcagcugagg

SEQ ID NO: 297339 - RNA, 22 nt, Human
cauuguaagcuguugaauccuc

SEQ ID NO: 297340 - RNA, 22 nt, Human
cacaaaugguuguagacauuaa

SEQ ID NO: 297341 - RNA, 23 nt, Human
acuauaaaguuguucugauuuac

SEQ ID NO: 297342 - RNA, 22 nt, Human
ggagcugaggacacuacauuuu

SEQ ID NO: 297343 - RNA, 22 nt, Human
uaguauaauuguucuggaauca

SEQ ID NO: 297344 - RNA, 21 nt, Human
caugugucuuguguuacugcu

SEQ ID NO: 297345 - RNA, 22 nt, Human
caggugucaaaauacuaagugg

SEQ ID NO: 297346 - RNA, 22 nt, Human
ucuauugcagauggaugcccuc

SEQ ID NO: 297347 - RNA, 22 nt, Human
auguuucagauacagaucaaau

SEQ ID NO: 297348 - RNA, 22 nt, Human
aaauguuuugcucccauguggu

SEQ ID NO: 297349 - RNA, 22 nt, Human
uucagagauggaaggcagaaug

SEQ ID NO: 297350 - RNA, 22 nt, Human
auuuugaugcuaucuaaugaau

SEQ ID NO: 297351 - RNA, 22 nt, Human
cacaggugcuccucggggagcu

SEQ ID NO: 297352 - RNA, 22 nt, Human
uucauucuugggaucagagagu

SEQ ID NO: 297353 - RNA, 22 nt, Human
gccugcaggcuguaguuuguga

SEQ ID NO: 297354 - RNA, 22 nt, Human
cuugaauccaaaugggagauga

SEQ ID NO: 297355 - RNA, 22 nt, Human
gacagguggguaccuuuaugga

SEQ ID NO: 297356 - RNA, 22 nt, Human
guuucuuagguaaauucuuuga

SEQ ID NO: 297357 - RNA, 23 nt, Human
ugcaggugugcagagggcucuug

SEQ ID NO: 297358 - RNA, 22 nt, Human
uggcagguggagacagcagagc

SEQ ID NO: 297359 - RNA, 22 nt, Human
ucagggcacguuucugcaaugc

SEQ ID NO: 297360 - RNA, 22 nt, Human
cauguugaauggccuugauuuu

SEQ ID NO: 297361 - RNA, 22 nt, Human
ggcagguggcacugcugcuccc

SEQ ID NO: 297362 - RNA, 22 nt, Human
gccucuagggcuguugggaauu

SEQ ID NO: 297363 - RNA, 22 nt, Human
auuugaauggcuuaacacaacg

SEQ ID NO: 297364 - RNA, 22 nt, Human
agagggcugcugcacagugcuc

SEQ ID NO: 297365 - RNA, 22 nt, Human
aauugcuuuaguuaccauagug

SEQ ID NO: 297366 - RNA, 22 nt, Human
gaggaggaaaggaguugaaaug

SEQ ID NO: 297367 - RNA, 22 nt, Human
cagggcucagaagacagaccuc

SEQ ID NO: 297368 - RNA, 22 nt, Human
uuuccagauuaagauaccacuu

SEQ ID NO: 297369 - RNA, 22 nt, Human
gcaugugugagaccuuuuagca

SEQ ID NO: 297370 - RNA, 22 nt, Human
ucuagggugugcggcagggcua

SEQ ID NO: 297371 - RNA, 22 nt, Human
ugacagguucguuagucauguu

SEQ ID NO: 297372 - RNA, 22 nt, Human
aauucauauggauaugcuagua

SEQ ID NO: 297373 - RNA, 22 nt, Human
ucuuuauuucugaaucccccau

SEQ ID NO: 297374 - RNA, 22 nt, Human
uguacauacauagauauacaca

SEQ ID NO: 297375 - RNA, 18 nt, Human
uuggaggauguccaugaa

SEQ ID NO: 297376 - RNA, 22 nt, Human
ucugugccaucagucuccagag

SEQ ID NO: 297377 - RNA, 22 nt, Human
ccuuccuuuuacugucuccgga

SEQ ID NO: 297378 - RNA, 22 nt, Human
cauugaaaaacguugacugagu

SEQ ID NO: 297379 - RNA, 20 nt, Human
guauuagguguuccucuuuc

SEQ ID NO: 297380 - RNA, 22 nt, Human
auuagagguacaaaccuucacu

SEQ ID NO: 297381 - RNA, 22 nt, Human
ggcucccaggagggccuggagg

SEQ ID NO: 297382 - RNA, 22 nt, Human
ucagggcaccaaaaaagaugcc

SEQ ID NO: 297383 - RNA, 22 nt, Human
auuuaauuuacauuugacagag

SEQ ID NO: 297384 - RNA, 22 nt, Human
gcagggcagcucacugugguuc

SEQ ID NO: 297385 - RNA, 22 nt, Human
ucccaggcuaggccucugcguu

SEQ ID NO: 297386 - RNA, 22 nt, Human
gaacuuggaacuggggcuacug

SEQ ID NO: 297387 - RNA, 22 nt, Human
guuauuagaagugaaggauugu

SEQ ID NO: 297388 - RNA, 22 nt, Human
uugcuucaguagcucuuuaaag

SEQ ID NO: 297389 - RNA, 22 nt, Human
acagguguugaaugaugucaca

SEQ ID NO: 297390 - RNA, 22 nt, Human
gaugaaaaucuugagaugucga

SEQ ID NO: 297391 - RNA, 22 nt, Human
uggaggaauaacagcaaccuua

SEQ ID NO: 297392 - RNA, 22 nt, Human
ugcuggagugcaguggcuuaac

SEQ ID NO: 297393 - RNA, 22 nt, Human
ucugaagagucuugcaagaaag

SEQ ID NO: 297394 - RNA, 22 nt, Human
aaaaugaugcuguaauuuggca

SEQ ID NO: 297395 - RNA, 22 nt, Human
ucuuccucuucugcugagaagu

SEQ ID NO: 297396 - RNA, 22 nt, Human
ugaaacacugcgauaaaauccu

SEQ ID NO: 297397 - RNA, 22 nt, Human
gcaugugugucacuuuccugcc

SEQ ID NO: 297398 - RNA, 22 nt, Human
aguguccuccucugggagccag

SEQ ID NO: 297399 - RNA, 22 nt, Human
aacaugugucuggcuagauugu

SEQ ID NO: 297400 - RNA, 22 nt, Human
uggucuggggaccgaggguuac

SEQ ID NO: 297401 - RNA, 22 nt, Human
cuguguccuuuaaaaaagacac

SEQ ID NO: 297402 - RNA, 23 nt, Human
aaggugucauugaugggauucua

SEQ ID NO: 297403 - RNA, 21 nt, Human
gggugggguuccagccuuuuc

SEQ ID NO: 297404 - RNA, 22 nt, Human
acagucuacuugagcuuguaua

SEQ ID NO: 297405 - RNA, 22 nt, Human
accaggcagcaccaaagccggu

SEQ ID NO: 297406 - RNA, 22 nt, Human
cccaugagguggagguugcagu

SEQ ID NO: 297407 - RNA, 21 nt, Human
uccaaaucccauucuguaguc

SEQ ID NO: 297408 - RNA, 22 nt, Human
uagacaggguggcuuagaaaca

SEQ ID NO: 297409 - RNA, 22 nt, Human
cauguaaagcauccuucuaggg

SEQ ID NO: 297410 - RNA, 22 nt, Human
gaaggcaucacagaggcugugg

SEQ ID NO: 297411 - RNA, 22 nt, Human
ccuggagggacccuggcccugu

SEQ ID NO: 297412 - RNA, 22 nt, Human
gggggcucugacucccucagcu

SEQ ID NO: 297413 - RNA, 22 nt, Human
uggucugguuauuucuuaauga

SEQ ID NO: 297414 - RNA, 22 nt, Human
agggcuccugaggcccuucugg

SEQ ID NO: 297415 - RNA, 22 nt, Human
agcucugacauugauucucagc

SEQ ID NO: 297416 - RNA, 22 nt, Human
ugcuggagagccuuggccaagg

SEQ ID NO: 297417 - RNA, 18 nt, Human
cucagagaugcccuuauu

SEQ ID NO: 297418 - RNA, 22 nt, Human
uauuuaguuaucuuucauaaaa

SEQ ID NO: 297419 - RNA, 22 nt, Human
caaauguauaaauguacuuucu

SEQ ID NO: 297420 - RNA, 22 nt, Human
gccaggcauuauuccgaucccu

SEQ ID NO: 297421 - RNA, 23 nt, Human
uaggugucuaguguccacuaugu

SEQ ID NO: 297422 - RNA, 22 nt, Human
uguuccugaaugccuggcuggc

SEQ ID NO: 297423 - RNA, 22 nt, Human
cacaucagggcugcuugggggu

SEQ ID NO: 297424 - RNA, 22 nt, Human
aaagcugcuuuaaacaucuaug

SEQ ID NO: 297425 - RNA, 22 nt, Human
auuccuucuauucucugugggu

SEQ ID NO: 297426 - RNA, 22 nt, Human
gggaccuggacaugugugugcu

SEQ ID NO: 297427 - RNA, 22 nt, Human
ucaugugucugcugcagcuguu

SEQ ID NO: 297428 - RNA, 22 nt, Human
uuucagauggagguuuaggaca

SEQ ID NO: 297429 - RNA, 22 nt, Human
aaaagucugcuuucuauuauca

SEQ ID NO: 297430 - RNA, 22 nt, Human
ugaaagcacaaguucuaacagg

SEQ ID NO: 297431 - RNA, 22 nt, Human
uguccuuuaugaaaugguguuu

SEQ ID NO: 297432 - RNA, 22 nt, Human
gauguacuugccuuaucuaucc

SEQ ID NO: 297433 - RNA, 22 nt, Human
ucuuccuucuuugaugacaagg

SEQ ID NO: 297434 - RNA, 22 nt, Human
auucuucacuguuucagaauga

SEQ ID NO: 297435 - RNA, 22 nt, Human
uauugcugacugucuucugagu

SEQ ID NO: 297436 - RNA, 22 nt, Human
uccugcagaucaaagccuuuga

SEQ ID NO: 297437 - RNA, 22 nt, Human
cgcagguguucaguaaauguau

SEQ ID NO: 297438 - RNA, 22 nt, Human
aucauucuauuguugagcugcc

SEQ ID NO: 297439 - RNA, 22 nt, Human
uuugacucugggugcuuuuucg

SEQ ID NO: 297440 - RNA, 22 nt, Human
gguuucaacuaaaucaagaagg

SEQ ID NO: 297441 - RNA, 22 nt, Human
uucaacuaauguuuauuuuaug

SEQ ID NO: 297442 - RNA, 22 nt, Human
ugucagaggcucagggucucag

SEQ ID NO: 297443 - RNA, 22 nt, Human
uauacauguuuuacauaaguga

SEQ ID NO: 297444 - RNA, 22 nt, Human
cacaggugccaucucuucaugg

SEQ ID NO: 297445 - RNA, 21 nt, Human
uuccagagauuguuucaccug

SEQ ID NO: 297446 - RNA, 22 nt, Human
uuguuucauggggauguuuauu

SEQ ID NO: 297447 - RNA, 22 nt, Human
ggauggcagacagugaguggcu

SEQ ID NO: 297448 - RNA, 22 nt, Human
gacugccagaaugugaggccug

SEQ ID NO: 297449 - RNA, 22 nt, Human
aggcagggcucauuucuuaggc

SEQ ID NO: 297450 - RNA, 22 nt, Human
uggaauguugauaaacauaggc

SEQ ID NO: 297451 - RNA, 22 nt, Human
uugcugauucuguauuuaaggu

SEQ ID NO: 297452 - RNA, 22 nt, Human
ggaacaggaaaggagggaugcu

SEQ ID NO: 297453 - RNA, 22 nt, Human
gcaaguacaaacgcaucggcug

SEQ ID NO: 297454 - RNA, 22 nt, Human
uuguaaauaguaguaagaugcc

SEQ ID NO: 297455 - RNA, 22 nt, Human
uuuccuuccagguuccuaaggc

SEQ ID NO: 297456 - RNA, 22 nt, Human
cacaggccugucucuuucuaac

SEQ ID NO: 297457 - RNA, 22 nt, Human
auuaauuuuucugacagccaca

SEQ ID NO: 297458 - RNA, 22 nt, Human
gaacuugggagaagggagugug

SEQ ID NO: 297459 - RNA, 22 nt, Human
ccagcuuuccaggguugacugg

SEQ ID NO: 297460 - RNA, 22 nt, Human
ugcuuaaaauaguucauuuuug

SEQ ID NO: 297461 - RNA, 22 nt, Human
uuucagaaagcugaacauauga

SEQ ID NO: 297462 - RNA, 22 nt, Human
gaaagcagcuaagucuuaugau

SEQ ID NO: 297463 - RNA, 22 nt, Human
cacaugugcaguuacaugaauu

SEQ ID NO: 297464 - RNA, 21 nt, Human
gccugcagaccccaccaggcu

SEQ ID NO: 297465 - RNA, 21 nt, Human
uagggcaggcauuggaagaga

SEQ ID NO: 297466 - RNA, 22 nt, Human
ugcagugguugagagcccagac

SEQ ID NO: 297467 - RNA, 22 nt, Human
cuuaaauucuuaaugcccucau

SEQ ID NO: 297468 - RNA, 22 nt, Human
gaggugucuguuaggaauaggc

SEQ ID NO: 297469 - RNA, 22 nt, Human
acauguguuuuccuacuuauga

SEQ ID NO: 297470 - RNA, 21 nt, Human
agcaacucugacuagaugagg

SEQ ID NO: 297471 - RNA, 22 nt, Human
ucugggaaugaauaagaccugu

SEQ ID NO: 297472 - RNA, 22 nt, Human
cuuauugaaagccccugugccu

SEQ ID NO: 297473 - RNA, 22 nt, Human
gcagggcagagggagaaucucu

SEQ ID NO: 297474 - RNA, 22 nt, Human
aacauauaaacucuuaaguuca

SEQ ID NO: 297475 - RNA, 22 nt, Human
auuuuacuuugugaauauugac

SEQ ID NO: 297476 - RNA, 22 nt, Human
agacaaguucugugggucaccu

SEQ ID NO: 297477 - RNA, 22 nt, Human
uuugcugacuggaugcaguugg

SEQ ID NO: 297478 - RNA, 22 nt, Human
cagggcucccaaauaucucuuc

SEQ ID NO: 297479 - RNA, 19 nt, Human
ucccaggaagcaaauguca

SEQ ID NO: 297480 - RNA, 22 nt, Human
cuuuacuucucaaaauaaagca

SEQ ID NO: 297481 - RNA, 22 nt, Human
gguuauauaauucagugcuuuc

SEQ ID NO: 297482 - RNA, 22 nt, Human
gacagacagagaaugggcuuga

SEQ ID NO: 297483 - RNA, 22 nt, Human
aagggcaggcacccacccucac

SEQ ID NO: 297484 - RNA, 22 nt, Human
cccaggcagugugugcaugcgu

SEQ ID NO: 297485 - RNA, 22 nt, Human
aaacagcuggucucaaauguuc

SEQ ID NO: 297486 - RNA, 20 nt, Human
ucauguguguccuacagaga

SEQ ID NO: 297487 - RNA, 22 nt, Human
cauuuguaguaucuguuuauau

SEQ ID NO: 297488 - RNA, 19 nt, Human
auacagauguauccaugau

SEQ ID NO: 297489 - RNA, 22 nt, Human
cacuuuauuauaaauuugagag

SEQ ID NO: 297490 - RNA, 22 nt, Human
agacagugcaagaagagcaggc

SEQ ID NO: 297491 - RNA, 22 nt, Human
uaugugucccugcuacucaaca

SEQ ID NO: 297492 - RNA, 22 nt, Human
acagugugaugggccugccuga

SEQ ID NO: 297493 - RNA, 22 nt, Human
ggagcaguuguugagcaagcca

SEQ ID NO: 297494 - RNA, 22 nt, Human
uccaggaggguuuucugccuuc

SEQ ID NO: 297495 - RNA, 22 nt, Human
cagaagcagaacacuagauuua

SEQ ID NO: 297496 - RNA, 21 nt, Human
aaauuucugcaagccucaacu

SEQ ID NO: 297497 - RNA, 22 nt, Human
uugaaucuggguacuuguaaua

SEQ ID NO: 297498 - RNA, 21 nt, Human
ucucuccucaagcucgacccc

SEQ ID NO: 297499 - RNA, 21 nt, Human
auuucagagcacacaaguaaa

SEQ ID NO: 297500 - RNA, 22 nt, Human
ugggcagggucucuguuaucag

SEQ ID NO: 297501 - RNA, 22 nt, Human
aaagcuaugaggcaugcauuuc

SEQ ID NO: 297502 - RNA, 22 nt, Human
uccugcagccaagggucaucga

SEQ ID NO: 297503 - RNA, 22 nt, Human
ccacugaggcaggcaguaucua

SEQ ID NO: 297504 - RNA, 22 nt, Human
ugaaugauuugggugcauucag

SEQ ID NO: 297505 - RNA, 22 nt, Human
uuuguacauauauaaaaucugu

SEQ ID NO: 297506 - RNA, 22 nt, Human
cccuuccugggugucccggagu

SEQ ID NO: 297507 - RNA, 22 nt, Human
gacagacagggguucuccugga

SEQ ID NO: 297508 - RNA, 22 nt, Human
auguccagggcacacagcagug

SEQ ID NO: 297509 - RNA, 22 nt, Human
uguugcugacaagagaggagca

SEQ ID NO: 297510 - RNA, 22 nt, Human
ugagauguaagguaugcuuacu

SEQ ID NO: 297511 - RNA, 22 nt, Human
acaggccugagauuuugcauuu

SEQ ID NO: 297512 - RNA, 22 nt, Human
aucuuucuccauauacaucuuu

SEQ ID NO: 297513 - RNA, 17 nt, Human
accaggcaacacgccca

SEQ ID NO: 297514 - RNA, 22 nt, Human
uccaagcucucuaugccaugau

SEQ ID NO: 297515 - RNA, 22 nt, Human
uagggaugaagaugguauuucu

SEQ ID NO: 297516 - RNA, 22 nt, Human
cuguccuccagacgacaguccc

SEQ ID NO: 297517 - RNA, 22 nt, Human
uuuccuucaucaucugagagcu

SEQ ID NO: 297518 - RNA, 22 nt, Human
auuuauuaugggauuuggcaca

SEQ ID NO: 297519 - RNA, 22 nt, Human
agcagggcuucugugccugugc

SEQ ID NO: 297520 - RNA, 22 nt, Human
cuuagggaaucuuagagcugga

SEQ ID NO: 297521 - RNA, 22 nt, Human
acuguauuuggauauaagaucu

SEQ ID NO: 297522 - RNA, 22 nt, Human
agagcaauggcauccagcugau

SEQ ID NO: 297523 - RNA, 22 nt, Human
uuccauacgacugaggucucgg

SEQ ID NO: 297524 - RNA, 22 nt, Human
cuugcuggaaacucucucugcc

SEQ ID NO: 297525 - RNA, 22 nt, Human
uuugcugauauuuugcugauac

SEQ ID NO: 297526 - RNA, 22 nt, Human
acagagagaaacaaucagcagc

SEQ ID NO: 297527 - RNA, 22 nt, Human
ucuggcuggcagugauggugug

SEQ ID NO: 297528 - RNA, 22 nt, Human
uauuucccagggagcaacaagc

SEQ ID NO: 297529 - RNA, 21 nt, Human
auacacauacacauaaaugug

SEQ ID NO: 297530 - RNA, 22 nt, Human
uauuuccaccuauuauuuucug

SEQ ID NO: 297531 - RNA, 22 nt, Human
aaaacauucugugaacucucaa

SEQ ID NO: 297532 - RNA, 22 nt, Human
caaauguauucucacuucaggg

SEQ ID NO: 297533 - RNA, 22 nt, Human
uggcagggccugcucaucaucc

SEQ ID NO: 297534 - RNA, 22 nt, Human
cugcgugucucugucucauggc

SEQ ID NO: 297535 - RNA, 22 nt, Human
acuuguucauugaguacauaug

SEQ ID NO: 297536 - RNA, 22 nt, Human
ucagggcagccuaaggcaccuc

SEQ ID NO: 297537 - RNA, 22 nt, Human
uggagcagcucuagcgggcgcc

SEQ ID NO: 297538 - RNA, 22 nt, Human
ugcacacacucugcauauacuu

SEQ ID NO: 297539 - RNA, 22 nt, Human
cuguccuuacugcuucuggcuu

SEQ ID NO: 297540 - RNA, 22 nt, Human
acucuuauaguauugguuauua

SEQ ID NO: 297541 - RNA, 22 nt, Human
cagcaugaugcucacacaaaac

SEQ ID NO: 297542 - RNA, 22 nt, Human
uuauuaggaacucaggauuuuu

SEQ ID NO: 297543 - RNA, 22 nt, Human
ggagcugaguucuucagccggg

SEQ ID NO: 297544 - RNA, 20 nt, Human
ccagguggugccuggagagg

SEQ ID NO: 297545 - RNA, 19 nt, Human
uccaggaggcugccauuga

SEQ ID NO: 297546 - RNA, 22 nt, Human
aagggcaggagaagacggauau

SEQ ID NO: 297547 - RNA, 22 nt, Human
gagggaccccaggcuggcccuu

SEQ ID NO: 297548 - RNA, 22 nt, Human
ucugggugucacuccugccugc

SEQ ID NO: 297549 - RNA, 22 nt, Human
uccugcagcucugagaagcauc

SEQ ID NO: 297550 - RNA, 22 nt, Human
aacaggcaggagaauucugccu

SEQ ID NO: 297551 - RNA, 22 nt, Human
ugggcuccaauuuguccuuuca

SEQ ID NO: 297552 - RNA, 22 nt, Human
ugcuggagcaacauuauugugc

SEQ ID NO: 297553 - RNA, 20 nt, Human
ugcaggugggcccuucuggg

SEQ ID NO: 297554 - RNA, 22 nt, Human
cuggaagcuuguuugccagucu

SEQ ID NO: 297555 - RNA, 22 nt, Human
auacaacuuuaucuguaaugag

SEQ ID NO: 297556 - RNA, 22 nt, Human
auucugggcgccuauggcugca

SEQ ID NO: 297557 - RNA, 22 nt, Human
uggcuggagagggucccaugag

SEQ ID NO: 297558 - RNA, 22 nt, Human
acccagcuaacccuacccugga

SEQ ID NO: 297559 - RNA, 22 nt, Human
uucacaaaacacuauuuucugg

SEQ ID NO: 297560 - RNA, 22 nt, Human
uuuaacauguucaagaaacaua

SEQ ID NO: 297561 - RNA, 22 nt, Human
uguuucaugauugcugucauuu

SEQ ID NO: 297562 - RNA, 22 nt, Human
gucucuaucauagcugaacccu

SEQ ID NO: 297563 - RNA, 22 nt, Human
cugcagggaccacaagcagguu

SEQ ID NO: 297564 - RNA, 22 nt, Human
aaaagcagaccacgcuuugugg

SEQ ID NO: 297565 - RNA, 20 nt, Human
aguuuauuccaggagaacug

SEQ ID NO: 297566 - RNA, 22 nt, Human
ggcuuuauguuuuucauguggu

SEQ ID NO: 297567 - RNA, 22 nt, Human
caaauaguaugagcaaugauuc

SEQ ID NO: 297568 - RNA, 22 nt, Human
cuucuucauguauugauagucu

SEQ ID NO: 297569 - RNA, 22 nt, Human
ugacuuccagcaacuuccucca

SEQ ID NO: 297570 - RNA, 22 nt, Human
gcucucuuuuuccagugguggu

SEQ ID NO: 297571 - RNA, 22 nt, Human
uucuaaaauaaguuuaucuggu

SEQ ID NO: 297572 - RNA, 22 nt, Human
agggaccugcucacugccuggc

SEQ ID NO: 297573 - RNA, 22 nt, Human
gggucccuggaauuacuugaca

SEQ ID NO: 297574 - RNA, 22 nt, Human
ccuguucagagcuaagcaucau

SEQ ID NO: 297575 - RNA, 22 nt, Human
agcagguguauauaaggcugag

SEQ ID NO: 297576 - RNA, 22 nt, Human
cagaguguuucuuugggugggu

SEQ ID NO: 297577 - RNA, 19 nt, Human
aaaagucuauucaauuaca

SEQ ID NO: 297578 - RNA, 22 nt, Human
aagauuuauuagaugcuuaccu

SEQ ID NO: 297579 - RNA, 21 nt, Human
ugacagcauagagcagggagg

SEQ ID NO: 297580 - RNA, 22 nt, Human
ugcuggagucucuugacccugg

SEQ ID NO: 297581 - RNA, 22 nt, Human
uauguguccuaagcaaucaucc

SEQ ID NO: 297582 - RNA, 22 nt, Human
ggcaggcaucaucaguugauca

SEQ ID NO: 297583 - RNA, 19 nt, Human
cuccucagucccagagguc

SEQ ID NO: 297584 - RNA, 18 nt, Human
aaauuagauggaccugug

SEQ ID NO: 297585 - RNA, 22 nt, Human
uccuuucugucuuuacucugga

SEQ ID NO: 297586 - RNA, 22 nt, Human
uagggcucugagaguucagccu

SEQ ID NO: 297587 - RNA, 22 nt, Human
ccuggagguggagguugcagug

SEQ ID NO: 297588 - RNA, 22 nt, Human
gccaggcauuuauugauugaau

SEQ ID NO: 297589 - RNA, 22 nt, Human
uggaccugcuggaugggcaggu

SEQ ID NO: 297590 - RNA, 22 nt, Human
uuuaucugagcugauagauagu

SEQ ID NO: 297591 - RNA, 22 nt, Human
agcagggcagguaaggaucaga

SEQ ID NO: 297592 - RNA, 22 nt, Human
uucaacucuucaagaucacauc

SEQ ID NO: 297593 - RNA, 21 nt, Human
cuguccuggucuagaggcaca

SEQ ID NO: 297594 - RNA, 23 nt, Human
agcugcaagacucccugucugag

SEQ ID NO: 297595 - RNA, 22 nt, Human
uaguuuuacuugcgaugauaau

SEQ ID NO: 297596 - RNA, 22 nt, Human
gcaguucuacuuauccauagac

SEQ ID NO: 297597 - RNA, 22 nt, Human
agucaaagaugaccgaguuccu

SEQ ID NO: 297598 - RNA, 22 nt, Human
aacuuuaucggaacagguacuc

SEQ ID NO: 297599 - RNA, 22 nt, Human
acaggugggcuuaagagucggc

SEQ ID NO: 297600 - RNA, 21 nt, Human
ucugggugcuaguguuugcuu

SEQ ID NO: 297601 - RNA, 22 nt, Human
auuugcaugcuucuauugugaa

SEQ ID NO: 297602 - RNA, 22 nt, Human
caguguggagggagagagccug

SEQ ID NO: 297603 - RNA, 22 nt, Human
ggguguagacacauguucaucu

SEQ ID NO: 297604 - RNA, 22 nt, Human
ugacugaaauggcgacagugaa

SEQ ID NO: 297605 - RNA, 22 nt, Human
uuugacucuuaaguggcucaau

SEQ ID NO: 297606 - RNA, 22 nt, Human
caggaaagaaaugagaacacca

SEQ ID NO: 297607 - RNA, 22 nt, Human
acauguguacuuuuaaggaugu

SEQ ID NO: 297608 - RNA, 22 nt, Human
ucuguggauuuuaguguucaug

SEQ ID NO: 297609 - RNA, 22 nt, Human
cucagagauauagucccugcuu

SEQ ID NO: 297610 - RNA, 22 nt, Human
cagcuuuuuagaaucuagggca

SEQ ID NO: 297611 - RNA, 22 nt, Human
gguguccuacugcuugguugcu

SEQ ID NO: 297612 - RNA, 22 nt, Human
acagagagggagugauaaaucc

SEQ ID NO: 297613 - RNA, 22 nt, Human
ugcuuuauucaggguuuacccc

SEQ ID NO: 297614 - RNA, 22 nt, Human
uauuccagugugaucuuuguag

SEQ ID NO: 297615 - RNA, 23 nt, Human
guaggaauuuucacuuccucuug

SEQ ID NO: 297616 - RNA, 22 nt, Human
augauugcagcccuacagcugu

SEQ ID NO: 297617 - RNA, 22 nt, Human
caaaaacugcaauuacuuuuac

SEQ ID NO: 297618 - RNA, 22 nt, Human
auugcuuuguacaugccuagca

SEQ ID NO: 297619 - RNA, 22 nt, Human
guguccugccacccugggcuuu

SEQ ID NO: 297620 - RNA, 20 nt, Human
uccaggcagcucagaguguc

SEQ ID NO: 297621 - RNA, 20 nt, Human
uccuucugaggugaggagga

SEQ ID NO: 297622 - RNA, 22 nt, Human
agacagacauucuagagccacc

SEQ ID NO: 297623 - RNA, 22 nt, Human
aaggugguaggcuauaucagua

SEQ ID NO: 297624 - RNA, 18 nt, Human
uuuuaauuucaggggugg

SEQ ID NO: 297625 - RNA, 22 nt, Human
ggguuucaugguucucacaaug

SEQ ID NO: 297626 - RNA, 22 nt, Human
acauuuaaguuaaaaccucagu

SEQ ID NO: 297627 - RNA, 22 nt, Human
cauuuguauagugcuuagacca

SEQ ID NO: 297628 - RNA, 22 nt, Human
aaauuucuugaggcucucuagc

SEQ ID NO: 297629 - RNA, 19 nt, Human
gagggcucauuugaacaau

SEQ ID NO: 297630 - RNA, 21 nt, Human
uuacaaagcaagugcuguguc

SEQ ID NO: 297631 - RNA, 22 nt, Human
gagcacccuuugcacaucaguc

SEQ ID NO: 297632 - RNA, 18 nt, Human
aggcaggugcuggaaguc

SEQ ID NO: 297633 - RNA, 22 nt, Human
guccagugacaaguagcuggcc

SEQ ID NO: 297634 - RNA, 21 nt, Human
cagcuucuucugugaccuggu

SEQ ID NO: 297635 - RNA, 22 nt, Human
augcuuuuccaggagaaauaua

SEQ ID NO: 297636 - RNA, 22 nt, Human
cucuuaaagaauguuccagcug

SEQ ID NO: 297637 - RNA, 22 nt, Human
guccugguccugccuccccaug

SEQ ID NO: 297638 - RNA, 22 nt, Human
guuaucaugcuucaucaucacu

SEQ ID NO: 297639 - RNA, 22 nt, Human
aaauaaguaguuuaguguugug

SEQ ID NO: 297640 - RNA, 22 nt, Human
aaacacauuagcccuguggaaa

SEQ ID NO: 297641 - RNA, 22 nt, Human
augcacauaggccaaaucauuu

SEQ ID NO: 297642 - RNA, 21 nt, Human
uuuagggaccaggucauaggc

SEQ ID NO: 297643 - RNA, 22 nt, Human
uucugugauugacauguggcuu

SEQ ID NO: 297644 - RNA, 22 nt, Human
uggcagguuggccuuugguuca

SEQ ID NO: 297645 - RNA, 20 nt, Human
uauuuacaacuuagagccuc

SEQ ID NO: 297646 - RNA, 22 nt, Human
uacauaauaaggggcauggugu

SEQ ID NO: 297647 - RNA, 22 nt, Human
auuguuaugaaaauaagauguu

SEQ ID NO: 297648 - RNA, 22 nt, Human
auuuccuguugcuuuugccacu

SEQ ID NO: 297649 - RNA, 22 nt, Human
uucauguauuuaucauguaaau

SEQ ID NO: 297650 - RNA, 22 nt, Human
guccuggugcuggucauugucg

SEQ ID NO: 297651 - RNA, 22 nt, Human
uuccucagagggcgcuggggaa

SEQ ID NO: 297652 - RNA, 22 nt, Human
agccagagcagggaauuggaca

SEQ ID NO: 297653 - RNA, 22 nt, Human
uccaaauucuagggccuugguu

SEQ ID NO: 297654 - RNA, 18 nt, Human
aucuuuccauagcauguu

SEQ ID NO: 297655 - RNA, 22 nt, Human
acuucaugcagaagagagcugu

SEQ ID NO: 297656 - RNA, 22 nt, Human
cagguaguccacagugagggag

SEQ ID NO: 297657 - RNA, 22 nt, Human
accauccugaaaccuucaugcu

SEQ ID NO: 297658 - RNA, 22 nt, Human
uccugcaggggcugaggaacca

SEQ ID NO: 297659 - RNA, 22 nt, Human
cuuuaguuauuuagacuacagu

SEQ ID NO: 297660 - RNA, 22 nt, Human
uucagauguggcuuugucaggc

SEQ ID NO: 297661 - RNA, 20 nt, Human
uuucugugagaaacacuguu

SEQ ID NO: 297662 - RNA, 22 nt, Human
ugguuccaagauggcugccaca

SEQ ID NO: 297663 - RNA, 22 nt, Human
uuucuucuugauuuaaacaggg

SEQ ID NO: 297664 - RNA, 22 nt, Human
ggggaccugggcuucaaggguu

SEQ ID NO: 297665 - RNA, 18 nt, Human
cuuuaugugcagagcuuu

SEQ ID NO: 297666 - RNA, 22 nt, Human
ucuucacaggagccugccugcc

SEQ ID NO: 297667 - RNA, 22 nt, Human
gcagguguggguggcugccagg

SEQ ID NO: 297668 - RNA, 22 nt, Human
aggaccuguguuuuccuugaau

SEQ ID NO: 297669 - RNA, 22 nt, Human
uuacauguuuacggauacacuu

SEQ ID NO: 297670 - RNA, 22 nt, Human
cccugcagugugaccucaccua

SEQ ID NO: 297671 - RNA, 22 nt, Human
ugcuuuauggauuuguguccug

SEQ ID NO: 297672 - RNA, 22 nt, Human
ucaggagcuugguagugugauu

SEQ ID NO: 297673 - RNA, 22 nt, Human
aagauuauuuaagacaggaacc

SEQ ID NO: 297674 - RNA, 22 nt, Human
gcaaaaaaugcuuguugcuuag

SEQ ID NO: 297675 - RNA, 22 nt, Human
gaggugucauuuaguuaaucag

SEQ ID NO: 297676 - RNA, 22 nt, Human
aaagcagguugcaauuacagug

SEQ ID NO: 297677 - RNA, 22 nt, Human
cuuuaguucuagaaagugaaac

SEQ ID NO: 297678 - RNA, 22 nt, Human
ugggaccucucuugagagagca

SEQ ID NO: 297679 - RNA, 22 nt, Human
cauuuaaagguuguggguaaaa

SEQ ID NO: 297680 - RNA, 22 nt, Human
uuaauuuuaaccuguuuguguc

SEQ ID NO: 297681 - RNA, 19 nt, Human
ccaggccugcgggcguugg

SEQ ID NO: 297682 - RNA, 22 nt, Human
aggugagguuugggagguguca

SEQ ID NO: 297683 - RNA, 22 nt, Human
ccagccuuacugcccuucagug

SEQ ID NO: 297684 - RNA, 22 nt, Human
ggcaggugaucuagagucaaua

SEQ ID NO: 297685 - RNA, 22 nt, Human
uaaggcauaaggccagaggcua

SEQ ID NO: 297686 - RNA, 22 nt, Human
ccaggccucccuuuuccagcca

SEQ ID NO: 297687 - RNA, 22 nt, Human
guuauugagacauagaguuaug

SEQ ID NO: 297688 - RNA, 21 nt, Human
cacuccacuuagaacaggguu

SEQ ID NO: 297689 - RNA, 22 nt, Human
gacagacaccugggggguugcu

SEQ ID NO: 297690 - RNA, 21 nt, Human
gcaaauguucaggaaaaaaga

SEQ ID NO: 297691 - RNA, 19 nt, Human
ugcuuccucaccaucuccc

SEQ ID NO: 297692 - RNA, 22 nt, Human
accauuuaaggaaaauguauca

SEQ ID NO: 297693 - RNA, 22 nt, Human
aagcaauauacugauaugauua

SEQ ID NO: 297694 - RNA, 22 nt, Human
gguccucaaucccaacaaggca

SEQ ID NO: 297695 - RNA, 22 nt, Human
ugcaggugcguuuucaagccuc

SEQ ID NO: 297696 - RNA, 22 nt, Human
gccugcagccagggaguucucu

SEQ ID NO: 297697 - RNA, 22 nt, Human
ugauguucuguauaucauauag

SEQ ID NO: 297698 - RNA, 16 nt, Human
cagcuuuaugucagug

SEQ ID NO: 297699 - RNA, 22 nt, Human
guucuucaucauuaacacucug

SEQ ID NO: 297700 - RNA, 22 nt, Human
augcacuacuuggcuuuacuga

SEQ ID NO: 297701 - RNA, 22 nt, Human
gacagacacagggccaugauug

SEQ ID NO: 297702 - RNA, 22 nt, Human
gaauacaugauacaugaacugc

SEQ ID NO: 297703 - RNA, 22 nt, Human
gcauucuuuuuaggagguuccu

SEQ ID NO: 297704 - RNA, 22 nt, Human
uucagcaagaccaccauguacc

SEQ ID NO: 297705 - RNA, 22 nt, Human
uuaacauacaucaugaacaaug

SEQ ID NO: 297706 - RNA, 22 nt, Human
caugaggucagggggagccggu

SEQ ID NO: 297707 - RNA, 22 nt, Human
gcaaauucuuaacuggacugug

SEQ ID NO: 297708 - RNA, 22 nt, Human
uggaccugggguggccuccucu

SEQ ID NO: 297709 - RNA, 22 nt, Human
uuaaauauuauguugucugcaa

SEQ ID NO: 297710 - RNA, 22 nt, Human
uguuuuaagagcgcacuuuaua

SEQ ID NO: 297711 - RNA, 22 nt, Human
uguggggcagcuagccggccug

SEQ ID NO: 297712 - RNA, 22 nt, Human
gccuggguccacugaucaugcu

SEQ ID NO: 297713 - RNA, 22 nt, Human
cuugaaguugcaaaacauuaau

SEQ ID NO: 297714 - RNA, 22 nt, Human
uugcacuccagcccgagcaaca

SEQ ID NO: 297715 - RNA, 22 nt, Human
aucauuucccuuuagaucacaa

SEQ ID NO: 297716 - RNA, 22 nt, Human
gaggcauaaguagaagagauug

SEQ ID NO: 297717 - RNA, 22 nt, Human
agcucccagaagccagagucgg

SEQ ID NO: 297718 - RNA, 17 nt, Human
ggaggcaacagacaggg

SEQ ID NO: 297719 - RNA, 22 nt, Human
cuuaaagaguauuuaauauaau

SEQ ID NO: 297720 - RNA, 22 nt, Human
agcugcaaaccaggccggcgcg

SEQ ID NO: 297721 - RNA, 22 nt, Human
acagauguacacucauauauaa

SEQ ID NO: 297722 - RNA, 22 nt, Human
aagaguuuaugauauaacaugu

SEQ ID NO: 297723 - RNA, 21 nt, Human
acagacagggccagugucccc

SEQ ID NO: 297724 - RNA, 22 nt, Human
aagaacuuccuaauauauuuuc

SEQ ID NO: 297725 - RNA, 22 nt, Human
gcugguccagggccucuguggg

SEQ ID NO: 297726 - RNA, 22 nt, Human
uggcaggugccuguaaucucag

SEQ ID NO: 297727 - RNA, 22 nt, Human
agugugaguuugguugagacuu

SEQ ID NO: 297728 - RNA, 22 nt, Human
auuucucaucaagugccaacuc

SEQ ID NO: 297729 - RNA, 22 nt, Human
uacaggugguaaaaauauuguu

SEQ ID NO: 297730 - RNA, 22 nt, Human
uaauaucuacuucauagaguuu

SEQ ID NO: 297731 - RNA, 22 nt, Human
ucugggugccacugucuguaca

SEQ ID NO: 297732 - RNA, 22 nt, Human
ccuggaggcagaaauaggacuu

SEQ ID NO: 297733 - RNA, 20 nt, Human
aggaggaagaaagcacacug

SEQ ID NO: 297734 - RNA, 22 nt, Human
aguuuccaaagcauguucacac

SEQ ID NO: 297735 - RNA, 22 nt, Human
uuuauacuccacucugcaagcg

SEQ ID NO: 297736 - RNA, 22 nt, Human
uuggaacauccaggacagauau

SEQ ID NO: 297737 - RNA, 19 nt, Human
cuucuucuuggcagccaag

SEQ ID NO: 297738 - RNA, 22 nt, Human
uugcauuccaguccccacugug

SEQ ID NO: 297739 - RNA, 22 nt, Human
uuucagaugugugucucugaag

SEQ ID NO: 297740 - RNA, 22 nt, Human
uuucaaauaccauaaaccuaau

SEQ ID NO: 297741 - RNA, 22 nt, Human
aggaggaaggcuucauuagguu

SEQ ID NO: 297742 - RNA, 22 nt, Human
gcaggugggggucggugcaucu

SEQ ID NO: 297743 - RNA, 22 nt, Human
ugcagggaauccagucuagggu

SEQ ID NO: 297744 - RNA, 22 nt, Human
uuuccaagagcuuauuucugaa

SEQ ID NO: 297745 - RNA, 22 nt, Human
ugcauugauagaaaaacaugga

SEQ ID NO: 297746 - RNA, 17 nt, Human
uccuggauccauggugg

SEQ ID NO: 297747 - RNA, 22 nt, Human
ccauguguucaauaagggaguu

SEQ ID NO: 297748 - RNA, 22 nt, Human
gcugccacauuuucaggacuaa

SEQ ID NO: 297749 - RNA, 22 nt, Human
cuaggguggauuugugcagagu

SEQ ID NO: 297750 - RNA, 22 nt, Human
uccgccaggacugagggcccau

SEQ ID NO: 297751 - RNA, 22 nt, Human
uauugcugaaaugcugaguuca

SEQ ID NO: 297752 - RNA, 17 nt, Human
cucuggaauuggugaag

SEQ ID NO: 297753 - RNA, 22 nt, Human
uucuuauagaagcaaccauugu

SEQ ID NO: 297754 - RNA, 22 nt, Human
cagcuuugccaaguaaggucuu

SEQ ID NO: 297755 - RNA, 22 nt, Human
uguuugcuuacuuguaugcugc

SEQ ID NO: 297756 - RNA, 22 nt, Human
ggcuuuauaggguagaggauca

SEQ ID NO: 297757 - RNA, 22 nt, Human
cuguccuguggugacagguaca

SEQ ID NO: 297758 - RNA, 22 nt, Human
auaugcaagcacauagaauacu

SEQ ID NO: 297759 - RNA, 22 nt, Human
ggcagugggaaauaagugagaa

SEQ ID NO: 297760 - RNA, 22 nt, Human
uuugcugaauaaaugugugacu

SEQ ID NO: 297761 - RNA, 22 nt, Human
uagguauaauauuuugaagaaa

SEQ ID NO: 297762 - RNA, 22 nt, Human
uggaugcugcugucagggaugg

SEQ ID NO: 297763 - RNA, 19 nt, Human
ugacagagagcaggguggu

SEQ ID NO: 297764 - RNA, 22 nt, Human
ccuggaucccgauggcugugag

SEQ ID NO: 297765 - RNA, 22 nt, Human
cagugagggcauucagugcugg

SEQ ID NO: 297766 - RNA, 23 nt, Human
uuaggcacuuaguagggccagag

SEQ ID NO: 297767 - RNA, 22 nt, Human
uuguaaaguucuuaggaagcuc

SEQ ID NO: 297768 - RNA, 22 nt, Human
ugcaggugguuuggacacugcu

SEQ ID NO: 297769 - RNA, 22 nt, Human
gacaugugucugcaaguugauc

SEQ ID NO: 297770 - RNA, 22 nt, Human
ugcagguggacacgggagacgg

SEQ ID NO: 297771 - RNA, 20 nt, Human
aaugaggucccacugaggag

SEQ ID NO: 297772 - RNA, 22 nt, Human
gggucuccauguuaacaucacu

SEQ ID NO: 297773 - RNA, 22 nt, Human
ucuucaaagaauuuuaguaauu

SEQ ID NO: 297774 - RNA, 17 nt, Human
agacagguuauaguuga

SEQ ID NO: 297775 - RNA, 22 nt, Human
uuauucagauuggcuacaggau

SEQ ID NO: 297776 - RNA, 22 nt, Human
ugcagggauccuagcugaagag

SEQ ID NO: 297777 - RNA, 22 nt, Human
auauuagggucucuaaauucua

SEQ ID NO: 297778 - RNA, 22 nt, Human
gauguacuuuaaaauacuucag

SEQ ID NO: 297779 - RNA, 22 nt, Human
uuuccuucccuggaugagaagu

SEQ ID NO: 297780 - RNA, 22 nt, Human
ccacccagaccagggaucuggg

SEQ ID NO: 297781 - RNA, 20 nt, Human
ggcaggugcucgcuuggucu

SEQ ID NO: 297782 - RNA, 22 nt, Human
gcacccagaggucagcagugcu

SEQ ID NO: 297783 - RNA, 22 nt, Human
uuauacuaaaacgcauugaauu

SEQ ID NO: 297784 - RNA, 22 nt, Human
uuucucagcucagcaucugggu

SEQ ID NO: 297785 - RNA, 22 nt, Human
uuccagugacuaagcuucugcu

SEQ ID NO: 297786 - RNA, 22 nt, Human
auaaauugugcuuuugacaucu

SEQ ID NO: 297787 - RNA, 22 nt, Human
uccugcagaccucagucagguc

SEQ ID NO: 297788 - RNA, 22 nt, Human
uccagaccaugugagaggcgca

SEQ ID NO: 297789 - RNA, 22 nt, Human
cccugcagaucagugagaacuu

SEQ ID NO: 297790 - RNA, 22 nt, Human
caggccucuccuuagucuggca

SEQ ID NO: 297791 - RNA, 22 nt, Human
cauccagggcagccauggccug

SEQ ID NO: 297792 - RNA, 22 nt, Human
aagcuuuaugacuuggagacag

SEQ ID NO: 297793 - RNA, 20 nt, Human
cuggguggcaagcaaggggg

SEQ ID NO: 297794 - RNA, 22 nt, Human
cccugcagacgucuugaugccu

SEQ ID NO: 297795 - RNA, 22 nt, Human
acaguguagaauccuguacuua

SEQ ID NO: 297796 - RNA, 22 nt, Human
uguccucaggaccuggcacagu

SEQ ID NO: 297797 - RNA, 22 nt, Human
agagggcuuugauucucaguuc

SEQ ID NO: 297798 - RNA, 22 nt, Human
cagcaggugucuagcaaggguc

SEQ ID NO: 297799 - RNA, 22 nt, Human
gaggugucccugacccuuugca

SEQ ID NO: 297800 - RNA, 22 nt, Human
aguauucuggaauucuauguga

SEQ ID NO: 297801 - RNA, 22 nt, Human
acaguuaaauauuucuacuggg

SEQ ID NO: 297802 - RNA, 22 nt, Human
gucaaauauacuaagagguaaa

SEQ ID NO: 297803 - RNA, 22 nt, Human
cagggcagggccacacccccug

SEQ ID NO: 297804 - RNA, 22 nt, Human
ccugggugaaugauauucuaaa

SEQ ID NO: 297805 - RNA, 22 nt, Human
ugcuggguguuccgcacuugac

SEQ ID NO: 297806 - RNA, 21 nt, Human
uuucugaaggcaacaucuauc

SEQ ID NO: 297807 - RNA, 22 nt, Human
ucuggccccuggcaguccugga

SEQ ID NO: 297808 - RNA, 22 nt, Human
ucuagggaacaugggucaagcu

SEQ ID NO: 297809 - RNA, 22 nt, Human
acuguucaagcaaaugacauug

SEQ ID NO: 297810 - RNA, 22 nt, Human
cuucaguucuaaaguagaaugu

SEQ ID NO: 297811 - RNA, 22 nt, Human
uauuagguaaaggacuugcagg

SEQ ID NO: 297812 - RNA, 17 nt, Human
ccagagaguaguuagga

SEQ ID NO: 297813 - RNA, 22 nt, Human
caaaugauacuguuuuuagucu

SEQ ID NO: 297814 - RNA, 22 nt, Human
aauuaugagguagauaucacau

SEQ ID NO: 297815 - RNA, 22 nt, Human
uuuauauguauugacuuugaug

SEQ ID NO: 297816 - RNA, 22 nt, Human
cagaggcugccagccaugugca

SEQ ID NO: 297817 - RNA, 15 nt, Human
gcaggcaggucaccu

SEQ ID NO: 297818 - RNA, 22 nt, Human
ugucuuuauauauuuggaaaau

SEQ ID NO: 297819 - RNA, 22 nt, Human
cuggguguuggguacugaccgu

SEQ ID NO: 297820 - RNA, 22 nt, Human
uacuuucuuucccaagaggugg

SEQ ID NO: 297821 - RNA, 22 nt, Human
gacaggcuuccuaagugccaga

SEQ ID NO: 297822 - RNA, 22 nt, Human
uccugucugcucacagagcugg

SEQ ID NO: 297823 - RNA, 22 nt, Human
uguggggccaaagcccagccac

SEQ ID NO: 297824 - RNA, 22 nt, Human
uccugcaggccagaggggugag

SEQ ID NO: 297825 - RNA, 22 nt, Human
gcaggcagagaaggaacauuua

SEQ ID NO: 297826 - RNA, 22 nt, Human
aaggcauaggacaaaucaguga

SEQ ID NO: 297827 - RNA, 22 nt, Human
uccaggagguagugcuuaauuu

SEQ ID NO: 297828 - RNA, 17 nt, Human
ccuuccucaucuccuuc

SEQ ID NO: 297829 - RNA, 22 nt, Human
cguguccuuuuagcuucagguc

SEQ ID NO: 297830 - RNA, 22 nt, Human
cugaaugagggauucugagggc

SEQ ID NO: 297831 - RNA, 22 nt, Human
uuacauguaaucuaaaauaauu

SEQ ID NO: 297832 - RNA, 22 nt, Human
aacauucuauuuugcuaaaaca

SEQ ID NO: 297833 - RNA, 18 nt, Human
uacuuuauucccccucca

SEQ ID NO: 297834 - RNA, 22 nt, Human
gcaggugggggagaaguuguga

SEQ ID NO: 297835 - RNA, 22 nt, Human
uccucuggcucuuucccuagga

SEQ ID NO: 297836 - RNA, 22 nt, Human
uuccuucuaauuuuacaccuga

SEQ ID NO: 297837 - RNA, 22 nt, Human
cuccaggcucguccaagaucga

SEQ ID NO: 297838 - RNA, 22 nt, Human
cuguccugugcauugucagaug

SEQ ID NO: 297839 - RNA, 22 nt, Human
aggugggguucagucucagccg

SEQ ID NO: 297840 - RNA, 22 nt, Human
guagggacccacagucuauauu

SEQ ID NO: 297841 - RNA, 22 nt, Human
agcagggcucuguggagggugg

SEQ ID NO: 297842 - RNA, 22 nt, Human
cuggauguuuugcuaaggacuc

SEQ ID NO: 297843 - RNA, 22 nt, Human
uuuuaauugcaauuaugguccc

SEQ ID NO: 297844 - RNA, 22 nt, Human
gcagacagccagacugcacugg

SEQ ID NO: 297845 - RNA, 22 nt, Human
ccaggugucaugcgugugaccc

SEQ ID NO: 297846 - RNA, 22 nt, Human
ucacaugaguauuauuuuccaa

SEQ ID NO: 297847 - RNA, 22 nt, Human
acagacagaggcuccaugagga

SEQ ID NO: 297848 - RNA, 22 nt, Human
uagaaacaucagcuaaccaaaa

SEQ ID NO: 297849 - RNA, 22 nt, Human
uccuggguaaacacugaccuuu

SEQ ID NO: 297850 - RNA, 22 nt, Human
cuagccugggauuugaacuuau

SEQ ID NO: 297851 - RNA, 22 nt, Human
acaggcagagaacucagccaga

SEQ ID NO: 297852 - RNA, 22 nt, Human
uuucuuauacuauauugucauc

SEQ ID NO: 297853 - RNA, 22 nt, Human
gcagguguccugggcuggcagu

SEQ ID NO: 297854 - RNA, 22 nt, Human
aagggcagaaagggacgcuuug

SEQ ID NO: 297855 - RNA, 19 nt, Human
uggaccugugcccauggcu

SEQ ID NO: 297856 - RNA, 22 nt, Human
guggaggaagggauucagacca

SEQ ID NO: 297857 - RNA, 22 nt, Human
uguguccucauguggcagagag

SEQ ID NO: 297858 - RNA, 22 nt, Human
cuuuucaugccagcccaucaca

SEQ ID NO: 297859 - RNA, 22 nt, Human
auuugcaaagucguaucuguga

SEQ ID NO: 297860 - RNA, 22 nt, Human
cuucagagugcagaagauuggg

SEQ ID NO: 297861 - RNA, 22 nt, Human
gguguccuuugggggcuccgag

SEQ ID NO: 297862 - RNA, 22 nt, Human
uaacuugguuggugggcaggag

SEQ ID NO: 297863 - RNA, 22 nt, Human
uuccuucuggaagcuucagggg

SEQ ID NO: 297864 - RNA, 22 nt, Human
uuuguagauucauugaacuuuu

SEQ ID NO: 297865 - RNA, 22 nt, Human
ugcuuaaaaugaugauuauuuu

SEQ ID NO: 297866 - RNA, 22 nt, Human
uucuucuucuggcugcaccugg

SEQ ID NO: 297867 - RNA, 20 nt, Human
caugugucaguucucaccca

SEQ ID NO: 297868 - RNA, 22 nt, Human
aggugggggcuguguccuugac

SEQ ID NO: 297869 - RNA, 22 nt, Human
uuggaggaagcucaugggggau

SEQ ID NO: 297870 - RNA, 22 nt, Human
ugaauccagagcuauuucgucc

SEQ ID NO: 297871 - RNA, 22 nt, Human
uacugcaugguggaguggagcu

SEQ ID NO: 297872 - RNA, 22 nt, Human
ucagggcaaugucccucagaag

SEQ ID NO: 297873 - RNA, 20 nt, Human
gaggccucagccucagcucc

SEQ ID NO: 297874 - RNA, 22 nt, Human
gacagacaggugugguaggcac

SEQ ID NO: 297875 - RNA, 22 nt, Human
aauggcuggguuucauuuugua

SEQ ID NO: 297876 - RNA, 22 nt, Human
gagggcucuacucaccacccug

SEQ ID NO: 297877 - RNA, 22 nt, Human
ucucuucuuguguuuuccugcc

SEQ ID NO: 297878 - RNA, 22 nt, Human
aggacaguccgggguccuccac

SEQ ID NO: 297879 - RNA, 22 nt, Human
gggcagguacuggguggugagc

SEQ ID NO: 297880 - RNA, 22 nt, Human
ugcuuaaacccugaucaugugu

SEQ ID NO: 297881 - RNA, 22 nt, Human
uuucuucagccacuccaaacug

SEQ ID NO: 297882 - RNA, 22 nt, Human
auuucagaugaccaaauggaaa

SEQ ID NO: 297883 - RNA, 22 nt, Human
ugucuucaucuccaugcacaga

SEQ ID NO: 297884 - RNA, 22 nt, Human
agugugaguaauucagggaggg

SEQ ID NO: 297885 - RNA, 22 nt, Human
gcaccugcuggggcugaugaga

SEQ ID NO: 297886 - RNA, 22 nt, Human
acauuguuugagaauacagaug

SEQ ID NO: 297887 - RNA, 22 nt, Human
auguaccucugcauuccugccu

SEQ ID NO: 297888 - RNA, 19 nt, Human
uccaggcauccuucaggcu

SEQ ID NO: 297889 - RNA, 22 nt, Human
ucagagaguuacacaaauuguu

SEQ ID NO: 297890 - RNA, 22 nt, Human
ugcaggugauucugaugcaguu

SEQ ID NO: 297891 - RNA, 22 nt, Human
ccaggugucuguggccagcccu

SEQ ID NO: 297892 - RNA, 22 nt, Human
agggcacccucucugcaguacc

SEQ ID NO: 297893 - RNA, 22 nt, Human
uuugcaaauauguguuucuauu

SEQ ID NO: 297894 - RNA, 22 nt, Human
uggagcaggaaacaucuagagg

SEQ ID NO: 297895 - RNA, 19 nt, Human
aggaaggaaccugagucug

SEQ ID NO: 297896 - RNA, 22 nt, Human
cagguggcuuauuagggucagu

SEQ ID NO: 297897 - RNA, 22 nt, Human
aaugggcuuuggccaguaggag

SEQ ID NO: 297898 - RNA, 22 nt, Human
uguagaaagcucuucugaaauc

SEQ ID NO: 297899 - RNA, 22 nt, Human
cagaggcucagauggcccuggc

SEQ ID NO: 297900 - RNA, 22 nt, Human
cagcuuuagagaaaacauauuu

SEQ ID NO: 297901 - RNA, 22 nt, Human
uugcaggguacauucuuagaau

SEQ ID NO: 297902 - RNA, 22 nt, Human
aucuuccuucacuuucucccac

SEQ ID NO: 297903 - RNA, 22 nt, Human
cuucucccgaagccgguucugc

SEQ ID NO: 297904 - RNA, 22 nt, Human
uaucauuuaacagaaucauugc

SEQ ID NO: 297905 - RNA, 22 nt, Human
ggguggggccaggcaauuugca

SEQ ID NO: 297906 - RNA, 22 nt, Human
aaagcucuuauagcagagugug

SEQ ID NO: 297907 - RNA, 22 nt, Human
gcaggugggagccgcugccuga

SEQ ID NO: 297908 - RNA, 22 nt, Human
agcagggcuugccgcuuguccu

SEQ ID NO: 297909 - RNA, 22 nt, Human
uacugcauaacuggcauguggg

SEQ ID NO: 297910 - RNA, 22 nt, Human
ggggaccuuuccauuucugaga

SEQ ID NO: 297911 - RNA, 22 nt, Human
uucuucagagaguagaagcaag

SEQ ID NO: 297912 - RNA, 22 nt, Human
ugcugggugguugcuccucccg

SEQ ID NO: 297913 - RNA, 23 nt, Human
ucaggugugcggacugcugaguc

SEQ ID NO: 297914 - RNA, 22 nt, Human
ugggaccugcucuuggaaugag

SEQ ID NO: 297915 - RNA, 22 nt, Human
cagaagucacccucagaauaac

SEQ ID NO: 297916 - RNA, 22 nt, Human
ugggccaguccagccccaggga

SEQ ID NO: 297917 - RNA, 22 nt, Human
cagaggcauacucccagucuug

SEQ ID NO: 297918 - RNA, 22 nt, Human
ucauuuguugaacuuuagugcg

SEQ ID NO: 297919 - RNA, 22 nt, Human
aacauacauauuucagugucca

SEQ ID NO: 297920 - RNA, 19 nt, Human
ccagagagcuagguacaga

SEQ ID NO: 297921 - RNA, 20 nt, Human
ccagcauguacacaugugga

SEQ ID NO: 297922 - RNA, 22 nt, Human
ggcuacuagacuuugauacuag

SEQ ID NO: 297923 - RNA, 22 nt, Human
uuucaaauagaaucuuuccaaa

SEQ ID NO: 297924 - RNA, 22 nt, Human
gcuuuacugagaugacacaggg

SEQ ID NO: 297925 - RNA, 20 nt, Human
uucuuaaagaccucacuuug

SEQ ID NO: 297926 - RNA, 22 nt, Human
aaagcagauucugaugcaguag

SEQ ID NO: 297927 - RNA, 22 nt, Human
uuuacagucugucuagcaaugu

SEQ ID NO: 297928 - RNA, 22 nt, Human
uccugaggcacaauccuagaau

SEQ ID NO: 297929 - RNA, 22 nt, Human
gaugaggucuacauuguuaaaa

SEQ ID NO: 297930 - RNA, 22 nt, Human
uguucagagacagaaauucuaa

SEQ ID NO: 297931 - RNA, 22 nt, Human
aggaggaauugacacagaagcc

SEQ ID NO: 297932 - RNA, 22 nt, Human
gggaacuucagaaagucgcugc

SEQ ID NO: 297933 - RNA, 22 nt, Human
cuuugcugagcugguuguucaa

SEQ ID NO: 297934 - RNA, 22 nt, Human
cauuuccacucugggagucaga

SEQ ID NO: 297935 - RNA, 22 nt, Human
agcugcaaguguugccuccuac

SEQ ID NO: 297936 - RNA, 22 nt, Human
uuccugggcucuggcuggccua

SEQ ID NO: 297937 - RNA, 22 nt, Human
gggaccuggcaccuuugcucug

SEQ ID NO: 297938 - RNA, 22 nt, Human
cagguugaaaguggaggagcua

SEQ ID NO: 297939 - RNA, 22 nt, Human
acuuagauaacaaaccuguggu

SEQ ID NO: 297940 - RNA, 22 nt, Human
acaacauucuuaaauacacuga

SEQ ID NO: 297941 - RNA, 22 nt, Human
ggcagguguggaguguuauuuu

SEQ ID NO: 297942 - RNA, 22 nt, Human
uuuaagaaguuauguuauaaau

SEQ ID NO: 297943 - RNA, 22 nt, Human
cuugaaucuggcuuugccacuu

SEQ ID NO: 297944 - RNA, 22 nt, Human
uaugugucuuuaucuggcucuu

SEQ ID NO: 297945 - RNA, 22 nt, Human
uucuucuuucccccugugguac

SEQ ID NO: 297946 - RNA, 22 nt, Human
uccugcagccacugcaggcaga

SEQ ID NO: 297947 - RNA, 22 nt, Human
ccagguguccccgucacugcag

SEQ ID NO: 297948 - RNA, 22 nt, Human
caaaugauaccuauuacuaggc

SEQ ID NO: 297949 - RNA, 22 nt, Human
ccauguguugagauuccagccu

SEQ ID NO: 297950 - RNA, 22 nt, Human
uauuccagguauucuucaagag

SEQ ID NO: 297951 - RNA, 20 nt, Human
aaguuuucuccaaauacagu

SEQ ID NO: 297952 - RNA, 15 nt, Human
gcauguguaauaggc

SEQ ID NO: 297953 - RNA, 22 nt, Human
uuauuagggugguuuauguucu

SEQ ID NO: 297954 - RNA, 22 nt, Human
agguggggaguauauguaauug

SEQ ID NO: 297955 - RNA, 22 nt, Human
uuaauuuucucaucugugaaau

SEQ ID NO: 297956 - RNA, 22 nt, Human
uggaccugaagaauaggaagua

SEQ ID NO: 297957 - RNA, 22 nt, Human
uuguuucaaauauuucagaaua

SEQ ID NO: 297958 - RNA, 22 nt, Human
caauuucucuuuauaucucaca

SEQ ID NO: 297959 - RNA, 22 nt, Human
gaagggagaagguugggugacg

SEQ ID NO: 297960 - RNA, 22 nt, Human
uugaaauacugcauuguucagu

SEQ ID NO: 297961 - RNA, 22 nt, Human
acacuuuaugucuagaucuggg

SEQ ID NO: 297962 - RNA, 22 nt, Human
aggcuuuaaguggccuacagcu

SEQ ID NO: 297963 - RNA, 22 nt, Human
guuucacagucugcagaauuuu

SEQ ID NO: 297964 - RNA, 22 nt, Human
uauuuauuggacaguguugcug

SEQ ID NO: 297965 - RNA, 22 nt, Human
ggcaggcauggggucugccauu

SEQ ID NO: 297966 - RNA, 22 nt, Human
cuacauaaauauuuaugugucu

SEQ ID NO: 297967 - RNA, 22 nt, Human
gagggcagugaauuuugaagcu

SEQ ID NO: 297968 - RNA, 22 nt, Human
uccaggcaugucccaagccgga

SEQ ID NO: 297969 - RNA, 22 nt, Human
uucaucaauguguuuaauaaug

SEQ ID NO: 297970 - RNA, 22 nt, Human
cauguuuuguguacagaauauu

SEQ ID NO: 297971 - RNA, 22 nt, Human
uucugcaucugaauuuaaguac

SEQ ID NO: 297972 - RNA, 22 nt, Human
ucaggugggcaguggguugagc

SEQ ID NO: 297973 - RNA, 22 nt, Human
agccggccauguggucuugugc

SEQ ID NO: 297974 - RNA, 22 nt, Human
auugcuggcccagaugcuuuag

SEQ ID NO: 297975 - RNA, 22 nt, Human
agcccuaacucccaguaucuug

SEQ ID NO: 297976 - RNA, 21 nt, Human
ugacccuucuagcagaacaca

SEQ ID NO: 297977 - RNA, 20 nt, Human
acaugcaguggucauuucag

SEQ ID NO: 297978 - RNA, 22 nt, Human
ggcaggugacggggaugaguau

SEQ ID NO: 297979 - RNA, 22 nt, Human
ggcaggugcugggagcaucuca

SEQ ID NO: 297980 - RNA, 22 nt, Human
uuuccauguuaucuugcagacu

SEQ ID NO: 297981 - RNA, 22 nt, Human
ugaaaucaauugcaauguuuau

SEQ ID NO: 297982 - RNA, 22 nt, Human
guuauugagguggagucucacu

SEQ ID NO: 297983 - RNA, 22 nt, Human
acaccauacucauguugguucc

SEQ ID NO: 297984 - RNA, 22 nt, Human
cuuucucaaugccggaaggcac

SEQ ID NO: 297985 - RNA, 22 nt, Human
agacagacuuugaucuggaugu

SEQ ID NO: 297986 - RNA, 22 nt, Human
acagguguaauuugcccgaggu

SEQ ID NO: 297987 - RNA, 22 nt, Human
acauuucucuugaugucucuau

SEQ ID NO: 297988 - RNA, 22 nt, Human
ccaggccuggccaggggaugcc

SEQ ID NO: 297989 - RNA, 22 nt, Human
cauuuauucauuugcuagggcu

SEQ ID NO: 297990 - RNA, 22 nt, Human
ucuauuuuauacucaaaucuuc

SEQ ID NO: 297991 - RNA, 22 nt, Human
caggugucagcagcacuguacu

SEQ ID NO: 297992 - RNA, 22 nt, Human
auguaauaggguaacauaacau

SEQ ID NO: 297993 - RNA, 22 nt, Human
uucuucaugcuguugcugcuug

SEQ ID NO: 297994 - RNA, 22 nt, Human
gucugcccuuccucuccacgau

SEQ ID NO: 297995 - RNA, 22 nt, Human
uauauuuaaauccagguugaaa

SEQ ID NO: 297996 - RNA, 22 nt, Human
uucagcaaacacgaugcuuguu

SEQ ID NO: 297997 - RNA, 22 nt, Human
uccuucuuucccccuagucauu

SEQ ID NO: 297998 - RNA, 22 nt, Human
gaggcuggcagaaaagcacagg

SEQ ID NO: 297999 - RNA, 20 nt, Human
auuuggcaugaaguauugau

SEQ ID NO: 298000 - RNA, 20 nt, Human
agguggcucuuccugggcuu

SEQ ID NO: 298001 - RNA, 22 nt, Human
agcugcaaccuuagcuauaggc

SEQ ID NO: 298002 - RNA, 21 nt, Human
ccuucuccacagggucuccgg

SEQ ID NO: 298003 - RNA, 20 nt, Human
uuugacucaggccuuuagcc

SEQ ID NO: 298004 - RNA, 22 nt, Human
gauuuauugucccuguccugcu

SEQ ID NO: 298005 - RNA, 22 nt, Human
aaauccuaagcagaggaauuua

SEQ ID NO: 298006 - RNA, 22 nt, Human
aagacaggaacauagcaaaucc

SEQ ID NO: 298007 - RNA, 22 nt, Human
ucuucacagaugcauauacuuc

SEQ ID NO: 298008 - RNA, 22 nt, Human
gugcaggggccuccccuugcug

SEQ ID NO: 298009 - RNA, 22 nt, Human
aagcuuuaagugucagucagcc

SEQ ID NO: 298010 - RNA, 22 nt, Human
uauuuccaggccccacucuaga

SEQ ID NO: 298011 - RNA, 22 nt, Human
gacagggaaacauugaaguguc

SEQ ID NO: 298012 - RNA, 22 nt, Human
gcacccagggacuuggcuggcc

SEQ ID NO: 298013 - RNA, 22 nt, Human
ugggugcucugcuucccugcac

SEQ ID NO: 298014 - RNA, 22 nt, Human
ucuggguggcagugauggcgug

SEQ ID NO: 298015 - RNA, 22 nt, Human
ucuguucaguuguaccuucccc

SEQ ID NO: 298016 - RNA, 22 nt, Human
ggaggauuugucaucugaagau

SEQ ID NO: 298017 - RNA, 22 nt, Human
aacagacauauuuuuaauaugc

SEQ ID NO: 298018 - RNA, 22 nt, Human
aaauaugaaugauaagaguuau

SEQ ID NO: 298019 - RNA, 22 nt, Human
gagggcaggggucuugcacggu

SEQ ID NO: 298020 - RNA, 22 nt, Human
aacagacaacuccuguggcuca

SEQ ID NO: 298021 - RNA, 22 nt, Human
cauuggaaugcauuugaagaga

SEQ ID NO: 298022 - RNA, 22 nt, Human
ucagcuuuugucagaaauugua

SEQ ID NO: 298023 - RNA, 22 nt, Human
ugguccuguguucuuccugccu

SEQ ID NO: 298024 - RNA, 22 nt, Human
uuccagaaaucuuucagcucaa

SEQ ID NO: 298025 - RNA, 22 nt, Human
uuaguuuauaauucauuucugu

SEQ ID NO: 298026 - RNA, 22 nt, Human
aucauucuagcuguuguguuga

SEQ ID NO: 298027 - RNA, 22 nt, Human
ggcuccacccugcuuccagaag

SEQ ID NO: 298028 - RNA, 22 nt, Human
agaguggcagcaagucagguag

SEQ ID NO: 298029 - RNA, 22 nt, Human
acagcuuuugaaaaauuacugg

SEQ ID NO: 298030 - RNA, 22 nt, Human
uuugacucccaaacugugauuu

SEQ ID NO: 298031 - RNA, 22 nt, Human
cagaucaagcuguauggucaga

SEQ ID NO: 298032 - RNA, 22 nt, Human
uuuccuuccauguugggcaaaa

SEQ ID NO: 298033 - RNA, 22 nt, Human
cuucuucccagcuucccucacc

SEQ ID NO: 298034 - RNA, 22 nt, Human
uggagcugccuggcaccuacag

SEQ ID NO: 298035 - RNA, 21 nt, Human
cuggaggcagguggugccagg

SEQ ID NO: 298036 - RNA, 20 nt, Human
uugauucaagggcugaugga

SEQ ID NO: 298037 - RNA, 22 nt, Human
aggaggaacucagaaagaaggu

SEQ ID NO: 298038 - RNA, 18 nt, Human
gcucuggcucaccuccag

SEQ ID NO: 298039 - RNA, 22 nt, Human
agcagggcugugcuccuuccga

SEQ ID NO: 298040 - RNA, 22 nt, Human
cuuucuuucgaagacgugauua

SEQ ID NO: 298041 - RNA, 22 nt, Human
auuuauuauugugguuacuucu

SEQ ID NO: 298042 - RNA, 21 nt, Human
gcugggucagcagguccucug

SEQ ID NO: 298043 - RNA, 22 nt, Human
gugagcaggauuucauggugua

SEQ ID NO: 298044 - RNA, 22 nt, Human
gguggggcucagcaaucugugu

SEQ ID NO: 298045 - RNA, 22 nt, Human
uggcaggugccaugggcucaga

SEQ ID NO: 298046 - RNA, 22 nt, Human
agcugcaaagaugauuuguugu

SEQ ID NO: 298047 - RNA, 22 nt, Human
aacaaacaaacauuuugucauc

SEQ ID NO: 298048 - RNA, 22 nt, Human
cuucagaauccagaaucagaau

SEQ ID NO: 298049 - RNA, 22 nt, Human
cagaacagacuuaacagggcug

SEQ ID NO: 298050 - RNA, 22 nt, Human
ucugggaacugagcuccccuag

SEQ ID NO: 298051 - RNA, 22 nt, Human
uagggaccuuagaauuguaugu

SEQ ID NO: 298052 - RNA, 22 nt, Human
uauuuccauguuagaacuaagu

SEQ ID NO: 298053 - RNA, 22 nt, Human
aaggaugaacauuaauacauca

SEQ ID NO: 298054 - RNA, 22 nt, Human
ugcugggucagugagagcaggg

SEQ ID NO: 298055 - RNA, 22 nt, Human
guguguccucaguaguggcaug

SEQ ID NO: 298056 - RNA, 22 nt, Human
gaugguccuccugcugccucuc

SEQ ID NO: 298057 - RNA, 22 nt, Human
uuccaggauagcuuucaggaau

SEQ ID NO: 298058 - RNA, 22 nt, Human
ugacauguuagggaaaugugau

SEQ ID NO: 298059 - RNA, 22 nt, Human
aguuauuucaguaacauaauag

SEQ ID NO: 298060 - RNA, 22 nt, Human
aaacauuugcaacucgguuugg

SEQ ID NO: 298061 - RNA, 22 nt, Human
auucagcaaacauuuauugugu

SEQ ID NO: 298062 - RNA, 22 nt, Human
cauuuguaucugggcugcugug

SEQ ID NO: 298063 - RNA, 22 nt, Human
auugcuuucuuuggggaacugu

SEQ ID NO: 298064 - RNA, 19 nt, Human
agugugagacuccaucuca

SEQ ID NO: 298065 - RNA, 22 nt, Human
ccugccuucuaaagcgcccgcc

SEQ ID NO: 298066 - RNA, 22 nt, Human
ccuggagggcgccgcacagucc

SEQ ID NO: 298067 - RNA, 22 nt, Human
uccaugaguuugaggaaaagag

SEQ ID NO: 298068 - RNA, 22 nt, Human
gcaugugucuccccaguggagg

SEQ ID NO: 298069 - RNA, 22 nt, Human
gacagacauuuccugauccaau

SEQ ID NO: 298070 - RNA, 21 nt, Human
uuuaauuugcauguaugacgc

SEQ ID NO: 298071 - RNA, 21 nt, Human
agcaggugaaccuccaguaca

SEQ ID NO: 298072 - RNA, 22 nt, Human
guuuauuaacugucaagugauu

SEQ ID NO: 298073 - RNA, 22 nt, Human
agagagcauggcacagaggggu

SEQ ID NO: 298074 - RNA, 22 nt, Human
uaccugcagcgggaauccauua

SEQ ID NO: 298075 - RNA, 22 nt, Human
accugcagccacuucucuccuu

SEQ ID NO: 298076 - RNA, 22 nt, Human
gacagacaugggacuucauacu

SEQ ID NO: 298077 - RNA, 22 nt, Human
uuucuuuguuguuaucacauca

SEQ ID NO: 298078 - RNA, 22 nt, Human
cuggaggagagucugaaugaca

SEQ ID NO: 298079 - RNA, 22 nt, Human
uuggcuuuuaugcagcuuaggu

SEQ ID NO: 298080 - RNA, 22 nt, Human
ugcaggugcagcgauacuguga

SEQ ID NO: 298081 - RNA, 22 nt, Human
uuguuuacaaguuacucagucu

SEQ ID NO: 298082 - RNA, 23 nt, Human
ugcuguggauggcagguccuugc

SEQ ID NO: 298083 - RNA, 22 nt, Human
agaauuguucuguagcuuggcu

SEQ ID NO: 298084 - RNA, 21 nt, Human
uaaaucucuguauucuucagu

SEQ ID NO: 298085 - RNA, 22 nt, Human
acuucuucuucagcugggggau

SEQ ID NO: 298086 - RNA, 22 nt, Human
aguucucaagacaauuaccugu

SEQ ID NO: 298087 - RNA, 22 nt, Human
agaguacugccucaguuaugaa

SEQ ID NO: 298088 - RNA, 22 nt, Human
ugucuuuagaaagaagcagaca

SEQ ID NO: 298089 - RNA, 22 nt, Human
aggcagguuuacucuuauuugg

SEQ ID NO: 298090 - RNA, 22 nt, Human
gagacugcauagauggccacaa

SEQ ID NO: 298091 - RNA, 22 nt, Human
auucugauaucuuauucuagcu

SEQ ID NO: 298092 - RNA, 22 nt, Human
uucucuuuucaccaguugcuaa

SEQ ID NO: 298093 - RNA, 22 nt, Human
ucaggugugaacuauuuggaaa

SEQ ID NO: 298094 - RNA, 22 nt, Human
uaauaacaauuguaggacauga

SEQ ID NO: 298095 - RNA, 21 nt, Human
ugcuuuaugggaaaaauguca

SEQ ID NO: 298096 - RNA, 19 nt, Human
guugaaaguaggugagggu

SEQ ID NO: 298097 - RNA, 22 nt, Human
cuggcuuucauuucaagcacgu

SEQ ID NO: 298098 - RNA, 22 nt, Human
cuaaaauuaucaagauaauucc

SEQ ID NO: 298099 - RNA, 22 nt, Human
cauuuugugcuagacacuaugg

SEQ ID NO: 298100 - RNA, 22 nt, Human
cagacaggguccuguccgucac

SEQ ID NO: 298101 - RNA, 22 nt, Human
guaaaauagaauaacguggcua

SEQ ID NO: 298102 - RNA, 22 nt, Human
gcagggcagcugaagcuaggug

SEQ ID NO: 298103 - RNA, 22 nt, Human
aguccagugucaaggugccauu

SEQ ID NO: 298104 - RNA, 22 nt, Human
aaauggaauguguuuauaauuc

SEQ ID NO: 298105 - RNA, 22 nt, Human
aaguuucaugauguaauuauug

SEQ ID NO: 298106 - RNA, 22 nt, Human
aaucuucacagagaaaauuagg

SEQ ID NO: 298107 - RNA, 20 nt, Human
cccaguguccagccuugcca

SEQ ID NO: 298108 - RNA, 22 nt, Human
gguggggcuaggaccucaggau

SEQ ID NO: 298109 - RNA, 22 nt, Human
gcaucuaauccaguccagcauc

SEQ ID NO: 298110 - RNA, 22 nt, Human
cuguuuucuagggcugagguga

SEQ ID NO: 298111 - RNA, 20 nt, Human
guaaaauauggucuuugggu

SEQ ID NO: 298112 - RNA, 22 nt, Human
agcuuguuaaggaugcauauua

SEQ ID NO: 298113 - RNA, 22 nt, Human
cuggauggucccaugagcagcu

SEQ ID NO: 298114 - RNA, 22 nt, Human
gcucucuugguggcuguccugg

SEQ ID NO: 298115 - RNA, 23 nt, Human
ggacaugucucuggguauuuuga

SEQ ID NO: 298116 - RNA, 22 nt, Human
caguucuuauuuggccaguguc

SEQ ID NO: 298117 - RNA, 22 nt, Human
uacaaagucagaauaacaggug

SEQ ID NO: 298118 - RNA, 22 nt, Human
aaggcuuuugggaauuuucaac

SEQ ID NO: 298119 - RNA, 22 nt, Human
aauaauuagugggacagagaac

SEQ ID NO: 298120 - RNA, 22 nt, Human
uguccugggaaaucccuuaggc

SEQ ID NO: 298121 - RNA, 22 nt, Human
cucuggaagugauggcagguca

SEQ ID NO: 298122 - RNA, 22 nt, Human
cagacaggguuuuggucuuugg

SEQ ID NO: 298123 - RNA, 22 nt, Human
acugaugaagaguaccacuguu

SEQ ID NO: 298124 - RNA, 22 nt, Human
aaauccuaaaaguuugacuuaa

SEQ ID NO: 298125 - RNA, 19 nt, Human
aaggugguuugucucugua

SEQ ID NO: 298126 - RNA, 22 nt, Human
uucuguuuuagaaauaaguagu

SEQ ID NO: 298127 - RNA, 22 nt, Human
auucuucacauaagugcuguac

SEQ ID NO: 298128 - RNA, 22 nt, Human
uuccuucuucauuguguuacag

SEQ ID NO: 298129 - RNA, 22 nt, Human
gguguccuucguccgcuggcau

SEQ ID NO: 298130 - RNA, 22 nt, Human
uuuccauguuggugaaaugagg

SEQ ID NO: 298131 - RNA, 22 nt, Human
ugaaagcuguacaugugguaca

SEQ ID NO: 298132 - RNA, 22 nt, Human
uuuacagucaccaaacuuugcu

SEQ ID NO: 298133 - RNA, 22 nt, Human
agcuuuauggugccucacuuga

SEQ ID NO: 298134 - RNA, 22 nt, Human
acacaaauuguaggauaauugc

SEQ ID NO: 298135 - RNA, 22 nt, Human
guguguccuugggccucugcag

SEQ ID NO: 298136 - RNA, 22 nt, Human
aagugguuauuuugaucuagaa

SEQ ID NO: 298137 - RNA, 22 nt, Human
auauuucaugggguuccauacu

SEQ ID NO: 298138 - RNA, 22 nt, Human
aggagugggggcgagaaguuaa

SEQ ID NO: 298139 - RNA, 22 nt, Human
ccagugcauaaucaauacagcc

SEQ ID NO: 298140 - RNA, 22 nt, Human
cacccaggcagguggcugagaa

SEQ ID NO: 298141 - RNA, 22 nt, Human
uuauugacugaucagagaggga

SEQ ID NO: 298142 - RNA, 22 nt, Human
uagcuuuaccauagaagaguau

SEQ ID NO: 298143 - RNA, 22 nt, Human
uucuucuuuaucucaguauccu

SEQ ID NO: 298144 - RNA, 21 nt, Human
aagaguggcugaggaggugau

SEQ ID NO: 298145 - RNA, 22 nt, Human
aauuucagaccauuugcaauua

SEQ ID NO: 298146 - RNA, 22 nt, Human
aaggugucucucugcuucuugg

SEQ ID NO: 298147 - RNA, 22 nt, Human
ucuucuucccaucccucaaaug

SEQ ID NO: 298148 - RNA, 22 nt, Human
cgcaggugaaagaggcugggca

SEQ ID NO: 298149 - RNA, 21 nt, Human
uucuucaaagaagaaggcaca

SEQ ID NO: 298150 - RNA, 22 nt, Human
aaacaucaauugcaucucccaa

SEQ ID NO: 298151 - RNA, 22 nt, Human
gcaggcagagguggaggagaca

SEQ ID NO: 298152 - RNA, 22 nt, Human
ccagagagucgaugggggacac

SEQ ID NO: 298153 - RNA, 22 nt, Human
cuauuagacacaauuagugauu

SEQ ID NO: 298154 - RNA, 22 nt, Human
ugguggcagcugagugucaggu

SEQ ID NO: 298155 - RNA, 22 nt, Human
ucugaacagaaaagaugcacaa

SEQ ID NO: 298156 - RNA, 22 nt, Human
gggcagguuauuggaguaggga

SEQ ID NO: 298157 - RNA, 22 nt, Human
gcaggcagaucaccugucagga

SEQ ID NO: 298158 - RNA, 20 nt, Human
uuuuccagaaaguaucauug

SEQ ID NO: 298159 - RNA, 22 nt, Human
cuucucccuggcuucugcacac

SEQ ID NO: 298160 - RNA, 22 nt, Human
ugcugccaucucaacugcccuu

SEQ ID NO: 298161 - RNA, 22 nt, Human
ugcaggugccucuugagcuugu

SEQ ID NO: 298162 - RNA, 22 nt, Human
uccaggcacgaggcccugugca

SEQ ID NO: 298163 - RNA, 22 nt, Human
ggagcugagaguagucccuuuu

SEQ ID NO: 298164 - RNA, 21 nt, Human
cacaggugggucagugaggcc

SEQ ID NO: 298165 - RNA, 22 nt, Human
caguguuuaaucauugugaauu

SEQ ID NO: 298166 - RNA, 22 nt, Human
ugaaucauggauaaauagcuua

SEQ ID NO: 298167 - RNA, 20 nt, Human
auguccucagccacugcccu

SEQ ID NO: 298168 - RNA, 22 nt, Human
uugaaguuguaguucagugaag

SEQ ID NO: 298169 - RNA, 22 nt, Human
cagagcauuaaaaccagcucug

SEQ ID NO: 298170 - RNA, 22 nt, Human
gaauuugaaaagugaugggaau

SEQ ID NO: 298171 - RNA, 22 nt, Human
auuugcuuuaagguauaaaagg

SEQ ID NO: 298172 - RNA, 22 nt, Human
gacuuuauuacuaacccuguga

SEQ ID NO: 298173 - RNA, 22 nt, Human
aacaugauuuaguauaaugcag

SEQ ID NO: 298174 - RNA, 22 nt, Human
ucuucagagugaaagucuguga

SEQ ID NO: 298175 - RNA, 22 nt, Human
caugcagccugugaacaguguc

SEQ ID NO: 298176 - RNA, 22 nt, Human
uucuuuucuuggcaggaguaga

SEQ ID NO: 298177 - RNA, 22 nt, Human
uuuauugucuucguggugccua

SEQ ID NO: 298178 - RNA, 22 nt, Human
acagaaauugggcaaauggaag

SEQ ID NO: 298179 - RNA, 22 nt, Human
acagacaguaaauaguguggcu

SEQ ID NO: 298180 - RNA, 22 nt, Human
gggaccuggggacuccuuguuc

SEQ ID NO: 298181 - RNA, 22 nt, Human
ccagagaggccuuggcaagaca

SEQ ID NO: 298182 - RNA, 22 nt, Human
uggguggagaaguggaccugcu

SEQ ID NO: 298183 - RNA, 22 nt, Human
uccaggcauaagccuugagugu

SEQ ID NO: 298184 - RNA, 22 nt, Human
ggucuggcaggugaggacucag

SEQ ID NO: 298185 - RNA, 22 nt, Human
agaggcucugccgccucaggua

SEQ ID NO: 298186 - RNA, 22 nt, Human
gggcaggucugggucagccuga

SEQ ID NO: 298187 - RNA, 22 nt, Human
auaugcauguacgugugcacaa

SEQ ID NO: 298188 - RNA, 22 nt, Human
gacccaggguggucaccugaaa

SEQ ID NO: 298189 - RNA, 22 nt, Human
agcccuaaauuaucuuuauuuu

SEQ ID NO: 298190 - RNA, 22 nt, Human
caggcauaucuacauuauccaa

SEQ ID NO: 298191 - RNA, 22 nt, Human
cuguccucuguccucagcagga

SEQ ID NO: 298192 - RNA, 22 nt, Human
agauuugcggcuuuacuuugca

SEQ ID NO: 298193 - RNA, 22 nt, Human
gagaggagguggcuaugacagc

SEQ ID NO: 298194 - RNA, 22 nt, Human
ggaggcagaauagagugugggu

SEQ ID NO: 298195 - RNA, 16 nt, Human
aaggaaugucauucug

SEQ ID NO: 298196 - RNA, 22 nt, Human
accaggcagucaccguccagga

SEQ ID NO: 298197 - RNA, 22 nt, Human
uguccuuuguucccugucucug

SEQ ID NO: 298198 - RNA, 22 nt, Human
aaagugguuuuucagacuuuga

SEQ ID NO: 298199 - RNA, 22 nt, Human
uccaggcaguuuuccagguugu

SEQ ID NO: 298200 - RNA, 22 nt, Human
acuguucauuuguccuguaucu

SEQ ID NO: 298201 - RNA, 22 nt, Human
gugggugugagugacggcgucc

SEQ ID NO: 298202 - RNA, 22 nt, Human
uguggggcucccuggcagccug

SEQ ID NO: 298203 - RNA, 22 nt, Human
cagagaaaaaauccugcucuca

SEQ ID NO: 298204 - RNA, 22 nt, Human
ucagcuuucuauguugcuaaac

SEQ ID NO: 298205 - RNA, 21 nt, Human
gggaggaagcugcuucucucu

SEQ ID NO: 298206 - RNA, 21 nt, Human
agcugcaaaaacauacaguuc

SEQ ID NO: 298207 - RNA, 22 nt, Human
cuccaugaauuugagcuuugug

SEQ ID NO: 298208 - RNA, 22 nt, Human
agacagacaaaauuccugccug

SEQ ID NO: 298209 - RNA, 22 nt, Human
uccuggguucauguccuggugc

SEQ ID NO: 298210 - RNA, 20 nt, Human
gccugcagagaaggucagag

SEQ ID NO: 298211 - RNA, 19 nt, Human
gcgaggaagucacuguggu

SEQ ID NO: 298212 - RNA, 22 nt, Human
ugcucauuggcgaucugaggga

SEQ ID NO: 298213 - RNA, 22 nt, Human
ggcuccagguuuaaggguaugu

SEQ ID NO: 298214 - RNA, 23 nt, Human
uccaugagaugugggcuucuagu

SEQ ID NO: 298215 - RNA, 22 nt, Human
uuucuugagcccaggaggugga

SEQ ID NO: 298216 - RNA, 22 nt, Human
ccuugcucucccaagcccgcag

SEQ ID NO: 298217 - RNA, 22 nt, Human
auuguauaacagcauguauuuu

SEQ ID NO: 298218 - RNA, 22 nt, Human
ucacugggagaugugggaaggg

SEQ ID NO: 298219 - RNA, 22 nt, Human
gaggugguucagguagagccca

SEQ ID NO: 298220 - RNA, 22 nt, Human
uuccucaacaacuucccuacag

SEQ ID NO: 298221 - RNA, 22 nt, Human
cugggaaauggcuucgagcuca

SEQ ID NO: 298222 - RNA, 22 nt, Human
ugcagggcacggugcgcguggg

SEQ ID NO: 298223 - RNA, 22 nt, Human
uuauugaguuuacagcuuuaga

SEQ ID NO: 298224 - RNA, 22 nt, Human
uuccuucuuugugguagaaagu

SEQ ID NO: 298225 - RNA, 22 nt, Human
uuuccuucucagggagcuucaa

SEQ ID NO: 298226 - RNA, 22 nt, Human
uauguacuacacuagaacauuu

SEQ ID NO: 298227 - RNA, 22 nt, Human
ucacaauuuggauacagcuaug

SEQ ID NO: 298228 - RNA, 22 nt, Human
uuucucauuuagaguggcaggg

SEQ ID NO: 298229 - RNA, 22 nt, Human
caauuucuuguuaauucucagg

SEQ ID NO: 298230 - RNA, 22 nt, Human
uuucugauauacuguagaaucc

SEQ ID NO: 298231 - RNA, 22 nt, Human
ucccacaggagccugaguccca

SEQ ID NO: 298232 - RNA, 17 nt, Human
acagcagggaaguguug

SEQ ID NO: 298233 - RNA, 22 nt, Human
gagagcugggcuuugggugaag

SEQ ID NO: 298234 - RNA, 22 nt, Human
ugcuuuauuggaaccucauccu

SEQ ID NO: 298235 - RNA, 22 nt, Human
ugcugaggagguggcugugcuu

SEQ ID NO: 298236 - RNA, 22 nt, Human
aaauacagauuccagggucuua

SEQ ID NO: 298237 - RNA, 19 nt, Human
gcaugcagaguaagaaggu

SEQ ID NO: 298238 - RNA, 22 nt, Human
uagggacacugcucaugaguuc

SEQ ID NO: 298239 - RNA, 22 nt, Human
ucuggcccaucuucugccacca

SEQ ID NO: 298240 - RNA, 22 nt, Human
auuuccugggucucacuccaga

SEQ ID NO: 298241 - RNA, 22 nt, Human
uugcuuuauuuggcaugccacu

SEQ ID NO: 298242 - RNA, 22 nt, Human
acauguaaaaauuaagguaaga

SEQ ID NO: 298243 - RNA, 22 nt, Human
guguccaucucuguaugcugcu

SEQ ID NO: 298244 - RNA, 22 nt, Human
cacagaaaaaggcuugaaaauc

SEQ ID NO: 298245 - RNA, 22 nt, Human
agccagagacugugucuguaau

SEQ ID NO: 298246 - RNA, 19 nt, Human
ugguggaggugcaccugac

SEQ ID NO: 298247 - RNA, 22 nt, Human
cgacccuacagacagugcugag

SEQ ID NO: 298248 - RNA, 22 nt, Human
gcagacaggggcuuaggaaagg

SEQ ID NO: 298249 - RNA, 22 nt, Human
ucuuccucaugaauucucguau

SEQ ID NO: 298250 - RNA, 22 nt, Human
aucacaaaggcugcuucaugau

SEQ ID NO: 298251 - RNA, 22 nt, Human
uucuccaacacaagcaugaugu

SEQ ID NO: 298252 - RNA, 22 nt, Human
cagacaggagacuggaucaugg

SEQ ID NO: 298253 - RNA, 22 nt, Human
uucuuguauauaaaaaucauuu

SEQ ID NO: 298254 - RNA, 22 nt, Human
gagggcuccucacauucucuau

SEQ ID NO: 298255 - RNA, 21 nt, Human
ugacugaggcuucuucacaca

SEQ ID NO: 298256 - RNA, 22 nt, Human
aucuuucuauuucuaaaaacua

SEQ ID NO: 298257 - RNA, 15 nt, Human
gcaggcagaucaccg

SEQ ID NO: 298258 - RNA, 22 nt, Human
uacuaaauaguuuaauuccuca

SEQ ID NO: 298259 - RNA, 22 nt, Human
auuuccauacacccauuucuga

SEQ ID NO: 298260 - RNA, 23 nt, Human
aguccuuuuuauaaaauugagga

SEQ ID NO: 298261 - RNA, 22 nt, Human
cauggaauuuucuaggcauaaa

SEQ ID NO: 298262 - RNA, 22 nt, Human
agucccagcuucccccaugcag

SEQ ID NO: 298263 - RNA, 22 nt, Human
aagagcauggaauggagaucca

SEQ ID NO: 298264 - RNA, 17 nt, Human
acaggcagaucaccuga

SEQ ID NO: 298265 - RNA, 22 nt, Human
uuucagaaagcaucaucaaagu

SEQ ID NO: 298266 - RNA, 17 nt, Human
uucugggucccagggcc

SEQ ID NO: 298267 - RNA, 22 nt, Human
aauucuuguuguuaguauauuu

SEQ ID NO: 298268 - RNA, 22 nt, Human
gggacagacccaugggccaggu

SEQ ID NO: 298269 - RNA, 22 nt, Human
cuuuauuagauguagacuuucu

SEQ ID NO: 298270 - RNA, 22 nt, Human
agaaauguggaucguuuuaaaa

SEQ ID NO: 298271 - RNA, 18 nt, Human
ucuuccaacacugacacc

SEQ ID NO: 298272 - RNA, 22 nt, Human
acuuuguuuggcuauuagaguc

SEQ ID NO: 298273 - RNA, 22 nt, Human
ugaaaaacuuuaauccauaaag

SEQ ID NO: 298274 - RNA, 22 nt, Human
cucagagaaccuaagcggagga

SEQ ID NO: 298275 - RNA, 22 nt, Human
uucucuuagcuguaaagucaau

SEQ ID NO: 298276 - RNA, 22 nt, Human
agggaccucuucuugcagcuga

SEQ ID NO: 298277 - RNA, 22 nt, Human
ggcagguggacgugcuaaagcu

SEQ ID NO: 298278 - RNA, 22 nt, Human
uuuguaaaggccugaauuucag

SEQ ID NO: 298279 - RNA, 22 nt, Human
gauuguaaaacagaucauuauc

SEQ ID NO: 298280 - RNA, 22 nt, Human
acagguggggaggcugagguuc

SEQ ID NO: 298281 - RNA, 22 nt, Human
uacagacauucaauuuugaccc

SEQ ID NO: 298282 - RNA, 22 nt, Human
ccaggugugcucugcaguggau

SEQ ID NO: 298283 - RNA, 22 nt, Human
ggcuuuauuucacuguaccaua

SEQ ID NO: 298284 - RNA, 22 nt, Human
agcagggcuggauuuggcaaga

SEQ ID NO: 298285 - RNA, 22 nt, Human
gcagcuuuaaacauuggaaaua

SEQ ID NO: 298286 - RNA, 22 nt, Human
augaaauggugguuuuccauuu

SEQ ID NO: 298287 - RNA, 17 nt, Human
uguuuucauucauugcu

SEQ ID NO: 298288 - RNA, 22 nt, Human
uucuucaaagaugucuguugga

SEQ ID NO: 298289 - RNA, 22 nt, Human
ugcagggaugcuagagguaaga

SEQ ID NO: 298290 - RNA, 22 nt, Human
gaaguacaguuuuaucuagcca

SEQ ID NO: 298291 - RNA, 22 nt, Human
cuggguguucaggagcugggcu

SEQ ID NO: 298292 - RNA, 22 nt, Human
accugccagaauccaagccaca

SEQ ID NO: 298293 - RNA, 22 nt, Human
gcugggugucacggggcucgug

SEQ ID NO: 298294 - RNA, 22 nt, Human
ccuugguccaacccugcacagc

SEQ ID NO: 298295 - RNA, 22 nt, Human
guccuucuuuucaucccugguu

SEQ ID NO: 298296 - RNA, 22 nt, Human
uuauuuaaugugaucugaagag

SEQ ID NO: 298297 - RNA, 22 nt, Human
cucccaagcugugcugaacugu

SEQ ID NO: 298298 - RNA, 22 nt, Human
ugucagagcaaggccaggccag

SEQ ID NO: 298299 - RNA, 19 nt, Human
aauagauuaauuauccucu

SEQ ID NO: 298300 - RNA, 22 nt, Human
augugucuaauuccaggagcac

SEQ ID NO: 298301 - RNA, 22 nt, Human
cuugcuggugucgugccuucac

SEQ ID NO: 298302 - RNA, 22 nt, Human
agcugcaauucuggacauaguc

SEQ ID NO: 298303 - RNA, 22 nt, Human
ugcagggaggccccgcagcccu

SEQ ID NO: 298304 - RNA, 22 nt, Human
auucuucacauggauaggaucu

SEQ ID NO: 298305 - RNA, 22 nt, Human
uguagaaauuaguaagaucaac

SEQ ID NO: 298306 - RNA, 22 nt, Human
uacaggugcucuacagacagga

SEQ ID NO: 298307 - RNA, 21 nt, Human
agcugcaagagcaacaucuuu

SEQ ID NO: 298308 - RNA, 22 nt, Human
gaauguuugacuaaagguagcu

SEQ ID NO: 298309 - RNA, 21 nt, Human
ucuuccuccacagcgugccac

SEQ ID NO: 298310 - RNA, 19 nt, Human
gcgaggaagucacuguggc

SEQ ID NO: 298311 - RNA, 20 nt, Human
cuucuucagccuaugcuuca

SEQ ID NO: 298312 - RNA, 22 nt, Human
agcuggucuuaaauguguccag

SEQ ID NO: 298313 - RNA, 22 nt, Human
uauuccuaagucccaacuacau

SEQ ID NO: 298314 - RNA, 22 nt, Human
uccaggcauguggccaguacuc

SEQ ID NO: 298315 - RNA, 22 nt, Human
ccauucuuucagugucucaugu

SEQ ID NO: 298316 - RNA, 22 nt, Human
uuaaauuauuucuagugaggug

SEQ ID NO: 298317 - RNA, 22 nt, Human
ugauuuuauugaaacuucacuu

SEQ ID NO: 298318 - RNA, 22 nt, Human
aacuuucaggcaaugaauauuu

SEQ ID NO: 298319 - RNA, 22 nt, Human
aaacagcuaauggccaggaaua

SEQ ID NO: 298320 - RNA, 22 nt, Human
uuucuguaaggacuuaaugcaa

SEQ ID NO: 298321 - RNA, 22 nt, Human
aauuagggagagguagcuaggu

SEQ ID NO: 298322 - RNA, 22 nt, Human
gcaggugucuucauggaacucu

SEQ ID NO: 298323 - RNA, 22 nt, Human
uaaguuuucuggaauaacuugg

SEQ ID NO: 298324 - RNA, 18 nt, Human
ucugagguggacgaggag

SEQ ID NO: 298325 - RNA, 22 nt, Human
gagcaguggugguguguuagag

SEQ ID NO: 298326 - RNA, 22 nt, Human
ugcaggugaaaauuaugaggau

SEQ ID NO: 298327 - RNA, 22 nt, Human
uuggaggauaaggauauugauu

SEQ ID NO: 298328 - RNA, 22 nt, Human
auugcugguagucagugucccu

SEQ ID NO: 298329 - RNA, 22 nt, Human
agucccuucucaaagugugcgg

SEQ ID NO: 298330 - RNA, 22 nt, Human
aucagagacaaaaccagcacuu

SEQ ID NO: 298331 - RNA, 22 nt, Human
acauguaagacuagcuuaaagu

SEQ ID NO: 298332 - RNA, 22 nt, Human
ugcugccaagcccgugcuccug

SEQ ID NO: 298333 - RNA, 22 nt, Human
agcuggcaguaugacuggugac

SEQ ID NO: 298334 - RNA, 22 nt, Human
uacacacaugcauuugccuuau

SEQ ID NO: 298335 - RNA, 22 nt, Human
uggacaugagcugagugggugu

SEQ ID NO: 298336 - RNA, 22 nt, Human
uccuucuccuccuugagugaca

SEQ ID NO: 298337 - RNA, 22 nt, Human
ggcuuggaaauugcaggacaca

SEQ ID NO: 298338 - RNA, 22 nt, Human
aguccugucaccucuacuuucg

SEQ ID NO: 298339 - RNA, 22 nt, Human
cuugaagaaauggagacaggau

SEQ ID NO: 298340 - RNA, 22 nt, Human
ucagugugaguaccaugcucag

SEQ ID NO: 298341 - RNA, 22 nt, Human
cucagagagggcaccagggcca

SEQ ID NO: 298342 - RNA, 22 nt, Human
uaggccauucuuggagcuuacu

SEQ ID NO: 298343 - RNA, 22 nt, Human
uuccaggaagcaguuagcagcc

SEQ ID NO: 298344 - RNA, 22 nt, Human
ucauuguagggcauuuagagag

SEQ ID NO: 298345 - RNA, 22 nt, Human
auauauuugagaauauucauga

SEQ ID NO: 298346 - RNA, 22 nt, Human
uugcugggugcuauuaugaaca

SEQ ID NO: 298347 - RNA, 22 nt, Human
gggcugacaguuuccccugaaa

SEQ ID NO: 298348 - RNA, 22 nt, Human
ccagagagaaauggauuugagu

SEQ ID NO: 298349 - RNA, 22 nt, Human
augagguuuuacugccauuuuc

SEQ ID NO: 298350 - RNA, 22 nt, Human
uuuagauaaugcucaagcaauu

SEQ ID NO: 298351 - RNA, 19 nt, Human
aaggugucccaacugcguu

SEQ ID NO: 298352 - RNA, 22 nt, Human
cccagcuugcccaggacugagg

SEQ ID NO: 298353 - RNA, 22 nt, Human
acuuccagugucugcugcuagc

SEQ ID NO: 298354 - RNA, 22 nt, Human
cagguacauucguagacccauu

SEQ ID NO: 298355 - RNA, 22 nt, Human
uuucaaaguugggaauuguaau

SEQ ID NO: 298356 - RNA, 22 nt, Human
aaauacagaguugcuuaaaagc

SEQ ID NO: 298357 - RNA, 22 nt, Human
uuugcacuagcauuuguccaug

SEQ ID NO: 298358 - RNA, 22 nt, Human
auacaugugugugcauacaugu

SEQ ID NO: 298359 - RNA, 22 nt, Human
uccagcaugaaggggcuuuuau

SEQ ID NO: 298360 - RNA, 22 nt, Human
cuuauuagugucugucugaguu

SEQ ID NO: 298361 - RNA, 22 nt, Human
agcagguguaucggucaccuac

SEQ ID NO: 298362 - RNA, 22 nt, Human
agacagacaugcuaguuuucuu

SEQ ID NO: 298363 - RNA, 21 nt, Human
ggcaggugggucucuguugcu

SEQ ID NO: 298364 - RNA, 22 nt, Human
agaugaaagauuuuuauagaga

SEQ ID NO: 298365 - RNA, 22 nt, Human
cagcuuugcaggcuggucagug

SEQ ID NO: 298366 - RNA, 22 nt, Human
cacaggcugcccgcagcuggga

SEQ ID NO: 298367 - RNA, 22 nt, Human
ucuuaaagagcgcaauuugagg

SEQ ID NO: 298368 - RNA, 22 nt, Human
caaaguccuagaacagugcuug

SEQ ID NO: 298369 - RNA, 22 nt, Human
ccagcauggcaccugagaugag

SEQ ID NO: 298370 - RNA, 22 nt, Human
aauuagggaaaacauuugcuuu

SEQ ID NO: 298371 - RNA, 22 nt, Human
guucuauuccccuuaucuguga

SEQ ID NO: 298372 - RNA, 22 nt, Human
acauguguacauauauaugugc

SEQ ID NO: 298373 - RNA, 22 nt, Human
uagcuuuaaaaaucaucaaagc

SEQ ID NO: 298374 - RNA, 22 nt, Human
aauauaugugguauugaccagc

SEQ ID NO: 298375 - RNA, 22 nt, Human
acagacaguaugguggggcuga

SEQ ID NO: 298376 - RNA, 22 nt, Human
gcuguucacggaggaggauggg

SEQ ID NO: 298377 - RNA, 22 nt, Human
uuauuacacugaaagaauugcg

SEQ ID NO: 298378 - RNA, 22 nt, Human
auuuaugauuagccuauuguug

SEQ ID NO: 298379 - RNA, 20 nt, Human
ucagauuuuucuaacuuuga

SEQ ID NO: 298380 - RNA, 22 nt, Human
aaauuauaggugccaccuugga

SEQ ID NO: 298381 - RNA, 22 nt, Human
uuuccagagggugcucagggcg

SEQ ID NO: 298382 - RNA, 22 nt, Human
uucuauugggcagcauugcuuc

SEQ ID NO: 298383 - RNA, 22 nt, Human
ccugcagggugcugccacagau

SEQ ID NO: 298384 - RNA, 22 nt, Human
cacccagcuuuugcauccuccg

SEQ ID NO: 298385 - RNA, 22 nt, Human
aaaagcagaucuccaaagucua

SEQ ID NO: 298386 - RNA, 22 nt, Human
cuauuagguuggugcaaaagua

SEQ ID NO: 298387 - RNA, 22 nt, Human
uagaaauaaaucugcagcuggg

SEQ ID NO: 298388 - RNA, 18 nt, Human
agcagguggauuuauugg

SEQ ID NO: 298389 - RNA, 22 nt, Human
ugugcauguauugauuuguacc

SEQ ID NO: 298390 - RNA, 22 nt, Human
agaauaauacugaaaugcugaa

SEQ ID NO: 298391 - RNA, 22 nt, Human
aagauaaacucuugauuucuga

SEQ ID NO: 298392 - RNA, 22 nt, Human
uggaggaaaauuacuggggucu

SEQ ID NO: 298393 - RNA, 23 nt, Human
acagaaaucauuuguaagguacc

SEQ ID NO: 298394 - RNA, 22 nt, Human
uuugacuccagagcccauuuuu

SEQ ID NO: 298395 - RNA, 22 nt, Human
caauuucucgaacucuaaucca

SEQ ID NO: 298396 - RNA, 22 nt, Human
aagugccccaggcuguuaacau

SEQ ID NO: 298397 - RNA, 22 nt, Human
uguuuucauuugauguaacaaa

SEQ ID NO: 298398 - RNA, 22 nt, Human
uauugguagauggagagagaca

SEQ ID NO: 298399 - RNA, 22 nt, Human
aguguccuggcaaggguuucag

SEQ ID NO: 298400 - RNA, 22 nt, Human
agauuucucuuucccuggcuga

SEQ ID NO: 298401 - RNA, 22 nt, Human
uuaaauuccagccucauaauag

SEQ ID NO: 298402 - RNA, 22 nt, Human
uuuaucuguuccucuuggaggc

SEQ ID NO: 298403 - RNA, 22 nt, Human
acagggcauuuccucuaugugu

SEQ ID NO: 298404 - RNA, 22 nt, Human
caggguggaagcuguagagugg

SEQ ID NO: 298405 - RNA, 22 nt, Human
ggcagaccucuccagccccaca

SEQ ID NO: 298406 - RNA, 22 nt, Human
uuguguccuaagcaccagaugg

SEQ ID NO: 298407 - RNA, 19 nt, Human
cacaucagcagggcugugg

SEQ ID NO: 298408 - RNA, 22 nt, Human
gggcaggugaccucuuguccug

SEQ ID NO: 298409 - RNA, 20 nt, Human
gagggcucguggauggauaa

SEQ ID NO: 298410 - RNA, 22 nt, Human
agagacaggguuuugucguguu

SEQ ID NO: 298411 - RNA, 22 nt, Human
gcagggcacagacagugccaag

SEQ ID NO: 298412 - RNA, 22 nt, Human
uucauucugggcucuaaggaac

SEQ ID NO: 298413 - RNA, 22 nt, Human
acagaaaugauguuuggcaaua

SEQ ID NO: 298414 - RNA, 22 nt, Human
ugcaguggaaagacucagacuu

SEQ ID NO: 298415 - RNA, 22 nt, Human
uuuguuuucaaugugucauuca

SEQ ID NO: 298416 - RNA, 22 nt, Human
gucauauacacugcauguaauc

SEQ ID NO: 298417 - RNA, 22 nt, Human
ucuucagacuccaaauguuuua

SEQ ID NO: 298418 - RNA, 22 nt, Human
uguguccucuuaccucugaccc

SEQ ID NO: 298419 - RNA, 22 nt, Human
ugggaagaguuagagacagcug

SEQ ID NO: 298420 - RNA, 22 nt, Human
ucagggcaaaagggaaaccauu

SEQ ID NO: 298421 - RNA, 22 nt, Human
uuuuuauaacucuuuugugaca

SEQ ID NO: 298422 - RNA, 22 nt, Human
cuagggaccucagcuccuggag

SEQ ID NO: 298423 - RNA, 22 nt, Human
cccaggcagcccuucugacgca

SEQ ID NO: 298424 - RNA, 22 nt, Human
ugucagagcaaugagguucagc

SEQ ID NO: 298425 - RNA, 22 nt, Human
uagggcucagagaaguggggcc

SEQ ID NO: 298426 - RNA, 22 nt, Human
aaugauuuggcaaaggaaucca

SEQ ID NO: 298427 - RNA, 22 nt, Human
augugcaaauccaaugugaaug

SEQ ID NO: 298428 - RNA, 22 nt, Human
auucauuuagguauucacuuac

SEQ ID NO: 298429 - RNA, 22 nt, Human
uuguuuuuaaacaugugacuga

SEQ ID NO: 298430 - RNA, 22 nt, Human
cucagcaacccuagaacauuug

SEQ ID NO: 298431 - RNA, 22 nt, Human
uucugugcccauuuuaaaaugg

SEQ ID NO: 298432 - RNA, 22 nt, Human
auugaaaauauaauucuaggag

SEQ ID NO: 298433 - RNA, 22 nt, Human
gacaggguccaaaggcagggga

SEQ ID NO: 298434 - RNA, 22 nt, Human
accaggcagcugggggugaugu

SEQ ID NO: 298435 - RNA, 17 nt, Human
cagacaggcugucaccc

SEQ ID NO: 298436 - RNA, 22 nt, Human
cacaugugggaaauggugcuua

SEQ ID NO: 298437 - RNA, 22 nt, Human
gauguguccuaguacggguggg

SEQ ID NO: 298438 - RNA, 22 nt, Human
cauuagggccaccauaacaaaa

SEQ ID NO: 298439 - RNA, 22 nt, Human
uuuagggaauagaagaucugaa

SEQ ID NO: 298440 - RNA, 22 nt, Human
uuaugcaaaggggccucuuccu

SEQ ID NO: 298441 - RNA, 22 nt, Human
auuuacuggaaaaacuaugagc

SEQ ID NO: 298442 - RNA, 22 nt, Human
uuuccucugucaugacagcuga

SEQ ID NO: 298443 - RNA, 22 nt, Human
gcaaauauucaagacuuuucca

SEQ ID NO: 298444 - RNA, 22 nt, Human
agcagggcagugcuucagcucu

SEQ ID NO: 298445 - RNA, 22 nt, Human
cccaggcagaauuaguguuuca

SEQ ID NO: 298446 - RNA, 22 nt, Human
uuuauuauccaguguugucaug

SEQ ID NO: 298447 - RNA, 22 nt, Human
gccaggcagcaggaagccagug

SEQ ID NO: 298448 - RNA, 22 nt, Human
ugcaggugguccuuccucugcu

SEQ ID NO: 298449 - RNA, 22 nt, Human
uacauaauuaaucuuuaaguuc

SEQ ID NO: 298450 - RNA, 22 nt, Human
ggaacuugaaaaucaagguggu

SEQ ID NO: 298451 - RNA, 22 nt, Human
agucucagcaagcauggcuagu

SEQ ID NO: 298452 - RNA, 22 nt, Human
cauaauuuuuuuaagucagaac

SEQ ID NO: 298453 - RNA, 22 nt, Human
gaggugucaugagggccugcuc

SEQ ID NO: 298454 - RNA, 22 nt, Human
auucuucauuguugauucaugu

SEQ ID NO: 298455 - RNA, 22 nt, Human
guguuuuaucagacaaaguaua

SEQ ID NO: 298456 - RNA, 22 nt, Human
acagcuuuucaauucugcugag

SEQ ID NO: 298457 - RNA, 22 nt, Human
uuuguucaugccuauauucuca

SEQ ID NO: 298458 - RNA, 22 nt, Human
ucuguucagaagaggugaaagu

SEQ ID NO: 298459 - RNA, 22 nt, Human
auguguuuguaccuuuaaauau

SEQ ID NO: 298460 - RNA, 22 nt, Human
ccuguucaccauggucacgugc

SEQ ID NO: 298461 - RNA, 22 nt, Human
agguuuaugccuuggagcuggg

SEQ ID NO: 298462 - RNA, 22 nt, Human
cuuguucaguccugacuuccug

SEQ ID NO: 298463 - RNA, 22 nt, Human
ccagggcauguccaagacuuag

SEQ ID NO: 298464 - RNA, 22 nt, Human
uauaucauggagauuaacauuc

SEQ ID NO: 298465 - RNA, 22 nt, Human
ccagguguguacagaacagcac

SEQ ID NO: 298466 - RNA, 22 nt, Human
cuucguuuuuaguagcaauguu

SEQ ID NO: 298467 - RNA, 22 nt, Human
ucugggaacacacgucacuuca

SEQ ID NO: 298468 - RNA, 21 nt, Human
acuguucauuugaugaacugg

SEQ ID NO: 298469 - RNA, 22 nt, Human
gcuguucacagacucugcucug

SEQ ID NO: 298470 - RNA, 22 nt, Human
uaggugguagagccuggcuugc

SEQ ID NO: 298471 - RNA, 22 nt, Human
uuucaugagauuccuccacauc

SEQ ID NO: 298472 - RNA, 22 nt, Human
acacuaaugagaaaggaauuaa

SEQ ID NO: 298473 - RNA, 22 nt, Human
uuauuagguuauucucuguacu

SEQ ID NO: 298474 - RNA, 22 nt, Human
caggugucggucaggcgguuuu

SEQ ID NO: 298475 - RNA, 22 nt, Human
cacauaauugaacgugaugagu

SEQ ID NO: 298476 - RNA, 22 nt, Human
accaggcagagcugggccuuaa

SEQ ID NO: 298477 - RNA, 22 nt, Human
gaggugucaucaggcagcucug

SEQ ID NO: 298478 - RNA, 22 nt, Human
ccagcuuuuagugggcuuauua

SEQ ID NO: 298479 - RNA, 22 nt, Human
aggacaugugccuccagggcag

SEQ ID NO: 298480 - RNA, 22 nt, Human
cucuucuuauggccguggcuga

SEQ ID NO: 298481 - RNA, 22 nt, Human
gcagcuuucuaagcuuuauugc

SEQ ID NO: 298482 - RNA, 18 nt, Human
ucuggagggaagcuuuga

SEQ ID NO: 298483 - RNA, 22 nt, Human
caguguuucugaguuccagcuc

SEQ ID NO: 298484 - RNA, 22 nt, Human
aaguauaagcuauucuucauga

SEQ ID NO: 298485 - RNA, 22 nt, Human
uugacacaguuuucucauuaag

SEQ ID NO: 298486 - RNA, 22 nt, Human
ucuucaaauccuacagugucug

SEQ ID NO: 298487 - RNA, 22 nt, Human
uagggcaguuauaacauuagug

SEQ ID NO: 298488 - RNA, 22 nt, Human
cuuuaagacucugcucuuggug

SEQ ID NO: 298489 - RNA, 22 nt, Human
acaggacaggcugggcuagacu

SEQ ID NO: 298490 - RNA, 22 nt, Human
acuuucuucuacuacuuggaga

SEQ ID NO: 298491 - RNA, 22 nt, Human
auuuauuaccucggaguuucug

SEQ ID NO: 298492 - RNA, 21 nt, Human
aguuugaugcaauuucugaga

SEQ ID NO: 298493 - RNA, 22 nt, Human
uauugcugccauuuuccaaugu

SEQ ID NO: 298494 - RNA, 22 nt, Human
uauuuccaaaagccuauuauga

SEQ ID NO: 298495 - RNA, 22 nt, Human
ucuguucaagacugaggugaca

SEQ ID NO: 298496 - RNA, 22 nt, Human
caggugguuccauguuucauga

SEQ ID NO: 298497 - RNA, 22 nt, Human
ccuguucaugaaacugcuuucc

SEQ ID NO: 298498 - RNA, 22 nt, Human
cccaugagauucugaauuuggc

SEQ ID NO: 298499 - RNA, 22 nt, Human
cuacauaaauuuaucacagacu

SEQ ID NO: 298500 - RNA, 22 nt, Human
acacuaauuaagcugcuuuacu

SEQ ID NO: 298501 - RNA, 22 nt, Human
aacauucugguucuaaaaaccu

SEQ ID NO: 298502 - RNA, 22 nt, Human
auauuugucaauucacuguuca

SEQ ID NO: 298503 - RNA, 22 nt, Human
cuuuauuccuacaagauuuucu

SEQ ID NO: 298504 - RNA, 22 nt, Human
caauuucuggaacuaauucuga

SEQ ID NO: 298505 - RNA, 22 nt, Human
agggcuccaaggaaguguagcu

SEQ ID NO: 298506 - RNA, 22 nt, Human
aaugugucccuuauuucacagg

SEQ ID NO: 298507 - RNA, 18 nt, Human
gacaggugggugagacca

SEQ ID NO: 298508 - RNA, 22 nt, Human
ucucuucauagugacacccauc

SEQ ID NO: 298509 - RNA, 22 nt, Human
gaugaaaaaagacgagcauaua

SEQ ID NO: 298510 - RNA, 23 nt, Human
gaggcagcuccugcagugcccug

SEQ ID NO: 298511 - RNA, 22 nt, Human
gcuguucaagacuaggaaauuu

SEQ ID NO: 298512 - RNA, 22 nt, Human
cagacaggcaggugcugcuuug

SEQ ID NO: 298513 - RNA, 22 nt, Human
ggugggugcagggggcuucuua

SEQ ID NO: 298514 - RNA, 22 nt, Human
ucauguguuaaacuccaagaua

SEQ ID NO: 298515 - RNA, 22 nt, Human
uuucauugagacuauagacauc

SEQ ID NO: 298516 - RNA, 22 nt, Human
caaaugcuacuaauaggcaagu

SEQ ID NO: 298517 - RNA, 22 nt, Human
uuuccucacacagaagaucuug

SEQ ID NO: 298518 - RNA, 22 nt, Human
aagggcaggaaaagauggaugu

SEQ ID NO: 298519 - RNA, 22 nt, Human
aagcugcaaaaaauuucugucu

SEQ ID NO: 298520 - RNA, 22 nt, Human
acccaggguagaaccucagagc

SEQ ID NO: 298521 - RNA, 22 nt, Human
acauguguaaaaguggauaaaa

SEQ ID NO: 298522 - RNA, 19 nt, Human
gaacuuggccaggcacagu

SEQ ID NO: 298523 - RNA, 19 nt, Human
ucugaagaauuagagagca

SEQ ID NO: 298524 - RNA, 22 nt, Human
ucauucuugaucacuaguuagu

SEQ ID NO: 298525 - RNA, 22 nt, Human
cccaggcagugcugaucccuca

SEQ ID NO: 298526 - RNA, 22 nt, Human
ucucucuucaacccuuaacuag

SEQ ID NO: 298527 - RNA, 22 nt, Human
gugaaaauaaggcugguucuug

SEQ ID NO: 298528 - RNA, 22 nt, Human
cccagugugccccuccugcagc

SEQ ID NO: 298529 - RNA, 22 nt, Human
ucuucaauuagauuuaccaauu

SEQ ID NO: 298530 - RNA, 22 nt, Human
cauuuguagcuauuuacuguau

SEQ ID NO: 298531 - RNA, 22 nt, Human
gaggugucuagaucuaccagua

SEQ ID NO: 298532 - RNA, 22 nt, Human
uaauucagggccagaaucccca

SEQ ID NO: 298533 - RNA, 22 nt, Human
ggagcugaguggguuuauugau

SEQ ID NO: 298534 - RNA, 22 nt, Human
ugcuuucuuuagcuccugaguc

SEQ ID NO: 298535 - RNA, 22 nt, Human
ugcauuuuuaacaaggcuaauu

SEQ ID NO: 298536 - RNA, 22 nt, Human
ucagguggagaccuccuuggcc

SEQ ID NO: 298537 - RNA, 22 nt, Human
uuucuggguuuaugucacagcu

SEQ ID NO: 298538 - RNA, 22 nt, Human
cuuaaaaucuggcaguuagcua

SEQ ID NO: 298539 - RNA, 22 nt, Human
agccagaggaacuugaugacug

SEQ ID NO: 298540 - RNA, 22 nt, Human
ggcaggugugagcuguaaagga

SEQ ID NO: 298541 - RNA, 22 nt, Human
ucuugcacuucaugaauauguu

SEQ ID NO: 298542 - RNA, 22 nt, Human
uuaccuaaaauagcucaauuua

SEQ ID NO: 298543 - RNA, 22 nt, Human
aacaugauggggaagaacaaga

SEQ ID NO: 298544 - RNA, 21 nt, Human
ugaucauuuguguaaaggaga

SEQ ID NO: 298545 - RNA, 22 nt, Human
uuaguucuugggugaacuuuug

SEQ ID NO: 298546 - RNA, 22 nt, Human
cagaaaauaaaguuucuacgca

SEQ ID NO: 298547 - RNA, 22 nt, Human
uucagugucaauuuuuaaauau

SEQ ID NO: 298548 - RNA, 22 nt, Human
ccaucagauuagcaaaauccag

SEQ ID NO: 298549 - RNA, 22 nt, Human
uucacaauaggagcaugcaaau

SEQ ID NO: 298550 - RNA, 22 nt, Human
ggaacuugcaaccucuggucac

SEQ ID NO: 298551 - RNA, 22 nt, Human
ggggcagggagguuaucgccga

SEQ ID NO: 298552 - RNA, 22 nt, Human
uuugcaaagaaauuauugcugu

SEQ ID NO: 298553 - RNA, 22 nt, Human
uuucaaaccuacuuguauguuu

SEQ ID NO: 298554 - RNA, 22 nt, Human
ggcaggcaccagcucagcaaua

SEQ ID NO: 298555 - RNA, 22 nt, Human
acauuuuuauucaucaaagcag

SEQ ID NO: 298556 - RNA, 22 nt, Human
aguaaaauuucugcugaggaga

SEQ ID NO: 298557 - RNA, 22 nt, Human
aaugaucuacucucauuaucuc

SEQ ID NO: 298558 - RNA, 21 nt, Human
uaauaauuccacuacagagua

SEQ ID NO: 298559 - RNA, 22 nt, Human
aagguuaaauagguauuuucca

SEQ ID NO: 298560 - RNA, 22 nt, Human
gcagguggaagcagcagacuca

SEQ ID NO: 298561 - RNA, 22 nt, Human
acauccagaucucagcauggcu

SEQ ID NO: 298562 - RNA, 22 nt, Human
aggacaugaagaaagggcaagg

SEQ ID NO: 298563 - RNA, 22 nt, Human
auuuaaugucgagcuauuguag

SEQ ID NO: 298564 - RNA, 22 nt, Human
gaggcugggaaguccaagacca

SEQ ID NO: 298565 - RNA, 22 nt, Human
ccuuccucauccauuucucuug

SEQ ID NO: 298566 - RNA, 22 nt, Human
gcaguguuaggaauaaaaauga

SEQ ID NO: 298567 - RNA, 22 nt, Human
acagcauggauaacaaggcacu

SEQ ID NO: 298568 - RNA, 22 nt, Human
uuaguugauguucuggagguag

SEQ ID NO: 298569 - RNA, 22 nt, Human
ucaaauaaugccauucaucauc

SEQ ID NO: 298570 - RNA, 22 nt, Human
gcguccagggaaggcccagcug

SEQ ID NO: 298571 - RNA, 22 nt, Human
aaggugguaauagugcaggauu

SEQ ID NO: 298572 - RNA, 22 nt, Human
acucacuuuccauucaagcacc

SEQ ID NO: 298573 - RNA, 22 nt, Human
cuuuccaaugucacuaugaauc

SEQ ID NO: 298574 - RNA, 22 nt, Human
uuaaauuuuagaaacagacucu

SEQ ID NO: 298575 - RNA, 22 nt, Human
uuuauuagauuaucaaagaggu

SEQ ID NO: 298576 - RNA, 22 nt, Human
ggcuuuuguuucagcucugcua

SEQ ID NO: 298577 - RNA, 22 nt, Human
aagaaagggagaaggauggugu

SEQ ID NO: 298578 - RNA, 22 nt, Human
gcuggcuggcgggugcguccuc

SEQ ID NO: 298579 - RNA, 22 nt, Human
cuuaagcaaaauauucuuucac

SEQ ID NO: 298580 - RNA, 22 nt, Human
uuagcuucuuacauuucauccu

SEQ ID NO: 298581 - RNA, 22 nt, Human
ugaugguuuuauuaauaggacc

SEQ ID NO: 298582 - RNA, 22 nt, Human
ucugaagaacugucuagagaac

SEQ ID NO: 298583 - RNA, 20 nt, Human
gcuguucacauuauuaguag

SEQ ID NO: 298584 - RNA, 21 nt, Human
cucugcccagggccuccugcc

SEQ ID NO: 298585 - RNA, 22 nt, Human
cagugaggugcccagccugccc

SEQ ID NO: 298586 - RNA, 22 nt, Human
gauucuuacuucuaagcaagcu

SEQ ID NO: 298587 - RNA, 21 nt, Human
agcagguguaaaggaggaaau

SEQ ID NO: 298588 - RNA, 22 nt, Human
aauugcuucccaagggaggucu

SEQ ID NO: 298589 - RNA, 22 nt, Human
auuucagauucagaaauguagg

SEQ ID NO: 298590 - RNA, 22 nt, Human
gaggcugguaggaaaggaaaca

SEQ ID NO: 298591 - RNA, 22 nt, Human
uguuccugguuccugcaugaug

SEQ ID NO: 298592 - RNA, 22 nt, Human
gggcaaguccggugcccagagc

SEQ ID NO: 298593 - RNA, 22 nt, Human
aaacaugcauucaagaaaaucu

SEQ ID NO: 298594 - RNA, 22 nt, Human
ugggugugccauauuccauuuc

SEQ ID NO: 298595 - RNA, 22 nt, Human
guggaggaaaagaaguugggug

SEQ ID NO: 298596 - RNA, 22 nt, Human
uagggcagccuuauagcuccca

SEQ ID NO: 298597 - RNA, 22 nt, Human
cagcuucuggcguggagccuga

SEQ ID NO: 298598 - RNA, 22 nt, Human
gcagcuuuggagguggaacucu

SEQ ID NO: 298599 - RNA, 22 nt, Human
cuguccugaaguuuucaugaga

SEQ ID NO: 298600 - RNA, 18 nt, Human
ugagaggcuauuuuuugc

SEQ ID NO: 298601 - RNA, 22 nt, Human
gaggccagaaugagcugaaugc

SEQ ID NO: 298602 - RNA, 22 nt, Human
ucuaaagaagaggguucugcgg

SEQ ID NO: 298603 - RNA, 22 nt, Human
gacaucugaggcccucagagcc

SEQ ID NO: 298604 - RNA, 22 nt, Human
gccaggcagacaggucaucagg

SEQ ID NO: 298605 - RNA, 22 nt, Human
ugcagggcacacgcacgggugu

SEQ ID NO: 298606 - RNA, 22 nt, Human
uaaacauuuguuauucuuguuu

SEQ ID NO: 298607 - RNA, 22 nt, Human
uuccugggaggcuguguacuug

SEQ ID NO: 298608 - RNA, 22 nt, Human
cuugcacacauguacaugugua

SEQ ID NO: 298609 - RNA, 22 nt, Human
cugggguggauggguccaaguu

SEQ ID NO: 298610 - RNA, 22 nt, Human
cagggcucccucuggcucccag

SEQ ID NO: 298611 - RNA, 22 nt, Human
uuucuauugaucuaauaaacau

SEQ ID NO: 298612 - RNA, 22 nt, Human
ccaggugugauuucaucugagg

SEQ ID NO: 298613 - RNA, 20 nt, Human
uccaugaguuagagacuaua

SEQ ID NO: 298614 - RNA, 22 nt, Human
cuguuuucccuggaguucagca

SEQ ID NO: 298615 - RNA, 22 nt, Human
uuucccaguucccugcucuaua

SEQ ID NO: 298616 - RNA, 22 nt, Human
cccagcuugucugauucagccu

SEQ ID NO: 298617 - RNA, 22 nt, Human
ucucacagugcaggucugucuc

SEQ ID NO: 298618 - RNA, 22 nt, Human
aacuuucuuggaugucucaaca

SEQ ID NO: 298619 - RNA, 22 nt, Human
cuuugcaaacugucacacuuuc

SEQ ID NO: 298620 - RNA, 22 nt, Human
uagcugaugaauaauuauucuu

SEQ ID NO: 298621 - RNA, 22 nt, Human
guauuaggaaauaugaagaaag

SEQ ID NO: 298622 - RNA, 22 nt, Human
acuggaggggaaaaugguagua

SEQ ID NO: 298623 - RNA, 19 nt, Human
ccauuguaaagaaaaaugu

SEQ ID NO: 298624 - RNA, 22 nt, Human
uacuuuauucaggaaggcuggu

SEQ ID NO: 298625 - RNA, 22 nt, Human
gaauguaagugggcagaagaca

SEQ ID NO: 298626 - RNA, 22 nt, Human
ucuggguggugucuuccaagac

SEQ ID NO: 298627 - RNA, 15 nt, Human
uuggaggauguagua

SEQ ID NO: 298628 - RNA, 22 nt, Human
ugagaaaagguugagaugauaa

SEQ ID NO: 298629 - RNA, 22 nt, Human
aggaccuguaccucagcaucua

SEQ ID NO: 298630 - RNA, 22 nt, Human
cugugggagcacaugacagaua

SEQ ID NO: 298631 - RNA, 22 nt, Human
ccaggccugcaucugcugcgca

SEQ ID NO: 298632 - RNA, 22 nt, Human
cucuggccuggggccugcuccc

SEQ ID NO: 298633 - RNA, 22 nt, Human
uaguccuugcugggcacagagu

SEQ ID NO: 298634 - RNA, 22 nt, Human
cagggcaggaauuugacauugc

SEQ ID NO: 298635 - RNA, 17 nt, Human
ggcuggaggggacccgg

SEQ ID NO: 298636 - RNA, 22 nt, Human
caaauaguuuuucauguauuau

SEQ ID NO: 298637 - RNA, 22 nt, Human
uccuggauuaauagggagcugu

SEQ ID NO: 298638 - RNA, 22 nt, Human
agcccggcuuccccgguugcua

SEQ ID NO: 298639 - RNA, 22 nt, Human
ucagcugcucaaauuuauguca

SEQ ID NO: 298640 - RNA, 22 nt, Human
aagagagggacuuauuaaaguc

SEQ ID NO: 298641 - RNA, 22 nt, Human
ccaggccuucugaggacacucu

SEQ ID NO: 298642 - RNA, 22 nt, Human
uuuuucauugcagccucucucc

SEQ ID NO: 298643 - RNA, 22 nt, Human
aaaaucuaaguagcgaguaagg

SEQ ID NO: 298644 - RNA, 22 nt, Human
cccagcuugcgggcggcaggag

SEQ ID NO: 298645 - RNA, 22 nt, Human
ccagccacugggccacugccag

SEQ ID NO: 298646 - RNA, 22 nt, Human
uuuccaagacuccaguucuccc

SEQ ID NO: 298647 - RNA, 22 nt, Human
gucuggccugccagcucuggug

SEQ ID NO: 298648 - RNA, 22 nt, Human
ugcuuuauaaccauuucugugg

SEQ ID NO: 298649 - RNA, 22 nt, Human
agucaaagaagaugguuccaaa

SEQ ID NO: 298650 - RNA, 19 nt, Human
uguguccuagcagccaguc

SEQ ID NO: 298651 - RNA, 22 nt, Human
agggaagaaucacugggauguu

SEQ ID NO: 298652 - RNA, 22 nt, Human
cuuccuuccuuccccgaaaugc

SEQ ID NO: 298653 - RNA, 22 nt, Human
uaaauuuacccaaggaacaugu

SEQ ID NO: 298654 - RNA, 22 nt, Human
ucugggaauuuauuggcacuuu

SEQ ID NO: 298655 - RNA, 19 nt, Human
agacaaguuuccagaagcc

SEQ ID NO: 298656 - RNA, 22 nt, Human
uguacuauuaagaggccuaaau

SEQ ID NO: 298657 - RNA, 22 nt, Human
gacagacaggaggccaccugcu

SEQ ID NO: 298658 - RNA, 22 nt, Human
cugcaucaguggauaugauggu

SEQ ID NO: 298659 - RNA, 22 nt, Human
uuuugcuugagugcacaaaaug

SEQ ID NO: 298660 - RNA, 22 nt, Human
ggaaguuguaugaucggggaau

SEQ ID NO: 298661 - RNA, 20 nt, Human
uagggcucauuaugaucucc

SEQ ID NO: 298662 - RNA, 22 nt, Human
ucuucuccaguucauccuacca

SEQ ID NO: 298663 - RNA, 22 nt, Human
ugggaaagacucaggacaggag

SEQ ID NO: 298664 - RNA, 22 nt, Human
aagauuauggcagauaacaauu

SEQ ID NO: 298665 - RNA, 22 nt, Human
augaaaacggaccagagcuauu

SEQ ID NO: 298666 - RNA, 22 nt, Human
augauauuugcaaugugcuugc

SEQ ID NO: 298667 - RNA, 22 nt, Human
gaaggggaguggcuagugugug

SEQ ID NO: 298668 - RNA, 22 nt, Human
gcagagugaagggagaggugug

SEQ ID NO: 298669 - RNA, 23 nt, Human
ugcugggguaguuuguggcacag

SEQ ID NO: 298670 - RNA, 22 nt, Human
gcaguguuguuaaaagauuaga

SEQ ID NO: 298671 - RNA, 19 nt, Human
ugcucuggagccagcucuc

SEQ ID NO: 298672 - RNA, 22 nt, Human
cagacaggguggguuucugggc

SEQ ID NO: 298673 - RNA, 22 nt, Human
uggucuggaacuccuggcuuca

SEQ ID NO: 298674 - RNA, 22 nt, Human
aaagcagaggugauaugacuua

SEQ ID NO: 298675 - RNA, 22 nt, Human
acagcagguuauuguuauggca

SEQ ID NO: 298676 - RNA, 21 nt, Human
ggcuuuaugcucacccagccu

SEQ ID NO: 298677 - RNA, 22 nt, Human
ggucaaagugaggagucagguu

SEQ ID NO: 298678 - RNA, 22 nt, Human
auguauuucuauguagugaaga

SEQ ID NO: 298679 - RNA, 22 nt, Human
uucuuuucaagaggggcaagga

SEQ ID NO: 298680 - RNA, 22 nt, Human
uauucauaguaaacaaaagugg

SEQ ID NO: 298681 - RNA, 22 nt, Human
ggcuuucuaugaacucaaaggc

SEQ ID NO: 298682 - RNA, 22 nt, Human
auauuaggugcucaauacaugc

SEQ ID NO: 298683 - RNA, 22 nt, Human
uuauuccauucaguucaacaag

SEQ ID NO: 298684 - RNA, 22 nt, Human
gcaggcagguggcaucuuguga

SEQ ID NO: 298685 - RNA, 22 nt, Human
agggaauucacuggaacgcccu

SEQ ID NO: 298686 - RNA, 22 nt, Human
cgaggcagggaagcugcaaaag

SEQ ID NO: 298687 - RNA, 21 nt, Human
aguguccuugaucuugccuug

SEQ ID NO: 298688 - RNA, 22 nt, Human
uggaggaaguggacaguugugu

SEQ ID NO: 298689 - RNA, 22 nt, Human
aauguugagcuugaaaguaggu

SEQ ID NO: 298690 - RNA, 22 nt, Human
ccuugguuuccaggaugaggcu

SEQ ID NO: 298691 - RNA, 22 nt, Human
cccaggcagggacgugcucugg

SEQ ID NO: 298692 - RNA, 22 nt, Human
ucagagaguuggaaagaauuaa

SEQ ID NO: 298693 - RNA, 22 nt, Human
gcagggcagcuuagucccuguc

SEQ ID NO: 298694 - RNA, 22 nt, Human
agggcuccuaugaugcucugcc

SEQ ID NO: 298695 - RNA, 22 nt, Human
ugcagggcuacaggacuacaac

SEQ ID NO: 298696 - RNA, 18 nt, Human
ugcuggguaacuguaugg

SEQ ID NO: 298697 - RNA, 22 nt, Human
uuccuucuuuuacaccauaaau

SEQ ID NO: 298698 - RNA, 22 nt, Human
uguggcagaggaggcagcgucc

SEQ ID NO: 298699 - RNA, 22 nt, Human
auggaagacagauaaggcagaa

SEQ ID NO: 298700 - RNA, 22 nt, Human
uuguccuggagguuaauagagu

SEQ ID NO: 298701 - RNA, 22 nt, Human
gaagggaaggaaagaaccagca

SEQ ID NO: 298702 - RNA, 22 nt, Human
gcagagaccccgcagugaggcc

SEQ ID NO: 298703 - RNA, 22 nt, Human
uguuugaacugaauaacauagu

SEQ ID NO: 298704 - RNA, 22 nt, Human
ggucaaagggugagauggcagg

SEQ ID NO: 298705 - RNA, 20 nt, Human
uacagacaugacaauaaugg

SEQ ID NO: 298706 - RNA, 18 nt, Human
ucagagagcagcuuuauu

SEQ ID NO: 298707 - RNA, 20 nt, Human
cugaagaguggccugaucug

SEQ ID NO: 298708 - RNA, 22 nt, Human
gacauaauaaucugaccuagau

SEQ ID NO: 298709 - RNA, 22 nt, Human
ucagggcauacucuucaagguc

SEQ ID NO: 298710 - RNA, 22 nt, Human
uauucugugugauauguaaaug

SEQ ID NO: 298711 - RNA, 19 nt, Human
aauacaguguuauagaauu

SEQ ID NO: 298712 - RNA, 17 nt, Human
gggcagggacuccuggg

SEQ ID NO: 298713 - RNA, 20 nt, Human
ugugccuggcuuuguccuga

SEQ ID NO: 298714 - RNA, 22 nt, Human
ugaaggagaauuaauaggcauu

SEQ ID NO: 298715 - RNA, 22 nt, Human
ccagcuuuggaguguuguugcu

SEQ ID NO: 298716 - RNA, 22 nt, Human
gagacaggauuuaaccaaagcu

SEQ ID NO: 298717 - RNA, 22 nt, Human
ccugggugaaauaguccucaag

SEQ ID NO: 298718 - RNA, 22 nt, Human
uagggcagccacccaggcugcu

SEQ ID NO: 298719 - RNA, 22 nt, Human
uuuuucauauuccccucucugg

SEQ ID NO: 298720 - RNA, 22 nt, Human
agaaguuguagguuugcauauu

SEQ ID NO: 298721 - RNA, 22 nt, Human
gguccuuugccaucucuccacc

SEQ ID NO: 298722 - RNA, 22 nt, Human
gcaggugucuucagcaggauga

SEQ ID NO: 298723 - RNA, 22 nt, Human
agugucugccuauuuuucaagc

SEQ ID NO: 298724 - RNA, 22 nt, Human
guuuauuauacaacaaaagcua

SEQ ID NO: 298725 - RNA, 22 nt, Human
aggaccuguagggccugcaucc

SEQ ID NO: 298726 - RNA, 22 nt, Human
gcuggagguuucaccugaguuu

SEQ ID NO: 298727 - RNA, 22 nt, Human
cccaggacucuucacugcagcc

SEQ ID NO: 298728 - RNA, 21 nt, Human
guuauugaccuccaggcuggc

SEQ ID NO: 298729 - RNA, 22 nt, Human
aaugcuaaaacacagauuuuug

SEQ ID NO: 298730 - RNA, 22 nt, Human
caguuaaaagguaugcuaccaa

SEQ ID NO: 298731 - RNA, 22 nt, Human
guguguccaaggccacaauagc

SEQ ID NO: 298732 - RNA, 22 nt, Human
ucagcuuuuuggauugcccaag

SEQ ID NO: 298733 - RNA, 22 nt, Human
guaaacaugcuguguacucagc

SEQ ID NO: 298734 - RNA, 22 nt, Human
ucugggaaguccucugucaugc

SEQ ID NO: 298735 - RNA, 22 nt, Human
cucugcccucgcacaucugcca

SEQ ID NO: 298736 - RNA, 23 nt, Human
uguccuuuuugaggccuccuccu

SEQ ID NO: 298737 - RNA, 22 nt, Human
auuuacagugugccuacuauau

SEQ ID NO: 298738 - RNA, 20 nt, Human
ugcagguguuggagaaggua

SEQ ID NO: 298739 - RNA, 22 nt, Human
guguccugagugaggccuggcc

SEQ ID NO: 298740 - RNA, 22 nt, Human
aguauacaguaaugacauaucu

SEQ ID NO: 298741 - RNA, 22 nt, Human
cugcaucacagcaggaggcaca

SEQ ID NO: 298742 - RNA, 22 nt, Human
gggagcauuucccuguguugaa

SEQ ID NO: 298743 - RNA, 22 nt, Human
cacuguauuauuaggaaugaca

SEQ ID NO: 298744 - RNA, 22 nt, Human
aagauuuagggccaguuuacau

SEQ ID NO: 298745 - RNA, 22 nt, Human
uguuuacuuaaauguuuucaua

SEQ ID NO: 298746 - RNA, 22 nt, Human
uuggaggauggaguuagcaucu

SEQ ID NO: 298747 - RNA, 22 nt, Human
cagggcuccccagagagccucu

SEQ ID NO: 298748 - RNA, 20 nt, Human
ggggcagguuuuuauggcua

SEQ ID NO: 298749 - RNA, 14 nt, Human
gcaggcagaccacc

SEQ ID NO: 298750 - RNA, 22 nt, Human
cuuuaguucuaaugcauugaaa

SEQ ID NO: 298751 - RNA, 22 nt, Human
cacaggugugugccuuaucaaa

SEQ ID NO: 298752 - RNA, 22 nt, Human
gaauacauuggaaaucagaaua

SEQ ID NO: 298753 - RNA, 22 nt, Human
ccagacagcaguuaaaggacau

SEQ ID NO: 298754 - RNA, 22 nt, Human
cccugcagagggaugggggcag

SEQ ID NO: 298755 - RNA, 22 nt, Human
gggucuggcaugcugagaugga

SEQ ID NO: 298756 - RNA, 22 nt, Human
caugaaaauaacauuguuguga

SEQ ID NO: 298757 - RNA, 22 nt, Human
uugcuuuaaugagauuuugcca

SEQ ID NO: 298758 - RNA, 22 nt, Human
ccaggccucaccugcccaccua

SEQ ID NO: 298759 - RNA, 22 nt, Human
ucucuuaauaaguaaauacuga

SEQ ID NO: 298760 - RNA, 22 nt, Human
ugcagggcaucuuugaagugug

SEQ ID NO: 298761 - RNA, 22 nt, Human
gagagaaaugugcaguuugggc

SEQ ID NO: 298762 - RNA, 23 nt, Human
ugcuggcuuuuaucuggucccua

SEQ ID NO: 298763 - RNA, 22 nt, Human
uggcagggagccaccggucaug

SEQ ID NO: 298764 - RNA, 22 nt, Human
auguguccacaggugugagaga

SEQ ID NO: 298765 - RNA, 22 nt, Human
caaauacuggguaaguuaauuu

SEQ ID NO: 298766 - RNA, 22 nt, Human
aauguuguuuuucugcaugucu

SEQ ID NO: 298767 - RNA, 23 nt, Human
aaauucaguccuucaacucugag

SEQ ID NO: 298768 - RNA, 22 nt, Human
uucaguaaaacacugcaauguc

SEQ ID NO: 298769 - RNA, 22 nt, Human
aaguuugcauagauuaagcauu

SEQ ID NO: 298770 - RNA, 22 nt, Human
agcagggcugcggccccaccac

SEQ ID NO: 298771 - RNA, 22 nt, Human
uauugguaggacucagcugaga

SEQ ID NO: 298772 - RNA, 22 nt, Human
gaacuguaguuaauacuacaca

SEQ ID NO: 298773 - RNA, 20 nt, Human
ugggugagaguguuugcucu

SEQ ID NO: 298774 - RNA, 23 nt, Human
uugcuugagcccaggaaguggag

SEQ ID NO: 298775 - RNA, 22 nt, Human
cuccuucugaggcucuggguuc

SEQ ID NO: 298776 - RNA, 22 nt, Human
uaguuucagcuccuucauccug

SEQ ID NO: 298777 - RNA, 22 nt, Human
guucuucagucacaucacagaa

SEQ ID NO: 298778 - RNA, 22 nt, Human
ccagggcaauaggaacacuuuu

SEQ ID NO: 298779 - RNA, 22 nt, Human
gggguguggacggcugugccag

SEQ ID NO: 298780 - RNA, 22 nt, Human
uuguguccuauaugcauguucu

SEQ ID NO: 298781 - RNA, 22 nt, Human
acacuuuagaaaaaagaauggu

SEQ ID NO: 298782 - RNA, 22 nt, Human
aguggcagagcaggugcuggaa

SEQ ID NO: 298783 - RNA, 23 nt, Human
cgcccagccucagugaccugggc

SEQ ID NO: 298784 - RNA, 23 nt, Human
aaacuugcuauggcugaaaucau

SEQ ID NO: 298785 - RNA, 22 nt, Human
aguuauaaucugcuacugauau

SEQ ID NO: 298786 - RNA, 22 nt, Human
ugguauuacuucuagacacaag

SEQ ID NO: 298787 - RNA, 22 nt, Human
cagaugaaguaggugacgagca

SEQ ID NO: 298788 - RNA, 22 nt, Human
uaggugucuggacaacuuugua

SEQ ID NO: 298789 - RNA, 22 nt, Human
ucagacagggcuucucaaacuu

SEQ ID NO: 298790 - RNA, 22 nt, Human
uuucuuuuccaauaucccuacu

SEQ ID NO: 298791 - RNA, 23 nt, Human
ccaaagucgaagucuaguccaga

SEQ ID NO: 298792 - RNA, 22 nt, Human
gcagggcagugugucugugggg

SEQ ID NO: 298793 - RNA, 22 nt, Human
guaggcagugguuggaagagaa

SEQ ID NO: 298794 - RNA, 22 nt, Human
uuuauauauggcuggucuggau

SEQ ID NO: 298795 - RNA, 22 nt, Human
caauacuuccuuguuagaggca

SEQ ID NO: 298796 - RNA, 22 nt, Human
ugguggggucaucgucagaugc

SEQ ID NO: 298797 - RNA, 22 nt, Human
auacacauauguguguauaugu

SEQ ID NO: 298798 - RNA, 22 nt, Human
uguacauagaucuugaaaauua

SEQ ID NO: 298799 - RNA, 22 nt, Human
ucccuucuggcagcagugugag

SEQ ID NO: 298800 - RNA, 22 nt, Human
ugaaagaagccucccuuuggag

SEQ ID NO: 298801 - RNA, 19 nt, Human
gcaucagagcagaaggggu

SEQ ID NO: 298802 - RNA, 20 nt, Human
ggcaggugcuguccccuccu

SEQ ID NO: 298803 - RNA, 22 nt, Human
caugcagcggcguuugguuuaa

SEQ ID NO: 298804 - RNA, 22 nt, Human
uuggaggaugucggcauauuua

SEQ ID NO: 298805 - RNA, 22 nt, Human
acauucuuaacaguuaaaaacu

SEQ ID NO: 298806 - RNA, 22 nt, Human
gcaggugugcugaauuacguga

SEQ ID NO: 298807 - RNA, 21 nt, Human
acauguaagagaguuucaaga

SEQ ID NO: 298808 - RNA, 22 nt, Human
aguguccuugauuccuguuguu

SEQ ID NO: 298809 - RNA, 22 nt, Human
ucccaggcuggcaggcagcagu

SEQ ID NO: 298810 - RNA, 22 nt, Human
gcuuccaaaucuguucaaaaug

SEQ ID NO: 298811 - RNA, 22 nt, Human
uauuuaaaauagugcuccagca

SEQ ID NO: 298812 - RNA, 22 nt, Human
aacaaccaaaaagaugaaugua

SEQ ID NO: 298813 - RNA, 22 nt, Human
agggugugcuguugggucuuuc

SEQ ID NO: 298814 - RNA, 22 nt, Human
ucaucaguuuagaaaaaauaug

SEQ ID NO: 298815 - RNA, 19 nt, Human
aguguccuagucauuugcc

SEQ ID NO: 298816 - RNA, 22 nt, Human
aggaccugcuaaugugccaagu

SEQ ID NO: 298817 - RNA, 22 nt, Human
gaacuugguauuccuuuuaaca

SEQ ID NO: 298818 - RNA, 22 nt, Human
uuucuucagagagagcuuuccc

SEQ ID NO: 298819 - RNA, 22 nt, Human
gcuuuauuuugugagggauuac

SEQ ID NO: 298820 - RNA, 23 nt, Human
gagugcagaauagacaugcagug

SEQ ID NO: 298821 - RNA, 22 nt, Human
auguguccuuguucccauucca

SEQ ID NO: 298822 - RNA, 22 nt, Human
auaguuuacaaaaaugaugcau

SEQ ID NO: 298823 - RNA, 22 nt, Human
uuccuaaucacgaacauuauuu

SEQ ID NO: 298824 - RNA, 22 nt, Human
aagaucagcucccgagucugag

SEQ ID NO: 298825 - RNA, 22 nt, Human
ucuggcuguuuuagaugagcuc

SEQ ID NO: 298826 - RNA, 22 nt, Human
aaccugcauguuucuaaaagca

SEQ ID NO: 298827 - RNA, 22 nt, Human
auuuacugcuugacacauuggu

SEQ ID NO: 298828 - RNA, 22 nt, Human
agacagugauggacaggcagac

SEQ ID NO: 298829 - RNA, 22 nt, Human
uccugcagguggaugauucucu

SEQ ID NO: 298830 - RNA, 22 nt, Human
aaggugucacuguuucuggccu

SEQ ID NO: 298831 - RNA, 22 nt, Human
auuuccauuaucaugacaaauu

SEQ ID NO: 298832 - RNA, 22 nt, Human
agugaggggauucaggcaaggu

SEQ ID NO: 298833 - RNA, 22 nt, Human
uacagguggaucacuaguauag

SEQ ID NO: 298834 - RNA, 22 nt, Human
ucuuagauguuagcucugugug

SEQ ID NO: 298835 - RNA, 22 nt, Human
ugauagagcacuaaguagugua

SEQ ID NO: 298836 - RNA, 22 nt, Human
uauuucagcccuacuacuuggc

SEQ ID NO: 298837 - RNA, 22 nt, Human
cuguguccucccgcugcaccca

SEQ ID NO: 298838 - RNA, 22 nt, Human
ucaggagcugcacugggcccac

SEQ ID NO: 298839 - RNA, 22 nt, Human
uagggcaguuucauguuaucuu

SEQ ID NO: 298840 - RNA, 22 nt, Human
ugacugaaggacuagauugauu

SEQ ID NO: 298841 - RNA, 22 nt, Human
ucagguggcugguugcuggcua

SEQ ID NO: 298842 - RNA, 22 nt, Human
ggcugaguugagaggauuacuu

SEQ ID NO: 298843 - RNA, 22 nt, Human
ugcuuuauucccuucugaugug

SEQ ID NO: 298844 - RNA, 22 nt, Human
gauugcugaagaaagugaguga

SEQ ID NO: 298845 - RNA, 22 nt, Human
guggcacaaggcuuacacagca

SEQ ID NO: 298846 - RNA, 22 nt, Human
cacagguggcuccaaguuagag

SEQ ID NO: 298847 - RNA, 22 nt, Human
ucuucuuccucauuuauacaua

SEQ ID NO: 298848 - RNA, 22 nt, Human
gagguggucgaggagggguacc

SEQ ID NO: 298849 - RNA, 22 nt, Human
ccagcuuuauagcuucaaagga

SEQ ID NO: 298850 - RNA, 22 nt, Human
aguguccucaucuguaaaauga

SEQ ID NO: 298851 - RNA, 22 nt, Human
cagaagcaaguagugauucuuu

SEQ ID NO: 298852 - RNA, 22 nt, Human
uuauuguagcacuuuggcagug

SEQ ID NO: 298853 - RNA, 22 nt, Human
cccaggcacacugaagugacau

SEQ ID NO: 298854 - RNA, 22 nt, Human
ugggcuccggcggccucaggcu

SEQ ID NO: 298855 - RNA, 22 nt, Human
uaacauguuaagaaauuagaua

SEQ ID NO: 298856 - RNA, 22 nt, Human
cauuuauucucagauccuuguc

SEQ ID NO: 298857 - RNA, 22 nt, Human
uggcaaagaugaagcauuucgu

SEQ ID NO: 298858 - RNA, 22 nt, Human
ugcuuuauuuauaaaauagcaa

SEQ ID NO: 298859 - RNA, 22 nt, Human
uaagauguuuugguuugauaag

SEQ ID NO: 298860 - RNA, 22 nt, Human
ggcaggcacuguguuuuguguu

SEQ ID NO: 298861 - RNA, 22 nt, Human
gacagguggggaaacuaaggua

SEQ ID NO: 298862 - RNA, 22 nt, Human
ucaucaguguccuuaucacuua

SEQ ID NO: 298863 - RNA, 22 nt, Human
agugaggggcagcugagugggc

SEQ ID NO: 298864 - RNA, 19 nt, Human
uuagguauuauugcuuucc

SEQ ID NO: 298865 - RNA, 22 nt, Human
guaugcaucgacucaagucuga

SEQ ID NO: 298866 - RNA, 22 nt, Human
uucuggguggccaguauuuaga

SEQ ID NO: 298867 - RNA, 21 nt, Human
uuguguccuucuaaagggcca

SEQ ID NO: 298868 - RNA, 22 nt, Human
gucuauauauugcuugaauaau

SEQ ID NO: 298869 - RNA, 17 nt, Human
ucuggaugucauggaag

SEQ ID NO: 298870 - RNA, 22 nt, Human
accaggcacucuuguggcagug

SEQ ID NO: 298871 - RNA, 22 nt, Human
gguggcagagaggagguaguuu

SEQ ID NO: 298872 - RNA, 22 nt, Human
gcccaggcuggagugcaguagc

SEQ ID NO: 298873 - RNA, 22 nt, Human
acaguguuuuagaaaagcuuga

SEQ ID NO: 298874 - RNA, 22 nt, Human
ugacaggugcugggggcagugu

SEQ ID NO: 298875 - RNA, 21 nt, Human
ucuucccucaggauguccugc

SEQ ID NO: 298876 - RNA, 22 nt, Human
uggcaaagugacuccuuggggc

SEQ ID NO: 298877 - RNA, 22 nt, Human
acauacagaccugcagggcagc

SEQ ID NO: 298878 - RNA, 22 nt, Human
aaagcugcuuugguuucuggaa

SEQ ID NO: 298879 - RNA, 22 nt, Human
agaagcuauaacaacaauuaua

SEQ ID NO: 298880 - RNA, 22 nt, Human
uucuucagucccacuagccaca

SEQ ID NO: 298881 - RNA, 22 nt, Human
ucuggcucugacacuacuguua

SEQ ID NO: 298882 - RNA, 22 nt, Human
accuuauuuugaaauagauugu

SEQ ID NO: 298883 - RNA, 17 nt, Human
ggcaguggaggaagaga

SEQ ID NO: 298884 - RNA, 22 nt, Human
ccagguguaagacaugguccua

SEQ ID NO: 298885 - RNA, 22 nt, Human
gcagggcagggcaagaacuggg

SEQ ID NO: 298886 - RNA, 22 nt, Human
ggucuggauaauuccaguaccu

SEQ ID NO: 298887 - RNA, 22 nt, Human
gccaggcagauaugugagcuua

SEQ ID NO: 298888 - RNA, 22 nt, Human
gaugagcauuguuucauguguu

SEQ ID NO: 298889 - RNA, 22 nt, Human
cccagugucugggccugcaggg

SEQ ID NO: 298890 - RNA, 22 nt, Human
cagggagcuggugccagccgac

SEQ ID NO: 298891 - RNA, 22 nt, Human
ccugggucccagccaggcuuug

SEQ ID NO: 298892 - RNA, 19 nt, Human
uuucuuuuccccucagcac

SEQ ID NO: 298893 - RNA, 22 nt, Human
aacaugugagcagguuuuuuau

SEQ ID NO: 298894 - RNA, 22 nt, Human
ucagggacagggugcugcugcg

SEQ ID NO: 298895 - RNA, 22 nt, Human
uucaugugauaaaugugugacu

SEQ ID NO: 298896 - RNA, 22 nt, Human
ccuucucccucugagaggaacc

SEQ ID NO: 298897 - RNA, 22 nt, Human
ccaggugucugucucuuuuuca

SEQ ID NO: 298898 - RNA, 19 nt, Human
uaggaauguagaauccuag

SEQ ID NO: 298899 - RNA, 22 nt, Human
cuucuucaaccugaaaguuuca

SEQ ID NO: 298900 - RNA, 23 nt, Human
ucagagagcuguugagagcugcc

SEQ ID NO: 298901 - RNA, 22 nt, Human
guguccugggucucugauucuu

SEQ ID NO: 298902 - RNA, 22 nt, Human
acauuguauaaugauuaucaca

SEQ ID NO: 298903 - RNA, 22 nt, Human
guucacaagaguuacagacaga

SEQ ID NO: 298904 - RNA, 16 nt, Human
uccaggcauaucugag

SEQ ID NO: 298905 - RNA, 22 nt, Human
cagcaugaugagugcaguuugg

SEQ ID NO: 298906 - RNA, 22 nt, Human
cuuaggaacgcucugccuagug

SEQ ID NO: 298907 - RNA, 22 nt, Human
guuagggaucaggaacaagagc

SEQ ID NO: 298908 - RNA, 22 nt, Human
auucuucagcaggggacacuau

SEQ ID NO: 298909 - RNA, 22 nt, Human
caugugucuuuauggagccaca

SEQ ID NO: 298910 - RNA, 22 nt, Human
gcauacagagaggauguggcau

SEQ ID NO: 298911 - RNA, 22 nt, Human
agacagaccauggcuauucaga

SEQ ID NO: 298912 - RNA, 22 nt, Human
cuguccucaucugccccaaggg

SEQ ID NO: 298913 - RNA, 22 nt, Human
ccagagaggcaaaacuccuucc

SEQ ID NO: 298914 - RNA, 22 nt, Human
acuuuguuuucaugaaacagcu

SEQ ID NO: 298915 - RNA, 22 nt, Human
cugcccucgggcccucccauag

SEQ ID NO: 298916 - RNA, 22 nt, Human
uggaggaaaaaaccaggcagag

SEQ ID NO: 298917 - RNA, 22 nt, Human
aauauccacacugugucccugc

SEQ ID NO: 298918 - RNA, 22 nt, Human
aggaggaauacaauccagcagc

SEQ ID NO: 298919 - RNA, 21 nt, Human
ccugggugggaccccucuucc

SEQ ID NO: 298920 - RNA, 22 nt, Human
uccuucuguagucccugucccu

SEQ ID NO: 298921 - RNA, 22 nt, Human
accuugaugccuuuccaagaug

SEQ ID NO: 298922 - RNA, 22 nt, Human
cuccgcagcgggccaauccgga

SEQ ID NO: 298923 - RNA, 19 nt, Human
ggcauccacgaaugcagag

SEQ ID NO: 298924 - RNA, 22 nt, Human
cuguccucaacccauccuucuc

SEQ ID NO: 298925 - RNA, 22 nt, Human
guacaauaacuagucuuauagu

SEQ ID NO: 298926 - RNA, 22 nt, Human
auuucuggauuuuggaugcugc

SEQ ID NO: 298927 - RNA, 22 nt, Human
ucugaagauuaccagcuaaaug

SEQ ID NO: 298928 - RNA, 22 nt, Human
uccucagaaaccccugugaggu

SEQ ID NO: 298929 - RNA, 20 nt, Human
gccugcagguuggaugggau

SEQ ID NO: 298930 - RNA, 22 nt, Human
cacaucagguagaccuacagag

SEQ ID NO: 298931 - RNA, 22 nt, Human
agauguuuuggagacacuaacc

SEQ ID NO: 298932 - RNA, 22 nt, Human
uuucacauaucaacucuauccu

SEQ ID NO: 298933 - RNA, 22 nt, Human
cuguccagucuuuagcaagcug

SEQ ID NO: 298934 - RNA, 22 nt, Human
guccaugacugugacucacaug

SEQ ID NO: 298935 - RNA, 22 nt, Human
ucuggagggcccacauccacaa

SEQ ID NO: 298936 - RNA, 22 nt, Human
uccaggcaugguguaauuuugc

SEQ ID NO: 298937 - RNA, 22 nt, Human
gacauaaaauggaauucuguug

SEQ ID NO: 298938 - RNA, 22 nt, Human
uaguaguaauuguuaucuuauu

SEQ ID NO: 298939 - RNA, 22 nt, Human
uauuuauucauucagcaagcau

SEQ ID NO: 298940 - RNA, 22 nt, Human
cagagcaucgcgcagagagccu

SEQ ID NO: 298941 - RNA, 22 nt, Human
agacagacguagugugagagua

SEQ ID NO: 298942 - RNA, 22 nt, Human
ucugggaacagccuggcugugu

SEQ ID NO: 298943 - RNA, 22 nt, Human
ucuguucauguugggcuuuucc

SEQ ID NO: 298944 - RNA, 21 nt, Human
uuucuucacuuugccccaugu

SEQ ID NO: 298945 - RNA, 22 nt, Human
uguggggccucgugcuagcugg

SEQ ID NO: 298946 - RNA, 19 nt, Human
agugcagggagcacccuca

SEQ ID NO: 298947 - RNA, 22 nt, Human
aagacauugucauuuuauaauu

SEQ ID NO: 298948 - RNA, 20 nt, Human
uugauucccucuaaacucgc

SEQ ID NO: 298949 - RNA, 20 nt, Human
ccaggccugggccugcucua

SEQ ID NO: 298950 - RNA, 22 nt, Human
cauacuuuugcccugacauucu

SEQ ID NO: 298951 - RNA, 22 nt, Human
uuugacucauuaaagucuccgu

SEQ ID NO: 298952 - RNA, 22 nt, Human
augcuacuauccuucugcuuaa

SEQ ID NO: 298953 - RNA, 22 nt, Human
uuuccagguauuaauacuguau

SEQ ID NO: 298954 - RNA, 22 nt, Human
aagcuuucagagcagaauguga

SEQ ID NO: 298955 - RNA, 22 nt, Human
ucugucccugagagcucaggag

SEQ ID NO: 298956 - RNA, 22 nt, Human
ccagcuuuaucaagucugagcu

SEQ ID NO: 298957 - RNA, 19 nt, Human
uccugcugugugaagggga

SEQ ID NO: 298958 - RNA, 22 nt, Human
ucauuuguucucauucucuacu

SEQ ID NO: 298959 - RNA, 22 nt, Human
uucugggugccaccuaagacau

SEQ ID NO: 298960 - RNA, 22 nt, Human
uuugcaauuugugcugcaaaug

SEQ ID NO: 298961 - RNA, 22 nt, Human
acuucuaugcacagagcuugga

SEQ ID NO: 298962 - RNA, 22 nt, Human
ugaaacauuugaugaucuuugg

SEQ ID NO: 298963 - RNA, 22 nt, Human
cucccaagauaaauaaggcagu

SEQ ID NO: 298964 - RNA, 22 nt, Human
cagguggugccuccaggcuggu

SEQ ID NO: 298965 - RNA, 22 nt, Human
uucucuuaucuggcauuauugg

SEQ ID NO: 298966 - RNA, 22 nt, Human
uuuacuugauauggagcugagg

SEQ ID NO: 298967 - RNA, 22 nt, Human
uugcuuauagagaguuucauac

SEQ ID NO: 298968 - RNA, 22 nt, Human
auuuccaguccuaaugaucugg

SEQ ID NO: 298969 - RNA, 22 nt, Human
uaucuaaaggauuuaauuuagu

SEQ ID NO: 298970 - RNA, 22 nt, Human
uuucaaagcaacugaaaaggaa

SEQ ID NO: 298971 - RNA, 22 nt, Human
aguguguccagaaaucuguauu

SEQ ID NO: 298972 - RNA, 22 nt, Human
ugcuggagcccaggcggccuuu

SEQ ID NO: 298973 - RNA, 22 nt, Human
gacagaaggcaucuagggcacg

SEQ ID NO: 298974 - RNA, 22 nt, Human
gugagcagcucaggguggucuc

SEQ ID NO: 298975 - RNA, 22 nt, Human
ggaggcaggaaagacagguuca

SEQ ID NO: 298976 - RNA, 22 nt, Human
aucauucugauggucaaugcua

SEQ ID NO: 298977 - RNA, 22 nt, Human
uuagcuuuucacuugcauuauc

SEQ ID NO: 298978 - RNA, 22 nt, Human
ugcuugaacccaggaaguggag

SEQ ID NO: 298979 - RNA, 22 nt, Human
ccaggugugucuggccccgaag

SEQ ID NO: 298980 - RNA, 22 nt, Human
ucaggugucuaucuaaccuggu

SEQ ID NO: 298981 - RNA, 22 nt, Human
ggcaggcagaggcugagacagg

SEQ ID NO: 298982 - RNA, 22 nt, Human
ccugcagaaaggguccccagga

SEQ ID NO: 298983 - RNA, 21 nt, Human
aguugcugcugcugcagguga

SEQ ID NO: 298984 - RNA, 22 nt, Human
auuguauuagcacaauacaauu

SEQ ID NO: 298985 - RNA, 22 nt, Human
uagaaacauguucuguucuguu

SEQ ID NO: 298986 - RNA, 22 nt, Human
uccugcagcugauaaauacagu

SEQ ID NO: 298987 - RNA, 22 nt, Human
gaguccuuuucucuguccacug

SEQ ID NO: 298988 - RNA, 19 nt, Human
aaaguuuuauucucauuug

SEQ ID NO: 298989 - RNA, 22 nt, Human
ucagguguguggcucuggacca

SEQ ID NO: 298990 - RNA, 22 nt, Human
gguguccucacuauagcaaguc

SEQ ID NO: 298991 - RNA, 22 nt, Human
aacauuguuuucccuauaucca

SEQ ID NO: 298992 - RNA, 19 nt, Human
uauugguaugugugaggca

SEQ ID NO: 298993 - RNA, 22 nt, Human
gaucuucucuuuaguagaaaca

SEQ ID NO: 298994 - RNA, 22 nt, Human
uuguccugcaaccucacauggc

SEQ ID NO: 298995 - RNA, 23 nt, Human
ugagcaucacaggagaaccaggc

SEQ ID NO: 298996 - RNA, 20 nt, Human
uuucacaucugucccuuuaa

SEQ ID NO: 298997 - RNA, 22 nt, Human
gcauguuuugcaacaagugacc

SEQ ID NO: 298998 - RNA, 22 nt, Human
acucauugaaacuuaagaucua

SEQ ID NO: 298999 - RNA, 22 nt, Human
aauugcuuuacaagccguuuaa

SEQ ID NO: 299000 - RNA, 22 nt, Human
agguggucuuaaacugcucugg

SEQ ID NO: 299001 - RNA, 22 nt, Human
uucucuuuugugaugugagaug

SEQ ID NO: 299002 - RNA, 22 nt, Human
agauacaaaagauaagauuuag

SEQ ID NO: 299003 - RNA, 22 nt, Human
auuccuucuuugagaauaagca

SEQ ID NO: 299004 - RNA, 22 nt, Human
ucugcaugaugaacaaaugagc

SEQ ID NO: 299005 - RNA, 20 nt, Human
uuucacagucccuguuuccu

SEQ ID NO: 299006 - RNA, 22 nt, Human
gcagacagggcuacagagguac

SEQ ID NO: 299007 - RNA, 22 nt, Human
agugucuguugaguuucaaaag

SEQ ID NO: 299008 - RNA, 22 nt, Human
cucuucuuuaguccagaccauc

SEQ ID NO: 299009 - RNA, 22 nt, Human
ccuguucauuuguauuugucuu

SEQ ID NO: 299010 - RNA, 22 nt, Human
uccaggcagggcagccaucaag

SEQ ID NO: 299011 - RNA, 22 nt, Human
uuugacucaagcccucauguua

SEQ ID NO: 299012 - RNA, 22 nt, Human
uuauacauguuuauaagguuga

SEQ ID NO: 299013 - RNA, 22 nt, Human
ccagguggugaaagugggcccu

SEQ ID NO: 299014 - RNA, 22 nt, Human
uguccucacacguagggaguaa

SEQ ID NO: 299015 - RNA, 22 nt, Human
caggauggucagaugcauuguc

SEQ ID NO: 299016 - RNA, 22 nt, Human
gggcaaagugguggaggcaguu

SEQ ID NO: 299017 - RNA, 22 nt, Human
uaguuaggaauagcagcgacuc

SEQ ID NO: 299018 - RNA, 16 nt, Human
ucuuaguuguguggua

SEQ ID NO: 299019 - RNA, 22 nt, Human
ccagguggacggcgaguacagg

SEQ ID NO: 299020 - RNA, 22 nt, Human
ccugcaguuuguugugaccccg

SEQ ID NO: 299021 - RNA, 22 nt, Human
aaaggcuaugagauagaagaua

SEQ ID NO: 299022 - RNA, 22 nt, Human
uaguuauauccagucuuuaaaa

SEQ ID NO: 299023 - RNA, 22 nt, Human
aagguggucuuacugaugguau

SEQ ID NO: 299024 - RNA, 19 nt, Human
gauuuaaacguggcucuau

SEQ ID NO: 299025 - RNA, 22 nt, Human
uauuuccaagcugaauccaaug

SEQ ID NO: 299026 - RNA, 22 nt, Human
cuguacaaguccuucaucaggg

SEQ ID NO: 299027 - RNA, 22 nt, Human
auugggaugccggcugauaaga

SEQ ID NO: 299028 - RNA, 22 nt, Human
ugccuggaaggcccaugggaag

SEQ ID NO: 299029 - RNA, 22 nt, Human
acacauuucucuuuuuguaagu

SEQ ID NO: 299030 - RNA, 22 nt, Human
uauugcugccucguccaggcug

SEQ ID NO: 299031 - RNA, 22 nt, Human
ccagcuuucugggugguuucug

SEQ ID NO: 299032 - RNA, 22 nt, Human
agcauguucaucuucuguuggu

SEQ ID NO: 299033 - RNA, 19 nt, Human
ccagguggaacugagguag

SEQ ID NO: 299034 - RNA, 22 nt, Human
uaauuuuacuuccugagcaccu

SEQ ID NO: 299035 - RNA, 22 nt, Human
agggucaacauuucauugauuc

SEQ ID NO: 299036 - RNA, 22 nt, Human
uggaaugaauuuggcuuccucc

SEQ ID NO: 299037 - RNA, 20 nt, Human
ucuggcucuuugcuccuccc

SEQ ID NO: 299038 - RNA, 22 nt, Human
uugggaaguuuaaugacagacu

SEQ ID NO: 299039 - RNA, 22 nt, Human
uguugauuaguguuuagacuua

SEQ ID NO: 299040 - RNA, 22 nt, Human
aagggcucugugcuugucccau

SEQ ID NO: 299041 - RNA, 22 nt, Human
cuuccagagauccaugaauacc

SEQ ID NO: 299042 - RNA, 22 nt, Human
uuucacaucagagguagauuag

SEQ ID NO: 299043 - RNA, 22 nt, Human
auguccucggcucugugcugcu

SEQ ID NO: 299044 - RNA, 22 nt, Human
agcagggcuuuggcuggcuuuc

SEQ ID NO: 299045 - RNA, 22 nt, Human
uucuuguaauuuggagaaauga

SEQ ID NO: 299046 - RNA, 22 nt, Human
aaaguggugggcgaacucauca

SEQ ID NO: 299047 - RNA, 22 nt, Human
ccagagagagaggucaauggca

SEQ ID NO: 299048 - RNA, 22 nt, Human
cccugcagaccaaugccauaga

SEQ ID NO: 299049 - RNA, 19 nt, Human
acagcagguguggggauaa

SEQ ID NO: 299050 - RNA, 22 nt, Human
ucuguucaguugauuagacaga

SEQ ID NO: 299051 - RNA, 14 nt, Human
gcaggcagaucauu

SEQ ID NO: 299052 - RNA, 22 nt, Human
caguuucugagcccugucauuu

SEQ ID NO: 299053 - RNA, 20 nt, Human
cugcaggguuagaggcucca

SEQ ID NO: 299054 - RNA, 22 nt, Human
uuuacuuucucaaguauauagg

SEQ ID NO: 299055 - RNA, 22 nt, Human
acuggaggauuccuggaaggcg

SEQ ID NO: 299056 - RNA, 22 nt, Human
caguucuuaauaccaugugguu

SEQ ID NO: 299057 - RNA, 22 nt, Human
agucauaugacccuucacaaac

SEQ ID NO: 299058 - RNA, 22 nt, Human
gggugggacucuuuggccugag

SEQ ID NO: 299059 - RNA, 22 nt, Human
cgcagggccgcgagcgggacca

SEQ ID NO: 299060 - RNA, 22 nt, Human
ugcuagggauacaguggugaau

SEQ ID NO: 299061 - RNA, 22 nt, Human
gcagagaguugggcugcgccag

SEQ ID NO: 299062 - RNA, 22 nt, Human
aauuucuccaagaaugcuuaga

SEQ ID NO: 299063 - RNA, 22 nt, Human
cgcaggugccggcagauggggu

SEQ ID NO: 299064 - RNA, 22 nt, Human
auuucugugcaguaaaugguga

SEQ ID NO: 299065 - RNA, 22 nt, Human
agggaagaagcugguaguaggu

SEQ ID NO: 299066 - RNA, 22 nt, Human
uggaaaaacugagacuuagaca

SEQ ID NO: 299067 - RNA, 22 nt, Human
agggcucccgcgguguccggga

SEQ ID NO: 299068 - RNA, 22 nt, Human
ugggaccugaagcagguuggca

SEQ ID NO: 299069 - RNA, 22 nt, Human
agucacauggacucaggaugac

SEQ ID NO: 299070 - RNA, 17 nt, Human
uuucagauucacuuucu

SEQ ID NO: 299071 - RNA, 22 nt, Human
agcuggagaauaggaauuagug

SEQ ID NO: 299072 - RNA, 22 nt, Human
gaucugaaauagcuacugcaga

SEQ ID NO: 299073 - RNA, 21 nt, Human
uaugugucuguggaaaacuag

SEQ ID NO: 299074 - RNA, 22 nt, Human
uggagcagcuaagccucugaga

SEQ ID NO: 299075 - RNA, 22 nt, Human
gugaccauaauagauuaugagu

SEQ ID NO: 299076 - RNA, 22 nt, Human
cagggcuccccgcaccgcagcc

SEQ ID NO: 299077 - RNA, 22 nt, Human
cuuccuucaauauaauuuuuac

SEQ ID NO: 299078 - RNA, 22 nt, Human
cagcuuguuaccgagggagggu

SEQ ID NO: 299079 - RNA, 22 nt, Human
aaaucucaggccucuauuuacu

SEQ ID NO: 299080 - RNA, 22 nt, Human
cagggcucaggcucugggauuc

SEQ ID NO: 299081 - RNA, 22 nt, Human
cuuccucugccucccgugcuca

SEQ ID NO: 299082 - RNA, 22 nt, Human
ugcagguggcuccagggacugc

SEQ ID NO: 299083 - RNA, 22 nt, Human
agcugcaagauaaaagugaugu

SEQ ID NO: 299084 - RNA, 22 nt, Human
aguaaaaauugaggugcaaaau

SEQ ID NO: 299085 - RNA, 22 nt, Human
ucuggcccuauggcauguaccu

SEQ ID NO: 299086 - RNA, 22 nt, Human
gcagguguggaguggggugagc

SEQ ID NO: 299087 - RNA, 22 nt, Human
uuccagagcaguuuucagauca

SEQ ID NO: 299088 - RNA, 22 nt, Human
acauaucuuucccucuccugaa

SEQ ID NO: 299089 - RNA, 22 nt, Human
cauuagggacugaggaauaagg

SEQ ID NO: 299090 - RNA, 22 nt, Human
acagggcagaaauguugcaucu

SEQ ID NO: 299091 - RNA, 22 nt, Human
cuauugcuuuugugugcuccca

SEQ ID NO: 299092 - RNA, 22 nt, Human
uuauuguuuacuaguuugcaga

SEQ ID NO: 299093 - RNA, 22 nt, Human
caaauucacaugauugcuucug

SEQ ID NO: 299094 - RNA, 22 nt, Human
ccucaugcugcaucucugaggu

SEQ ID NO: 299095 - RNA, 22 nt, Human
ucuucaaacugaaaauuuagaa

SEQ ID NO: 299096 - RNA, 19 nt, Human
uagcugauagcuacuuuau

SEQ ID NO: 299097 - RNA, 22 nt, Human
ugcguacuguuuauacaugugu

SEQ ID NO: 299098 - RNA, 22 nt, Human
ugcuggguagaaguauuagucu

SEQ ID NO: 299099 - RNA, 22 nt, Human
uuucaaacauaucuucauuacu

SEQ ID NO: 299100 - RNA, 22 nt, Human
ucauuucuguugugcaucacug

SEQ ID NO: 299101 - RNA, 22 nt, Human
ucaggaaagccuagaagagaac

SEQ ID NO: 299102 - RNA, 22 nt, Human
aaucuucacagaaaaaugucug

SEQ ID NO: 299103 - RNA, 20 nt, Human
acaaaauagguacuggguag

SEQ ID NO: 299104 - RNA, 22 nt, Human
uccaggcagcccuuccugacuc

SEQ ID NO: 299105 - RNA, 22 nt, Human
aagucacauucugagguauugg

SEQ ID NO: 299106 - RNA, 22 nt, Human
gcaccugcuggaaucagucugu

SEQ ID NO: 299107 - RNA, 22 nt, Human
uauugcuggugcuguucugaau

SEQ ID NO: 299108 - RNA, 22 nt, Human
agaaacucauccuggagaugac

SEQ ID NO: 299109 - RNA, 22 nt, Human
cagaugaacuaggcugcacuug

SEQ ID NO: 299110 - RNA, 20 nt, Human
uuccuggggaaugauagaag

SEQ ID NO: 299111 - RNA, 22 nt, Human
cauuuccacuucugaaaacugg

SEQ ID NO: 299112 - RNA, 21 nt, Human
uuucucaguugugugagcagc

SEQ ID NO: 299113 - RNA, 19 nt, Human
ucccaguggggagaggugu

SEQ ID NO: 299114 - RNA, 22 nt, Human
gacccaggguauccagagcugc

SEQ ID NO: 299115 - RNA, 22 nt, Human
aaccccgcucaggcugggugag

SEQ ID NO: 299116 - RNA, 19 nt, Human
uucuaccuuacuguaggcu

SEQ ID NO: 299117 - RNA, 22 nt, Human
uucuucaguuugguaaauguaa

SEQ ID NO: 299118 - RNA, 22 nt, Human
gcaucuaaauaaacgugggagu

SEQ ID NO: 299119 - RNA, 22 nt, Human
ggcauccaguucugaucaacaa

SEQ ID NO: 299120 - RNA, 22 nt, Human
uggcagguuaugcgggccacau

SEQ ID NO: 299121 - RNA, 22 nt, Human
uugcuuuagggcaaauauuuca

SEQ ID NO: 299122 - RNA, 22 nt, Human
acaugauucuugauaggcauug

SEQ ID NO: 299123 - RNA, 22 nt, Human
uuccggaagguucucuagaauu

SEQ ID NO: 299124 - RNA, 22 nt, Human
uuuacucuugcuacacaacugu

SEQ ID NO: 299125 - RNA, 22 nt, Human
cuuucuuauaccugucagggcc

SEQ ID NO: 299126 - RNA, 22 nt, Human
ucacaaauauuuuaacaguagg

SEQ ID NO: 299127 - RNA, 18 nt, Human
agacagacagguuugugc

SEQ ID NO: 299128 - RNA, 17 nt, Human
cagugaggccuuuccuc

SEQ ID NO: 299129 - RNA, 22 nt, Human
cugggucugggccuccuggagu

SEQ ID NO: 299130 - RNA, 22 nt, Human
gcagggcagaaggugcugagga

SEQ ID NO: 299131 - RNA, 22 nt, Human
gccugcagccucaagggcugag

SEQ ID NO: 299132 - RNA, 22 nt, Human
uaaguucaagucuuggauauaa

SEQ ID NO: 299133 - RNA, 22 nt, Human
uauuccuauggccacugcuacu

SEQ ID NO: 299134 - RNA, 22 nt, Human
ggaucuucagccagcaggugcc

SEQ ID NO: 299135 - RNA, 22 nt, Human
aggcugcagaacagucaggugc

SEQ ID NO: 299136 - RNA, 22 nt, Human
ugcagggaaugcuugcagcaug

SEQ ID NO: 299137 - RNA, 22 nt, Human
aaauccuaaggagaauaugauu

SEQ ID NO: 299138 - RNA, 22 nt, Human
ugguuuaccccuguccuauauc

SEQ ID NO: 299139 - RNA, 22 nt, Human
ucugggugggcccgagaaaucu

SEQ ID NO: 299140 - RNA, 22 nt, Human
gacagguggguucucguaucug

SEQ ID NO: 299141 - RNA, 20 nt, Human
ucuaaaguacaguuugugug

SEQ ID NO: 299142 - RNA, 22 nt, Human
uuugacucuagucauagaagug

SEQ ID NO: 299143 - RNA, 22 nt, Human
cagggcagugaagaacacacgu

SEQ ID NO: 299144 - RNA, 21 nt, Human
aguaguuuagcacaggguuug

SEQ ID NO: 299145 - RNA, 22 nt, Human
gcagguguggauuugcauccag

SEQ ID NO: 299146 - RNA, 22 nt, Human
uuucuucauucaccuucacccc

SEQ ID NO: 299147 - RNA, 23 nt, Human
cuguccugccauccacagcggcc

SEQ ID NO: 299148 - RNA, 22 nt, Human
gucacuguauccagguuccagc

SEQ ID NO: 299149 - RNA, 22 nt, Human
ggacaggugacugcccagagug

SEQ ID NO: 299150 - RNA, 22 nt, Human
uggcuggagcgcccuccucugc

SEQ ID NO: 299151 - RNA, 22 nt, Human
ugcuggaggccagaagucugag

SEQ ID NO: 299152 - RNA, 22 nt, Human
ucaggugucugccucuuugagu

SEQ ID NO: 299153 - RNA, 18 nt, Human
ucauuuguuuugcaugaa

SEQ ID NO: 299154 - RNA, 22 nt, Human
uuuacauugcauuagguauuau

SEQ ID NO: 299155 - RNA, 22 nt, Human
auguccuuuguaucccuaggca

SEQ ID NO: 299156 - RNA, 22 nt, Human
aggcaggggagcuggaagggua

SEQ ID NO: 299157 - RNA, 22 nt, Human
ugaccugcagucaagaggggaa

SEQ ID NO: 299158 - RNA, 22 nt, Human
cuggaaugccucccugucagag

SEQ ID NO: 299159 - RNA, 22 nt, Human
ucauuguauuaaaauauugguu

SEQ ID NO: 299160 - RNA, 22 nt, Human
ggcucccacccauagggcgagu

SEQ ID NO: 299161 - RNA, 22 nt, Human
uuuacagagaauguacauaaag

SEQ ID NO: 299162 - RNA, 22 nt, Human
acuguacugaaaaguaagcaag

SEQ ID NO: 299163 - RNA, 22 nt, Human
uaagaaacaugauacuuuuccu

SEQ ID NO: 299164 - RNA, 22 nt, Human
uacaaaaaauugauacugacga

SEQ ID NO: 299165 - RNA, 22 nt, Human
uacagauaacugaaugcagacu

SEQ ID NO: 299166 - RNA, 22 nt, Human
ucaaggagcccacagucuaaug

SEQ ID NO: 299167 - RNA, 22 nt, Human
uugcugggcaugucuuaauucu

SEQ ID NO: 299168 - RNA, 22 nt, Human
uaaaaugccagaccaguucacg

SEQ ID NO: 299169 - RNA, 22 nt, Human
uccuggcugaguucccaagucg

SEQ ID NO: 299170 - RNA, 22 nt, Human
acacuuuacucuuacaccauug

SEQ ID NO: 299171 - RNA, 22 nt, Human
uucuucaguguagcaacuguau

SEQ ID NO: 299172 - RNA, 22 nt, Human
ucugcccuggggucagccucca

SEQ ID NO: 299173 - RNA, 22 nt, Human
ugaacauugucacauuccuagc

SEQ ID NO: 299174 - RNA, 22 nt, Human
guauacauagaugaugaacaag

SEQ ID NO: 299175 - RNA, 22 nt, Human
ggcaggugcccagagagcacga

SEQ ID NO: 299176 - RNA, 22 nt, Human
auacaacuuuacaugcaauucc

SEQ ID NO: 299177 - RNA, 22 nt, Human
aaguguauauaugacuuauaaa

SEQ ID NO: 299178 - RNA, 22 nt, Human
ugagcauuggaucaaaugacuu

SEQ ID NO: 299179 - RNA, 22 nt, Human
ccuguucacccuccaugcacag

SEQ ID NO: 299180 - RNA, 22 nt, Human
ccaugagcuuccuauauagggu

SEQ ID NO: 299181 - RNA, 22 nt, Human
cauuagggucucucagcugaau

SEQ ID NO: 299182 - RNA, 22 nt, Human
uggcaggucaugaguggccacc

SEQ ID NO: 299183 - RNA, 22 nt, Human
guuugcaaauuguguuaaagcu

SEQ ID NO: 299184 - RNA, 22 nt, Human
gggugggaucuguggagccuca

SEQ ID NO: 299185 - RNA, 22 nt, Human
uucugugaaucuuuuuucccac

SEQ ID NO: 299186 - RNA, 22 nt, Human
uuaacauuguccuuagcagauu

SEQ ID NO: 299187 - RNA, 22 nt, Human
uuuuauugucuguauugccuau

SEQ ID NO: 299188 - RNA, 20 nt, Human
aggcucagcugagcucuugg

SEQ ID NO: 299189 - RNA, 22 nt, Human
cucuuaguaaugccaugaagca

SEQ ID NO: 299190 - RNA, 22 nt, Human
aaaccaucagauaauucauacu

SEQ ID NO: 299191 - RNA, 22 nt, Human
cccugcagaaccacagacaaac

SEQ ID NO: 299192 - RNA, 22 nt, Human
cuauaauuaugcucaaaaugua

SEQ ID NO: 299193 - RNA, 22 nt, Human
gccugcagugagugcagaaggu

SEQ ID NO: 299194 - RNA, 22 nt, Human
auuauuagugauguuguuacug

SEQ ID NO: 299195 - RNA, 22 nt, Human
uguaaauugaaggaaauuugug

SEQ ID NO: 299196 - RNA, 20 nt, Human
uuuauuggccuuucaggaac

SEQ ID NO: 299197 - RNA, 22 nt, Human
uuuggacuuagccugcagaauu

SEQ ID NO: 299198 - RNA, 22 nt, Human
uucauucuuugaaucugaggua

SEQ ID NO: 299199 - RNA, 22 nt, Human
ucagcuuugccaccagcuguaa

SEQ ID NO: 299200 - RNA, 22 nt, Human
ccucuaggauguggcuggagga

SEQ ID NO: 299201 - RNA, 22 nt, Human
gcacccaggcuugggcagcaac

SEQ ID NO: 299202 - RNA, 22 nt, Human
uucugggucacccuucugcuca

SEQ ID NO: 299203 - RNA, 22 nt, Human
ucuggaggcaacuaaccuaguu

SEQ ID NO: 299204 - RNA, 22 nt, Human
uccaggcaaaaggaacugcuug

SEQ ID NO: 299205 - RNA, 22 nt, Human
aaaauuuugcccuauccuucau

SEQ ID NO: 299206 - RNA, 22 nt, Human
uuguauuuauauugaauagcuu

SEQ ID NO: 299207 - RNA, 22 nt, Human
uuuauguuugacaaugaucugg

SEQ ID NO: 299208 - RNA, 22 nt, Human
acacacagguaaaggagccugg

SEQ ID NO: 299209 - RNA, 23 nt, Human
acuugauuauuguugauagauuc

SEQ ID NO: 299210 - RNA, 22 nt, Human
cagcaaagguagaagcacagga

SEQ ID NO: 299211 - RNA, 22 nt, Human
caguaaaagauggaaauagaau

SEQ ID NO: 299212 - RNA, 22 nt, Human
cuuucauuugauaagaaugcca

SEQ ID NO: 299213 - RNA, 22 nt, Human
gccugcagauauauaggauggu

SEQ ID NO: 299214 - RNA, 22 nt, Human
cuguguccugucuccuaaggug

SEQ ID NO: 299215 - RNA, 22 nt, Human
uuagggaaggcugcugucagcu

SEQ ID NO: 299216 - RNA, 22 nt, Human
caggauggcagagaaaagggug

SEQ ID NO: 299217 - RNA, 22 nt, Human
uugcugaugguauuaugcuagu

SEQ ID NO: 299218 - RNA, 22 nt, Human
ccagggcagcgccccuccacgc

SEQ ID NO: 299219 - RNA, 22 nt, Human
guagcuauuuaugauacucaug

SEQ ID NO: 299220 - RNA, 22 nt, Human
uauugaggaucuccugcuaauu

SEQ ID NO: 299221 - RNA, 22 nt, Human
auauaaguuaguggucauguuu

SEQ ID NO: 299222 - RNA, 22 nt, Human
uuauuagguuuacauaaagguu

SEQ ID NO: 299223 - RNA, 22 nt, Human
ugcagggcaguggagguugagu

SEQ ID NO: 299224 - RNA, 22 nt, Human
gcuggagguggugagaaaaggu

SEQ ID NO: 299225 - RNA, 22 nt, Human
uuccagugaaacaugaggugug

SEQ ID NO: 299226 - RNA, 22 nt, Human
cacccagcagcacuuaagacua

SEQ ID NO: 299227 - RNA, 22 nt, Human
uccuggguggcucugcccggcu

SEQ ID NO: 299228 - RNA, 22 nt, Human
uccugcagcugcagaccugggg

SEQ ID NO: 299229 - RNA, 22 nt, Human
cucuuaaaaacuugauauauuu

SEQ ID NO: 299230 - RNA, 22 nt, Human
aagggagacaguugugugagga

SEQ ID NO: 299231 - RNA, 17 nt, Human
ucuguucaagugagagg

SEQ ID NO: 299232 - RNA, 22 nt, Human
uggaaauguauuugggcaugcc

SEQ ID NO: 299233 - RNA, 22 nt, Human
ugaaugaugcaguauaaugaua

SEQ ID NO: 299234 - RNA, 22 nt, Human
ugcagggcuccuggcuccaauc

SEQ ID NO: 299235 - RNA, 22 nt, Human
ggguguggcugcgugccaauaa

SEQ ID NO: 299236 - RNA, 22 nt, Human
aacuauguuaauaaguuucauu

SEQ ID NO: 299237 - RNA, 22 nt, Human
aguccuuugggaaaaaugacua

SEQ ID NO: 299238 - RNA, 22 nt, Human
ugcugccaauuucuggucuuga

SEQ ID NO: 299239 - RNA, 22 nt, Human
uuaguucucaugaauuuuaagu

SEQ ID NO: 299240 - RNA, 21 nt, Human
ugucugauguauuuuuugccu

SEQ ID NO: 299241 - RNA, 22 nt, Human
ucagacagucaucagagcuugu

SEQ ID NO: 299242 - RNA, 22 nt, Human
auucagcaguuccugcuucagu

SEQ ID NO: 299243 - RNA, 22 nt, Human
cuguacuaauugcuuuacaugu

SEQ ID NO: 299244 - RNA, 22 nt, Human
uccaggcauuggagagauaaug

SEQ ID NO: 299245 - RNA, 22 nt, Human
cuggcucuaucuccaaggcugg

SEQ ID NO: 299246 - RNA, 22 nt, Human
ucuuagcacagcuauauaaguu

SEQ ID NO: 299247 - RNA, 21 nt, Human
cuggcucuguugucacccggc

SEQ ID NO: 299248 - RNA, 22 nt, Human
acauauauuacuaguaaagaca

SEQ ID NO: 299249 - RNA, 22 nt, Human
cuaugaaaugucagauucugca

SEQ ID NO: 299250 - RNA, 22 nt, Human
agaaauguugaauacacaaaau

SEQ ID NO: 299251 - RNA, 22 nt, Human
uucauuccuucccuaagcaacu

SEQ ID NO: 299252 - RNA, 22 nt, Human
uuugacucauugauuuucucug

SEQ ID NO: 299253 - RNA, 22 nt, Human
uuucauuggcucccugaugaau

SEQ ID NO: 299254 - RNA, 21 nt, Human
uggccaaaaccauauuauuaa

SEQ ID NO: 299255 - RNA, 22 nt, Human
aagggcucgguagcaguccuga

SEQ ID NO: 299256 - RNA, 22 nt, Human
caguuuauagcucuagcagcuu

SEQ ID NO: 299257 - RNA, 22 nt, Human
uaaagcugaaaugauuaugaca

SEQ ID NO: 299258 - RNA, 22 nt, Human
ccuucuucaccaguuuaccuga

SEQ ID NO: 299259 - RNA, 22 nt, Human
uuguucaugguuguaaguuuga

SEQ ID NO: 299260 - RNA, 22 nt, Human
aguaaaauuguauuggaaaaca

SEQ ID NO: 299261 - RNA, 22 nt, Human
gcagacagacugcagugauuuu

SEQ ID NO: 299262 - RNA, 22 nt, Human
gacaugugcugucucuuaaauu

SEQ ID NO: 299263 - RNA, 22 nt, Human
uggcaaaggaaaugauuuaaga

SEQ ID NO: 299264 - RNA, 22 nt, Human
auuuauugaacacugacuaugu

SEQ ID NO: 299265 - RNA, 22 nt, Human
cguccucagaggccauccgaaa

SEQ ID NO: 299266 - RNA, 19 nt, Human
ugacagguuuuauguguuu

SEQ ID NO: 299267 - RNA, 22 nt, Human
uccuggcucugcugccuccuag

SEQ ID NO: 299268 - RNA, 18 nt, Human
uggcaggggcaguacgcc

SEQ ID NO: 299269 - RNA, 22 nt, Human
uccuuccugcucuaacauucag

SEQ ID NO: 299270 - RNA, 22 nt, Human
aaguguuuggggaucauuuuaa

SEQ ID NO: 299271 - RNA, 22 nt, Human
aaaugucuguaggggcugcagg

SEQ ID NO: 299272 - RNA, 22 nt, Human
ggcuuuaucaaaugagacccug

SEQ ID NO: 299273 - RNA, 22 nt, Human
ucuuucuuuaucaccugauaug

SEQ ID NO: 299274 - RNA, 22 nt, Human
uucuuuucuuuaggcauugugu

SEQ ID NO: 299275 - RNA, 22 nt, Human
auugcagauucuucucagggag

SEQ ID NO: 299276 - RNA, 22 nt, Human
uucuuuuggacucaaagagaac

SEQ ID NO: 299277 - RNA, 22 nt, Human
agguggcuucuggccaggugug

SEQ ID NO: 299278 - RNA, 22 nt, Human
cuuugcaaacgauuaccacaug

SEQ ID NO: 299279 - RNA, 22 nt, Human
acagauuugacugguaccuggc

SEQ ID NO: 299280 - RNA, 22 nt, Human
cagcuuuccagagaccugcccc

SEQ ID NO: 299281 - RNA, 22 nt, Human
cauguuaaaauauacauucuga

SEQ ID NO: 299282 - RNA, 22 nt, Human
cagagaaagaagcccauucauu

SEQ ID NO: 299283 - RNA, 18 nt, Human
uagggcucuagggaguga

SEQ ID NO: 299284 - RNA, 22 nt, Human
uguuauugucgcugcacuggga

SEQ ID NO: 299285 - RNA, 18 nt, Human
ucagagagaauaguaauu

SEQ ID NO: 299286 - RNA, 22 nt, Human
ucaagagaaggggaaauagacu

SEQ ID NO: 299287 - RNA, 23 nt, Human
uuuauauuccuaaugucuugagc

SEQ ID NO: 299288 - RNA, 22 nt, Human
ucagguguagguuguucaguuu

SEQ ID NO: 299289 - RNA, 21 nt, Human
gauuugcagaaacuagacagg

SEQ ID NO: 299290 - RNA, 21 nt, Human
auucagaguaauucaucuuua

SEQ ID NO: 299291 - RNA, 22 nt, Human
uuugaaucugauauggcagcau

SEQ ID NO: 299292 - RNA, 22 nt, Human
uggguccuuuuuggacuucuuc

SEQ ID NO: 299293 - RNA, 22 nt, Human
gcuggaggcaguucagacacca

SEQ ID NO: 299294 - RNA, 22 nt, Human
auugcuggaugagcucuuggau

SEQ ID NO: 299295 - RNA, 22 nt, Human
acaaauaugguacucggagaaa

SEQ ID NO: 299296 - RNA, 22 nt, Human
uaaauuaugucacaugacucug

SEQ ID NO: 299297 - RNA, 22 nt, Human
agacgagggcccccaggacagc

SEQ ID NO: 299298 - RNA, 22 nt, Human
cgcgguggcggccuccagcgcc

SEQ ID NO: 299299 - RNA, 22 nt, Human
uccaggcaugucugaguccuuc

SEQ ID NO: 299300 - RNA, 21 nt, Human
uguuuuccaccuugaggcaag

SEQ ID NO: 299301 - RNA, 22 nt, Human
aagggcuccauccuuauaaaug

SEQ ID NO: 299302 - RNA, 22 nt, Human
ggugggaguggaacguggaaga

SEQ ID NO: 299303 - RNA, 22 nt, Human
uaaauuauguuccauguccuuu

SEQ ID NO: 299304 - RNA, 22 nt, Human
ucaauaauggcaggauaaauuu

SEQ ID NO: 299305 - RNA, 22 nt, Human
agcugcaagucuguguggggag

SEQ ID NO: 299306 - RNA, 22 nt, Human
gggcagggguagcauuccaagu

SEQ ID NO: 299307 - RNA, 21 nt, Human
auggugagauacugggugugg

SEQ ID NO: 299308 - RNA, 22 nt, Human
ggguggcacugauaaugagacg

SEQ ID NO: 299309 - RNA, 22 nt, Human
ucuucaaaugcuaguaauauca

SEQ ID NO: 299310 - RNA, 17 nt, Human
uccaugagacaugaaga

SEQ ID NO: 299311 - RNA, 23 nt, Human
uucuuucaagaaguucacagugc

SEQ ID NO: 299312 - RNA, 22 nt, Human
auguuucaugacugagcaaaau

SEQ ID NO: 299313 - RNA, 22 nt, Human
auuucauagauuguaaaucccu

SEQ ID NO: 299314 - RNA, 22 nt, Human
gguucaguggaauguguugacc

SEQ ID NO: 299315 - RNA, 22 nt, Human
ucagcuuucucagaggccuaac

SEQ ID NO: 299316 - RNA, 22 nt, Human
uggaccugagccuggcccugcc

SEQ ID NO: 299317 - RNA, 22 nt, Human
auuugcuuucagguauaaaagg

SEQ ID NO: 299318 - RNA, 22 nt, Human
acaaauauuuacugaauccacu

SEQ ID NO: 299319 - RNA, 19 nt, Human
ggaacuuggccuuuaccca

SEQ ID NO: 299320 - RNA, 22 nt, Human
uugggugguggggagaguucag

SEQ ID NO: 299321 - RNA, 22 nt, Human
uccucagagcauagcgcugucu

SEQ ID NO: 299322 - RNA, 22 nt, Human
gacagacacaauugauccauga

SEQ ID NO: 299323 - RNA, 22 nt, Human
uccugcagagccgcccucaggu

SEQ ID NO: 299324 - RNA, 22 nt, Human
aaucucuuuggcucaaggaucc

SEQ ID NO: 299325 - RNA, 22 nt, Human
ucacaaauagcuauauuaagga

SEQ ID NO: 299326 - RNA, 19 nt, Human
auucagcauucugcacuuc

SEQ ID NO: 299327 - RNA, 22 nt, Human
acacugaauguuuaagaacuug

SEQ ID NO: 299328 - RNA, 22 nt, Human
uuuucauuguuacuaugagcua

SEQ ID NO: 299329 - RNA, 23 nt, Human
acuuuauugaccccaggucaguu

SEQ ID NO: 299330 - RNA, 16 nt, Human
uggcagguuuuuaucu

SEQ ID NO: 299331 - RNA, 22 nt, Human
gacaggugaaacagcaagguaa

SEQ ID NO: 299332 - RNA, 22 nt, Human
guaggcagggcuguggggagaa

SEQ ID NO: 299333 - RNA, 22 nt, Human
cuucuucaagagaaugggagac

SEQ ID NO: 299334 - RNA, 22 nt, Human
aggccuccuggcuccaggccuu

SEQ ID NO: 299335 - RNA, 22 nt, Human
cuuuacugaagugaagaccugg

SEQ ID NO: 299336 - RNA, 22 nt, Human
ccagguguuacacgaguguuaa

SEQ ID NO: 299337 - RNA, 22 nt, Human
auguccucaaaacugauugcag

SEQ ID NO: 299338 - RNA, 22 nt, Human
gggcaggugcccagggccagag

SEQ ID NO: 299339 - RNA, 22 nt, Human
gggcagguguugucaaucuaau

SEQ ID NO: 299340 - RNA, 22 nt, Human
gaccuggaggauccucuucuug

SEQ ID NO: 299341 - RNA, 22 nt, Human
aauguaaaguugggcacaaaug

SEQ ID NO: 299342 - RNA, 22 nt, Human
uaucacaucaauguuuuaaaau

SEQ ID NO: 299343 - RNA, 22 nt, Human
cucccagguuccgacgccucuu

SEQ ID NO: 299344 - RNA, 22 nt, Human
gggacccugggaggcuggcgca

SEQ ID NO: 299345 - RNA, 22 nt, Human
auuagggaaacugacuugucuc

SEQ ID NO: 299346 - RNA, 22 nt, Human
uagggcucgggcacaggacagg

SEQ ID NO: 299347 - RNA, 22 nt, Human
cagauuuagaguggggcuugga

SEQ ID NO: 299348 - RNA, 21 nt, Human
uacuacagucucuuuaucagu

SEQ ID NO: 299349 - RNA, 22 nt, Human
gccaggcagccacccucugcga

SEQ ID NO: 299350 - RNA, 22 nt, Human
uucagcacuguuauggauuugc

SEQ ID NO: 299351 - RNA, 22 nt, Human
ucuuucuucuuucauaguguga

SEQ ID NO: 299352 - RNA, 22 nt, Human
uauugcugcuauugucaguuca

SEQ ID NO: 299353 - RNA, 22 nt, Human
aagaguggagcuggaaaguggg

SEQ ID NO: 299354 - RNA, 22 nt, Human
uuccuucuagagcuuguuuagg

SEQ ID NO: 299355 - RNA, 22 nt, Human
uugaaaaaauugguagaggaug

SEQ ID NO: 299356 - RNA, 22 nt, Human
uuaaauuagucaagcuucucug

SEQ ID NO: 299357 - RNA, 22 nt, Human
acuguucaucucuuagaaagua

SEQ ID NO: 299358 - RNA, 22 nt, Human
cauuaggguaauugaacacuua

SEQ ID NO: 299359 - RNA, 22 nt, Human
agcuggaggggccagcaggugu

SEQ ID NO: 299360 - RNA, 21 nt, Human
acagauuuuauaucucugcug

SEQ ID NO: 299361 - RNA, 22 nt, Human
uggguggauuaggauaggguau

SEQ ID NO: 299362 - RNA, 22 nt, Human
agguggggugagcugcagacua

SEQ ID NO: 299363 - RNA, 22 nt, Human
cucuuaaagcuuccaguuucaa

SEQ ID NO: 299364 - RNA, 22 nt, Human
aggguggcaccacauaucauag

SEQ ID NO: 299365 - RNA, 20 nt, Human
uaggugucuuugccagcuuu

SEQ ID NO: 299366 - RNA, 22 nt, Human
cugggugacagagugagauggu

SEQ ID NO: 299367 - RNA, 22 nt, Human
augcagcuucaggauuaugaug

SEQ ID NO: 299368 - RNA, 22 nt, Human
auuucaguguuuuaagaguuca

SEQ ID NO: 299369 - RNA, 22 nt, Human
auguccagaguguccuggaaag

SEQ ID NO: 299370 - RNA, 22 nt, Human
cacagcuucccaaaguggaccu

SEQ ID NO: 299371 - RNA, 22 nt, Human
gaaggcuguuucugguagugau

SEQ ID NO: 299372 - RNA, 16 nt, Human
caggugucagucaccu

SEQ ID NO: 299373 - RNA, 22 nt, Human
agcaggugucacuuucacucca

SEQ ID NO: 299374 - RNA, 22 nt, Human
ugcaggugcuacaagaacucac

SEQ ID NO: 299375 - RNA, 22 nt, Human
auccaugaagguacuucucagg

SEQ ID NO: 299376 - RNA, 22 nt, Human
gccugcagaacugugaggcaau

SEQ ID NO: 299377 - RNA, 18 nt, Human
ccagcaugccagaggcug

SEQ ID NO: 299378 - RNA, 22 nt, Human
cagcuuuauugagguauaauug

SEQ ID NO: 299379 - RNA, 22 nt, Human
gugcaaaagucauugugguuuu

SEQ ID NO: 299380 - RNA, 22 nt, Human
ggcuacuagguaccauuuagaa

SEQ ID NO: 299381 - RNA, 22 nt, Human
acagguguagaaaacagauuau

SEQ ID NO: 299382 - RNA, 22 nt, Human
ccacaagaugcaaacucuaaca

SEQ ID NO: 299383 - RNA, 22 nt, Human
uuuaauuuucugggcccagcag

SEQ ID NO: 299384 - RNA, 22 nt, Human
uuugacucuucuagcaagugug

SEQ ID NO: 299385 - RNA, 22 nt, Human
uggcagguagaguucugagaug

SEQ ID NO: 299386 - RNA, 22 nt, Human
ucugggaacucugucauuuccc

SEQ ID NO: 299387 - RNA, 22 nt, Human
ggggcaggagcccuucuucagc

SEQ ID NO: 299388 - RNA, 22 nt, Human
auugcuggcaucagugacaaua

SEQ ID NO: 299389 - RNA, 19 nt, Human
uggcucuguuucucuggag

SEQ ID NO: 299390 - RNA, 22 nt, Human
auuaauuuccaggcacugugcu

SEQ ID NO: 299391 - RNA, 22 nt, Human
auaaugaggauuugcauauuag

SEQ ID NO: 299392 - RNA, 22 nt, Human
uuguguccuaacaucuaguuaa

SEQ ID NO: 299393 - RNA, 22 nt, Human
uugcagcugcaguaaauguuca

SEQ ID NO: 299394 - RNA, 22 nt, Human
aauuuagauugauaaacaugga

SEQ ID NO: 299395 - RNA, 22 nt, Human
aaacuucagugaaugacuuaug

SEQ ID NO: 299396 - RNA, 20 nt, Human
ccugucuccucuuaccuggc

SEQ ID NO: 299397 - RNA, 22 nt, Human
cagggcuagugacaccccaguc

SEQ ID NO: 299398 - RNA, 22 nt, Human
acagcuuugggcaaugcuauga

SEQ ID NO: 299399 - RNA, 22 nt, Human
ucuguucauuugccucggcucu

SEQ ID NO: 299400 - RNA, 21 nt, Human
ugacagguuuaggauuaaaau

SEQ ID NO: 299401 - RNA, 23 nt, Human
aaauaggaguaucuggaucauga

SEQ ID NO: 299402 - RNA, 22 nt, Human
ugacagacuuuacuucuccuau

SEQ ID NO: 299403 - RNA, 22 nt, Human
aguucgagaucugcugaugaga

SEQ ID NO: 299404 - RNA, 22 nt, Human
uagaaacauucaguugcagucc

SEQ ID NO: 299405 - RNA, 22 nt, Human
cuggaggaggaagucuacaaug

SEQ ID NO: 299406 - RNA, 22 nt, Human
auucagcaaugagcuuggauuu

SEQ ID NO: 299407 - RNA, 22 nt, Human
uacaguaccagaaaugcuaaga

SEQ ID NO: 299408 - RNA, 22 nt, Human
ccagcuuucauaucaugaggua

SEQ ID NO: 299409 - RNA, 22 nt, Human
ucagggcaagauugguuaauaa

SEQ ID NO: 299410 - RNA, 22 nt, Human
cuguccuggagggcauaggacg

SEQ ID NO: 299411 - RNA, 22 nt, Human
aaaagcagguacucagcuuggg

SEQ ID NO: 299412 - RNA, 22 nt, Human
gagcuuuaagggcacuggucuu

SEQ ID NO: 299413 - RNA, 22 nt, Human
agggcuacugccugccuucagg

SEQ ID NO: 299414 - RNA, 22 nt, Human
uaagaaacuaaugcaauaagag

SEQ ID NO: 299415 - RNA, 22 nt, Human
ccuguucaagggaugauugacc

SEQ ID NO: 299416 - RNA, 22 nt, Human
cccagugucauucuaagggagg

SEQ ID NO: 299417 - RNA, 22 nt, Human
gcagcuuuaaucugaauaagua

SEQ ID NO: 299418 - RNA, 22 nt, Human
aggagaggcucuaacucugugu

SEQ ID NO: 299419 - RNA, 22 nt, Human
caauauauaaugaguacuuucc

SEQ ID NO: 299420 - RNA, 22 nt, Human
ggagggagcauccccuugcuga

SEQ ID NO: 299421 - RNA, 22 nt, Human
uuccuucuggaggcuccagggg

SEQ ID NO: 299422 - RNA, 22 nt, Human
agcaggugaucgcgugugcucc

SEQ ID NO: 299423 - RNA, 22 nt, Human
ccagguguucuuugucccuguu

SEQ ID NO: 299424 - RNA, 20 nt, Human
uugaagagucagguagggcc

SEQ ID NO: 299425 - RNA, 23 nt, Human
ucuguucaaggcuuucuccuuga

SEQ ID NO: 299426 - RNA, 22 nt, Human
aacauuuaugguagucauugca

SEQ ID NO: 299427 - RNA, 22 nt, Human
gaguaguugcugcagagaauac

SEQ ID NO: 299428 - RNA, 22 nt, Human
aagaauuaucugaaagcugugu

SEQ ID NO: 299429 - RNA, 23 nt, Human
uggcaaagcauucuuauaacagu

SEQ ID NO: 299430 - RNA, 22 nt, Human
ggacagacaaaaauaguaagca

SEQ ID NO: 299431 - RNA, 22 nt, Human
auuuccauguccaaaaauuagu

SEQ ID NO: 299432 - RNA, 22 nt, Human
uuuaauugcauuuaaagaugga

SEQ ID NO: 299433 - RNA, 21 nt, Human
gcugccaccgcgugcuccagg

SEQ ID NO: 299434 - RNA, 22 nt, Human
ggaccugcauuuuaacaagauc

SEQ ID NO: 299435 - RNA, 22 nt, Human
auguguccuuauaagaagaaga

SEQ ID NO: 299436 - RNA, 22 nt, Human
uccugggucugggugucugagg

SEQ ID NO: 299437 - RNA, 22 nt, Human
uccagacccaugacccugggga

SEQ ID NO: 299438 - RNA, 22 nt, Human
gaauccaggguuguuugagcua

SEQ ID NO: 299439 - RNA, 22 nt, Human
acagagagcugugauugaguua

SEQ ID NO: 299440 - RNA, 22 nt, Human
uuuuugaaggcugaugugauua

SEQ ID NO: 299441 - RNA, 22 nt, Human
acaugaaguggucagaucaaac

SEQ ID NO: 299442 - RNA, 22 nt, Human
gcuucuaucccuccacugcacu

SEQ ID NO: 299443 - RNA, 22 nt, Human
uauaaauuauuaggcugcuaaa

SEQ ID NO: 299444 - RNA, 22 nt, Human
agagggugcuggagagacauug

SEQ ID NO: 299445 - RNA, 22 nt, Human
acacuuuaagcauuucacacug

SEQ ID NO: 299446 - RNA, 22 nt, Human
gaucauuugcaggaaacauuaa

SEQ ID NO: 299447 - RNA, 22 nt, Human
aacuuaaacccacucauguaga

SEQ ID NO: 299448 - RNA, 22 nt, Human
ucuuccuugccuugcuucauca

SEQ ID NO: 299449 - RNA, 22 nt, Human
uuuucauuuuuguagaugcaag

SEQ ID NO: 299450 - RNA, 22 nt, Human
guuucauacagauuauucaugg

SEQ ID NO: 299451 - RNA, 22 nt, Human
cgcaggugaacuguucugcagu

SEQ ID NO: 299452 - RNA, 22 nt, Human
ugcagguggauucaauguggga

SEQ ID NO: 299453 - RNA, 22 nt, Human
ugcuggaggaguuuacuguggc

SEQ ID NO: 299454 - RNA, 22 nt, Human
uugauacaggcucuauuucauc

SEQ ID NO: 299455 - RNA, 22 nt, Human
acuugguugaugucauaagguu

SEQ ID NO: 299456 - RNA, 22 nt, Human
uccaugagagguaacuuuacaa

SEQ ID NO: 299457 - RNA, 22 nt, Human
ugucucaucucuuaaccccacu

SEQ ID NO: 299458 - RNA, 22 nt, Human
gcagguggauauugcuacuuga

SEQ ID NO: 299459 - RNA, 22 nt, Human
acaggccuuggcaggcauguga

SEQ ID NO: 299460 - RNA, 22 nt, Human
caugugucaaaugauguagcug

SEQ ID NO: 299461 - RNA, 22 nt, Human
uggcaaggccacaggugcaguu

SEQ ID NO: 299462 - RNA, 23 nt, Human
cccagagcacagccuccagaugc

SEQ ID NO: 299463 - RNA, 22 nt, Human
uuagcuuucaugaaccuggucg

SEQ ID NO: 299464 - RNA, 22 nt, Human
cagggccagagagggcuggcug

SEQ ID NO: 299465 - RNA, 22 nt, Human
cccugcagggaggauucugaag

SEQ ID NO: 299466 - RNA, 22 nt, Human
uugcuuuaucuaagcauggcca

SEQ ID NO: 299467 - RNA, 20 nt, Human
agcuucuucugucuaauuuu

SEQ ID NO: 299468 - RNA, 22 nt, Human
ucaaaggcauugccaauaagua

SEQ ID NO: 299469 - RNA, 22 nt, Human
agguggggcccaccaauuugca

SEQ ID NO: 299470 - RNA, 22 nt, Human
aguggcagggcuggcugcugca

SEQ ID NO: 299471 - RNA, 22 nt, Human
agacaugucaccaauucuuacu

SEQ ID NO: 299472 - RNA, 22 nt, Human
cuaaucaucuuucucuuaaagc

SEQ ID NO: 299473 - RNA, 23 nt, Human
uuugaaguugacugccuuccaga

SEQ ID NO: 299474 - RNA, 22 nt, Human
ccagugugauuguugcaagaau

SEQ ID NO: 299475 - RNA, 22 nt, Human
gacaggugugaugauuuaggcu

SEQ ID NO: 299476 - RNA, 22 nt, Human
uuccaugccucuauuuagaauu

SEQ ID NO: 299477 - RNA, 22 nt, Human
agccuauuccaggaugagcuca

SEQ ID NO: 299478 - RNA, 22 nt, Human
cagggcagccaggccccguggg

SEQ ID NO: 299479 - RNA, 22 nt, Human
uccauucuaugcuuacauuuau

SEQ ID NO: 299480 - RNA, 22 nt, Human
ccagguggaggugugagguccu

SEQ ID NO: 299481 - RNA, 22 nt, Human
ggcaggcaagucugcucuguga

SEQ ID NO: 299482 - RNA, 22 nt, Human
aaacauuguaauuuuagcaugg

SEQ ID NO: 299483 - RNA, 21 nt, Human
uucauaaaccauucucaugca

SEQ ID NO: 299484 - RNA, 22 nt, Human
uguuuucuuccuaauugcucau

SEQ ID NO: 299485 - RNA, 22 nt, Human
gccaggcacugcucuaagcccu

SEQ ID NO: 299486 - RNA, 22 nt, Human
agcagguggauuuagacgggag

SEQ ID NO: 299487 - RNA, 23 nt, Human
uccuccuuuugcuugugcuuccc

SEQ ID NO: 299488 - RNA, 22 nt, Human
uagggcucagaguccaguuucu

SEQ ID NO: 299489 - RNA, 22 nt, Human
cuggguccugcucucccuaaga

SEQ ID NO: 299490 - RNA, 19 nt, Human
uuugcugguucaggaaaga

SEQ ID NO: 299491 - RNA, 22 nt, Human
aguuuucuguucuacaauuuga

SEQ ID NO: 299492 - RNA, 22 nt, Human
ucagcauguucuuaggucacag

SEQ ID NO: 299493 - RNA, 22 nt, Human
aacuuucagaauccuaugcauu

SEQ ID NO: 299494 - RNA, 22 nt, Human
auugaaaaaugacuauugcuua

SEQ ID NO: 299495 - RNA, 22 nt, Human
guuuuauaggcuguugcuauau

SEQ ID NO: 299496 - RNA, 22 nt, Human
ggagaggggcaaguuuaucuag

SEQ ID NO: 299497 - RNA, 22 nt, Human
uucauucuugucuuuguauagu

SEQ ID NO: 299498 - RNA, 22 nt, Human
uugcagcuuagugauguuaucu

SEQ ID NO: 299499 - RNA, 22 nt, Human
ugcagggcuaagucagagccug

SEQ ID NO: 299500 - RNA, 22 nt, Human
ucuucaaaaaauauccaucagu

SEQ ID NO: 299501 - RNA, 22 nt, Human
ugacagacacaccuuaggaaag

SEQ ID NO: 299502 - RNA, 22 nt, Human
gaggcauaaaucacaguguuca

SEQ ID NO: 299503 - RNA, 22 nt, Human
uuacuuuugcaccaaacuaaua

SEQ ID NO: 299504 - RNA, 22 nt, Human
uugauacauuuuuaggauaaac

SEQ ID NO: 299505 - RNA, 22 nt, Human
ugucugggauguaauuccugcc

SEQ ID NO: 299506 - RNA, 22 nt, Human
agcagguggucuguugcugcug

SEQ ID NO: 299507 - RNA, 22 nt, Human
acagguggggcacuuggagccu

SEQ ID NO: 299508 - RNA, 20 nt, Human
uuuacauuuugaaacaguga

SEQ ID NO: 299509 - RNA, 19 nt, Human
ugcauaaauuauauacuuu

SEQ ID NO: 299510 - RNA, 23 nt, Human
gccaggcacaugguggacacgca

SEQ ID NO: 299511 - RNA, 22 nt, Human
uguccuggggcgacuuggggcc

SEQ ID NO: 299512 - RNA, 22 nt, Human
aaacaccagucccaguauacac

SEQ ID NO: 299513 - RNA, 19 nt, Human
accugcaguaauaauuccu

SEQ ID NO: 299514 - RNA, 22 nt, Human
agcaggugggcaugaaagcuga

SEQ ID NO: 299515 - RNA, 18 nt, Human
ccuggaggucuucggggu

SEQ ID NO: 299516 - RNA, 22 nt, Human
auacagggacauccaguuuuuc

SEQ ID NO: 299517 - RNA, 22 nt, Human
gagcugcacuggggguggaaug

SEQ ID NO: 299518 - RNA, 22 nt, Human
uccugucuaaagaccugcaggc

SEQ ID NO: 299519 - RNA, 22 nt, Human
aauacaguaauuuugaugaguu

SEQ ID NO: 299520 - RNA, 22 nt, Human
uuccaugcaagaaguauggcuc

SEQ ID NO: 299521 - RNA, 22 nt, Human
caaagucauggggaugcagguc

SEQ ID NO: 299522 - RNA, 22 nt, Human
gucauuccuuauguugauucag

SEQ ID NO: 299523 - RNA, 22 nt, Human
agagcggggauaguuaauauuc

SEQ ID NO: 299524 - RNA, 22 nt, Human
uuccuuccauagcaaaacaugc

SEQ ID NO: 299525 - RNA, 22 nt, Human
uauuaggguuuugaagguuugu

SEQ ID NO: 299526 - RNA, 22 nt, Human
uuccuucuuccagaggcugccc

SEQ ID NO: 299527 - RNA, 22 nt, Human
cugcaaaaguaauuggggcuuu

SEQ ID NO: 299528 - RNA, 22 nt, Human
uuuuauagcugaauaguauucc

SEQ ID NO: 299529 - RNA, 22 nt, Human
cugucccuucauuauucacuac

SEQ ID NO: 299530 - RNA, 22 nt, Human
aacacagcuaauuucugucaau

SEQ ID NO: 299531 - RNA, 22 nt, Human
gaggugucguagauuauucuca

SEQ ID NO: 299532 - RNA, 22 nt, Human
ugucuucagcaaaugccuuucu

SEQ ID NO: 299533 - RNA, 19 nt, Human
uuugugaagaaaaugaugc

SEQ ID NO: 299534 - RNA, 20 nt, Human
cagagaccaggccagguguc

SEQ ID NO: 299535 - RNA, 22 nt, Human
auuucucaguuccuacuguuua

SEQ ID NO: 299536 - RNA, 22 nt, Human
gagagggauacugaguuuuggu

SEQ ID NO: 299537 - RNA, 22 nt, Human
gaauuucuggacccuuugagaa

SEQ ID NO: 299538 - RNA, 22 nt, Human
uacagagaguacagcauccaca

SEQ ID NO: 299539 - RNA, 22 nt, Human
agaaaguuuugugcuauauaug

SEQ ID NO: 299540 - RNA, 22 nt, Human
gccaaaucacagggccaaaagc

SEQ ID NO: 299541 - RNA, 22 nt, Human
uauaauuuggggaaaguggugu

SEQ ID NO: 299542 - RNA, 17 nt, Human
auccuucuguucuuucu

SEQ ID NO: 299543 - RNA, 21 nt, Human
uggcagggguaguaguacagc

SEQ ID NO: 299544 - RNA, 22 nt, Human
ugcacuuuaaaaaauggugaug

SEQ ID NO: 299545 - RNA, 22 nt, Human
ggagaggggaacuuguugcuug

SEQ ID NO: 299546 - RNA, 21 nt, Human
acuguucaucuguucagaagc

SEQ ID NO: 299547 - RNA, 22 nt, Human
uguccuuuacugauugcuucug

SEQ ID NO: 299548 - RNA, 22 nt, Human
uuuugcuguuauaugcuauuau

SEQ ID NO: 299549 - RNA, 22 nt, Human
aucuacccacugaacacaauau

SEQ ID NO: 299550 - RNA, 22 nt, Human
cagcaccuguuagcauuaaaua

SEQ ID NO: 299551 - RNA, 19 nt, Human
uagaaagaugauggguggg

SEQ ID NO: 299552 - RNA, 22 nt, Human
aggacagugguguucuggagug

SEQ ID NO: 299553 - RNA, 22 nt, Human
agcagggccugagugaccuaac

SEQ ID NO: 299554 - RNA, 22 nt, Human
uggcaaaguaucugucccagcu

SEQ ID NO: 299555 - RNA, 22 nt, Human
ggguggggcccaggaaaucuau

SEQ ID NO: 299556 - RNA, 22 nt, Human
uguguccucaugagguuugcag

SEQ ID NO: 299557 - RNA, 22 nt, Human
uuucuacauucaaaaacuacca

SEQ ID NO: 299558 - RNA, 22 nt, Human
gcaugcaguaaaauucagcaac

SEQ ID NO: 299559 - RNA, 22 nt, Human
uuauuccauagaagucaaggaa

SEQ ID NO: 299560 - RNA, 23 nt, Human
uccugcagauaagcugguugaca

SEQ ID NO: 299561 - RNA, 22 nt, Human
aauuuccagaucagaugacuca

SEQ ID NO: 299562 - RNA, 20 nt, Human
uuucaguuaucuugaccuuc

SEQ ID NO: 299563 - RNA, 22 nt, Human
ugcagggccuuguugaugugcu

SEQ ID NO: 299564 - RNA, 22 nt, Human
guuuuauaggugaaauauuacu

SEQ ID NO: 299565 - RNA, 22 nt, Human
cuggcacucauaggccaguuca

SEQ ID NO: 299566 - RNA, 22 nt, Human
cccaggcauuuucaacuuuagu

SEQ ID NO: 299567 - RNA, 22 nt, Human
aaacaugagcauuucuguuuaa

SEQ ID NO: 299568 - RNA, 22 nt, Human
ugcagggaaaguguuggcagca

SEQ ID NO: 299569 - RNA, 22 nt, Human
ugguguggggauaagcacucug

SEQ ID NO: 299570 - RNA, 22 nt, Human
uuccaugaaggagacugagaag

SEQ ID NO: 299571 - RNA, 22 nt, Human
ugggccaggcaugugaucagca

SEQ ID NO: 299572 - RNA, 22 nt, Human
uacauguggguuaaaaacacuc

SEQ ID NO: 299573 - RNA, 22 nt, Human
auugaaaaauucacaauucugg

SEQ ID NO: 299574 - RNA, 22 nt, Human
acaugugugacaacagagguga

SEQ ID NO: 299575 - RNA, 22 nt, Human
agcaggugggaucaagcuggca

SEQ ID NO: 299576 - RNA, 22 nt, Human
ccagcuuuugcacuggacuggg

SEQ ID NO: 299577 - RNA, 22 nt, Human
acaaauguggacauggauaaug

SEQ ID NO: 299578 - RNA, 22 nt, Human
gagggcagaaaauuaugcggug

SEQ ID NO: 299579 - RNA, 22 nt, Human
gauccugugguuuuccugugca

SEQ ID NO: 299580 - RNA, 22 nt, Human
guguguccaggcgggagucaag

SEQ ID NO: 299581 - RNA, 22 nt, Human
uucaaacaguguagaauauaug

SEQ ID NO: 299582 - RNA, 22 nt, Human
cauguuaaugaauuuuugcagu

SEQ ID NO: 299583 - RNA, 22 nt, Human
ucgcuugaacccaggaagugga

SEQ ID NO: 299584 - RNA, 23 nt, Human
uuucaacuccugccauuauuucu

SEQ ID NO: 299585 - RNA, 22 nt, Human
augaaacaguguguauagcaaa

SEQ ID NO: 299586 - RNA, 22 nt, Human
uagguggugggauaugagcauc

SEQ ID NO: 299587 - RNA, 22 nt, Human
uuuccuuugcccaauacauguc

SEQ ID NO: 299588 - RNA, 22 nt, Human
uuuaaauuauaguuaaugucug

SEQ ID NO: 299589 - RNA, 22 nt, Human
ccugggugcccggcccuucucu

SEQ ID NO: 299590 - RNA, 21 nt, Human
agcaggugcuguuggaggaaa

SEQ ID NO: 299591 - RNA, 22 nt, Human
gagggaaaauaaaauugcagua

SEQ ID NO: 299592 - RNA, 22 nt, Human
cagagccuuccuagcagacucu

SEQ ID NO: 299593 - RNA, 19 nt, Human
ucucaauucuccccacugc

SEQ ID NO: 299594 - RNA, 22 nt, Human
uggaauguaaacucugugaggg

SEQ ID NO: 299595 - RNA, 22 nt, Human
ugucuuuaaaauuaaacacauc

SEQ ID NO: 299596 - RNA, 20 nt, Human
cuucuucaguaguuuguucu

SEQ ID NO: 299597 - RNA, 21 nt, Human
auuuucauuuccaggggagga

SEQ ID NO: 299598 - RNA, 22 nt, Human
ucuuuucuccagaccugggauc

SEQ ID NO: 299599 - RNA, 22 nt, Human
cuuaauuuaaaauaguucaggc

SEQ ID NO: 299600 - RNA, 22 nt, Human
uuaaauauuuucagcaggguca

SEQ ID NO: 299601 - RNA, 22 nt, Human
acauguguguauacguauuuau

SEQ ID NO: 299602 - RNA, 21 nt, Human
uugcuuauggcacugcuuugc

SEQ ID NO: 299603 - RNA, 22 nt, Human
uauuugaagggagaaagugcca

SEQ ID NO: 299604 - RNA, 22 nt, Human
auguaaaagauuauuuuccugu

SEQ ID NO: 299605 - RNA, 22 nt, Human
ccugucacgaugacugcacucu

SEQ ID NO: 299606 - RNA, 22 nt, Human
gccucaagacauuuuuaauugc

SEQ ID NO: 299607 - RNA, 22 nt, Human
ugagcagagucgcuccagagug

SEQ ID NO: 299608 - RNA, 22 nt, Human
aaucuucauuuugacaagauuc

SEQ ID NO: 299609 - RNA, 22 nt, Human
uggcaagggauuguggagaacu

SEQ ID NO: 299610 - RNA, 22 nt, Human
ugucccucugaggcuucccugg

SEQ ID NO: 299611 - RNA, 18 nt, Human
gacccagcagaugggcuu

SEQ ID NO: 299612 - RNA, 22 nt, Human
aguuuacacuuuugauucuuau

SEQ ID NO: 299613 - RNA, 21 nt, Human
agcuuacauuaccauuguugc

SEQ ID NO: 299614 - RNA, 22 nt, Human
uuuccuuccaaaugcccgggag

SEQ ID NO: 299615 - RNA, 22 nt, Human
ucaggaaagaagaugcucagug

SEQ ID NO: 299616 - RNA, 22 nt, Human
uuggauuacaugaaaugcagaa

SEQ ID NO: 299617 - RNA, 22 nt, Human
uggcaaagaccgcaauuacuuu

SEQ ID NO: 299618 - RNA, 18 nt, Human
uggaggaaucacaauggc

SEQ ID NO: 299619 - RNA, 22 nt, Human
agacagacacaugguaacagau

SEQ ID NO: 299620 - RNA, 23 nt, Human
uugauuucaaaugcagagaacac

SEQ ID NO: 299621 - RNA, 22 nt, Human
ucagguggcuucggggaguggc

SEQ ID NO: 299622 - RNA, 22 nt, Human
gauguguccccagaggauugaa

SEQ ID NO: 299623 - RNA, 22 nt, Human
uuucucauagucaugccucuua

SEQ ID NO: 299624 - RNA, 22 nt, Human
agcugcaacuguccuugccuug

SEQ ID NO: 299625 - RNA, 22 nt, Human
uuacauuuugggguaaggauaa

SEQ ID NO: 299626 - RNA, 22 nt, Human
aggagcugauaaaaggggguca

SEQ ID NO: 299627 - RNA, 22 nt, Human
agcaggugacccaagcaggcug

SEQ ID NO: 299628 - RNA, 22 nt, Human
uguuaauauacuaaaauccacu

SEQ ID NO: 299629 - RNA, 22 nt, Human
uacccagcccaugccuaccuca

SEQ ID NO: 299630 - RNA, 22 nt, Human
ucugggaaaugcuguuccuugu

SEQ ID NO: 299631 - RNA, 22 nt, Human
ucuuuauuuuaugcuugugcaa

SEQ ID NO: 299632 - RNA, 22 nt, Human
auuucuguugcuuauaaauuac

SEQ ID NO: 299633 - RNA, 22 nt, Human
ucauuuguggaagugauugugg

SEQ ID NO: 299634 - RNA, 22 nt, Human
uaaaaaacauuacucuguccug

SEQ ID NO: 299635 - RNA, 22 nt, Human
ugcaggugugugcaagggaggg

SEQ ID NO: 299636 - RNA, 19 nt, Human
gguccucagcagagcaugc

SEQ ID NO: 299637 - RNA, 22 nt, Human
gauuguaauucuacuuuccgcu

SEQ ID NO: 299638 - RNA, 22 nt, Human
gggucuggagggcagcccuucu

SEQ ID NO: 299639 - RNA, 22 nt, Human
aucuguucuucaaaauauuaca

SEQ ID NO: 299640 - RNA, 22 nt, Human
uggaugucauaguuggauauac

SEQ ID NO: 299641 - RNA, 22 nt, Human
guuauauauaguauuucucuga

SEQ ID NO: 299642 - RNA, 22 nt, Human
ggcaggugguaaggauuucaua

SEQ ID NO: 299643 - RNA, 22 nt, Human
uuccuucuuccuuuaguaacca

SEQ ID NO: 299644 - RNA, 22 nt, Human
uuuucaguuccaucucugcucu

SEQ ID NO: 299645 - RNA, 22 nt, Human
aauaauuauuugagagcagacc

SEQ ID NO: 299646 - RNA, 22 nt, Human
auccaugauuaguaggauaaag

SEQ ID NO: 299647 - RNA, 22 nt, Human
ucuaugaaaagucuauucauuc

SEQ ID NO: 299648 - RNA, 21 nt, Human
acagugugcuucucucccucc

SEQ ID NO: 299649 - RNA, 19 nt, Human
uggcagggagugauauuag

SEQ ID NO: 299650 - RNA, 22 nt, Human
aucuagauuagguauaagagcu

SEQ ID NO: 299651 - RNA, 22 nt, Human
ugcugagggagggguuuuccag

SEQ ID NO: 299652 - RNA, 22 nt, Human
uucuacaauaugaauaaugaag

SEQ ID NO: 299653 - RNA, 20 nt, Human
cccaggcagagcuagcggca

SEQ ID NO: 299654 - RNA, 22 nt, Human
ucaggugggaguagaaugcuag

SEQ ID NO: 299655 - RNA, 22 nt, Human
uuccuuucccuugcuucugugc

SEQ ID NO: 299656 - RNA, 22 nt, Human
cuucucaaaguugugaaucagg

SEQ ID NO: 299657 - RNA, 22 nt, Human
uaaugucuaugggccagauaau

SEQ ID NO: 299658 - RNA, 22 nt, Human
uuuauucugugcuacaugaaga

SEQ ID NO: 299659 - RNA, 22 nt, Human
uuauuccauuauuucacuuagg

SEQ ID NO: 299660 - RNA, 22 nt, Human
uccuggauuuaacccuggcucu

SEQ ID NO: 299661 - RNA, 22 nt, Human
ggcaggugcuaagagagguaaa

SEQ ID NO: 299662 - RNA, 22 nt, Human
ccacaggcugcugcaggucccg

SEQ ID NO: 299663 - RNA, 22 nt, Human
cuuucauucuuagauauuagug

SEQ ID NO: 299664 - RNA, 22 nt, Human
uuucauaauacuguacaugaaa

SEQ ID NO: 299665 - RNA, 22 nt, Human
ugacccuuagugaacauuagaa

SEQ ID NO: 299666 - RNA, 22 nt, Human
uggguacuccuauuaguucagu

SEQ ID NO: 299667 - RNA, 22 nt, Human
gauugcugccagcguguccgug

SEQ ID NO: 299668 - RNA, 20 nt, Human
guauuacaggcuuagaacca

SEQ ID NO: 299669 - RNA, 20 nt, Human
agacccucuggacugggccc

SEQ ID NO: 299670 - RNA, 22 nt, Human
aggggauggagcuggaaggcag

SEQ ID NO: 299671 - RNA, 22 nt, Human
gguuucaaauuaaagucuuaag

SEQ ID NO: 299672 - RNA, 22 nt, Human
uugcagggcaucuaugucuggu

SEQ ID NO: 299673 - RNA, 22 nt, Human
ucccagaagugaaauuucuaga

SEQ ID NO: 299674 - RNA, 22 nt, Human
ucaggcaggaagggaggacuug

SEQ ID NO: 299675 - RNA, 22 nt, Human
aguguccucaggcuuuguuccu

SEQ ID NO: 299676 - RNA, 22 nt, Human
auuauuagacuuauaugguagu

SEQ ID NO: 299677 - RNA, 22 nt, Human
ugucccugccugcccacucugu

SEQ ID NO: 299678 - RNA, 22 nt, Human
ggcaggcaaugaggaugggaag

SEQ ID NO: 299679 - RNA, 22 nt, Human
acagguggucuuugcuccuuuu

SEQ ID NO: 299680 - RNA, 22 nt, Human
acccagccuacaaagcucaccu

SEQ ID NO: 299681 - RNA, 22 nt, Human
cuuuauggaaucaaagacugga

SEQ ID NO: 299682 - RNA, 22 nt, Human
uggcagggugccaguugcgagu

SEQ ID NO: 299683 - RNA, 22 nt, Human
ccugggugacagagugagaccu

SEQ ID NO: 299684 - RNA, 22 nt, Human
uucugggugcaacucuguucug

SEQ ID NO: 299685 - RNA, 22 nt, Human
auuuggaaaugcaucucuugag

SEQ ID NO: 299686 - RNA, 22 nt, Human
uaaauucugaucaaguuccuuc

SEQ ID NO: 299687 - RNA, 23 nt, Human
uuguccugccgaucucugagaau

SEQ ID NO: 299688 - RNA, 19 nt, Human
uuccugggguuccauugug

SEQ ID NO: 299689 - RNA, 22 nt, Human
uuccuugguagagagaauauuu

SEQ ID NO: 299690 - RNA, 21 nt, Human
auauuguagguaaagugcagg

SEQ ID NO: 299691 - RNA, 21 nt, Human
ucauguguaacuuuugaccac

SEQ ID NO: 299692 - RNA, 22 nt, Human
auugcugaacuuauaaaugaau

SEQ ID NO: 299693 - RNA, 22 nt, Human
ucagacaggccucuccagccuc

SEQ ID NO: 299694 - RNA, 22 nt, Human
cuuaauuuuuguaguagaugga

SEQ ID NO: 299695 - RNA, 22 nt, Human
auuaguaaaacauuguauaugu

SEQ ID NO: 299696 - RNA, 22 nt, Human
uaauuccaaguugagacaugca

SEQ ID NO: 299697 - RNA, 20 nt, Human
aucuucuuggccagcuugcu

SEQ ID NO: 299698 - RNA, 22 nt, Human
gaaucauuuauuuuugacagca

SEQ ID NO: 299699 - RNA, 22 nt, Human
uccuuccuggggucucugcugc

SEQ ID NO: 299700 - RNA, 22 nt, Human
ucaugaauauugaaugcuucau

SEQ ID NO: 299701 - RNA, 22 nt, Human
ggcuagggaucuagaccaggac

SEQ ID NO: 299702 - RNA, 22 nt, Human
uagcuuuuaguacuuaauggcu

SEQ ID NO: 299703 - RNA, 22 nt, Human
cuuugcuuuacucccacugugu

SEQ ID NO: 299704 - RNA, 22 nt, Human
uuuucauuguaaaucaggaaac

SEQ ID NO: 299705 - RNA, 22 nt, Human
ccagacaggggcuguuccugcu

SEQ ID NO: 299706 - RNA, 21 nt, Human
acagagcauaaugguguggca

SEQ ID NO: 299707 - RNA, 22 nt, Human
aucauucuaguccuuauggucu

SEQ ID NO: 299708 - RNA, 19 nt, Human
uguccucacagagcauaac

SEQ ID NO: 299709 - RNA, 22 nt, Human
uuuauuggauggauggauggau

SEQ ID NO: 299710 - RNA, 22 nt, Human
ugacauguaagauggaaaagcg

SEQ ID NO: 299711 - RNA, 22 nt, Human
gggaccuggcgagggucacaca

SEQ ID NO: 299712 - RNA, 22 nt, Human
gauuguaauuuucaagagguaa

SEQ ID NO: 299713 - RNA, 22 nt, Human
cagggcagagccaggauuucaa

SEQ ID NO: 299714 - RNA, 19 nt, Human
agacacacuuacguggaau

SEQ ID NO: 299715 - RNA, 22 nt, Human
agaggaauaaauuucuguagug

SEQ ID NO: 299716 - RNA, 22 nt, Human
auaaaauuugcuacuguuaaau

SEQ ID NO: 299717 - RNA, 22 nt, Human
ucuuccaagguugcacacuauc

SEQ ID NO: 299718 - RNA, 22 nt, Human
cuggauguaaagggugaagaaa

SEQ ID NO: 299719 - RNA, 22 nt, Human
cauuugaauuguucugugggaa

SEQ ID NO: 299720 - RNA, 22 nt, Human
acagggcagugucuugaaaaau

SEQ ID NO: 299721 - RNA, 22 nt, Human
aacauaauguggccaaagucac

SEQ ID NO: 299722 - RNA, 22 nt, Human
cuggaugugguaaugacuuuga

SEQ ID NO: 299723 - RNA, 21 nt, Human
gcaaguacuaucaucauuauc

SEQ ID NO: 299724 - RNA, 22 nt, Human
acaggcagguccugucccagcu

SEQ ID NO: 299725 - RNA, 22 nt, Human
cacccagcauuggcuaagagag

SEQ ID NO: 299726 - RNA, 22 nt, Human
uguuuugcuucucuguuuccca

SEQ ID NO: 299727 - RNA, 20 nt, Human
uuucaguugguuaauggcau

SEQ ID NO: 299728 - RNA, 22 nt, Human
uuugacucuugcuuugguggcu

SEQ ID NO: 299729 - RNA, 22 nt, Human
acuuuguucuaauaguaucucu

SEQ ID NO: 299730 - RNA, 17 nt, Human
aggccucccuccaggcc

SEQ ID NO: 299731 - RNA, 22 nt, Human
uuguaagaauaugaauacaaau

SEQ ID NO: 299732 - RNA, 22 nt, Human
acgugcaggaucugguuggcga

SEQ ID NO: 299733 - RNA, 22 nt, Human
aauguauuccucaugcaagagu

SEQ ID NO: 299734 - RNA, 22 nt, Human
guuuucuggcaguuauuccuua

SEQ ID NO: 299735 - RNA, 22 nt, Human
uauuggauagcuugugcagaau

SEQ ID NO: 299736 - RNA, 22 nt, Human
aaucuucuacuugacaguucuc

SEQ ID NO: 299737 - RNA, 22 nt, Human
ucucucuugucaccccaucugc

SEQ ID NO: 299738 - RNA, 22 nt, Human
ggaugaggaagauuacugagaa

SEQ ID NO: 299739 - RNA, 22 nt, Human
agaggaauaugggugcacuaga

SEQ ID NO: 299740 - RNA, 22 nt, Human
gagguguccuagaaguauucag

SEQ ID NO: 299741 - RNA, 22 nt, Human
auuauaugugggauagaauuua

SEQ ID NO: 299742 - RNA, 22 nt, Human
uuuuccagauuggacuuagucc

SEQ ID NO: 299743 - RNA, 22 nt, Human
gagggcagagacagugauucac

SEQ ID NO: 299744 - RNA, 22 nt, Human
uuugcugaccccauucugaguc

SEQ ID NO: 299745 - RNA, 21 nt, Human
auuuucauuaauucagugugg

SEQ ID NO: 299746 - RNA, 23 nt, Human
aaacaugcagcacaugaaugcua

SEQ ID NO: 299747 - RNA, 22 nt, Human
ugggcagggaucucuuuugcaa

SEQ ID NO: 299748 - RNA, 22 nt, Human
gggugggguguaucggauccua

SEQ ID NO: 299749 - RNA, 22 nt, Human
ggacauuugcaccuaccucagc

SEQ ID NO: 299750 - RNA, 22 nt, Human
uuuaauuuuccucuuccuggag

SEQ ID NO: 299751 - RNA, 22 nt, Human
agcugcaaguaagcuugcuccu

SEQ ID NO: 299752 - RNA, 22 nt, Human
uuaauuuuuauguauagugugu

SEQ ID NO: 299753 - RNA, 22 nt, Human
uacauguaauuuucauaguaag

SEQ ID NO: 299754 - RNA, 22 nt, Human
auagauuauuugcucauuacuu

SEQ ID NO: 299755 - RNA, 22 nt, Human
uuggaauucaaguuguagcuua

SEQ ID NO: 299756 - RNA, 22 nt, Human
uucuaaaaccaauucugcuucu

SEQ ID NO: 299757 - RNA, 22 nt, Human
uauuaggguaaauuugacaugc

SEQ ID NO: 299758 - RNA, 22 nt, Human
acagcaggauuuggcgauguug

SEQ ID NO: 299759 - RNA, 22 nt, Human
gggcagguggcaaagccagagg

SEQ ID NO: 299760 - RNA, 21 nt, Human
ccagcuuucccaagucccuuu

SEQ ID NO: 299761 - RNA, 19 nt, Human
acaaaugauguugcacuga

SEQ ID NO: 299762 - RNA, 22 nt, Human
guugcacaguuccucaagcagg

SEQ ID NO: 299763 - RNA, 17 nt, Human
aguguuuccuuaucauu

SEQ ID NO: 299764 - RNA, 22 nt, Human
cucuucuuggcccccaugaggg

SEQ ID NO: 299765 - RNA, 22 nt, Human
gugagcauauauguaaucguuu

SEQ ID NO: 299766 - RNA, 22 nt, Human
auucuucauaccuacugagguu

SEQ ID NO: 299767 - RNA, 22 nt, Human
auuuauuaugggauuuggcuca

SEQ ID NO: 299768 - RNA, 22 nt, Human
ucauuguauacuuuauuuauga

SEQ ID NO: 299769 - RNA, 22 nt, Human
uugaauucauuucucauugagu

SEQ ID NO: 299770 - RNA, 22 nt, Human
uuccugcuuccuggccucacaa

SEQ ID NO: 299771 - RNA, 22 nt, Human
ggaaggaaguaaaugaugcuau

SEQ ID NO: 299772 - RNA, 21 nt, Human
uccuuccuugagguccuuucc

SEQ ID NO: 299773 - RNA, 22 nt, Human
guguguccacacauacauacau

SEQ ID NO: 299774 - RNA, 22 nt, Human
cagagcauaauugacaugaggu

SEQ ID NO: 299775 - RNA, 22 nt, Human
caggugucuaauucucaccccc

SEQ ID NO: 299776 - RNA, 22 nt, Human
uuauuccaguaaucucuguaau

SEQ ID NO: 299777 - RNA, 20 nt, Human
uggcagguggccucaguucc

SEQ ID NO: 299778 - RNA, 22 nt, Human
uuuaauugauucacagucugua

SEQ ID NO: 299779 - RNA, 23 nt, Human
cacacccaucacuaagagcuccu

SEQ ID NO: 299780 - RNA, 23 nt, Human
uggagcugggcucagacccuggg

SEQ ID NO: 299781 - RNA, 22 nt, Human
aauauucaaguuauucuuucuu

SEQ ID NO: 299782 - RNA, 17 nt, Human
uuauuuuuugggcugag

SEQ ID NO: 299783 - RNA, 22 nt, Human
cagaagagaugaaauaguauua

SEQ ID NO: 299784 - RNA, 22 nt, Human
acagguguguucccggaaagcc

SEQ ID NO: 299785 - RNA, 22 nt, Human
caugaguuuuuuaguucaugca

SEQ ID NO: 299786 - RNA, 22 nt, Human
ggcaggugggaacccuccccac

SEQ ID NO: 299787 - RNA, 22 nt, Human
aaauuucaguuaccuuuacguu

SEQ ID NO: 299788 - RNA, 22 nt, Human
uuucaaagucaauaucauuacc

SEQ ID NO: 299789 - RNA, 22 nt, Human
ccagggcacuuaggcccagccc

SEQ ID NO: 299790 - RNA, 22 nt, Human
aaugaggucauuaaugguggga

SEQ ID NO: 299791 - RNA, 22 nt, Human
uugcaggggaaggagcagagcu

SEQ ID NO: 299792 - RNA, 22 nt, Human
guuauacauauguguuaacaaa

SEQ ID NO: 299793 - RNA, 22 nt, Human
cauuuguaggaugcuucuuguu

SEQ ID NO: 299794 - RNA, 22 nt, Human
gagguguccucagccaacucug

SEQ ID NO: 299795 - RNA, 22 nt, Human
uuuuccuucugauacuccauuu

SEQ ID NO: 299796 - RNA, 22 nt, Human
cucuucuugcuagacugagugc

SEQ ID NO: 299797 - RNA, 16 nt, Human
gcaggcagaucacaug

SEQ ID NO: 299798 - RNA, 22 nt, Human
cagcuguccuuccuggugggcg

SEQ ID NO: 299799 - RNA, 22 nt, Human
uuccagauuucuacacaagacc

SEQ ID NO: 299800 - RNA, 18 nt, Human
ugaccugcgcuucacggu

SEQ ID NO: 299801 - RNA, 22 nt, Human
uuauugaguaucugcuuggugu

SEQ ID NO: 299802 - RNA, 22 nt, Human
uccuccuuguucuuuugccuac

SEQ ID NO: 299803 - RNA, 19 nt, Human
agaaucaggucaggugaca

SEQ ID NO: 299804 - RNA, 22 nt, Human
uuuccuucuuagcgguguucuu

SEQ ID NO: 299805 - RNA, 22 nt, Human
ggcuuuaugcagggauagaaau

SEQ ID NO: 299806 - RNA, 22 nt, Human
auuauuguacuuucaauaaggu

SEQ ID NO: 299807 - RNA, 22 nt, Human
cuguugcucccagggagagggu

SEQ ID NO: 299808 - RNA, 22 nt, Human
aacauuguuuugcacaacucuu

SEQ ID NO: 299809 - RNA, 22 nt, Human
acagagagguaaaauauauagu

SEQ ID NO: 299810 - RNA, 22 nt, Human
gggcuccaccuagggacacugg

SEQ ID NO: 299811 - RNA, 22 nt, Human
guagggacaauauguuauuaga

SEQ ID NO: 299812 - RNA, 22 nt, Human
uucccuuccucacucuacuugu

SEQ ID NO: 299813 - RNA, 22 nt, Human
auugcuaggaacagguugcacc

SEQ ID NO: 299814 - RNA, 22 nt, Human
uggcaaagauuaccacaucuac

SEQ ID NO: 299815 - RNA, 17 nt, Human
uggucuggaagaacuga

SEQ ID NO: 299816 - RNA, 22 nt, Human
augauguugauaaauuacuuua

SEQ ID NO: 299817 - RNA, 22 nt, Human
cccaggcacaccccgaacggaa

SEQ ID NO: 299818 - RNA, 22 nt, Human
aggacaguguggaagagggugc

SEQ ID NO: 299819 - RNA, 22 nt, Human
uuucagauuaucucaacuuugg

SEQ ID NO: 299820 - RNA, 22 nt, Human
uaaugucuccaggguugaccua

SEQ ID NO: 299821 - RNA, 22 nt, Human
uuuuauugggaguccucuacug

SEQ ID NO: 299822 - RNA, 22 nt, Human
uacccagcuccucagaagacca

SEQ ID NO: 299823 - RNA, 22 nt, Human
ucuggaugauaugugaacuuga

SEQ ID NO: 299824 - RNA, 22 nt, Human
ucugcccucauugcugccugga

SEQ ID NO: 299825 - RNA, 22 nt, Human
ugcuggguggacuuggcucuca

SEQ ID NO: 299826 - RNA, 22 nt, Human
gagggcucacugagaaagcagu

SEQ ID NO: 299827 - RNA, 22 nt, Human
uugcuuuacaaaaauugauggu

SEQ ID NO: 299828 - RNA, 22 nt, Human
gguagggcaaaguagggcaccu

SEQ ID NO: 299829 - RNA, 22 nt, Human
uccaggcacagaguuggucagu

SEQ ID NO: 299830 - RNA, 22 nt, Human
uaaaguuuggcagacaauaaca

SEQ ID NO: 299831 - RNA, 22 nt, Human
uuugauuuacuggauauucuca

SEQ ID NO: 299832 - RNA, 22 nt, Human
gacugaaggucucagcauguga

SEQ ID NO: 299833 - RNA, 22 nt, Human
ggucccagcugcucaagaggcu

SEQ ID NO: 299834 - RNA, 22 nt, Human
ucaauuuauguggcuauucauu

SEQ ID NO: 299835 - RNA, 22 nt, Human
uuuucagaggccuaagagguuu

SEQ ID NO: 299836 - RNA, 22 nt, Human
uucuucuuaauguccugggaac

SEQ ID NO: 299837 - RNA, 22 nt, Human
acuacaguacuauaucuauagg

SEQ ID NO: 299838 - RNA, 22 nt, Human
auuugcuggugaaauagugaca

SEQ ID NO: 299839 - RNA, 22 nt, Human
ucauuuguaccauuuuuuaaga

SEQ ID NO: 299840 - RNA, 22 nt, Human
uuuugcugggguggcuagcuua

SEQ ID NO: 299841 - RNA, 22 nt, Human
agcagggcucacauuaguggau

SEQ ID NO: 299842 - RNA, 22 nt, Human
ggacuccucuagaaguugaggc

SEQ ID NO: 299843 - RNA, 22 nt, Human
aaauuauucucauguguuucuu

SEQ ID NO: 299844 - RNA, 22 nt, Human
uggagcugguaaacagugacau

SEQ ID NO: 299845 - RNA, 22 nt, Human
ugucuucaucucagacacaguu

SEQ ID NO: 299846 - RNA, 22 nt, Human
agggcuccgggcaggcgaugga

SEQ ID NO: 299847 - RNA, 22 nt, Human
cuucucccugggggcucuuuau

SEQ ID NO: 299848 - RNA, 22 nt, Human
cagauucucacuguauucaggu

SEQ ID NO: 299849 - RNA, 22 nt, Human
ggagcugagacccaguggcuga

SEQ ID NO: 299850 - RNA, 22 nt, Human
uagacaggaaacauuaggaugg

SEQ ID NO: 299851 - RNA, 22 nt, Human
ucuccauuuuauagauaaugaa

SEQ ID NO: 299852 - RNA, 22 nt, Human
cuuuaagagaucaccaaucaca

SEQ ID NO: 299853 - RNA, 22 nt, Human
aauuagggaaaauuuacuugua

SEQ ID NO: 299854 - RNA, 22 nt, Human
cacaauuuguuuuaucaguauu

SEQ ID NO: 299855 - RNA, 22 nt, Human
ccuucuccugccuuggguucau

SEQ ID NO: 299856 - RNA, 22 nt, Human
auuucuguggcuucauucuccu

SEQ ID NO: 299857 - RNA, 22 nt, Human
uuuccaugaucguuauagaacu

SEQ ID NO: 299858 - RNA, 22 nt, Human
ugacaggucauauaagcuugca

SEQ ID NO: 299859 - RNA, 22 nt, Human
cccaugagaccugguuuaaggc

SEQ ID NO: 299860 - RNA, 22 nt, Human
uugcugauucaugauuugagaa

SEQ ID NO: 299861 - RNA, 22 nt, Human
uuauucugcacuuuuaaaauau

SEQ ID NO: 299862 - RNA, 22 nt, Human
uugaaaacuuucuagaccaaga

SEQ ID NO: 299863 - RNA, 22 nt, Human
cagacagguugcaaaacuucaa

SEQ ID NO: 299864 - RNA, 18 nt, Human
ugaggcagucagugaugg

SEQ ID NO: 299865 - RNA, 23 nt, Human
uggcaaggaaugggauggagacu

SEQ ID NO: 299866 - RNA, 22 nt, Human
ugaguacucggagugcuuugga

SEQ ID NO: 299867 - RNA, 22 nt, Human
ccagggcagggaccacgugucu

SEQ ID NO: 299868 - RNA, 22 nt, Human
uagaaacagaaaacuguaauag

SEQ ID NO: 299869 - RNA, 21 nt, Human
cagacccucuagaggccaccu

SEQ ID NO: 299870 - RNA, 22 nt, Human
acaaaugugucuaauugugccu

SEQ ID NO: 299871 - RNA, 22 nt, Human
aagcugcagaugugccugugga

SEQ ID NO: 299872 - RNA, 22 nt, Human
uccucccuguaccauuccucug

SEQ ID NO: 299873 - RNA, 22 nt, Human
uguguuuugaacucaucuacug

SEQ ID NO: 299874 - RNA, 19 nt, Human
uggaggaaguauauuucau

SEQ ID NO: 299875 - RNA, 22 nt, Human
ggacaugugcaacuucuuugga

SEQ ID NO: 299876 - RNA, 22 nt, Human
aaggugguugcaauuaccauaa

SEQ ID NO: 299877 - RNA, 22 nt, Human
aauggaauaccuagguggccca

SEQ ID NO: 299878 - RNA, 22 nt, Human
auuguaaauagugccacaauaa

SEQ ID NO: 299879 - RNA, 22 nt, Human
cucuggaauugaccugggaggg

SEQ ID NO: 299880 - RNA, 16 nt, Human
gcagguggaucaccug

SEQ ID NO: 299881 - RNA, 21 nt, Human
agggaaaaggcugagugaggg

SEQ ID NO: 299882 - RNA, 22 nt, Human
agggcucugagcuggaccaccu

SEQ ID NO: 299883 - RNA, 22 nt, Human
gcaguguuuacauauuagaaac

SEQ ID NO: 299884 - RNA, 22 nt, Human
gccuggagggauagaaugcaag

SEQ ID NO: 299885 - RNA, 16 nt, Human
ucagggcagaauggca

SEQ ID NO: 299886 - RNA, 23 nt, Human
uggaccugaaccagugccucugu

SEQ ID NO: 299887 - RNA, 22 nt, Human
cuggauccuucucuguguauuu

SEQ ID NO: 299888 - RNA, 22 nt, Human
auguccaguuucuacacacaua

SEQ ID NO: 299889 - RNA, 22 nt, Human
uccuucugaaaaaugcacacga

SEQ ID NO: 299890 - RNA, 22 nt, Human
uggaaauggaucugaugagucu

SEQ ID NO: 299891 - RNA, 22 nt, Human
ugaagcuuuccuguggucagga

SEQ ID NO: 299892 - RNA, 22 nt, Human
acacauaagccuaaucaucucc

SEQ ID NO: 299893 - RNA, 22 nt, Human
acauuguaaauaccuuuaucac

SEQ ID NO: 299894 - RNA, 22 nt, Human
cacuggaauucaagauacugag

SEQ ID NO: 299895 - RNA, 22 nt, Human
uccuccuuguuuuccuguuuac

SEQ ID NO: 299896 - RNA, 22 nt, Human
cagaggcagacccuccagggcg

SEQ ID NO: 299897 - RNA, 22 nt, Human
cucuuuccucagccacagucua

SEQ ID NO: 299898 - RNA, 22 nt, Human
gugggugucaguaucuuuaacg

SEQ ID NO: 299899 - RNA, 22 nt, Human
uggaccugcguaggugcugggc

SEQ ID NO: 299900 - RNA, 22 nt, Human
uuuaaaaaacuagucugagucu

SEQ ID NO: 299901 - RNA, 21 nt, Human
ugggaccuauuucaacuggau

SEQ ID NO: 299902 - RNA, 22 nt, Human
acaauacuauuuucaguauccu

SEQ ID NO: 299903 - RNA, 22 nt, Human
caccugcaaggagcuuucauuu

SEQ ID NO: 299904 - RNA, 22 nt, Human
cagugaggcucugcugagcggu

SEQ ID NO: 299905 - RNA, 22 nt, Human
auuauuauuguugauguuaggg

SEQ ID NO: 299906 - RNA, 22 nt, Human
cagcaugacagucugcagcaga

SEQ ID NO: 299907 - RNA, 19 nt, Human
aaagcagaggagcaucuga

SEQ ID NO: 299908 - RNA, 22 nt, Human
acauguguggacaugaaucuac

SEQ ID NO: 299909 - RNA, 22 nt, Human
uaugugucaaaccauucaucug

SEQ ID NO: 299910 - RNA, 22 nt, Human
uucagagaagcaaaggcagauu

SEQ ID NO: 299911 - RNA, 22 nt, Human
acagauuuuauuauucagguau

SEQ ID NO: 299912 - RNA, 22 nt, Human
aguauugugacucaaguauucu

SEQ ID NO: 299913 - RNA, 22 nt, Human
ucagagagcagaacuuuuuuac

SEQ ID NO: 299914 - RNA, 22 nt, Human
uugcagcuucgagucuaucugu

SEQ ID NO: 299915 - RNA, 22 nt, Human
uauuugaagauucuucugaugu

SEQ ID NO: 299916 - RNA, 20 nt, Human
uugagcuuuuaguacagaca

SEQ ID NO: 299917 - RNA, 20 nt, Human
gagcaguggaguuuccaggg

SEQ ID NO: 299918 - RNA, 22 nt, Human
cuucuucacacuggucugaagc

SEQ ID NO: 299919 - RNA, 22 nt, Human
gcuggaggaucacuugagccca

SEQ ID NO: 299920 - RNA, 18 nt, Human
uuucacagauucaugacu

SEQ ID NO: 299921 - RNA, 22 nt, Human
cuuccugcccacuuccugcugg

SEQ ID NO: 299922 - RNA, 22 nt, Human
uucauaaugagguccuagaggc

SEQ ID NO: 299923 - RNA, 20 nt, Human
uuucuguaaggcauuaaucu

SEQ ID NO: 299924 - RNA, 17 nt, Human
ccaggugggaggugggg

SEQ ID NO: 299925 - RNA, 22 nt, Human
uacauguggaguuuucuaguca

SEQ ID NO: 299926 - RNA, 22 nt, Human
aaauuucuguuguuuugagcca

SEQ ID NO: 299927 - RNA, 22 nt, Human
gguuucaaaguggacaguuagu

SEQ ID NO: 299928 - RNA, 22 nt, Human
uugugcaauuuaaaaucuuccu

SEQ ID NO: 299929 - RNA, 22 nt, Human
agagugauucuaguuagggaau

SEQ ID NO: 299930 - RNA, 22 nt, Human
ugcagggcagauaugacuguag

SEQ ID NO: 299931 - RNA, 18 nt, Human
uggcagggaggaaauaua

SEQ ID NO: 299932 - RNA, 22 nt, Human
guuuacaugcagaaaaucaaug

SEQ ID NO: 299933 - RNA, 22 nt, Human
cagugagggcccccuuccaggu

SEQ ID NO: 299934 - RNA, 22 nt, Human
ugcagggacaggcucuggggau

SEQ ID NO: 299935 - RNA, 22 nt, Human
uuccuucuggagcccggggagc

SEQ ID NO: 299936 - RNA, 20 nt, Human
cauuugaaucuccauucugc

SEQ ID NO: 299937 - RNA, 22 nt, Human
ccagagagcuacaaggcauaaa

SEQ ID NO: 299938 - RNA, 22 nt, Human
gcuguucauagaaauggucuca

SEQ ID NO: 299939 - RNA, 22 nt, Human
gaaugaauuuuggauggugaag

SEQ ID NO: 299940 - RNA, 19 nt, Human
uagguguccgccggaggug

SEQ ID NO: 299941 - RNA, 22 nt, Human
cauuugaaugagauugcuguaa

SEQ ID NO: 299942 - RNA, 22 nt, Human
uguugcuguaugaauaggaagg

SEQ ID NO: 299943 - RNA, 20 nt, Human
gcaggcagggaaugggggug

SEQ ID NO: 299944 - RNA, 22 nt, Human
cuaaaugucauggaguuguaga

SEQ ID NO: 299945 - RNA, 22 nt, Human
ucaggaaagaguaauguauaca

SEQ ID NO: 299946 - RNA, 22 nt, Human
uguuaggguccugugcaggggc

SEQ ID NO: 299947 - RNA, 22 nt, Human
aaagauuuaagaauaauuugug

SEQ ID NO: 299948 - RNA, 14 nt, Human
gcagguggaucacc

SEQ ID NO: 299949 - RNA, 22 nt, Human
auuuauuaagcaucugcuaugu

SEQ ID NO: 299950 - RNA, 22 nt, Human
auguuucaaauauauagaguug

SEQ ID NO: 299951 - RNA, 22 nt, Human
uguuucugucuguuuucuacau

SEQ ID NO: 299952 - RNA, 22 nt, Human
ucagcuuucucaaagaagcugg

SEQ ID NO: 299953 - RNA, 22 nt, Human
aagccggcugggccgaggcugc

SEQ ID NO: 299954 - RNA, 22 nt, Human
caugaggugauaaagcugggau

SEQ ID NO: 299955 - RNA, 22 nt, Human
ucagggaccccucugaguggag

SEQ ID NO: 299956 - RNA, 22 nt, Human
ugagaaugaaucuuuugcuuuc

SEQ ID NO: 299957 - RNA, 22 nt, Human
ugaacaacugcaaaaaucucca

SEQ ID NO: 299958 - RNA, 22 nt, Human
cagggcauaagaugaggcugua

SEQ ID NO: 299959 - RNA, 22 nt, Human
auuucuguauccugcugucaga

SEQ ID NO: 299960 - RNA, 22 nt, Human
aagcugcagguugaauccaggu

SEQ ID NO: 299961 - RNA, 22 nt, Human
agauggucaaggauacuguuca

SEQ ID NO: 299962 - RNA, 22 nt, Human
acuugaauuauauuucuagaga

SEQ ID NO: 299963 - RNA, 22 nt, Human
uaggugucuaacaauaagugua

SEQ ID NO: 299964 - RNA, 22 nt, Human
ccaggcaggcgauggugcagug

SEQ ID NO: 299965 - RNA, 19 nt, Human
uggcagguagugagcaguc

SEQ ID NO: 299966 - RNA, 22 nt, Human
uccugcaggccuguucccagua

SEQ ID NO: 299967 - RNA, 23 nt, Human
cuguccuguaguucacguuggcc

SEQ ID NO: 299968 - RNA, 22 nt, Human
uuccaggaacagaugaagguug

SEQ ID NO: 299969 - RNA, 22 nt, Human
ucagagagaaauaguuuuugac

SEQ ID NO: 299970 - RNA, 22 nt, Human
ucuucacauggaacaugaagcu

SEQ ID NO: 299971 - RNA, 22 nt, Human
uuuacagaucuguugauuuguu

SEQ ID NO: 299972 - RNA, 22 nt, Human
uuucuguaaguggcaaauaaug

SEQ ID NO: 299973 - RNA, 22 nt, Human
auugaguaccuccagauucaua

SEQ ID NO: 299974 - RNA, 22 nt, Human
cuccauugaacauccucucaga

SEQ ID NO: 299975 - RNA, 23 nt, Human
ccagugauugccuggaaggaggu

SEQ ID NO: 299976 - RNA, 22 nt, Human
cugggcugcaguuccugguccu

SEQ ID NO: 299977 - RNA, 22 nt, Human
ggcaggcagccuccauccacag

SEQ ID NO: 299978 - RNA, 22 nt, Human
gaugagguaagaauguaacacc

SEQ ID NO: 299979 - RNA, 22 nt, Human
cuggaggagcauggacuggagu

SEQ ID NO: 299980 - RNA, 22 nt, Human
uggaaagucucuuuugacugua

SEQ ID NO: 299981 - RNA, 19 nt, Human
ugggcagguucaguaaugg

SEQ ID NO: 299982 - RNA, 22 nt, Human
ggguaggaugguagaagggacc

SEQ ID NO: 299983 - RNA, 22 nt, Human
aaauauagugacacuuauaguc

SEQ ID NO: 299984 - RNA, 19 nt, Human
cugcagggaugugcagagu

SEQ ID NO: 299985 - RNA, 22 nt, Human
ucuguucagguuucagagaacu

SEQ ID NO: 299986 - RNA, 16 nt, Human
auuuccagauuaugca

SEQ ID NO: 299987 - RNA, 22 nt, Human
ccagcuuuuggggugacaauuu

SEQ ID NO: 299988 - RNA, 22 nt, Human
uaacaauaguguuugcuaguca

SEQ ID NO: 299989 - RNA, 22 nt, Human
uuucuucauagaccuugucuug

SEQ ID NO: 299990 - RNA, 22 nt, Human
cuauuacauuucuggacauuca

SEQ ID NO: 299991 - RNA, 22 nt, Human
cuuguauuaggaagaaugcuuu

SEQ ID NO: 299992 - RNA, 19 nt, Human
gcugggugggguccacagc

SEQ ID NO: 299993 - RNA, 22 nt, Human
ugcuuuauucgacaucugguag

SEQ ID NO: 299994 - RNA, 17 nt, Human
aaggaaugucagaaguu

SEQ ID NO: 299995 - RNA, 22 nt, Human
gguaaaaugcagauucuuagcc

SEQ ID NO: 299996 - RNA, 18 nt, Human
auugcuuuuguaccaacc

SEQ ID NO: 299997 - RNA, 22 nt, Human
agaauucugacaauagaauugg

SEQ ID NO: 299998 - RNA, 22 nt, Human
cauuuaagagaaauauuuaguu

SEQ ID NO: 299999 - RNA, 22 nt, Human
uuuaaauuuguguuuagagggu

SEQ ID NO: 300000 - RNA, 22 nt, Human
auacuuuggucacuauuauugg

SEQ ID NO: 300001 - RNA, 22 nt, Human
uuuuauugucaaugaagacaga

SEQ ID NO: 300002 - RNA, 22 nt, Human
ugccuugcacauaauauacauu

SEQ ID NO: 300003 - RNA, 22 nt, Human
gguguccucaugauuuucuaga

SEQ ID NO: 300004 - RNA, 22 nt, Human
cuggaggaauaaucuccuaccc

SEQ ID NO: 300005 - RNA, 22 nt, Human
gacuuuaugaagagaugaccaa

SEQ ID NO: 300006 - RNA, 22 nt, Human
ccagggcaugggaagaacugaa

SEQ ID NO: 300007 - RNA, 22 nt, Human
cacgcauguggaucagaugaag

SEQ ID NO: 300008 - RNA, 22 nt, Human
cucuuccucucaugcggucaua

SEQ ID NO: 300009 - RNA, 22 nt, Human
uucuucagacuacugaugauug

SEQ ID NO: 300010 - RNA, 22 nt, Human
cuuuuucuucuaggugugccug

SEQ ID NO: 300011 - RNA, 22 nt, Human
acagggcaccugagguaggaag

SEQ ID NO: 300012 - RNA, 22 nt, Human
ggaccugccagaacucaggcua

SEQ ID NO: 300013 - RNA, 22 nt, Human
uuucugaagggcagcagacucu

SEQ ID NO: 300014 - RNA, 22 nt, Human
auuaauuuuaccuuuguaaaca

SEQ ID NO: 300015 - RNA, 22 nt, Human
cuggaggccacuguacagauug

SEQ ID NO: 300016 - RNA, 22 nt, Human
ucagagagccucaggcacugcc

SEQ ID NO: 300017 - RNA, 22 nt, Human
ggcaggugcucugugggccugg

SEQ ID NO: 300018 - RNA, 22 nt, Human
uggagcagggcaucacugugcg

SEQ ID NO: 300019 - RNA, 22 nt, Human
aaagcugcccagcugccuguuu

SEQ ID NO: 300020 - RNA, 22 nt, Human
aaagcaugauuagauagaugau

SEQ ID NO: 300021 - RNA, 22 nt, Human
uguccuuuguguaucuauagua

SEQ ID NO: 300022 - RNA, 22 nt, Human
guacacauauauuaaaaauugu

SEQ ID NO: 300023 - RNA, 22 nt, Human
ucaggaaauggcuucaugguuu

SEQ ID NO: 300024 - RNA, 22 nt, Human
ugcugaggcagaugucugugac

SEQ ID NO: 300025 - RNA, 22 nt, Human
uaaguucauaagcuuauucuua

SEQ ID NO: 300026 - RNA, 22 nt, Human
uucaaauuaccacauuugcuua

SEQ ID NO: 300027 - RNA, 22 nt, Human
ggaugucuuuacuuugggauuu

SEQ ID NO: 300028 - RNA, 22 nt, Human
uugaaauaucaaguuauuagug

SEQ ID NO: 300029 - RNA, 22 nt, Human
uacccaggaggaaacugaggcu

SEQ ID NO: 300030 - RNA, 22 nt, Human
auuaaauuaaguggcuaauuua

SEQ ID NO: 300031 - RNA, 22 nt, Human
uacaugugcacgugugacuuug

SEQ ID NO: 300032 - RNA, 19 nt, Human
uccugcagguggcuugcag

SEQ ID NO: 300033 - RNA, 22 nt, Human
auuuccaugaaguuuaguuaua

SEQ ID NO: 300034 - RNA, 22 nt, Human
acagguggaggcuuuaggaggu

SEQ ID NO: 300035 - RNA, 22 nt, Human
cagacaggaaguucagaagaaa

SEQ ID NO: 300036 - RNA, 22 nt, Human
agguaaaauagauaguauuucu

SEQ ID NO: 300037 - RNA, 23 nt, Human
caggugguagagaaaaauccaga

SEQ ID NO: 300038 - RNA, 20 nt, Human
uacaauauucccacuuugcu

SEQ ID NO: 300039 - RNA, 22 nt, Human
ccagcuuuucagaaucugccug

SEQ ID NO: 300040 - RNA, 22 nt, Human
uuauugcucuauuauggccuaa

SEQ ID NO: 300041 - RNA, 22 nt, Human
ucagagaggauuuuaauaagug

SEQ ID NO: 300042 - RNA, 22 nt, Human
ucuaggguccacagggucagcc

SEQ ID NO: 300043 - RNA, 17 nt, Human
acagggcagaaacagcu

SEQ ID NO: 300044 - RNA, 22 nt, Human
uuucuauaugaggagcuaaagu

SEQ ID NO: 300045 - RNA, 22 nt, Human
agucugcuuccuggagaacuca

SEQ ID NO: 300046 - RNA, 17 nt, Human
aguggcaggcagauggg

SEQ ID NO: 300047 - RNA, 22 nt, Human
ugcuggaggggaugccuucacu

SEQ ID NO: 300048 - RNA, 22 nt, Human
agcuuuaucuucaccugggaau

SEQ ID NO: 300049 - RNA, 22 nt, Human
uucagagagaaaccagugggaa

SEQ ID NO: 300050 - RNA, 22 nt, Human
acagcaggaagcuggagggaaa

SEQ ID NO: 300051 - RNA, 22 nt, Human
auguuauuaaaguacagauucu

SEQ ID NO: 300052 - RNA, 22 nt, Human
gagcagugacuggagcaugaga

SEQ ID NO: 300053 - RNA, 22 nt, Human
uuaguuuucccaucuuuauggu

SEQ ID NO: 300054 - RNA, 19 nt, Human
auggaaaaugccagacuga

SEQ ID NO: 300055 - RNA, 22 nt, Human
uuaguuaguggggcugucaguc

SEQ ID NO: 300056 - RNA, 22 nt, Human
guccagagauggacgagcagau

SEQ ID NO: 300057 - RNA, 22 nt, Human
cuggcccauggugagcucuggg

SEQ ID NO: 300058 - RNA, 22 nt, Human
cccugcagagagugcuuuugug

SEQ ID NO: 300059 - RNA, 22 nt, Human
guucuucagcauuagaagucau

SEQ ID NO: 300060 - RNA, 22 nt, Human
auguguccauuaucaguucugg

SEQ ID NO: 300061 - RNA, 22 nt, Human
ucaaucacguguuccauguucu

SEQ ID NO: 300062 - RNA, 22 nt, Human
gcugauagacugaauguuggga

SEQ ID NO: 300063 - RNA, 23 nt, Human
agguggucuuguggaugcugcaa

SEQ ID NO: 300064 - RNA, 22 nt, Human
uguuuauucauggcuaaugaaa

SEQ ID NO: 300065 - RNA, 22 nt, Human
auauaauacaaccugcuaagug

SEQ ID NO: 300066 - RNA, 22 nt, Human
gccaggcagcugggagggugcc

SEQ ID NO: 300067 - RNA, 22 nt, Human
uuccaggagacuuccagaaaua

SEQ ID NO: 300068 - RNA, 22 nt, Human
uaucaauacauguuaucagugu

SEQ ID NO: 300069 - RNA, 22 nt, Human
acacuuggagcaacacuuaugg

SEQ ID NO: 300070 - RNA, 22 nt, Human
ccaaagucagugcucagucguc

SEQ ID NO: 300071 - RNA, 22 nt, Human
aauuaguaaccuaauuccaucu

SEQ ID NO: 300072 - RNA, 22 nt, Human
auaauauaauccuacuucccau

SEQ ID NO: 300073 - RNA, 18 nt, Human
caggaauggaugggauuu

SEQ ID NO: 300074 - RNA, 22 nt, Human
uuuacuuguucugcugaauucu

SEQ ID NO: 300075 - RNA, 22 nt, Human
agugugagauuaaaccgaauca

SEQ ID NO: 300076 - RNA, 22 nt, Human
gacaggcuucaugauggcagga

SEQ ID NO: 300077 - RNA, 22 nt, Human
uaaauucagugaguaauuucug

SEQ ID NO: 300078 - RNA, 22 nt, Human
gggcagguguuuccaaggugag

SEQ ID NO: 300079 - RNA, 22 nt, Human
uugugucccuggagcuucugug

SEQ ID NO: 300080 - RNA, 22 nt, Human
uacauaaugagcuaguuaaguu

SEQ ID NO: 300081 - RNA, 22 nt, Human
cuuccuucuguaagaccaguug

SEQ ID NO: 300082 - RNA, 22 nt, Human
guugcugggagcagggauccug

SEQ ID NO: 300083 - RNA, 22 nt, Human
agaggcaugaucuuauaauuua

SEQ ID NO: 300084 - RNA, 22 nt, Human
uucuucuucaagugcugcauuc

SEQ ID NO: 300085 - RNA, 22 nt, Human
uacauagugaacauuuacagag

SEQ ID NO: 300086 - RNA, 22 nt, Human
agugugaguaauugagucuguc

SEQ ID NO: 300087 - RNA, 22 nt, Human
uugcuggggugugaaaucugau

SEQ ID NO: 300088 - RNA, 22 nt, Human
gauccugugcauggggugaugg

SEQ ID NO: 300089 - RNA, 21 nt, Human
uagcuuuaauauucccacauu

SEQ ID NO: 300090 - RNA, 22 nt, Human
uccuggguagagaccugaugaa

SEQ ID NO: 300091 - RNA, 22 nt, Human
gguguccugucagcuagaguga

SEQ ID NO: 300092 - RNA, 22 nt, Human
uucuucaaacaaaaguggcaug

SEQ ID NO: 300093 - RNA, 22 nt, Human
ucuucagacccuuagcugugau

SEQ ID NO: 300094 - RNA, 22 nt, Human
ugcuuuauaucucucuucuuag

SEQ ID NO: 300095 - RNA, 18 nt, Human
ggcggguguuuuauucac

SEQ ID NO: 300096 - RNA, 22 nt, Human
cccagcucugcagaccugcccu

SEQ ID NO: 300097 - RNA, 22 nt, Human
uaaauuauggcuggcagagcag

SEQ ID NO: 300098 - RNA, 22 nt, Human
uuugaaguaccugguucugacu

SEQ ID NO: 300099 - RNA, 22 nt, Human
ucucuuucuauaugugagucuu

SEQ ID NO: 300100 - RNA, 22 nt, Human
uuauugaaauggaagcuauaac

SEQ ID NO: 300101 - RNA, 22 nt, Human
ccugcagggaaucgaggcagaa

SEQ ID NO: 300102 - RNA, 22 nt, Human
aagaaaagauguuugguuuuca

SEQ ID NO: 300103 - RNA, 22 nt, Human
guguccuuaugcauaccagagu

SEQ ID NO: 300104 - RNA, 23 nt, Human
aucauucuccaaucuggagcagg

SEQ ID NO: 300105 - RNA, 22 nt, Human
gcuuccuuccuuacauuggugg

SEQ ID NO: 300106 - RNA, 22 nt, Human
uuuauuguguugaaacugaauu

SEQ ID NO: 300107 - RNA, 22 nt, Human
ucauuucaaugauacuacuaag

SEQ ID NO: 300108 - RNA, 18 nt, Human
ccagguggugacagagau

SEQ ID NO: 300109 - RNA, 22 nt, Human
caggauggccccggggcugugc

SEQ ID NO: 300110 - RNA, 22 nt, Human
cuauuaggcuuccauuucaugc

SEQ ID NO: 300111 - RNA, 22 nt, Human
uucucagugaaguuuagaacau

SEQ ID NO: 300112 - RNA, 22 nt, Human
acaugcauaggagaagucuuua

SEQ ID NO: 300113 - RNA, 22 nt, Human
uauguacacacacaugcaugua

SEQ ID NO: 300114 - RNA, 22 nt, Human
uucuuaacuggaaaaugucaga

SEQ ID NO: 300115 - RNA, 22 nt, Human
auuguuaaacugaagcauuacu

SEQ ID NO: 300116 - RNA, 22 nt, Human
cauuaaaauaucucaugguguu

SEQ ID NO: 300117 - RNA, 22 nt, Human
uggacauguaaaggcucaaggu

SEQ ID NO: 300118 - RNA, 22 nt, Human
uaaauuguuuucuagaaguugu

SEQ ID NO: 300119 - RNA, 22 nt, Human
ucugaagacauaugauauggug

SEQ ID NO: 300120 - RNA, 22 nt, Human
uuuauuuauccuucuggauugc

SEQ ID NO: 300121 - RNA, 22 nt, Human
ucuuccugaaacccuguuccag

SEQ ID NO: 300122 - RNA, 22 nt, Human
ucagguggcuuggagggggacg

SEQ ID NO: 300123 - RNA, 22 nt, Human
cugaaauucugccucugcacaa

SEQ ID NO: 300124 - RNA, 22 nt, Human
ccagagaccagaacauggggau

SEQ ID NO: 300125 - RNA, 22 nt, Human
ucauguguguuucauguaugga

SEQ ID NO: 300126 - RNA, 22 nt, Human
uccuuuaugugaguuguuuccc

SEQ ID NO: 300127 - RNA, 23 nt, Human
ggagaggggugugggcaucuuua

SEQ ID NO: 300128 - RNA, 22 nt, Human
aaauuaguacauugcaaagucc

SEQ ID NO: 300129 - RNA, 22 nt, Human
aauuaugauuggucuaaaccag

SEQ ID NO: 300130 - RNA, 20 nt, Human
cuucuucauuaacccuacug

SEQ ID NO: 300131 - RNA, 22 nt, Human
caggacagugcagguccauccu

SEQ ID NO: 300132 - RNA, 20 nt, Human
cuuuaguuauuaacagcacu

SEQ ID NO: 300133 - RNA, 22 nt, Human
auuaaauguuccuuaaauuaua

SEQ ID NO: 300134 - RNA, 22 nt, Human
uacuagaaauuaccuucucacu

SEQ ID NO: 300135 - RNA, 22 nt, Human
uauugguaucugagacagaguu

SEQ ID NO: 300136 - RNA, 22 nt, Human
ccaggccugugcaaggagggag

SEQ ID NO: 300137 - RNA, 22 nt, Human
uguguuauugccacugaagacc

SEQ ID NO: 300138 - RNA, 22 nt, Human
aauugcuuuucaaggguacagc

SEQ ID NO: 300139 - RNA, 22 nt, Human
uccaggcaucccccaggacaga

SEQ ID NO: 300140 - RNA, 22 nt, Human
ucuggcucauacaagccugcaa

SEQ ID NO: 300141 - RNA, 22 nt, Human
uuguaaaugaccuuuucuaauu

SEQ ID NO: 300142 - RNA, 22 nt, Human
ugagcagaacacgggauccaug

SEQ ID NO: 300143 - RNA, 22 nt, Human
uacccagcuucaagucaggacu

SEQ ID NO: 300144 - RNA, 20 nt, Human
aagggcagagggaacagacu

SEQ ID NO: 300145 - RNA, 20 nt, Human
ucccaggcuccacccuagac

SEQ ID NO: 300146 - RNA, 22 nt, Human
auuucacaaagaacagaugcag

SEQ ID NO: 300147 - RNA, 22 nt, Human
gguaggaguauuuugcagcagu

SEQ ID NO: 300148 - RNA, 22 nt, Human
cugcagggugacguugcccacc

SEQ ID NO: 300149 - RNA, 19 nt, Human
uccugaaaacuucuggaau

SEQ ID NO: 300150 - RNA, 22 nt, Human
auucagcagccauggcuucuga

SEQ ID NO: 300151 - RNA, 22 nt, Human
gcagguggucacucauccccag

SEQ ID NO: 300152 - RNA, 22 nt, Human
aaauuuaaggaggugcucacuu

SEQ ID NO: 300153 - RNA, 21 nt, Human
uccugcagggcagcagagugg

SEQ ID NO: 300154 - RNA, 22 nt, Human
acagcuuuuaugggaccagcca

SEQ ID NO: 300155 - RNA, 20 nt, Human
cucuuaaauguaaaguaggc

SEQ ID NO: 300156 - RNA, 22 nt, Human
uccaggcaggguuaaggguccu

SEQ ID NO: 300157 - RNA, 22 nt, Human
uguguccugcaggugcugccug

SEQ ID NO: 300158 - RNA, 22 nt, Human
gugagacacgugugugaccugg

SEQ ID NO: 300159 - RNA, 20 nt, Human
cugaacacagaauaagcaca

SEQ ID NO: 300160 - RNA, 22 nt, Human
aguuugaaaguauugacagaag

SEQ ID NO: 300161 - RNA, 19 nt, Human
ggcaggugugcuuaugcuu

SEQ ID NO: 300162 - RNA, 22 nt, Human
uguccuggagacacaagguggu

SEQ ID NO: 300163 - RNA, 19 nt, Human
uccuccuuacuuccucuug

SEQ ID NO: 300164 - RNA, 22 nt, Human
ucauuguauucagaacugaaga

SEQ ID NO: 300165 - RNA, 22 nt, Human
aagcugcaugaaguugaguaga

SEQ ID NO: 300166 - RNA, 22 nt, Human
agacacugaaucagagggacau

SEQ ID NO: 300167 - RNA, 22 nt, Human
guuaaauucgaugauggauaaa

SEQ ID NO: 300168 - RNA, 22 nt, Human
uagggacaaagagcugaggccu

SEQ ID NO: 300169 - RNA, 22 nt, Human
uccagauggauuuaagaccuaa

SEQ ID NO: 300170 - RNA, 22 nt, Human
gccaggcaggugucggagcccu

SEQ ID NO: 300171 - RNA, 22 nt, Human
uuaaacauuuauggaggcagca

SEQ ID NO: 300172 - RNA, 22 nt, Human
ugacauguccugagaagauggc

SEQ ID NO: 300173 - RNA, 22 nt, Human
ugucuggggaacugugcaucca

SEQ ID NO: 300174 - RNA, 22 nt, Human
ggagagggggcucccugcuugg

SEQ ID NO: 300175 - RNA, 22 nt, Human
aucagagauggcuccagugcuc

SEQ ID NO: 300176 - RNA, 22 nt, Human
guuaauuugcagcuuucgagcu

SEQ ID NO: 300177 - RNA, 22 nt, Human
gcugccacgaucucugcuguag

SEQ ID NO: 300178 - RNA, 22 nt, Human
auuucucagcacuuccuaucuc

SEQ ID NO: 300179 - RNA, 22 nt, Human
cagcuucuucaguccuggagcu

SEQ ID NO: 300180 - RNA, 22 nt, Human
uggacauguccggccagacaau

SEQ ID NO: 300181 - RNA, 22 nt, Human
aaaucucaauuugaauuguagc

SEQ ID NO: 300182 - RNA, 22 nt, Human
ucauuugugugagugauuugac

SEQ ID NO: 300183 - RNA, 23 nt, Human
cacagguguuucaucuucucagu

SEQ ID NO: 300184 - RNA, 22 nt, Human
ucugagguggacgauggagccu

SEQ ID NO: 300185 - RNA, 22 nt, Human
aaauuauuaugccccucuauaa

SEQ ID NO: 300186 - RNA, 22 nt, Human
ccagagagguagcuuacccucu

SEQ ID NO: 300187 - RNA, 22 nt, Human
gaauuguauugauuuuucagag

SEQ ID NO: 300188 - RNA, 22 nt, Human
uuguauuuggguaguauagaga

SEQ ID NO: 300189 - RNA, 22 nt, Human
uacaugugauaaauugauuaaa

SEQ ID NO: 300190 - RNA, 22 nt, Human
gcaaauacauguugagcaccua

SEQ ID NO: 300191 - RNA, 22 nt, Human
agcagggcuuugucucugugaa

SEQ ID NO: 300192 - RNA, 22 nt, Human
acagggcagagggcaguuggua

SEQ ID NO: 300193 - RNA, 22 nt, Human
gggcuggaggagauccagaggc

SEQ ID NO: 300194 - RNA, 22 nt, Human
uguauacaugucugugugcaca

SEQ ID NO: 300195 - RNA, 20 nt, Human
aacuuguucuaccuguuuca

SEQ ID NO: 300196 - RNA, 22 nt, Human
cuuaauuuaagccuagaaugca

SEQ ID NO: 300197 - RNA, 22 nt, Human
cagggcucccugcagccucugu

SEQ ID NO: 300198 - RNA, 16 nt, Human
cuacccagugagaagg

SEQ ID NO: 300199 - RNA, 22 nt, Human
gucuucuuuaaccuacuaaagc

SEQ ID NO: 300200 - RNA, 22 nt, Human
guaaucucagcuacuugggagg

SEQ ID NO: 300201 - RNA, 22 nt, Human
agcugcaaguccaaaggaauua

SEQ ID NO: 300202 - RNA, 22 nt, Human
aaaagucucucugaguaaaagu

SEQ ID NO: 300203 - RNA, 22 nt, Human
auuuacauuuauuugagaaggu

SEQ ID NO: 300204 - RNA, 23 nt, Human
agucuucauuguauuuccagacc

SEQ ID NO: 300205 - RNA, 22 nt, Human
ggacaggugugaggcuggcaca

SEQ ID NO: 300206 - RNA, 22 nt, Human
ucaggcaggcucagaggaaaac

SEQ ID NO: 300207 - RNA, 22 nt, Human
auuucacaucuaucucagauuu

SEQ ID NO: 300208 - RNA, 22 nt, Human
uauugguaugguaagaauugaa

SEQ ID NO: 300209 - RNA, 22 nt, Human
augagacuaccuguaauguggc

SEQ ID NO: 300210 - RNA, 22 nt, Human
gcagcuuuguaaaguaugaagc

SEQ ID NO: 300211 - RNA, 22 nt, Human
cagacugaguggauuaaacaau

SEQ ID NO: 300212 - RNA, 22 nt, Human
acauuuuaauaugcuuagugug

SEQ ID NO: 300213 - RNA, 22 nt, Human
uuccagugaugggcaauuuggu

SEQ ID NO: 300214 - RNA, 22 nt, Human
gcagggaccagggccagaucca

SEQ ID NO: 300215 - RNA, 22 nt, Human
guuuuauaugucucugcugaca

SEQ ID NO: 300216 - RNA, 22 nt, Human
ucauucuuuaccaaguugucac

SEQ ID NO: 300217 - RNA, 22 nt, Human
ucagacagagaaguacaaugag

SEQ ID NO: 300218 - RNA, 22 nt, Human
aggcucccaagcacugacccca

SEQ ID NO: 300219 - RNA, 22 nt, Human
uuugucauaucacacaauuuug

SEQ ID NO: 300220 - RNA, 21 nt, Human
cagugagguccccagccuagg

SEQ ID NO: 300221 - RNA, 22 nt, Human
agugacuggugugaaguuaaau

SEQ ID NO: 300222 - RNA, 22 nt, Human
acaggugugagaacaugccuug

SEQ ID NO: 300223 - RNA, 22 nt, Human
guguccugguuccuuguggcug

SEQ ID NO: 300224 - RNA, 22 nt, Human
cuuccugcuccccugccaauuc

SEQ ID NO: 300225 - RNA, 22 nt, Human
uggcaggggaggugcuugcuua

SEQ ID NO: 300226 - RNA, 22 nt, Human
cuguccugucugcuuuuaauuu

SEQ ID NO: 300227 - RNA, 22 nt, Human
ucagcuuuccuugcuuuagauu

SEQ ID NO: 300228 - RNA, 22 nt, Human
acagugugugcuuucccuuacg

SEQ ID NO: 300229 - RNA, 22 nt, Human
uguccaggucagcagcagggac

SEQ ID NO: 300230 - RNA, 22 nt, Human
uagggcaggggaggaaucugaa

SEQ ID NO: 300231 - RNA, 22 nt, Human
uuugggaauaauugcacagauu

SEQ ID NO: 300232 - RNA, 22 nt, Human
ugcuguaauacuuaagguuaag

SEQ ID NO: 300233 - RNA, 22 nt, Human
cuuuuucugauguuccaugauu

SEQ ID NO: 300234 - RNA, 22 nt, Human
gcagacaggauuggguuaauag

SEQ ID NO: 300235 - RNA, 22 nt, Human
aggcaggcccucuggaaaggua

SEQ ID NO: 300236 - RNA, 22 nt, Human
uagcuuuaauaagcugcugaau

SEQ ID NO: 300237 - RNA, 22 nt, Human
uucuggguaacaaggcaagaau

SEQ ID NO: 300238 - RNA, 22 nt, Human
uuaaaauagccagugccccucu

SEQ ID NO: 300239 - RNA, 22 nt, Human
gagggcucuaccaaguaacucu

SEQ ID NO: 300240 - RNA, 22 nt, Human
ggaggggucucuagcgaggaga

SEQ ID NO: 300241 - RNA, 23 nt, Human
gagggcucugagugcuugggcca

SEQ ID NO: 300242 - RNA, 22 nt, Human
ggaaggaagugcagacuuuaaa

SEQ ID NO: 300243 - RNA, 20 nt, Human
ugcagggcugccucccagcu

SEQ ID NO: 300244 - RNA, 22 nt, Human
ucugaaaugcaaauuugacuga

SEQ ID NO: 300245 - RNA, 22 nt, Human
aaggcauacauauuguuauagg

SEQ ID NO: 300246 - RNA, 22 nt, Human
uggaggaaguugcuggaaguca

SEQ ID NO: 300247 - RNA, 22 nt, Human
acagccagguaaaggcauggca

SEQ ID NO: 300248 - RNA, 22 nt, Human
ugcaggugcugauaccuacucc

SEQ ID NO: 300249 - RNA, 23 nt, Human
uuuuaauuuggacauaagaagau

SEQ ID NO: 300250 - RNA, 22 nt, Human
guauuagggccaaaggcaggaa

SEQ ID NO: 300251 - RNA, 20 nt, Human
aggaggaaaaaaugacgagc

SEQ ID NO: 300252 - RNA, 22 nt, Human
uccugcagcugaagcucaugug

SEQ ID NO: 300253 - RNA, 22 nt, Human
agcagguggacagaggaagaaa

SEQ ID NO: 300254 - RNA, 22 nt, Human
gagcuuuaggagaaggagguca

SEQ ID NO: 300255 - RNA, 22 nt, Human
guguguccuguuuuaaaauagu

SEQ ID NO: 300256 - RNA, 17 nt, Human
uccuuucuuuaccuguu

SEQ ID NO: 300257 - RNA, 22 nt, Human
auuccuucuaaaacgcugcccu

SEQ ID NO: 300258 - RNA, 22 nt, Human
cucuuaaauaacaucauugcuu

SEQ ID NO: 300259 - RNA, 22 nt, Human
uucaaauacauucuuugccacu

SEQ ID NO: 300260 - RNA, 21 nt, Human
uuuuauugaugaauggccacu

SEQ ID NO: 300261 - RNA, 22 nt, Human
gcaguggcaugaugugggcuca

SEQ ID NO: 300262 - RNA, 22 nt, Human
agcagggccuggcacuccuggg

SEQ ID NO: 300263 - RNA, 22 nt, Human
uggaauguaaaccucagguggg

SEQ ID NO: 300264 - RNA, 22 nt, Human
acaauacaggcuucuggacuua

SEQ ID NO: 300265 - RNA, 22 nt, Human
uguguccuuucuaaugcccaga

SEQ ID NO: 300266 - RNA, 22 nt, Human
auugugcaaauauuaucuguag

SEQ ID NO: 300267 - RNA, 22 nt, Human
uguuucaggaccuaucuuuuag

SEQ ID NO: 300268 - RNA, 22 nt, Human
guguccucuuauugcucuuggc

SEQ ID NO: 300269 - RNA, 22 nt, Human
uacuucaaccuucucuauuaga

SEQ ID NO: 300270 - RNA, 22 nt, Human
augcuuuauuauuuugcaggga

SEQ ID NO: 300271 - RNA, 22 nt, Human
uccagcauuuuucaauagaauu

SEQ ID NO: 300272 - RNA, 19 nt, Human
gcugggugaggucguugga

SEQ ID NO: 300273 - RNA, 22 nt, Human
cagggcaguuuuacuucucucu

SEQ ID NO: 300274 - RNA, 22 nt, Human
gaagucuucauucucucugaga

SEQ ID NO: 300275 - RNA, 22 nt, Human
cuccuccuaaaugauucuuccu

SEQ ID NO: 300276 - RNA, 22 nt, Human
cuacauaaucuggauuugucug

SEQ ID NO: 300277 - RNA, 22 nt, Human
acucugcuguuuacucucuaua

SEQ ID NO: 300278 - RNA, 15 nt, Human
uccaggcauucauuc

SEQ ID NO: 300279 - RNA, 22 nt, Human
uguguccuacugaggagcuccu

SEQ ID NO: 300280 - RNA, 17 nt, Human
uauacacagacagacug

SEQ ID NO: 300281 - RNA, 22 nt, Human
aagagcuggauggaaucuggga

SEQ ID NO: 300282 - RNA, 22 nt, Human
ugucaacacaccuaucucaauu

SEQ ID NO: 300283 - RNA, 22 nt, Human
aaagaguucuaugaucuuucca

SEQ ID NO: 300284 - RNA, 22 nt, Human
uuauuuuaccuuccucugagcu

SEQ ID NO: 300285 - RNA, 21 nt, Human
gccugcaguuuugaagcccuu

SEQ ID NO: 300286 - RNA, 22 nt, Human
cuaugaaaggauuuggaguugu

SEQ ID NO: 300287 - RNA, 22 nt, Human
gguguccuacagggccgcaggc

SEQ ID NO: 300288 - RNA, 22 nt, Human
auucuucacaccuguuccuguu

SEQ ID NO: 300289 - RNA, 22 nt, Human
ucucuuaauuuuggaauagugu

SEQ ID NO: 300290 - RNA, 19 nt, Human
cucuuaaauugucucuugc

SEQ ID NO: 300291 - RNA, 22 nt, Human
agagggcaugcuugguggccug

SEQ ID NO: 300292 - RNA, 22 nt, Human
cugaaugaaaucaaggacugag

SEQ ID NO: 300293 - RNA, 22 nt, Human
ggggugugaguagagcugggga

SEQ ID NO: 300294 - RNA, 22 nt, Human
cccugcagcuuuugcauaguca

SEQ ID NO: 300295 - RNA, 22 nt, Human
acagaggguguggaggaagacg

SEQ ID NO: 300296 - RNA, 22 nt, Human
uuauucuuuucuccagaauccc

SEQ ID NO: 300297 - RNA, 22 nt, Human
gggaggaaggcuugggugagua

SEQ ID NO: 300298 - RNA, 22 nt, Human
aaauacaaaaauuagccaggca

SEQ ID NO: 300299 - RNA, 22 nt, Human
uaugacaagguggaguaugagu

SEQ ID NO: 300300 - RNA, 22 nt, Human
uuucuucucacccaggacagag

SEQ ID NO: 300301 - RNA, 22 nt, Human
gaguccuuuguuccuugccaca

SEQ ID NO: 300302 - RNA, 22 nt, Human
uacagguaaaauuaucagaaac

SEQ ID NO: 300303 - RNA, 22 nt, Human
ucagguguuagaagaaauuuca

SEQ ID NO: 300304 - RNA, 22 nt, Human
augagguuuugauuggcacagg

SEQ ID NO: 300305 - RNA, 22 nt, Human
caggcagcugcgacaagagagc

SEQ ID NO: 300306 - RNA, 22 nt, Human
uaacuuuaguguaugagguaag

SEQ ID NO: 300307 - RNA, 21 nt, Human
gguguccugagggauagguag

SEQ ID NO: 300308 - RNA, 22 nt, Human
cugcagggagaggggacagccu

SEQ ID NO: 300309 - RNA, 22 nt, Human
ccagcuuuucuuaucauuauaa

SEQ ID NO: 300310 - RNA, 22 nt, Human
uggguagaguggagggauaaga

SEQ ID NO: 300311 - RNA, 19 nt, Human
uugaaauuguuugauaugg

SEQ ID NO: 300312 - RNA, 22 nt, Human
cacuggaauauggcguugaacc

SEQ ID NO: 300313 - RNA, 22 nt, Human
aaaauaacuucuacuauuugca

SEQ ID NO: 300314 - RNA, 22 nt, Human
aggcucaguauagcuggcaagu

SEQ ID NO: 300315 - RNA, 22 nt, Human
gucuucuuuucagucugcuugu

SEQ ID NO: 300316 - RNA, 22 nt, Human
ugagggaguuggguguauagga

SEQ ID NO: 300317 - RNA, 22 nt, Human
cagggcucgcucuugcccuucg

SEQ ID NO: 300318 - RNA, 22 nt, Human
auuauucuuaugucaucauggc

SEQ ID NO: 300319 - RNA, 17 nt, Human
gaauuucuuggucaaaa

SEQ ID NO: 300320 - RNA, 22 nt, Human
ugguggagccuaggcuaagucu

SEQ ID NO: 300321 - RNA, 22 nt, Human
uuucaguuguccuguuaauagc

SEQ ID NO: 300322 - RNA, 22 nt, Human
gcauguguuauuucucuguggg

SEQ ID NO: 300323 - RNA, 22 nt, Human
guuuaagaggguuucauuccca

SEQ ID NO: 300324 - RNA, 22 nt, Human
aguguccuuguuauuacugcuc

SEQ ID NO: 300325 - RNA, 22 nt, Human
uugcugggucagaagccaggag

SEQ ID NO: 300326 - RNA, 22 nt, Human
gaggggaugcagagaggcuuau

SEQ ID NO: 300327 - RNA, 23 nt, Human
uuuuauugauauguagcuguugu

SEQ ID NO: 300328 - RNA, 22 nt, Human
uguaauauuguagugacaguac

SEQ ID NO: 300329 - RNA, 22 nt, Human
ggcaggaggugaguggcgggug

SEQ ID NO: 300330 - RNA, 22 nt, Human
aagugguuugauucaguuuaug

SEQ ID NO: 300331 - RNA, 22 nt, Human
uuugacuccuguguuucuggaa

SEQ ID NO: 300332 - RNA, 22 nt, Human
uggcagaaagaaccaugugcaa

SEQ ID NO: 300333 - RNA, 18 nt, Human
gaggauggaaggagaugc

SEQ ID NO: 300334 - RNA, 22 nt, Human
aguugacauccagagacauucu

SEQ ID NO: 300335 - RNA, 22 nt, Human
auuagauacacagauuuccacu

SEQ ID NO: 300336 - RNA, 22 nt, Human
ccauuguaguaucuguuuuagu

SEQ ID NO: 300337 - RNA, 22 nt, Human
uaaaugucuguuaacaugaaug

SEQ ID NO: 300338 - RNA, 22 nt, Human
guuuucugauuagcaaaucuga

SEQ ID NO: 300339 - RNA, 22 nt, Human
aguauacauauauuagccuucg

SEQ ID NO: 300340 - RNA, 22 nt, Human
acagguggcacugcuguuacuc

SEQ ID NO: 300341 - RNA, 22 nt, Human
uccaggagaggccugaccaggu

SEQ ID NO: 300342 - RNA, 22 nt, Human
gggaccugccauugcucacagg

SEQ ID NO: 300343 - RNA, 22 nt, Human
auccuucuaagagggacguaug

SEQ ID NO: 300344 - RNA, 20 nt, Human
gauguguccucagcaguggu

SEQ ID NO: 300345 - RNA, 22 nt, Human
ccagguggaaggucugugcucu

SEQ ID NO: 300346 - RNA, 21 nt, Human
guuuucaugauagagucugua

SEQ ID NO: 300347 - RNA, 22 nt, Human
ggauuucuuccuuccucagaag

SEQ ID NO: 300348 - RNA, 19 nt, Human
caggaaugagguaauggcu

SEQ ID NO: 300349 - RNA, 22 nt, Human
agaaagcacucugucuuuuacc

SEQ ID NO: 300350 - RNA, 22 nt, Human
ugcuggagaucauuaauguuca

SEQ ID NO: 300351 - RNA, 22 nt, Human
guuauuaguaagacucgcacau

SEQ ID NO: 300352 - RNA, 22 nt, Human
gaugugucuccauacaccaccc

SEQ ID NO: 300353 - RNA, 22 nt, Human
cagggcuccaugcagggacucc

SEQ ID NO: 300354 - RNA, 21 nt, Human
uuuaaagaauaggaagggagg

SEQ ID NO: 300355 - RNA, 22 nt, Human
agcaugaaaacaugaaacagca

SEQ ID NO: 300356 - RNA, 22 nt, Human
uuucauugucaauaaacuguau

SEQ ID NO: 300357 - RNA, 22 nt, Human
guuagguagaaguuuacuuuga

SEQ ID NO: 300358 - RNA, 22 nt, Human
auauuagguuggugcaaaagua

SEQ ID NO: 300359 - RNA, 22 nt, Human
uauugcugaggauugaggcuug

SEQ ID NO: 300360 - RNA, 22 nt, Human
uucauguaguguaaugucuuca

SEQ ID NO: 300361 - RNA, 22 nt, Human
acacuuuacagaauguuuugau

SEQ ID NO: 300362 - RNA, 22 nt, Human
cuauuagguaugcagccuauuu

SEQ ID NO: 300363 - RNA, 22 nt, Human
agacagacuguguuugaauccu

SEQ ID NO: 300364 - RNA, 22 nt, Human
acaugacaccucuggcugggug

SEQ ID NO: 300365 - RNA, 22 nt, Human
ugcagggagcucuggggugcag

SEQ ID NO: 300366 - RNA, 22 nt, Human
gccaggcaaauuaaggaaugca

SEQ ID NO: 300367 - RNA, 22 nt, Human
ugggcaggagagaagcuaaaga

SEQ ID NO: 300368 - RNA, 22 nt, Human
guuuuuaucuaauagcaguuau

SEQ ID NO: 300369 - RNA, 23 nt, Human
ucuguacaauugagaagagaaca

SEQ ID NO: 300370 - RNA, 22 nt, Human
ucagggcaagucucagaagguu

SEQ ID NO: 300371 - RNA, 22 nt, Human
cuguguccauuuaucauuguca

SEQ ID NO: 300372 - RNA, 22 nt, Human
uggccucaaucuguccuccagc

SEQ ID NO: 300373 - RNA, 22 nt, Human
uugcuaauaaaguuuuuaugug

SEQ ID NO: 300374 - RNA, 21 nt, Human
caugugucauuggagagcaau

SEQ ID NO: 300375 - RNA, 22 nt, Human
cauuuguaguuaaaaaugucuc

SEQ ID NO: 300376 - RNA, 22 nt, Human
uaguuuacucaucuauaaaaug

SEQ ID NO: 300377 - RNA, 22 nt, Human
ucuuaaaccacaaaauucagag

SEQ ID NO: 300378 - RNA, 22 nt, Human
uugcuugacuuuguguaccugu

SEQ ID NO: 300379 - RNA, 22 nt, Human
uauuucagcaagaagaaugugg

SEQ ID NO: 300380 - RNA, 22 nt, Human
ccaggugugucaccauugccca

SEQ ID NO: 300381 - RNA, 22 nt, Human
uuugugcagauguauauuugug

SEQ ID NO: 300382 - RNA, 20 nt, Human
cugcagggugagugggcgau

SEQ ID NO: 300383 - RNA, 22 nt, Human
cuuaauuucaaacugcuaguga

SEQ ID NO: 300384 - RNA, 22 nt, Human
accaggcagcacuuuccuugca

SEQ ID NO: 300385 - RNA, 22 nt, Human
ggucuggaauaagguccaggaa

SEQ ID NO: 300386 - RNA, 22 nt, Human
cacagguguguccuggucuugu

SEQ ID NO: 300387 - RNA, 22 nt, Human
aggcagggcugggauuagacuc

SEQ ID NO: 300388 - RNA, 22 nt, Human
uccuggguccugggaagcccug

SEQ ID NO: 300389 - RNA, 20 nt, Human
gcagggcaagggauaugaaa

SEQ ID NO: 300390 - RNA, 22 nt, Human
aguggggccgcgguccugcccu

SEQ ID NO: 300391 - RNA, 22 nt, Human
ccuucuccccucugcagggugu

SEQ ID NO: 300392 - RNA, 22 nt, Human
ugcugccagggcucugcccaca

SEQ ID NO: 300393 - RNA, 22 nt, Human
ugaccuuucuuugagauuccug

SEQ ID NO: 300394 - RNA, 21 nt, Human
uauuuauuaauuuguaaggcu

SEQ ID NO: 300395 - RNA, 22 nt, Human
uuugacuccuuugugaaaagag

SEQ ID NO: 300396 - RNA, 22 nt, Human
agagggugaaugagauagaaaa

SEQ ID NO: 300397 - RNA, 18 nt, Human
ucagcuuuugaaaaccaa

SEQ ID NO: 300398 - RNA, 22 nt, Human
cuuugcaauagaggcacacaug

SEQ ID NO: 300399 - RNA, 21 nt, Human
aguguccuuuuacugugaaua

SEQ ID NO: 300400 - RNA, 22 nt, Human
uugcuuuauuccuagcccuugu

SEQ ID NO: 300401 - RNA, 22 nt, Human
cauauuugguauaacuuaagca

SEQ ID NO: 300402 - RNA, 22 nt, Human
gccaggcgggucucaaacuccu

SEQ ID NO: 300403 - RNA, 22 nt, Human
uuuaugagcaaugcugagggga

SEQ ID NO: 300404 - RNA, 22 nt, Human
aguugcugauucugucugugau

SEQ ID NO: 300405 - RNA, 22 nt, Human
ggugcaggagcggggugcucgg

SEQ ID NO: 300406 - RNA, 21 nt, Human
uggaggaauaaagcacagaag

SEQ ID NO: 300407 - RNA, 22 nt, Human
ucagaagccaccuuuuguuggg

SEQ ID NO: 300408 - RNA, 22 nt, Human
agcugaaucucaggcauccuuu

SEQ ID NO: 300409 - RNA, 22 nt, Human
gcaugcagggagggucuggcug

SEQ ID NO: 300410 - RNA, 22 nt, Human
aagcuuuaaggaauuuuaugga

SEQ ID NO: 300411 - RNA, 22 nt, Human
aaggugguuguaggcuggucug

SEQ ID NO: 300412 - RNA, 22 nt, Human
ugacauguauguauuuguuuau

SEQ ID NO: 300413 - RNA, 22 nt, Human
uagcuuuaggaugguucucuug

SEQ ID NO: 300414 - RNA, 22 nt, Human
uauuccagguuucuuguuguau

SEQ ID NO: 300415 - RNA, 22 nt, Human
agacagguguuuuacaacuucg

SEQ ID NO: 300416 - RNA, 17 nt, Human
uaggugguugcuggucu

SEQ ID NO: 300417 - RNA, 22 nt, Human
ugaucuccugaccuuguaaucc

SEQ ID NO: 300418 - RNA, 20 nt, Human
gggugugugcagggccuggu

SEQ ID NO: 300419 - RNA, 22 nt, Human
gggugugucuuuugcuccugga

SEQ ID NO: 300420 - RNA, 21 nt, Human
uucuucaggccaaugcucauu

SEQ ID NO: 300421 - RNA, 22 nt, Human
aaagcugcaagcuccugaggaa

SEQ ID NO: 300422 - RNA, 22 nt, Human
ugcauguguuugccacagugag

SEQ ID NO: 300423 - RNA, 23 nt, Human
cagaccuuucuguaucaguuauc

SEQ ID NO: 300424 - RNA, 22 nt, Human
acauguaaaagauaaauuaaca

SEQ ID NO: 300425 - RNA, 22 nt, Human
aggaggugcuguuuguccugga

SEQ ID NO: 300426 - RNA, 22 nt, Human
gaauuuaaggaccaagcauuuu

SEQ ID NO: 300427 - RNA, 22 nt, Human
ggcaaaguuuucaucucauaac

SEQ ID NO: 300428 - RNA, 22 nt, Human
ccagcuuuagguugccugccag

SEQ ID NO: 300429 - RNA, 22 nt, Human
gugcaggguagcgacggcagga

SEQ ID NO: 300430 - RNA, 20 nt, Human
ucagacagucgcaguucugg

SEQ ID NO: 300431 - RNA, 22 nt, Human
cccaggcagccugcagggaagg

SEQ ID NO: 300432 - RNA, 22 nt, Human
cagggacccuacuagcucacac

SEQ ID NO: 300433 - RNA, 22 nt, Human
ugugaaaagggcuuuguacaaa

SEQ ID NO: 300434 - RNA, 22 nt, Human
gcaguggcuaagcucgcaugca

SEQ ID NO: 300435 - RNA, 22 nt, Human
ucuguaguagguuguaguucuu

SEQ ID NO: 300436 - RNA, 20 nt, Human
ucaggcaguggggaaaggca

SEQ ID NO: 300437 - RNA, 22 nt, Human
gaugugucauuuggucaucugc

SEQ ID NO: 300438 - RNA, 22 nt, Human
aagacaggaaaagcuccaggcc

SEQ ID NO: 300439 - RNA, 22 nt, Human
gauugcugggucccacucccag

SEQ ID NO: 300440 - RNA, 22 nt, Human
aggcaggugagucaaaacagac

SEQ ID NO: 300441 - RNA, 22 nt, Human
ggaugggaacuugguagggcau

SEQ ID NO: 300442 - RNA, 22 nt, Human
uuccuaauggcaaaacauguuu

SEQ ID NO: 300443 - RNA, 22 nt, Human
auuuucaucauggguuuaacau

SEQ ID NO: 300444 - RNA, 22 nt, Human
ugcuuagacgucaaguacagcc

SEQ ID NO: 300445 - RNA, 22 nt, Human
gaugcgggcccgcuccacugcc

SEQ ID NO: 300446 - RNA, 22 nt, Human
ccuucuucuguguggcccaaga

SEQ ID NO: 300447 - RNA, 17 nt, Human
ggcaggugcggggccgc

SEQ ID NO: 300448 - RNA, 22 nt, Human
caugugguucaaguacuccaca

SEQ ID NO: 300449 - RNA, 22 nt, Human
ugggacucacucuuuuggccag

SEQ ID NO: 300450 - RNA, 22 nt, Human
gagcugcagcggcugacgcaac

SEQ ID NO: 300451 - RNA, 22 nt, Human
aaauuugauaagccauuguuac

SEQ ID NO: 300452 - RNA, 22 nt, Human
uguuuccuucugucucuuugga

SEQ ID NO: 300453 - RNA, 22 nt, Human
ggcaggugcuugucgaaggccu

SEQ ID NO: 300454 - RNA, 22 nt, Human
cuuuauguccaccagacugcaa

SEQ ID NO: 300455 - RNA, 22 nt, Human
ugacagguuguguagguggcca

SEQ ID NO: 300456 - RNA, 22 nt, Human
ggggugggcgugcagggacacc

SEQ ID NO: 300457 - RNA, 22 nt, Human
aaauauaguaaaugcauaguuc

SEQ ID NO: 300458 - RNA, 22 nt, Human
auuuucaucgcuagguuggccu

SEQ ID NO: 300459 - RNA, 22 nt, Human
aguccaguguguucuggcagca

SEQ ID NO: 300460 - RNA, 22 nt, Human
uagguguccucguccaaagauu

SEQ ID NO: 300461 - RNA, 22 nt, Human
uguguccuccagggagauguaa

SEQ ID NO: 300462 - RNA, 23 nt, Human
uucuggguugcugugcuuggaau

SEQ ID NO: 300463 - RNA, 22 nt, Human
ucaggaaaguguucucagagga

SEQ ID NO: 300464 - RNA, 20 nt, Human
cugcaaaaugacauuaggaa

SEQ ID NO: 300465 - RNA, 19 nt, Human
cacacccaugcuugccaag

SEQ ID NO: 300466 - RNA, 22 nt, Human
auaguuugugaaacacagcagu

SEQ ID NO: 300467 - RNA, 22 nt, Human
aaggcuuucagcuaacuugauu

SEQ ID NO: 300468 - RNA, 22 nt, Human
cacccaggacaggccagaugug

SEQ ID NO: 300469 - RNA, 22 nt, Human
agcaggugccagguguacccgc

SEQ ID NO: 300470 - RNA, 22 nt, Human
cccagcuugcaaauggguugcu

SEQ ID NO: 300471 - RNA, 22 nt, Human
auugcugaaaugaaaggauaug

SEQ ID NO: 300472 - RNA, 22 nt, Human
aaggcauagucuuuaaguucug

SEQ ID NO: 300473 - RNA, 22 nt, Human
ugcuggagaugaaagggcccug

SEQ ID NO: 300474 - RNA, 22 nt, Human
augaaacacacacgcgcauacu

SEQ ID NO: 300475 - RNA, 17 nt, Human
aauugcuuguacuccca

SEQ ID NO: 300476 - RNA, 22 nt, Human
uacagauauuguacaguuauag

SEQ ID NO: 300477 - RNA, 22 nt, Human
aucuguaaagauaaucauaugu

SEQ ID NO: 300478 - RNA, 22 nt, Human
agaagaggggugucccuguggc

SEQ ID NO: 300479 - RNA, 22 nt, Human
uaaugucagcauaguuuauuuu

SEQ ID NO: 300480 - RNA, 22 nt, Human
gacccagcuaaccaggugggga

SEQ ID NO: 300481 - RNA, 22 nt, Human
gcuggccucaucacugacuucu

SEQ ID NO: 300482 - RNA, 22 nt, Human
ugagggagucaugauuaaggaa

SEQ ID NO: 300483 - RNA, 22 nt, Human
agaagaaaugaggccguucugc

SEQ ID NO: 300484 - RNA, 22 nt, Human
uaugccuggaaccuuucucuuu

SEQ ID NO: 300485 - RNA, 22 nt, Human
auuuaagauugcguauucaugu

SEQ ID NO: 300486 - RNA, 22 nt, Human
agaaggaagccaggagggugca

SEQ ID NO: 300487 - RNA, 22 nt, Human
guuuuacacaccuaugaaagac

SEQ ID NO: 300488 - RNA, 22 nt, Human
agauggucuuuugaguaaugaa

SEQ ID NO: 300489 - RNA, 22 nt, Human
uaauuuuaacugugcuguuugg

SEQ ID NO: 300490 - RNA, 22 nt, Human
aagggcucugggcuacgcacug

SEQ ID NO: 300491 - RNA, 22 nt, Human
ccaugugucgggccugcagugg

SEQ ID NO: 300492 - RNA, 22 nt, Human
agacaggcuuugcuguauauca

SEQ ID NO: 300493 - RNA, 18 nt, Human
cuucucccaucuuggcca

SEQ ID NO: 300494 - RNA, 22 nt, Human
gguuucaacuucaaccucucca

SEQ ID NO: 300495 - RNA, 22 nt, Human
aaagagggacaggcgcagacac

SEQ ID NO: 300496 - RNA, 22 nt, Human
uccucuccauauuuucugauuu

SEQ ID NO: 300497 - RNA, 22 nt, Human
auuuauugaagcuuauuacguu

SEQ ID NO: 300498 - RNA, 22 nt, Human
uuuaagacuuagauuuauuggg

SEQ ID NO: 300499 - RNA, 22 nt, Human
auuuccaugaauucccacucau

SEQ ID NO: 300500 - RNA, 18 nt, Human
cauaauuuucuuucuuua

SEQ ID NO: 300501 - RNA, 22 nt, Human
guucuucagauuccauuucagu

SEQ ID NO: 300502 - RNA, 22 nt, Human
uuauuaggaaaaggucagaugu

SEQ ID NO: 300503 - RNA, 22 nt, Human
caaauucucuuacuguuugaca

SEQ ID NO: 300504 - RNA, 22 nt, Human
guuucuuucuauugacugaaca

SEQ ID NO: 300505 - RNA, 22 nt, Human
ucagggcaucucuuaaguggug

SEQ ID NO: 300506 - RNA, 22 nt, Human
ggauuaagaccugucaguacac

SEQ ID NO: 300507 - RNA, 22 nt, Human
caaauguaaauucuuuugaagc

SEQ ID NO: 300508 - RNA, 22 nt, Human
cuguguccaauggccuuagcag

SEQ ID NO: 300509 - RNA, 22 nt, Human
ugacauguaguuagaaaauagg

SEQ ID NO: 300510 - RNA, 22 nt, Human
aacccagccguguagcugccgc

SEQ ID NO: 300511 - RNA, 22 nt, Human
uguuccuguuuaaugugcucau

SEQ ID NO: 300512 - RNA, 22 nt, Human
cuguccugggggugguccuugc

SEQ ID NO: 300513 - RNA, 22 nt, Human
ugaugagggagauuugagccca

SEQ ID NO: 300514 - RNA, 22 nt, Human
uggcaaauauuuuguuuuguaa

SEQ ID NO: 300515 - RNA, 22 nt, Human
aauuguaacuacauugagaaca

SEQ ID NO: 300516 - RNA, 22 nt, Human
uguccuuuucuuuagugcagcu

SEQ ID NO: 300517 - RNA, 22 nt, Human
uuuauugacuucagugagucuu

SEQ ID NO: 300518 - RNA, 21 nt, Human
gaaaagcaagggaguagaaca

SEQ ID NO: 300519 - RNA, 21 nt, Human
cuguccaguaauuccuggcac

SEQ ID NO: 300520 - RNA, 22 nt, Human
auuucuuuucaagagggugcuu

SEQ ID NO: 300521 - RNA, 22 nt, Human
cagcuuuaccaauauuuggaaa

SEQ ID NO: 300522 - RNA, 20 nt, Human
agggugugggccuuagccau

SEQ ID NO: 300523 - RNA, 20 nt, Human
uuugcgaggccaaggcgggc

SEQ ID NO: 300524 - RNA, 22 nt, Human
ucugugcaggaagucauuauga

SEQ ID NO: 300525 - RNA, 22 nt, Human
uacaguaagaugaaauagcaau

SEQ ID NO: 300526 - RNA, 22 nt, Human
uuguuuuaucuuucuacagacu

SEQ ID NO: 300527 - RNA, 22 nt, Human
guuagggaagcgcuguguucuu

SEQ ID NO: 300528 - RNA, 19 nt, Human
ccugggucugcagcauuca

SEQ ID NO: 300529 - RNA, 22 nt, Human
agacagacuugaaaauguucuu

SEQ ID NO: 300530 - RNA, 22 nt, Human
aguguccugugucccagacugu

SEQ ID NO: 300531 - RNA, 19 nt, Human
guucaaacacugauucagc

SEQ ID NO: 300532 - RNA, 20 nt, Human
gagggcaggcacccauuuca

SEQ ID NO: 300533 - RNA, 22 nt, Human
ucaaauaccagcuuuuccagaa

SEQ ID NO: 300534 - RNA, 22 nt, Human
ugcuuuaucugugagaaccuga

SEQ ID NO: 300535 - RNA, 22 nt, Human
ucucuucuauuugagacuauuu

SEQ ID NO: 300536 - RNA, 22 nt, Human
uuuguuuacaaaaauaagcagu

SEQ ID NO: 300537 - RNA, 22 nt, Human
gaugugucccuuucaacucaga

SEQ ID NO: 300538 - RNA, 22 nt, Human
ccuacaggaaauuguaucaaaa

SEQ ID NO: 300539 - RNA, 22 nt, Human
gggugggguucaggaaucuuca

SEQ ID NO: 300540 - RNA, 22 nt, Human
agguggagaagagaugggcagu

SEQ ID NO: 300541 - RNA, 22 nt, Human
gcagguguggagaguggucggg

SEQ ID NO: 300542 - RNA, 22 nt, Human
ucuuccucccuacagagcucag

SEQ ID NO: 300543 - RNA, 22 nt, Human
gcacaauuauuuaugcaguaug

SEQ ID NO: 300544 - RNA, 22 nt, Human
gagaaacaacacuugaugccuu

SEQ ID NO: 300545 - RNA, 22 nt, Human
caaagucagccagcuaguaggu

SEQ ID NO: 300546 - RNA, 17 nt, Human
cccguucucuucgcugg

SEQ ID NO: 300547 - RNA, 22 nt, Human
agggacccauagagagaccagu

SEQ ID NO: 300548 - RNA, 22 nt, Human
gauugcuguucccagggggcug

SEQ ID NO: 300549 - RNA, 22 nt, Human
ugggcagggagcuggaaccaca

SEQ ID NO: 300550 - RNA, 22 nt, Human
uuuucaguaaugucuacauaau

SEQ ID NO: 300551 - RNA, 22 nt, Human
guuuaagaaaauucauguuguu

SEQ ID NO: 300552 - RNA, 23 nt, Human
acagggcauugcuggccucgagg

SEQ ID NO: 300553 - RNA, 22 nt, Human
aaucuuucccuauuaaaugugg

SEQ ID NO: 300554 - RNA, 22 nt, Human
aauuugcaugaugagaacaaua

SEQ ID NO: 300555 - RNA, 22 nt, Human
ccaaguacagauuccuccacug

SEQ ID NO: 300556 - RNA, 22 nt, Human
uagaagcaguaauagaaauagg

SEQ ID NO: 300557 - RNA, 22 nt, Human
gccagggaaacugcagaccagc

SEQ ID NO: 300558 - RNA, 22 nt, Human
uuccaugacugaagcaggggcg

SEQ ID NO: 300559 - RNA, 22 nt, Human
gggacauggcuaggauuccaau

SEQ ID NO: 300560 - RNA, 22 nt, Human
acagauuuuaaaugacacuccc

SEQ ID NO: 300561 - RNA, 21 nt, Human
gggcaggucucugaugucaac

SEQ ID NO: 300562 - RNA, 22 nt, Human
ugcaggugguccauuugggaac

SEQ ID NO: 300563 - RNA, 20 nt, Human
cccagagccauagccagaca

SEQ ID NO: 300564 - RNA, 22 nt, Human
ccuuuucuggccaccaagcgcu

SEQ ID NO: 300565 - RNA, 22 nt, Human
aagggcagaauagagaagaugg

SEQ ID NO: 300566 - RNA, 22 nt, Human
uuucacaugguacugccuguuu

SEQ ID NO: 300567 - RNA, 22 nt, Human
auccagaacaccuguaucacca

SEQ ID NO: 300568 - RNA, 19 nt, Human
ugggaaaguaacauacaaa

SEQ ID NO: 300569 - RNA, 21 nt, Human
agacagacugccugacccacg

SEQ ID NO: 300570 - RNA, 22 nt, Human
uugaaugaggaagagcacuggc

SEQ ID NO: 300571 - RNA, 22 nt, Human
cuguuauuucugccaggugagu

SEQ ID NO: 300572 - RNA, 22 nt, Human
uggacaugaccucgagcgagau

SEQ ID NO: 300573 - RNA, 20 nt, Human
uccugcaguuccuaggaggg

SEQ ID NO: 300574 - RNA, 23 nt, Human
aaauuauugcucuucaauugccu

SEQ ID NO: 300575 - RNA, 22 nt, Human
uaauuucuaauucauuuucagu

SEQ ID NO: 300576 - RNA, 22 nt, Human
gaaggcaucacagaggcuguga

SEQ ID NO: 300577 - RNA, 22 nt, Human
ugcagggaagcaaggguggcuc

SEQ ID NO: 300578 - RNA, 22 nt, Human
agagcaucuaacacauaagccu

SEQ ID NO: 300579 - RNA, 22 nt, Human
ugguggggccagacuucagcuc

SEQ ID NO: 300580 - RNA, 22 nt, Human
cuguccuggccgcccuugugag

SEQ ID NO: 300581 - RNA, 22 nt, Human
uaguauagauugaagcagauca

SEQ ID NO: 300582 - RNA, 22 nt, Human
cuagggacagaaagaggguaga

SEQ ID NO: 300583 - RNA, 22 nt, Human
gucuggaaggaggagauggagc

SEQ ID NO: 300584 - RNA, 22 nt, Human
agcucccagaaggcccugcgcc

SEQ ID NO: 300585 - RNA, 22 nt, Human
aaaagcaguuuauagucaguug

SEQ ID NO: 300586 - RNA, 22 nt, Human
aggaggaagggaagacaaguaa

SEQ ID NO: 300587 - RNA, 22 nt, Human
cugugucccacacgagguguau

SEQ ID NO: 300588 - RNA, 22 nt, Human
auccucaguguuucugacaucu

SEQ ID NO: 300589 - RNA, 22 nt, Human
cuguugcugagguucaaggguc

SEQ ID NO: 300590 - RNA, 22 nt, Human
aauaucagcacuuuugugguau

SEQ ID NO: 300591 - RNA, 22 nt, Human
cuaaaauuaccuaccaguuuag

SEQ ID NO: 300592 - RNA, 22 nt, Human
uucacauuucauaccacagcuu

SEQ ID NO: 300593 - RNA, 22 nt, Human
gcauguguucuugaaaggccac

SEQ ID NO: 300594 - RNA, 22 nt, Human
gccaggcaauguguuagaagcg

SEQ ID NO: 300595 - RNA, 22 nt, Human
ucugucuucaucagcaugugau

SEQ ID NO: 300596 - RNA, 22 nt, Human
cagaagaguagcugaacaaguu

SEQ ID NO: 300597 - RNA, 22 nt, Human
uuuaaagaaauuccucaucuuu

SEQ ID NO: 300598 - RNA, 22 nt, Human
accuaaauucuggcugauuagg

SEQ ID NO: 300599 - RNA, 22 nt, Human
uguguccuucugggagucccag

SEQ ID NO: 300600 - RNA, 22 nt, Human
cacaauguauauguauaucaaa

SEQ ID NO: 300601 - RNA, 22 nt, Human
aaaauccucuaauucuagaaua

SEQ ID NO: 300602 - RNA, 22 nt, Human
agaagcuaggcuagacaaguga

SEQ ID NO: 300603 - RNA, 22 nt, Human
ucagagagcuggugggcagagg

SEQ ID NO: 300604 - RNA, 18 nt, Human
ucagguguuuucuguaua

SEQ ID NO: 300605 - RNA, 22 nt, Human
uaccaugucuucaauaagucua

SEQ ID NO: 300606 - RNA, 21 nt, Human
uuugcugaagauuuuaggcug

SEQ ID NO: 300607 - RNA, 19 nt, Human
gcuaggguugguggcgugc

SEQ ID NO: 300608 - RNA, 21 nt, Human
ugcauaaagaaauacaaauac

SEQ ID NO: 300609 - RNA, 22 nt, Human
agaugggugccuucuuucuuua

SEQ ID NO: 300610 - RNA, 22 nt, Human
uguguccucagggaagcagaga

SEQ ID NO: 300611 - RNA, 22 nt, Human
ggaccuggcaauuugcaucucu

SEQ ID NO: 300612 - RNA, 22 nt, Human
ggucuggauuuuaucuacugua

SEQ ID NO: 300613 - RNA, 22 nt, Human
agagguugggucugaggugaga

SEQ ID NO: 300614 - RNA, 23 nt, Human
uuggcaaagccuaugaaguccuc

SEQ ID NO: 300615 - RNA, 22 nt, Human
acuugguuguuuuaacuuggca

SEQ ID NO: 300616 - RNA, 22 nt, Human
uguucuucuagauugccuuuua

SEQ ID NO: 300617 - RNA, 22 nt, Human
cucccaguguuguuuucugaug

SEQ ID NO: 300618 - RNA, 22 nt, Human
gcugggucagaaucucccugug

SEQ ID NO: 300619 - RNA, 22 nt, Human
uuaugggagcaauuggggaggu

SEQ ID NO: 300620 - RNA, 22 nt, Human
gggcagguggccucuuguacua

SEQ ID NO: 300621 - RNA, 22 nt, Human
agcugcaaagaucugucaguca

SEQ ID NO: 300622 - RNA, 22 nt, Human
ugaucauuaucaaacuggucau

SEQ ID NO: 300623 - RNA, 22 nt, Human
uccucagaagaaccccuagauu

SEQ ID NO: 300624 - RNA, 22 nt, Human
gaacaucaugaagaaaacauau

SEQ ID NO: 300625 - RNA, 22 nt, Human
cucuggccgcagcucagcucug

SEQ ID NO: 300626 - RNA, 21 nt, Human
ucugaugguagaugagaugug

SEQ ID NO: 300627 - RNA, 22 nt, Human
ggcaguggguuccccaaggcac

SEQ ID NO: 300628 - RNA, 22 nt, Human
uauuccuauuucuaaacauaug

SEQ ID NO: 300629 - RNA, 22 nt, Human
uugcuuuauguguaugacuuga

SEQ ID NO: 300630 - RNA, 22 nt, Human
uauuugaaaguguacaaaaacu

SEQ ID NO: 300631 - RNA, 22 nt, Human
ucuucccuaaucaccaucuuca

SEQ ID NO: 300632 - RNA, 22 nt, Human
uggacaugucuucuccaagaaa

SEQ ID NO: 300633 - RNA, 22 nt, Human
guuucaaauagguuucagcaaa

SEQ ID NO: 300634 - RNA, 22 nt, Human
gcuuucuugguucugcaggggc

SEQ ID NO: 300635 - RNA, 22 nt, Human
gucauuccuauccauuugauac

SEQ ID NO: 300636 - RNA, 22 nt, Human
uuccuucucuguggggaaggca

SEQ ID NO: 300637 - RNA, 22 nt, Human
cacaccagagguuaccugcaaa

SEQ ID NO: 300638 - RNA, 22 nt, Human
gcagguggaucaccacgucagg

SEQ ID NO: 300639 - RNA, 22 nt, Human
aagugguuuuaagagguuccuu

SEQ ID NO: 300640 - RNA, 22 nt, Human
guaguucugcagugucaccuga

SEQ ID NO: 300641 - RNA, 22 nt, Human
ucuguucaucucaugggagaau

SEQ ID NO: 300642 - RNA, 22 nt, Human
caggcauaaucucaucuuguuu

SEQ ID NO: 300643 - RNA, 22 nt, Human
uuauuuaaaauguagguuggga

SEQ ID NO: 300644 - RNA, 20 nt, Human
ugcugagguugacaugccca

SEQ ID NO: 300645 - RNA, 17 nt, Human
aaguccagaguugagca

SEQ ID NO: 300646 - RNA, 22 nt, Human
caggauggagggagggcuguua

SEQ ID NO: 300647 - RNA, 22 nt, Human
cggcagggcuccaugcauuucu

SEQ ID NO: 300648 - RNA, 22 nt, Human
ucugaaagaagggcagucuuuu

SEQ ID NO: 300649 - RNA, 22 nt, Human
agcuuuauuaacucuccaggug

SEQ ID NO: 300650 - RNA, 22 nt, Human
uuuacaguuaagaaauguuacc

SEQ ID NO: 300651 - RNA, 22 nt, Human
gaguccuuuugugccacaggga

SEQ ID NO: 300652 - RNA, 22 nt, Human
ucagggcauggcugcacuuggc

SEQ ID NO: 300653 - RNA, 22 nt, Human
uauaaaugcacuuuugaaauau

SEQ ID NO: 300654 - RNA, 22 nt, Human
guauuagguuggugcaaaagua

SEQ ID NO: 300655 - RNA, 22 nt, Human
auauaguuggguuucauucuac

SEQ ID NO: 300656 - RNA, 20 nt, Human
cuguggaauuuuaccaugcg

SEQ ID NO: 300657 - RNA, 22 nt, Human
aguaaaauuaauggaucagaag

SEQ ID NO: 300658 - RNA, 22 nt, Human
uguccucacaggaaugaacuuu

SEQ ID NO: 300659 - RNA, 22 nt, Human
aaggugucaaacuagaagaugu

SEQ ID NO: 300660 - RNA, 22 nt, Human
agcucccaggcagucaugagga

SEQ ID NO: 300661 - RNA, 22 nt, Human
ggaugucuggucuauuucaagu

SEQ ID NO: 300662 - RNA, 22 nt, Human
gaugugucuggcuccccugcaa

SEQ ID NO: 300663 - RNA, 22 nt, Human
uagggcagaguccaggaugggc

SEQ ID NO: 300664 - RNA, 22 nt, Human
agcagguggugggccagauuug

SEQ ID NO: 300665 - RNA, 22 nt, Human
uccauugugauuauauacaaaa

SEQ ID NO: 300666 - RNA, 22 nt, Human
cacuuuauaaaauuggugugag

SEQ ID NO: 300667 - RNA, 22 nt, Human
ucagugugaggucuuccacccg

SEQ ID NO: 300668 - RNA, 22 nt, Human
uuuauugaguaucuacuaugug

SEQ ID NO: 300669 - RNA, 22 nt, Human
ccagagacgucggucagggcgc

SEQ ID NO: 300670 - RNA, 22 nt, Human
auacuuucugaccaauuaauug

SEQ ID NO: 300671 - RNA, 22 nt, Human
uuacacaacaucuguauuauua

SEQ ID NO: 300672 - RNA, 22 nt, Human
ccaaguacucucaccaaagcuu

SEQ ID NO: 300673 - RNA, 22 nt, Human
aucuuucaaucaggaaaaaucu

SEQ ID NO: 300674 - RNA, 22 nt, Human
agacaaauggaguaugagcaac

SEQ ID NO: 300675 - RNA, 22 nt, Human
aaagaaaccuaucagccacaug

SEQ ID NO: 300676 - RNA, 22 nt, Human
cagacaggaauucuggcguggu

SEQ ID NO: 300677 - RNA, 22 nt, Human
uucauucugcaguucucagcuc

SEQ ID NO: 300678 - RNA, 22 nt, Human
aggcagggugaugauaaugauu

SEQ ID NO: 300679 - RNA, 22 nt, Human
cuuaaauuuucaucuacaagaa

SEQ ID NO: 300680 - RNA, 22 nt, Human
ugguaugaccguggugcaagca

SEQ ID NO: 300681 - RNA, 22 nt, Human
uuuaguagaaugauacagggca

SEQ ID NO: 300682 - RNA, 23 nt, Human
agaggcaggaguggcuugcccgg

SEQ ID NO: 300683 - RNA, 22 nt, Human
uauuauugcaaguauauaaagu

SEQ ID NO: 300684 - RNA, 22 nt, Human
gcagggcaguaagagcuagagu

SEQ ID NO: 300685 - RNA, 22 nt, Human
uucauucuuauuugugaucugg

SEQ ID NO: 300686 - RNA, 22 nt, Human
gcacuuuaaauguucacggaaa

SEQ ID NO: 300687 - RNA, 22 nt, Human
uuucucagucacaugaaccaau

SEQ ID NO: 300688 - RNA, 22 nt, Human
uauaauuuaucaugucacaguu

SEQ ID NO: 300689 - RNA, 19 nt, Human
aagcauggugccucaccuc

SEQ ID NO: 300690 - RNA, 22 nt, Human
uuaagacaguguauuuguuuuc

SEQ ID NO: 300691 - RNA, 22 nt, Human
accaggcaaaaccacaggagca

SEQ ID NO: 300692 - RNA, 17 nt, Human
cagcuuuaugcuacugu

SEQ ID NO: 300693 - RNA, 18 nt, Human
acauuucuccuucugacc

SEQ ID NO: 300694 - RNA, 22 nt, Human
gaugagguuuuugaaaugugga

SEQ ID NO: 300695 - RNA, 22 nt, Human
cagagcugcuucccaguuugug

SEQ ID NO: 300696 - RNA, 22 nt, Human
uagggcagauucgguggaguuu

SEQ ID NO: 300697 - RNA, 22 nt, Human
augaaugggucauuauuugauc

SEQ ID NO: 300698 - RNA, 22 nt, Human
ugaggccagugacauauauuaa

SEQ ID NO: 300699 - RNA, 22 nt, Human
uuucuucacaggguauugggug

SEQ ID NO: 300700 - RNA, 20 nt, Human
agauuauuccuaagauuucu

SEQ ID NO: 300701 - RNA, 22 nt, Human
caguauuuguucccuaucaaug

SEQ ID NO: 300702 - RNA, 22 nt, Human
cauguguccuagcuauucuccu

SEQ ID NO: 300703 - RNA, 19 nt, Human
ccucaucuuggugugugca

SEQ ID NO: 300704 - RNA, 22 nt, Human
uuuuagcacuaagugauaugcu

SEQ ID NO: 300705 - RNA, 22 nt, Human
uuucacauucagauauagacuu

SEQ ID NO: 300706 - RNA, 22 nt, Human
acagguggagugguuagcaggc

SEQ ID NO: 300707 - RNA, 22 nt, Human
ucauuauuuuggacuggagugu

SEQ ID NO: 300708 - RNA, 22 nt, Human
cucuccaggacuuuggcccaau

SEQ ID NO: 300709 - RNA, 22 nt, Human
ugcuggcuuuuugguccuugcu

SEQ ID NO: 300710 - RNA, 22 nt, Human
uuuuucaucugauugauaacuc

SEQ ID NO: 300711 - RNA, 22 nt, Human
gacccaggcccaaggcugccag

SEQ ID NO: 300712 - RNA, 22 nt, Human
auugcugggaauauuuagccca

SEQ ID NO: 300713 - RNA, 22 nt, Human
uccaugcagaguccaggccuca

SEQ ID NO: 300714 - RNA, 22 nt, Human
ccugggucuccuccugcuggcu

SEQ ID NO: 300715 - RNA, 22 nt, Human
agccauccucccaccucagccu

SEQ ID NO: 300716 - RNA, 22 nt, Human
gcuguucagggcacucaugggc

SEQ ID NO: 300717 - RNA, 18 nt, Human
uucuggguguuauguuua

SEQ ID NO: 300718 - RNA, 22 nt, Human
caugaaggaauaauuguuuaga

SEQ ID NO: 300719 - RNA, 22 nt, Human
aagagcaucgguggagccccca

SEQ ID NO: 300720 - RNA, 22 nt, Human
uuauuuaaaagugguaagauuc

SEQ ID NO: 300721 - RNA, 22 nt, Human
cacaauuuccuugcuucacuuu

SEQ ID NO: 300722 - RNA, 22 nt, Human
uuguugcucuuguugccacaug

SEQ ID NO: 300723 - RNA, 22 nt, Human
auuuauugagacuuaacaaccc

SEQ ID NO: 300724 - RNA, 22 nt, Human
uccaugaggaccaaauucguag

SEQ ID NO: 300725 - RNA, 22 nt, Human
agcugcaggauuauggaaugga

SEQ ID NO: 300726 - RNA, 22 nt, Human
cuuucacacacauacauuugga

SEQ ID NO: 300727 - RNA, 20 nt, Human
uuuauugagcacguacugug

SEQ ID NO: 300728 - RNA, 22 nt, Human
uucugggacaucuggacaguuu

SEQ ID NO: 300729 - RNA, 22 nt, Human
aaaguggucaccuucucauuuc

SEQ ID NO: 300730 - RNA, 22 nt, Human
aggcaggucuguaucuagucuc

SEQ ID NO: 300731 - RNA, 22 nt, Human
ucauguguugcacugaggaccu

SEQ ID NO: 300732 - RNA, 22 nt, Human
gacacuuuaggauuuaaaaguc

SEQ ID NO: 300733 - RNA, 22 nt, Human
gcugggcuugguuucccugcuu

SEQ ID NO: 300734 - RNA, 22 nt, Human
cagagcagugaggaguugugua

SEQ ID NO: 300735 - RNA, 22 nt, Human
cuugcaugcauuugaagaucau

SEQ ID NO: 300736 - RNA, 22 nt, Human
gggcaggugauuuuggcuccau

SEQ ID NO: 300737 - RNA, 22 nt, Human
auuuccauuuucagccauuacu

SEQ ID NO: 300738 - RNA, 22 nt, Human
gggucugggcaggcgcuuccuc

SEQ ID NO: 300739 - RNA, 23 nt, Human
acagugugguggacaaggagcag

SEQ ID NO: 300740 - RNA, 22 nt, Human
ugacauguauaucuuacgcuau

SEQ ID NO: 300741 - RNA, 22 nt, Human
gccugcagggccugggccuacc

SEQ ID NO: 300742 - RNA, 22 nt, Human
acaacaggguaaggcaggccau

SEQ ID NO: 300743 - RNA, 22 nt, Human
aaaaaugcugugguagcugugu

SEQ ID NO: 300744 - RNA, 22 nt, Human
uacuuuaucagcgucaaaggua

SEQ ID NO: 300745 - RNA, 22 nt, Human
ucucaagcuaguguuuauagua

SEQ ID NO: 300746 - RNA, 22 nt, Human
ucagagaguccuggucauuugc

SEQ ID NO: 300747 - RNA, 22 nt, Human
agggacccugaugacugaggag

SEQ ID NO: 300748 - RNA, 22 nt, Human
auucuucaucacuaccuuguga

SEQ ID NO: 300749 - RNA, 22 nt, Human
ggcaggcacauuugggggccgu

SEQ ID NO: 300750 - RNA, 22 nt, Human
auuaaauuagcaaacugugaaa

SEQ ID NO: 300751 - RNA, 22 nt, Human
uacacacagaggccaugggauu

SEQ ID NO: 300752 - RNA, 22 nt, Human
uucuaccuacccucugcauaca

SEQ ID NO: 300753 - RNA, 21 nt, Human
uguguaauauguauaagaaua

SEQ ID NO: 300754 - RNA, 18 nt, Human
agacccucuaagggcagu

SEQ ID NO: 300755 - RNA, 22 nt, Human
uuugaacuucuccauucugaug

SEQ ID NO: 300756 - RNA, 22 nt, Human
gagcaguaggagaacccugagc

SEQ ID NO: 300757 - RNA, 22 nt, Human
ucuuccuucgcccuugcuguuu

SEQ ID NO: 300758 - RNA, 22 nt, Human
cuggauccaacagaguuggguu

SEQ ID NO: 300759 - RNA, 18 nt, Human
uuuuacucauagcaggcc

SEQ ID NO: 300760 - RNA, 22 nt, Human
ugcuuuauucagucucugccau

SEQ ID NO: 300761 - RNA, 22 nt, Human
uucuggguuuacaucugacuuc

SEQ ID NO: 300762 - RNA, 22 nt, Human
ugccuacauuccuugcuuaugg

SEQ ID NO: 300763 - RNA, 22 nt, Human
uuuguguuuguacaaugcacua

SEQ ID NO: 300764 - RNA, 22 nt, Human
agcaguccaacugagguggcau

SEQ ID NO: 300765 - RNA, 20 nt, Human
auguccagugacuggaccau

SEQ ID NO: 300766 - RNA, 22 nt, Human
uacaaaugaguuguaugaacca

SEQ ID NO: 300767 - RNA, 22 nt, Human
agcuucuugggcuuuacacaaa

SEQ ID NO: 300768 - RNA, 22 nt, Human
aaagcugcccuacacggaagca

SEQ ID NO: 300769 - RNA, 22 nt, Human
uguacuuaugagauccuagucg

SEQ ID NO: 300770 - RNA, 22 nt, Human
ugggcuccuugggagcaaguga

SEQ ID NO: 300771 - RNA, 22 nt, Human
ucuaggguguauaaggaagccu

SEQ ID NO: 300772 - RNA, 22 nt, Human
uuauuucauugauuucuaagac

SEQ ID NO: 300773 - RNA, 22 nt, Human
gccugcagggugaugggcugcc

SEQ ID NO: 300774 - RNA, 22 nt, Human
aaaugcuacauacacaucaggg

SEQ ID NO: 300775 - RNA, 22 nt, Human
gauuuuauauggcauacugugg

SEQ ID NO: 300776 - RNA, 22 nt, Human
ccagggcagugggagaaggugc

SEQ ID NO: 300777 - RNA, 21 nt, Human
uggacauuauggagagaguag

SEQ ID NO: 300778 - RNA, 22 nt, Human
ccagugugguagguccacaggu

SEQ ID NO: 300779 - RNA, 22 nt, Human
agcugcaacaucugcuuguccc

SEQ ID NO: 300780 - RNA, 22 nt, Human
cguggggcggguggacacuugc

SEQ ID NO: 300781 - RNA, 22 nt, Human
uggcagugggaagcuggaaguc

SEQ ID NO: 300782 - RNA, 22 nt, Human
uuggaggaugcaaugagggagu

SEQ ID NO: 300783 - RNA, 22 nt, Human
acagguguagcaggagcaucaa

SEQ ID NO: 300784 - RNA, 21 nt, Human
uuucacaaaaguaugugacaa

SEQ ID NO: 300785 - RNA, 23 nt, Human
uguuuuucauucacaugggcugu

SEQ ID NO: 300786 - RNA, 20 nt, Human
ugcagguguguccaagcacu

SEQ ID NO: 300787 - RNA, 22 nt, Human
ugggcagguuguuauuugacau

SEQ ID NO: 300788 - RNA, 22 nt, Human
ugcuuuauagacaaggaaguag

SEQ ID NO: 300789 - RNA, 22 nt, Human
uugcuuuagaaucugcuucugg

SEQ ID NO: 300790 - RNA, 22 nt, Human
cacaaugugguuugucaucuuu

SEQ ID NO: 300791 - RNA, 22 nt, Human
uaggugguugucugcuuuccua

SEQ ID NO: 300792 - RNA, 22 nt, Human
cuuuccuccacucccuaggcuu

SEQ ID NO: 300793 - RNA, 22 nt, Human
cagaagaggacuggguagcuca

SEQ ID NO: 300794 - RNA, 22 nt, Human
ugacaugugucuccuuccgucu

SEQ ID NO: 300795 - RNA, 22 nt, Human
uuucaaauggagucgugaaaug

SEQ ID NO: 300796 - RNA, 22 nt, Human
cauuuucagcacccaucugaaa

SEQ ID NO: 300797 - RNA, 22 nt, Human
caaaucuauauguugauauucu

SEQ ID NO: 300798 - RNA, 22 nt, Human
ugggaagauggagugacaggca

SEQ ID NO: 300799 - RNA, 22 nt, Human
gccaggguucgaauccguaugg

SEQ ID NO: 300800 - RNA, 22 nt, Human
uccaguaugacugauguccuuc

SEQ ID NO: 300801 - RNA, 22 nt, Human
gacagcaggaugugaggggaug

SEQ ID NO: 300802 - RNA, 22 nt, Human
aguugacucucaagauccuguu

SEQ ID NO: 300803 - RNA, 17 nt, Human
gcauccaguaacaugcc

SEQ ID NO: 300804 - RNA, 22 nt, Human
uaauacagaaguguauuaaaau

SEQ ID NO: 300805 - RNA, 22 nt, Human
aaguccuuggagaauagaaagg

SEQ ID NO: 300806 - RNA, 22 nt, Human
cauguuaauaugcauugaguac

SEQ ID NO: 300807 - RNA, 22 nt, Human
cuuaaauuggaugaguuaaguu

SEQ ID NO: 300808 - RNA, 22 nt, Human
cugcugcccuagacccaguccu

SEQ ID NO: 300809 - RNA, 20 nt, Human
cccugcagccaugggagugg

SEQ ID NO: 300810 - RNA, 22 nt, Human
ugcuggcuggagugccucugga

SEQ ID NO: 300811 - RNA, 22 nt, Human
uugauuccuugaaauauccuug

SEQ ID NO: 300812 - RNA, 22 nt, Human
aauguucagaggacaauauaaa

SEQ ID NO: 300813 - RNA, 23 nt, Human
aaugauuucaugaugauagcagc

SEQ ID NO: 300814 - RNA, 22 nt, Human
acaggugguagaguggaaagag

SEQ ID NO: 300815 - RNA, 22 nt, Human
ugggcuccagcaccugugcucu

SEQ ID NO: 300816 - RNA, 22 nt, Human
cuggcuguaacauuuugccaua

SEQ ID NO: 300817 - RNA, 22 nt, Human
acagguggacacagcagcaguc

SEQ ID NO: 300818 - RNA, 22 nt, Human
cuguuauuuagaacauggaauc

SEQ ID NO: 300819 - RNA, 22 nt, Human
uuccaggaagauucaacaaaag

SEQ ID NO: 300820 - RNA, 22 nt, Human
cagagccucagaauccugugga

SEQ ID NO: 300821 - RNA, 22 nt, Human
agguggggaaaccagcgauccc

SEQ ID NO: 300822 - RNA, 22 nt, Human
ggucccaggaaucuguguucua

SEQ ID NO: 300823 - RNA, 23 nt, Human
auguauuuaaauuucagugauga

SEQ ID NO: 300824 - RNA, 22 nt, Human
uuguuauaaagacuaaauaugu

SEQ ID NO: 300825 - RNA, 22 nt, Human
gauuuuucaguauaaaauauau

SEQ ID NO: 300826 - RNA, 22 nt, Human
gucugcccagaagacauccccu

SEQ ID NO: 300827 - RNA, 22 nt, Human
uaucaucuuguugucaugcagc

SEQ ID NO: 300828 - RNA, 22 nt, Human
acacauaagaaacuacaaagag

SEQ ID NO: 300829 - RNA, 22 nt, Human
ugauucuauggaaggcauaagg

SEQ ID NO: 300830 - RNA, 22 nt, Human
agugauuugggugucagaaagu

SEQ ID NO: 300831 - RNA, 22 nt, Human
gugagauuugaguggggauaca

SEQ ID NO: 300832 - RNA, 21 nt, Human
aaggcuggagaugcaggucug

SEQ ID NO: 300833 - RNA, 22 nt, Human
uacauguuuacuccaagucagg

SEQ ID NO: 300834 - RNA, 22 nt, Human
agagggaucacccuguuucugg

SEQ ID NO: 300835 - RNA, 22 nt, Human
acagcaggcaugaaugacacug

SEQ ID NO: 300836 - RNA, 22 nt, Human
guaaaauucuagcaucugaaag

SEQ ID NO: 300837 - RNA, 22 nt, Human
gaggugucugaguggggaccug

SEQ ID NO: 300838 - RNA, 22 nt, Human
gguguccugggcaggcagcuga

SEQ ID NO: 300839 - RNA, 19 nt, Human
gacaggacgaagggaaguu

SEQ ID NO: 300840 - RNA, 22 nt, Human
aagcagacaucccauacuuuug

SEQ ID NO: 300841 - RNA, 22 nt, Human
ggcaaagagacaugcaucgggg

SEQ ID NO: 300842 - RNA, 21 nt, Human
uccuucucuaugauugucuga

SEQ ID NO: 300843 - RNA, 22 nt, Human
agaugguuuugucuuuaugauu

SEQ ID NO: 300844 - RNA, 21 nt, Human
gggcuuuuuauuuagcacugu

SEQ ID NO: 300845 - RNA, 22 nt, Human
ggguaccaagcugcuugggggc

SEQ ID NO: 300846 - RNA, 22 nt, Human
uggcucugagucugcccuuggc

SEQ ID NO: 300847 - RNA, 22 nt, Human
uucuggauaugggagagggagc

SEQ ID NO: 300848 - RNA, 22 nt, Human
aaaaaccuuucauugcaaaugu

SEQ ID NO: 300849 - RNA, 22 nt, Human
cuguaaaacacuguaguaucug

SEQ ID NO: 300850 - RNA, 22 nt, Human
cuuuauguucaguacaaugcuu

SEQ ID NO: 300851 - RNA, 22 nt, Human
uuucaaagaccauuaacuauca

SEQ ID NO: 300852 - RNA, 22 nt, Human
uaauuuuaugacaguguauuuu

SEQ ID NO: 300853 - RNA, 22 nt, Human
ucaggugucuugugggauuuua

SEQ ID NO: 300854 - RNA, 22 nt, Human
uauuuuaaagugaagggucuug

SEQ ID NO: 300855 - RNA, 22 nt, Human
caacuuuagcaauguuaguaua

SEQ ID NO: 300856 - RNA, 22 nt, Human
ggagcugaaggggugggcucag

SEQ ID NO: 300857 - RNA, 22 nt, Human
uauuucagggagaauaaauuug

SEQ ID NO: 300858 - RNA, 22 nt, Human
cagggcagaacauauagauagu

SEQ ID NO: 300859 - RNA, 22 nt, Human
cuggauguccagguagaaguuu

SEQ ID NO: 300860 - RNA, 22 nt, Human
cugacagaugcugcuggcagua

SEQ ID NO: 300861 - RNA, 22 nt, Human
uuguauuggcaaagaacuugag

SEQ ID NO: 300862 - RNA, 22 nt, Human
gcagacagaagcuaaguagaca

SEQ ID NO: 300863 - RNA, 22 nt, Human
auuuccuguaggggcuugcgaa

SEQ ID NO: 300864 - RNA, 22 nt, Human
ucuuuuaagccucuggcauagg

SEQ ID NO: 300865 - RNA, 22 nt, Human
ucuguugacuccuagcagccau

SEQ ID NO: 300866 - RNA, 22 nt, Human
auuauuaggacuacugggguug

SEQ ID NO: 300867 - RNA, 22 nt, Human
auucuucauacagacaaguccu

SEQ ID NO: 300868 - RNA, 22 nt, Human
gcagcuuucugggacagaaagg

SEQ ID NO: 300869 - RNA, 22 nt, Human
agucucuuuaaucacagugucu

SEQ ID NO: 300870 - RNA, 19 nt, Human
guagggacagugguucuga

SEQ ID NO: 300871 - RNA, 22 nt, Human
uagaacacuugaccacugcucc

SEQ ID NO: 300872 - RNA, 22 nt, Human
gcuggaggcuggagugcagugg

SEQ ID NO: 300873 - RNA, 22 nt, Human
cagggcucgcucgcucgcucgc

SEQ ID NO: 300874 - RNA, 22 nt, Human
guacccaggcacgccuugcuga

SEQ ID NO: 300875 - RNA, 22 nt, Human
gcagacaggcccaguggaggga

SEQ ID NO: 300876 - RNA, 22 nt, Human
cagggcucgcugccagcuucag

SEQ ID NO: 300877 - RNA, 22 nt, Human
uacaguauggaaaauguauagu

SEQ ID NO: 300878 - RNA, 22 nt, Human
aaaauccuuagccgagugaggu

SEQ ID NO: 300879 - RNA, 22 nt, Human
cacaggcuuccaguccccagcu

SEQ ID NO: 300880 - RNA, 22 nt, Human
ggcucugccucugacccucugg

SEQ ID NO: 300881 - RNA, 22 nt, Human
uguccugggccggcgacugguc

SEQ ID NO: 300882 - RNA, 22 nt, Human
uaauugcuuuauccuguuagaa

SEQ ID NO: 300883 - RNA, 22 nt, Human
agcagggccaacaguaaacacc

SEQ ID NO: 300884 - RNA, 22 nt, Human
auuucucaguguacauuauguu

SEQ ID NO: 300885 - RNA, 22 nt, Human
ggcuuuauuauguggccaugug

SEQ ID NO: 300886 - RNA, 22 nt, Human
uuuuauguaauccuuacugucg

SEQ ID NO: 300887 - RNA, 22 nt, Human
guagggacuuguuuuacuagua

SEQ ID NO: 300888 - RNA, 22 nt, Human
gaagcuucguggcucuucaaau

SEQ ID NO: 300889 - RNA, 22 nt, Human
agggaccugucaaugacaguua

SEQ ID NO: 300890 - RNA, 22 nt, Human
auuacaguaacagcuacaaugc

SEQ ID NO: 300891 - RNA, 22 nt, Human
gcccggcagucacacacccagg

SEQ ID NO: 300892 - RNA, 22 nt, Human
ucucuucacaugcuugcuccaa

SEQ ID NO: 300893 - RNA, 22 nt, Human
uccugcagacauuuacaccuuu

SEQ ID NO: 300894 - RNA, 22 nt, Human
aggguggccaccaaguauguca

SEQ ID NO: 300895 - RNA, 22 nt, Human
aggaccugacauuguguuuucu

SEQ ID NO: 300896 - RNA, 22 nt, Human
cugaggaagacagcagcugugu

SEQ ID NO: 300897 - RNA, 22 nt, Human
ccagagaguaaacauuuuccgg

SEQ ID NO: 300898 - RNA, 20 nt, Human
uggaccugucucuuuaggga

SEQ ID NO: 300899 - RNA, 22 nt, Human
agccagagaguguuggagaugu

SEQ ID NO: 300900 - RNA, 22 nt, Human
gcaggcaggcuuccuugaacug

SEQ ID NO: 300901 - RNA, 22 nt, Human
caggcauggugagaacucagcc

SEQ ID NO: 300902 - RNA, 22 nt, Human
agacagguagcaggacagauau

SEQ ID NO: 300903 - RNA, 22 nt, Human
ucaaaggcgguccaggaauaaa

SEQ ID NO: 300904 - RNA, 22 nt, Human
cuguccugguacuuugagguuc

SEQ ID NO: 300905 - RNA, 22 nt, Human
ccauguguugauucucugcaga

SEQ ID NO: 300906 - RNA, 22 nt, Human
cagggcucaggaaaucagacgu

SEQ ID NO: 300907 - RNA, 22 nt, Human
gccaggcagcagcgaggauggu

SEQ ID NO: 300908 - RNA, 23 nt, Human
ugacagaccuucccagacaguca

SEQ ID NO: 300909 - RNA, 22 nt, Human
agagccaggugcugcuguuuga

SEQ ID NO: 300910 - RNA, 22 nt, Human
cagagagcaugggaggcccgag

SEQ ID NO: 300911 - RNA, 22 nt, Human
aaacaucaccauuuuaccuaau

SEQ ID NO: 300912 - RNA, 22 nt, Human
acuuagauuuccuuacugggug

SEQ ID NO: 300913 - RNA, 20 nt, Human
ugaucaugugaaagucaugu

SEQ ID NO: 300914 - RNA, 22 nt, Human
cagguggucaggcaaggacacg

SEQ ID NO: 300915 - RNA, 22 nt, Human
ucuucauuuuacaggcagaccu

SEQ ID NO: 300916 - RNA, 22 nt, Human
uccagcauauauagagaaugag

SEQ ID NO: 300917 - RNA, 17 nt, Human
uaaguuauagcagaaga

SEQ ID NO: 300918 - RNA, 22 nt, Human
guuagggagucagguggcucuu

SEQ ID NO: 300919 - RNA, 22 nt, Human
uuuugagauggagucuugcucu

SEQ ID NO: 300920 - RNA, 22 nt, Human
ugauuuccuaggucuggagaag

SEQ ID NO: 300921 - RNA, 22 nt, Human
acagguguaaaacccaggaugg

SEQ ID NO: 300922 - RNA, 22 nt, Human
auguucuacagauggaaagggg

SEQ ID NO: 300923 - RNA, 22 nt, Human
uauuucuaagagauaucuguac

SEQ ID NO: 300924 - RNA, 22 nt, Human
guccaggucuggacccugagcc

SEQ ID NO: 300925 - RNA, 22 nt, Human
agaggccggccgagcccauggg

SEQ ID NO: 300926 - RNA, 22 nt, Human
uauuugagcgaagcaguguuuu

SEQ ID NO: 300927 - RNA, 18 nt, Human
cagagcagagguggagcg

SEQ ID NO: 300928 - RNA, 22 nt, Human
aaaguggucugcaucccuucug

SEQ ID NO: 300929 - RNA, 22 nt, Human
cugugucccccucagccaggug

SEQ ID NO: 300930 - RNA, 17 nt, Human
uccaggcagcaacugag

SEQ ID NO: 300931 - RNA, 22 nt, Human
auuuguagugaagugaaaauaa

SEQ ID NO: 300932 - RNA, 22 nt, Human
gugcaaaaguaauugugguuuu

SEQ ID NO: 300933 - RNA, 22 nt, Human
uuugacucagcaaauucacagg

SEQ ID NO: 300934 - RNA, 22 nt, Human
cuucugugcuucacaguugcca

SEQ ID NO: 300935 - RNA, 22 nt, Human
ucauuacaguguuuauaugucu

SEQ ID NO: 300936 - RNA, 22 nt, Human
auuguaacauguucagaucacu

SEQ ID NO: 300937 - RNA, 22 nt, Human
aggaccuggaucacagagaucu

SEQ ID NO: 300938 - RNA, 22 nt, Human
ggcuuggaccagucacaguggu

SEQ ID NO: 300939 - RNA, 22 nt, Human
ugacccauggucugaucauagg

SEQ ID NO: 300940 - RNA, 20 nt, Human
uauuuguauuugggaaaguu

SEQ ID NO: 300941 - RNA, 22 nt, Human
guuauugacauguauuaagcac

SEQ ID NO: 300942 - RNA, 22 nt, Human
uuucuagggcucuugucuucug

SEQ ID NO: 300943 - RNA, 22 nt, Human
cuuagggagaaugccucugcag

SEQ ID NO: 300944 - RNA, 22 nt, Human
aagggcucccaacucaucuuuu

SEQ ID NO: 300945 - RNA, 22 nt, Human
uucuuaacucaaauauauaucc

SEQ ID NO: 300946 - RNA, 22 nt, Human
agguuuauguuuggugcaggag

SEQ ID NO: 300947 - RNA, 22 nt, Human
ucuggaggcaggcugccaggau

SEQ ID NO: 300948 - RNA, 22 nt, Human
gggaccugcgccacucacuguc

SEQ ID NO: 300949 - RNA, 22 nt, Human
agcagguguuggcugggccauc

SEQ ID NO: 300950 - RNA, 22 nt, Human
accucaaggaaaaucuagacag

SEQ ID NO: 300951 - RNA, 22 nt, Human
uaagaaacccaggaauuucuua

SEQ ID NO: 300952 - RNA, 22 nt, Human
uuugagguuagcuagcagauca

SEQ ID NO: 300953 - RNA, 22 nt, Human
cccugcagccggccagcucauu

SEQ ID NO: 300954 - RNA, 22 nt, Human
uucaacuauuaugaauaaaauu

SEQ ID NO: 300955 - RNA, 22 nt, Human
aaacacaccuuuggaacuguga

SEQ ID NO: 300956 - RNA, 22 nt, Human
uugcuuuaucucuuaugccuca

SEQ ID NO: 300957 - RNA, 22 nt, Human
uuuucagugggcaaugauguga

SEQ ID NO: 300958 - RNA, 22 nt, Human
cauguguccacccuugaacaca

SEQ ID NO: 300959 - RNA, 22 nt, Human
cucuucuugucucugguuagaa

SEQ ID NO: 300960 - RNA, 22 nt, Human
ucucucagggggaaggcugaag

SEQ ID NO: 300961 - RNA, 22 nt, Human
uaugaaaagguggccaauguag

SEQ ID NO: 300962 - RNA, 22 nt, Human
uagggcaggugaagaaaagcua

SEQ ID NO: 300963 - RNA, 22 nt, Human
uuucaaagucaagaaggauacu

SEQ ID NO: 300964 - RNA, 22 nt, Human
auacaaagacaaaucucaaucu

SEQ ID NO: 300965 - RNA, 21 nt, Human
aggcucccagaaaugggcauc

SEQ ID NO: 300966 - RNA, 22 nt, Human
acagagagaauuggguuuacag

SEQ ID NO: 300967 - RNA, 22 nt, Human
uucuggguaguaugguuaguuu

SEQ ID NO: 300968 - RNA, 22 nt, Human
aggcaggugggagugauuccuu

SEQ ID NO: 300969 - RNA, 22 nt, Human
auucuuaauugccaugcuguau

SEQ ID NO: 300970 - RNA, 22 nt, Human
cucuggaagaauacacuuagaa

SEQ ID NO: 300971 - RNA, 22 nt, Human
uuccagaagccuccauauuacu

SEQ ID NO: 300972 - RNA, 22 nt, Human
guauauaugugugaacauguau

SEQ ID NO: 300973 - RNA, 22 nt, Human
guuauugacucucuuguggcuu

SEQ ID NO: 300974 - RNA, 22 nt, Human
uagcuuuagugaaaaauaucag

SEQ ID NO: 300975 - RNA, 22 nt, Human
aguuuacaugacguguauuuca

SEQ ID NO: 300976 - RNA, 22 nt, Human
ugccuggauucgguuguuguca

SEQ ID NO: 300977 - RNA, 22 nt, Human
ucuggaugggaugaggcaacaa

SEQ ID NO: 300978 - RNA, 22 nt, Human
gguggggcccuggcacugguau

SEQ ID NO: 300979 - RNA, 22 nt, Human
agagggaaaaacucaugucauu

SEQ ID NO: 300980 - RNA, 22 nt, Human
gcagggcaaugaucccgagagg

SEQ ID NO: 300981 - RNA, 22 nt, Human
ucacaaaugaggaaaucgagca

SEQ ID NO: 300982 - RNA, 22 nt, Human
cuuauaaaguccaucugaacaa

SEQ ID NO: 300983 - RNA, 22 nt, Human
aaagcagagguugcagugagcu

SEQ ID NO: 300984 - RNA, 22 nt, Human
ggucuggccuccgggcaggugg

SEQ ID NO: 300985 - RNA, 22 nt, Human
uccaggcauguugggaagauga

SEQ ID NO: 300986 - RNA, 22 nt, Human
cugcuuuagacaacugcuggga

SEQ ID NO: 300987 - RNA, 22 nt, Human
gcaggugguuaaggucccaugu

SEQ ID NO: 300988 - RNA, 22 nt, Human
uuuacagucucuauagucaaaa

SEQ ID NO: 300989 - RNA, 22 nt, Human
auucuucaccugagucagucua

SEQ ID NO: 300990 - RNA, 22 nt, Human
ugauuucuuccuugucauuaga

SEQ ID NO: 300991 - RNA, 22 nt, Human
uccaugagcuagggauucauca

SEQ ID NO: 300992 - RNA, 18 nt, Human
uguaaacacuuucauucu

SEQ ID NO: 300993 - RNA, 22 nt, Human
uugcuguaguguucugauguca

SEQ ID NO: 300994 - RNA, 22 nt, Human
guagggacuguucucaccugag

SEQ ID NO: 300995 - RNA, 22 nt, Human
uuaagucaauaucaaucucagc

SEQ ID NO: 300996 - RNA, 22 nt, Human
aaugauugcaaacauugagaac

SEQ ID NO: 300997 - RNA, 21 nt, Human
cacaugugaauuacugaacug

SEQ ID NO: 300998 - RNA, 22 nt, Human
uccucagaauggauggcagggg

SEQ ID NO: 300999 - RNA, 22 nt, Human
cuguguccuuuuaguugcugug

SEQ ID NO: 301000 - RNA, 22 nt, Human
gcaggcagccacgauucccuug

SEQ ID NO: 301001 - RNA, 22 nt, Human
aaggcuuuuaacuacuguuuua

SEQ ID NO: 301002 - RNA, 22 nt, Human
uucauauaaauggaaucagaau

SEQ ID NO: 301003 - RNA, 22 nt, Human
ucagguguggaccgaggucaga

SEQ ID NO: 301004 - RNA, 22 nt, Human
uuguacaaaggauuuggaagag

SEQ ID NO: 301005 - RNA, 22 nt, Human
uuauugcuuuggaaaacacuca

SEQ ID NO: 301006 - RNA, 22 nt, Human
auuucucaucuuugugaauggu

SEQ ID NO: 301007 - RNA, 22 nt, Human
uucagagacagcaaccaggaca

SEQ ID NO: 301008 - RNA, 22 nt, Human
uuucagaaaacuuaucaucagu

SEQ ID NO: 301009 - RNA, 22 nt, Human
gggaacuugccccagaggaauu

SEQ ID NO: 301010 - RNA, 22 nt, Human
auucucuuuguauaacaucuug

SEQ ID NO: 301011 - RNA, 22 nt, Human
auugcugggaggauguguguuc

SEQ ID NO: 301012 - RNA, 22 nt, Human
ugguccugagaauccuguccuc

SEQ ID NO: 301013 - RNA, 22 nt, Human
cugggugaguauaggaaaggga

SEQ ID NO: 301014 - RNA, 21 nt, Human
ggguguggaaauuacauccug

SEQ ID NO: 301015 - RNA, 22 nt, Human
acagguggccccgagggagugg

SEQ ID NO: 301016 - RNA, 22 nt, Human
acaaauuuauugaagggcauau

SEQ ID NO: 301017 - RNA, 22 nt, Human
cuccagugcacccagaggauuu

SEQ ID NO: 301018 - RNA, 22 nt, Human
cccagugucucuugugccuuuc

SEQ ID NO: 301019 - RNA, 22 nt, Human
ugcccacauggugccauggcca

SEQ ID NO: 301020 - RNA, 22 nt, Human
uaauuucuucaucucugcagcu

SEQ ID NO: 301021 - RNA, 22 nt, Human
ucaggaaagaguuagaugauua

SEQ ID NO: 301022 - RNA, 22 nt, Human
ucagagagguuggugauaagaa

SEQ ID NO: 301023 - RNA, 22 nt, Human
cauccaggcaccacaaccagcu

SEQ ID NO: 301024 - RNA, 22 nt, Human
acagggcagguggcuacugguc

SEQ ID NO: 301025 - RNA, 22 nt, Human
uuucuuuugcccuguggguuag

SEQ ID NO: 301026 - RNA, 22 nt, Human
aguggcagagcugugucuugaa

SEQ ID NO: 301027 - RNA, 22 nt, Human
uuuuauugguaaugauaaaagu

SEQ ID NO: 301028 - RNA, 22 nt, Human
uguaaaaccaaaucaaucuagu

SEQ ID NO: 301029 - RNA, 22 nt, Human
uguguccuaugaaagaggguua

SEQ ID NO: 301030 - RNA, 22 nt, Human
uaauuucaccguugcuagaaau

SEQ ID NO: 301031 - RNA, 22 nt, Human
guacauuuacugaugaaaagua

SEQ ID NO: 301032 - RNA, 21 nt, Human
uucaauacuauuucaauaguc

SEQ ID NO: 301033 - RNA, 22 nt, Human
cauuauugccagccauacugaa

SEQ ID NO: 301034 - RNA, 22 nt, Human
ugcuuuauugcaucaguguggg

SEQ ID NO: 301035 - RNA, 22 nt, Human
cucuggaagaugaccuggguaa

SEQ ID NO: 301036 - RNA, 22 nt, Human
guucucucugcuuccaagaugg

SEQ ID NO: 301037 - RNA, 22 nt, Human
agaaaauuagauuuuacugugu

SEQ ID NO: 301038 - RNA, 22 nt, Human
gcaaggauguacugcaauagga

SEQ ID NO: 301039 - RNA, 22 nt, Human
uucauacaguggcugcacucca

SEQ ID NO: 301040 - RNA, 22 nt, Human
auugcuuuucagacaaugaggc

SEQ ID NO: 301041 - RNA, 22 nt, Human
gggcucucgauuagacccuggg

SEQ ID NO: 301042 - RNA, 22 nt, Human
uccaugagggacacuggaugcu

SEQ ID NO: 301043 - RNA, 22 nt, Human
uaugcacauucacacaaaaaug

SEQ ID NO: 301044 - RNA, 16 nt, Human
uuauugaggccaagga

SEQ ID NO: 301045 - RNA, 22 nt, Human
aaauuucaagcaaaguagcuau

SEQ ID NO: 301046 - RNA, 22 nt, Human
cacuuagucucaccaguucagu

SEQ ID NO: 301047 - RNA, 22 nt, Human
ucagggcaaagggcagaguuug

SEQ ID NO: 301048 - RNA, 22 nt, Human
cuggaggacagaggccaugucu

SEQ ID NO: 301049 - RNA, 22 nt, Human
augggugugaaaauggucaucu

SEQ ID NO: 301050 - RNA, 22 nt, Human
aauugcuuaugccaggugagag

SEQ ID NO: 301051 - RNA, 22 nt, Human
ggacagacagugugagugaggc

SEQ ID NO: 301052 - RNA, 22 nt, Human
acugccaaugguaguuugaugg

SEQ ID NO: 301053 - RNA, 22 nt, Human
uacagacagacuucccacccuc

SEQ ID NO: 301054 - RNA, 22 nt, Human
uaagaaacauuuuuaugacagu

SEQ ID NO: 301055 - RNA, 22 nt, Human
gguguccuugcuccuucagcuu

SEQ ID NO: 301056 - RNA, 21 nt, Human
acagcaagccuucacaugagu

SEQ ID NO: 301057 - RNA, 22 nt, Human
aacaguaaaaaucauuuaguug

SEQ ID NO: 301058 - RNA, 22 nt, Human
augaaaaguucgaucuagaagg

SEQ ID NO: 301059 - RNA, 22 nt, Human
uaucuaaauggaauauuccaga

SEQ ID NO: 301060 - RNA, 23 nt, Human
ucagagaggcccccugcagagau

SEQ ID NO: 301061 - RNA, 22 nt, Human
acugaagaacgcaucagugguu

SEQ ID NO: 301062 - RNA, 22 nt, Human
gcaggcagagucaauuugaucc

SEQ ID NO: 301063 - RNA, 22 nt, Human
ugucaaaaugacuuuacuacag

SEQ ID NO: 301064 - RNA, 22 nt, Human
uguuugcuaggguugguauuua

SEQ ID NO: 301065 - RNA, 22 nt, Human
acuguucacagauuagucgaug

SEQ ID NO: 301066 - RNA, 22 nt, Human
uucagaauauuuguuuuacaug

SEQ ID NO: 301067 - RNA, 22 nt, Human
cuguaaauaugaagaauauaug

SEQ ID NO: 301068 - RNA, 22 nt, Human
uggaaugaaaaguacuucagaa

SEQ ID NO: 301069 - RNA, 22 nt, Human
agacaaaugguaauuaugucua

SEQ ID NO: 301070 - RNA, 22 nt, Human
ccagggcaaaugagaucauagc

SEQ ID NO: 301071 - RNA, 22 nt, Human
acauacauauguuuaaaugcau

SEQ ID NO: 301072 - RNA, 22 nt, Human
uccugaaauucugguugucacu

SEQ ID NO: 301073 - RNA, 22 nt, Human
gggcagguacaagaugcuucuu

SEQ ID NO: 301074 - RNA, 22 nt, Human
ccagguguaggacaccaaggga

SEQ ID NO: 301075 - RNA, 20 nt, Human
uauuugaaauggccaagugu

SEQ ID NO: 301076 - RNA, 19 nt, Human
ccuggaggugaagguucuc

SEQ ID NO: 301077 - RNA, 22 nt, Human
uccaugguuucagucuggcugg

SEQ ID NO: 301078 - RNA, 21 nt, Human
uguaaguuucaucugaauugg

SEQ ID NO: 301079 - RNA, 22 nt, Human
ugugauauuugaguauugucaa

SEQ ID NO: 301080 - RNA, 22 nt, Human
aaggcuuuaugugaccaaaaga

SEQ ID NO: 301081 - RNA, 22 nt, Human
ucauugccauggcauuugcaga

SEQ ID NO: 301082 - RNA, 22 nt, Human
agcaggugacagggcuguggug

SEQ ID NO: 301083 - RNA, 22 nt, Human
uucacuuaacaucauaucauga

SEQ ID NO: 301084 - RNA, 22 nt, Human
ugcaggugcugugucaagagag

SEQ ID NO: 301085 - RNA, 22 nt, Human
uguccugggucccugcuagaag

SEQ ID NO: 301086 - RNA, 22 nt, Human
cagcauuuucuuaauguaggug

SEQ ID NO: 301087 - RNA, 18 nt, Human
agcaggugcuguuucuuu

SEQ ID NO: 301088 - RNA, 22 nt, Human
agcugcaagauuucuuuuguau

SEQ ID NO: 301089 - RNA, 20 nt, Human
cucuggaagaguuuaaaugg

SEQ ID NO: 301090 - RNA, 22 nt, Human
uccagaccuagggcaccccagu

SEQ ID NO: 301091 - RNA, 19 nt, Human
ugccuggacaaaugugggg

SEQ ID NO: 301092 - RNA, 22 nt, Human
uauaaaacagaaagcacuaccu

SEQ ID NO: 301093 - RNA, 20 nt, Human
uuccuguauacaaagaguuc

SEQ ID NO: 301094 - RNA, 22 nt, Human
gagguggugguggaggcauagc

SEQ ID NO: 301095 - RNA, 22 nt, Human
gaugugucuauucaacaugaaa

SEQ ID NO: 301096 - RNA, 22 nt, Human
uuccucagcacaaagccaagau

SEQ ID NO: 301097 - RNA, 22 nt, Human
ggcuuuauauuguuugagcaga

SEQ ID NO: 301098 - RNA, 22 nt, Human
uuuuucugagaauaugagagga

SEQ ID NO: 301099 - RNA, 22 nt, Human
cugauagacaaucaccauggga

SEQ ID NO: 301100 - RNA, 22 nt, Human
agagcauccaucggccaggacc

SEQ ID NO: 301101 - RNA, 22 nt, Human
agggcuccaggggcugggugac

SEQ ID NO: 301102 - RNA, 22 nt, Human
ucucccucauuccugcuuccau

SEQ ID NO: 301103 - RNA, 22 nt, Human
cagcaggauuugaaaggaagag

SEQ ID NO: 301104 - RNA, 20 nt, Human
ucauuacagugcuaagaugu

SEQ ID NO: 301105 - RNA, 22 nt, Human
cugcaaaagucauugugguuuu

SEQ ID NO: 301106 - RNA, 22 nt, Human
cugaaggcuaaaauggacugaa

SEQ ID NO: 301107 - RNA, 22 nt, Human
acagcuuuuuacuaauagauug

SEQ ID NO: 301108 - RNA, 22 nt, Human
augauuucuauauaaacuuaaa

SEQ ID NO: 301109 - RNA, 22 nt, Human
guuacucuugagaggcugaggu

SEQ ID NO: 301110 - RNA, 22 nt, Human
gugugucccuuggaaccucagc

SEQ ID NO: 301111 - RNA, 22 nt, Human
gcauuuaaauuugaacuucaga

SEQ ID NO: 301112 - RNA, 23 nt, Human
aaugggugcaacuauccaugaca

SEQ ID NO: 301113 - RNA, 22 nt, Human
cccaaggccuucaagccagcuc

SEQ ID NO: 301114 - RNA, 22 nt, Human
ugcugggucccuugagagcuca

SEQ ID NO: 301115 - RNA, 22 nt, Human
ucauuuaauugguuuugcucgu

SEQ ID NO: 301116 - RNA, 18 nt, Human
ugcuuggagcauuuacca

SEQ ID NO: 301117 - RNA, 22 nt, Human
caaauucagaaaauugguagag

SEQ ID NO: 301118 - RNA, 22 nt, Human
ucugggaagcugguccuguucu

SEQ ID NO: 301119 - RNA, 22 nt, Human
ugggcuccucgucacucgcugu

SEQ ID NO: 301120 - RNA, 22 nt, Human
acuuugcagggcuugauaucca

SEQ ID NO: 301121 - RNA, 22 nt, Human
ugggcaggaugcguugauucuu

SEQ ID NO: 301122 - RNA, 22 nt, Human
cuggauguccuuccccugaagc

SEQ ID NO: 301123 - RNA, 22 nt, Human
aucaagaauugggagcuauuga

SEQ ID NO: 301124 - RNA, 22 nt, Human
cccagugucuccaacaucagau

SEQ ID NO: 301125 - RNA, 22 nt, Human
aguuuauuuuugauaagucuug

SEQ ID NO: 301126 - RNA, 22 nt, Human
cagggcagcuuccuuuguuagg

SEQ ID NO: 301127 - RNA, 21 nt, Human
uggcaggcagcuggaagcuug

SEQ ID NO: 301128 - RNA, 22 nt, Human
cauuugaaccuggauguucuua

SEQ ID NO: 301129 - RNA, 22 nt, Human
uuucuagucucgaucucuuaau

SEQ ID NO: 301130 - RNA, 20 nt, Human
caugguggaggagcagggcc

SEQ ID NO: 301131 - RNA, 21 nt, Human
uauuugcugccaucuuugagg

SEQ ID NO: 301132 - RNA, 21 nt, Human
aggaggaacccguggcugggc

SEQ ID NO: 301133 - RNA, 22 nt, Human
uuucuacagcuggugcaacuuu

SEQ ID NO: 301134 - RNA, 22 nt, Human
ugcauaaagugccauaguauua

SEQ ID NO: 301135 - RNA, 22 nt, Human
uauguuauuuucauacaacaga

SEQ ID NO: 301136 - RNA, 22 nt, Human
gucuucaacaauaacuaccacu

SEQ ID NO: 301137 - RNA, 22 nt, Human
ccagagagaaaauggagggcca

SEQ ID NO: 301138 - RNA, 22 nt, Human
cuucuucagcacaauauugaug

SEQ ID NO: 301139 - RNA, 22 nt, Human
guuuauaaggcccaauauuucu

SEQ ID NO: 301140 - RNA, 22 nt, Human
cuaauacacccuauugcuuguu

SEQ ID NO: 301141 - RNA, 22 nt, Human
uucacuuauagggauguuauug

SEQ ID NO: 301142 - RNA, 22 nt, Human
augcuauacauaugacaucaca

SEQ ID NO: 301143 - RNA, 22 nt, Human
acaugcauacacguacauaccu

SEQ ID NO: 301144 - RNA, 22 nt, Human
uugcuuuaggauuuaaguggca

SEQ ID NO: 301145 - RNA, 22 nt, Human
uccuggguuaauuaugauucac

SEQ ID NO: 301146 - RNA, 22 nt, Human
auuaauauacacuguuagcaug

SEQ ID NO: 301147 - RNA, 22 nt, Human
uucugaaagccaauucauugaa

SEQ ID NO: 301148 - RNA, 22 nt, Human
agcagggcuguguagguaauga

SEQ ID NO: 301149 - RNA, 20 nt, Human
auccaugagagucuggauuc

SEQ ID NO: 301150 - RNA, 22 nt, Human
ucaggugugggcagagaaacca

SEQ ID NO: 301151 - RNA, 22 nt, Human
cagugggacaugggcacugggc

SEQ ID NO: 301152 - RNA, 22 nt, Human
cccaggcacagauuaucccaau

SEQ ID NO: 301153 - RNA, 21 nt, Human
aauuagggugccucuuauaau

SEQ ID NO: 301154 - RNA, 22 nt, Human
uauuuaaaaagaggccagcugg

SEQ ID NO: 301155 - RNA, 22 nt, Human
agaugaagaugccacuaagacc

SEQ ID NO: 301156 - RNA, 22 nt, Human
cugcguguuugcacccugucug

SEQ ID NO: 301157 - RNA, 22 nt, Human
gggaggaaaugugcagcgaauu

SEQ ID NO: 301158 - RNA, 22 nt, Human
uuucccagagguaugaauaagu

SEQ ID NO: 301159 - RNA, 22 nt, Human
cuauugcuaucauucugguggu

SEQ ID NO: 301160 - RNA, 22 nt, Human
uguccucaaggagcuucagucu

SEQ ID NO: 301161 - RNA, 22 nt, Human
auauauuuugcggucacguggc

SEQ ID NO: 301162 - RNA, 22 nt, Human
aagacaauuugauacuaguugc

SEQ ID NO: 301163 - RNA, 19 nt, Human
ccaggccuggcgucuccgc

SEQ ID NO: 301164 - RNA, 22 nt, Human
cccaggcagcggggucuccuug

SEQ ID NO: 301165 - RNA, 22 nt, Human
auuaaagaaacccagcauguga

SEQ ID NO: 301166 - RNA, 19 nt, Human
uguacauauagagcucagu

SEQ ID NO: 301167 - RNA, 20 nt, Human
acagaugaggaaaaugaagu

SEQ ID NO: 301168 - RNA, 22 nt, Human
guuuacuguuaaccaacgaaug

SEQ ID NO: 301169 - RNA, 22 nt, Human
ucagguguuucuggagaaguaa

SEQ ID NO: 301170 - RNA, 22 nt, Human
cgcagguguguuuucaggacua

SEQ ID NO: 301171 - RNA, 22 nt, Human
ccacagagcauuagauuucaga

SEQ ID NO: 301172 - RNA, 22 nt, Human
gcaggugguggcgcgcgcccug

SEQ ID NO: 301173 - RNA, 22 nt, Human
ucuggguggcugccaaucugcc

SEQ ID NO: 301174 - RNA, 22 nt, Human
uguuuuucaaauauugcucugu

SEQ ID NO: 301175 - RNA, 22 nt, Human
ccucuuccagcuguugcuucca

SEQ ID NO: 301176 - RNA, 22 nt, Human
aauugcuugaugacuaguaauu

SEQ ID NO: 301177 - RNA, 22 nt, Human
gcaggcagucaucuuucauauu

SEQ ID NO: 301178 - RNA, 22 nt, Human
acaguacauaauccugagucug

SEQ ID NO: 301179 - RNA, 22 nt, Human
aggcaggucacaugcuuggcga

SEQ ID NO: 301180 - RNA, 22 nt, Human
uuauugagcaacucuggggcuc

SEQ ID NO: 301181 - RNA, 22 nt, Human
auacacauguguaugugcaugc

SEQ ID NO: 301182 - RNA, 22 nt, Human
gccaggcagagccccgugcagc

SEQ ID NO: 301183 - RNA, 22 nt, Human
auucuucacaaauauauagaag

SEQ ID NO: 301184 - RNA, 22 nt, Human
ucaggugguccuaagugccauc

SEQ ID NO: 301185 - RNA, 22 nt, Human
cuuaacauccugcauuuuucuu

SEQ ID NO: 301186 - RNA, 22 nt, Human
agaugguugucgcaaaugaaug

SEQ ID NO: 301187 - RNA, 22 nt, Human
aauauugagaaccagcauguuu

SEQ ID NO: 301188 - RNA, 22 nt, Human
ugcagggccuucuagaccaugg

SEQ ID NO: 301189 - RNA, 19 nt, Human
gcagacagguccagagagg

SEQ ID NO: 301190 - RNA, 22 nt, Human
uuuccucuuugugacacagcug

SEQ ID NO: 301191 - RNA, 23 nt, Human
agggcuccuuguugauuagcauu

SEQ ID NO: 301192 - RNA, 15 nt, Human
agacagacaguggga

SEQ ID NO: 301193 - RNA, 22 nt, Human
aauguuuuauagcucaagcaau

SEQ ID NO: 301194 - RNA, 22 nt, Human
guucuucacauuucauugagga

SEQ ID NO: 301195 - RNA, 23 nt, Human
gcugugcacgagccacugccugu

SEQ ID NO: 301196 - RNA, 22 nt, Human
agcuuuaugcuuccuacaagcu

SEQ ID NO: 301197 - RNA, 22 nt, Human
aaaugcuagggagaaacucucc

SEQ ID NO: 301198 - RNA, 22 nt, Human
uguauacaggauuacucauagc

SEQ ID NO: 301199 - RNA, 22 nt, Human
ccucugcccuuuuccuguauca

SEQ ID NO: 301200 - RNA, 22 nt, Human
ccagguggacuugauuugaaua

SEQ ID NO: 301201 - RNA, 20 nt, Human
uggucuggagccagugagga

SEQ ID NO: 301202 - RNA, 18 nt, Human
gcagcuuuugauucaccc

SEQ ID NO: 301203 - RNA, 22 nt, Human
aaucaagaaaaugaggauucuu

SEQ ID NO: 301204 - RNA, 22 nt, Human
aagcugcagacccccugucuca

SEQ ID NO: 301205 - RNA, 19 nt, Human
cacuuuauuucuguuuugu

SEQ ID NO: 301206 - RNA, 22 nt, Human
uacauguuauuucacuauuggu

SEQ ID NO: 301207 - RNA, 22 nt, Human
aaugugaaaccgcacagaauaa

SEQ ID NO: 301208 - RNA, 22 nt, Human
cuccuucuccucgggaggccag

SEQ ID NO: 301209 - RNA, 21 nt, Human
gacaggugauucagagcaggg

SEQ ID NO: 301210 - RNA, 22 nt, Human
gccugcagggcccuuguggguc

SEQ ID NO: 301211 - RNA, 22 nt, Human
ucagggcaucaucaugaauaua

SEQ ID NO: 301212 - RNA, 22 nt, Human
gcaguggccacauggaggagga

SEQ ID NO: 301213 - RNA, 22 nt, Human
agcagggcuuugcagacuuggg

SEQ ID NO: 301214 - RNA, 22 nt, Human
aaagcagggaugaggcuagagg

SEQ ID NO: 301215 - RNA, 22 nt, Human
aguugacauccauaacaggaag

SEQ ID NO: 301216 - RNA, 22 nt, Human
uucaaacaaaacuguucccaua

SEQ ID NO: 301217 - RNA, 22 nt, Human
guacuacaguuucucauuaaau

SEQ ID NO: 301218 - RNA, 22 nt, Human
cuccagauguauacuuuccaag

SEQ ID NO: 301219 - RNA, 22 nt, Human
gagcagugccaaagaauuugcg

SEQ ID NO: 301220 - RNA, 22 nt, Human
acugcacuucacccugggugac

SEQ ID NO: 301221 - RNA, 22 nt, Human
uagaaacauauguuugagacau

SEQ ID NO: 301222 - RNA, 22 nt, Human
uguguccugguguuaauuuuau

SEQ ID NO: 301223 - RNA, 22 nt, Human
acacugaauaauugagaguuga

SEQ ID NO: 301224 - RNA, 22 nt, Human
aaggugguuugauuaucccacu

SEQ ID NO: 301225 - RNA, 22 nt, Human
gcuucuauuauuuggagcugag

SEQ ID NO: 301226 - RNA, 17 nt, Human
uuuagaauacaauguuu

SEQ ID NO: 301227 - RNA, 22 nt, Human
ccagggcaucacauccaguguu

SEQ ID NO: 301228 - RNA, 22 nt, Human
aucagagaccggucaagucaug

SEQ ID NO: 301229 - RNA, 22 nt, Human
ucagcuuugcaaguuagaaaau

SEQ ID NO: 301230 - RNA, 22 nt, Human
uccacagaauguaagauccaca

SEQ ID NO: 301231 - RNA, 22 nt, Human
guaacauaguuugugcuucauc

SEQ ID NO: 301232 - RNA, 22 nt, Human
uuuacagaaugucaauuucuau

SEQ ID NO: 301233 - RNA, 22 nt, Human
ucugggugacccugggcaaggc

SEQ ID NO: 301234 - RNA, 22 nt, Human
cccugcagccuugcaugccuuc

SEQ ID NO: 301235 - RNA, 22 nt, Human
gguguccucggauucagggcag

SEQ ID NO: 301236 - RNA, 22 nt, Human
cagaguggcgacccccucagcu

SEQ ID NO: 301237 - RNA, 22 nt, Human
aaugugucagcuugucgaucuu

SEQ ID NO: 301238 - RNA, 22 nt, Human
ccagggcagccaacccagaugc

SEQ ID NO: 301239 - RNA, 22 nt, Human
gagccaccuucaacucaggaau

SEQ ID NO: 301240 - RNA, 22 nt, Human
ccauuguaaagaguauacuuug

SEQ ID NO: 301241 - RNA, 22 nt, Human
aguaaaaucaccaucucuuugu

SEQ ID NO: 301242 - RNA, 22 nt, Human
ugaaaaaccucaguccgcuuua

SEQ ID NO: 301243 - RNA, 22 nt, Human
cauuuauucaugaucuguagcu

SEQ ID NO: 301244 - RNA, 22 nt, Human
uuuucauuuacauuagggaaga

SEQ ID NO: 301245 - RNA, 20 nt, Human
cuguccugaucuuuucagaa

SEQ ID NO: 301246 - RNA, 22 nt, Human
guuucauucggcagcucauaag

SEQ ID NO: 301247 - RNA, 18 nt, Human
ucccuucucccuugccuc

SEQ ID NO: 301248 - RNA, 21 nt, Human
uaucaagauguuaugguugaa

SEQ ID NO: 301249 - RNA, 22 nt, Human
cccaggcaguagaaagaagagg

SEQ ID NO: 301250 - RNA, 22 nt, Human
uagaaucuaguucauucauuug

SEQ ID NO: 301251 - RNA, 22 nt, Human
aauugcuuguuuucggucauaa

SEQ ID NO: 301252 - RNA, 14 nt, Human
gcagguggaucacu

SEQ ID NO: 301253 - RNA, 22 nt, Human
ggaugagguagaugaacaaggg

SEQ ID NO: 301254 - RNA, 22 nt, Human
acacaaguucuaaagauugcgc

SEQ ID NO: 301255 - RNA, 22 nt, Human
aaauguacgggaguagaauuag

SEQ ID NO: 301256 - RNA, 22 nt, Human
cucuucaauagauuguugaggg

SEQ ID NO: 301257 - RNA, 22 nt, Human
auccugaaaacuuacgaagugg

SEQ ID NO: 301258 - RNA, 22 nt, Human
aaauguaagucuuuguuucuua

SEQ ID NO: 301259 - RNA, 22 nt, Human
uuuaaagagaaugugaaggagu

SEQ ID NO: 301260 - RNA, 22 nt, Human
aagugguuugagcacagugcug

SEQ ID NO: 301261 - RNA, 22 nt, Human
ugcagguguagaguugggcucc

SEQ ID NO: 301262 - RNA, 22 nt, Human
agggacuugaugucagggagau

SEQ ID NO: 301263 - RNA, 22 nt, Human
aaagacagacggaaaccugagg

SEQ ID NO: 301264 - RNA, 22 nt, Human
auucaaauuaaguuaauucagc

SEQ ID NO: 301265 - RNA, 22 nt, Human
aauuagggaaguauuuaguagu

SEQ ID NO: 301266 - RNA, 22 nt, Human
aaggugguucgcugguacccag

SEQ ID NO: 301267 - RNA, 22 nt, Human
cagcagagcugugugggaaggg

SEQ ID NO: 301268 - RNA, 22 nt, Human
acagcuuuguuuucccugcuga

SEQ ID NO: 301269 - RNA, 22 nt, Human
aauucaugaguagaaucuauau

SEQ ID NO: 301270 - RNA, 22 nt, Human
aguggcagaucucuggucugga

SEQ ID NO: 301271 - RNA, 22 nt, Human
ccagggcacguugggacaguac

SEQ ID NO: 301272 - RNA, 22 nt, Human
aaaauuauggaguaucccaaag

SEQ ID NO: 301273 - RNA, 22 nt, Human
cucagagaaaaggagcaagggu

SEQ ID NO: 301274 - RNA, 22 nt, Human
uugcaacaucugaacauuuauc

SEQ ID NO: 301275 - RNA, 22 nt, Human
aagcugcagcacagagaggugg

SEQ ID NO: 301276 - RNA, 22 nt, Human
cugagggucaacuugauuguau

SEQ ID NO: 301277 - RNA, 22 nt, Human
uuaugauuugccacagauuggu

SEQ ID NO: 301278 - RNA, 22 nt, Human
ccugggucuugguucaugcucu

SEQ ID NO: 301279 - RNA, 22 nt, Human
uauugcugccaggacccuaucc

SEQ ID NO: 301280 - RNA, 22 nt, Human
ugaggaauggcuuaauguggga

SEQ ID NO: 301281 - RNA, 22 nt, Human
cgcaccacugaauuccagccug

SEQ ID NO: 301282 - RNA, 22 nt, Human
gccaaaucuugcacacucuugu

SEQ ID NO: 301283 - RNA, 22 nt, Human
uagggacccucccugcucuaac

SEQ ID NO: 301284 - RNA, 22 nt, Human
ugcagggcccuugggguugaac

SEQ ID NO: 301285 - RNA, 22 nt, Human
uuggagauaucacaccuucaca

SEQ ID NO: 301286 - RNA, 22 nt, Human
uaauuucaauagcuugcauaau

SEQ ID NO: 301287 - RNA, 22 nt, Human
agaagggccagcuggacaccug

SEQ ID NO: 301288 - RNA, 22 nt, Human
ugagaugaauaacuccugcuaa

SEQ ID NO: 301289 - RNA, 22 nt, Human
uucucauggugucuuuauacau

SEQ ID NO: 301290 - RNA, 22 nt, Human
ugucuuuagagucacaaaacca

SEQ ID NO: 301291 - RNA, 22 nt, Human
cagcaugagaaaaugaaucaga

SEQ ID NO: 301292 - RNA, 19 nt, Human
acagggcagcaauaggaua

SEQ ID NO: 301293 - RNA, 22 nt, Human
cuggcucugagcccaccuccag

SEQ ID NO: 301294 - RNA, 22 nt, Human
uauugcugaugcugaagggaag

SEQ ID NO: 301295 - RNA, 22 nt, Human
uuguguccucuaaucucaccac

SEQ ID NO: 301296 - RNA, 22 nt, Human
acaaaauuguguuaaacuuuau

SEQ ID NO: 301297 - RNA, 22 nt, Human
gcagagcacccugcagugguau

SEQ ID NO: 301298 - RNA, 22 nt, Human
agaugaaaauacgugacuuuaa

SEQ ID NO: 301299 - RNA, 22 nt, Human
uuccaggagccacacaggggcg

SEQ ID NO: 301300 - RNA, 22 nt, Human
ccuagaugggauggcggccggg

SEQ ID NO: 301301 - RNA, 22 nt, Human
aaauggaucuguggaauacauu

SEQ ID NO: 301302 - RNA, 20 nt, Human
uccugcagucgcuagcgccc

SEQ ID NO: 301303 - RNA, 22 nt, Human
cccaggcacucuuggucauuuu

SEQ ID NO: 301304 - RNA, 22 nt, Human
uuauuauagauuaugcaagauu

SEQ ID NO: 301305 - RNA, 22 nt, Human
gccaggcacaguucuaggugcu

SEQ ID NO: 301306 - RNA, 22 nt, Human
caguagacacauuaauauggaa

SEQ ID NO: 301307 - RNA, 21 nt, Human
aaagugguaaggauuauuuug

SEQ ID NO: 301308 - RNA, 22 nt, Human
uauaauuuuagaagagauggaa

SEQ ID NO: 301309 - RNA, 22 nt, Human
acaagaaagguaggauucaggu

SEQ ID NO: 301310 - RNA, 22 nt, Human
uggcaggguuggccaccuuacc

SEQ ID NO: 301311 - RNA, 22 nt, Human
ugaaugauacagaauuauguag

SEQ ID NO: 301312 - RNA, 22 nt, Human
ugucccuggagcuucugucccc

SEQ ID NO: 301313 - RNA, 19 nt, Human
uggugcuggccucccaugg

SEQ ID NO: 301314 - RNA, 20 nt, Human
uuuaucugugggaguggaga

SEQ ID NO: 301315 - RNA, 15 nt, Human
cuccaugauuuugca

SEQ ID NO: 301316 - RNA, 22 nt, Human
uacauguuugguaaaugauggc

SEQ ID NO: 301317 - RNA, 22 nt, Human
gaauugcuaaccaauucaaaau

SEQ ID NO: 301318 - RNA, 22 nt, Human
gauccuguuagaucccauuaga

SEQ ID NO: 301319 - RNA, 22 nt, Human
auuaagggccaauccuccagcc

SEQ ID NO: 301320 - RNA, 22 nt, Human
ugcaggugugguuccucagcca

SEQ ID NO: 301321 - RNA, 22 nt, Human
caacuuuaugauugguuuguca

SEQ ID NO: 301322 - RNA, 22 nt, Human
cuugggaaugcuaacagaugac

SEQ ID NO: 301323 - RNA, 22 nt, Human
cugcaggggccucgagcacagg

SEQ ID NO: 301324 - RNA, 22 nt, Human
acagcaggcaugaagaaauguu

SEQ ID NO: 301325 - RNA, 16 nt, Human
ccuggaggucacuuca

SEQ ID NO: 301326 - RNA, 22 nt, Human
ugguggcaauucaaagacagca

SEQ ID NO: 301327 - RNA, 22 nt, Human
ucuuccuugcuccuugucacuu

SEQ ID NO: 301328 - RNA, 22 nt, Human
uucuuaaaacuuauggacaggu

SEQ ID NO: 301329 - RNA, 22 nt, Human
cuuccuuccacaccuucagaau

SEQ ID NO: 301330 - RNA, 22 nt, Human
auugcuuuugagcuagaauuuu

SEQ ID NO: 301331 - RNA, 22 nt, Human
cugcauuagucaugcuuugcag

SEQ ID NO: 301332 - RNA, 22 nt, Human
ucuuauugguaaugauggcauu

SEQ ID NO: 301333 - RNA, 22 nt, Human
accaggcaacugugaaugggcu

SEQ ID NO: 301334 - RNA, 22 nt, Human
agacauauuggcuugcuuuaau

SEQ ID NO: 301335 - RNA, 22 nt, Human
uuuaucuggacugugauauaaa

SEQ ID NO: 301336 - RNA, 22 nt, Human
ggcuuuugcuguguuuuccaga

SEQ ID NO: 301337 - RNA, 22 nt, Human
uacuacaagggcccuaaaaggu

SEQ ID NO: 301338 - RNA, 22 nt, Human
ccagagagaguacugggcucug

SEQ ID NO: 301339 - RNA, 22 nt, Human
ccuguucauuuuuugacucugc

SEQ ID NO: 301340 - RNA, 22 nt, Human
uucuuuuacauuaagauuucag

SEQ ID NO: 301341 - RNA, 21 nt, Human
uucuggguuguuaaucugaac

SEQ ID NO: 301342 - RNA, 22 nt, Human
ucuccucccaggcucuuccagg

SEQ ID NO: 301343 - RNA, 22 nt, Human
gccagguggcugagcagcugca

SEQ ID NO: 301344 - RNA, 22 nt, Human
uaaaggcuucugcagggacuga

SEQ ID NO: 301345 - RNA, 22 nt, Human
uucuucaauuuuccauauacug

SEQ ID NO: 301346 - RNA, 22 nt, Human
gccaggcagcuagcaaccccug

SEQ ID NO: 301347 - RNA, 22 nt, Human
uaagaacuucggacauguuauc

SEQ ID NO: 301348 - RNA, 22 nt, Human
auaaauaucacuguugucccuc

SEQ ID NO: 301349 - RNA, 22 nt, Human
aggcaggugcuuaugacuugcu

SEQ ID NO: 301350 - RNA, 16 nt, Human
uuuuauugugacagcc

SEQ ID NO: 301351 - RNA, 21 nt, Human
gcaugugugggacuggauccu

SEQ ID NO: 301352 - RNA, 22 nt, Human
aaggugucggcagagccgcuuc

SEQ ID NO: 301353 - RNA, 22 nt, Human
aggcuagaggcuucuggcuuca

SEQ ID NO: 301354 - RNA, 22 nt, Human
auaucaguaucuauguauuugu

SEQ ID NO: 301355 - RNA, 22 nt, Human
acauguaacauauauguagcau

SEQ ID NO: 301356 - RNA, 22 nt, Human
uuucacuagaacguucuuguuu

SEQ ID NO: 301357 - RNA, 22 nt, Human
gacagacacuguguccucacuu

SEQ ID NO: 301358 - RNA, 22 nt, Human
cuuuaguuuaagaacaugauga

SEQ ID NO: 301359 - RNA, 18 nt, Human
cccagcuuagcgccccuc

SEQ ID NO: 301360 - RNA, 22 nt, Human
ccaugcauauaauagugccugg

SEQ ID NO: 301361 - RNA, 23 nt, Human
cagcuuucagggcuuuagggaag

SEQ ID NO: 301362 - RNA, 22 nt, Human
gaugaugaggccaugaggcagg

SEQ ID NO: 301363 - RNA, 19 nt, Human
ggcauccagaacuaccagu

SEQ ID NO: 301364 - RNA, 22 nt, Human
caaaugauagagccgauuauca

SEQ ID NO: 301365 - RNA, 22 nt, Human
cuguuauuuuccucugaacucu

SEQ ID NO: 301366 - RNA, 20 nt, Human
uugcugggaccuuuuucaac

SEQ ID NO: 301367 - RNA, 22 nt, Human
uugcuaauuuaacuaccuuguu

SEQ ID NO: 301368 - RNA, 22 nt, Human
cuguccugaggcagguggccug

SEQ ID NO: 301369 - RNA, 22 nt, Human
auauucuuccaaaacaucauuu

SEQ ID NO: 301370 - RNA, 22 nt, Human
gucaggccaauacucuccagca

SEQ ID NO: 301371 - RNA, 22 nt, Human
ugcagggccgcuggaggucaug

SEQ ID NO: 301372 - RNA, 22 nt, Human
ugccaaauugcccuauaaauga

SEQ ID NO: 301373 - RNA, 22 nt, Human
ucagguggccaaaugggagcgc

SEQ ID NO: 301374 - RNA, 22 nt, Human
cuuuaguuugugauacgaagau

SEQ ID NO: 301375 - RNA, 22 nt, Human
caaauacuaaacauaagauuuu

SEQ ID NO: 301376 - RNA, 15 nt, Human
gcagguggaucacuu

SEQ ID NO: 301377 - RNA, 22 nt, Human
gggugacauuaggaagauagac

SEQ ID NO: 301378 - RNA, 22 nt, Human
cccugcagagccagcccugacc

SEQ ID NO: 301379 - RNA, 17 nt, Human
ggcaggugacagacacc

SEQ ID NO: 301380 - RNA, 22 nt, Human
agcagggcuggggcacgagcca

SEQ ID NO: 301381 - RNA, 22 nt, Human
caguucuuuguggggaguucuc

SEQ ID NO: 301382 - RNA, 22 nt, Human
caguguggcugagacagaggcu

SEQ ID NO: 301383 - RNA, 22 nt, Human
ccagguggcuucugcccgaugu

SEQ ID NO: 301384 - RNA, 22 nt, Human
agauauuuguaucuugcuauug

SEQ ID NO: 301385 - RNA, 22 nt, Human
cuguccuguacuuugaggcccu

SEQ ID NO: 301386 - RNA, 22 nt, Human
uuuuagacuuguauguaaagcc

SEQ ID NO: 301387 - RNA, 23 nt, Human
uugggaaauaguuaagacaugag

SEQ ID NO: 301388 - RNA, 22 nt, Human
uuccugggauuauugucaagca

SEQ ID NO: 301389 - RNA, 22 nt, Human
uauuccaguccuauccucuuuu

SEQ ID NO: 301390 - RNA, 22 nt, Human
gcagagaggauauuauugucca

SEQ ID NO: 301391 - RNA, 22 nt, Human
agacagacauagaaauuaguaa

SEQ ID NO: 301392 - RNA, 22 nt, Human
uuaggaaaaucaugagagauga

SEQ ID NO: 301393 - RNA, 22 nt, Human
acacagcaacuugcaguaugga

SEQ ID NO: 301394 - RNA, 22 nt, Human
aacauuucagcaaauaagaaca

SEQ ID NO: 301395 - RNA, 22 nt, Human
guguguccucauaagauggagg

SEQ ID NO: 301396 - RNA, 22 nt, Human
agcagggcaguuaaaggguccu

SEQ ID NO: 301397 - RNA, 22 nt, Human
cauuuauugguuaggccagcag

SEQ ID NO: 301398 - RNA, 22 nt, Human
acaauaguaagguauauuguca

SEQ ID NO: 301399 - RNA, 22 nt, Human
auuuacagaagcauguaauagc

SEQ ID NO: 301400 - RNA, 22 nt, Human
cuguccugaguucuuggagguc

SEQ ID NO: 301401 - RNA, 22 nt, Human
agauugaagacugguggagcug

SEQ ID NO: 301402 - RNA, 22 nt, Human
cagagggacaguaugaugaaag

SEQ ID NO: 301403 - RNA, 22 nt, Human
guggaaugaauagauuugcauu

SEQ ID NO: 301404 - RNA, 22 nt, Human
auuugcuucugugaaaucaagu

SEQ ID NO: 301405 - RNA, 22 nt, Human
gggagcuguaagggacagguag

SEQ ID NO: 301406 - RNA, 22 nt, Human
uacaugugcuauuuguuuugua

SEQ ID NO: 301407 - RNA, 22 nt, Human
ugucaauauguaauaacugaau

SEQ ID NO: 301408 - RNA, 22 nt, Human
uucauguaauuccauaagguaa

SEQ ID NO: 301409 - RNA, 22 nt, Human
ggaugucugucauuaugcuuuc

SEQ ID NO: 301410 - RNA, 22 nt, Human
aaaagcagagacucuggagcua

SEQ ID NO: 301411 - RNA, 22 nt, Human
uucuuccucacacucucaccca

SEQ ID NO: 301412 - RNA, 22 nt, Human
uagggcucugcucaucaguugu

SEQ ID NO: 301413 - RNA, 22 nt, Human
uacccagggcuuuucugaugca

SEQ ID NO: 301414 - RNA, 22 nt, Human
aguugcagacgcagagauguug

SEQ ID NO: 301415 - RNA, 22 nt, Human
ccagaugagaccacacugcugg

SEQ ID NO: 301416 - RNA, 22 nt, Human
ggcucccugccuguccucaguc

SEQ ID NO: 301417 - RNA, 22 nt, Human
agugugagggguucuuugauau

SEQ ID NO: 301418 - RNA, 22 nt, Human
cuucucucccuggcacucagac

SEQ ID NO: 301419 - RNA, 22 nt, Human
uggacaacauagugagaccuca

SEQ ID NO: 301420 - RNA, 22 nt, Human
gacagacaggagcucacaggca

SEQ ID NO: 301421 - RNA, 22 nt, Human
uuugguauugcacacugucuuc

SEQ ID NO: 301422 - RNA, 22 nt, Human
guauucauauuaaacauaucaa

SEQ ID NO: 301423 - RNA, 22 nt, Human
uugauuucuuacucuuccaagg

SEQ ID NO: 301424 - RNA, 22 nt, Human
caugugucuaaucuacuaauau

SEQ ID NO: 301425 - RNA, 22 nt, Human
uuugcuuucuguugaacagagu

SEQ ID NO: 301426 - RNA, 22 nt, Human
cagggagcuuucccaggacccu

SEQ ID NO: 301427 - RNA, 22 nt, Human
acaggugucuaaggcagacagc

SEQ ID NO: 301428 - RNA, 22 nt, Human
caugaaugcuggguucauguaa

SEQ ID NO: 301429 - RNA, 22 nt, Human
cuuccucccggcccaugcucug

SEQ ID NO: 301430 - RNA, 22 nt, Human
auacaaauuuauagaugcauuu

SEQ ID NO: 301431 - RNA, 22 nt, Human
aagauuuaccacuuuauucaag

SEQ ID NO: 301432 - RNA, 22 nt, Human
cuuuauuguccuucuuaggugg

SEQ ID NO: 301433 - RNA, 22 nt, Human
auuugcauaauagugauuugua

SEQ ID NO: 301434 - RNA, 15 nt, Human
gggcaggucuggggc

SEQ ID NO: 301435 - RNA, 22 nt, Human
guggaauguccuugaucauaag

SEQ ID NO: 301436 - RNA, 22 nt, Human
uuacuucuuacaaaagaaauau

SEQ ID NO: 301437 - RNA, 22 nt, Human
acccagcuguuucccgugucau

SEQ ID NO: 301438 - RNA, 20 nt, Human
gggugggagagucugagggu

SEQ ID NO: 301439 - RNA, 22 nt, Human
ugcaggugccaucgcugcucau

SEQ ID NO: 301440 - RNA, 22 nt, Human
cauguacaaaaggcaaaugccu

SEQ ID NO: 301441 - RNA, 22 nt, Human
gggacaugccccucagugggug

SEQ ID NO: 301442 - RNA, 22 nt, Human
agggcuccgggccaccggccug

SEQ ID NO: 301443 - RNA, 22 nt, Human
ccuguucaaugcccuggcuuca

SEQ ID NO: 301444 - RNA, 16 nt, Human
gcagguggggcgcgca

SEQ ID NO: 301445 - RNA, 22 nt, Human
cuuccagguccuucuugagaag

SEQ ID NO: 301446 - RNA, 22 nt, Human
uccaugagacagauacuguaag

SEQ ID NO: 301447 - RNA, 22 nt, Human
auuuauuggaugcuuacuuggg

SEQ ID NO: 301448 - RNA, 22 nt, Human
auccaugaucaauuuauuacua

SEQ ID NO: 301449 - RNA, 22 nt, Human
cauaauuucuguaucagcacca

SEQ ID NO: 301450 - RNA, 22 nt, Human
ugcacccucaucagucaaaugg

SEQ ID NO: 301451 - RNA, 22 nt, Human
gcaugcaggauagguugagcuc

SEQ ID NO: 301452 - RNA, 18 nt, Human
gggcucacacaggucauc

SEQ ID NO: 301453 - RNA, 22 nt, Human
ugucuucaguaaaauacacuau

SEQ ID NO: 301454 - RNA, 22 nt, Human
cuggcugggagcgagcugcuca

SEQ ID NO: 301455 - RNA, 22 nt, Human
uuuauuagugcuuguaucacug

SEQ ID NO: 301456 - RNA, 22 nt, Human
uauuuaauuagugauuguagag

SEQ ID NO: 301457 - RNA, 22 nt, Human
gccugcagacguguuuuccuca

SEQ ID NO: 301458 - RNA, 22 nt, Human
gcuguucacaucuggaccauuu

SEQ ID NO: 301459 - RNA, 22 nt, Human
ucccugaaacauaauagaugcc

SEQ ID NO: 301460 - RNA, 22 nt, Human
aaagcucuuuuccaaguauuga

SEQ ID NO: 301461 - RNA, 22 nt, Human
auacauacauguaugcacauac

SEQ ID NO: 301462 - RNA, 23 nt, Human
uccuuugucuuugcauagauggu

SEQ ID NO: 301463 - RNA, 22 nt, Human
uagggcagcugcaucaggcacu

SEQ ID NO: 301464 - RNA, 21 nt, Human
uggcagguucaaaggccuauc

SEQ ID NO: 301465 - RNA, 22 nt, Human
gagcaggucuuucauggugcau

SEQ ID NO: 301466 - RNA, 22 nt, Human
uuucaugaggggcaaaaucuca

SEQ ID NO: 301467 - RNA, 22 nt, Human
cagcuuuggcccagucgggagg

SEQ ID NO: 301468 - RNA, 22 nt, Human
accugcagguguuuccacacuu

SEQ ID NO: 301469 - RNA, 22 nt, Human
cuauugaggacauaaggacucu

SEQ ID NO: 301470 - RNA, 22 nt, Human
aaagauucgagcgauguauaaa

SEQ ID NO: 301471 - RNA, 22 nt, Human
ucuguucaugucuuuuuaagug

SEQ ID NO: 301472 - RNA, 22 nt, Human
gcagcuuuguggagaggcccau

SEQ ID NO: 301473 - RNA, 22 nt, Human
uacuaucucuucuaacuucaga

SEQ ID NO: 301474 - RNA, 22 nt, Human
auagauacuggguauggagaug

SEQ ID NO: 301475 - RNA, 22 nt, Human
ucuggcuccugaguccaugcuc

SEQ ID NO: 301476 - RNA, 22 nt, Human
gggcaggggucaguggccccaa

SEQ ID NO: 301477 - RNA, 22 nt, Human
ucagggcauucaagaggccugg

SEQ ID NO: 301478 - RNA, 22 nt, Human
uuuagggacaagggucuggggu

SEQ ID NO: 301479 - RNA, 22 nt, Human
gagccucguggcggccacugcg

SEQ ID NO: 301480 - RNA, 22 nt, Human
cguccuuugaauugaggucuuu

SEQ ID NO: 301481 - RNA, 22 nt, Human
ggcagggcaggaaagucaggaa

SEQ ID NO: 301482 - RNA, 22 nt, Human
gcagcuuucugcaaugucaucc

SEQ ID NO: 301483 - RNA, 22 nt, Human
gcccagcuuuucacuuccacac

SEQ ID NO: 301484 - RNA, 22 nt, Human
uucuucuugucugcccucacau

SEQ ID NO: 301485 - RNA, 22 nt, Human
aaugugucauuucccacaggug

SEQ ID NO: 301486 - RNA, 22 nt, Human
uccuggguagccuguccaagau

SEQ ID NO: 301487 - RNA, 22 nt, Human
aauuucagaacccaaauuagcg

SEQ ID NO: 301488 - RNA, 22 nt, Human
gaggcuccccaugaggccccag

SEQ ID NO: 301489 - RNA, 22 nt, Human
ugcagggccaugguggcggcug

SEQ ID NO: 301490 - RNA, 22 nt, Human
ugauguccucaugucaagcucc

SEQ ID NO: 301491 - RNA, 22 nt, Human
gauuuucugagccuucaaauuu

SEQ ID NO: 301492 - RNA, 23 nt, Human
guguguccauucgcacucuuagg

SEQ ID NO: 301493 - RNA, 22 nt, Human
aaacaucauaggcaugcaugau

SEQ ID NO: 301494 - RNA, 22 nt, Human
cuucuauucacuggucacaguu

SEQ ID NO: 301495 - RNA, 22 nt, Human
aaaagucugcucucauuucaga

SEQ ID NO: 301496 - RNA, 23 nt, Human
ugggaccuguuugcccacagaug

SEQ ID NO: 301497 - RNA, 22 nt, Human
ugcauacacaagcauacaugua

SEQ ID NO: 301498 - RNA, 22 nt, Human
cacagcauaaugaaauauacuu

SEQ ID NO: 301499 - RNA, 22 nt, Human
uugcuuuaaaauggcuaagucu

SEQ ID NO: 301500 - RNA, 21 nt, Human
aaaaagcuggggcaugcaugc

SEQ ID NO: 301501 - RNA, 22 nt, Human
acagaauugaaaguauaaucug

SEQ ID NO: 301502 - RNA, 22 nt, Human
cuggaggaauaauggcaucuug

SEQ ID NO: 301503 - RNA, 22 nt, Human
uucuucaacaaggacacuguua

SEQ ID NO: 301504 - RNA, 22 nt, Human
aagagcaucuauuucacagugg

SEQ ID NO: 301505 - RNA, 22 nt, Human
uaaagcuguuagaguaguaaga

SEQ ID NO: 301506 - RNA, 22 nt, Human
uaggugucugcucuuauuuaac

SEQ ID NO: 301507 - RNA, 22 nt, Human
ggguugaggcggaugucggcgg

SEQ ID NO: 301508 - RNA, 22 nt, Human
gucugcccggccuuccuccacc

SEQ ID NO: 301509 - RNA, 22 nt, Human
ugcuccagugagcuggccaucc

SEQ ID NO: 301510 - RNA, 22 nt, Human
cuucuuucuuuugaucacaggu

SEQ ID NO: 301511 - RNA, 22 nt, Human
ugacaugugcucaucuuggcua

SEQ ID NO: 301512 - RNA, 22 nt, Human
uugcuuuagguauagaauccau

SEQ ID NO: 301513 - RNA, 22 nt, Human
cagcugcaggaacaaaaaugug

SEQ ID NO: 301514 - RNA, 22 nt, Human
uuuaucuguuguaccugcauug

SEQ ID NO: 301515 - RNA, 22 nt, Human
aagaugcagcuuuacaauaagg

SEQ ID NO: 301516 - RNA, 22 nt, Human
cuguugcuaaguagugcaggua

SEQ ID NO: 301517 - RNA, 22 nt, Human
uauccuguuuugcacaauuaua

SEQ ID NO: 301518 - RNA, 22 nt, Human
aagaaaggauauaugggaggua

SEQ ID NO: 301519 - RNA, 22 nt, Human
ugacaguuaagguauacauuca

SEQ ID NO: 301520 - RNA, 22 nt, Human
uccaggaggugaggggaccaaa

SEQ ID NO: 301521 - RNA, 22 nt, Human
uccugcagccuugggcuggagc

SEQ ID NO: 301522 - RNA, 22 nt, Human
auaguguuacccuucuuaaagu

SEQ ID NO: 301523 - RNA, 22 nt, Human
aaggugucggguuagcucagcc

SEQ ID NO: 301524 - RNA, 22 nt, Human
ucugggaaccagugcggcuggg

SEQ ID NO: 301525 - RNA, 22 nt, Human
guaaaauugcaauuacuuuugc

SEQ ID NO: 301526 - RNA, 22 nt, Human
uacaugugaucagaaagugaaa

SEQ ID NO: 301527 - RNA, 18 nt, Human
uccucucuuuccccaggg

SEQ ID NO: 301528 - RNA, 22 nt, Human
gguguccuuguugaacgaaaau

SEQ ID NO: 301529 - RNA, 22 nt, Human
caggcagcugcuggguucagcc

SEQ ID NO: 301530 - RNA, 18 nt, Human
uggcagguccagcugugg

SEQ ID NO: 301531 - RNA, 22 nt, Human
ucagacagcuugggauaacuga

SEQ ID NO: 301532 - RNA, 22 nt, Human
uuugacauuggcuuauucuguu

SEQ ID NO: 301533 - RNA, 18 nt, Human
uuccuucugauguauaug

SEQ ID NO: 301534 - RNA, 23 nt, Human
gggcagguuuuuauaggcuucag

SEQ ID NO: 301535 - RNA, 22 nt, Human
gcauguguggaggagaugugcu

SEQ ID NO: 301536 - RNA, 22 nt, Human
aguccuuuuguuuugagaugag

SEQ ID NO: 301537 - RNA, 22 nt, Human
cauuuguacagaacagcuuuau

SEQ ID NO: 301538 - RNA, 22 nt, Human
aaauucaguuuuaauaaucacu

SEQ ID NO: 301539 - RNA, 22 nt, Human
cuuuucauuguuuguacaugca

SEQ ID NO: 301540 - RNA, 22 nt, Human
uuguccugugauuucagggccu

SEQ ID NO: 301541 - RNA, 22 nt, Human
cacccagcacagagggaggcga

SEQ ID NO: 301542 - RNA, 22 nt, Human
uuucugcagcagacucagugug

SEQ ID NO: 301543 - RNA, 22 nt, Human
ccagguggugccucuguucgca

SEQ ID NO: 301544 - RNA, 22 nt, Human
aacauuuacaaauccuucugca

SEQ ID NO: 301545 - RNA, 22 nt, Human
gacaguuuuuaauccuuucaug

SEQ ID NO: 301546 - RNA, 22 nt, Human
uuaaagaugcagcuuuagagaa

SEQ ID NO: 301547 - RNA, 22 nt, Human
cccaggcaggagugugguggcu

SEQ ID NO: 301548 - RNA, 22 nt, Human
uucuucaaauagcagggaguca

SEQ ID NO: 301549 - RNA, 22 nt, Human
uaugaaacauucauacaaauaa

SEQ ID NO: 301550 - RNA, 22 nt, Human
acaggcaggcgggacagcccga

SEQ ID NO: 301551 - RNA, 23 nt, Human
ccacuagcaccuguucaacuucu

SEQ ID NO: 301552 - RNA, 22 nt, Human
aaugauuggcacuagauacaca

SEQ ID NO: 301553 - RNA, 22 nt, Human
ugcuacuacuugucaacgguca

SEQ ID NO: 301554 - RNA, 22 nt, Human
ggcagggcccugauuccugggg

SEQ ID NO: 301555 - RNA, 22 nt, Human
cagggcagggauguugcggcag

SEQ ID NO: 301556 - RNA, 22 nt, Human
guuagaauaaaaggucagagag

SEQ ID NO: 301557 - RNA, 22 nt, Human
gcagggcaaauguggaaaggag

SEQ ID NO: 301558 - RNA, 22 nt, Human
cuacccagcaccuaggcugccu

SEQ ID NO: 301559 - RNA, 22 nt, Human
aaugaucuggcucaggauauca

SEQ ID NO: 301560 - RNA, 22 nt, Human
cucuggaauguuuacaugcccu

SEQ ID NO: 301561 - RNA, 22 nt, Human
agacaucauguuacagauuaag

SEQ ID NO: 301562 - RNA, 22 nt, Human
aggcaaagaggauauuuugggg

SEQ ID NO: 301563 - RNA, 22 nt, Human
uuguacaaguauuaugugaaca

SEQ ID NO: 301564 - RNA, 21 nt, Human
uccuggcuuuaugcuaccucu

SEQ ID NO: 301565 - RNA, 23 nt, Human
agcuucauugaccuccgcagggg

SEQ ID NO: 301566 - RNA, 22 nt, Human
ucuucaaguuccaaagugcagg

SEQ ID NO: 301567 - RNA, 22 nt, Human
ccugggugaugugcugcccucg

SEQ ID NO: 301568 - RNA, 22 nt, Human
uuugacaaaggaaaaaugcaca

SEQ ID NO: 301569 - RNA, 22 nt, Human
uaagacugugagcucagagacu

SEQ ID NO: 301570 - RNA, 22 nt, Human
agauggucugguuauuuuuagu

SEQ ID NO: 301571 - RNA, 22 nt, Human
aaucucuugggaggaaugaauu

SEQ ID NO: 301572 - RNA, 22 nt, Human
gagcagugagugaauguugccu

SEQ ID NO: 301573 - RNA, 22 nt, Human
ucagucuucccuccagugcaac

SEQ ID NO: 301574 - RNA, 22 nt, Human
auuuccuucggacaguuugggu

SEQ ID NO: 301575 - RNA, 22 nt, Human
auuuuacuacuccaauuaauga

SEQ ID NO: 301576 - RNA, 21 nt, Human
ugcuggguuugcccaucaggc

SEQ ID NO: 301577 - RNA, 22 nt, Human
uggaauguuuccccagccugca

SEQ ID NO: 301578 - RNA, 22 nt, Human
agcugcaauacccuucuuccuu

SEQ ID NO: 301579 - RNA, 19 nt, Human
caugugucaauacuguacc

SEQ ID NO: 301580 - RNA, 22 nt, Human
ggucugcccacuacucuccauu

SEQ ID NO: 301581 - RNA, 20 nt, Human
agacaaaaugacuucaugca

SEQ ID NO: 301582 - RNA, 22 nt, Human
cugggucuggcuacugcuuccu

SEQ ID NO: 301583 - RNA, 22 nt, Human
auucagcauucauuaugcgcca

SEQ ID NO: 301584 - RNA, 17 nt, Human
gcaagggaugggagauu

SEQ ID NO: 301585 - RNA, 22 nt, Human
ggacagaggguugacagaguau

SEQ ID NO: 301586 - RNA, 22 nt, Human
ucuguccuguuuccuccugaca

SEQ ID NO: 301587 - RNA, 22 nt, Human
ggcaggcagaaaaauagaauau

SEQ ID NO: 301588 - RNA, 22 nt, Human
ugggccaggggccucuucugau

SEQ ID NO: 301589 - RNA, 17 nt, Human
gugaagagucauugaau

SEQ ID NO: 301590 - RNA, 22 nt, Human
ugcagguggcagcggggcacca

SEQ ID NO: 301591 - RNA, 22 nt, Human
uaauguaaacacagagacagaa

SEQ ID NO: 301592 - RNA, 22 nt, Human
gugcaguggcagauccuagcuc

SEQ ID NO: 301593 - RNA, 20 nt, Human
auuugcaucugaauaacuua

SEQ ID NO: 301594 - RNA, 22 nt, Human
accuuuauaugaaagaugacau

SEQ ID NO: 301595 - RNA, 22 nt, Human
auaugauuccacuauuguaugg

SEQ ID NO: 301596 - RNA, 22 nt, Human
uuauucagucugucuagggagu

SEQ ID NO: 301597 - RNA, 20 nt, Human
aaacauucauguacaaguga

SEQ ID NO: 301598 - RNA, 22 nt, Human
ggcugccacgucgaggguccaa

SEQ ID NO: 301599 - RNA, 22 nt, Human
uugcuuuacauguucugguaaa

SEQ ID NO: 301600 - RNA, 22 nt, Human
guacacauuaugcuucucuaaa

SEQ ID NO: 301601 - RNA, 22 nt, Human
gagcaguggucugaucuucuaa

SEQ ID NO: 301602 - RNA, 22 nt, Human
uccuaguucucugccagucgcu

SEQ ID NO: 301603 - RNA, 18 nt, Human
uguggcugguccacacug

SEQ ID NO: 301604 - RNA, 22 nt, Human
uaaaagcucuucuguugaguua

SEQ ID NO: 301605 - RNA, 22 nt, Human
agguguccaggaagaugcuggc

SEQ ID NO: 301606 - RNA, 22 nt, Human
agacaucaaugaucagagguag

SEQ ID NO: 301607 - RNA, 23 nt, Human
uggcaggugguuagauguuuugu

SEQ ID NO: 301608 - RNA, 22 nt, Human
ggggugugucugacaaugguau

SEQ ID NO: 301609 - RNA, 22 nt, Human
aaaugcuaacaaggaaugcugc

SEQ ID NO: 301610 - RNA, 22 nt, Human
ugcaggugucucugucuagcgu

SEQ ID NO: 301611 - RNA, 22 nt, Human
cacaugaguccugccagguaug

SEQ ID NO: 301612 - RNA, 22 nt, Human
ggagcugaggaauagcuuugau

SEQ ID NO: 301613 - RNA, 22 nt, Human
auacaacagaaaaugauuauuc

SEQ ID NO: 301614 - RNA, 22 nt, Human
uagggcucacugagaugaauau

SEQ ID NO: 301615 - RNA, 22 nt, Human
aaguccaugaucaagauguggc

SEQ ID NO: 301616 - RNA, 22 nt, Human
cacccagggcugugccugccca

SEQ ID NO: 301617 - RNA, 22 nt, Human
cuguccuccggccaccuacagu

SEQ ID NO: 301618 - RNA, 22 nt, Human
ugugaaaagcaggcuacuuucu

SEQ ID NO: 301619 - RNA, 22 nt, Human
guuuacauauuuuaauugguga

SEQ ID NO: 301620 - RNA, 22 nt, Human
auuuguuccacacauauuuacu

SEQ ID NO: 301621 - RNA, 22 nt, Human
agaaaugucaggaaagaagucc

SEQ ID NO: 301622 - RNA, 22 nt, Human
caggcagcugacugucagauau

SEQ ID NO: 301623 - RNA, 22 nt, Human
guuggcuaugagagcuuuagug

SEQ ID NO: 301624 - RNA, 22 nt, Human
uugggcagggaaaggacaggca

SEQ ID NO: 301625 - RNA, 22 nt, Human
uggcaggugcacuuuugguuuc

SEQ ID NO: 301626 - RNA, 22 nt, Human
cauguaaagaauuucacacaag

SEQ ID NO: 301627 - RNA, 22 nt, Human
cccagugugaugagguugcuaa

SEQ ID NO: 301628 - RNA, 22 nt, Human
ccagagaguaucauggagagua

SEQ ID NO: 301629 - RNA, 22 nt, Human
agggaccucauguaaguggauu

SEQ ID NO: 301630 - RNA, 22 nt, Human
uuauuugcccauguuuagcaga

SEQ ID NO: 301631 - RNA, 22 nt, Human
ucgagcucuggagccaaggaug

SEQ ID NO: 301632 - RNA, 22 nt, Human
uuccagauguuuaaguucugcu

SEQ ID NO: 301633 - RNA, 21 nt, Human
aagaaguuuggauuuuguccu

SEQ ID NO: 301634 - RNA, 21 nt, Human
acaggcucacgauccauuucu

SEQ ID NO: 301635 - RNA, 22 nt, Human
ucccaggccauaaaacucagag

SEQ ID NO: 301636 - RNA, 22 nt, Human
agugcuccuauggaucaguugu

SEQ ID NO: 301637 - RNA, 22 nt, Human
aggagguggcaacugucgacag

SEQ ID NO: 301638 - RNA, 22 nt, Human
acagguggcuuccauuuucuaa

SEQ ID NO: 301639 - RNA, 21 nt, Human
aagaugauauuuuaucuguag

SEQ ID NO: 301640 - RNA, 22 nt, Human
uucccucucacuuaaagcuugg

SEQ ID NO: 301641 - RNA, 22 nt, Human
gagcugaauugcugccauuugc

SEQ ID NO: 301642 - RNA, 21 nt, Human
agguggggcugcaccucugcu

SEQ ID NO: 301643 - RNA, 22 nt, Human
cccugcaguccuuucuuggcuc

SEQ ID NO: 301644 - RNA, 22 nt, Human
ugcaggugucugggggcaacag

SEQ ID NO: 301645 - RNA, 22 nt, Human
cuucucccaaguaugcaguuug

SEQ ID NO: 301646 - RNA, 22 nt, Human
aaauccuaccaagaaauucccu

SEQ ID NO: 301647 - RNA, 22 nt, Human
ugcagggcuauaacuccauucu

SEQ ID NO: 301648 - RNA, 22 nt, Human
uuuagccaacuauaugacuagu

SEQ ID NO: 301649 - RNA, 22 nt, Human
ucauuuguucaucugcucuucu

SEQ ID NO: 301650 - RNA, 22 nt, Human
uaccugcaaaguuccuuuugcc

SEQ ID NO: 301651 - RNA, 22 nt, Human
cccaggcacauccacucuguga

SEQ ID NO: 301652 - RNA, 22 nt, Human
auugagcuguuuuguaggauaa

SEQ ID NO: 301653 - RNA, 22 nt, Human
uucauguaggcugcaaugcaca

SEQ ID NO: 301654 - RNA, 22 nt, Human
uaaaaugaucucucauguucuu

SEQ ID NO: 301655 - RNA, 23 nt, Human
ugcuggguaucagaaucacugag

SEQ ID NO: 301656 - RNA, 22 nt, Human
uucugggugacucacgcucccc

SEQ ID NO: 301657 - RNA, 22 nt, Human
agaagcuuccuacauuguucuu

SEQ ID NO: 301658 - RNA, 22 nt, Human
guuccuuccuaucccgagagcc

SEQ ID NO: 301659 - RNA, 22 nt, Human
gggcagguuggcaucccgggca

SEQ ID NO: 301660 - RNA, 22 nt, Human
uuaaaguguuaacugaagcuua

SEQ ID NO: 301661 - RNA, 22 nt, Human
aggcaguguauugcuagcggcu

SEQ ID NO: 301662 - RNA, 22 nt, Human
uuguacaaauaggaaccucuga

SEQ ID NO: 301663 - RNA, 22 nt, Human
uauuucagucacuucuucucug

SEQ ID NO: 301664 - RNA, 22 nt, Human
cuuuaauuaggaaguauaauga

SEQ ID NO: 301665 - RNA, 22 nt, Human
auuugguuacucaguugucuga

SEQ ID NO: 301666 - RNA, 22 nt, Human
uuccuccuacgcuuaucacuuu

SEQ ID NO: 301667 - RNA, 22 nt, Human
uucagagagaccaaguggcgug

SEQ ID NO: 301668 - RNA, 22 nt, Human
auuaguaguaguuagcagccuc

SEQ ID NO: 301669 - RNA, 22 nt, Human
gagcuuuaccuuagguucuguu

SEQ ID NO: 301670 - RNA, 22 nt, Human
gcaggacaggcguugguccagu

SEQ ID NO: 301671 - RNA, 22 nt, Human
ggcaggcaacggaccacuaguc

SEQ ID NO: 301672 - RNA, 21 nt, Human
cauuagggcagaagcaggaag

SEQ ID NO: 301673 - RNA, 22 nt, Human
agcugcaaaggcacacuugggc

SEQ ID NO: 301674 - RNA, 22 nt, Human
uuauccaagcagaagcugcaca

SEQ ID NO: 301675 - RNA, 21 nt, Human
agaaaauggcguuuuagauuu

SEQ ID NO: 301676 - RNA, 22 nt, Human
gaauuuccucuaaaccccugag

SEQ ID NO: 301677 - RNA, 22 nt, Human
acagggcaugugcaagagacau

SEQ ID NO: 301678 - RNA, 22 nt, Human
auucucaguucacuaguuucuu

SEQ ID NO: 301679 - RNA, 22 nt, Human
uaguucuagccagugaaaugua

SEQ ID NO: 301680 - RNA, 22 nt, Human
auuuccauagagcgucucacag

SEQ ID NO: 301681 - RNA, 22 nt, Human
cagguuuagguggacgugcagg

SEQ ID NO: 301682 - RNA, 22 nt, Human
caggugguuugauaggauaacu

SEQ ID NO: 301683 - RNA, 22 nt, Human
cauucuuacacaauauuuuaau

SEQ ID NO: 301684 - RNA, 22 nt, Human
uagcuuuagaaauauucucaga

SEQ ID NO: 301685 - RNA, 22 nt, Human
cuguccuguggaccugaggacg

SEQ ID NO: 301686 - RNA, 22 nt, Human
ggcuuuaugcacagcagauggu

SEQ ID NO: 301687 - RNA, 21 nt, Human
accucaagcaacaaccaaggu

SEQ ID NO: 301688 - RNA, 22 nt, Human
aaggccaucuacuuacggaauu

SEQ ID NO: 301689 - RNA, 21 nt, Human
ggugacacguggccccgcucu

SEQ ID NO: 301690 - RNA, 22 nt, Human
ucagacagaaagaugaguaugg

SEQ ID NO: 301691 - RNA, 22 nt, Human
uuccugggugguccugguagag

SEQ ID NO: 301692 - RNA, 22 nt, Human
gugugucccuacaacagcuuca

SEQ ID NO: 301693 - RNA, 22 nt, Human
uggagcugacucacaccagcua

SEQ ID NO: 301694 - RNA, 22 nt, Human
uuuucauugagcaccugaguaa

SEQ ID NO: 301695 - RNA, 22 nt, Human
ggcagguguuuuuauauuaaag

SEQ ID NO: 301696 - RNA, 22 nt, Human
accauuugacucucuaaggaua

SEQ ID NO: 301697 - RNA, 22 nt, Human
uuccaugaaauguguuaugcuu

SEQ ID NO: 301698 - RNA, 19 nt, Human
cuguuauugucagagcucc

SEQ ID NO: 301699 - RNA, 22 nt, Human
acuuagauuccugguaccuccg

SEQ ID NO: 301700 - RNA, 22 nt, Human
uuccuucucagcccucgaggau

SEQ ID NO: 301701 - RNA, 17 nt, Human
ccagguggaaucgugga

SEQ ID NO: 301702 - RNA, 22 nt, Human
aagugcuguuucugaugaaugc

SEQ ID NO: 301703 - RNA, 22 nt, Human
auguaacacccacuuuuauagc

SEQ ID NO: 301704 - RNA, 22 nt, Human
cauguccuucucauugccucau

SEQ ID NO: 301705 - RNA, 22 nt, Human
ccaggccucuggcugcuuaguc

SEQ ID NO: 301706 - RNA, 22 nt, Human
gugcauuugugcaugcacaugu

SEQ ID NO: 301707 - RNA, 22 nt, Human
ugucugggagggacagggcuac

SEQ ID NO: 301708 - RNA, 22 nt, Human
uugucuggucaaaucacuugua

SEQ ID NO: 301709 - RNA, 22 nt, Human
cuguggaaaauuuguauguaau

SEQ ID NO: 301710 - RNA, 16 nt, Human
agcagguguauagugu

SEQ ID NO: 301711 - RNA, 22 nt, Human
uuucuucaauugcuaacaagga

SEQ ID NO: 301712 - RNA, 22 nt, Human
auucacaaaaugauauagauac

SEQ ID NO: 301713 - RNA, 22 nt, Human
uuuauugcuggccaccuguagc

SEQ ID NO: 301714 - RNA, 22 nt, Human
agcagggcaaagucaggcuaac

SEQ ID NO: 301715 - RNA, 22 nt, Human
auugaaucugcacuaguauuuu

SEQ ID NO: 301716 - RNA, 22 nt, Human
acagcaugagaguagcaaaagg

SEQ ID NO: 301717 - RNA, 18 nt, Human
uuaguauaacugccugug

SEQ ID NO: 301718 - RNA, 22 nt, Human
caauguuuuuccuuccuuaaua

SEQ ID NO: 301719 - RNA, 22 nt, Human
uuucaguguaucuuccaaaagc

SEQ ID NO: 301720 - RNA, 22 nt, Human
auaugagaauuggaaaauauca

SEQ ID NO: 301721 - RNA, 22 nt, Human
uuauuccagcuaagaguccugg

SEQ ID NO: 301722 - RNA, 21 nt, Human
agguggucugcagcagcugaa

SEQ ID NO: 301723 - RNA, 22 nt, Human
gaauguaaaauugccuacaaga

SEQ ID NO: 301724 - RNA, 22 nt, Human
ucagggcacauucugcaguggc

SEQ ID NO: 301725 - RNA, 22 nt, Human
acccagccacagcauugaggga

SEQ ID NO: 301726 - RNA, 19 nt, Human
ucuguucacauuguuucgc

SEQ ID NO: 301727 - RNA, 22 nt, Human
aagguggugaguacaguuaggu

SEQ ID NO: 301728 - RNA, 22 nt, Human
cggcaggguugguuuucucuga

SEQ ID NO: 301729 - RNA, 22 nt, Human
aggaccugacuggcuccugcuu

SEQ ID NO: 301730 - RNA, 20 nt, Human
ccuuuauuauuuguaugaug

SEQ ID NO: 301731 - RNA, 22 nt, Human
gagggcucugucuggaagggaa

SEQ ID NO: 301732 - RNA, 22 nt, Human
cuguucauggaaaaauaguugg

SEQ ID NO: 301733 - RNA, 19 nt, Human
uuugaauccagcugguaac

SEQ ID NO: 301734 - RNA, 17 nt, Human
uguccauuugccuggag

SEQ ID NO: 301735 - RNA, 22 nt, Human
guuuuauaauugcuucauaaga

SEQ ID NO: 301736 - RNA, 22 nt, Human
gcagguggcagaggugggaucu

SEQ ID NO: 301737 - RNA, 22 nt, Human
auccacagucuuagccaucaaa

SEQ ID NO: 301738 - RNA, 22 nt, Human
gcaggcaggaaggacuaaguaa

SEQ ID NO: 301739 - RNA, 22 nt, Human
aucuuuauuuauugagcacuua

SEQ ID NO: 301740 - RNA, 22 nt, Human
auuaucuauguagaaugauuuu

SEQ ID NO: 301741 - RNA, 22 nt, Human
uuuagcuucaguucuagcuucu

SEQ ID NO: 301742 - RNA, 22 nt, Human
ccaaggcaggggaucaaaguuu

SEQ ID NO: 301743 - RNA, 22 nt, Human
agggacuauuuacccaucucac

SEQ ID NO: 301744 - RNA, 22 nt, Human
cccagggaagggcuaccugagg

SEQ ID NO: 301745 - RNA, 22 nt, Human
acugaaugaggggugaucuggg

SEQ ID NO: 301746 - RNA, 22 nt, Human
acagacuggagugagagaaaua

SEQ ID NO: 301747 - RNA, 22 nt, Human
uccaugagcuagcuuuccaaag

SEQ ID NO: 301748 - RNA, 22 nt, Human
gcagggacaacugugcaccuga

SEQ ID NO: 301749 - RNA, 22 nt, Human
cauuugaaauaguucauucuug

SEQ ID NO: 301750 - RNA, 20 nt, Human
cacaggcuuacaguuuagau

SEQ ID NO: 301751 - RNA, 22 nt, Human
gguguccuugcagaaggcggcg

SEQ ID NO: 301752 - RNA, 20 nt, Human
ucccaaggaugccugggugu

SEQ ID NO: 301753 - RNA, 22 nt, Human
aucuuucaguuucauaccaauu

SEQ ID NO: 301754 - RNA, 17 nt, Human
ucuucucuuccagucuu

SEQ ID NO: 301755 - RNA, 22 nt, Human
uuauucuuuaaacauauauguu

SEQ ID NO: 301756 - RNA, 19 nt, Human
ugcagggcugcgccugggg

SEQ ID NO: 301757 - RNA, 22 nt, Human
agcucccauuaucuucugaaac

SEQ ID NO: 301758 - RNA, 22 nt, Human
agacaucagcuugugugcaggg

SEQ ID NO: 301759 - RNA, 22 nt, Human
guccaugauucuguguaguaga

SEQ ID NO: 301760 - RNA, 22 nt, Human
aauuugauuuucuuaaaccaua

SEQ ID NO: 301761 - RNA, 22 nt, Human
ggcagggaagcuggcaucacgg

SEQ ID NO: 301762 - RNA, 23 nt, Human
gggcuccagucucugcucaguug

SEQ ID NO: 301763 - RNA, 22 nt, Human
gugagggcagaacccccaggcc

SEQ ID NO: 301764 - RNA, 22 nt, Human
ucauuguuucugcuuuucauga

SEQ ID NO: 301765 - RNA, 18 nt, Human
ggugagggagcuggaagc

SEQ ID NO: 301766 - RNA, 22 nt, Human
cacaugaugguggaagccauag

SEQ ID NO: 301767 - RNA, 22 nt, Human
ccagggcauguaacuaauggug

SEQ ID NO: 301768 - RNA, 22 nt, Human
acauuuaaugauccuacuguga

SEQ ID NO: 301769 - RNA, 20 nt, Human
ucagagagagggugccacuu

SEQ ID NO: 301770 - RNA, 22 nt, Human
uuagcuuuagagccauuacugg

SEQ ID NO: 301771 - RNA, 22 nt, Human
ugacauguggcuuugacccagg

SEQ ID NO: 301772 - RNA, 21 nt, Human
aaucauacaaaacaugucagg

SEQ ID NO: 301773 - RNA, 22 nt, Human
acugugagugauuuccuucugg

SEQ ID NO: 301774 - RNA, 22 nt, Human
acacauauauacauauuugugc

SEQ ID NO: 301775 - RNA, 22 nt, Human
ugaaagcuuguuggaaauguag

SEQ ID NO: 301776 - RNA, 22 nt, Human
aaggugguuugcagacagaaua

SEQ ID NO: 301777 - RNA, 22 nt, Human
agccauccuacuaccucagcau

SEQ ID NO: 301778 - RNA, 22 nt, Human
guucuguacuccaagcucuucc

SEQ ID NO: 301779 - RNA, 22 nt, Human
gagggcuccauuccccgugccc

SEQ ID NO: 301780 - RNA, 22 nt, Human
ucugggcccuaaaccagcucua

SEQ ID NO: 301781 - RNA, 22 nt, Human
gagccuccuccuggugugccga

SEQ ID NO: 301782 - RNA, 22 nt, Human
acuguucauuuggauuucucug

SEQ ID NO: 301783 - RNA, 21 nt, Human
augucaaaugcuuuauuuuau

SEQ ID NO: 301784 - RNA, 22 nt, Human
uuauuguaggccuauuguagaa

SEQ ID NO: 301785 - RNA, 22 nt, Human
ugggaccugcccuggccccauc

SEQ ID NO: 301786 - RNA, 22 nt, Human
aaaauccugcugacucgagaug

SEQ ID NO: 301787 - RNA, 22 nt, Human
aacagacagaaaaaugugaucu

SEQ ID NO: 301788 - RNA, 22 nt, Human
ucacuuuggauuauguaauuuc

SEQ ID NO: 301789 - RNA, 22 nt, Human
ucccaaggugcucggcaacagg

SEQ ID NO: 301790 - RNA, 22 nt, Human
cuauuagguaugugguugcuau

SEQ ID NO: 301791 - RNA, 22 nt, Human
cugggugaguugaugaaggaga

SEQ ID NO: 301792 - RNA, 22 nt, Human
acagguggaaacaugguguugg

SEQ ID NO: 301793 - RNA, 22 nt, Human
cccaggcagccccagaagcuug

SEQ ID NO: 301794 - RNA, 22 nt, Human
ugcuggcugcagugcugucaaa

SEQ ID NO: 301795 - RNA, 22 nt, Human
ucagucuuugcuuaugacaaua

SEQ ID NO: 301796 - RNA, 22 nt, Human
auugcuuuuagugaaauuauau

SEQ ID NO: 301797 - RNA, 22 nt, Human
gggcaggugccagcucccuguc

SEQ ID NO: 301798 - RNA, 22 nt, Human
gugcaaaaguaacugugguuuu

SEQ ID NO: 301799 - RNA, 22 nt, Human
uggaaugucauaccauaaaaga

SEQ ID NO: 301800 - RNA, 22 nt, Human
uugcacuaggaaaaggcagcca

SEQ ID NO: 301801 - RNA, 22 nt, Human
ggucucugaacuuccacugcgc

SEQ ID NO: 301802 - RNA, 22 nt, Human
ugcaggugucuccagggcaggu

SEQ ID NO: 301803 - RNA, 22 nt, Human
cagagcaugaauaaaaguuaca

SEQ ID NO: 301804 - RNA, 22 nt, Human
gcuggaggaggaagugugaggg

SEQ ID NO: 301805 - RNA, 22 nt, Human
auuauaaaccuuugaggguggg

SEQ ID NO: 301806 - RNA, 22 nt, Human
uacagacaaagagcaugcggua

SEQ ID NO: 301807 - RNA, 22 nt, Human
ucuucuccagugcuucugcaca

SEQ ID NO: 301808 - RNA, 22 nt, Human
caccugccugcaggggcuccac

SEQ ID NO: 301809 - RNA, 22 nt, Human
aaucauaauuguauacauucau

SEQ ID NO: 301810 - RNA, 22 nt, Human
ugggcaggugcuauuuuccaug

SEQ ID NO: 301811 - RNA, 22 nt, Human
aaaguucauugaugacugaggu

SEQ ID NO: 301812 - RNA, 22 nt, Human
acuugccuguuacauuucuagu

SEQ ID NO: 301813 - RNA, 21 nt, Human
acucaggagacuaacuauguc

SEQ ID NO: 301814 - RNA, 23 nt, Human
uuccagaguccacaucugccacc

SEQ ID NO: 301815 - RNA, 22 nt, Human
uugaucaaaucagcuacugagg

SEQ ID NO: 301816 - RNA, 22 nt, Human
gauuuuauuagcccaaacuuug

SEQ ID NO: 301817 - RNA, 22 nt, Human
gaauugcuaauccaagugacug

SEQ ID NO: 301818 - RNA, 20 nt, Human
agguauaagaaaugugauuu

SEQ ID NO: 301819 - RNA, 18 nt, Human
uuggcuuugagaacuggu

SEQ ID NO: 301820 - RNA, 22 nt, Human
ucagacaggcuggacagcuugc

SEQ ID NO: 301821 - RNA, 21 nt, Human
uuuucuggaguaugucuccuc

SEQ ID NO: 301822 - RNA, 22 nt, Human
uuucaguucaguuuauuauauc

SEQ ID NO: 301823 - RNA, 22 nt, Human
uccucagauauaaaugagggug

SEQ ID NO: 301824 - RNA, 20 nt, Human
gagucacagaagaagcugaa

SEQ ID NO: 301825 - RNA, 22 nt, Human
auggaggaugugcagcaugggc

SEQ ID NO: 301826 - RNA, 22 nt, Human
caggcauagaagggcaagaaua

SEQ ID NO: 301827 - RNA, 22 nt, Human
cugcagggaugugaggcccguu

SEQ ID NO: 301828 - RNA, 22 nt, Human
uauugauaaggauggcugcaau

SEQ ID NO: 301829 - RNA, 22 nt, Human
uugcagggaaaucagugaggau

SEQ ID NO: 301830 - RNA, 22 nt, Human
uauuucagacacugaucuugca

SEQ ID NO: 301831 - RNA, 22 nt, Human
gggacaugaggccauagugauu

SEQ ID NO: 301832 - RNA, 22 nt, Human
agacuucuuugugagcauuuuc

SEQ ID NO: 301833 - RNA, 22 nt, Human
ugcauggacucaucagacaaga

SEQ ID NO: 301834 - RNA, 22 nt, Human
guucuucaucauuuuagauagg

SEQ ID NO: 301835 - RNA, 22 nt, Human
uuuucauuagaaugacugagaa

SEQ ID NO: 301836 - RNA, 23 nt, Human
aggcagguuugggcucuucuugu

SEQ ID NO: 301837 - RNA, 22 nt, Human
aaaaaguauuggccaugguuga

SEQ ID NO: 301838 - RNA, 22 nt, Human
gccaggcauguccucugcagaa

SEQ ID NO: 301839 - RNA, 22 nt, Human
gugcaaaaauaauugugguuuu

SEQ ID NO: 301840 - RNA, 22 nt, Human
uuccaugccuagaacaggauuc

SEQ ID NO: 301841 - RNA, 22 nt, Human
gaagcacauggcuauagcuauu

SEQ ID NO: 301842 - RNA, 22 nt, Human
uuggaggaggcauuggaggauu

SEQ ID NO: 301843 - RNA, 22 nt, Human
cccaggcaucccauuaaggagc

SEQ ID NO: 301844 - RNA, 22 nt, Human
ggcagguggaaguuggcagagc

SEQ ID NO: 301845 - RNA, 22 nt, Human
ugacauguccaggugguccugu

SEQ ID NO: 301846 - RNA, 22 nt, Human
gcauuauuaauagcugcaugag

SEQ ID NO: 301847 - RNA, 22 nt, Human
uuugacucaguggacguacuag

SEQ ID NO: 301848 - RNA, 22 nt, Human
cuuguugcugaauucaggauuc

SEQ ID NO: 301849 - RNA, 22 nt, Human
ugcauacacaugugcacauacg

SEQ ID NO: 301850 - RNA, 22 nt, Human
uucuuugcccuuaaugaaauaa

SEQ ID NO: 301851 - RNA, 22 nt, Human
cagagggcucggcggccgcucc

SEQ ID NO: 301852 - RNA, 22 nt, Human
ucuggagaggaggauguggaca

SEQ ID NO: 301853 - RNA, 22 nt, Human
auguguccucuggcagguuuag

SEQ ID NO: 301854 - RNA, 22 nt, Human
uggcaaagacugcaaggacuuu

SEQ ID NO: 301855 - RNA, 19 nt, Human
agcugcaaaagguggaacu

SEQ ID NO: 301856 - RNA, 22 nt, Human
uuugacucuugcccaguuuggc

SEQ ID NO: 301857 - RNA, 22 nt, Human
aaagugguucuuacauccgugg

SEQ ID NO: 301858 - RNA, 22 nt, Human
cugaggcucaagggcagguggg

SEQ ID NO: 301859 - RNA, 21 nt, Human
uggaccuguccuucucgcugu

SEQ ID NO: 301860 - RNA, 22 nt, Human
uuugcuuaaaguucuuucuggu

SEQ ID NO: 301861 - RNA, 22 nt, Human
gcaggcaggagcccaacugccu

SEQ ID NO: 301862 - RNA, 22 nt, Human
cuuagggaauugggaggaugcc

SEQ ID NO: 301863 - RNA, 20 nt, Human
ugcuuuaugcuauacuuugu

SEQ ID NO: 301864 - RNA, 22 nt, Human
agaaauguauucuguauguuuu

SEQ ID NO: 301865 - RNA, 22 nt, Human
gagggcucaacuacuacuaggc

SEQ ID NO: 301866 - RNA, 22 nt, Human
gcaguccaaaguggcucucacc

SEQ ID NO: 301867 - RNA, 22 nt, Human
auucagagcacuggguagaauu

SEQ ID NO: 301868 - RNA, 22 nt, Human
caguguggugugcacagcuuag

SEQ ID NO: 301869 - RNA, 22 nt, Human
cagggacccgcacagguagcau

SEQ ID NO: 301870 - RNA, 22 nt, Human
gucuucaauagagccucaauuu

SEQ ID NO: 301871 - RNA, 22 nt, Human
uguggggcugucaggcaacugg

SEQ ID NO: 301872 - RNA, 22 nt, Human
cuccagugagcgcggggcaugg

SEQ ID NO: 301873 - RNA, 22 nt, Human
agcuugauuucucugcagugug

SEQ ID NO: 301874 - RNA, 22 nt, Human
cuguguccuccccaucacuucu

SEQ ID NO: 301875 - RNA, 22 nt, Human
gucugcccucacgccagcuggg

SEQ ID NO: 301876 - RNA, 22 nt, Human
agggcgacaauggagagcguuu

SEQ ID NO: 301877 - RNA, 22 nt, Human
uuuccuaggagauugaucacau

SEQ ID NO: 301878 - RNA, 22 nt, Human
ugggugagccacaggaguuguc

SEQ ID NO: 301879 - RNA, 22 nt, Human
uguggcagcugcugcaggagcu

SEQ ID NO: 301880 - RNA, 22 nt, Human
ucuauaaauuaugcagucucag

SEQ ID NO: 301881 - RNA, 22 nt, Human
gcauguguaugguaggaauauu

SEQ ID NO: 301882 - RNA, 23 nt, Human
uuucaaauuacucugcagaugac

SEQ ID NO: 301883 - RNA, 22 nt, Human
uccugcagagacagaggccuca

SEQ ID NO: 301884 - RNA, 22 nt, Human
auucugggucugggugugauca

SEQ ID NO: 301885 - RNA, 22 nt, Human
uuugucuuggccucaguuuucu

SEQ ID NO: 301886 - RNA, 22 nt, Human
aaagcagagaucauggcuugua

SEQ ID NO: 301887 - RNA, 22 nt, Human
ccagguguagcacugcucacag

SEQ ID NO: 301888 - RNA, 22 nt, Human
caggacugauguuccuccagcc

SEQ ID NO: 301889 - RNA, 22 nt, Human
acagcaggcacacaaggauaga

SEQ ID NO: 301890 - RNA, 22 nt, Human
gacuuuaucuuguccuuccugc

SEQ ID NO: 301891 - RNA, 22 nt, Human
gcagggcucaacaggacacccc

SEQ ID NO: 301892 - RNA, 22 nt, Human
ccuugcucaucccccagugccu

SEQ ID NO: 301893 - RNA, 22 nt, Human
ggagcugaaccccaucgugcug

SEQ ID NO: 301894 - RNA, 22 nt, Human
agccuggaauuaaggaaaugca

SEQ ID NO: 301895 - RNA, 22 nt, Human
cuugucuugcacacgguugcca

SEQ ID NO: 301896 - RNA, 22 nt, Human
acauguaaaaggaacaugcaug

SEQ ID NO: 301897 - RNA, 22 nt, Human
gggaccugggccagaggacagu

SEQ ID NO: 301898 - RNA, 22 nt, Human
agcagguggccuccugucuguc

SEQ ID NO: 301899 - RNA, 22 nt, Human
ucacaggcuugugaacauugca

SEQ ID NO: 301900 - RNA, 22 nt, Human
aaguccaguuucauuugagguc

SEQ ID NO: 301901 - RNA, 22 nt, Human
agagcacggccaccauuuacaa

SEQ ID NO: 301902 - RNA, 22 nt, Human
uccaggcaaaaaccaacuacag

SEQ ID NO: 301903 - RNA, 22 nt, Human
uacaaaguagaaauucaguaaa

SEQ ID NO: 301904 - RNA, 22 nt, Human
uaucuauuauguucuauguguc

SEQ ID NO: 301905 - RNA, 22 nt, Human
gugcuggcaccccucuccaguu

SEQ ID NO: 301906 - RNA, 22 nt, Human
uagacaggagucaggcuagaau

SEQ ID NO: 301907 - RNA, 22 nt, Human
uuuccagggcucuguagaagaa

SEQ ID NO: 301908 - RNA, 22 nt, Human
uggcagggccugaaucuuauac

SEQ ID NO: 301909 - RNA, 22 nt, Human
uuuuauuaucuuugaaugggac

SEQ ID NO: 301910 - RNA, 22 nt, Human
gaaugaaucuguaagugacaag

SEQ ID NO: 301911 - RNA, 22 nt, Human
ggcaggugcaccugagccaucu

SEQ ID NO: 301912 - RNA, 22 nt, Human
uauuccaguucaccuuuucauc

SEQ ID NO: 301913 - RNA, 22 nt, Human
ucagagaggcaauacuguuuaa

SEQ ID NO: 301914 - RNA, 22 nt, Human
uuuccauguguacuggccagaa

SEQ ID NO: 301915 - RNA, 22 nt, Human
acuugguggcgaacgaggguca

SEQ ID NO: 301916 - RNA, 22 nt, Human
gaggaggaaguucucuguaggc

SEQ ID NO: 301917 - RNA, 22 nt, Human
uucacaauagcuggcaucaucu

SEQ ID NO: 301918 - RNA, 22 nt, Human
uauuccagaugaaaucauucag

SEQ ID NO: 301919 - RNA, 22 nt, Human
aagguggugaucaucuugaagg

SEQ ID NO: 301920 - RNA, 16 nt, Human
ucaggugugacuuuuu

SEQ ID NO: 301921 - RNA, 22 nt, Human
auaugagagaggaaagauuuua

SEQ ID NO: 301922 - RNA, 22 nt, Human
acaagaauuuacauguagugga

SEQ ID NO: 301923 - RNA, 22 nt, Human
agacaugugguauaaucagggg

SEQ ID NO: 301924 - RNA, 22 nt, Human
gcuggguggaucggaggcucug

SEQ ID NO: 301925 - RNA, 22 nt, Human
aguguccuagcaagccgguccu

SEQ ID NO: 301926 - RNA, 21 nt, Human
ccagagagagggaaguggguu

SEQ ID NO: 301927 - RNA, 22 nt, Human
gccaggcauucuagaaguagug

SEQ ID NO: 301928 - RNA, 22 nt, Human
ccaggugugagcauucugucuu

SEQ ID NO: 301929 - RNA, 20 nt, Human
uugaagaggauauaucgcuc

SEQ ID NO: 301930 - RNA, 22 nt, Human
ugcuuuauuaagagagaaauuu

SEQ ID NO: 301931 - RNA, 22 nt, Human
agaaaauauucauugagaggcu

SEQ ID NO: 301932 - RNA, 22 nt, Human
ccaaaugugccuguuucaacaa

SEQ ID NO: 301933 - RNA, 22 nt, Human
auugcuuuuaagcaccaccuaa

SEQ ID NO: 301934 - RNA, 22 nt, Human
aggaaucagaauucuuagaauu

SEQ ID NO: 301935 - RNA, 22 nt, Human
ucagggcagaauccaaagaauu

SEQ ID NO: 301936 - RNA, 22 nt, Human
uucuucaaugugcccuguuuuc

SEQ ID NO: 301937 - RNA, 22 nt, Human
gcacccaggccggcgacugcag

SEQ ID NO: 301938 - RNA, 22 nt, Human
uacaaaguaauguauaauaucg

SEQ ID NO: 301939 - RNA, 22 nt, Human
uacuuuuagccuauuugauucu

SEQ ID NO: 301940 - RNA, 22 nt, Human
uuuccuaagguagugauaauuu

SEQ ID NO: 301941 - RNA, 22 nt, Human
ucagacagaaggacuauuugaa

SEQ ID NO: 301942 - RNA, 23 nt, Human
uuuuccagaaucgacucuguaga

SEQ ID NO: 301943 - RNA, 22 nt, Human
uuacaguuuaguccaagccaga

SEQ ID NO: 301944 - RNA, 22 nt, Human
gcaugugucuuuauagcagcau

SEQ ID NO: 301945 - RNA, 23 nt, Human
auucuucauuaucuucuagaaaa

SEQ ID NO: 301946 - RNA, 22 nt, Human
ugcagguguaaauuuucaagag

SEQ ID NO: 301947 - RNA, 22 nt, Human
ccauguguaaauuagauaacuc

SEQ ID NO: 301948 - RNA, 22 nt, Human
ccuggguccuggcagccuccug

SEQ ID NO: 301949 - RNA, 22 nt, Human
gauggaaugaauggcagauaca

SEQ ID NO: 301950 - RNA, 22 nt, Human
uuaagauagaacccaguagucu

SEQ ID NO: 301951 - RNA, 22 nt, Human
ucuuuccuagaggcugaugagu

SEQ ID NO: 301952 - RNA, 22 nt, Human
aggcagguuggggaaaagcacu

SEQ ID NO: 301953 - RNA, 19 nt, Human
ucagggcaguccggucccc

SEQ ID NO: 301954 - RNA, 22 nt, Human
acuugguuggucucacccuguu

SEQ ID NO: 301955 - RNA, 22 nt, Human
guggauuacaagacaguugaga

SEQ ID NO: 301956 - RNA, 22 nt, Human
uaguuaggaaaguccagggagc

SEQ ID NO: 301957 - RNA, 22 nt, Human
ucagguguguuguauuuuacca

SEQ ID NO: 301958 - RNA, 22 nt, Human
acuguucacccagcacuagcag

SEQ ID NO: 301959 - RNA, 22 nt, Human
aagcaauagcaacaacuuuaca

SEQ ID NO: 301960 - RNA, 22 nt, Human
ggguggaagccagagaggucau

SEQ ID NO: 301961 - RNA, 22 nt, Human
ugaauagacuggggcugugaag

SEQ ID NO: 301962 - RNA, 22 nt, Human
aaggugucacugggacaggaaa

SEQ ID NO: 301963 - RNA, 22 nt, Human
cagaugaaggccugaaugucua

SEQ ID NO: 301964 - RNA, 22 nt, Human
uguuucaaagaaagaaaauaua

SEQ ID NO: 301965 - RNA, 22 nt, Human
gacuacucaaacuuucucuaua

SEQ ID NO: 301966 - RNA, 22 nt, Human
ucguccugugcaccugccugca

SEQ ID NO: 301967 - RNA, 22 nt, Human
uaaagcuguucagugcagaaag

SEQ ID NO: 301968 - RNA, 22 nt, Human
ucagaugagugcuuucagcugc

SEQ ID NO: 301969 - RNA, 22 nt, Human
cugaggcugggcauggggucca

SEQ ID NO: 301970 - RNA, 22 nt, Human
uaaauguauaggcacuaaaccu

SEQ ID NO: 301971 - RNA, 22 nt, Human
aucugaagggaaguggaaggca

SEQ ID NO: 301972 - RNA, 22 nt, Human
uauuugcaacauaaaacucuga

SEQ ID NO: 301973 - RNA, 22 nt, Human
uaauuauuugaagacauuagag

SEQ ID NO: 301974 - RNA, 22 nt, Human
gguuuauuaaugugaacuguau

SEQ ID NO: 301975 - RNA, 20 nt, Human
ucagggcaugggacagcccc

SEQ ID NO: 301976 - RNA, 20 nt, Human
ucuuauugucuugaggaguu

SEQ ID NO: 301977 - RNA, 22 nt, Human
ucccagugagaugaaacaggua

SEQ ID NO: 301978 - RNA, 19 nt, Human
aaaugugaugguacaauuc

SEQ ID NO: 301979 - RNA, 23 nt, Human
uuuauuuauuuaggcugagggau

SEQ ID NO: 301980 - RNA, 22 nt, Human
accuuuauagcugauuaugaca

SEQ ID NO: 301981 - RNA, 22 nt, Human
ccuuccagaguucagucugccc

SEQ ID NO: 301982 - RNA, 22 nt, Human
gaggaugguaugaggcaagcaa

SEQ ID NO: 301983 - RNA, 22 nt, Human
agggccucuaccauccaagguu

SEQ ID NO: 301984 - RNA, 22 nt, Human
cuggaaauuggagaugauguuu

SEQ ID NO: 301985 - RNA, 20 nt, Human
uugcuuuaucagacaugaua

SEQ ID NO: 301986 - RNA, 22 nt, Human
uucuuuuccuacacagcgauuu

SEQ ID NO: 301987 - RNA, 22 nt, Human
agcagggcagugaucagaaagg

SEQ ID NO: 301988 - RNA, 22 nt, Human
ucugaagagaaugcugcugaac

SEQ ID NO: 301989 - RNA, 22 nt, Human
ggaccugcccuggcucagaugc

SEQ ID NO: 301990 - RNA, 21 nt, Human
uuccuggggacuuccguggga

SEQ ID NO: 301991 - RNA, 22 nt, Human
uguguccugugaucucuagggu

SEQ ID NO: 301992 - RNA, 21 nt, Human
ucagggcagugggagguuccu

SEQ ID NO: 301993 - RNA, 19 nt, Human
agugugaguaauuggaguu

SEQ ID NO: 301994 - RNA, 22 nt, Human
acuauuagcauaucaugaaugg

SEQ ID NO: 301995 - RNA, 22 nt, Human
cauuguuauagcauuacacacc

SEQ ID NO: 301996 - RNA, 22 nt, Human
ccagggcauccucacaucgcag

SEQ ID NO: 301997 - RNA, 22 nt, Human
ggagcugaggcugaggccucac

SEQ ID NO: 301998 - RNA, 22 nt, Human
cugaggcucccucgggucugcu

SEQ ID NO: 301999 - RNA, 23 nt, Human
gacagagugagaccuugucuuac

SEQ ID NO: 302000 - RNA, 22 nt, Human
ucuguucaugaaauaucuuuuu

SEQ ID NO: 302001 - RNA, 22 nt, Human
ucaagaaagggcuucaccagga

SEQ ID NO: 302002 - RNA, 19 nt, Human
cuuuucaucaacagccaau

SEQ ID NO: 302003 - RNA, 22 nt, Human
cacuugauggaagagcagaaga

SEQ ID NO: 302004 - RNA, 22 nt, Human
gcagcuuucuuuuugcaugucu

SEQ ID NO: 302005 - RNA, 22 nt, Human
uucaugugaauauauuugucuu

SEQ ID NO: 302006 - RNA, 22 nt, Human
cuuauauuuuaggaacagacaa

SEQ ID NO: 302007 - RNA, 22 nt, Human
uguccugggucaaauccugguc

SEQ ID NO: 302008 - RNA, 22 nt, Human
ugcagggccagacuggguugga

SEQ ID NO: 302009 - RNA, 21 nt, Human
uuuagggaggauauuuaacuu

SEQ ID NO: 302010 - RNA, 20 nt, Human
ggcaggcaggagguuuccag

SEQ ID NO: 302011 - RNA, 22 nt, Human
acagggcagcaacuuugugccu

SEQ ID NO: 302012 - RNA, 22 nt, Human
auuaaauuggacgcugggggaa

SEQ ID NO: 302013 - RNA, 22 nt, Human
uuucugcauauguauguaugga

SEQ ID NO: 302014 - RNA, 19 nt, Human
uuuagcuuacguuucauug

SEQ ID NO: 302015 - RNA, 21 nt, Human
agaauaaugguaucauuugcu

SEQ ID NO: 302016 - RNA, 22 nt, Human
aggcagguuacaaaaacuuuau

SEQ ID NO: 302017 - RNA, 22 nt, Human
uuauucuucuucucuugccagg

SEQ ID NO: 302018 - RNA, 22 nt, Human
gggcagguggcagggucucugg

SEQ ID NO: 302019 - RNA, 22 nt, Human
ggcagguguggugaccagagau

SEQ ID NO: 302020 - RNA, 22 nt, Human
aaauuagucgguuuaggaauuu

SEQ ID NO: 302021 - RNA, 22 nt, Human
ccagguggacaaggcuuucaca

SEQ ID NO: 302022 - RNA, 22 nt, Human
caggccuccacuccacgcagac

SEQ ID NO: 302023 - RNA, 23 nt, Human
ugcuggcuuccagcugcucccuc

SEQ ID NO: 302024 - RNA, 22 nt, Human
auuccaguuggguucuaauaca

SEQ ID NO: 302025 - RNA, 22 nt, Human
acuuucaugcucugagcacugg

SEQ ID NO: 302026 - RNA, 22 nt, Human
ggcuuggaaaugguaaugagcu

SEQ ID NO: 302027 - RNA, 22 nt, Human
uucuaaauuuuggaagaugcag

SEQ ID NO: 302028 - RNA, 22 nt, Human
aucugcuugaaugagcaacagg

SEQ ID NO: 302029 - RNA, 18 nt, Human
uuauuggugcugcuguuc

SEQ ID NO: 302030 - RNA, 22 nt, Human
uccaggcacuauauauacuuuu

SEQ ID NO: 302031 - RNA, 22 nt, Human
agggcuccuccccggccuccac

SEQ ID NO: 302032 - RNA, 22 nt, Human
uugacacagaucaauauucaac

SEQ ID NO: 302033 - RNA, 22 nt, Human
ugcuagugugugagauguucaa

SEQ ID NO: 302034 - RNA, 23 nt, Human
ugcaggugauuaauccaguuuca

SEQ ID NO: 302035 - RNA, 22 nt, Human
aauucuagcauugugaaaauau

SEQ ID NO: 302036 - RNA, 22 nt, Human
aggagcugugaaugggaggggu

SEQ ID NO: 302037 - RNA, 22 nt, Human
acuguccauucacucauauuca

SEQ ID NO: 302038 - RNA, 22 nt, Human
auuuuuaugacaaaccauccuc

SEQ ID NO: 302039 - RNA, 22 nt, Human
agggccucugacgcccccagcc

SEQ ID NO: 302040 - RNA, 22 nt, Human
uuuaaauguuuaaaacucguga

SEQ ID NO: 302041 - RNA, 19 nt, Human
auuucaagagguuuauugg

SEQ ID NO: 302042 - RNA, 22 nt, Human
ucuggaugcucugagcccaagg

SEQ ID NO: 302043 - RNA, 22 nt, Human
ugguccuggaagguccugaggg

SEQ ID NO: 302044 - RNA, 19 nt, Human
aucugccuguuaucacaua

SEQ ID NO: 302045 - RNA, 22 nt, Human
gggcaggugugcagagcuguug

SEQ ID NO: 302046 - RNA, 22 nt, Human
guggaggacaaaagaagccuuu

SEQ ID NO: 302047 - RNA, 22 nt, Human
agcaaucaccaccucuauauuu

SEQ ID NO: 302048 - RNA, 22 nt, Human
uuucauggcuaggacuagagug

SEQ ID NO: 302049 - RNA, 22 nt, Human
ggcaggugccaguuggcuuggg

SEQ ID NO: 302050 - RNA, 22 nt, Human
uguacauuuagagcucaauaga

SEQ ID NO: 302051 - RNA, 22 nt, Human
caggugguugagagcuguaggc

SEQ ID NO: 302052 - RNA, 22 nt, Human
gcagggcagaccuccagccuau

SEQ ID NO: 302053 - RNA, 20 nt, Human
aaaaucucccagaaacuuau

SEQ ID NO: 302054 - RNA, 22 nt, Human
ggcuuuauuaacucauccguaa

SEQ ID NO: 302055 - RNA, 22 nt, Human
cuguccuggugcuggggauccc

SEQ ID NO: 302056 - RNA, 22 nt, Human
acaguguguucugggaccucca

SEQ ID NO: 302057 - RNA, 22 nt, Human
ugguuaaguccagaaaggaagc

SEQ ID NO: 302058 - RNA, 22 nt, Human
uucugggagagaaagggccuug

SEQ ID NO: 302059 - RNA, 22 nt, Human
agaaauaugcugauuagaugaa

SEQ ID NO: 302060 - RNA, 22 nt, Human
ucaggaaacuacaguugaacua

SEQ ID NO: 302061 - RNA, 23 nt, Human
uauuagggccaggacuggcaaau

SEQ ID NO: 302062 - RNA, 22 nt, Human
uagcuuuaagacauggugaaug

SEQ ID NO: 302063 - RNA, 22 nt, Human
gcuguggucccucuguccucau

SEQ ID NO: 302064 - RNA, 22 nt, Human
ucagagaguuagugucuuagcu

SEQ ID NO: 302065 - RNA, 22 nt, Human
cugguccuaaagcccuacucca

SEQ ID NO: 302066 - RNA, 22 nt, Human
aaguguuuacuuaaagucaugg

SEQ ID NO: 302067 - RNA, 22 nt, Human
cuuucuucaucaagugccacgu

SEQ ID NO: 302068 - RNA, 19 nt, Human
ugguggaggccccauguuc

SEQ ID NO: 302069 - RNA, 22 nt, Human
ucuguucacugagcaauggcaa

SEQ ID NO: 302070 - RNA, 22 nt, Human
uggagcaggaagucuauggcug

SEQ ID NO: 302071 - RNA, 22 nt, Human
uuuagggaugucagaacaggga

SEQ ID NO: 302072 - RNA, 18 nt, Human
uuugcaaaggaaguaugg

SEQ ID NO: 302073 - RNA, 22 nt, Human
cugaaaauguuacacaggaaga

SEQ ID NO: 302074 - RNA, 18 nt, Human
ugcuuuaugcuuauauaa

SEQ ID NO: 302075 - RNA, 16 nt, Human
gcuggagggagggguu

SEQ ID NO: 302076 - RNA, 22 nt, Human
aagcuguucucuaaguuucaug

SEQ ID NO: 302077 - RNA, 22 nt, Human
agcuuuauauuuaaugaauucu

SEQ ID NO: 302078 - RNA, 22 nt, Human
aaucuucuuucuuaacaguaca

SEQ ID NO: 302079 - RNA, 22 nt, Human
uuugaaauuaagauauugucca

SEQ ID NO: 302080 - RNA, 22 nt, Human
agcuuguuagaaauguagacuc

SEQ ID NO: 302081 - RNA, 22 nt, Human
gggacagaaggaagugagcaca

SEQ ID NO: 302082 - RNA, 22 nt, Human
ugcaaaauaaugaacgauuuuu

SEQ ID NO: 302083 - RNA, 22 nt, Human
cagggcucccuugcaaggaggg

SEQ ID NO: 302084 - RNA, 19 nt, Human
agcugcagaccagaagugc

SEQ ID NO: 302085 - RNA, 22 nt, Human
uuuguacauccuaauucugagu

SEQ ID NO: 302086 - RNA, 22 nt, Human
uuauuggaaaagggcuguaauu

SEQ ID NO: 302087 - RNA, 22 nt, Human
ggauguugauugaauggccauu

SEQ ID NO: 302088 - RNA, 22 nt, Human
agucacccuccaacucuccacu

SEQ ID NO: 302089 - RNA, 22 nt, Human
cuauuauuauguuaacuggacu

SEQ ID NO: 302090 - RNA, 22 nt, Human
gaggcagcgggucaggaccgug

SEQ ID NO: 302091 - RNA, 23 nt, Human
ccacagagcugccaauuccugug

SEQ ID NO: 302092 - RNA, 22 nt, Human
uucuuaaagaggcaaaacacag

SEQ ID NO: 302093 - RNA, 21 nt, Human
gcauguguggugugcuccaca

SEQ ID NO: 302094 - RNA, 22 nt, Human
cucugaccauucccuugauuuu

SEQ ID NO: 302095 - RNA, 22 nt, Human
ugcaggugacaccacucuuccu

SEQ ID NO: 302096 - RNA, 22 nt, Human
ggagcugagcagcgauggcgga

SEQ ID NO: 302097 - RNA, 22 nt, Human
ccugggugucaugggcagcugg

SEQ ID NO: 302098 - RNA, 22 nt, Human
gcuggccuugaggugucuuuau

SEQ ID NO: 302099 - RNA, 22 nt, Human
augacagaggagugcaggugau

SEQ ID NO: 302100 - RNA, 22 nt, Human
ggcaggcacaguaauacauguu

SEQ ID NO: 302101 - RNA, 22 nt, Human
cuuccuccgaagaaguugcugg

SEQ ID NO: 302102 - RNA, 22 nt, Human
ucaggugucaagcagggagcug

SEQ ID NO: 302103 - RNA, 22 nt, Human
uuugcaaagugacuauuauaug

SEQ ID NO: 302104 - RNA, 22 nt, Human
auuugcuuaucuccacaguugu

SEQ ID NO: 302105 - RNA, 22 nt, Human
aauacauauggaauuccauguu

SEQ ID NO: 302106 - RNA, 22 nt, Human
ccagcuuucucagaggcuucua

SEQ ID NO: 302107 - RNA, 17 nt, Human
uucagaagcauuuuggc

SEQ ID NO: 302108 - RNA, 22 nt, Human
ugcagggauuauguagggguug

SEQ ID NO: 302109 - RNA, 22 nt, Human
uuauuagcugggcuucagggug

SEQ ID NO: 302110 - RNA, 22 nt, Human
ccaggugugguggcauacaccu

SEQ ID NO: 302111 - RNA, 22 nt, Human
gacauguugaagaauauuugga

SEQ ID NO: 302112 - RNA, 23 nt, Human
uuguccucuggaucgguuugguu

SEQ ID NO: 302113 - RNA, 22 nt, Human
uagaauaugauuaauuuucuua

SEQ ID NO: 302114 - RNA, 22 nt, Human
uuaagcauggaagugaaauaau

SEQ ID NO: 302115 - RNA, 22 nt, Human
ugccugggaucugugcccuuug

SEQ ID NO: 302116 - RNA, 22 nt, Human
agcagguguuuguaucauaagg

SEQ ID NO: 302117 - RNA, 21 nt, Human
aguugcauaggccagccaucc

SEQ ID NO: 302118 - RNA, 22 nt, Human
gagcuuuacuucugacuggugc

SEQ ID NO: 302119 - RNA, 22 nt, Human
cugcggugggcugggcuguccc

SEQ ID NO: 302120 - RNA, 22 nt, Human
uuccucagggaggcuagcagua

SEQ ID NO: 302121 - RNA, 22 nt, Human
uuucuucagccuucacaaccug

SEQ ID NO: 302122 - RNA, 18 nt, Human
ucuugccugcacccucuc

SEQ ID NO: 302123 - RNA, 22 nt, Human
gacaggcuuugagucccagaac

SEQ ID NO: 302124 - RNA, 22 nt, Human
uuuugagauggugucucgcucc

SEQ ID NO: 302125 - RNA, 22 nt, Human
cagaugagaguggccaggguuc

SEQ ID NO: 302126 - RNA, 22 nt, Human
ucuggagggggaugccucaucc

SEQ ID NO: 302127 - RNA, 22 nt, Human
gcaucuaaacuugcaucauugu

SEQ ID NO: 302128 - RNA, 22 nt, Human
uacaucuaucuagaugcucaga

SEQ ID NO: 302129 - RNA, 22 nt, Human
uuuaaaauuuagaccucuccac

SEQ ID NO: 302130 - RNA, 22 nt, Human
cuuuucaugagucuguuauggg

SEQ ID NO: 302131 - RNA, 22 nt, Human
gcaaggacucccugggucauuc

SEQ ID NO: 302132 - RNA, 22 nt, Human
gggacuuaaugcagagagggac

SEQ ID NO: 302133 - RNA, 22 nt, Human
ggcaggcaggucuucauggccc

SEQ ID NO: 302134 - RNA, 22 nt, Human
ugcuccuucccuucccagugag

SEQ ID NO: 302135 - RNA, 22 nt, Human
auuugcugagcucaaagaaaag

SEQ ID NO: 302136 - RNA, 22 nt, Human
aaccugcaguuuuuauucugag

SEQ ID NO: 302137 - RNA, 22 nt, Human
cagggcaguaccgcccucuggc

SEQ ID NO: 302138 - RNA, 22 nt, Human
ggcaggugcucaaaaauauuug

SEQ ID NO: 302139 - RNA, 22 nt, Human
aggcagggucuugcuauguugc

SEQ ID NO: 302140 - RNA, 22 nt, Human
uuuaaaaucagaugggaguugg

SEQ ID NO: 302141 - RNA, 22 nt, Human
gagagacagcacacaguguggg

SEQ ID NO: 302142 - RNA, 22 nt, Human
cuguguccauguucuaauuugg

SEQ ID NO: 302143 - RNA, 22 nt, Human
uuucacaaaugucuuuaacuug

SEQ ID NO: 302144 - RNA, 22 nt, Human
ccaggugggaggaaagcagaga

SEQ ID NO: 302145 - RNA, 22 nt, Human
agggcuccaggggaccaucagu

SEQ ID NO: 302146 - RNA, 21 nt, Human
guccagagagccggcuccuga

SEQ ID NO: 302147 - RNA, 22 nt, Human
aggcagggaccaguuguuuucu

SEQ ID NO: 302148 - RNA, 22 nt, Human
uauugcugacuuguucaguguu

SEQ ID NO: 302149 - RNA, 22 nt, Human
gcagggacgcagcacucuccgu

SEQ ID NO: 302150 - RNA, 22 nt, Human
ggguauuaaaaugaaggagaaa

SEQ ID NO: 302151 - RNA, 20 nt, Human
ggcaggaccccaguggcauc

SEQ ID NO: 302152 - RNA, 22 nt, Human
ugguuccacuaaccugagagcc

SEQ ID NO: 302153 - RNA, 22 nt, Human
cagaugaacucuauccuguggc

SEQ ID NO: 302154 - RNA, 22 nt, Human
ugaccugcguaggugguuucug

SEQ ID NO: 302155 - RNA, 22 nt, Human
aauuagggaggacaaagguaca

SEQ ID NO: 302156 - RNA, 22 nt, Human
uagcuuuaagaugagaugugga

SEQ ID NO: 302157 - RNA, 22 nt, Human
cucuggaaaauugugugggggu

SEQ ID NO: 302158 - RNA, 19 nt, Human
ucaaaggcuuuuaggagac

SEQ ID NO: 302159 - RNA, 22 nt, Human
aauuucagagguagagauucua

SEQ ID NO: 302160 - RNA, 22 nt, Human
agaagucauuuauguuagauga

SEQ ID NO: 302161 - RNA, 20 nt, Human
guguuucaugugauacaaug

SEQ ID NO: 302162 - RNA, 22 nt, Human
uaguauuuccuguaagcuauag

SEQ ID NO: 302163 - RNA, 22 nt, Human
uuugcuugacccuugugcugaa

SEQ ID NO: 302164 - RNA, 22 nt, Human
acuguacuuuagaaaguguagu

SEQ ID NO: 302165 - RNA, 17 nt, Human
aaugaaugaauucuuug

SEQ ID NO: 302166 - RNA, 22 nt, Human
gcauguguugguuuaugcaugu

SEQ ID NO: 302167 - RNA, 22 nt, Human
aaaugucagaagcuuuacuucu

SEQ ID NO: 302168 - RNA, 22 nt, Human
cucugaauggacacuccagugu

SEQ ID NO: 302169 - RNA, 21 nt, Human
uuugacuccucauuuuuauau

SEQ ID NO: 302170 - RNA, 22 nt, Human
cagggcucagggacugcagaaa

SEQ ID NO: 302171 - RNA, 22 nt, Human
ggcauccaaauaccaagaugua

SEQ ID NO: 302172 - RNA, 22 nt, Human
auacagauguugaauguuauau

SEQ ID NO: 302173 - RNA, 22 nt, Human
guucuucaguaaaauuaaaugu

SEQ ID NO: 302174 - RNA, 22 nt, Human
acuguucauauucuuagaaauu

SEQ ID NO: 302175 - RNA, 22 nt, Human
acacacaauuaguuuuaugcuu

SEQ ID NO: 302176 - RNA, 21 nt, Human
ccuucuccauuacaguaagcu

SEQ ID NO: 302177 - RNA, 22 nt, Human
aaagauuauggcauugaaauac

SEQ ID NO: 302178 - RNA, 22 nt, Human
gcugggucucucccugguccug

SEQ ID NO: 302179 - RNA, 22 nt, Human
uaaaacuuaacuauccagauua

SEQ ID NO: 302180 - RNA, 22 nt, Human
uauguauagagucuuuuaaauu

SEQ ID NO: 302181 - RNA, 22 nt, Human
caucuucagguucauggucaua

SEQ ID NO: 302182 - RNA, 22 nt, Human
cugcugccccugagcucagccu

SEQ ID NO: 302183 - RNA, 22 nt, Human
uuccucagcucagcgagagaga

SEQ ID NO: 302184 - RNA, 22 nt, Human
uuugaacugauaaucuucuguu

SEQ ID NO: 302185 - RNA, 22 nt, Human
ugcuggaauaauuucauguuaa

SEQ ID NO: 302186 - RNA, 22 nt, Human
gugaccaucagagaauaacaaa

SEQ ID NO: 302187 - RNA, 22 nt, Human
aaggcucccucuucucgagugu

SEQ ID NO: 302188 - RNA, 22 nt, Human
uuaguuguaaaauggaauuugu

SEQ ID NO: 302189 - RNA, 21 nt, Human
ucauuugugaucugauuucca

SEQ ID NO: 302190 - RNA, 22 nt, Human
gcaggcaguugcaguuuucuag

SEQ ID NO: 302191 - RNA, 22 nt, Human
ugcaggguauccuugucucugc

SEQ ID NO: 302192 - RNA, 22 nt, Human
agucacaguuccuacccaguaa

SEQ ID NO: 302193 - RNA, 22 nt, Human
uagggcucagcucuagcuccug

SEQ ID NO: 302194 - RNA, 22 nt, Human
agcagggccucuggcacugguc

SEQ ID NO: 302195 - RNA, 22 nt, Human
cgggcuccgggucuuugcaguc

SEQ ID NO: 302196 - RNA, 22 nt, Human
cagggcaguaacgggaacaucu

SEQ ID NO: 302197 - RNA, 21 nt, Human
aucauucuggaaaauucaagc

SEQ ID NO: 302198 - RNA, 22 nt, Human
acaggacauguaccaggugguc

SEQ ID NO: 302199 - RNA, 22 nt, Human
uccuucuuugacaaguggcaga

SEQ ID NO: 302200 - RNA, 17 nt, Human
gggcugacaguggccuc

SEQ ID NO: 302201 - RNA, 23 nt, Human
uggaauguuucuuguacugaaug

SEQ ID NO: 302202 - RNA, 22 nt, Human
ucuguucauaguaguguauaug

SEQ ID NO: 302203 - RNA, 22 nt, Human
uguuuacugcauucuauuugcu

SEQ ID NO: 302204 - RNA, 21 nt, Human
uggccaaacuggagcauuuga

SEQ ID NO: 302205 - RNA, 22 nt, Human
aauacaguagguaauaguucau

SEQ ID NO: 302206 - RNA, 21 nt, Human
uaaaggcuuuagaauggcaaa

SEQ ID NO: 302207 - RNA, 22 nt, Human
uucuuguauguaugcaaaauca

SEQ ID NO: 302208 - RNA, 22 nt, Human
cccaggcagagagcuggugagc

SEQ ID NO: 302209 - RNA, 22 nt, Human
aauagugaacaggaacaugcuu

SEQ ID NO: 302210 - RNA, 22 nt, Human
uuagugguaaggaugaaauuuc

SEQ ID NO: 302211 - RNA, 22 nt, Human
gcagggcaucccugagcgggug

SEQ ID NO: 302212 - RNA, 22 nt, Human
cauuuguaucauauguaucuua

SEQ ID NO: 302213 - RNA, 22 nt, Human
caacuuuaauuugggugucaga

SEQ ID NO: 302214 - RNA, 22 nt, Human
agacagguaaauagagaugcug

SEQ ID NO: 302215 - RNA, 22 nt, Human
ucuuuccucugagcuccuguag

SEQ ID NO: 302216 - RNA, 22 nt, Human
gggcucucaaggcagggcccca

SEQ ID NO: 302217 - RNA, 22 nt, Human
ucauuuauaaggaugcaauuaa

SEQ ID NO: 302218 - RNA, 22 nt, Human
cagcaugaauguguucguaggg

SEQ ID NO: 302219 - RNA, 22 nt, Human
uuuguaaauagcaguacucaug

SEQ ID NO: 302220 - RNA, 17 nt, Human
gcuccuucuaacuucca

SEQ ID NO: 302221 - RNA, 22 nt, Human
uguuuuaaagccauugccuuuc

SEQ ID NO: 302222 - RNA, 19 nt, Human
accaggcuuauggucagug

SEQ ID NO: 302223 - RNA, 18 nt, Human
uuucacaaccuccagagg

SEQ ID NO: 302224 - RNA, 22 nt, Human
acuguccuggagcucacacucu

SEQ ID NO: 302225 - RNA, 22 nt, Human
auaguuuuaaaaccucaggaag

SEQ ID NO: 302226 - RNA, 22 nt, Human
cuguggaaggccuguccugaaa

SEQ ID NO: 302227 - RNA, 22 nt, Human
auauauuuacucuccuguugca

SEQ ID NO: 302228 - RNA, 22 nt, Human
uacauguauguguacgugcaug

SEQ ID NO: 302229 - RNA, 22 nt, Human
cacgguggcccacaggugcaag

SEQ ID NO: 302230 - RNA, 22 nt, Human
acagucauuagauacaaugucu

SEQ ID NO: 302231 - RNA, 22 nt, Human
gcugccacucugagcuugcuuc

SEQ ID NO: 302232 - RNA, 22 nt, Human
ucuggccugaaaguccaugcuu

SEQ ID NO: 302233 - RNA, 22 nt, Human
gacuuuauuuuaacggagauuc

SEQ ID NO: 302234 - RNA, 22 nt, Human
gagggaccuuuacacagacauu

SEQ ID NO: 302235 - RNA, 22 nt, Human
cauucauuagaauagauaugua

SEQ ID NO: 302236 - RNA, 22 nt, Human
acaggugugcggaaagcuguga

SEQ ID NO: 302237 - RNA, 22 nt, Human
acauuaaacuugcuuggcugua

SEQ ID NO: 302238 - RNA, 22 nt, Human
ucaagagauugaauaauaacug

SEQ ID NO: 302239 - RNA, 22 nt, Human
auggcuggauaguugaagcucu

SEQ ID NO: 302240 - RNA, 22 nt, Human
cagacagggguaaccuuccuca

SEQ ID NO: 302241 - RNA, 21 nt, Human
ccuuuacaauuuugcauuccu

SEQ ID NO: 302242 - RNA, 22 nt, Human
augaguugaagcuacaagaggc

SEQ ID NO: 302243 - RNA, 22 nt, Human
auaacaugaccugugcuucaca

SEQ ID NO: 302244 - RNA, 22 nt, Human
guuucauuaccugacccaugag

SEQ ID NO: 302245 - RNA, 22 nt, Human
uuuuccagagcugucucuugca

SEQ ID NO: 302246 - RNA, 22 nt, Human
agacagacggcuuuauacacag

SEQ ID NO: 302247 - RNA, 22 nt, Human
cagcuuuaguaacccacugcuc

SEQ ID NO: 302248 - RNA, 22 nt, Human
uucagaaguagcuaagcaguca

SEQ ID NO: 302249 - RNA, 22 nt, Human
uccugggucucuuccuuaguuc

SEQ ID NO: 302250 - RNA, 22 nt, Human
gcagacagaugagggugcuggg

SEQ ID NO: 302251 - RNA, 22 nt, Human
agagagcaguggaucaccuagc

SEQ ID NO: 302252 - RNA, 22 nt, Human
cucuuccuacagucugcuaugc

SEQ ID NO: 302253 - RNA, 22 nt, Human
uaggugguuaugucagccuaga

SEQ ID NO: 302254 - RNA, 22 nt, Human
uccagaccauggauggcugcaa

SEQ ID NO: 302255 - RNA, 22 nt, Human
cagcuuugugcaaugcagucuc

SEQ ID NO: 302256 - RNA, 19 nt, Human
uuugcagugguuccuuugu

SEQ ID NO: 302257 - RNA, 22 nt, Human
cuuuauauauucccaggcugcc

SEQ ID NO: 302258 - RNA, 22 nt, Human
ucagguggaauuaauuaagaga

SEQ ID NO: 302259 - RNA, 22 nt, Human
cuguccugauggugccacuggu

SEQ ID NO: 302260 - RNA, 22 nt, Human
ucagggacgugagcucagaguc

SEQ ID NO: 302261 - RNA, 22 nt, Human
gcccagcuggcuuccagcacau

SEQ ID NO: 302262 - RNA, 22 nt, Human
augcauaauguauguauugacu

SEQ ID NO: 302263 - RNA, 22 nt, Human
ugggucuguagggcuguccaau

SEQ ID NO: 302264 - RNA, 22 nt, Human
ucacugugcucucuagauaggc

SEQ ID NO: 302265 - RNA, 22 nt, Human
gagacaggcagcuaguggguca

SEQ ID NO: 302266 - RNA, 22 nt, Human
ccaguguguuaguggauuuccc

SEQ ID NO: 302267 - RNA, 20 nt, Human
uccaggcagacagcuauggg

SEQ ID NO: 302268 - RNA, 22 nt, Human
gaggugguuuguggugacucau

SEQ ID NO: 302269 - RNA, 22 nt, Human
acagggcaaccucugggagacu

SEQ ID NO: 302270 - RNA, 22 nt, Human
aguguuugucccguuagaaaug

SEQ ID NO: 302271 - RNA, 22 nt, Human
gaaugagggagauguuggugca

SEQ ID NO: 302272 - RNA, 22 nt, Human
guugggguaccuugaggcuggg

SEQ ID NO: 302273 - RNA, 22 nt, Human
accucaagugauccacucaccu

SEQ ID NO: 302274 - RNA, 22 nt, Human
ccuguucacgguguguuguuag

SEQ ID NO: 302275 - RNA, 22 nt, Human
caggugguuguuuggauucuaa

SEQ ID NO: 302276 - RNA, 22 nt, Human
aagcugcacuacuugagggacc

SEQ ID NO: 302277 - RNA, 22 nt, Human
ggcaggcauugcaacauguaca

SEQ ID NO: 302278 - RNA, 22 nt, Human
agguguccaauccugguuggau

SEQ ID NO: 302279 - RNA, 22 nt, Human
caaaaaacacagaugucugugu

SEQ ID NO: 302280 - RNA, 22 nt, Human
gcugccagucuaaugggaaaca

SEQ ID NO: 302281 - RNA, 23 nt, Human
ugcagggcaaguuagagacccca

SEQ ID NO: 302282 - RNA, 22 nt, Human
aggaccugccaggugcaaagca

SEQ ID NO: 302283 - RNA, 23 nt, Human
guuccuucauguggucauugguu

SEQ ID NO: 302284 - RNA, 22 nt, Human
agcuuuaucccuugcccaucga

SEQ ID NO: 302285 - RNA, 22 nt, Human
guuucuuuugugaucaccaacc

SEQ ID NO: 302286 - RNA, 22 nt, Human
aaacuuucauguaucucuuuca

SEQ ID NO: 302287 - RNA, 22 nt, Human
gaaguuuauuucaaucuauuca

SEQ ID NO: 302288 - RNA, 17 nt, Human
ugauaguucauuuuaag

SEQ ID NO: 302289 - RNA, 21 nt, Human
uccugcaggaggccugagagg

SEQ ID NO: 302290 - RNA, 22 nt, Human
ccagguguggggaggacucaca

SEQ ID NO: 302291 - RNA, 22 nt, Human
aacaaugugaagugcuguucag

SEQ ID NO: 302292 - RNA, 22 nt, Human
aggaaacuguccccucauccua

SEQ ID NO: 302293 - RNA, 22 nt, Human
agucagguacuccgagggcaug

SEQ ID NO: 302294 - RNA, 22 nt, Human
accucaagaauguauaacacag

SEQ ID NO: 302295 - RNA, 22 nt, Human
uuccaugaagggcagccucuca

SEQ ID NO: 302296 - RNA, 19 nt, Human
auuuauuguaugauuccau

SEQ ID NO: 302297 - RNA, 22 nt, Human
acagggcagagaggcaggcuug

SEQ ID NO: 302298 - RNA, 17 nt, Human
ucuguucaugcauaccu

SEQ ID NO: 302299 - RNA, 22 nt, Human
cucuggccugcuuccucaggua

SEQ ID NO: 302300 - RNA, 22 nt, Human
gggcugacucugcacugagcca

SEQ ID NO: 302301 - RNA, 22 nt, Human
aacuugguuguuggcaauuugc

SEQ ID NO: 302302 - RNA, 20 nt, Human
uacagaaugcaauaaaaugg

SEQ ID NO: 302303 - RNA, 20 nt, Human
agcauuugaaauaugacuau

SEQ ID NO: 302304 - RNA, 22 nt, Human
ccaggugugccagcagggacug

SEQ ID NO: 302305 - RNA, 22 nt, Human
gccugcaguucugugcuaggca

SEQ ID NO: 302306 - RNA, 22 nt, Human
uugcuuuauuggguuuacugcc

SEQ ID NO: 302307 - RNA, 22 nt, Human
ggcagguggauuuucuacucua

SEQ ID NO: 302308 - RNA, 22 nt, Human
aguguccuugagguuccuagga

SEQ ID NO: 302309 - RNA, 22 nt, Human
uuagcuuucagccuuucucacc

SEQ ID NO: 302310 - RNA, 22 nt, Human
acuguucauccuuuuugaacaa

SEQ ID NO: 302311 - RNA, 20 nt, Human
cuugguggcucugggaagug

SEQ ID NO: 302312 - RNA, 22 nt, Human
guuucauuuacaucuguaggua

SEQ ID NO: 302313 - RNA, 22 nt, Human
uauuuguagaauggauuaaggg

SEQ ID NO: 302314 - RNA, 22 nt, Human
acagcuuuguguuaaugggaag

SEQ ID NO: 302315 - RNA, 22 nt, Human
uguccuuugggagggcacagcu

SEQ ID NO: 302316 - RNA, 22 nt, Human
cugcaggguuuuucaaggacaa

SEQ ID NO: 302317 - RNA, 22 nt, Human
gggcagguaggugaaauaauga

SEQ ID NO: 302318 - RNA, 19 nt, Human
ccaggccucuggggccugu

SEQ ID NO: 302319 - RNA, 22 nt, Human
auugcugaaaguauuuuaugac

SEQ ID NO: 302320 - RNA, 22 nt, Human
cagggcacggagaagucacccc

SEQ ID NO: 302321 - RNA, 22 nt, Human
cugggugauuccuguccaggca

SEQ ID NO: 302322 - RNA, 22 nt, Human
aaugugucuaugugguucacag

SEQ ID NO: 302323 - RNA, 22 nt, Human
ucagcacugaaauucuucacau

SEQ ID NO: 302324 - RNA, 22 nt, Human
gcccaggccggagagcagugcu

SEQ ID NO: 302325 - RNA, 22 nt, Human
gcaugcagucaaccaguaaggg

SEQ ID NO: 302326 - RNA, 22 nt, Human
acaguaaaucaacagaauaucu

SEQ ID NO: 302327 - RNA, 18 nt, Human
uccuaacuuagauacucc

SEQ ID NO: 302328 - RNA, 20 nt, Human
gacaggugcuaaagaggggc

SEQ ID NO: 302329 - RNA, 22 nt, Human
auuguauaagucuauuuacaau

SEQ ID NO: 302330 - RNA, 22 nt, Human
gacaugugagagcucgguuuuc

SEQ ID NO: 302331 - RNA, 22 nt, Human
gugggguagaucuuucucagga

SEQ ID NO: 302332 - RNA, 22 nt, Human
ggcuuucucacagcauggcagc

SEQ ID NO: 302333 - RNA, 22 nt, Human
gacucguucauaguuccaauuu

SEQ ID NO: 302334 - RNA, 22 nt, Human
uucuuuucccaauauuuugcug

SEQ ID NO: 302335 - RNA, 22 nt, Human
gcuggcugaguucugucgucug

SEQ ID NO: 302336 - RNA, 22 nt, Human
gugcaaaaggcauugugguuuu

SEQ ID NO: 302337 - RNA, 22 nt, Human
uuucauugucuacauaugacau

SEQ ID NO: 302338 - RNA, 22 nt, Human
gcagcuuuaaaggaggcucuga

SEQ ID NO: 302339 - RNA, 22 nt, Human
aaggugucauuguuuauggaga

SEQ ID NO: 302340 - RNA, 22 nt, Human
ccucccuuuuggugucugcaua

SEQ ID NO: 302341 - RNA, 17 nt, Human
ugacagacaucaugagc

SEQ ID NO: 302342 - RNA, 22 nt, Human
agcuuuaucacaauauuggcua

SEQ ID NO: 302343 - RNA, 22 nt, Human
ucuguucaucaucuggacacau

SEQ ID NO: 302344 - RNA, 22 nt, Human
gcuguucauuagaaauagaaug

SEQ ID NO: 302345 - RNA, 22 nt, Human
caguguuuguauagaauaugca

SEQ ID NO: 302346 - RNA, 22 nt, Human
uucagaaugugaccuuauuugg

SEQ ID NO: 302347 - RNA, 22 nt, Human
agguggggccaaaugcuacagu

SEQ ID NO: 302348 - RNA, 22 nt, Human
ugcaaaaaggcagacuggugau

SEQ ID NO: 302349 - RNA, 19 nt, Human
aauuagggagucgguuaag

SEQ ID NO: 302350 - RNA, 22 nt, Human
augagagguuucgucagaggaa

SEQ ID NO: 302351 - RNA, 22 nt, Human
ucaguucugcuagaaaaacagu

SEQ ID NO: 302352 - RNA, 22 nt, Human
caggugguuaugaggaagguga

SEQ ID NO: 302353 - RNA, 22 nt, Human
caauuucugggccucacacaag

SEQ ID NO: 302354 - RNA, 22 nt, Human
ugcaugaacacaugugcaugua

SEQ ID NO: 302355 - RNA, 22 nt, Human
cuucauuggcuuccauagaugc

SEQ ID NO: 302356 - RNA, 22 nt, Human
agaaagaggaugcagaucucau

SEQ ID NO: 302357 - RNA, 22 nt, Human
uuuauugagcacccguugugcg

SEQ ID NO: 302358 - RNA, 22 nt, Human
uuucuguagugugguauguagg

SEQ ID NO: 302359 - RNA, 22 nt, Human
caggcagggagcuggaaaggau

SEQ ID NO: 302360 - RNA, 22 nt, Human
acagguguggggcugugguacu

SEQ ID NO: 302361 - RNA, 22 nt, Human
gcugcgguggcuggcgauggga

SEQ ID NO: 302362 - RNA, 22 nt, Human
uggcagggaauacagauguuua

SEQ ID NO: 302363 - RNA, 22 nt, Human
gggaccugaggcccugcuccac

SEQ ID NO: 302364 - RNA, 22 nt, Human
cuuuccaaugcauuuccaaugu

SEQ ID NO: 302365 - RNA, 22 nt, Human
auacuuuuaauuccuucugagu

SEQ ID NO: 302366 - RNA, 22 nt, Human
uucaacuagauuuauacaauuc

SEQ ID NO: 302367 - RNA, 18 nt, Human
ucuguccuuccauucuuc

SEQ ID NO: 302368 - RNA, 18 nt, Human
uguuuauuuuucucuuac

SEQ ID NO: 302369 - RNA, 22 nt, Human
auguguccugcugugucacaca

SEQ ID NO: 302370 - RNA, 22 nt, Human
ucagggacugcagagggaagcu

SEQ ID NO: 302371 - RNA, 22 nt, Human
uccuguuuaucugugugacucg

SEQ ID NO: 302372 - RNA, 22 nt, Human
caugggggucuggacaacaggc

SEQ ID NO: 302373 - RNA, 22 nt, Human
accaugaugcauccuuaaggaa

SEQ ID NO: 302374 - RNA, 22 nt, Human
uuccuuucccucacagccucgg

SEQ ID NO: 302375 - RNA, 22 nt, Human
caggacauugauccauuggcac

SEQ ID NO: 302376 - RNA, 22 nt, Human
gcaggcaguuauuuaguagaau

SEQ ID NO: 302377 - RNA, 22 nt, Human
gucccauaaguagugcaacuug

SEQ ID NO: 302378 - RNA, 22 nt, Human
ucagggcagguuaacuugggug

SEQ ID NO: 302379 - RNA, 22 nt, Human
uacauaauugucuuuguccuca

SEQ ID NO: 302380 - RNA, 22 nt, Human
gcagggcacaaggacgcacagg

SEQ ID NO: 302381 - RNA, 22 nt, Human
ugcauguuaagaaaauauugag

SEQ ID NO: 302382 - RNA, 22 nt, Human
cagugagguggauggauggccu

SEQ ID NO: 302383 - RNA, 22 nt, Human
ggcaggugaccuggccucccag

SEQ ID NO: 302384 - RNA, 22 nt, Human
ucacugugaauguuaucaucuu

SEQ ID NO: 302385 - RNA, 22 nt, Human
uggcagggaguugcaggauuuc

SEQ ID NO: 302386 - RNA, 22 nt, Human
accacugcccauggugaaaacu

SEQ ID NO: 302387 - RNA, 22 nt, Human
ggggcucaguucggacagccug

SEQ ID NO: 302388 - RNA, 22 nt, Human
aaaauuauagaucuagugccug

SEQ ID NO: 302389 - RNA, 22 nt, Human
uugcaggguuaaaguaagguag

SEQ ID NO: 302390 - RNA, 22 nt, Human
ugagggagcacacacugaagug

SEQ ID NO: 302391 - RNA, 21 nt, Human
uugcugcccucccuuuccuca

SEQ ID NO: 302392 - RNA, 22 nt, Human
uuccuggggcgacuguaucuga

SEQ ID NO: 302393 - RNA, 22 nt, Human
uuggcaaaauuuaaagaaguga

SEQ ID NO: 302394 - RNA, 22 nt, Human
ugggccaggucugugucagcug

SEQ ID NO: 302395 - RNA, 22 nt, Human
aggcaguguucuucuaagggca

SEQ ID NO: 302396 - RNA, 22 nt, Human
uccugcaguuacaucccagcca

SEQ ID NO: 302397 - RNA, 22 nt, Human
caguuuauuuccaagaugacaa

SEQ ID NO: 302398 - RNA, 22 nt, Human
auguaaauuguacugacacacg

SEQ ID NO: 302399 - RNA, 22 nt, Human
uucuuacagaguuuacagagcc

SEQ ID NO: 302400 - RNA, 22 nt, Human
aauaauuuuagcucagaguugu

SEQ ID NO: 302401 - RNA, 23 nt, Human
ugcuggguaaauagcugaguaac

SEQ ID NO: 302402 - RNA, 22 nt, Human
cauuuguaauacugacuugcag

SEQ ID NO: 302403 - RNA, 20 nt, Human
uuugagaccagucugcccaa

SEQ ID NO: 302404 - RNA, 22 nt, Human
uuugacucuuagcccaggacuc

SEQ ID NO: 302405 - RNA, 22 nt, Human
aacuuuauuguuaggggcuaaa

SEQ ID NO: 302406 - RNA, 22 nt, Human
uuuucuuuaaucugguggggug

SEQ ID NO: 302407 - RNA, 22 nt, Human
ucaacaaauacuuaaagcagag

SEQ ID NO: 302408 - RNA, 22 nt, Human
uugcuuuacggcaaggccccag

SEQ ID NO: 302409 - RNA, 22 nt, Human
ggguggagaggcuaaguccagu

SEQ ID NO: 302410 - RNA, 22 nt, Human
uggcaggugaaguuguuaggga

SEQ ID NO: 302411 - RNA, 23 nt, Human
cuuuucauugccuuagcgcagag

SEQ ID NO: 302412 - RNA, 22 nt, Human
aauaucaacaguguccuucuaa

SEQ ID NO: 302413 - RNA, 22 nt, Human
uguguccucacuguaugcaagg

SEQ ID NO: 302414 - RNA, 22 nt, Human
acaaaugucuccucuuuuguua

SEQ ID NO: 302415 - RNA, 22 nt, Human
cauuuccagcuccugcaucaug

SEQ ID NO: 302416 - RNA, 22 nt, Human
uaguacuacguuuucuacuauc

SEQ ID NO: 302417 - RNA, 22 nt, Human
auccuucuccaaaacuggcucc

SEQ ID NO: 302418 - RNA, 22 nt, Human
uugcuuuaccauuugaucucua

SEQ ID NO: 302419 - RNA, 22 nt, Human
uguccuauuucucugugcauga

SEQ ID NO: 302420 - RNA, 22 nt, Human
cucuuagauauggagaauuacc

SEQ ID NO: 302421 - RNA, 22 nt, Human
uccaggcaaggauaauaaacau

SEQ ID NO: 302422 - RNA, 22 nt, Human
aauuaggggaggacguaucaua

SEQ ID NO: 302423 - RNA, 18 nt, Human
cuguccaguagacucugc

SEQ ID NO: 302424 - RNA, 22 nt, Human
uacaacauuguguugcuucaua

SEQ ID NO: 302425 - RNA, 22 nt, Human
agaugguccaugcacagauaug

SEQ ID NO: 302426 - RNA, 22 nt, Human
auucuucaucagagaugcacua

SEQ ID NO: 302427 - RNA, 22 nt, Human
ccagacccugcucuggggcucu

SEQ ID NO: 302428 - RNA, 22 nt, Human
aaagugguuucccaguucagua

SEQ ID NO: 302429 - RNA, 22 nt, Human
ugauugacuuuagaauagcacu

SEQ ID NO: 302430 - RNA, 22 nt, Human
uccuccuuguuuugucucugcu

SEQ ID NO: 302431 - RNA, 22 nt, Human
ugcuuuaucaaagcuauaguga

SEQ ID NO: 302432 - RNA, 22 nt, Human
auuuucaugacuaccuuaaaua

SEQ ID NO: 302433 - RNA, 22 nt, Human
uuucacauuuguuuuaagaagu

SEQ ID NO: 302434 - RNA, 23 nt, Human
caggacaugggaggaaguauggc

SEQ ID NO: 302435 - RNA, 22 nt, Human
cccugcaggcucagacuggagu

SEQ ID NO: 302436 - RNA, 22 nt, Human
agcccccucccuagugacugga

SEQ ID NO: 302437 - RNA, 18 nt, Human
gccaggcaggguggggaa

SEQ ID NO: 302438 - RNA, 22 nt, Human
aagggacccuggaucaaaugga

SEQ ID NO: 302439 - RNA, 22 nt, Human
acagauuuauugaagcugcugc

SEQ ID NO: 302440 - RNA, 19 nt, Human
guguccauggagcauggag

SEQ ID NO: 302441 - RNA, 23 nt, Human
uuuauccaacucuguaaucucuc

SEQ ID NO: 302442 - RNA, 22 nt, Human
agagauggagagcacuggggcu

SEQ ID NO: 302443 - RNA, 22 nt, Human
acagguguacaaugcaugacag

SEQ ID NO: 302444 - RNA, 22 nt, Human
gaagccucaacaucucugcguc

SEQ ID NO: 302445 - RNA, 22 nt, Human
gggugguggccagcagugggca

SEQ ID NO: 302446 - RNA, 22 nt, Human
gccaaaucuggauuuagcaaga

SEQ ID NO: 302447 - RNA, 22 nt, Human
guuaauuuaguagaguccagau

SEQ ID NO: 302448 - RNA, 20 nt, Human
ugcugggugggcagcuguaa

SEQ ID NO: 302449 - RNA, 22 nt, Human
uugagggucuggaucugcugcu

SEQ ID NO: 302450 - RNA, 22 nt, Human
aaagugguuuaugauauuccaa

SEQ ID NO: 302451 - RNA, 22 nt, Human
uugcugauuuccccuugagugu

SEQ ID NO: 302452 - RNA, 22 nt, Human
augcagcugugggcaagaaaug

SEQ ID NO: 302453 - RNA, 22 nt, Human
ugcaggugguacuucuuuuucu

SEQ ID NO: 302454 - RNA, 21 nt, Human
ucuuccugcuccacacucccc

SEQ ID NO: 302455 - RNA, 22 nt, Human
ugguuccaaucgcacuggcuca

SEQ ID NO: 302456 - RNA, 22 nt, Human
uuaugcaacaggugagcagaca

SEQ ID NO: 302457 - RNA, 22 nt, Human
uuuugcuuuuguaacacagugu

SEQ ID NO: 302458 - RNA, 22 nt, Human
cuucuucaucuguaaaacuugg

SEQ ID NO: 302459 - RNA, 22 nt, Human
ggcaggugugagaucgaggcca

SEQ ID NO: 302460 - RNA, 22 nt, Human
aauugcuugucuucuucccuac

SEQ ID NO: 302461 - RNA, 22 nt, Human
agugugucugaucacuugugag

SEQ ID NO: 302462 - RNA, 22 nt, Human
ggcaggcaggagcucugucucc

SEQ ID NO: 302463 - RNA, 22 nt, Human
ugcagggauuagaggccgggga

SEQ ID NO: 302464 - RNA, 22 nt, Human
ucauuauccuaguaucuugaau

SEQ ID NO: 302465 - RNA, 22 nt, Human
uuagggacagcucuguagguga

SEQ ID NO: 302466 - RNA, 22 nt, Human
aauaucaguauauuguaucagu

SEQ ID NO: 302467 - RNA, 23 nt, Human
auauuagggagauuagcccucua

SEQ ID NO: 302468 - RNA, 22 nt, Human
gaaugaauucagcacauggaau

SEQ ID NO: 302469 - RNA, 22 nt, Human
ccccaggcagggccuaacagag

SEQ ID NO: 302470 - RNA, 22 nt, Human
aaguguuuauuuauaacgaucu

SEQ ID NO: 302471 - RNA, 22 nt, Human
ucaggugggaccugcuaggaca

SEQ ID NO: 302472 - RNA, 22 nt, Human
cuucuuaaucccuuauauauuu

SEQ ID NO: 302473 - RNA, 22 nt, Human
gugguaucugucucccccacug

SEQ ID NO: 302474 - RNA, 22 nt, Human
uuuuauugcaauaaagugugua

SEQ ID NO: 302475 - RNA, 22 nt, Human
augcaugcagggaagacaguag

SEQ ID NO: 302476 - RNA, 22 nt, Human
ccuuuucuacaagcaaaugugc

SEQ ID NO: 302477 - RNA, 22 nt, Human
auuuccuugcaaguuucuguaa

SEQ ID NO: 302478 - RNA, 22 nt, Human
gguggcaguggucucugacaga

SEQ ID NO: 302479 - RNA, 22 nt, Human
ucagcuuucucuucuaucgaua

SEQ ID NO: 302480 - RNA, 22 nt, Human
cugugucccuugucccagagcc

SEQ ID NO: 302481 - RNA, 21 nt, Human
aaauacagaaacuuguuuuca

SEQ ID NO: 302482 - RNA, 22 nt, Human
guggauggagcuggaagccauu

SEQ ID NO: 302483 - RNA, 16 nt, Human
agcagggcgggaagga

SEQ ID NO: 302484 - RNA, 19 nt, Human
gcaggcagcugggguaucc

SEQ ID NO: 302485 - RNA, 22 nt, Human
aauucuugguccuaguguauaa

SEQ ID NO: 302486 - RNA, 22 nt, Human
guuucuuuuaaaauauguagac

SEQ ID NO: 302487 - RNA, 22 nt, Human
acuuggugaagucaggugauua

SEQ ID NO: 302488 - RNA, 22 nt, Human
aaauucagcagugaaaugcccc

SEQ ID NO: 302489 - RNA, 22 nt, Human
acaaaagugagugugucucaga

SEQ ID NO: 302490 - RNA, 21 nt, Human
aauuacagauggaauuacaga

SEQ ID NO: 302491 - RNA, 22 nt, Human
aagcagacagagaauggguuug

SEQ ID NO: 302492 - RNA, 22 nt, Human
aguagcacaauuuugucccuaa

SEQ ID NO: 302493 - RNA, 22 nt, Human
caagcuuguuucuccugggggu

SEQ ID NO: 302494 - RNA, 20 nt, Human
agcaggugacggggccugcu

SEQ ID NO: 302495 - RNA, 22 nt, Human
auaagcauguuagaauauuuga

SEQ ID NO: 302496 - RNA, 22 nt, Human
gcuaggaggaagaaugugaauu

SEQ ID NO: 302497 - RNA, 20 nt, Human
acaauauguagaugaauagc

SEQ ID NO: 302498 - RNA, 22 nt, Human
uuccuuccuccuccaguucugg

SEQ ID NO: 302499 - RNA, 22 nt, Human
caauauauaggaacaacuuagg

SEQ ID NO: 302500 - RNA, 22 nt, Human
ugcugagcgcauccggcggccg

SEQ ID NO: 302501 - RNA, 22 nt, Human
uuccuagggcagagccgcuggg

SEQ ID NO: 302502 - RNA, 22 nt, Human
auuucucacucacaguccaugu

SEQ ID NO: 302503 - RNA, 22 nt, Human
aggcaccuugagagcaggagcu

SEQ ID NO: 302504 - RNA, 22 nt, Human
gcaggugguccccguggagugg

SEQ ID NO: 302505 - RNA, 22 nt, Human
ggcuggcagugugagagaggga

SEQ ID NO: 302506 - RNA, 22 nt, Human
aaauauaauuucugccucaaua

SEQ ID NO: 302507 - RNA, 22 nt, Human
uuauugagcacauaguaugugg

SEQ ID NO: 302508 - RNA, 22 nt, Human
ggcaggcaucauguggucauua

SEQ ID NO: 302509 - RNA, 21 nt, Human
uuguaaagguuuagaagaaug

SEQ ID NO: 302510 - RNA, 19 nt, Human
cuuauuagagugagagcuu

SEQ ID NO: 302511 - RNA, 22 nt, Human
uguuauugagguuacuuauaag

SEQ ID NO: 302512 - RNA, 22 nt, Human
uuuaauuuuccugguaggccug

SEQ ID NO: 302513 - RNA, 22 nt, Human
auguccagaguaaagcacauuc

SEQ ID NO: 302514 - RNA, 19 nt, Human
aggcaggugcagagguccc

SEQ ID NO: 302515 - RNA, 22 nt, Human
aacaaagucguugccuagaaga

SEQ ID NO: 302516 - RNA, 22 nt, Human
cagcaugauuggugucugguga

SEQ ID NO: 302517 - RNA, 22 nt, Human
uugugucccuguaagacaaagc

SEQ ID NO: 302518 - RNA, 22 nt, Human
agacagacugguuugaauuggu

SEQ ID NO: 302519 - RNA, 22 nt, Human
uuuauugcccuguaguacagga

SEQ ID NO: 302520 - RNA, 22 nt, Human
agacaaagacagcaucucaggu

SEQ ID NO: 302521 - RNA, 22 nt, Human
acuugguugcaaaugaauuauu

SEQ ID NO: 302522 - RNA, 22 nt, Human
cagagagcuuagugugcugcau

SEQ ID NO: 302523 - RNA, 22 nt, Human
ucagacagggagucagaaaaua

SEQ ID NO: 302524 - RNA, 22 nt, Human
agaccuggauuccaauccuacc

SEQ ID NO: 302525 - RNA, 22 nt, Human
cuuguccccagcagguugguuu

SEQ ID NO: 302526 - RNA, 22 nt, Human
uguccuggaaaaauggagaguu

SEQ ID NO: 302527 - RNA, 22 nt, Human
aaagcugccaaggagaauacua

SEQ ID NO: 302528 - RNA, 22 nt, Human
gacaauaaaaugaucuuacagu

SEQ ID NO: 302529 - RNA, 22 nt, Human
guccaugauucugugacacccu

SEQ ID NO: 302530 - RNA, 22 nt, Human
cugggugucaggagacaugaug

SEQ ID NO: 302531 - RNA, 22 nt, Human
ccuggaggagcgcugaccagcu

SEQ ID NO: 302532 - RNA, 22 nt, Human
auguccagccaaccacuggauu

SEQ ID NO: 302533 - RNA, 22 nt, Human
aaauggauggaauugacauuua

SEQ ID NO: 302534 - RNA, 22 nt, Human
acuguucaaguuuuaugcugga

SEQ ID NO: 302535 - RNA, 17 nt, Human
cccaugagcccacuccc

SEQ ID NO: 302536 - RNA, 21 nt, Human
uagggcucuauuuuuauuuca

SEQ ID NO: 302537 - RNA, 22 nt, Human
acuuucauuuguaauaaacuuc

SEQ ID NO: 302538 - RNA, 22 nt, Human
acaguuugcccugacauucucc

SEQ ID NO: 302539 - RNA, 22 nt, Human
agaccugcagggccaggccugc

SEQ ID NO: 302540 - RNA, 22 nt, Human
guagcuuauuagggauaauagu

SEQ ID NO: 302541 - RNA, 22 nt, Human
aguguccuuucuguuccagcca

SEQ ID NO: 302542 - RNA, 22 nt, Human
ugggcaggggcccugcuuccgu

SEQ ID NO: 302543 - RNA, 22 nt, Human
uuuaagagcuaguaugucauuu

SEQ ID NO: 302544 - RNA, 22 nt, Human
cuguguccugcgucaagccaau

SEQ ID NO: 302545 - RNA, 22 nt, Human
acacaggacagggauguguuuu

SEQ ID NO: 302546 - RNA, 22 nt, Human
cagacagguagggacagaacau

SEQ ID NO: 302547 - RNA, 22 nt, Human
aaugaaauguagcuuauccaua

SEQ ID NO: 302548 - RNA, 16 nt, Human
gagggcagaggcggaa

SEQ ID NO: 302549 - RNA, 22 nt, Human
cagggcucacucggcuggcguc

SEQ ID NO: 302550 - RNA, 22 nt, Human
acuuucaugguaguuguauucu

SEQ ID NO: 302551 - RNA, 22 nt, Human
gcagguggagcaguagucuggu

SEQ ID NO: 302552 - RNA, 22 nt, Human
uuuagggaaauugaggguuaag

SEQ ID NO: 302553 - RNA, 19 nt, Human
uucauucuuucuacuuacc

SEQ ID NO: 302554 - RNA, 22 nt, Human
ugacauguguaaucagcuccgu

SEQ ID NO: 302555 - RNA, 22 nt, Human
cuuauuagaguuguguucuguu

SEQ ID NO: 302556 - RNA, 22 nt, Human
uguccuuuuccccaaauucacu

SEQ ID NO: 302557 - RNA, 22 nt, Human
uguuugcucugacuaucuugcg

SEQ ID NO: 302558 - RNA, 22 nt, Human
cugucucagcaggaagucauca

SEQ ID NO: 302559 - RNA, 22 nt, Human
caugcauguuuacuacagugac

SEQ ID NO: 302560 - RNA, 22 nt, Human
cacagguguuuguuauacucag

SEQ ID NO: 302561 - RNA, 22 nt, Human
cuuuauguacuguguauuugaa

SEQ ID NO: 302562 - RNA, 22 nt, Human
uuuguuagagugugggaggcug

SEQ ID NO: 302563 - RNA, 22 nt, Human
cggcaggugugcucacucugcc

SEQ ID NO: 302564 - RNA, 22 nt, Human
uauugagaacccucaggaggca

SEQ ID NO: 302565 - RNA, 18 nt, Human
agcaugagagaggcugug

SEQ ID NO: 302566 - RNA, 22 nt, Human
auuauuucucacucacauaaua

SEQ ID NO: 302567 - RNA, 22 nt, Human
ucccaggcaaaggcagcucauu

SEQ ID NO: 302568 - RNA, 22 nt, Human
uugauaaaaugauaucuucuuu

SEQ ID NO: 302569 - RNA, 22 nt, Human
uuaguuuucucaucuaucucac

SEQ ID NO: 302570 - RNA, 22 nt, Human
ccaaugauggugcccacgauga

SEQ ID NO: 302571 - RNA, 22 nt, Human
cuuacaaaggagaggagauagg

SEQ ID NO: 302572 - RNA, 22 nt, Human
gcaggugugaaugugaauuaag

SEQ ID NO: 302573 - RNA, 22 nt, Human
uuccucucaacaugccugccgg

SEQ ID NO: 302574 - RNA, 22 nt, Human
ugguccuggggaucugcaguga

SEQ ID NO: 302575 - RNA, 22 nt, Human
ggaugucuaggguuuaugugcc

SEQ ID NO: 302576 - RNA, 22 nt, Human
agcaggugguaggcagucagca

SEQ ID NO: 302577 - RNA, 22 nt, Human
ugcagggagggcccagcaaucu

SEQ ID NO: 302578 - RNA, 22 nt, Human
aaauguaguugaaaaguuaagg

SEQ ID NO: 302579 - RNA, 18 nt, Human
uggcaggaaaugcacuuu

SEQ ID NO: 302580 - RNA, 22 nt, Human
caucuaaauuugacuccaagga

SEQ ID NO: 302581 - RNA, 22 nt, Human
auaguuuucuaugcacuguuau

SEQ ID NO: 302582 - RNA, 22 nt, Human
auuucuguuugcuacuauaagu

SEQ ID NO: 302583 - RNA, 22 nt, Human
auccuucuaccuaggacuauuu

SEQ ID NO: 302584 - RNA, 22 nt, Human
cagugaggaguccagggcagag

SEQ ID NO: 302585 - RNA, 22 nt, Human
ucuggcuccacaccucacugca

SEQ ID NO: 302586 - RNA, 22 nt, Human
uuuauugacccaaagcgagagu

SEQ ID NO: 302587 - RNA, 22 nt, Human
uccugugucaauuccucauucu

SEQ ID NO: 302588 - RNA, 22 nt, Human
acccaggcugcuucucaguggc

SEQ ID NO: 302589 - RNA, 22 nt, Human
ccuuuguucauugccuucaguc

SEQ ID NO: 302590 - RNA, 22 nt, Human
gucuucuuguuuugaaggaaau

SEQ ID NO: 302591 - RNA, 21 nt, Human
agguacuaaugaaaagugauu

SEQ ID NO: 302592 - RNA, 22 nt, Human
caauguaucaaccagaaaguuc

SEQ ID NO: 302593 - RNA, 22 nt, Human
gaauguaauagucaguagaaca

SEQ ID NO: 302594 - RNA, 18 nt, Human
aaaaagugcucaggccua

SEQ ID NO: 302595 - RNA, 22 nt, Human
agaagggaacucagagaugauu

SEQ ID NO: 302596 - RNA, 21 nt, Human
ugggugggcagagucucuuca

SEQ ID NO: 302597 - RNA, 22 nt, Human
gcugcaaaccugccaccuggug

SEQ ID NO: 302598 - RNA, 17 nt, Human
aggcagguaagaguuau

SEQ ID NO: 302599 - RNA, 22 nt, Human
aauugcuuuugggggcaguuac

SEQ ID NO: 302600 - RNA, 22 nt, Human
caggccucuauggucagcugag

SEQ ID NO: 302601 - RNA, 22 nt, Human
uuuucauuguuccucgagcauu

SEQ ID NO: 302602 - RNA, 20 nt, Human
ccagagaguagguuagugau

SEQ ID NO: 302603 - RNA, 22 nt, Human
uggagcagaguucagcggggag

SEQ ID NO: 302604 - RNA, 22 nt, Human
aguuauuacucuuuaacauauu

SEQ ID NO: 302605 - RNA, 22 nt, Human
cuugcuucauuagugucuuagu

SEQ ID NO: 302606 - RNA, 22 nt, Human
ccuggaucuaaggaagcuggga

SEQ ID NO: 302607 - RNA, 22 nt, Human
auuuccugcaggggcugguggg

SEQ ID NO: 302608 - RNA, 21 nt, Human
acagacaguccagagaaaaga

SEQ ID NO: 302609 - RNA, 22 nt, Human
aggacauguaaauggagaggga

SEQ ID NO: 302610 - RNA, 20 nt, Human
ugcagggcucugcuucucuc

SEQ ID NO: 302611 - RNA, 21 nt, Human
agaagcuagucacuaaaucca

SEQ ID NO: 302612 - RNA, 22 nt, Human
auucuuauuuaaauagagucug

SEQ ID NO: 302613 - RNA, 22 nt, Human
uuuagaaguucacacauuuaaa

SEQ ID NO: 302614 - RNA, 22 nt, Human
uuccugaaugcuguugugcugu

SEQ ID NO: 302615 - RNA, 22 nt, Human
cuuguucaguugccucuccugc

SEQ ID NO: 302616 - RNA, 22 nt, Human
cccugcagaucuaggguccuuc

SEQ ID NO: 302617 - RNA, 22 nt, Human
auuugaaguaaguaaugaguau

SEQ ID NO: 302618 - RNA, 22 nt, Human
cugagaucuuuauacgaggcac

SEQ ID NO: 302619 - RNA, 22 nt, Human
gggagcugagcuggaagagaau

SEQ ID NO: 302620 - RNA, 22 nt, Human
uaugugucucaguugugauuga

SEQ ID NO: 302621 - RNA, 20 nt, Human
guauuaggagguaaauguaa

SEQ ID NO: 302622 - RNA, 22 nt, Human
uugaaagacuucuccugugaaa

SEQ ID NO: 302623 - RNA, 22 nt, Human
aagggcucccugccugaggugg

SEQ ID NO: 302624 - RNA, 22 nt, Human
aaggcuggcaauauauuuguua

SEQ ID NO: 302625 - RNA, 21 nt, Human
ugcaccuguucacugcaguuc

SEQ ID NO: 302626 - RNA, 22 nt, Human
uccaggcaaagugcugggcugc

SEQ ID NO: 302627 - RNA, 22 nt, Human
uugcuguaaguaucuuucuacc

SEQ ID NO: 302628 - RNA, 20 nt, Human
uuucaagucagcaauucuca

SEQ ID NO: 302629 - RNA, 22 nt, Human
cuggcacugaguggcuuaugac

SEQ ID NO: 302630 - RNA, 22 nt, Human
aaacaaacauagguuugaaagu

SEQ ID NO: 302631 - RNA, 19 nt, Human
gcagguggauguggucagc

SEQ ID NO: 302632 - RNA, 22 nt, Human
cuguccagaaagggggcaacaa

SEQ ID NO: 302633 - RNA, 22 nt, Human
aguuugaaauguuggcaauauu

SEQ ID NO: 302634 - RNA, 22 nt, Human
cagguggugccuccucccuucc

SEQ ID NO: 302635 - RNA, 22 nt, Human
gcuggguccaugguccucgggu

SEQ ID NO: 302636 - RNA, 22 nt, Human
uaugugucugucgugcauaaau

SEQ ID NO: 302637 - RNA, 22 nt, Human
ugacagacagcuucucauuuua

SEQ ID NO: 302638 - RNA, 22 nt, Human
ggggcaggagguguucucuuuu

SEQ ID NO: 302639 - RNA, 22 nt, Human
ucaaaaauguuuuauauuggua

SEQ ID NO: 302640 - RNA, 22 nt, Human
ugggugggagcacccugucugg

SEQ ID NO: 302641 - RNA, 22 nt, Human
ugugucaauuuucauuccuacu

SEQ ID NO: 302642 - RNA, 22 nt, Human
ugcuguguaaaaggugauugaa

SEQ ID NO: 302643 - RNA, 22 nt, Human
cagcacaguacaaggcacggau

SEQ ID NO: 302644 - RNA, 22 nt, Human
cgcaggugggcccuucauugau

SEQ ID NO: 302645 - RNA, 22 nt, Human
uuccaggauggcaauaaugaau

SEQ ID NO: 302646 - RNA, 19 nt, Human
cucagagaggggcagugcc

SEQ ID NO: 302647 - RNA, 22 nt, Human
cacaaauggccguguucaaaga

SEQ ID NO: 302648 - RNA, 22 nt, Human
acuuaaaaccagacagcgucau

SEQ ID NO: 302649 - RNA, 22 nt, Human
uuccaugacaccgagggaaguc

SEQ ID NO: 302650 - RNA, 22 nt, Human
acagacagauuuugucugaugu

SEQ ID NO: 302651 - RNA, 17 nt, Human
agacagaccucugcauc

SEQ ID NO: 302652 - RNA, 19 nt, Human
agguggucuaggcuggaga

SEQ ID NO: 302653 - RNA, 22 nt, Human
cucugcccucacuuggggccug

SEQ ID NO: 302654 - RNA, 22 nt, Human
gugcaaaagcaguugugguuuu

SEQ ID NO: 302655 - RNA, 22 nt, Human
ucauuucccuccuacaaagagg

SEQ ID NO: 302656 - RNA, 22 nt, Human
uuucauaauagugcaguuuguu

SEQ ID NO: 302657 - RNA, 22 nt, Human
uucuggaucugagggggaagau

SEQ ID NO: 302658 - RNA, 21 nt, Human
uccuccuucaaguccuggccu

SEQ ID NO: 302659 - RNA, 22 nt, Human
uggagcagugguccuggagaug

SEQ ID NO: 302660 - RNA, 22 nt, Human
cagaaauucccauuucagauuc

SEQ ID NO: 302661 - RNA, 20 nt, Human
auaaaauaacugccacaaga

SEQ ID NO: 302662 - RNA, 22 nt, Human
cacauguguauaugugaggggg

SEQ ID NO: 302663 - RNA, 22 nt, Human
ccuguucacugcacaguuuccg

SEQ ID NO: 302664 - RNA, 22 nt, Human
gaucuucuauguaaugaagugu

SEQ ID NO: 302665 - RNA, 23 nt, Human
uucaaaacuggaaaaucagaugc

SEQ ID NO: 302666 - RNA, 22 nt, Human
cugccguguuuuucauguuaaa

SEQ ID NO: 302667 - RNA, 22 nt, Human
ugcagggaaaacccaggaugcu

SEQ ID NO: 302668 - RNA, 22 nt, Human
ggaguugauuuuggauauauua

SEQ ID NO: 302669 - RNA, 22 nt, Human
cuguccugcccacccugcaggg

SEQ ID NO: 302670 - RNA, 22 nt, Human
caaugauugcuauuuacauaaa

SEQ ID NO: 302671 - RNA, 23 nt, Human
ugguggggucuuggagacagcac

SEQ ID NO: 302672 - RNA, 22 nt, Human
ggguuccuccaguuccuagagc

SEQ ID NO: 302673 - RNA, 23 nt, Human
auuucuaggggauuuucuggugc

SEQ ID NO: 302674 - RNA, 22 nt, Human
acuggacagaggaaauauggag

SEQ ID NO: 302675 - RNA, 22 nt, Human
aguauacaaauaaauguguaau

SEQ ID NO: 302676 - RNA, 22 nt, Human
cuguggaauugaugcuuagugu

SEQ ID NO: 302677 - RNA, 20 nt, Human
uguguccaucaucugggcac

SEQ ID NO: 302678 - RNA, 22 nt, Human
uugcuaggauucauucuauacu

SEQ ID NO: 302679 - RNA, 22 nt, Human
ugcuuuauguggcugauacuca

SEQ ID NO: 302680 - RNA, 22 nt, Human
uuccuggggggauagauuucac

SEQ ID NO: 302681 - RNA, 22 nt, Human
ccugggucuggucacuaaguca

SEQ ID NO: 302682 - RNA, 22 nt, Human
acuggaggccccucccagugaa

SEQ ID NO: 302683 - RNA, 22 nt, Human
gguguccuuguccuuugguacc

SEQ ID NO: 302684 - RNA, 22 nt, Human
ccauaaucuggcuuugagagag

SEQ ID NO: 302685 - RNA, 22 nt, Human
cuggagugacuuuguuccuuuu

SEQ ID NO: 302686 - RNA, 22 nt, Human
gggaaugugaaacaguaaggga

SEQ ID NO: 302687 - RNA, 22 nt, Human
gucuggaagaacuagggauguu

SEQ ID NO: 302688 - RNA, 22 nt, Human
ucccaaggccaggcaucuagaa

SEQ ID NO: 302689 - RNA, 22 nt, Human
cucuuccuuucccuugagggug

SEQ ID NO: 302690 - RNA, 18 nt, Human
ccauguguuccuuuuggg

SEQ ID NO: 302691 - RNA, 22 nt, Human
uuuauuggauauuuacaagaua

SEQ ID NO: 302692 - RNA, 22 nt, Human
uugugucccugcggcugaggag

SEQ ID NO: 302693 - RNA, 22 nt, Human
aagcuuuagagaugaguuccuu

SEQ ID NO: 302694 - RNA, 22 nt, Human
uuggaggauugcucucagccca

SEQ ID NO: 302695 - RNA, 20 nt, Human
cugaagagacuggaggggca

SEQ ID NO: 302696 - RNA, 22 nt, Human
uaguuuaccaaauugaucuucc

SEQ ID NO: 302697 - RNA, 22 nt, Human
uugcuuuacuuugccauucguu

SEQ ID NO: 302698 - RNA, 22 nt, Human
auguccagagccggccugcuga

SEQ ID NO: 302699 - RNA, 22 nt, Human
auuagauauuugcuguuggauu

SEQ ID NO: 302700 - RNA, 22 nt, Human
ugguggggcuuuccuucugcuu

SEQ ID NO: 302701 - RNA, 22 nt, Human
guuauaaaaugcacaguuguuu

SEQ ID NO: 302702 - RNA, 22 nt, Human
uuucauugagaauauaagauuu

SEQ ID NO: 302703 - RNA, 22 nt, Human
auuuucauggcuucugcucagu

SEQ ID NO: 302704 - RNA, 22 nt, Human
aggacuuagaacauuauguacu

SEQ ID NO: 302705 - RNA, 22 nt, Human
uguuuuccuccugguuucugcc

SEQ ID NO: 302706 - RNA, 22 nt, Human
cagcuuauucaguaagcacaua

SEQ ID NO: 302707 - RNA, 22 nt, Human
guuuuuacuaagguugcuaagu

SEQ ID NO: 302708 - RNA, 22 nt, Human
gucugcccugcugaucucaccc

SEQ ID NO: 302709 - RNA, 22 nt, Human
uuuaucugaggaaagcagacaa

SEQ ID NO: 302710 - RNA, 22 nt, Human
ucagcuuuuuacaugugaaaua

SEQ ID NO: 302711 - RNA, 22 nt, Human
gacagacacuauugguaugccu

SEQ ID NO: 302712 - RNA, 22 nt, Human
uuuccuaguucuaagaaaugua

SEQ ID NO: 302713 - RNA, 22 nt, Human
uuguguccaaggcuauggugau

SEQ ID NO: 302714 - RNA, 22 nt, Human
ucuggcucccagccugcucuca

SEQ ID NO: 302715 - RNA, 22 nt, Human
gggccaugagagguucaucaac

SEQ ID NO: 302716 - RNA, 17 nt, Human
gccugcaggcccgcaga

SEQ ID NO: 302717 - RNA, 22 nt, Human
cccagugugguugugaauucug

SEQ ID NO: 302718 - RNA, 22 nt, Human
auugcugacaccaaguaguagc

SEQ ID NO: 302719 - RNA, 22 nt, Human
uugaaucucuugaaucucuguu

SEQ ID NO: 302720 - RNA, 20 nt, Human
aacacagauaccaaagguug

SEQ ID NO: 302721 - RNA, 22 nt, Human
ucuuuauuuaagucuguuguaa

SEQ ID NO: 302722 - RNA, 22 nt, Human
gagggcaguagccucguacccu

SEQ ID NO: 302723 - RNA, 22 nt, Human
uugggacaucuggcauacaguu

SEQ ID NO: 302724 - RNA, 22 nt, Human
guuuacauguacucauuauacu

SEQ ID NO: 302725 - RNA, 22 nt, Human
gugaccauuugacauauccuug

SEQ ID NO: 302726 - RNA, 22 nt, Human
gcauagucaguaggauucucaa

SEQ ID NO: 302727 - RNA, 22 nt, Human
ggcugcaaaggaaaagugguga

SEQ ID NO: 302728 - RNA, 22 nt, Human
cccaggcagucuggcucuaaag

SEQ ID NO: 302729 - RNA, 22 nt, Human
gccugcagcaugcuaggucuug

SEQ ID NO: 302730 - RNA, 22 nt, Human
ucuguucaguugauguaguuuu

SEQ ID NO: 302731 - RNA, 22 nt, Human
uagguggugugcgaagagcgug

SEQ ID NO: 302732 - RNA, 22 nt, Human
gcuggaggauggacuggaagaa

SEQ ID NO: 302733 - RNA, 22 nt, Human
gcuguucaaaagccacaguuac

SEQ ID NO: 302734 - RNA, 22 nt, Human
ugcagggcccucauuccugucc

SEQ ID NO: 302735 - RNA, 19 nt, Human
uucauucucuuauuguugu

SEQ ID NO: 302736 - RNA, 22 nt, Human
cagcuuuauuaaugauugucuu

SEQ ID NO: 302737 - RNA, 22 nt, Human
ugacagacauggaagccagagu

SEQ ID NO: 302738 - RNA, 20 nt, Human
acccagcucugugcccuggg

SEQ ID NO: 302739 - RNA, 19 nt, Human
gcagagugggguggagggu

SEQ ID NO: 302740 - RNA, 22 nt, Human
uggcagguuucguuaaaaaugg

SEQ ID NO: 302741 - RNA, 22 nt, Human
gcuggaagaaugagugccucgu

SEQ ID NO: 302742 - RNA, 22 nt, Human
uuacauguucucauacacagag

SEQ ID NO: 302743 - RNA, 22 nt, Human
cagcuuguuuuauuuggggacc

SEQ ID NO: 302744 - RNA, 22 nt, Human
aguguccuuaguuagcuuuggg

SEQ ID NO: 302745 - RNA, 22 nt, Human
acagggcagagugaaaugcuau

SEQ ID NO: 302746 - RNA, 22 nt, Human
ugcugugggauauauguucaaa

SEQ ID NO: 302747 - RNA, 21 nt, Human
aaugcauuaacauaaagcuga

SEQ ID NO: 302748 - RNA, 22 nt, Human
uauugauaugcagaacugacuu

SEQ ID NO: 302749 - RNA, 22 nt, Human
cuagggacugggaccuuaguua

SEQ ID NO: 302750 - RNA, 22 nt, Human
uacaugugguagggagggcagu

SEQ ID NO: 302751 - RNA, 22 nt, Human
ccagggcaggggcuggaguuca

SEQ ID NO: 302752 - RNA, 22 nt, Human
gaggugucugcuguguucaaag

SEQ ID NO: 302753 - RNA, 23 nt, Human
uuuggacuugugacucuucuccu

SEQ ID NO: 302754 - RNA, 22 nt, Human
aaggugguuugcuaaucccaac

SEQ ID NO: 302755 - RNA, 19 nt, Human
gccugcagaaaaggcaggg

SEQ ID NO: 302756 - RNA, 22 nt, Human
auagcuuuuugucauagagucu

SEQ ID NO: 302757 - RNA, 22 nt, Human
aggcaaagcgauaccagagcua

SEQ ID NO: 302758 - RNA, 22 nt, Human
cagagaaagggugaauuccuuc

SEQ ID NO: 302759 - RNA, 22 nt, Human
acaugauuaaaagauuuuaaag

SEQ ID NO: 302760 - RNA, 22 nt, Human
gucugcccugagcucccagugc

SEQ ID NO: 302761 - RNA, 22 nt, Human
cgucacuucuuagucuauuuuc

SEQ ID NO: 302762 - RNA, 22 nt, Human
uuucaguuacugcuauaucauu

SEQ ID NO: 302763 - RNA, 22 nt, Human
gagggaaagguuaauacaugau

SEQ ID NO: 302764 - RNA, 22 nt, Human
gcuguucacauuuugggccaaa

SEQ ID NO: 302765 - RNA, 22 nt, Human
aaugcauauguaggcaagcagu

SEQ ID NO: 302766 - RNA, 22 nt, Human
cagggcucaccacugggauccu

SEQ ID NO: 302767 - RNA, 22 nt, Human
uaaaggcuuuuacaggagugca

SEQ ID NO: 302768 - RNA, 22 nt, Human
ccagagagggcgccaccuggag

SEQ ID NO: 302769 - RNA, 22 nt, Human
acaggugguaaaauggacuguc

SEQ ID NO: 302770 - RNA, 22 nt, Human
gguuucaaugagaagugcuugu

SEQ ID NO: 302771 - RNA, 22 nt, Human
ccugggugaaaucucuccugca

SEQ ID NO: 302772 - RNA, 22 nt, Human
uuucuucuugaguaaccagauu

SEQ ID NO: 302773 - RNA, 22 nt, Human
uccuucuggaggcucuaagggg

SEQ ID NO: 302774 - RNA, 22 nt, Human
ucuggagaacuugcaagaggau

SEQ ID NO: 302775 - RNA, 22 nt, Human
agggcccuagggaaugagacau

SEQ ID NO: 302776 - RNA, 22 nt, Human
acucuuauuuugaaguaauaau

SEQ ID NO: 302777 - RNA, 19 nt, Human
gcaggugugaauccguaga

SEQ ID NO: 302778 - RNA, 22 nt, Human
gaaucauuggaaccacauccaa

SEQ ID NO: 302779 - RNA, 22 nt, Human
uuugcagugauucuugcaguga

SEQ ID NO: 302780 - RNA, 22 nt, Human
ccaugagccaggcugaggaagc

SEQ ID NO: 302781 - RNA, 22 nt, Human
ccccugaagacaauggagaggu

SEQ ID NO: 302782 - RNA, 22 nt, Human
ugggaccuguuacauugaguua

SEQ ID NO: 302783 - RNA, 22 nt, Human
gccaggcaugggcuucugggcg

SEQ ID NO: 302784 - RNA, 20 nt, Human
uauugaguaccuacuguaua

SEQ ID NO: 302785 - RNA, 22 nt, Human
aauucuauaggcaagcuauuuu

SEQ ID NO: 302786 - RNA, 19 nt, Human
agggauauuuaaaaagcuc

SEQ ID NO: 302787 - RNA, 22 nt, Human
caggcagcccugcaccaagugu

SEQ ID NO: 302788 - RNA, 22 nt, Human
ucagcuuugaucucaggcaauc

SEQ ID NO: 302789 - RNA, 22 nt, Human
cuuccuucugaagcauagaagc

SEQ ID NO: 302790 - RNA, 23 nt, Human
cacaggcugcgcauaagcuucuc

SEQ ID NO: 302791 - RNA, 22 nt, Human
uuauuucauguaaaauuuaugu

SEQ ID NO: 302792 - RNA, 22 nt, Human
aggcaguggcugagaccagggg

SEQ ID NO: 302793 - RNA, 22 nt, Human
ucaugaaucguggaaugauuua

SEQ ID NO: 302794 - RNA, 22 nt, Human
ugcacuccaggcugggugacag

SEQ ID NO: 302795 - RNA, 22 nt, Human
uggcaaagaugguucucaccau

SEQ ID NO: 302796 - RNA, 22 nt, Human
agcagggcugcagugugucuuu

SEQ ID NO: 302797 - RNA, 19 nt, Human
ugguggcaaugucagcuaa

SEQ ID NO: 302798 - RNA, 22 nt, Human
ucagguguaucauggaguugaa

SEQ ID NO: 302799 - RNA, 22 nt, Human
ugcuuucauugugauaggaagc

SEQ ID NO: 302800 - RNA, 22 nt, Human
gaccucagugaauggucaugua

SEQ ID NO: 302801 - RNA, 22 nt, Human
agcuuuauagaaaggaucagug

SEQ ID NO: 302802 - RNA, 22 nt, Human
gccaggcaggccacgcuguguu

SEQ ID NO: 302803 - RNA, 22 nt, Human
cccugcagagaccacugaccuu

SEQ ID NO: 302804 - RNA, 22 nt, Human
guuuauuagaguuuucugucug

SEQ ID NO: 302805 - RNA, 22 nt, Human
gcaaggaccuuugagcgugcca

SEQ ID NO: 302806 - RNA, 22 nt, Human
cuggcccucggaguccagcugc

SEQ ID NO: 302807 - RNA, 22 nt, Human
uauuccaaaaucccaaacugcc

SEQ ID NO: 302808 - RNA, 22 nt, Human
aaugauuuccccuacacagaag

SEQ ID NO: 302809 - RNA, 22 nt, Human
cuggauuuaauuaacuguugcu

SEQ ID NO: 302810 - RNA, 22 nt, Human
auaaagauuucuuuuucucuac

SEQ ID NO: 302811 - RNA, 22 nt, Human
uggcagguggcacagccuggga

SEQ ID NO: 302812 - RNA, 20 nt, Human
gucugcccaggccaccacgg

SEQ ID NO: 302813 - RNA, 22 nt, Human
uuauugagagcuguuuuauggc

SEQ ID NO: 302814 - RNA, 20 nt, Human
cauauauaccuagaagugga

SEQ ID NO: 302815 - RNA, 22 nt, Human
aaggcauaccugaauguuugug

SEQ ID NO: 302816 - RNA, 22 nt, Human
cagcuuuaccuuuaggaguaac

SEQ ID NO: 302817 - RNA, 18 nt, Human
ucucugaauauuuuaugu

SEQ ID NO: 302818 - RNA, 22 nt, Human
uucauuccuucuguaccuugcc

SEQ ID NO: 302819 - RNA, 22 nt, Human
ugcagggccuugggucuuucuu

SEQ ID NO: 302820 - RNA, 22 nt, Human
aauucuauguucuugaguaaga

SEQ ID NO: 302821 - RNA, 22 nt, Human
ucaggcaggaucccagggaagg

SEQ ID NO: 302822 - RNA, 22 nt, Human
guuuauuggguauuguggagcc

SEQ ID NO: 302823 - RNA, 22 nt, Human
gguguccuuagaaagcagaccu

SEQ ID NO: 302824 - RNA, 22 nt, Human
auucagugugagguuuucaagu

SEQ ID NO: 302825 - RNA, 22 nt, Human
agaggcacaacagucccauugu

SEQ ID NO: 302826 - RNA, 22 nt, Human
uccuuucccuuuccauccuggc

SEQ ID NO: 302827 - RNA, 22 nt, Human
uguccuggagugcuugggggaa

SEQ ID NO: 302828 - RNA, 22 nt, Human
guuuucauuacugcugugauuu

SEQ ID NO: 302829 - RNA, 22 nt, Human
aaaauguaaagcuugaguguag

SEQ ID NO: 302830 - RNA, 19 nt, Human
gguguccuagagauaagag

SEQ ID NO: 302831 - RNA, 22 nt, Human
ugcuggagaccugcuugcacca

SEQ ID NO: 302832 - RNA, 22 nt, Human
gcacccagcccagggcgugaug

SEQ ID NO: 302833 - RNA, 22 nt, Human
aguuggagugaacaugagauug

SEQ ID NO: 302834 - RNA, 22 nt, Human
aguuguaagaggcacaaggaag

SEQ ID NO: 302835 - RNA, 22 nt, Human
auugcuggcagcuggaucugca

SEQ ID NO: 302836 - RNA, 22 nt, Human
uuuccuguugccaucaagaaug

SEQ ID NO: 302837 - RNA, 23 nt, Human
uaauucacauauacauugcuuca

SEQ ID NO: 302838 - RNA, 21 nt, Human
acagggcaugcagcuggcugu

SEQ ID NO: 302839 - RNA, 22 nt, Human
caugcaugccgggcugacagag

SEQ ID NO: 302840 - RNA, 22 nt, Human
ucaggugugugguggaaggcag

SEQ ID NO: 302841 - RNA, 22 nt, Human
guccugguuuucacagaccuuu

SEQ ID NO: 302842 - RNA, 22 nt, Human
cuggcuugcagcucaucauaaa

SEQ ID NO: 302843 - RNA, 22 nt, Human
agcaggugcauggcgagcgcgg

SEQ ID NO: 302844 - RNA, 22 nt, Human
aguccaugguucugacucaucu

SEQ ID NO: 302845 - RNA, 22 nt, Human
ggggaccuucccagagcaguug

SEQ ID NO: 302846 - RNA, 22 nt, Human
gaaucauuuagcucugcaugga

SEQ ID NO: 302847 - RNA, 22 nt, Human
gauaccagacagggagggagaa

SEQ ID NO: 302848 - RNA, 22 nt, Human
auuaaaauuccaagguaugcca

SEQ ID NO: 302849 - RNA, 23 nt, Human
uagggcagcugggagggacaugc

SEQ ID NO: 302850 - RNA, 22 nt, Human
aaagcuaccuuuguguucauag

SEQ ID NO: 302851 - RNA, 22 nt, Human
gguggggccagggcuccaaccu

SEQ ID NO: 302852 - RNA, 22 nt, Human
uaggugucagguauagaauuua

SEQ ID NO: 302853 - RNA, 22 nt, Human
ugacaggugauugugaacuaag

SEQ ID NO: 302854 - RNA, 22 nt, Human
aacuuucagcaaguaauucugg

SEQ ID NO: 302855 - RNA, 22 nt, Human
cugugucccagccaggauaaug

SEQ ID NO: 302856 - RNA, 22 nt, Human
uguguccuuuggaggaucagcg

SEQ ID NO: 302857 - RNA, 22 nt, Human
aaaacaguuuaggcaucacagu

SEQ ID NO: 302858 - RNA, 22 nt, Human
gccugcagaggugcugcuagcu

SEQ ID NO: 302859 - RNA, 18 nt, Human
guuaauuuugaaguucau

SEQ ID NO: 302860 - RNA, 22 nt, Human
auuauuaggugcucucugacaa

SEQ ID NO: 302861 - RNA, 22 nt, Human
uggaggcaggggauacagguca

SEQ ID NO: 302862 - RNA, 22 nt, Human
gcagguggauuaucagaagugc

SEQ ID NO: 302863 - RNA, 22 nt, Human
gguuucaacuuuugugaggaau

SEQ ID NO: 302864 - RNA, 18 nt, Human
gcugggguugagcucucc

SEQ ID NO: 302865 - RNA, 22 nt, Human
cagacccugggccacagaggag

SEQ ID NO: 302866 - RNA, 22 nt, Human
uaacauuugcugucuccuaugu

SEQ ID NO: 302867 - RNA, 22 nt, Human
agcauuuagucuuuauugcagc

SEQ ID NO: 302868 - RNA, 22 nt, Human
agaagggcuacacgggcucucc

SEQ ID NO: 302869 - RNA, 22 nt, Human
uuccuucugaagccuuuguguu

SEQ ID NO: 302870 - RNA, 22 nt, Human
ugggaccugcuccuggaaugag

SEQ ID NO: 302871 - RNA, 22 nt, Human
ggggaccuaggcucugucucuu

SEQ ID NO: 302872 - RNA, 21 nt, Human
guagggacagagaguugguga

SEQ ID NO: 302873 - RNA, 22 nt, Human
cccugcaggggaccugcagccu

SEQ ID NO: 302874 - RNA, 22 nt, Human
aggacauguuuguaucuuccuu

SEQ ID NO: 302875 - RNA, 22 nt, Human
gugguggaugucuguaaucuca

SEQ ID NO: 302876 - RNA, 22 nt, Human
acuuucuuaggcuguauaaaug

SEQ ID NO: 302877 - RNA, 22 nt, Human
ucccagggcacucacccucccu

SEQ ID NO: 302878 - RNA, 22 nt, Human
ggcaguggaggacccugugucu

SEQ ID NO: 302879 - RNA, 22 nt, Human
cuacauuaaauuggcuuacuua

SEQ ID NO: 302880 - RNA, 22 nt, Human
uuucaguuuuugcucgauguau

SEQ ID NO: 302881 - RNA, 22 nt, Human
ucauuuggaagccugagagugu

SEQ ID NO: 302882 - RNA, 22 nt, Human
gguuacauggaagaaauauaau

SEQ ID NO: 302883 - RNA, 22 nt, Human
ugaauagagcugcaguggacau

SEQ ID NO: 302884 - RNA, 21 nt, Human
agaauuaaauuggauuugugu

SEQ ID NO: 302885 - RNA, 22 nt, Human
cugccugcaugcugccauagcu

SEQ ID NO: 302886 - RNA, 22 nt, Human
auauaacauacauacagaaaag

SEQ ID NO: 302887 - RNA, 22 nt, Human
ucugggugagcugccucggguc

SEQ ID NO: 302888 - RNA, 22 nt, Human
auguccucuucugccucaggcc

SEQ ID NO: 302889 - RNA, 22 nt, Human
ucuucacaugaccuucaugucu

SEQ ID NO: 302890 - RNA, 22 nt, Human
agguauuauuagcaucucuauu

SEQ ID NO: 302891 - RNA, 22 nt, Human
aauguuuugcauuaguuuucua

SEQ ID NO: 302892 - RNA, 21 nt, Human
auaauguacaaaaacugucuu

SEQ ID NO: 302893 - RNA, 22 nt, Human
ucagguguucuccacucaguuu

SEQ ID NO: 302894 - RNA, 22 nt, Human
uuggaggacuaguuaagagacc

SEQ ID NO: 302895 - RNA, 22 nt, Human
uauuccaagcacagcaacccag

SEQ ID NO: 302896 - RNA, 22 nt, Human
auuauauaggacuugcccuucc

SEQ ID NO: 302897 - RNA, 20 nt, Human
gcauccagacacccagcugc

SEQ ID NO: 302898 - RNA, 22 nt, Human
aauugcuuguuucuuuaacuga

SEQ ID NO: 302899 - RNA, 22 nt, Human
cauuuguauguuccuccuuagg

SEQ ID NO: 302900 - RNA, 22 nt, Human
agugugagcccuggaguggugc

SEQ ID NO: 302901 - RNA, 22 nt, Human
gggaauguaaucauggaaugcu

SEQ ID NO: 302902 - RNA, 22 nt, Human
auuucuacaguacacaugcauu

SEQ ID NO: 302903 - RNA, 21 nt, Human
ucucuuucuggaagcuucccu

SEQ ID NO: 302904 - RNA, 22 nt, Human
uuucacauuuaggcgugaauug

SEQ ID NO: 302905 - RNA, 22 nt, Human
guuuauugauaaaagcuggaca

SEQ ID NO: 302906 - RNA, 22 nt, Human
acuugguugcuucugaaaugac

SEQ ID NO: 302907 - RNA, 22 nt, Human
uauagacaagcguaacaagaag

SEQ ID NO: 302908 - RNA, 22 nt, Human
cugggcugauuuagucacguuu

SEQ ID NO: 302909 - RNA, 22 nt, Human
aacuugguaccaccuucugaag

SEQ ID NO: 302910 - RNA, 22 nt, Human
auucugggugacuacgugauca

SEQ ID NO: 302911 - RNA, 22 nt, Human
uacaugugcuggguucuuggcc

SEQ ID NO: 302912 - RNA, 22 nt, Human
aguggcagguguuucguggugc

SEQ ID NO: 302913 - RNA, 22 nt, Human
auugcuggcugccaucuugccc

SEQ ID NO: 302914 - RNA, 22 nt, Human
acauguggaggaggcgagggua

SEQ ID NO: 302915 - RNA, 22 nt, Human
auacauauaugguacuuccugg

SEQ ID NO: 302916 - RNA, 22 nt, Human
uugcaggguugacacugccugc

SEQ ID NO: 302917 - RNA, 22 nt, Human
acccagcaugacaccugcacau

SEQ ID NO: 302918 - RNA, 22 nt, Human
ucuggcucuccagugcucuuag

SEQ ID NO: 302919 - RNA, 20 nt, Human
cagcuuuagaucuuugauua

SEQ ID NO: 302920 - RNA, 22 nt, Human
cuguggaaauaaacaaugcuaa

SEQ ID NO: 302921 - RNA, 22 nt, Human
aggcucagaggugagcaucugc

SEQ ID NO: 302922 - RNA, 18 nt, Human
guguccuggcugcggcgc

SEQ ID NO: 302923 - RNA, 22 nt, Human
uggcagguuaacuuacaacugu

SEQ ID NO: 302924 - RNA, 22 nt, Human
uaaguuuuaagcaaucugauaa

SEQ ID NO: 302925 - RNA, 22 nt, Human
aagggcucugugugccucccca

SEQ ID NO: 302926 - RNA, 22 nt, Human
gguuccaccuggcgagggguau

SEQ ID NO: 302927 - RNA, 22 nt, Human
cuguccugugucagccugaaau

SEQ ID NO: 302928 - RNA, 22 nt, Human
aguucuucauaaccuuacugug

SEQ ID NO: 302929 - RNA, 22 nt, Human
cagagcagggguuucccagguu

SEQ ID NO: 302930 - RNA, 22 nt, Human
uagcuuuaggcacguuugaauu

SEQ ID NO: 302931 - RNA, 22 nt, Human
aaauuucuggaagugucagagu

SEQ ID NO: 302932 - RNA, 23 nt, Human
gauugcuguaugcaggagcauuc

SEQ ID NO: 302933 - RNA, 22 nt, Human
aaggcauaugcauagaagacag

SEQ ID NO: 302934 - RNA, 22 nt, Human
uguguccuguccccuugcugcu

SEQ ID NO: 302935 - RNA, 22 nt, Human
guuuauuauucaacuucauguu

SEQ ID NO: 302936 - RNA, 22 nt, Human
aaauccuaaugacaaguuuagu

SEQ ID NO: 302937 - RNA, 22 nt, Human
cagcuucugucugauuagcaag

SEQ ID NO: 302938 - RNA, 18 nt, Human
gguccugggccuggcuca

SEQ ID NO: 302939 - RNA, 22 nt, Human
aucaagaacuuauuuuggaaau

SEQ ID NO: 302940 - RNA, 22 nt, Human
auucugggaacuuugucucuca

SEQ ID NO: 302941 - RNA, 22 nt, Human
uaauuucacugauaugaaguca

SEQ ID NO: 302942 - RNA, 22 nt, Human
uugaaucuauguauucagugua

SEQ ID NO: 302943 - RNA, 22 nt, Human
uccaggcauagaaggcacgcac

SEQ ID NO: 302944 - RNA, 22 nt, Human
ccuuuucuauguaccagcagug

SEQ ID NO: 302945 - RNA, 22 nt, Human
ccagccacagcuuccagcuccu

SEQ ID NO: 302946 - RNA, 22 nt, Human
gcagaagucagaccaucugaau

SEQ ID NO: 302947 - RNA, 22 nt, Human
uguccuggugcuucuugggauu

SEQ ID NO: 302948 - RNA, 22 nt, Human
agacccucuccaugcccacugc

SEQ ID NO: 302949 - RNA, 22 nt, Human
cagggcucaucugugugaccag

SEQ ID NO: 302950 - RNA, 22 nt, Human
ccaggccuagccccugagggua

SEQ ID NO: 302951 - RNA, 22 nt, Human
gacaggugagaugaggaacacc

SEQ ID NO: 302952 - RNA, 22 nt, Human
aguuguaauaacaauaccaaaa

SEQ ID NO: 302953 - RNA, 20 nt, Human
ccuucuccagcuuguucuug

SEQ ID NO: 302954 - RNA, 22 nt, Human
ucugggaagcugcgugccuguu

SEQ ID NO: 302955 - RNA, 22 nt, Human
gccuggguuccaugaucuccag

SEQ ID NO: 302956 - RNA, 23 nt, Human
cguguccuucagggagagugugg

SEQ ID NO: 302957 - RNA, 22 nt, Human
cacaggugcaagaaguugcagu

SEQ ID NO: 302958 - RNA, 22 nt, Human
aagcuuuaugaucucucagcua

SEQ ID NO: 302959 - RNA, 22 nt, Human
caauagugucugcuuguuucua

SEQ ID NO: 302960 - RNA, 22 nt, Human
uguguccuuucuuaagagugag

SEQ ID NO: 302961 - RNA, 22 nt, Human
uauauucaaugauuaguaucag

SEQ ID NO: 302962 - RNA, 22 nt, Human
auuaagugacuaaaguaaugcu

SEQ ID NO: 302963 - RNA, 22 nt, Human
cuggaguuagaguagacacuga

SEQ ID NO: 302964 - RNA, 22 nt, Human
ucuccgaucacagguuuucaau

SEQ ID NO: 302965 - RNA, 17 nt, Human
ugguggcuggagucagg

SEQ ID NO: 302966 - RNA, 22 nt, Human
uuuuauuaguggcuagaugggg

SEQ ID NO: 302967 - RNA, 22 nt, Human
gcagagaggaaugaagccaucc

SEQ ID NO: 302968 - RNA, 20 nt, Human
auguucuucauuuaauguuc

SEQ ID NO: 302969 - RNA, 22 nt, Human
guucuucaaagugacaacuaaa

SEQ ID NO: 302970 - RNA, 22 nt, Human
auuuucauuuugcagggugaga

SEQ ID NO: 302971 - RNA, 19 nt, Human
cuggaauguggcuggugca

SEQ ID NO: 302972 - RNA, 19 nt, Human
ucaaaacacaaaugguuga

SEQ ID NO: 302973 - RNA, 22 nt, Human
uagaaauggagaacagauuaau

SEQ ID NO: 302974 - RNA, 21 nt, Human
ucagaacuggugcagaugaau

SEQ ID NO: 302975 - RNA, 18 nt, Human
gcagguguggagaagggg

SEQ ID NO: 302976 - RNA, 22 nt, Human
gggugggaaggcuaagggauug

SEQ ID NO: 302977 - RNA, 22 nt, Human
agccagaguugaaugugagucu

SEQ ID NO: 302978 - RNA, 22 nt, Human
auguuauaguuauaaaaugagg

SEQ ID NO: 302979 - RNA, 22 nt, Human
auuuccaugaaggcagauuuua

SEQ ID NO: 302980 - RNA, 22 nt, Human
aagggcaggcagagaucauaua

SEQ ID NO: 302981 - RNA, 22 nt, Human
agacacuguguacagaaaaaga

SEQ ID NO: 302982 - RNA, 22 nt, Human
uaguuaacucuugguaauaggu

SEQ ID NO: 302983 - RNA, 22 nt, Human
ucugggugaugaaaugcacugu

SEQ ID NO: 302984 - RNA, 22 nt, Human
uccugcaggcuugaguccucag

SEQ ID NO: 302985 - RNA, 22 nt, Human
gagggcucugaaaggaggucac

SEQ ID NO: 302986 - RNA, 22 nt, Human
gcaugugucccucagucugugc

SEQ ID NO: 302987 - RNA, 22 nt, Human
cuggguguagauggaaguuugg

SEQ ID NO: 302988 - RNA, 22 nt, Human
uuuaauuugaaaugaguaaccc

SEQ ID NO: 302989 - RNA, 22 nt, Human
ucagacagauuuugacacuugc

SEQ ID NO: 302990 - RNA, 22 nt, Human
uuugcuuguucaagauuucugu

SEQ ID NO: 302991 - RNA, 22 nt, Human
ccaggugguucaggucaccaua

SEQ ID NO: 302992 - RNA, 22 nt, Human
gcugggucucuggguguaacaa

SEQ ID NO: 302993 - RNA, 22 nt, Human
uacuuuauuguaaaugcugaug

SEQ ID NO: 302994 - RNA, 22 nt, Human
ucugaagagcuuuggaaguaug

SEQ ID NO: 302995 - RNA, 22 nt, Human
uuucauaaccucaagcuacagu

SEQ ID NO: 302996 - RNA, 22 nt, Human
ugauucacagacuucacaaggc

SEQ ID NO: 302997 - RNA, 22 nt, Human
gacaggcugugauggccgggag

SEQ ID NO: 302998 - RNA, 22 nt, Human
ucuaaccuuugaaacugcuuuc

SEQ ID NO: 302999 - RNA, 22 nt, Human
uacaaaaguaauuacgguuuuu

SEQ ID NO: 303000 - RNA, 22 nt, Human
aggcagguuucccggcugucaa

SEQ ID NO: 303001 - RNA, 20 nt, Human
acugugaaugcugaauuagc

SEQ ID NO: 303002 - RNA, 22 nt, Human
uuuauugucuaugaacugcuug

SEQ ID NO: 303003 - RNA, 22 nt, Human
uuauuuuuaaaaguucacacag

SEQ ID NO: 303004 - RNA, 22 nt, Human
gaacuuggaccugguccuuugg

SEQ ID NO: 303005 - RNA, 22 nt, Human
auguuaaaugguuuauuauuaa

SEQ ID NO: 303006 - RNA, 20 nt, Human
aggagcugaauuagaggguu

SEQ ID NO: 303007 - RNA, 22 nt, Human
ugcagguggauaucucaucaga

SEQ ID NO: 303008 - RNA, 22 nt, Human
gcacccagccagcaucucagag

SEQ ID NO: 303009 - RNA, 22 nt, Human
cuccucaaggucucaggaauaa

SEQ ID NO: 303010 - RNA, 22 nt, Human
ugcaaaaacagccuugaggccu

SEQ ID NO: 303011 - RNA, 22 nt, Human
cuuagauacaguagaaagacuc

SEQ ID NO: 303012 - RNA, 22 nt, Human
ugaaugauguauaauauugaga

SEQ ID NO: 303013 - RNA, 22 nt, Human
uguccauggagaagcucagggc

SEQ ID NO: 303014 - RNA, 22 nt, Human
uggcaaggcugugggggcagag

SEQ ID NO: 303015 - RNA, 22 nt, Human
cuucccuuucuggugacuucuc

SEQ ID NO: 303016 - RNA, 22 nt, Human
guuuucaugucuauugggcaua

SEQ ID NO: 303017 - RNA, 22 nt, Human
gcagggcauagaggcacggagg

SEQ ID NO: 303018 - RNA, 22 nt, Human
cuugggugcuggaggcugccgc

SEQ ID NO: 303019 - RNA, 22 nt, Human
gcuuccucccugcugcucacua

SEQ ID NO: 303020 - RNA, 22 nt, Human
auuucaaggcuauuaauauaaa

SEQ ID NO: 303021 - RNA, 22 nt, Human
uggagcugagagccaggcuggc

SEQ ID NO: 303022 - RNA, 22 nt, Human
uaggugucuuucuguccuuguu

SEQ ID NO: 303023 - RNA, 22 nt, Human
aguggggccggugaggccgagg

SEQ ID NO: 303024 - RNA, 22 nt, Human
uuucugcauuguccucuugguu

SEQ ID NO: 303025 - RNA, 20 nt, Human
uuaagaaaagcacauccugc

SEQ ID NO: 303026 - RNA, 22 nt, Human
uauauguagucagucagaguaa

SEQ ID NO: 303027 - RNA, 22 nt, Human
agguggggcugggaaagauucc

SEQ ID NO: 303028 - RNA, 20 nt, Human
gauuacaaaaugaaaugcau

SEQ ID NO: 303029 - RNA, 22 nt, Human
ggaugucucccagcaccaaagu

SEQ ID NO: 303030 - RNA, 22 nt, Human
ccaggccuuccaguacgcagaa

SEQ ID NO: 303031 - RNA, 22 nt, Human
agugugaguuacaaagugugaa

SEQ ID NO: 303032 - RNA, 22 nt, Human
uuccuucuccagaacuucuagg

SEQ ID NO: 303033 - RNA, 22 nt, Human
gaauaucccgcuaugcaaagua

SEQ ID NO: 303034 - RNA, 22 nt, Human
uacaagucacuuccuuucuaaa

SEQ ID NO: 303035 - RNA, 22 nt, Human
uggcagguacccauuggcugua

SEQ ID NO: 303036 - RNA, 22 nt, Human
gacagacaaauguuuuuaacuu

SEQ ID NO: 303037 - RNA, 22 nt, Human
gguccuuugaaagggguguguc

SEQ ID NO: 303038 - RNA, 22 nt, Human
gauugcuggggcaggcuguagc

SEQ ID NO: 303039 - RNA, 22 nt, Human
aagaugauguuguguuuucacu

SEQ ID NO: 303040 - RNA, 22 nt, Human
uacauguauguguuaauaucug

SEQ ID NO: 303041 - RNA, 22 nt, Human
augauugaaaaugacauugcca

SEQ ID NO: 303042 - RNA, 22 nt, Human
guauuagguuggugcaaaauug

SEQ ID NO: 303043 - RNA, 22 nt, Human
ggacaggugcaaagggcacaug

SEQ ID NO: 303044 - RNA, 22 nt, Human
aggcaugacuuuggcugaagaa

SEQ ID NO: 303045 - RNA, 22 nt, Human
aggaccugagaguuggaaaucc

SEQ ID NO: 303046 - RNA, 23 nt, Human
uguguccuuaacuguauauacua

SEQ ID NO: 303047 - RNA, 22 nt, Human
acauuuauauaacucacuagga

SEQ ID NO: 303048 - RNA, 22 nt, Human
gguuucaacucagcuaguaagg

SEQ ID NO: 303049 - RNA, 22 nt, Human
uuuagggaagaagcccauggcc

SEQ ID NO: 303050 - RNA, 21 nt, Human
gcugcaaauucuaacaauuau

SEQ ID NO: 303051 - RNA, 22 nt, Human
acuuucauuugugaagacugua

SEQ ID NO: 303052 - RNA, 22 nt, Human
cauuguuaauugguaucuuaca

SEQ ID NO: 303053 - RNA, 22 nt, Human
gacagguguguguauauuaggg

SEQ ID NO: 303054 - RNA, 22 nt, Human
uuuauuuauaagccacuugcug

SEQ ID NO: 303055 - RNA, 21 nt, Human
ucuguucaaggaacuacggau

SEQ ID NO: 303056 - RNA, 22 nt, Human
uacagacauuuacuccacuccu

SEQ ID NO: 303057 - RNA, 22 nt, Human
ucaugaacaucucaaauaacca

SEQ ID NO: 303058 - RNA, 22 nt, Human
aauguugaggauaucagaaaau

SEQ ID NO: 303059 - RNA, 22 nt, Human
agcagguggccacgaggaggag

SEQ ID NO: 303060 - RNA, 22 nt, Human
uauacagucuuuugcuauauuc

SEQ ID NO: 303061 - RNA, 22 nt, Human
auaaacaguaaaugugagcagu

SEQ ID NO: 303062 - RNA, 22 nt, Human
cuuguugcuaacauaugcuucu

SEQ ID NO: 303063 - RNA, 22 nt, Human
caugcaggaggaaaaagcagcu

SEQ ID NO: 303064 - RNA, 22 nt, Human
aaaauuauucauggcuuuugga

SEQ ID NO: 303065 - RNA, 22 nt, Human
cuggaggcaguugccccaguca

SEQ ID NO: 303066 - RNA, 22 nt, Human
uuccaggaaaacaguuggaagu

SEQ ID NO: 303067 - RNA, 22 nt, Human
agccuuguuggucugaguuugg

SEQ ID NO: 303068 - RNA, 22 nt, Human
ggcugcaagacaagguugguuu

SEQ ID NO: 303069 - RNA, 22 nt, Human
uggaggaaguggcuggccagaa

SEQ ID NO: 303070 - RNA, 22 nt, Human
gccugcagcugcuuccacacac

SEQ ID NO: 303071 - RNA, 22 nt, Human
ucagggcacugucaccugauau

SEQ ID NO: 303072 - RNA, 19 nt, Human
cuguccugguuuggucccu

SEQ ID NO: 303073 - RNA, 22 nt, Human
cuuucuuugcagugagccagag

SEQ ID NO: 303074 - RNA, 22 nt, Human
caguguggugagauuccaggug

SEQ ID NO: 303075 - RNA, 22 nt, Human
cagcaugaaacaauugagccca

SEQ ID NO: 303076 - RNA, 22 nt, Human
gagcagugaugggaggacguca

SEQ ID NO: 303077 - RNA, 22 nt, Human
agcuggagcuucaagcagguaa

SEQ ID NO: 303078 - RNA, 22 nt, Human
ggagcugagguaacagugagug

SEQ ID NO: 303079 - RNA, 22 nt, Human
guauuacaaauaaauguuacug

SEQ ID NO: 303080 - RNA, 22 nt, Human
aaaugcuacacaggaauucuca

SEQ ID NO: 303081 - RNA, 22 nt, Human
uuucacauguggaaugccaggu

SEQ ID NO: 303082 - RNA, 22 nt, Human
uuguaaagcugauuagaaagcc

SEQ ID NO: 303083 - RNA, 22 nt, Human
uaauuauuaugacaacaauugc

SEQ ID NO: 303084 - RNA, 22 nt, Human
cuggaugucuuggggacuccug

SEQ ID NO: 303085 - RNA, 22 nt, Human
ccagguguggccacauggcugg

SEQ ID NO: 303086 - RNA, 19 nt, Human
caggugguaaucugagccu

SEQ ID NO: 303087 - RNA, 22 nt, Human
guccaguguguuuaucuuggau

SEQ ID NO: 303088 - RNA, 22 nt, Human
uauuuguauguguguacauaua

SEQ ID NO: 303089 - RNA, 22 nt, Human
uuuuauugucucccaguucugg

SEQ ID NO: 303090 - RNA, 22 nt, Human
uuuuccuuucaucaggacaaag

SEQ ID NO: 303091 - RNA, 22 nt, Human
ucagacagcuugcagggaggug

SEQ ID NO: 303092 - RNA, 22 nt, Human
uuuauaugugaagguuugcaga

SEQ ID NO: 303093 - RNA, 22 nt, Human
uccuggaucuacucucaauugg

SEQ ID NO: 303094 - RNA, 22 nt, Human
uuaacugugacaguuucucaga

SEQ ID NO: 303095 - RNA, 22 nt, Human
cuccagggaugagacagaguag

SEQ ID NO: 303096 - RNA, 22 nt, Human
auguuucaucaguaagguuuug

SEQ ID NO: 303097 - RNA, 22 nt, Human
gaaccauuguugaaaagaauag

SEQ ID NO: 303098 - RNA, 22 nt, Human
agcaggugaugugagucuggaa

SEQ ID NO: 303099 - RNA, 22 nt, Human
uuuccagagcaugucugcucag

SEQ ID NO: 303100 - RNA, 22 nt, Human
uuucuaggcacagugucuuccc

SEQ ID NO: 303101 - RNA, 22 nt, Human
uaccugcacagccagccaugug

SEQ ID NO: 303102 - RNA, 22 nt, Human
uuucuuuugaauaguguguggu

SEQ ID NO: 303103 - RNA, 22 nt, Human
uuccagaauugggagccuugag

SEQ ID NO: 303104 - RNA, 22 nt, Human
cccaguguuccuugaggggcug

SEQ ID NO: 303105 - RNA, 22 nt, Human
uuccaugagcucugaguucaca

SEQ ID NO: 303106 - RNA, 22 nt, Human
ccacccagcagaggaggcaaga

SEQ ID NO: 303107 - RNA, 20 nt, Human
uuacuugucucagcauggag

SEQ ID NO: 303108 - RNA, 22 nt, Human
acuuuauuuccuauugcaucca

SEQ ID NO: 303109 - RNA, 22 nt, Human
guucuuaagaccacaauaaaaa

SEQ ID NO: 303110 - RNA, 22 nt, Human
ccacccagccagaugcaggaag

SEQ ID NO: 303111 - RNA, 22 nt, Human
gucugcccuuggcucagccaua

SEQ ID NO: 303112 - RNA, 22 nt, Human
uacauguggagauaacugaagc

SEQ ID NO: 303113 - RNA, 22 nt, Human
cagcuucuccggccuggugcgg

SEQ ID NO: 303114 - RNA, 22 nt, Human
uggcagggucuugcuguguugc

SEQ ID NO: 303115 - RNA, 22 nt, Human
cagggcagggagcuuagaauga

SEQ ID NO: 303116 - RNA, 22 nt, Human
gagagcacggucuugggcaugg

SEQ ID NO: 303117 - RNA, 22 nt, Human
auucuucagaauaucuggcacu

SEQ ID NO: 303118 - RNA, 22 nt, Human
ugaauaaucuuggguauuaaua

SEQ ID NO: 303119 - RNA, 22 nt, Human
aacaugugucuugcauuucuug

SEQ ID NO: 303120 - RNA, 22 nt, Human
cugcagggcagaagggcauaga

SEQ ID NO: 303121 - RNA, 22 nt, Human
uuucacauuagauaugucauuu

SEQ ID NO: 303122 - RNA, 22 nt, Human
auuuggcaacauuaauugaauc

SEQ ID NO: 303123 - RNA, 22 nt, Human
ucuggaugaaagggcuauauau

SEQ ID NO: 303124 - RNA, 22 nt, Human
acuuccuuuugggaaacuguuu

SEQ ID NO: 303125 - RNA, 22 nt, Human
uuguacuaucaccaugucaugu

SEQ ID NO: 303126 - RNA, 22 nt, Human
aguuuguaaguucauuaugagu

SEQ ID NO: 303127 - RNA, 22 nt, Human
acauuuaaauaccuauguuucu

SEQ ID NO: 303128 - RNA, 22 nt, Human
ucuuuccaaggacucuguagca

SEQ ID NO: 303129 - RNA, 22 nt, Human
gcuggagggguaauaggauggg

SEQ ID NO: 303130 - RNA, 22 nt, Human
cugaggcuuggaggggucuggu

SEQ ID NO: 303131 - RNA, 22 nt, Human
auuguauaauuguauugccaaa

SEQ ID NO: 303132 - RNA, 23 nt, Human
agagcaucaugaugcuaagucug

SEQ ID NO: 303133 - RNA, 22 nt, Human
ucuggcucucauacucgccagu

SEQ ID NO: 303134 - RNA, 22 nt, Human
cagggcagaaggcacucuacuc

SEQ ID NO: 303135 - RNA, 22 nt, Human
uuuauuuaaagucguguguuaa

SEQ ID NO: 303136 - RNA, 22 nt, Human
ugcuggcugccagguucccugu

SEQ ID NO: 303137 - RNA, 22 nt, Human
cagaguggugcaagggcagugu

SEQ ID NO: 303138 - RNA, 22 nt, Human
gcaugcaggagagaaagacggc

SEQ ID NO: 303139 - RNA, 22 nt, Human
uuauauuguguaauaagugaag

SEQ ID NO: 303140 - RNA, 22 nt, Human
auauuccauugguuucccuucu

SEQ ID NO: 303141 - RNA, 22 nt, Human
auuucccuccagggaaagcuua

SEQ ID NO: 303142 - RNA, 22 nt, Human
caguggugaagagcaggggcuc

SEQ ID NO: 303143 - RNA, 22 nt, Human
aguccuuugcugaacugucaca

SEQ ID NO: 303144 - RNA, 18 nt, Human
uccugcagcuucuaugua

SEQ ID NO: 303145 - RNA, 22 nt, Human
ugggacacagaaaaggcagguu

SEQ ID NO: 303146 - RNA, 22 nt, Human
cacauaaucaccaaguccuuuc

SEQ ID NO: 303147 - RNA, 22 nt, Human
cuucagaggggacucaaaguca

SEQ ID NO: 303148 - RNA, 22 nt, Human
aagggcagccugacucacgguc

SEQ ID NO: 303149 - RNA, 22 nt, Human
uuauugagcaccuacuaugugu

SEQ ID NO: 303150 - RNA, 22 nt, Human
gggaggaaugcaacuuauuuag

SEQ ID NO: 303151 - RNA, 20 nt, Human
ccagcuuucccugcagcauc

SEQ ID NO: 303152 - RNA, 22 nt, Human
cagauuuaccuaacuccaaguu

SEQ ID NO: 303153 - RNA, 22 nt, Human
auuuauugguuugcauggugaa

SEQ ID NO: 303154 - RNA, 22 nt, Human
uguuucauuaguacugacaaua

SEQ ID NO: 303155 - RNA, 22 nt, Human
uacagcuaggcaaaaaugacau

SEQ ID NO: 303156 - RNA, 22 nt, Human
ucagggcacaggccuguggguu

SEQ ID NO: 303157 - RNA, 22 nt, Human
gagggcuccacacgggcccagc

SEQ ID NO: 303158 - RNA, 22 nt, Human
uuggaggaaauugcuuuugugg

SEQ ID NO: 303159 - RNA, 18 nt, Human
agcagguggcgucugcag

SEQ ID NO: 303160 - RNA, 22 nt, Human
uuugaaauaugaggcauuauga

SEQ ID NO: 303161 - RNA, 22 nt, Human
uauuugaaggcauacauuuuga

SEQ ID NO: 303162 - RNA, 22 nt, Human
cucuggaauggguguuucuaac

SEQ ID NO: 303163 - RNA, 22 nt, Human
cucugcccccagcuggugcuug

SEQ ID NO: 303164 - RNA, 22 nt, Human
ccagagagauugcuucuaaaga

SEQ ID NO: 303165 - RNA, 23 nt, Human
uccaggcaugagcucuggaugga

SEQ ID NO: 303166 - RNA, 22 nt, Human
agcagguguuagggauccaaug

SEQ ID NO: 303167 - RNA, 22 nt, Human
ucagggcauguauguuucuuua

SEQ ID NO: 303168 - RNA, 22 nt, Human
gagugcuugcauauuuauuguc

SEQ ID NO: 303169 - RNA, 22 nt, Human
ccugcucccgggacgcguucac

SEQ ID NO: 303170 - RNA, 22 nt, Human
aaaagguuuugaguacaaauau

SEQ ID NO: 303171 - RNA, 22 nt, Human
uuucuuucaauucuccuaaugc

SEQ ID NO: 303172 - RNA, 22 nt, Human
cuggauguaacgaagguuucac

SEQ ID NO: 303173 - RNA, 22 nt, Human
uguccuagaguacauuccacug

SEQ ID NO: 303174 - RNA, 22 nt, Human
aggcuuuaauuaucuacaggag

SEQ ID NO: 303175 - RNA, 22 nt, Human
auccugugcaaugacugcaucu

SEQ ID NO: 303176 - RNA, 22 nt, Human
uguuugcuauauccuacuucau

SEQ ID NO: 303177 - RNA, 22 nt, Human
uuuaaauucugucugccgcuua

SEQ ID NO: 303178 - RNA, 21 nt, Human
aucuggaaauucugccagaga

SEQ ID NO: 303179 - RNA, 22 nt, Human
uguccuuuuucuuaggaaauau

SEQ ID NO: 303180 - RNA, 22 nt, Human
auuucaguguugguuagcaagc

SEQ ID NO: 303181 - RNA, 22 nt, Human
ugaaagcagcaccaauaccauu

SEQ ID NO: 303182 - RNA, 22 nt, Human
guaggcagguggaggagugaag

SEQ ID NO: 303183 - RNA, 17 nt, Human
uacauguguaucugauu

SEQ ID NO: 303184 - RNA, 22 nt, Human
uuccaggacaagauguuucagg

SEQ ID NO: 303185 - RNA, 22 nt, Human
caggacagagcccagacugugu

SEQ ID NO: 303186 - RNA, 18 nt, Human
uuccaugauuccuuucac

SEQ ID NO: 303187 - RNA, 22 nt, Human
ugcagggcaguuuguuucggca

SEQ ID NO: 303188 - RNA, 22 nt, Human
ugcagggaaagggcacugggcu

SEQ ID NO: 303189 - RNA, 22 nt, Human
ucagacagugugaucagucucu

SEQ ID NO: 303190 - RNA, 22 nt, Human
accugcagcuaaagauguaggg

SEQ ID NO: 303191 - RNA, 22 nt, Human
ugaaagaaacagguauauuggg

SEQ ID NO: 303192 - RNA, 22 nt, Human
cugauuccagagucuguguucu

SEQ ID NO: 303193 - RNA, 22 nt, Human
cuggauguucuucugcaauuau

SEQ ID NO: 303194 - RNA, 22 nt, Human
cuguuguauuauucaauauuau

SEQ ID NO: 303195 - RNA, 22 nt, Human
ccagacaguuccuugagguuca

SEQ ID NO: 303196 - RNA, 22 nt, Human
agacaggugcucgcccaagucc

SEQ ID NO: 303197 - RNA, 22 nt, Human
ccuuccuuugcaucauuucuag

SEQ ID NO: 303198 - RNA, 14 nt, Human
gcaggcagaucacc

SEQ ID NO: 303199 - RNA, 19 nt, Human
agcauuuggaauucuacac

SEQ ID NO: 303200 - RNA, 22 nt, Human
guguccugcauuggcucugccc

SEQ ID NO: 303201 - RNA, 22 nt, Human
ccuuuauucaauuaguccuaau

SEQ ID NO: 303202 - RNA, 22 nt, Human
cucagcaacccacacacggucu

SEQ ID NO: 303203 - RNA, 22 nt, Human
cuguccugcaguugggggcagg

SEQ ID NO: 303204 - RNA, 22 nt, Human
cuggcccuucucuugcuuccug

SEQ ID NO: 303205 - RNA, 22 nt, Human
ccacagaaaauaaagcacgauu

SEQ ID NO: 303206 - RNA, 21 nt, Human
uucuucaguuuaauauaaaau

SEQ ID NO: 303207 - RNA, 21 nt, Human
ucuuuucucagcuuugugguu

SEQ ID NO: 303208 - RNA, 22 nt, Human
aagggcagagggaaucccacau

SEQ ID NO: 303209 - RNA, 22 nt, Human
cacagacagugucccuuuguug

SEQ ID NO: 303210 - RNA, 22 nt, Human
gguaaaaaucacaaauacuuua

SEQ ID NO: 303211 - RNA, 21 nt, Human
uccagaccucccucuccuagc

SEQ ID NO: 303212 - RNA, 22 nt, Human
aaauguauugcauaggauauuu

SEQ ID NO: 303213 - RNA, 22 nt, Human
ggacagguucagcaguuuauaa

SEQ ID NO: 303214 - RNA, 17 nt, Human
uuucugcaugauuggac

SEQ ID NO: 303215 - RNA, 19 nt, Human
ccaggccuccugggagguc

SEQ ID NO: 303216 - RNA, 22 nt, Human
aguccggggucuggacaccugg

SEQ ID NO: 303217 - RNA, 22 nt, Human
gucauucuuaacaacucaguag

SEQ ID NO: 303218 - RNA, 22 nt, Human
uuaagacauucagauauuucua

SEQ ID NO: 303219 - RNA, 22 nt, Human
acagcuggcaggggggcaugaa

SEQ ID NO: 303220 - RNA, 22 nt, Human
cucccuucaggagaggcucaca

SEQ ID NO: 303221 - RNA, 22 nt, Human
cagggcucugccuugagggaug

SEQ ID NO: 303222 - RNA, 22 nt, Human
agggcccuaaggaaggcacaca

SEQ ID NO: 303223 - RNA, 22 nt, Human
cuuuguugugccugagugcacc

SEQ ID NO: 303224 - RNA, 19 nt, Human
ggaagagaggaaaggugga

SEQ ID NO: 303225 - RNA, 22 nt, Human
gaugagguguguggccacuaga

SEQ ID NO: 303226 - RNA, 22 nt, Human
ccaggugucauggauaaugggu

SEQ ID NO: 303227 - RNA, 22 nt, Human
aaagcagacugauuugcaucac

SEQ ID NO: 303228 - RNA, 21 nt, Human
ugucagagcuuguaggacauu

SEQ ID NO: 303229 - RNA, 22 nt, Human
cacagguggcuucuuucaucuu

SEQ ID NO: 303230 - RNA, 22 nt, Human
uccugcagccauuagaggucaa

SEQ ID NO: 303231 - RNA, 22 nt, Human
uggagcaggugggaugucguga

SEQ ID NO: 303232 - RNA, 22 nt, Human
uucuguauauuguaaagacuca

SEQ ID NO: 303233 - RNA, 22 nt, Human
uaguuuguagaaaucuagaaau

SEQ ID NO: 303234 - RNA, 22 nt, Human
agugugagcuaauagcagagcc

SEQ ID NO: 303235 - RNA, 22 nt, Human
uuugaaugcaggacauacagaa

SEQ ID NO: 303236 - RNA, 22 nt, Human
acaggcaggcuucggccagagc

SEQ ID NO: 303237 - RNA, 22 nt, Human
auauugagaugaggauauuaac

SEQ ID NO: 303238 - RNA, 22 nt, Human
gacauaauccuccucaccuacu

SEQ ID NO: 303239 - RNA, 20 nt, Human
agugacugggagaauggauu

SEQ ID NO: 303240 - RNA, 22 nt, Human
auuucuguaguccacauucuuu

SEQ ID NO: 303241 - RNA, 22 nt, Human
accugcaggggugcucucuggg

SEQ ID NO: 303242 - RNA, 22 nt, Human
gugggggacccaggugcugucc

SEQ ID NO: 303243 - RNA, 19 nt, Human
uccuucuccggccaccccg

SEQ ID NO: 303244 - RNA, 22 nt, Human
auccuucuucaaagagggaaaa

SEQ ID NO: 303245 - RNA, 20 nt, Human
uuccagagaucugcauuuua

SEQ ID NO: 303246 - RNA, 22 nt, Human
ugcaugaaauauuuucuguagg

SEQ ID NO: 303247 - RNA, 22 nt, Human
caaauucucacccuguuugauu

SEQ ID NO: 303248 - RNA, 22 nt, Human
accugcaggcacaggugugcgc

SEQ ID NO: 303249 - RNA, 22 nt, Human
ucaugugucugccaguguuuau

SEQ ID NO: 303250 - RNA, 22 nt, Human
uuccaggaggagguacuagagg

SEQ ID NO: 303251 - RNA, 22 nt, Human
augacaggaggcagcugggcag

SEQ ID NO: 303252 - RNA, 21 nt, Human
uucuucuuggacuguuuuggc

SEQ ID NO: 303253 - RNA, 22 nt, Human
uugguuuguucaccaucaagca

SEQ ID NO: 303254 - RNA, 22 nt, Human
guuugaaugcaguaugcauuuu

SEQ ID NO: 303255 - RNA, 22 nt, Human
ugaaagcuuugggacaguguga

SEQ ID NO: 303256 - RNA, 20 nt, Human
gcagagugugagagggugaa

SEQ ID NO: 303257 - RNA, 22 nt, Human
ugcugauuuugccuacugaucc

SEQ ID NO: 303258 - RNA, 22 nt, Human
aggaccugaaauucuugcuuuu

SEQ ID NO: 303259 - RNA, 19 nt, Human
ugggugugaccaucucugc

SEQ ID NO: 303260 - RNA, 22 nt, Human
uggcaggguggcaacuuuuggu

SEQ ID NO: 303261 - RNA, 22 nt, Human
agcagggcuccugaaagccgcg

SEQ ID NO: 303262 - RNA, 22 nt, Human
ugcacuacugugauacacagcc

SEQ ID NO: 303263 - RNA, 22 nt, Human
guauuaggaggaacacaggccu

SEQ ID NO: 303264 - RNA, 22 nt, Human
auuugaagucuucaugauuucu

SEQ ID NO: 303265 - RNA, 22 nt, Human
ggcaggcacugugcuaggcgcu

SEQ ID NO: 303266 - RNA, 21 nt, Human
aggcugcaugcaugagugugg

SEQ ID NO: 303267 - RNA, 22 nt, Human
gucuucuuguguugccugucuu

SEQ ID NO: 303268 - RNA, 22 nt, Human
uuccuggguugugcauuguaca

SEQ ID NO: 303269 - RNA, 22 nt, Human
ccacagagacaggguccuugcu

SEQ ID NO: 303270 - RNA, 22 nt, Human
ugcuuuauggagcccaucucau

SEQ ID NO: 303271 - RNA, 21 nt, Human
uccugcagaaugccuuccuac

SEQ ID NO: 303272 - RNA, 22 nt, Human
cugaaggagaaggccacuguuc

SEQ ID NO: 303273 - RNA, 22 nt, Human
uccaggcauuccagccauucca

SEQ ID NO: 303274 - RNA, 22 nt, Human
aauauaauuuuauuccuagagu

SEQ ID NO: 303275 - RNA, 22 nt, Human
ggcagguggaaggucuccauuc

SEQ ID NO: 303276 - RNA, 22 nt, Human
gggacauggaggcgcgcaggca

SEQ ID NO: 303277 - RNA, 23 nt, Human
ucagggacaugaugugucauauc

SEQ ID NO: 303278 - RNA, 20 nt, Human
auggaggaagggcaagagaa

SEQ ID NO: 303279 - RNA, 22 nt, Human
aauuugauucccugcaccuguu

SEQ ID NO: 303280 - RNA, 22 nt, Human
aucauguguaauuucaagcuac

SEQ ID NO: 303281 - RNA, 23 nt, Human
uuucuucagaagccuugcgaggc

SEQ ID NO: 303282 - RNA, 22 nt, Human
uggcagggugggcuucagcccc

SEQ ID NO: 303283 - RNA, 22 nt, Human
uuuaauuuguauuucuagaggg

SEQ ID NO: 303284 - RNA, 22 nt, Human
cucagcaagauuaagcagcuug

SEQ ID NO: 303285 - RNA, 22 nt, Human
aauugcuuugaagaagggagcg

SEQ ID NO: 303286 - RNA, 22 nt, Human
gcagggcaggauuugaacccag

SEQ ID NO: 303287 - RNA, 22 nt, Human
uaauuucuagggacuaaggugc

SEQ ID NO: 303288 - RNA, 22 nt, Human
ccaguguucauaauuuuacacu

SEQ ID NO: 303289 - RNA, 22 nt, Human
uuuacuguguccaucugugacu

SEQ ID NO: 303290 - RNA, 20 nt, Human
uguaggaaggacccugucug

SEQ ID NO: 303291 - RNA, 22 nt, Human
cuagugagucugaaugaguugc

SEQ ID NO: 303292 - RNA, 22 nt, Human
uaaaucuccuguuuuucaucua

SEQ ID NO: 303293 - RNA, 22 nt, Human
ugcauaaacagauacuucaugu

SEQ ID NO: 303294 - RNA, 22 nt, Human
auaucaaacgaaguuauuuuaa

SEQ ID NO: 303295 - RNA, 22 nt, Human
cugcaggggcuggaguuggcuu

SEQ ID NO: 303296 - RNA, 23 nt, Human
ucuggaggggacacugcagaugc

SEQ ID NO: 303297 - RNA, 22 nt, Human
uuggagguuugaaaauaugugu

SEQ ID NO: 303298 - RNA, 22 nt, Human
auuucauugaaguuaauucuuc

SEQ ID NO: 303299 - RNA, 22 nt, Human
uauucaaaguaccuucauugcc

SEQ ID NO: 303300 - RNA, 22 nt, Human
ccagggcaacgcugucucagag

SEQ ID NO: 303301 - RNA, 22 nt, Human
cagacagaccugcaagggcaca

SEQ ID NO: 303302 - RNA, 20 nt, Human
agaaccuaaguuaaaacaca

SEQ ID NO: 303303 - RNA, 22 nt, Human
ugcuuuaucugacuuggcgcug

SEQ ID NO: 303304 - RNA, 22 nt, Human
ggcuccaggcuccuauuucacu

SEQ ID NO: 303305 - RNA, 22 nt, Human
agaagcacaccugaccucuagc

SEQ ID NO: 303306 - RNA, 22 nt, Human
accaggcaguauggugcugcaa

SEQ ID NO: 303307 - RNA, 22 nt, Human
agaagcugcguuuauuuaaauc

SEQ ID NO: 303308 - RNA, 22 nt, Human
agacaggcagggcauggaaaaa

SEQ ID NO: 303309 - RNA, 22 nt, Human
uguaaauaaugcauguaaauca

SEQ ID NO: 303310 - RNA, 22 nt, Human
uggcagguggcucuggcauucu

SEQ ID NO: 303311 - RNA, 22 nt, Human
acuuaaaaagaaucuuuucacg

SEQ ID NO: 303312 - RNA, 22 nt, Human
auguauuugcuuguuauggauu

SEQ ID NO: 303313 - RNA, 22 nt, Human
agcuggagaauguggaugaucc

SEQ ID NO: 303314 - RNA, 22 nt, Human
agacagacagagaauuuaaaua

SEQ ID NO: 303315 - RNA, 22 nt, Human
aauugcuuaucuuguugaauag

SEQ ID NO: 303316 - RNA, 22 nt, Human
aauuuccaaauuucugucacac

SEQ ID NO: 303317 - RNA, 22 nt, Human
aguguuagugaaagguguuuau

SEQ ID NO: 303318 - RNA, 22 nt, Human
ugcagggccuugggaugugucc

SEQ ID NO: 303319 - RNA, 22 nt, Human
uacaacauguaaagugguuuaa

SEQ ID NO: 303320 - RNA, 22 nt, Human
cagaaagaccugauuggcaguu

SEQ ID NO: 303321 - RNA, 20 nt, Human
uuucuggguacucucccucu

SEQ ID NO: 303322 - RNA, 22 nt, Human
uccauucuuuuuaccucucaga

SEQ ID NO: 303323 - RNA, 22 nt, Human
uuauuuacaacucuucucuucc

SEQ ID NO: 303324 - RNA, 18 nt, Human
cuguucuagaacuccugu

SEQ ID NO: 303325 - RNA, 20 nt, Human
uuucugugcccaggucuguu

SEQ ID NO: 303326 - RNA, 22 nt, Human
ugucuuuagccagcagucuucu

SEQ ID NO: 303327 - RNA, 22 nt, Human
aaugcuaacauugguuuauauc

SEQ ID NO: 303328 - RNA, 17 nt, Human
uccaggcauaucuccua

SEQ ID NO: 303329 - RNA, 22 nt, Human
gaggauggaggcaguuagggcc

SEQ ID NO: 303330 - RNA, 22 nt, Human
uaaacaucugucauguguuuau

SEQ ID NO: 303331 - RNA, 18 nt, Human
cuaaacugcaccuaauga

SEQ ID NO: 303332 - RNA, 22 nt, Human
gaaaacuaacggaaaaguuagg

SEQ ID NO: 303333 - RNA, 22 nt, Human
auguccuuccugagaucccugu

SEQ ID NO: 303334 - RNA, 22 nt, Human
aggaccauccuaagguaggcaa

SEQ ID NO: 303335 - RNA, 22 nt, Human
gaucuucuagcagaaguaauuu

SEQ ID NO: 303336 - RNA, 22 nt, Human
cagggccagcgcccaggcccag

SEQ ID NO: 303337 - RNA, 22 nt, Human
acagguguagguacauuugcau

SEQ ID NO: 303338 - RNA, 15 nt, Human
ggcagguggaucacu

SEQ ID NO: 303339 - RNA, 22 nt, Human
ugcuuuauaggggauugcaggc

SEQ ID NO: 303340 - RNA, 20 nt, Human
cugcugcccugucagccucu

SEQ ID NO: 303341 - RNA, 22 nt, Human
uauuagggaacugcaagacuaa

SEQ ID NO: 303342 - RNA, 22 nt, Human
aaggcuuuuguuccuauuuagu

SEQ ID NO: 303343 - RNA, 22 nt, Human
cagagcauugagggucugccaa

SEQ ID NO: 303344 - RNA, 22 nt, Human
acucugaaugugcauguaaauc

SEQ ID NO: 303345 - RNA, 22 nt, Human
uuugacauggaauaacucauuu

SEQ ID NO: 303346 - RNA, 22 nt, Human
caugaaggaccauuucacgguc

SEQ ID NO: 303347 - RNA, 22 nt, Human
cuugauugcuucuacgugacug

SEQ ID NO: 303348 - RNA, 23 nt, Human
uugcugccugagccuuccucugg

SEQ ID NO: 303349 - RNA, 22 nt, Human
gggcugacgaaggccaugugug

SEQ ID NO: 303350 - RNA, 22 nt, Human
gucuggaaauuuaagguaugag

SEQ ID NO: 303351 - RNA, 22 nt, Human
gguggggcugcaagcaguucgg

SEQ ID NO: 303352 - RNA, 22 nt, Human
aguguccuacagcuccugccug

SEQ ID NO: 303353 - RNA, 22 nt, Human
cagguggucaggcagaugggcu

SEQ ID NO: 303354 - RNA, 21 nt, Human
agacaggucagggagagguga

SEQ ID NO: 303355 - RNA, 23 nt, Human
gcagacagagcagacuaagacaa

SEQ ID NO: 303356 - RNA, 22 nt, Human
cuccagugagugagcaggcgac

SEQ ID NO: 303357 - RNA, 22 nt, Human
cugcccgucccuuugcucucgc

SEQ ID NO: 303358 - RNA, 22 nt, Human
gaaaacacuuugaucugaaagu

SEQ ID NO: 303359 - RNA, 22 nt, Human
agagguuguuagaauaguggag

SEQ ID NO: 303360 - RNA, 22 nt, Human
cacagguguaugaauaugucca

SEQ ID NO: 303361 - RNA, 22 nt, Human
uuccaggaggcacugacagagg

SEQ ID NO: 303362 - RNA, 22 nt, Human
aaugaaugaaccacauauaaca

SEQ ID NO: 303363 - RNA, 22 nt, Human
agauggucuucauaaguuuuaa

SEQ ID NO: 303364 - RNA, 21 nt, Human
uccuugcuauuuuccucagcu

SEQ ID NO: 303365 - RNA, 22 nt, Human
auugguauguauucugaaaacu

SEQ ID NO: 303366 - RNA, 22 nt, Human
gggcugacaccacccaggcgca

SEQ ID NO: 303367 - RNA, 22 nt, Human
guauacaugugguaaaaugcac

SEQ ID NO: 303368 - RNA, 19 nt, Human
uccugcagaccagaccugu

SEQ ID NO: 303369 - RNA, 22 nt, Human
aaauucuaaggucacaauguug

SEQ ID NO: 303370 - RNA, 22 nt, Human
ugcaggugugggcaggggagca

SEQ ID NO: 303371 - RNA, 17 nt, Human
uguuuucugcuaccuuu

SEQ ID NO: 303372 - RNA, 22 nt, Human
cauaauaucuccgauuacuugc

SEQ ID NO: 303373 - RNA, 23 nt, Human
cuuucauugugguuucacagagc

SEQ ID NO: 303374 - RNA, 22 nt, Human
ugucugggucaccccuccuggc

SEQ ID NO: 303375 - RNA, 22 nt, Human
ugggugggagcgcccugucugg

SEQ ID NO: 303376 - RNA, 22 nt, Human
auagaaacagaggucaggcauu

SEQ ID NO: 303377 - RNA, 22 nt, Human
auuucuuucuggccacgguuuu

SEQ ID NO: 303378 - RNA, 22 nt, Human
aaaacuaaauacgcuuugccuc

SEQ ID NO: 303379 - RNA, 22 nt, Human
aucaagaaaagugcuuucggcu

SEQ ID NO: 303380 - RNA, 22 nt, Human
gugcagggcuggcaccggaggc

SEQ ID NO: 303381 - RNA, 22 nt, Human
ucagggcaggacaguguaggcc

SEQ ID NO: 303382 - RNA, 21 nt, Human
uaaauaauaaguugcugagau

SEQ ID NO: 303383 - RNA, 23 nt, Human
cauaaaauauuaguaugguagca

SEQ ID NO: 303384 - RNA, 22 nt, Human
cagugagggaagaucucagcac

SEQ ID NO: 303385 - RNA, 22 nt, Human
auuuccaucaucauuaggccua

SEQ ID NO: 303386 - RNA, 22 nt, Human
agucaguguucuggguuguaau

SEQ ID NO: 303387 - RNA, 22 nt, Human
cuguccagcuuggcuccugggg

SEQ ID NO: 303388 - RNA, 22 nt, Human
accaugaucugcucugguguuu

SEQ ID NO: 303389 - RNA, 22 nt, Human
uguuuauugagugccuacuaua

SEQ ID NO: 303390 - RNA, 22 nt, Human
uacagacaguuuuucagauauu

SEQ ID NO: 303391 - RNA, 22 nt, Human
uccaguuuacaggguugcuuuu

SEQ ID NO: 303392 - RNA, 22 nt, Human
uauugguauaggcauugaaacu

SEQ ID NO: 303393 - RNA, 22 nt, Human
ggacagacuuuacagccccggg

SEQ ID NO: 303394 - RNA, 22 nt, Human
caggaaaggugugucaugaugg

SEQ ID NO: 303395 - RNA, 22 nt, Human
cagcuuuauuucacguguuugu

SEQ ID NO: 303396 - RNA, 22 nt, Human
auuaaauuggaucugcauaguu

SEQ ID NO: 303397 - RNA, 22 nt, Human
ccagcaugagacgaugaugaag

SEQ ID NO: 303398 - RNA, 22 nt, Human
cgugagcaaaauggacacuccc

SEQ ID NO: 303399 - RNA, 22 nt, Human
agggaccuugauggguuuggga

SEQ ID NO: 303400 - RNA, 22 nt, Human
uuuuucagccaugaauuacacu

SEQ ID NO: 303401 - RNA, 22 nt, Human
uuugcugaauagauuguaaacu

SEQ ID NO: 303402 - RNA, 22 nt, Human
cucagugugaaugcucaguaaa

SEQ ID NO: 303403 - RNA, 22 nt, Human
auucaagagcccauguuuccug

SEQ ID NO: 303404 - RNA, 22 nt, Human
aauauaaugcuguuuuaugcca

SEQ ID NO: 303405 - RNA, 22 nt, Human
uucacaguggcugugccauuug

SEQ ID NO: 303406 - RNA, 21 nt, Human
ugggaccuagcuuugcacagg

SEQ ID NO: 303407 - RNA, 22 nt, Human
ccuguucaaguugcagggcugg

SEQ ID NO: 303408 - RNA, 22 nt, Human
ugcagggauuguuggcauccau

SEQ ID NO: 303409 - RNA, 22 nt, Human
gagcuuuagcugagaccugcuu

SEQ ID NO: 303410 - RNA, 22 nt, Human
caggugguacuuaaagucagaa

SEQ ID NO: 303411 - RNA, 22 nt, Human
uuccuucuuccaaacccaucau

SEQ ID NO: 303412 - RNA, 22 nt, Human
acuuccuuguacugacuccauu

SEQ ID NO: 303413 - RNA, 22 nt, Human
cauuguuaccaucuuuuaccua

SEQ ID NO: 303414 - RNA, 22 nt, Human
aauguuuuagauuacugcuggg

SEQ ID NO: 303415 - RNA, 22 nt, Human
cugggugagcuggccagagggu

SEQ ID NO: 303416 - RNA, 22 nt, Human
caugugucacagccuuuuauug

SEQ ID NO: 303417 - RNA, 22 nt, Human
guguguccucuuaacuauuaug

SEQ ID NO: 303418 - RNA, 22 nt, Human
cuuccagaggaacucugcagug

SEQ ID NO: 303419 - RNA, 22 nt, Human
augugguugaagaauuacaucu

SEQ ID NO: 303420 - RNA, 22 nt, Human
ucuaauccuugcuaccugggug

SEQ ID NO: 303421 - RNA, 22 nt, Human
agacauguccacaaagcauuca

SEQ ID NO: 303422 - RNA, 22 nt, Human
gaaauuuauuaucuacaucauu

SEQ ID NO: 303423 - RNA, 22 nt, Human
ucuggagggguuuagagggaca

SEQ ID NO: 303424 - RNA, 22 nt, Human
uuauacauguguuuugagauga

SEQ ID NO: 303425 - RNA, 22 nt, Human
aauugcuuuuauuuagggccag

SEQ ID NO: 303426 - RNA, 22 nt, Human
uguguccuuccaguuuuuccug

SEQ ID NO: 303427 - RNA, 18 nt, Human
acuguuaucugauaaggc

SEQ ID NO: 303428 - RNA, 22 nt, Human
agaggugggagccuggucacau

SEQ ID NO: 303429 - RNA, 22 nt, Human
ugggguggauagaaagugaugu

SEQ ID NO: 303430 - RNA, 22 nt, Human
ggacauguuccuuuucaucuuu

SEQ ID NO: 303431 - RNA, 22 nt, Human
ggcagggcuugucucugugaug

SEQ ID NO: 303432 - RNA, 22 nt, Human
uuccaggaccaggaagagggga

SEQ ID NO: 303433 - RNA, 22 nt, Human
uagaaaugaauguuuaaaaguc

SEQ ID NO: 303434 - RNA, 22 nt, Human
uaauuacagguccaaaacaauc

SEQ ID NO: 303435 - RNA, 22 nt, Human
uugcuuuauauucaagagagga

SEQ ID NO: 303436 - RNA, 22 nt, Human
aagauucagccaaauuguucau

SEQ ID NO: 303437 - RNA, 22 nt, Human
agcaggugaauuccuggaugug

SEQ ID NO: 303438 - RNA, 22 nt, Human
auuuucagagacaucuggacuu

SEQ ID NO: 303439 - RNA, 22 nt, Human
uuuaacacuaguuucuuuaacu

SEQ ID NO: 303440 - RNA, 22 nt, Human
ucucucuuuuuaaucauguaau

SEQ ID NO: 303441 - RNA, 22 nt, Human
uuccaugaaagugaaauggagc

SEQ ID NO: 303442 - RNA, 22 nt, Human
uuauuugugaaucauuuaucua

SEQ ID NO: 303443 - RNA, 22 nt, Human
caggagcaaggagcagugggau

SEQ ID NO: 303444 - RNA, 22 nt, Human
auaacauuuugacaacugguga

SEQ ID NO: 303445 - RNA, 21 nt, Human
gcaggugugguaucagcuucc

SEQ ID NO: 303446 - RNA, 22 nt, Human
agcaggugagcacagccaggcu

SEQ ID NO: 303447 - RNA, 22 nt, Human
uggcucugugucucccagcagc

SEQ ID NO: 303448 - RNA, 22 nt, Human
uugcuuuaagguaucuggagaa

SEQ ID NO: 303449 - RNA, 22 nt, Human
aagagcaucaaugacucgcagu

SEQ ID NO: 303450 - RNA, 22 nt, Human
uaguuaggguucugcagagaca

SEQ ID NO: 303451 - RNA, 22 nt, Human
aagggcucuucuauuuauggcc

SEQ ID NO: 303452 - RNA, 22 nt, Human
aacuugguaaauugugucagau

SEQ ID NO: 303453 - RNA, 22 nt, Human
ccacagcugaccgcaggugagc

SEQ ID NO: 303454 - RNA, 22 nt, Human
gccugcagccucagagaauuuu

SEQ ID NO: 303455 - RNA, 22 nt, Human
aggcagguguuaccucugguuu

SEQ ID NO: 303456 - RNA, 22 nt, Human
ucugggugcccuuugcucuguu

SEQ ID NO: 303457 - RNA, 22 nt, Human
auguucuuggauguuguguaua

SEQ ID NO: 303458 - RNA, 20 nt, Human
cagggcucugggccuggccu

SEQ ID NO: 303459 - RNA, 22 nt, Human
ggcuccacugcugaccacucca

SEQ ID NO: 303460 - RNA, 22 nt, Human
ccuggacucaggcugugggcac

SEQ ID NO: 303461 - RNA, 22 nt, Human
ccaggcagagggaauagcaagu

SEQ ID NO: 303462 - RNA, 22 nt, Human
ggagagguguauucaguggguc

SEQ ID NO: 303463 - RNA, 22 nt, Human
aaaauucugucauuaaauugug

SEQ ID NO: 303464 - RNA, 22 nt, Human
aagggcucacccaacucacuuc

SEQ ID NO: 303465 - RNA, 22 nt, Human
cacagcauuaacugggacagcu

SEQ ID NO: 303466 - RNA, 22 nt, Human
acagcuuuaucucagggaucag

SEQ ID NO: 303467 - RNA, 22 nt, Human
uacagacaaagugcuauagggu

SEQ ID NO: 303468 - RNA, 22 nt, Human
ugggccagcacugggugcucau

SEQ ID NO: 303469 - RNA, 22 nt, Human
gaaagcacaguucugaccaugu

SEQ ID NO: 303470 - RNA, 22 nt, Human
aaggcauauauucuaaacagga

SEQ ID NO: 303471 - RNA, 22 nt, Human
acaggcacugucaagucaugaa

SEQ ID NO: 303472 - RNA, 23 nt, Human
ucuuuccuaaugaaacagugaaa

SEQ ID NO: 303473 - RNA, 22 nt, Human
gacagacaggaggcauucaggg

SEQ ID NO: 303474 - RNA, 22 nt, Human
ccaggcaggcuagaauguaaau

SEQ ID NO: 303475 - RNA, 22 nt, Human
acagauuuaggacuguagcgau

SEQ ID NO: 303476 - RNA, 22 nt, Human
aaagugguugcugucagccucu

SEQ ID NO: 303477 - RNA, 22 nt, Human
uuuuuagaauuggcugagaauu

SEQ ID NO: 303478 - RNA, 22 nt, Human
aaaggcuggggacugaggaagg

SEQ ID NO: 303479 - RNA, 22 nt, Human
guggaggagaggcgccuugcgg

SEQ ID NO: 303480 - RNA, 22 nt, Human
aagauguaaaggcaauauaaag

SEQ ID NO: 303481 - RNA, 22 nt, Human
gugcaaaaguaaaugugguuuu

SEQ ID NO: 303482 - RNA, 22 nt, Human
cagguguauaaacucagugacu

SEQ ID NO: 303483 - RNA, 22 nt, Human
cugggucuaaaaauucucagau

SEQ ID NO: 303484 - RNA, 22 nt, Human
ugcaggugcuccgggggugccc

SEQ ID NO: 303485 - RNA, 22 nt, Human
uucagcaaauggacuguucagg

SEQ ID NO: 303486 - RNA, 22 nt, Human
aauauguuccacuuaaagcugg

SEQ ID NO: 303487 - RNA, 22 nt, Human
uuagcucagaaaauuuaaacuu

SEQ ID NO: 303488 - RNA, 21 nt, Human
agaagggauugugguaaagau

SEQ ID NO: 303489 - RNA, 22 nt, Human
uacauguacaugcauagguaga

SEQ ID NO: 303490 - RNA, 18 nt, Human
aggcaggugcuaauauuu

SEQ ID NO: 303491 - RNA, 22 nt, Human
uauuauuaaauggcagaauuuu

SEQ ID NO: 303492 - RNA, 22 nt, Human
cacccagccuucacacaggagu

SEQ ID NO: 303493 - RNA, 22 nt, Human
agcaggugcguuacuucacucu

SEQ ID NO: 303494 - RNA, 22 nt, Human
ucuggaugaagacccagaggcu

SEQ ID NO: 303495 - RNA, 22 nt, Human
gcaccugccugggacugaagau

SEQ ID NO: 303496 - RNA, 22 nt, Human
ccagguguuuggccugcaugau

SEQ ID NO: 303497 - RNA, 22 nt, Human
ucaaauaccagcaauuucaugu

SEQ ID NO: 303498 - RNA, 22 nt, Human
auagauauuugaguuguuucca

SEQ ID NO: 303499 - RNA, 22 nt, Human
uugguggagucauuggcauaug

SEQ ID NO: 303500 - RNA, 22 nt, Human
aaggcauaugcuguguacaguu

SEQ ID NO: 303501 - RNA, 22 nt, Human
ugcauaaacuucucugguguga

SEQ ID NO: 303502 - RNA, 22 nt, Human
gaugugucuccguuucaaggca

SEQ ID NO: 303503 - RNA, 22 nt, Human
agggcuccuaugccccauggac

SEQ ID NO: 303504 - RNA, 22 nt, Human
uuaguuauacuacugaauggag

SEQ ID NO: 303505 - RNA, 22 nt, Human
agcuucuuggcucagcacuugg

SEQ ID NO: 303506 - RNA, 22 nt, Human
auguccaggaucuauccccaga

SEQ ID NO: 303507 - RNA, 22 nt, Human
caggcauaaguaauguuuuaug

SEQ ID NO: 303508 - RNA, 22 nt, Human
cuuucccuuagccccauucuau

SEQ ID NO: 303509 - RNA, 22 nt, Human
gcaugugucaucugccuuucgu

SEQ ID NO: 303510 - RNA, 23 nt, Human
cccugcagucagggugagauggu

SEQ ID NO: 303511 - RNA, 21 nt, Human
cuguggaagggaacuagaggg

SEQ ID NO: 303512 - RNA, 22 nt, Human
uuacauguacugguuugacuua

SEQ ID NO: 303513 - RNA, 22 nt, Human
cuccaguggcaaguccgggcgg

SEQ ID NO: 303514 - RNA, 22 nt, Human
cugugucccaguaccuugggua

SEQ ID NO: 303515 - RNA, 22 nt, Human
ggaccugaacauaaaacgaggc

SEQ ID NO: 303516 - RNA, 22 nt, Human
auaugaaaauguuuuagcugua

SEQ ID NO: 303517 - RNA, 20 nt, Human
cguguccuuggcgggagagc

SEQ ID NO: 303518 - RNA, 22 nt, Human
cauaauauacuacauugaugaa

SEQ ID NO: 303519 - RNA, 22 nt, Human
auaguuuuauagauauugugua

SEQ ID NO: 303520 - RNA, 22 nt, Human
aggcaauccccugaggauacuu

SEQ ID NO: 303521 - RNA, 22 nt, Human
gccagccuucuguggccugcaa

SEQ ID NO: 303522 - RNA, 22 nt, Human
gcaggugucugacugccuucuu

SEQ ID NO: 303523 - RNA, 22 nt, Human
aggugggguguuggauguuuau

SEQ ID NO: 303524 - RNA, 22 nt, Human
augcuucagugcuaccuucaaa

SEQ ID NO: 303525 - RNA, 22 nt, Human
ggcaggcaggagcgugcuuggg

SEQ ID NO: 303526 - RNA, 22 nt, Human
agcagggcagcugaugcgcacg

SEQ ID NO: 303527 - RNA, 22 nt, Human
ggggcuccagucuucacauuuu

SEQ ID NO: 303528 - RNA, 22 nt, Human
cugggucccaauagcuuuuguu

SEQ ID NO: 303529 - RNA, 22 nt, Human
uccugguaggcuaugucauguc

SEQ ID NO: 303530 - RNA, 22 nt, Human
aaugucaauaacuuuaucccuc

SEQ ID NO: 303531 - RNA, 22 nt, Human
cauauuuauagaucuggcauuu

SEQ ID NO: 303532 - RNA, 22 nt, Human
aaaucagugcucauuugaaagg

SEQ ID NO: 303533 - RNA, 22 nt, Human
aaaugucagaggaacauauuga

SEQ ID NO: 303534 - RNA, 22 nt, Human
cucuucuugaaagaggaauuca

SEQ ID NO: 303535 - RNA, 22 nt, Human
uuccaagagcuuuaauuguuga

SEQ ID NO: 303536 - RNA, 22 nt, Human
ugggcuccguugccuggggcag

SEQ ID NO: 303537 - RNA, 22 nt, Human
uuucuaggucuuccauacugcc

SEQ ID NO: 303538 - RNA, 22 nt, Human
aaauucuaugucaauguuuauu

SEQ ID NO: 303539 - RNA, 22 nt, Human
cauuugaaauucuuagaacaaa

SEQ ID NO: 303540 - RNA, 22 nt, Human
uuacaguaauguauuauuuaac

SEQ ID NO: 303541 - RNA, 22 nt, Human
uagaaaugugauaauagcuuaa

SEQ ID NO: 303542 - RNA, 22 nt, Human
uuauagaaggagcauucacuua

SEQ ID NO: 303543 - RNA, 22 nt, Human
uuuauucaucaucuguucauau

SEQ ID NO: 303544 - RNA, 22 nt, Human
uccuucaagaugccacagcuuu

SEQ ID NO: 303545 - RNA, 22 nt, Human
ucagugauuucuggggugaggg

SEQ ID NO: 303546 - RNA, 22 nt, Human
ugguaucguguuggcacucagu

SEQ ID NO: 303547 - RNA, 22 nt, Human
ugcuuaaacauacuauuuauau

SEQ ID NO: 303548 - RNA, 22 nt, Human
cuggauguuuaugaaggaccca

SEQ ID NO: 303549 - RNA, 22 nt, Human
cuucuucaguugcauguauugg

SEQ ID NO: 303550 - RNA, 22 nt, Human
cucuuccuuaagacuauaaaga

SEQ ID NO: 303551 - RNA, 22 nt, Human
gacccuguuucuacaaauaauu

SEQ ID NO: 303552 - RNA, 22 nt, Human
uugcuuuauucacaucuauauu

SEQ ID NO: 303553 - RNA, 22 nt, Human
cacaaaugugcagaaaugugag

SEQ ID NO: 303554 - RNA, 22 nt, Human
ggugggaggacuguuugaggca

SEQ ID NO: 303555 - RNA, 22 nt, Human
agcaugaaaggcgugccaacuu

SEQ ID NO: 303556 - RNA, 22 nt, Human
gagugaggcuggaaucauggcu

SEQ ID NO: 303557 - RNA, 22 nt, Human
ugcaugaacggaggguaagcug

SEQ ID NO: 303558 - RNA, 22 nt, Human
agcuuuaugggagcuuagauaa

SEQ ID NO: 303559 - RNA, 22 nt, Human
agcucccagcagagcuggccac

SEQ ID NO: 303560 - RNA, 22 nt, Human
uuuuauuggagugauaccaagc

SEQ ID NO: 303561 - RNA, 22 nt, Human
cuggaggagcaauaugguuagg

SEQ ID NO: 303562 - RNA, 22 nt, Human
aagugguugcuugugagucccc

SEQ ID NO: 303563 - RNA, 22 nt, Human
guuuccaaccccaccaaagugc

SEQ ID NO: 303564 - RNA, 22 nt, Human
agugugagccuacaggccaaag

SEQ ID NO: 303565 - RNA, 22 nt, Human
aggcagguuggugagaagacug

SEQ ID NO: 303566 - RNA, 22 nt, Human
cuuuccaagaaugcagauaccu

SEQ ID NO: 303567 - RNA, 18 nt, Human
uggcucugccacucaccg

SEQ ID NO: 303568 - RNA, 23 nt, Human
uugcacauuggagcuggucuucu

SEQ ID NO: 303569 - RNA, 22 nt, Human
acagacagggcaccugccuccu

SEQ ID NO: 303570 - RNA, 22 nt, Human
uguucaaaugaucuucuuaaau

SEQ ID NO: 303571 - RNA, 22 nt, Human
caggaaagccgagugccauagg

SEQ ID NO: 303572 - RNA, 22 nt, Human
aacaguaacgagauguccuaac

SEQ ID NO: 303573 - RNA, 22 nt, Human
acuaaagaagccaaaguuuucu

SEQ ID NO: 303574 - RNA, 22 nt, Human
ggcugaggcucaugccaucuug

SEQ ID NO: 303575 - RNA, 22 nt, Human
aaaaaucuaugacugcuucucc

SEQ ID NO: 303576 - RNA, 16 nt, Human
aauugcuucuugcugc

SEQ ID NO: 303577 - RNA, 22 nt, Human
ccaggcagggcucaaggaaccu

SEQ ID NO: 303578 - RNA, 22 nt, Human
ggcaggcaaggcagccugguga

SEQ ID NO: 303579 - RNA, 22 nt, Human
cugggugugggucaagcaacca

SEQ ID NO: 303580 - RNA, 22 nt, Human
uccucagcauggaaucuggacu

SEQ ID NO: 303581 - RNA, 19 nt, Human
gcaggcaguggcauucgga

SEQ ID NO: 303582 - RNA, 22 nt, Human
gggaccugccaaggccacccag

SEQ ID NO: 303583 - RNA, 22 nt, Human
uauuuagaaugcguguacgugu

SEQ ID NO: 303584 - RNA, 22 nt, Human
uagguauacagagauuucuggg

SEQ ID NO: 303585 - RNA, 22 nt, Human
uggaauguuuuccuaaaucaga

SEQ ID NO: 303586 - RNA, 22 nt, Human
uucuucuuuccuauaauuaauu

SEQ ID NO: 303587 - RNA, 22 nt, Human
caccugcagggggagucaagag

SEQ ID NO: 303588 - RNA, 22 nt, Human
uuccuucuaauauucugccugu

SEQ ID NO: 303589 - RNA, 22 nt, Human
aaacucuguagcuaaacauaau

SEQ ID NO: 303590 - RNA, 22 nt, Human
ucuguucauacagaguauagua

SEQ ID NO: 303591 - RNA, 22 nt, Human
agcuuuauauguuguuucucca

SEQ ID NO: 303592 - RNA, 22 nt, Human
ucaauguaauaaaauacucuau

SEQ ID NO: 303593 - RNA, 22 nt, Human
agggaagaggaccagagucucu

SEQ ID NO: 303594 - RNA, 22 nt, Human
auaguuugaaggcuguucuacu

SEQ ID NO: 303595 - RNA, 22 nt, Human
uccugcagucugcacucugccu

SEQ ID NO: 303596 - RNA, 22 nt, Human
gcagcuuuuuggaugucaguua

SEQ ID NO: 303597 - RNA, 22 nt, Human
uccaugcaaacaguggcuagcu

SEQ ID NO: 303598 - RNA, 22 nt, Human
ugggaccagauaaagggagguc

SEQ ID NO: 303599 - RNA, 22 nt, Human
uuuauugaauuguaacccuauu

SEQ ID NO: 303600 - RNA, 17 nt, Human
uguagcuucuccuucuc

SEQ ID NO: 303601 - RNA, 22 nt, Human
cuguucacacacuuguacucuc

SEQ ID NO: 303602 - RNA, 22 nt, Human
uuucauugaugggugauagaaa

SEQ ID NO: 303603 - RNA, 22 nt, Human
gacuuuauuuccuuauuuguga

SEQ ID NO: 303604 - RNA, 21 nt, Human
cccugcaggccagggcugagc

SEQ ID NO: 303605 - RNA, 22 nt, Human
ugcaaaaagagcgaggagcccu

SEQ ID NO: 303606 - RNA, 22 nt, Human
caguguuugcuuaaguuauaug

SEQ ID NO: 303607 - RNA, 22 nt, Human
auuuauugagccuuuccuaugu

SEQ ID NO: 303608 - RNA, 19 nt, Human
aaaaacuuaguccagaaag

SEQ ID NO: 303609 - RNA, 22 nt, Human
ugcagggcuuccucuuggaguu

SEQ ID NO: 303610 - RNA, 22 nt, Human
auuuccagcagcauauuugucu

SEQ ID NO: 303611 - RNA, 22 nt, Human
ggcaggugagagcucuuugaaa

SEQ ID NO: 303612 - RNA, 22 nt, Human
auauuaggaguuaaauguauua

SEQ ID NO: 303613 - RNA, 18 nt, Human
aaugugaauauuuacuuc

SEQ ID NO: 303614 - RNA, 22 nt, Human
cucuucuugccugaugaggcag

SEQ ID NO: 303615 - RNA, 22 nt, Human
uuguguccauuugagucaugug

SEQ ID NO: 303616 - RNA, 22 nt, Human
ucaguucuuuauuucacaguga

SEQ ID NO: 303617 - RNA, 22 nt, Human
ggagcugaugacgucaccaugg

SEQ ID NO: 303618 - RNA, 22 nt, Human
uugcucauauuugcauguguuu

SEQ ID NO: 303619 - RNA, 22 nt, Human
uaggugucuuguguaugguaca

SEQ ID NO: 303620 - RNA, 22 nt, Human
agcaggagcugugggaagaugg

SEQ ID NO: 303621 - RNA, 19 nt, Human
gaggugucuuuccugagua

SEQ ID NO: 303622 - RNA, 22 nt, Human
ccagagaggccaaggucguggu

SEQ ID NO: 303623 - RNA, 22 nt, Human
ucucugaagauauuuauuauua

SEQ ID NO: 303624 - RNA, 22 nt, Human
uugugucccccuuugagagcca

SEQ ID NO: 303625 - RNA, 22 nt, Human
cacagcauucacagaaagacau

SEQ ID NO: 303626 - RNA, 22 nt, Human
uugacaauguccuuugaauuuc

SEQ ID NO: 303627 - RNA, 22 nt, Human
ucucaguguguuuucucucaga

SEQ ID NO: 303628 - RNA, 22 nt, Human
cugcaaaaguaauugcagguuu

SEQ ID NO: 303629 - RNA, 22 nt, Human
gccaggcaguucaaguacacca

SEQ ID NO: 303630 - RNA, 22 nt, Human
acuucauuguaauauuauagca

SEQ ID NO: 303631 - RNA, 22 nt, Human
auuuaaaugcuuaagaggguuu

SEQ ID NO: 303632 - RNA, 22 nt, Human
augcuuuuaugucacaugguca

SEQ ID NO: 303633 - RNA, 22 nt, Human
uggaauuuaguuaauuccauuu

SEQ ID NO: 303634 - RNA, 22 nt, Human
agcagggcccacuaggggagau

SEQ ID NO: 303635 - RNA, 22 nt, Human
aguucaguaguccuucauugua

SEQ ID NO: 303636 - RNA, 22 nt, Human
agugugagugcucauguccauc

SEQ ID NO: 303637 - RNA, 23 nt, Human
agaccugcaucugauaggcccug

SEQ ID NO: 303638 - RNA, 20 nt, Human
aggguggcaaguuagugaca

SEQ ID NO: 303639 - RNA, 22 nt, Human
aucugaagaggucauggcugac

SEQ ID NO: 303640 - RNA, 22 nt, Human
gcugccacuuggucaugucaug

SEQ ID NO: 303641 - RNA, 22 nt, Human
cacuuauuaugggcuaggaacu

SEQ ID NO: 303642 - RNA, 21 nt, Human
acagcagggcuggcaugacag

SEQ ID NO: 303643 - RNA, 22 nt, Human
ucugggugugguaucuuagcca

SEQ ID NO: 303644 - RNA, 22 nt, Human
uuauugagaccguaagucaggu

SEQ ID NO: 303645 - RNA, 22 nt, Human
acaugugucuaagaaugaaaga

SEQ ID NO: 303646 - RNA, 22 nt, Human
guucuucaggcugugcucuaga

SEQ ID NO: 303647 - RNA, 22 nt, Human
uuggaggaaagaagguugauau

SEQ ID NO: 303648 - RNA, 22 nt, Human
gcuggcuugauaguuucugcuu

SEQ ID NO: 303649 - RNA, 22 nt, Human
auuucuguaacuuaugaaaguu

SEQ ID NO: 303650 - RNA, 22 nt, Human
ggcuuuugaauuccaaggcauu

SEQ ID NO: 303651 - RNA, 22 nt, Human
cauucauuuaugaaauaucuau

SEQ ID NO: 303652 - RNA, 19 nt, Human
ggacagacgcagagaucug

SEQ ID NO: 303653 - RNA, 22 nt, Human
gcaugcagacagucugagacca

SEQ ID NO: 303654 - RNA, 19 nt, Human
uucacaauuaugaaauuag

SEQ ID NO: 303655 - RNA, 22 nt, Human
auggaguucuuuaaauucacag

SEQ ID NO: 303656 - RNA, 22 nt, Human
gaggagggagcuggaagcucuu

SEQ ID NO: 303657 - RNA, 21 nt, Human
uagggcucucugugucaggug

SEQ ID NO: 303658 - RNA, 22 nt, Human
aguuguaagagacagauauaaa

SEQ ID NO: 303659 - RNA, 22 nt, Human
gucugcccucacaugcacucuu

SEQ ID NO: 303660 - RNA, 22 nt, Human
acagcuuuucugauagauccug

SEQ ID NO: 303661 - RNA, 19 nt, Human
uggcagggagaguuugaag

SEQ ID NO: 303662 - RNA, 21 nt, Human
ucagguggcagaguguuuaug

SEQ ID NO: 303663 - RNA, 22 nt, Human
uuauugaguuguaagagcucuu

SEQ ID NO: 303664 - RNA, 22 nt, Human
ucauguacauguaagucagaaa

SEQ ID NO: 303665 - RNA, 22 nt, Human
gggaggaaagagaaguggucca

SEQ ID NO: 303666 - RNA, 22 nt, Human
uccucuggggcgugguccugga

SEQ ID NO: 303667 - RNA, 22 nt, Human
gggaacagagugccagacugac

SEQ ID NO: 303668 - RNA, 22 nt, Human
ccauggcaauggucagucuauu

SEQ ID NO: 303669 - RNA, 22 nt, Human
ugcugggucaggcaucugcaga

SEQ ID NO: 303670 - RNA, 22 nt, Human
cugcugccggcgagccucccuu

SEQ ID NO: 303671 - RNA, 22 nt, Human
uuccaggacuggguguuugaag

SEQ ID NO: 303672 - RNA, 22 nt, Human
agagucagcuuaugacacaguc

SEQ ID NO: 303673 - RNA, 22 nt, Human
uggcaaagcuagacauucccuc

SEQ ID NO: 303674 - RNA, 17 nt, Human
cugaagaguccuggcua

SEQ ID NO: 303675 - RNA, 22 nt, Human
ugggcaggcaagugaauaccuu

SEQ ID NO: 303676 - RNA, 22 nt, Human
cuguugcucugaacaggucuug

SEQ ID NO: 303677 - RNA, 22 nt, Human
acauguguggccgcuguagaca

SEQ ID NO: 303678 - RNA, 22 nt, Human
ccuggaucagucacuguugcug

SEQ ID NO: 303679 - RNA, 22 nt, Human
aggcucagccugggccuagagc

SEQ ID NO: 303680 - RNA, 22 nt, Human
uugguggaccucaucagaaccg

SEQ ID NO: 303681 - RNA, 22 nt, Human
aaagcugcccuugugaaacaag

SEQ ID NO: 303682 - RNA, 19 nt, Human
ugcugggucauauggaaac

SEQ ID NO: 303683 - RNA, 22 nt, Human
uacuuuauauuguggcuggcca

SEQ ID NO: 303684 - RNA, 22 nt, Human
gacaggugcuaagggaccuggc

SEQ ID NO: 303685 - RNA, 22 nt, Human
ccagggcaauuauuuggagggu

SEQ ID NO: 303686 - RNA, 22 nt, Human
ugcuuuauaacuuaguuuaugg

SEQ ID NO: 303687 - RNA, 18 nt, Human
agcaggugugcagaaugu

SEQ ID NO: 303688 - RNA, 22 nt, Human
guguccugggcauuaggcuuag

SEQ ID NO: 303689 - RNA, 22 nt, Human
aaguauuucguucugaaaaagu

SEQ ID NO: 303690 - RNA, 22 nt, Human
gcagguggggcugcuaccagaa

SEQ ID NO: 303691 - RNA, 22 nt, Human
cacaggugucucuaguagcguu

SEQ ID NO: 303692 - RNA, 22 nt, Human
gcucagcacuuucuccaaccac

SEQ ID NO: 303693 - RNA, 22 nt, Human
uccaggcagagcaacaaaauau

SEQ ID NO: 303694 - RNA, 22 nt, Human
acaugauauuaaugucuuauuu

SEQ ID NO: 303695 - RNA, 22 nt, Human
aggcagugagaaauagcaagau

SEQ ID NO: 303696 - RNA, 17 nt, Human
aaaauucuguaaagagg

SEQ ID NO: 303697 - RNA, 22 nt, Human
cacagguguucuugcagugaaa

SEQ ID NO: 303698 - RNA, 22 nt, Human
cuggguggagccuggucaucug

SEQ ID NO: 303699 - RNA, 22 nt, Human
caggaugggauguagugggccc

SEQ ID NO: 303700 - RNA, 22 nt, Human
ggcaggcauuagagauucccag

SEQ ID NO: 303701 - RNA, 22 nt, Human
gccugggugaauuugauccuaa

SEQ ID NO: 303702 - RNA, 22 nt, Human
agcucccaauugacuugaacua

SEQ ID NO: 303703 - RNA, 22 nt, Human
aaucauucuuauuucacagcaa

SEQ ID NO: 303704 - RNA, 22 nt, Human
ucaagaaacugugcuacagagu

SEQ ID NO: 303705 - RNA, 22 nt, Human
ggcagaggaagcuggaaguggg

SEQ ID NO: 303706 - RNA, 22 nt, Human
aggcaggugggucacuugaguc

SEQ ID NO: 303707 - RNA, 22 nt, Human
agcuuuaccugccuuggggcac

SEQ ID NO: 303708 - RNA, 22 nt, Human
aaguaguuaguccgccugcucu

SEQ ID NO: 303709 - RNA, 22 nt, Human
auuugaagaaaguuuucuagau

SEQ ID NO: 303710 - RNA, 22 nt, Human
guccuucucaaauccuguguuu

SEQ ID NO: 303711 - RNA, 22 nt, Human
uaggugguuauaaauucaaggc

SEQ ID NO: 303712 - RNA, 22 nt, Human
gcacccagagggcagggucucc

SEQ ID NO: 303713 - RNA, 22 nt, Human
uccaggcaaagccuuguagacg

SEQ ID NO: 303714 - RNA, 22 nt, Human
ccuggagggcagcccauucugg

SEQ ID NO: 303715 - RNA, 22 nt, Human
uugcagggaaauagaaauaaac

SEQ ID NO: 303716 - RNA, 22 nt, Human
uaauuauucuagucacauagca

SEQ ID NO: 303717 - RNA, 22 nt, Human
ugcaugcaugugagcaugcaua

SEQ ID NO: 303718 - RNA, 22 nt, Human
ccagcuuuccugcgaguugauu

SEQ ID NO: 303719 - RNA, 22 nt, Human
auuuccaugccuuagcuuaagg

SEQ ID NO: 303720 - RNA, 22 nt, Human
uagcuuuacaaagugcugcacc

SEQ ID NO: 303721 - RNA, 22 nt, Human
gugugucccuccucuccugagu

SEQ ID NO: 303722 - RNA, 22 nt, Human
uggcaaaguaauuggguuucuc

SEQ ID NO: 303723 - RNA, 22 nt, Human
uuccuucuagcccaaguauugg

SEQ ID NO: 303724 - RNA, 22 nt, Human
aaaagucuacaagcuucaacaa

SEQ ID NO: 303725 - RNA, 22 nt, Human
ugaggaauguuuugagugccga

SEQ ID NO: 303726 - RNA, 22 nt, Human
uuaguuagucccugguaccuuu

SEQ ID NO: 303727 - RNA, 22 nt, Human
caaaagucuuccuauucucuua

SEQ ID NO: 303728 - RNA, 22 nt, Human
gacuuuauucguuaacuguuaa

SEQ ID NO: 303729 - RNA, 22 nt, Human
uaagaauuaucucauggauaau

SEQ ID NO: 303730 - RNA, 22 nt, Human
cacuuuauaugcauuaccucau

SEQ ID NO: 303731 - RNA, 22 nt, Human
uggcaaagacgcuagcuaagau

SEQ ID NO: 303732 - RNA, 22 nt, Human
cacacacaguuuuguauucugu

SEQ ID NO: 303733 - RNA, 22 nt, Human
ucuggaggcucugagggugagu

SEQ ID NO: 303734 - RNA, 22 nt, Human
caagaugugccuaaucagaccu

SEQ ID NO: 303735 - RNA, 22 nt, Human
aagugauuucugccugcauguu

SEQ ID NO: 303736 - RNA, 22 nt, Human
auucuuauuauaguaaaacagu

SEQ ID NO: 303737 - RNA, 19 nt, Human
ucuucccuggcugucaguc

SEQ ID NO: 303738 - RNA, 22 nt, Human
ucacauuuuuuacuggacuuaa

SEQ ID NO: 303739 - RNA, 22 nt, Human
aauugcuuagagaauccaggua

SEQ ID NO: 303740 - RNA, 22 nt, Human
uuucaaaauuuugcagugguaa

SEQ ID NO: 303741 - RNA, 22 nt, Human
ggcaggugaggcaugugccugg

SEQ ID NO: 303742 - RNA, 22 nt, Human
gcagggacaucuucagaucacu

SEQ ID NO: 303743 - RNA, 22 nt, Human
aauuagggagccaucauaaggu

SEQ ID NO: 303744 - RNA, 22 nt, Human
uaugauguguaccuaagucacc

SEQ ID NO: 303745 - RNA, 22 nt, Human
agguauauauucugguccuuau

SEQ ID NO: 303746 - RNA, 21 nt, Human
acagcuggugcagggcgggga

SEQ ID NO: 303747 - RNA, 22 nt, Human
caggauggucuucauuuggcuc

SEQ ID NO: 303748 - RNA, 22 nt, Human
uggcaaaggggaccauguugaa

SEQ ID NO: 303749 - RNA, 22 nt, Human
aggaggaaagaaggcccccagc

SEQ ID NO: 303750 - RNA, 22 nt, Human
auaaguaggaaaauuugaauau

SEQ ID NO: 303751 - RNA, 22 nt, Human
cccuuccuccucgccugucaga

SEQ ID NO: 303752 - RNA, 22 nt, Human
cuggggugucucgucugccauu

SEQ ID NO: 303753 - RNA, 22 nt, Human
aucuuguuaaaaugcagaaacu

SEQ ID NO: 303754 - RNA, 22 nt, Human
ccagggcagaaaaagagggaau

SEQ ID NO: 303755 - RNA, 22 nt, Human
agaugguccaucuauuuucuau

SEQ ID NO: 303756 - RNA, 22 nt, Human
caugucacuuuaacaaauuagu

SEQ ID NO: 303757 - RNA, 22 nt, Human
gcugcagugagccaagaucgug

SEQ ID NO: 303758 - RNA, 22 nt, Human
cuuauuagaaagaaaagacaug

SEQ ID NO: 303759 - RNA, 22 nt, Human
cuggguaaguuccuaaggcuca

SEQ ID NO: 303760 - RNA, 22 nt, Human
uucuauugggaagugugagagu

SEQ ID NO: 303761 - RNA, 22 nt, Human
acagcaugagagaugaacauuc

SEQ ID NO: 303762 - RNA, 22 nt, Human
acagacuggaggagaauaguuu

SEQ ID NO: 303763 - RNA, 22 nt, Human
cucuggaaauggccauagucau

SEQ ID NO: 303764 - RNA, 22 nt, Human
cagggcucuuccggagcaggga

SEQ ID NO: 303765 - RNA, 22 nt, Human
accuuauuaaaaugaugaugua

SEQ ID NO: 303766 - RNA, 22 nt, Human
uuguguccugauuugacacaau

SEQ ID NO: 303767 - RNA, 22 nt, Human
acagauuuguucuuuugggcua

SEQ ID NO: 303768 - RNA, 22 nt, Human
auugcuuuuccuuaacacaugc

SEQ ID NO: 303769 - RNA, 22 nt, Human
gugcaaagugcauggggaaggg

SEQ ID NO: 303770 - RNA, 22 nt, Human
uuucauaaacaguagaagacua

SEQ ID NO: 303771 - RNA, 22 nt, Human
aggccuuaccauagcuguagca

SEQ ID NO: 303772 - RNA, 22 nt, Human
auuuguaauuucuuaucugugu

SEQ ID NO: 303773 - RNA, 22 nt, Human
uuuaugaacuacagauauaacu

SEQ ID NO: 303774 - RNA, 18 nt, Human
aaaggcugaauauagaag

SEQ ID NO: 303775 - RNA, 22 nt, Human
aagagcauauuaauaguggaga

SEQ ID NO: 303776 - RNA, 22 nt, Human
ggcaggugcgcauguugcauua

SEQ ID NO: 303777 - RNA, 22 nt, Human
acauguguauagccuguauaga

SEQ ID NO: 303778 - RNA, 23 nt, Human
agcuuugugaaagcagacauggg

SEQ ID NO: 303779 - RNA, 22 nt, Human
uuccugcagcaaggagaagcug

SEQ ID NO: 303780 - RNA, 22 nt, Human
acaguaaaaagccuuagaauuu

SEQ ID NO: 303781 - RNA, 22 nt, Human
uuaaaauuuccccaccauguau

SEQ ID NO: 303782 - RNA, 22 nt, Human
agcagggcacuggaaggcacug

SEQ ID NO: 303783 - RNA, 22 nt, Human
ccuguucacuuugacuucucca

SEQ ID NO: 303784 - RNA, 22 nt, Human
aguuaacucauuuuauaaugcc

SEQ ID NO: 303785 - RNA, 22 nt, Human
acagugugguuugagcacuggg

SEQ ID NO: 303786 - RNA, 22 nt, Human
auccuucuccagucguauuuuu

SEQ ID NO: 303787 - RNA, 22 nt, Human
uuccauuuauucuuguccagau

SEQ ID NO: 303788 - RNA, 20 nt, Human
ggcagggcaucaacagcucu

SEQ ID NO: 303789 - RNA, 22 nt, Human
acagguguccaacauuuaccuu

SEQ ID NO: 303790 - RNA, 22 nt, Human
uguuccaauaaggaguugaaau

SEQ ID NO: 303791 - RNA, 22 nt, Human
ccuggguccaauucuggcuugu

SEQ ID NO: 303792 - RNA, 21 nt, Human
acagcauguuuguguguuugc

SEQ ID NO: 303793 - RNA, 20 nt, Human
augugucuguaaacaacucu

SEQ ID NO: 303794 - RNA, 20 nt, Human
auuccucagccccagccuca

SEQ ID NO: 303795 - RNA, 22 nt, Human
aguuuucacacucaccaaaagg

SEQ ID NO: 303796 - RNA, 20 nt, Human
ucccaggcugggcuccagcu

SEQ ID NO: 303797 - RNA, 20 nt, Human
gaacuugggcaaguggcuua

SEQ ID NO: 303798 - RNA, 22 nt, Human
ugggugugcccagauggugucc

SEQ ID NO: 303799 - RNA, 22 nt, Human
aucauuacuccuguaaaauugu

SEQ ID NO: 303800 - RNA, 22 nt, Human
uguuuuagcugacacauggagc

SEQ ID NO: 303801 - RNA, 22 nt, Human
ucuguacuuccuuuaaacuuua

SEQ ID NO: 303802 - RNA, 22 nt, Human
ugcagggccccucugcaugagu

SEQ ID NO: 303803 - RNA, 21 nt, Human
aagugguuuacauccagcugu

SEQ ID NO: 303804 - RNA, 20 nt, Human
cuguggugagcaggagagua

SEQ ID NO: 303805 - RNA, 22 nt, Human
acccagcuggaugcauggaggc

SEQ ID NO: 303806 - RNA, 22 nt, Human
ccugggucuucagucugcuggu

SEQ ID NO: 303807 - RNA, 22 nt, Human
acaguuaucuuugaaauagaga

SEQ ID NO: 303808 - RNA, 22 nt, Human
caucacagggggcuagaagucu

SEQ ID NO: 303809 - RNA, 22 nt, Human
gcagggcaugggcccugucugc

SEQ ID NO: 303810 - RNA, 22 nt, Human
cagcuucugcuaucgaacaucu

SEQ ID NO: 303811 - RNA, 22 nt, Human
ugcauggaggaagaugaaugca

SEQ ID NO: 303812 - RNA, 22 nt, Human
gcagacagcauguugggcuauu

SEQ ID NO: 303813 - RNA, 22 nt, Human
auuuccaugucgguauuuuaua

SEQ ID NO: 303814 - RNA, 22 nt, Human
ggcagggcagcgcugauuaggg

SEQ ID NO: 303815 - RNA, 22 nt, Human
acauguguuaaaauucucacca

SEQ ID NO: 303816 - RNA, 22 nt, Human
cuggaggagaacuugaggaagg

SEQ ID NO: 303817 - RNA, 22 nt, Human
ucaccagggcuccagccagccu

SEQ ID NO: 303818 - RNA, 18 nt, Human
agcagggcauuuugccau

SEQ ID NO: 303819 - RNA, 22 nt, Human
aaauuauuacaagcuaguuggc

SEQ ID NO: 303820 - RNA, 19 nt, Human
uuagggacaugaauucuag

SEQ ID NO: 303821 - RNA, 22 nt, Human
gacuuuauuauaguggcaauag

SEQ ID NO: 303822 - RNA, 22 nt, Human
aaagcugcugccaaucaggcuu

SEQ ID NO: 303823 - RNA, 22 nt, Human
gaaauuauugcuagagacugca

SEQ ID NO: 303824 - RNA, 22 nt, Human
ccaugagcuucaacugacacag

SEQ ID NO: 303825 - RNA, 22 nt, Human
cagggcaguuugugccuaugag

SEQ ID NO: 303826 - RNA, 22 nt, Human
acccagcaaagauaaacuuaug

SEQ ID NO: 303827 - RNA, 22 nt, Human
cacugaaauauuaauaucuuau

SEQ ID NO: 303828 - RNA, 22 nt, Human
cauuguaagaggcuuugcagca

SEQ ID NO: 303829 - RNA, 21 nt, Human
agaugaggauacugaggccua

SEQ ID NO: 303830 - RNA, 22 nt, Human
aaagcagagcagggcacuuaug

SEQ ID NO: 303831 - RNA, 20 nt, Human
uauuggaucuaagaaauggg

SEQ ID NO: 303832 - RNA, 22 nt, Human
auuuaaauuuucugauggagag

SEQ ID NO: 303833 - RNA, 22 nt, Human
uuucaaagaguuguaaauuacu

SEQ ID NO: 303834 - RNA, 22 nt, Human
cuguccugagauaaagaugagg

SEQ ID NO: 303835 - RNA, 22 nt, Human
ggggaccuggccacccauccuu

SEQ ID NO: 303836 - RNA, 22 nt, Human
uccuucuggaggcuguaaagga

SEQ ID NO: 303837 - RNA, 22 nt, Human
aagcgccaugguuccugcgcag

SEQ ID NO: 303838 - RNA, 22 nt, Human
uugcugaucugugaaucagcca

SEQ ID NO: 303839 - RNA, 22 nt, Human
gaggugucccgcaguccccaag

SEQ ID NO: 303840 - RNA, 22 nt, Human
aucagagaaauggagggcgcuu

SEQ ID NO: 303841 - RNA, 22 nt, Human
ccuccuucuggggccuucugcu

SEQ ID NO: 303842 - RNA, 20 nt, Human
auguaaaauuauaaggcuga

SEQ ID NO: 303843 - RNA, 22 nt, Human
ugcuucaaguugaaauauucuu

SEQ ID NO: 303844 - RNA, 22 nt, Human
cuggaggaaaacaacugcagac

SEQ ID NO: 303845 - RNA, 22 nt, Human
cugucuuuaguacaaaaaaugu

SEQ ID NO: 303846 - RNA, 22 nt, Human
cuggguguagcccaguaugagg

SEQ ID NO: 303847 - RNA, 21 nt, Human
caguguggugaccagggucuc

SEQ ID NO: 303848 - RNA, 22 nt, Human
guuucgucaggcuuauucuauc

SEQ ID NO: 303849 - RNA, 22 nt, Human
auauugagauaagaacugacau

SEQ ID NO: 303850 - RNA, 22 nt, Human
uagaaacagauguuuuugaaga

SEQ ID NO: 303851 - RNA, 22 nt, Human
uuugacuccacuccuaacuccu

SEQ ID NO: 303852 - RNA, 22 nt, Human
aagcugcaaggaagugugccag

SEQ ID NO: 303853 - RNA, 22 nt, Human
agagggugggcacgugauggau

SEQ ID NO: 303854 - RNA, 22 nt, Human
ggucaaaguugaagaagggcau

SEQ ID NO: 303855 - RNA, 22 nt, Human
uccaugcagaggagcugguggc

SEQ ID NO: 303856 - RNA, 19 nt, Human
aaggaauggcuuuaaguag

SEQ ID NO: 303857 - RNA, 22 nt, Human
ucuuagauggcagcuagagcuc

SEQ ID NO: 303858 - RNA, 22 nt, Human
acagacagacagagaacuauuc

SEQ ID NO: 303859 - RNA, 22 nt, Human
aacccgggaggcagagguugug

SEQ ID NO: 303860 - RNA, 22 nt, Human
ucugcagguaagcguucuugga

SEQ ID NO: 303861 - RNA, 22 nt, Human
cacagguguccaauaccugcuu

SEQ ID NO: 303862 - RNA, 22 nt, Human
cagacaggcuagccagacucac

SEQ ID NO: 303863 - RNA, 22 nt, Human
ggagcugaugguagaagaauga

SEQ ID NO: 303864 - RNA, 22 nt, Human
ucagcaaaggaccagcacaggc

SEQ ID NO: 303865 - RNA, 22 nt, Human
gacccagcuuaagucacauguu

SEQ ID NO: 303866 - RNA, 22 nt, Human
ucucuuaaaagauuuuaaugac

SEQ ID NO: 303867 - RNA, 22 nt, Human
gcauguguuauuuuauguauga

SEQ ID NO: 303868 - RNA, 22 nt, Human
uauuuauucuuuguacugccuu

SEQ ID NO: 303869 - RNA, 23 nt, Human
uccuggguuugaauucuagucuu

SEQ ID NO: 303870 - RNA, 22 nt, Human
guuuuucuagaaaucuccuccu

SEQ ID NO: 303871 - RNA, 22 nt, Human
uccaugcagagaacugaaguac

SEQ ID NO: 303872 - RNA, 22 nt, Human
uagggcucuggugggcucuguu

SEQ ID NO: 303873 - RNA, 22 nt, Human
acagagcaugcucaguguguga

SEQ ID NO: 303874 - RNA, 22 nt, Human
aaguccagcucuaaauaucuga

SEQ ID NO: 303875 - RNA, 17 nt, Human
ugaaacaccaagacugu

SEQ ID NO: 303876 - RNA, 22 nt, Human
guauuaggagguggagccuuug

SEQ ID NO: 303877 - RNA, 22 nt, Human
uuuacuucugcauuuccccuag

SEQ ID NO: 303878 - RNA, 22 nt, Human
acaguguguuggaggagacugu

SEQ ID NO: 303879 - RNA, 22 nt, Human
uaacuuuaggaauagguaaucu

SEQ ID NO: 303880 - RNA, 22 nt, Human
ucuuucaaugagcauucuuucc

SEQ ID NO: 303881 - RNA, 22 nt, Human
augcaacaaaugcuacgaaucg

SEQ ID NO: 303882 - RNA, 22 nt, Human
acuaucaacaucauugcucuag

SEQ ID NO: 303883 - RNA, 22 nt, Human
uccaggaggccucauuuccugu

SEQ ID NO: 303884 - RNA, 14 nt, Human
agcugcaagcaucc

SEQ ID NO: 303885 - RNA, 22 nt, Human
ucauacaucuguccuggagcuc

SEQ ID NO: 303886 - RNA, 22 nt, Human
cccuccucaacucuggcuucca

SEQ ID NO: 303887 - RNA, 22 nt, Human
uucuaucauacuugaauacauu

SEQ ID NO: 303888 - RNA, 22 nt, Human
gcuuggccagcagccgggaugc

SEQ ID NO: 303889 - RNA, 22 nt, Human
cucuuagaaagaaacacacugg

SEQ ID NO: 303890 - RNA, 22 nt, Human
agucaaaggguauuuggauuga

SEQ ID NO: 303891 - RNA, 22 nt, Human
cagcaaucgggugauaugcaau

SEQ ID NO: 303892 - RNA, 22 nt, Human
auuaaauuuucacuaggcuccc

SEQ ID NO: 303893 - RNA, 22 nt, Human
uuugacuccugccuucuccugu

SEQ ID NO: 303894 - RNA, 22 nt, Human
ccuuccuuucagggcuaugccu

SEQ ID NO: 303895 - RNA, 22 nt, Human
caaagagcuguucagugucgcu

SEQ ID NO: 303896 - RNA, 22 nt, Human
cuucauuaaccaaaaugcaaua

SEQ ID NO: 303897 - RNA, 22 nt, Human
uuaucacuuaugagcuuuuugc

SEQ ID NO: 303898 - RNA, 17 nt, Human
uuauugcuauaagcuga

SEQ ID NO: 303899 - RNA, 22 nt, Human
gacagcagccacagggagaggg

SEQ ID NO: 303900 - RNA, 22 nt, Human
ucuucagaggaagucagucuuu

SEQ ID NO: 303901 - RNA, 22 nt, Human
ggcaggugaguucauuaucugc

SEQ ID NO: 303902 - RNA, 22 nt, Human
gauguguccuuuucuccaucca

SEQ ID NO: 303903 - RNA, 22 nt, Human
uguccauggauagagcugcucg

SEQ ID NO: 303904 - RNA, 22 nt, Human
ucagagagugcaaaauauagcu

SEQ ID NO: 303905 - RNA, 21 nt, Human
cuacuuaaguaggggauuagg

SEQ ID NO: 303906 - RNA, 22 nt, Human
ucuguucagaaauggaagugcc

SEQ ID NO: 303907 - RNA, 22 nt, Human
ggugggcagcucuuggcaggca

SEQ ID NO: 303908 - RNA, 19 nt, Human
agcagguggguaagaaaau

SEQ ID NO: 303909 - RNA, 22 nt, Human
uaugcauacaaugagauauucc

SEQ ID NO: 303910 - RNA, 21 nt, Human
ucagggcagcugcucuucaga

SEQ ID NO: 303911 - RNA, 22 nt, Human
uauaauuuuaagugguaaauua

SEQ ID NO: 303912 - RNA, 22 nt, Human
uuuuucaugagacuagaaguca

SEQ ID NO: 303913 - RNA, 22 nt, Human
acagcuuuaguguggguggugc

SEQ ID NO: 303914 - RNA, 22 nt, Human
cguuuauuuugaagauuccacu

SEQ ID NO: 303915 - RNA, 22 nt, Human
uuagcuuuuaagugugcuacau

SEQ ID NO: 303916 - RNA, 22 nt, Human
auguaauuugcccucaaguuaa

SEQ ID NO: 303917 - RNA, 22 nt, Human
auggaaugugaacaugauggca

SEQ ID NO: 303918 - RNA, 22 nt, Human
cuuuuccacugagccucacaaa

SEQ ID NO: 303919 - RNA, 22 nt, Human
gcagcuuugaagacuuauuugc

SEQ ID NO: 303920 - RNA, 22 nt, Human
auuagggaaggauuuggccuga

SEQ ID NO: 303921 - RNA, 22 nt, Human
aaacuucauggauaauauaaag

SEQ ID NO: 303922 - RNA, 22 nt, Human
gggugggaacaggaugccagga

SEQ ID NO: 303923 - RNA, 22 nt, Human
ucuuuccauggccacacagucu

SEQ ID NO: 303924 - RNA, 22 nt, Human
cagcaugaucccaguugauugc

SEQ ID NO: 303925 - RNA, 22 nt, Human
uuauuguuagugagacuguaga

SEQ ID NO: 303926 - RNA, 22 nt, Human
auagaagaggaaacugagguug

SEQ ID NO: 303927 - RNA, 22 nt, Human
uucuucaaccaucuacauaaac

SEQ ID NO: 303928 - RNA, 22 nt, Human
gcuuuuggccagauggggaaac

SEQ ID NO: 303929 - RNA, 19 nt, Human
ccagagacauuggcaucuu

SEQ ID NO: 303930 - RNA, 22 nt, Human
acaugauuuuaguaucauaaua

SEQ ID NO: 303931 - RNA, 22 nt, Human
gaaccauuucugaauaguuugu

SEQ ID NO: 303932 - RNA, 22 nt, Human
aaagacuuggcuuaugauuugc

SEQ ID NO: 303933 - RNA, 22 nt, Human
aggugucuucagggugagacag

SEQ ID NO: 303934 - RNA, 20 nt, Human
aaaggaauauaugaaguaua

SEQ ID NO: 303935 - RNA, 21 nt, Human
auucagaaagggaauaaacuc

SEQ ID NO: 303936 - RNA, 20 nt, Human
caccacagaauuggggacag

SEQ ID NO: 303937 - RNA, 22 nt, Human
ccugggucuauagacuucaaga

SEQ ID NO: 303938 - RNA, 22 nt, Human
ggcaggcacugugauagauucu

SEQ ID NO: 303939 - RNA, 22 nt, Human
uccugcagagucccacugauuu

SEQ ID NO: 303940 - RNA, 22 nt, Human
agggaagaaaauccaucgcugc

SEQ ID NO: 303941 - RNA, 22 nt, Human
gacccagccugguuuuuauagg

SEQ ID NO: 303942 - RNA, 22 nt, Human
uucaugaauggaaucaaugcuc

SEQ ID NO: 303943 - RNA, 22 nt, Human
uggcagggaguucguucacaac

SEQ ID NO: 303944 - RNA, 22 nt, Human
gcaaagaaaugucagugagagg

SEQ ID NO: 303945 - RNA, 19 nt, Human
uuugacuccucauuuuuau

SEQ ID NO: 303946 - RNA, 22 nt, Human
uagggcagagcuuguacacgau

SEQ ID NO: 303947 - RNA, 22 nt, Human
ugucagagagcaggcaguagaa

SEQ ID NO: 303948 - RNA, 19 nt, Human
gggcaaagugaucguccug

SEQ ID NO: 303949 - RNA, 22 nt, Human
cagcaugaaaaguguugcuauc

SEQ ID NO: 303950 - RNA, 22 nt, Human
ccuguucaauauucuuccuugu

SEQ ID NO: 303951 - RNA, 22 nt, Human
gggcugaccaaugccuugcuuu

SEQ ID NO: 303952 - RNA, 21 nt, Human
aagagcuggaucaaggauaag

SEQ ID NO: 303953 - RNA, 22 nt, Human
uuuuugcuaauccccagccacu

SEQ ID NO: 303954 - RNA, 22 nt, Human
uguccucuuccagugcuccuuc

SEQ ID NO: 303955 - RNA, 22 nt, Human
gagaggcugaaaucacaggagc

SEQ ID NO: 303956 - RNA, 22 nt, Human
cauauaaauacaacauguguua

SEQ ID NO: 303957 - RNA, 22 nt, Human
uagcuuuaaugaguugguaaga

SEQ ID NO: 303958 - RNA, 22 nt, Human
uaaaauagcaugugcagugaaa

SEQ ID NO: 303959 - RNA, 22 nt, Human
gugggugugauaagaccaaggg

SEQ ID NO: 303960 - RNA, 22 nt, Human
gggcuggacaucuaagguagcu

SEQ ID NO: 303961 - RNA, 22 nt, Human
caggcauagguaggauguuucu

SEQ ID NO: 303962 - RNA, 22 nt, Human
cauggaaugguugaaugacgaa

SEQ ID NO: 303963 - RNA, 22 nt, Human
accugcagcugagaaaaugacu

SEQ ID NO: 303964 - RNA, 22 nt, Human
ugaauaugugacuuugauuuca

SEQ ID NO: 303965 - RNA, 16 nt, Human
ccagguggggcuguga

SEQ ID NO: 303966 - RNA, 22 nt, Human
auacacuuuagaaaaacgcugc

SEQ ID NO: 303967 - RNA, 22 nt, Human
gucugccccacaggcucaguug

SEQ ID NO: 303968 - RNA, 22 nt, Human
agcagguguagggcucuuugua

SEQ ID NO: 303969 - RNA, 22 nt, Human
ccuggcaggcuggggacagugc

SEQ ID NO: 303970 - RNA, 22 nt, Human
cacuuuaugggaagcaaaaauu

SEQ ID NO: 303971 - RNA, 22 nt, Human
acccaggccugagagacaggag

SEQ ID NO: 303972 - RNA, 22 nt, Human
ccaugcugugacacaguaguua

SEQ ID NO: 303973 - RNA, 20 nt, Human
ccagacagcaccugccuggu

SEQ ID NO: 303974 - RNA, 22 nt, Human
caggcugccgugaagcaggccu

SEQ ID NO: 303975 - RNA, 22 nt, Human
ucuggaggccauagggaaggau

SEQ ID NO: 303976 - RNA, 22 nt, Human
agauguuuguguuaucuccauu

SEQ ID NO: 303977 - RNA, 22 nt, Human
uuccugaauauaaagacacuag

SEQ ID NO: 303978 - RNA, 22 nt, Human
aguguggcugcguagggcucuc

SEQ ID NO: 303979 - RNA, 22 nt, Human
gacuuuauccugccugaccacg

SEQ ID NO: 303980 - RNA, 22 nt, Human
ccagacaggaacacacaucucc

SEQ ID NO: 303981 - RNA, 22 nt, Human
uggcagggccuaccccaauauc

SEQ ID NO: 303982 - RNA, 22 nt, Human
gagauggagucuuuuucuguca

SEQ ID NO: 303983 - RNA, 22 nt, Human
acuuucugcaguguuggaaaug

SEQ ID NO: 303984 - RNA, 22 nt, Human
uuccucaguuagugccugaggc

SEQ ID NO: 303985 - RNA, 22 nt, Human
cacuuuauauucuaagacggcc

SEQ ID NO: 303986 - RNA, 22 nt, Human
aguugcuggcaccugugaguau

SEQ ID NO: 303987 - RNA, 20 nt, Human
agguguccuguagcuugagu

SEQ ID NO: 303988 - RNA, 22 nt, Human
cagggcaggacagauacauuac

SEQ ID NO: 303989 - RNA, 22 nt, Human
ucuucagauggccaguuguccc

SEQ ID NO: 303990 - RNA, 22 nt, Human
acuguucacuagugaggguuga

SEQ ID NO: 303991 - RNA, 19 nt, Human
gggaccugacuaauuggca

SEQ ID NO: 303992 - RNA, 22 nt, Human
aucuguaauuuugaaugcaaau

SEQ ID NO: 303993 - RNA, 22 nt, Human
uauuuccagcaguaagaagaca

SEQ ID NO: 303994 - RNA, 22 nt, Human
gcagggcaaacccagguguuca

SEQ ID NO: 303995 - RNA, 22 nt, Human
uguggggcuuacaaaggcagau

SEQ ID NO: 303996 - RNA, 22 nt, Human
agcucccagcuccuuugagaga

SEQ ID NO: 303997 - RNA, 22 nt, Human
aucagagaaguuucacuggcau

SEQ ID NO: 303998 - RNA, 22 nt, Human
caaaaguucucacccagacaug

SEQ ID NO: 303999 - RNA, 22 nt, Human
agcacugauuuaaacuggauuu

SEQ ID NO: 304000 - RNA, 22 nt, Human
uuuauuuggcauccagggagaa

SEQ ID NO: 304001 - RNA, 21 nt, Human
uuccuuuuuauggcuuagugg

SEQ ID NO: 304002 - RNA, 22 nt, Human
aaggugucaggcuugggaaagu

SEQ ID NO: 304003 - RNA, 22 nt, Human
uguguccugugcaaggggauga

SEQ ID NO: 304004 - RNA, 22 nt, Human
ugcagggaaucuguggcuggac

SEQ ID NO: 304005 - RNA, 22 nt, Human
uauuugauagagauaaaugaua

SEQ ID NO: 304006 - RNA, 16 nt, Human
guuccuucccacaccu

SEQ ID NO: 304007 - RNA, 22 nt, Human
ucuuaguuguuugcugucuaac

SEQ ID NO: 304008 - RNA, 23 nt, Human
uggcucuguggaucccucaggag

SEQ ID NO: 304009 - RNA, 22 nt, Human
ucucuuaggagaaauucauaaa

SEQ ID NO: 304010 - RNA, 22 nt, Human
auguacuaugcagucaacuguu

SEQ ID NO: 304011 - RNA, 22 nt, Human
acagguggcuuauuggcugauu

SEQ ID NO: 304012 - RNA, 22 nt, Human
uuauccuggauuauauauguga

SEQ ID NO: 304013 - RNA, 22 nt, Human
caguuuauaugucagagcugua

SEQ ID NO: 304014 - RNA, 22 nt, Human
ucagacaguuugcagugugccu

SEQ ID NO: 304015 - RNA, 22 nt, Human
cugcagagcagccaguccccca

SEQ ID NO: 304016 - RNA, 22 nt, Human
gggcagguauuuaucuucuauu

SEQ ID NO: 304017 - RNA, 22 nt, Human
aaagucuuuauuuuguaucuuu

SEQ ID NO: 304018 - RNA, 22 nt, Human
cugcaaaauuguucuuugcucc

SEQ ID NO: 304019 - RNA, 22 nt, Human
guguaaaaacauacuauuucua

SEQ ID NO: 304020 - RNA, 22 nt, Human
aaggugucaccagauuggcagg

SEQ ID NO: 304021 - RNA, 22 nt, Human
cagguggcuucucccuaggcca

SEQ ID NO: 304022 - RNA, 22 nt, Human
uuacauaacgguaugaaaaaug

SEQ ID NO: 304023 - RNA, 22 nt, Human
uacuacaaggccgaagcucuca

SEQ ID NO: 304024 - RNA, 22 nt, Human
uccaggcaucuguauuuuuuaa

SEQ ID NO: 304025 - RNA, 22 nt, Human
gcagggcacacaagaaugauaa

SEQ ID NO: 304026 - RNA, 22 nt, Human
guccugucccccaaggcugugg

SEQ ID NO: 304027 - RNA, 22 nt, Human
agcuuuauauaaaagaguacau

SEQ ID NO: 304028 - RNA, 22 nt, Human
ucaacuuugaaaccauagugaa

SEQ ID NO: 304029 - RNA, 22 nt, Human
ugggacacaaaccagaccagga

SEQ ID NO: 304030 - RNA, 22 nt, Human
aagggcagcugacagaugcuua

SEQ ID NO: 304031 - RNA, 22 nt, Human
ucagcuuuggucacauugaguu

SEQ ID NO: 304032 - RNA, 22 nt, Human
augcaugaaagaauccaagccu

SEQ ID NO: 304033 - RNA, 22 nt, Human
uguccuggccaaggccuugcuu

SEQ ID NO: 304034 - RNA, 22 nt, Human
cucuggaaaaccacuagcagga

SEQ ID NO: 304035 - RNA, 22 nt, Human
aaguccuuuaauaucacauagu

SEQ ID NO: 304036 - RNA, 22 nt, Human
uuuugcuguguccuugagccgg

SEQ ID NO: 304037 - RNA, 22 nt, Human
agguggcuguauucagcuguaa

SEQ ID NO: 304038 - RNA, 22 nt, Human
uuugcugucagccgcuauuuuc

SEQ ID NO: 304039 - RNA, 22 nt, Human
auucauaacggcaaaugucacc

SEQ ID NO: 304040 - RNA, 21 nt, Human
uucugggaaaugagcuggggc

SEQ ID NO: 304041 - RNA, 22 nt, Human
gauuuaaaguagaccuuuguuu

SEQ ID NO: 304042 - RNA, 22 nt, Human
aggaggaaaaaggccacagcaa

SEQ ID NO: 304043 - RNA, 22 nt, Human
ccaggugggcgugucuucaccu

SEQ ID NO: 304044 - RNA, 22 nt, Human
cuucuucauaggcaguccuguu

SEQ ID NO: 304045 - RNA, 22 nt, Human
gggcagguggagggcccagcca

SEQ ID NO: 304046 - RNA, 22 nt, Human
accaugaugggaagcucagggc

SEQ ID NO: 304047 - RNA, 23 nt, Human
gcaggugguucgaacagaaguuu

SEQ ID NO: 304048 - RNA, 22 nt, Human
cucagagaaaugucacaacaau

SEQ ID NO: 304049 - RNA, 22 nt, Human
uuugcaguagacaucuuauuuu

SEQ ID NO: 304050 - RNA, 22 nt, Human
uuuauugaacacuugcacuggc

SEQ ID NO: 304051 - RNA, 22 nt, Human
gggguuaacaguauugcucaug

SEQ ID NO: 304052 - RNA, 23 nt, Human
ucucuuucaagagcuuaaugugc

SEQ ID NO: 304053 - RNA, 22 nt, Human
uuauuccaauuucuccuacaaa

SEQ ID NO: 304054 - RNA, 22 nt, Human
auuucucagugaaaugacaggc

SEQ ID NO: 304055 - RNA, 22 nt, Human
uuauuuaggagaaggaacccug

SEQ ID NO: 304056 - RNA, 22 nt, Human
ugcagggcauaggguccaguuu

SEQ ID NO: 304057 - RNA, 22 nt, Human
uacauguggccagaaauuugag

SEQ ID NO: 304058 - RNA, 22 nt, Human
acagguguccucacagggggug

SEQ ID NO: 304059 - RNA, 22 nt, Human
ucuucagauaaagggagaguau

SEQ ID NO: 304060 - RNA, 22 nt, Human
gugucccaggccucuggaauua

SEQ ID NO: 304061 - RNA, 22 nt, Human
acuugguucuaacuaguguaua

SEQ ID NO: 304062 - RNA, 20 nt, Human
ucuguucaaaucuuaguucc

SEQ ID NO: 304063 - RNA, 22 nt, Human
gcaggggcuaaggacacagaga

SEQ ID NO: 304064 - RNA, 22 nt, Human
gccugcagccccucugcaguag

SEQ ID NO: 304065 - RNA, 19 nt, Human
cgcagguggaaggagccgc

SEQ ID NO: 304066 - RNA, 16 nt, Human
ugggaccuguggccaa

SEQ ID NO: 304067 - RNA, 22 nt, Human
cacauaauacauguuccacuua

SEQ ID NO: 304068 - RNA, 22 nt, Human
aaaaucuggcaacacuaaguuu

SEQ ID NO: 304069 - RNA, 22 nt, Human
uauguacucaucaacuauugaa

SEQ ID NO: 304070 - RNA, 22 nt, Human
gcugggcucauuugugugucug

SEQ ID NO: 304071 - RNA, 22 nt, Human
ugacagacuacugccucuauug

SEQ ID NO: 304072 - RNA, 22 nt, Human
uccaugagaacccuuggagaua

SEQ ID NO: 304073 - RNA, 22 nt, Human
gggaccugaggagggguuucag

SEQ ID NO: 304074 - RNA, 22 nt, Human
uccaggcaagggaggagcaugg

SEQ ID NO: 304075 - RNA, 22 nt, Human
uuuaaauuuagaagaaacacug

SEQ ID NO: 304076 - RNA, 22 nt, Human
cagucuggaggucagcuggcuu

SEQ ID NO: 304077 - RNA, 23 nt, Human
agcagggccagaauacuugcugu

SEQ ID NO: 304078 - RNA, 23 nt, Human
ucauaaauauuagcacaguagga

SEQ ID NO: 304079 - RNA, 22 nt, Human
cauaugaaauaugaguugaaca

SEQ ID NO: 304080 - RNA, 23 nt, Human
acagacuguauucaaaguaggac

SEQ ID NO: 304081 - RNA, 22 nt, Human
aaguuuaacuugaauucuuucu

SEQ ID NO: 304082 - RNA, 22 nt, Human
uggugggggaggcugucuagca

SEQ ID NO: 304083 - RNA, 22 nt, Human
uauuuagaugcauuuggauugc

SEQ ID NO: 304084 - RNA, 16 nt, Human
ugguggggaggacagc

SEQ ID NO: 304085 - RNA, 22 nt, Human
agcugcaauuaaagacugugaa

SEQ ID NO: 304086 - RNA, 22 nt, Human
uuugaaaauuagacacaggcua

SEQ ID NO: 304087 - RNA, 22 nt, Human
aguggggcggacaggaccagga

SEQ ID NO: 304088 - RNA, 22 nt, Human
agauuccagaucccaaaaauga

SEQ ID NO: 304089 - RNA, 22 nt, Human
gccugggugagggucuccuuca

SEQ ID NO: 304090 - RNA, 22 nt, Human
gagaagcaaucaguggccaccc

SEQ ID NO: 304091 - RNA, 22 nt, Human
auucuucauuuacuguuacuug

SEQ ID NO: 304092 - RNA, 22 nt, Human
gcagcuuucuugcccuaaucuu

SEQ ID NO: 304093 - RNA, 23 nt, Human
acucaaaauuuggcauuugagga

SEQ ID NO: 304094 - RNA, 22 nt, Human
guguccauguuguucaggguga

SEQ ID NO: 304095 - RNA, 18 nt, Human
uggaggaaaaaucucaug

SEQ ID NO: 304096 - RNA, 22 nt, Human
uuucacauaaauauuaugccua

SEQ ID NO: 304097 - RNA, 22 nt, Human
uucacauaaugauacaaagcuu

SEQ ID NO: 304098 - RNA, 22 nt, Human
ccaggccuggaccaugccaggg

SEQ ID NO: 304099 - RNA, 22 nt, Human
ucagcuuugggggucucaggag

SEQ ID NO: 304100 - RNA, 22 nt, Human
acacaaugcauauuuuuccaga

SEQ ID NO: 304101 - RNA, 22 nt, Human
guucuucaucuuaaccaucugu

SEQ ID NO: 304102 - RNA, 22 nt, Human
ucagcauaucuugagcuucaug

SEQ ID NO: 304103 - RNA, 22 nt, Human
auuauuauauagggaaaguccc

SEQ ID NO: 304104 - RNA, 22 nt, Human
ccugcuccugcuauucuucugg

SEQ ID NO: 304105 - RNA, 22 nt, Human
ugugugucagagucuccauggu

SEQ ID NO: 304106 - RNA, 22 nt, Human
cauauucuuuaagcaaugcucu

SEQ ID NO: 304107 - RNA, 22 nt, Human
gcugcuuuauaaucucggcaga

SEQ ID NO: 304108 - RNA, 22 nt, Human
ugaacaugcuguugauggccug

SEQ ID NO: 304109 - RNA, 22 nt, Human
cccagugugguucuuuggagaa

SEQ ID NO: 304110 - RNA, 22 nt, Human
auuagggcuggaugcaaggaaa

SEQ ID NO: 304111 - RNA, 22 nt, Human
gguccugggaagaugcucauga

SEQ ID NO: 304112 - RNA, 22 nt, Human
ccugcaggcugcaggccaguuc

SEQ ID NO: 304113 - RNA, 22 nt, Human
uagguguccauauaugugugua

SEQ ID NO: 304114 - RNA, 22 nt, Human
auuuccaggagaaaggauuuua

SEQ ID NO: 304115 - RNA, 21 nt, Human
gaguccuuccaauguccucag

SEQ ID NO: 304116 - RNA, 19 nt, Human
guccaguguuuuccaguca

SEQ ID NO: 304117 - RNA, 22 nt, Human
aguccagucucacucuuggcag

SEQ ID NO: 304118 - RNA, 22 nt, Human
cuucuuaacuguauauacuaug

SEQ ID NO: 304119 - RNA, 22 nt, Human
ucuguucagaauuguaacacuc

SEQ ID NO: 304120 - RNA, 22 nt, Human
ggucuggauuucugcuucuuuc

SEQ ID NO: 304121 - RNA, 22 nt, Human
auucagcaaacauuuauuaucu

SEQ ID NO: 304122 - RNA, 22 nt, Human
ucucugaaggggagcuguuuaa

SEQ ID NO: 304123 - RNA, 22 nt, Human
auucuucaguauguguggauug

SEQ ID NO: 304124 - RNA, 22 nt, Human
uccugcagcauccgucgucugu

SEQ ID NO: 304125 - RNA, 22 nt, Human
uuugcaaauaccaugaaacuug

SEQ ID NO: 304126 - RNA, 22 nt, Human
guauuaggugguggaauuguag

SEQ ID NO: 304127 - RNA, 22 nt, Human
ugacaggugaaauguccuuauu

SEQ ID NO: 304128 - RNA, 22 nt, Human
gucugcccuggggcaucaguuu

SEQ ID NO: 304129 - RNA, 22 nt, Human
uauugcuguucuuuaaaugaag

SEQ ID NO: 304130 - RNA, 22 nt, Human
cuguuauuugagaguguugaau

SEQ ID NO: 304131 - RNA, 22 nt, Human
aagggcauugaggcugagagac

SEQ ID NO: 304132 - RNA, 18 nt, Human
ccauggcucccuccugcc

SEQ ID NO: 304133 - RNA, 22 nt, Human
auuauaaagaacaugugugugg

SEQ ID NO: 304134 - RNA, 22 nt, Human
uuucuuagcgaugcuugauaaa

SEQ ID NO: 304135 - RNA, 22 nt, Human
ucacaaaagcuuuugaauuugg

SEQ ID NO: 304136 - RNA, 22 nt, Human
uguccuuuuggcugucuauggu

SEQ ID NO: 304137 - RNA, 19 nt, Human
aguuuauuauaggugauuc

SEQ ID NO: 304138 - RNA, 22 nt, Human
uuaagcauaauuaaagugaaau

SEQ ID NO: 304139 - RNA, 22 nt, Human
uucauaguguuuccuuccagug

SEQ ID NO: 304140 - RNA, 22 nt, Human
uuuccuuccuugcuagccugag

SEQ ID NO: 304141 - RNA, 22 nt, Human
auuucccagcuuugaucaguuu

SEQ ID NO: 304142 - RNA, 22 nt, Human
ugucaaaaauaagagagauugu

SEQ ID NO: 304143 - RNA, 22 nt, Human
gguggggccugcuccagcggcc

SEQ ID NO: 304144 - RNA, 22 nt, Human
acauguguaaggucucucaguc

SEQ ID NO: 304145 - RNA, 23 nt, Human
guaaaauacgcagugcaguguga

SEQ ID NO: 304146 - RNA, 22 nt, Human
uguccucagauaugucuacucu

SEQ ID NO: 304147 - RNA, 22 nt, Human
ugguuugacaaugaggacuggu

SEQ ID NO: 304148 - RNA, 22 nt, Human
ucuaggguggagcugggaaucc

SEQ ID NO: 304149 - RNA, 22 nt, Human
aggcagcaauugaaaucauugu

SEQ ID NO: 304150 - RNA, 22 nt, Human
acuuuacucuucauaugugaca

SEQ ID NO: 304151 - RNA, 22 nt, Human
gaugggcguggcgcguuuggug

SEQ ID NO: 304152 - RNA, 22 nt, Human
cuaaaugacuuccagugguuau

SEQ ID NO: 304153 - RNA, 22 nt, Human
uuuuuucagccugucugugcca

SEQ ID NO: 304154 - RNA, 22 nt, Human
acagacagacagauugcauaug

SEQ ID NO: 304155 - RNA, 22 nt, Human
uugggcucaggaguuugagacc

SEQ ID NO: 304156 - RNA, 22 nt, Human
gccaggcauuuguuaggugcug

SEQ ID NO: 304157 - RNA, 22 nt, Human
aucuucaaagggauguccaugg

SEQ ID NO: 304158 - RNA, 20 nt, Human
ucuggccccuuccuguccug

SEQ ID NO: 304159 - RNA, 22 nt, Human
ugcagggcagcuagggagcuuu

SEQ ID NO: 304160 - RNA, 22 nt, Human
ucugaacauccagcaaugcaca

SEQ ID NO: 304161 - RNA, 22 nt, Human
ucuacccagagcuaugaccuga

SEQ ID NO: 304162 - RNA, 22 nt, Human
cuagaugccaauuuuuauggau

SEQ ID NO: 304163 - RNA, 22 nt, Human
uaacauuagguagacauaagcc

SEQ ID NO: 304164 - RNA, 22 nt, Human
ggaccugcucucccaguucucu

SEQ ID NO: 304165 - RNA, 22 nt, Human
guaaacaucgacccaacagggg

SEQ ID NO: 304166 - RNA, 22 nt, Human
uagggcuccacucccagagauu

SEQ ID NO: 304167 - RNA, 22 nt, Human
acaguguucacuuaacaaugga

SEQ ID NO: 304168 - RNA, 22 nt, Human
guuggcaaguguuccuuccucu

SEQ ID NO: 304169 - RNA, 21 nt, Human
aagaaagauaauuaaggaccc

SEQ ID NO: 304170 - RNA, 22 nt, Human
ugggcaggauaauaucucaugu

SEQ ID NO: 304171 - RNA, 22 nt, Human
uggcagguccacucacagaucu

SEQ ID NO: 304172 - RNA, 22 nt, Human
gucccaggugggcuccaccucu

SEQ ID NO: 304173 - RNA, 17 nt, Human
auuuacauugucaccga

SEQ ID NO: 304174 - RNA, 22 nt, Human
gacccggcuccaggcccagcag

SEQ ID NO: 304175 - RNA, 22 nt, Human
uuccaagaguaaauucaaauug

SEQ ID NO: 304176 - RNA, 22 nt, Human
auugauaucaguuugcugauug

SEQ ID NO: 304177 - RNA, 23 nt, Human
acauacauggagauaaagugaug

SEQ ID NO: 304178 - RNA, 22 nt, Human
uccaggcaaagggacuagcagg

SEQ ID NO: 304179 - RNA, 22 nt, Human
ccagagcccagggucaugcagg

SEQ ID NO: 304180 - RNA, 21 nt, Human
aaaugaaugugguagugcaag

SEQ ID NO: 304181 - RNA, 16 nt, Human
uaugugucucaucuac

SEQ ID NO: 304182 - RNA, 22 nt, Human
aaagauaauguuuccuuauucu

SEQ ID NO: 304183 - RNA, 22 nt, Human
uuauugcuauggugagagggau

SEQ ID NO: 304184 - RNA, 22 nt, Human
uggcaggguacaccuuaacacc

SEQ ID NO: 304185 - RNA, 22 nt, Human
ucauguuauugacucauaauau

SEQ ID NO: 304186 - RNA, 22 nt, Human
ugcagguggccaucuucguucu

SEQ ID NO: 304187 - RNA, 22 nt, Human
ggagaggguagggguccugccc

SEQ ID NO: 304188 - RNA, 23 nt, Human
gcaugaagugcuacgucuacagc

SEQ ID NO: 304189 - RNA, 22 nt, Human
cuguccugaaagggagauuggg

SEQ ID NO: 304190 - RNA, 22 nt, Human
auggagggugguaagacagaga

SEQ ID NO: 304191 - RNA, 22 nt, Human
gacuuuauaaaugagaggcgga

SEQ ID NO: 304192 - RNA, 20 nt, Human
gccaggcacuguucucaaua

SEQ ID NO: 304193 - RNA, 23 nt, Human
auguuauuauuagcagucuugcc

SEQ ID NO: 304194 - RNA, 22 nt, Human
auaauucagguuuucuggcaca

SEQ ID NO: 304195 - RNA, 22 nt, Human
agacagcuagggcugcagggac

SEQ ID NO: 304196 - RNA, 22 nt, Human
cauuugcagagggugacacucu

SEQ ID NO: 304197 - RNA, 22 nt, Human
ucacauaaauuauacaauuuca

SEQ ID NO: 304198 - RNA, 22 nt, Human
gugaccauccugguaaugaauc

SEQ ID NO: 304199 - RNA, 22 nt, Human
aggcagguccccuggaaggcac

SEQ ID NO: 304200 - RNA, 22 nt, Human
uuccucagcuguguccuggcga

SEQ ID NO: 304201 - RNA, 22 nt, Human
aaaacaggugucagcaaacuau

SEQ ID NO: 304202 - RNA, 21 nt, Human
uucaaaguuugccuaaagauu

SEQ ID NO: 304203 - RNA, 22 nt, Human
cuaaagcucaacaggcacuauu

SEQ ID NO: 304204 - RNA, 22 nt, Human
cuggaggaaucacagaaggcuu

SEQ ID NO: 304205 - RNA, 22 nt, Human
gcaugcagaaaaugaacaacga

SEQ ID NO: 304206 - RNA, 22 nt, Human
uggucugggcaaauccuucuga

SEQ ID NO: 304207 - RNA, 22 nt, Human
gagggcagagucuaaugaugca

SEQ ID NO: 304208 - RNA, 22 nt, Human
ucccaggcugggggccugaagu

SEQ ID NO: 304209 - RNA, 22 nt, Human
cagcuuuguggccuugaccucg

SEQ ID NO: 304210 - RNA, 22 nt, Human
acagguggcagaagcauuuacu

SEQ ID NO: 304211 - RNA, 22 nt, Human
agcuuuaucagaggagucucua

SEQ ID NO: 304212 - RNA, 22 nt, Human
gagugcaggccugagcaccauc

SEQ ID NO: 304213 - RNA, 22 nt, Human
acuuccagcuagguucugcuaa

SEQ ID NO: 304214 - RNA, 22 nt, Human
ucagacagaggagcucgugcag

SEQ ID NO: 304215 - RNA, 22 nt, Human
cagacaggcaggugagagcucc

SEQ ID NO: 304216 - RNA, 22 nt, Human
cuguccuguagcuccaucaguc

SEQ ID NO: 304217 - RNA, 22 nt, Human
ccagguggauaagguuucugga

SEQ ID NO: 304218 - RNA, 22 nt, Human
agagggcugccucagucagcua

SEQ ID NO: 304219 - RNA, 22 nt, Human
uuguguccccuguucuaccugu

SEQ ID NO: 304220 - RNA, 22 nt, Human
auugcuuuagaaagaaaaauau

SEQ ID NO: 304221 - RNA, 22 nt, Human
uggcuggagcauuccuugucuu

SEQ ID NO: 304222 - RNA, 22 nt, Human
aguuuacaaaguuucacuguuc

SEQ ID NO: 304223 - RNA, 20 nt, Human
cuggaguguagcaguggcug

SEQ ID NO: 304224 - RNA, 22 nt, Human
gcuuccagacgaucauguaaga

SEQ ID NO: 304225 - RNA, 22 nt, Human
acagagagaggcccgaggcugc

SEQ ID NO: 304226 - RNA, 22 nt, Human
ggcuggguacagggcagugugc

SEQ ID NO: 304227 - RNA, 22 nt, Human
gcagggacaaggcagguguucu

SEQ ID NO: 304228 - RNA, 22 nt, Human
uccauguguuuuccuguccaca

SEQ ID NO: 304229 - RNA, 22 nt, Human
ugauggucaacaauuuugagug

SEQ ID NO: 304230 - RNA, 22 nt, Human
uggaagcuguggcauaacugag

SEQ ID NO: 304231 - RNA, 22 nt, Human
gugccaaaagcuauaauuuggu

SEQ ID NO: 304232 - RNA, 22 nt, Human
uugcuguagcucauuucacucu

SEQ ID NO: 304233 - RNA, 22 nt, Human
agcuuuauucaugauuucaggg

SEQ ID NO: 304234 - RNA, 21 nt, Human
uucaaaaugguguguuugucu

SEQ ID NO: 304235 - RNA, 22 nt, Human
cuggaggaccccugccuggaag

SEQ ID NO: 304236 - RNA, 22 nt, Human
acaggugugggcugggcucuga

SEQ ID NO: 304237 - RNA, 22 nt, Human
auguccuuuuauuuaaagcagg

SEQ ID NO: 304238 - RNA, 22 nt, Human
auguuucaccagcaaauuaccu

SEQ ID NO: 304239 - RNA, 22 nt, Human
guagggacaugccauuaucuca

SEQ ID NO: 304240 - RNA, 22 nt, Human
gcagggcagccacaggcccccu

SEQ ID NO: 304241 - RNA, 22 nt, Human
aauugcuuaguugcaacuaugc

SEQ ID NO: 304242 - RNA, 22 nt, Human
gcugggugauucauuuccauaa

SEQ ID NO: 304243 - RNA, 22 nt, Human
gaaugaauagguguccagaugg

SEQ ID NO: 304244 - RNA, 22 nt, Human
agugugagaacggacuaauaaa

SEQ ID NO: 304245 - RNA, 22 nt, Human
acuguccaagcaugccuggcuu

SEQ ID NO: 304246 - RNA, 22 nt, Human
agcagggcaugaauaaggguuu

SEQ ID NO: 304247 - RNA, 21 nt, Human
auaagcaugcugauuacauuu

SEQ ID NO: 304248 - RNA, 22 nt, Human
cugaaagaauaagauguuuaca

SEQ ID NO: 304249 - RNA, 22 nt, Human
acaaguaccaaaugcucaagua

SEQ ID NO: 304250 - RNA, 22 nt, Human
uucauagugauuguucagauag

SEQ ID NO: 304251 - RNA, 22 nt, Human
cauucuuauauuuacucauuca

SEQ ID NO: 304252 - RNA, 22 nt, Human
gaagcacauggcugugagcaac

SEQ ID NO: 304253 - RNA, 22 nt, Human
aaggaccuauauugucagagga

SEQ ID NO: 304254 - RNA, 22 nt, Human
aggguggcaccuggaagggaug

SEQ ID NO: 304255 - RNA, 22 nt, Human
aaagcuuuucaguauguucaug

SEQ ID NO: 304256 - RNA, 22 nt, Human
uuccuucuauucagcuccaaga

SEQ ID NO: 304257 - RNA, 22 nt, Human
guacuaagucaggagaagaauu

SEQ ID NO: 304258 - RNA, 22 nt, Human
auccugaagcaugaaugucaaa

SEQ ID NO: 304259 - RNA, 22 nt, Human
cccugcagcauucucuaacugg

SEQ ID NO: 304260 - RNA, 22 nt, Human
ucagagaguuuucacuagggug

SEQ ID NO: 304261 - RNA, 19 nt, Human
cuggguccuguucuuuuac

SEQ ID NO: 304262 - RNA, 22 nt, Human
cagggcucuucaucacacagua

SEQ ID NO: 304263 - RNA, 22 nt, Human
gaggcuggaggucaaagaugaa

SEQ ID NO: 304264 - RNA, 20 nt, Human
agcugcaacagacuguaugg

SEQ ID NO: 304265 - RNA, 22 nt, Human
cuggguguucacccgaggcgcu

SEQ ID NO: 304266 - RNA, 22 nt, Human
uccaggcagucauuaaucucua

SEQ ID NO: 304267 - RNA, 22 nt, Human
uuuauauguuuguacaauuaag

SEQ ID NO: 304268 - RNA, 22 nt, Human
cauagcuuagggguuaaacuca

SEQ ID NO: 304269 - RNA, 22 nt, Human
ucuugccucuuccccuuuccau

SEQ ID NO: 304270 - RNA, 22 nt, Human
acagaaagauaggcacaagguc

SEQ ID NO: 304271 - RNA, 22 nt, Human
agguggggaggagugucucuuu

SEQ ID NO: 304272 - RNA, 22 nt, Human
uucccagaaugaauggauggag

SEQ ID NO: 304273 - RNA, 22 nt, Human
acaggugucugcaaguuacugg

SEQ ID NO: 304274 - RNA, 22 nt, Human
aguggaggcacuaauuggauuu

SEQ ID NO: 304275 - RNA, 22 nt, Human
gacagaggagaagaugcugugg

SEQ ID NO: 304276 - RNA, 22 nt, Human
uuuaucuuuaggacuuugcaga

SEQ ID NO: 304277 - RNA, 22 nt, Human
uuuccuuccuaaggugaagcaa

SEQ ID NO: 304278 - RNA, 22 nt, Human
ucauuuguugcuguuaccugag

SEQ ID NO: 304279 - RNA, 21 nt, Human
ucagagagucacagugaacug

SEQ ID NO: 304280 - RNA, 22 nt, Human
caaauagugucacauugugagg

SEQ ID NO: 304281 - RNA, 22 nt, Human
acagguguaugaauauguucca

SEQ ID NO: 304282 - RNA, 22 nt, Human
auuugcuugugcuaugaaaguu

SEQ ID NO: 304283 - RNA, 22 nt, Human
agggcucccgugaggugacugc

SEQ ID NO: 304284 - RNA, 22 nt, Human
uuucaguuuccagcuuugucau

SEQ ID NO: 304285 - RNA, 22 nt, Human
uacaucauaauaauacuuagaa

SEQ ID NO: 304286 - RNA, 22 nt, Human
auucuucaccauggauaauuug

SEQ ID NO: 304287 - RNA, 22 nt, Human
gacuuuggcaucuagacauugu

SEQ ID NO: 304288 - RNA, 22 nt, Human
auccuucuucugcuagugucua

SEQ ID NO: 304289 - RNA, 22 nt, Human
uauuuaaaauaagccccagugg

SEQ ID NO: 304290 - RNA, 22 nt, Human
cagggcagagggaaacuccuuu

SEQ ID NO: 304291 - RNA, 18 nt, Human
uaugugucuguuacaacu

SEQ ID NO: 304292 - RNA, 22 nt, Human
uugaacauuggcaauuucauau

SEQ ID NO: 304293 - RNA, 22 nt, Human
aguguccuggggcccuaaggcc

SEQ ID NO: 304294 - RNA, 22 nt, Human
ugcaaaaacugcaauugcuuuu

SEQ ID NO: 304295 - RNA, 22 nt, Human
cuguccucaccuuggcaggggg

SEQ ID NO: 304296 - RNA, 22 nt, Human
caugcagcagaauaaugacuau

SEQ ID NO: 304297 - RNA, 22 nt, Human
aagggcagcuauuaucgucauc

SEQ ID NO: 304298 - RNA, 23 nt, Human
uacuauaacgcugugucagcucc

SEQ ID NO: 304299 - RNA, 22 nt, Human
agauugaauauagagauucuug

SEQ ID NO: 304300 - RNA, 22 nt, Human
cuugaagaaaguauguugggau

SEQ ID NO: 304301 - RNA, 23 nt, Human
auaguuuucccugguucuugcca

SEQ ID NO: 304302 - RNA, 18 nt, Human
aauuuccauaugaauugc

SEQ ID NO: 304303 - RNA, 22 nt, Human
ccucccucccucuuaugguuua

SEQ ID NO: 304304 - RNA, 20 nt, Human
ugcagggccuaaaaagggaa

SEQ ID NO: 304305 - RNA, 22 nt, Human
agauggucuaguugaaccauau

SEQ ID NO: 304306 - RNA, 22 nt, Human
ucagguguuuaaggauagugau

SEQ ID NO: 304307 - RNA, 22 nt, Human
aauacuuaugugaccucauuuu

SEQ ID NO: 304308 - RNA, 22 nt, Human
aagggcucucugcauugaaauu

SEQ ID NO: 304309 - RNA, 22 nt, Human
gaggugucacuauuuugcuuau

SEQ ID NO: 304310 - RNA, 22 nt, Human
caaauucucaagguuuauccca

SEQ ID NO: 304311 - RNA, 22 nt, Human
aauauuuguuaguguuuuaaug

SEQ ID NO: 304312 - RNA, 19 nt, Human
guuucauuaagauaggaaa

SEQ ID NO: 304313 - RNA, 22 nt, Human
ucagggcaggcgagcagcugcu

SEQ ID NO: 304314 - RNA, 22 nt, Human
uccuccuucgggacugcuugac

SEQ ID NO: 304315 - RNA, 22 nt, Human
ccagagaguaggaggcauuauu

SEQ ID NO: 304316 - RNA, 22 nt, Human
acagguguuuuggaggaugauu

SEQ ID NO: 304317 - RNA, 22 nt, Human
ggcaggcauggccacucccuag

SEQ ID NO: 304318 - RNA, 22 nt, Human
uuucacauaugguuguugauug

SEQ ID NO: 304319 - RNA, 19 nt, Human
uuuacucuccaaggugagu

SEQ ID NO: 304320 - RNA, 22 nt, Human
accaggcaugauguggagcaca

SEQ ID NO: 304321 - RNA, 22 nt, Human
cuggaggaccacagaagcuggu

SEQ ID NO: 304322 - RNA, 21 nt, Human
cuguccucagauguggacgag

SEQ ID NO: 304323 - RNA, 22 nt, Human
gcuggccugggcagccugucgg

SEQ ID NO: 304324 - RNA, 22 nt, Human
ugucaaagacagaaggaaaugg

SEQ ID NO: 304325 - RNA, 23 nt, Human
gguuccaggaacacagccugaug

SEQ ID NO: 304326 - RNA, 22 nt, Human
ucuguagcauucaccagcccug

SEQ ID NO: 304327 - RNA, 22 nt, Human
aggccagaacagcucugcacca

SEQ ID NO: 304328 - RNA, 22 nt, Human
acagggagucugaggggauagu

SEQ ID NO: 304329 - RNA, 22 nt, Human
uggaaauaguugugagucaggc

SEQ ID NO: 304330 - RNA, 22 nt, Human
gggcugagggguaucucauggg

SEQ ID NO: 304331 - RNA, 22 nt, Human
ccagcagcucccucaggguccg

SEQ ID NO: 304332 - RNA, 22 nt, Human
agggggcuccuuggugugcaga

SEQ ID NO: 304333 - RNA, 22 nt, Human
ucaggagaguguucaguggagg

SEQ ID NO: 304334 - RNA, 22 nt, Human
uaguggggaaggaggacaagaa

SEQ ID NO: 304335 - RNA, 22 nt, Human
agcaccagcucaaggugcaccu

SEQ ID NO: 304336 - RNA, 18 nt, Human
aguaaauguuaaauauug

SEQ ID NO: 304337 - RNA, 22 nt, Human
aggcaguggcuuuuguuguguu

SEQ ID NO: 304338 - RNA, 22 nt, Human
agacaagagcugaggacauauu

SEQ ID NO: 304339 - RNA, 22 nt, Human
agcggcgccggagggaggugcg

SEQ ID NO: 304340 - RNA, 22 nt, Human
ggcaguggugggaggcucgcuc

SEQ ID NO: 304341 - RNA, 22 nt, Human
gggcuggagagucccacguggg

SEQ ID NO: 304342 - RNA, 21 nt, Human
uuucaagggacccuggggauc

SEQ ID NO: 304343 - RNA, 22 nt, Human
aacccaggguggagguugcagu

SEQ ID NO: 304344 - RNA, 20 nt, Human
ggccugagcauggcuggcag

SEQ ID NO: 304345 - RNA, 22 nt, Human
aagaagguugaaugacuacuuu

SEQ ID NO: 304346 - RNA, 22 nt, Human
uggcggugacggcggcgccugg

SEQ ID NO: 304347 - RNA, 22 nt, Human
ugaggagcaggguggcuuacuc

SEQ ID NO: 304348 - RNA, 22 nt, Human
acuuggucguggugcagcaugg

SEQ ID NO: 304349 - RNA, 20 nt, Human
acuagaaagucacugggggg

SEQ ID NO: 304350 - RNA, 22 nt, Human
aauuagaagcuguuagcaaaau

SEQ ID NO: 304351 - RNA, 22 nt, Human
cuucagggaggagcauggguuc

SEQ ID NO: 304352 - RNA, 22 nt, Human
gggagcugagcuggaagagaau

SEQ ID NO: 304353 - RNA, 22 nt, Human
ucugggccggagccgacggcag

SEQ ID NO: 304354 - RNA, 22 nt, Human
gccagaggggcucgaaggcgcg

SEQ ID NO: 304355 - RNA, 22 nt, Human
gacggggcagccagcugguggc

SEQ ID NO: 304356 - RNA, 22 nt, Human
guggccuccuccguccgccucu

SEQ ID NO: 304357 - RNA, 22 nt, Human
cagcgguggcaaggugacugug

SEQ ID NO: 304358 - RNA, 22 nt, Human
uggcugaguuacgaacagagca

SEQ ID NO: 304359 - RNA, 22 nt, Human
aacacauggcaagagcaggaaa

SEQ ID NO: 304360 - RNA, 22 nt, Human
gcccagcaccucucucaggguu

SEQ ID NO: 304361 - RNA, 18 nt, Human
uggggggcuugucugaag

SEQ ID NO: 304362 - RNA, 22 nt, Human
gacggagcugguugcugcggcu

SEQ ID NO: 304363 - RNA, 22 nt, Human
uagggggcuuugcugcuugaca

SEQ ID NO: 304364 - RNA, 22 nt, Human
uagaaagagcuuugcuuccuuu

SEQ ID NO: 304365 - RNA, 22 nt, Human
aaagcagaacugagagagcugg

SEQ ID NO: 304366 - RNA, 22 nt, Human
gaaagcagaugaaauugcaaca

SEQ ID NO: 304367 - RNA, 22 nt, Human
auugagaaaauucgagcaaguu

SEQ ID NO: 304368 - RNA, 22 nt, Human
aggggagguguccccaaaucuc

SEQ ID NO: 304369 - RNA, 22 nt, Human
aguggcugugaaauacauggga

SEQ ID NO: 304370 - RNA, 22 nt, Human
aaggcacauauuuuagagucac

SEQ ID NO: 304371 - RNA, 21 nt, Human
uacaucaguuuucuuggcuca

SEQ ID NO: 304372 - RNA, 23 nt, Human
ggucccaguggagaggccucacc

SEQ ID NO: 304373 - RNA, 22 nt, Human
gagggcugccacguugggcgag

SEQ ID NO: 304374 - RNA, 22 nt, Human
uggcagaaugaagacuggggcc

SEQ ID NO: 304375 - RNA, 22 nt, Human
ucagaagcauguggggagccug

SEQ ID NO: 304376 - RNA, 22 nt, Human
aaagcacauuacaagcucaguc

SEQ ID NO: 304377 - RNA, 23 nt, Human
aaacuacauuuauaguuuuucuc

SEQ ID NO: 304378 - RNA, 22 nt, Human
aggcaguguggagggcuguugc

SEQ ID NO: 304379 - RNA, 22 nt, Human
aggcugagccugggcguggugg

SEQ ID NO: 304380 - RNA, 22 nt, Human
uuucgagggauuagcuaggacu

SEQ ID NO: 304381 - RNA, 22 nt, Human
uguggccaccagagcugcuauu

SEQ ID NO: 304382 - RNA, 22 nt, Human
ugagaagcaguuucaguaagaa

SEQ ID NO: 304383 - RNA, 22 nt, Human
aggcggcuccgggagugugggc

SEQ ID NO: 304384 - RNA, 22 nt, Human
gugcuggggagauaggaagaga

SEQ ID NO: 304385 - RNA, 22 nt, Human
gugcugagugcagagugcagag

SEQ ID NO: 304386 - RNA, 22 nt, Human
uagaaaagccccagcuggaggg

SEQ ID NO: 304387 - RNA, 22 nt, Human
agcucagaacugcagacaugug

SEQ ID NO: 304388 - RNA, 22 nt, Human
ggaaggggagcuggaaagggua

SEQ ID NO: 304389 - RNA, 22 nt, Human
cagguuagcaacaugguuagag

SEQ ID NO: 304390 - RNA, 22 nt, Human
uccaaggucagcgagagucacu

SEQ ID NO: 304391 - RNA, 22 nt, Human
gaacugcauugugguauauguu

SEQ ID NO: 304392 - RNA, 22 nt, Human
gggcagcaaaucugagucuggu

SEQ ID NO: 304393 - RNA, 22 nt, Human
ugggugguugcugaggcuccuu

SEQ ID NO: 304394 - RNA, 22 nt, Human
ggcggcgcguagccggagacuu

SEQ ID NO: 304395 - RNA, 22 nt, Human
auuaguagcacacagagaucag

SEQ ID NO: 304396 - RNA, 22 nt, Human
aggucacguccugugaugucau

SEQ ID NO: 304397 - RNA, 22 nt, Human
auggucacuucacccaugagcu

SEQ ID NO: 304398 - RNA, 22 nt, Human
agacagcgaggacagaggggug

SEQ ID NO: 304399 - RNA, 22 nt, Human
ggcucagaggagcuggaacggu

SEQ ID NO: 304400 - RNA, 22 nt, Human
gggcagcaggcuccacguuccu

SEQ ID NO: 304401 - RNA, 22 nt, Human
cgggcagugcccagcggggcag

SEQ ID NO: 304402 - RNA, 22 nt, Human
aggagucaccugcccaaaguca

SEQ ID NO: 304403 - RNA, 22 nt, Human
uuagaaaucaccucugaagauc

SEQ ID NO: 304404 - RNA, 22 nt, Human
gguagccaauuuaaacauuucc

SEQ ID NO: 304405 - RNA, 22 nt, Human
gcugggcccugggugcccuagc

SEQ ID NO: 304406 - RNA, 22 nt, Human
uggcugaggcacagcugccgcc

SEQ ID NO: 304407 - RNA, 22 nt, Human
caaagaagagauuuacagagcu

SEQ ID NO: 304408 - RNA, 22 nt, Human
aagcaacuaaggcaaggaaaug

SEQ ID NO: 304409 - RNA, 22 nt, Human
ggcacuggcaaagcaaagucug

SEQ ID NO: 304410 - RNA, 22 nt, Human
gcaggguaggugacagguaguc

SEQ ID NO: 304411 - RNA, 22 nt, Human
aacagaaaucauuuagggcucu

SEQ ID NO: 304412 - RNA, 22 nt, Human
agaguggagagaaacaacucug

SEQ ID NO: 304413 - RNA, 18 nt, Human
uaaguggacacaggucac

SEQ ID NO: 304414 - RNA, 22 nt, Human
acucgcggcggacggcggccag

SEQ ID NO: 304415 - RNA, 22 nt, Human
gggagggcuuggacccagaugu

SEQ ID NO: 304416 - RNA, 22 nt, Human
gcacagagagcagugggggaca

SEQ ID NO: 304417 - RNA, 22 nt, Human
uggcugaggcuuuucuuaaaga

SEQ ID NO: 304418 - RNA, 20 nt, Human
gaacagucuucugagccaca

SEQ ID NO: 304419 - RNA, 22 nt, Human
cccaggucgucagcaguguggu

SEQ ID NO: 304420 - RNA, 22 nt, Human
uuggaggaagcucaugggggau

SEQ ID NO: 304421 - RNA, 22 nt, Human
aaggggggcaccugcaugcccg

SEQ ID NO: 304422 - RNA, 22 nt, Human
ucaggggacagccagcuggagg

SEQ ID NO: 304423 - RNA, 22 nt, Human
ucagaggagcaaaagaggggau

SEQ ID NO: 304424 - RNA, 22 nt, Human
cggcagcgguuggagguuguag

SEQ ID NO: 304425 - RNA, 22 nt, Human
cggcgcaggcagaccgcgggcu

SEQ ID NO: 304426 - RNA, 22 nt, Human
cagcccaggacugcagguguuu

SEQ ID NO: 304427 - RNA, 22 nt, Human
acugggccaggugugggugagu

SEQ ID NO: 304428 - RNA, 22 nt, Human
cagcaguguacaaggugucaga

SEQ ID NO: 304429 - RNA, 22 nt, Human
gggaggugauuaggaccaugua

SEQ ID NO: 304430 - RNA, 22 nt, Human
cuugaggcugcacuccagggcc

SEQ ID NO: 304431 - RNA, 22 nt, Human
gccuggagcucggcugagggcg

SEQ ID NO: 304432 - RNA, 22 nt, Human
ugagacaaagcagcugacagaa

SEQ ID NO: 304433 - RNA, 22 nt, Human
acauucucuuuuagaaagcugu

SEQ ID NO: 304434 - RNA, 23 nt, Human
uacugggcagcugcucugacacc

SEQ ID NO: 304435 - RNA, 22 nt, Human
gcaggaguguggugggacaucc

SEQ ID NO: 304436 - RNA, 22 nt, Human
gcagauggauguggacggcgcc

SEQ ID NO: 304437 - RNA, 22 nt, Human
aggccgugugagcaugugugag

SEQ ID NO: 304438 - RNA, 22 nt, Human
ggcuguggucauuaggagguug

SEQ ID NO: 304439 - RNA, 22 nt, Human
cuggagggcugcagcgaggcug

SEQ ID NO: 304440 - RNA, 22 nt, Human
gcagcagaaggccaaggggagc

SEQ ID NO: 304441 - RNA, 23 nt, Human
augcaacauugccaguaugggca

SEQ ID NO: 304442 - RNA, 20 nt, Human
gggugugugcagggccuggu

SEQ ID NO: 304443 - RNA, 22 nt, Human
cugcaccgugucucgggcugcc

SEQ ID NO: 304444 - RNA, 22 nt, Human
ugaaagaagccucccuuuggag

SEQ ID NO: 304445 - RNA, 22 nt, Human
gggcggggcuuccguccuccac

SEQ ID NO: 304446 - RNA, 22 nt, Human
accuggaggcagagguugcagu

SEQ ID NO: 304447 - RNA, 22 nt, Human
aaauacaguggcagcagauaau

SEQ ID NO: 304448 - RNA, 22 nt, Human
gaagcgcggcgucggcgugggu

SEQ ID NO: 304449 - RNA, 19 nt, Human
gcagcugugggaagagcca

SEQ ID NO: 304450 - RNA, 18 nt, Human
gcugaaauucuaaacaaa

SEQ ID NO: 304451 - RNA, 22 nt, Human
agccccaguucccuggaagucu

SEQ ID NO: 304452 - RNA, 22 nt, Human
uaaccaagcaaacuuucauugu

SEQ ID NO: 304453 - RNA, 20 nt, Human
ugcuggaggcgccggcgcuc

SEQ ID NO: 304454 - RNA, 22 nt, Human
gcugaagagagaugcguccagc

SEQ ID NO: 304455 - RNA, 22 nt, Human
guggcgcagaggguggcagaga

SEQ ID NO: 304456 - RNA, 22 nt, Human
uagcaccggcagugguaggugc

SEQ ID NO: 304457 - RNA, 22 nt, Human
aggggcuuguggaguugcuggu

SEQ ID NO: 304458 - RNA, 22 nt, Human
aggcugagguaggaggaucgcu

SEQ ID NO: 304459 - RNA, 22 nt, Human
gggggcgccgccgcucaucuca

SEQ ID NO: 304460 - RNA, 22 nt, Human
caggcgggcaggugcggccccu

SEQ ID NO: 304461 - RNA, 18 nt, Human
acagggagggcgcugggg

SEQ ID NO: 304462 - RNA, 20 nt, Human
aggggcaccugcgacggggc

SEQ ID NO: 304463 - RNA, 22 nt, Human
ggccgcggauuuucccgcuggc

SEQ ID NO: 304464 - RNA, 22 nt, Human
aagcgcagacacagagagugga

SEQ ID NO: 304465 - RNA, 21 nt, Human
gcaaccagaccacagggcagu

SEQ ID NO: 304466 - RNA, 22 nt, Human
aaggggaguuagugauaaaacc

SEQ ID NO: 304467 - RNA, 23 nt, Human
ggaggcacuuaggcagagcagag

SEQ ID NO: 304468 - RNA, 22 nt, Human
uggcugggagcuggaacugggc

SEQ ID NO: 304469 - RNA, 22 nt, Human
agccaccaccacugaaagguua

SEQ ID NO: 304470 - RNA, 23 nt, Human
guguggccccagggccuccucgc

SEQ ID NO: 304471 - RNA, 20 nt, Human
gcagcagacagacaggggac

SEQ ID NO: 304472 - RNA, 18 nt, Human
uucggcagauacgcuugg

SEQ ID NO: 304473 - RNA, 15 nt, Human
uggugguguugagac

SEQ ID NO: 304474 - RNA, 22 nt, Human
agaaaagaggcuuucuaagcau

SEQ ID NO: 304475 - RNA, 22 nt, Human
ggaaugcacuagacugugaaac

SEQ ID NO: 304476 - RNA, 22 nt, Human
ggcacugggugagggucacugg

SEQ ID NO: 304477 - RNA, 22 nt, Human
gaggugaguggggucuccaggg

SEQ ID NO: 304478 - RNA, 22 nt, Human
ccaagaggggaagggccgcagc

SEQ ID NO: 304479 - RNA, 22 nt, Human
ggcggugguugagaggacggcg

SEQ ID NO: 304480 - RNA, 22 nt, Human
ccugugguuuacucuguggcua

SEQ ID NO: 304481 - RNA, 19 nt, Human
cccuggaggaguguuggcu

SEQ ID NO: 304482 - RNA, 22 nt, Human
ggugggugagcccugggagcug

SEQ ID NO: 304483 - RNA, 22 nt, Human
ggcuggccuguguggccgccac

SEQ ID NO: 304484 - RNA, 22 nt, Human
acugagaacuuggggacagagg

SEQ ID NO: 304485 - RNA, 22 nt, Human
gagcaacacauugaaugaggau

SEQ ID NO: 304486 - RNA, 22 nt, Human
gagucgagcagaaagccgucgg

SEQ ID NO: 304487 - RNA, 22 nt, Human
guggaaauuuuaggaucaucuu

SEQ ID NO: 304488 - RNA, 22 nt, Human
aggggagccagggcugcgaguu

SEQ ID NO: 304489 - RNA, 22 nt, Human
agcaccaggucgcuggcacgcu

SEQ ID NO: 304490 - RNA, 22 nt, Human
acagcugggaacucacacagca

SEQ ID NO: 304491 - RNA, 22 nt, Human
ucggagcgucacuggcuggagg

SEQ ID NO: 304492 - RNA, 17 nt, Human
uaagggggaaacggagc

SEQ ID NO: 304493 - RNA, 22 nt, Human
cuucagggguguuaguuuugug

SEQ ID NO: 304494 - RNA, 22 nt, Human
gcccagcgagcagagguggacg

SEQ ID NO: 304495 - RNA, 22 nt, Human
acaugggcaucuaugaggcucu

SEQ ID NO: 304496 - RNA, 22 nt, Human
gcggggccauguccaacggccu

SEQ ID NO: 304497 - RNA, 22 nt, Human
ccagagacaaggagcuggaguc

SEQ ID NO: 304498 - RNA, 22 nt, Human
aggcaguguguagcuggaagag

SEQ ID NO: 304499 - RNA, 22 nt, Human
auggugguagaagcacuaugug

SEQ ID NO: 304500 - RNA, 22 nt, Human
cagagguagccgagugcaaucg

SEQ ID NO: 304501 - RNA, 22 nt, Human
uacugcugagcuggguagaagg

SEQ ID NO: 304502 - RNA, 23 nt, Human
agcaacagugggugaguguugcu

SEQ ID NO: 304503 - RNA, 21 nt, Human
ccuguggugccagaucgccag

SEQ ID NO: 304504 - RNA, 22 nt, Human
aaugagaauguaagugaagaga

SEQ ID NO: 304505 - RNA, 22 nt, Human
gaaaauaguucaucacaaugau

SEQ ID NO: 304506 - RNA, 22 nt, Human
uggaaauacaagaaguauguca

SEQ ID NO: 304507 - RNA, 22 nt, Human
cagggagcuggugccagccgac

SEQ ID NO: 304508 - RNA, 22 nt, Human
uggcugagugaacauguccauu

SEQ ID NO: 304509 - RNA, 22 nt, Human
ccaagcuggacagcagcaagga

SEQ ID NO: 304510 - RNA, 22 nt, Human
agcagcaggugaccucgaugcc

SEQ ID NO: 304511 - RNA, 22 nt, Human
ucaaagcacuggggaaagccug

SEQ ID NO: 304512 - RNA, 22 nt, Human
cagggagccccaauuccaugcc

SEQ ID NO: 304513 - RNA, 22 nt, Human
gcaguggccacauggaggagga

SEQ ID NO: 304514 - RNA, 22 nt, Human
ugagaacaaaguugaaaguuug

SEQ ID NO: 304515 - RNA, 22 nt, Human
cagaaccaggaacugauggaga

SEQ ID NO: 304516 - RNA, 22 nt, Human
ugguuugcccacucgagugauu

SEQ ID NO: 304517 - RNA, 21 nt, Human
uuucaauguguucuuuguagu

SEQ ID NO: 304518 - RNA, 22 nt, Human
uaaugcuuaacagcuggcuuuu

SEQ ID NO: 304519 - RNA, 22 nt, Human
acugucucucuagcaguucagg

SEQ ID NO: 304520 - RNA, 22 nt, Human
gcuggccuugugucugaggaag

SEQ ID NO: 304521 - RNA, 22 nt, Human
uuggccuucccuaccugggcca

SEQ ID NO: 304522 - RNA, 22 nt, Human
ccugggagagucuguggucucc

SEQ ID NO: 304523 - RNA, 22 nt, Human
gucauuucuguuucuucagugc

SEQ ID NO: 304524 - RNA, 22 nt, Human
ccaccagcuucagcagccgcgg

SEQ ID NO: 304525 - RNA, 22 nt, Human
gcuggaggcaguucagacacca

SEQ ID NO: 304526 - RNA, 22 nt, Human
ugcugaggcccaggagcacuuu

SEQ ID NO: 304527 - RNA, 22 nt, Human
augaacugcaguauaaacuugg

SEQ ID NO: 304528 - RNA, 22 nt, Human
auagucuuagucuauaguuuug

SEQ ID NO: 304529 - RNA, 22 nt, Human
acuuucucaaaucagacuuuaa

SEQ ID NO: 304530 - RNA, 22 nt, Human
uauuuccaaaagccuauuauga

SEQ ID NO: 304531 - RNA, 22 nt, Human
uguuagaaauuauuaguaauau

SEQ ID NO: 304532 - RNA, 22 nt, Human
aggggagccccugguccuggug

SEQ ID NO: 304533 - RNA, 22 nt, Human
gagccaggucgggccgcggcga

SEQ ID NO: 304534 - RNA, 22 nt, Human
guugacagcuggugagcugcua

SEQ ID NO: 304535 - RNA, 22 nt, Human
acucuugucucaacuuuuguau

SEQ ID NO: 304536 - RNA, 21 nt, Human
cagaggcugagagggcaaucu

SEQ ID NO: 304537 - RNA, 22 nt, Human
uugcauugauguuccuucuugc

SEQ ID NO: 304538 - RNA, 18 nt, Human
cugaggcuggcaggagcc

SEQ ID NO: 304539 - RNA, 22 nt, Human
cauuuacuguugaaucccuagc

SEQ ID NO: 304540 - RNA, 22 nt, Human
uaaauuaugucacaugacucug

SEQ ID NO: 304541 - RNA, 22 nt, Human
ucuggggguuaagugaggacaa

SEQ ID NO: 304542 - RNA, 22 nt, Human
cauuaucugccauugacaccau

SEQ ID NO: 304543 - RNA, 22 nt, Human
ucaaggaggugcuuggcuucac

SEQ ID NO: 304544 - RNA, 22 nt, Human
gggacaggccccucgcuagcuu

SEQ ID NO: 304545 - RNA, 22 nt, Human
cucaguuucugacauuaaaauc

SEQ ID NO: 304546 - RNA, 22 nt, Human
cagagcugucauuugccaguga

SEQ ID NO: 304547 - RNA, 22 nt, Human
gaggcagcuuggggcugugggu

SEQ ID NO: 304548 - RNA, 17 nt, Human
ccuguguuugcuccuuc

SEQ ID NO: 304549 - RNA, 22 nt, Human
caggccucaggggcucaggcug

SEQ ID NO: 304550 - RNA, 22 nt, Human
cugagaggcacaaggcauuucg

SEQ ID NO: 304551 - RNA, 22 nt, Human
ucagagugcagcgggaggcugg

SEQ ID NO: 304552 - RNA, 22 nt, Human
aaggacagaaacagauugcugg

SEQ ID NO: 304553 - RNA, 22 nt, Human
gugguguaggucacaguuagga

SEQ ID NO: 304554 - RNA, 22 nt, Human
guggcucuaggugagcauggag

SEQ ID NO: 304555 - RNA, 22 nt, Human
accaggcuggagugcaguggcg

SEQ ID NO: 304556 - RNA, 22 nt, Human
acagcucucccucagagaaaug

SEQ ID NO: 304557 - RNA, 21 nt, Human
gcagacugcccugcugucccc

SEQ ID NO: 304558 - RNA, 22 nt, Human
cugaaggaagcagguggccugu

SEQ ID NO: 304559 - RNA, 22 nt, Human
cugagggccuuggcuccugccc

SEQ ID NO: 304560 - RNA, 22 nt, Human
aggugaguuacaggaggagguc

SEQ ID NO: 304561 - RNA, 22 nt, Human
acagcagccugcagcccugugu

SEQ ID NO: 304562 - RNA, 22 nt, Human
ggccuuggugcucuguguugca

SEQ ID NO: 304563 - RNA, 22 nt, Human
cuuggcagagggcugggcucag

SEQ ID NO: 304564 - RNA, 22 nt, Human
gcuuuggagccuguguucugcc

SEQ ID NO: 304565 - RNA, 22 nt, Human
aggcacugacagauucuguguc

SEQ ID NO: 304566 - RNA, 22 nt, Human
agggggugaucaaggugcggcg

SEQ ID NO: 304567 - RNA, 22 nt, Human
auugagaauccauuugagauga

SEQ ID NO: 304568 - RNA, 22 nt, Human
uucuuauagaagcaaccauugu

SEQ ID NO: 304569 - RNA, 22 nt, Human
guucuugccagcauccucaggu

SEQ ID NO: 304570 - RNA, 18 nt, Human
uggguggcuagggaguuu

SEQ ID NO: 304571 - RNA, 19 nt, Human
uacuuuuucaggacagagu

SEQ ID NO: 304572 - RNA, 22 nt, Human
ucacguuuuacugagugagaua

SEQ ID NO: 304573 - RNA, 22 nt, Human
uucuugauuucaugcaguuaag

SEQ ID NO: 304574 - RNA, 22 nt, Human
uauuccaguucaccuuuucauc

SEQ ID NO: 304575 - RNA, 22 nt, Human
agcucccagucuccucuccaug

SEQ ID NO: 304576 - RNA, 22 nt, Human
ugggagaacccagggucaggcu

SEQ ID NO: 304577 - RNA, 22 nt, Human
cagggccuuuuagcaucuucuc

SEQ ID NO: 304578 - RNA, 22 nt, Human
uuccaagaguaaauucaaauug

SEQ ID NO: 304579 - RNA, 21 nt, Human
ccuguucacagaucuguaacu

SEQ ID NO: 304580 - RNA, 22 nt, Human
uaaaguuuggcagacaauaaca

SEQ ID NO: 304581 - RNA, 22 nt, Human
agaauaaaucaaauguccugag

SEQ ID NO: 304582 - RNA, 22 nt, Human
ccaggacuuuaaguccagcacu

SEQ ID NO: 304583 - RNA, 22 nt, Human
cagagcucuauguucauggagg

SEQ ID NO: 304584 - RNA, 22 nt, Human
agaggcugaaugaugucaucau

SEQ ID NO: 304585 - RNA, 22 nt, Human
uguauaaaccauggacagcuuu

SEQ ID NO: 304586 - RNA, 22 nt, Human
uacuuacacagcuguagaaggu

SEQ ID NO: 304587 - RNA, 22 nt, Human
uggagccaugccuggccuuucc

SEQ ID NO: 304588 - RNA, 23 nt, Human
caugggagugagaaugccagcuc

SEQ ID NO: 304589 - RNA, 22 nt, Human
gaggcagcaucuauggugggaa

SEQ ID NO: 304590 - RNA, 22 nt, Human
ucaguguuaaucagugguaccu

SEQ ID NO: 304591 - RNA, 22 nt, Human
uuucuucugagaucagggagaa

SEQ ID NO: 304592 - RNA, 22 nt, Human
cagcuuugauucuuucugccau

SEQ ID NO: 304593 - RNA, 23 nt, Human
ugcucugugaauaguuggugacu

SEQ ID NO: 304594 - RNA, 20 nt, Human
uacauucaaaacaaacucug

SEQ ID NO: 304595 - RNA, 18 nt, Human
uccuccuuuggccuuuuc

SEQ ID NO: 304596 - RNA, 23 nt, Human
ugagcugguauuguccaucucca

SEQ ID NO: 304597 - RNA, 22 nt, Human
agggcagcuagcuguagaaaga

SEQ ID NO: 304598 - RNA, 22 nt, Human
uccagugguuugaaaggggugu

SEQ ID NO: 304599 - RNA, 23 nt, Human
gcucugagggcuuaucccuccca

SEQ ID NO: 304600 - RNA, 22 nt, Human
auuuuucucuuuccacugagau

SEQ ID NO: 304601 - RNA, 22 nt, Human
ugaagccaucaggaagccagca

SEQ ID NO: 304602 - RNA, 22 nt, Human
gccuucugauaucucuuggcau

SEQ ID NO: 304603 - RNA, 22 nt, Human
ugcugggcuugaaagcugcuaa

SEQ ID NO: 304604 - RNA, 22 nt, Human
ugcuccuuccucauccugugca

SEQ ID NO: 304605 - RNA, 22 nt, Human
aaagccuucaaguagauguaag

SEQ ID NO: 304606 - RNA, 22 nt, Human
accugccuaguugguucugccc

SEQ ID NO: 304607 - RNA, 22 nt, Human
uagugcacacgcauguagcagu

SEQ ID NO: 304608 - RNA, 23 nt, Human
gccuucagcucgggaaggcuccc

SEQ ID NO: 304609 - RNA, 22 nt, Human
acaaaggugcgucccuucagcu

SEQ ID NO: 304610 - RNA, 22 nt, Human
ugggcugcugagaaugagagag

SEQ ID NO: 304611 - RNA, 22 nt, Human
cagcagggaagcugugcuguuu

SEQ ID NO: 304612 - RNA, 22 nt, Human
agaggaugauuuuaaggacacu

SEQ ID NO: 304613 - RNA, 22 nt, Human
gaauaguucuauggcugcaggg

SEQ ID NO: 304614 - RNA, 22 nt, Human
aggaaaaagaguugcugccuuc

SEQ ID NO: 304615 - RNA, 22 nt, Human
cacuggaauauggcguugaacc

SEQ ID NO: 304616 - RNA, 22 nt, Human
gucagugucuuaacagagauua

SEQ ID NO: 304617 - RNA, 22 nt, Human
aaggaagguucauagucaaaga

SEQ ID NO: 304618 - RNA, 22 nt, Human
ggcuggcacugaggagagcucu

SEQ ID NO: 304619 - RNA, 22 nt, Human
cccucugccugcgcccuggugu

SEQ ID NO: 304620 - RNA, 22 nt, Human
aggcaaaauuacaaaguuauua

SEQ ID NO: 304621 - RNA, 22 nt, Human
aaaauucugucauuaaauugug

SEQ ID NO: 304622 - RNA, 22 nt, Human
uccucugccaaagggaguugcc

SEQ ID NO: 304623 - RNA, 22 nt, Human
uuuaacuuagaagagauauccu

SEQ ID NO: 304624 - RNA, 22 nt, Human
uucccaugccuggccccuaucc

SEQ ID NO: 304625 - RNA, 23 nt, Human
gaagcagaugucugaguaggcag

SEQ ID NO: 304626 - RNA, 22 nt, Human
uuguuuugcuaaagggucauca

SEQ ID NO: 304627 - RNA, 22 nt, Human
cuggagcuggcuuccuuccacu

SEQ ID NO: 304628 - RNA, 22 nt, Human
agagcacagaaguuauauguua

SEQ ID NO: 304629 - RNA, 22 nt, Human
cacauuugaaggaauuagcauu

SEQ ID NO: 304630 - RNA, 22 nt, Human
gaggaccacagaugagccugca

SEQ ID NO: 304631 - RNA, 22 nt, Human
acacagggcugcgccugacccc

SEQ ID NO: 304632 - RNA, 22 nt, Human
uggagcugaacuuugaggccag

SEQ ID NO: 304633 - RNA, 22 nt, Human
gcacugcagccucagauggugg

SEQ ID NO: 304634 - RNA, 22 nt, Human
uuacauuagacccacuuucaug

SEQ ID NO: 304635 - RNA, 22 nt, Human
caagaaaugggauuugacugcc

SEQ ID NO: 304636 - RNA, 22 nt, Human
agggccugcaucaggagcuugg

SEQ ID NO: 304637 - RNA, 22 nt, Human
cugccugcuucugagccagagg

SEQ ID NO: 304638 - RNA, 22 nt, Human
acguuuucagugacugugcuuc

SEQ ID NO: 304639 - RNA, 22 nt, Human
accugagccuagggagguugag

SEQ ID NO: 304640 - RNA, 22 nt, Human
gggcagauggggcacaggcuga

SEQ ID NO: 304641 - RNA, 20 nt, Human
uccagcccagguccugccug

SEQ ID NO: 304642 - RNA, 22 nt, Human
gcugcccuaauaucacauguua

SEQ ID NO: 304643 - RNA, 22 nt, Human
agggaugguggagguugcaagu

SEQ ID NO: 304644 - RNA, 22 nt, Human
cugcuguguuccuccugcaucu

SEQ ID NO: 304645 - RNA, 22 nt, Human
ggcucugcuggauugaggccag

SEQ ID NO: 304646 - RNA, 22 nt, Human
cuccagugcuucuagaaaauac

SEQ ID NO: 304647 - RNA, 20 nt, Human
aaaauauguauaacucuucu

SEQ ID NO: 304648 - RNA, 22 nt, Human
cuggcaggcggcagagcccagg

SEQ ID NO: 304649 - RNA, 21 nt, Human
gugcugggacacagccaggcu

SEQ ID NO: 304650 - RNA, 22 nt, Human
gggcugacucugcacugagcca

SEQ ID NO: 304651 - RNA, 22 nt, Human
aggagugcaaauaguccagaga

SEQ ID NO: 304652 - RNA, 22 nt, Human
cugggcugucaauggcccucug

SEQ ID NO: 304653 - RNA, 22 nt, Human
aaauguguuccuuugcuacaga

SEQ ID NO: 304654 - RNA, 21 nt, Human
guggcccugccgcagugucca

SEQ ID NO: 304655 - RNA, 22 nt, Human
ggagacaguauggcuuguagcu

SEQ ID NO: 304656 - RNA, 22 nt, Human
uugacaagaaucguugccuugg

SEQ ID NO: 304657 - RNA, 22 nt, Human
cugugucucuccuuacaagacu

SEQ ID NO: 304658 - RNA, 22 nt, Human
aauucaugaguagaaucuauau

SEQ ID NO: 304659 - RNA, 22 nt, Human
ggguccagaguugaagagguua

SEQ ID NO: 304660 - RNA, 22 nt, Human
ugccugggggacuaaggccaaa

SEQ ID NO: 304661 - RNA, 22 nt, Human
auuauuauuguugauguuaggg

SEQ ID NO: 304662 - RNA, 22 nt, Human
gccugggugaauuugauccuaa

SEQ ID NO: 304663 - RNA, 22 nt, Human
cugcagggcccgccugagcccu

SEQ ID NO: 304664 - RNA, 22 nt, Human
aaaaaugaaacggcugguuggc

SEQ ID NO: 304665 - RNA, 22 nt, Human
uaugcacauucacacaaaaaug

SEQ ID NO: 304666 - RNA, 22 nt, Human
gacagacauuuccugauccaau

SEQ ID NO: 304667 - RNA, 22 nt, Human
cauucauuuacuuucaacagcu

SEQ ID NO: 304668 - RNA, 22 nt, Human
gaaauguuguccugucucuuga

SEQ ID NO: 304669 - RNA, 22 nt, Human
gcagaugaaguuuacaggaaac

SEQ ID NO: 304670 - RNA, 22 nt, Human
gcacagccagcaucugagggau

SEQ ID NO: 304671 - RNA, 22 nt, Human
augacacaauuuuagagcugaa

SEQ ID NO: 304672 - RNA, 22 nt, Human
cugggagcggcugucacugguu

SEQ ID NO: 304673 - RNA, 22 nt, Human
cccuguggcaggaggaggagca

SEQ ID NO: 304674 - RNA, 22 nt, Human
ucccagagcugauaagccuuua

SEQ ID NO: 304675 - RNA, 22 nt, Human
uucucuagguuuuagaugaaga

SEQ ID NO: 304676 - RNA, 22 nt, Human
auuuucaaaacaucugcugugu

SEQ ID NO: 304677 - RNA, 22 nt, Human
aaugaacaaaauaugcuuugca

SEQ ID NO: 304678 - RNA, 22 nt, Human
uccucugcucagcauuccucac

SEQ ID NO: 304679 - RNA, 22 nt, Human
ugccuguguugauuacuuuguc

SEQ ID NO: 304680 - RNA, 22 nt, Human
cugugucccccucagccaggug

SEQ ID NO: 304681 - RNA, 22 nt, Human
guuguuuuuguucucuauagcu

SEQ ID NO: 304682 - RNA, 22 nt, Human
cauggccuugagugacugcacu

SEQ ID NO: 304683 - RNA, 22 nt, Human
ggcucccugccuguccucaguc

SEQ ID NO: 304684 - RNA, 22 nt, Human
agauggagaccuuggaugaacu

SEQ ID NO: 304685 - RNA, 22 nt, Human
uguggaaaagaauaagggagau

SEQ ID NO: 304686 - RNA, 22 nt, Human
cacaagacuuauuuguguagaa

SEQ ID NO: 304687 - RNA, 22 nt, Human
ucaaagagcuauucaguugugg

SEQ ID NO: 304688 - RNA, 22 nt, Human
ugggcccugacuucaagcaucc

SEQ ID NO: 304689 - RNA, 22 nt, Human
caccuggcuggaagugcuccgg

SEQ ID NO: 304690 - RNA, 22 nt, Human
uuugaaucugauauggcagcau

SEQ ID NO: 304691 - RNA, 22 nt, Human
ucugccugagggagcugaggaa

SEQ ID NO: 304692 - RNA, 20 nt, Human
uggagccaaggugugucugg

SEQ ID NO: 304693 - RNA, 18 nt, Human
aaacuggcuuggccugug

SEQ ID NO: 304694 - RNA, 22 nt, Human
ccugagaggcccucucacuguc

SEQ ID NO: 304695 - RNA, 22 nt, Human
caggccugggcuucggggcuga

SEQ ID NO: 304696 - RNA, 22 nt, Human
ugcagaagaauguaggcauaag

SEQ ID NO: 304697 - RNA, 22 nt, Human
ucccuggaacagagagacaacg

SEQ ID NO: 304698 - RNA, 22 nt, Human
ugagagugguucagcucagaag

SEQ ID NO: 304699 - RNA, 23 nt, Human
uuuauccaacucuguaaucucuc

SEQ ID NO: 304700 - RNA, 22 nt, Human
uucuucaaacaaaaguggcaug

SEQ ID NO: 304701 - RNA, 22 nt, Human
agagcuggcugugggugacuuu

SEQ ID NO: 304702 - RNA, 22 nt, Human
cacucaggcugugucaggagga

SEQ ID NO: 304703 - RNA, 22 nt, Human
uuucacaaguuucaggauucug

SEQ ID NO: 304704 - RNA, 22 nt, Human
ugagcccagagcccuuguaggg

SEQ ID NO: 304705 - RNA, 22 nt, Human
uuuccucuucuucccaugucau

SEQ ID NO: 304706 - RNA, 22 nt, Human
uaacuacauuucacugcaauua

SEQ ID NO: 304707 - RNA, 22 nt, Human
uuucaaacauaucuucauuacu

SEQ ID NO: 304708 - RNA, 22 nt, Human
uaggccaguggcagguugugug

SEQ ID NO: 304709 - RNA, 22 nt, Human
aguugcagacgcagagauguug

SEQ ID NO: 304710 - RNA, 22 nt, Human
aagaugauagaucugucaaugu

SEQ ID NO: 304711 - RNA, 22 nt, Human
gcagauggugccaugucuugug

SEQ ID NO: 304712 - RNA, 22 nt, Human
cugcccugcuugaugacagcga

SEQ ID NO: 304713 - RNA, 22 nt, Human
cugaggcucaagggcagguggg

SEQ ID NO: 304714 - RNA, 23 nt, Human
uucucaguccugcccagggaggc

SEQ ID NO: 304715 - RNA, 22 nt, Human
caggggcagucugugugcgugg

SEQ ID NO: 304716 - RNA, 22 nt, Human
ccugccugcguccucugagggc

SEQ ID NO: 304717 - RNA, 22 nt, Human
auccagggauaaaaguaagguu

SEQ ID NO: 304718 - RNA, 23 nt, Human
ucacacagcuggucagguacaga

SEQ ID NO: 304719 - RNA, 22 nt, Human
ucaagagacaggacguguuuca

SEQ ID NO: 304720 - RNA, 22 nt, Human
uuuaaauuauaguuaaugucug

SEQ ID NO: 304721 - RNA, 22 nt, Human
cagcaucuaaucuucaugccgg

SEQ ID NO: 304722 - RNA, 22 nt, Human
aggucaaggccaaaagaguggu

SEQ ID NO: 304723 - RNA, 22 nt, Human
cugggcaguuuuacaucauugc

SEQ ID NO: 304724 - RNA, 22 nt, Human
uggaggcaguaacugagcaaca

SEQ ID NO: 304725 - RNA, 22 nt, Human
uuugucagucaugucugcuuuu

SEQ ID NO: 304726 - RNA, 21 nt, Human
auccauccaucuuggccuaac

SEQ ID NO: 304727 - RNA, 22 nt, Human
ccacagagacagagcccagggu

SEQ ID NO: 304728 - RNA, 22 nt, Human
cugggccuuggauugacacugu

SEQ ID NO: 304729 - RNA, 22 nt, Human
cugaggcuuggaggggucuggu

SEQ ID NO: 304730 - RNA, 22 nt, Human
aaaguuguaauggaagaaaugc

SEQ ID NO: 304731 - RNA, 22 nt, Human
gcacacaggcaguuuccagcca

SEQ ID NO: 304732 - RNA, 22 nt, Human
uggaguucauccaugacagcuu

SEQ ID NO: 304733 - RNA, 22 nt, Human
ggggauggugggaaggcaaucu

SEQ ID NO: 304734 - RNA, 22 nt, Human
cucuccagaucugcugagccag

SEQ ID NO: 304735 - RNA, 22 nt, Human
uuguccuuaccucaaucuggaa

SEQ ID NO: 304736 - RNA, 22 nt, Human
cccagcccugaccuauuggaaa

SEQ ID NO: 304737 - RNA, 22 nt, Human
aaauauguuuuccaguugucau

SEQ ID NO: 304738 - RNA, 23 nt, Human
ugggggugcacgggccacaucuu

SEQ ID NO: 304739 - RNA, 22 nt, Human
auuuggaaaugcaucucuugag

SEQ ID NO: 304740 - RNA, 22 nt, Human
ugccagccagguucugaggcua

SEQ ID NO: 304741 - RNA, 22 nt, Human
uggcucuguucgccaucaggag

SEQ ID NO: 304742 - RNA, 22 nt, Human
aagucagagcaacugagacauu

SEQ ID NO: 304743 - RNA, 22 nt, Human
ucuguaucuaauuuuacaguag

SEQ ID NO: 304744 - RNA, 22 nt, Human
ugaaggaagaauaggcaguguu

SEQ ID NO: 304745 - RNA, 22 nt, Human
uaaaguucuggugagagguaag

SEQ ID NO: 304746 - RNA, 22 nt, Human
cagcucuggguaggaggaaucu

SEQ ID NO: 304747 - RNA, 22 nt, Human
uuccucagccaaggcugggauc

SEQ ID NO: 304748 - RNA, 22 nt, Human
ugggcucugugccagguuggug

SEQ ID NO: 304749 - RNA, 22 nt, Human
cagcccugagcaaggcuuuuaa

SEQ ID NO: 304750 - RNA, 22 nt, Human
ucugagccaauuucugugucca

SEQ ID NO: 304751 - RNA, 22 nt, Human
uuccagggcuaauuccugugga

SEQ ID NO: 304752 - RNA, 22 nt, Human
ggcugccauaacugauaccaua

SEQ ID NO: 304753 - RNA, 22 nt, Human
cucuuucugauucgcugggacc

SEQ ID NO: 304754 - RNA, 22 nt, Human
gcaaggcugcugccacccaucu

SEQ ID NO: 304755 - RNA, 18 nt, Human
ucauuuguuuugcaugaa

SEQ ID NO: 304756 - RNA, 22 nt, Human
cacagcagaaauaugaaggcag

SEQ ID NO: 304757 - RNA, 22 nt, Human
aucauacagccuuuguuagugu

SEQ ID NO: 304758 - RNA, 22 nt, Human
cagggacauugguggccagguu

SEQ ID NO: 304759 - RNA, 22 nt, Human
uugauagguuuuauguauaguu

SEQ ID NO: 304760 - RNA, 22 nt, Human
ccucacuggccagccaggggug

SEQ ID NO: 304761 - RNA, 22 nt, Human
ugagccugaguucaaggcugca

SEQ ID NO: 304762 - RNA, 22 nt, Human
gaaguucugguguaugugauaa

SEQ ID NO: 304763 - RNA, 21 nt, Human
ugucuuuggccucauucccag

SEQ ID NO: 304764 - RNA, 18 nt, Human
acucaggaaaugaugaca

SEQ ID NO: 304765 - RNA, 22 nt, Human
uauuucagcaagaagaaugugg

SEQ ID NO: 304766 - RNA, 22 nt, Human
cucagagcccaggguacacccg

SEQ ID NO: 304767 - RNA, 22 nt, Human
gagagaagggggauaugagccu

SEQ ID NO: 304768 - RNA, 22 nt, Human
cugccgaguacagccauagaaa

SEQ ID NO: 304769 - RNA, 22 nt, Human
uaauaucuacuucauagaguuu

SEQ ID NO: 304770 - RNA, 22 nt, Human
gaaggaggucugauacaauaug

SEQ ID NO: 304771 - RNA, 22 nt, Human
cuuguggcccauggcuuccugc

SEQ ID NO: 304772 - RNA, 22 nt, Human
cuggcagguggauggggacucc

SEQ ID NO: 304773 - RNA, 22 nt, Human
cauuuagacauuugauuugggg

SEQ ID NO: 304774 - RNA, 22 nt, Human
uuggagguuugaaaauaugugu

SEQ ID NO: 304775 - RNA, 21 nt, Human
aggaaguggccagauugggaa

SEQ ID NO: 304776 - RNA, 22 nt, Human
ccaguguuuccgucaguacacg

SEQ ID NO: 304777 - RNA, 16 nt, Human
cagaguguaaacagga

SEQ ID NO: 304778 - RNA, 22 nt, Human
cucucccccacagcagccuucu

SEQ ID NO: 304779 - RNA, 20 nt, Human
uacagaaacaggacuuuugg

SEQ ID NO: 304780 - RNA, 22 nt, Human
gugacagucaaagacaugacuu

SEQ ID NO: 304781 - RNA, 22 nt, Human
ccugugcccucagccuggcucu

SEQ ID NO: 304782 - RNA, 22 nt, Human
uuagaacuuaaacuucagaaag

SEQ ID NO: 304783 - RNA, 22 nt, Human
ugucauaacuuagugacaaauc

SEQ ID NO: 304784 - RNA, 23 nt, Human
ccucccaccuauuucacuuucuu

SEQ ID NO: 304785 - RNA, 22 nt, Human
auccuuggaugugucuuuuugu

SEQ ID NO: 304786 - RNA, 22 nt, Human
ccugggcaacauagugagaccu

SEQ ID NO: 304787 - RNA, 22 nt, Human
ucaguguuuuccagggucuacu

SEQ ID NO: 304788 - RNA, 22 nt, Human
ucacugaagacugggcucuaaa

SEQ ID NO: 304789 - RNA, 22 nt, Human
agcagccaagguaaccugugcu

SEQ ID NO: 304790 - RNA, 22 nt, Human
acaguguuuuagaaaagcuuga

SEQ ID NO: 304791 - RNA, 22 nt, Human
uauauagaaaagcagauguugg

SEQ ID NO: 304792 - RNA, 22 nt, Human
auauguguauuugguuagccua

SEQ ID NO: 304793 - RNA, 22 nt, Human
gcuggccauauauuuugcuguu

SEQ ID NO: 304794 - RNA, 22 nt, Human
gccuggcaaggcccuguugacu

SEQ ID NO: 304795 - RNA, 22 nt, Human
aucacuguguauguauaugcag

SEQ ID NO: 304796 - RNA, 22 nt, Human
ggagaugguggaagcuggugca

SEQ ID NO: 304797 - RNA, 22 nt, Human
aaguugagaugucauaggagac

SEQ ID NO: 304798 - RNA, 22 nt, Human
gagcugucucuauaugaaugcu

SEQ ID NO: 304799 - RNA, 22 nt, Human
uucacagacuuuccauagauug

SEQ ID NO: 304800 - RNA, 22 nt, Human
ugcucugucaagaaaagaugcc

SEQ ID NO: 304801 - RNA, 22 nt, Human
gucugcccucacgccagcuggg

SEQ ID NO: 304802 - RNA, 22 nt, Human
caguccugugucccuugguggg

SEQ ID NO: 304803 - RNA, 22 nt, Human
gaagagcuuagacagaaucaaa

SEQ ID NO: 304804 - RNA, 22 nt, Human
gagcugaacaucauggaaaggc

SEQ ID NO: 304805 - RNA, 22 nt, Human
cuucagaaugggacuguguuug

SEQ ID NO: 304806 - RNA, 21 nt, Human
aggugccaaggagaagcaggc

SEQ ID NO: 304807 - RNA, 21 nt, Human
aggcccagagucuugggggga

SEQ ID NO: 304808 - RNA, 22 nt, Human
cagagugaaauaggggaucaag

SEQ ID NO: 304809 - RNA, 22 nt, Human
uugaacaguuuugucagguuca

SEQ ID NO: 304810 - RNA, 17 nt, Human
cugucugcgcaugaggu

SEQ ID NO: 304811 - RNA, 22 nt, Human
gcucugagaggugcagcaguaa

SEQ ID NO: 304812 - RNA, 22 nt, Human
ccagggugcucuguggcgucgc

SEQ ID NO: 304813 - RNA, 22 nt, Human
cagcaggcagccauuucacugu

SEQ ID NO: 304814 - RNA, 22 nt, Human
auguguaaaaagugcuuaauau

SEQ ID NO: 304815 - RNA, 22 nt, Human
ugaaaugacagucuuaagcucu

SEQ ID NO: 304816 - RNA, 22 nt, Human
agccucucuuucugguggcuaa

SEQ ID NO: 304817 - RNA, 22 nt, Human
aggcccagcugggccaggaaca

SEQ ID NO: 304818 - RNA, 22 nt, Human
cugggaggcccacguugggaag

SEQ ID NO: 304819 - RNA, 22 nt, Human
cauaacuagagugaaauguuga

SEQ ID NO: 304820 - RNA, 22 nt, Human
ccaggcuggagugcaauggugc

SEQ ID NO: 304821 - RNA, 16 nt, Human
uguaugaacgucucca

SEQ ID NO: 304822 - RNA, 22 nt, Human
cagagccagcaguggggacagg

SEQ ID NO: 304823 - RNA, 22 nt, Human
uauuuguauguguguacauaua

SEQ ID NO: 304824 - RNA, 22 nt, Human
ucauacauaacuuguacaguga

SEQ ID NO: 304825 - RNA, 22 nt, Human
ggagcugcacgcucugaagccu

SEQ ID NO: 304826 - RNA, 22 nt, Human
ucuggcucccagccugcucuca

SEQ ID NO: 304827 - RNA, 22 nt, Human
gcacagccacugagugagaacc

SEQ ID NO: 304828 - RNA, 22 nt, Human
cugccuugaggagguuguggga

SEQ ID NO: 304829 - RNA, 22 nt, Human
guuuacaaauauuuuaaauggu

SEQ ID NO: 304830 - RNA, 22 nt, Human
agucuacaaagaaaaguuauug

SEQ ID NO: 304831 - RNA, 22 nt, Human
cuugaaagcuuugcgucuucua

SEQ ID NO: 304832 - RNA, 22 nt, Human
aauucuuguuguuaguauauuu

SEQ ID NO: 304833 - RNA, 22 nt, Human
cuggagccagccagggcccucu

SEQ ID NO: 304834 - RNA, 22 nt, Human
gucuucaauagagccucaauuu

SEQ ID NO: 304835 - RNA, 22 nt, Human
uuauacauguguuuugagauga

SEQ ID NO: 304836 - RNA, 22 nt, Human
uuucauaaugucacagucaaaa

SEQ ID NO: 304837 - RNA, 16 nt, Human
agcagccagcacugga

SEQ ID NO: 304838 - RNA, 22 nt, Human
aggggacacggcuucuccaggg

SEQ ID NO: 304839 - RNA, 22 nt, Human
augcugugucaccuuaggauuu

SEQ ID NO: 304840 - RNA, 22 nt, Human
uuccaggacuggguguuugaag

SEQ ID NO: 304841 - RNA, 22 nt, Human
aaaugcauugguuucuacuugu

SEQ ID NO: 304842 - RNA, 22 nt, Human
acacaggggaaaguggagcuga

SEQ ID NO: 304843 - RNA, 22 nt, Human
caaguaaagaaucacauuucuu

SEQ ID NO: 304844 - RNA, 22 nt, Human
gccaggugggagacagacagca

SEQ ID NO: 304845 - RNA, 22 nt, Human
ugucucugugacuccuuccgcc

SEQ ID NO: 304846 - RNA, 22 nt, Human
gccuaauaacuagcuguguaac

SEQ ID NO: 304847 - RNA, 22 nt, Human
cacaggcugcccgcagcuggga

SEQ ID NO: 304848 - RNA, 19 nt, Human
ugucuuaauuaacucagag

SEQ ID NO: 304849 - RNA, 22 nt, Human
aucuacaggauuuuacagaguu

SEQ ID NO: 304850 - RNA, 22 nt, Human
uggcagagcccagacuccaguc

SEQ ID NO: 304851 - RNA, 22 nt, Human
ccagaagucaggaaugagucuu

SEQ ID NO: 304852 - RNA, 22 nt, Human
agagaagagcaaugauaaauuu

SEQ ID NO: 304853 - RNA, 22 nt, Human
aguggcaggcggagauguagga

SEQ ID NO: 304854 - RNA, 22 nt, Human
gaggccaggagugcuguaaguu

SEQ ID NO: 304855 - RNA, 22 nt, Human
ccacagggugucaucagcuuga

SEQ ID NO: 304856 - RNA, 22 nt, Human
caguagcacucugucagugaag

SEQ ID NO: 304857 - RNA, 22 nt, Human
ucuuuccauggccacacagucu

SEQ ID NO: 304858 - RNA, 22 nt, Human
ucuuagaaauuccccaguggcu

SEQ ID NO: 304859 - RNA, 22 nt, Human
cagggcagggauguugcggcag

SEQ ID NO: 304860 - RNA, 22 nt, Human
ccugggcuggaguacagcagug

SEQ ID NO: 304861 - RNA, 22 nt, Human
ucacaugcccuguauuuaccag

SEQ ID NO: 304862 - RNA, 22 nt, Human
agagcuggaaaaguuguuuuaa

SEQ ID NO: 304863 - RNA, 22 nt, Human
gaugguuuaugauagaugggaa

SEQ ID NO: 304864 - RNA, 18 nt, Human
uggcagggaggaaauaua

SEQ ID NO: 304865 - RNA, 22 nt, Human
gaggccuguagucauggaugua

SEQ ID NO: 304866 - RNA, 22 nt, Human
ucucacuuuccagacuuuucaa

SEQ ID NO: 304867 - RNA, 22 nt, Human
gaauucuuuucuuucugaaagu

SEQ ID NO: 304868 - RNA, 22 nt, Human
cagaccagaaggaagccgacaa

SEQ ID NO: 304869 - RNA, 22 nt, Human
ggcaucccuucuuccaguguca

SEQ ID NO: 304870 - RNA, 22 nt, Human
gagccugaugaaacaggcagac

SEQ ID NO: 304871 - RNA, 22 nt, Human
cacagcuggugcacuagcucug

SEQ ID NO: 304872 - RNA, 22 nt, Human
cuccaggagcugugucuuucuu

SEQ ID NO: 304873 - RNA, 22 nt, Human
gaaaugugggucaugacccauu

SEQ ID NO: 304874 - RNA, 22 nt, Human
ugucccagauacuggacauaga

SEQ ID NO: 304875 - RNA, 22 nt, Human
guucuucaucauuuuagauagg

SEQ ID NO: 304876 - RNA, 22 nt, Human
acugcaucugaaacauggguca

SEQ ID NO: 304877 - RNA, 22 nt, Human
ugcauccuuaaccagcaucacu

SEQ ID NO: 304878 - RNA, 22 nt, Human
aggcugcaggucugggucaugu

SEQ ID NO: 304879 - RNA, 22 nt, Human
cagcucugggugacaggagggc

SEQ ID NO: 304880 - RNA, 22 nt, Human
uaacacugauuuguucucaggg

SEQ ID NO: 304881 - RNA, 19 nt, Human
gcucugugaugcugagggg

SEQ ID NO: 304882 - RNA, 22 nt, Human
ucuccuugcuacccaguauguc

SEQ ID NO: 304883 - RNA, 22 nt, Human
gcaagcugcucuuauguggagg

SEQ ID NO: 304884 - RNA, 22 nt, Human
ggagaguggauuccagcuguau

SEQ ID NO: 304885 - RNA, 22 nt, Human
guuuucaauuauaagauggcuu

SEQ ID NO: 304886 - RNA, 22 nt, Human
ucacaaaagcuuuugaauuugg

SEQ ID NO: 304887 - RNA, 22 nt, Human
cguggccuuugagugagcuccc

SEQ ID NO: 304888 - RNA, 22 nt, Human
uuauccuggauuauauauguga

SEQ ID NO: 304889 - RNA, 22 nt, Human
ugcuucaggagaugucaccaug

SEQ ID NO: 304890 - RNA, 22 nt, Human
gcacugaacuuuaaucauuucu

SEQ ID NO: 304891 - RNA, 22 nt, Human
aucuggcuuaccuagggugccu

SEQ ID NO: 304892 - RNA, 22 nt, Human
cugcuuuguaaaauagacauaa

SEQ ID NO: 304893 - RNA, 21 nt, Human
auaagcaugcugauuacauuu

SEQ ID NO: 304894 - RNA, 22 nt, Human
gucaggaugcuauuguuauuaa

SEQ ID NO: 304895 - RNA, 22 nt, Human
cuuauguaaacuacagauaaua

SEQ ID NO: 304896 - RNA, 22 nt, Human
uguaucaaaccaaauuaauucu

SEQ ID NO: 304897 - RNA, 22 nt, Human
ucuggcuccacuuucuucauuu

SEQ ID NO: 304898 - RNA, 22 nt, Human
uauauuuaaauccagguugaaa

SEQ ID NO: 304899 - RNA, 23 nt, Human
ggauggagccacuuugaaaccac

SEQ ID NO: 304900 - RNA, 22 nt, Human
gcagccagccccucugaccucu

SEQ ID NO: 304901 - RNA, 22 nt, Human
ccacagcuagggcaaucugauu

SEQ ID NO: 304902 - RNA, 22 nt, Human
ccacuugugaaauaaucaaaua

SEQ ID NO: 304903 - RNA, 22 nt, Human
ugcacuuugcaggcauggaaac

SEQ ID NO: 304904 - RNA, 22 nt, Human
cagagagcuuagugugcugcau

SEQ ID NO: 304905 - RNA, 20 nt, Human
ggcagagcuaugucuguugc

SEQ ID NO: 304906 - RNA, 22 nt, Human
cccucugccucugaguaggaca

SEQ ID NO: 304907 - RNA, 20 nt, Human
uucacagaggacucagguca

SEQ ID NO: 304908 - RNA, 22 nt, Human
cagcugccccgcuggcugacca

SEQ ID NO: 304909 - RNA, 21 nt, Human
agagaauugccuuagauguuc

SEQ ID NO: 304910 - RNA, 22 nt, Human
acagccuggacuggcucucugc

SEQ ID NO: 304911 - RNA, 22 nt, Human
cagaaguaagauuacugugagu

SEQ ID NO: 304912 - RNA, 19 nt, Human
uggggcuguguuuugaccc

SEQ ID NO: 304913 - RNA, 22 nt, Human
gaugagaauguuuaucaaaugc

SEQ ID NO: 304914 - RNA, 22 nt, Human
aacuaaaacugguuuguucucu

SEQ ID NO: 304915 - RNA, 22 nt, Human
cugugcccuggccaggccucuc

SEQ ID NO: 304916 - RNA, 22 nt, Human
guucauuuaugauguaacaugu

SEQ ID NO: 304917 - RNA, 22 nt, Human
ugcguugcgcuccugcagcagg

SEQ ID NO: 304918 - RNA, 22 nt, Human
ucucagcugacugcuuuccucg

SEQ ID NO: 304919 - RNA, 22 nt, Human
uagcagugccaggauuuugcug

SEQ ID NO: 304920 - RNA, 22 nt, Human
aaaugucuguuagucauaucau

SEQ ID NO: 304921 - RNA, 22 nt, Human
uaauguguugaauauuuguaca

SEQ ID NO: 304922 - RNA, 22 nt, Human
aaugacaagacauagucucuga

SEQ ID NO: 304923 - RNA, 22 nt, Human
gccucaguguccuccuccaugu

SEQ ID NO: 304924 - RNA, 22 nt, Human
acagaugagguguuuggagagc

SEQ ID NO: 304925 - RNA, 22 nt, Human
gcucccagggaccgcagggcag

SEQ ID NO: 304926 - RNA, 22 nt, Human
cagagguaccagcagccucugg

SEQ ID NO: 304927 - RNA, 22 nt, Human
cugccagcucgccacaaugaca

SEQ ID NO: 304928 - RNA, 22 nt, Human
cuuccucaugugcaaugcaagc

SEQ ID NO: 304929 - RNA, 22 nt, Human
ugcaggagcaccagcucacccu

SEQ ID NO: 304930 - RNA, 20 nt, Human
ucccugccuuuuacugcugg

SEQ ID NO: 304931 - RNA, 17 nt, Human
aaggccauuuccaccca

SEQ ID NO: 304932 - RNA, 22 nt, Human
gggcagcucuggcugugggaag

SEQ ID NO: 304933 - RNA, 22 nt, Human
aaggcacuugcccagagcugca

SEQ ID NO: 304934 - RNA, 21 nt, Human
uccacaaguuagaaggaaauu

SEQ ID NO: 304935 - RNA, 22 nt, Human
gcauuuagcuuuaaaauauuuc

SEQ ID NO: 304936 - RNA, 22 nt, Human
aaugcauauguaggcaagcagu

SEQ ID NO: 304937 - RNA, 22 nt, Human
acuucuucuucagcugggggau

SEQ ID NO: 304938 - RNA, 22 nt, Human
cuggccuggagccucugggugg

SEQ ID NO: 304939 - RNA, 22 nt, Human
ggcucuggcaaggggaggcuac

SEQ ID NO: 304940 - RNA, 22 nt, Human
agaaauguauagugaauuuuuc

SEQ ID NO: 304941 - RNA, 22 nt, Human
caguacuuuucuggcuuucuac

SEQ ID NO: 304942 - RNA, 22 nt, Human
guuacacaggaaaacauuagca

SEQ ID NO: 304943 - RNA, 22 nt, Human
auacaaguugugauaauguaaa

SEQ ID NO: 304944 - RNA, 20 nt, Human
caucaucacaugagccaauu

SEQ ID NO: 304945 - RNA, 19 nt, Human
uucuccagccugaccugag

SEQ ID NO: 304946 - RNA, 22 nt, Human
uuuauguacauauccacaagga

SEQ ID NO: 304947 - RNA, 22 nt, Human
gcagccuguuguaccagccugu

SEQ ID NO: 304948 - RNA, 22 nt, Human
ccucacagggccaggccccuca

SEQ ID NO: 304949 - RNA, 22 nt, Human
cuggagcugcuguccuugggug

SEQ ID NO: 304950 - RNA, 22 nt, Human
ugucccaggcugaaguacagug

SEQ ID NO: 304951 - RNA, 22 nt, Human
acagccagggcauugucgccga

SEQ ID NO: 304952 - RNA, 22 nt, Human
ggaagagagggcugggccucaa

SEQ ID NO: 304953 - RNA, 22 nt, Human
gcugcugugccuggcguccugu

SEQ ID NO: 304954 - RNA, 22 nt, Human
cugcugugugcuuacuuggguu

SEQ ID NO: 304955 - RNA, 22 nt, Human
acagaauuaaaguguuugugga

SEQ ID NO: 304956 - RNA, 22 nt, Human
ccuuuuucccuggagggacagc

SEQ ID NO: 304957 - RNA, 22 nt, Human
ugucucugaacagcuuacuaaa

SEQ ID NO: 304958 - RNA, 22 nt, Human
acuggcagcuguaggaugcaug

SEQ ID NO: 304959 - RNA, 22 nt, Human
gcaagcaguuguggcuucugag

SEQ ID NO: 304960 - RNA, 22 nt, Human
agagugaaaagcuagagcagua

SEQ ID NO: 304961 - RNA, 22 nt, Human
augugcaugcacuuacaugugu

SEQ ID NO: 304962 - RNA, 22 nt, Human
gaugagcauuguuucauguguu

SEQ ID NO: 304963 - RNA, 22 nt, Human
ccaucagcuccaguaucuucug

SEQ ID NO: 304964 - RNA, 23 nt, Human
aggaagaggcaauuucucuuaga

SEQ ID NO: 304965 - RNA, 21 nt, Human
ggagcugcaggagccgaaggc

SEQ ID NO: 304966 - RNA, 22 nt, Human
ggccuggcauggggacuaaggg

SEQ ID NO: 304967 - RNA, 22 nt, Human
gggcugcacguauucugcucac

SEQ ID NO: 304968 - RNA, 22 nt, Human
ucccagauuguugauggcuuaa

SEQ ID NO: 304969 - RNA, 22 nt, Human
gucaaaaaguagucauuucugu

SEQ ID NO: 304970 - RNA, 22 nt, Human
aaauuuucagagcacuagagaa

SEQ ID NO: 304971 - RNA, 22 nt, Human
cagugcuguuguaagcucauug

SEQ ID NO: 304972 - RNA, 22 nt, Human
auucugucuuuuuauacaucua

SEQ ID NO: 304973 - RNA, 21 nt, Human
cagugcucaaucugacagugg

SEQ ID NO: 304974 - RNA, 22 nt, Human
gauuuagagaauguuuuguaag

SEQ ID NO: 304975 - RNA, 22 nt, Human
gagagcaggcucucgggggcca

SEQ ID NO: 304976 - RNA, 22 nt, Human
ucuccuccuuuuuucaacauag

SEQ ID NO: 304977 - RNA, 22 nt, Human
agcugguaugaacaggauagga

SEQ ID NO: 304978 - RNA, 22 nt, Human
acauuucucagggaguuuugcu

SEQ ID NO: 304979 - RNA, 22 nt, Human
gcagggacagggcagggccuuu

SEQ ID NO: 304980 - RNA, 22 nt, Human
uugcauugaaaauauauuuuaa

SEQ ID NO: 304981 - RNA, 22 nt, Human
cacagggcagugauuguccaca

SEQ ID NO: 304982 - RNA, 22 nt, Human
gggcucugggaugcucuuagag

SEQ ID NO: 304983 - RNA, 22 nt, Human
auacagugaauacuuacagugu

SEQ ID NO: 304984 - RNA, 22 nt, Human
cccaguccagaccaugaccuca

SEQ ID NO: 304985 - RNA, 22 nt, Human
uugggcaaaguguuucuggagc

SEQ ID NO: 304986 - RNA, 22 nt, Human
uuugggaaacuuaggggucaga

SEQ ID NO: 304987 - RNA, 22 nt, Human
acauuucuuccuaauuaucccu

SEQ ID NO: 304988 - RNA, 22 nt, Human
ugggcagauguggcucuccuug

SEQ ID NO: 304989 - RNA, 22 nt, Human
ucccagcagucagagcuaugug

SEQ ID NO: 304990 - RNA, 22 nt, Human
agcaccaucagaugcaauaucu

SEQ ID NO: 304991 - RNA, 22 nt, Human
cgcaccacugaauuccagccug

SEQ ID NO: 304992 - RNA, 22 nt, Human
cacauuucucuaccucacacaa

SEQ ID NO: 304993 - RNA, 22 nt, Human
aaguaugacauuuaagacaauu

SEQ ID NO: 304994 - RNA, 22 nt, Human
agagcccucucauuggcuuauu

SEQ ID NO: 304995 - RNA, 22 nt, Human
cugcaucaguggauaugauggu

SEQ ID NO: 304996 - RNA, 22 nt, Human
uagacauuuggcaugguuuuca

SEQ ID NO: 304997 - RNA, 22 nt, Human
uggcccuguguccugcugccag

SEQ ID NO: 304998 - RNA, 22 nt, Human
gacagaggcaagaccagaagcc

SEQ ID NO: 304999 - RNA, 22 nt, Human
ugugugucagagucuccauggu

SEQ ID NO: 305000 - RNA, 17 nt, Human
ucaggauccaggguucu

SEQ ID NO: 305001 - RNA, 21 nt, Human
uggcucugaaagagugcugca

SEQ ID NO: 305002 - RNA, 22 nt, Human
acauuaucccuggcacaacugc

SEQ ID NO: 305003 - RNA, 22 nt, Human
acacacaacucauuguguaaua

SEQ ID NO: 305004 - RNA, 22 nt, Human
ucagagaguuggaaagaauuaa

SEQ ID NO: 305005 - RNA, 22 nt, Human
gucagcugucuccccagagugg

SEQ ID NO: 305006 - RNA, 22 nt, Human
gaggccugcuuuggcacucugg

SEQ ID NO: 305007 - RNA, 22 nt, Human
uuuuaauacugcuauuguagga

SEQ ID NO: 305008 - RNA, 22 nt, Human
ccagcaugagacgaugaugaag

SEQ ID NO: 305009 - RNA, 17 nt, Human
gcagugaaaagagauca

SEQ ID NO: 305010 - RNA, 22 nt, Human
acuguucacuagugaggguuga

SEQ ID NO: 305011 - RNA, 22 nt, Human
uucugucagcgucagaaauucu

SEQ ID NO: 305012 - RNA, 17 nt, Human
uggacccuugggccucc

SEQ ID NO: 305013 - RNA, 22 nt, Human
agaggccagggacacugcucaa

SEQ ID NO: 305014 - RNA, 22 nt, Human
ucauccuuuugcaugggaaggc

SEQ ID NO: 305015 - RNA, 22 nt, Human
auguucuguuuuguaauucaua

SEQ ID NO: 305016 - RNA, 22 nt, Human
ucauuucucccggccaaaaacu

SEQ ID NO: 305017 - RNA, 22 nt, Human
cccaggcagucuggcucuaaag

SEQ ID NO: 305018 - RNA, 21 nt, Human
ccuucucuugcuucagcuuca

SEQ ID NO: 305019 - RNA, 22 nt, Human
uuugagauggagucuugcucug

SEQ ID NO: 305020 - RNA, 22 nt, Human
aauuuccagaccccauccacag

SEQ ID NO: 305021 - RNA, 22 nt, Human
aggccagaugucgggcuagaag

SEQ ID NO: 305022 - RNA, 22 nt, Human
ggcugccugcuccuccugcacg

SEQ ID NO: 305023 - RNA, 20 nt, Human
cuuccacacaagaagcacag

SEQ ID NO: 305024 - RNA, 23 nt, Human
uggccugcagaguuucugcuggg

SEQ ID NO: 305025 - RNA, 22 nt, Human
ugcugcucucagccaccaggaa

SEQ ID NO: 305026 - RNA, 22 nt, Human
ccucuuugugccugcaggcugc

SEQ ID NO: 305027 - RNA, 22 nt, Human
ggaggccaggaaggcucggaga

SEQ ID NO: 305028 - RNA, 22 nt, Human
cucugaagggagggccaagccc

SEQ ID NO: 305029 - RNA, 22 nt, Human
caggaggccaacugugggacuu

SEQ ID NO: 305030 - RNA, 20 nt, Human
cuguggaauuuuaccaugcg

SEQ ID NO: 305031 - RNA, 22 nt, Human
uagugcuugagucucuccguac

SEQ ID NO: 305032 - RNA, 22 nt, Human
auacaucucauguaagagauaa

SEQ ID NO: 305033 - RNA, 22 nt, Human
cacaguguuccagagcaguggu

SEQ ID NO: 305034 - RNA, 22 nt, Human
auccugggcagugugucacucu

SEQ ID NO: 305035 - RNA, 22 nt, Human
aaguaacaaugcuguugaauug

SEQ ID NO: 305036 - RNA, 22 nt, Human
ugggcugcuguuacaggggcug

SEQ ID NO: 305037 - RNA, 22 nt, Human
auucuucaccugagucagucua

SEQ ID NO: 305038 - RNA, 22 nt, Human
gucccagaaacauauugcuggu

SEQ ID NO: 305039 - RNA, 22 nt, Human
aucaaaguccaucagaagguag

SEQ ID NO: 305040 - RNA, 21 nt, Human
aguccaggaggaggccagguu

SEQ ID NO: 305041 - RNA, 22 nt, Human
ccuguucaccauggucacgugc

SEQ ID NO: 305042 - RNA, 23 nt, Human
uuuuaauuuggacauaagaagau

SEQ ID NO: 305043 - RNA, 22 nt, Human
ccucucccgggugccgcugggc

SEQ ID NO: 305044 - RNA, 22 nt, Human
gggacagacccaugggccaggu

SEQ ID NO: 305045 - RNA, 22 nt, Human
gagagcugcauucucagacaca

SEQ ID NO: 305046 - RNA, 22 nt, Human
ucacaggaaccaucagagaaau

SEQ ID NO: 305047 - RNA, 22 nt, Human
uucaagguaugguagcugguca

SEQ ID NO: 305048 - RNA, 22 nt, Human
aauuuuaaucaguggugcugag

SEQ ID NO: 305049 - RNA, 22 nt, Human
gggaaauugucaacacucucaa

SEQ ID NO: 305050 - RNA, 22 nt, Human
cauuauguucaguagcuuaaaa

SEQ ID NO: 305051 - RNA, 22 nt, Human
caaaugcaugagaaauaagagg

SEQ ID NO: 305052 - RNA, 22 nt, Human
gccccagcucugccacaacuag

SEQ ID NO: 305053 - RNA, 22 nt, Human
cuuugaagagauuacugugcuc

SEQ ID NO: 305054 - RNA, 22 nt, Human
ucagggacuuacaaaccagaag

SEQ ID NO: 305055 - RNA, 22 nt, Human
agcaggagagcagugcgugguc

SEQ ID NO: 305056 - RNA, 22 nt, Human
cugaagcacagcauauaaauaa

SEQ ID NO: 305057 - RNA, 22 nt, Human
caagagcuacccugugccauau

SEQ ID NO: 305058 - RNA, 22 nt, Human
cagguggguguaugaaugcaaa

SEQ ID NO: 305059 - RNA, 22 nt, Human
gaggccuggucuaugagauguu

SEQ ID NO: 305060 - RNA, 22 nt, Human
ugcaguggaaucuggagagcag

SEQ ID NO: 305061 - RNA, 22 nt, Human
gaaggcuggcuuucugagagca

SEQ ID NO: 305062 - RNA, 22 nt, Human
caggccagguggcaggcaaaac

SEQ ID NO: 305063 - RNA, 17 nt, Human
ucagagggaugagcagg

SEQ ID NO: 305064 - RNA, 22 nt, Human
cagaauuugaaguaauauucca

SEQ ID NO: 305065 - RNA, 22 nt, Human
uaaagguaguuuuaaaggugcu

SEQ ID NO: 305066 - RNA, 22 nt, Human
aauaauguugacgauagucuua

SEQ ID NO: 305067 - RNA, 22 nt, Human
aaaaugugaucuacaaaugcaa

SEQ ID NO: 305068 - RNA, 22 nt, Human
ccagcucugcauguuucccuug

SEQ ID NO: 305069 - RNA, 22 nt, Human
cuaugaaaggauuuggaguugu

SEQ ID NO: 305070 - RNA, 22 nt, Human
cauuuguagcuauuuacuguau

SEQ ID NO: 305071 - RNA, 22 nt, Human
gcccagcugucuggcagggaug

SEQ ID NO: 305072 - RNA, 22 nt, Human
auuuggaaacaauuauauucuu

SEQ ID NO: 305073 - RNA, 22 nt, Human
uggguagagcaggcuggggcuu

SEQ ID NO: 305074 - RNA, 22 nt, Human
agcucucugauaaauugauaaa

SEQ ID NO: 305075 - RNA, 22 nt, Human
uucauuccugagcccauauuua

SEQ ID NO: 305076 - RNA, 22 nt, Human
uuugacauuggcuuauucuguu

SEQ ID NO: 305077 - RNA, 22 nt, Human
uggcucugggcaccguguccac

SEQ ID NO: 305078 - RNA, 22 nt, Human
cagcauuggguuaccuuuguuu

SEQ ID NO: 305079 - RNA, 17 nt, Human
aggccucccuccaggcc

SEQ ID NO: 305080 - RNA, 22 nt, Human
uuagcugcauuaucaaaguuau

SEQ ID NO: 305081 - RNA, 22 nt, Human
gccagggaggcuguaggguccu

SEQ ID NO: 305082 - RNA, 22 nt, Human
agggcccauagaucgucagcuu

SEQ ID NO: 305083 - RNA, 22 nt, Human
aaguucaauggaaaagcuuuag

SEQ ID NO: 305084 - RNA, 22 nt, Human
cuucucucugcauaggcauggg

SEQ ID NO: 305085 - RNA, 17 nt, Human
ugguggcuggagucagg

SEQ ID NO: 305086 - RNA, 22 nt, Human
gcugaagagagaugcguccagc

SEQ ID NO: 305087 - RNA, 23 nt, Human
uccuucagagccucccuccaagc

SEQ ID NO: 305088 - RNA, 22 nt, Human
aagaacaguguccugggacucg

SEQ ID NO: 305089 - RNA, 22 nt, Human
ccaaaguccauaguuuacauaa

SEQ ID NO: 305090 - RNA, 22 nt, Human
gagggcagaaaauuaugcggug

SEQ ID NO: 305091 - RNA, 22 nt, Human
cagcuggcauaccugggcccgg

SEQ ID NO: 305092 - RNA, 22 nt, Human
ugcugaugaguccuucuaucgc

SEQ ID NO: 305093 - RNA, 22 nt, Human
gggagggaaagcuugaucuguc

SEQ ID NO: 305094 - RNA, 22 nt, Human
ccuggcucucugcagauccugg

SEQ ID NO: 305095 - RNA, 23 nt, Human
agcagccauagggaagcaauaca

SEQ ID NO: 305096 - RNA, 22 nt, Human
cauuuguacagaacagcuuuau

SEQ ID NO: 305097 - RNA, 22 nt, Human
gcagagguggcaucugggcucu

SEQ ID NO: 305098 - RNA, 22 nt, Human
uggcuggcuuguucacugacug

SEQ ID NO: 305099 - RNA, 23 nt, Human
cuuuuaacuagaguaucagcugc

SEQ ID NO: 305100 - RNA, 19 nt, Human
cagcucaguuugauucucu

SEQ ID NO: 305101 - RNA, 22 nt, Human
ggaggcccagagaggugaagug

SEQ ID NO: 305102 - RNA, 22 nt, Human
aguaugaaucucuuuauucugc

SEQ ID NO: 305103 - RNA, 20 nt, Human
cagcuuggaugagaggcuga

SEQ ID NO: 305104 - RNA, 22 nt, Human
cacugcuuauaaauucuaggca

SEQ ID NO: 305105 - RNA, 22 nt, Human
aguuuuguaauucucaaaaaua

SEQ ID NO: 305106 - RNA, 22 nt, Human
gagccagccgcaagagcuguga

SEQ ID NO: 305107 - RNA, 23 nt, Human
cuuuuaacuugaucugagaccag

SEQ ID NO: 305108 - RNA, 19 nt, Human
ccucugcgcuguccugcuc

SEQ ID NO: 305109 - RNA, 22 nt, Human
aaggugucacugggacaggaaa

SEQ ID NO: 305110 - RNA, 22 nt, Human
uguacauacauagauauacaca

SEQ ID NO: 305111 - RNA, 22 nt, Human
ucuggcucaucucuccagguaa

SEQ ID NO: 305112 - RNA, 19 nt, Human
auaaggcaggaggaaauuu

SEQ ID NO: 305113 - RNA, 22 nt, Human
cagccuccugggacacucaccg

SEQ ID NO: 305114 - RNA, 22 nt, Human
caggagacuauggcccaaggcc

SEQ ID NO: 305115 - RNA, 22 nt, Human
ugggcuggugagggaucauuua

SEQ ID NO: 305116 - RNA, 22 nt, Human
cuggagccgcauggagcaggga

SEQ ID NO: 305117 - RNA, 22 nt, Human
gcaguguuucaaaucaaaggca

SEQ ID NO: 305118 - RNA, 22 nt, Human
cuggccuggcagggagggcaug

SEQ ID NO: 305119 - RNA, 22 nt, Human
uggccaggggaguuccccucca

SEQ ID NO: 305120 - RNA, 22 nt, Human
aauuucaauuacuuuugcacca

SEQ ID NO: 305121 - RNA, 22 nt, Human
gcccuugggagguuccacuggg

SEQ ID NO: 305122 - RNA, 22 nt, Human
gcaggaaagguugagacuuugc

SEQ ID NO: 305123 - RNA, 22 nt, Human
gcaggagcccuggcauguucuu

SEQ ID NO: 305124 - RNA, 22 nt, Human
gggagggaggugaugcuuggcu

SEQ ID NO: 305125 - RNA, 22 nt, Human
cacauugaaaugacccaauaau

SEQ ID NO: 305126 - RNA, 22 nt, Human
auuucccagcuuugaucaguuu

SEQ ID NO: 305127 - RNA, 22 nt, Human
ugauuuuuagcuauucugaaga

SEQ ID NO: 305128 - RNA, 22 nt, Human
ggcagcaguggcugcuauuguc

SEQ ID NO: 305129 - RNA, 22 nt, Human
uucacaggaauguaggggucuu

SEQ ID NO: 305130 - RNA, 22 nt, Human
ucagagcccugcuccuccccaa

SEQ ID NO: 305131 - RNA, 22 nt, Human
uccuuccuggggucucugcugc

SEQ ID NO: 305132 - RNA, 21 nt, Human
accucaagcaacaaccaaggu

SEQ ID NO: 305133 - RNA, 22 nt, Human
gccucugcgccucagccgaccu

SEQ ID NO: 305134 - RNA, 22 nt, Human
uacuuuuuagcacagugugugc

SEQ ID NO: 305135 - RNA, 22 nt, Human
agaaaugaagagagucaagguu

SEQ ID NO: 305136 - RNA, 22 nt, Human
gcagaagggaauaaggagcuuu

SEQ ID NO: 305137 - RNA, 22 nt, Human
gcugagguggagauugcaguga

SEQ ID NO: 305138 - RNA, 22 nt, Human
uucaagauccagcacaacagug

SEQ ID NO: 305139 - RNA, 22 nt, Human
aaguuucaaauguugauuaugc

SEQ ID NO: 305140 - RNA, 22 nt, Human
auggggcuguucucugcccugc

SEQ ID NO: 305141 - RNA, 23 nt, Human
agcagccagagauccucggcccu

SEQ ID NO: 305142 - RNA, 21 nt, Human
uuacuuuugcagcaaccuaau

SEQ ID NO: 305143 - RNA, 22 nt, Human
uuucugaacaaagccauuauca

SEQ ID NO: 305144 - RNA, 19 nt, Human
auacacauacguaaacuga

SEQ ID NO: 305145 - RNA, 22 nt, Human
agggcacaagacucugagcccc

SEQ ID NO: 305146 - RNA, 22 nt, Human
uguaggacauguacuuguaaca

SEQ ID NO: 305147 - RNA, 22 nt, Human
cucaaauauaagcuaaaugugg

SEQ ID NO: 305148 - RNA, 22 nt, Human
aacuuucaggcaaugaauauuu

SEQ ID NO: 305149 - RNA, 21 nt, Human
cagugcugccuaauagggagu

SEQ ID NO: 305150 - RNA, 22 nt, Human
gaggggcaaugagggaaagagu

SEQ ID NO: 305151 - RNA, 22 nt, Human
cuuuccaaugucacuaugaauc

SEQ ID NO: 305152 - RNA, 22 nt, Human
uggcugccuagugucugagcag

SEQ ID NO: 305153 - RNA, 22 nt, Human
ggcugcuggaagacugaacaag

SEQ ID NO: 305154 - RNA, 22 nt, Human
caguacuugggaaugcugggga

SEQ ID NO: 305155 - RNA, 22 nt, Human
uggcucuguuuuaugaguacca

SEQ ID NO: 305156 - RNA, 22 nt, Human
ggcucugccugcccagcagcac

SEQ ID NO: 305157 - RNA, 22 nt, Human
ucagagaggcaauacuguuuaa

SEQ ID NO: 305158 - RNA, 18 nt, Human
gaugggagcaagagaaga

SEQ ID NO: 305159 - RNA, 22 nt, Human
aucugccugcaguggagguggg

SEQ ID NO: 305160 - RNA, 22 nt, Human
gccagcucagugccaggccccu

SEQ ID NO: 305161 - RNA, 22 nt, Human
guaggcagauaggagugcagcc

SEQ ID NO: 305162 - RNA, 22 nt, Human
uuucuuguaagauguuuauuaa

SEQ ID NO: 305163 - RNA, 22 nt, Human
guguccacggcugagaaugauu

SEQ ID NO: 305164 - RNA, 22 nt, Human
aagcaccucuaugauugcuuuu

SEQ ID NO: 305165 - RNA, 23 nt, Human
aguguuccaguugguugagagug

SEQ ID NO: 305166 - RNA, 22 nt, Human
cagggcugcuggccgugcccuc

SEQ ID NO: 305167 - RNA, 22 nt, Human
cucagugcuucuagcuugauga

SEQ ID NO: 305168 - RNA, 22 nt, Human
uuuuccuaguaggccuauuaga

SEQ ID NO: 305169 - RNA, 17 nt, Human
aggugcuggagcaucag

SEQ ID NO: 305170 - RNA, 20 nt, Human
ugcagcugguuucacaggga

SEQ ID NO: 305171 - RNA, 22 nt, Human
caugugguucaaguacuccaca

SEQ ID NO: 305172 - RNA, 22 nt, Human
agcuucucaggagucugaggca

SEQ ID NO: 305173 - RNA, 22 nt, Human
aaagcucuuuuccaaguauuga

SEQ ID NO: 305174 - RNA, 22 nt, Human
acucccagguugccuggcaggc

SEQ ID NO: 305175 - RNA, 22 nt, Human
ggagcagccgcgucucagggca

SEQ ID NO: 305176 - RNA, 22 nt, Human
uccaugagcuagggauucauca

SEQ ID NO: 305177 - RNA, 22 nt, Human
ggagccugacagugcccagcau

SEQ ID NO: 305178 - RNA, 22 nt, Human
ugcuggguagaaguauuagucu

SEQ ID NO: 305179 - RNA, 17 nt, Human
agguggguggaucaccu

SEQ ID NO: 305180 - RNA, 22 nt, Human
caguauguuugggagacaugac

SEQ ID NO: 305181 - RNA, 22 nt, Human
agugggcaugaucuggugucug

SEQ ID NO: 305182 - RNA, 22 nt, Human
gaaggccuagggaugcucugcg

SEQ ID NO: 305183 - RNA, 22 nt, Human
cucccugguguccccuccagga

SEQ ID NO: 305184 - RNA, 23 nt, Human
auaugucaugcaccagcacuuua

SEQ ID NO: 305185 - RNA, 22 nt, Human
aggagaaagacuggacagccaa

SEQ ID NO: 305186 - RNA, 22 nt, Human
acuuccuuuugggaaacuguuu

SEQ ID NO: 305187 - RNA, 22 nt, Human
auaaaugauucagcaggaaaua

SEQ ID NO: 305188 - RNA, 22 nt, Human
uaacacauauuucaagaguagu

SEQ ID NO: 305189 - RNA, 22 nt, Human
agggaagaaaauccaucgcugc

SEQ ID NO: 305190 - RNA, 22 nt, Human
aggaggccccuccuggguugcu

SEQ ID NO: 305191 - RNA, 20 nt, Human
gauuucaaagcagaguggcc

SEQ ID NO: 305192 - RNA, 22 nt, Human
gcucagagaaucagcagacacc

SEQ ID NO: 305193 - RNA, 22 nt, Human
uauuucugucagccagauaugg

SEQ ID NO: 305194 - RNA, 22 nt, Human
agauuccagaucccaaaaauga

SEQ ID NO: 305195 - RNA, 22 nt, Human
agggcugccugcucugcauuga

SEQ ID NO: 305196 - RNA, 22 nt, Human
cccuggcagaaugucucugggc

SEQ ID NO: 305197 - RNA, 22 nt, Human
uucaugugaauauauuugucuu

SEQ ID NO: 305198 - RNA, 22 nt, Human
gcucuggagauggagccuugag

SEQ ID NO: 305199 - RNA, 22 nt, Human
uuuuucuugugcuggaucuaau

SEQ ID NO: 305200 - RNA, 22 nt, Human
ccucacugaagaggugacauuu

SEQ ID NO: 305201 - RNA, 22 nt, Human
agagccugaggccaggaaaaug

SEQ ID NO: 305202 - RNA, 22 nt, Human
ugcugcuguauccuuaguguca

SEQ ID NO: 305203 - RNA, 22 nt, Human
cccuggcauaaaacuucuccag

SEQ ID NO: 305204 - RNA, 22 nt, Human
ggcugccugaggcugaggcccg

SEQ ID NO: 305205 - RNA, 22 nt, Human
ggcucacgcaauuaucccggcc

SEQ ID NO: 305206 - RNA, 22 nt, Human
ugacccugcuucuuggugcagg

SEQ ID NO: 305207 - RNA, 22 nt, Human
aucaguuuggugcuuucaguga

SEQ ID NO: 305208 - RNA, 22 nt, Human
aggcaugugacccuggacucag

SEQ ID NO: 305209 - RNA, 21 nt, Human
ugggagagggcucagcuaccc

SEQ ID NO: 305210 - RNA, 22 nt, Human
uacauugcuuucuaauacaucu

SEQ ID NO: 305211 - RNA, 22 nt, Human
gcuggccauucucuuugagaug

SEQ ID NO: 305212 - RNA, 22 nt, Human
aaaugccucugcuguacacaau

SEQ ID NO: 305213 - RNA, 22 nt, Human
gcugccuuccaaagaguuuuau

SEQ ID NO: 305214 - RNA, 21 nt, Human
ggugacacguggccccgcucu

SEQ ID NO: 305215 - RNA, 22 nt, Human
gagacagcagggccagggccug

SEQ ID NO: 305216 - RNA, 22 nt, Human
uuagaaaucaccucugaagauc

SEQ ID NO: 305217 - RNA, 22 nt, Human
guggccaggccgacugccaggc

SEQ ID NO: 305218 - RNA, 22 nt, Human
uccauuuuucaugacuccucaa

SEQ ID NO: 305219 - RNA, 22 nt, Human
ucagagccaaucauggugcauu

SEQ ID NO: 305220 - RNA, 22 nt, Human
aacaugauggggaagaacaaga

SEQ ID NO: 305221 - RNA, 22 nt, Human
acaaugcaccagcaucuucacc

SEQ ID NO: 305222 - RNA, 22 nt, Human
cuuugcaauagaggcacacaug

SEQ ID NO: 305223 - RNA, 19 nt, Human
ccaggccucuggggccugu

SEQ ID NO: 305224 - RNA, 22 nt, Human
ggcucuggucagugaggggccu

SEQ ID NO: 305225 - RNA, 22 nt, Human
acacauuucuaaauuuuuaccg

SEQ ID NO: 305226 - RNA, 22 nt, Human
cagagugagggccugcaccugc

SEQ ID NO: 305227 - RNA, 22 nt, Human
aagagaaggcccugacccaccc

SEQ ID NO: 305228 - RNA, 22 nt, Human
gcagaggcaaucagguaugugg

SEQ ID NO: 305229 - RNA, 23 nt, Human
aaacugcuuccaauuccugccau

SEQ ID NO: 305230 - RNA, 22 nt, Human
auuuccaguccuaaugaucugg

SEQ ID NO: 305231 - RNA, 22 nt, Human
uggaaggcaugggaacuguucu

SEQ ID NO: 305232 - RNA, 22 nt, Human
ugcucuucggggccacugcuug

SEQ ID NO: 305233 - RNA, 22 nt, Human
uggccuggcccugaggcccugu

SEQ ID NO: 305234 - RNA, 22 nt, Human
gucaggauguuuauucuccagu

SEQ ID NO: 305235 - RNA, 22 nt, Human
ugauuuccugugcgcccuuagg

SEQ ID NO: 305236 - RNA, 22 nt, Human
aggccagcaagaaagagagucu

SEQ ID NO: 305237 - RNA, 22 nt, Human
ugcugccuuugggaccuggccu

SEQ ID NO: 305238 - RNA, 22 nt, Human
ggcacugaaguggguguugggu

SEQ ID NO: 305239 - RNA, 22 nt, Human
uagacauuggccauuccugugg

SEQ ID NO: 305240 - RNA, 22 nt, Human
cccagcucucgcacuuacuagc

SEQ ID NO: 305241 - RNA, 22 nt, Human
uuccucuguaugcuuugcugcu

SEQ ID NO: 305242 - RNA, 22 nt, Human
cauaauuucccaagagauugaa

SEQ ID NO: 305243 - RNA, 22 nt, Human
acugaaggaagcgggcaggggu

SEQ ID NO: 305244 - RNA, 22 nt, Human
ucagucucuggggcuucuguuu

SEQ ID NO: 305245 - RNA, 22 nt, Human
acauuucuccuacuuguuauuu

SEQ ID NO: 305246 - RNA, 22 nt, Human
uuuugaauaauucagaaacagc

SEQ ID NO: 305247 - RNA, 22 nt, Human
ugcucagggacaauggagaggg

SEQ ID NO: 305248 - RNA, 22 nt, Human
uguucuuucaguuagacacagu

SEQ ID NO: 305249 - RNA, 22 nt, Human
gagggaagaaagaauugaugcg

SEQ ID NO: 305250 - RNA, 22 nt, Human
ccagggcaggggcuggaguuca

SEQ ID NO: 305251 - RNA, 22 nt, Human
cuuccagguccuucuugagaag

SEQ ID NO: 305252 - RNA, 22 nt, Human
gggagggaggugcugguucacg

SEQ ID NO: 305253 - RNA, 22 nt, Human
cuuccugguuugaagcucgccg

SEQ ID NO: 305254 - RNA, 22 nt, Human
ccugucugcaugagugagcaua

SEQ ID NO: 305255 - RNA, 20 nt, Human
ccuggcugcauucaggacgg

SEQ ID NO: 305256 - RNA, 22 nt, Human
guagcccaccuggggagggcga

SEQ ID NO: 305257 - RNA, 22 nt, Human
agagugagggggcacugagacg

SEQ ID NO: 305258 - RNA, 22 nt, Human
ccagggcagggaccacgugucu

SEQ ID NO: 305259 - RNA, 22 nt, Human
uucucuuugacauuauucaggu

SEQ ID NO: 305260 - RNA, 22 nt, Human
cagggcaguaacgggaacaucu

SEQ ID NO: 305261 - RNA, 22 nt, Human
cccaaggcugcagugagcauga

SEQ ID NO: 305262 - RNA, 22 nt, Human
uggcucugucaaacugcacaca

SEQ ID NO: 305263 - RNA, 22 nt, Human
gcugucugucuucacaucucgc

SEQ ID NO: 305264 - RNA, 22 nt, Human
gaacccaggcuuuugaggcugu

SEQ ID NO: 305265 - RNA, 20 nt, Human
gugcagccaagcugagccgc

SEQ ID NO: 305266 - RNA, 22 nt, Human
caaaugcagucccuuuguugcu

SEQ ID NO: 305267 - RNA, 22 nt, Human
cacagggcuuugauggcugagu

SEQ ID NO: 305268 - RNA, 22 nt, Human
gcaggcaguugcaguuuucuag

SEQ ID NO: 305269 - RNA, 22 nt, Human
aaaucacuaaguuauagugugg

SEQ ID NO: 305270 - RNA, 20 nt, Human
uuccuguauacaaagaguuc

SEQ ID NO: 305271 - RNA, 21 nt, Human
ggccuuggcgggggccgaauu

SEQ ID NO: 305272 - RNA, 22 nt, Human
uuuuccuguccaggcaauuauu

SEQ ID NO: 305273 - RNA, 22 nt, Human
auuuugaaaagcauuugaguaa

SEQ ID NO: 305274 - RNA, 22 nt, Human
aucuggcucccuuggaauccgu

SEQ ID NO: 305275 - RNA, 22 nt, Human
ucaauucugguccucaggaacu

SEQ ID NO: 305276 - RNA, 22 nt, Human
agggccagcccauaaugccaaa

SEQ ID NO: 305277 - RNA, 18 nt, Human
uggugaaggguggaggag

SEQ ID NO: 305278 - RNA, 22 nt, Human
agagaugucgccuugcccaggg

SEQ ID NO: 305279 - RNA, 21 nt, Human
agcugcuccagggagcucagg

SEQ ID NO: 305280 - RNA, 22 nt, Human
cacccugggcugggccuguuaa

SEQ ID NO: 305281 - RNA, 22 nt, Human
cucagucucuugggcugugaag

SEQ ID NO: 305282 - RNA, 21 nt, Human
ucacagacuggucagugaggc

SEQ ID NO: 305283 - RNA, 22 nt, Human
gacagcauggugucuguucagg

SEQ ID NO: 305284 - RNA, 22 nt, Human
agccaagcugaucuccugcuga

SEQ ID NO: 305285 - RNA, 22 nt, Human
aucuacauaaaacgaauacaua

SEQ ID NO: 305286 - RNA, 22 nt, Human
ugucacuucaggaaugcaggga

SEQ ID NO: 305287 - RNA, 19 nt, Human
accucugcagagauguuua

SEQ ID NO: 305288 - RNA, 22 nt, Human
gucaggauuggggucaugaguc

SEQ ID NO: 305289 - RNA, 22 nt, Human
aaagguaguacuucuagaaggg

SEQ ID NO: 305290 - RNA, 22 nt, Human
aaggcccuggccccagcuucuu

SEQ ID NO: 305291 - RNA, 22 nt, Human
ugaaaucaauugcaauguuuau

SEQ ID NO: 305292 - RNA, 22 nt, Human
ugggauaguggccaggaccccc

SEQ ID NO: 305293 - RNA, 22 nt, Human
ccacugucugcaggccucagca

SEQ ID NO: 305294 - RNA, 22 nt, Human
cuggcccagagagcagagcuua

SEQ ID NO: 305295 - RNA, 22 nt, Human
ccacugggggcugcaggcacuc

SEQ ID NO: 305296 - RNA, 22 nt, Human
cccagggacagcuagguggggc

SEQ ID NO: 305297 - RNA, 22 nt, Human
uuguaugaggauagcaagaagc

SEQ ID NO: 305298 - RNA, 22 nt, Human
gcagcugagcgugaggaagagu

SEQ ID NO: 305299 - RNA, 22 nt, Human
gguucacacuaagcuuaagugg

SEQ ID NO: 305300 - RNA, 22 nt, Human
cacugaaggaaggacuacugca

SEQ ID NO: 305301 - RNA, 22 nt, Human
agcagcucacaggauuccugaa

SEQ ID NO: 305302 - RNA, 22 nt, Human
ucuuuguaacugucuauugaga

SEQ ID NO: 305303 - RNA, 22 nt, Human
gccuccugagaagccacaggcu

SEQ ID NO: 305304 - RNA, 22 nt, Human
cccauuuaucccaagguuacuc

SEQ ID NO: 305305 - RNA, 22 nt, Human
gugcaugugcauccauguguac

SEQ ID NO: 305306 - RNA, 22 nt, Human
cugucuguuucugauucaaccu

SEQ ID NO: 305307 - RNA, 20 nt, Human
ugccagggccagcagaggcu

SEQ ID NO: 305308 - RNA, 22 nt, Human
aguacuuugcacuuugcucaga

SEQ ID NO: 305309 - RNA, 22 nt, Human
cauuaugugggaaaauguucuu

SEQ ID NO: 305310 - RNA, 22 nt, Human
ucaguuuucucauuuaugagau

SEQ ID NO: 305311 - RNA, 22 nt, Human
ccagggcauguaacuaauggug

SEQ ID NO: 305312 - RNA, 22 nt, Human
cuauuacauuucuggacauuca

SEQ ID NO: 305313 - RNA, 22 nt, Human
cuaaaugacuuccagugguuau

SEQ ID NO: 305314 - RNA, 22 nt, Human
augcagagacagauguggcaug

SEQ ID NO: 305315 - RNA, 22 nt, Human
cugggggcaauggucagagugu

SEQ ID NO: 305316 - RNA, 22 nt, Human
caaggccugccucuggcagaaa

SEQ ID NO: 305317 - RNA, 22 nt, Human
aggaaaugcugaugcuccugga

SEQ ID NO: 305318 - RNA, 22 nt, Human
ugccagaagugcuuuauaagug

SEQ ID NO: 305319 - RNA, 22 nt, Human
aguuuauguaaaauuaguaaug

SEQ ID NO: 305320 - RNA, 22 nt, Human
cagagcagguaucuuuggugaa

SEQ ID NO: 305321 - RNA, 22 nt, Human
gcaggcuccaggccggccccuu

SEQ ID NO: 305322 - RNA, 22 nt, Human
gguuugaacagcuuuggagaag

SEQ ID NO: 305323 - RNA, 22 nt, Human
augcacgccccacacuggugug

SEQ ID NO: 305324 - RNA, 22 nt, Human
ggaggguuagcaaaggcacaga

SEQ ID NO: 305325 - RNA, 22 nt, Human
augcugugucaggaauuugaua

SEQ ID NO: 305326 - RNA, 22 nt, Human
cugcuuugaggggcucuguaua

SEQ ID NO: 305327 - RNA, 20 nt, Human
ucagaggcugccagcugggg

SEQ ID NO: 305328 - RNA, 20 nt, Human
auaaaauaacugccacaaga

SEQ ID NO: 305329 - RNA, 22 nt, Human
ggggcuguuuuuggaauggcug

SEQ ID NO: 305330 - RNA, 22 nt, Human
caguuucuacgaaggucaaccc

SEQ ID NO: 305331 - RNA, 21 nt, Human
uaaauaauaaguugcugagau

SEQ ID NO: 305332 - RNA, 20 nt, Human
cacaggccuugugagcagac

SEQ ID NO: 305333 - RNA, 22 nt, Human
auguagaacagguuaaugacag

SEQ ID NO: 305334 - RNA, 22 nt, Human
ggcagcugugaagugccucaca

SEQ ID NO: 305335 - RNA, 22 nt, Human
gucucaguuguaucaccugguu

SEQ ID NO: 305336 - RNA, 22 nt, Human
aauuaguauugcgauucauuag

SEQ ID NO: 305337 - RNA, 22 nt, Human
ucugagaggauuccugucccga

SEQ ID NO: 305338 - RNA, 22 nt, Human
gggaaauugugugagaucuuug

SEQ ID NO: 305339 - RNA, 22 nt, Human
gugaaacacccuccaaugcaca

SEQ ID NO: 305340 - RNA, 23 nt, Human
ugauuuccagugagucaguggga

SEQ ID NO: 305341 - RNA, 20 nt, Human
uucugucagauuauauggga

SEQ ID NO: 305342 - RNA, 22 nt, Human
gcucaggagcucuugguggcgc

SEQ ID NO: 305343 - RNA, 22 nt, Human
ugucacaaacauacauuauaga

SEQ ID NO: 305344 - RNA, 22 nt, Human
cagagcuguugcggggcuuggc

SEQ ID NO: 305345 - RNA, 22 nt, Human
cagucccaucucccagguggcu

SEQ ID NO: 305346 - RNA, 22 nt, Human
agaaggccuaacuugggggcaa

SEQ ID NO: 305347 - RNA, 19 nt, Human
agaggcugucaccuguagc

SEQ ID NO: 305348 - RNA, 22 nt, Human
uaaauuauguuccauguccuuu

SEQ ID NO: 305349 - RNA, 22 nt, Human
agcagaugaaucccagauaaag

SEQ ID NO: 305350 - RNA, 22 nt, Human
gaaaggccauuucugaggguuu

SEQ ID NO: 305351 - RNA, 22 nt, Human
cccaggcucccaggugggacaa

SEQ ID NO: 305352 - RNA, 22 nt, Human
ugggagaagcagugggacagua

SEQ ID NO: 305353 - RNA, 22 nt, Human
aguccagggcucucugugggau

SEQ ID NO: 305354 - RNA, 22 nt, Human
cuguccuugcuggccagguaug

SEQ ID NO: 305355 - RNA, 22 nt, Human
ggggugggcgugcagggacacc

SEQ ID NO: 305356 - RNA, 22 nt, Human
agcagccagagaaugaugcagu

SEQ ID NO: 305357 - RNA, 22 nt, Human
gggcuguggagccgcgagggcu

SEQ ID NO: 305358 - RNA, 22 nt, Human
guuugcauuucuugaacuauau

SEQ ID NO: 305359 - RNA, 22 nt, Human
aaguucaaggugauaguggcag

SEQ ID NO: 305360 - RNA, 22 nt, Human
ucaggagggugacaggcccugg

SEQ ID NO: 305361 - RNA, 22 nt, Human
cagggccaguucucgcagcagu

SEQ ID NO: 305362 - RNA, 22 nt, Human
uaugucaaaguuaagaaauagg

SEQ ID NO: 305363 - RNA, 20 nt, Human
gccugagcuauugccaggau

SEQ ID NO: 305364 - RNA, 22 nt, Human
caugcuguguguuuuagcucca

SEQ ID NO: 305365 - RNA, 22 nt, Human
aggagucauaaaugugaacaaa

SEQ ID NO: 305366 - RNA, 22 nt, Human
uuuucagaggccuaagagguuu

SEQ ID NO: 305367 - RNA, 21 nt, Human
agacagaacaacugcucucca

SEQ ID NO: 305368 - RNA, 17 nt, Human
ucaggcugugccuggua

SEQ ID NO: 305369 - RNA, 22 nt, Human
gaagcccuauccucuccuggga

SEQ ID NO: 305370 - RNA, 22 nt, Human
cauucuuauauuuacucauuca

SEQ ID NO: 305371 - RNA, 22 nt, Human
gaggcagcaaaauauaucauaa

SEQ ID NO: 305372 - RNA, 22 nt, Human
caaggccaguuucuccuaguca

SEQ ID NO: 305373 - RNA, 15 nt, Human
aaucuggcggcaagu

SEQ ID NO: 305374 - RNA, 22 nt, Human
gaaucucaaggcuugugaggau

SEQ ID NO: 305375 - RNA, 22 nt, Human
agagugaucagauaucaggugu

SEQ ID NO: 305376 - RNA, 22 nt, Human
uguacauagaucuugaaaauua

SEQ ID NO: 305377 - RNA, 22 nt, Human
guuugcauggaagacagugagu

SEQ ID NO: 305378 - RNA, 22 nt, Human
gacacuccagcuuuuggcucaa

SEQ ID NO: 305379 - RNA, 22 nt, Human
uauguacauggagagcaauuga

SEQ ID NO: 305380 - RNA, 22 nt, Human
ugcagcugcuggcccaggugcu

SEQ ID NO: 305381 - RNA, 22 nt, Human
agccugcaggaugggcagcacc

SEQ ID NO: 305382 - RNA, 22 nt, Human
guucagggagggacagaugaag

SEQ ID NO: 305383 - RNA, 22 nt, Human
cugggcacagcguugggcucuu

SEQ ID NO: 305384 - RNA, 22 nt, Human
gcagagcuguuaauggagcuga

SEQ ID NO: 305385 - RNA, 22 nt, Human
auguguccacaggugugagaga

SEQ ID NO: 305386 - RNA, 22 nt, Human
agggccagcugaugagaaugag

SEQ ID NO: 305387 - RNA, 22 nt, Human
agggcagagaaauguaguugag

SEQ ID NO: 305388 - RNA, 22 nt, Human
ugccugugucacagugauguuu

SEQ ID NO: 305389 - RNA, 22 nt, Human
cagcaggguagguuguaucagu

SEQ ID NO: 305390 - RNA, 22 nt, Human
gcugagcugcuguucauccugc

SEQ ID NO: 305391 - RNA, 22 nt, Human
uuccuuguuuguagcucuggga

SEQ ID NO: 305392 - RNA, 22 nt, Human
gcucugcuugcaucaugacugc

SEQ ID NO: 305393 - RNA, 22 nt, Human
guauuuauaggggaaugagagu

SEQ ID NO: 305394 - RNA, 22 nt, Human
gcucagugugcacgaguacucu

SEQ ID NO: 305395 - RNA, 22 nt, Human
ugaaguuauauauguugaaaau

SEQ ID NO: 305396 - RNA, 19 nt, Human
ccagucccauacaggagau

SEQ ID NO: 305397 - RNA, 23 nt, Human
cugcagucgccggccugggugcc

SEQ ID NO: 305398 - RNA, 22 nt, Human
ccugggagugugccaucucugu

SEQ ID NO: 305399 - RNA, 22 nt, Human
uuucaaacuuuacucuugaauc

SEQ ID NO: 305400 - RNA, 22 nt, Human
cugccuuggaaaaugugguaau

SEQ ID NO: 305401 - RNA, 22 nt, Human
ucaggcugcccguucagggcuc

SEQ ID NO: 305402 - RNA, 22 nt, Human
cagggugccuguccucagcaaa

SEQ ID NO: 305403 - RNA, 19 nt, Human
gagaggccugugcuugaag

SEQ ID NO: 305404 - RNA, 22 nt, Human
ucaaagagcucuaucuucaaaa

SEQ ID NO: 305405 - RNA, 22 nt, Human
ugggcugcccaagguggccaug

SEQ ID NO: 305406 - RNA, 22 nt, Human
ggaguaaggcucagaggaaaug

SEQ ID NO: 305407 - RNA, 22 nt, Human
aggcucaguuugguuuccauug

SEQ ID NO: 305408 - RNA, 22 nt, Human
augccuggacugacaugcacug

SEQ ID NO: 305409 - RNA, 22 nt, Human
agagccaggugcugcuguuuga

SEQ ID NO: 305410 - RNA, 22 nt, Human
aucaggauccaccuugagccug

SEQ ID NO: 305411 - RNA, 22 nt, Human
uugcugaauugaauccuuuggu

SEQ ID NO: 305412 - RNA, 22 nt, Human
gcugcagcuuuaggauccagug

SEQ ID NO: 305413 - RNA, 22 nt, Human
caaaagcaguucuaucugaguu

SEQ ID NO: 305414 - RNA, 23 nt, Human
aucuguucaucugacacagauuc

SEQ ID NO: 305415 - RNA, 21 nt, Human
ccuauugaauauaggaagauu

SEQ ID NO: 305416 - RNA, 22 nt, Human
agcaaagucaguggaaccaucc

SEQ ID NO: 305417 - RNA, 22 nt, Human
ccugggugacccgugagcgucc

SEQ ID NO: 305418 - RNA, 22 nt, Human
gcccccucuuuggagccagcca

SEQ ID NO: 305419 - RNA, 22 nt, Human
gguucacacuuucaugauuuca

SEQ ID NO: 305420 - RNA, 21 nt, Human
uuguucuuccagaagcaaagu

SEQ ID NO: 305421 - RNA, 22 nt, Human
aucaggaucacagaaacuuuua

SEQ ID NO: 305422 - RNA, 22 nt, Human
auggggugaccaugagcauuua

SEQ ID NO: 305423 - RNA, 22 nt, Human
auucuuauuuaaauagagucug

SEQ ID NO: 305424 - RNA, 22 nt, Human
gaaacccaaacuaagacaguag

SEQ ID NO: 305425 - RNA, 22 nt, Human
uagccgcuuaauuauuugguga

SEQ ID NO: 305426 - RNA, 22 nt, Human
cugcaggcugagcgccugccgg

SEQ ID NO: 305427 - RNA, 22 nt, Human
auuguucaaagugcuuugcaug

SEQ ID NO: 305428 - RNA, 22 nt, Human
aagccagccagugccagucuua

SEQ ID NO: 305429 - RNA, 22 nt, Human
augcaucuauucccaagggcag

SEQ ID NO: 305430 - RNA, 23 nt, Human
uggcagagacccagaaucuacau

SEQ ID NO: 305431 - RNA, 22 nt, Human
ugucacauaggcaaaauguuuu

SEQ ID NO: 305432 - RNA, 19 nt, Human
gcugggagcagacccuccc

SEQ ID NO: 305433 - RNA, 22 nt, Human
uacaugcuccacuuucuccugu

SEQ ID NO: 305434 - RNA, 22 nt, Human
cacugcagcaccaugcagggcu

SEQ ID NO: 305435 - RNA, 22 nt, Human
aagagguugucugugaugaguu

SEQ ID NO: 305436 - RNA, 22 nt, Human
ccugucuguaucgguucagagu

SEQ ID NO: 305437 - RNA, 22 nt, Human
aaauauagugacacuuauaguc

SEQ ID NO: 305438 - RNA, 22 nt, Human
gacagaagaggaacuuggacag

SEQ ID NO: 305439 - RNA, 22 nt, Human
gccugggagagggauagugcag

SEQ ID NO: 305440 - RNA, 22 nt, Human
cagggcccaggccacuggguug

SEQ ID NO: 305441 - RNA, 22 nt, Human
ucaggugggaccugcuaggaca

SEQ ID NO: 305442 - RNA, 22 nt, Human
ggaggccauaguuugggaguca

SEQ ID NO: 305443 - RNA, 22 nt, Human
ugcuuggcuuucugagcuucug

SEQ ID NO: 305444 - RNA, 22 nt, Human
uuugaacugauaaucuucuguu

SEQ ID NO: 305445 - RNA, 22 nt, Human
augcagcuucaggauuaugaug

SEQ ID NO: 305446 - RNA, 22 nt, Human
aaagaaggaccuggaggaggau

SEQ ID NO: 305447 - RNA, 21 nt, Human
ccugagccuguuuauccagaa

SEQ ID NO: 305448 - RNA, 22 nt, Human
aaauaguucagccacggugacu

SEQ ID NO: 305449 - RNA, 22 nt, Human
ccccagcucagugcagggacau

SEQ ID NO: 305450 - RNA, 22 nt, Human
gagaggagguggcuaugacagc

SEQ ID NO: 305451 - RNA, 22 nt, Human
ggugaggcagguggcugcugag

SEQ ID NO: 305452 - RNA, 22 nt, Human
gcuuuccuggcccugucccugc

SEQ ID NO: 305453 - RNA, 22 nt, Human
guggccuggauagacuccaucu

SEQ ID NO: 305454 - RNA, 19 nt, Human
ugcuagaaauucugugacu

SEQ ID NO: 305455 - RNA, 22 nt, Human
uugaauuauaagugugucuacu

SEQ ID NO: 305456 - RNA, 22 nt, Human
aggccuguuggcgugggcucua

SEQ ID NO: 305457 - RNA, 22 nt, Human
gaaaggucaguuccacuuccau

SEQ ID NO: 305458 - RNA, 22 nt, Human
ccuggagcaaaaaucuaaggag

SEQ ID NO: 305459 - RNA, 22 nt, Human
acucaagauagggaaaguacaa

SEQ ID NO: 305460 - RNA, 22 nt, Human
cagcugggagcuccauuagaua

SEQ ID NO: 305461 - RNA, 22 nt, Human
aaaguguaaggaauuuaaguaa

SEQ ID NO: 305462 - RNA, 22 nt, Human
guuugcauuccaauuuagggga

SEQ ID NO: 305463 - RNA, 18 nt, Human
gcccagaggucugggccc

SEQ ID NO: 305464 - RNA, 22 nt, Human
uguuuuaaucucccauugcucu

SEQ ID NO: 305465 - RNA, 22 nt, Human
ugcugcacgauaaauaauuucu

SEQ ID NO: 305466 - RNA, 22 nt, Human
ugcauguguuugccacagugag

SEQ ID NO: 305467 - RNA, 22 nt, Human
uggaaagucucuuuugacugua

SEQ ID NO: 305468 - RNA, 22 nt, Human
ggccuaguuuuuucugguaggu

SEQ ID NO: 305469 - RNA, 21 nt, Human
agccuggcccagggggaggcu

SEQ ID NO: 305470 - RNA, 22 nt, Human
uuucuguagggauuucacaguu

SEQ ID NO: 305471 - RNA, 22 nt, Human
uuccuaauggcaaaacauguuu

SEQ ID NO: 305472 - RNA, 21 nt, Human
cccuguguuccacagcagaca

SEQ ID NO: 305473 - RNA, 22 nt, Human
ugcagcuccucuggcugccuga

SEQ ID NO: 305474 - RNA, 22 nt, Human
ggcuucauggaggaggugaguc

SEQ ID NO: 305475 - RNA, 22 nt, Human
uuucucugaggcuggccucccu

SEQ ID NO: 305476 - RNA, 22 nt, Human
uuccaugaagggcagccucuca

SEQ ID NO: 305477 - RNA, 21 nt, Human
guggcccugguguggcugcac

SEQ ID NO: 305478 - RNA, 22 nt, Human
uggaggaugagugugggcucug

SEQ ID NO: 305479 - RNA, 19 nt, Human
ggaaacaggggccagagga

SEQ ID NO: 305480 - RNA, 22 nt, Human
gguuauauaauucagugcuuuc

SEQ ID NO: 305481 - RNA, 22 nt, Human
aaagauuucacaucccaagccu

SEQ ID NO: 305482 - RNA, 22 nt, Human
guggugcauccuugaguaagcu

SEQ ID NO: 305483 - RNA, 18 nt, Human
aaaaugcaggcgacaugg

SEQ ID NO: 305484 - RNA, 20 nt, Human
gcugucuggauuagaagccu

SEQ ID NO: 305485 - RNA, 22 nt, Human
ucuucacaggagccugccugcc

SEQ ID NO: 305486 - RNA, 22 nt, Human
ggaugcaggaguugaagaagga

SEQ ID NO: 305487 - RNA, 22 nt, Human
uucuucuucaagugcugcauuc

SEQ ID NO: 305488 - RNA, 22 nt, Human
ccagggcaugggaagaacugaa

SEQ ID NO: 305489 - RNA, 22 nt, Human
cccugggcaagcccuauuuucc

SEQ ID NO: 305490 - RNA, 22 nt, Human
augcugugguagacagcauucc

SEQ ID NO: 305491 - RNA, 22 nt, Human
uuguggaaauacagacuccaag

SEQ ID NO: 305492 - RNA, 22 nt, Human
ggaaaagacagaauucuagaau

SEQ ID NO: 305493 - RNA, 22 nt, Human
cacagugcaugaugggcagaag

SEQ ID NO: 305494 - RNA, 22 nt, Human
ggaaaguggugguggaaagagg

SEQ ID NO: 305495 - RNA, 19 nt, Human
ggcagagcuccugcuuucu

SEQ ID NO: 305496 - RNA, 22 nt, Human
guuugcauguguacuuaauugg

SEQ ID NO: 305497 - RNA, 22 nt, Human
gcuuccucccugcugcucacua

SEQ ID NO: 305498 - RNA, 22 nt, Human
ucaguguuuccuagagcauaua

SEQ ID NO: 305499 - RNA, 22 nt, Human
uuugcauucuagaaaaauuucu

SEQ ID NO: 305500 - RNA, 22 nt, Human
uggagcagccaugaugacagag

SEQ ID NO: 305501 - RNA, 22 nt, Human
uacauugugauguuucaauaca

SEQ ID NO: 305502 - RNA, 22 nt, Human
aggcccaguguggcuuccugga

SEQ ID NO: 305503 - RNA, 22 nt, Human
cugccucucaggucccugagau

SEQ ID NO: 305504 - RNA, 22 nt, Human
aaguucaagaucaagguuccag

SEQ ID NO: 305505 - RNA, 22 nt, Human
gaucucuguggacucuuagcac

SEQ ID NO: 305506 - RNA, 22 nt, Human
gaaaucugaacaacagcuguca

SEQ ID NO: 305507 - RNA, 22 nt, Human
cagggcaguuuuacuucucucu

SEQ ID NO: 305508 - RNA, 22 nt, Human
gugccaggugcuaagcugugcu

SEQ ID NO: 305509 - RNA, 22 nt, Human
guucgcaucuugaucauggacu

SEQ ID NO: 305510 - RNA, 22 nt, Human
uccuggagauaauugcagugaa

SEQ ID NO: 305511 - RNA, 22 nt, Human
ggagcaaaugccaagugggagg

SEQ ID NO: 305512 - RNA, 22 nt, Human
cagcucccuauggugaggcgac

SEQ ID NO: 305513 - RNA, 22 nt, Human
gcuuucucuucacugauguuca

SEQ ID NO: 305514 - RNA, 22 nt, Human
acaguguuccuuuguugugacu

SEQ ID NO: 305515 - RNA, 22 nt, Human
gaaacauacgauuuaggagaaa

SEQ ID NO: 305516 - RNA, 22 nt, Human
auuuugaaaccaaguuauuucc

SEQ ID NO: 305517 - RNA, 22 nt, Human
gcuggccucgcaggcaggaugu

SEQ ID NO: 305518 - RNA, 21 nt, Human
cacucaggguaugugccaggc

SEQ ID NO: 305519 - RNA, 23 nt, Human
aucaagauaauccagaugaccua

SEQ ID NO: 305520 - RNA, 22 nt, Human
gaagcagcucagauugacugaa

SEQ ID NO: 305521 - RNA, 21 nt, Human
gcagccacagccaccaagcua

SEQ ID NO: 305522 - RNA, 22 nt, Human
ugagagugauugguucgaaugu

SEQ ID NO: 305523 - RNA, 22 nt, Human
uaugaaaagguggccaauguag

SEQ ID NO: 305524 - RNA, 22 nt, Human
gagggcugaugcuuacuuauuu

SEQ ID NO: 305525 - RNA, 22 nt, Human
augggugugaaaauggucaucu

SEQ ID NO: 305526 - RNA, 22 nt, Human
caucuucagguucauggucaua

SEQ ID NO: 305527 - RNA, 22 nt, Human
auccugucaucauaguacuuga

SEQ ID NO: 305528 - RNA, 22 nt, Human
ucaugacaacuauauuauucca

SEQ ID NO: 305529 - RNA, 22 nt, Human
ggcugcugcccaccccugcaug

SEQ ID NO: 305530 - RNA, 22 nt, Human
ggcaggagaauggcgugaacuc

SEQ ID NO: 305531 - RNA, 22 nt, Human
gagagucuagugcaccuaguuu

SEQ ID NO: 305532 - RNA, 22 nt, Human
ucagccagguaauguggagaug

SEQ ID NO: 305533 - RNA, 22 nt, Human
uuccaggggcagcagugauggu

SEQ ID NO: 305534 - RNA, 22 nt, Human
uuuacauuucccucugucaguu

SEQ ID NO: 305535 - RNA, 22 nt, Human
aggagcccugcgggaggcagag

SEQ ID NO: 305536 - RNA, 20 nt, Human
ucucagcauaagaacccuuc

SEQ ID NO: 305537 - RNA, 22 nt, Human
cuguuucaagugaagucagaca

SEQ ID NO: 305538 - RNA, 22 nt, Human
aggggagaauuucaacucaggu

SEQ ID NO: 305539 - RNA, 22 nt, Human
acauuugaggauguuaagaaug

SEQ ID NO: 305540 - RNA, 22 nt, Human
guuugaaaaaagcaguauguaa

SEQ ID NO: 305541 - RNA, 22 nt, Human
gugcucuccuggcugcccugac

SEQ ID NO: 305542 - RNA, 22 nt, Human
ucugggaacucugucauuuccc

SEQ ID NO: 305543 - RNA, 22 nt, Human
ugugccuggaucucugugacaa

SEQ ID NO: 305544 - RNA, 22 nt, Human
ucauuacagagauauaaucuac

SEQ ID NO: 305545 - RNA, 22 nt, Human
uguacaguaggaacuuguuauu

SEQ ID NO: 305546 - RNA, 22 nt, Human
gagcaagacucacugcaucuug

SEQ ID NO: 305547 - RNA, 22 nt, Human
cugagucucccggcaguggagg

SEQ ID NO: 305548 - RNA, 22 nt, Human
gaauauuuguaauuacuguuga

SEQ ID NO: 305549 - RNA, 22 nt, Human
gugucaugggguuuguuauaca

SEQ ID NO: 305550 - RNA, 17 nt, Human
ggccuguguggcugcag

SEQ ID NO: 305551 - RNA, 22 nt, Human
uagacagauuucuuguuagaca

SEQ ID NO: 305552 - RNA, 21 nt, Human
caauaaacugcacauugagac

SEQ ID NO: 305553 - RNA, 19 nt, Human
uuacuuggcaaagucaguc

SEQ ID NO: 305554 - RNA, 22 nt, Human
gagcagaugugugccaggaugc

SEQ ID NO: 305555 - RNA, 22 nt, Human
gugauuuucuccuccuagaagu

SEQ ID NO: 305556 - RNA, 22 nt, Human
aaaucuaggcucauccuggucc

SEQ ID NO: 305557 - RNA, 22 nt, Human
uugaauucauuucucauugagu

SEQ ID NO: 305558 - RNA, 22 nt, Human
cuuaacagauacaucugugguu

SEQ ID NO: 305559 - RNA, 23 nt, Human
acaaaugcccauacaucuaguuc

SEQ ID NO: 305560 - RNA, 22 nt, Human
gcugccugccuugccuggagga

SEQ ID NO: 305561 - RNA, 22 nt, Human
gggagcugagggaccucugugg

SEQ ID NO: 305562 - RNA, 22 nt, Human
cauugaaauauggaaacugaug

SEQ ID NO: 305563 - RNA, 16 nt, Human
ggcaccagugaacaca

SEQ ID NO: 305564 - RNA, 22 nt, Human
ccugagugaauucccucacugu

SEQ ID NO: 305565 - RNA, 22 nt, Human
uacauauguaaacauguauaaa

SEQ ID NO: 305566 - RNA, 22 nt, Human
cauguuuucuaggcuuucacaa

SEQ ID NO: 305567 - RNA, 22 nt, Human
ggcagcugagcauggcuaccuu

SEQ ID NO: 305568 - RNA, 22 nt, Human
augugaaaauccaauggcagca

SEQ ID NO: 305569 - RNA, 22 nt, Human
ccagcucucugcagaaaggacu

SEQ ID NO: 305570 - RNA, 22 nt, Human
ccuccagggcagacggggagca

SEQ ID NO: 305571 - RNA, 22 nt, Human
uggaggccagagguacugggac

SEQ ID NO: 305572 - RNA, 22 nt, Human
caacauuucaaggucuuuagga

SEQ ID NO: 305573 - RNA, 22 nt, Human
cugaggccuaagacaugaauga

SEQ ID NO: 305574 - RNA, 22 nt, Human
ggcccaguguggguggauguug

SEQ ID NO: 305575 - RNA, 22 nt, Human
ugcagaagcugcaggucagugg

SEQ ID NO: 305576 - RNA, 22 nt, Human
gcaggcugaugacuggaguugg

SEQ ID NO: 305577 - RNA, 18 nt, Human
gggcccuggcguccgccc

SEQ ID NO: 305578 - RNA, 17 nt, Human
cauguguaugugggagu

SEQ ID NO: 305579 - RNA, 22 nt, Human
aggccugacuugaauuuagggc

SEQ ID NO: 305580 - RNA, 22 nt, Human
aaugaacaggugaaugucagau

SEQ ID NO: 305581 - RNA, 22 nt, Human
uggcagcaauuagcuagagcug

SEQ ID NO: 305582 - RNA, 22 nt, Human
uaacaucuuuagcagcucgaac

SEQ ID NO: 305583 - RNA, 22 nt, Human
aagcagcacaguaauauuggug

SEQ ID NO: 305584 - RNA, 22 nt, Human
gaggggcucuuuaauaguaaca

SEQ ID NO: 305585 - RNA, 19 nt, Human
gggcuucugggaucaagag

SEQ ID NO: 305586 - RNA, 22 nt, Human
uucugucacuugcaaucaagag

SEQ ID NO: 305587 - RNA, 22 nt, Human
cagcuggaugggagaccauguu

SEQ ID NO: 305588 - RNA, 22 nt, Human
ugucugagugugccugggcauu

SEQ ID NO: 305589 - RNA, 22 nt, Human
gacagggcaagacucugucuaa

SEQ ID NO: 305590 - RNA, 22 nt, Human
uagugcuuuaaguuuacagaga

SEQ ID NO: 305591 - RNA, 22 nt, Human
ugcauggaggaagaugaaugca

SEQ ID NO: 305592 - RNA, 22 nt, Human
uagaaacugauagucuugugcu

SEQ ID NO: 305593 - RNA, 22 nt, Human
aaaagagucuuaggcagucaua

SEQ ID NO: 305594 - RNA, 22 nt, Human
agucauaugacccuucacaaac

SEQ ID NO: 305595 - RNA, 22 nt, Human
ccucccacauugaggacaugcu

SEQ ID NO: 305596 - RNA, 22 nt, Human
agccagggacgcugcaggcuac

SEQ ID NO: 305597 - RNA, 22 nt, Human
cugcugcugagagcucagccug

SEQ ID NO: 305598 - RNA, 22 nt, Human
uaguguucuaagaacauccaug

SEQ ID NO: 305599 - RNA, 22 nt, Human
uucucuucuguucagugcccaa

SEQ ID NO: 305600 - RNA, 22 nt, Human
uaaggccaaggggccauagucu

SEQ ID NO: 305601 - RNA, 22 nt, Human
uccagcagaccaucaaggcuca

SEQ ID NO: 305602 - RNA, 22 nt, Human
aaaaacuguaauuacuuuugca

SEQ ID NO: 305603 - RNA, 22 nt, Human
gcaaguuauuuccauuuaaagc

SEQ ID NO: 305604 - RNA, 22 nt, Human
uggaagcaucacuucuugccug

SEQ ID NO: 305605 - RNA, 22 nt, Human
ucccagagugugggcaucaagg

SEQ ID NO: 305606 - RNA, 22 nt, Human
agcucccugagaugccacagca

SEQ ID NO: 305607 - RNA, 22 nt, Human
gagcccuccauggagccaggca

SEQ ID NO: 305608 - RNA, 22 nt, Human
ugucuucagcaaaugccuuucu

SEQ ID NO: 305609 - RNA, 22 nt, Human
gaggggcagaaugugaucaggg

SEQ ID NO: 305610 - RNA, 22 nt, Human
agugccuggaccccaugacaua

SEQ ID NO: 305611 - RNA, 22 nt, Human
ccagcccugucaccaacuggag

SEQ ID NO: 305612 - RNA, 22 nt, Human
ggggcagaaagcccacagagug

SEQ ID NO: 305613 - RNA, 21 nt, Human
uggcacugcuuagcagguucc

SEQ ID NO: 305614 - RNA, 22 nt, Human
gcugucuugcucacucuugcag

SEQ ID NO: 305615 - RNA, 22 nt, Human
gagcucuggcagggcaggucug

SEQ ID NO: 305616 - RNA, 22 nt, Human
ggucagagggugggcugccugu

SEQ ID NO: 305617 - RNA, 22 nt, Human
ugcuucuggaaacaguggcugu

SEQ ID NO: 305618 - RNA, 23 nt, Human
uggcucagcuaguuuuccauuuc

SEQ ID NO: 305619 - RNA, 22 nt, Human
uuugaauagaggccccucagaa

SEQ ID NO: 305620 - RNA, 22 nt, Human
guuggccugaauggucaagagg

SEQ ID NO: 305621 - RNA, 22 nt, Human
gcacuaaaccaacauguaauaa

SEQ ID NO: 305622 - RNA, 22 nt, Human
uuuggaauauuaaaaugucuca

SEQ ID NO: 305623 - RNA, 18 nt, Human
uuuccuuguaugaacaua

SEQ ID NO: 305624 - RNA, 22 nt, Human
augacaugaccugguagagaca

SEQ ID NO: 305625 - RNA, 22 nt, Human
ucaaauaaugccauucaucauc

SEQ ID NO: 305626 - RNA, 22 nt, Human
aacucagucauaaagcgaaugc

SEQ ID NO: 305627 - RNA, 22 nt, Human
ucucaggacuuugggaagcuca

SEQ ID NO: 305628 - RNA, 22 nt, Human
uggagcaagcuggagagaacau

SEQ ID NO: 305629 - RNA, 22 nt, Human
ugcagcccuuccuuccucuggg

SEQ ID NO: 305630 - RNA, 22 nt, Human
aagcagccagccaucaugcccg

SEQ ID NO: 305631 - RNA, 22 nt, Human
aaccaggacaauuugaauagaa

SEQ ID NO: 305632 - RNA, 22 nt, Human
uuucagaugguauauacaguag

SEQ ID NO: 305633 - RNA, 22 nt, Human
uaugaagauauaucugaucucu

SEQ ID NO: 305634 - RNA, 22 nt, Human
ucucugaguaagugacaguuca

SEQ ID NO: 305635 - RNA, 22 nt, Human
aaucaguuguucacucugaaaa

SEQ ID NO: 305636 - RNA, 22 nt, Human
uccagcucuaacaugcugggcc

SEQ ID NO: 305637 - RNA, 22 nt, Human
gugcauuucucauacacuaaau

SEQ ID NO: 305638 - RNA, 22 nt, Human
uuucacauguggaaugccaggu

SEQ ID NO: 305639 - RNA, 22 nt, Human
cagcucugcugggaggaugcag

SEQ ID NO: 305640 - RNA, 22 nt, Human
cugcugcucagugucaucaugu

SEQ ID NO: 305641 - RNA, 22 nt, Human
agagugucugguagcugcucug

SEQ ID NO: 305642 - RNA, 22 nt, Human
uuagaaaugauuucaccucuuu

SEQ ID NO: 305643 - RNA, 22 nt, Human
gccugagauucugcauuucuaa

SEQ ID NO: 305644 - RNA, 22 nt, Human
cagcaaaauuugaggauugccu

SEQ ID NO: 305645 - RNA, 21 nt, Human
cuccugggcuaagauauagug

SEQ ID NO: 305646 - RNA, 20 nt, Human
uuucagugguuugugccuag

SEQ ID NO: 305647 - RNA, 22 nt, Human
cugcagaguggagccucggcug

SEQ ID NO: 305648 - RNA, 22 nt, Human
acugaaauacugcucuuggauu

SEQ ID NO: 305649 - RNA, 22 nt, Human
aaagguuaguucuuagaagugc

SEQ ID NO: 305650 - RNA, 22 nt, Human
uuuccucuuugugacacagcug

SEQ ID NO: 305651 - RNA, 22 nt, Human
cagguggggagaguguggagca

SEQ ID NO: 305652 - RNA, 22 nt, Human
aaaugaacaguugcauucucug

SEQ ID NO: 305653 - RNA, 22 nt, Human
gggugggccacugagcagcgug

SEQ ID NO: 305654 - RNA, 22 nt, Human
ugaaacauugcacuguaugaau

SEQ ID NO: 305655 - RNA, 21 nt, Human
cagaggcagguccugggacgg

SEQ ID NO: 305656 - RNA, 22 nt, Human
ucucaggagccacagcgggagu

SEQ ID NO: 305657 - RNA, 22 nt, Human
agugauggagcuuccucugcua

SEQ ID NO: 305658 - RNA, 22 nt, Human
uggagcagcuaagccucugaga

SEQ ID NO: 305659 - RNA, 22 nt, Human
gcagugggaagguuggcacaug

SEQ ID NO: 305660 - RNA, 22 nt, Human
augcugugcuggcuaaccaugg

SEQ ID NO: 305661 - RNA, 22 nt, Human
agcaggagcugugggaagaugg

SEQ ID NO: 305662 - RNA, 22 nt, Human
ugucaugccaccguuucccaga

SEQ ID NO: 305663 - RNA, 22 nt, Human
agaugagggguagaaaggacuu

SEQ ID NO: 305664 - RNA, 22 nt, Human
cccugugggaacuccugaguug

SEQ ID NO: 305665 - RNA, 22 nt, Human
uuggaaaaacacgauagugguu

SEQ ID NO: 305666 - RNA, 23 nt, Human
agcccagcagagaaccuaggucc

SEQ ID NO: 305667 - RNA, 22 nt, Human
ugucucaggggcauugaaauaa

SEQ ID NO: 305668 - RNA, 22 nt, Human
acagcagagacacucaggaggc

SEQ ID NO: 305669 - RNA, 22 nt, Human
gagccauacaaccuauaaagug

SEQ ID NO: 305670 - RNA, 22 nt, Human
gagcagaacaggccggguggga

SEQ ID NO: 305671 - RNA, 22 nt, Human
aacagaauugcugcugccaaug

SEQ ID NO: 305672 - RNA, 22 nt, Human
cagagccccccuucugaucaca

SEQ ID NO: 305673 - RNA, 22 nt, Human
cacugcucgcugcagcauggcc

SEQ ID NO: 305674 - RNA, 22 nt, Human
gauuucuugauaauucaaaucc

SEQ ID NO: 305675 - RNA, 22 nt, Human
ggggcagaguagcuggggugug

SEQ ID NO: 305676 - RNA, 22 nt, Human
gggcuggggcucaauaauuugu

SEQ ID NO: 305677 - RNA, 22 nt, Human
uugggcuggcagagguggucuu

SEQ ID NO: 305678 - RNA, 22 nt, Human
ucagccagugccuugaucuugc

SEQ ID NO: 305679 - RNA, 22 nt, Human
cccugggacccgcugcagaggc

SEQ ID NO: 305680 - RNA, 22 nt, Human
agaguguaauaagggcaagggc

SEQ ID NO: 305681 - RNA, 19 nt, Human
ugacaggcuguugccuuga

SEQ ID NO: 305682 - RNA, 22 nt, Human
cagagggcucaguccugcugga

SEQ ID NO: 305683 - RNA, 22 nt, Human
auacaguauuaccuguucagga

SEQ ID NO: 305684 - RNA, 22 nt, Human
gcuguucaagacuaggaaauuu

SEQ ID NO: 305685 - RNA, 22 nt, Human
gaauuguacgcuuuacauaggu

SEQ ID NO: 305686 - RNA, 22 nt, Human
caggccugugaguugaggcccc

SEQ ID NO: 305687 - RNA, 22 nt, Human
aauguguguucggggcccagag

SEQ ID NO: 305688 - RNA, 22 nt, Human
ucugggaaaugcuguuccuugu

SEQ ID NO: 305689 - RNA, 22 nt, Human
cugcuguguggauucaauggcu

SEQ ID NO: 305690 - RNA, 22 nt, Human
cccucugccugggaccaagucc

SEQ ID NO: 305691 - RNA, 22 nt, Human
uaacagaagaugaaacuucuuu

SEQ ID NO: 305692 - RNA, 22 nt, Human
auuugucuuuggaccugugaga

SEQ ID NO: 305693 - RNA, 22 nt, Human
acaggcugcugggcuccgugcu

SEQ ID NO: 305694 - RNA, 22 nt, Human
ugcacacacgcggcacaucugu

SEQ ID NO: 305695 - RNA, 22 nt, Human
gcucccacugcagcccugagcc

SEQ ID NO: 305696 - RNA, 22 nt, Human
agauggagaaugacaauuaagg

SEQ ID NO: 305697 - RNA, 20 nt, Human
ugcagaagaacguucugguu

SEQ ID NO: 305698 - RNA, 22 nt, Human
gaggccugucgcuaggccucug

SEQ ID NO: 305699 - RNA, 22 nt, Human
acuguguggaccacucugaggc

SEQ ID NO: 305700 - RNA, 22 nt, Human
ucugcucuaguugcuuccugcc

SEQ ID NO: 305701 - RNA, 22 nt, Human
augggaugcauggcuguggcca

SEQ ID NO: 305702 - RNA, 22 nt, Human
ggggccugcgagguucaacuuc

SEQ ID NO: 305703 - RNA, 22 nt, Human
gugcugcagagucucgugccgc

SEQ ID NO: 305704 - RNA, 22 nt, Human
gaugugaggugguaaacaggga

SEQ ID NO: 305705 - RNA, 17 nt, Human
gccuuccuuccuccaca

SEQ ID NO: 305706 - RNA, 22 nt, Human
ucagccucucugaguccagacc

SEQ ID NO: 305707 - RNA, 22 nt, Human
gcuguucugcgucccaggcugg

SEQ ID NO: 305708 - RNA, 22 nt, Human
gagcuggggcagcuuaggagug

SEQ ID NO: 305709 - RNA, 22 nt, Human
cucugagcugaaacaugagcau

SEQ ID NO: 305710 - RNA, 22 nt, Human
aagcuguucucuaaguuucaug

SEQ ID NO: 305711 - RNA, 22 nt, Human
ucagggcauucaagaggccugg

SEQ ID NO: 305712 - RNA, 22 nt, Human
uuucaggauuaguuuaagcagg

SEQ ID NO: 305713 - RNA, 18 nt, Human
cugagggcaacagaggcu

SEQ ID NO: 305714 - RNA, 22 nt, Human
gcccucuggcagccuuggcugg

SEQ ID NO: 305715 - RNA, 22 nt, Human
acauuucucaucuaguagagua

SEQ ID NO: 305716 - RNA, 22 nt, Human
cauuuguuaaccaguguggauu

SEQ ID NO: 305717 - RNA, 22 nt, Human
gagaaaugcaugcaugucauca

SEQ ID NO: 305718 - RNA, 22 nt, Human
acaugaaaagacuaucugauua

SEQ ID NO: 305719 - RNA, 22 nt, Human
ucaaaugcaggucuggucuugg

SEQ ID NO: 305720 - RNA, 22 nt, Human
ccagggcauccucacaucgcag

SEQ ID NO: 305721 - RNA, 22 nt, Human
uugaaagacuucuccugugaaa

SEQ ID NO: 305722 - RNA, 22 nt, Human
cugcugcaaucuggcuuccaug

SEQ ID NO: 305723 - RNA, 22 nt, Human
gugcaugugucuuuauaguagc

SEQ ID NO: 305724 - RNA, 22 nt, Human
gccaggcuguuuuuauuacugu

SEQ ID NO: 305725 - RNA, 22 nt, Human
gcagagcucuguucuuaucucc

SEQ ID NO: 305726 - RNA, 22 nt, Human
aagugguagacaaagauaauug

SEQ ID NO: 305727 - RNA, 22 nt, Human
cagaugagcaugggcacaagca

SEQ ID NO: 305728 - RNA, 22 nt, Human
uugugguuaaccgcacauuuuu

SEQ ID NO: 305729 - RNA, 22 nt, Human
aguucucuuuagcucauauggu

SEQ ID NO: 305730 - RNA, 22 nt, Human
aagcacauuguacauuugugcu

SEQ ID NO: 305731 - RNA, 22 nt, Human
cauugaaaccuaacauaggcug

SEQ ID NO: 305732 - RNA, 22 nt, Human
caguuucucucaauaagcaucg

SEQ ID NO: 305733 - RNA, 22 nt, Human
uuucacaucagagguagauuag

SEQ ID NO: 305734 - RNA, 22 nt, Human
agagccugcaucaggcuugggg

SEQ ID NO: 305735 - RNA, 22 nt, Human
ugugcccaucccucuggagugu

SEQ ID NO: 305736 - RNA, 22 nt, Human
uccucaggcugccuggaagacu

SEQ ID NO: 305737 - RNA, 22 nt, Human
ucuguucaguugauguaguuuu

SEQ ID NO: 305738 - RNA, 18 nt, Human
ucuuuggacaacuacugg

SEQ ID NO: 305739 - RNA, 22 nt, Human
gguguccaucaggcugugcuuc

SEQ ID NO: 305740 - RNA, 19 nt, Human
agagaaagaauugagucua

SEQ ID NO: 305741 - RNA, 22 nt, Human
caacagcugaucuuugaugaag

SEQ ID NO: 305742 - RNA, 22 nt, Human
uucaaucauuagaaucucaggc

SEQ ID NO: 305743 - RNA, 17 nt, Human
gguggccugcaguggcu

SEQ ID NO: 305744 - RNA, 22 nt, Human
cauugcacgggcgucugucugu

SEQ ID NO: 305745 - RNA, 22 nt, Human
ccagcagcccacaggcgucccu

SEQ ID NO: 305746 - RNA, 22 nt, Human
uauguacuacacuagaacauuu

SEQ ID NO: 305747 - RNA, 22 nt, Human
uccuucagucuucugagccaua

SEQ ID NO: 305748 - RNA, 23 nt, Human
ggaaagagaggaguugugcauag

SEQ ID NO: 305749 - RNA, 22 nt, Human
agcacagaguugcagagagcgu

SEQ ID NO: 305750 - RNA, 22 nt, Human
gugcuucucuucacacccaacu

SEQ ID NO: 305751 - RNA, 22 nt, Human
uugcugaaaacaguggguauug

SEQ ID NO: 305752 - RNA, 22 nt, Human
gccaggcuggucuugaacuccu

SEQ ID NO: 305753 - RNA, 22 nt, Human
cauuuacagugagaguuuuuac

SEQ ID NO: 305754 - RNA, 22 nt, Human
acaccauacucauguugguucc

SEQ ID NO: 305755 - RNA, 22 nt, Human
uuguggcucgugagauguuagg

SEQ ID NO: 305756 - RNA, 22 nt, Human
agcccuguagauuuaggagagu

SEQ ID NO: 305757 - RNA, 22 nt, Human
cccuggagguggagguugcagg

SEQ ID NO: 305758 - RNA, 22 nt, Human
aggccagagaggggaccagccu

SEQ ID NO: 305759 - RNA, 22 nt, Human
acagcugggugcugcucagagc

SEQ ID NO: 305760 - RNA, 22 nt, Human
acauuucuauagugcaucuguu

SEQ ID NO: 305761 - RNA, 17 nt, Human
gcuuccugugcugggga

SEQ ID NO: 305762 - RNA, 22 nt, Human
ucaguguuagacaaguuuggaa

SEQ ID NO: 305763 - RNA, 22 nt, Human
ucugggugcccuuugcucuguu

SEQ ID NO: 305764 - RNA, 22 nt, Human
ugccugucucugacugccauua

SEQ ID NO: 305765 - RNA, 22 nt, Human
ucauuuguugaacuuuagugcg

SEQ ID NO: 305766 - RNA, 22 nt, Human
uggcagcacaagguggcccaug

SEQ ID NO: 305767 - RNA, 19 nt, Human
ugcaagcuuuuucuuguua

SEQ ID NO: 305768 - RNA, 22 nt, Human
ccucugcucugguccaugugcu

SEQ ID NO: 305769 - RNA, 20 nt, Human
aggcucagagcaguaguaca

SEQ ID NO: 305770 - RNA, 22 nt, Human
augcuguguauuuuacucuuuc

SEQ ID NO: 305771 - RNA, 22 nt, Human
ggaaaugacuuggugcuucguu

SEQ ID NO: 305772 - RNA, 22 nt, Human
guguggcugauugacaugguca

SEQ ID NO: 305773 - RNA, 22 nt, Human
uccucagucacgguagcacauu

SEQ ID NO: 305774 - RNA, 22 nt, Human
ggcaccagcacuugggauggcu

SEQ ID NO: 305775 - RNA, 22 nt, Human
cuuggggcugucacucuggcau

SEQ ID NO: 305776 - RNA, 22 nt, Human
ugaaggugucuuugugaacauc

SEQ ID NO: 305777 - RNA, 22 nt, Human
gcucccaggaagagaagggcca

SEQ ID NO: 305778 - RNA, 23 nt, Human
cuggggcuuucaaaucugggcag

SEQ ID NO: 305779 - RNA, 22 nt, Human
cccagggcuuuucucacuagac

SEQ ID NO: 305780 - RNA, 22 nt, Human
aaaucugggagcagcucggcca

SEQ ID NO: 305781 - RNA, 22 nt, Human
uccuucaggccucauucucaua

SEQ ID NO: 305782 - RNA, 20 nt, Human
uccucagaagacauuugggg

SEQ ID NO: 305783 - RNA, 22 nt, Human
uggggaagggcacccuggagac

SEQ ID NO: 305784 - RNA, 22 nt, Human
agugugugcaugcauucgugca

SEQ ID NO: 305785 - RNA, 22 nt, Human
aguacauauaguaauuuagcca

SEQ ID NO: 305786 - RNA, 22 nt, Human
gcauuucuuccuggugugagcc

SEQ ID NO: 305787 - RNA, 22 nt, Human
caugcugugcaucuugaugacc

SEQ ID NO: 305788 - RNA, 22 nt, Human
aguuggagugaacaugagauug

SEQ ID NO: 305789 - RNA, 22 nt, Human
ugcaauaaguuguguuaucacu

SEQ ID NO: 305790 - RNA, 20 nt, Human
agcauuugaaauaugacuau

SEQ ID NO: 305791 - RNA, 22 nt, Human
uccagggcugacuugggagagg

SEQ ID NO: 305792 - RNA, 23 nt, Human
ucuuuccucagcacacaccaaga

SEQ ID NO: 305793 - RNA, 22 nt, Human
ggguacuuaauauuuacggggu

SEQ ID NO: 305794 - RNA, 22 nt, Human
gcugcccaggguggagccggcu

SEQ ID NO: 305795 - RNA, 22 nt, Human
gcaggaugagugaguacauuua

SEQ ID NO: 305796 - RNA, 22 nt, Human
uccugggcugugugccacucug

SEQ ID NO: 305797 - RNA, 22 nt, Human
ucaggugguccuaagugccauc

SEQ ID NO: 305798 - RNA, 22 nt, Human
uuccaggaggagguacuagagg

SEQ ID NO: 305799 - RNA, 22 nt, Human
cagugggaagggcagaggcuuu

SEQ ID NO: 305800 - RNA, 22 nt, Human
ucugcucuguggcuucagcuaa

SEQ ID NO: 305801 - RNA, 22 nt, Human
acaagagacaagagguucuucu

SEQ ID NO: 305802 - RNA, 22 nt, Human
gacccugaggauucccugcuga

SEQ ID NO: 305803 - RNA, 22 nt, Human
aguaaugucccuuaaauguggu

SEQ ID NO: 305804 - RNA, 22 nt, Human
aucaguuucugugaagaacaca

SEQ ID NO: 305805 - RNA, 22 nt, Human
agcagccagaaagggcagucga

SEQ ID NO: 305806 - RNA, 22 nt, Human
gaugcacaugugaguauagaag

SEQ ID NO: 305807 - RNA, 22 nt, Human
ggaugcaggggcagcagagccu

SEQ ID NO: 305808 - RNA, 22 nt, Human
gccucugcaugcucagcaccca

SEQ ID NO: 305809 - RNA, 19 nt, Human
ccuuggaguuccaggugga

SEQ ID NO: 305810 - RNA, 22 nt, Human
aagacuuucucccaaauccuca

SEQ ID NO: 305811 - RNA, 22 nt, Human
gcagggcugggugggagacaga

SEQ ID NO: 305812 - RNA, 22 nt, Human
agcugggucuugggccaggaga

SEQ ID NO: 305813 - RNA, 22 nt, Human
auaaaaaugagggcgguagcua

SEQ ID NO: 305814 - RNA, 22 nt, Human
ucugucugcucauuuaccucag

SEQ ID NO: 305815 - RNA, 22 nt, Human
caguggcaugguugacugcagu

SEQ ID NO: 305816 - RNA, 22 nt, Human
agcagggguaacagaaggaaag

SEQ ID NO: 305817 - RNA, 22 nt, Human
gccucugcggagcuguacauca

SEQ ID NO: 305818 - RNA, 22 nt, Human
augcaguggcagcuccuggugu

SEQ ID NO: 305819 - RNA, 22 nt, Human
agugucugccagcugccaggug

SEQ ID NO: 305820 - RNA, 23 nt, Human
cugcuguguuggucucgauggga

SEQ ID NO: 305821 - RNA, 22 nt, Human
ugggcucucuggcaggaaggcu

SEQ ID NO: 305822 - RNA, 19 nt, Human
gagcugccuuuugaagacc

SEQ ID NO: 305823 - RNA, 22 nt, Human
agcucccaauugacuugaacua

SEQ ID NO: 305824 - RNA, 22 nt, Human
cugccagcucucuggaggcucu

SEQ ID NO: 305825 - RNA, 18 nt, Human
cccagcuccacuucccuc

SEQ ID NO: 305826 - RNA, 22 nt, Human
caacacauugaagcuaugauga

SEQ ID NO: 305827 - RNA, 22 nt, Human
ugcuggcuggccuggccuggac

SEQ ID NO: 305828 - RNA, 21 nt, Human
gccugcagaccccaccaggcu

SEQ ID NO: 305829 - RNA, 22 nt, Human
uggcuggcgccgggcuagccac

SEQ ID NO: 305830 - RNA, 23 nt, Human
gguggcaggaguggaugcugagc

SEQ ID NO: 305831 - RNA, 17 nt, Human
gauuuccugaaguucuu

SEQ ID NO: 305832 - RNA, 22 nt, Human
ccugucucuuucaaucugagag

SEQ ID NO: 305833 - RNA, 21 nt, Human
gugucaugguugacuuuggca

SEQ ID NO: 305834 - RNA, 22 nt, Human
acauguguggacaugaaucuac

SEQ ID NO: 305835 - RNA, 22 nt, Human
aaggaaccuggaguagagggag

SEQ ID NO: 305836 - RNA, 23 nt, Human
caggcaggaugaggacuacacuc

SEQ ID NO: 305837 - RNA, 22 nt, Human
gauuucuuuaugaaguacagaa

SEQ ID NO: 305838 - RNA, 22 nt, Human
ucugccuggauuuuggaaagcu

SEQ ID NO: 305839 - RNA, 22 nt, Human
agcagagucugugugcacuuua

SEQ ID NO: 305840 - RNA, 22 nt, Human
uauguagaagcugcucaaagaa

SEQ ID NO: 305841 - RNA, 22 nt, Human
uccagccacucagcagggauug

SEQ ID NO: 305842 - RNA, 22 nt, Human
auucuggauuaucaguccacca

SEQ ID NO: 305843 - RNA, 22 nt, Human
agccacagagagggagcugcaa

SEQ ID NO: 305844 - RNA, 22 nt, Human
agcaggcuuguuaugucugaga

SEQ ID NO: 305845 - RNA, 17 nt, Human
ugaaggaaggaugaugu

SEQ ID NO: 305846 - RNA, 22 nt, Human
aaggcaguuugggccaccaucu

SEQ ID NO: 305847 - RNA, 22 nt, Human
ccagcccuuagauaaaccuggc

SEQ ID NO: 305848 - RNA, 22 nt, Human
augaagauaagaccaggcugga

SEQ ID NO: 305849 - RNA, 22 nt, Human
gcaggcucuucuuucugcccag

SEQ ID NO: 305850 - RNA, 22 nt, Human
agagccugugauugucaucacc

SEQ ID NO: 305851 - RNA, 22 nt, Human
accucugccacuuucuaacucu

SEQ ID NO: 305852 - RNA, 22 nt, Human
gcuguggccaacaaaccacuuu

SEQ ID NO: 305853 - RNA, 22 nt, Human
ggccucucuggcauggcugccc

SEQ ID NO: 305854 - RNA, 22 nt, Human
ucagacaguuugcagugugccu

SEQ ID NO: 305855 - RNA, 22 nt, Human
caggggcuuuuccucuauaagg

SEQ ID NO: 305856 - RNA, 22 nt, Human
uacaaaguaauguauaauaucg

SEQ ID NO: 305857 - RNA, 22 nt, Human
caguuuuugccauuaagaguaa

SEQ ID NO: 305858 - RNA, 22 nt, Human
aggccugaggaccuucuggagg

SEQ ID NO: 305859 - RNA, 22 nt, Human
ccagcucuagccccauguggcu

SEQ ID NO: 305860 - RNA, 22 nt, Human
ucauaaagcuugccugcagugu

SEQ ID NO: 305861 - RNA, 22 nt, Human
agcagccacccagcugcucauu

SEQ ID NO: 305862 - RNA, 22 nt, Human
acauucuuggacuccacucuag

SEQ ID NO: 305863 - RNA, 22 nt, Human
gaccauuuguugaaaagauuau

SEQ ID NO: 305864 - RNA, 22 nt, Human
caguuucuacgacuuaagcaca

SEQ ID NO: 305865 - RNA, 22 nt, Human
gcagggcaugggcccugucugc

SEQ ID NO: 305866 - RNA, 22 nt, Human
agaaaugcucuuccugaccaga

SEQ ID NO: 305867 - RNA, 22 nt, Human
ucacugcucucuaagcaucgcc

SEQ ID NO: 305868 - RNA, 22 nt, Human
acaguguuuaagagauggcauu

SEQ ID NO: 305869 - RNA, 22 nt, Human
cagagcugugauaaauagauau

SEQ ID NO: 305870 - RNA, 22 nt, Human
gcucaagagagaugcaguucuu

SEQ ID NO: 305871 - RNA, 22 nt, Human
uuuccuugggucucuuaguggc

SEQ ID NO: 305872 - RNA, 22 nt, Human
gccucuggucccucaugcugug

SEQ ID NO: 305873 - RNA, 22 nt, Human
aggccucacauugggcuucaag

SEQ ID NO: 305874 - RNA, 22 nt, Human
accuggcaugaagcaugccuua

SEQ ID NO: 305875 - RNA, 22 nt, Human
auugaaaggcaaaguaggaagc

SEQ ID NO: 305876 - RNA, 22 nt, Human
cugggcuggagugcaauggcgc

SEQ ID NO: 305877 - RNA, 18 nt, Human
uggagcaggaagccuggc

SEQ ID NO: 305878 - RNA, 22 nt, Human
acauuuaaccaaacuguuuaau

SEQ ID NO: 305879 - RNA, 22 nt, Human
ucacuguauuugcugaugcaua

SEQ ID NO: 305880 - RNA, 22 nt, Human
agauacauuaguaguuacuugu

SEQ ID NO: 305881 - RNA, 22 nt, Human
gcuuccuagaucugugguacuc

SEQ ID NO: 305882 - RNA, 20 nt, Human
caggccucugggggcccugg

SEQ ID NO: 305883 - RNA, 21 nt, Human
acagaugggaugagcacacug

SEQ ID NO: 305884 - RNA, 22 nt, Human
ucccaaggcacagggcagggac

SEQ ID NO: 305885 - RNA, 22 nt, Human
agggcucuguccccagaggccc

SEQ ID NO: 305886 - RNA, 22 nt, Human
uagaaacauguucuguucuguu

SEQ ID NO: 305887 - RNA, 22 nt, Human
cggggcuguagcacagcugagc

SEQ ID NO: 305888 - RNA, 20 nt, Human
ugcuuccuggccacugcggg

SEQ ID NO: 305889 - RNA, 22 nt, Human
ggugggcacccgagacuggauc

SEQ ID NO: 305890 - RNA, 22 nt, Human
accacuguaucuccagcacauu

SEQ ID NO: 305891 - RNA, 21 nt, Human
agcagcagaucuggugagggc

SEQ ID NO: 305892 - RNA, 22 nt, Human
ugcccucaagcaacagagagga

SEQ ID NO: 305893 - RNA, 22 nt, Human
ucaggcagagcuguggagcucu

SEQ ID NO: 305894 - RNA, 22 nt, Human
acaguguuuugucuggcagggc

SEQ ID NO: 305895 - RNA, 23 nt, Human
uccaccccagcugaggcuuagcc

SEQ ID NO: 305896 - RNA, 22 nt, Human
aguauacauauauuagccuucg

SEQ ID NO: 305897 - RNA, 22 nt, Human
gcccaggcuagcguagagugca

SEQ ID NO: 305898 - RNA, 21 nt, Human
guuuuaagggagaaaaccuag

SEQ ID NO: 305899 - RNA, 22 nt, Human
gagcucugacugcugggugaca

SEQ ID NO: 305900 - RNA, 20 nt, Human
guggccucucacauucugag

SEQ ID NO: 305901 - RNA, 22 nt, Human
aaagaggaaccaagagcacgug

SEQ ID NO: 305902 - RNA, 22 nt, Human
gcucucugggugugucuagaua

SEQ ID NO: 305903 - RNA, 22 nt, Human
gaguuauuggguggaaagguag

SEQ ID NO: 305904 - RNA, 22 nt, Human
ugagaagauugggcagagugga

SEQ ID NO: 305905 - RNA, 22 nt, Human
aaggaagacacagaugaaguga

SEQ ID NO: 305906 - RNA, 22 nt, Human
aucuacaggcugaggugggagg

SEQ ID NO: 305907 - RNA, 22 nt, Human
ugcuguagcccugcacagugca

SEQ ID NO: 305908 - RNA, 22 nt, Human
aucuaagauguauugagcacuu

SEQ ID NO: 305909 - RNA, 22 nt, Human
caaagguauucucauuuuggaa

SEQ ID NO: 305910 - RNA, 22 nt, Human
ugcagcaggcacaggacggaag

SEQ ID NO: 305911 - RNA, 17 nt, Human
cccguucucuucgcugg

SEQ ID NO: 305912 - RNA, 22 nt, Human
gccaaagcagucuugccucugc

SEQ ID NO: 305913 - RNA, 22 nt, Human
aaguuauuuccucgugacugaa

SEQ ID NO: 305914 - RNA, 22 nt, Human
agcaaggcagucagcuggcugg

SEQ ID NO: 305915 - RNA, 22 nt, Human
cagcagagcugugugggaaggg

SEQ ID NO: 305916 - RNA, 22 nt, Human
guggcagcggcccaggccgucu

SEQ ID NO: 305917 - RNA, 22 nt, Human
guggcugcagagccagcaagcu

SEQ ID NO: 305918 - RNA, 22 nt, Human
uggcucagaaggcugccuucac

SEQ ID NO: 305919 - RNA, 22 nt, Human
uaaaagauuuuauaggaacaag

SEQ ID NO: 305920 - RNA, 22 nt, Human
aaaguucuggggguguuucugg

SEQ ID NO: 305921 - RNA, 22 nt, Human
aaguaugucaaucauacuucaa

SEQ ID NO: 305922 - RNA, 22 nt, Human
ucuagaauuuugccauauagcu

SEQ ID NO: 305923 - RNA, 22 nt, Human
acucagugaauuuucaucaaau

SEQ ID NO: 305924 - RNA, 22 nt, Human
gaacagcccuguuaagucuguu

SEQ ID NO: 305925 - RNA, 22 nt, Human
cugaaggauuagagagcacuua

SEQ ID NO: 305926 - RNA, 22 nt, Human
aaaagucugcucucauuucaga

SEQ ID NO: 305927 - RNA, 17 nt, Human
uuagcaaaauagcacuu

SEQ ID NO: 305928 - RNA, 22 nt, Human
acaggugauucaggcucuggga

SEQ ID NO: 305929 - RNA, 22 nt, Human
cagcuggcguggagugauugca

SEQ ID NO: 305930 - RNA, 22 nt, Human
cauggcaggaggcugcuggcag

SEQ ID NO: 305931 - RNA, 22 nt, Human
agucucugccagcuuguccucu

SEQ ID NO: 305932 - RNA, 19 nt, Human
uucauucuuucuacuuacc

SEQ ID NO: 305933 - RNA, 21 nt, Human
aggcucagagaucaaacagua

SEQ ID NO: 305934 - RNA, 22 nt, Human
uugauuaaacaggcauauucaa

SEQ ID NO: 305935 - RNA, 22 nt, Human
acucagcuuccuacagcuagaa

SEQ ID NO: 305936 - RNA, 22 nt, Human
ggcagcuuuuaucccugacaga

SEQ ID NO: 305937 - RNA, 22 nt, Human
auugucuguacuuuaaaaaugu

SEQ ID NO: 305938 - RNA, 22 nt, Human
gcucucagguacaaagcugugu

SEQ ID NO: 305939 - RNA, 22 nt, Human
uagcuggggcuuucauucuugc

SEQ ID NO: 305940 - RNA, 22 nt, Human
ucugcagcuugcacaggcaggc

SEQ ID NO: 305941 - RNA, 20 nt, Human
ggguggaguugcggucugug

SEQ ID NO: 305942 - RNA, 22 nt, Human
gcagcugaaagggaucucuaca

SEQ ID NO: 305943 - RNA, 22 nt, Human
ccagggcaauaggaacacuuuu

SEQ ID NO: 305944 - RNA, 22 nt, Human
augggagugacagggccacugg

SEQ ID NO: 305945 - RNA, 23 nt, Human
cauuucugggagauuuauaaaau

SEQ ID NO: 305946 - RNA, 20 nt, Human
caggaggcaaggucaagguc

SEQ ID NO: 305947 - RNA, 22 nt, Human
aggcacugguccauuuucugca

SEQ ID NO: 305948 - RNA, 22 nt, Human
cccuggagggauuucucaauca

SEQ ID NO: 305949 - RNA, 22 nt, Human
gcagcugaagcugcaguuccag

SEQ ID NO: 305950 - RNA, 22 nt, Human
ucauuuguucucauucucuacu

SEQ ID NO: 305951 - RNA, 22 nt, Human
aaggcaggaugcggacccaucu

SEQ ID NO: 305952 - RNA, 22 nt, Human
gcaaaaaaugcuuguugcuuag

SEQ ID NO: 305953 - RNA, 22 nt, Human
uacucaaacucacuaagacaga

SEQ ID NO: 305954 - RNA, 22 nt, Human
gccagggcaggggagcaucugc

SEQ ID NO: 305955 - RNA, 22 nt, Human
gagaagggauauggcuucuuga

SEQ ID NO: 305956 - RNA, 22 nt, Human
ggaggccaucagggagggcauu

SEQ ID NO: 305957 - RNA, 22 nt, Human
gguagcacauugcauuaggaga

SEQ ID NO: 305958 - RNA, 22 nt, Human
gcaggggcugcugggaacucgg

SEQ ID NO: 305959 - RNA, 22 nt, Human
ggccucugguucguggugaccu

SEQ ID NO: 305960 - RNA, 22 nt, Human
gcucugcucuaacauuccugac

SEQ ID NO: 305961 - RNA, 22 nt, Human
gccaccucggcuuucucugcuc

SEQ ID NO: 305962 - RNA, 22 nt, Human
cacuguaauagcauuauaagug

SEQ ID NO: 305963 - RNA, 22 nt, Human
caggggcucuaaugcaugauca

SEQ ID NO: 305964 - RNA, 22 nt, Human
ggugggugagcccugggagcug

SEQ ID NO: 305965 - RNA, 22 nt, Human
cagacagcugcuuucuugcugu

SEQ ID NO: 305966 - RNA, 22 nt, Human
cauggacucugguuuggggagc

SEQ ID NO: 305967 - RNA, 22 nt, Human
cugcucugacccuuucaccuuc

SEQ ID NO: 305968 - RNA, 22 nt, Human
ucagaagacuacuaggacacau

SEQ ID NO: 305969 - RNA, 22 nt, Human
uccucaggugacuagguaucuu

SEQ ID NO: 305970 - RNA, 22 nt, Human
agccaaggcagcuagagcucug

SEQ ID NO: 305971 - RNA, 22 nt, Human
gugccugugcggacucagggaa

SEQ ID NO: 305972 - RNA, 22 nt, Human
cugccagccaggccagguaggc

SEQ ID NO: 305973 - RNA, 20 nt, Human
acaguguuagguuuuuccuu

SEQ ID NO: 305974 - RNA, 22 nt, Human
accuggcacuacaggcaccugu

SEQ ID NO: 305975 - RNA, 21 nt, Human
uaucuacuggugucuuucaga

SEQ ID NO: 305976 - RNA, 22 nt, Human
agaaguuaccacauacuucucu

SEQ ID NO: 305977 - RNA, 22 nt, Human
ucccagccugacagugcaucaa

SEQ ID NO: 305978 - RNA, 22 nt, Human
aggauccuuuggccacuucuua

SEQ ID NO: 305979 - RNA, 22 nt, Human
gcaugucaugucauguaggaau

SEQ ID NO: 305980 - RNA, 22 nt, Human
gagcacagccaaaguaagaagg

SEQ ID NO: 305981 - RNA, 22 nt, Human
gcauuguccugcuucugagugu

SEQ ID NO: 305982 - RNA, 22 nt, Human
ucuuuuggaaaugaugugcagg

SEQ ID NO: 305983 - RNA, 22 nt, Human
aggcagaggaaggguggauuug

SEQ ID NO: 305984 - RNA, 21 nt, Human
uuacuuuugcaccaaccuaau

SEQ ID NO: 305985 - RNA, 22 nt, Human
uaugcacauugguuuccucauu

SEQ ID NO: 305986 - RNA, 22 nt, Human
cagcagccuacaaugcacagaa

SEQ ID NO: 305987 - RNA, 18 nt, Human
ugcucuguuuaaugauuu

SEQ ID NO: 305988 - RNA, 22 nt, Human
cuguuaaucugcuugcaugaug

SEQ ID NO: 305989 - RNA, 22 nt, Human
gcugcucugugacagccuccgg

SEQ ID NO: 305990 - RNA, 22 nt, Human
agaccuggaugugagggaagua

SEQ ID NO: 305991 - RNA, 22 nt, Human
aggcucagagagcuguguccau

SEQ ID NO: 305992 - RNA, 22 nt, Human
aaauaaguaguuuaguguugug

SEQ ID NO: 305993 - RNA, 22 nt, Human
cugcccgcugcuagagaggccg

SEQ ID NO: 305994 - RNA, 22 nt, Human
ccaaagucuggagcagcagagc

SEQ ID NO: 305995 - RNA, 22 nt, Human
ucucaggccccugaguuucucu

SEQ ID NO: 305996 - RNA, 22 nt, Human
ugcuggcccaugaagacgcagu

SEQ ID NO: 305997 - RNA, 22 nt, Human
ccagcccugaacccugcugcau

SEQ ID NO: 305998 - RNA, 22 nt, Human
uaauagaaagguauuuuuugca

SEQ ID NO: 305999 - RNA, 22 nt, Human
gcacugaaauuauaugcauuug

SEQ ID NO: 306000 - RNA, 22 nt, Human
gaaugcacucacccaucacuca

SEQ ID NO: 306001 - RNA, 22 nt, Human
gagcugggucuccaccuuggca

SEQ ID NO: 306002 - RNA, 22 nt, Human
ucaguguuuacaugcauccuug

SEQ ID NO: 306003 - RNA, 17 nt, Human
uucaaagcuuaucaagg

SEQ ID NO: 306004 - RNA, 21 nt, Human
cugcaucucauagaacauguc

SEQ ID NO: 306005 - RNA, 22 nt, Human
agcugcaggccucuccugggga

SEQ ID NO: 306006 - RNA, 22 nt, Human
uaaugcacauagaaguacuuag

SEQ ID NO: 306007 - RNA, 17 nt, Human
ucuguucaagugagagg

SEQ ID NO: 306008 - RNA, 22 nt, Human
agggcagagaucugagugggca

SEQ ID NO: 306009 - RNA, 22 nt, Human
gugugccaacaaaagacagugc

SEQ ID NO: 306010 - RNA, 22 nt, Human
uuacacaacaucuguauuauua

SEQ ID NO: 306011 - RNA, 22 nt, Human
aauaauuuccagccaacuggaa

SEQ ID NO: 306012 - RNA, 22 nt, Human
aaauucagcagugaaaugcccc

SEQ ID NO: 306013 - RNA, 22 nt, Human
cugcugugcuuguggccacccg

SEQ ID NO: 306014 - RNA, 22 nt, Human
ucaggaguccugccugcagccu

SEQ ID NO: 306015 - RNA, 22 nt, Human
ugaacaacugcaaaaaucucca

SEQ ID NO: 306016 - RNA, 22 nt, Human
gagaggagucccuaucacaguu

SEQ ID NO: 306017 - RNA, 22 nt, Human
augcucuggaguacgugaaauu

SEQ ID NO: 306018 - RNA, 22 nt, Human
ccagcuggugacauccccaacc

SEQ ID NO: 306019 - RNA, 22 nt, Human
augggaggcagacacuaaguuc

SEQ ID NO: 306020 - RNA, 22 nt, Human
gagcccuggcagucugggaugg

SEQ ID NO: 306021 - RNA, 22 nt, Human
aauugugcuaugauuaugaaag

SEQ ID NO: 306022 - RNA, 22 nt, Human
uggccugccccgagauccuggc

SEQ ID NO: 306023 - RNA, 22 nt, Human
gcuguguccucacacagccuuu

SEQ ID NO: 306024 - RNA, 22 nt, Human
ugaaaguugcacauaagagaau

SEQ ID NO: 306025 - RNA, 21 nt, Human
acagacagggccagugucccc

SEQ ID NO: 306026 - RNA, 22 nt, Human
ucuucuuaugugccauuaucuc

SEQ ID NO: 306027 - RNA, 22 nt, Human
gauaugaaguggcauugugaag

SEQ ID NO: 306028 - RNA, 22 nt, Human
ccugccagcccgcguucaugcc

SEQ ID NO: 306029 - RNA, 22 nt, Human
agagcugguuuacucaggaauu

SEQ ID NO: 306030 - RNA, 22 nt, Human
ucaagagaaggggaaauagacu

SEQ ID NO: 306031 - RNA, 21 nt, Human
uccagggaacuucucaggaau

SEQ ID NO: 306032 - RNA, 19 nt, Human
ucccuuccugucgggcucc

SEQ ID NO: 306033 - RNA, 22 nt, Human
gcaggggaguggaugauggauu

SEQ ID NO: 306034 - RNA, 22 nt, Human
uucaucaauguguuuaauaaug

SEQ ID NO: 306035 - RNA, 22 nt, Human
aguuuuuccguggcuacgauaa

SEQ ID NO: 306036 - RNA, 22 nt, Human
ggugaaggucuacugugugcca

SEQ ID NO: 306037 - RNA, 19 nt, Human
auccuggguccuccagcug

SEQ ID NO: 306038 - RNA, 22 nt, Human
cagggccuuauccugccauuga

SEQ ID NO: 306039 - RNA, 22 nt, Human
gugccuggagcuaauguguaua

SEQ ID NO: 306040 - RNA, 22 nt, Human
uugagaagaaauaguuugcaau

SEQ ID NO: 306041 - RNA, 22 nt, Human
gccuuccuuuuaccaccagcca

SEQ ID NO: 306042 - RNA, 22 nt, Human
ccuuucucuuggauaccgauug

SEQ ID NO: 306043 - RNA, 22 nt, Human
agcagcugguaggaguggccac

SEQ ID NO: 306044 - RNA, 22 nt, Human
ucaggaucggccuuuuuuuaag

SEQ ID NO: 306045 - RNA, 23 nt, Human
uggcucugugucacauacaggau

SEQ ID NO: 306046 - RNA, 22 nt, Human
cugggagagaagcgaagcuggg

SEQ ID NO: 306047 - RNA, 20 nt, Human
aggagaugauccagagucag

SEQ ID NO: 306048 - RNA, 22 nt, Human
auggaaagccaguguuccauca

SEQ ID NO: 306049 - RNA, 22 nt, Human
uggcugaaggaagauucuucua

SEQ ID NO: 306050 - RNA, 22 nt, Human
ucauacaucuuguauaucuauc

SEQ ID NO: 306051 - RNA, 22 nt, Human
ucagaagcaaacaucacucuag

SEQ ID NO: 306052 - RNA, 22 nt, Human
uauucacaugaaaacaaauuuu

SEQ ID NO: 306053 - RNA, 22 nt, Human
uuuaccaagcuuuaauuacaua

SEQ ID NO: 306054 - RNA, 22 nt, Human
cagcuuggcuuccgcuuuacug

SEQ ID NO: 306055 - RNA, 22 nt, Human
caguuucuguuuuaaauagcag

SEQ ID NO: 306056 - RNA, 17 nt, Human
uuucuccuuccaucuca

SEQ ID NO: 306057 - RNA, 22 nt, Human
aacaucagaauauccauguugg

SEQ ID NO: 306058 - RNA, 22 nt, Human
accaaggaagagauucucaguu

SEQ ID NO: 306059 - RNA, 22 nt, Human
guuagaauaaaaggucagagag

SEQ ID NO: 306060 - RNA, 22 nt, Human
gggcaugagagggcagcuggca

SEQ ID NO: 306061 - RNA, 22 nt, Human
caguccugcccaggcugacaga

SEQ ID NO: 306062 - RNA, 22 nt, Human
uaaaugugcacuuuacuuuuca

SEQ ID NO: 306063 - RNA, 22 nt, Human
ugcuggggguucagaugaguaa

SEQ ID NO: 306064 - RNA, 22 nt, Human
aggagcugcaaauauuaguaau

SEQ ID NO: 306065 - RNA, 22 nt, Human
uacucagagucauugcccuucu

SEQ ID NO: 306066 - RNA, 22 nt, Human
cuggcagcuggaggcuagaggc

SEQ ID NO: 306067 - RNA, 23 nt, Human
gcagaggagcaagcuggacacca

SEQ ID NO: 306068 - RNA, 22 nt, Human
uuugcaauuugugcugcaaaug

SEQ ID NO: 306069 - RNA, 22 nt, Human
agggagagguugaaaccucagu

SEQ ID NO: 306070 - RNA, 22 nt, Human
cugcuuuguggaaucacacugg

SEQ ID NO: 306071 - RNA, 22 nt, Human
accauuuuggguauuuucagag

SEQ ID NO: 306072 - RNA, 22 nt, Human
gggcugcugcugccagcgacac

SEQ ID NO: 306073 - RNA, 22 nt, Human
aggaggccgauuucagaggucg

SEQ ID NO: 306074 - RNA, 19 nt, Human
ccugugugggguagagauc

SEQ ID NO: 306075 - RNA, 22 nt, Human
agccacagcccacaggacucuu

SEQ ID NO: 306076 - RNA, 22 nt, Human
agggcagcagcuccuccuagcu

SEQ ID NO: 306077 - RNA, 22 nt, Human
cuauugaaaguguacaauucaa

SEQ ID NO: 306078 - RNA, 22 nt, Human
uagcacaucuggcgcuuauagg

SEQ ID NO: 306079 - RNA, 22 nt, Human
agggcaaguugagugugcgugg

SEQ ID NO: 306080 - RNA, 22 nt, Human
aaugagaaaacacagaggaggu

SEQ ID NO: 306081 - RNA, 22 nt, Human
uggaagcacuuggguuuuguug

SEQ ID NO: 306082 - RNA, 22 nt, Human
agccuucagcaguucaggugcc

SEQ ID NO: 306083 - RNA, 22 nt, Human
uuuuccagagcugucucuugca

SEQ ID NO: 306084 - RNA, 17 nt, Human
agagagagcaugccacc

SEQ ID NO: 306085 - RNA, 22 nt, Human
agccacagcuccuugguggaga

SEQ ID NO: 306086 - RNA, 22 nt, Human
aucuggcugagcgaggcccaca

SEQ ID NO: 306087 - RNA, 22 nt, Human
uuucuaggcacagugucuuccc

SEQ ID NO: 306088 - RNA, 22 nt, Human
cuacuuuaauuuucugcagaga

SEQ ID NO: 306089 - RNA, 22 nt, Human
cagcuuucaucagugacacuca

SEQ ID NO: 306090 - RNA, 21 nt, Human
gacaggggaagaagcaaggag

SEQ ID NO: 306091 - RNA, 22 nt, Human
acagucauuagauacaaugucu

SEQ ID NO: 306092 - RNA, 22 nt, Human
gcuguauuccugcacuguauag

SEQ ID NO: 306093 - RNA, 22 nt, Human
ggcucuggguucugcaaugcgu

SEQ ID NO: 306094 - RNA, 22 nt, Human
cccagccagccucuucccauau

SEQ ID NO: 306095 - RNA, 22 nt, Human
guguguuucagaagccaggugu

SEQ ID NO: 306096 - RNA, 19 nt, Human
cugagagaugcuucacaca

SEQ ID NO: 306097 - RNA, 22 nt, Human
uaagaacuucggacauguuauc

SEQ ID NO: 306098 - RNA, 22 nt, Human
uuggcagugucugcaaaaugga

SEQ ID NO: 306099 - RNA, 22 nt, Human
caaagucccagcugcuuagaga

SEQ ID NO: 306100 - RNA, 22 nt, Human
ggguggcuccuaugggcauagc

SEQ ID NO: 306101 - RNA, 19 nt, Human
uggcuccugccugccuucu

SEQ ID NO: 306102 - RNA, 22 nt, Human
aaucuucagugucuaaaaagca

SEQ ID NO: 306103 - RNA, 17 nt, Human
aggugcagaggcagagc

SEQ ID NO: 306104 - RNA, 22 nt, Human
cugaaugucgaucagcuugggu

SEQ ID NO: 306105 - RNA, 22 nt, Human
cuguacaggugaggagggggcu

SEQ ID NO: 306106 - RNA, 20 nt, Human
aggcacuggauuucuuauau

SEQ ID NO: 306107 - RNA, 23 nt, Human
gaaguucuuucuucucaugcugu

SEQ ID NO: 306108 - RNA, 22 nt, Human
uccuugaauugugccacuuacc

SEQ ID NO: 306109 - RNA, 22 nt, Human
gcagggcaaugaucccgagagg

SEQ ID NO: 306110 - RNA, 22 nt, Human
cagcuccugccugggcagcugu

SEQ ID NO: 306111 - RNA, 22 nt, Human
aaaauugaagugaucaggaacu

SEQ ID NO: 306112 - RNA, 22 nt, Human
guccucaguaagagggccucug

SEQ ID NO: 306113 - RNA, 17 nt, Human
cugaggcccagggccca

SEQ ID NO: 306114 - RNA, 23 nt, Human
uuuggacuugugacucuucuccu

SEQ ID NO: 306115 - RNA, 22 nt, Human
ggauguugauugaauggccauu

SEQ ID NO: 306116 - RNA, 22 nt, Human
aaaagacaucuauuucaggcag

SEQ ID NO: 306117 - RNA, 22 nt, Human
ccagggcagcagaauuggggca

SEQ ID NO: 306118 - RNA, 19 nt, Human
ccucugccagcccgccucu

SEQ ID NO: 306119 - RNA, 22 nt, Human
uauguacaugauuucauuugcu

SEQ ID NO: 306120 - RNA, 22 nt, Human
uaccugagcccagugcagcaua

SEQ ID NO: 306121 - RNA, 22 nt, Human
uguggcacuucucuccuuguaa

SEQ ID NO: 306122 - RNA, 22 nt, Human
cuggcucuaucuccaaggcugg

SEQ ID NO: 306123 - RNA, 22 nt, Human
augagacaugacuucaggccuu

SEQ ID NO: 306124 - RNA, 22 nt, Human
aagagggcugcaaucuuauugc

SEQ ID NO: 306125 - RNA, 22 nt, Human
caaaguccuagaacagugcuug

SEQ ID NO: 306126 - RNA, 22 nt, Human
ucaguuuuguauguuguaaguc

SEQ ID NO: 306127 - RNA, 22 nt, Human
gaagagcugugauucaggcuua

SEQ ID NO: 306128 - RNA, 23 nt, Human
ucugcucugaaguucggcugagc

SEQ ID NO: 306129 - RNA, 22 nt, Human
ugccuguguccccuucuuggca

SEQ ID NO: 306130 - RNA, 22 nt, Human
agccaggaaccagcuacagucu

SEQ ID NO: 306131 - RNA, 20 nt, Human
agcugguuaucuuaauucuu

SEQ ID NO: 306132 - RNA, 19 nt, Human
gccacuccugaugcugccc

SEQ ID NO: 306133 - RNA, 22 nt, Human
uaauaguugugacuuuguaaag

SEQ ID NO: 306134 - RNA, 22 nt, Human
cuccuguauguugggcuucaca

SEQ ID NO: 306135 - RNA, 22 nt, Human
ggaggaugagcuacgaggagcu

SEQ ID NO: 306136 - RNA, 22 nt, Human
agaugcugugaggaagcuagga

SEQ ID NO: 306137 - RNA, 22 nt, Human
acagaugaggaaacagggucag

SEQ ID NO: 306138 - RNA, 20 nt, Human
gccagcacagggagcaguuc

SEQ ID NO: 306139 - RNA, 22 nt, Human
cugcauccuggaaauagcuaag

SEQ ID NO: 306140 - RNA, 22 nt, Human
acauuucugucuuagggacugu

SEQ ID NO: 306141 - RNA, 22 nt, Human
cagagccaaaugcugugguuau

SEQ ID NO: 306142 - RNA, 22 nt, Human
gcucugggcugcccucuggaca

SEQ ID NO: 306143 - RNA, 22 nt, Human
agagccuggaccugagcuacaa

SEQ ID NO: 306144 - RNA, 19 nt, Human
ccucccacggauuccuucc

SEQ ID NO: 306145 - RNA, 22 nt, Human
gcucccugaaaagaacaaaguc

SEQ ID NO: 306146 - RNA, 22 nt, Human
gcaaagucucaagacccaagug

SEQ ID NO: 306147 - RNA, 22 nt, Human
uagcuuuacaaagugcugcacc

SEQ ID NO: 306148 - RNA, 22 nt, Human
caggaagagaacauggaggcug

SEQ ID NO: 306149 - RNA, 22 nt, Human
acacagaaccucauagccucuc

SEQ ID NO: 306150 - RNA, 22 nt, Human
uucugucaaauuugccauaugg

SEQ ID NO: 306151 - RNA, 22 nt, Human
ccagguggacggcgaguacagg

SEQ ID NO: 306152 - RNA, 22 nt, Human
agcugcucucacuggacgccug

SEQ ID NO: 306153 - RNA, 22 nt, Human
uaaaauagcaugugcagugaaa

SEQ ID NO: 306154 - RNA, 22 nt, Human
ccucucuguaagggucccuccc

SEQ ID NO: 306155 - RNA, 22 nt, Human
uugguuuagagagugugguuac

SEQ ID NO: 306156 - RNA, 22 nt, Human
agccaagcaccacuggcacucg

SEQ ID NO: 306157 - RNA, 22 nt, Human
ucauacauucagcagauauuug

SEQ ID NO: 306158 - RNA, 22 nt, Human
uguguuauugccacugaagacc

SEQ ID NO: 306159 - RNA, 22 nt, Human
ucucaguguguugagaggucug

SEQ ID NO: 306160 - RNA, 22 nt, Human
aggcuggagggcaauggcaaga

SEQ ID NO: 306161 - RNA, 22 nt, Human
gaggcugccccuuccucagcug

SEQ ID NO: 306162 - RNA, 19 nt, Human
ggcagcuggacgcuguuca

SEQ ID NO: 306163 - RNA, 22 nt, Human
aaaggccaauaaagacaagcug

SEQ ID NO: 306164 - RNA, 21 nt, Human
cucacaggaugcaguguuacu

SEQ ID NO: 306165 - RNA, 20 nt, Human
ggcucuggaaucuggugggc

SEQ ID NO: 306166 - RNA, 22 nt, Human
cccaggcugauguucagcgggu

SEQ ID NO: 306167 - RNA, 22 nt, Human
gcagagcugggauaugaaccca

SEQ ID NO: 306168 - RNA, 22 nt, Human
cagggccagccauccugcuggg

SEQ ID NO: 306169 - RNA, 22 nt, Human
ggcagauggagaagcagcaggu

SEQ ID NO: 306170 - RNA, 22 nt, Human
ugacagaaugugacucucagau

SEQ ID NO: 306171 - RNA, 22 nt, Human
caagagcuuuagaaaugcucau

SEQ ID NO: 306172 - RNA, 22 nt, Human
uggcccuguggaggucagugag

SEQ ID NO: 306173 - RNA, 22 nt, Human
aauggagacccuaaggaagagg

SEQ ID NO: 306174 - RNA, 22 nt, Human
gucccaggcagagucaggaggg

SEQ ID NO: 306175 - RNA, 22 nt, Human
gggcagggguagcauuccaagu

SEQ ID NO: 306176 - RNA, 22 nt, Human
ugggacaguuguccuccacucu

SEQ ID NO: 306177 - RNA, 22 nt, Human
acucaggaaaugagaggcucuc

SEQ ID NO: 306178 - RNA, 22 nt, Human
uucugggacaucuggacaguuu

SEQ ID NO: 306179 - RNA, 22 nt, Human
ugcagcaggagccaggccuggu

SEQ ID NO: 306180 - RNA, 22 nt, Human
gucucuggguuaagcagugcau

SEQ ID NO: 306181 - RNA, 22 nt, Human
auuucugugcaguaaaugguga

SEQ ID NO: 306182 - RNA, 17 nt, Human
ugcauguccuuuguucc

SEQ ID NO: 306183 - RNA, 22 nt, Human
gcucaggagcugacagccucaa

SEQ ID NO: 306184 - RNA, 22 nt, Human
gagaggcugaaaucacaggagc

SEQ ID NO: 306185 - RNA, 22 nt, Human
uucaagaugacccagucacacg

SEQ ID NO: 306186 - RNA, 22 nt, Human
acaaagucacaauaauuaaccu

SEQ ID NO: 306187 - RNA, 22 nt, Human
uuaucauugucgcagucuaauu

SEQ ID NO: 306188 - RNA, 22 nt, Human
gccugucugcgucacgcuuauu

SEQ ID NO: 306189 - RNA, 22 nt, Human
cagggccagccgcagcauccac

SEQ ID NO: 306190 - RNA, 22 nt, Human
cuacauuuuucaccgagccucu

SEQ ID NO: 306191 - RNA, 22 nt, Human
cauuucugugacacuuccaucu

SEQ ID NO: 306192 - RNA, 22 nt, Human
cuggcucaccuccgcuccagca

SEQ ID NO: 306193 - RNA, 22 nt, Human
ugggccugggagggcagacgcu

SEQ ID NO: 306194 - RNA, 22 nt, Human
gcugcagcagaaguucucagag

SEQ ID NO: 306195 - RNA, 22 nt, Human
cuggguggcgucuggggccagu

SEQ ID NO: 306196 - RNA, 18 nt, Human
ugcuuggagcauuuacca

SEQ ID NO: 306197 - RNA, 22 nt, Human
ugaggcagcaauuguauuguau

SEQ ID NO: 306198 - RNA, 22 nt, Human
gggagacacgcugcaggcauaa

SEQ ID NO: 306199 - RNA, 22 nt, Human
gcugagguaggagguugcagug

SEQ ID NO: 306200 - RNA, 22 nt, Human
cucagagaagucuuugcuaaac

SEQ ID NO: 306201 - RNA, 22 nt, Human
ccagggagccuggugugucagc

SEQ ID NO: 306202 - RNA, 21 nt, Human
ggcagcugaccgcgcggugca

SEQ ID NO: 306203 - RNA, 22 nt, Human
gcuggagcugaguucccugggc

SEQ ID NO: 306204 - RNA, 22 nt, Human
uaaguucauuagacuacagaua

SEQ ID NO: 306205 - RNA, 22 nt, Human
gcaguggauccaaugguaucuu

SEQ ID NO: 306206 - RNA, 22 nt, Human
auugaaucugcacuaguauuuu

SEQ ID NO: 306207 - RNA, 20 nt, Human
gagggcaggcacccauuuca

SEQ ID NO: 306208 - RNA, 17 nt, Human
gagaguguauuggaugc

SEQ ID NO: 306209 - RNA, 19 nt, Human
uugaaagauuagcuuucua

SEQ ID NO: 306210 - RNA, 22 nt, Human
agaaaugacaagacugaucagg

SEQ ID NO: 306211 - RNA, 22 nt, Human
ucuacugugguccuuguaacca

SEQ ID NO: 306212 - RNA, 22 nt, Human
caguggguccuaaguacaguuc

SEQ ID NO: 306213 - RNA, 22 nt, Human
aaauaauuauagcgagucuauc

SEQ ID NO: 306214 - RNA, 22 nt, Human
agggggugcccagaugaaggau

SEQ ID NO: 306215 - RNA, 22 nt, Human
gugcgccagcucaaggggaggc

SEQ ID NO: 306216 - RNA, 20 nt, Human
ccagagcagccacugaaguu

SEQ ID NO: 306217 - RNA, 22 nt, Human
auucucaauggcuacuuucaua

SEQ ID NO: 306218 - RNA, 22 nt, Human
uucauucuuugaaucugaggua

SEQ ID NO: 306219 - RNA, 22 nt, Human
gugcuuucugcaugguuccuac

SEQ ID NO: 306220 - RNA, 22 nt, Human
agagcugcaauuucauguggug

SEQ ID NO: 306221 - RNA, 22 nt, Human
ccugccaggccagugagcuucc

SEQ ID NO: 306222 - RNA, 22 nt, Human
gaaggcuugcagcucuguggca

SEQ ID NO: 306223 - RNA, 22 nt, Human
aagcuggagaguuaggugaaua

SEQ ID NO: 306224 - RNA, 22 nt, Human
acaaaugccauauauaaauucu

SEQ ID NO: 306225 - RNA, 22 nt, Human
ugggcucugaagucagucugcu

SEQ ID NO: 306226 - RNA, 22 nt, Human
agaaaguucugugaguuguuca

SEQ ID NO: 306227 - RNA, 22 nt, Human
cagaggaggccaccgcauaggc

SEQ ID NO: 306228 - RNA, 20 nt, Human
aguguuccggaagacuggca

SEQ ID NO: 306229 - RNA, 22 nt, Human
ggcacugagcugccuuggggca

SEQ ID NO: 306230 - RNA, 22 nt, Human
agccuggaggccaggagacagu

SEQ ID NO: 306231 - RNA, 19 nt, Human
ugcugcuguccuugcaggg

SEQ ID NO: 306232 - RNA, 22 nt, Human
aggauccuccuuagaaaagacc

SEQ ID NO: 306233 - RNA, 22 nt, Human
augacucuuagcuaaagguaag

SEQ ID NO: 306234 - RNA, 22 nt, Human
aaaauaguuaacguucagagua

SEQ ID NO: 306235 - RNA, 22 nt, Human
guggccuggaaaggcuggucug

SEQ ID NO: 306236 - RNA, 22 nt, Human
gagcccucucuguaggcaagua

SEQ ID NO: 306237 - RNA, 22 nt, Human
uaagcuauuccugaagaagguu

SEQ ID NO: 306238 - RNA, 22 nt, Human
agcagggcagguaaggaucaga

SEQ ID NO: 306239 - RNA, 22 nt, Human
cuggcucagugccuucagaagu

SEQ ID NO: 306240 - RNA, 22 nt, Human
ccuguguguaggccaggggagu

SEQ ID NO: 306241 - RNA, 22 nt, Human
uauuuugacuauuaaaccaaca

SEQ ID NO: 306242 - RNA, 22 nt, Human
agaggccacuuugccugugaug

SEQ ID NO: 306243 - RNA, 22 nt, Human
ccaaggcuggagugcaguggcg

SEQ ID NO: 306244 - RNA, 22 nt, Human
ugucacauguguggcauuuuuc

SEQ ID NO: 306245 - RNA, 22 nt, Human
ucaguguuuccugugguacagc

SEQ ID NO: 306246 - RNA, 22 nt, Human
aguaugaauacagauuuucucu

SEQ ID NO: 306247 - RNA, 22 nt, Human
caugaagcacagcucucuuuuu

SEQ ID NO: 306248 - RNA, 22 nt, Human
uugcauuugacaaauuauuuaa

SEQ ID NO: 306249 - RNA, 22 nt, Human
ccagcuccugggucuuagucag

SEQ ID NO: 306250 - RNA, 22 nt, Human
gugucauggaaaauugcaaugg

SEQ ID NO: 306251 - RNA, 22 nt, Human
uauuucuuguuauucucguuga

SEQ ID NO: 306252 - RNA, 22 nt, Human
gcuggugcauuagcugcaguuc

SEQ ID NO: 306253 - RNA, 22 nt, Human
uggcagcugucuguggggucuc

SEQ ID NO: 306254 - RNA, 22 nt, Human
ccacugaggcaggcaguaucua

SEQ ID NO: 306255 - RNA, 22 nt, Human
uucacagggcagcagcugagcc

SEQ ID NO: 306256 - RNA, 22 nt, Human
aaaaacugcaauuacuuuuguc

SEQ ID NO: 306257 - RNA, 22 nt, Human
ggagccuguggcugcuugaagc

SEQ ID NO: 306258 - RNA, 20 nt, Human
caguagcaauaauuagaagc

SEQ ID NO: 306259 - RNA, 22 nt, Human
aucauuucccuuuagaucacaa

SEQ ID NO: 306260 - RNA, 22 nt, Human
aauaugcauguauacaugugua

SEQ ID NO: 306261 - RNA, 22 nt, Human
agagacaggguuuugccauguu

SEQ ID NO: 306262 - RNA, 22 nt, Human
aggccuggccccaguugcuagg

SEQ ID NO: 306263 - RNA, 22 nt, Human
aacaaauguguuuuguaauuaa

SEQ ID NO: 306264 - RNA, 22 nt, Human
guccuggggauacagaagugaa

SEQ ID NO: 306265 - RNA, 22 nt, Human
ugcaccauacccauuccccucu

SEQ ID NO: 306266 - RNA, 19 nt, Human
uccugcccaccagccaggg

SEQ ID NO: 306267 - RNA, 22 nt, Human
ucuggaaguuagaggaggaaag

SEQ ID NO: 306268 - RNA, 22 nt, Human
acaggugaccugcucauaugaa

SEQ ID NO: 306269 - RNA, 20 nt, Human
cuguagggugcagcaggcuc

SEQ ID NO: 306270 - RNA, 22 nt, Human
acaggugggcuuaagagucggc

SEQ ID NO: 306271 - RNA, 22 nt, Human
gcaggaguguauuugcauguaa

SEQ ID NO: 306272 - RNA, 22 nt, Human
aaagcucacaguaauacaaggc

SEQ ID NO: 306273 - RNA, 22 nt, Human
cuggcaggucucgcugacgugu

SEQ ID NO: 306274 - RNA, 22 nt, Human
ccuggugcuuaccagagcuuuu

SEQ ID NO: 306275 - RNA, 22 nt, Human
uagauuuuacuucugucauuac

SEQ ID NO: 306276 - RNA, 22 nt, Human
uaaguuuaaauguacaugaagc

SEQ ID NO: 306277 - RNA, 22 nt, Human
auggcccaggccuccuguggcu

SEQ ID NO: 306278 - RNA, 22 nt, Human
agcuggcaguaugacuggugac

SEQ ID NO: 306279 - RNA, 22 nt, Human
cagcccucagguccucagcagc

SEQ ID NO: 306280 - RNA, 22 nt, Human
uguccucaaggagcuucagucu

SEQ ID NO: 306281 - RNA, 22 nt, Human
gcugagcuagcuaucucagucu

SEQ ID NO: 306282 - RNA, 22 nt, Human
gccccucccagucaggagcacu

SEQ ID NO: 306283 - RNA, 23 nt, Human
uucaaaacuggaaaaucagaugc

SEQ ID NO: 306284 - RNA, 22 nt, Human
uugaacauuaacuucagucuau

SEQ ID NO: 306285 - RNA, 22 nt, Human
ucuggcucccuggagcuccaca

SEQ ID NO: 306286 - RNA, 22 nt, Human
uguggccuccuguuccugggua

SEQ ID NO: 306287 - RNA, 22 nt, Human
gcagagccgugaauggauuuca

SEQ ID NO: 306288 - RNA, 21 nt, Human
acagcauguuuguguguuugc

SEQ ID NO: 306289 - RNA, 22 nt, Human
ggcacugacugugcagcgcacc

SEQ ID NO: 306290 - RNA, 22 nt, Human
uggcccugcuggccaaaggcua

SEQ ID NO: 306291 - RNA, 22 nt, Human
ucugaggcuaagagacagaggc

SEQ ID NO: 306292 - RNA, 22 nt, Human
agcuuguuagaaauguagacuc

SEQ ID NO: 306293 - RNA, 22 nt, Human
agacagcaugauacaugaugcu

SEQ ID NO: 306294 - RNA, 22 nt, Human
aguaaaaucaccaucucuuugu

SEQ ID NO: 306295 - RNA, 22 nt, Human
uugcauuugaucuuggguucuc

SEQ ID NO: 306296 - RNA, 22 nt, Human
gggccccuuguaucucuggcuc

SEQ ID NO: 306297 - RNA, 22 nt, Human
agaauucuuggugguuagaaua

SEQ ID NO: 306298 - RNA, 23 nt, Human
cugcagccgcguggggacgugga

SEQ ID NO: 306299 - RNA, 22 nt, Human
ucuagaaaaaaacugcugugga

SEQ ID NO: 306300 - RNA, 22 nt, Human
agcaggguauguuagagcugua

SEQ ID NO: 306301 - RNA, 22 nt, Human
gcagauggcucagacacugggg

SEQ ID NO: 306302 - RNA, 22 nt, Human
gauuuccuagacauggggcaga

SEQ ID NO: 306303 - RNA, 22 nt, Human
ugucauuuucuaaucuguuguc

SEQ ID NO: 306304 - RNA, 22 nt, Human
uaucaauugggccaaaugguac

SEQ ID NO: 306305 - RNA, 22 nt, Human
gaagggagaagguugggugacg

SEQ ID NO: 306306 - RNA, 22 nt, Human
gggugggaucuguggagccuca

SEQ ID NO: 306307 - RNA, 20 nt, Human
uccuggccuucucgggcagu

SEQ ID NO: 306308 - RNA, 22 nt, Human
auauucaucguguagaaauacu

SEQ ID NO: 306309 - RNA, 22 nt, Human
aaggcacuuaacgugggaggau

SEQ ID NO: 306310 - RNA, 20 nt, Human
gcagagccucacugcaaggg

SEQ ID NO: 306311 - RNA, 22 nt, Human
uggguagaggaauugggcuacc

SEQ ID NO: 306312 - RNA, 22 nt, Human
ucaggcaguagaauugcuugaa

SEQ ID NO: 306313 - RNA, 19 nt, Human
gggcagaauggcaucucag

SEQ ID NO: 306314 - RNA, 22 nt, Human
ugaagcccugugucagcuucca

SEQ ID NO: 306315 - RNA, 22 nt, Human
ggcccagccggcgagucucgcg

SEQ ID NO: 306316 - RNA, 22 nt, Human
auacuguuucucuucuacauga

SEQ ID NO: 306317 - RNA, 22 nt, Human
uaaagaacacagggaauagcac

SEQ ID NO: 306318 - RNA, 22 nt, Human
uccaaauucuagggccuugguu

SEQ ID NO: 306319 - RNA, 22 nt, Human
aggugccagcucucaggcagga

SEQ ID NO: 306320 - RNA, 22 nt, Human
cccaaggcauggcaugguggca

SEQ ID NO: 306321 - RNA, 22 nt, Human
gaggccuggcugucagucccca

SEQ ID NO: 306322 - RNA, 22 nt, Human
gcccugugcuuggauggcagau

SEQ ID NO: 306323 - RNA, 19 nt, Human
ugaguucugugguucucaa

SEQ ID NO: 306324 - RNA, 22 nt, Human
ugacuagaccuauaucuuuuug

SEQ ID NO: 306325 - RNA, 22 nt, Human
ucagggcacaggccuguggguu

SEQ ID NO: 306326 - RNA, 22 nt, Human
ccccuucucugcaagccugcuc

SEQ ID NO: 306327 - RNA, 22 nt, Human
uagccggguguugugucaugca

SEQ ID NO: 306328 - RNA, 22 nt, Human
auaugcaagcacauagaauacu

SEQ ID NO: 306329 - RNA, 22 nt, Human
gccucaguugaucugugugagc

SEQ ID NO: 306330 - RNA, 22 nt, Human
gcuguauuuauuuucuaggguu

SEQ ID NO: 306331 - RNA, 22 nt, Human
cuggaggcacccuuagagaggc

SEQ ID NO: 306332 - RNA, 22 nt, Human
gggccccugggaauucugugau

SEQ ID NO: 306333 - RNA, 22 nt, Human
aucaggaucagggcuagcagag

SEQ ID NO: 306334 - RNA, 22 nt, Human
gcuggccugggcagccugucgg

SEQ ID NO: 306335 - RNA, 22 nt, Human
gaaacugugaggaucuuaacuu

SEQ ID NO: 306336 - RNA, 19 nt, Human
ucuggagcugaugcaggug

SEQ ID NO: 306337 - RNA, 22 nt, Human
cucucccagucaggcucaggau

SEQ ID NO: 306338 - RNA, 22 nt, Human
ccucagagguuuucauucugua

SEQ ID NO: 306339 - RNA, 22 nt, Human
cuuaagauuugagauaccuaau

SEQ ID NO: 306340 - RNA, 22 nt, Human
auguacauuuguaguaauauca

SEQ ID NO: 306341 - RNA, 22 nt, Human
uccuugaacagagggccugggu

SEQ ID NO: 306342 - RNA, 22 nt, Human
ccucagagccuccagaaggaau

SEQ ID NO: 306343 - RNA, 22 nt, Human
gguggguauaguuagggccucu

SEQ ID NO: 306344 - RNA, 22 nt, Human
ucacaugaguauuauuuuccaa

SEQ ID NO: 306345 - RNA, 22 nt, Human
ccagcauggcaccugagaugag

SEQ ID NO: 306346 - RNA, 22 nt, Human
ggugcagugguguggcaaaggg

SEQ ID NO: 306347 - RNA, 22 nt, Human
gaaccucagugaaacuggaggu

SEQ ID NO: 306348 - RNA, 22 nt, Human
uucagcaaauggacuguucagg

SEQ ID NO: 306349 - RNA, 22 nt, Human
caagaauuguacaaacugggug

SEQ ID NO: 306350 - RNA, 22 nt, Human
gagcugccugugugccaugaug

SEQ ID NO: 306351 - RNA, 22 nt, Human
ccaugagcuucaacugacacag

SEQ ID NO: 306352 - RNA, 22 nt, Human
ucucuggguuuuuguccuguac

SEQ ID NO: 306353 - RNA, 22 nt, Human
gccuaauaugcaaaauugauac

SEQ ID NO: 306354 - RNA, 22 nt, Human
guggccuggaguuugauguagg

SEQ ID NO: 306355 - RNA, 19 nt, Human
ccagcagacacagcugccc

SEQ ID NO: 306356 - RNA, 22 nt, Human
gcccagccuccaagcuccaagg

SEQ ID NO: 306357 - RNA, 22 nt, Human
gugcaccccggggcccugcucc

SEQ ID NO: 306358 - RNA, 22 nt, Human
ugaaaucuccucuuuauauauc

SEQ ID NO: 306359 - RNA, 22 nt, Human
ucagaaaccagcucucucaauu

SEQ ID NO: 306360 - RNA, 22 nt, Human
uucaagauggccccagugagcc

SEQ ID NO: 306361 - RNA, 22 nt, Human
gcucccugcacucugcagcccu

SEQ ID NO: 306362 - RNA, 22 nt, Human
ugccagcuuuugacuaucuuag

SEQ ID NO: 306363 - RNA, 22 nt, Human
uagaauugggccuaacuuccau

SEQ ID NO: 306364 - RNA, 22 nt, Human
uguggaggauucugaugccagc

SEQ ID NO: 306365 - RNA, 22 nt, Human
aguggcagaagucacuggguag

SEQ ID NO: 306366 - RNA, 22 nt, Human
gcacagagggcagugagccucu

SEQ ID NO: 306367 - RNA, 20 nt, Human
cugcugugguccuuuauuuu

SEQ ID NO: 306368 - RNA, 22 nt, Human
gggcccuggauuuaagcaugga

SEQ ID NO: 306369 - RNA, 22 nt, Human
gaauacauuggaaaucagaaua

SEQ ID NO: 306370 - RNA, 22 nt, Human
cucagucugucuugucuguguu

SEQ ID NO: 306371 - RNA, 22 nt, Human
gcugggcugagcuagacuuggc

SEQ ID NO: 306372 - RNA, 22 nt, Human
uaugaacuguacuguacuaagc

SEQ ID NO: 306373 - RNA, 22 nt, Human
uuuagaaguucacacauuuaaa

SEQ ID NO: 306374 - RNA, 22 nt, Human
cugcugugucagaguccagggg

SEQ ID NO: 306375 - RNA, 20 nt, Human
auacacauauucuugcaacu

SEQ ID NO: 306376 - RNA, 22 nt, Human
aaaugugucauauucaaaguca

SEQ ID NO: 306377 - RNA, 22 nt, Human
gaaggaaaaauacucuguaagg

SEQ ID NO: 306378 - RNA, 22 nt, Human
aaugcacagcuaaagugguucc

SEQ ID NO: 306379 - RNA, 22 nt, Human
gugauugcccagcaccauuguu

SEQ ID NO: 306380 - RNA, 22 nt, Human
aaguuauugcagcaauccaagu

SEQ ID NO: 306381 - RNA, 22 nt, Human
gggccugggaacuugcauuuag

SEQ ID NO: 306382 - RNA, 21 nt, Human
cucaggaucuuauauauuagu

SEQ ID NO: 306383 - RNA, 22 nt, Human
augaacacauguacacauuucu

SEQ ID NO: 306384 - RNA, 22 nt, Human
aaguggacuaauacaaggacua

SEQ ID NO: 306385 - RNA, 22 nt, Human
ccugccaggcuuugggcuucug

SEQ ID NO: 306386 - RNA, 23 nt, Human
ucugagagaacaaugccuccuau

SEQ ID NO: 306387 - RNA, 22 nt, Human
uccuccagugucuggggccuug

SEQ ID NO: 306388 - RNA, 22 nt, Human
ugcauuugucuugucucaugaa

SEQ ID NO: 306389 - RNA, 22 nt, Human
aggagccccucuucaguccugg

SEQ ID NO: 306390 - RNA, 21 nt, Human
ucuuguccuugcucucccacu

SEQ ID NO: 306391 - RNA, 22 nt, Human
aagggcuggccacauucugggu

SEQ ID NO: 306392 - RNA, 22 nt, Human
acacugcagaugaaagcauaag

SEQ ID NO: 306393 - RNA, 22 nt, Human
ucaaaguaaaaguauagaguuu

SEQ ID NO: 306394 - RNA, 22 nt, Human
gcaaauucuuaacuggacugug

SEQ ID NO: 306395 - RNA, 22 nt, Human
uucaugaaaguguaucuugugg

SEQ ID NO: 306396 - RNA, 21 nt, Human
ucucuacaaauuauguuaggu

SEQ ID NO: 306397 - RNA, 22 nt, Human
ugucucugguauuaggugaaaa

SEQ ID NO: 306398 - RNA, 22 nt, Human
guguguccucaguaguggcaug

SEQ ID NO: 306399 - RNA, 22 nt, Human
ccaggcccugccugugguuccu

SEQ ID NO: 306400 - RNA, 22 nt, Human
gauugaaacauaggcagucgag

SEQ ID NO: 306401 - RNA, 22 nt, Human
cuuugaauugccguuucaucug

SEQ ID NO: 306402 - RNA, 20 nt, Human
aguaccuuuuguauguuacc

SEQ ID NO: 306403 - RNA, 22 nt, Human
cucccaggcacagggaggagcc

SEQ ID NO: 306404 - RNA, 22 nt, Human
augcuguguuugagaaccuagg

SEQ ID NO: 306405 - RNA, 22 nt, Human
ggcaggagggcggacaaugacc

SEQ ID NO: 306406 - RNA, 22 nt, Human
cuacauuuggagaguauaggaa

SEQ ID NO: 306407 - RNA, 22 nt, Human
gucucagagagcuacucucuua

SEQ ID NO: 306408 - RNA, 19 nt, Human
ccaguagagacagcugcag

SEQ ID NO: 306409 - RNA, 22 nt, Human
acagcugugaaaauccacagga

SEQ ID NO: 306410 - RNA, 22 nt, Human
agcugcugugugcucaggcagg

SEQ ID NO: 306411 - RNA, 22 nt, Human
ggagcagagcugggcuuggcug

SEQ ID NO: 306412 - RNA, 22 nt, Human
gcaucuaaacuugcaucauugu

SEQ ID NO: 306413 - RNA, 22 nt, Human
ugcccaagcagaggagugauuc

SEQ ID NO: 306414 - RNA, 22 nt, Human
agcuccuguucugagagcagga

SEQ ID NO: 306415 - RNA, 22 nt, Human
gagcauuuuugucugcauuuua

SEQ ID NO: 306416 - RNA, 22 nt, Human
cugcaguguucuggaaugcauu

SEQ ID NO: 306417 - RNA, 22 nt, Human
cccuggcaugcaugucccuggc

SEQ ID NO: 306418 - RNA, 22 nt, Human
uucuccaacacaagcaugaugu

SEQ ID NO: 306419 - RNA, 22 nt, Human
uaucuguuaugggcugaauugc

SEQ ID NO: 306420 - RNA, 22 nt, Human
uuguguuucccuugcauauucc

SEQ ID NO: 306421 - RNA, 22 nt, Human
augaacuuauuucugaacuuuu

SEQ ID NO: 306422 - RNA, 22 nt, Human
gcagcagcccagggcucucaga

SEQ ID NO: 306423 - RNA, 22 nt, Human
ccucuggcuguaccacuggcac

SEQ ID NO: 306424 - RNA, 22 nt, Human
ggccucugcaacuggcuguggc

SEQ ID NO: 306425 - RNA, 19 nt, Human
cagagccucagagcuagaa

SEQ ID NO: 306426 - RNA, 22 nt, Human
gugugccaggaacuggcugcug

SEQ ID NO: 306427 - RNA, 21 nt, Human
agaugcugugcuccaggagca

SEQ ID NO: 306428 - RNA, 22 nt, Human
gaacagaauuaccgaagaucug

SEQ ID NO: 306429 - RNA, 22 nt, Human
aggggcugggacagagccaagc

SEQ ID NO: 306430 - RNA, 22 nt, Human
cacaaugugguuugucaucuuu

SEQ ID NO: 306431 - RNA, 22 nt, Human
ggggaaaggccauggcaagaac

SEQ ID NO: 306432 - RNA, 22 nt, Human
ugugaaagcaagucuaguucuc

SEQ ID NO: 306433 - RNA, 22 nt, Human
ugcuggggauccguaccaaccc

SEQ ID NO: 306434 - RNA, 22 nt, Human
acugcagcaaagcccgugucuu

SEQ ID NO: 306435 - RNA, 18 nt, Human
ggcaggagcaagaauagg

SEQ ID NO: 306436 - RNA, 22 nt, Human
uuucauuuugguuaugccauaa

SEQ ID NO: 306437 - RNA, 22 nt, Human
ccugguggccuucagcccacaa

SEQ ID NO: 306438 - RNA, 19 nt, Human
uuugaauccagcugguaac

SEQ ID NO: 306439 - RNA, 19 nt, Human
agacagagcucaguggguu

SEQ ID NO: 306440 - RNA, 22 nt, Human
uuccaugugaguacacugugau

SEQ ID NO: 306441 - RNA, 22 nt, Human
caggcagccaggggaccugucc

SEQ ID NO: 306442 - RNA, 22 nt, Human
cucaaggacuuauucaugccug

SEQ ID NO: 306443 - RNA, 22 nt, Human
gugaggugguacaauauuaacu

SEQ ID NO: 306444 - RNA, 22 nt, Human
cagcauuuaaugcagugcuucc

SEQ ID NO: 306445 - RNA, 22 nt, Human
auguacaguuucuagacucaaa

SEQ ID NO: 306446 - RNA, 22 nt, Human
cagaagcagugagagaugugca

SEQ ID NO: 306447 - RNA, 22 nt, Human
acuguucacccagcacuagcag

SEQ ID NO: 306448 - RNA, 22 nt, Human
uuuuacuuaauucuuggucaug

SEQ ID NO: 306449 - RNA, 22 nt, Human
ccuggagccccucuggccagcc

SEQ ID NO: 306450 - RNA, 22 nt, Human
acagaugaguuagaauaggcag

SEQ ID NO: 306451 - RNA, 22 nt, Human
gcagccaccucccauggcgggg

SEQ ID NO: 306452 - RNA, 22 nt, Human
uuucuaggucuuccauacugcc

SEQ ID NO: 306453 - RNA, 22 nt, Human
ccaaaguccauaguuuacuuua

SEQ ID NO: 306454 - RNA, 22 nt, Human
ugagcuuacgugggaacagacu

SEQ ID NO: 306455 - RNA, 22 nt, Human
caucaaauggcaagugaaagcu

SEQ ID NO: 306456 - RNA, 22 nt, Human
ugagccugcaauaagcacagcc

SEQ ID NO: 306457 - RNA, 22 nt, Human
ggucccaggaagugcggcggcg

SEQ ID NO: 306458 - RNA, 22 nt, Human
agggcugcuauguugauucaga

SEQ ID NO: 306459 - RNA, 22 nt, Human
agcucccagggcugggcaaguu

SEQ ID NO: 306460 - RNA, 22 nt, Human
uguggucucguuauguugccca

SEQ ID NO: 306461 - RNA, 22 nt, Human
cuggcucaguucuugguuuuca

SEQ ID NO: 306462 - RNA, 22 nt, Human
aaugauuuccccuacacagaag

SEQ ID NO: 306463 - RNA, 22 nt, Human
gccaggaacacaaugccaagcu

SEQ ID NO: 306464 - RNA, 22 nt, Human
aaaguuugcaauuuauguuaau

SEQ ID NO: 306465 - RNA, 22 nt, Human
gcucaguguguucaagggcuca

SEQ ID NO: 306466 - RNA, 22 nt, Human
aucuggcuuucuuaaugacuua

SEQ ID NO: 306467 - RNA, 22 nt, Human
agcccaagcauaggagggaggc

SEQ ID NO: 306468 - RNA, 22 nt, Human
gauucugagcugguguuuuacg

SEQ ID NO: 306469 - RNA, 22 nt, Human
cccagcaguuguuggugcacau

SEQ ID NO: 306470 - RNA, 22 nt, Human
ucauuuaauagcuuuugucuuu

SEQ ID NO: 306471 - RNA, 22 nt, Human
agcuggggguagugagaaauaa

SEQ ID NO: 306472 - RNA, 21 nt, Human
auacacauacacauaaaugug

SEQ ID NO: 306473 - RNA, 22 nt, Human
aucaggauucaccccagagcug

SEQ ID NO: 306474 - RNA, 22 nt, Human
uggcagggugggcuucagcccc

SEQ ID NO: 306475 - RNA, 22 nt, Human
gcuugcuggugccugcaggcuc

SEQ ID NO: 306476 - RNA, 22 nt, Human
ggcacagggaggcccuggugug

SEQ ID NO: 306477 - RNA, 22 nt, Human
cagggagggacaauugucaccu

SEQ ID NO: 306478 - RNA, 22 nt, Human
gcuggcccagggucaccuagga

SEQ ID NO: 306479 - RNA, 21 nt, Human
gcugcagggcccagggcaccc

SEQ ID NO: 306480 - RNA, 22 nt, Human
uggcacuggcgcaggauggcgg

SEQ ID NO: 306481 - RNA, 22 nt, Human
uuguuuuggaagaacuuacucu

SEQ ID NO: 306482 - RNA, 22 nt, Human
gcuggggagcuagaccucagca

SEQ ID NO: 306483 - RNA, 22 nt, Human
aaacauuugcaacucgguuugg

SEQ ID NO: 306484 - RNA, 22 nt, Human
agcugcccuucucuugcccuug

SEQ ID NO: 306485 - RNA, 21 nt, Human
aacugcuggucuuuucugucu

SEQ ID NO: 306486 - RNA, 22 nt, Human
uggcagccacaucucguggauu

SEQ ID NO: 306487 - RNA, 22 nt, Human
uuucucaguuacuagcuguggu

SEQ ID NO: 306488 - RNA, 22 nt, Human
cucaggagaugacagaagguau

SEQ ID NO: 306489 - RNA, 22 nt, Human
cuagagggauguuaggauagca

SEQ ID NO: 306490 - RNA, 22 nt, Human
ccucuuccacugggccccaucc

SEQ ID NO: 306491 - RNA, 22 nt, Human
gagcagugaagacagaaguaca

SEQ ID NO: 306492 - RNA, 22 nt, Human
auugaaagaguuuucugcugca

SEQ ID NO: 306493 - RNA, 22 nt, Human
ucccagagcucuggagguugga

SEQ ID NO: 306494 - RNA, 22 nt, Human
ugugggcaggcccgggucugag

SEQ ID NO: 306495 - RNA, 22 nt, Human
guuguauucuucaauaucagag

SEQ ID NO: 306496 - RNA, 17 nt, Human
ucaggcugggugcagug

SEQ ID NO: 306497 - RNA, 22 nt, Human
cugugucccuugucccagagcc

SEQ ID NO: 306498 - RNA, 22 nt, Human
ucucugguuauuaacuaacucc

SEQ ID NO: 306499 - RNA, 22 nt, Human
gaaagggaguggacaacaggca

SEQ ID NO: 306500 - RNA, 22 nt, Human
agucucugcaugaugcagcaca

SEQ ID NO: 306501 - RNA, 22 nt, Human
uggccucaagucugagggccuu

SEQ ID NO: 306502 - RNA, 22 nt, Human
caggcagagugagguggucuaa

SEQ ID NO: 306503 - RNA, 22 nt, Human
ccagaccacccuggccaugcac

SEQ ID NO: 306504 - RNA, 22 nt, Human
agaggccagguccagaguuugu

SEQ ID NO: 306505 - RNA, 22 nt, Human
uggcugggagcuggaacugggc

SEQ ID NO: 306506 - RNA, 22 nt, Human
uauugaaaugaaugacagugau

SEQ ID NO: 306507 - RNA, 23 nt, Human
gccuggagaaaagcugcaguuca

SEQ ID NO: 306508 - RNA, 22 nt, Human
cucagcucugacaggaggcauc

SEQ ID NO: 306509 - RNA, 20 nt, Human
uuguuucugcuauuuucuaa

SEQ ID NO: 306510 - RNA, 22 nt, Human
aaaguguaaaagcauguuaggg

SEQ ID NO: 306511 - RNA, 22 nt, Human
cugguuuagcuguaagguuccc

SEQ ID NO: 306512 - RNA, 22 nt, Human
ucccagaguuuccuguguccca

SEQ ID NO: 306513 - RNA, 19 nt, Human
uagucuuuauucuuaauuu

SEQ ID NO: 306514 - RNA, 22 nt, Human
aaauaucauuuauaacuuuuaa

SEQ ID NO: 306515 - RNA, 22 nt, Human
agagccugcuguguaagucaca

SEQ ID NO: 306516 - RNA, 23 nt, Human
cagcccuuccugcauguuuuugu

SEQ ID NO: 306517 - RNA, 22 nt, Human
cauucacaucuuguuccaucac

SEQ ID NO: 306518 - RNA, 22 nt, Human
agcugucuuucugccuccugau

SEQ ID NO: 306519 - RNA, 22 nt, Human
uuguaaauaguaguaagaugcc

SEQ ID NO: 306520 - RNA, 22 nt, Human
gcacagggagcaggucucuggu

SEQ ID NO: 306521 - RNA, 22 nt, Human
uccucuggggcgugguccugga

SEQ ID NO: 306522 - RNA, 22 nt, Human
cucugagagcggucuguggcuu

SEQ ID NO: 306523 - RNA, 22 nt, Human
auggacagugugaagcagauag

SEQ ID NO: 306524 - RNA, 22 nt, Human
caguugcuggaugugcagcucu

SEQ ID NO: 306525 - RNA, 22 nt, Human
uucuccucuguuggccuucccu

SEQ ID NO: 306526 - RNA, 22 nt, Human
aagaauguggguggauaugaug

SEQ ID NO: 306527 - RNA, 22 nt, Human
ugucucagauacgccaucaagg

SEQ ID NO: 306528 - RNA, 22 nt, Human
cccagcucuaggagugguggca

SEQ ID NO: 306529 - RNA, 22 nt, Human
gcuugcucaacccccgucucuc

SEQ ID NO: 306530 - RNA, 20 nt, Human
uccaugaguuagagacuaua

SEQ ID NO: 306531 - RNA, 22 nt, Human
gcuggcagguccaagauagagc

SEQ ID NO: 306532 - RNA, 21 nt, Human
gcagcuggucucagagcuugc

SEQ ID NO: 306533 - RNA, 22 nt, Human
agaacagcaguuaugguucauu

SEQ ID NO: 306534 - RNA, 22 nt, Human
cugaaggagguagagugacaua

SEQ ID NO: 306535 - RNA, 22 nt, Human
ugcuuggccuacuuguccuuug

SEQ ID NO: 306536 - RNA, 22 nt, Human
aaauuauuaugccccucuauaa

SEQ ID NO: 306537 - RNA, 22 nt, Human
acagagccaaaaggacauagua

SEQ ID NO: 306538 - RNA, 22 nt, Human
agugagggaugaagaacugcgg

SEQ ID NO: 306539 - RNA, 22 nt, Human
cauucacaaagcugauugaugg

SEQ ID NO: 306540 - RNA, 22 nt, Human
gcagggucgcucuaggagauca

SEQ ID NO: 306541 - RNA, 22 nt, Human
aaaauggucucagcuggcacca

SEQ ID NO: 306542 - RNA, 22 nt, Human
gccuguccuggaugcucugcaa

SEQ ID NO: 306543 - RNA, 20 nt, Human
acaggagaucugaggaaagg

SEQ ID NO: 306544 - RNA, 22 nt, Human
ugcaggugcguuuucaagccuc

SEQ ID NO: 306545 - RNA, 22 nt, Human
ucugcaggaaaaaagugccugg

SEQ ID NO: 306546 - RNA, 22 nt, Human
uuauguacucugcaauguuuga

SEQ ID NO: 306547 - RNA, 22 nt, Human
augucccagcugagagacaacu

SEQ ID NO: 306548 - RNA, 22 nt, Human
caguccugggcaggucaggcca

SEQ ID NO: 306549 - RNA, 22 nt, Human
agcaauauuucagcuagcaggu

SEQ ID NO: 306550 - RNA, 22 nt, Human
uggaguuccuuugaaaggcucu

SEQ ID NO: 306551 - RNA, 22 nt, Human
ccugccaggagcuggugcugca

SEQ ID NO: 306552 - RNA, 22 nt, Human
uacaguucacaguaucauaaau

SEQ ID NO: 306553 - RNA, 22 nt, Human
agaaaugugaauuucauuuccu

SEQ ID NO: 306554 - RNA, 22 nt, Human
aaggcaguuaauuuggcuagaa

SEQ ID NO: 306555 - RNA, 22 nt, Human
aagugaaacauguaucucuuua

SEQ ID NO: 306556 - RNA, 22 nt, Human
cagugcaugaaacaauaugcag

SEQ ID NO: 306557 - RNA, 17 nt, Human
cccaugagcccacuccc

SEQ ID NO: 306558 - RNA, 22 nt, Human
aaaagacauaugugggcauucu

SEQ ID NO: 306559 - RNA, 22 nt, Human
gggauggcucaaaggagucagg

SEQ ID NO: 306560 - RNA, 22 nt, Human
agaaaacauuacauaggugugu

SEQ ID NO: 306561 - RNA, 22 nt, Human
augaaaacuuuagccucauuag

SEQ ID NO: 306562 - RNA, 22 nt, Human
aggccugaaguguggagugggg

SEQ ID NO: 306563 - RNA, 22 nt, Human
gggagcaggagccugccugcca

SEQ ID NO: 306564 - RNA, 22 nt, Human
cuccagggagcuguggagguuu

SEQ ID NO: 306565 - RNA, 22 nt, Human
auugucugaauccaaagcucug

SEQ ID NO: 306566 - RNA, 23 nt, Human
ugcaggggaggcuuaaagcaggu

SEQ ID NO: 306567 - RNA, 22 nt, Human
cagagccacugucugccaggca

SEQ ID NO: 306568 - RNA, 22 nt, Human
gaucaaaagcuggguucuaaaa

SEQ ID NO: 306569 - RNA, 22 nt, Human
agacaguguguguauauauggu

SEQ ID NO: 306570 - RNA, 18 nt, Human
ccgggcuuuggugacaca

SEQ ID NO: 306571 - RNA, 22 nt, Human
aagggcuggaucucucugagca

SEQ ID NO: 306572 - RNA, 22 nt, Human
uaucuuguaauagguccacuug

SEQ ID NO: 306573 - RNA, 22 nt, Human
acaugauuggacuccuuccccu

SEQ ID NO: 306574 - RNA, 22 nt, Human
ggaggcaggaaagacagguuca

SEQ ID NO: 306575 - RNA, 19 nt, Human
cagaacagaggucauggcc

SEQ ID NO: 306576 - RNA, 22 nt, Human
ucaggccuuucuucagagcuuc

SEQ ID NO: 306577 - RNA, 22 nt, Human
acagccugagaguggagcuggc

SEQ ID NO: 306578 - RNA, 22 nt, Human
uucuuaaaacuuauggacaggu

SEQ ID NO: 306579 - RNA, 22 nt, Human
cugugcuggagaugggccagag

SEQ ID NO: 306580 - RNA, 22 nt, Human
agcugagcugcagaugacugua

SEQ ID NO: 306581 - RNA, 22 nt, Human
acagcuguauccccagagcuca

SEQ ID NO: 306582 - RNA, 22 nt, Human
auccuugagccuuaucuuuugu

SEQ ID NO: 306583 - RNA, 22 nt, Human
uacaugaacaaaauagcagaaa

SEQ ID NO: 306584 - RNA, 22 nt, Human
cagaguguaucuguguaagcau

SEQ ID NO: 306585 - RNA, 22 nt, Human
uggcugcugagaaggcagcugu

SEQ ID NO: 306586 - RNA, 22 nt, Human
ccacagagagugucagccuuug

SEQ ID NO: 306587 - RNA, 22 nt, Human
guaggaagcucugaggcuaguu

SEQ ID NO: 306588 - RNA, 22 nt, Human
auguagcaucuauccugauaaa

SEQ ID NO: 306589 - RNA, 22 nt, Human
auucuccacacauccagaccuu

SEQ ID NO: 306590 - RNA, 22 nt, Human
cagggguggcugcagcagaggu

SEQ ID NO: 306591 - RNA, 22 nt, Human
auuucuguaguccacauucuuu

SEQ ID NO: 306592 - RNA, 22 nt, Human
ggccagggccuggggacugucc

SEQ ID NO: 306593 - RNA, 22 nt, Human
ugcuauaagaauuauauuacuc

SEQ ID NO: 306594 - RNA, 19 nt, Human
uggagacugagagugagca

SEQ ID NO: 306595 - RNA, 22 nt, Human
aaugcugcucucauaauuauag

SEQ ID NO: 306596 - RNA, 19 nt, Human
ggaaggagagaaaugcaug

SEQ ID NO: 306597 - RNA, 22 nt, Human
aggguggagggagucccugagc

SEQ ID NO: 306598 - RNA, 22 nt, Human
ugaagcugugggcaguggagcc

SEQ ID NO: 306599 - RNA, 22 nt, Human
cucaggaugucggugacuauug

SEQ ID NO: 306600 - RNA, 22 nt, Human
gcagcguggggcugagucagcu

SEQ ID NO: 306601 - RNA, 22 nt, Human
uuuaaauuuagaagaaacacug

SEQ ID NO: 306602 - RNA, 19 nt, Human
ccagguggaacugagguag

SEQ ID NO: 306603 - RNA, 19 nt, Human
gccucugcuggggacaggc

SEQ ID NO: 306604 - RNA, 17 nt, Human
aagacagaagccaugag

SEQ ID NO: 306605 - RNA, 22 nt, Human
gcucucuuuuuccagugguggu

SEQ ID NO: 306606 - RNA, 22 nt, Human
ggcacugaaccaggacacaagc

SEQ ID NO: 306607 - RNA, 22 nt, Human
ggucagggcucuuccaguggcu

SEQ ID NO: 306608 - RNA, 22 nt, Human
ugaggcucaaggucugguggag

SEQ ID NO: 306609 - RNA, 22 nt, Human
auuuccucaugaucauaaugca

SEQ ID NO: 306610 - RNA, 22 nt, Human
uaugugaauacagcaguggaug

SEQ ID NO: 306611 - RNA, 22 nt, Human
auuuccauacacccauuucuga

SEQ ID NO: 306612 - RNA, 22 nt, Human
auguaauaggguaacauaacau

SEQ ID NO: 306613 - RNA, 22 nt, Human
uggcagcagacaaaaggccauu

SEQ ID NO: 306614 - RNA, 22 nt, Human
ccacagagcauuagauuucaga

SEQ ID NO: 306615 - RNA, 22 nt, Human
aagucauugguagcuugauagg

SEQ ID NO: 306616 - RNA, 22 nt, Human
cacccaggcagguggcugagaa

SEQ ID NO: 306617 - RNA, 22 nt, Human
caccaggcugcccaggacaggg

SEQ ID NO: 306618 - RNA, 22 nt, Human
ccuccugggccuugcucuguga

SEQ ID NO: 306619 - RNA, 22 nt, Human
uuccaugaaauguguuaugcuu

SEQ ID NO: 306620 - RNA, 22 nt, Human
uucaaugagcccggggccauag

SEQ ID NO: 306621 - RNA, 22 nt, Human
uagugcuuuaggccugaguguc

SEQ ID NO: 306622 - RNA, 22 nt, Human
ggcagcagggucuagauugaug

SEQ ID NO: 306623 - RNA, 22 nt, Human
cugggguuggccagggcccuag

SEQ ID NO: 306624 - RNA, 22 nt, Human
ggucccaggcucccucuugucc

SEQ ID NO: 306625 - RNA, 22 nt, Human
gguggcagcgucuaucugacau

SEQ ID NO: 306626 - RNA, 17 nt, Human
gcugagugcagggaguc

SEQ ID NO: 306627 - RNA, 22 nt, Human
caguugaugggacucauguggg

SEQ ID NO: 306628 - RNA, 22 nt, Human
acagagcugggugcccccugga

SEQ ID NO: 306629 - RNA, 22 nt, Human
ucaucaaagucaaagaaugacu

SEQ ID NO: 306630 - RNA, 22 nt, Human
cauucauuuaugaaauaucuau

SEQ ID NO: 306631 - RNA, 22 nt, Human
agagcuggcacugacccucacc

SEQ ID NO: 306632 - RNA, 22 nt, Human
gaaacaauuuuuguugucuaag

SEQ ID NO: 306633 - RNA, 22 nt, Human
uggaaagagguagaggaucugg

SEQ ID NO: 306634 - RNA, 22 nt, Human
aagcaauaagccagauuuggau

SEQ ID NO: 306635 - RNA, 20 nt, Human
cccagcccgggccgcgcucg

SEQ ID NO: 306636 - RNA, 22 nt, Human
agccuucacugggaccuuggau

SEQ ID NO: 306637 - RNA, 16 nt, Human
uggaggcaucuggccc

SEQ ID NO: 306638 - RNA, 22 nt, Human
uuuguuugaaagucucuacagc

SEQ ID NO: 306639 - RNA, 19 nt, Human
agggaaggauucugucauu

SEQ ID NO: 306640 - RNA, 23 nt, Human
agucucagcuggaaacauguguc

SEQ ID NO: 306641 - RNA, 22 nt, Human
cuucuuuacuuucuagaaauaa

SEQ ID NO: 306642 - RNA, 22 nt, Human
uggagcaggccggaaguggcuu

SEQ ID NO: 306643 - RNA, 22 nt, Human
ugggagcucagaaagggagguc

SEQ ID NO: 306644 - RNA, 22 nt, Human
auguaguguagagauuagucuc

SEQ ID NO: 306645 - RNA, 22 nt, Human
uggggccuggucagagcugcac

SEQ ID NO: 306646 - RNA, 22 nt, Human
acagauguacacucauauauaa

SEQ ID NO: 306647 - RNA, 22 nt, Human
ggagggugcauuuuacccugug

SEQ ID NO: 306648 - RNA, 22 nt, Human
ggccuggaaugcuuuccuacca

SEQ ID NO: 306649 - RNA, 22 nt, Human
uacagugugacauuucuacaaa

SEQ ID NO: 306650 - RNA, 22 nt, Human
uuagaaaggagcuuauuucuuu

SEQ ID NO: 306651 - RNA, 22 nt, Human
auucuucacuguuucagaauga

SEQ ID NO: 306652 - RNA, 22 nt, Human
uuugaaagggaaauaaacuccu

SEQ ID NO: 306653 - RNA, 22 nt, Human
acagaugaauuuauggauggaa

SEQ ID NO: 306654 - RNA, 22 nt, Human
uauuuauaaucugccaaagaga

SEQ ID NO: 306655 - RNA, 22 nt, Human
guacucucuugaaggccuuucu

SEQ ID NO: 306656 - RNA, 22 nt, Human
ccccagccuuccaugggaauug

SEQ ID NO: 306657 - RNA, 22 nt, Human
ugggccuggguuccuccugggc

SEQ ID NO: 306658 - RNA, 22 nt, Human
ucaggauguccaaaauccagcc

SEQ ID NO: 306659 - RNA, 22 nt, Human
ggaggccaaggagggcggauca

SEQ ID NO: 306660 - RNA, 22 nt, Human
aggucauuccuugucuucuugc

SEQ ID NO: 306661 - RNA, 22 nt, Human
uuuuuccuagugcuuucuggua

SEQ ID NO: 306662 - RNA, 22 nt, Human
uuuccuugcacauugguuucca

SEQ ID NO: 306663 - RNA, 22 nt, Human
gaaaaugugccuuuggguauug

SEQ ID NO: 306664 - RNA, 22 nt, Human
uucugucacuuaggaggucaua

SEQ ID NO: 306665 - RNA, 22 nt, Human
cagaaagaccugggcucaagag

SEQ ID NO: 306666 - RNA, 22 nt, Human
gcuccaggagagggaagcagau

SEQ ID NO: 306667 - RNA, 22 nt, Human
gcuggcagagacaagaagacua

SEQ ID NO: 306668 - RNA, 18 nt, Human
uccagucccagcucugcc

SEQ ID NO: 306669 - RNA, 20 nt, Human
cugagcgucuaagaggugag

SEQ ID NO: 306670 - RNA, 22 nt, Human
uauugaauuagacccuaaaaug

SEQ ID NO: 306671 - RNA, 22 nt, Human
auaucaguaucuauguauuugu

SEQ ID NO: 306672 - RNA, 22 nt, Human
gcaggagccacuucagggaugc

SEQ ID NO: 306673 - RNA, 23 nt, Human
acuuaaaugguucuuuaucucag

SEQ ID NO: 306674 - RNA, 22 nt, Human
gggguggauuccuacaggucca

SEQ ID NO: 306675 - RNA, 22 nt, Human
uauuugcaacauaaaacucuga

SEQ ID NO: 306676 - RNA, 22 nt, Human
cuucugugcuucacaguugcca

SEQ ID NO: 306677 - RNA, 22 nt, Human
ugggccuggaguuuguccagag

SEQ ID NO: 306678 - RNA, 22 nt, Human
ccagcucugcagggccuggggu

SEQ ID NO: 306679 - RNA, 22 nt, Human
aaaggccaccaacaugaagcau

SEQ ID NO: 306680 - RNA, 21 nt, Human
aaugcauuaacauaaagcuga

SEQ ID NO: 306681 - RNA, 22 nt, Human
ggcugugccucaaggcuacuca

SEQ ID NO: 306682 - RNA, 22 nt, Human
acagagaugcaaguguguauuu

SEQ ID NO: 306683 - RNA, 21 nt, Human
ugcuccuuagcugccccugcc

SEQ ID NO: 306684 - RNA, 22 nt, Human
agaaauguuguggguuuuguua

SEQ ID NO: 306685 - RNA, 22 nt, Human
agaaaucaauaucuauauguug

SEQ ID NO: 306686 - RNA, 22 nt, Human
gagcagcuaaaauucucaugca

SEQ ID NO: 306687 - RNA, 22 nt, Human
caggcagccugcggucugcaca

SEQ ID NO: 306688 - RNA, 22 nt, Human
cuggggugugcucagagcaggg

SEQ ID NO: 306689 - RNA, 22 nt, Human
ucccagaggucucugcugguuc

SEQ ID NO: 306690 - RNA, 22 nt, Human
cagcagcugauggggaagugau

SEQ ID NO: 306691 - RNA, 22 nt, Human
ucccugaggaagggguguggug

SEQ ID NO: 306692 - RNA, 22 nt, Human
cuggugugauugagcccaggug

SEQ ID NO: 306693 - RNA, 22 nt, Human
cccacucccugcacgccugccg

SEQ ID NO: 306694 - RNA, 22 nt, Human
gagcaggcucugccuguguguc

SEQ ID NO: 306695 - RNA, 22 nt, Human
uguaugcaccauuguauuaccu

SEQ ID NO: 306696 - RNA, 22 nt, Human
cacuggcaugugaggcgguggc

SEQ ID NO: 306697 - RNA, 20 nt, Human
agcuccugguauaggugccu

SEQ ID NO: 306698 - RNA, 22 nt, Human
auacauuagaaucugguacuca

SEQ ID NO: 306699 - RNA, 22 nt, Human
caggguggggaaauagcgcccu

SEQ ID NO: 306700 - RNA, 22 nt, Human
acaggcugacuuccugccaugu

SEQ ID NO: 306701 - RNA, 22 nt, Human
ccugagggcgccgagcucccag

SEQ ID NO: 306702 - RNA, 22 nt, Human
ccagagcugauuccugggacuu

SEQ ID NO: 306703 - RNA, 22 nt, Human
aguguucauuuauucauucacu

SEQ ID NO: 306704 - RNA, 19 nt, Human
uguguguuuauauauguau

SEQ ID NO: 306705 - RNA, 22 nt, Human
acagugucaugucguguucccc

SEQ ID NO: 306706 - RNA, 21 nt, Human
ucacuuauaauguauuugcug

SEQ ID NO: 306707 - RNA, 22 nt, Human
uucuucuccgaggagggcuggu

SEQ ID NO: 306708 - RNA, 22 nt, Human
aaggccaggacaccaggggacu

SEQ ID NO: 306709 - RNA, 22 nt, Human
acuguucauuuguccuguaucu

SEQ ID NO: 306710 - RNA, 18 nt, Human
cagaugagaugcaaucuc

SEQ ID NO: 306711 - RNA, 22 nt, Human
cagcccagccgagggccuggcu

SEQ ID NO: 306712 - RNA, 22 nt, Human
cagcugccccauaaaucacagu

SEQ ID NO: 306713 - RNA, 22 nt, Human
cauuuccacuucugaaaacugg

SEQ ID NO: 306714 - RNA, 22 nt, Human
uaagaacaguguuucaucucua

SEQ ID NO: 306715 - RNA, 22 nt, Human
ccucaggggugcccacagcugc

SEQ ID NO: 306716 - RNA, 22 nt, Human
uucuuuggggaauauucugguu

SEQ ID NO: 306717 - RNA, 22 nt, Human
ucucagugacugcugggucccc

SEQ ID NO: 306718 - RNA, 22 nt, Human
uaugcacacaucgcagcaggaa

SEQ ID NO: 306719 - RNA, 22 nt, Human
uuuuucaugagacuagaaguca

SEQ ID NO: 306720 - RNA, 22 nt, Human
guuugcauauuugcacaggaau

SEQ ID NO: 306721 - RNA, 22 nt, Human
ugucugugaccucuuaggcaag

SEQ ID NO: 306722 - RNA, 22 nt, Human
ugauugaagaggugaggaaguu

SEQ ID NO: 306723 - RNA, 22 nt, Human
cucaguuucuucauauuguagg

SEQ ID NO: 306724 - RNA, 18 nt, Human
cuuuaugugcagagcuuu

SEQ ID NO: 306725 - RNA, 22 nt, Human
ucuucucuccugcuuggcagaa

SEQ ID NO: 306726 - RNA, 21 nt, Human
uucuucaugaugauuaauggc

SEQ ID NO: 306727 - RNA, 22 nt, Human
ccugcugugaccggggagcagg

SEQ ID NO: 306728 - RNA, 22 nt, Human
aaugcacaugucuuggccucac

SEQ ID NO: 306729 - RNA, 22 nt, Human
cucaggccauucuuccagcugc

SEQ ID NO: 306730 - RNA, 22 nt, Human
cagccagcugucccaagugccu

SEQ ID NO: 306731 - RNA, 22 nt, Human
cacccaggcuggagugcagggg

SEQ ID NO: 306732 - RNA, 22 nt, Human
cacugugucaguuugguuagac

SEQ ID NO: 306733 - RNA, 22 nt, Human
agacagcaggggagucugguuu

SEQ ID NO: 306734 - RNA, 22 nt, Human
uccagggccaagucauggaacc

SEQ ID NO: 306735 - RNA, 22 nt, Human
gugcagagaaaugagaagucga

SEQ ID NO: 306736 - RNA, 22 nt, Human
uaaucuguauuccuacuuugca

SEQ ID NO: 306737 - RNA, 17 nt, Human
ccucccacaccgcccug

SEQ ID NO: 306738 - RNA, 22 nt, Human
aacuagaaaacaagaugcugau

SEQ ID NO: 306739 - RNA, 22 nt, Human
auguuauuaaaguacagauucu

SEQ ID NO: 306740 - RNA, 22 nt, Human
gagaaggggugauguggguaau

SEQ ID NO: 306741 - RNA, 22 nt, Human
aacagcagggggaccugcuggu

SEQ ID NO: 306742 - RNA, 22 nt, Human
augauacaagcaaaacuaauca

SEQ ID NO: 306743 - RNA, 22 nt, Human
caggagcucuuaaggaugugau

SEQ ID NO: 306744 - RNA, 22 nt, Human
uugucuuaaauggauggacaau

SEQ ID NO: 306745 - RNA, 22 nt, Human
aguaugaagcugaaugauuuua

SEQ ID NO: 306746 - RNA, 22 nt, Human
cuggagagauccuccugaaaaa

SEQ ID NO: 306747 - RNA, 22 nt, Human
auucagcauaaucaguagcuug

SEQ ID NO: 306748 - RNA, 22 nt, Human
ucagggcaggcgagcagcugcu

SEQ ID NO: 306749 - RNA, 20 nt, Human
gcagcugcccccagucccug

SEQ ID NO: 306750 - RNA, 22 nt, Human
uggcacugaccccaggccugug

SEQ ID NO: 306751 - RNA, 20 nt, Human
uucauucauuccacaacuuc

SEQ ID NO: 306752 - RNA, 22 nt, Human
augcuguguccuagugaaagaa

SEQ ID NO: 306753 - RNA, 20 nt, Human
gaagcagcuucauguagaca

SEQ ID NO: 306754 - RNA, 20 nt, Human
aggaaaaauggaaacuggag

SEQ ID NO: 306755 - RNA, 22 nt, Human
cuggggugagcagaaacagggg

SEQ ID NO: 306756 - RNA, 22 nt, Human
uugcucugacuggagugcagug

SEQ ID NO: 306757 - RNA, 22 nt, Human
auugacaagacaauggcucuua

SEQ ID NO: 306758 - RNA, 22 nt, Human
cagcuucugcuaucgaacaucu

SEQ ID NO: 306759 - RNA, 22 nt, Human
ccuggcaggcuggggacagugc

SEQ ID NO: 306760 - RNA, 22 nt, Human
ccagagacgucggucagggcgc

SEQ ID NO: 306761 - RNA, 22 nt, Human
aauaauuuugagagccuggaaa

SEQ ID NO: 306762 - RNA, 22 nt, Human
agggcuggcuccguuaccuuga

SEQ ID NO: 306763 - RNA, 18 nt, Human
cagggcuguggggucacu

SEQ ID NO: 306764 - RNA, 22 nt, Human
aagcuuccugaaugcucauuua

SEQ ID NO: 306765 - RNA, 23 nt, Human
uuucaaauuacucugcagaugac

SEQ ID NO: 306766 - RNA, 22 nt, Human
gcuggcuccucuguccucacgg

SEQ ID NO: 306767 - RNA, 22 nt, Human
ggccaggaagggaagaucagca

SEQ ID NO: 306768 - RNA, 22 nt, Human
gaccaggcuuccccagaccuca

SEQ ID NO: 306769 - RNA, 22 nt, Human
cugucaucacaguugagcagcc

SEQ ID NO: 306770 - RNA, 22 nt, Human
cauuuuaaaugauuuaagccaa

SEQ ID NO: 306771 - RNA, 18 nt, Human
gccugggaggaggaaaug

SEQ ID NO: 306772 - RNA, 22 nt, Human
cucuucucugcagccuuugaag

SEQ ID NO: 306773 - RNA, 22 nt, Human
ggagauaauccagggagggacu

SEQ ID NO: 306774 - RNA, 22 nt, Human
ugggagcugggguuggacgucu

SEQ ID NO: 306775 - RNA, 22 nt, Human
auuccuuggcauucuggacuug

SEQ ID NO: 306776 - RNA, 22 nt, Human
gugggccucuugaggguggcua

SEQ ID NO: 306777 - RNA, 22 nt, Human
ucccuggcugggggcugccuug

SEQ ID NO: 306778 - RNA, 22 nt, Human
cauacauugcucauucaguauc

SEQ ID NO: 306779 - RNA, 18 nt, Human
agcuggggccucuggucc

SEQ ID NO: 306780 - RNA, 22 nt, Human
ucuguagcaagugagaggcauu

SEQ ID NO: 306781 - RNA, 22 nt, Human
augagacuaccuguaauguggc

SEQ ID NO: 306782 - RNA, 22 nt, Human
uucaggauuauacucucuuccc

SEQ ID NO: 306783 - RNA, 22 nt, Human
ccaggauggggagcagauagaa

SEQ ID NO: 306784 - RNA, 22 nt, Human
acaguguuguauuuaguuugau

SEQ ID NO: 306785 - RNA, 22 nt, Human
gcugccugaucauacaccaggg

SEQ ID NO: 306786 - RNA, 22 nt, Human
cccucccaagcacucugacaua

SEQ ID NO: 306787 - RNA, 20 nt, Human
ggaggguggaagaaagcaag

SEQ ID NO: 306788 - RNA, 22 nt, Human
guguuuccaguucagaaagcaa

SEQ ID NO: 306789 - RNA, 22 nt, Human
ucaguggauauuucuguggcug

SEQ ID NO: 306790 - RNA, 19 nt, Human
ggugaccaccuggucagug

SEQ ID NO: 306791 - RNA, 22 nt, Human
ccucuucugcuucaggagcacu

SEQ ID NO: 306792 - RNA, 22 nt, Human
ugcugccaaaugcgagcucugu

SEQ ID NO: 306793 - RNA, 22 nt, Human
uaugauaugcacuuuaucagaa

SEQ ID NO: 306794 - RNA, 22 nt, Human
ugaaggaauggaggaucagagc

SEQ ID NO: 306795 - RNA, 22 nt, Human
cugucucagcaggaagucauca

SEQ ID NO: 306796 - RNA, 22 nt, Human
cccaagaucuuucgugcacuaa

SEQ ID NO: 306797 - RNA, 22 nt, Human
cagagcaguccuugucaaucag

SEQ ID NO: 306798 - RNA, 22 nt, Human
aggcacugaaagguggccagag

SEQ ID NO: 306799 - RNA, 22 nt, Human
uucuaugccauguucagcuacu

SEQ ID NO: 306800 - RNA, 22 nt, Human
ggcaugggccgaggugccuccu

SEQ ID NO: 306801 - RNA, 22 nt, Human
gcagagcugggucuguauccaa

SEQ ID NO: 306802 - RNA, 22 nt, Human
acacugcucacuucuucccuug

SEQ ID NO: 306803 - RNA, 22 nt, Human
ccagcugcuugggaaaaugucu

SEQ ID NO: 306804 - RNA, 22 nt, Human
uagaaaucagcaggcauaugua

SEQ ID NO: 306805 - RNA, 22 nt, Human
cagcauuuaucuuguagcagga

SEQ ID NO: 306806 - RNA, 22 nt, Human
uuucaguguaagguuuccagga

SEQ ID NO: 306807 - RNA, 22 nt, Human
cuuugaaagcucccaggacuua

SEQ ID NO: 306808 - RNA, 22 nt, Human
uuugcauugcagugguuuacag

SEQ ID NO: 306809 - RNA, 22 nt, Human
uuuauucaucaucuguucauau

SEQ ID NO: 306810 - RNA, 22 nt, Human
agcuaccuggcuuaucacuguc

SEQ ID NO: 306811 - RNA, 20 nt, Human
uuugagaccagucugcccaa

SEQ ID NO: 306812 - RNA, 22 nt, Human
aagaauguucauuaaacuguug

SEQ ID NO: 306813 - RNA, 22 nt, Human
gcccugcugucuucagaguaua

SEQ ID NO: 306814 - RNA, 22 nt, Human
ugccaggaggaggugggacaga

SEQ ID NO: 306815 - RNA, 22 nt, Human
uucuucaauuuuccauauacug

SEQ ID NO: 306816 - RNA, 22 nt, Human
gaagccccaaacccucgccauc

SEQ ID NO: 306817 - RNA, 22 nt, Human
gucagaggggcagcugccaggc

SEQ ID NO: 306818 - RNA, 22 nt, Human
gggacugggagauccuccuggc

SEQ ID NO: 306819 - RNA, 22 nt, Human
cccaggcuggauuucgguggca

SEQ ID NO: 306820 - RNA, 22 nt, Human
uugauacauuuuuaggauaaac

SEQ ID NO: 306821 - RNA, 22 nt, Human
uaagaacauaaauucauacggg

SEQ ID NO: 306822 - RNA, 22 nt, Human
cccagcuccuuacagggccgaa

SEQ ID NO: 306823 - RNA, 22 nt, Human
auaacagaguugggaagugaaa

SEQ ID NO: 306824 - RNA, 22 nt, Human
ggaggccaaggcaggcggauca

SEQ ID NO: 306825 - RNA, 22 nt, Human
agggccugacacccuugccagc

SEQ ID NO: 306826 - RNA, 22 nt, Human
auggagggugucagagagcgaa

SEQ ID NO: 306827 - RNA, 22 nt, Human
uugaaaguccuucuugaguuac

SEQ ID NO: 306828 - RNA, 22 nt, Human
gccugagaaggauaggaagcga

SEQ ID NO: 306829 - RNA, 22 nt, Human
aucugccugagucuagguuuuc

SEQ ID NO: 306830 - RNA, 22 nt, Human
uaauuuacuugcaaauaacaau

SEQ ID NO: 306831 - RNA, 22 nt, Human
aacuagaacgucuaguugcugg

SEQ ID NO: 306832 - RNA, 22 nt, Human
auuaguguacaucucacacgca

SEQ ID NO: 306833 - RNA, 22 nt, Human
cugccuggucucaggcaugggg

SEQ ID NO: 306834 - RNA, 19 nt, Human
gaagaagcuugagaaguag

SEQ ID NO: 306835 - RNA, 22 nt, Human
ucagcugcucuguugagcugaa

SEQ ID NO: 306836 - RNA, 22 nt, Human
ugggcagagaucuggaucaaac

SEQ ID NO: 306837 - RNA, 22 nt, Human
aggcacagagaaugcccuccau

SEQ ID NO: 306838 - RNA, 22 nt, Human
uggcagggaauacagauguuua

SEQ ID NO: 306839 - RNA, 22 nt, Human
ucucuggagcugcagauccagg

SEQ ID NO: 306840 - RNA, 22 nt, Human
agccccaguaagggagggccug

SEQ ID NO: 306841 - RNA, 19 nt, Human
uggcagaggcaguuuguac

SEQ ID NO: 306842 - RNA, 22 nt, Human
ggauccuuaacuaucacaguga

SEQ ID NO: 306843 - RNA, 22 nt, Human
auaacagagagcuacugaacug

SEQ ID NO: 306844 - RNA, 22 nt, Human
uaacacugguauuucauuuagu

SEQ ID NO: 306845 - RNA, 17 nt, Human
aucuggcugcuucuaga

SEQ ID NO: 306846 - RNA, 22 nt, Human
caugcacuuaccugaaauucaa

SEQ ID NO: 306847 - RNA, 22 nt, Human
ucuuaacaagcuccucagugcu

SEQ ID NO: 306848 - RNA, 22 nt, Human
ugaaggagcucaaugaugaugc

SEQ ID NO: 306849 - RNA, 22 nt, Human
ucagaggucccuagcaggagug

SEQ ID NO: 306850 - RNA, 22 nt, Human
uauuucuguaugcauaaaagga

SEQ ID NO: 306851 - RNA, 22 nt, Human
ugcugcuuugauguguaaauca

SEQ ID NO: 306852 - RNA, 21 nt, Human
cagagguggccugaccucuga

SEQ ID NO: 306853 - RNA, 22 nt, Human
ccagggugggaggcugaaggcg

SEQ ID NO: 306854 - RNA, 22 nt, Human
uaagaauuguguugaauagagu

SEQ ID NO: 306855 - RNA, 22 nt, Human
cucugagggucuaaggagucac

SEQ ID NO: 306856 - RNA, 22 nt, Human
auaugagagaggaaagauuuua

SEQ ID NO: 306857 - RNA, 22 nt, Human
ccuuggcccuagccucaggcaa

SEQ ID NO: 306858 - RNA, 22 nt, Human
ucuugggauugcccugcaguuc

SEQ ID NO: 306859 - RNA, 22 nt, Human
gggcugcuuauacugaugauaa

SEQ ID NO: 306860 - RNA, 22 nt, Human
gacagggcgagacucagucuca

SEQ ID NO: 306861 - RNA, 22 nt, Human
cagcucugaagaaaggugucua

SEQ ID NO: 306862 - RNA, 22 nt, Human
auguuacauaguccuuauuugu

SEQ ID NO: 306863 - RNA, 22 nt, Human
cagaugagaguggccaggguuc

SEQ ID NO: 306864 - RNA, 22 nt, Human
ccucuggucccagcucugcugc

SEQ ID NO: 306865 - RNA, 22 nt, Human
ugugucccuuggaaccucagcu

SEQ ID NO: 306866 - RNA, 21 nt, Human
uugaccaagggugcgugcucc

SEQ ID NO: 306867 - RNA, 22 nt, Human
cuggagccccagacagggagag

SEQ ID NO: 306868 - RNA, 18 nt, Human
cagaaaucacaccagcac

SEQ ID NO: 306869 - RNA, 22 nt, Human
uggguggcacuucuggggucca

SEQ ID NO: 306870 - RNA, 22 nt, Human
ccugccugcggcccgcggggag

SEQ ID NO: 306871 - RNA, 22 nt, Human
cugcaagauuggaagaugcaau

SEQ ID NO: 306872 - RNA, 22 nt, Human
caggauccccaggucgccgucc

SEQ ID NO: 306873 - RNA, 22 nt, Human
guggcugguuuccugcaugcaa

SEQ ID NO: 306874 - RNA, 20 nt, Human
uaugaguauuacuuucagga

SEQ ID NO: 306875 - RNA, 22 nt, Human
gagcucauucauucauugccug

SEQ ID NO: 306876 - RNA, 22 nt, Human
uugugcauuucucugagugugu

SEQ ID NO: 306877 - RNA, 16 nt, Human
uguuagcugugcauua

SEQ ID NO: 306878 - RNA, 17 nt, Human
acacagccagguucucc

SEQ ID NO: 306879 - RNA, 22 nt, Human
ugggcagacauugaguuuguuc

SEQ ID NO: 306880 - RNA, 22 nt, Human
cagcugccuaugaccuagccuc

SEQ ID NO: 306881 - RNA, 22 nt, Human
ugaaggcccagccacagaaugg

SEQ ID NO: 306882 - RNA, 22 nt, Human
ugagcccaggaguuggagaccg

SEQ ID NO: 306883 - RNA, 22 nt, Human
gguggccucugcaggccucgac

SEQ ID NO: 306884 - RNA, 22 nt, Human
gcagccacuuugcaaccaagag

SEQ ID NO: 306885 - RNA, 22 nt, Human
uugaaaguuaucuagauucuga

SEQ ID NO: 306886 - RNA, 17 nt, Human
agaggcagauacuugga

SEQ ID NO: 306887 - RNA, 22 nt, Human
cugggcucaguggcucauggcu

SEQ ID NO: 306888 - RNA, 22 nt, Human
cugcauuagucaugcuuugcag

SEQ ID NO: 306889 - RNA, 22 nt, Human
uaugacauuggccaaguucugu

SEQ ID NO: 306890 - RNA, 22 nt, Human
acaauguuuuuguucaaagagu

SEQ ID NO: 306891 - RNA, 22 nt, Human
gcuggccacauugugccguccu

SEQ ID NO: 306892 - RNA, 22 nt, Human
cugggguggugcaggccucaug

SEQ ID NO: 306893 - RNA, 22 nt, Human
cagagacauuaagugccaugau

SEQ ID NO: 306894 - RNA, 21 nt, Human
ugauccuuucccccauguugc

SEQ ID NO: 306895 - RNA, 22 nt, Human
uacaaagucaccagcuucuugc

SEQ ID NO: 306896 - RNA, 19 nt, Human
ggcucucccuugagagagc

SEQ ID NO: 306897 - RNA, 22 nt, Human
uuaacacaucccugcucuaccc

SEQ ID NO: 306898 - RNA, 22 nt, Human
ucuuaaagagcgcaauuugagg

SEQ ID NO: 306899 - RNA, 22 nt, Human
gagagcuguccggcugagcagc

SEQ ID NO: 306900 - RNA, 22 nt, Human
ccuguggcugccacuuggguga

SEQ ID NO: 306901 - RNA, 22 nt, Human
ccugaggcccuggcugugcuga

SEQ ID NO: 306902 - RNA, 22 nt, Human
ugcagccaauucauucauucuu

SEQ ID NO: 306903 - RNA, 22 nt, Human
agcugagcuaguaguuccagug

SEQ ID NO: 306904 - RNA, 22 nt, Human
uauuucagggagaauaaauuug

SEQ ID NO: 306905 - RNA, 22 nt, Human
ucucagagcuucagaaagcacc

SEQ ID NO: 306906 - RNA, 22 nt, Human
accucuggccuucaggcaucau

SEQ ID NO: 306907 - RNA, 22 nt, Human
uuccucagaaaauacuguccaa

SEQ ID NO: 306908 - RNA, 22 nt, Human
aucuggcugcugugcuuaagcu

SEQ ID NO: 306909 - RNA, 22 nt, Human
auuugcuuuaagguauaaaagg

SEQ ID NO: 306910 - RNA, 22 nt, Human
acagcagcuaaccccugggcca

SEQ ID NO: 306911 - RNA, 22 nt, Human
aggcucugugacaaucaagcug

SEQ ID NO: 306912 - RNA, 22 nt, Human
ucccacugugaauccaaggccu

SEQ ID NO: 306913 - RNA, 22 nt, Human
ucucaccauggugcuugcuuau

SEQ ID NO: 306914 - RNA, 22 nt, Human
uuccuugaccacugcauaauga

SEQ ID NO: 306915 - RNA, 22 nt, Human
cagcugccagcuucucuccauc

SEQ ID NO: 306916 - RNA, 22 nt, Human
aggcagaauguuggaaaggaag

SEQ ID NO: 306917 - RNA, 22 nt, Human
uaugagaaagucguaugucucc

SEQ ID NO: 306918 - RNA, 22 nt, Human
ccugccucaucaacuugucgug

SEQ ID NO: 306919 - RNA, 22 nt, Human
ugcuagaaaucugaaacuagca

SEQ ID NO: 306920 - RNA, 22 nt, Human
cagcuugcaguacuuguuuuug

SEQ ID NO: 306921 - RNA, 22 nt, Human
aaacagcaggaacaucuugcca

SEQ ID NO: 306922 - RNA, 22 nt, Human
ugggccugauucuugaauccug

SEQ ID NO: 306923 - RNA, 22 nt, Human
cagcacuggggggauucggagc

SEQ ID NO: 306924 - RNA, 22 nt, Human
aaauauguaagauuagcacuag

SEQ ID NO: 306925 - RNA, 23 nt, Human
aggugcagcccuggaccugcccc

SEQ ID NO: 306926 - RNA, 22 nt, Human
cucagggacguuagaggacagg

SEQ ID NO: 306927 - RNA, 22 nt, Human
gcugcaggcauuuuccugggca

SEQ ID NO: 306928 - RNA, 22 nt, Human
ccaugagcuuccuauauagggu

SEQ ID NO: 306929 - RNA, 22 nt, Human
guggccuggcgagcuggcgcgg

SEQ ID NO: 306930 - RNA, 22 nt, Human
gugauuccuauuaguacaugca

SEQ ID NO: 306931 - RNA, 22 nt, Human
ugcagccaggaaauauuugcug

SEQ ID NO: 306932 - RNA, 22 nt, Human
aaucuggcauuugagaguagga

SEQ ID NO: 306933 - RNA, 22 nt, Human
uaaaauguuugcaagagaccag

SEQ ID NO: 306934 - RNA, 22 nt, Human
uuugaaagcaggugugggaggg

SEQ ID NO: 306935 - RNA, 22 nt, Human
aaacagaaggguagguaaacau

SEQ ID NO: 306936 - RNA, 22 nt, Human
caaaaguucucacccagacaug

SEQ ID NO: 306937 - RNA, 22 nt, Human
aggguccaucaaggacugcaca

SEQ ID NO: 306938 - RNA, 22 nt, Human
cucagaagaacaaaggcucuac

SEQ ID NO: 306939 - RNA, 22 nt, Human
ugccugggaaccaauccuggcu

SEQ ID NO: 306940 - RNA, 22 nt, Human
gaugcugaagugaagugaucuu

SEQ ID NO: 306941 - RNA, 22 nt, Human
aagucacagcuaaauagcuaag

SEQ ID NO: 306942 - RNA, 22 nt, Human
ucuuccagcaaugugaaaucac

SEQ ID NO: 306943 - RNA, 22 nt, Human
cuuccagagauagggccucaag

SEQ ID NO: 306944 - RNA, 21 nt, Human
uggcugcuggcccucucucca

SEQ ID NO: 306945 - RNA, 22 nt, Human
auuguuaugaaaauaagauguu

SEQ ID NO: 306946 - RNA, 22 nt, Human
acauuucuugaugccucuguga

SEQ ID NO: 306947 - RNA, 22 nt, Human
ccauaagguugaaaacuguaca

SEQ ID NO: 306948 - RNA, 22 nt, Human
caggggcuagcacuuaauguuu

SEQ ID NO: 306949 - RNA, 20 nt, Human
agcuggccuguccuaggccu

SEQ ID NO: 306950 - RNA, 22 nt, Human
cucuggagguggagguugcagu

SEQ ID NO: 306951 - RNA, 22 nt, Human
aggagcuguuuuguucagcaaa

SEQ ID NO: 306952 - RNA, 22 nt, Human
aucugucaggagcaaggacuac

SEQ ID NO: 306953 - RNA, 22 nt, Human
caagauggaguccgggaaugug

SEQ ID NO: 306954 - RNA, 21 nt, Human
ccuggcagaagccugauaugc

SEQ ID NO: 306955 - RNA, 20 nt, Human
cccucugcuacacugggagc

SEQ ID NO: 306956 - RNA, 22 nt, Human
cugucaccuguucacugcagca

SEQ ID NO: 306957 - RNA, 18 nt, Human
caaagcucacguuccauc

SEQ ID NO: 306958 - RNA, 22 nt, Human
gccuggcaggggccugggagug

SEQ ID NO: 306959 - RNA, 22 nt, Human
aggggagcuaacaccagagccc

SEQ ID NO: 306960 - RNA, 22 nt, Human
ggagggcugccagguggagcgg

SEQ ID NO: 306961 - RNA, 22 nt, Human
cuguaugaggaucagacuggac

SEQ ID NO: 306962 - RNA, 20 nt, Human
acccagcucugugcccuggg

SEQ ID NO: 306963 - RNA, 22 nt, Human
acuggcucagaguuccuagaga

SEQ ID NO: 306964 - RNA, 22 nt, Human
ucucagucagccuugauguccc

SEQ ID NO: 306965 - RNA, 22 nt, Human
agucugucuacuuaaagucugu

SEQ ID NO: 306966 - RNA, 22 nt, Human
acagcagcauaaacugacuaag

SEQ ID NO: 306967 - RNA, 22 nt, Human
cagcuugggaguuugguuuuau

SEQ ID NO: 306968 - RNA, 22 nt, Human
ugccucugcugcuguggcauca

SEQ ID NO: 306969 - RNA, 21 nt, Human
ucuugaaaauuguagcaguuu

SEQ ID NO: 306970 - RNA, 22 nt, Human
cugacuguaauucuguucuuaa

SEQ ID NO: 306971 - RNA, 22 nt, Human
acaugcuuucuagguccuucug

SEQ ID NO: 306972 - RNA, 22 nt, Human
aucuacccacugaacacaauau

SEQ ID NO: 306973 - RNA, 22 nt, Human
uagggcagccuuauagcuccca

SEQ ID NO: 306974 - RNA, 22 nt, Human
ugggcuggcugaggcauucacu

SEQ ID NO: 306975 - RNA, 22 nt, Human
uacauuaucuuguuaucuuuca

SEQ ID NO: 306976 - RNA, 22 nt, Human
gggcugugugcccacuucccau

SEQ ID NO: 306977 - RNA, 22 nt, Human
gaaaccucuuagccucucuuug

SEQ ID NO: 306978 - RNA, 22 nt, Human
cagaggccuauccaguguccau

SEQ ID NO: 306979 - RNA, 22 nt, Human
acaaagucaaauugcagccgcc

SEQ ID NO: 306980 - RNA, 22 nt, Human
aaugccaguguguugauuccag

SEQ ID NO: 306981 - RNA, 22 nt, Human
ccagagcaauucucacagaacu

SEQ ID NO: 306982 - RNA, 22 nt, Human
ugggggugcugagaagacagga

SEQ ID NO: 306983 - RNA, 22 nt, Human
augccuguaaucccagugcuuu

SEQ ID NO: 306984 - RNA, 22 nt, Human
ugcauugcaguuaacucaguau

SEQ ID NO: 306985 - RNA, 22 nt, Human
ugccugcugcuaagcucuuugu

SEQ ID NO: 306986 - RNA, 22 nt, Human
gcagagaaaguuuuguccucag

SEQ ID NO: 306987 - RNA, 22 nt, Human
ugggccuggcccuguggaggag

SEQ ID NO: 306988 - RNA, 22 nt, Human
caugucuggguauaugcauaug

SEQ ID NO: 306989 - RNA, 22 nt, Human
agaacagcagcacgucaagcug

SEQ ID NO: 306990 - RNA, 20 nt, Human
uggcaucucucaauuguagg

SEQ ID NO: 306991 - RNA, 22 nt, Human
aagauuuagggccaguuuacau

SEQ ID NO: 306992 - RNA, 22 nt, Human
uaauaucuggcauucaaacaug

SEQ ID NO: 306993 - RNA, 22 nt, Human
uuccucaucugugcaccucacu

SEQ ID NO: 306994 - RNA, 22 nt, Human
auaauuuaauuuucacaguggu

SEQ ID NO: 306995 - RNA, 22 nt, Human
augcugggaaguccuaaccaca

SEQ ID NO: 306996 - RNA, 22 nt, Human
agggaucaaaaaauguacaugc

SEQ ID NO: 306997 - RNA, 22 nt, Human
uccagccaagggagguuacuag

SEQ ID NO: 306998 - RNA, 22 nt, Human
ggcucagagaccugcgaucuga

SEQ ID NO: 306999 - RNA, 22 nt, Human
cagagccuuccuagcagacucu

SEQ ID NO: 307000 - RNA, 22 nt, Human
ggccacuccgcugcuacuggaa

SEQ ID NO: 307001 - RNA, 22 nt, Human
ugcagcuguaacagaggccuca

SEQ ID NO: 307002 - RNA, 22 nt, Human
agcaguggaccucagugcuauu

SEQ ID NO: 307003 - RNA, 22 nt, Human
agauaugacuagaagcucauuu

SEQ ID NO: 307004 - RNA, 20 nt, Human
aagcaauauagugcaaaugu

SEQ ID NO: 307005 - RNA, 22 nt, Human
cuggccuuggaagggagcccgu

SEQ ID NO: 307006 - RNA, 22 nt, Human
uggcuccuucauucuccugcca

SEQ ID NO: 307007 - RNA, 22 nt, Human
aacaacugaaaagcuuuuucug

SEQ ID NO: 307008 - RNA, 20 nt, Human
uagauuucauacuucucuuu

SEQ ID NO: 307009 - RNA, 22 nt, Human
ucccagccuuccagucugguuu

SEQ ID NO: 307010 - RNA, 22 nt, Human
ggcugggcugcugggucagagc

SEQ ID NO: 307011 - RNA, 22 nt, Human
auucuuaauugccaugcuguau

SEQ ID NO: 307012 - RNA, 23 nt, Human
gugcugugagccccuuggccucc

SEQ ID NO: 307013 - RNA, 22 nt, Human
agggcucugagugggaaagagg

SEQ ID NO: 307014 - RNA, 22 nt, Human
ccagugcacagccaggcaggug

SEQ ID NO: 307015 - RNA, 22 nt, Human
ugacagaacagguugggagcaa

SEQ ID NO: 307016 - RNA, 22 nt, Human
uggucaggcugcucugcggcgu

SEQ ID NO: 307017 - RNA, 22 nt, Human
caguucuuaauaccaugugguu

SEQ ID NO: 307018 - RNA, 22 nt, Human
cugggugguuuugaugugaauu

SEQ ID NO: 307019 - RNA, 22 nt, Human
cuggccugagcacagcggcugc

SEQ ID NO: 307020 - RNA, 22 nt, Human
acaaaguccugguguauggcca

SEQ ID NO: 307021 - RNA, 22 nt, Human
agagccagccuucucagcuuac

SEQ ID NO: 307022 - RNA, 22 nt, Human
gcauguguuauuuuauguauga

SEQ ID NO: 307023 - RNA, 22 nt, Human
uucauauauaugcacuacguac

SEQ ID NO: 307024 - RNA, 22 nt, Human
ucucucuucaacccuuaacuag

SEQ ID NO: 307025 - RNA, 21 nt, Human
ugcugccaucaugcagagaug

SEQ ID NO: 307026 - RNA, 21 nt, Human
uguaaguuucaucugaauugg

SEQ ID NO: 307027 - RNA, 22 nt, Human
gugguaaucggauucuuaccgg

SEQ ID NO: 307028 - RNA, 22 nt, Human
agucuucucauuucacaugcuu

SEQ ID NO: 307029 - RNA, 22 nt, Human
uaugacauuauaaaggauuauu

SEQ ID NO: 307030 - RNA, 22 nt, Human
ggggcagaaguagugccccuga

SEQ ID NO: 307031 - RNA, 22 nt, Human
cuuauaguaugauguugagaau

SEQ ID NO: 307032 - RNA, 22 nt, Human
cagaagcacuaggaggaaacgu

SEQ ID NO: 307033 - RNA, 22 nt, Human
ugcagaagcagagccgguggcc

SEQ ID NO: 307034 - RNA, 22 nt, Human
uuaaaaccaucagcuguaagau

SEQ ID NO: 307035 - RNA, 22 nt, Human
acagcuugcaauggcuuucaac

SEQ ID NO: 307036 - RNA, 22 nt, Human
aacugcauuugcauaaguccau

SEQ ID NO: 307037 - RNA, 22 nt, Human
cccugcaggggaccugcagccu

SEQ ID NO: 307038 - RNA, 22 nt, Human
caacugcugacaccaucacucc

SEQ ID NO: 307039 - RNA, 22 nt, Human
cacaggagagcugggaggugcc

SEQ ID NO: 307040 - RNA, 22 nt, Human
ccuccugguccagcaucucuuu

SEQ ID NO: 307041 - RNA, 22 nt, Human
ugaggcaggaguucaggcugcg

SEQ ID NO: 307042 - RNA, 22 nt, Human
agcagcugcagggagggucugc

SEQ ID NO: 307043 - RNA, 22 nt, Human
acagguggggaggcugagguuc

SEQ ID NO: 307044 - RNA, 22 nt, Human
cggggacacacuggcagcuccu

SEQ ID NO: 307045 - RNA, 22 nt, Human
acuuugugcccaacagaaagaa

SEQ ID NO: 307046 - RNA, 22 nt, Human
gcacagguugcaaaaguucaca

SEQ ID NO: 307047 - RNA, 22 nt, Human
uggcccugacagguccugggca

SEQ ID NO: 307048 - RNA, 22 nt, Human
ccaguguuugaugggauuuuca

SEQ ID NO: 307049 - RNA, 20 nt, Human
agagaauucccuuuggagau

SEQ ID NO: 307050 - RNA, 20 nt, Human
ugucagugccugaggcacag

SEQ ID NO: 307051 - RNA, 22 nt, Human
gaugaagaggcacugacauauu

SEQ ID NO: 307052 - RNA, 19 nt, Human
cagcugcaccgugaccauc

SEQ ID NO: 307053 - RNA, 22 nt, Human
ccacaguccgggcuggcaggac

SEQ ID NO: 307054 - RNA, 22 nt, Human
aaagaaauagauggcauuuaaa

SEQ ID NO: 307055 - RNA, 22 nt, Human
aaugagcugcugcuguuccacc

SEQ ID NO: 307056 - RNA, 22 nt, Human
uaucuguuggcuccuaguugua

SEQ ID NO: 307057 - RNA, 22 nt, Human
ugucauguguucuuaaauacau

SEQ ID NO: 307058 - RNA, 22 nt, Human
agggcugcugcuccgggcccag

SEQ ID NO: 307059 - RNA, 22 nt, Human
cuguaaauaugaagaauauaug

SEQ ID NO: 307060 - RNA, 18 nt, Human
uggagcugagugcugugc

SEQ ID NO: 307061 - RNA, 22 nt, Human
ggcuccugggaugggacugagc

SEQ ID NO: 307062 - RNA, 22 nt, Human
gugccugguuuggggaguguuc

SEQ ID NO: 307063 - RNA, 22 nt, Human
agccuccaguagcugaagagac

SEQ ID NO: 307064 - RNA, 22 nt, Human
ugacagggugauuaugagagcu

SEQ ID NO: 307065 - RNA, 22 nt, Human
uugaggagcacuagucagguau

SEQ ID NO: 307066 - RNA, 22 nt, Human
ucaugcacaugugucaccauca

SEQ ID NO: 307067 - RNA, 22 nt, Human
cagcaauaagccagguuagaca

SEQ ID NO: 307068 - RNA, 22 nt, Human
ucagccugcgucauggugacac

SEQ ID NO: 307069 - RNA, 22 nt, Human
uuauuuaaaagugguaagauuc

SEQ ID NO: 307070 - RNA, 22 nt, Human
agggaaagguagugaggucaca

SEQ ID NO: 307071 - RNA, 22 nt, Human
uccaugaguuugaggaaaagag

SEQ ID NO: 307072 - RNA, 22 nt, Human
agagccagagaccuggguucac

SEQ ID NO: 307073 - RNA, 22 nt, Human
gcugucuggguugagggcccug

SEQ ID NO: 307074 - RNA, 22 nt, Human
ugggacagugugccuugcuccu

SEQ ID NO: 307075 - RNA, 22 nt, Human
ucaguaacuuacuuauucaccu

SEQ ID NO: 307076 - RNA, 22 nt, Human
cuucuccucugaguccugggag

SEQ ID NO: 307077 - RNA, 22 nt, Human
uuacaugguuguuggaaaugcu

SEQ ID NO: 307078 - RNA, 22 nt, Human
ccacugggcguuucuguccaau

SEQ ID NO: 307079 - RNA, 22 nt, Human
aucuagaaguggcaugaauuac

SEQ ID NO: 307080 - RNA, 22 nt, Human
gcuguggucugugagcuccaaa

SEQ ID NO: 307081 - RNA, 22 nt, Human
aagccaagaguuaacuauuugu

SEQ ID NO: 307082 - RNA, 22 nt, Human
aagguagauucuggaucgaagg

SEQ ID NO: 307083 - RNA, 22 nt, Human
auguuucaccaguuuuauaaga

SEQ ID NO: 307084 - RNA, 22 nt, Human
auaugcacacucugcccacaga

SEQ ID NO: 307085 - RNA, 17 nt, Human
gcuuccucaugcaguuc

SEQ ID NO: 307086 - RNA, 22 nt, Human
ucuggcucuguguccucaccca

SEQ ID NO: 307087 - RNA, 22 nt, Human
guggaggagaggcgccuugcgg

SEQ ID NO: 307088 - RNA, 22 nt, Human
aguucuggugguuuggagaucu

SEQ ID NO: 307089 - RNA, 22 nt, Human
uaucuauuccaaauaucagcgu

SEQ ID NO: 307090 - RNA, 23 nt, Human
uugcacauuggagcuggucuucu

SEQ ID NO: 307091 - RNA, 22 nt, Human
cuguguccucccgcugcaccca

SEQ ID NO: 307092 - RNA, 22 nt, Human
acaauacuuaccaauguuuuug

SEQ ID NO: 307093 - RNA, 22 nt, Human
aguguucuucuucaaagcucug

SEQ ID NO: 307094 - RNA, 22 nt, Human
agaaugcaguuugaaauaaggu

SEQ ID NO: 307095 - RNA, 22 nt, Human
aggucacccguuugacuaucca

SEQ ID NO: 307096 - RNA, 22 nt, Human
agugaaauacugucguuuuuag

SEQ ID NO: 307097 - RNA, 22 nt, Human
cagcugucuaaguugagcagga

SEQ ID NO: 307098 - RNA, 22 nt, Human
aucaggaucugggagccugaaa

SEQ ID NO: 307099 - RNA, 22 nt, Human
aaggaugauugguaaugacacu

SEQ ID NO: 307100 - RNA, 22 nt, Human
cugggcugcagcgggagcgacg

SEQ ID NO: 307101 - RNA, 22 nt, Human
gguggggucacgacagagggaa

SEQ ID NO: 307102 - RNA, 22 nt, Human
guuuuaguggguggccacugau

SEQ ID NO: 307103 - RNA, 22 nt, Human
uccagcagaaaagagguaggga

SEQ ID NO: 307104 - RNA, 22 nt, Human
agggcuggcaucucuaaugcug

SEQ ID NO: 307105 - RNA, 22 nt, Human
agaaggaguguacaggucaugc

SEQ ID NO: 307106 - RNA, 22 nt, Human
acagggcagagaggcaggcuug

SEQ ID NO: 307107 - RNA, 22 nt, Human
aaggccugggaggccucucuuc

SEQ ID NO: 307108 - RNA, 22 nt, Human
aggcagcagggccacuggcuga

SEQ ID NO: 307109 - RNA, 22 nt, Human
guucuucaaagugacaacuaaa

SEQ ID NO: 307110 - RNA, 22 nt, Human
agagccugugggagaugcagcu

SEQ ID NO: 307111 - RNA, 22 nt, Human
ggccucaguuucuccauggguu

SEQ ID NO: 307112 - RNA, 22 nt, Human
guguauaacuaucuaucuagua

SEQ ID NO: 307113 - RNA, 22 nt, Human
ccuuggaggacugcugcuucuu

SEQ ID NO: 307114 - RNA, 22 nt, Human
cauagaaaucaggugagaaucu

SEQ ID NO: 307115 - RNA, 22 nt, Human
aucuuucagggccauuuguauu

SEQ ID NO: 307116 - RNA, 22 nt, Human
caggguggcccuguggucucau

SEQ ID NO: 307117 - RNA, 22 nt, Human
caagauggguguugugaugguu

SEQ ID NO: 307118 - RNA, 22 nt, Human
agagccaggaucuguuuugggg

SEQ ID NO: 307119 - RNA, 19 nt, Human
ugagugggccccugcagac

SEQ ID NO: 307120 - RNA, 22 nt, Human
caguacuuaguucucaugguuu

SEQ ID NO: 307121 - RNA, 22 nt, Human
cccaaggccucuccuuggcuug

SEQ ID NO: 307122 - RNA, 19 nt, Human
auaaggcagugacuuuuuu

SEQ ID NO: 307123 - RNA, 22 nt, Human
ugcauuaugcuugugcuguaua

SEQ ID NO: 307124 - RNA, 22 nt, Human
ccugucuggccuuccacggggg

SEQ ID NO: 307125 - RNA, 22 nt, Human
uggcuagcccuuguggggagag

SEQ ID NO: 307126 - RNA, 22 nt, Human
aacucaguucuuuccacaaugc

SEQ ID NO: 307127 - RNA, 22 nt, Human
gggcuuggcacaugggcucagc

SEQ ID NO: 307128 - RNA, 22 nt, Human
acagugacguuuauuugagacg

SEQ ID NO: 307129 - RNA, 22 nt, Human
gaaauacaggaaugccacacag

SEQ ID NO: 307130 - RNA, 23 nt, Human
acauacauggagauaaagugaug

SEQ ID NO: 307131 - RNA, 22 nt, Human
cugcacagagcagggcagacac

SEQ ID NO: 307132 - RNA, 22 nt, Human
uccucaguaaggcauggcuuug

SEQ ID NO: 307133 - RNA, 22 nt, Human
cuucuggggauggagcccagaa

SEQ ID NO: 307134 - RNA, 22 nt, Human
cccuugcaucccauguguggcc

SEQ ID NO: 307135 - RNA, 22 nt, Human
gaauauuuucaguacagauggu

SEQ ID NO: 307136 - RNA, 22 nt, Human
gcuggccugggcagaggcuaug

SEQ ID NO: 307137 - RNA, 22 nt, Human
uucauucuugggaucagagagu

SEQ ID NO: 307138 - RNA, 22 nt, Human
gacaggggucccucugggcugu

SEQ ID NO: 307139 - RNA, 22 nt, Human
cuggagcauccaugcccagggu

SEQ ID NO: 307140 - RNA, 22 nt, Human
agcuuguuaaggaugcauauua

SEQ ID NO: 307141 - RNA, 22 nt, Human
aagcugccuugcugaggagaaa

SEQ ID NO: 307142 - RNA, 22 nt, Human
gcuggcauuacaggagagaacc

SEQ ID NO: 307143 - RNA, 22 nt, Human
uggggcuccuccuggcaggagg

SEQ ID NO: 307144 - RNA, 22 nt, Human
uaaggccagcaugaaugcagca

SEQ ID NO: 307145 - RNA, 22 nt, Human
caggaaccuaaugaaggcucac

SEQ ID NO: 307146 - RNA, 22 nt, Human
gcagcuggacccacacggcuua

SEQ ID NO: 307147 - RNA, 22 nt, Human
ccaggaagccucagaugcugag

SEQ ID NO: 307148 - RNA, 22 nt, Human
gggccuccggggugagcugugg

SEQ ID NO: 307149 - RNA, 22 nt, Human
gaugcagggcuggcaggagcuu

SEQ ID NO: 307150 - RNA, 22 nt, Human
acagguggccccgagggagugg

SEQ ID NO: 307151 - RNA, 22 nt, Human
acagagaaagugggcugaagau

SEQ ID NO: 307152 - RNA, 22 nt, Human
cagggccaugaggcacaggguc

SEQ ID NO: 307153 - RNA, 22 nt, Human
gcugucuguggugucagcugac

SEQ ID NO: 307154 - RNA, 22 nt, Human
aaggcccuggcaggaagcagga

SEQ ID NO: 307155 - RNA, 21 nt, Human
acuguucauuugaugaacugg

SEQ ID NO: 307156 - RNA, 22 nt, Human
cagucucagaggugggaguggg

SEQ ID NO: 307157 - RNA, 22 nt, Human
cuaucauuuuacaugguuggug

SEQ ID NO: 307158 - RNA, 22 nt, Human
cuggggcugcggacgggagccc

SEQ ID NO: 307159 - RNA, 20 nt, Human
uacugggcaagcccacagac

SEQ ID NO: 307160 - RNA, 22 nt, Human
ccugggaguggcacucacagca

SEQ ID NO: 307161 - RNA, 22 nt, Human
uugucccaggacuugcauagau

SEQ ID NO: 307162 - RNA, 22 nt, Human
cagaaauggaauuuuccaucac

SEQ ID NO: 307163 - RNA, 22 nt, Human
agcuuaggaggaugaugaacau

SEQ ID NO: 307164 - RNA, 20 nt, Human
uguucacaguaguugcugcu

SEQ ID NO: 307165 - RNA, 22 nt, Human
aggcccuggcacugccugggag

SEQ ID NO: 307166 - RNA, 22 nt, Human
ucagccacuacccaccuuaaca

SEQ ID NO: 307167 - RNA, 22 nt, Human
cuggagagaaaugacaaagcua

SEQ ID NO: 307168 - RNA, 17 nt, Human
uccaugagacaugaaga

SEQ ID NO: 307169 - RNA, 22 nt, Human
cagaauuuagcacaauguaugg

SEQ ID NO: 307170 - RNA, 22 nt, Human
ccagcuugaagaugugcugguu

SEQ ID NO: 307171 - RNA, 22 nt, Human
gcugagugauugauauuuuagu

SEQ ID NO: 307172 - RNA, 22 nt, Human
uuuauucuugagagugagaaga

SEQ ID NO: 307173 - RNA, 22 nt, Human
cagaaauguacugacaugcagu

SEQ ID NO: 307174 - RNA, 22 nt, Human
uggcucuguugagguauggauu

SEQ ID NO: 307175 - RNA, 22 nt, Human
ggacacagauaaucacacagau

SEQ ID NO: 307176 - RNA, 22 nt, Human
gauaauauuagaagauacaaau

SEQ ID NO: 307177 - RNA, 22 nt, Human
gcugggagugggcaagaugaga

SEQ ID NO: 307178 - RNA, 22 nt, Human
ccagugcuaagguagccucugc

SEQ ID NO: 307179 - RNA, 22 nt, Human
aucaggauguuuggcugucaua

SEQ ID NO: 307180 - RNA, 22 nt, Human
aaguccaugaucaagauguggc

SEQ ID NO: 307181 - RNA, 21 nt, Human
agcagccauggaugguaugua

SEQ ID NO: 307182 - RNA, 22 nt, Human
ugcagcucugaacagucaugaa

SEQ ID NO: 307183 - RNA, 22 nt, Human
gcagugacagggcugcugccuu

SEQ ID NO: 307184 - RNA, 20 nt, Human
ucacaggggaccaggagcag

SEQ ID NO: 307185 - RNA, 22 nt, Human
aagaugaaucaguauguguccu

SEQ ID NO: 307186 - RNA, 22 nt, Human
gccaggugcuaucccugcgcug

SEQ ID NO: 307187 - RNA, 22 nt, Human
ucucaggggauucacuggcacc

SEQ ID NO: 307188 - RNA, 22 nt, Human
aauugcaauuuucuuaaggucu

SEQ ID NO: 307189 - RNA, 21 nt, Human
uccucagggccccagagcacu

SEQ ID NO: 307190 - RNA, 22 nt, Human
aaugggagguaguaugggaggu

SEQ ID NO: 307191 - RNA, 22 nt, Human
uuugaaguucccccauaucaga

SEQ ID NO: 307192 - RNA, 22 nt, Human
ugagccagaguggagugugccu

SEQ ID NO: 307193 - RNA, 22 nt, Human
gccuggugcuaugagggccagc

SEQ ID NO: 307194 - RNA, 22 nt, Human
ccucugggagacugcuacugag

SEQ ID NO: 307195 - RNA, 22 nt, Human
aguuauauaacuaucuagaugc

SEQ ID NO: 307196 - RNA, 22 nt, Human
ggcagcucaccucugguccagg

SEQ ID NO: 307197 - RNA, 22 nt, Human
ugccugggccucugaggaaggc

SEQ ID NO: 307198 - RNA, 22 nt, Human
gaggagagaugguagauugggu

SEQ ID NO: 307199 - RNA, 22 nt, Human
caggccucuccuuagucuggca

SEQ ID NO: 307200 - RNA, 22 nt, Human
ugcaauaacuacuuuaauguug

SEQ ID NO: 307201 - RNA, 22 nt, Human
gccuggaguagcauggcaagcc

SEQ ID NO: 307202 - RNA, 21 nt, Human
uuugaaagcccuauguuuuca

SEQ ID NO: 307203 - RNA, 22 nt, Human
cagcccuggugccaagguuccc

SEQ ID NO: 307204 - RNA, 19 nt, Human
uccagccccucugugugug

SEQ ID NO: 307205 - RNA, 22 nt, Human
ugcuggaggggccugaccagga

SEQ ID NO: 307206 - RNA, 22 nt, Human
ucucuuccaguaagagucuuua

SEQ ID NO: 307207 - RNA, 22 nt, Human
ggggagcaauaguugaggugug

SEQ ID NO: 307208 - RNA, 22 nt, Human
cagcuguucacauuuccaaaac

SEQ ID NO: 307209 - RNA, 22 nt, Human
ucauugcagacuaacaaucuca

SEQ ID NO: 307210 - RNA, 22 nt, Human
gugcaugugucuuuauaguaga

SEQ ID NO: 307211 - RNA, 22 nt, Human
uggggagaguuacaaggaaucu

SEQ ID NO: 307212 - RNA, 22 nt, Human
uagacacaucaaguauaguuaa

SEQ ID NO: 307213 - RNA, 22 nt, Human
ucaaagucacaacucucuaauu

SEQ ID NO: 307214 - RNA, 22 nt, Human
guucucucugcuuccaagaugg

SEQ ID NO: 307215 - RNA, 19 nt, Human
agucucaguguacagaggc

SEQ ID NO: 307216 - RNA, 22 nt, Human
uugcauugggagugaggagacc

SEQ ID NO: 307217 - RNA, 22 nt, Human
auucagcaguuccugcuucagu

SEQ ID NO: 307218 - RNA, 22 nt, Human
ggacagaggguugacagaguau

SEQ ID NO: 307219 - RNA, 22 nt, Human
uagcauuucacugaucuucacu

SEQ ID NO: 307220 - RNA, 22 nt, Human
agaauaugaucggaauacagau

SEQ ID NO: 307221 - RNA, 22 nt, Human
cugccugggccggccacccucu

SEQ ID NO: 307222 - RNA, 20 nt, Human
ucuguacacucaucuucugc

SEQ ID NO: 307223 - RNA, 22 nt, Human
auaacagauacucucugugagg

SEQ ID NO: 307224 - RNA, 22 nt, Human
uauguguaggaggaggacaggg

SEQ ID NO: 307225 - RNA, 22 nt, Human
ucauuucuccgaccugcugucc

SEQ ID NO: 307226 - RNA, 19 nt, Human
ucuuucauuucuagcucug

SEQ ID NO: 307227 - RNA, 22 nt, Human
cucacugacgaggaagcugaga

SEQ ID NO: 307228 - RNA, 22 nt, Human
gcagagcugcagcgaggccugg

SEQ ID NO: 307229 - RNA, 22 nt, Human
cauugcacugcagcccgggcaa

SEQ ID NO: 307230 - RNA, 22 nt, Human
gccugagccgccugagcggcgg

SEQ ID NO: 307231 - RNA, 22 nt, Human
uuuuccuauaugcaaagaaugc

SEQ ID NO: 307232 - RNA, 22 nt, Human
ucuguucagaagaggugaaagu

SEQ ID NO: 307233 - RNA, 20 nt, Human
uuucagauuuacagaaaugu

SEQ ID NO: 307234 - RNA, 22 nt, Human
aaaucuggccccuugccuauuu

SEQ ID NO: 307235 - RNA, 22 nt, Human
gccagaaacauacacaucacuu

SEQ ID NO: 307236 - RNA, 22 nt, Human
aggagaguaccauugggccgca

SEQ ID NO: 307237 - RNA, 22 nt, Human
gccaggcagauaugugagcuua

SEQ ID NO: 307238 - RNA, 22 nt, Human
gccuguggggcugaggcugccu

SEQ ID NO: 307239 - RNA, 22 nt, Human
caggaugggugucggccagcac

SEQ ID NO: 307240 - RNA, 22 nt, Human
aagcugccauagaacgagaggu

SEQ ID NO: 307241 - RNA, 22 nt, Human
gcugccaguaguuggagcucca

SEQ ID NO: 307242 - RNA, 20 nt, Human
ugaaaaggucaggagacaug

SEQ ID NO: 307243 - RNA, 22 nt, Human
caggaugugaggaggccauuug

SEQ ID NO: 307244 - RNA, 22 nt, Human
augaaggcuguguggagccccc

SEQ ID NO: 307245 - RNA, 22 nt, Human
uauacagaaccgccugaagucu

SEQ ID NO: 307246 - RNA, 22 nt, Human
gggagcaggacauaauagcaau

SEQ ID NO: 307247 - RNA, 22 nt, Human
gccagggaacccaagggccuca

SEQ ID NO: 307248 - RNA, 22 nt, Human
agggaaaggcugaugcuguggg

SEQ ID NO: 307249 - RNA, 22 nt, Human
ggcuucuccccuuugagucuuc

SEQ ID NO: 307250 - RNA, 21 nt, Human
cuggacugaggagacagucgc

SEQ ID NO: 307251 - RNA, 22 nt, Human
gaggggcugggcagucccugga

SEQ ID NO: 307252 - RNA, 22 nt, Human
uccugaggaaaguucaugaaug

SEQ ID NO: 307253 - RNA, 22 nt, Human
aggugcuggaguagaagaaaaa

SEQ ID NO: 307254 - RNA, 23 nt, Human
ggagugcaauggcgccaucucgg

SEQ ID NO: 307255 - RNA, 22 nt, Human
aucuucaacuugaucauuugaa

SEQ ID NO: 307256 - RNA, 22 nt, Human
caguguggagggagagagccug

SEQ ID NO: 307257 - RNA, 22 nt, Human
uccagggcuggguuggcucagc

SEQ ID NO: 307258 - RNA, 22 nt, Human
uccucagucucucaaaugaggc

SEQ ID NO: 307259 - RNA, 22 nt, Human
ugcucagacaagcugaacagua

SEQ ID NO: 307260 - RNA, 22 nt, Human
uguguuuugaacucaucuacug

SEQ ID NO: 307261 - RNA, 22 nt, Human
guggcugcucgggcuccggccc

SEQ ID NO: 307262 - RNA, 22 nt, Human
uucaaaacagcuagauauugga

SEQ ID NO: 307263 - RNA, 22 nt, Human
ccucagggaggccucuguggcu

SEQ ID NO: 307264 - RNA, 22 nt, Human
aucaaaguaggcauauguuuuu

SEQ ID NO: 307265 - RNA, 22 nt, Human
ggacaggaugcugaagaugaag

SEQ ID NO: 307266 - RNA, 22 nt, Human
ccucaggcuuacgggcaaugga

SEQ ID NO: 307267 - RNA, 22 nt, Human
uccuucagaaaaccucagucuu

SEQ ID NO: 307268 - RNA, 22 nt, Human
agccugugugcuuuggacaggg

SEQ ID NO: 307269 - RNA, 18 nt, Human
gccucaguuuccucaccu

SEQ ID NO: 307270 - RNA, 20 nt, Human
ggcccagugaaccaggacgg

SEQ ID NO: 307271 - RNA, 22 nt, Human
ucugcagaaguggcugggccac

SEQ ID NO: 307272 - RNA, 22 nt, Human
caggaacacaaguucagggaug

SEQ ID NO: 307273 - RNA, 22 nt, Human
uucaagaucuggguuuucagcu

SEQ ID NO: 307274 - RNA, 22 nt, Human
uaauacuuuugccuuguauuca

SEQ ID NO: 307275 - RNA, 23 nt, Human
aacaauagguuuuggcagaauag

SEQ ID NO: 307276 - RNA, 22 nt, Human
auaaagauuucuuuuucucuac

SEQ ID NO: 307277 - RNA, 22 nt, Human
aagauuucuuacuuauugaugc

SEQ ID NO: 307278 - RNA, 22 nt, Human
agccugagagccaagcugugca

SEQ ID NO: 307279 - RNA, 22 nt, Human
cagcagcuuugccaagucagcc

SEQ ID NO: 307280 - RNA, 22 nt, Human
uuucacuagaacguucuuguuu

SEQ ID NO: 307281 - RNA, 20 nt, Human
gucaggauuaguaaacucug

SEQ ID NO: 307282 - RNA, 22 nt, Human
ucuggcucauaggaaggccauu

SEQ ID NO: 307283 - RNA, 22 nt, Human
augaccccuaaaauuuacuguc

SEQ ID NO: 307284 - RNA, 22 nt, Human
uauuucuguaacucagggucug

SEQ ID NO: 307285 - RNA, 22 nt, Human
ugccuggguguaaagggccaac

SEQ ID NO: 307286 - RNA, 18 nt, Human
caguuuuuauaucuggca

SEQ ID NO: 307287 - RNA, 22 nt, Human
aucaggauuauuaaaucuggau

SEQ ID NO: 307288 - RNA, 22 nt, Human
aggauccuguauggagaagcug

SEQ ID NO: 307289 - RNA, 22 nt, Human
ucugagaguagagcugccucuu

SEQ ID NO: 307290 - RNA, 22 nt, Human
cauggaaggcaaaagacacaga

SEQ ID NO: 307291 - RNA, 22 nt, Human
cuggcuugcagcucaucauaaa

SEQ ID NO: 307292 - RNA, 22 nt, Human
ucagaggacgcacuaggguugu

SEQ ID NO: 307293 - RNA, 22 nt, Human
caugugucaaaugauguagcug

SEQ ID NO: 307294 - RNA, 22 nt, Human
acucugccccgaguucugggaa

SEQ ID NO: 307295 - RNA, 22 nt, Human
acagaauuaucaggaaauguua

SEQ ID NO: 307296 - RNA, 22 nt, Human
gccuggagugcaguggcgugau

SEQ ID NO: 307297 - RNA, 22 nt, Human
ggcagcagggcugucucccuac

SEQ ID NO: 307298 - RNA, 22 nt, Human
ggcuuccuaauacucccuacac

SEQ ID NO: 307299 - RNA, 22 nt, Human
ucuguuccauguuuuguuccau

SEQ ID NO: 307300 - RNA, 22 nt, Human
agagccagguguagucucggag

SEQ ID NO: 307301 - RNA, 22 nt, Human
cugccuguuuucugauagauuu

SEQ ID NO: 307302 - RNA, 22 nt, Human
ccagcugcgggcaucgagaguu

SEQ ID NO: 307303 - RNA, 22 nt, Human
ccagaaaaugcagaacauagaa

SEQ ID NO: 307304 - RNA, 22 nt, Human
gucauugcaguggcaaaucaca

SEQ ID NO: 307305 - RNA, 22 nt, Human
gaaaugugcagaauguguuaga

SEQ ID NO: 307306 - RNA, 22 nt, Human
ccugccagauccccugagcuga

SEQ ID NO: 307307 - RNA, 22 nt, Human
uggagcugagagccaggcuggc

SEQ ID NO: 307308 - RNA, 22 nt, Human
aggcugaggcagguggaucacc

SEQ ID NO: 307309 - RNA, 22 nt, Human
aagucucagaaaacuagugugg

SEQ ID NO: 307310 - RNA, 22 nt, Human
caaaugauacuguuuuuagucu

SEQ ID NO: 307311 - RNA, 22 nt, Human
ggccucugguucacagggagga

SEQ ID NO: 307312 - RNA, 22 nt, Human
guuguuuugcaggauccuuaca

SEQ ID NO: 307313 - RNA, 22 nt, Human
gucaccaggucugaugcagcca

SEQ ID NO: 307314 - RNA, 22 nt, Human
cacugcaggucugagauggggg

SEQ ID NO: 307315 - RNA, 22 nt, Human
ccacuguuuuucaguuaacuuu

SEQ ID NO: 307316 - RNA, 22 nt, Human
ugauuuccuagcugacaugaaa

SEQ ID NO: 307317 - RNA, 22 nt, Human
cuguccauuuucgugccuccuu

SEQ ID NO: 307318 - RNA, 22 nt, Human
gcaguguugcuaggugcgguga

SEQ ID NO: 307319 - RNA, 22 nt, Human
ucuguccagagguccuggagac

SEQ ID NO: 307320 - RNA, 22 nt, Human
ugcuggcugggcugcuggagac

SEQ ID NO: 307321 - RNA, 22 nt, Human
aaggccaacuaggaugagcuag

SEQ ID NO: 307322 - RNA, 22 nt, Human
cagccagggagcaaagaguuga

SEQ ID NO: 307323 - RNA, 22 nt, Human
auuggaaauacaguagaaaaau

SEQ ID NO: 307324 - RNA, 22 nt, Human
cuggcaguguccagcucgugau

SEQ ID NO: 307325 - RNA, 22 nt, Human
gauuuuauauggcauacugugg

SEQ ID NO: 307326 - RNA, 22 nt, Human
cagcuccagcccaggcagcucc

SEQ ID NO: 307327 - RNA, 22 nt, Human
uaaggccauuauggugggcccg

SEQ ID NO: 307328 - RNA, 21 nt, Human
uucaauacuauuucaauaguc

SEQ ID NO: 307329 - RNA, 22 nt, Human
accuuucacgguaucagacauc

SEQ ID NO: 307330 - RNA, 22 nt, Human
cacagaggacuguagcggggag

SEQ ID NO: 307331 - RNA, 22 nt, Human
caaagcaaggcucaguuugaac

SEQ ID NO: 307332 - RNA, 22 nt, Human
cagcucugccucuggggcugag

SEQ ID NO: 307333 - RNA, 22 nt, Human
aagaggccuuggucugaccuga

SEQ ID NO: 307334 - RNA, 22 nt, Human
uccugucugucuuuggucccuu

SEQ ID NO: 307335 - RNA, 22 nt, Human
guuuaagaaaauucauguuguu

SEQ ID NO: 307336 - RNA, 22 nt, Human
cagcugaacauguagagcaucu

SEQ ID NO: 307337 - RNA, 22 nt, Human
auaugccauuagcuagaaauaa

SEQ ID NO: 307338 - RNA, 22 nt, Human
ccugucugaggaggugcucuuu

SEQ ID NO: 307339 - RNA, 22 nt, Human
gccucccuggcccacagcagcg

SEQ ID NO: 307340 - RNA, 22 nt, Human
ucuuuccuuagaauaauucuuu

SEQ ID NO: 307341 - RNA, 22 nt, Human
agaaaugacacacaugagacau

SEQ ID NO: 307342 - RNA, 22 nt, Human
auaauaacaccugaauaggaaa

SEQ ID NO: 307343 - RNA, 17 nt, Human
uauauguaugccucucc

SEQ ID NO: 307344 - RNA, 22 nt, Human
ggacacaguggaagacagcuug

SEQ ID NO: 307345 - RNA, 18 nt, Human
ugacucacccugucagug

SEQ ID NO: 307346 - RNA, 22 nt, Human
guagccauuggcaaugaagccu

SEQ ID NO: 307347 - RNA, 22 nt, Human
gaacagcuucuugggagcuggg

SEQ ID NO: 307348 - RNA, 22 nt, Human
uuucaaauaccauaaaccuaau

SEQ ID NO: 307349 - RNA, 22 nt, Human
agaauuguaagcaauuugauua

SEQ ID NO: 307350 - RNA, 22 nt, Human
gcagggccagguacaagaagca

SEQ ID NO: 307351 - RNA, 22 nt, Human
agaugauggccauguccucucc

SEQ ID NO: 307352 - RNA, 22 nt, Human
gccagccugugcuuggccaggc

SEQ ID NO: 307353 - RNA, 22 nt, Human
auaaaaguuuccaaucaugccu

SEQ ID NO: 307354 - RNA, 22 nt, Human
gagcuucccucugcagucccug

SEQ ID NO: 307355 - RNA, 22 nt, Human
aguggggagguccaggccaccc

SEQ ID NO: 307356 - RNA, 22 nt, Human
uugauuccuugaaauauccuug

SEQ ID NO: 307357 - RNA, 22 nt, Human
gagugucugaauuagagcacaa

SEQ ID NO: 307358 - RNA, 22 nt, Human
aggugcuuggcucgugcacaca

SEQ ID NO: 307359 - RNA, 22 nt, Human
ugucucugcuuuccuugcaggg

SEQ ID NO: 307360 - RNA, 22 nt, Human
ugucucugauaaguaguucagu

SEQ ID NO: 307361 - RNA, 22 nt, Human
uaggccagcccuuaguccuguc

SEQ ID NO: 307362 - RNA, 22 nt, Human
uauuuucaccuucucuggauau

SEQ ID NO: 307363 - RNA, 22 nt, Human
cucaggauucucgacacucaca

SEQ ID NO: 307364 - RNA, 22 nt, Human
auuuagcaaaaaaugaugaagc

SEQ ID NO: 307365 - RNA, 21 nt, Human
aguguccuugaucuugccuug

SEQ ID NO: 307366 - RNA, 22 nt, Human
uagaaaugauuuugaugcuuca

SEQ ID NO: 307367 - RNA, 22 nt, Human
ggcuguccuuggccaaggcacu

SEQ ID NO: 307368 - RNA, 22 nt, Human
gggauggggucaacauguaccu

SEQ ID NO: 307369 - RNA, 22 nt, Human
aaaugguaagacaacacauuau

SEQ ID NO: 307370 - RNA, 20 nt, Human
cagaaggucuaagcuuuaga

SEQ ID NO: 307371 - RNA, 22 nt, Human
gucucagugucaccuccagcug

SEQ ID NO: 307372 - RNA, 22 nt, Human
agggccuggcgcguggccgccg

SEQ ID NO: 307373 - RNA, 22 nt, Human
guggauggauuuugaggaaugg

SEQ ID NO: 307374 - RNA, 22 nt, Human
ugcauaguucuccuuccuccuc

SEQ ID NO: 307375 - RNA, 20 nt, Human
aggagaaauucgggacaccu

SEQ ID NO: 307376 - RNA, 22 nt, Human
ugcucacugaacucuugcuguc

SEQ ID NO: 307377 - RNA, 22 nt, Human
cgcugggggaacagcgagggug

SEQ ID NO: 307378 - RNA, 22 nt, Human
ccggggacuuaaagugaaggaa

SEQ ID NO: 307379 - RNA, 22 nt, Human
uacacauguuuggcaaguaugu

SEQ ID NO: 307380 - RNA, 22 nt, Human
gcaggguccauggaggcagccc

SEQ ID NO: 307381 - RNA, 22 nt, Human
cuuauguaaaacggaaagggaa

SEQ ID NO: 307382 - RNA, 22 nt, Human
aggcuauuuccacucuucucau

SEQ ID NO: 307383 - RNA, 22 nt, Human
gugccugugccaggggugugcu

SEQ ID NO: 307384 - RNA, 22 nt, Human
acuguucauccuuuuugaacaa

SEQ ID NO: 307385 - RNA, 22 nt, Human
ggcuggaaguccaagaucaagg

SEQ ID NO: 307386 - RNA, 22 nt, Human
aguguuccugcucucaggaagc

SEQ ID NO: 307387 - RNA, 22 nt, Human
auuuaucaccaguuagcugacu

SEQ ID NO: 307388 - RNA, 22 nt, Human
agcaucuggugagggccuaguu

SEQ ID NO: 307389 - RNA, 19 nt, Human
uggcagcauugguaccuug

SEQ ID NO: 307390 - RNA, 22 nt, Human
cugggcuguucugccccugggu

SEQ ID NO: 307391 - RNA, 22 nt, Human
caaauguguagagcuuuugggg

SEQ ID NO: 307392 - RNA, 22 nt, Human
cauuuguauagugcuuagacca

SEQ ID NO: 307393 - RNA, 22 nt, Human
cuaucuuucgauucuagcuuaa

SEQ ID NO: 307394 - RNA, 22 nt, Human
cugcagagcauaaaucugaaua

SEQ ID NO: 307395 - RNA, 22 nt, Human
uugcagcuucuaccacuguuuc

SEQ ID NO: 307396 - RNA, 22 nt, Human
uauucacaaaaugagguccuca

SEQ ID NO: 307397 - RNA, 22 nt, Human
acaauucucucauaucuuauua

SEQ ID NO: 307398 - RNA, 22 nt, Human
ggaggggcagccauggaacucc

SEQ ID NO: 307399 - RNA, 22 nt, Human
gcuggccugaccugaggcuggg

SEQ ID NO: 307400 - RNA, 23 nt, Human
cugaggccugcugcguucagguu

SEQ ID NO: 307401 - RNA, 22 nt, Human
agcagagaagacacaggcuuca

SEQ ID NO: 307402 - RNA, 22 nt, Human
ucagcccuagccucaguccagg

SEQ ID NO: 307403 - RNA, 22 nt, Human
cuuccuguugucacagucugcg

SEQ ID NO: 307404 - RNA, 22 nt, Human
agucccagugagaugaaccagg

SEQ ID NO: 307405 - RNA, 22 nt, Human
cuggcugcuggccugaggaugc

SEQ ID NO: 307406 - RNA, 22 nt, Human
agaauuguugggguaauaaaag

SEQ ID NO: 307407 - RNA, 22 nt, Human
agugcuuuccuucuugugacau

SEQ ID NO: 307408 - RNA, 22 nt, Human
ucagcuggagaugagaaccgaa

SEQ ID NO: 307409 - RNA, 22 nt, Human
uaugagaacaagaacaaucucc

SEQ ID NO: 307410 - RNA, 22 nt, Human
gugcuuuuaaaggcaauuagua

SEQ ID NO: 307411 - RNA, 22 nt, Human
cugggcugucccaaccccaucc

SEQ ID NO: 307412 - RNA, 22 nt, Human
uggcccugacacgugguacugg

SEQ ID NO: 307413 - RNA, 22 nt, Human
cugggcuuguguuagcugacaa

SEQ ID NO: 307414 - RNA, 22 nt, Human
ggccugccucacagucagcacc

SEQ ID NO: 307415 - RNA, 22 nt, Human
gccuucaguaguauccucauga

SEQ ID NO: 307416 - RNA, 22 nt, Human
cagcuggcuccaccucugggcu

SEQ ID NO: 307417 - RNA, 22 nt, Human
aaggcugaggagggccugcagg

SEQ ID NO: 307418 - RNA, 22 nt, Human
ugcacauucacuuagguauugu

SEQ ID NO: 307419 - RNA, 17 nt, Human
caggucugaggccaggc

SEQ ID NO: 307420 - RNA, 22 nt, Human
aaagguuugcauggaauuuacc

SEQ ID NO: 307421 - RNA, 22 nt, Human
ugggcacuggaagccugcugug

SEQ ID NO: 307422 - RNA, 22 nt, Human
cucugugccucaguuuucuucu

SEQ ID NO: 307423 - RNA, 22 nt, Human
agaagucauuuauguuagauga

SEQ ID NO: 307424 - RNA, 22 nt, Human
uggagccaggagccugggaguc

SEQ ID NO: 307425 - RNA, 22 nt, Human
uuugaacaagagcuucacauua

SEQ ID NO: 307426 - RNA, 22 nt, Human
ugcuguguucuccugacucacc

SEQ ID NO: 307427 - RNA, 22 nt, Human
cagcaggcugcgauugcucauu

SEQ ID NO: 307428 - RNA, 22 nt, Human
cuccucugucuggcccugagcc

SEQ ID NO: 307429 - RNA, 22 nt, Human
ucucuggaauuggcugaggcaa

SEQ ID NO: 307430 - RNA, 22 nt, Human
gccugccuagaauugcagcuuu

SEQ ID NO: 307431 - RNA, 22 nt, Human
uuauuccauucaguucaacaag

SEQ ID NO: 307432 - RNA, 22 nt, Human
agcugccaccucugccuuuggg

SEQ ID NO: 307433 - RNA, 22 nt, Human
auucuucauguugaagcuguca

SEQ ID NO: 307434 - RNA, 22 nt, Human
ugggcuggagcuuguugcuucc

SEQ ID NO: 307435 - RNA, 22 nt, Human
cucaugauguagcgaaugagaa

SEQ ID NO: 307436 - RNA, 22 nt, Human
auuccuugggcugccuuauuau

SEQ ID NO: 307437 - RNA, 22 nt, Human
uaagaacagugucugucucaca

SEQ ID NO: 307438 - RNA, 22 nt, Human
cacuuaagcaguuaauuuaucu

SEQ ID NO: 307439 - RNA, 22 nt, Human
ccucauggaccucagacugucc

SEQ ID NO: 307440 - RNA, 22 nt, Human
ugagccagccuugcagcugugc

SEQ ID NO: 307441 - RNA, 22 nt, Human
ucaucacuguaucauugauaga

SEQ ID NO: 307442 - RNA, 22 nt, Human
uccagccuaauguucuucccac

SEQ ID NO: 307443 - RNA, 22 nt, Human
gagccugaauuugaccugcuua

SEQ ID NO: 307444 - RNA, 22 nt, Human
ccaggcugcuguugguguccgc

SEQ ID NO: 307445 - RNA, 22 nt, Human
augcuguguuuuaaauggaaau

SEQ ID NO: 307446 - RNA, 22 nt, Human
ccaggccugcaucugcugcgca

SEQ ID NO: 307447 - RNA, 22 nt, Human
agcuggcagcucucagggguac

SEQ ID NO: 307448 - RNA, 22 nt, Human
aaacaaguguaaacuagucugu

SEQ ID NO: 307449 - RNA, 22 nt, Human
ccuggugccacuagagaauguc

SEQ ID NO: 307450 - RNA, 22 nt, Human
uuccuguauuuugcgaauuuuc

SEQ ID NO: 307451 - RNA, 22 nt, Human
acuuuacuccccaacauaaaug

SEQ ID NO: 307452 - RNA, 22 nt, Human
gugccuuccccgguggucuguu

SEQ ID NO: 307453 - RNA, 22 nt, Human
gugggcaaggucccugccagcu

SEQ ID NO: 307454 - RNA, 22 nt, Human
uggcagaguaggauggcccugu

SEQ ID NO: 307455 - RNA, 22 nt, Human
accuguggaucagauucuugua

SEQ ID NO: 307456 - RNA, 22 nt, Human
aggugagugugacugcaagaga

SEQ ID NO: 307457 - RNA, 22 nt, Human
uuucuucagagagagcuuuccc

SEQ ID NO: 307458 - RNA, 22 nt, Human
uugaaaggugacauuguuagag

SEQ ID NO: 307459 - RNA, 22 nt, Human
cuggagggauguaggguguauu

SEQ ID NO: 307460 - RNA, 22 nt, Human
uguggcucucaugcacucccag

SEQ ID NO: 307461 - RNA, 22 nt, Human
cuaaaaauccacacuaggugaa

SEQ ID NO: 307462 - RNA, 22 nt, Human
ccagggucucugcugccugaga

SEQ ID NO: 307463 - RNA, 22 nt, Human
aggcacaguuucauccccgggc

SEQ ID NO: 307464 - RNA, 22 nt, Human
aaggcacuuuucuaaagaccuu

SEQ ID NO: 307465 - RNA, 22 nt, Human
aaaaguauuuauggcuauguaa

SEQ ID NO: 307466 - RNA, 22 nt, Human
cugcagaggccucgccuccucu

SEQ ID NO: 307467 - RNA, 22 nt, Human
auuaaaauuccaagguaugcca

SEQ ID NO: 307468 - RNA, 22 nt, Human
ccuggagauuauuugguccaau

SEQ ID NO: 307469 - RNA, 22 nt, Human
aacccagccguguagcugccgc

SEQ ID NO: 307470 - RNA, 22 nt, Human
cauugcuuugugcauauuuaaa

SEQ ID NO: 307471 - RNA, 22 nt, Human
cccagccucagcuuuacuucca

SEQ ID NO: 307472 - RNA, 22 nt, Human
aggagcugggcugcugcuggga

SEQ ID NO: 307473 - RNA, 22 nt, Human
uuagaaaggaaucuucauuuca

SEQ ID NO: 307474 - RNA, 22 nt, Human
ugaaacagucuccagacuugga

SEQ ID NO: 307475 - RNA, 22 nt, Human
uugcaaaagccgaggcacucca

SEQ ID NO: 307476 - RNA, 20 nt, Human
uagaaaucuuauaaaagacu

SEQ ID NO: 307477 - RNA, 22 nt, Human
ugggcagacgcuguuggaaggc

SEQ ID NO: 307478 - RNA, 22 nt, Human
cuggugccauucuguggccuag

SEQ ID NO: 307479 - RNA, 22 nt, Human
agaagaaacugucggggauauu

SEQ ID NO: 307480 - RNA, 22 nt, Human
gagguggguguaucacagguca

SEQ ID NO: 307481 - RNA, 21 nt, Human
ucuuccuccacagcgugccac

SEQ ID NO: 307482 - RNA, 20 nt, Human
uuucacaaugaacaugucuc

SEQ ID NO: 307483 - RNA, 22 nt, Human
auagauacauuagguaacuugu

SEQ ID NO: 307484 - RNA, 22 nt, Human
gaggcccuccagcugucagcug

SEQ ID NO: 307485 - RNA, 22 nt, Human
uacauuccacuagugacuggcg

SEQ ID NO: 307486 - RNA, 22 nt, Human
ccaguuuuuccagugcuuucug

SEQ ID NO: 307487 - RNA, 22 nt, Human
ggucucagacuggcaggcagug

SEQ ID NO: 307488 - RNA, 22 nt, Human
gccucugcucggacuuugccuc

SEQ ID NO: 307489 - RNA, 22 nt, Human
ggaggagcacuucugagcucag

SEQ ID NO: 307490 - RNA, 22 nt, Human
uuccaugacaccgagggaaguc

SEQ ID NO: 307491 - RNA, 22 nt, Human
gcaggagagccagcaggcuucc

SEQ ID NO: 307492 - RNA, 22 nt, Human
agggcugcuccuccuucaggcc

SEQ ID NO: 307493 - RNA, 22 nt, Human
cugggaugucuauagaacacuu

SEQ ID NO: 307494 - RNA, 22 nt, Human
aucccaugagaccacguuggcu

SEQ ID NO: 307495 - RNA, 22 nt, Human
gagcucuguguagccugagggu

SEQ ID NO: 307496 - RNA, 22 nt, Human
caggggaagaugccaagggaga

SEQ ID NO: 307497 - RNA, 23 nt, Human
ugcugggguaguuuguggcacag

SEQ ID NO: 307498 - RNA, 22 nt, Human
uggaggagaauuuauggucgaa

SEQ ID NO: 307499 - RNA, 22 nt, Human
cagcagugcuucagugugagau

SEQ ID NO: 307500 - RNA, 22 nt, Human
uguuuugucuaaucuaaauucu

SEQ ID NO: 307501 - RNA, 22 nt, Human
ccagagccggauugugaagugc

SEQ ID NO: 307502 - RNA, 21 nt, Human
gcagggacaaagcuucaggag

SEQ ID NO: 307503 - RNA, 22 nt, Human
ggcaccuggauguagcagugaa

SEQ ID NO: 307504 - RNA, 19 nt, Human
acuggcaguuucugcaugg

SEQ ID NO: 307505 - RNA, 22 nt, Human
gaaugugugacucuauugagca

SEQ ID NO: 307506 - RNA, 22 nt, Human
aaguuugagaagcuuauagaua

SEQ ID NO: 307507 - RNA, 22 nt, Human
ccuguccagggacugagggaga

SEQ ID NO: 307508 - RNA, 22 nt, Human
cagugcuggaggcuggagggaa

SEQ ID NO: 307509 - RNA, 23 nt, Human
cccagagcacagccuccagaugc

SEQ ID NO: 307510 - RNA, 22 nt, Human
gcucagagggaacaaggggcug

SEQ ID NO: 307511 - RNA, 22 nt, Human
ccuuucucauuuuaagcauuag

SEQ ID NO: 307512 - RNA, 22 nt, Human
ggccuugggcuggcugcaguau

SEQ ID NO: 307513 - RNA, 22 nt, Human
agugggcagcccaggaggucuu

SEQ ID NO: 307514 - RNA, 22 nt, Human
ucuuugcaggccaaauuguuaa

SEQ ID NO: 307515 - RNA, 22 nt, Human
gcucagagcuugaaguuccacu

SEQ ID NO: 307516 - RNA, 22 nt, Human
uucuucaaaacaacacuggccu

SEQ ID NO: 307517 - RNA, 22 nt, Human
ugcaggugugguuccucagcca

SEQ ID NO: 307518 - RNA, 23 nt, Human
ucguugaauagcaauagcacaac

SEQ ID NO: 307519 - RNA, 21 nt, Human
ccuggcuucagggugcacugg

SEQ ID NO: 307520 - RNA, 22 nt, Human
agcccuccucacaucagcgucc

SEQ ID NO: 307521 - RNA, 22 nt, Human
ugggcugcccugaugguccuca

SEQ ID NO: 307522 - RNA, 22 nt, Human
cagagacagaaaauggaucuag

SEQ ID NO: 307523 - RNA, 22 nt, Human
caugcuuucuguccaaauguua

SEQ ID NO: 307524 - RNA, 21 nt, Human
cagggcacacagaggauggua

SEQ ID NO: 307525 - RNA, 23 nt, Human
uugcauagacauccucauagauu

SEQ ID NO: 307526 - RNA, 22 nt, Human
auaugugugccauuucagcagu

SEQ ID NO: 307527 - RNA, 22 nt, Human
cauuuguuggucagauuguagu

SEQ ID NO: 307528 - RNA, 22 nt, Human
ccagccaggcuggcuguggagg

SEQ ID NO: 307529 - RNA, 22 nt, Human
augccagucaaagaagaugaca

SEQ ID NO: 307530 - RNA, 22 nt, Human
cuggaugcuuccucucugcuag

SEQ ID NO: 307531 - RNA, 22 nt, Human
aucugucaucagcaccacaggu

SEQ ID NO: 307532 - RNA, 22 nt, Human
uuuaaaauuuagaccucuccac

SEQ ID NO: 307533 - RNA, 22 nt, Human
ucucagagcucacaccuccugg

SEQ ID NO: 307534 - RNA, 22 nt, Human
uuucuucacaggguauugggug

SEQ ID NO: 307535 - RNA, 22 nt, Human
cuugaaguugcaaaacauuaau

SEQ ID NO: 307536 - RNA, 22 nt, Human
gucucccaaccccugugcccag

SEQ ID NO: 307537 - RNA, 22 nt, Human
agcagauggugucaugggaugg

SEQ ID NO: 307538 - RNA, 22 nt, Human
cucacagaugcugugggucagg

SEQ ID NO: 307539 - RNA, 22 nt, Human
acagaguacauucagagacuau

SEQ ID NO: 307540 - RNA, 22 nt, Human
uuuucaggugcaguaaucauau

SEQ ID NO: 307541 - RNA, 22 nt, Human
gaggagcuggcagcgucuccgc

SEQ ID NO: 307542 - RNA, 22 nt, Human
aucaguuugauaauaaggcuug

SEQ ID NO: 307543 - RNA, 19 nt, Human
agucuuucccacucgucuu

SEQ ID NO: 307544 - RNA, 22 nt, Human
ucuucuguuuuagauugcauac

SEQ ID NO: 307545 - RNA, 22 nt, Human
aauggacaggagagcauaguca

SEQ ID NO: 307546 - RNA, 22 nt, Human
cuagaaauacaggcacgugcca

SEQ ID NO: 307547 - RNA, 22 nt, Human
gggcagugguuacacagcugag

SEQ ID NO: 307548 - RNA, 22 nt, Human
cugggaggugaacagaaaaacu

SEQ ID NO: 307549 - RNA, 18 nt, Human
aguccuggagaucaccaa

SEQ ID NO: 307550 - RNA, 22 nt, Human
caagccugucucaccagugcua

SEQ ID NO: 307551 - RNA, 22 nt, Human
caguugcuacaguucaagugug

SEQ ID NO: 307552 - RNA, 22 nt, Human
uggccucagauuucaggggugg

SEQ ID NO: 307553 - RNA, 20 nt, Human
ucaggaugugcugagugaag

SEQ ID NO: 307554 - RNA, 22 nt, Human
gguggcagaggugcaucagccc

SEQ ID NO: 307555 - RNA, 22 nt, Human
ucugccugcuaacuccugcacc

SEQ ID NO: 307556 - RNA, 22 nt, Human
uuaaacaccugucuaguguagc

SEQ ID NO: 307557 - RNA, 22 nt, Human
agugaaaugauucugagcaaga

SEQ ID NO: 307558 - RNA, 22 nt, Human
gucaggauuauaauccccaugg

SEQ ID NO: 307559 - RNA, 22 nt, Human
ugggagaagcagcagccaagug

SEQ ID NO: 307560 - RNA, 22 nt, Human
uuccucagacccucauugugag

SEQ ID NO: 307561 - RNA, 22 nt, Human
ugccucagaguugucccuacca

SEQ ID NO: 307562 - RNA, 22 nt, Human
uccagggaugguaaugagcagu

SEQ ID NO: 307563 - RNA, 22 nt, Human
gugcuuaauacaugucaauaac

SEQ ID NO: 307564 - RNA, 22 nt, Human
agugcugaacauagaauggaca

SEQ ID NO: 307565 - RNA, 22 nt, Human
uuucagauggagguuuaggaca

SEQ ID NO: 307566 - RNA, 22 nt, Human
aauacugccugugagguaacuc

SEQ ID NO: 307567 - RNA, 22 nt, Human
aauguguauacuggcaauuaag

SEQ ID NO: 307568 - RNA, 22 nt, Human
gcaggcaggcuuccuugaacug

SEQ ID NO: 307569 - RNA, 22 nt, Human
agggaagaagcugguaguaggu

SEQ ID NO: 307570 - RNA, 22 nt, Human
ccagucugcugugguaggaaga

SEQ ID NO: 307571 - RNA, 22 nt, Human
cagaggcugggaccucaggcau

SEQ ID NO: 307572 - RNA, 22 nt, Human
uucaauucaauucuaaauauau

SEQ ID NO: 307573 - RNA, 22 nt, Human
gaagccaguacugugcucugca

SEQ ID NO: 307574 - RNA, 22 nt, Human
uccugaggcucacuuugaaugu

SEQ ID NO: 307575 - RNA, 22 nt, Human
cugagccagcuggcaugugcua

SEQ ID NO: 307576 - RNA, 23 nt, Human
uuugaaaguaucaacucgccuga

SEQ ID NO: 307577 - RNA, 20 nt, Human
aagcagaagcugcucucagc

SEQ ID NO: 307578 - RNA, 19 nt, Human
guggccagggcaggggcug

SEQ ID NO: 307579 - RNA, 22 nt, Human
cagcagggcccccgggugcgcc

SEQ ID NO: 307580 - RNA, 22 nt, Human
ggccugagucacaucaggagag

SEQ ID NO: 307581 - RNA, 22 nt, Human
ggagaaagcuguaguggaaugu

SEQ ID NO: 307582 - RNA, 22 nt, Human
uggcagcaauuugugauguuga

SEQ ID NO: 307583 - RNA, 22 nt, Human
ugaugggacugccagcugcuga

SEQ ID NO: 307584 - RNA, 22 nt, Human
uuuuaaguuaauauaauugagg

SEQ ID NO: 307585 - RNA, 18 nt, Human
acagaggcagacauguau

SEQ ID NO: 307586 - RNA, 22 nt, Human
ccucugcaccauagccuucagc

SEQ ID NO: 307587 - RNA, 22 nt, Human
ucccuggacagccuugccuggg

SEQ ID NO: 307588 - RNA, 22 nt, Human
uaaugagacucaauugugugug

SEQ ID NO: 307589 - RNA, 22 nt, Human
aggacaggauugagcugaacug

SEQ ID NO: 307590 - RNA, 18 nt, Human
ucucagaggccauccuag

SEQ ID NO: 307591 - RNA, 22 nt, Human
gaaggagagagacaucgucccu

SEQ ID NO: 307592 - RNA, 22 nt, Human
gaggucaauaauaugugcuuua

SEQ ID NO: 307593 - RNA, 22 nt, Human
uggaacaaauuacaauuaacuu

SEQ ID NO: 307594 - RNA, 22 nt, Human
ugucccagggaaggcccagcac

SEQ ID NO: 307595 - RNA, 22 nt, Human
gagaccaggaaguacagcagcc

SEQ ID NO: 307596 - RNA, 22 nt, Human
agcugcccugggucuugcugcu

SEQ ID NO: 307597 - RNA, 22 nt, Human
cucuccuccaacagcccugccg

SEQ ID NO: 307598 - RNA, 22 nt, Human
gggugaggagcugccagucaug

SEQ ID NO: 307599 - RNA, 22 nt, Human
cagccaggagcucccccugcuc

SEQ ID NO: 307600 - RNA, 22 nt, Human
cagggcagcuuccuuuguuagg

SEQ ID NO: 307601 - RNA, 22 nt, Human
cugggagucuggccucuggucc

SEQ ID NO: 307602 - RNA, 22 nt, Human
ucccccacucuaaaggagccuu

SEQ ID NO: 307603 - RNA, 22 nt, Human
cuauuucaaggcccagauauga

SEQ ID NO: 307604 - RNA, 22 nt, Human
cugagagcagggacuugagcca

SEQ ID NO: 307605 - RNA, 22 nt, Human
agccaggaaugcaugcucugcu

SEQ ID NO: 307606 - RNA, 22 nt, Human
acagaauucuaguauguggcuu

SEQ ID NO: 307607 - RNA, 22 nt, Human
aucaaauauaauaauuuucgcu

SEQ ID NO: 307608 - RNA, 22 nt, Human
caggcaggagccagggauucca

SEQ ID NO: 307609 - RNA, 22 nt, Human
caaaugcaaaauauaacccugu

SEQ ID NO: 307610 - RNA, 22 nt, Human
cagugguggaaugaggaauugu

SEQ ID NO: 307611 - RNA, 21 nt, Human
aggcuguccuuugccagcccu

SEQ ID NO: 307612 - RNA, 22 nt, Human
cuggcucagacagcugugcagu

SEQ ID NO: 307613 - RNA, 22 nt, Human
aaaaaugcugugguagcugugu

SEQ ID NO: 307614 - RNA, 22 nt, Human
uaaaaugaucucucauguucuu

SEQ ID NO: 307615 - RNA, 22 nt, Human
accauuuaauaaguauuuccau

SEQ ID NO: 307616 - RNA, 22 nt, Human
caugcuuugggucagaaaugcc

SEQ ID NO: 307617 - RNA, 22 nt, Human
aguuuguaucaauuugcuuuau

SEQ ID NO: 307618 - RNA, 17 nt, Human
ggccuuggggccucagu

SEQ ID NO: 307619 - RNA, 22 nt, Human
ucugucacugagcucaggauuc

SEQ ID NO: 307620 - RNA, 22 nt, Human
gccuucagcccugacuggccag

SEQ ID NO: 307621 - RNA, 22 nt, Human
cuggcccauggugagcucuggg

SEQ ID NO: 307622 - RNA, 22 nt, Human
ggugggcaggucacucugccuc

SEQ ID NO: 307623 - RNA, 22 nt, Human
aagaugcagcuuccacuuuugc

SEQ ID NO: 307624 - RNA, 22 nt, Human
cugggcagagcuaacaccugag

SEQ ID NO: 307625 - RNA, 22 nt, Human
aguucacauuccgagguacugg

SEQ ID NO: 307626 - RNA, 22 nt, Human
gcucugaggcugggagcacucu

SEQ ID NO: 307627 - RNA, 22 nt, Human
uuucaaagucaauaucauuacc

SEQ ID NO: 307628 - RNA, 22 nt, Human
gcuccucuucucccacugaaug

SEQ ID NO: 307629 - RNA, 19 nt, Human
caugagcugcucacuuccc

SEQ ID NO: 307630 - RNA, 18 nt, Human
uccagagcuacuguggug

SEQ ID NO: 307631 - RNA, 22 nt, Human
gcagauggacuguaugaccuga

SEQ ID NO: 307632 - RNA, 20 nt, Human
caccacagaauuggggacag

SEQ ID NO: 307633 - RNA, 22 nt, Human
guuagaaagugucugcuugggu

SEQ ID NO: 307634 - RNA, 22 nt, Human
gaugagaaauggacaggagugg

SEQ ID NO: 307635 - RNA, 22 nt, Human
acuuguucauugaguacauaug

SEQ ID NO: 307636 - RNA, 22 nt, Human
aauuuucacagugcugugagau

SEQ ID NO: 307637 - RNA, 22 nt, Human
caaagguauaaguuaauauaca

SEQ ID NO: 307638 - RNA, 22 nt, Human
uccauuggucucugugcccagg

SEQ ID NO: 307639 - RNA, 22 nt, Human
gcagccacuaguuuuccuguuu

SEQ ID NO: 307640 - RNA, 22 nt, Human
auguuuccauuuucuuguauca

SEQ ID NO: 307641 - RNA, 22 nt, Human
cuucucaaaguugugaaucagg

SEQ ID NO: 307642 - RNA, 22 nt, Human
ggcaaaaaccgcaauaacuucu

SEQ ID NO: 307643 - RNA, 22 nt, Human
aaguugaaugcguacgugacau

SEQ ID NO: 307644 - RNA, 22 nt, Human
uggguggcggccugguucugag

SEQ ID NO: 307645 - RNA, 22 nt, Human
ccuggagcuuuuccauccugga

SEQ ID NO: 307646 - RNA, 22 nt, Human
uucaggaugaaagugugcaaca

SEQ ID NO: 307647 - RNA, 18 nt, Human
cauuaugugguuauagaa

SEQ ID NO: 307648 - RNA, 22 nt, Human
ucuggcagggguucugcacuug

SEQ ID NO: 307649 - RNA, 22 nt, Human
ugcaggagcagagauggcugga

SEQ ID NO: 307650 - RNA, 21 nt, Human
agggagcuauuuauaguaagc

SEQ ID NO: 307651 - RNA, 20 nt, Human
gcauugaguauagacagaug

SEQ ID NO: 307652 - RNA, 22 nt, Human
aacuuucagcaaguaauucugg

SEQ ID NO: 307653 - RNA, 22 nt, Human
ugcagcauuauucacaguagcc

SEQ ID NO: 307654 - RNA, 22 nt, Human
aauaaucucccuuuuuguaugu

SEQ ID NO: 307655 - RNA, 22 nt, Human
aagaguuaagcaacagauacca

SEQ ID NO: 307656 - RNA, 20 nt, Human
ugugaaagcaguagaaugac

SEQ ID NO: 307657 - RNA, 22 nt, Human
uauucacauucucaggccuggu

SEQ ID NO: 307658 - RNA, 22 nt, Human
uuugcauuaucucacuuauaua

SEQ ID NO: 307659 - RNA, 22 nt, Human
uggcucugugucucccagcagc

SEQ ID NO: 307660 - RNA, 22 nt, Human
uuuuuuaguuaggucagaaugu

SEQ ID NO: 307661 - RNA, 17 nt, Human
agcugccagggagugug

SEQ ID NO: 307662 - RNA, 19 nt, Human
gaguuauugccagggcaug

SEQ ID NO: 307663 - RNA, 22 nt, Human
cucugucccagacccaccucuc

SEQ ID NO: 307664 - RNA, 22 nt, Human
guggcugcuacagagcuggagg

SEQ ID NO: 307665 - RNA, 22 nt, Human
aggccagaaaugucagggagug

SEQ ID NO: 307666 - RNA, 21 nt, Human
ucccacucuaaauggacugaa

SEQ ID NO: 307667 - RNA, 22 nt, Human
ucaguguuucaguuuggaaaug

SEQ ID NO: 307668 - RNA, 22 nt, Human
aaaggaagaugccaggacucug

SEQ ID NO: 307669 - RNA, 22 nt, Human
gugccagcaguuauggugauuu

SEQ ID NO: 307670 - RNA, 22 nt, Human
aauccugugugacucuggggag

SEQ ID NO: 307671 - RNA, 22 nt, Human
cucugucaggcugcagaugcuc

SEQ ID NO: 307672 - RNA, 23 nt, Human
ucagagagcuguugagagcugcc

SEQ ID NO: 307673 - RNA, 22 nt, Human
agucuugcauuuucugaagaug

SEQ ID NO: 307674 - RNA, 22 nt, Human
acagagcugggaucugaaccca

SEQ ID NO: 307675 - RNA, 22 nt, Human
aggcuggguaccugucauaugc

SEQ ID NO: 307676 - RNA, 22 nt, Human
gucccagagagcacuaguccau

SEQ ID NO: 307677 - RNA, 22 nt, Human
uccugcaggggcugaggaacca

SEQ ID NO: 307678 - RNA, 22 nt, Human
cuuagaaauuguuacucauuca

SEQ ID NO: 307679 - RNA, 22 nt, Human
caaauccagaucccagucguag

SEQ ID NO: 307680 - RNA, 22 nt, Human
aagaacugugcuccaggcucca

SEQ ID NO: 307681 - RNA, 22 nt, Human
cugggccagggaggugucugua

SEQ ID NO: 307682 - RNA, 22 nt, Human
ugcccagcacugugccagucac

SEQ ID NO: 307683 - RNA, 22 nt, Human
uuggcucaggaccccugugacu

SEQ ID NO: 307684 - RNA, 22 nt, Human
ucucaggaauagaguggcagca

SEQ ID NO: 307685 - RNA, 22 nt, Human
aucagcaagacuaggggaauac

SEQ ID NO: 307686 - RNA, 22 nt, Human
cacagcagagggagccauugaa

SEQ ID NO: 307687 - RNA, 22 nt, Human
auacaugucaucauauguuugu

SEQ ID NO: 307688 - RNA, 22 nt, Human
ugagaggccccagcucuuggcc

SEQ ID NO: 307689 - RNA, 23 nt, Human
uggccuggagagaaaagaugagu

SEQ ID NO: 307690 - RNA, 22 nt, Human
aauguguauaugaacauacagg

SEQ ID NO: 307691 - RNA, 22 nt, Human
auauaaaguguuuagaaagcug

SEQ ID NO: 307692 - RNA, 22 nt, Human
aaggaagggaaauagugauguc

SEQ ID NO: 307693 - RNA, 22 nt, Human
gccuggaggggccaggguggua

SEQ ID NO: 307694 - RNA, 22 nt, Human
agcaguggcugaagauguuccu

SEQ ID NO: 307695 - RNA, 22 nt, Human
gucuccugagccuugacugcaa

SEQ ID NO: 307696 - RNA, 22 nt, Human
gcccacagcucguuccucuccu

SEQ ID NO: 307697 - RNA, 22 nt, Human
agcaccuucacaggcucucagg

SEQ ID NO: 307698 - RNA, 23 nt, Human
uccaugagaugugggcuucuagu

SEQ ID NO: 307699 - RNA, 22 nt, Human
ugaggccucauaaugagauuuc

SEQ ID NO: 307700 - RNA, 22 nt, Human
gccaggggacgcggagcgacga

SEQ ID NO: 307701 - RNA, 22 nt, Human
aggagcugcauggauaccuggu

SEQ ID NO: 307702 - RNA, 22 nt, Human
ucacagggauggaauagaaaua

SEQ ID NO: 307703 - RNA, 22 nt, Human
ugcuugaaagggguuucccagu

SEQ ID NO: 307704 - RNA, 22 nt, Human
guggagcccugguagggacccc

SEQ ID NO: 307705 - RNA, 22 nt, Human
cugccucaugcugccugcagcc

SEQ ID NO: 307706 - RNA, 22 nt, Human
uccaccccugggaaugucaaua

SEQ ID NO: 307707 - RNA, 22 nt, Human
ugccaggcccugugcuggaugc

SEQ ID NO: 307708 - RNA, 20 nt, Human
cuguaucagguuacaaagua

SEQ ID NO: 307709 - RNA, 22 nt, Human
gcagugcuuuagucuguccuuu

SEQ ID NO: 307710 - RNA, 22 nt, Human
auccaugaucaauuuauuacua

SEQ ID NO: 307711 - RNA, 22 nt, Human
cagggcuguggcuuugugcugu

SEQ ID NO: 307712 - RNA, 22 nt, Human
acaagagauuaucuacagauga

SEQ ID NO: 307713 - RNA, 22 nt, Human
agcccugucucucacuccaggu

SEQ ID NO: 307714 - RNA, 23 nt, Human
agcaauaagaagggauacaugug

SEQ ID NO: 307715 - RNA, 22 nt, Human
cugggccagauccagccucaca

SEQ ID NO: 307716 - RNA, 22 nt, Human
guaaaugugcuucuuuuaacuu

SEQ ID NO: 307717 - RNA, 22 nt, Human
cuuccucaggcauuagcuggac

SEQ ID NO: 307718 - RNA, 22 nt, Human
agcuccugucucaagggagccu

SEQ ID NO: 307719 - RNA, 22 nt, Human
uuugaagugggcauuagaaccu

SEQ ID NO: 307720 - RNA, 22 nt, Human
ucacagaauagcacuguaagcg

SEQ ID NO: 307721 - RNA, 22 nt, Human
ucccuggacaacagacuucacu

SEQ ID NO: 307722 - RNA, 22 nt, Human
uucagagcaucucuaaagccag

SEQ ID NO: 307723 - RNA, 22 nt, Human
ccagcccuugcugaaggguggc

SEQ ID NO: 307724 - RNA, 23 nt, Human
acaguuauagcugugaauaacau

SEQ ID NO: 307725 - RNA, 22 nt, Human
cagcccuguccagcagagggug

SEQ ID NO: 307726 - RNA, 22 nt, Human
gcagggacaucuuugucuagua

SEQ ID NO: 307727 - RNA, 22 nt, Human
ggcuccuguccccucagcugcu

SEQ ID NO: 307728 - RNA, 16 nt, Human
ggagagugucugcaaa

SEQ ID NO: 307729 - RNA, 22 nt, Human
ugagaguauuuuggcauuauca

SEQ ID NO: 307730 - RNA, 19 nt, Human
ccagcccugucacuucuug

SEQ ID NO: 307731 - RNA, 22 nt, Human
cagcagcucccauccgcugagc

SEQ ID NO: 307732 - RNA, 22 nt, Human
uggcucugagacacaggcucuc

SEQ ID NO: 307733 - RNA, 22 nt, Human
gcccagcagaucucagugucuc

SEQ ID NO: 307734 - RNA, 22 nt, Human
caggggcaagaaugcugucagc

SEQ ID NO: 307735 - RNA, 19 nt, Human
cucuggagcagacacugga

SEQ ID NO: 307736 - RNA, 22 nt, Human
ccuccaggaacuugagagacac

SEQ ID NO: 307737 - RNA, 22 nt, Human
ucugguaaccuuuaucccuccu

SEQ ID NO: 307738 - RNA, 22 nt, Human
cccagagccucauucuguuggg

SEQ ID NO: 307739 - RNA, 22 nt, Human
cccuucagcugagugggacagc

SEQ ID NO: 307740 - RNA, 22 nt, Human
ucuaaccuuugaaacugcuuuc

SEQ ID NO: 307741 - RNA, 22 nt, Human
ccagucccaucucugucgcuua

SEQ ID NO: 307742 - RNA, 23 nt, Human
cagaccuggcagucauccucaac

SEQ ID NO: 307743 - RNA, 20 nt, Human
augugaaagaucaguugucu

SEQ ID NO: 307744 - RNA, 22 nt, Human
uuauuauagauuaugcaagauu

SEQ ID NO: 307745 - RNA, 22 nt, Human
gcuuugaagacuuuuccagggu

SEQ ID NO: 307746 - RNA, 22 nt, Human
agcauccaacaggagggaaggg

SEQ ID NO: 307747 - RNA, 22 nt, Human
gcugagagcggccagcugggaa

SEQ ID NO: 307748 - RNA, 22 nt, Human
gccugucugcagggcugucauu

SEQ ID NO: 307749 - RNA, 22 nt, Human
uccaggaggaggaaggcugcca

SEQ ID NO: 307750 - RNA, 23 nt, Human
acucacaaagcaggaucauguug

SEQ ID NO: 307751 - RNA, 22 nt, Human
uaaauuuacccaaggaacaugu

SEQ ID NO: 307752 - RNA, 22 nt, Human
ccagcucuguaagcugugaaau

SEQ ID NO: 307753 - RNA, 21 nt, Human
gauugaaaccauggcagugag

SEQ ID NO: 307754 - RNA, 22 nt, Human
ugcugccugguuucuucuugcu

SEQ ID NO: 307755 - RNA, 22 nt, Human
ggcacugaauuucuuggcaucu

SEQ ID NO: 307756 - RNA, 22 nt, Human
uggagcugggguuugaaucugg

SEQ ID NO: 307757 - RNA, 22 nt, Human
gaggccugcagcguggucccug

SEQ ID NO: 307758 - RNA, 22 nt, Human
ucacauuuuauaucucugguuu

SEQ ID NO: 307759 - RNA, 22 nt, Human
gcugagugagguccagagcuug

SEQ ID NO: 307760 - RNA, 19 nt, Human
ucagugugugggagguggu

SEQ ID NO: 307761 - RNA, 19 nt, Human
gggcucuggccucaguggg

SEQ ID NO: 307762 - RNA, 22 nt, Human
cugucccaggagcuguaagaca

SEQ ID NO: 307763 - RNA, 22 nt, Human
gaugccuccaaaugagggcaga

SEQ ID NO: 307764 - RNA, 22 nt, Human
ugggacagggaaucugaucccc

SEQ ID NO: 307765 - RNA, 22 nt, Human
cagggguguuuuuggccaggag

SEQ ID NO: 307766 - RNA, 22 nt, Human
gcugucacucaccaggccugca

SEQ ID NO: 307767 - RNA, 22 nt, Human
uauauucaaugauuaguaucag

SEQ ID NO: 307768 - RNA, 22 nt, Human
aagaaagugcuuuguaaauuau

SEQ ID NO: 307769 - RNA, 23 nt, Human
gccuggccaccccagggcugcuu

SEQ ID NO: 307770 - RNA, 22 nt, Human
acaaaugugucuaauugugccu

SEQ ID NO: 307771 - RNA, 22 nt, Human
cucucugggggccaugccaaga

SEQ ID NO: 307772 - RNA, 22 nt, Human
agcuucuuggcucagcacuugg

SEQ ID NO: 307773 - RNA, 16 nt, Human
ucaguguuccagaaua

SEQ ID NO: 307774 - RNA, 22 nt, Human
uggaggcaccacuggcugcccg

SEQ ID NO: 307775 - RNA, 22 nt, Human
ucagaguguuuuacuaaacaag

SEQ ID NO: 307776 - RNA, 22 nt, Human
cagccugcauuuguaucuguau

SEQ ID NO: 307777 - RNA, 22 nt, Human
ugggcugcagggguugagagcu

SEQ ID NO: 307778 - RNA, 22 nt, Human
gcaggccuuggcaaugagccug

SEQ ID NO: 307779 - RNA, 22 nt, Human
cugggagcccugacuagccugg

SEQ ID NO: 307780 - RNA, 22 nt, Human
uggcucagauuuuuguaggcuu

SEQ ID NO: 307781 - RNA, 22 nt, Human
gccuggagggauagaaugcaag

SEQ ID NO: 307782 - RNA, 22 nt, Human
aguauguauuuuauacuuacag

SEQ ID NO: 307783 - RNA, 22 nt, Human
ugcccugucuaagcugucagua

SEQ ID NO: 307784 - RNA, 22 nt, Human
caguggggaggccaggauagaa

SEQ ID NO: 307785 - RNA, 22 nt, Human
acauuuguaugcguuuuuacug

SEQ ID NO: 307786 - RNA, 22 nt, Human
auuucaguagaaaaucuugauu

SEQ ID NO: 307787 - RNA, 22 nt, Human
cuuuggcaugguccucacuaua

SEQ ID NO: 307788 - RNA, 22 nt, Human
gacccugacucuaaugcuuggc

SEQ ID NO: 307789 - RNA, 22 nt, Human
cagcugagucugagguucuuug

SEQ ID NO: 307790 - RNA, 22 nt, Human
uugugcucuguguuauuuaagg

SEQ ID NO: 307791 - RNA, 22 nt, Human
uucaugaaacuuaacuguuggg

SEQ ID NO: 307792 - RNA, 22 nt, Human
uccucagucagcuccguucuug

SEQ ID NO: 307793 - RNA, 22 nt, Human
cuuggccucuucucaggguggg

SEQ ID NO: 307794 - RNA, 17 nt, Human
agguggcugcugcgccu

SEQ ID NO: 307795 - RNA, 22 nt, Human
cuggccacaugugugcugagca

SEQ ID NO: 307796 - RNA, 22 nt, Human
uugauacagcagccugugaucc

SEQ ID NO: 307797 - RNA, 22 nt, Human
cuuccccaaguagagaggggag

SEQ ID NO: 307798 - RNA, 22 nt, Human
agcucucaagauaagaaagaac

SEQ ID NO: 307799 - RNA, 22 nt, Human
agaaaucuuuccugaaguguuu

SEQ ID NO: 307800 - RNA, 22 nt, Human
caggucccgccccgggcugacc

SEQ ID NO: 307801 - RNA, 22 nt, Human
agccucugucaagcuuuucaaa

SEQ ID NO: 307802 - RNA, 22 nt, Human
ggagagaaauugagguagcaag

SEQ ID NO: 307803 - RNA, 22 nt, Human
ccugucagaugaaguaauugug

SEQ ID NO: 307804 - RNA, 22 nt, Human
cuggcccagucucagaguguca

SEQ ID NO: 307805 - RNA, 22 nt, Human
cucagcccagcccaggaccagg

SEQ ID NO: 307806 - RNA, 22 nt, Human
cugaaggauguguggugggagu

SEQ ID NO: 307807 - RNA, 22 nt, Human
cuggagcuccagggucuccucu

SEQ ID NO: 307808 - RNA, 22 nt, Human
aauacuauguagccaaaauaau

SEQ ID NO: 307809 - RNA, 22 nt, Human
cugaaugaggaaaagagugagg

SEQ ID NO: 307810 - RNA, 22 nt, Human
uuauggcauauuccucauugua

SEQ ID NO: 307811 - RNA, 22 nt, Human
aagggcugaaagaccuugggca

SEQ ID NO: 307812 - RNA, 22 nt, Human
aaaagagguuaaccaggugugu

SEQ ID NO: 307813 - RNA, 22 nt, Human
ugagcccaggaguaugaggcug

SEQ ID NO: 307814 - RNA, 22 nt, Human
agggaagagcuugcaagaaacc

SEQ ID NO: 307815 - RNA, 22 nt, Human
augcuguguggucaaguuaauu

SEQ ID NO: 307816 - RNA, 22 nt, Human
gcaggagcugcucuccugacga

SEQ ID NO: 307817 - RNA, 22 nt, Human
uuugaaauuaagauauugucca

SEQ ID NO: 307818 - RNA, 22 nt, Human
aagggaugcaggaaagaagguu

SEQ ID NO: 307819 - RNA, 22 nt, Human
agacucaagacugcagaagacg

SEQ ID NO: 307820 - RNA, 22 nt, Human
uucuucuccuaaggagaguccu

SEQ ID NO: 307821 - RNA, 22 nt, Human
aaugacaaauauggaagccuga

SEQ ID NO: 307822 - RNA, 22 nt, Human
auuuauuaugggauuuggcaca

SEQ ID NO: 307823 - RNA, 22 nt, Human
agaggccaucugcucugugggg

SEQ ID NO: 307824 - RNA, 22 nt, Human
ggaggcuccacugcucuuccug

SEQ ID NO: 307825 - RNA, 22 nt, Human
gggaaaaauaaugcacagauau

SEQ ID NO: 307826 - RNA, 22 nt, Human
cagugguuauacuuacuguuuc

SEQ ID NO: 307827 - RNA, 22 nt, Human
guucuguacuccaagcucuucc

SEQ ID NO: 307828 - RNA, 22 nt, Human
ccuggaaggcaggcauggauug

SEQ ID NO: 307829 - RNA, 22 nt, Human
ccaguguuggaggauggcuugc

SEQ ID NO: 307830 - RNA, 22 nt, Human
caguacuuggucaaggaagcag

SEQ ID NO: 307831 - RNA, 22 nt, Human
acuucaugcagaagagagcugu

SEQ ID NO: 307832 - RNA, 22 nt, Human
ugagcuggucacuccuucugaa

SEQ ID NO: 307833 - RNA, 22 nt, Human
ccuggccucuccgaguaaccug

SEQ ID NO: 307834 - RNA, 22 nt, Human
aucagcaagcaugguuaggugu

SEQ ID NO: 307835 - RNA, 22 nt, Human
gcaagauguuaacauagggaga

SEQ ID NO: 307836 - RNA, 22 nt, Human
aaggcugagggcuguaccuggc

SEQ ID NO: 307837 - RNA, 22 nt, Human
agggcagccugagugcuggccc

SEQ ID NO: 307838 - RNA, 22 nt, Human
guguaaggugaaaucaacaaau

SEQ ID NO: 307839 - RNA, 17 nt, Human
agaugcuggccacaugu

SEQ ID NO: 307840 - RNA, 23 nt, Human
auggagcugguacuagcuaccuc

SEQ ID NO: 307841 - RNA, 22 nt, Human
uucaaugaggauagaacuggau

SEQ ID NO: 307842 - RNA, 22 nt, Human
caagagcuagaaauugguuaga

SEQ ID NO: 307843 - RNA, 22 nt, Human
guccagcugcagcugggcagaa

SEQ ID NO: 307844 - RNA, 22 nt, Human
ugugacaucgcugugucuguuu

SEQ ID NO: 307845 - RNA, 22 nt, Human
uagcugccuagacagcuauagc

SEQ ID NO: 307846 - RNA, 22 nt, Human
acauuucuaguuguucaucucc

SEQ ID NO: 307847 - RNA, 18 nt, Human
caggagcaggaguugaac

SEQ ID NO: 307848 - RNA, 22 nt, Human
aguggcagagcaggugcuggaa

SEQ ID NO: 307849 - RNA, 22 nt, Human
uuuucaguuugcacugcagugc

SEQ ID NO: 307850 - RNA, 22 nt, Human
guuccuuggaagaacuugaggu

SEQ ID NO: 307851 - RNA, 22 nt, Human
gcaggcugugaggcucagaugg

SEQ ID NO: 307852 - RNA, 22 nt, Human
acucacauuucaucaggccaag

SEQ ID NO: 307853 - RNA, 22 nt, Human
uaacacaugaaagcaccuucuu

SEQ ID NO: 307854 - RNA, 22 nt, Human
gucuuuauuugagauugucauu

SEQ ID NO: 307855 - RNA, 22 nt, Human
gggccacacagaaccuccuggu

SEQ ID NO: 307856 - RNA, 22 nt, Human
cugggcagugguggcccuuccc

SEQ ID NO: 307857 - RNA, 22 nt, Human
gcccacacaccagcucaggagg

SEQ ID NO: 307858 - RNA, 22 nt, Human
augaugguaaauucaguauccg

SEQ ID NO: 307859 - RNA, 22 nt, Human
agcaccugccugcauuggcuau

SEQ ID NO: 307860 - RNA, 22 nt, Human
uagcuaucuguguccagaucca

SEQ ID NO: 307861 - RNA, 22 nt, Human
agccugguguggggcugcagag

SEQ ID NO: 307862 - RNA, 22 nt, Human
ccagggcacguugggacaguac

SEQ ID NO: 307863 - RNA, 22 nt, Human
gccugagauucccggagccgug

SEQ ID NO: 307864 - RNA, 22 nt, Human
uggcucaguagcagugugguca

SEQ ID NO: 307865 - RNA, 22 nt, Human
auguuauaguuauaaaaugagg

SEQ ID NO: 307866 - RNA, 22 nt, Human
ggagaaggugcuggucacugug

SEQ ID NO: 307867 - RNA, 21 nt, Human
gcaaggcuuuuguguuuccca

SEQ ID NO: 307868 - RNA, 22 nt, Human
uaauaaaugaaagugcuggcau

SEQ ID NO: 307869 - RNA, 22 nt, Human
cagucccaguuugagacucugg

SEQ ID NO: 307870 - RNA, 23 nt, Human
gccucuggagccccagugcucag

SEQ ID NO: 307871 - RNA, 22 nt, Human
ccccuucuggucuucaauggug

SEQ ID NO: 307872 - RNA, 22 nt, Human
agaaaugugagccccuuaucaa

SEQ ID NO: 307873 - RNA, 22 nt, Human
acuucucuucauagguggcaau

SEQ ID NO: 307874 - RNA, 22 nt, Human
aggagccaugagugacaucaca

SEQ ID NO: 307875 - RNA, 22 nt, Human
cuuagcaugugguguccuugua

SEQ ID NO: 307876 - RNA, 22 nt, Human
uagggcagauucgguggaguuu

SEQ ID NO: 307877 - RNA, 22 nt, Human
ugauuuaaaagaaacauugucu

SEQ ID NO: 307878 - RNA, 22 nt, Human
gcccucucggcauagcaggggc

SEQ ID NO: 307879 - RNA, 22 nt, Human
caugagaaugaagaagacuuaa

SEQ ID NO: 307880 - RNA, 22 nt, Human
cagggugccucccgcucgccgg

SEQ ID NO: 307881 - RNA, 18 nt, Human
cucugcuaaugggcagcu

SEQ ID NO: 307882 - RNA, 23 nt, Human
agaauuguaaauagaauauaccu

SEQ ID NO: 307883 - RNA, 22 nt, Human
uguuugaauuuugcuaacgugu

SEQ ID NO: 307884 - RNA, 22 nt, Human
ugggcugccggcaggcucugcc

SEQ ID NO: 307885 - RNA, 22 nt, Human
agcagggcaaagucaggcuaac

SEQ ID NO: 307886 - RNA, 22 nt, Human
gcuggcaccugcaccaagcagg

SEQ ID NO: 307887 - RNA, 18 nt, Human
guaggucaguaccaagca

SEQ ID NO: 307888 - RNA, 22 nt, Human
cucucagacugaagggccugug

SEQ ID NO: 307889 - RNA, 22 nt, Human
gcugggaggaauuuggggaaua

SEQ ID NO: 307890 - RNA, 22 nt, Human
gaaaugugaccuacuuccuugu

SEQ ID NO: 307891 - RNA, 22 nt, Human
accaggggugucaacagcauuu

SEQ ID NO: 307892 - RNA, 22 nt, Human
gcaggaugaaggcagaggcuga

SEQ ID NO: 307893 - RNA, 21 nt, Human
aggcugcuggcucaggguccu

SEQ ID NO: 307894 - RNA, 22 nt, Human
acauuaacaccauaaguguguu

SEQ ID NO: 307895 - RNA, 22 nt, Human
aaaugcacaaaguaaguguaau

SEQ ID NO: 307896 - RNA, 22 nt, Human
aaaggccaagcaugagguggac

SEQ ID NO: 307897 - RNA, 22 nt, Human
acugucugcaaaacucauacuc

SEQ ID NO: 307898 - RNA, 22 nt, Human
cuggugucugcucccucacagc

SEQ ID NO: 307899 - RNA, 22 nt, Human
gggcggggggagcuggaaugaa

SEQ ID NO: 307900 - RNA, 22 nt, Human
agcagugggggaguguuaguuu

SEQ ID NO: 307901 - RNA, 22 nt, Human
ucugucaauauaugugcugcag

SEQ ID NO: 307902 - RNA, 22 nt, Human
gcauacagagaggauguggcau

SEQ ID NO: 307903 - RNA, 22 nt, Human
augacagaggagugcaggugau

SEQ ID NO: 307904 - RNA, 22 nt, Human
acagcagccuuguugguuucga

SEQ ID NO: 307905 - RNA, 22 nt, Human
ucacugcaaccucugccuuccg

SEQ ID NO: 307906 - RNA, 18 nt, Human
gcagcugcaguuguagcu

SEQ ID NO: 307907 - RNA, 22 nt, Human
gagcuggguauauggcuuuaug

SEQ ID NO: 307908 - RNA, 22 nt, Human
gcagcuggggaggucgugggga

SEQ ID NO: 307909 - RNA, 22 nt, Human
aaguucaagucuccugaguaua

SEQ ID NO: 307910 - RNA, 22 nt, Human
aaacucuguagcuaaacauaau

SEQ ID NO: 307911 - RNA, 23 nt, Human
aagcuuccuucacgucuccuggg

SEQ ID NO: 307912 - RNA, 22 nt, Human
gcaccuggcugcccagguggag

SEQ ID NO: 307913 - RNA, 22 nt, Human
ccuggagcccaaggcagugaga

SEQ ID NO: 307914 - RNA, 22 nt, Human
caucaguguggcaguucacugu

SEQ ID NO: 307915 - RNA, 22 nt, Human
uuucacauuuuauacuuaagcc

SEQ ID NO: 307916 - RNA, 23 nt, Human
ugccagaggcagucacaguggug

SEQ ID NO: 307917 - RNA, 22 nt, Human
aucagagauuguaguaugugca

SEQ ID NO: 307918 - RNA, 21 nt, Human
gggugcuguggucaugcagga

SEQ ID NO: 307919 - RNA, 22 nt, Human
uacaaagccugguagauaucug

SEQ ID NO: 307920 - RNA, 22 nt, Human
cugagagccuccuguuggcuag

SEQ ID NO: 307921 - RNA, 22 nt, Human
augaguaaaaccacuauuuaca

SEQ ID NO: 307922 - RNA, 22 nt, Human
aguguugucaaacggcucagca

SEQ ID NO: 307923 - RNA, 22 nt, Human
ucagaaacacucuucuucuguc

SEQ ID NO: 307924 - RNA, 22 nt, Human
ugcagcugcuugauucaucuug

SEQ ID NO: 307925 - RNA, 22 nt, Human
ccaguguucugguguucauuuc

SEQ ID NO: 307926 - RNA, 23 nt, Human
uccucaguauauaaaggcagaug

SEQ ID NO: 307927 - RNA, 22 nt, Human
uucugggagagaaagggccuug

SEQ ID NO: 307928 - RNA, 22 nt, Human
agcugguggauuaugcuguaca

SEQ ID NO: 307929 - RNA, 22 nt, Human
gccugaggaaugcuccugacuu

SEQ ID NO: 307930 - RNA, 22 nt, Human
gcugggcagccuggccgcugcc

SEQ ID NO: 307931 - RNA, 23 nt, Human
ucugucaccuauggcugcucuuc

SEQ ID NO: 307932 - RNA, 22 nt, Human
cagcugccugucuggaggcaau

SEQ ID NO: 307933 - RNA, 22 nt, Human
agaggggcucaagcaguggucu

SEQ ID NO: 307934 - RNA, 22 nt, Human
cuggagcccugaaugggcagga

SEQ ID NO: 307935 - RNA, 22 nt, Human
uuccucucgcucuccggggccc

SEQ ID NO: 307936 - RNA, 17 nt, Human
uccuggcucugccacug

SEQ ID NO: 307937 - RNA, 22 nt, Human
aaauaguuagcccugcauauau

SEQ ID NO: 307938 - RNA, 19 nt, Human
caguggagauuggaggagg

SEQ ID NO: 307939 - RNA, 22 nt, Human
cucccaggggaacuaucaagua

SEQ ID NO: 307940 - RNA, 22 nt, Human
cuggcuccauccuugagcucug

SEQ ID NO: 307941 - RNA, 22 nt, Human
ugucucugccagcuagcagaau

SEQ ID NO: 307942 - RNA, 22 nt, Human
gagguucacaggcuaucacagu

SEQ ID NO: 307943 - RNA, 22 nt, Human
ucugccuuuucacugccacuaa

SEQ ID NO: 307944 - RNA, 22 nt, Human
caagggcucuuuugaggaaugu

SEQ ID NO: 307945 - RNA, 22 nt, Human
uguagcucuccagccagcaagg

SEQ ID NO: 307946 - RNA, 22 nt, Human
augcagcaguuuacaaagcaau

SEQ ID NO: 307947 - RNA, 17 nt, Human
ccagguggaaucgugga

SEQ ID NO: 307948 - RNA, 22 nt, Human
uguguauucagcaagcgaaaca

SEQ ID NO: 307949 - RNA, 22 nt, Human
cucuggaggccuaaggaagugg

SEQ ID NO: 307950 - RNA, 21 nt, Human
uuucuuaggcucuaaaaugac

SEQ ID NO: 307951 - RNA, 22 nt, Human
ccuggaugauccaugucaugga

SEQ ID NO: 307952 - RNA, 21 nt, Human
cucuugugucagagccagagg

SEQ ID NO: 307953 - RNA, 22 nt, Human
uuugcagucaaauuugcuaaau

SEQ ID NO: 307954 - RNA, 22 nt, Human
ccaguguuagagacugauacag

SEQ ID NO: 307955 - RNA, 22 nt, Human
ccuuccaggagucucugcaggu

SEQ ID NO: 307956 - RNA, 22 nt, Human
uugcagagaucagcagguuuga

SEQ ID NO: 307957 - RNA, 17 nt, Human
acacagggagagggagc

SEQ ID NO: 307958 - RNA, 22 nt, Human
aggaaucccgcaccagcugcug

SEQ ID NO: 307959 - RNA, 22 nt, Human
acagcagcaauagcagugacau

SEQ ID NO: 307960 - RNA, 22 nt, Human
cagcuccccucuguggggcagu

SEQ ID NO: 307961 - RNA, 22 nt, Human
cagcugaggucaaagaagcagg

SEQ ID NO: 307962 - RNA, 22 nt, Human
ccuucucuacuccugaugcaug

SEQ ID NO: 307963 - RNA, 22 nt, Human
ccuggcagcgccgaagcuggcc

SEQ ID NO: 307964 - RNA, 22 nt, Human
ucaguuuuuaaaugauauaauu

SEQ ID NO: 307965 - RNA, 22 nt, Human
aaugcacauguuguaauaaaua

SEQ ID NO: 307966 - RNA, 22 nt, Human
ccacucugauuuuggcuccacu

SEQ ID NO: 307967 - RNA, 23 nt, Human
auggaagucacuguuuucuuguc

SEQ ID NO: 307968 - RNA, 22 nt, Human
cuugcuucauuagugucuuagu

SEQ ID NO: 307969 - RNA, 22 nt, Human
gcauuuaaauuugaacuucaga

SEQ ID NO: 307970 - RNA, 19 nt, Human
gguaaaagugagcuucagg

SEQ ID NO: 307971 - RNA, 19 nt, Human
cagcugccuuuucuuugca

SEQ ID NO: 307972 - RNA, 22 nt, Human
uaggcagcugcaaacuucgguc

SEQ ID NO: 307973 - RNA, 23 nt, Human
ugcucugggaggcccuggagagc

SEQ ID NO: 307974 - RNA, 22 nt, Human
ucugagagagggucagaugcua

SEQ ID NO: 307975 - RNA, 22 nt, Human
aggagucagauaugggaaaguu

SEQ ID NO: 307976 - RNA, 22 nt, Human
uucuaguguccuuggacuugcu

SEQ ID NO: 307977 - RNA, 22 nt, Human
gcucugugcaguucagggacac

SEQ ID NO: 307978 - RNA, 22 nt, Human
ugcagaagugagucaugaggaa

SEQ ID NO: 307979 - RNA, 22 nt, Human
cccuggagugugacgaggcauu

SEQ ID NO: 307980 - RNA, 22 nt, Human
uuuugaaagccagguuuguaug

SEQ ID NO: 307981 - RNA, 22 nt, Human
acguguucaauuuccaucugac

SEQ ID NO: 307982 - RNA, 22 nt, Human
cuggacagaaaaggccacugga

SEQ ID NO: 307983 - RNA, 22 nt, Human
uagcugcugcagcacagggagg

SEQ ID NO: 307984 - RNA, 22 nt, Human
uucauguaauuccauaagguaa

SEQ ID NO: 307985 - RNA, 22 nt, Human
aggagacauaacuaugaugaga

SEQ ID NO: 307986 - RNA, 22 nt, Human
uucaggauucugugucugacaa

SEQ ID NO: 307987 - RNA, 22 nt, Human
uauuuucauucugugugacugu

SEQ ID NO: 307988 - RNA, 22 nt, Human
gucuucuuuucagucugcuugu

SEQ ID NO: 307989 - RNA, 22 nt, Human
gugugcaguagagaaagagcag

SEQ ID NO: 307990 - RNA, 22 nt, Human
acaaauaugguacucggagaaa

SEQ ID NO: 307991 - RNA, 22 nt, Human
gugcauuugacgaauacucacu

SEQ ID NO: 307992 - RNA, 22 nt, Human
gagcugcuucugugugccgggu

SEQ ID NO: 307993 - RNA, 22 nt, Human
agacagcauggagcugauaaca

SEQ ID NO: 307994 - RNA, 22 nt, Human
gaaaugcaaauucucucucgcu

SEQ ID NO: 307995 - RNA, 22 nt, Human
gaagagcuauguccagggagca

SEQ ID NO: 307996 - RNA, 22 nt, Human
cagggaguuuuuguuccucuag

SEQ ID NO: 307997 - RNA, 21 nt, Human
uucuccccagcgaauccucgg

SEQ ID NO: 307998 - RNA, 18 nt, Human
ugggauggagaguaacug

SEQ ID NO: 307999 - RNA, 22 nt, Human
gacuguguccaugugcuggauu

SEQ ID NO: 308000 - RNA, 22 nt, Human
uuggaaauacagcaguuacuuu

SEQ ID NO: 308001 - RNA, 22 nt, Human
cuuuauguuggggugucuuagu

SEQ ID NO: 308002 - RNA, 22 nt, Human
agccuggcacugaggcagggcg

SEQ ID NO: 308003 - RNA, 22 nt, Human
gaugagaaggcucagauccaaa

SEQ ID NO: 308004 - RNA, 22 nt, Human
uggcuucugcuuucaguggagg

SEQ ID NO: 308005 - RNA, 22 nt, Human
ucucagugcuauccauauucca

SEQ ID NO: 308006 - RNA, 22 nt, Human
uugaggaguguuuagggugagg

SEQ ID NO: 308007 - RNA, 20 nt, Human
gccucagucacauggccuac

SEQ ID NO: 308008 - RNA, 21 nt, Human
ggagucagggucuggcugggg

SEQ ID NO: 308009 - RNA, 22 nt, Human
guuugcauaucugugaaaugga

SEQ ID NO: 308010 - RNA, 22 nt, Human
aaagaacaucggagugggcggg

SEQ ID NO: 308011 - RNA, 22 nt, Human
gagggaugugccugaaggcagg

SEQ ID NO: 308012 - RNA, 22 nt, Human
uucauuccuucuguaccuugcc

SEQ ID NO: 308013 - RNA, 22 nt, Human
ccugugugcugaugacgacaga

SEQ ID NO: 308014 - RNA, 22 nt, Human
cuggcucccagcuuucagggag

SEQ ID NO: 308015 - RNA, 22 nt, Human
aucauucuauuguugagcugcc

SEQ ID NO: 308016 - RNA, 18 nt, Human
cugcugcaggcacucagg

SEQ ID NO: 308017 - RNA, 22 nt, Human
acaggugugagaacaugccuug

SEQ ID NO: 308018 - RNA, 22 nt, Human
cauaugaaauaugaguugaaca

SEQ ID NO: 308019 - RNA, 22 nt, Human
aaucuuucccuauuaaaugugg

SEQ ID NO: 308020 - RNA, 22 nt, Human
ccuuuggguucaaucucggucu

SEQ ID NO: 308021 - RNA, 21 nt, Human
aaugaaguggcuauuuugagg

SEQ ID NO: 308022 - RNA, 22 nt, Human
aggacccugagcgggcaugccg

SEQ ID NO: 308023 - RNA, 23 nt, Human
uaagaacagacaagcauuuacau

SEQ ID NO: 308024 - RNA, 22 nt, Human
ggcccagcacagugcuuggggg

SEQ ID NO: 308025 - RNA, 22 nt, Human
cugccagcaaugugaccaugcu

SEQ ID NO: 308026 - RNA, 22 nt, Human
cccagcuccaagggacagcgaa

SEQ ID NO: 308027 - RNA, 22 nt, Human
aggagagucuugagucacuggu

SEQ ID NO: 308028 - RNA, 22 nt, Human
auguaugagagauucuuuuauu

SEQ ID NO: 308029 - RNA, 22 nt, Human
ugugccauuucuauucugcagc

SEQ ID NO: 308030 - RNA, 19 nt, Human
uccaaaggacccaccucca

SEQ ID NO: 308031 - RNA, 22 nt, Human
caggcacuggggaugcugggau

SEQ ID NO: 308032 - RNA, 22 nt, Human
ccacucccuuccgguccagggc

SEQ ID NO: 308033 - RNA, 22 nt, Human
gagcuguccgccccugggccga

SEQ ID NO: 308034 - RNA, 22 nt, Human
ggcggggguccaggagccugca

SEQ ID NO: 308035 - RNA, 22 nt, Human
cuucacauguuggaguccuuug

SEQ ID NO: 308036 - RNA, 22 nt, Human
cagcagagcuuauguuggguca

SEQ ID NO: 308037 - RNA, 22 nt, Human
aaguguguugacugaauugggg

SEQ ID NO: 308038 - RNA, 22 nt, Human
cucugcuuggaacuggacagaa

SEQ ID NO: 308039 - RNA, 22 nt, Human
gggaggugauggcaagcagcgg

SEQ ID NO: 308040 - RNA, 22 nt, Human
cauggccugccuccuccuggug

SEQ ID NO: 308041 - RNA, 22 nt, Human
uccuuagagauacugucuugaa

SEQ ID NO: 308042 - RNA, 22 nt, Human
ucuuggaacuuauuauuguaga

SEQ ID NO: 308043 - RNA, 22 nt, Human
cugggccuagcaacagaggagu

SEQ ID NO: 308044 - RNA, 21 nt, Human
auuucagagcacacaaguaaa

SEQ ID NO: 308045 - RNA, 22 nt, Human
aagccagguuccauggaggagc

SEQ ID NO: 308046 - RNA, 18 nt, Human
cugaaggauccaggugua

SEQ ID NO: 308047 - RNA, 20 nt, Human
ggcugugcccuuccguggcc

SEQ ID NO: 308048 - RNA, 22 nt, Human
agcuccuggcuuuccucucacc

SEQ ID NO: 308049 - RNA, 20 nt, Human
aggaggggauagaaucaaag

SEQ ID NO: 308050 - RNA, 22 nt, Human
ucaaggugcugugcugugcuag

SEQ ID NO: 308051 - RNA, 22 nt, Human
aauccagguggcggagguugug

SEQ ID NO: 308052 - RNA, 22 nt, Human
aguuauucauuuauucuguaca

SEQ ID NO: 308053 - RNA, 22 nt, Human
uguacaguguagucaugagguu

SEQ ID NO: 308054 - RNA, 20 nt, Human
auaauuuacccugcaccacu

SEQ ID NO: 308055 - RNA, 22 nt, Human
ucccagcauuaaugccugucag

SEQ ID NO: 308056 - RNA, 22 nt, Human
aagcugccuuccaugugaggaa

SEQ ID NO: 308057 - RNA, 19 nt, Human
gagcacagcggcauuuggu

SEQ ID NO: 308058 - RNA, 22 nt, Human
auuaaagacagcagauggaugg

SEQ ID NO: 308059 - RNA, 21 nt, Human
agugaaauugcaucagaggga

SEQ ID NO: 308060 - RNA, 16 nt, Human
gagggcagaggcggaa

SEQ ID NO: 308061 - RNA, 22 nt, Human
gacccugccaugagugacaggg

SEQ ID NO: 308062 - RNA, 22 nt, Human
gaccauuucuaggaaucagacu

SEQ ID NO: 308063 - RNA, 22 nt, Human
uuuaaauucugucugccgcuua

SEQ ID NO: 308064 - RNA, 22 nt, Human
ucagcugccccaguggccccag

SEQ ID NO: 308065 - RNA, 19 nt, Human
aggcugcaagguggugggc

SEQ ID NO: 308066 - RNA, 22 nt, Human
aaaugucuuucaauagagaaau

SEQ ID NO: 308067 - RNA, 19 nt, Human
uggcagggagaguuugaag

SEQ ID NO: 308068 - RNA, 22 nt, Human
cugcuuuguguggucccuccag

SEQ ID NO: 308069 - RNA, 22 nt, Human
acaguguucucuuccuguauag

SEQ ID NO: 308070 - RNA, 22 nt, Human
uuauguaccugaauuaguaaag

SEQ ID NO: 308071 - RNA, 22 nt, Human
uucuguuuuagaaauaaguagu

SEQ ID NO: 308072 - RNA, 22 nt, Human
aggcccuguuaugagccacugu

SEQ ID NO: 308073 - RNA, 22 nt, Human
gugccucagcaccgccugcagc

SEQ ID NO: 308074 - RNA, 21 nt, Human
uaaaagaugacaagacagcuc

SEQ ID NO: 308075 - RNA, 22 nt, Human
caggcacuguguuaggcacugu

SEQ ID NO: 308076 - RNA, 22 nt, Human
auaguauuuaauaguuagcuca

SEQ ID NO: 308077 - RNA, 22 nt, Human
auuucugauaaacguaagcugc

SEQ ID NO: 308078 - RNA, 22 nt, Human
cucaggccuugaagucuuuucu

SEQ ID NO: 308079 - RNA, 22 nt, Human
caggcagcaucagucugcugua

SEQ ID NO: 308080 - RNA, 22 nt, Human
agagacaggauaucugcucaug

SEQ ID NO: 308081 - RNA, 22 nt, Human
auucuucaccauggauaauuug

SEQ ID NO: 308082 - RNA, 22 nt, Human
ccuguucacgguguguuguuag

SEQ ID NO: 308083 - RNA, 22 nt, Human
caaauguauaaauguacuuucu

SEQ ID NO: 308084 - RNA, 22 nt, Human
ugguuucccauuaucugcagga

SEQ ID NO: 308085 - RNA, 22 nt, Human
ucucuuucuauaugugagucuu

SEQ ID NO: 308086 - RNA, 22 nt, Human
ugaaaugagcauuuauucuuua

SEQ ID NO: 308087 - RNA, 22 nt, Human
guccucugggcagcugccccac

SEQ ID NO: 308088 - RNA, 22 nt, Human
guggaggacaaaagaagccuuu

SEQ ID NO: 308089 - RNA, 22 nt, Human
ugcauguguguguauuuauaaa

SEQ ID NO: 308090 - RNA, 22 nt, Human
ucucucuuuuuaaucauguaau

SEQ ID NO: 308091 - RNA, 22 nt, Human
uccagccuuucuacucacugag

SEQ ID NO: 308092 - RNA, 22 nt, Human
ccuguucacuuugacuucucca

SEQ ID NO: 308093 - RNA, 22 nt, Human
agagccagcauuugacacuggc

SEQ ID NO: 308094 - RNA, 22 nt, Human
ugcauugcauuugucaugaaga

SEQ ID NO: 308095 - RNA, 22 nt, Human
ccugcuggccaguggagggcug

SEQ ID NO: 308096 - RNA, 22 nt, Human
aacaggagaguaaauauaugau

SEQ ID NO: 308097 - RNA, 22 nt, Human
gucuucuuguguugccugucuu

SEQ ID NO: 308098 - RNA, 22 nt, Human
ccugcuggccacugcuccaccu

SEQ ID NO: 308099 - RNA, 23 nt, Human
acagagguccaaacaguauaagc

SEQ ID NO: 308100 - RNA, 22 nt, Human
gggcuggucuggcuuagucagg

SEQ ID NO: 308101 - RNA, 22 nt, Human
agauaaaaugguucaaaggcua

SEQ ID NO: 308102 - RNA, 22 nt, Human
agccacagucugaugccugaga

SEQ ID NO: 308103 - RNA, 22 nt, Human
aguuugaauugaaaugcagaug

SEQ ID NO: 308104 - RNA, 22 nt, Human
agugaaauccuggucaacaggu

SEQ ID NO: 308105 - RNA, 22 nt, Human
ggaggccaaggcagguggauca

SEQ ID NO: 308106 - RNA, 22 nt, Human
ucagggcauacucuucaagguc

SEQ ID NO: 308107 - RNA, 22 nt, Human
uggcccugaggggcugugcccc

SEQ ID NO: 308108 - RNA, 22 nt, Human
auuugaagucuucaugauuucu

SEQ ID NO: 308109 - RNA, 22 nt, Human
auuucccaugugaaucaauugg

SEQ ID NO: 308110 - RNA, 23 nt, Human
acagaaaucauuuguaagguacc

SEQ ID NO: 308111 - RNA, 22 nt, Human
ugucuucaucucagacacaguu

SEQ ID NO: 308112 - RNA, 19 nt, Human
ugccuggacaaaugugggg

SEQ ID NO: 308113 - RNA, 22 nt, Human
gggugggguucaggaaucuuca

SEQ ID NO: 308114 - RNA, 22 nt, Human
cuggccuuuagccccagugucu

SEQ ID NO: 308115 - RNA, 22 nt, Human
augagcugugggauuccagagg

SEQ ID NO: 308116 - RNA, 22 nt, Human
uauuccagugugaucuuuguag

SEQ ID NO: 308117 - RNA, 22 nt, Human
agggagcugcucugcuuccgug

SEQ ID NO: 308118 - RNA, 22 nt, Human
auaaggcauauagucacuuuuu

SEQ ID NO: 308119 - RNA, 22 nt, Human
ugaaaugaucaguuugguuacu

SEQ ID NO: 308120 - RNA, 22 nt, Human
gagaaccucuccacaagucugg

SEQ ID NO: 308121 - RNA, 22 nt, Human
ucaaugauaguacaaucagccu

SEQ ID NO: 308122 - RNA, 22 nt, Human
gcauguguugguuuaugcaugu

SEQ ID NO: 308123 - RNA, 22 nt, Human
cugagagugcucuuugauguca

SEQ ID NO: 308124 - RNA, 22 nt, Human
cugcccagaaucacucacucga

SEQ ID NO: 308125 - RNA, 22 nt, Human
uacaaaaguaauuacgguuuuu

SEQ ID NO: 308126 - RNA, 22 nt, Human
gaccuggaggauccucuucuug

SEQ ID NO: 308127 - RNA, 22 nt, Human
ccuuuugcucucccauccagaa

SEQ ID NO: 308128 - RNA, 22 nt, Human
caggauggucuucauuuggcuc

SEQ ID NO: 308129 - RNA, 21 nt, Human
auggagccuaagaguggaggu

SEQ ID NO: 308130 - RNA, 22 nt, Human
ucacaguaaaagcauggaagag

SEQ ID NO: 308131 - RNA, 22 nt, Human
aucauuacuccuguaaaauugu

SEQ ID NO: 308132 - RNA, 22 nt, Human
cugggcacacagugacucugca

SEQ ID NO: 308133 - RNA, 18 nt, Human
uuucacaaccuccagagg

SEQ ID NO: 308134 - RNA, 22 nt, Human
agggcugccugacuccagagcc

SEQ ID NO: 308135 - RNA, 22 nt, Human
agagccagcauuugggcccugc

SEQ ID NO: 308136 - RNA, 22 nt, Human
ugaaggaaugaguauacuguuu

SEQ ID NO: 308137 - RNA, 22 nt, Human
aggguggcaguuacuggagcaa

SEQ ID NO: 308138 - RNA, 18 nt, Human
cuguucuagaacuccugu

SEQ ID NO: 308139 - RNA, 22 nt, Human
aaaugcacaauaaaguaaaggc

SEQ ID NO: 308140 - RNA, 22 nt, Human
uauuuaguuaucuuucauaaaa

SEQ ID NO: 308141 - RNA, 22 nt, Human
uuuucaguuccaucucugcucu

SEQ ID NO: 308142 - RNA, 22 nt, Human
cugcugugcaggugccuaugau

SEQ ID NO: 308143 - RNA, 22 nt, Human
ugaagccaucccucagauggcc

SEQ ID NO: 308144 - RNA, 22 nt, Human
gccuggagcuacuggacacuga

SEQ ID NO: 308145 - RNA, 22 nt, Human
ggccugagcagacagcaugaug

SEQ ID NO: 308146 - RNA, 21 nt, Human
ugccagggauuuacagagccu

SEQ ID NO: 308147 - RNA, 22 nt, Human
uccucuggcccagcugccucug

SEQ ID NO: 308148 - RNA, 22 nt, Human
uccucaggagagcuccuaugcc

SEQ ID NO: 308149 - RNA, 22 nt, Human
agauuuccaucuuuuucaugug

SEQ ID NO: 308150 - RNA, 22 nt, Human
ugggcaaguaucggacucugag

SEQ ID NO: 308151 - RNA, 22 nt, Human
ccaaagugcugagauuacaggu

SEQ ID NO: 308152 - RNA, 22 nt, Human
cuggggaggcagggcugccccu

SEQ ID NO: 308153 - RNA, 22 nt, Human
uggcucaguuaggucagaaaca

SEQ ID NO: 308154 - RNA, 22 nt, Human
gggcuacagacaugcucuaagc

SEQ ID NO: 308155 - RNA, 22 nt, Human
ucucaggaucuaauacauggua

SEQ ID NO: 308156 - RNA, 22 nt, Human
cuggagccacugggucuuguau

SEQ ID NO: 308157 - RNA, 20 nt, Human
cacugaagacuucuugcuca

SEQ ID NO: 308158 - RNA, 21 nt, Human
agcagaggcagaauguaugca

SEQ ID NO: 308159 - RNA, 17 nt, Human
ugagcaguagaagaugc

SEQ ID NO: 308160 - RNA, 22 nt, Human
ugccuuccuggagcugaaggcu

SEQ ID NO: 308161 - RNA, 22 nt, Human
aagggcaggagaagacggauau

SEQ ID NO: 308162 - RNA, 22 nt, Human
agguggagaagagaugggcagu

SEQ ID NO: 308163 - RNA, 22 nt, Human
uuucaucuaacacuacauaggg

SEQ ID NO: 308164 - RNA, 22 nt, Human
acucugaggagugacuagaggu

SEQ ID NO: 308165 - RNA, 22 nt, Human
aggccagaaauuuggaguaugu

SEQ ID NO: 308166 - RNA, 22 nt, Human
caugggcuacagaagcaugcug

SEQ ID NO: 308167 - RNA, 22 nt, Human
gaaggaagucauuagugcagac

SEQ ID NO: 308168 - RNA, 22 nt, Human
ucuuaaaaguaugccaauugga

SEQ ID NO: 308169 - RNA, 22 nt, Human
acagccauagaugcuuauguaa

SEQ ID NO: 308170 - RNA, 22 nt, Human
uuggcuucucuuaacccuaaag

SEQ ID NO: 308171 - RNA, 22 nt, Human
aagauggcuuagaguccuggug

SEQ ID NO: 308172 - RNA, 21 nt, Human
uuccagagauuguuucaccug

SEQ ID NO: 308173 - RNA, 22 nt, Human
gcaguguuuggauccauagcga

SEQ ID NO: 308174 - RNA, 22 nt, Human
aggcugggcuccgcccaacucc

SEQ ID NO: 308175 - RNA, 22 nt, Human
caggacagguguucuagaucag

SEQ ID NO: 308176 - RNA, 22 nt, Human
ccaggccuccugugaguggacc

SEQ ID NO: 308177 - RNA, 22 nt, Human
gggagggauuaguucugccugg

SEQ ID NO: 308178 - RNA, 22 nt, Human
aaauguguuucgaaaacuggug

SEQ ID NO: 308179 - RNA, 22 nt, Human
cacucccucuaguugcauucug

SEQ ID NO: 308180 - RNA, 22 nt, Human
ggcucugcuucagaaggcucau

SEQ ID NO: 308181 - RNA, 22 nt, Human
ugacagggcuagaggcaaugca

SEQ ID NO: 308182 - RNA, 22 nt, Human
agagcagccugugaugaugcac

SEQ ID NO: 308183 - RNA, 22 nt, Human
gcagcugggccccagccucucc

SEQ ID NO: 308184 - RNA, 22 nt, Human
acugagcugcuugaagugaacu

SEQ ID NO: 308185 - RNA, 22 nt, Human
auguguauacuugugcuuacuc

SEQ ID NO: 308186 - RNA, 22 nt, Human
uuugauaguugauuaaauucca

SEQ ID NO: 308187 - RNA, 22 nt, Human
ugacauaauaauccaaacauac

SEQ ID NO: 308188 - RNA, 22 nt, Human
cugaggccucucuccugggcuu

SEQ ID NO: 308189 - RNA, 20 nt, Human
ugcucaggauggagaggugu

SEQ ID NO: 308190 - RNA, 22 nt, Human
uuuaagacuuagauuuauuggg

SEQ ID NO: 308191 - RNA, 22 nt, Human
augugaaacugaagcauccaua

SEQ ID NO: 308192 - RNA, 22 nt, Human
cuggugggagcagcaggcagcu

SEQ ID NO: 308193 - RNA, 22 nt, Human
aagggagcuuaggagaucaggc

SEQ ID NO: 308194 - RNA, 22 nt, Human
uagggcaguuauaacauuagug

SEQ ID NO: 308195 - RNA, 22 nt, Human
agugaaaugacugaaucagaua

SEQ ID NO: 308196 - RNA, 22 nt, Human
ugucaccagcugcuccucagga

SEQ ID NO: 308197 - RNA, 22 nt, Human
ucagcuuggacagcuugguuga

SEQ ID NO: 308198 - RNA, 22 nt, Human
aguggcagagccaaguagagcc

SEQ ID NO: 308199 - RNA, 19 nt, Human
uagcagcugccaaaggaga

SEQ ID NO: 308200 - RNA, 22 nt, Human
uauauguaagcuauguaagagu

SEQ ID NO: 308201 - RNA, 22 nt, Human
ucagcaauccucccacaggugg

SEQ ID NO: 308202 - RNA, 22 nt, Human
auuuaagacugacuucaccagu

SEQ ID NO: 308203 - RNA, 22 nt, Human
aaugcacagcguuccaugcuug

SEQ ID NO: 308204 - RNA, 22 nt, Human
ugcuguuauacuuagcugguua

SEQ ID NO: 308205 - RNA, 22 nt, Human
gccuucccacccugcgaggcug

SEQ ID NO: 308206 - RNA, 22 nt, Human
auuaucuauguagaaugauuuu

SEQ ID NO: 308207 - RNA, 22 nt, Human
cccucuggcucuucucaggccg

SEQ ID NO: 308208 - RNA, 21 nt, Human
agaaauguaucauucuuuucc

SEQ ID NO: 308209 - RNA, 22 nt, Human
uuuuaucaaucauuaagacauu

SEQ ID NO: 308210 - RNA, 20 nt, Human
cuuuggcaaugagaacaggg

SEQ ID NO: 308211 - RNA, 22 nt, Human
cugccuggcuaaacucaagucg

SEQ ID NO: 308212 - RNA, 22 nt, Human
ugcuggcucaguuugcagacuc

SEQ ID NO: 308213 - RNA, 22 nt, Human
cugugccaggcccagcugacuu

SEQ ID NO: 308214 - RNA, 22 nt, Human
auuccaguucuccucucuaaag

SEQ ID NO: 308215 - RNA, 22 nt, Human
ugaguaauaaacugucuugcuc

SEQ ID NO: 308216 - RNA, 22 nt, Human
caguuuuuagauuaguuggugg

SEQ ID NO: 308217 - RNA, 22 nt, Human
auguacaaaaugccacugaauu

SEQ ID NO: 308218 - RNA, 22 nt, Human
uagcauuucccaaaugcauuug

SEQ ID NO: 308219 - RNA, 17 nt, Human
aggcuggcucacaggga

SEQ ID NO: 308220 - RNA, 22 nt, Human
ccucagccuuggccccaggcag

SEQ ID NO: 308221 - RNA, 22 nt, Human
ggagacacuggaaaguauuaca

SEQ ID NO: 308222 - RNA, 22 nt, Human
acauaccauacauggugagaug

SEQ ID NO: 308223 - RNA, 22 nt, Human
ggcagccagagggcagcuggau

SEQ ID NO: 308224 - RNA, 22 nt, Human
gcccuuggaacagccuccugcu

SEQ ID NO: 308225 - RNA, 22 nt, Human
ugcaggccucacaccuggcacc

SEQ ID NO: 308226 - RNA, 22 nt, Human
agugcugaagacuggcuaggga

SEQ ID NO: 308227 - RNA, 22 nt, Human
aaggagaguacaggaguuggua

SEQ ID NO: 308228 - RNA, 22 nt, Human
gcugcccucccagggcaagcuu

SEQ ID NO: 308229 - RNA, 22 nt, Human
aagcagcuuaaauuagagccug

SEQ ID NO: 308230 - RNA, 22 nt, Human
ccuggcagcauugguagagauu

SEQ ID NO: 308231 - RNA, 22 nt, Human
cucugggcaccaaagagcagcu

SEQ ID NO: 308232 - RNA, 19 nt, Human
cuuccuugcuccccaugug

SEQ ID NO: 308233 - RNA, 22 nt, Human
cagccagguaugggcgugcggg

SEQ ID NO: 308234 - RNA, 22 nt, Human
aaugaacacagcccucuacuuu

SEQ ID NO: 308235 - RNA, 22 nt, Human
agcauuuauuucuuagaaauug

SEQ ID NO: 308236 - RNA, 18 nt, Human
aagccagagaccacugcc

SEQ ID NO: 308237 - RNA, 22 nt, Human
cugggcuccuaaccauccaggu

SEQ ID NO: 308238 - RNA, 22 nt, Human
uuccagugaugggcaauuuggu

SEQ ID NO: 308239 - RNA, 22 nt, Human
uugcaaaggggaauaaagcaau

SEQ ID NO: 308240 - RNA, 18 nt, Human
agcuggcccuggcugccg

SEQ ID NO: 308241 - RNA, 22 nt, Human
aaggagcuuguucgccuuccuc

SEQ ID NO: 308242 - RNA, 22 nt, Human
cauacuuuugcccugacauucu

SEQ ID NO: 308243 - RNA, 22 nt, Human
uaacagaaaggggacagaaaua

SEQ ID NO: 308244 - RNA, 22 nt, Human
gccaagagaaugugagagaaau

SEQ ID NO: 308245 - RNA, 21 nt, Human
ugcagcagaguaagcagggga

SEQ ID NO: 308246 - RNA, 22 nt, Human
ugcagccaucuuucuuggagga

SEQ ID NO: 308247 - RNA, 22 nt, Human
cauuuacuuaaaucuuuacaag

SEQ ID NO: 308248 - RNA, 22 nt, Human
caaauucucacccuguuugauu

SEQ ID NO: 308249 - RNA, 22 nt, Human
aaacuuuaagacaguccucaag

SEQ ID NO: 308250 - RNA, 20 nt, Human
gagauggacagaugaagggg

SEQ ID NO: 308251 - RNA, 22 nt, Human
cugaagaugucugagaugcuca

SEQ ID NO: 308252 - RNA, 22 nt, Human
ugccugccaugcagaaagcuga

SEQ ID NO: 308253 - RNA, 21 nt, Human
gcucccuggcugugugaccug

SEQ ID NO: 308254 - RNA, 22 nt, Human
ucuggccuauuucugucagauc

SEQ ID NO: 308255 - RNA, 22 nt, Human
ccuggcugggguagaagugagg

SEQ ID NO: 308256 - RNA, 22 nt, Human
ucagggcugcagaagaggcagg

SEQ ID NO: 308257 - RNA, 22 nt, Human
aggcccaguuauccuacuuguu

SEQ ID NO: 308258 - RNA, 22 nt, Human
ugcagcugguuuagaacuagau

SEQ ID NO: 308259 - RNA, 22 nt, Human
agcuguguguuuccacugagcu

SEQ ID NO: 308260 - RNA, 22 nt, Human
augcuuuacaguuuuccaaaca

SEQ ID NO: 308261 - RNA, 22 nt, Human
ucuggaguccagauccauuugg

SEQ ID NO: 308262 - RNA, 22 nt, Human
cagcuucucagaaagcugaggu

SEQ ID NO: 308263 - RNA, 22 nt, Human
gcaguggggaaugcuggggaga

SEQ ID NO: 308264 - RNA, 22 nt, Human
ucagagugguagccuauuuucu

SEQ ID NO: 308265 - RNA, 22 nt, Human
uggcagcauuuuuuccagaaca

SEQ ID NO: 308266 - RNA, 22 nt, Human
gcuuuauguaaguccaaaggca

SEQ ID NO: 308267 - RNA, 22 nt, Human
ugggugggagcgcccugucugg

SEQ ID NO: 308268 - RNA, 22 nt, Human
ugcuuuuaagaacaaugcugcu

SEQ ID NO: 308269 - RNA, 22 nt, Human
uuguaaaugaccuuuucuaauu

SEQ ID NO: 308270 - RNA, 22 nt, Human
cuaauacacccuauugcuuguu

SEQ ID NO: 308271 - RNA, 22 nt, Human
caagaaauguuuacugagcauc

SEQ ID NO: 308272 - RNA, 23 nt, Human
ggcagcucucaucugaugacuga

SEQ ID NO: 308273 - RNA, 22 nt, Human
gcuggccacacugcugauggag

SEQ ID NO: 308274 - RNA, 22 nt, Human
agggacuuguguccuauguaug

SEQ ID NO: 308275 - RNA, 22 nt, Human
uggcugaacuaaugugcuguuu

SEQ ID NO: 308276 - RNA, 22 nt, Human
ucaggauccauagacucccaaa

SEQ ID NO: 308277 - RNA, 21 nt, Human
ugagccaggcugacggcugug

SEQ ID NO: 308278 - RNA, 19 nt, Human
ugucccagacuccgugucu

SEQ ID NO: 308279 - RNA, 22 nt, Human
ccuguguggccaggcuggaguc

SEQ ID NO: 308280 - RNA, 21 nt, Human
aagagcuggaucaaggauaag

SEQ ID NO: 308281 - RNA, 22 nt, Human
acacagggaggaggugcugugc

SEQ ID NO: 308282 - RNA, 22 nt, Human
ugugaggagaggcccagcuccc

SEQ ID NO: 308283 - RNA, 22 nt, Human
uucagcaagaccaccauguacc

SEQ ID NO: 308284 - RNA, 19 nt, Human
ucugucacuggggguauuc

SEQ ID NO: 308285 - RNA, 22 nt, Human
caggaacagcaccaggagcuag

SEQ ID NO: 308286 - RNA, 22 nt, Human
ggguggaguagaaagaugaauu

SEQ ID NO: 308287 - RNA, 22 nt, Human
gucccagggaugcagacaugag

SEQ ID NO: 308288 - RNA, 22 nt, Human
uccacccccagacagcugguga

SEQ ID NO: 308289 - RNA, 22 nt, Human
caggcagcgcucguggccuggc

SEQ ID NO: 308290 - RNA, 22 nt, Human
uggcucucagcucccagcagcc

SEQ ID NO: 308291 - RNA, 22 nt, Human
aauucauccaugaacaauucca

SEQ ID NO: 308292 - RNA, 22 nt, Human
gcuggugccuuguuguuguuac

SEQ ID NO: 308293 - RNA, 19 nt, Human
aagcagcccuggcaagagc

SEQ ID NO: 308294 - RNA, 22 nt, Human
cugcuguggccagccaggucaa

SEQ ID NO: 308295 - RNA, 20 nt, Human
ugacucugcaaccgucucuc

SEQ ID NO: 308296 - RNA, 22 nt, Human
aaaugucuuucuucugcuacgu

SEQ ID NO: 308297 - RNA, 22 nt, Human
aggagcugcagauucugccuug

SEQ ID NO: 308298 - RNA, 22 nt, Human
gaaauauuguacuggagauguu

SEQ ID NO: 308299 - RNA, 22 nt, Human
uggccugaauuauggcagaucu

SEQ ID NO: 308300 - RNA, 22 nt, Human
ugcagagguguugcugagauaa

SEQ ID NO: 308301 - RNA, 22 nt, Human
caguguguggauccucccagga

SEQ ID NO: 308302 - RNA, 22 nt, Human
agguaagggucacaguucauau

SEQ ID NO: 308303 - RNA, 22 nt, Human
gggcaguggguggcugcagccu

SEQ ID NO: 308304 - RNA, 22 nt, Human
gcagcugccccgacugugaguc

SEQ ID NO: 308305 - RNA, 22 nt, Human
acucagaaugacugaugcugug

SEQ ID NO: 308306 - RNA, 22 nt, Human
ugagaaagguauuucaugcacu

SEQ ID NO: 308307 - RNA, 22 nt, Human
ccaggacuuauuacaguauaac

SEQ ID NO: 308308 - RNA, 23 nt, Human
ccuucagaagaaguaacaggggc

SEQ ID NO: 308309 - RNA, 22 nt, Human
acagaaugcguagugcauguug

SEQ ID NO: 308310 - RNA, 22 nt, Human
ugccucugugugcaggugagca

SEQ ID NO: 308311 - RNA, 22 nt, Human
agggacacaugugauuauuuau

SEQ ID NO: 308312 - RNA, 22 nt, Human
ccugaggcuuaaucugucccaa

SEQ ID NO: 308313 - RNA, 22 nt, Human
gggccuggggacaccaccauga

SEQ ID NO: 308314 - RNA, 22 nt, Human
ccuccuggcccugggccuggaa

SEQ ID NO: 308315 - RNA, 22 nt, Human
ugccugugguuccaguuuuuuc

SEQ ID NO: 308316 - RNA, 22 nt, Human
aggcaguguguagcuggaagag

SEQ ID NO: 308317 - RNA, 21 nt, Human
augugaaauaucaucagagca

SEQ ID NO: 308318 - RNA, 22 nt, Human
gucugcugcagagcauggcuuu

SEQ ID NO: 308319 - RNA, 22 nt, Human
agagcuuagaauuucagaugau

SEQ ID NO: 308320 - RNA, 22 nt, Human
agggucugacuccucuggcaag

SEQ ID NO: 308321 - RNA, 18 nt, Human
uuccaugauuccuuucac

SEQ ID NO: 308322 - RNA, 21 nt, Human
ucucugguuggaguugugcca

SEQ ID NO: 308323 - RNA, 22 nt, Human
acauuucugcaucucagagcua

SEQ ID NO: 308324 - RNA, 22 nt, Human
cagcagggggcagcgcagauca

SEQ ID NO: 308325 - RNA, 22 nt, Human
ucaguuuucucaucugugaaau

SEQ ID NO: 308326 - RNA, 22 nt, Human
cugcuucuaagaaccugcagcu

SEQ ID NO: 308327 - RNA, 22 nt, Human
auggccugggcccgcuucagau

SEQ ID NO: 308328 - RNA, 22 nt, Human
agugccuggcacauggaaggug

SEQ ID NO: 308329 - RNA, 22 nt, Human
acuagauaauuauaaaagguag

SEQ ID NO: 308330 - RNA, 22 nt, Human
guggccucuguuggcuccuagg

SEQ ID NO: 308331 - RNA, 22 nt, Human
uguuccaugucuuuguaggacu

SEQ ID NO: 308332 - RNA, 22 nt, Human
agagaagacuuacagccacagu

SEQ ID NO: 308333 - RNA, 22 nt, Human
uuccucuguaguugcugaugaa

SEQ ID NO: 308334 - RNA, 22 nt, Human
uuguauuagcuguaaauuuucu

SEQ ID NO: 308335 - RNA, 22 nt, Human
aucaggauucaguaucuccagc

SEQ ID NO: 308336 - RNA, 22 nt, Human
ucauaaaugcagugucauaaau

SEQ ID NO: 308337 - RNA, 22 nt, Human
caugcugugugguuagaacugu

SEQ ID NO: 308338 - RNA, 22 nt, Human
gggagggaaggaggcgccgugu

SEQ ID NO: 308339 - RNA, 22 nt, Human
gcugccaugccacagcacucac

SEQ ID NO: 308340 - RNA, 22 nt, Human
ccaguguucaguaugcauuaag

SEQ ID NO: 308341 - RNA, 22 nt, Human
ugccugaggagucagggcaggu

SEQ ID NO: 308342 - RNA, 22 nt, Human
uaggaaauggcucaguuacugc

SEQ ID NO: 308343 - RNA, 22 nt, Human
cugucacacugauaucaggcuu

SEQ ID NO: 308344 - RNA, 23 nt, Human
cucccuggaguuucuggaagaug

SEQ ID NO: 308345 - RNA, 22 nt, Human
uucuuuucuuuaggcauugugu

SEQ ID NO: 308346 - RNA, 22 nt, Human
uauguacagggauagaacuuga

SEQ ID NO: 308347 - RNA, 22 nt, Human
cagcccuggcccaggugccuua

SEQ ID NO: 308348 - RNA, 22 nt, Human
gcaguccucucauuggccuccu

SEQ ID NO: 308349 - RNA, 22 nt, Human
aggcuuccucgugccuuagaua

SEQ ID NO: 308350 - RNA, 22 nt, Human
ucucaagaucucaagauggccc

SEQ ID NO: 308351 - RNA, 22 nt, Human
gaaggccacaaaaaaugucaua

SEQ ID NO: 308352 - RNA, 22 nt, Human
agccaggcugcaguuggcuggc

SEQ ID NO: 308353 - RNA, 22 nt, Human
caggcugcagaggccuuucaug

SEQ ID NO: 308354 - RNA, 22 nt, Human
ccagcugcaggggagcagugga

SEQ ID NO: 308355 - RNA, 22 nt, Human
cccagccugaucucggccagcu

SEQ ID NO: 308356 - RNA, 22 nt, Human
ggcaaggccuugcccagcauuc

SEQ ID NO: 308357 - RNA, 22 nt, Human
aggccagcccucaccuguguuc

SEQ ID NO: 308358 - RNA, 20 nt, Human
uguuaaaggacacuugcuuu

SEQ ID NO: 308359 - RNA, 22 nt, Human
ucagagcuuaucucuugcugga

SEQ ID NO: 308360 - RNA, 22 nt, Human
agaccauggccauccuaggaaa

SEQ ID NO: 308361 - RNA, 22 nt, Human
caaggaaaacagaugaucaaca

SEQ ID NO: 308362 - RNA, 22 nt, Human
auucauaacggcaaaugucacc

SEQ ID NO: 308363 - RNA, 22 nt, Human
gccagcaguccugcugugugcc

SEQ ID NO: 308364 - RNA, 19 nt, Human
gagcccucuccauggccac

SEQ ID NO: 308365 - RNA, 22 nt, Human
auguuacacauaggcauaaaug

SEQ ID NO: 308366 - RNA, 22 nt, Human
gacugucauucuagugcccaug

SEQ ID NO: 308367 - RNA, 22 nt, Human
aggggaggagcuuuucuugccu

SEQ ID NO: 308368 - RNA, 20 nt, Human
agucucuguagugccugaga

SEQ ID NO: 308369 - RNA, 22 nt, Human
gugucccaauguucaggacggc

SEQ ID NO: 308370 - RNA, 22 nt, Human
ugcuauugugaacagugccaca

SEQ ID NO: 308371 - RNA, 22 nt, Human
cauuuguaguuaaaaaugucuc

SEQ ID NO: 308372 - RNA, 22 nt, Human
gccaggcauuuguuaggugcug

SEQ ID NO: 308373 - RNA, 22 nt, Human
aguguccccuccaagggccugg

SEQ ID NO: 308374 - RNA, 22 nt, Human
uaacagaagaaaacauauugga

SEQ ID NO: 308375 - RNA, 22 nt, Human
ccaguguugcauaggaugggga

SEQ ID NO: 308376 - RNA, 22 nt, Human
ugcugccauggucgcugguguc

SEQ ID NO: 308377 - RNA, 22 nt, Human
uuuuucaagacaaccugcaugu

SEQ ID NO: 308378 - RNA, 22 nt, Human
gcugucccaugguugcaagaug

SEQ ID NO: 308379 - RNA, 22 nt, Human
cccaggcuggagugcaauggug

SEQ ID NO: 308380 - RNA, 22 nt, Human
ccaggagcaacuugaaggcaag

SEQ ID NO: 308381 - RNA, 21 nt, Human
ccagagccugcugagcccccu

SEQ ID NO: 308382 - RNA, 22 nt, Human
ggccccagauucugggcugggu

SEQ ID NO: 308383 - RNA, 22 nt, Human
ccagcagcucccucaggguccg

SEQ ID NO: 308384 - RNA, 22 nt, Human
gcucagggaacuuuuugcaggc

SEQ ID NO: 308385 - RNA, 22 nt, Human
gagagugaggccugggaaucua

SEQ ID NO: 308386 - RNA, 22 nt, Human
gaagagcugcucagaacaugau

SEQ ID NO: 308387 - RNA, 22 nt, Human
gcagcaggcuuuucauaccuug

SEQ ID NO: 308388 - RNA, 22 nt, Human
aagcugccagauucagucugcu

SEQ ID NO: 308389 - RNA, 17 nt, Human
auccccagcaucuagaa

SEQ ID NO: 308390 - RNA, 22 nt, Human
agggacugagcuaggaucuagu

SEQ ID NO: 308391 - RNA, 20 nt, Human
agcuucuucugucuaauuuu

SEQ ID NO: 308392 - RNA, 22 nt, Human
gcaggggaguggcaggcccgga

SEQ ID NO: 308393 - RNA, 22 nt, Human
caggggcaggugugagaucauc

SEQ ID NO: 308394 - RNA, 17 nt, Human
ccagggaggggccgcgc

SEQ ID NO: 308395 - RNA, 22 nt, Human
gcauguguggaggagaugugcu

SEQ ID NO: 308396 - RNA, 22 nt, Human
uacauauuugucuuuguacugu

SEQ ID NO: 308397 - RNA, 22 nt, Human
cccagcucuuccugggagcuaa

SEQ ID NO: 308398 - RNA, 22 nt, Human
ucuuccaagguugcacacuauc

SEQ ID NO: 308399 - RNA, 22 nt, Human
agaaauuccuaagguacacaag

SEQ ID NO: 308400 - RNA, 22 nt, Human
ggugccagccuagugcaguggu

SEQ ID NO: 308401 - RNA, 22 nt, Human
uggccugauuuugcuaagagaa

SEQ ID NO: 308402 - RNA, 22 nt, Human
cuuagaaaucgaacucagguua

SEQ ID NO: 308403 - RNA, 22 nt, Human
uugcuuccucgaggccagcgug

SEQ ID NO: 308404 - RNA, 22 nt, Human
acagcacaaucugagucccaga

SEQ ID NO: 308405 - RNA, 19 nt, Human
ucugugcugggaggcagca

SEQ ID NO: 308406 - RNA, 21 nt, Human
acagucuccccagaucucucc

SEQ ID NO: 308407 - RNA, 21 nt, Human
caggaaaagcggaagucuagc

SEQ ID NO: 308408 - RNA, 22 nt, Human
uacaugcaugucacagaaugaa

SEQ ID NO: 308409 - RNA, 22 nt, Human
aaaguauucuugacuguuuuuc

SEQ ID NO: 308410 - RNA, 23 nt, Human
uggggcugauggagacggaccag

SEQ ID NO: 308411 - RNA, 22 nt, Human
augaaauugaucuugaacuuuu

SEQ ID NO: 308412 - RNA, 22 nt, Human
uggaccugcuggaugggcaggu

SEQ ID NO: 308413 - RNA, 22 nt, Human
ccagcugcugugaggaccacag

SEQ ID NO: 308414 - RNA, 22 nt, Human
ucucagccucaccucuauggag

SEQ ID NO: 308415 - RNA, 21 nt, Human
agcagagugcuuugacuuugu

SEQ ID NO: 308416 - RNA, 22 nt, Human
ccaggccuuccaguacgcagaa

SEQ ID NO: 308417 - RNA, 22 nt, Human
uccucagaaaccccugugaggu

SEQ ID NO: 308418 - RNA, 22 nt, Human
gcagggcuguucaggagggugg

SEQ ID NO: 308419 - RNA, 22 nt, Human
ggcagccauggacacuggcuag

SEQ ID NO: 308420 - RNA, 22 nt, Human
ugcuuuauguuaucagaagggu

SEQ ID NO: 308421 - RNA, 22 nt, Human
ucacugcucuccaauguggagu

SEQ ID NO: 308422 - RNA, 22 nt, Human
aucagcaaucucguguauuagg

SEQ ID NO: 308423 - RNA, 22 nt, Human
uucuacagacuauaacugugau

SEQ ID NO: 308424 - RNA, 22 nt, Human
ugugccaggcacuugcccaggc

SEQ ID NO: 308425 - RNA, 19 nt, Human
ugcucauggggacuucucc

SEQ ID NO: 308426 - RNA, 18 nt, Human
aggcacuggaauuaaggg

SEQ ID NO: 308427 - RNA, 22 nt, Human
uccaagggcagccauagaacuu

SEQ ID NO: 308428 - RNA, 18 nt, Human
ucugagggugcgggagcu

SEQ ID NO: 308429 - RNA, 22 nt, Human
cugucccucaguucugggcaaa

SEQ ID NO: 308430 - RNA, 22 nt, Human
uccugccuaccuugcggaggug

SEQ ID NO: 308431 - RNA, 22 nt, Human
ugcagcuucuccaucuccuugu

SEQ ID NO: 308432 - RNA, 22 nt, Human
ggucccugaagaggccuggggu

SEQ ID NO: 308433 - RNA, 22 nt, Human
ucccagggacaccaagcuguuu

SEQ ID NO: 308434 - RNA, 22 nt, Human
acugcuuuucagagucugccug

SEQ ID NO: 308435 - RNA, 22 nt, Human
acuauaaaaggauaaaccagaa

SEQ ID NO: 308436 - RNA, 23 nt, Human
ccagccucugggucuucauccag

SEQ ID NO: 308437 - RNA, 22 nt, Human
uucucaguaugugacgaggacc

SEQ ID NO: 308438 - RNA, 22 nt, Human
ugacuuccugcacucaggugau

SEQ ID NO: 308439 - RNA, 22 nt, Human
agccacccauucccgagcccua

SEQ ID NO: 308440 - RNA, 22 nt, Human
gagaacucagacgcaggucaug

SEQ ID NO: 308441 - RNA, 19 nt, Human
aaaguuuuauucucauuug

SEQ ID NO: 308442 - RNA, 23 nt, Human
gugcucugcggucugcuagucug

SEQ ID NO: 308443 - RNA, 22 nt, Human
acagaggccccgugggagagcc

SEQ ID NO: 308444 - RNA, 22 nt, Human
guguugaugacauuuuagaaac

SEQ ID NO: 308445 - RNA, 23 nt, Human
gagcugggauacaggcuuacugc

SEQ ID NO: 308446 - RNA, 21 nt, Human
aaaguucaugcuuuaauauuc

SEQ ID NO: 308447 - RNA, 22 nt, Human
ucuucauuuuauagcaucugug

SEQ ID NO: 308448 - RNA, 22 nt, Human
ugcuuuggccacuagaauucag

SEQ ID NO: 308449 - RNA, 22 nt, Human
aaacucuguauuugcugugggu

SEQ ID NO: 308450 - RNA, 22 nt, Human
uuugcauuucuaaugagcuccg

SEQ ID NO: 308451 - RNA, 22 nt, Human
uucuucaacaaggacacuguua

SEQ ID NO: 308452 - RNA, 22 nt, Human
gccaugccugugucuccaggcc

SEQ ID NO: 308453 - RNA, 23 nt, Human
uccuggugacaugccugagcauc

SEQ ID NO: 308454 - RNA, 22 nt, Human
agaaaucuauguuuugguuaga

SEQ ID NO: 308455 - RNA, 22 nt, Human
cuucagaacuauaaaaaguacu

SEQ ID NO: 308456 - RNA, 22 nt, Human
ccagucacuggaaaaugggaau

SEQ ID NO: 308457 - RNA, 22 nt, Human
auaaaacuuauuagaauugugu

SEQ ID NO: 308458 - RNA, 22 nt, Human
ggcagagcuugcagugagccga

SEQ ID NO: 308459 - RNA, 22 nt, Human
auuuaaauuuucugauggagag

SEQ ID NO: 308460 - RNA, 22 nt, Human
caaaggcaguuacugaaugaag

SEQ ID NO: 308461 - RNA, 22 nt, Human
uagccuucucaagacaaaguug

SEQ ID NO: 308462 - RNA, 19 nt, Human
uguuuuguuaaagcagucc

SEQ ID NO: 308463 - RNA, 22 nt, Human
cuuccugcaggacagccaucug

SEQ ID NO: 308464 - RNA, 22 nt, Human
uucagcaaacacgaugcuuguu

SEQ ID NO: 308465 - RNA, 22 nt, Human
ucuggagaacuugcaagaggau

SEQ ID NO: 308466 - RNA, 22 nt, Human
agggcugggcugcuuguuguca

SEQ ID NO: 308467 - RNA, 22 nt, Human
ggucacugcucuaaacaaaagu

SEQ ID NO: 308468 - RNA, 17 nt, Human
aguggcaggcagauggg

SEQ ID NO: 308469 - RNA, 22 nt, Human
uagaaagcuugggguguuuaaa

SEQ ID NO: 308470 - RNA, 22 nt, Human
auaucuuuuagagcaagcuugu

SEQ ID NO: 308471 - RNA, 19 nt, Human
uuagaaacuguugacacug

SEQ ID NO: 308472 - RNA, 22 nt, Human
gcaugggcaagaggacuggggg

SEQ ID NO: 308473 - RNA, 22 nt, Human
uaagcauucaaugcuuagcacu

SEQ ID NO: 308474 - RNA, 22 nt, Human
aaaggucagacuuaggcugggc

SEQ ID NO: 308475 - RNA, 22 nt, Human
agcugguuagcaaucuaaguga

SEQ ID NO: 308476 - RNA, 22 nt, Human
cagcauggugccagugagucca

SEQ ID NO: 308477 - RNA, 21 nt, Human
ucagaguggaagacaguuuga

SEQ ID NO: 308478 - RNA, 22 nt, Human
ugagccuguccugugcauguga

SEQ ID NO: 308479 - RNA, 22 nt, Human
uagaacagaggguugcccagau

SEQ ID NO: 308480 - RNA, 22 nt, Human
caagaugacaaggcuggaggcu

SEQ ID NO: 308481 - RNA, 22 nt, Human
ggccuuggugccauggccaguu

SEQ ID NO: 308482 - RNA, 22 nt, Human
ggacucagcagccaggaguggc

SEQ ID NO: 308483 - RNA, 22 nt, Human
uaaugcacagaauugacauggg

SEQ ID NO: 308484 - RNA, 22 nt, Human
gcacacccucucaccagcacug

SEQ ID NO: 308485 - RNA, 22 nt, Human
aagcacagaaaaggagcaugga

SEQ ID NO: 308486 - RNA, 22 nt, Human
cagaacauuccaugugcccugc

SEQ ID NO: 308487 - RNA, 22 nt, Human
cagccuucugaaugaacguacu

SEQ ID NO: 308488 - RNA, 22 nt, Human
gccacccccaaguagguggucu

SEQ ID NO: 308489 - RNA, 22 nt, Human
augacagaaggccucccugaca

SEQ ID NO: 308490 - RNA, 22 nt, Human
uagccgggugugguggaacucc

SEQ ID NO: 308491 - RNA, 22 nt, Human
gcugucagaaggugaaggguaa

SEQ ID NO: 308492 - RNA, 18 nt, Human
ccucaggggaccuggcag

SEQ ID NO: 308493 - RNA, 22 nt, Human
acugagcugugacaaugcuuaa

SEQ ID NO: 308494 - RNA, 22 nt, Human
uaggaaaagucuagauugauga

SEQ ID NO: 308495 - RNA, 23 nt, Human
ccuggcuggauucucugcauuca

SEQ ID NO: 308496 - RNA, 22 nt, Human
gacagggcgcccagccuguuuc

SEQ ID NO: 308497 - RNA, 22 nt, Human
acaugaaaguuauucugaguug

SEQ ID NO: 308498 - RNA, 22 nt, Human
cuggaggggcuggcaugguagc

SEQ ID NO: 308499 - RNA, 22 nt, Human
ccauggcauuuuaugugucuua

SEQ ID NO: 308500 - RNA, 22 nt, Human
gggcguggauggucagugcagg

SEQ ID NO: 308501 - RNA, 23 nt, Human
gggagccauggguggucauggag

SEQ ID NO: 308502 - RNA, 22 nt, Human
uaugacauugcuuuuuagaacu

SEQ ID NO: 308503 - RNA, 22 nt, Human
uuuucaguuacuguuuauguga

SEQ ID NO: 308504 - RNA, 22 nt, Human
aacagugagaagguggacagga

SEQ ID NO: 308505 - RNA, 23 nt, Human
cccagcgcugagcccugcaggca

SEQ ID NO: 308506 - RNA, 22 nt, Human
cauauuuauagaucuggcauuu

SEQ ID NO: 308507 - RNA, 22 nt, Human
cagcaggcguugggagaaagac

SEQ ID NO: 308508 - RNA, 22 nt, Human
aggcucagcugguggugaucgc

SEQ ID NO: 308509 - RNA, 20 nt, Human
gccagcccugacacaggagc

SEQ ID NO: 308510 - RNA, 22 nt, Human
gcaggaguuaggcgucguggau

SEQ ID NO: 308511 - RNA, 22 nt, Human
cucaacagcucugccauacucc

SEQ ID NO: 308512 - RNA, 22 nt, Human
uuucaguuuccagcuuugucau

SEQ ID NO: 308513 - RNA, 17 nt, Human
gcaaucucagucuccuu

SEQ ID NO: 308514 - RNA, 22 nt, Human
agggggcaucagguccuggcuc

SEQ ID NO: 308515 - RNA, 22 nt, Human
uccucagcuuuuauuucacuug

SEQ ID NO: 308516 - RNA, 22 nt, Human
ucaguguuggucaagaaucagu

SEQ ID NO: 308517 - RNA, 22 nt, Human
ucucagagaccugaacucccug

SEQ ID NO: 308518 - RNA, 22 nt, Human
cacagaauaaauugguaucaga

SEQ ID NO: 308519 - RNA, 22 nt, Human
ucaaaguuuguggcaauuuauu

SEQ ID NO: 308520 - RNA, 22 nt, Human
acugucaccaucagagcgggaa

SEQ ID NO: 308521 - RNA, 22 nt, Human
ucagaaauguaagcugaugacu

SEQ ID NO: 308522 - RNA, 22 nt, Human
ugucccagaucacaggagggga

SEQ ID NO: 308523 - RNA, 22 nt, Human
cuccagggaggucugcaggacu

SEQ ID NO: 308524 - RNA, 22 nt, Human
uguauuuugugaggaucacucu

SEQ ID NO: 308525 - RNA, 22 nt, Human
gccuucaggaaaucaguccuug

SEQ ID NO: 308526 - RNA, 22 nt, Human
ugccaggccucaggagucucca

SEQ ID NO: 308527 - RNA, 22 nt, Human
ggccagaaaguuaagcuguggc

SEQ ID NO: 308528 - RNA, 19 nt, Human
ugcaggaggacugagcaga

SEQ ID NO: 308529 - RNA, 22 nt, Human
aaucagaaagaggucauguugc

SEQ ID NO: 308530 - RNA, 22 nt, Human
ucaaaugcggucauggcuuuua

SEQ ID NO: 308531 - RNA, 22 nt, Human
uggggacacagagguucguugg

SEQ ID NO: 308532 - RNA, 22 nt, Human
gugccugggcaugagcuuguug

SEQ ID NO: 308533 - RNA, 22 nt, Human
cagccuguagaauacaguaaau

SEQ ID NO: 308534 - RNA, 22 nt, Human
cucccuggaggugagcuggcac

SEQ ID NO: 308535 - RNA, 22 nt, Human
ccaccuccaccuauugccagcc

SEQ ID NO: 308536 - RNA, 22 nt, Human
cugggcuacguguugacagcau

SEQ ID NO: 308537 - RNA, 22 nt, Human
gauggcagucaaccaggugagg

SEQ ID NO: 308538 - RNA, 17 nt, Human
uauguaguacuuauaaa

SEQ ID NO: 308539 - RNA, 22 nt, Human
cuuaagauuugcgauaccuaau

SEQ ID NO: 308540 - RNA, 22 nt, Human
gagagugaggcaucaggggcag

SEQ ID NO: 308541 - RNA, 22 nt, Human
gacccugauaggaguagaagaa

SEQ ID NO: 308542 - RNA, 22 nt, Human
aaaugguauuuacucuguauua

SEQ ID NO: 308543 - RNA, 22 nt, Human
ucucagagaaaugugucaccau

SEQ ID NO: 308544 - RNA, 22 nt, Human
gcagcacauauaaacaaagaga

SEQ ID NO: 308545 - RNA, 22 nt, Human
agcugcaggcccaugcucaguc

SEQ ID NO: 308546 - RNA, 22 nt, Human
ucaguccuccucucauagagag

SEQ ID NO: 308547 - RNA, 22 nt, Human
uaugcuuuacuuuucauuguga

SEQ ID NO: 308548 - RNA, 22 nt, Human
uuuccagguauuaauacuguau

SEQ ID NO: 308549 - RNA, 22 nt, Human
aaacacauuagcccuguggaaa

SEQ ID NO: 308550 - RNA, 21 nt, Human
uuuauguacuucauagaguag

SEQ ID NO: 308551 - RNA, 22 nt, Human
ugaacaaacugcauucuucacu

SEQ ID NO: 308552 - RNA, 22 nt, Human
aaauaguuguuuggaucaauaa

SEQ ID NO: 308553 - RNA, 21 nt, Human
cccaccccauaaggcagaacc

SEQ ID NO: 308554 - RNA, 22 nt, Human
ugcagcucauugguguccuggu

SEQ ID NO: 308555 - RNA, 22 nt, Human
gcucagugagauauugacucca

SEQ ID NO: 308556 - RNA, 22 nt, Human
gcagggucuugagaggcagcca

SEQ ID NO: 308557 - RNA, 22 nt, Human
ccuggcagacugugagggcagg

SEQ ID NO: 308558 - RNA, 22 nt, Human
ugccucagcugaggccgcucca

SEQ ID NO: 308559 - RNA, 22 nt, Human
guccaugauucugugacacccu

SEQ ID NO: 308560 - RNA, 22 nt, Human
agcuggcuccagaaggagucgu

SEQ ID NO: 308561 - RNA, 22 nt, Human
agcagaugcgucugagugggag

SEQ ID NO: 308562 - RNA, 22 nt, Human
acagggcaugugcaagagacau

SEQ ID NO: 308563 - RNA, 22 nt, Human
acagagcaguucuggagcuggc

SEQ ID NO: 308564 - RNA, 22 nt, Human
caggccagugugcuucccaggc

SEQ ID NO: 308565 - RNA, 20 nt, Human
acuugcugggcuuuguuacc

SEQ ID NO: 308566 - RNA, 22 nt, Human
agcaccuggucuccuggcgcug

SEQ ID NO: 308567 - RNA, 22 nt, Human
acuaagugauucuaagcaucuu

SEQ ID NO: 308568 - RNA, 22 nt, Human
agauggggcucaguguggaggc

SEQ ID NO: 308569 - RNA, 18 nt, Human
ggagccagucugucucug

SEQ ID NO: 308570 - RNA, 22 nt, Human
gcagaaggucuggcacuucagg

SEQ ID NO: 308571 - RNA, 22 nt, Human
uagaaacaaugacaugcuugua

SEQ ID NO: 308572 - RNA, 22 nt, Human
aaguuugcauagauuaagcauu

SEQ ID NO: 308573 - RNA, 22 nt, Human
cagcaggcucugaguggcugcc

SEQ ID NO: 308574 - RNA, 22 nt, Human
uaugaguacaaggacucugucu

SEQ ID NO: 308575 - RNA, 22 nt, Human
caggaaagagcugccaggcagg

SEQ ID NO: 308576 - RNA, 19 nt, Human
aaaaacuuaguccagaaag

SEQ ID NO: 308577 - RNA, 22 nt, Human
cccaggcagggacgugcucugg

SEQ ID NO: 308578 - RNA, 21 nt, Human
agaagccuggguggagguggg

SEQ ID NO: 308579 - RNA, 22 nt, Human
aggugagguuugggagguguca

SEQ ID NO: 308580 - RNA, 22 nt, Human
aggcacugugcagucccaagca

SEQ ID NO: 308581 - RNA, 22 nt, Human
cagcagcugcgugcccaggccg

SEQ ID NO: 308582 - RNA, 22 nt, Human
ccaagaugaucuuuacaguguu

SEQ ID NO: 308583 - RNA, 22 nt, Human
cuacaaugacagaauugaguag

SEQ ID NO: 308584 - RNA, 22 nt, Human
uucuucuugaaacuuuagguug

SEQ ID NO: 308585 - RNA, 22 nt, Human
gcucaggaccgaggggugggaa

SEQ ID NO: 308586 - RNA, 22 nt, Human
agucuucacucuucacuacuau

SEQ ID NO: 308587 - RNA, 22 nt, Human
gaacaucagucauaauuuaacg

SEQ ID NO: 308588 - RNA, 22 nt, Human
ggacacaagcuccggggcugca

SEQ ID NO: 308589 - RNA, 22 nt, Human
cauauuugguauaacuuaagca

SEQ ID NO: 308590 - RNA, 22 nt, Human
cucuguagaaacagggcagaag

SEQ ID NO: 308591 - RNA, 22 nt, Human
uguccauggauagagcugcucg

SEQ ID NO: 308592 - RNA, 22 nt, Human
uggagcccagacacuggcauug

SEQ ID NO: 308593 - RNA, 23 nt, Human
ucucaagaggaagcagggcucau

SEQ ID NO: 308594 - RNA, 22 nt, Human
aggcacuguggguguggccgga

SEQ ID NO: 308595 - RNA, 18 nt, Human
cagaaguccuucaaggcc

SEQ ID NO: 308596 - RNA, 22 nt, Human
acagaacugcaggaggaaaagc

SEQ ID NO: 308597 - RNA, 22 nt, Human
cuggcagccaagugggauacuc

SEQ ID NO: 308598 - RNA, 23 nt, Human
ugagacacucauucauggaguau

SEQ ID NO: 308599 - RNA, 22 nt, Human
gguggcuggaggagcugaugga

SEQ ID NO: 308600 - RNA, 20 nt, Human
cuucaggacccauccucccc

SEQ ID NO: 308601 - RNA, 22 nt, Human
ggccucuguucugcauuccucc

SEQ ID NO: 308602 - RNA, 22 nt, Human
ccucccaccguaucucaguggc

SEQ ID NO: 308603 - RNA, 20 nt, Human
ccucucugaagaggucaucu

SEQ ID NO: 308604 - RNA, 22 nt, Human
cagcccugcucuuagugucucc

SEQ ID NO: 308605 - RNA, 20 nt, Human
caggugagcagaucugggug

SEQ ID NO: 308606 - RNA, 22 nt, Human
ccagcagaagcucccgcugggu

SEQ ID NO: 308607 - RNA, 22 nt, Human
uggcucuggggacaguaagucc

SEQ ID NO: 308608 - RNA, 22 nt, Human
gagagcuguguucauucuacca

SEQ ID NO: 308609 - RNA, 22 nt, Human
uaauacuuaccuugcagagucu

SEQ ID NO: 308610 - RNA, 22 nt, Human
ucucagagauguuagggaagag

SEQ ID NO: 308611 - RNA, 20 nt, Human
ugagaaaguagagacucagg

SEQ ID NO: 308612 - RNA, 22 nt, Human
cucccucugucuuguccagaaa

SEQ ID NO: 308613 - RNA, 22 nt, Human
gggugacauuucccaaugagcc

SEQ ID NO: 308614 - RNA, 21 nt, Human
uagggcaggcauuggaagaga

SEQ ID NO: 308615 - RNA, 22 nt, Human
caguccugucuuuaugacuuca

SEQ ID NO: 308616 - RNA, 22 nt, Human
aucucauaacucauuugaagac

SEQ ID NO: 308617 - RNA, 22 nt, Human
acucagcugaugaagcacaagu

SEQ ID NO: 308618 - RNA, 22 nt, Human
ucagggcaucaucaugaauaua

SEQ ID NO: 308619 - RNA, 22 nt, Human
uacaaaugaaccaacuuugaug

SEQ ID NO: 308620 - RNA, 22 nt, Human
auugcuuaucuaucuuuaaguc

SEQ ID NO: 308621 - RNA, 22 nt, Human
cuguuuucaaagagagagaaug

SEQ ID NO: 308622 - RNA, 22 nt, Human
aaaucucaggccucuauuuacu

SEQ ID NO: 308623 - RNA, 22 nt, Human
uuccaugagcucugaguucaca

SEQ ID NO: 308624 - RNA, 23 nt, Human
uuagagaugauuaaaaaaucuug

SEQ ID NO: 308625 - RNA, 22 nt, Human
gguccuggaaauugacggaaag

SEQ ID NO: 308626 - RNA, 22 nt, Human
uucuuaacuggaaaaugucaga

SEQ ID NO: 308627 - RNA, 22 nt, Human
gcagugaaucuggcaagaauuu

SEQ ID NO: 308628 - RNA, 22 nt, Human
agguacagcaauauaagagguc

SEQ ID NO: 308629 - RNA, 22 nt, Human
aggccugcagcaggagcaaacc

SEQ ID NO: 308630 - RNA, 22 nt, Human
gcuguuccugcuuagaggucgg

SEQ ID NO: 308631 - RNA, 22 nt, Human
ucuucagacccuuagcugugau

SEQ ID NO: 308632 - RNA, 22 nt, Human
ggugaggggagagugaaagaaa

SEQ ID NO: 308633 - RNA, 22 nt, Human
ccaggccucccuuuuccagcca

SEQ ID NO: 308634 - RNA, 23 nt, Human
uccuccuuuugcuugugcuuccc

SEQ ID NO: 308635 - RNA, 22 nt, Human
agagccagcaagugaauaguga

SEQ ID NO: 308636 - RNA, 22 nt, Human
cugucaggggcggguggagcgg

SEQ ID NO: 308637 - RNA, 22 nt, Human
augcccaaugucacaauuuuug

SEQ ID NO: 308638 - RNA, 22 nt, Human
guaguuuucugaaaauuacuuu

SEQ ID NO: 308639 - RNA, 22 nt, Human
cugcugugaguuuggaggucua

SEQ ID NO: 308640 - RNA, 22 nt, Human
aguguccaacucagcuugucaa

SEQ ID NO: 308641 - RNA, 22 nt, Human
uucuucucucauagauuaaggu

SEQ ID NO: 308642 - RNA, 22 nt, Human
gccagcucccaagugagccccu

SEQ ID NO: 308643 - RNA, 22 nt, Human
uauuuccaagcugaauccaaug

SEQ ID NO: 308644 - RNA, 22 nt, Human
ccacccugagccgcaagagcag

SEQ ID NO: 308645 - RNA, 22 nt, Human
uauuauuaaauggcagaauuuu

SEQ ID NO: 308646 - RNA, 22 nt, Human
guggcuugaccaucccugcuac

SEQ ID NO: 308647 - RNA, 22 nt, Human
uguuucagucccuguguucaau

SEQ ID NO: 308648 - RNA, 22 nt, Human
gagagugauucccucccauaga

SEQ ID NO: 308649 - RNA, 22 nt, Human
uuucuggcagcgggacaggggu

SEQ ID NO: 308650 - RNA, 22 nt, Human
ccucagggaaugggaggcuggg

SEQ ID NO: 308651 - RNA, 22 nt, Human
gccugguggacacugggcauca

SEQ ID NO: 308652 - RNA, 22 nt, Human
uuuacagaucuguugauuuguu

SEQ ID NO: 308653 - RNA, 22 nt, Human
aucaggaucacugggagucuug

SEQ ID NO: 308654 - RNA, 22 nt, Human
aggaugaauaacugaaauggug

SEQ ID NO: 308655 - RNA, 23 nt, Human
ggcugagacuacaggcgcuugcc

SEQ ID NO: 308656 - RNA, 19 nt, Human
gugauuucuuuccacaagc

SEQ ID NO: 308657 - RNA, 20 nt, Human
gcugccuguuucuguaagua

SEQ ID NO: 308658 - RNA, 22 nt, Human
acaugugucuaagaaugaaaga

SEQ ID NO: 308659 - RNA, 22 nt, Human
caggggcugagaaggaacgucc

SEQ ID NO: 308660 - RNA, 22 nt, Human
ucugccugccagucugguccuc

SEQ ID NO: 308661 - RNA, 22 nt, Human
cacagcauaaugaaauauacuu

SEQ ID NO: 308662 - RNA, 20 nt, Human
accuuucaaaugauucagca

SEQ ID NO: 308663 - RNA, 18 nt, Human
ccuggcagccaugcgcgc

SEQ ID NO: 308664 - RNA, 22 nt, Human
cucuggaguuagugaucugggc

SEQ ID NO: 308665 - RNA, 22 nt, Human
gcaguguuaccuugggcugguu

SEQ ID NO: 308666 - RNA, 22 nt, Human
aggggccauuguucugcccgcu

SEQ ID NO: 308667 - RNA, 22 nt, Human
ccugggagguggagguugcagu

SEQ ID NO: 308668 - RNA, 22 nt, Human
uguaugaaccuuuaauauagug

SEQ ID NO: 308669 - RNA, 22 nt, Human
agagugaaggccagguuacagu

SEQ ID NO: 308670 - RNA, 22 nt, Human
aggagucacucagggcuucauc

SEQ ID NO: 308671 - RNA, 22 nt, Human
ucuggagcaacagagcaggaca

SEQ ID NO: 308672 - RNA, 22 nt, Human
uuccaaagucauguugcugaua

SEQ ID NO: 308673 - RNA, 20 nt, Human
uccugggguaagccaugguc

SEQ ID NO: 308674 - RNA, 17 nt, Human
uuugaaaggaugucagu

SEQ ID NO: 308675 - RNA, 22 nt, Human
cugggacuuuacccuguggccc

SEQ ID NO: 308676 - RNA, 22 nt, Human
cacugaagaugcgacuagugcu

SEQ ID NO: 308677 - RNA, 22 nt, Human
gugcuaaaggguuaugaacaag

SEQ ID NO: 308678 - RNA, 22 nt, Human
cuggagagggagcccuggcagu

SEQ ID NO: 308679 - RNA, 22 nt, Human
ggccuguguccuccuugcccug

SEQ ID NO: 308680 - RNA, 22 nt, Human
aacuagaaccacuuguauuucc

SEQ ID NO: 308681 - RNA, 22 nt, Human
aguauugugacucaaguauucu

SEQ ID NO: 308682 - RNA, 22 nt, Human
cugcugggucuaugcaagugga

SEQ ID NO: 308683 - RNA, 22 nt, Human
cuggcucacaggugagaugcau

SEQ ID NO: 308684 - RNA, 22 nt, Human
gcucccagacugaccagaggug

SEQ ID NO: 308685 - RNA, 20 nt, Human
uuucuugucggcuguugcug

SEQ ID NO: 308686 - RNA, 22 nt, Human
agaggccaugcuagaggccugg

SEQ ID NO: 308687 - RNA, 22 nt, Human
ccucaggaaccacauugcugcu

SEQ ID NO: 308688 - RNA, 22 nt, Human
cagcuccuagaucggcgaagug

SEQ ID NO: 308689 - RNA, 22 nt, Human
uacuuuuugucucuuugaaugu

SEQ ID NO: 308690 - RNA, 22 nt, Human
cauucuuacacaauauuuuaau

SEQ ID NO: 308691 - RNA, 22 nt, Human
cuggcaggaagaggaaagguca

SEQ ID NO: 308692 - RNA, 21 nt, Human
ucucugugucuuuaagcugga

SEQ ID NO: 308693 - RNA, 22 nt, Human
uuugcauugcauuaaguauucu

SEQ ID NO: 308694 - RNA, 22 nt, Human
ugcuuugggucucucuaguuuc

SEQ ID NO: 308695 - RNA, 22 nt, Human
uuucaguuuuugcucgauguau

SEQ ID NO: 308696 - RNA, 22 nt, Human
uuguugguggaauugaugcuag

SEQ ID NO: 308697 - RNA, 21 nt, Human
uggccucccacacuuccaugg

SEQ ID NO: 308698 - RNA, 22 nt, Human
auaucauuauguuaugagcaca

SEQ ID NO: 308699 - RNA, 22 nt, Human
ccugagguggcugcagcacugc

SEQ ID NO: 308700 - RNA, 22 nt, Human
gaggcugcccaacuggagugga

SEQ ID NO: 308701 - RNA, 22 nt, Human
cacaggcuugucagcaugaggc

SEQ ID NO: 308702 - RNA, 22 nt, Human
ggcucagguuaccagucccucc

SEQ ID NO: 308703 - RNA, 22 nt, Human
ugggcaccugaggccuggcagg

SEQ ID NO: 308704 - RNA, 22 nt, Human
cagagcuggagggaacccuggc

SEQ ID NO: 308705 - RNA, 22 nt, Human
ugccugucuuaauaucuggaaa

SEQ ID NO: 308706 - RNA, 22 nt, Human
agggccagaaucccucagucua

SEQ ID NO: 308707 - RNA, 22 nt, Human
caggccugucugcacaugaggc

SEQ ID NO: 308708 - RNA, 18 nt, Human
cccucuccugcuaguggg

SEQ ID NO: 308709 - RNA, 22 nt, Human
caaauguaaauucuuuugaagc

SEQ ID NO: 308710 - RNA, 22 nt, Human
ucaguauccacaaaugcucaaa

SEQ ID NO: 308711 - RNA, 22 nt, Human
auguaaggcugccuaugacacu

SEQ ID NO: 308712 - RNA, 22 nt, Human
aguacuuuacuucuuacaguuu

SEQ ID NO: 308713 - RNA, 20 nt, Human
acagaauaugcugguugugg

SEQ ID NO: 308714 - RNA, 22 nt, Human
cugggccuagaggaagcugaca

SEQ ID NO: 308715 - RNA, 22 nt, Human
ugcuucucccaaccagggccug

SEQ ID NO: 308716 - RNA, 22 nt, Human
gccugggagggcagcagugugg

SEQ ID NO: 308717 - RNA, 22 nt, Human
agaagccauguuuaguaggaug

SEQ ID NO: 308718 - RNA, 22 nt, Human
uauuuccaggccccacucuaga

SEQ ID NO: 308719 - RNA, 22 nt, Human
aaaagguaguugccaaauaagg

SEQ ID NO: 308720 - RNA, 22 nt, Human
gccuggaguacuccuugaagug

SEQ ID NO: 308721 - RNA, 22 nt, Human
ggccugugagcccuugcaugua

SEQ ID NO: 308722 - RNA, 22 nt, Human
cuggaaugccucccugucagag

SEQ ID NO: 308723 - RNA, 22 nt, Human
uuacaagauaaccugaugcugu

SEQ ID NO: 308724 - RNA, 22 nt, Human
uaugagaagaacaggugacuuu

SEQ ID NO: 308725 - RNA, 20 nt, Human
cugugcuuuggaaccuggaa

SEQ ID NO: 308726 - RNA, 22 nt, Human
aagccucuggggccucaucugu

SEQ ID NO: 308727 - RNA, 22 nt, Human
ugggccagcaauugcugcucag

SEQ ID NO: 308728 - RNA, 22 nt, Human
uuauguauggauggcugaaagu

SEQ ID NO: 308729 - RNA, 22 nt, Human
aagcagaaguugaucuaccaua

SEQ ID NO: 308730 - RNA, 22 nt, Human
ccagaaaguucagcugugaaug

SEQ ID NO: 308731 - RNA, 22 nt, Human
augaugugugcugaucaagcuu

SEQ ID NO: 308732 - RNA, 23 nt, Human
caguggagacucaugcuuccuua

SEQ ID NO: 308733 - RNA, 22 nt, Human
gugagggcaaauuagaaucaaa

SEQ ID NO: 308734 - RNA, 19 nt, Human
uccuucagucagaucuggg

SEQ ID NO: 308735 - RNA, 22 nt, Human
uccuggagagugggcgagcaca

SEQ ID NO: 308736 - RNA, 22 nt, Human
agcugcugagagucugccgggc

SEQ ID NO: 308737 - RNA, 22 nt, Human
acuggacagaggaaauauggag

SEQ ID NO: 308738 - RNA, 22 nt, Human
acagagccuccaggagugcugg

SEQ ID NO: 308739 - RNA, 22 nt, Human
gugauuucaaauauagagugag

SEQ ID NO: 308740 - RNA, 21 nt, Human
uggcccuggccacggcugcca

SEQ ID NO: 308741 - RNA, 22 nt, Human
aauguguguauuucuaggcgag

SEQ ID NO: 308742 - RNA, 19 nt, Human
aggacucuggaggcaugag

SEQ ID NO: 308743 - RNA, 22 nt, Human
ugggaggagcccucugggaagg

SEQ ID NO: 308744 - RNA, 21 nt, Human
cugcaggaugcugaagccagg

SEQ ID NO: 308745 - RNA, 22 nt, Human
gcugaguguaaugauggcagag

SEQ ID NO: 308746 - RNA, 22 nt, Human
auucuucaucacuaccuuguga

SEQ ID NO: 308747 - RNA, 22 nt, Human
uggcagcauguuauguaaggaa

SEQ ID NO: 308748 - RNA, 22 nt, Human
uccaaacacccuccaugcugca

SEQ ID NO: 308749 - RNA, 22 nt, Human
uggccucaccacuagcugggug

SEQ ID NO: 308750 - RNA, 22 nt, Human
uccucagggcggccuccgucuu

SEQ ID NO: 308751 - RNA, 22 nt, Human
cugggccucauccucagaguuu

SEQ ID NO: 308752 - RNA, 22 nt, Human
agcugcuccuuuccugcaggcg

SEQ ID NO: 308753 - RNA, 22 nt, Human
uggcagaaguucacuaguagcu

SEQ ID NO: 308754 - RNA, 22 nt, Human
cugagccagagggagucggguc

SEQ ID NO: 308755 - RNA, 19 nt, Human
aggcagaggcuuggcuagc

SEQ ID NO: 308756 - RNA, 22 nt, Human
ugggcagagucguggggaauag

SEQ ID NO: 308757 - RNA, 23 nt, Human
uagggcagcugggagggacaugc

SEQ ID NO: 308758 - RNA, 22 nt, Human
ugaacuuagugggaauaucucu

SEQ ID NO: 308759 - RNA, 22 nt, Human
cugagaggaugcugcaguggag

SEQ ID NO: 308760 - RNA, 22 nt, Human
gugucccacucuggaggugaag

SEQ ID NO: 308761 - RNA, 22 nt, Human
uaaguucucaauacauuguagc

SEQ ID NO: 308762 - RNA, 18 nt, Human
cucaccauucugcccaau

SEQ ID NO: 308763 - RNA, 22 nt, Human
agagcuggggcucuggguuuaa

SEQ ID NO: 308764 - RNA, 22 nt, Human
caggugcuguccugcacauguc

SEQ ID NO: 308765 - RNA, 22 nt, Human
cagaggccccagaacuagcucu

SEQ ID NO: 308766 - RNA, 22 nt, Human
uggccucuggcugaggacuaac

SEQ ID NO: 308767 - RNA, 22 nt, Human
uugaacaguccuaagagacccu

SEQ ID NO: 308768 - RNA, 22 nt, Human
gggccacauugaagggugggua

SEQ ID NO: 308769 - RNA, 22 nt, Human
ucccuggguccugcuugcucuc

SEQ ID NO: 308770 - RNA, 22 nt, Human
ugaaucaguauaaauucucaaa

SEQ ID NO: 308771 - RNA, 22 nt, Human
gagcugggccucagaacacagu

SEQ ID NO: 308772 - RNA, 22 nt, Human
agccuggaauuaaggaaaugca

SEQ ID NO: 308773 - RNA, 22 nt, Human
cauaauuucuguaucagcacca

SEQ ID NO: 308774 - RNA, 22 nt, Human
ucuuuccaaggacucuguagca

SEQ ID NO: 308775 - RNA, 22 nt, Human
uaucuaaaggauuuaauuuagu

SEQ ID NO: 308776 - RNA, 22 nt, Human
ucugucacccaggcuggagugc

SEQ ID NO: 308777 - RNA, 22 nt, Human
uuuccuaagguagugauaauuu

SEQ ID NO: 308778 - RNA, 22 nt, Human
augcaccugaacuccaucagcu

SEQ ID NO: 308779 - RNA, 22 nt, Human
ugucucugagaugacucccacc

SEQ ID NO: 308780 - RNA, 22 nt, Human
aaggagaaaugguagaugugca

SEQ ID NO: 308781 - RNA, 22 nt, Human
caguggucugugcuucuguaca

SEQ ID NO: 308782 - RNA, 20 nt, Human
aacuuguucuaccuguuuca

SEQ ID NO: 308783 - RNA, 19 nt, Human
agaaguuagacauugcaau

SEQ ID NO: 308784 - RNA, 22 nt, Human
acaguguuuaaaauaauaugcu

SEQ ID NO: 308785 - RNA, 22 nt, Human
ggagcugaugguagaagaauga

SEQ ID NO: 308786 - RNA, 17 nt, Human
agcagcuggcacaggag

SEQ ID NO: 308787 - RNA, 22 nt, Human
ccagcagcccucuuccaagacu

SEQ ID NO: 308788 - RNA, 22 nt, Human
gcugcccauuccacuggauggu

SEQ ID NO: 308789 - RNA, 22 nt, Human
aaaguucuuucucuuauuuggu

SEQ ID NO: 308790 - RNA, 22 nt, Human
cagugguugguagauacuugag

SEQ ID NO: 308791 - RNA, 22 nt, Human
ggagccugggcauuaguaauuu

SEQ ID NO: 308792 - RNA, 22 nt, Human
gccagcagcccagaaggacuuu

SEQ ID NO: 308793 - RNA, 22 nt, Human
guucuucaucauuaacacucug

SEQ ID NO: 308794 - RNA, 22 nt, Human
uggcagggccugaaucuuauac

SEQ ID NO: 308795 - RNA, 23 nt, Human
ucccuggaggcagguccagggcc

SEQ ID NO: 308796 - RNA, 22 nt, Human
caugggaggucugcaaggugcu

SEQ ID NO: 308797 - RNA, 22 nt, Human
aaugagaauguaagugaagaga

SEQ ID NO: 308798 - RNA, 22 nt, Human
cuuacagagaagaaaauguagu

SEQ ID NO: 308799 - RNA, 22 nt, Human
aucagcaagauugugucuugua

SEQ ID NO: 308800 - RNA, 22 nt, Human
ggugcuggacacguggcacucc

SEQ ID NO: 308801 - RNA, 17 nt, Human
ccugggaggaguuauga

SEQ ID NO: 308802 - RNA, 22 nt, Human
cagggccaaguuggugccuuuu

SEQ ID NO: 308803 - RNA, 22 nt, Human
uaugcacacaggcuuaauucau

SEQ ID NO: 308804 - RNA, 22 nt, Human
uguacauugucacucaucaagu

SEQ ID NO: 308805 - RNA, 22 nt, Human
gagcuuccugaugccgaccagu

SEQ ID NO: 308806 - RNA, 22 nt, Human
ucugcucagugcuuaucucuaa

SEQ ID NO: 308807 - RNA, 22 nt, Human
cacuggugacuucugagcugga

SEQ ID NO: 308808 - RNA, 22 nt, Human
gccuggaggggacagucucugg

SEQ ID NO: 308809 - RNA, 22 nt, Human
aauugcaacagguagacuuuuc

SEQ ID NO: 308810 - RNA, 22 nt, Human
acccuuucuuacucacacgcuc

SEQ ID NO: 308811 - RNA, 22 nt, Human
uggcccgaccucugcucaugca

SEQ ID NO: 308812 - RNA, 22 nt, Human
cuucuucagcacaauauugaug

SEQ ID NO: 308813 - RNA, 21 nt, Human
ggcagccugacccccagagag

SEQ ID NO: 308814 - RNA, 22 nt, Human
aguaccaugcuuccugacuggu

SEQ ID NO: 308815 - RNA, 22 nt, Human
gguacaaggagugaagguuugg

SEQ ID NO: 308816 - RNA, 22 nt, Human
uguguuccugccuggcucuggu

SEQ ID NO: 308817 - RNA, 22 nt, Human
ucauuguuucugcuuuucauga

SEQ ID NO: 308818 - RNA, 20 nt, Human
caguccugcaggcgggagaa

SEQ ID NO: 308819 - RNA, 20 nt, Human
gacaucauguacacauugcc

SEQ ID NO: 308820 - RNA, 22 nt, Human
cugccucuauaggaguccacca

SEQ ID NO: 308821 - RNA, 22 nt, Human
agaaagcacucugucuuuuacc

SEQ ID NO: 308822 - RNA, 23 nt, Human
aggaggaaaaguuaucugcugag

SEQ ID NO: 308823 - RNA, 20 nt, Human
cagcaguggaugagaguuuu

SEQ ID NO: 308824 - RNA, 21 nt, Human
aucacauuggcuguuauuauu

SEQ ID NO: 308825 - RNA, 22 nt, Human
ggcagaagauaggacagggaau

SEQ ID NO: 308826 - RNA, 22 nt, Human
acugugcacaauucuaaguccu

SEQ ID NO: 308827 - RNA, 22 nt, Human
ucccagccacagguguagcccu

SEQ ID NO: 308828 - RNA, 22 nt, Human
ggcugcuuuaucggcugcugaa

SEQ ID NO: 308829 - RNA, 22 nt, Human
auucuguauuucuaauaagauc

SEQ ID NO: 308830 - RNA, 19 nt, Human
ucaguuuuagucaucaguu

SEQ ID NO: 308831 - RNA, 22 nt, Human
accagagauggggcuucucugu

SEQ ID NO: 308832 - RNA, 22 nt, Human
gggcccugugauuucuugagga

SEQ ID NO: 308833 - RNA, 22 nt, Human
agcagcugucccuuaacaucag

SEQ ID NO: 308834 - RNA, 22 nt, Human
uauaguaaaauuuucauuuaug

SEQ ID NO: 308835 - RNA, 22 nt, Human
cuugggagacacaagaagacau

SEQ ID NO: 308836 - RNA, 22 nt, Human
aucuucaaagcacaucguuugu

SEQ ID NO: 308837 - RNA, 22 nt, Human
gcaaagguagccaaggagcuca

SEQ ID NO: 308838 - RNA, 23 nt, Human
aguacauucgaaaaauucuguga

SEQ ID NO: 308839 - RNA, 22 nt, Human
cugcuuccauaaauaaugugcu

SEQ ID NO: 308840 - RNA, 22 nt, Human
agggacacacuccaguguuauu

SEQ ID NO: 308841 - RNA, 22 nt, Human
ucaaaugcucuuugcagagagg

SEQ ID NO: 308842 - RNA, 22 nt, Human
ucaggcugccuaucagacugug

SEQ ID NO: 308843 - RNA, 22 nt, Human
uccaguggcacuggagacuaga

SEQ ID NO: 308844 - RNA, 22 nt, Human
ugggcagaguagcucagaagaa

SEQ ID NO: 308845 - RNA, 20 nt, Human
uuucacagucccuguuuccu

SEQ ID NO: 308846 - RNA, 22 nt, Human
cacacaugagucuccccauugg

SEQ ID NO: 308847 - RNA, 21 nt, Human
agagaagaggacuuucucaca

SEQ ID NO: 308848 - RNA, 22 nt, Human
acaaaugcaaguuuuaugucaa

SEQ ID NO: 308849 - RNA, 22 nt, Human
acaugucaauuuaguacucuua

SEQ ID NO: 308850 - RNA, 22 nt, Human
cuguggaaggccuguccugaaa

SEQ ID NO: 308851 - RNA, 22 nt, Human
acccuggguucccgcagcacca

SEQ ID NO: 308852 - RNA, 22 nt, Human
acaauauuguacccagaaguuu

SEQ ID NO: 308853 - RNA, 23 nt, Human
agcacagacuagaaaggucuuuc

SEQ ID NO: 308854 - RNA, 21 nt, Human
guauugcagaguuaugugcuc

SEQ ID NO: 308855 - RNA, 22 nt, Human
ucuggagcuuguuucagauggu

SEQ ID NO: 308856 - RNA, 22 nt, Human
ggccugcuuuccgagccugcag

SEQ ID NO: 308857 - RNA, 22 nt, Human
gguggccuccagggcauaggug

SEQ ID NO: 308858 - RNA, 22 nt, Human
cagcagcugggaaggaggcuga

SEQ ID NO: 308859 - RNA, 22 nt, Human
aucaaaguucguaacugauaac

SEQ ID NO: 308860 - RNA, 22 nt, Human
cauaauuugugguaguggggga

SEQ ID NO: 308861 - RNA, 22 nt, Human
aucacaaaggcugcuucaugau

SEQ ID NO: 308862 - RNA, 22 nt, Human
ucagaggucacacagcaaguuu

SEQ ID NO: 308863 - RNA, 22 nt, Human
ugggaggcuuccagaccuugcu

SEQ ID NO: 308864 - RNA, 22 nt, Human
agggccugagcuggcugaccuc

SEQ ID NO: 308865 - RNA, 22 nt, Human
augaaacagugaauuagucaag

SEQ ID NO: 308866 - RNA, 22 nt, Human
agggcugcccagugugagagcu

SEQ ID NO: 308867 - RNA, 17 nt, Human
ugcugccaagucccaac

SEQ ID NO: 308868 - RNA, 22 nt, Human
acuaaggaauaugacaaacuca

SEQ ID NO: 308869 - RNA, 22 nt, Human
ccugugucuuccccacuggugu

SEQ ID NO: 308870 - RNA, 22 nt, Human
auuugucugcuugcugccuucc

SEQ ID NO: 308871 - RNA, 22 nt, Human
uggcucagcauucacuggucuu

SEQ ID NO: 308872 - RNA, 22 nt, Human
uagugcuuaauaaauuucagaa

SEQ ID NO: 308873 - RNA, 22 nt, Human
gcauuuauuucuuuacugcauc

SEQ ID NO: 308874 - RNA, 22 nt, Human
gacuucuauuaauaccucuacu

SEQ ID NO: 308875 - RNA, 22 nt, Human
cugaagcaaaugaaacagcucu

SEQ ID NO: 308876 - RNA, 22 nt, Human
uuugacaucuaagaauucuuac

SEQ ID NO: 308877 - RNA, 22 nt, Human
gcacaauuauuuaugcaguaug

SEQ ID NO: 308878 - RNA, 22 nt, Human
uacauucagcaaaagaaugguu

SEQ ID NO: 308879 - RNA, 22 nt, Human
caggccuggguucaaaucccuu

SEQ ID NO: 308880 - RNA, 23 nt, Human
ugggccuggccucccaguccagc

SEQ ID NO: 308881 - RNA, 23 nt, Human
cuuuccuuucuuugacacccagc

SEQ ID NO: 308882 - RNA, 22 nt, Human
aaucuucacagagaaaauuagg

SEQ ID NO: 308883 - RNA, 22 nt, Human
augcaguaaaauaggagguaau

SEQ ID NO: 308884 - RNA, 22 nt, Human
gaacacauuucucugacuguag

SEQ ID NO: 308885 - RNA, 22 nt, Human
aaacucuggagauguuuaugca

SEQ ID NO: 308886 - RNA, 23 nt, Human
ccuccugggcacaggccugaugg

SEQ ID NO: 308887 - RNA, 22 nt, Human
gcugauguuuaguugauguuac

SEQ ID NO: 308888 - RNA, 22 nt, Human
cucagagcaaugaacaugcaaa

SEQ ID NO: 308889 - RNA, 22 nt, Human
ccacagcugaccgcaggugagc

SEQ ID NO: 308890 - RNA, 22 nt, Human
uuugaaaguucuucugacacua

SEQ ID NO: 308891 - RNA, 22 nt, Human
uacauaguauucacauuguuuu

SEQ ID NO: 308892 - RNA, 22 nt, Human
uuccaugaaagugaaauggagc

SEQ ID NO: 308893 - RNA, 22 nt, Human
cagagccaaaccucagggcccg

SEQ ID NO: 308894 - RNA, 22 nt, Human
gcugucugcaucucuagagcuu

SEQ ID NO: 308895 - RNA, 22 nt, Human
ugcuagaagauagcuagaagau

SEQ ID NO: 308896 - RNA, 22 nt, Human
caggaaagguagucacaaugua

SEQ ID NO: 308897 - RNA, 22 nt, Human
uuccauauuuguguggcaaaag

SEQ ID NO: 308898 - RNA, 18 nt, Human
auccuugaugagaggucu

SEQ ID NO: 308899 - RNA, 22 nt, Human
ccucccucuuucagucccacag

SEQ ID NO: 308900 - RNA, 18 nt, Human
agucucagcggaggagua

SEQ ID NO: 308901 - RNA, 22 nt, Human
cacugcuuucacaguuuguucc

SEQ ID NO: 308902 - RNA, 22 nt, Human
auaaacagcuccauuuagugcc

SEQ ID NO: 308903 - RNA, 22 nt, Human
uuucaguuguccuguuaauagc

SEQ ID NO: 308904 - RNA, 22 nt, Human
uuucucugcugccugugucgau

SEQ ID NO: 308905 - RNA, 22 nt, Human
aaauauagcaauuaugccuacu

SEQ ID NO: 308906 - RNA, 22 nt, Human
ucaaagucucugcuucuguaac

SEQ ID NO: 308907 - RNA, 21 nt, Human
ucagggcagcugcucuucaga

SEQ ID NO: 308908 - RNA, 22 nt, Human
auaagaaacauuauucuuucca

SEQ ID NO: 308909 - RNA, 22 nt, Human
uuuuccucugcaauaaaagcag

SEQ ID NO: 308910 - RNA, 22 nt, Human
auucaguucuaaggucagugcc

SEQ ID NO: 308911 - RNA, 20 nt, Human
caguccaggcuagaaaacaa

SEQ ID NO: 308912 - RNA, 22 nt, Human
aggagaaguaaggcuagaugau

SEQ ID NO: 308913 - RNA, 18 nt, Human
cuuucagauggauaugcu

SEQ ID NO: 308914 - RNA, 22 nt, Human
aacaaauguguggcaguguggg

SEQ ID NO: 308915 - RNA, 22 nt, Human
cugugugugucugcagcauacu

SEQ ID NO: 308916 - RNA, 22 nt, Human
agaauguagucuuggagauuua

SEQ ID NO: 308917 - RNA, 22 nt, Human
cuauacaucccaauuucagaga

SEQ ID NO: 308918 - RNA, 22 nt, Human
ggcagugacuguucagacgucc

SEQ ID NO: 308919 - RNA, 22 nt, Human
uucuucuugucugcccucacau

SEQ ID NO: 308920 - RNA, 22 nt, Human
gcuggcuuugcacugggugcau

SEQ ID NO: 308921 - RNA, 22 nt, Human
gagaagcaaucaguggccaccc

SEQ ID NO: 308922 - RNA, 22 nt, Human
uacaagagguauauagaaacag

SEQ ID NO: 308923 - RNA, 22 nt, Human
ucagugcuugacagcucuggga

SEQ ID NO: 308924 - RNA, 22 nt, Human
aaggcugauuagacugauagcu

SEQ ID NO: 308925 - RNA, 22 nt, Human
caagggcuucaaguggccaaga

SEQ ID NO: 308926 - RNA, 22 nt, Human
gggcugccaagccugccugccu

SEQ ID NO: 308927 - RNA, 22 nt, Human
agccugccuugggcugcuugag

SEQ ID NO: 308928 - RNA, 22 nt, Human
ccuggcugcuauagcagcaugu

SEQ ID NO: 308929 - RNA, 23 nt, Human
ugacacauuuccuuuccacugca

SEQ ID NO: 308930 - RNA, 22 nt, Human
ccuguguggaaaccgcaugacg

SEQ ID NO: 308931 - RNA, 22 nt, Human
aucuuucaaucaggaaaaaucu

SEQ ID NO: 308932 - RNA, 22 nt, Human
uucaagaugccagggacgcggc

SEQ ID NO: 308933 - RNA, 22 nt, Human
ggcugcucugccuuccagcugg

SEQ ID NO: 308934 - RNA, 22 nt, Human
ugcccacaggaagacaccagcg

SEQ ID NO: 308935 - RNA, 22 nt, Human
cuguccucuguccucagcagga

SEQ ID NO: 308936 - RNA, 22 nt, Human
acugggccuugccauggcagcc

SEQ ID NO: 308937 - RNA, 22 nt, Human
ggcaguggugggaggcucgcuc

SEQ ID NO: 308938 - RNA, 20 nt, Human
agucccuuuggucagguauu

SEQ ID NO: 308939 - RNA, 22 nt, Human
aaguauaagcuauucuucauga

SEQ ID NO: 308940 - RNA, 22 nt, Human
augcugggagugaagccccugg

SEQ ID NO: 308941 - RNA, 22 nt, Human
ugggcacaggggaauggaugaa

SEQ ID NO: 308942 - RNA, 22 nt, Human
acagcagcacuauugacauuuu

SEQ ID NO: 308943 - RNA, 22 nt, Human
cccucagcuucucccugcagcu

SEQ ID NO: 308944 - RNA, 21 nt, Human
acauucacaggauauuaucau

SEQ ID NO: 308945 - RNA, 22 nt, Human
aggcugaggcagguggaucacu

SEQ ID NO: 308946 - RNA, 22 nt, Human
cugugccuggggggcagagcug

SEQ ID NO: 308947 - RNA, 22 nt, Human
auuauucuuaugucaucauggc

SEQ ID NO: 308948 - RNA, 22 nt, Human
ucagagucauugcaaguagaag

SEQ ID NO: 308949 - RNA, 21 nt, Human
cauugucgacauuuuccccuc

SEQ ID NO: 308950 - RNA, 22 nt, Human
accugccuucucaaggacauga

SEQ ID NO: 308951 - RNA, 22 nt, Human
caguccugaggaagagcugcug

SEQ ID NO: 308952 - RNA, 22 nt, Human
cagacacagcaauucuguguug

SEQ ID NO: 308953 - RNA, 22 nt, Human
uagcuguguaagcuugguaaga

SEQ ID NO: 308954 - RNA, 22 nt, Human
gugccuggaacuggguaggcug

SEQ ID NO: 308955 - RNA, 22 nt, Human
augaguugaagcuacaagaggc

SEQ ID NO: 308956 - RNA, 19 nt, Human
ugagagugaggaaggcuuc

SEQ ID NO: 308957 - RNA, 22 nt, Human
uuuggacuuagccugcagaauu

SEQ ID NO: 308958 - RNA, 22 nt, Human
cccaugagauucugaauuuggc

SEQ ID NO: 308959 - RNA, 22 nt, Human
ucaguguugugcacauacaaaa

SEQ ID NO: 308960 - RNA, 22 nt, Human
aaauuucaagcaaaguagcuau

SEQ ID NO: 308961 - RNA, 22 nt, Human
gcucagaggcacgaccucuugg

SEQ ID NO: 308962 - RNA, 22 nt, Human
uccagggaaggugugaggcugg

SEQ ID NO: 308963 - RNA, 22 nt, Human
agagaaggaaagcugacauggg

SEQ ID NO: 308964 - RNA, 20 nt, Human
gcuuucuaugagauggacug

SEQ ID NO: 308965 - RNA, 22 nt, Human
aucugcuuccugggcuccauga

SEQ ID NO: 308966 - RNA, 22 nt, Human
uuauuaaugaguacaaguuauu

SEQ ID NO: 308967 - RNA, 22 nt, Human
ugcauuuccagauuucuggagu

SEQ ID NO: 308968 - RNA, 19 nt, Human
ggcugggucuggcagguuc

SEQ ID NO: 308969 - RNA, 20 nt, Human
caggccagagguuugauggc

SEQ ID NO: 308970 - RNA, 22 nt, Human
ggugcucaagagggcauccucu

SEQ ID NO: 308971 - RNA, 22 nt, Human
aggaagcucggagagggcaaau

SEQ ID NO: 308972 - RNA, 22 nt, Human
gagaagggcuugggagucaaca

SEQ ID NO: 308973 - RNA, 22 nt, Human
uguaauauuguagugacaguac

SEQ ID NO: 308974 - RNA, 22 nt, Human
uuagccauuaaauuacaaggug

SEQ ID NO: 308975 - RNA, 22 nt, Human
uguuagaauauuguaauauucg

SEQ ID NO: 308976 - RNA, 22 nt, Human
cuagccugggauuugaacuuau

SEQ ID NO: 308977 - RNA, 22 nt, Human
ucugcuguauuagguugaacug

SEQ ID NO: 308978 - RNA, 22 nt, Human
auuauaaagaacaugugugugg

SEQ ID NO: 308979 - RNA, 22 nt, Human
gauccuugcacuugacuuggca

SEQ ID NO: 308980 - RNA, 22 nt, Human
caggguggaauggaaugcuggc

SEQ ID NO: 308981 - RNA, 23 nt, Human
cauguacacacagcuguacagug

SEQ ID NO: 308982 - RNA, 22 nt, Human
uccugggguuuagagggaagug

SEQ ID NO: 308983 - RNA, 19 nt, Human
ccuggaggugaagguucuc

SEQ ID NO: 308984 - RNA, 22 nt, Human
uggcauuuaguugcguauugca

SEQ ID NO: 308985 - RNA, 22 nt, Human
ugguggccuugauggcaucugc

SEQ ID NO: 308986 - RNA, 22 nt, Human
ccagccagccuugaucugagua

SEQ ID NO: 308987 - RNA, 22 nt, Human
uuuacaaccucauauucugaug

SEQ ID NO: 308988 - RNA, 22 nt, Human
ucccagggacugggcuaggcuu

SEQ ID NO: 308989 - RNA, 22 nt, Human
acugugugacuguuauuacugu

SEQ ID NO: 308990 - RNA, 22 nt, Human
uggagcaggugggaugucguga

SEQ ID NO: 308991 - RNA, 22 nt, Human
acaaagguggaccauguggcuu

SEQ ID NO: 308992 - RNA, 22 nt, Human
gacagcagggacauguaggaag

SEQ ID NO: 308993 - RNA, 22 nt, Human
cacacuagucuauccauuagcu

SEQ ID NO: 308994 - RNA, 22 nt, Human
cuuugcauacaauuuuuagaaa

SEQ ID NO: 308995 - RNA, 22 nt, Human
cuguccccgcgaguccagagcu

SEQ ID NO: 308996 - RNA, 22 nt, Human
aucauucugauggucaaugcua

SEQ ID NO: 308997 - RNA, 22 nt, Human
cucucugcuguauccuuaggcu

SEQ ID NO: 308998 - RNA, 22 nt, Human
gaggugagaagggggucagaug

SEQ ID NO: 308999 - RNA, 22 nt, Human
aguuugaaauguuggcaauauu

SEQ ID NO: 309000 - RNA, 22 nt, Human
ccagugcuuccaggaauacggu

SEQ ID NO: 309001 - RNA, 22 nt, Human
gagcuggguguuuauuugccaa

SEQ ID NO: 309002 - RNA, 22 nt, Human
guugaaaguggagaaccugguu

SEQ ID NO: 309003 - RNA, 22 nt, Human
ccuggagcacauggcaggaggc

SEQ ID NO: 309004 - RNA, 22 nt, Human
ucugaggcccugcaggcagugu

SEQ ID NO: 309005 - RNA, 23 nt, Human
ugagcccaggaggucaaggcugc

SEQ ID NO: 309006 - RNA, 22 nt, Human
gggcaugguggcaggcaccugu

SEQ ID NO: 309007 - RNA, 22 nt, Human
auagaaaacagauguccuuaaa

SEQ ID NO: 309008 - RNA, 22 nt, Human
agcagccacagucugggacagg

SEQ ID NO: 309009 - RNA, 22 nt, Human
ugucucaggcccaagccaguaa

SEQ ID NO: 309010 - RNA, 22 nt, Human
caagggccuccaccuugcucgu

SEQ ID NO: 309011 - RNA, 22 nt, Human
uggagaugaauauguguaccug

SEQ ID NO: 309012 - RNA, 22 nt, Human
uugaagcacaaugucuuuuauc

SEQ ID NO: 309013 - RNA, 22 nt, Human
ugcauuucagaagaaaauucgg

SEQ ID NO: 309014 - RNA, 22 nt, Human
cuggguggcuguccagccagcc

SEQ ID NO: 309015 - RNA, 22 nt, Human
guggcugggcuccgagcggcuu

SEQ ID NO: 309016 - RNA, 22 nt, Human
ggcaguggcuccucucuacucc

SEQ ID NO: 309017 - RNA, 21 nt, Human
gagcucucaggcaagaagcag

SEQ ID NO: 309018 - RNA, 22 nt, Human
cucuggagcaccgggcuaucca

SEQ ID NO: 309019 - RNA, 22 nt, Human
ucuggcugcugcgugagugcuu

SEQ ID NO: 309020 - RNA, 21 nt, Human
uuugaaagcuacaucuauagc

SEQ ID NO: 309021 - RNA, 22 nt, Human
agcauuuaggagaauuugagaa

SEQ ID NO: 309022 - RNA, 22 nt, Human
gucauuccuauccauuugauac

SEQ ID NO: 309023 - RNA, 22 nt, Human
cucugcagaauuugagcugcuc

SEQ ID NO: 309024 - RNA, 19 nt, Human
auagucuuuccaauuauac

SEQ ID NO: 309025 - RNA, 22 nt, Human
acccaggagguggaggcugcag

SEQ ID NO: 309026 - RNA, 22 nt, Human
ugcuuuggaucuauuugcugag

SEQ ID NO: 309027 - RNA, 22 nt, Human
gcucacugcaaccucugcuucc

SEQ ID NO: 309028 - RNA, 22 nt, Human
cccauucccuuuacuguugcau

SEQ ID NO: 309029 - RNA, 22 nt, Human
gucccacaccuugaggggucuu

SEQ ID NO: 309030 - RNA, 22 nt, Human
auguacauuuagaucauuucug

SEQ ID NO: 309031 - RNA, 22 nt, Human
gcagugcugaucccauggcaga

SEQ ID NO: 309032 - RNA, 22 nt, Human
caaagaugucauugguaagaca

SEQ ID NO: 309033 - RNA, 20 nt, Human
gcuguucacauuauuaguag

SEQ ID NO: 309034 - RNA, 22 nt, Human
ucugggcugggagcguguggac

SEQ ID NO: 309035 - RNA, 22 nt, Human
gagguagccacagauagagacu

SEQ ID NO: 309036 - RNA, 22 nt, Human
uguguacagcaggauuucucaa

SEQ ID NO: 309037 - RNA, 22 nt, Human
aagguacaccaaaguucaaguu

SEQ ID NO: 309038 - RNA, 18 nt, Human
gguggccuugacuucucu

SEQ ID NO: 309039 - RNA, 22 nt, Human
gaaaagggcaagagagagggca

SEQ ID NO: 309040 - RNA, 18 nt, Human
ccucagggagagagacgc

SEQ ID NO: 309041 - RNA, 19 nt, Human
ucucuucucccugguuuua

SEQ ID NO: 309042 - RNA, 22 nt, Human
uggcucagauaauucaaggggc

SEQ ID NO: 309043 - RNA, 22 nt, Human
ggagaagguggcucagcaaagg

SEQ ID NO: 309044 - RNA, 17 nt, Human
agcagcuggguugaucu

SEQ ID NO: 309045 - RNA, 18 nt, Human
cauaauuuucuuucuuua

SEQ ID NO: 309046 - RNA, 21 nt, Human
ugucagaaauaagcaugugau

SEQ ID NO: 309047 - RNA, 22 nt, Human
ccuacucugagcgccuccgcau

SEQ ID NO: 309048 - RNA, 22 nt, Human
ggaguucacugugcaggcucug

SEQ ID NO: 309049 - RNA, 22 nt, Human
ggcuggccuguguggccgccac

SEQ ID NO: 309050 - RNA, 22 nt, Human
ugaugcuucacgcugaauaugc

SEQ ID NO: 309051 - RNA, 22 nt, Human
gcuggccaguguggugaccacc

SEQ ID NO: 309052 - RNA, 22 nt, Human
uggcacugggacagaugcucuc

SEQ ID NO: 309053 - RNA, 22 nt, Human
uagagcuggccgggacagcugg

SEQ ID NO: 309054 - RNA, 22 nt, Human
agagcagcacguuguccccaca

SEQ ID NO: 309055 - RNA, 22 nt, Human
cccugccccaggcggcuucacu

SEQ ID NO: 309056 - RNA, 18 nt, Human
aguggucuguuauaucau

SEQ ID NO: 309057 - RNA, 22 nt, Human
agcaccauugcaaauauggcag

SEQ ID NO: 309058 - RNA, 22 nt, Human
guggggcaguggccugggagca

SEQ ID NO: 309059 - RNA, 22 nt, Human
gugggugauguacuggaggcca

SEQ ID NO: 309060 - RNA, 22 nt, Human
ucuucucccaucuccaggcagg

SEQ ID NO: 309061 - RNA, 22 nt, Human
ggggcggggcucugagaagcau

SEQ ID NO: 309062 - RNA, 22 nt, Human
uggcucagaguucaucuuuuag

SEQ ID NO: 309063 - RNA, 22 nt, Human
uucugucaaagacuuuuucagg

SEQ ID NO: 309064 - RNA, 22 nt, Human
uuuaagagcuaguaugucauuu

SEQ ID NO: 309065 - RNA, 22 nt, Human
uuaucguacgcuucagaaauuu

SEQ ID NO: 309066 - RNA, 22 nt, Human
uuuuaaucaugcuucuaugucc

SEQ ID NO: 309067 - RNA, 22 nt, Human
uauuccuauuucuaaacauaug

SEQ ID NO: 309068 - RNA, 22 nt, Human
gagaaagggaacuuacagagug

SEQ ID NO: 309069 - RNA, 22 nt, Human
uuaugacauaugaguacaagua

SEQ ID NO: 309070 - RNA, 22 nt, Human
uauuuuguuaauaauccagucc

SEQ ID NO: 309071 - RNA, 22 nt, Human
gcugugcuugggaagaaucucu

SEQ ID NO: 309072 - RNA, 19 nt, Human
gcugugugaccuugggcaa

SEQ ID NO: 309073 - RNA, 22 nt, Human
gagagaagggacuucuacacuu

SEQ ID NO: 309074 - RNA, 22 nt, Human
augugaaaaauuucuuauuaca

SEQ ID NO: 309075 - RNA, 22 nt, Human
gcucaguguucaucuguaugca

SEQ ID NO: 309076 - RNA, 22 nt, Human
ugcugugcuggcggcagaggcc

SEQ ID NO: 309077 - RNA, 22 nt, Human
uucacagauguauuggaacucc

SEQ ID NO: 309078 - RNA, 21 nt, Human
ccugugugucugacugggcua

SEQ ID NO: 309079 - RNA, 22 nt, Human
uaguguuuaguacauaugcaua

SEQ ID NO: 309080 - RNA, 22 nt, Human
agcugucagugcugugccugua

SEQ ID NO: 309081 - RNA, 22 nt, Human
uuugaacaugcugcaugauaau

SEQ ID NO: 309082 - RNA, 22 nt, Human
gcauccagagguagccacugug

SEQ ID NO: 309083 - RNA, 22 nt, Human
acagggcagugucuugaaaaau

SEQ ID NO: 309084 - RNA, 21 nt, Human
acaguucaugauaacuccauc

SEQ ID NO: 309085 - RNA, 22 nt, Human
ccuuggagcggucagcacuggu

SEQ ID NO: 309086 - RNA, 20 nt, Human
ccugccuguguuugugauga

SEQ ID NO: 309087 - RNA, 19 nt, Human
gcagaugaugaggcugguc

SEQ ID NO: 309088 - RNA, 19 nt, Human
augucccaccgccccugag

SEQ ID NO: 309089 - RNA, 22 nt, Human
uugaaaggccuguuuauccagc

SEQ ID NO: 309090 - RNA, 22 nt, Human
guuugucuuaauuaggcaucga

SEQ ID NO: 309091 - RNA, 22 nt, Human
ucugggaacacacgucacuuca

SEQ ID NO: 309092 - RNA, 22 nt, Human
uggcagcagccauggaaggccc

SEQ ID NO: 309093 - RNA, 22 nt, Human
cacaugggcguaauguccaugg

SEQ ID NO: 309094 - RNA, 22 nt, Human
cugccugugcaugcagucagaa

SEQ ID NO: 309095 - RNA, 22 nt, Human
accaaggaguuugguauuuuag

SEQ ID NO: 309096 - RNA, 22 nt, Human
uggccugcuuucauuugaugcu

SEQ ID NO: 309097 - RNA, 22 nt, Human
cucugcaggggaggcaugcacu

SEQ ID NO: 309098 - RNA, 22 nt, Human
gcagagcucaugccugcaccuc

SEQ ID NO: 309099 - RNA, 22 nt, Human
gcucagaggagcaucauaagga

SEQ ID NO: 309100 - RNA, 22 nt, Human
gcaguguuaggaauaaaaauga

SEQ ID NO: 309101 - RNA, 22 nt, Human
agcuccugcuugacagaagagg

SEQ ID NO: 309102 - RNA, 23 nt, Human
ugaaacauuuaggguagaauuuc

SEQ ID NO: 309103 - RNA, 22 nt, Human
agcugccugggcuuguacaccu

SEQ ID NO: 309104 - RNA, 22 nt, Human
agggcccuccccgcucagggca

SEQ ID NO: 309105 - RNA, 22 nt, Human
gcucugcuguguuuguucagca

SEQ ID NO: 309106 - RNA, 22 nt, Human
agugaaauugcuguaagaggaa

SEQ ID NO: 309107 - RNA, 22 nt, Human
ccucuugccaaucagcuacaga

SEQ ID NO: 309108 - RNA, 22 nt, Human
auacauacguacauacguaugu

SEQ ID NO: 309109 - RNA, 22 nt, Human
ccuggccucagacagagggugg

SEQ ID NO: 309110 - RNA, 22 nt, Human
aacuuuaaggcuauaaauuaug

SEQ ID NO: 309111 - RNA, 22 nt, Human
gacagcaggagaucaugauaga

SEQ ID NO: 309112 - RNA, 22 nt, Human
ucuucagauaaagggagaguau

SEQ ID NO: 309113 - RNA, 22 nt, Human
cacauauuugaugaagcuuugu

SEQ ID NO: 309114 - RNA, 21 nt, Human
gcagagccugagguucuugag

SEQ ID NO: 309115 - RNA, 19 nt, Human
caagugaagccugggaugg

SEQ ID NO: 309116 - RNA, 22 nt, Human
aaaugaccagaauacaggcuuc

SEQ ID NO: 309117 - RNA, 22 nt, Human
uggcuggggagccccgacuccc

SEQ ID NO: 309118 - RNA, 21 nt, Human
uucuucuuggacuguuuuggc

SEQ ID NO: 309119 - RNA, 22 nt, Human
ucagggcauguauguuucuuua

SEQ ID NO: 309120 - RNA, 22 nt, Human
ugggccugggucuuugcugcca

SEQ ID NO: 309121 - RNA, 22 nt, Human
ucuguggauuuuaguguucaug

SEQ ID NO: 309122 - RNA, 22 nt, Human
auacuuuggggguuaguguaga

SEQ ID NO: 309123 - RNA, 22 nt, Human
aggucagaagugccagggaauu

SEQ ID NO: 309124 - RNA, 22 nt, Human
auuugcaaagucguaucuguga

SEQ ID NO: 309125 - RNA, 22 nt, Human
cuuucucuguguuucacaugcu

SEQ ID NO: 309126 - RNA, 22 nt, Human
ugucccauggacacaacuucuu

SEQ ID NO: 309127 - RNA, 22 nt, Human
aaaguguacuaugucaugaaca

SEQ ID NO: 309128 - RNA, 22 nt, Human
uaaugagaauucuuuuugggua

SEQ ID NO: 309129 - RNA, 22 nt, Human
acccucccauuuccauguagca

SEQ ID NO: 309130 - RNA, 22 nt, Human
cauucucaauaguagaugagua

SEQ ID NO: 309131 - RNA, 22 nt, Human
agccaaagaucagugugcaagu

SEQ ID NO: 309132 - RNA, 22 nt, Human
aggccagccucaggcagggacc

SEQ ID NO: 309133 - RNA, 22 nt, Human
aaaaaagauugaugguggaugc

SEQ ID NO: 309134 - RNA, 22 nt, Human
ucccagagcccaaguuggagag

SEQ ID NO: 309135 - RNA, 22 nt, Human
auucuucauuuacuguuacuug

SEQ ID NO: 309136 - RNA, 22 nt, Human
aagaggucauaccagauaaggg

SEQ ID NO: 309137 - RNA, 22 nt, Human
ugccagggugucaggagagcua

SEQ ID NO: 309138 - RNA, 22 nt, Human
uuccauaacugaccgaaugcau

SEQ ID NO: 309139 - RNA, 22 nt, Human
gaugcuggaagugcugaucuug

SEQ ID NO: 309140 - RNA, 22 nt, Human
cugagauggaguuucgcucuuc

SEQ ID NO: 309141 - RNA, 22 nt, Human
uuucuuccuuaccuuacuagag

SEQ ID NO: 309142 - RNA, 22 nt, Human
cuguuuauaaauagaggggagu

SEQ ID NO: 309143 - RNA, 22 nt, Human
gcugccugccuaguuccacagu

SEQ ID NO: 309144 - RNA, 21 nt, Human
auaaaguuuuacaggaaugca

SEQ ID NO: 309145 - RNA, 23 nt, Human
aggcagagccaaggucaaaaccc

SEQ ID NO: 309146 - RNA, 22 nt, Human
uaagaacagugacagccaacau

SEQ ID NO: 309147 - RNA, 22 nt, Human
cuggcugcgucugcucugacag

SEQ ID NO: 309148 - RNA, 19 nt, Human
acacagggaucagaggguu

SEQ ID NO: 309149 - RNA, 22 nt, Human
ccaguccacgucaagaagaggu

SEQ ID NO: 309150 - RNA, 22 nt, Human
agggugccugcugcagguucag

SEQ ID NO: 309151 - RNA, 19 nt, Human
ggcucucuuaaagcuguuu

SEQ ID NO: 309152 - RNA, 22 nt, Human
ggagaaggaagaaagcuacuau

SEQ ID NO: 309153 - RNA, 22 nt, Human
gccuggagaauuaaaaggaagg

SEQ ID NO: 309154 - RNA, 22 nt, Human
aaguugaagcaugaaccaaggu

SEQ ID NO: 309155 - RNA, 19 nt, Human
gcugcuggcucuggcugga

SEQ ID NO: 309156 - RNA, 22 nt, Human
aauaucagcacuuuugugguau

SEQ ID NO: 309157 - RNA, 22 nt, Human
agccuggaggaggaguugagca

SEQ ID NO: 309158 - RNA, 18 nt, Human
cugagggcagccccuggg

SEQ ID NO: 309159 - RNA, 22 nt, Human
gccuggcaggccuguuggggcu

SEQ ID NO: 309160 - RNA, 23 nt, Human
uggacgccgacuuuggaggcgcu

SEQ ID NO: 309161 - RNA, 22 nt, Human
uggccucucuaccaggcagccu

SEQ ID NO: 309162 - RNA, 22 nt, Human
uggcccugacuuggaggccuga

SEQ ID NO: 309163 - RNA, 22 nt, Human
agagcuguucagcagccagguu

SEQ ID NO: 309164 - RNA, 22 nt, Human
gaggggagacagggaaaucagu

SEQ ID NO: 309165 - RNA, 21 nt, Human
aaaggccauaaucacggagca

SEQ ID NO: 309166 - RNA, 22 nt, Human
aaaugcagguaguauuuauuuu

SEQ ID NO: 309167 - RNA, 20 nt, Human
gguagcagcugcugucaucc

SEQ ID NO: 309168 - RNA, 22 nt, Human
gcagccacucucauuccacgug

SEQ ID NO: 309169 - RNA, 22 nt, Human
caggcagggagcuggaaaggau

SEQ ID NO: 309170 - RNA, 22 nt, Human
ucuuuggauaucgcuagaccgu

SEQ ID NO: 309171 - RNA, 22 nt, Human
aagagguaaccauagcaaccac

SEQ ID NO: 309172 - RNA, 22 nt, Human
agccucugacugucagcaaggu

SEQ ID NO: 309173 - RNA, 22 nt, Human
gcugccagccaacuugcugugc

SEQ ID NO: 309174 - RNA, 22 nt, Human
cugucaguaggcucccaucauu

SEQ ID NO: 309175 - RNA, 22 nt, Human
uuagccaugcccuagaagagga

SEQ ID NO: 309176 - RNA, 22 nt, Human
caggaacaauguaagucucauu

SEQ ID NO: 309177 - RNA, 22 nt, Human
ugccuugcgggcguuucuguug

SEQ ID NO: 309178 - RNA, 19 nt, Human
agggaguuuauauuugcac

SEQ ID NO: 309179 - RNA, 22 nt, Human
cugccaaggcuggggaggacaa

SEQ ID NO: 309180 - RNA, 22 nt, Human
accacugggcgggcagccugcu

SEQ ID NO: 309181 - RNA, 22 nt, Human
acccagaggcggagguugcagu

SEQ ID NO: 309182 - RNA, 22 nt, Human
augaguaagaccauaauuuuug

SEQ ID NO: 309183 - RNA, 22 nt, Human
ccugggagguggagguugcagc

SEQ ID NO: 309184 - RNA, 22 nt, Human
acaacauucuuaaauacacuga

SEQ ID NO: 309185 - RNA, 22 nt, Human
ccucuccuugcacccgucccgc

SEQ ID NO: 309186 - RNA, 22 nt, Human
ggcugccucaaagcucaagcuc

SEQ ID NO: 309187 - RNA, 22 nt, Human
aagacugugucuauggcuacuc

SEQ ID NO: 309188 - RNA, 19 nt, Human
ggccuggauuuagggcucc

SEQ ID NO: 309189 - RNA, 21 nt, Human
gaaaggucuuaacuuacagag

SEQ ID NO: 309190 - RNA, 22 nt, Human
cagucucacccuggaggcccca

SEQ ID NO: 309191 - RNA, 22 nt, Human
cauuuccugucuggaggucaaa

SEQ ID NO: 309192 - RNA, 22 nt, Human
gugcucuguguauuaggauguc

SEQ ID NO: 309193 - RNA, 22 nt, Human
gcugugcagucuuuggugugcc

SEQ ID NO: 309194 - RNA, 21 nt, Human
ugcaugcuauguuuuuauuuc

SEQ ID NO: 309195 - RNA, 22 nt, Human
aucauuuuuaagagacucuucu

SEQ ID NO: 309196 - RNA, 22 nt, Human
cccuggagggcagacagaugcc

SEQ ID NO: 309197 - RNA, 22 nt, Human
cugagccacugcuuguucagug

SEQ ID NO: 309198 - RNA, 22 nt, Human
uuccagcaggcagacaggagau

SEQ ID NO: 309199 - RNA, 22 nt, Human
caagaaauuucuuaagaacuaa

SEQ ID NO: 309200 - RNA, 22 nt, Human
uuccuuaguugacugucuuagu

SEQ ID NO: 309201 - RNA, 22 nt, Human
cuguagcaaguuauucaauaaa

SEQ ID NO: 309202 - RNA, 22 nt, Human
agucauauguggcauuuucuaa

SEQ ID NO: 309203 - RNA, 22 nt, Human
cuggcagguccagcuggacuca

SEQ ID NO: 309204 - RNA, 22 nt, Human
aggccugggacgggagccguga

SEQ ID NO: 309205 - RNA, 22 nt, Human
agaccaagacuauaaugagagg

SEQ ID NO: 309206 - RNA, 22 nt, Human
auauuucuccaaauguuuucaa

SEQ ID NO: 309207 - RNA, 22 nt, Human
acacagggggcauucuaggagu

SEQ ID NO: 309208 - RNA, 22 nt, Human
cucugugauuuugugagccaga

SEQ ID NO: 309209 - RNA, 22 nt, Human
gcugucuccauagcuguguguc

SEQ ID NO: 309210 - RNA, 22 nt, Human
ucugggggcgaccagggacugc

SEQ ID NO: 309211 - RNA, 22 nt, Human
gacucguucauaguuccaauuu

SEQ ID NO: 309212 - RNA, 22 nt, Human
ugguggcuucugaggauggcga

SEQ ID NO: 309213 - RNA, 22 nt, Human
uaaaugugcacagguuagaagg

SEQ ID NO: 309214 - RNA, 22 nt, Human
cuucccugauaagagccucaga

SEQ ID NO: 309215 - RNA, 22 nt, Human
uggggugggcaugcgcuguccu

SEQ ID NO: 309216 - RNA, 22 nt, Human
gugccuggcacacagaaggcaa

SEQ ID NO: 309217 - RNA, 22 nt, Human
uccugggcuguggccccgggca

SEQ ID NO: 309218 - RNA, 22 nt, Human
cucuggagcgcugcuucccgcg

SEQ ID NO: 309219 - RNA, 22 nt, Human
uggccugcagcucucagggaag

SEQ ID NO: 309220 - RNA, 22 nt, Human
cagugauggauauggagaaguc

SEQ ID NO: 309221 - RNA, 22 nt, Human
ucugcaggccucgacaaggcca

SEQ ID NO: 309222 - RNA, 22 nt, Human
aauaguguuguucacucaggag

SEQ ID NO: 309223 - RNA, 22 nt, Human
ugucaccaugccagcuucugcc

SEQ ID NO: 309224 - RNA, 22 nt, Human
cuggggccacaacggcgcacgc

SEQ ID NO: 309225 - RNA, 22 nt, Human
cuucuugucaauuugccauugu

SEQ ID NO: 309226 - RNA, 22 nt, Human
aagguacaguuuuaagaauaag

SEQ ID NO: 309227 - RNA, 22 nt, Human
ggcucagguuuccuucccagcu

SEQ ID NO: 309228 - RNA, 20 nt, Human
cuuagaaauuuuuacccugg

SEQ ID NO: 309229 - RNA, 22 nt, Human
ucccagagacaucauuucuccg

SEQ ID NO: 309230 - RNA, 22 nt, Human
uuucaauguaugucuuucugag

SEQ ID NO: 309231 - RNA, 22 nt, Human
caaaugcuacuaauaggcaagu

SEQ ID NO: 309232 - RNA, 22 nt, Human
ugcugcacaauuggaaaguauc

SEQ ID NO: 309233 - RNA, 22 nt, Human
agugacucacuagcucucagug

SEQ ID NO: 309234 - RNA, 22 nt, Human
agagcuggguggacuuguaguu

SEQ ID NO: 309235 - RNA, 22 nt, Human
uuuccuucaucaucugagagcu

SEQ ID NO: 309236 - RNA, 22 nt, Human
ugccagaagauucucuaucaga

SEQ ID NO: 309237 - RNA, 22 nt, Human
cugggugguucuaacuguugau

SEQ ID NO: 309238 - RNA, 22 nt, Human
uuugaaaguccuaggagagucc

SEQ ID NO: 309239 - RNA, 22 nt, Human
aggugauguccacagcuugcag

SEQ ID NO: 309240 - RNA, 22 nt, Human
ucaccaggcuggaaugcagugg

SEQ ID NO: 309241 - RNA, 21 nt, Human
cgggcuggccgggcccucacc

SEQ ID NO: 309242 - RNA, 22 nt, Human
gggcagcucucacagcagccaa

SEQ ID NO: 309243 - RNA, 22 nt, Human
auuuugcacacuaugcagcuuu

SEQ ID NO: 309244 - RNA, 22 nt, Human
acacuaaugagaaaggaauuaa

SEQ ID NO: 309245 - RNA, 22 nt, Human
gcaaaugaguuguaacauaaaa

SEQ ID NO: 309246 - RNA, 22 nt, Human
acacugaagagcacuuucaaag

SEQ ID NO: 309247 - RNA, 22 nt, Human
agcagggccucuggcacugguc

SEQ ID NO: 309248 - RNA, 22 nt, Human
augucaaaucaguuuuaucaga

SEQ ID NO: 309249 - RNA, 20 nt, Human
gccuggaggcaaugggaaga

SEQ ID NO: 309250 - RNA, 22 nt, Human
ucugggcacugcugagccugua

SEQ ID NO: 309251 - RNA, 22 nt, Human
agaauccugaugaaaaggagag

SEQ ID NO: 309252 - RNA, 22 nt, Human
ugaaggcccuaucuccauauac

SEQ ID NO: 309253 - RNA, 22 nt, Human
aggaagccuggggcugcccucg

SEQ ID NO: 309254 - RNA, 22 nt, Human
ucuggcaggucaaucauucuuu

SEQ ID NO: 309255 - RNA, 22 nt, Human
ccuggguggcagagguugcagu

SEQ ID NO: 309256 - RNA, 22 nt, Human
cacagucacauaucuaugugug

SEQ ID NO: 309257 - RNA, 22 nt, Human
gccauuuucugucuuguuuauu

SEQ ID NO: 309258 - RNA, 22 nt, Human
gcaguggcaccgcuggcucugg

SEQ ID NO: 309259 - RNA, 22 nt, Human
ucaggccugcaggcuuccugga

SEQ ID NO: 309260 - RNA, 22 nt, Human
uguguuccuucgucuucccuuc

SEQ ID NO: 309261 - RNA, 22 nt, Human
gaggcagagucacaaagagucu

SEQ ID NO: 309262 - RNA, 22 nt, Human
ucucagucaguuuggacugugu

SEQ ID NO: 309263 - RNA, 22 nt, Human
agcagcuguacuuucaucuguu

SEQ ID NO: 309264 - RNA, 22 nt, Human
uccauugucuuugguccuagcc

SEQ ID NO: 309265 - RNA, 22 nt, Human
ucuggauggucagcucuuccug

SEQ ID NO: 309266 - RNA, 19 nt, Human
agccagggugagaaggagc

SEQ ID NO: 309267 - RNA, 22 nt, Human
uuucuagggcucuugucuucug

SEQ ID NO: 309268 - RNA, 22 nt, Human
uuccuuccauagcaaaacaugc

SEQ ID NO: 309269 - RNA, 22 nt, Human
aaauugcauuuuaaagguagau

SEQ ID NO: 309270 - RNA, 22 nt, Human
aaauauacuagaugaugaccca

SEQ ID NO: 309271 - RNA, 22 nt, Human
uaugcauagguaucuauacuca

SEQ ID NO: 309272 - RNA, 22 nt, Human
ucagagugaggcgucaacauga

SEQ ID NO: 309273 - RNA, 22 nt, Human
agagcuggacgucugagcccua

SEQ ID NO: 309274 - RNA, 22 nt, Human
agacaaagacagcaucucaggu

SEQ ID NO: 309275 - RNA, 22 nt, Human
agccaaggagugcagguggcuu

SEQ ID NO: 309276 - RNA, 22 nt, Human
ugagcuuccucccugcauccau

SEQ ID NO: 309277 - RNA, 22 nt, Human
ccacugaaggucaacauagagc

SEQ ID NO: 309278 - RNA, 22 nt, Human
ucaugcuuaaaagacacuugag

SEQ ID NO: 309279 - RNA, 22 nt, Human
agguaaggcuguaagcuaagcc

SEQ ID NO: 309280 - RNA, 22 nt, Human
ugggccuggagcccuggagagu

SEQ ID NO: 309281 - RNA, 20 nt, Human
ugcuccaucuaaagugauua

SEQ ID NO: 309282 - RNA, 22 nt, Human
aaugcacaaaaauuguauguaa

SEQ ID NO: 309283 - RNA, 22 nt, Human
aaaggagaaaacauacaggacu

SEQ ID NO: 309284 - RNA, 22 nt, Human
ggucauugucagagccuguacu

SEQ ID NO: 309285 - RNA, 22 nt, Human
gcugucaguuuuacccacagac

SEQ ID NO: 309286 - RNA, 22 nt, Human
acucucucacagcuuggcugau

SEQ ID NO: 309287 - RNA, 22 nt, Human
caguccuggagcccuucuuggc

SEQ ID NO: 309288 - RNA, 22 nt, Human
caggcacuucugcugcuugucu

SEQ ID NO: 309289 - RNA, 22 nt, Human
acucacuuuccauucaagcacc

SEQ ID NO: 309290 - RNA, 22 nt, Human
acagaggaaggcugagcugccc

SEQ ID NO: 309291 - RNA, 22 nt, Human
gacaaaggaucagagguuggga

SEQ ID NO: 309292 - RNA, 22 nt, Human
ucaggccacuucacaggugauu

SEQ ID NO: 309293 - RNA, 22 nt, Human
cagcagguauguuuguucagca

SEQ ID NO: 309294 - RNA, 22 nt, Human
auugaaagauauacuguucuca

SEQ ID NO: 309295 - RNA, 22 nt, Human
gucuucaacaauaacuaccacu

SEQ ID NO: 309296 - RNA, 22 nt, Human
ggccucugccucaucugggcac

SEQ ID NO: 309297 - RNA, 22 nt, Human
aggcagcaaagaaaugaugcug

SEQ ID NO: 309298 - RNA, 22 nt, Human
ucagcucucugggcucgaaccu

SEQ ID NO: 309299 - RNA, 22 nt, Human
ugaggaugacgauggcaauggc

SEQ ID NO: 309300 - RNA, 22 nt, Human
uggagccugagucagcggaggc

SEQ ID NO: 309301 - RNA, 22 nt, Human
caggguggcaggcaccauggcc

SEQ ID NO: 309302 - RNA, 22 nt, Human
uguguacucaauugagccauuu

SEQ ID NO: 309303 - RNA, 22 nt, Human
gagcuggcuaauacugacuuau

SEQ ID NO: 309304 - RNA, 22 nt, Human
agcugggguugcacacauuuug

SEQ ID NO: 309305 - RNA, 22 nt, Human
auauguguacgugcaguauaua

SEQ ID NO: 309306 - RNA, 22 nt, Human
uauccaaaguuucucagaaacu

SEQ ID NO: 309307 - RNA, 22 nt, Human
agggcaguucaacuucauagug

SEQ ID NO: 309308 - RNA, 22 nt, Human
augucaaacacaacaccagugg

SEQ ID NO: 309309 - RNA, 22 nt, Human
uguggcuguguccaccugcugc

SEQ ID NO: 309310 - RNA, 22 nt, Human
gagaggcuaugagguucugugu

SEQ ID NO: 309311 - RNA, 22 nt, Human
aucuagcaguguuauaauugga

SEQ ID NO: 309312 - RNA, 22 nt, Human
ugccugaguuuaacccucagag

SEQ ID NO: 309313 - RNA, 22 nt, Human
caggguccaucuuucaucacug

SEQ ID NO: 309314 - RNA, 22 nt, Human
gucucagugcccaaugccauaa

SEQ ID NO: 309315 - RNA, 22 nt, Human
agcacagauucugaagaguccu

SEQ ID NO: 309316 - RNA, 22 nt, Human
ggcugcagagcugggugggccu

SEQ ID NO: 309317 - RNA, 22 nt, Human
agcauugccugccuauugcuaa

SEQ ID NO: 309318 - RNA, 22 nt, Human
cuuuggcaaugaaacacaagaa

SEQ ID NO: 309319 - RNA, 22 nt, Human
ggagggagcauccccuugcuga

SEQ ID NO: 309320 - RNA, 22 nt, Human
cauaucccauuggccaggacau

SEQ ID NO: 309321 - RNA, 17 nt, Human
guccugggaggagagag

SEQ ID NO: 309322 - RNA, 22 nt, Human
cugcagggcagggccuccuggc

SEQ ID NO: 309323 - RNA, 22 nt, Human
caggugccgggaaugcagcaau

SEQ ID NO: 309324 - RNA, 22 nt, Human
aaggaggaauuucagggugaau

SEQ ID NO: 309325 - RNA, 22 nt, Human
ccaccagcuuugccacccugcu

SEQ ID NO: 309326 - RNA, 22 nt, Human
uuaaaguucauuaaaugagcca

SEQ ID NO: 309327 - RNA, 22 nt, Human
uucuucaaugugcccuguuuuc

SEQ ID NO: 309328 - RNA, 22 nt, Human
caggugggccgggguuuguucu

SEQ ID NO: 309329 - RNA, 22 nt, Human
uccuuuuuauaguuagagaaac

SEQ ID NO: 309330 - RNA, 22 nt, Human
caggcuugggagcagagccacu

SEQ ID NO: 309331 - RNA, 22 nt, Human
uggauaaacucacuguaaguug

SEQ ID NO: 309332 - RNA, 22 nt, Human
gggauggacuuggggacuccag

SEQ ID NO: 309333 - RNA, 20 nt, Human
uauaacaguguugggugugu

SEQ ID NO: 309334 - RNA, 22 nt, Human
auguuacagaaagcaaagauga

SEQ ID NO: 309335 - RNA, 23 nt, Human
uaguuauuuucucuguaauuugc

SEQ ID NO: 309336 - RNA, 22 nt, Human
cagaggcuaagaugagugggug

SEQ ID NO: 309337 - RNA, 22 nt, Human
cucaggauggaagccuacagga

SEQ ID NO: 309338 - RNA, 21 nt, Human
ugaaggagaggaccgagugcu

SEQ ID NO: 309339 - RNA, 22 nt, Human
cagagggagcccuccaggagca

SEQ ID NO: 309340 - RNA, 22 nt, Human
ccugucaggguuugccucagaa

SEQ ID NO: 309341 - RNA, 22 nt, Human
uauuccuauggccacugcuacu

SEQ ID NO: 309342 - RNA, 22 nt, Human
gagcugggaggacugggaacuu

SEQ ID NO: 309343 - RNA, 22 nt, Human
cagagcuggagcuugaauggag

SEQ ID NO: 309344 - RNA, 21 nt, Human
ucuguucaaggaacuacggau

SEQ ID NO: 309345 - RNA, 22 nt, Human
ugccugcucuuaccacucuccc

SEQ ID NO: 309346 - RNA, 22 nt, Human
ggcagugguuagaaacaugagc

SEQ ID NO: 309347 - RNA, 22 nt, Human
gccagagguucaacaacugucu

SEQ ID NO: 309348 - RNA, 22 nt, Human
cacaauuuguuuuaucaguauu

SEQ ID NO: 309349 - RNA, 23 nt, Human
aagcugccuucgcaguuggucug

SEQ ID NO: 309350 - RNA, 22 nt, Human
caaaggagguaaugggugugag

SEQ ID NO: 309351 - RNA, 22 nt, Human
agcuucuggaaggcaaggcuug

SEQ ID NO: 309352 - RNA, 22 nt, Human
gcugcucucucccuaaguuggg

SEQ ID NO: 309353 - RNA, 22 nt, Human
ucucccacuggccuuguaugau

SEQ ID NO: 309354 - RNA, 22 nt, Human
uggccucugugggagcugagca

SEQ ID NO: 309355 - RNA, 22 nt, Human
uggcuggggccugaauccugca

SEQ ID NO: 309356 - RNA, 22 nt, Human
agguaacacuacuuaguauacu

SEQ ID NO: 309357 - RNA, 22 nt, Human
cagggucuuauaaggccaauuu

SEQ ID NO: 309358 - RNA, 22 nt, Human
aaggcacugaaaaauugugugu

SEQ ID NO: 309359 - RNA, 22 nt, Human
cuuucacagcugugcuuaugau

SEQ ID NO: 309360 - RNA, 22 nt, Human
ccugcugugaaacuggcauaug

SEQ ID NO: 309361 - RNA, 22 nt, Human
agcugcucugauaaaccuacuu

SEQ ID NO: 309362 - RNA, 22 nt, Human
uucuggagaucugccuauggga

SEQ ID NO: 309363 - RNA, 22 nt, Human
uuuuagcacuaagugauaugcu

SEQ ID NO: 309364 - RNA, 22 nt, Human
gaggcaggcccugaaugaguca

SEQ ID NO: 309365 - RNA, 22 nt, Human
agucucugggcaugguugugac

SEQ ID NO: 309366 - RNA, 22 nt, Human
augcugugaaaaagaaggcuga

SEQ ID NO: 309367 - RNA, 22 nt, Human
cacacaugucucuccaugcucu

SEQ ID NO: 309368 - RNA, 22 nt, Human
ugcacuggggucccagcgcacg

SEQ ID NO: 309369 - RNA, 22 nt, Human
ugaaaaggguagaucccuaagu

SEQ ID NO: 309370 - RNA, 22 nt, Human
gaaaauguuuccuguuauuugc

SEQ ID NO: 309371 - RNA, 22 nt, Human
acaguacauaauccugagucug

SEQ ID NO: 309372 - RNA, 17 nt, Human
uuccucucacauuuuuu

SEQ ID NO: 309373 - RNA, 23 nt, Human
aaaugcagggucgcagguuacag

SEQ ID NO: 309374 - RNA, 22 nt, Human
ccauuuguucgcccagcuccaa

SEQ ID NO: 309375 - RNA, 22 nt, Human
ucccagagucuucuccuguaau

SEQ ID NO: 309376 - RNA, 22 nt, Human
ucccagggugcgccugcccucg

SEQ ID NO: 309377 - RNA, 22 nt, Human
uucauucaucucuaaaaugccu

SEQ ID NO: 309378 - RNA, 21 nt, Human
ucagaacaauuccaugccucc

SEQ ID NO: 309379 - RNA, 22 nt, Human
uuugaguugcuuauuuaauagg

SEQ ID NO: 309380 - RNA, 22 nt, Human
cuggagcucuccagagccccgu

SEQ ID NO: 309381 - RNA, 22 nt, Human
gggcucugggauucagagcaag

SEQ ID NO: 309382 - RNA, 22 nt, Human
uuucaaaauuuugcagugguaa

SEQ ID NO: 309383 - RNA, 22 nt, Human
acauuucuucccuuuagcagaa

SEQ ID NO: 309384 - RNA, 22 nt, Human
cagagcagagugauuguucugg

SEQ ID NO: 309385 - RNA, 22 nt, Human
guccagggaaauagcgacaggg

SEQ ID NO: 309386 - RNA, 22 nt, Human
auugucgcuuauuuaggugcuu

SEQ ID NO: 309387 - RNA, 22 nt, Human
ucucugggugauggcagggcac

SEQ ID NO: 309388 - RNA, 22 nt, Human
guuuucugauuagcaaaucuga

SEQ ID NO: 309389 - RNA, 22 nt, Human
cacaugaagagagucuaguaau

SEQ ID NO: 309390 - RNA, 22 nt, Human
cauugacaguucuuuaaguugc

SEQ ID NO: 309391 - RNA, 22 nt, Human
uuccggaagguucucuagaauu

SEQ ID NO: 309392 - RNA, 22 nt, Human
ugcccucauuauaagaggcuca

SEQ ID NO: 309393 - RNA, 17 nt, Human
uguagcuucuccuucuc

SEQ ID NO: 309394 - RNA, 22 nt, Human
acauuucacuguucacagcagg

SEQ ID NO: 309395 - RNA, 22 nt, Human
ccugggaggcggagguugcagu

SEQ ID NO: 309396 - RNA, 22 nt, Human
aaaaguaauugaugcaaucgua

SEQ ID NO: 309397 - RNA, 22 nt, Human
cccagggaaugacucuggccuu

SEQ ID NO: 309398 - RNA, 22 nt, Human
gccugccuggagcuugagguga

SEQ ID NO: 309399 - RNA, 22 nt, Human
acacaugcauaagccuucccuu

SEQ ID NO: 309400 - RNA, 22 nt, Human
ucagagugcagggaguagcagc

SEQ ID NO: 309401 - RNA, 22 nt, Human
uccuucaguucaauuaguccgu

SEQ ID NO: 309402 - RNA, 22 nt, Human
uucaacuauuaugaauaaaauu

SEQ ID NO: 309403 - RNA, 21 nt, Human
gcucccugcucagcuccuggg

SEQ ID NO: 309404 - RNA, 22 nt, Human
acagggcagaaauguugcaucu

SEQ ID NO: 309405 - RNA, 22 nt, Human
uacaguagaauuuuuaguaacu

SEQ ID NO: 309406 - RNA, 22 nt, Human
gggcucucaugaguguguggua

SEQ ID NO: 309407 - RNA, 20 nt, Human
gccuguccugagugucaugg

SEQ ID NO: 309408 - RNA, 22 nt, Human
cacauacaaugguguuauuugg

SEQ ID NO: 309409 - RNA, 22 nt, Human
ucucugaguauccugaacugcc

SEQ ID NO: 309410 - RNA, 22 nt, Human
acuauacauugaauguuaaggu

SEQ ID NO: 309411 - RNA, 22 nt, Human
uaacucugcuuguucucugagu

SEQ ID NO: 309412 - RNA, 22 nt, Human
ccuccagguguuacauaugacu

SEQ ID NO: 309413 - RNA, 22 nt, Human
gaagcuucguggcucuucaaau

SEQ ID NO: 309414 - RNA, 22 nt, Human
agauuuauguggucacacucag

SEQ ID NO: 309415 - RNA, 20 nt, Human
gcagaugagacucacagagg

SEQ ID NO: 309416 - RNA, 21 nt, Human
uucaagauauuuaaaaggugg

SEQ ID NO: 309417 - RNA, 22 nt, Human
uuuucauuguuacuaugagcua

SEQ ID NO: 309418 - RNA, 22 nt, Human
ccccuuccaggaagcagaaucg

SEQ ID NO: 309419 - RNA, 22 nt, Human
uauugacaauuugugaaacuau

SEQ ID NO: 309420 - RNA, 22 nt, Human
uaugauuuguagacauuugauu

SEQ ID NO: 309421 - RNA, 18 nt, Human
gccaggaagaggaaugug

SEQ ID NO: 309422 - RNA, 22 nt, Human
aagaaauuaaggaaugcaacga

SEQ ID NO: 309423 - RNA, 22 nt, Human
agagccagcaacucuagcccug

SEQ ID NO: 309424 - RNA, 19 nt, Human
gccugccuggguuucugag

SEQ ID NO: 309425 - RNA, 22 nt, Human
uauuauguagaguaaggguuaa

SEQ ID NO: 309426 - RNA, 22 nt, Human
gccuggcuccuaaggacuggcu

SEQ ID NO: 309427 - RNA, 22 nt, Human
aggucccaggcauagcuggucu

SEQ ID NO: 309428 - RNA, 22 nt, Human
cuugcaggauuuugcugcugua

SEQ ID NO: 309429 - RNA, 22 nt, Human
aggacuccauguguccuggaga

SEQ ID NO: 309430 - RNA, 22 nt, Human
ucccugagcucacauggcagga

SEQ ID NO: 309431 - RNA, 22 nt, Human
aggaggggcauagaaauguaau

SEQ ID NO: 309432 - RNA, 22 nt, Human
cucagggucugguccuuagauu

SEQ ID NO: 309433 - RNA, 22 nt, Human
uauucacauguacauaugcuca

SEQ ID NO: 309434 - RNA, 22 nt, Human
agaaguaggcagggcuguauca

SEQ ID NO: 309435 - RNA, 19 nt, Human
ugugaaagcuaguguucuu

SEQ ID NO: 309436 - RNA, 22 nt, Human
cugcucugcaaggcacagugau

SEQ ID NO: 309437 - RNA, 22 nt, Human
acucccacuccagaguagaagc

SEQ ID NO: 309438 - RNA, 22 nt, Human
gugguuuugccauuacaaguaa

SEQ ID NO: 309439 - RNA, 22 nt, Human
agaaucucuacucaaguacuug

SEQ ID NO: 309440 - RNA, 22 nt, Human
ucuuugcaucccuuccauaguu

SEQ ID NO: 309441 - RNA, 22 nt, Human
ggcugcuggcauugagguaggu

SEQ ID NO: 309442 - RNA, 22 nt, Human
ucagggcacauucugcaguggc

SEQ ID NO: 309443 - RNA, 22 nt, Human
ucaggucuuuugucuccuagaa

SEQ ID NO: 309444 - RNA, 22 nt, Human
cuggugggaggcaagguggaag

SEQ ID NO: 309445 - RNA, 22 nt, Human
ucucuucuaauuaggguccaug

SEQ ID NO: 309446 - RNA, 22 nt, Human
gcucucugccauaugaggauac

SEQ ID NO: 309447 - RNA, 21 nt, Human
gcagccacugccuucaacaau

SEQ ID NO: 309448 - RNA, 22 nt, Human
cagagaaaaaauccugcucuca

SEQ ID NO: 309449 - RNA, 22 nt, Human
aagagagaccaugggggacagg

SEQ ID NO: 309450 - RNA, 23 nt, Human
uggugccucagaagcagugggcu

SEQ ID NO: 309451 - RNA, 22 nt, Human
uugcugaagugaagguauguuu

SEQ ID NO: 309452 - RNA, 22 nt, Human
gcuuccucaccuucucuugcau

SEQ ID NO: 309453 - RNA, 22 nt, Human
uggaaagaauuccuaugguuca

SEQ ID NO: 309454 - RNA, 22 nt, Human
cugcugcugcuaucuacccagg

SEQ ID NO: 309455 - RNA, 22 nt, Human
cgcagcagccccgugguaggug

SEQ ID NO: 309456 - RNA, 22 nt, Human
agggccuggugaccuggguccu

SEQ ID NO: 309457 - RNA, 22 nt, Human
ugggcagaauugugguaguuaa

SEQ ID NO: 309458 - RNA, 22 nt, Human
caaauacuaaacauaagauuuu

SEQ ID NO: 309459 - RNA, 22 nt, Human
gaagcccagggcguggccgggc

SEQ ID NO: 309460 - RNA, 22 nt, Human
cugagccaaaaagcagagcuug

SEQ ID NO: 309461 - RNA, 22 nt, Human
uggccugggcaugaagcaucgu

SEQ ID NO: 309462 - RNA, 20 nt, Human
ucuguucaaaucuuaguucc

SEQ ID NO: 309463 - RNA, 19 nt, Human
ugccagcauuaggcugaag

SEQ ID NO: 309464 - RNA, 22 nt, Human
gaaaugcauaaucuuaguagau

SEQ ID NO: 309465 - RNA, 22 nt, Human
gcaggcaguuugcuuuucccuc

SEQ ID NO: 309466 - RNA, 22 nt, Human
augugucaauuuucaaaugcuu

SEQ ID NO: 309467 - RNA, 22 nt, Human
cuucagaagccugcagccuuug

SEQ ID NO: 309468 - RNA, 22 nt, Human
ccagagcugcauccagcagguu

SEQ ID NO: 309469 - RNA, 22 nt, Human
ccugccagugaagcugacgggc

SEQ ID NO: 309470 - RNA, 22 nt, Human
uaagaacauuuucggaaagaua

SEQ ID NO: 309471 - RNA, 22 nt, Human
cagguaagagacggauuggccc

SEQ ID NO: 309472 - RNA, 18 nt, Human
ccauuucaugauuauuac

SEQ ID NO: 309473 - RNA, 22 nt, Human
cagcccuggugagguuggcuau

SEQ ID NO: 309474 - RNA, 22 nt, Human
cagagguagaaggcaugcagug

SEQ ID NO: 309475 - RNA, 22 nt, Human
aggcacugugcugaugucuuau

SEQ ID NO: 309476 - RNA, 22 nt, Human
cuggcucaauuuguacugcugu

SEQ ID NO: 309477 - RNA, 22 nt, Human
agauggaguuaguaccagaguc

SEQ ID NO: 309478 - RNA, 22 nt, Human
uccauuuacuauucucauaucg

SEQ ID NO: 309479 - RNA, 22 nt, Human
caguggcugugaccagggaccu

SEQ ID NO: 309480 - RNA, 17 nt, Human
uggagcugcguguguuc

SEQ ID NO: 309481 - RNA, 22 nt, Human
uggugcaagucucugaggaggg

SEQ ID NO: 309482 - RNA, 22 nt, Human
gcuuuuucaaaugaaagcuggu

SEQ ID NO: 309483 - RNA, 22 nt, Human
ccuucugcuggucaucccagug

SEQ ID NO: 309484 - RNA, 22 nt, Human
guacacauuaugcuucucuaaa

SEQ ID NO: 309485 - RNA, 17 nt, Human
gcagccagugcagcagg

SEQ ID NO: 309486 - RNA, 22 nt, Human
gcucccaguucccaaagugacc

SEQ ID NO: 309487 - RNA, 22 nt, Human
ucacagacacagggagaagcau

SEQ ID NO: 309488 - RNA, 22 nt, Human
cccuugcacauuugucuuuaau

SEQ ID NO: 309489 - RNA, 22 nt, Human
ucugucacaauuugcuuacucu

SEQ ID NO: 309490 - RNA, 22 nt, Human
agucaguggcuccgagccuggu

SEQ ID NO: 309491 - RNA, 22 nt, Human
gagcuggggcggauacucagcu

SEQ ID NO: 309492 - RNA, 21 nt, Human
uccuucaguucugcacuuucu

SEQ ID NO: 309493 - RNA, 22 nt, Human
uuaaacaguguuucaugugggg

SEQ ID NO: 309494 - RNA, 17 nt, Human
uccuucagggccucaca

SEQ ID NO: 309495 - RNA, 22 nt, Human
agagggagugaaauggaauaga

SEQ ID NO: 309496 - RNA, 22 nt, Human
guuuacauauuuuaauugguga

SEQ ID NO: 309497 - RNA, 22 nt, Human
agccuccacagaugcaaagggc

SEQ ID NO: 309498 - RNA, 22 nt, Human
aaauguuucuacuugugagcau

SEQ ID NO: 309499 - RNA, 22 nt, Human
uugcaagauguuaccauuguua

SEQ ID NO: 309500 - RNA, 22 nt, Human
uggccuggggaagaccaugggc

SEQ ID NO: 309501 - RNA, 22 nt, Human
uaucuuugcaaauaucucuaag

SEQ ID NO: 309502 - RNA, 22 nt, Human
gacucugcuacaggccgagguu

SEQ ID NO: 309503 - RNA, 22 nt, Human
agaaaguucacugguauauuuu

SEQ ID NO: 309504 - RNA, 21 nt, Human
gcagcagaggcuugacagaca

SEQ ID NO: 309505 - RNA, 22 nt, Human
ccugacgaaaggcgugcuggag

SEQ ID NO: 309506 - RNA, 22 nt, Human
acucugugugaguagagccugu

SEQ ID NO: 309507 - RNA, 17 nt, Human
ccuuucucuuucaucuc

SEQ ID NO: 309508 - RNA, 22 nt, Human
ccuuucucuuugcugaucaugu

SEQ ID NO: 309509 - RNA, 22 nt, Human
uccucugcuggaagggcaagag

SEQ ID NO: 309510 - RNA, 22 nt, Human
uucaggagcuggcugcgaagga

SEQ ID NO: 309511 - RNA, 22 nt, Human
agggcagagcugucuaaauggc

SEQ ID NO: 309512 - RNA, 22 nt, Human
ggcucaggccuguaauccuagc

SEQ ID NO: 309513 - RNA, 22 nt, Human
aaguccaucucugccccacaca

SEQ ID NO: 309514 - RNA, 22 nt, Human
aauauaauuuuauuccuagagu

SEQ ID NO: 309515 - RNA, 19 nt, Human
gccugggaugggcagaacu

SEQ ID NO: 309516 - RNA, 22 nt, Human
cauuuagagucuugcaauuuua

SEQ ID NO: 309517 - RNA, 22 nt, Human
ugcagaggagcuggaaggcugg

SEQ ID NO: 309518 - RNA, 20 nt, Human
gcacugaaauucaauguuug

SEQ ID NO: 309519 - RNA, 22 nt, Human
acaggggauugauuggaagucu

SEQ ID NO: 309520 - RNA, 22 nt, Human
gggcuugcugauuugggcagga

SEQ ID NO: 309521 - RNA, 22 nt, Human
gauuucaaagguucugcaugcc

SEQ ID NO: 309522 - RNA, 22 nt, Human
aagcuggcaauuaucaaaacug

SEQ ID NO: 309523 - RNA, 22 nt, Human
ggcaccaggaucagucugucau

SEQ ID NO: 309524 - RNA, 22 nt, Human
acugugugcccugacgccaggg

SEQ ID NO: 309525 - RNA, 22 nt, Human
gaaucucaggaagaucucugca

SEQ ID NO: 309526 - RNA, 22 nt, Human
gcuguucacagacucugcucug

SEQ ID NO: 309527 - RNA, 21 nt, Human
ucagaguguguuacagcaagc

SEQ ID NO: 309528 - RNA, 22 nt, Human
uauugaugcuuggauugggcca

SEQ ID NO: 309529 - RNA, 22 nt, Human
aaguguguauuguuuaugcugc

SEQ ID NO: 309530 - RNA, 22 nt, Human
gcucugucauuuugcagacacu

SEQ ID NO: 309531 - RNA, 21 nt, Human
aagccucaagcagaagacaga

SEQ ID NO: 309532 - RNA, 22 nt, Human
aguggcaguagaugagcugguu

SEQ ID NO: 309533 - RNA, 22 nt, Human
ucccagcagggccgaccagccu

SEQ ID NO: 309534 - RNA, 22 nt, Human
ggcugaaacagauuucaagaca

SEQ ID NO: 309535 - RNA, 20 nt, Human
ggcaccaggcuaggauugga

SEQ ID NO: 309536 - RNA, 22 nt, Human
guggugcaggccagcaggggcg

SEQ ID NO: 309537 - RNA, 22 nt, Human
uccuugaaaggggcugcagggc

SEQ ID NO: 309538 - RNA, 22 nt, Human
agcaggcuccuuccuucucugg

SEQ ID NO: 309539 - RNA, 22 nt, Human
uguguuuuacaaauucucuuaa

SEQ ID NO: 309540 - RNA, 22 nt, Human
cacagggcagagaccugggugc

SEQ ID NO: 309541 - RNA, 22 nt, Human
ucccaggguccucuucuggaau

SEQ ID NO: 309542 - RNA, 22 nt, Human
ggugcugguucaggguggcugu

SEQ ID NO: 309543 - RNA, 22 nt, Human
auacauguucguguacauguuc

SEQ ID NO: 309544 - RNA, 22 nt, Human
ucucaguguuguucugcagaug

SEQ ID NO: 309545 - RNA, 22 nt, Human
gcuuccuuauuguugccauagu

SEQ ID NO: 309546 - RNA, 22 nt, Human
cugaaaauguuacacaggaaga

SEQ ID NO: 309547 - RNA, 22 nt, Human
guggccugucagaagccguggg

SEQ ID NO: 309548 - RNA, 22 nt, Human
gcacugcagguggguggagagg

SEQ ID NO: 309549 - RNA, 22 nt, Human
ucuacccagagcuaugaccuga

SEQ ID NO: 309550 - RNA, 22 nt, Human
ggcagcacugcagcuuguuggg

SEQ ID NO: 309551 - RNA, 22 nt, Human
auccuugaacuuagacacuagg

SEQ ID NO: 309552 - RNA, 22 nt, Human
aggaaagggguagguguggacg

SEQ ID NO: 309553 - RNA, 22 nt, Human
ugccacccagccaggaguggga

SEQ ID NO: 309554 - RNA, 22 nt, Human
gccucccuguucuuccacaaua

SEQ ID NO: 309555 - RNA, 22 nt, Human
ucaggcugaggucaucugcauc

SEQ ID NO: 309556 - RNA, 22 nt, Human
agcugcuacugcucugccagag

SEQ ID NO: 309557 - RNA, 22 nt, Human
gcagguggauuaucagaagugc

SEQ ID NO: 309558 - RNA, 22 nt, Human
gcaggccagcugugcagauggg

SEQ ID NO: 309559 - RNA, 22 nt, Human
uucacauuauaaucaguucugc

SEQ ID NO: 309560 - RNA, 22 nt, Human
cuuccucugcggcgccgggcgc

SEQ ID NO: 309561 - RNA, 22 nt, Human
gcuguccaugucuggccucagu

SEQ ID NO: 309562 - RNA, 22 nt, Human
aaaugcacagguuuuaaauccu

SEQ ID NO: 309563 - RNA, 22 nt, Human
cacauggggcgcugcauuggcc

SEQ ID NO: 309564 - RNA, 22 nt, Human
ccagcucuuggugcacuuacau

SEQ ID NO: 309565 - RNA, 22 nt, Human
gcccagaguucaaggcugcagu

SEQ ID NO: 309566 - RNA, 22 nt, Human
uggcagcacuugaacuugagcc

SEQ ID NO: 309567 - RNA, 22 nt, Human
ucugcaggacugaggccuguuu

SEQ ID NO: 309568 - RNA, 22 nt, Human
ccuggcuguggcggugcucuca

SEQ ID NO: 309569 - RNA, 22 nt, Human
gaggcagcaugguaccuuggag

SEQ ID NO: 309570 - RNA, 22 nt, Human
ggccccuggcaccaggcugauu

SEQ ID NO: 309571 - RNA, 22 nt, Human
agagaugaaaaguggagacugg

SEQ ID NO: 309572 - RNA, 22 nt, Human
aggcagcccacaggacacagga

SEQ ID NO: 309573 - RNA, 22 nt, Human
acagugucuccugguacccagu

SEQ ID NO: 309574 - RNA, 22 nt, Human
guguaugauuucaaauggcuag

SEQ ID NO: 309575 - RNA, 22 nt, Human
gaaaauguuagcuucauaguca

SEQ ID NO: 309576 - RNA, 22 nt, Human
ugcagaagaaaacagcugugug

SEQ ID NO: 309577 - RNA, 22 nt, Human
ucucugucugagccuggcagac

SEQ ID NO: 309578 - RNA, 22 nt, Human
uacauuuauaaggcuucucugu

SEQ ID NO: 309579 - RNA, 22 nt, Human
cuggcugcaggaugaggcugcc

SEQ ID NO: 309580 - RNA, 22 nt, Human
ugugugccugagccgugccugg

SEQ ID NO: 309581 - RNA, 22 nt, Human
caguagcagggauuauuuuagg

SEQ ID NO: 309582 - RNA, 22 nt, Human
gaaagggcaugggcaugacaac

SEQ ID NO: 309583 - RNA, 22 nt, Human
gagagugucgggggccccagga

SEQ ID NO: 309584 - RNA, 22 nt, Human
cuggaagguuccucccagcucc

SEQ ID NO: 309585 - RNA, 22 nt, Human
aggaaaaaccuguuaaugguag

SEQ ID NO: 309586 - RNA, 21 nt, Human
gccagggaagagaguuggcug

SEQ ID NO: 309587 - RNA, 17 nt, Human
uucucuuccuggauagu

SEQ ID NO: 309588 - RNA, 19 nt, Human
uggaacaaacugcaaugac

SEQ ID NO: 309589 - RNA, 22 nt, Human
accccagcccugcuucugggag

SEQ ID NO: 309590 - RNA, 22 nt, Human
gagcagcuuaugucaagccaga

SEQ ID NO: 309591 - RNA, 22 nt, Human
ucaggcagaggauggggagcgu

SEQ ID NO: 309592 - RNA, 22 nt, Human
cacaugcauaaggauaauuacu

SEQ ID NO: 309593 - RNA, 23 nt, Human
gaguguucauagcaggcucuugc

SEQ ID NO: 309594 - RNA, 22 nt, Human
uucucucauucaaauuaaagug

SEQ ID NO: 309595 - RNA, 22 nt, Human
agcuggggcauuuauccacuaa

SEQ ID NO: 309596 - RNA, 22 nt, Human
ggaaggaggggcaaagcaguuc

SEQ ID NO: 309597 - RNA, 17 nt, Human
ggugagaccucccacuc

SEQ ID NO: 309598 - RNA, 18 nt, Human
cucucugggugaggacaa

SEQ ID NO: 309599 - RNA, 22 nt, Human
cuggcagcuucaggacacucgg

SEQ ID NO: 309600 - RNA, 22 nt, Human
uaccuugggguuuuguugcucu

SEQ ID NO: 309601 - RNA, 22 nt, Human
uccagggaugccagccauguug

SEQ ID NO: 309602 - RNA, 15 nt, Human
uucaggauaugacuc

SEQ ID NO: 309603 - RNA, 21 nt, Human
cuguggaagggaacuagaggg

SEQ ID NO: 309604 - RNA, 22 nt, Human
guuauugcaguauagaggucua

SEQ ID NO: 309605 - RNA, 22 nt, Human
cucagaaguucagccuagagua

SEQ ID NO: 309606 - RNA, 22 nt, Human
agcugcugguuuaagggauggg

SEQ ID NO: 309607 - RNA, 22 nt, Human
uguguucuggaaagcucacuga

SEQ ID NO: 309608 - RNA, 22 nt, Human
agcagccaggaaucugcagagc

SEQ ID NO: 309609 - RNA, 22 nt, Human
uccuugaagcaacgugcagaca

SEQ ID NO: 309610 - RNA, 22 nt, Human
uggccuggaaaaaugcagaugg

SEQ ID NO: 309611 - RNA, 19 nt, Human
uucacaauuaugaaauuag

SEQ ID NO: 309612 - RNA, 22 nt, Human
cucaggggaccuggcuccgagu

SEQ ID NO: 309613 - RNA, 22 nt, Human
uuuucguuuauuugacauguaa

SEQ ID NO: 309614 - RNA, 22 nt, Human
gugcagcugugugagagcucca

SEQ ID NO: 309615 - RNA, 22 nt, Human
auucucuuuguauaacaucuug

SEQ ID NO: 309616 - RNA, 22 nt, Human
gccagggcucgcggucccucgu

SEQ ID NO: 309617 - RNA, 22 nt, Human
ccagagccucgcccggagccuc

SEQ ID NO: 309618 - RNA, 22 nt, Human
uuaguaauguguuaauaugaau

SEQ ID NO: 309619 - RNA, 22 nt, Human
gggagccuugggagugccagcc

SEQ ID NO: 309620 - RNA, 22 nt, Human
uucaaacaaaacuguucccaua

SEQ ID NO: 309621 - RNA, 22 nt, Human
acagaagagcacauuuaguaug

SEQ ID NO: 309622 - RNA, 22 nt, Human
cagggccuccuaaggcaucuaa

SEQ ID NO: 309623 - RNA, 20 nt, Human
cugccuggaggccucuaccu

SEQ ID NO: 309624 - RNA, 22 nt, Human
agccuauuccaggaugagcuca

SEQ ID NO: 309625 - RNA, 22 nt, Human
gagucaguaauggauaugucau

SEQ ID NO: 309626 - RNA, 22 nt, Human
agaugaagauaucugcaggggc

SEQ ID NO: 309627 - RNA, 23 nt, Human
cacaccaggagccgucugggcca

SEQ ID NO: 309628 - RNA, 22 nt, Human
uuccuggugguggugacagcac

SEQ ID NO: 309629 - RNA, 17 nt, Human
aggaaacauuuucuuuc

SEQ ID NO: 309630 - RNA, 22 nt, Human
ccuggaagauucaccacuacca

SEQ ID NO: 309631 - RNA, 22 nt, Human
ccagcuccaggacugggagcug

SEQ ID NO: 309632 - RNA, 22 nt, Human
agccuggaccaggggccucaga

SEQ ID NO: 309633 - RNA, 22 nt, Human
gucaggaugggcagccaaacua

SEQ ID NO: 309634 - RNA, 22 nt, Human
aaggccagaguacuagaggcug

SEQ ID NO: 309635 - RNA, 22 nt, Human
agccuucauaaucuugggcuuu

SEQ ID NO: 309636 - RNA, 22 nt, Human
acauacuuaugcuaaaaauaua

SEQ ID NO: 309637 - RNA, 22 nt, Human
gaugaagccugacuucucggug

SEQ ID NO: 309638 - RNA, 22 nt, Human
gcugccuucccaggccuuugcu

SEQ ID NO: 309639 - RNA, 22 nt, Human
ggaggagacccugugucaguuu

SEQ ID NO: 309640 - RNA, 20 nt, Human
ucccuggaggugguggcauc

SEQ ID NO: 309641 - RNA, 22 nt, Human
cuccaguaucuguaggaaaagg

SEQ ID NO: 309642 - RNA, 22 nt, Human
gagacacaggugguuccuguca

SEQ ID NO: 309643 - RNA, 22 nt, Human
ggaagaagggucauuggcagcc

SEQ ID NO: 309644 - RNA, 22 nt, Human
uguauacauuuaacuagauaga

SEQ ID NO: 309645 - RNA, 22 nt, Human
uuguuucagcuguaugcuaugu

SEQ ID NO: 309646 - RNA, 22 nt, Human
auauucuucuuguucagacuau

SEQ ID NO: 309647 - RNA, 22 nt, Human
aagaacuuccuaauauauuuuc

SEQ ID NO: 309648 - RNA, 22 nt, Human
accccagaggcggaggcugcag

SEQ ID NO: 309649 - RNA, 22 nt, Human
cuucucucccuggcacucagac

SEQ ID NO: 309650 - RNA, 22 nt, Human
agaggaugguugaggaagaccu

SEQ ID NO: 309651 - RNA, 22 nt, Human
cccagacauaacagcagagagg

SEQ ID NO: 309652 - RNA, 22 nt, Human
uguuuuuaaauaaugauagaaa

SEQ ID NO: 309653 - RNA, 22 nt, Human
uucauucauuacgugccaggca

SEQ ID NO: 309654 - RNA, 22 nt, Human
aagcccagcugaaagcauuuuu

SEQ ID NO: 309655 - RNA, 22 nt, Human
aaguucaaggaagccuccaguu

SEQ ID NO: 309656 - RNA, 20 nt, Human
uaacagaaguagaagugggu

SEQ ID NO: 309657 - RNA, 22 nt, Human
gagggacagcuaaagagaaauu

SEQ ID NO: 309658 - RNA, 22 nt, Human
uaacacauaucuacaacaugug

SEQ ID NO: 309659 - RNA, 23 nt, Human
gcccaugcuguugggcccgagca

SEQ ID NO: 309660 - RNA, 22 nt, Human
ucaaucacguguuccauguucu

SEQ ID NO: 309661 - RNA, 22 nt, Human
acaugauuuuuaaagagauaau

SEQ ID NO: 309662 - RNA, 22 nt, Human
ggcucagacucccaggcccucu

SEQ ID NO: 309663 - RNA, 22 nt, Human
aaaguguagagacuuuggaacc

SEQ ID NO: 309664 - RNA, 22 nt, Human
cugaagccaugugcucacuggu

SEQ ID NO: 309665 - RNA, 22 nt, Human
auuugagaugguaaauaacuuu

SEQ ID NO: 309666 - RNA, 20 nt, Human
aauguauauuuuaugccagg

SEQ ID NO: 309667 - RNA, 22 nt, Human
cagauggccagaggcagcugca

SEQ ID NO: 309668 - RNA, 22 nt, Human
agggccagagucuguguagaua

SEQ ID NO: 309669 - RNA, 22 nt, Human
gucccuggaucugggacagcug

SEQ ID NO: 309670 - RNA, 23 nt, Human
agagaaagggauaacacguugaa

SEQ ID NO: 309671 - RNA, 22 nt, Human
uauugacaauaggcaacugagg

SEQ ID NO: 309672 - RNA, 22 nt, Human
augacacuuggugauacuuugu

SEQ ID NO: 309673 - RNA, 22 nt, Human
cagaccuggaaaacaggcuugc

SEQ ID NO: 309674 - RNA, 22 nt, Human
cuguaugaacccauauacuuau

SEQ ID NO: 309675 - RNA, 23 nt, Human
gcugagguacauuuacaggaaga

SEQ ID NO: 309676 - RNA, 22 nt, Human
cagggcacaguuauggaggugg

SEQ ID NO: 309677 - RNA, 18 nt, Human
cucagggcaucagucugg

SEQ ID NO: 309678 - RNA, 22 nt, Human
gccacaugcaauugcagcacgu

SEQ ID NO: 309679 - RNA, 23 nt, Human
uucaagauacgguuuccaggcug

SEQ ID NO: 309680 - RNA, 19 nt, Human
gaaggggaagguggguacc

SEQ ID NO: 309681 - RNA, 22 nt, Human
ugcuugugagaguuuuuucaga

SEQ ID NO: 309682 - RNA, 22 nt, Human
ugucccagguccuagaugacca

SEQ ID NO: 309683 - RNA, 22 nt, Human
ggccugcuauuggugggcagac

SEQ ID NO: 309684 - RNA, 22 nt, Human
ccagccccgggaaccuggccgu

SEQ ID NO: 309685 - RNA, 22 nt, Human
auacaacuuuaucuguaaugag

SEQ ID NO: 309686 - RNA, 22 nt, Human
aggcucagcaucugauucauau

SEQ ID NO: 309687 - RNA, 22 nt, Human
cugggcacaggggagcagaguc

SEQ ID NO: 309688 - RNA, 22 nt, Human
gaggcugguaggaaaggaaaca

SEQ ID NO: 309689 - RNA, 22 nt, Human
acagaaauuagcagugaguuua

SEQ ID NO: 309690 - RNA, 22 nt, Human
uguguacuugaaagggcagguc

SEQ ID NO: 309691 - RNA, 22 nt, Human
ugggggugaaagucuggacagu

SEQ ID NO: 309692 - RNA, 22 nt, Human
agguaaaauagauaguauuucu

SEQ ID NO: 309693 - RNA, 23 nt, Human
guaaaauacgcagugcaguguga

SEQ ID NO: 309694 - RNA, 17 nt, Human
uugggagagaaagguau

SEQ ID NO: 309695 - RNA, 22 nt, Human
acagaccaaaaaaggauauugg

SEQ ID NO: 309696 - RNA, 22 nt, Human
ugagaaaagguugagaugauaa

SEQ ID NO: 309697 - RNA, 22 nt, Human
uuugcauuccugccugcauuca

SEQ ID NO: 309698 - RNA, 22 nt, Human
uaaguucaagucuuggauauaa

SEQ ID NO: 309699 - RNA, 22 nt, Human
uauuuguugaguuguuaugucu

SEQ ID NO: 309700 - RNA, 22 nt, Human
agcagcucaaagccugcaagga

SEQ ID NO: 309701 - RNA, 19 nt, Human
ugagaaggcaguggggagc

SEQ ID NO: 309702 - RNA, 22 nt, Human
uugggugcugucauggggcacg

SEQ ID NO: 309703 - RNA, 22 nt, Human
gagcagcuccagccgcaugacu

SEQ ID NO: 309704 - RNA, 22 nt, Human
agcuccugcccaggaaggcucu

SEQ ID NO: 309705 - RNA, 22 nt, Human
uugugucccccuuugagagcca

SEQ ID NO: 309706 - RNA, 22 nt, Human
aaauucuaugucaauguuuauu

SEQ ID NO: 309707 - RNA, 22 nt, Human
ucucaguguguuuucucucaga

SEQ ID NO: 309708 - RNA, 22 nt, Human
uagagaaauaagcuuugccuug

SEQ ID NO: 309709 - RNA, 22 nt, Human
ccaggacucaguggggaaaggg

SEQ ID NO: 309710 - RNA, 20 nt, Human
ucugugugccaucaccuaac

SEQ ID NO: 309711 - RNA, 22 nt, Human
uguccugggaaugggaugcagu

SEQ ID NO: 309712 - RNA, 22 nt, Human
aaugauugucauuccaaaaagu

SEQ ID NO: 309713 - RNA, 22 nt, Human
ugugccuuaugaauucuuucug

SEQ ID NO: 309714 - RNA, 22 nt, Human
ccucugagagaaggccuucagc

SEQ ID NO: 309715 - RNA, 22 nt, Human
auggcucauuuaucuugcagcc

SEQ ID NO: 309716 - RNA, 22 nt, Human
cuguggugagcaacugacugaa

SEQ ID NO: 309717 - RNA, 22 nt, Human
acagcucugagauauuacuauu

SEQ ID NO: 309718 - RNA, 21 nt, Human
ggcuccugcuuugugaggggc

SEQ ID NO: 309719 - RNA, 22 nt, Human
cccaugagaccugguuuaaggc

SEQ ID NO: 309720 - RNA, 17 nt, Human
ucugccgacugccagcu

SEQ ID NO: 309721 - RNA, 19 nt, Human
cagccucaaucccucgggc

SEQ ID NO: 309722 - RNA, 22 nt, Human
gaggacagcuuagggcuuccug

SEQ ID NO: 309723 - RNA, 18 nt, Human
acaaaugugucacaggaa

SEQ ID NO: 309724 - RNA, 22 nt, Human
cucacugugaccucagcagaca

SEQ ID NO: 309725 - RNA, 22 nt, Human
uaacagaauccuguuauugcca

SEQ ID NO: 309726 - RNA, 22 nt, Human
uugcauguguaauuuuucuaaa

SEQ ID NO: 309727 - RNA, 22 nt, Human
cuggcaggaaguuagaugguaa

SEQ ID NO: 309728 - RNA, 23 nt, Human
cauguacagaguuugauaaagug

SEQ ID NO: 309729 - RNA, 22 nt, Human
uggugccuugggccuacagcgc

SEQ ID NO: 309730 - RNA, 22 nt, Human
uuagcauuucaguacacauguu

SEQ ID NO: 309731 - RNA, 21 nt, Human
gcugcugccccuagugaggcc

SEQ ID NO: 309732 - RNA, 17 nt, Human
acagagguuauacagac

SEQ ID NO: 309733 - RNA, 22 nt, Human
aucuggcuuacgaagcacuggu

SEQ ID NO: 309734 - RNA, 22 nt, Human
gcagcagaggcccuacucuuug

SEQ ID NO: 309735 - RNA, 22 nt, Human
uuucacacugcagcaucagaga

SEQ ID NO: 309736 - RNA, 22 nt, Human
guaauugacucagcucuguuca

SEQ ID NO: 309737 - RNA, 20 nt, Human
cccaggagugagcagcuuua

SEQ ID NO: 309738 - RNA, 22 nt, Human
aaauuucuugaggcucucuagc

SEQ ID NO: 309739 - RNA, 22 nt, Human
aggagcugagggagcgcccuug

SEQ ID NO: 309740 - RNA, 22 nt, Human
agucccagccuaggcugugcug

SEQ ID NO: 309741 - RNA, 22 nt, Human
uugguuuacuaggauucaaauu

SEQ ID NO: 309742 - RNA, 22 nt, Human
acagggcauuuccucuaugugu

SEQ ID NO: 309743 - RNA, 22 nt, Human
caggauggucucgaucuccuga

SEQ ID NO: 309744 - RNA, 19 nt, Human
gucccugggcagaggcacc

SEQ ID NO: 309745 - RNA, 22 nt, Human
augcauuuuugaguaugaauga

SEQ ID NO: 309746 - RNA, 22 nt, Human
agcccaaggcuucccugcuggc

SEQ ID NO: 309747 - RNA, 21 nt, Human
uuucugaaggcaacaucuauc

SEQ ID NO: 309748 - RNA, 22 nt, Human
ccuguucacugcacaguuuccg

SEQ ID NO: 309749 - RNA, 22 nt, Human
ugggccacuugaaaguggaugu

SEQ ID NO: 309750 - RNA, 22 nt, Human
uucugaaagccaauucauugaa

SEQ ID NO: 309751 - RNA, 22 nt, Human
cccauuuaaacacaagcuuuca

SEQ ID NO: 309752 - RNA, 22 nt, Human
uguagaaagaauauguuucaua

SEQ ID NO: 309753 - RNA, 22 nt, Human
ccagcuggagcucgcagauagg

SEQ ID NO: 309754 - RNA, 21 nt, Human
ugcauaaagaaauacaaauac

SEQ ID NO: 309755 - RNA, 22 nt, Human
gcaaggcugagcacauuugcau

SEQ ID NO: 309756 - RNA, 22 nt, Human
uaugcuuugguagagaguugug

SEQ ID NO: 309757 - RNA, 22 nt, Human
ugagccuggguggucgaggcug

SEQ ID NO: 309758 - RNA, 22 nt, Human
agagauugugcuacucacccaa

SEQ ID NO: 309759 - RNA, 22 nt, Human
gcuccuucaggugguagcuguu

SEQ ID NO: 309760 - RNA, 22 nt, Human
gaugcugagagguggagggaac

SEQ ID NO: 309761 - RNA, 22 nt, Human
ugcugccagagagacagggacu

SEQ ID NO: 309762 - RNA, 22 nt, Human
uacauguauguguacgugcaug

SEQ ID NO: 309763 - RNA, 22 nt, Human
aguggcaggaaaguggaagaga

SEQ ID NO: 309764 - RNA, 22 nt, Human
ucacacgugagguucuauccug

SEQ ID NO: 309765 - RNA, 22 nt, Human
uggccuuggacagagcgcuccu

SEQ ID NO: 309766 - RNA, 22 nt, Human
gacagggcauggugcagaguuc

SEQ ID NO: 309767 - RNA, 22 nt, Human
agugcuuugaacgaaaggcuga

SEQ ID NO: 309768 - RNA, 22 nt, Human
caagagcucagaaacccuugcu

SEQ ID NO: 309769 - RNA, 22 nt, Human
auacuuacuuuucuucagacua

SEQ ID NO: 309770 - RNA, 22 nt, Human
ugaagcaggaaccagcagcauu

SEQ ID NO: 309771 - RNA, 22 nt, Human
ggguacaaagauuucauaagau

SEQ ID NO: 309772 - RNA, 22 nt, Human
ucugucugagggagugacauuu

SEQ ID NO: 309773 - RNA, 22 nt, Human
aggcccugaagucggccccuca

SEQ ID NO: 309774 - RNA, 22 nt, Human
ugggcuguccagcaccugggcu

SEQ ID NO: 309775 - RNA, 22 nt, Human
ugcaggccggcccuaggccuca

SEQ ID NO: 309776 - RNA, 22 nt, Human
ggcugccuucccugagccccgg

SEQ ID NO: 309777 - RNA, 20 nt, Human
gagauuuccaaucaugccca

SEQ ID NO: 309778 - RNA, 22 nt, Human
agaaauguuuauggcugccuau

SEQ ID NO: 309779 - RNA, 22 nt, Human
ugggggagauuagagcuucuua

SEQ ID NO: 309780 - RNA, 22 nt, Human
agggcugcaggcaagauauggc

SEQ ID NO: 309781 - RNA, 22 nt, Human
uggcuggggccacaguuuuccu

SEQ ID NO: 309782 - RNA, 22 nt, Human
cagaugugcaugaugggaaggg

SEQ ID NO: 309783 - RNA, 22 nt, Human
ggcagggaggaggugaaaguga

SEQ ID NO: 309784 - RNA, 22 nt, Human
auuuuucucuccacuccauuaa

SEQ ID NO: 309785 - RNA, 22 nt, Human
uggggcugaggagccucacucu

SEQ ID NO: 309786 - RNA, 22 nt, Human
cagcaguguggaagcugagggg

SEQ ID NO: 309787 - RNA, 22 nt, Human
guguaugagccuccagcugggc

SEQ ID NO: 309788 - RNA, 22 nt, Human
uggaacaacaugcuggaaaauu

SEQ ID NO: 309789 - RNA, 22 nt, Human
cagcugugcuguauuaagcucu

SEQ ID NO: 309790 - RNA, 17 nt, Human
cucagaguugcuuuguc

SEQ ID NO: 309791 - RNA, 23 nt, Human
uggagcugggcucagacccuggg

SEQ ID NO: 309792 - RNA, 22 nt, Human
gcucuggaagcaucugagagga

SEQ ID NO: 309793 - RNA, 21 nt, Human
ugagaaguaugucuucagcca

SEQ ID NO: 309794 - RNA, 22 nt, Human
guucuucagaggggaaagaacc

SEQ ID NO: 309795 - RNA, 22 nt, Human
ucaagugcuugugagguauuug

SEQ ID NO: 309796 - RNA, 22 nt, Human
acucugccuuucagcagaugaa

SEQ ID NO: 309797 - RNA, 22 nt, Human
gaaggaaaucugugauuuaugc

SEQ ID NO: 309798 - RNA, 22 nt, Human
uguaugaagguuuaccugcugu

SEQ ID NO: 309799 - RNA, 22 nt, Human
uccucugcuccaucuuuacugu

SEQ ID NO: 309800 - RNA, 22 nt, Human
ucagagaaguaagguggggugc

SEQ ID NO: 309801 - RNA, 22 nt, Human
ugucucugaggugagggucagc

SEQ ID NO: 309802 - RNA, 19 nt, Human
cuuugucagaacaugcuuc

SEQ ID NO: 309803 - RNA, 22 nt, Human
cugagcuuggccaggaaugaau

SEQ ID NO: 309804 - RNA, 22 nt, Human
uauggaaacuaauucauuuuuc

SEQ ID NO: 309805 - RNA, 22 nt, Human
gaugaaaaucuugagaugucga

SEQ ID NO: 309806 - RNA, 19 nt, Human
ucaaggcucccugagggau

SEQ ID NO: 309807 - RNA, 22 nt, Human
acagcuggaggucugugagcac

SEQ ID NO: 309808 - RNA, 22 nt, Human
cuuucagagguuacucaggaaa

SEQ ID NO: 309809 - RNA, 20 nt, Human
augauuuugcacuaacuuca

SEQ ID NO: 309810 - RNA, 22 nt, Human
uauuugagcgaagcaguguuuu

SEQ ID NO: 309811 - RNA, 21 nt, Human
ugcuggccucaagggugacuu

SEQ ID NO: 309812 - RNA, 22 nt, Human
ucugcaggucacgcuccagccu

SEQ ID NO: 309813 - RNA, 20 nt, Human
ccugucuggagacaaagaga

SEQ ID NO: 309814 - RNA, 22 nt, Human
auaugaagaauuccaauuugga

SEQ ID NO: 309815 - RNA, 22 nt, Human
acuggcagcagcagcccuuggg

SEQ ID NO: 309816 - RNA, 22 nt, Human
guuccuugggaacaacgcugaa

SEQ ID NO: 309817 - RNA, 22 nt, Human
agaaauaugcugauuagaugaa

SEQ ID NO: 309818 - RNA, 22 nt, Human
uagggaggcuacuucuuguagg

SEQ ID NO: 309819 - RNA, 22 nt, Human
agaaaggguucucugaggugcu

SEQ ID NO: 309820 - RNA, 22 nt, Human
aagagcugcccaaggugaacag

SEQ ID NO: 309821 - RNA, 22 nt, Human
aggcuggcccuacuggcugccu

SEQ ID NO: 309822 - RNA, 22 nt, Human
cagcagagacgguaagcagaac

SEQ ID NO: 309823 - RNA, 22 nt, Human
caggaugguggcaugaucagaa

SEQ ID NO: 309824 - RNA, 22 nt, Human
uagcugcccaucuuuccuuuag

SEQ ID NO: 309825 - RNA, 22 nt, Human
cagccucuaagcacagccucuc

SEQ ID NO: 309826 - RNA, 22 nt, Human
ggcugccugaggcagugagaga

SEQ ID NO: 309827 - RNA, 22 nt, Human
cuuuauguccuugaagaguugu

SEQ ID NO: 309828 - RNA, 22 nt, Human
aaagcugcugccaaucaggcuu

SEQ ID NO: 309829 - RNA, 17 nt, Human
cacaggugugguuugag

SEQ ID NO: 309830 - RNA, 22 nt, Human
ugggccugaaggagcugcgccc

SEQ ID NO: 309831 - RNA, 22 nt, Human
ugugcacauauacucauauucc

SEQ ID NO: 309832 - RNA, 22 nt, Human
ucugaggcauaaccuguucugc

SEQ ID NO: 309833 - RNA, 22 nt, Human
augcaguacauacaaacacuga

SEQ ID NO: 309834 - RNA, 22 nt, Human
ccuggccucagccuagggcuga

SEQ ID NO: 309835 - RNA, 17 nt, Human
uuuucucucuuggauuc

SEQ ID NO: 309836 - RNA, 22 nt, Human
gaggagaagggcacggagaaaa

SEQ ID NO: 309837 - RNA, 19 nt, Human
agagaggcugugugaggga

SEQ ID NO: 309838 - RNA, 22 nt, Human
cauugcccaguaggaucaccag

SEQ ID NO: 309839 - RNA, 22 nt, Human
uguuucaugauugcugucauuu

SEQ ID NO: 309840 - RNA, 22 nt, Human
gcugcagguugggcaacagagu

SEQ ID NO: 309841 - RNA, 22 nt, Human
accaccccagaauuuuucaagg

SEQ ID NO: 309842 - RNA, 22 nt, Human
cuuccugaacaaugccaucaau

SEQ ID NO: 309843 - RNA, 22 nt, Human
uguuucauuaguacugacaaua

SEQ ID NO: 309844 - RNA, 22 nt, Human
gcugccagcucacucuccugag

SEQ ID NO: 309845 - RNA, 23 nt, Human
aaggccagaauuucaauggugcc

SEQ ID NO: 309846 - RNA, 22 nt, Human
uguacaaagguacuuugauguu

SEQ ID NO: 309847 - RNA, 22 nt, Human
ucucuuuuauguacacccugac

SEQ ID NO: 309848 - RNA, 22 nt, Human
aggcacugaccugcuuccuuga

SEQ ID NO: 309849 - RNA, 22 nt, Human
ccagagccuaagaucugauccu

SEQ ID NO: 309850 - RNA, 22 nt, Human
uucaggauggcggauguugggg

SEQ ID NO: 309851 - RNA, 22 nt, Human
acaguguugaggugcuuguuuc

SEQ ID NO: 309852 - RNA, 22 nt, Human
ccucuucuaggacguccuugug

SEQ ID NO: 309853 - RNA, 22 nt, Human
agcugguguccuccuggagcug

SEQ ID NO: 309854 - RNA, 22 nt, Human
gucuggaguggggccugagaau

SEQ ID NO: 309855 - RNA, 22 nt, Human
gggcugagucugcugccuguca

SEQ ID NO: 309856 - RNA, 18 nt, Human
aagaggaggagcagguug

SEQ ID NO: 309857 - RNA, 22 nt, Human
cuugaaagucagcagaguggau

SEQ ID NO: 309858 - RNA, 22 nt, Human
auggagacgcaagggaccuagg

SEQ ID NO: 309859 - RNA, 20 nt, Human
ccagucccugagcaccaggg

SEQ ID NO: 309860 - RNA, 22 nt, Human
agcucagggcgaucugucucgg

SEQ ID NO: 309861 - RNA, 22 nt, Human
cagcaucaccgccauuucugau

SEQ ID NO: 309862 - RNA, 22 nt, Human
uguuuucagucauauagcaggu

SEQ ID NO: 309863 - RNA, 22 nt, Human
ggaugcugacuuuggagcaugg

SEQ ID NO: 309864 - RNA, 20 nt, Human
ggcucugcuugugagcagcc

SEQ ID NO: 309865 - RNA, 22 nt, Human
cucagggccaaggaugcuguug

SEQ ID NO: 309866 - RNA, 22 nt, Human
agaagcuuccuacauuguucuu

SEQ ID NO: 309867 - RNA, 22 nt, Human
gggaaggagccugcuugcuaga

SEQ ID NO: 309868 - RNA, 21 nt, Human
gcaaaugaguuaacuaacuca

SEQ ID NO: 309869 - RNA, 22 nt, Human
caguggaggccuugggaccuuu

SEQ ID NO: 309870 - RNA, 22 nt, Human
gggugggagucuggcccucaaa

SEQ ID NO: 309871 - RNA, 22 nt, Human
gauggggaugagaagugagcag

SEQ ID NO: 309872 - RNA, 22 nt, Human
cugccugcugccuguggagggu

SEQ ID NO: 309873 - RNA, 22 nt, Human
ccagcugguuaaaauagagaaa

SEQ ID NO: 309874 - RNA, 22 nt, Human
gcaccgagaaggaagcaugccu

SEQ ID NO: 309875 - RNA, 22 nt, Human
agugugagcccuggaguggugc

SEQ ID NO: 309876 - RNA, 22 nt, Human
uuuccagagcaugucugcucag

SEQ ID NO: 309877 - RNA, 22 nt, Human
uugaagcagcucaggaggcuua

SEQ ID NO: 309878 - RNA, 22 nt, Human
uuaaacagagucugaaauguaa

SEQ ID NO: 309879 - RNA, 22 nt, Human
gcucaggaucccaggggugugc

SEQ ID NO: 309880 - RNA, 22 nt, Human
cacagcuugggcucugacaaua

SEQ ID NO: 309881 - RNA, 22 nt, Human
ggagggcacaggaccagaaauc

SEQ ID NO: 309882 - RNA, 22 nt, Human
uggggaggacgggcgccuuccu

SEQ ID NO: 309883 - RNA, 22 nt, Human
ucacauuuguuccucugcacuu

SEQ ID NO: 309884 - RNA, 22 nt, Human
ggcucugguugaccaugauggc

SEQ ID NO: 309885 - RNA, 22 nt, Human
ucccugucuaauaugccaugaa

SEQ ID NO: 309886 - RNA, 22 nt, Human
acucaggaaaaauguagugaua

SEQ ID NO: 309887 - RNA, 21 nt, Human
agacagagugcagucuacaua

SEQ ID NO: 309888 - RNA, 22 nt, Human
gcugccaugguccaggcuccag

SEQ ID NO: 309889 - RNA, 21 nt, Human
uucugggaaaugagcuggggc

SEQ ID NO: 309890 - RNA, 22 nt, Human
aguaaaauuucugcugaggaga

SEQ ID NO: 309891 - RNA, 22 nt, Human
uagugcuuggcccuaccagaua

SEQ ID NO: 309892 - RNA, 22 nt, Human
cuggggcccaucgagggcugag

SEQ ID NO: 309893 - RNA, 20 nt, Human
uguauauuuucugguguaaa

SEQ ID NO: 309894 - RNA, 22 nt, Human
uagacacauccguggaagcuuc

SEQ ID NO: 309895 - RNA, 19 nt, Human
uucaggauugacccuacug

SEQ ID NO: 309896 - RNA, 22 nt, Human
gcauuccuacaggcugcuauga

SEQ ID NO: 309897 - RNA, 22 nt, Human
ccaggcugccgaggaaagaaag

SEQ ID NO: 309898 - RNA, 22 nt, Human
ggucccaggagaauaggugcaa

SEQ ID NO: 309899 - RNA, 18 nt, Human
aggcuucuuggcucaguc

SEQ ID NO: 309900 - RNA, 21 nt, Human
uugcaccaugauaaauucaga

SEQ ID NO: 309901 - RNA, 22 nt, Human
ggccucucuccuuggcuugcag

SEQ ID NO: 309902 - RNA, 22 nt, Human
ugacaaacccugcaaauagcuc

SEQ ID NO: 309903 - RNA, 22 nt, Human
cccacucuggcucccuucuagu

SEQ ID NO: 309904 - RNA, 22 nt, Human
ugagacaguuuuucuauuucca

SEQ ID NO: 309905 - RNA, 22 nt, Human
ccagggugagaaaaggcuggau

SEQ ID NO: 309906 - RNA, 22 nt, Human
agaacuuaggaacaacagcuua

SEQ ID NO: 309907 - RNA, 22 nt, Human
aagcacaaugaacaucuuagau

SEQ ID NO: 309908 - RNA, 22 nt, Human
gaagcagcugccagagaugucu

SEQ ID NO: 309909 - RNA, 22 nt, Human
ggugggcacauucagucucugu

SEQ ID NO: 309910 - RNA, 22 nt, Human
cucucugguacauagaguuugg

SEQ ID NO: 309911 - RNA, 22 nt, Human
acuuugcaaugggcagaaccca

SEQ ID NO: 309912 - RNA, 22 nt, Human
agaugacaaaucaggggacggg

SEQ ID NO: 309913 - RNA, 22 nt, Human
uucucauucugacucaguguag

SEQ ID NO: 309914 - RNA, 22 nt, Human
auacuucuuugauguucacagg

SEQ ID NO: 309915 - RNA, 22 nt, Human
ucccagaagugaaauuucuaga

SEQ ID NO: 309916 - RNA, 22 nt, Human
acauguuagaaaugcagaaucu

SEQ ID NO: 309917 - RNA, 22 nt, Human
cucugaggcuccaugcaggcuu

SEQ ID NO: 309918 - RNA, 22 nt, Human
augugucuuugagacucugcua

SEQ ID NO: 309919 - RNA, 22 nt, Human
gcucaggaaaacagucuaguaa

SEQ ID NO: 309920 - RNA, 22 nt, Human
aagggagcaaauggacagacgg

SEQ ID NO: 309921 - RNA, 22 nt, Human
aucugcuuuugagaauuuacuu

SEQ ID NO: 309922 - RNA, 22 nt, Human
cugaggucaauuaaucaacaac

SEQ ID NO: 309923 - RNA, 22 nt, Human
gcacagggccuggcacauaaga

SEQ ID NO: 309924 - RNA, 22 nt, Human
ucaguguuacauuauauagaac

SEQ ID NO: 309925 - RNA, 22 nt, Human
uagcacaucuucuuggccugca

SEQ ID NO: 309926 - RNA, 22 nt, Human
aagcaauagcaacaacuuuaca

SEQ ID NO: 309927 - RNA, 22 nt, Human
ccagcucuaaacggcucugugg

SEQ ID NO: 309928 - RNA, 22 nt, Human
guugaguggguuaggaugcuga

SEQ ID NO: 309929 - RNA, 22 nt, Human
ucccucuguguugggcaugccu

SEQ ID NO: 309930 - RNA, 22 nt, Human
cuggccagacuacacaugugug

SEQ ID NO: 309931 - RNA, 22 nt, Human
cugggccaucagaggggcugga

SEQ ID NO: 309932 - RNA, 22 nt, Human
agcccuguuuaugccacaucau

SEQ ID NO: 309933 - RNA, 22 nt, Human
gagagcugcaagguagggcggg

SEQ ID NO: 309934 - RNA, 22 nt, Human
cccagccucuguuugcuccucu

SEQ ID NO: 309935 - RNA, 22 nt, Human
ccagcuuuucuuaucauuauaa

SEQ ID NO: 309936 - RNA, 22 nt, Human
ucaagcaggguagcaagcuggu

SEQ ID NO: 309937 - RNA, 21 nt, Human
ucuguacaucauugagucccc

SEQ ID NO: 309938 - RNA, 22 nt, Human
ucaauuaugccauugcaauauu

SEQ ID NO: 309939 - RNA, 22 nt, Human
agcaauaacagaaaacuuuccu

SEQ ID NO: 309940 - RNA, 18 nt, Human
ugucauaauauaucaccu

SEQ ID NO: 309941 - RNA, 22 nt, Human
gaccauuuuuacagagcauuca

SEQ ID NO: 309942 - RNA, 22 nt, Human
ucacaugcuacugagccagacc

SEQ ID NO: 309943 - RNA, 23 nt, Human
ggagccuggcauaugagacgcau

SEQ ID NO: 309944 - RNA, 22 nt, Human
ggcuccugauaggagaaugcgg

SEQ ID NO: 309945 - RNA, 22 nt, Human
aaaggccacugcaagggaaggu

SEQ ID NO: 309946 - RNA, 22 nt, Human
ccuucuccugccuuggguucau

SEQ ID NO: 309947 - RNA, 22 nt, Human
auauaacauacauacagaaaag

SEQ ID NO: 309948 - RNA, 22 nt, Human
aaauguguuucuuugugaaugg

SEQ ID NO: 309949 - RNA, 22 nt, Human
uaugcauaauuggauaaguaga

SEQ ID NO: 309950 - RNA, 22 nt, Human
uggcagcaaaaccagaaucaga

SEQ ID NO: 309951 - RNA, 22 nt, Human
aaugucugagucucuguauccc

SEQ ID NO: 309952 - RNA, 22 nt, Human
accauguguuuuacacauggua

SEQ ID NO: 309953 - RNA, 22 nt, Human
auuauguauuugguauaguuug

SEQ ID NO: 309954 - RNA, 22 nt, Human
acacagggauauuucagguggu

SEQ ID NO: 309955 - RNA, 22 nt, Human
uugcaauagccuuauuuccaaa

SEQ ID NO: 309956 - RNA, 22 nt, Human
auccaguuuaugucauauucuu

SEQ ID NO: 309957 - RNA, 22 nt, Human
aucuuucuauuucuaaaaacua

SEQ ID NO: 309958 - RNA, 22 nt, Human
aaaguuagaaugauaucaacga

SEQ ID NO: 309959 - RNA, 22 nt, Human
uacaaacuuguuuuaaguaagu

SEQ ID NO: 309960 - RNA, 22 nt, Human
gucugucaucugagauggagug

SEQ ID NO: 309961 - RNA, 22 nt, Human
cagcucuggcuauugaggacca

SEQ ID NO: 309962 - RNA, 22 nt, Human
ugcauauugugaaaauguagau

SEQ ID NO: 309963 - RNA, 22 nt, Human
gugugcagugagcaaaagaucu

SEQ ID NO: 309964 - RNA, 22 nt, Human
ucucagagggaaaggccaauuu

SEQ ID NO: 309965 - RNA, 22 nt, Human
uuguuacacauaauaacauuuu

SEQ ID NO: 309966 - RNA, 21 nt, Human
guguuuccuguuuauggcuug

SEQ ID NO: 309967 - RNA, 22 nt, Human
auaaucuuucuuuuccagauag

SEQ ID NO: 309968 - RNA, 22 nt, Human
gcucugggugaacuuggagcaa

SEQ ID NO: 309969 - RNA, 22 nt, Human
uuugcuauaaaagggucacacg

SEQ ID NO: 309970 - RNA, 20 nt, Human
ucugcucagcccucaguggc

SEQ ID NO: 309971 - RNA, 22 nt, Human
acuacuuugggccauuuguuua

SEQ ID NO: 309972 - RNA, 22 nt, Human
uuugcauuuccagaguagcaga

SEQ ID NO: 309973 - RNA, 22 nt, Human
ccugagagagaagcgaccuggu

SEQ ID NO: 309974 - RNA, 23 nt, Human
cccuggccuuggggcacaggcug

SEQ ID NO: 309975 - RNA, 22 nt, Human
augaagcugaaaaaggcauaua

SEQ ID NO: 309976 - RNA, 22 nt, Human
ucccagagaaagucaaggucuu

SEQ ID NO: 309977 - RNA, 22 nt, Human
cugcagagcuaggcugagugaa

SEQ ID NO: 309978 - RNA, 18 nt, Human
aaagaaggauuggagagc

SEQ ID NO: 309979 - RNA, 22 nt, Human
ugagccaguggaagauggcagu

SEQ ID NO: 309980 - RNA, 21 nt, Human
aaauacagaaacuuguuuuca

SEQ ID NO: 309981 - RNA, 22 nt, Human
gcccaugcucucaggcgggccu

SEQ ID NO: 309982 - RNA, 23 nt, Human
gagguacagcaccagugaauagg

SEQ ID NO: 309983 - RNA, 22 nt, Human
acuguguggaaauuugugaggg

SEQ ID NO: 309984 - RNA, 22 nt, Human
uccagggagagccgcugcucca

SEQ ID NO: 309985 - RNA, 20 nt, Human
aucuucuuggccagcuugcu

SEQ ID NO: 309986 - RNA, 22 nt, Human
cagagcuggagaaguggauuua

SEQ ID NO: 309987 - RNA, 22 nt, Human
uacuuacagaaggaagcaauug

SEQ ID NO: 309988 - RNA, 22 nt, Human
gcagggcacagacagugccaag

SEQ ID NO: 309989 - RNA, 22 nt, Human
gaagaagacauggaacaauagu

SEQ ID NO: 309990 - RNA, 22 nt, Human
uuuccucuuuguaccuugacua

SEQ ID NO: 309991 - RNA, 22 nt, Human
cagagcugguaagugguagagg

SEQ ID NO: 309992 - RNA, 22 nt, Human
ucagaacauugacauucuuauu

SEQ ID NO: 309993 - RNA, 22 nt, Human
gagggcacaaaggcaacauuca

SEQ ID NO: 309994 - RNA, 22 nt, Human
aggaggugacagccugcaucug

SEQ ID NO: 309995 - RNA, 20 nt, Human
gagagcuggggaugaggcug

SEQ ID NO: 309996 - RNA, 22 nt, Human
aagauaauauucauuaacuaga

SEQ ID NO: 309997 - RNA, 20 nt, Human
aggagccauugacugcagca

SEQ ID NO: 309998 - RNA, 21 nt, Human
aucucgggcuucucgcccagc

SEQ ID NO: 309999 - RNA, 22 nt, Human
accaggggaugguuggcacugu

SEQ ID NO: 310000 - RNA, 22 nt, Human
aguccaggaguugggugacauu

SEQ ID NO: 310001 - RNA, 22 nt, Human
uaguaucuauuaguaacaagag

SEQ ID NO: 310002 - RNA, 22 nt, Human
gaacaggguugggugagagagg

SEQ ID NO: 310003 - RNA, 22 nt, Human
caucucaugggcaugccaagcu

SEQ ID NO: 310004 - RNA, 22 nt, Human
agagugauucuaguuagggaau

SEQ ID NO: 310005 - RNA, 22 nt, Human
auugcuguaaauuaucuuauua

SEQ ID NO: 310006 - RNA, 19 nt, Human
ugccugucaguagaucuca

SEQ ID NO: 310007 - RNA, 22 nt, Human
ugccaggagagugcaugcaggg

SEQ ID NO: 310008 - RNA, 22 nt, Human
gaaggagagggucaaggauaau

SEQ ID NO: 310009 - RNA, 22 nt, Human
uuaacagauguuuauggagcau

SEQ ID NO: 310010 - RNA, 22 nt, Human
cagaguguuagcgcugguuggg

SEQ ID NO: 310011 - RNA, 22 nt, Human
gcugggagccguaccugucacg

SEQ ID NO: 310012 - RNA, 22 nt, Human
cagggagaagucuggucagucc

SEQ ID NO: 310013 - RNA, 22 nt, Human
cuguagccaguuuggccucacc

SEQ ID NO: 310014 - RNA, 22 nt, Human
uccuggaggggacagcaugggc

SEQ ID NO: 310015 - RNA, 22 nt, Human
gcaccaggcuuagagccccagg

SEQ ID NO: 310016 - RNA, 22 nt, Human
gagcugggcgagccggggaagu

SEQ ID NO: 310017 - RNA, 22 nt, Human
gagccugaaauacaggucacug

SEQ ID NO: 310018 - RNA, 22 nt, Human
agccagcaggugagugcagccu

SEQ ID NO: 310019 - RNA, 22 nt, Human
cucucugguuucagcgaagggg

SEQ ID NO: 310020 - RNA, 22 nt, Human
agcuucuguucaucuuccaggc

SEQ ID NO: 310021 - RNA, 22 nt, Human
agucucaggcagaggaaggcua

SEQ ID NO: 310022 - RNA, 22 nt, Human
gcguaaggccucuggucucgga

SEQ ID NO: 310023 - RNA, 22 nt, Human
cuggcucacuagcccugcccug

SEQ ID NO: 310024 - RNA, 22 nt, Human
aaaugauugucaaaguucuguu

SEQ ID NO: 310025 - RNA, 22 nt, Human
aggccagggucccacacucgca

SEQ ID NO: 310026 - RNA, 22 nt, Human
ccaaggagaaaugcugugcuuu

SEQ ID NO: 310027 - RNA, 22 nt, Human
uauagccauuuccaguggcauc

SEQ ID NO: 310028 - RNA, 22 nt, Human
acuuccuguuaugugugccucu

SEQ ID NO: 310029 - RNA, 22 nt, Human
uuggaaggagucaaccagcuga

SEQ ID NO: 310030 - RNA, 21 nt, Human
gacaaagugaagcaggcagga

SEQ ID NO: 310031 - RNA, 22 nt, Human
auuuccuuugcaaagacugugc

SEQ ID NO: 310032 - RNA, 22 nt, Human
uuguuuaaaagaaaucauagaa

SEQ ID NO: 310033 - RNA, 22 nt, Human
ucagugcuugccucuggaggag

SEQ ID NO: 310034 - RNA, 22 nt, Human
aggccagcccugggcugagaga

SEQ ID NO: 310035 - RNA, 22 nt, Human
ugaacccaggagguugcaguga

SEQ ID NO: 310036 - RNA, 22 nt, Human
gcugggcuugguuucccugcuu

SEQ ID NO: 310037 - RNA, 22 nt, Human
cuucuggaggacacuggcccca

SEQ ID NO: 310038 - RNA, 22 nt, Human
uuugaaagccuggcuuuucucu

SEQ ID NO: 310039 - RNA, 22 nt, Human
augucuuucucacagccaguuc

SEQ ID NO: 310040 - RNA, 22 nt, Human
uggcagaguucgcuccuauuca

SEQ ID NO: 310041 - RNA, 22 nt, Human
auguacaaucuaucacaagaag

SEQ ID NO: 310042 - RNA, 20 nt, Human
gcucaguggagaaaugcacc

SEQ ID NO: 310043 - RNA, 22 nt, Human
ucuguuccaguagaaaggugca

SEQ ID NO: 310044 - RNA, 19 nt, Human
ucucuggggacacuuucac

SEQ ID NO: 310045 - RNA, 22 nt, Human
gcccagcugagaagcgcggggc

SEQ ID NO: 310046 - RNA, 22 nt, Human
aucuugcauuugcuaaaaugca

SEQ ID NO: 310047 - RNA, 22 nt, Human
guaacauaguuugugcuucauc

SEQ ID NO: 310048 - RNA, 17 nt, Human
cagugcagagcccuuuc

SEQ ID NO: 310049 - RNA, 22 nt, Human
ucauugucuugauaugauuguc

SEQ ID NO: 310050 - RNA, 22 nt, Human
cauuuacacuucuaaccacaag

SEQ ID NO: 310051 - RNA, 22 nt, Human
ucucaggggccuggaguccugg

SEQ ID NO: 310052 - RNA, 22 nt, Human
gccagcaguauguccuggcagu

SEQ ID NO: 310053 - RNA, 22 nt, Human
ucagaacagaagaaggaacacg

SEQ ID NO: 310054 - RNA, 22 nt, Human
ggcugggagcuggacaggccgg

SEQ ID NO: 310055 - RNA, 20 nt, Human
ugcagcugcaggaggguggg

SEQ ID NO: 310056 - RNA, 22 nt, Human
aguggaccagaagacugaagcu

SEQ ID NO: 310057 - RNA, 22 nt, Human
aaaaaaucagaucuuugguuaa

SEQ ID NO: 310058 - RNA, 22 nt, Human
cugagggcccugaagcuuggca

SEQ ID NO: 310059 - RNA, 22 nt, Human
cccagggucccugcucucugug

SEQ ID NO: 310060 - RNA, 19 nt, Human
augucuguugaauuucaua

SEQ ID NO: 310061 - RNA, 22 nt, Human
cucacugugccuuuucccaaac

SEQ ID NO: 310062 - RNA, 19 nt, Human
cugggagguguucagagaa

SEQ ID NO: 310063 - RNA, 22 nt, Human
ucagagaaaugaaguagggauu

SEQ ID NO: 310064 - RNA, 22 nt, Human
gcagugggagcuuaggcagugc

SEQ ID NO: 310065 - RNA, 22 nt, Human
ggagccaguuuagaccucaguu

SEQ ID NO: 310066 - RNA, 22 nt, Human
agggcagcagcccauggcucug

SEQ ID NO: 310067 - RNA, 22 nt, Human
uaugagaaaauaaauaucuguu

SEQ ID NO: 310068 - RNA, 22 nt, Human
ucucagagugacaaugagaauu

SEQ ID NO: 310069 - RNA, 22 nt, Human
aguguauugauuggaacagccu

SEQ ID NO: 310070 - RNA, 22 nt, Human
gccucugcccuccugggacugc

SEQ ID NO: 310071 - RNA, 22 nt, Human
auuauaggcuugagccaccgug

SEQ ID NO: 310072 - RNA, 22 nt, Human
ggccuguccagccugccuggcu

SEQ ID NO: 310073 - RNA, 22 nt, Human
ucaaauaccagcaauuucaugu

SEQ ID NO: 310074 - RNA, 22 nt, Human
uuuuaucuaccuaugcucauuu

SEQ ID NO: 310075 - RNA, 22 nt, Human
gcccagcuuuuugaggcaggca

SEQ ID NO: 310076 - RNA, 22 nt, Human
cacucaggguacaauggagggc

SEQ ID NO: 310077 - RNA, 22 nt, Human
ggcuggcuugccaagcucaggg

SEQ ID NO: 310078 - RNA, 22 nt, Human
cucuucagauaaaagggauauu

SEQ ID NO: 310079 - RNA, 22 nt, Human
uuggaaauggcuguaguuauga

SEQ ID NO: 310080 - RNA, 22 nt, Human
ggagagcaggguccugagauac

SEQ ID NO: 310081 - RNA, 22 nt, Human
caguagcauguaauaaagacag

SEQ ID NO: 310082 - RNA, 22 nt, Human
gagcagcugagcuggaaugaga

SEQ ID NO: 310083 - RNA, 22 nt, Human
cagucccagacccagaaggugg

SEQ ID NO: 310084 - RNA, 22 nt, Human
cccaggcagagagcuggugagc

SEQ ID NO: 310085 - RNA, 22 nt, Human
ggcacugagaggcucuuccuaa

SEQ ID NO: 310086 - RNA, 22 nt, Human
caggcugcagugcaguggcuau

SEQ ID NO: 310087 - RNA, 22 nt, Human
aggcaguuguugcugagcagcu

SEQ ID NO: 310088 - RNA, 18 nt, Human
gcagagugcgucucugug

SEQ ID NO: 310089 - RNA, 22 nt, Human
acucaggaagaaagcagcuggu

SEQ ID NO: 310090 - RNA, 21 nt, Human
gccaccucgucucggagcagc

SEQ ID NO: 310091 - RNA, 18 nt, Human
cccagcccaccauuucuc

SEQ ID NO: 310092 - RNA, 22 nt, Human
ucaugaauauugaaugcuucau

SEQ ID NO: 310093 - RNA, 22 nt, Human
cagucucucugaaguauuaaga

SEQ ID NO: 310094 - RNA, 22 nt, Human
cuggcucccguuguccuugaag

SEQ ID NO: 310095 - RNA, 22 nt, Human
aauguaugaagguuccaguuuc

SEQ ID NO: 310096 - RNA, 22 nt, Human
gcugccuguugaagggucugug

SEQ ID NO: 310097 - RNA, 22 nt, Human
auaauguagguauguguauuua

SEQ ID NO: 310098 - RNA, 22 nt, Human
gcuuugaagucugugucuuuug

SEQ ID NO: 310099 - RNA, 22 nt, Human
aggaaaaaagucugugauuaua

SEQ ID NO: 310100 - RNA, 22 nt, Human
agagcuguuuggacaucugagu

SEQ ID NO: 310101 - RNA, 22 nt, Human
auugcacaaacacagucagacu

SEQ ID NO: 310102 - RNA, 22 nt, Human
aaauuuaagaagugugugcgug

SEQ ID NO: 310103 - RNA, 22 nt, Human
ggaagagccuggggugucaggc

SEQ ID NO: 310104 - RNA, 20 nt, Human
agcugaggcaccugagguua

SEQ ID NO: 310105 - RNA, 22 nt, Human
uucaggauucucucccauuuac

SEQ ID NO: 310106 - RNA, 22 nt, Human
aggagggauagaaaaauacuug

SEQ ID NO: 310107 - RNA, 22 nt, Human
gaaugcagauggcugguguaug

SEQ ID NO: 310108 - RNA, 22 nt, Human
ucgugucagaucagagguuccu

SEQ ID NO: 310109 - RNA, 22 nt, Human
uggcucugggaaucuguugcuu

SEQ ID NO: 310110 - RNA, 22 nt, Human
cagagcugagaauguugaugcu

SEQ ID NO: 310111 - RNA, 19 nt, Human
gcucagagggcccugugcu

SEQ ID NO: 310112 - RNA, 22 nt, Human
guugaaugaaucauucuaugua

SEQ ID NO: 310113 - RNA, 22 nt, Human
caguacugcuugugggagcaga

SEQ ID NO: 310114 - RNA, 22 nt, Human
caggcagcauuuacucugauga

SEQ ID NO: 310115 - RNA, 22 nt, Human
aacaucuacuaagugccaggca

SEQ ID NO: 310116 - RNA, 22 nt, Human
agucucugcacaguaagaagca

SEQ ID NO: 310117 - RNA, 22 nt, Human
gggacuguaaauucauauggcc

SEQ ID NO: 310118 - RNA, 22 nt, Human
ggugggcaggcgaggcccaggu

SEQ ID NO: 310119 - RNA, 22 nt, Human
ggcacugauuccauucaugaag

SEQ ID NO: 310120 - RNA, 22 nt, Human
agaaauguggaucguuuuaaaa

SEQ ID NO: 310121 - RNA, 22 nt, Human
ucaggaugagcucauaacuaug

SEQ ID NO: 310122 - RNA, 22 nt, Human
aggugccaauuuucagugaaca

SEQ ID NO: 310123 - RNA, 20 nt, Human
ucugucucugagcuagacuu

SEQ ID NO: 310124 - RNA, 22 nt, Human
uguuugaacugaauaacauagu

SEQ ID NO: 310125 - RNA, 22 nt, Human
ucaguguuuuaacugucuuuua

SEQ ID NO: 310126 - RNA, 22 nt, Human
cagagcagaaaccugggugauu

SEQ ID NO: 310127 - RNA, 22 nt, Human
uagcagggucucaggagucagg

SEQ ID NO: 310128 - RNA, 22 nt, Human
uguuuuaugagccauauaaccu

SEQ ID NO: 310129 - RNA, 23 nt, Human
aggcccaacucugugagggcugc

SEQ ID NO: 310130 - RNA, 22 nt, Human
guuugaaugcaguaugcauuuu

SEQ ID NO: 310131 - RNA, 22 nt, Human
gcugggcucuuuaccccuguac

SEQ ID NO: 310132 - RNA, 22 nt, Human
acaugcauucucuaaaagcaaa

SEQ ID NO: 310133 - RNA, 22 nt, Human
agcugccuguccuaggccauca

SEQ ID NO: 310134 - RNA, 22 nt, Human
augcccgauaccuaguuaacuc

SEQ ID NO: 310135 - RNA, 19 nt, Human
gcaggcaguggcauucgga

SEQ ID NO: 310136 - RNA, 22 nt, Human
acagagcauuugggacagagag

SEQ ID NO: 310137 - RNA, 22 nt, Human
agcuggcauacuuugcuaggaa

SEQ ID NO: 310138 - RNA, 22 nt, Human
uuauccaaacuggugaaucauu

SEQ ID NO: 310139 - RNA, 22 nt, Human
agagcugaaaaagcugacccgg

SEQ ID NO: 310140 - RNA, 22 nt, Human
ucuuggagaauggcagagaagc

SEQ ID NO: 310141 - RNA, 22 nt, Human
caguuucuucaucaguuaagca

SEQ ID NO: 310142 - RNA, 22 nt, Human
auguuucagauacagaucaaau

SEQ ID NO: 310143 - RNA, 22 nt, Human
acacaggagauauguaauggcu

SEQ ID NO: 310144 - RNA, 22 nt, Human
aaucuggcauguaagcuuagag

SEQ ID NO: 310145 - RNA, 22 nt, Human
auaaacacuucuagggcacaca

SEQ ID NO: 310146 - RNA, 22 nt, Human
aaggagagagcuuugcuggaac

SEQ ID NO: 310147 - RNA, 22 nt, Human
cuugcugggguaagucugugcu

SEQ ID NO: 310148 - RNA, 22 nt, Human
gagccagcugagcugcacuguc

SEQ ID NO: 310149 - RNA, 22 nt, Human
ucucuucugaaaccugucuuua

SEQ ID NO: 310150 - RNA, 22 nt, Human
aagauuuacuagcauaauagcu

SEQ ID NO: 310151 - RNA, 22 nt, Human
gccuggagggucccucucugga

SEQ ID NO: 310152 - RNA, 22 nt, Human
ucagugugcacaugguagcagu

SEQ ID NO: 310153 - RNA, 22 nt, Human
uagaaacucaggauacucuucc

SEQ ID NO: 310154 - RNA, 22 nt, Human
caggacaguuugcuuugcccug

SEQ ID NO: 310155 - RNA, 22 nt, Human
caaauuacccucaacaucuaga

SEQ ID NO: 310156 - RNA, 22 nt, Human
gcauaauauacaugcuugaucc

SEQ ID NO: 310157 - RNA, 22 nt, Human
cagcccugucccugagggaccu

SEQ ID NO: 310158 - RNA, 21 nt, Human
ugagagccuccaaccggcuac

SEQ ID NO: 310159 - RNA, 19 nt, Human
agcuuccauauucucuagu

SEQ ID NO: 310160 - RNA, 22 nt, Human
gugccugcugcagagucgcugu

SEQ ID NO: 310161 - RNA, 22 nt, Human
cuggccaacuugcuuguuggca

SEQ ID NO: 310162 - RNA, 22 nt, Human
ucugagaggcagaccuuccuaa

SEQ ID NO: 310163 - RNA, 22 nt, Human
ggaagaaaucugguuaagagau

SEQ ID NO: 310164 - RNA, 22 nt, Human
acugaaggaaagccuuugcaug

SEQ ID NO: 310165 - RNA, 22 nt, Human
cauugcacuccaucuugggcaa

SEQ ID NO: 310166 - RNA, 22 nt, Human
cagggacaugacuggucucugu

SEQ ID NO: 310167 - RNA, 22 nt, Human
gcuguccucugaucucuggagg

SEQ ID NO: 310168 - RNA, 22 nt, Human
uuucuuaguccuagagugauuu

SEQ ID NO: 310169 - RNA, 22 nt, Human
uaguuuuacuugcgaugauaau

SEQ ID NO: 310170 - RNA, 22 nt, Human
cccucagucuggcugggaagac

SEQ ID NO: 310171 - RNA, 22 nt, Human
cugggcugcgggcgccccucca

SEQ ID NO: 310172 - RNA, 22 nt, Human
cauugcacaucugagaagagau

SEQ ID NO: 310173 - RNA, 22 nt, Human
ugccugucagggggagugggaa

SEQ ID NO: 310174 - RNA, 22 nt, Human
ggcccugggcagaggagugggc

SEQ ID NO: 310175 - RNA, 22 nt, Human
cacauuucuaggaaauuaaaug

SEQ ID NO: 310176 - RNA, 22 nt, Human
uacagggguaacaguggggaau

SEQ ID NO: 310177 - RNA, 22 nt, Human
gcaaauauucaagacuuuucca

SEQ ID NO: 310178 - RNA, 22 nt, Human
caggauggagggagggcuguua

SEQ ID NO: 310179 - RNA, 22 nt, Human
gccugagcccaggugugcagag

SEQ ID NO: 310180 - RNA, 20 nt, Human
uauuuagauucaaguaugga

SEQ ID NO: 310181 - RNA, 22 nt, Human
acucugagcaucccaagucuua

SEQ ID NO: 310182 - RNA, 22 nt, Human
cagcccuggcuagggcgagggc

SEQ ID NO: 310183 - RNA, 22 nt, Human
uucugaggcacuggcucuccca

SEQ ID NO: 310184 - RNA, 22 nt, Human
aaccaggacaauuuugaaagua

SEQ ID NO: 310185 - RNA, 22 nt, Human
gacaggaggcagagcucaggug

SEQ ID NO: 310186 - RNA, 22 nt, Human
cggcagagcuuccugcucagcg

SEQ ID NO: 310187 - RNA, 22 nt, Human
uauuccaaaaucccaaacugcc

SEQ ID NO: 310188 - RNA, 22 nt, Human
ugaaggagaauuaauaggcauu

SEQ ID NO: 310189 - RNA, 22 nt, Human
gccagagccggcuucacaggau

SEQ ID NO: 310190 - RNA, 22 nt, Human
aguagaaagaaggcacugggcc

SEQ ID NO: 310191 - RNA, 18 nt, Human
gccugccuagagcuugcc

SEQ ID NO: 310192 - RNA, 22 nt, Human
ggagacaugcagacugagauac

SEQ ID NO: 310193 - RNA, 22 nt, Human
gccuccuggccuuugcuccuca

SEQ ID NO: 310194 - RNA, 22 nt, Human
uaaauguguguagccaucugug

SEQ ID NO: 310195 - RNA, 22 nt, Human
agggcagaaaucgauuacaccu

SEQ ID NO: 310196 - RNA, 22 nt, Human
ugagagcagaggugggcagccu

SEQ ID NO: 310197 - RNA, 22 nt, Human
cuggccacuggagguggcaccc

SEQ ID NO: 310198 - RNA, 21 nt, Human
agggccugugcucuccagguc

SEQ ID NO: 310199 - RNA, 22 nt, Human
gcaggcaguuauuuaguagaau

SEQ ID NO: 310200 - RNA, 22 nt, Human
aguuagaauauaauuauguuaa

SEQ ID NO: 310201 - RNA, 22 nt, Human
gggcucuggaaggugcaccaug

SEQ ID NO: 310202 - RNA, 22 nt, Human
uauuucuucgggauucaagcua

SEQ ID NO: 310203 - RNA, 22 nt, Human
gauauuuugagaaauccuauga

SEQ ID NO: 310204 - RNA, 22 nt, Human
ucagugcacagagauuuuuguu

SEQ ID NO: 310205 - RNA, 22 nt, Human
ccuggcagacagcacugaagcu

SEQ ID NO: 310206 - RNA, 22 nt, Human
ugucagggcaugcgguccagcc

SEQ ID NO: 310207 - RNA, 21 nt, Human
ggugggcacaggagagcagag

SEQ ID NO: 310208 - RNA, 22 nt, Human
cccugccugugggcaucaacau

SEQ ID NO: 310209 - RNA, 22 nt, Human
cagcccagcagucuuagccugc

SEQ ID NO: 310210 - RNA, 22 nt, Human
caaaauguucuggcaccuuuaa

SEQ ID NO: 310211 - RNA, 22 nt, Human
guacauuucucuuguucuuauu

SEQ ID NO: 310212 - RNA, 22 nt, Human
uggcagcuccuggggccagcac

SEQ ID NO: 310213 - RNA, 22 nt, Human
ccagcagagggucuuggccauu

SEQ ID NO: 310214 - RNA, 22 nt, Human
aaaguuaguuucuuauaugucu

SEQ ID NO: 310215 - RNA, 22 nt, Human
ucucaguggacgugucugucuu

SEQ ID NO: 310216 - RNA, 22 nt, Human
ucuguaguagguuguaguucuu

SEQ ID NO: 310217 - RNA, 22 nt, Human
aagcccaguuucacacugagac

SEQ ID NO: 310218 - RNA, 22 nt, Human
cagcugccacaggacuuucuga

SEQ ID NO: 310219 - RNA, 22 nt, Human
aggccuccugcagggaugagug

SEQ ID NO: 310220 - RNA, 22 nt, Human
aaucuucuacuugacaguucuc

SEQ ID NO: 310221 - RNA, 22 nt, Human
cauuuguaucauauguaucuua

SEQ ID NO: 310222 - RNA, 22 nt, Human
uagacauuagguagguucaugg

SEQ ID NO: 310223 - RNA, 22 nt, Human
ggucacaggggagaagagugau

SEQ ID NO: 310224 - RNA, 22 nt, Human
caguccugggcacagcccuggg

SEQ ID NO: 310225 - RNA, 22 nt, Human
gucccuggggaaucagcuggag

SEQ ID NO: 310226 - RNA, 22 nt, Human
agugggcagugcgcucggaugc

SEQ ID NO: 310227 - RNA, 22 nt, Human
ggaggaggcaaguaccagaugc

SEQ ID NO: 310228 - RNA, 22 nt, Human
uguguauuucuggaacagacua

SEQ ID NO: 310229 - RNA, 22 nt, Human
ccagcugaggcagccacacagg

SEQ ID NO: 310230 - RNA, 19 nt, Human
caaggguugggucugucau

SEQ ID NO: 310231 - RNA, 18 nt, Human
acacugcagcagucugcu

SEQ ID NO: 310232 - RNA, 22 nt, Human
gccaccagggggcuccagugag

SEQ ID NO: 310233 - RNA, 22 nt, Human
gccugugcuuaacugacgugag

SEQ ID NO: 310234 - RNA, 22 nt, Human
ucaaaguagggguaagccaggc

SEQ ID NO: 310235 - RNA, 22 nt, Human
uuauuccauagaagucaaggaa

SEQ ID NO: 310236 - RNA, 22 nt, Human
uguggccucaaggcugcccuca

SEQ ID NO: 310237 - RNA, 22 nt, Human
aagcaaagaguuuaguggguga

SEQ ID NO: 310238 - RNA, 23 nt, Human
agucuucauuguauuuccagacc

SEQ ID NO: 310239 - RNA, 23 nt, Human
cuggcucauccugguugcagugg

SEQ ID NO: 310240 - RNA, 22 nt, Human
gccucugccaagggggcugcgg

SEQ ID NO: 310241 - RNA, 22 nt, Human
uuagaaagcuuuccauagucaa

SEQ ID NO: 310242 - RNA, 22 nt, Human
cuuaaaaucuggcaguuagcua

SEQ ID NO: 310243 - RNA, 22 nt, Human
uacuaucucuucuaacuucaga

SEQ ID NO: 310244 - RNA, 22 nt, Human
uucuccgcuaaguucucugcag

SEQ ID NO: 310245 - RNA, 22 nt, Human
cugcuuuggcucagugacauca

SEQ ID NO: 310246 - RNA, 22 nt, Human
gcugccucaggcaccuccuggc

SEQ ID NO: 310247 - RNA, 22 nt, Human
cugggcuagaaggaccaggaug

SEQ ID NO: 310248 - RNA, 22 nt, Human
ucugugcugucucagagaaagc

SEQ ID NO: 310249 - RNA, 22 nt, Human
gggcucuguccauuccuucaua

SEQ ID NO: 310250 - RNA, 22 nt, Human
gauuuccuaauguggaucucug

SEQ ID NO: 310251 - RNA, 20 nt, Human
uacuugaauguugcagcagu

SEQ ID NO: 310252 - RNA, 18 nt, Human
cucucuggucuggauccc

SEQ ID NO: 310253 - RNA, 22 nt, Human
ucauugaauuucacagcuuuau

SEQ ID NO: 310254 - RNA, 22 nt, Human
agggcagccaugagccuucagg

SEQ ID NO: 310255 - RNA, 22 nt, Human
ggagcagcuugcaugcucaggg

SEQ ID NO: 310256 - RNA, 22 nt, Human
uuccugaugcacacagucauuu

SEQ ID NO: 310257 - RNA, 22 nt, Human
uccucagucguuugagccaaaa

SEQ ID NO: 310258 - RNA, 22 nt, Human
uucuuucccagaagauauguuu

SEQ ID NO: 310259 - RNA, 22 nt, Human
cacaggguuguucugaggauuc

SEQ ID NO: 310260 - RNA, 22 nt, Human
ccaccagcagugugcaaggauu

SEQ ID NO: 310261 - RNA, 22 nt, Human
accccaagacaguagaagagaa

SEQ ID NO: 310262 - RNA, 22 nt, Human
ucccagagaagagcuggaugga

SEQ ID NO: 310263 - RNA, 22 nt, Human
auaugcauaugucaaaacuuau

SEQ ID NO: 310264 - RNA, 22 nt, Human
caccagcagaagacugagggug

SEQ ID NO: 310265 - RNA, 22 nt, Human
augaagcugguuuuggcuuggg

SEQ ID NO: 310266 - RNA, 22 nt, Human
aaauuguugaucuacaguaagg

SEQ ID NO: 310267 - RNA, 22 nt, Human
gugaaggacugaaugaaaaugu

SEQ ID NO: 310268 - RNA, 22 nt, Human
uccugagagcagaguccaggug

SEQ ID NO: 310269 - RNA, 21 nt, Human
gcaggcuggucaaaccucagu

SEQ ID NO: 310270 - RNA, 20 nt, Human
ucagugauuaucucugagug

SEQ ID NO: 310271 - RNA, 22 nt, Human
agagaugaagggcauuccccag

SEQ ID NO: 310272 - RNA, 22 nt, Human
cucagggcaguauggcugagag

SEQ ID NO: 310273 - RNA, 21 nt, Human
aaggagccuaggaggcucagg

SEQ ID NO: 310274 - RNA, 22 nt, Human
ccuagagcucugcuuuaucuaa

SEQ ID NO: 310275 - RNA, 22 nt, Human
agggaaaguaagcauuucauua

SEQ ID NO: 310276 - RNA, 20 nt, Human
cacagcuugccuuuuaugac

SEQ ID NO: 310277 - RNA, 22 nt, Human
uccagagcagguggucagaagg

SEQ ID NO: 310278 - RNA, 22 nt, Human
cuagucacucagcacugacaaa

SEQ ID NO: 310279 - RNA, 22 nt, Human
acaaagucugaaaccugaggca

SEQ ID NO: 310280 - RNA, 22 nt, Human
guguccagggccguguugucuu

SEQ ID NO: 310281 - RNA, 18 nt, Human
ucaguccuccauagagcu

SEQ ID NO: 310282 - RNA, 22 nt, Human
ucaucuaagagucuuacauuua

SEQ ID NO: 310283 - RNA, 22 nt, Human
ugaaagcucugucaucauuccu

SEQ ID NO: 310284 - RNA, 22 nt, Human
gaagcccaggcuuccuuggcuu

SEQ ID NO: 310285 - RNA, 22 nt, Human
uggcaggguggcaacuuuuggu

SEQ ID NO: 310286 - RNA, 22 nt, Human
ccuggcagguggcgcccucggc

SEQ ID NO: 310287 - RNA, 22 nt, Human
gucuuguuugggauguggaugg

SEQ ID NO: 310288 - RNA, 19 nt, Human
ggcugccuuuccuuaccag

SEQ ID NO: 310289 - RNA, 22 nt, Human
aagaaauuaaugugccauuacu

SEQ ID NO: 310290 - RNA, 22 nt, Human
cagcucugacacaguacaaaau

SEQ ID NO: 310291 - RNA, 22 nt, Human
auuacaaucgagagaaacaaau

SEQ ID NO: 310292 - RNA, 22 nt, Human
cacagaguggaggcuuggccug

SEQ ID NO: 310293 - RNA, 22 nt, Human
agacuuuaaugugcaaaugaaa

SEQ ID NO: 310294 - RNA, 22 nt, Human
cagagguauugcaaaagccuag

SEQ ID NO: 310295 - RNA, 22 nt, Human
gagcucagcacuaaaaucaugu

SEQ ID NO: 310296 - RNA, 22 nt, Human
cagcccacugccucugugguag

SEQ ID NO: 310297 - RNA, 18 nt, Human
uccucucuuuccccaggg

SEQ ID NO: 310298 - RNA, 22 nt, Human
uaauuuaauuccauggauucua

SEQ ID NO: 310299 - RNA, 23 nt, Human
uguaaaaugggguaguguuacca

SEQ ID NO: 310300 - RNA, 22 nt, Human
acucuucuugcugcucauuaau

SEQ ID NO: 310301 - RNA, 22 nt, Human
cagccccuuguccgguagccac

SEQ ID NO: 310302 - RNA, 22 nt, Human
cagugcaguggcugagcuggag

SEQ ID NO: 310303 - RNA, 22 nt, Human
uguugauuaguguuuagacuua

SEQ ID NO: 310304 - RNA, 22 nt, Human
cugggagaugacucagagcagg

SEQ ID NO: 310305 - RNA, 22 nt, Human
aauggccagcaacaggagugaa

SEQ ID NO: 310306 - RNA, 22 nt, Human
cggggcugcucguccuccugug

SEQ ID NO: 310307 - RNA, 22 nt, Human
gagcagugagugaauguugccu

SEQ ID NO: 310308 - RNA, 22 nt, Human
cugcagccuaggugcagcuggg

SEQ ID NO: 310309 - RNA, 22 nt, Human
uuugcauuucucguaaggaaac

SEQ ID NO: 310310 - RNA, 21 nt, Human
ccuccaggugauuccgugcuc

SEQ ID NO: 310311 - RNA, 22 nt, Human
ccauccuaucugaccuacuugu

SEQ ID NO: 310312 - RNA, 22 nt, Human
ccucugagaccagcucugcacc

SEQ ID NO: 310313 - RNA, 22 nt, Human
aggccuggccugggcggcauug

SEQ ID NO: 310314 - RNA, 22 nt, Human
cugauuccugauucaugcucuu

SEQ ID NO: 310315 - RNA, 22 nt, Human
ucacugcagacaaccucaguca

SEQ ID NO: 310316 - RNA, 22 nt, Human
uucuucaguguagcaacuguau

SEQ ID NO: 310317 - RNA, 22 nt, Human
gcugggagcccuggucugcucc

SEQ ID NO: 310318 - RNA, 22 nt, Human
gauguuuuaggucccuguagcu

SEQ ID NO: 310319 - RNA, 22 nt, Human
acaauacaggcuucuggacuua

SEQ ID NO: 310320 - RNA, 22 nt, Human
aucucuggccuuccuuuuccaa

SEQ ID NO: 310321 - RNA, 22 nt, Human
agucccaguucgguucuuccuc

SEQ ID NO: 310322 - RNA, 22 nt, Human
uggggacauagccagucuggcu

SEQ ID NO: 310323 - RNA, 22 nt, Human
uggcugcucaagggaggaggcu

SEQ ID NO: 310324 - RNA, 22 nt, Human
auacaucuugucagauucaugu

SEQ ID NO: 310325 - RNA, 22 nt, Human
cucagcagagaccagggaggaa

SEQ ID NO: 310326 - RNA, 22 nt, Human
gggccccaaaaugccaggcucu

SEQ ID NO: 310327 - RNA, 22 nt, Human
aagugguaggaagagagcacug

SEQ ID NO: 310328 - RNA, 22 nt, Human
uaugaacuagcugauuuaguuu

SEQ ID NO: 310329 - RNA, 22 nt, Human
uugaaagggauauaucuuucug

SEQ ID NO: 310330 - RNA, 22 nt, Human
uuuaucuuuggaucuucagaaa

SEQ ID NO: 310331 - RNA, 22 nt, Human
gaggucaggcuugcagcagggu

SEQ ID NO: 310332 - RNA, 20 nt, Human
uucaggauucuagaccacac

SEQ ID NO: 310333 - RNA, 22 nt, Human
cagcagagguuggaacaguucu

SEQ ID NO: 310334 - RNA, 22 nt, Human
uuucuucagccacuccaaacug

SEQ ID NO: 310335 - RNA, 22 nt, Human
agcugggaugauaaccucaguc

SEQ ID NO: 310336 - RNA, 22 nt, Human
ugucuucaucuccaugcacaga

SEQ ID NO: 310337 - RNA, 22 nt, Human
cucagaguggggcucccugagg

SEQ ID NO: 310338 - RNA, 22 nt, Human
agaaacauuuagauuauauguc

SEQ ID NO: 310339 - RNA, 22 nt, Human
uugccuugauucuucucaugug

SEQ ID NO: 310340 - RNA, 22 nt, Human
aucaguuuaaaugggcuguugg

SEQ ID NO: 310341 - RNA, 22 nt, Human
gugauuuugagaccuauauagu

SEQ ID NO: 310342 - RNA, 22 nt, Human
uuuucagugggcaaugauguga

SEQ ID NO: 310343 - RNA, 18 nt, Human
gcaggagauggguggggu

SEQ ID NO: 310344 - RNA, 22 nt, Human
cuucuugcaauuuucaucuuau

SEQ ID NO: 310345 - RNA, 22 nt, Human
cagggcaggacagauacauuac

SEQ ID NO: 310346 - RNA, 23 nt, Human
aaucuggcugauguuuuuucucu

SEQ ID NO: 310347 - RNA, 19 nt, Human
ccuggguccacucagacua

SEQ ID NO: 310348 - RNA, 22 nt, Human
cuucuucauaggcaguccuguu

SEQ ID NO: 310349 - RNA, 22 nt, Human
ggggacugccuuccacagacac

SEQ ID NO: 310350 - RNA, 22 nt, Human
uagaaaauagggccuguggagc

SEQ ID NO: 310351 - RNA, 22 nt, Human
cccuggaguagcacugggucgc

SEQ ID NO: 310352 - RNA, 22 nt, Human
ucagagucucccccaguuuggg

SEQ ID NO: 310353 - RNA, 22 nt, Human
ucaccagucuuucuuaccauug

SEQ ID NO: 310354 - RNA, 22 nt, Human
uccucagggaagaugagccuca

SEQ ID NO: 310355 - RNA, 22 nt, Human
cucuuccucucaugcggucaua

SEQ ID NO: 310356 - RNA, 22 nt, Human
gcuggccagggcugcucgcgga

SEQ ID NO: 310357 - RNA, 22 nt, Human
agaucaaagccaugagagauuu

SEQ ID NO: 310358 - RNA, 22 nt, Human
gcuccaguggacugggggaggc

SEQ ID NO: 310359 - RNA, 22 nt, Human
gcuggagccuucugcucuguug

SEQ ID NO: 310360 - RNA, 22 nt, Human
aauauuucuccuucguuauagc

SEQ ID NO: 310361 - RNA, 22 nt, Human
ugagccugguugcagugucugg

SEQ ID NO: 310362 - RNA, 22 nt, Human
acagaaagaagguguauuugag

SEQ ID NO: 310363 - RNA, 22 nt, Human
agagcugggugguggugacuca

SEQ ID NO: 310364 - RNA, 22 nt, Human
cuucucaguugcaagugucaga

SEQ ID NO: 310365 - RNA, 22 nt, Human
ggagccuguuaguugagugcuc

SEQ ID NO: 310366 - RNA, 17 nt, Human
ggcagcugugugcaugc

SEQ ID NO: 310367 - RNA, 22 nt, Human
cagucccacaagaucuccacaa

SEQ ID NO: 310368 - RNA, 22 nt, Human
uguguacaggccuugcuagacu

SEQ ID NO: 310369 - RNA, 22 nt, Human
accagagcuuacaugcuagaaa

SEQ ID NO: 310370 - RNA, 22 nt, Human
gaaaucugaacucuguauccuu

SEQ ID NO: 310371 - RNA, 22 nt, Human
ccgggccucgggacaccgggua

SEQ ID NO: 310372 - RNA, 22 nt, Human
aagagcuggauggaaucuggga

SEQ ID NO: 310373 - RNA, 22 nt, Human
aggaaaaauaaggcagcagggc

SEQ ID NO: 310374 - RNA, 22 nt, Human
uuucuucaauugcuaacaagga

SEQ ID NO: 310375 - RNA, 22 nt, Human
cagggacagccuugggguggcg

SEQ ID NO: 310376 - RNA, 22 nt, Human
auucauucugaccucaagagaa

SEQ ID NO: 310377 - RNA, 22 nt, Human
cugcccccaggcugcauggcug

SEQ ID NO: 310378 - RNA, 19 nt, Human
cauuuagaaguacauauua

SEQ ID NO: 310379 - RNA, 22 nt, Human
ucagcagggccuccuugugcag

SEQ ID NO: 310380 - RNA, 22 nt, Human
ccagccucacuggcaucaccua

SEQ ID NO: 310381 - RNA, 22 nt, Human
gcugucagcgcccaaggagcuc

SEQ ID NO: 310382 - RNA, 22 nt, Human
aguccuggccccaaggaaggau

SEQ ID NO: 310383 - RNA, 22 nt, Human
aggaaagcucccaguagggcuc

SEQ ID NO: 310384 - RNA, 22 nt, Human
agcaccuguggcucaugcucgu

SEQ ID NO: 310385 - RNA, 20 nt, Human
uuaagaaaagcacauccugc

SEQ ID NO: 310386 - RNA, 22 nt, Human
ugagaaagugggugccuagcaa

SEQ ID NO: 310387 - RNA, 22 nt, Human
ggcagcugaccuagcaccaucc

SEQ ID NO: 310388 - RNA, 22 nt, Human
cauggcccucuucuggagcaau

SEQ ID NO: 310389 - RNA, 22 nt, Human
uggagcagagaugggagcccaa

SEQ ID NO: 310390 - RNA, 22 nt, Human
ggaagaaagcacacaaacuuga

SEQ ID NO: 310391 - RNA, 22 nt, Human
acauuucucccugcaugccugc

SEQ ID NO: 310392 - RNA, 22 nt, Human
auguuuauguugggcuauauuu

SEQ ID NO: 310393 - RNA, 22 nt, Human
aggcugccaaagcuucugucuc

SEQ ID NO: 310394 - RNA, 22 nt, Human
agccugggcccugccucuucuc

SEQ ID NO: 310395 - RNA, 22 nt, Human
agccuggagcuugaguuaugag

SEQ ID NO: 310396 - RNA, 22 nt, Human
ggcccacacugacagcugagcu

SEQ ID NO: 310397 - RNA, 20 nt, Human
cucuccucacccgugucagg

SEQ ID NO: 310398 - RNA, 23 nt, Human
ucuggcucuaugugacagcucuc

SEQ ID NO: 310399 - RNA, 22 nt, Human
cugccuggagcauucugaaggu

SEQ ID NO: 310400 - RNA, 22 nt, Human
gauggcagguaguggucucauc

SEQ ID NO: 310401 - RNA, 20 nt, Human
auuuggcaugaaguauugau

SEQ ID NO: 310402 - RNA, 22 nt, Human
gcacccagaggucagcagugcu

SEQ ID NO: 310403 - RNA, 22 nt, Human
gaggggcagagguagagaacaa

SEQ ID NO: 310404 - RNA, 22 nt, Human
ggcuuccuuucacuacccucag

SEQ ID NO: 310405 - RNA, 22 nt, Human
agggggcaggagagaccugcug

SEQ ID NO: 310406 - RNA, 22 nt, Human
cagcucccaguggcagcuccuu

SEQ ID NO: 310407 - RNA, 22 nt, Human
gccuggagcagacgugucccgg

SEQ ID NO: 310408 - RNA, 22 nt, Human
guguccaucagcagccacugug

SEQ ID NO: 310409 - RNA, 22 nt, Human
aucuacagcugucugcacagua

SEQ ID NO: 310410 - RNA, 22 nt, Human
cuucaagauauuucuagaauca

SEQ ID NO: 310411 - RNA, 22 nt, Human
cuuauguaugcuacuuuguggu

SEQ ID NO: 310412 - RNA, 22 nt, Human
acuuagaacaggcagaauucca

SEQ ID NO: 310413 - RNA, 22 nt, Human
uggcacugggaugcuacuguua

SEQ ID NO: 310414 - RNA, 20 nt, Human
ccaagagcaugcaugaggaa

SEQ ID NO: 310415 - RNA, 17 nt, Human
uguggccuucugagcuu

SEQ ID NO: 310416 - RNA, 22 nt, Human
uugucuguccaggcaccccaag

SEQ ID NO: 310417 - RNA, 22 nt, Human
caguccugagccaaucaugaug

SEQ ID NO: 310418 - RNA, 22 nt, Human
cauguguuuugucauuucaaua

SEQ ID NO: 310419 - RNA, 22 nt, Human
uacaaagugagcaaccucuuuu

SEQ ID NO: 310420 - RNA, 17 nt, Human
ugaauucaaucugcacu

SEQ ID NO: 310421 - RNA, 22 nt, Human
cuccaggggccagaagccuggc

SEQ ID NO: 310422 - RNA, 22 nt, Human
agaggcugggaaggguccccgg

SEQ ID NO: 310423 - RNA, 22 nt, Human
ucuuuccucugagcuccuguag

SEQ ID NO: 310424 - RNA, 22 nt, Human
gguucacauauugagaguauuc

SEQ ID NO: 310425 - RNA, 22 nt, Human
agaccauagggaccucagguug

SEQ ID NO: 310426 - RNA, 22 nt, Human
ugcauuccuuugucuguuaaag

SEQ ID NO: 310427 - RNA, 22 nt, Human
ugccagcaguagcaguaggcca

SEQ ID NO: 310428 - RNA, 22 nt, Human
ucuguuuaggcaaaauagcuac

SEQ ID NO: 310429 - RNA, 22 nt, Human
gggaucagcaagccacugcacc

SEQ ID NO: 310430 - RNA, 22 nt, Human
gggccugacugagagcuccuca

SEQ ID NO: 310431 - RNA, 22 nt, Human
uaacagaaacagauaaguguaa

SEQ ID NO: 310432 - RNA, 22 nt, Human
gcuggcuguguuucaucucuga

SEQ ID NO: 310433 - RNA, 22 nt, Human
agagccuggcucccagcuaccg

SEQ ID NO: 310434 - RNA, 22 nt, Human
uggucucuucuuccaagauggc

SEQ ID NO: 310435 - RNA, 22 nt, Human
ucaaacuguuuacagugagaua

SEQ ID NO: 310436 - RNA, 22 nt, Human
gccucuggggcagcugagucau

SEQ ID NO: 310437 - RNA, 22 nt, Human
gcuggcuguaucaccuggccag

SEQ ID NO: 310438 - RNA, 22 nt, Human
ucaguucuuuauuucacaguga

SEQ ID NO: 310439 - RNA, 22 nt, Human
auuuagacuucccagcacugug

SEQ ID NO: 310440 - RNA, 22 nt, Human
augcacccagugucuggacuau

SEQ ID NO: 310441 - RNA, 18 nt, Human
gguggcucagucaugggg

SEQ ID NO: 310442 - RNA, 22 nt, Human
auauaauuguucugaaguguuu

SEQ ID NO: 310443 - RNA, 22 nt, Human
caguccagccaguagggugugg

SEQ ID NO: 310444 - RNA, 17 nt, Human
auguauauuaacucuga

SEQ ID NO: 310445 - RNA, 22 nt, Human
gccuggcccagggcuccgcagg

SEQ ID NO: 310446 - RNA, 22 nt, Human
gagaagccgagucagcugagcc

SEQ ID NO: 310447 - RNA, 22 nt, Human
guuccuauauagccuuaaggau

SEQ ID NO: 310448 - RNA, 22 nt, Human
auggacagugugucuguuucca

SEQ ID NO: 310449 - RNA, 22 nt, Human
ucucccacagccgugcuucaag

SEQ ID NO: 310450 - RNA, 22 nt, Human
cucuccagaauaugccgccgug

SEQ ID NO: 310451 - RNA, 22 nt, Human
ccagcuggaagagugcagaacu

SEQ ID NO: 310452 - RNA, 22 nt, Human
acucagaagauauaaugacuca

SEQ ID NO: 310453 - RNA, 22 nt, Human
gggugggccugucuggccaugu

SEQ ID NO: 310454 - RNA, 21 nt, Human
ccuccaggagcagagcccuga

SEQ ID NO: 310455 - RNA, 22 nt, Human
uggagcagggcaucacugugcg

SEQ ID NO: 310456 - RNA, 22 nt, Human
cacagaaucugugacuccaaga

SEQ ID NO: 310457 - RNA, 22 nt, Human
ggcccugggaugcucagcagug

SEQ ID NO: 310458 - RNA, 22 nt, Human
ugggcugcuucuauuggugguc

SEQ ID NO: 310459 - RNA, 22 nt, Human
ugcagaggagucagccugggca

SEQ ID NO: 310460 - RNA, 22 nt, Human
agaaaauaaauugaugguggaa

SEQ ID NO: 310461 - RNA, 22 nt, Human
cugagcuggucuauggacuugg

SEQ ID NO: 310462 - RNA, 19 nt, Human
aggugaugugacucuagaa

SEQ ID NO: 310463 - RNA, 22 nt, Human
aucuggcuuuuacugaauugcu

SEQ ID NO: 310464 - RNA, 22 nt, Human
uaaggccaggcuguggucggca

SEQ ID NO: 310465 - RNA, 22 nt, Human
ccaaaugugccuguuucaacaa

SEQ ID NO: 310466 - RNA, 22 nt, Human
cagcaaaagccagcauaagcuc

SEQ ID NO: 310467 - RNA, 22 nt, Human
cagucccaccaggaucgcucuu

SEQ ID NO: 310468 - RNA, 22 nt, Human
cuggaaggcucugcugccuguc

SEQ ID NO: 310469 - RNA, 22 nt, Human
auuugaagaaaguuuucuagau

SEQ ID NO: 310470 - RNA, 22 nt, Human
aaaaucugguaauuugaaugug

SEQ ID NO: 310471 - RNA, 22 nt, Human
ugcuggggcagaagagccaaga

SEQ ID NO: 310472 - RNA, 22 nt, Human
uguagaaccuguuuauuauaga

SEQ ID NO: 310473 - RNA, 22 nt, Human
uuaucacuuaugagcuuuuugc

SEQ ID NO: 310474 - RNA, 20 nt, Human
uccaguuuuggagacauucu

SEQ ID NO: 310475 - RNA, 19 nt, Human
ggcucagggcgcugccgcc

SEQ ID NO: 310476 - RNA, 22 nt, Human
cccugcugucaggugcugggag

SEQ ID NO: 310477 - RNA, 22 nt, Human
gcuggcugcgucaucacagggc

SEQ ID NO: 310478 - RNA, 22 nt, Human
agacccugcaccucucgugggc

SEQ ID NO: 310479 - RNA, 22 nt, Human
gccaggcugcuccagggaggcc

SEQ ID NO: 310480 - RNA, 22 nt, Human
ggcuggcuggcugguagacaag

SEQ ID NO: 310481 - RNA, 22 nt, Human
aucugcuugaaugagcaacagg

SEQ ID NO: 310482 - RNA, 22 nt, Human
auccaaagauggaaagaacuuu

SEQ ID NO: 310483 - RNA, 22 nt, Human
ugcucauuggcgaucugaggga

SEQ ID NO: 310484 - RNA, 22 nt, Human
uguaugaaucucauuuguuuaa

SEQ ID NO: 310485 - RNA, 22 nt, Human
aggagcagcccacuccuguccu

SEQ ID NO: 310486 - RNA, 18 nt, Human
uggccuggagacaacucu

SEQ ID NO: 310487 - RNA, 22 nt, Human
ugggccacaagccaugggacca

SEQ ID NO: 310488 - RNA, 22 nt, Human
uacaguaaccuuauuugucauu

SEQ ID NO: 310489 - RNA, 22 nt, Human
ucucccucuuugucugcuuugg

SEQ ID NO: 310490 - RNA, 22 nt, Human
uaaaucucacuggguauauugg

SEQ ID NO: 310491 - RNA, 22 nt, Human
caccagguuccgggcagagcug

SEQ ID NO: 310492 - RNA, 22 nt, Human
ucuacuuuucccuauacaguuu

SEQ ID NO: 310493 - RNA, 22 nt, Human
augaggcaguacacacaaagcc

SEQ ID NO: 310494 - RNA, 22 nt, Human
uuuuuccuuggaugugucucuc

SEQ ID NO: 310495 - RNA, 22 nt, Human
gccaggcucucagugacugccc

SEQ ID NO: 310496 - RNA, 22 nt, Human
ccagaagaccccguccaccucc

SEQ ID NO: 310497 - RNA, 22 nt, Human
auauauuuugcggucacguggc

SEQ ID NO: 310498 - RNA, 22 nt, Human
gggagggaagguaccuguguga

SEQ ID NO: 310499 - RNA, 22 nt, Human
cuucccagacgggguggcagcc

SEQ ID NO: 310500 - RNA, 22 nt, Human
aagaaaggauauaugggaggua

SEQ ID NO: 310501 - RNA, 22 nt, Human
agcuggaggggccagcaggugu

SEQ ID NO: 310502 - RNA, 22 nt, Human
gaagagcuuaguuguccuagaa

SEQ ID NO: 310503 - RNA, 22 nt, Human
aaagcucuuauagcagagugug

SEQ ID NO: 310504 - RNA, 22 nt, Human
ccugcagaccacacucaguccu

SEQ ID NO: 310505 - RNA, 22 nt, Human
uuuccucacuucaugagaguuu

SEQ ID NO: 310506 - RNA, 22 nt, Human
aacauacagugagcaguggacu

SEQ ID NO: 310507 - RNA, 20 nt, Human
ucuggcaggugaacgagcug

SEQ ID NO: 310508 - RNA, 22 nt, Human
auccccaggggcauucaagcuu

SEQ ID NO: 310509 - RNA, 22 nt, Human
ggcaaaaaccacaauuacuuuu

SEQ ID NO: 310510 - RNA, 22 nt, Human
uuuauguaauuucauaggugug

SEQ ID NO: 310511 - RNA, 20 nt, Human
aucugcuugccuguccucgg

SEQ ID NO: 310512 - RNA, 22 nt, Human
gggcauggugaugugcaccugu

SEQ ID NO: 310513 - RNA, 22 nt, Human
uuccagaaaucuuucagcucaa

SEQ ID NO: 310514 - RNA, 22 nt, Human
ucucagugguguuuugagucca

SEQ ID NO: 310515 - RNA, 22 nt, Human
cugggccagucucggccgcucu

SEQ ID NO: 310516 - RNA, 22 nt, Human
uccuguuuaucugugugacucg

SEQ ID NO: 310517 - RNA, 22 nt, Human
cugagccaaccacagcaggagc

SEQ ID NO: 310518 - RNA, 22 nt, Human
auuaaauuagcaaacugugaaa

SEQ ID NO: 310519 - RNA, 22 nt, Human
ucccaagugucuuggaccaggg

SEQ ID NO: 310520 - RNA, 22 nt, Human
ugcuggcccuggcucagggaac

SEQ ID NO: 310521 - RNA, 22 nt, Human
auuuucaucauggguuuaacau

SEQ ID NO: 310522 - RNA, 22 nt, Human
cuacauuucccagcugccuucc

SEQ ID NO: 310523 - RNA, 22 nt, Human
aucugguuuggggauccuugug

SEQ ID NO: 310524 - RNA, 22 nt, Human
uguauuagaucugagaacuucu

SEQ ID NO: 310525 - RNA, 22 nt, Human
gaaaggugccccauaggcagga

SEQ ID NO: 310526 - RNA, 22 nt, Human
gcaggaguguggugggacaucc

SEQ ID NO: 310527 - RNA, 22 nt, Human
guuuuuaucuaauagcaguuau

SEQ ID NO: 310528 - RNA, 22 nt, Human
aacaugcugccuuucuacgagu

SEQ ID NO: 310529 - RNA, 22 nt, Human
auuaguaaaacauuguauaugu

SEQ ID NO: 310530 - RNA, 22 nt, Human
ggccuugggauguggcugcagc

SEQ ID NO: 310531 - RNA, 22 nt, Human
ucacagugagccaugucagaga

SEQ ID NO: 310532 - RNA, 22 nt, Human
uuuaaaaucagaugggaguugg

SEQ ID NO: 310533 - RNA, 22 nt, Human
ugccaggcccagcuccagagcu

SEQ ID NO: 310534 - RNA, 22 nt, Human
cugaagccacgauagcuuccua

SEQ ID NO: 310535 - RNA, 22 nt, Human
agaauucugacaauagaauugg

SEQ ID NO: 310536 - RNA, 22 nt, Human
uuugcagugucagcuucugugu

SEQ ID NO: 310537 - RNA, 23 nt, Human
uggggccaagugaggaagggucu

SEQ ID NO: 310538 - RNA, 22 nt, Human
ccucagggucugaggagaccgu

SEQ ID NO: 310539 - RNA, 22 nt, Human
ucagggacauuuagacacugau

SEQ ID NO: 310540 - RNA, 22 nt, Human
gcuguguuuuauguuagguuaa

SEQ ID NO: 310541 - RNA, 22 nt, Human
ugcuucaaguugaaauauucuu

SEQ ID NO: 310542 - RNA, 22 nt, Human
cacaggcucuucucacuugauu

SEQ ID NO: 310543 - RNA, 22 nt, Human
cuggaagguucuuugugugccu

SEQ ID NO: 310544 - RNA, 22 nt, Human
guggccagaagacugcaaugcu

SEQ ID NO: 310545 - RNA, 22 nt, Human
uuugcaaagaaauuauugcugu

SEQ ID NO: 310546 - RNA, 22 nt, Human
augauggugggagaugacccag

SEQ ID NO: 310547 - RNA, 22 nt, Human
aaaguguugauaugugacaucc

SEQ ID NO: 310548 - RNA, 22 nt, Human
aaguucuuggaggaugaagagu

SEQ ID NO: 310549 - RNA, 22 nt, Human
agugcuuucccugaaaccuucc

SEQ ID NO: 310550 - RNA, 22 nt, Human
acagccaggaauucuggagaag

SEQ ID NO: 310551 - RNA, 22 nt, Human
ucugagcuggagcccaucaccu

SEQ ID NO: 310552 - RNA, 22 nt, Human
acagggcccuugccagcacaag

SEQ ID NO: 310553 - RNA, 23 nt, Human
cuugcagggcuggaggcuuagaa

SEQ ID NO: 310554 - RNA, 22 nt, Human
ggggugagugcucagccccgga

SEQ ID NO: 310555 - RNA, 22 nt, Human
caaagguaaagaucugcugugg

SEQ ID NO: 310556 - RNA, 22 nt, Human
aaaaugaugcuguaauuuggca

SEQ ID NO: 310557 - RNA, 22 nt, Human
cugucaguucuuccagauagag

SEQ ID NO: 310558 - RNA, 22 nt, Human
ggcaggagauaaaauauuaguu

SEQ ID NO: 310559 - RNA, 22 nt, Human
auuuucaguugaaaaaguuggu

SEQ ID NO: 310560 - RNA, 22 nt, Human
ccuggagcgcgggucaagcugg

SEQ ID NO: 310561 - RNA, 22 nt, Human
ggucucagcaguugcuuugacu

SEQ ID NO: 310562 - RNA, 22 nt, Human
caugggcucuucuggacugcac

SEQ ID NO: 310563 - RNA, 22 nt, Human
uucacaauggcaaaccauuaaa

SEQ ID NO: 310564 - RNA, 16 nt, Human
gagccaggugccuuga

SEQ ID NO: 310565 - RNA, 22 nt, Human
ucugaggccccugggcaggaug

SEQ ID NO: 310566 - RNA, 22 nt, Human
uggagagcuccuauuugcuguc

SEQ ID NO: 310567 - RNA, 22 nt, Human
agcugcuguggggcucggccug

SEQ ID NO: 310568 - RNA, 22 nt, Human
agacaacaccaaaugcuagugu

SEQ ID NO: 310569 - RNA, 22 nt, Human
uuacugaaaauucuucaggauu

SEQ ID NO: 310570 - RNA, 22 nt, Human
acauuucugagcagggagcugu

SEQ ID NO: 310571 - RNA, 22 nt, Human
aagccaguaaguuuuugucauu

SEQ ID NO: 310572 - RNA, 22 nt, Human
ccaggucugcgggcggcaggca

SEQ ID NO: 310573 - RNA, 20 nt, Human
cuucuucaguaguuuguucu

SEQ ID NO: 310574 - RNA, 20 nt, Human
aaucagaaagugugagcucu

SEQ ID NO: 310575 - RNA, 22 nt, Human
acugugugaaacaucaaugugu

SEQ ID NO: 310576 - RNA, 22 nt, Human
cugccucagcguuguggcccua

SEQ ID NO: 310577 - RNA, 22 nt, Human
agcccaugcaacaggccuagcg

SEQ ID NO: 310578 - RNA, 22 nt, Human
gaacagcugcuagagaucugug

SEQ ID NO: 310579 - RNA, 22 nt, Human
ccaggaguuugaggcugcagug

SEQ ID NO: 310580 - RNA, 22 nt, Human
ucucaggcuaccuugcacaagg

SEQ ID NO: 310581 - RNA, 22 nt, Human
ucuguucaguugauuagacaga

SEQ ID NO: 310582 - RNA, 22 nt, Human
caggauggucagaugcauuguc

SEQ ID NO: 310583 - RNA, 22 nt, Human
acauuuaaugauccuacuguga

SEQ ID NO: 310584 - RNA, 23 nt, Human
cccagcuuucccacugccgagag

SEQ ID NO: 310585 - RNA, 22 nt, Human
gaggcuggugguuaguuccauu

SEQ ID NO: 310586 - RNA, 22 nt, Human
uaggaaaugcuccauugcauaa

SEQ ID NO: 310587 - RNA, 22 nt, Human
uucaggauaguggugaguggca

SEQ ID NO: 310588 - RNA, 20 nt, Human
acaguguuuuugaguagagc

SEQ ID NO: 310589 - RNA, 19 nt, Human
ggcuccuguggcugcagcc

SEQ ID NO: 310590 - RNA, 22 nt, Human
uacauggguagguuaagucaua

SEQ ID NO: 310591 - RNA, 22 nt, Human
cuucuucaucuguaaaacuugg

SEQ ID NO: 310592 - RNA, 22 nt, Human
ggcuuccuggggccuccugcaa

SEQ ID NO: 310593 - RNA, 22 nt, Human
auugacaagugagcugggcugc

SEQ ID NO: 310594 - RNA, 22 nt, Human
uuggcagugaugcagcuuguuc

SEQ ID NO: 310595 - RNA, 22 nt, Human
agggugccuggaagccacucac

SEQ ID NO: 310596 - RNA, 22 nt, Human
gcugcccagcaggccccagggg

SEQ ID NO: 310597 - RNA, 22 nt, Human
aagcagggugucuugacccaug

SEQ ID NO: 310598 - RNA, 22 nt, Human
cauuuguaucugggcugcugug

SEQ ID NO: 310599 - RNA, 22 nt, Human
uccugagauaaaucucauguga

SEQ ID NO: 310600 - RNA, 22 nt, Human
ugaggaggucagagucuggcug

SEQ ID NO: 310601 - RNA, 22 nt, Human
ugcaggugccucuugagcuugu

SEQ ID NO: 310602 - RNA, 22 nt, Human
uaauaguuucauaaugugcuuc

SEQ ID NO: 310603 - RNA, 22 nt, Human
gcaccugggacccagaggcacc

SEQ ID NO: 310604 - RNA, 21 nt, Human
cacugcagccuugaccugggc

SEQ ID NO: 310605 - RNA, 22 nt, Human
ccacucugcugugcuccaugau

SEQ ID NO: 310606 - RNA, 20 nt, Human
gucaucgccggcagcaaaga

SEQ ID NO: 310607 - RNA, 22 nt, Human
caguauuuauggcuugaguauu

SEQ ID NO: 310608 - RNA, 22 nt, Human
gcugucacacauggccccagcu

SEQ ID NO: 310609 - RNA, 21 nt, Human
gggugggaggacacagcaggc

SEQ ID NO: 310610 - RNA, 22 nt, Human
aguggugcugcgcgcggagcuc

SEQ ID NO: 310611 - RNA, 22 nt, Human
aagcagcugauuucacagcuca

SEQ ID NO: 310612 - RNA, 22 nt, Human
uuguuuucuccacugcaucuua

SEQ ID NO: 310613 - RNA, 22 nt, Human
caagagagaugcagcucacuca

SEQ ID NO: 310614 - RNA, 22 nt, Human
caauaauauccugugcuguuug

SEQ ID NO: 310615 - RNA, 22 nt, Human
agaacuguccuuggaggagagu

SEQ ID NO: 310616 - RNA, 22 nt, Human
ccugacucuggccaggccagcu

SEQ ID NO: 310617 - RNA, 22 nt, Human
caggguacagaguuuucuaaac

SEQ ID NO: 310618 - RNA, 18 nt, Human
ugaauagggguuugcaga

SEQ ID NO: 310619 - RNA, 22 nt, Human
cuucagagugcagaagauuggg

SEQ ID NO: 310620 - RNA, 22 nt, Human
caguggcgugaucucugcucac

SEQ ID NO: 310621 - RNA, 22 nt, Human
cucuggaauuaaggaagccugu

SEQ ID NO: 310622 - RNA, 22 nt, Human
cuucugugauuugguuaggaua

SEQ ID NO: 310623 - RNA, 22 nt, Human
ucuggugucaguauucuuugaa

SEQ ID NO: 310624 - RNA, 22 nt, Human
uguuuauuacaguucuuggaau

SEQ ID NO: 310625 - RNA, 22 nt, Human
ccuucugcucccuggccagggc

SEQ ID NO: 310626 - RNA, 22 nt, Human
ucagaagcaggagugugcacaa

SEQ ID NO: 310627 - RNA, 22 nt, Human
ugauuucccucaucauaacaga

SEQ ID NO: 310628 - RNA, 22 nt, Human
ucaguguucuuauuuaauuagg

SEQ ID NO: 310629 - RNA, 22 nt, Human
auuuaaaugcuuaagaggguuu

SEQ ID NO: 310630 - RNA, 22 nt, Human
uggguaaacugggucuggagag

SEQ ID NO: 310631 - RNA, 22 nt, Human
gcugugugaaaacugggccugg

SEQ ID NO: 310632 - RNA, 22 nt, Human
cagggcuggauccuccagacuc

SEQ ID NO: 310633 - RNA, 22 nt, Human
guggcugcagcccagcggcacg

SEQ ID NO: 310634 - RNA, 22 nt, Human
cagccagcugaauguaccauga

SEQ ID NO: 310635 - RNA, 22 nt, Human
cccagacucaucccugggagcu

SEQ ID NO: 310636 - RNA, 22 nt, Human
agagaauuacagaagaauguca

SEQ ID NO: 310637 - RNA, 22 nt, Human
gggcugggauggcuugaagauu

SEQ ID NO: 310638 - RNA, 22 nt, Human
uucacaggugacuggggauaac

SEQ ID NO: 310639 - RNA, 22 nt, Human
agcugccagcaucccggaaggg

SEQ ID NO: 310640 - RNA, 22 nt, Human
agugugagaugauugaggagca

SEQ ID NO: 310641 - RNA, 22 nt, Human
cagcagugucuccagcaucaca

SEQ ID NO: 310642 - RNA, 22 nt, Human
uuguuuuggagaugagcuaaaa

SEQ ID NO: 310643 - RNA, 22 nt, Human
aaaauacuguggaguguugaaa

SEQ ID NO: 310644 - RNA, 22 nt, Human
ucucuucacaugcuugcuccaa

SEQ ID NO: 310645 - RNA, 22 nt, Human
cagggccagagagggcuggcug

SEQ ID NO: 310646 - RNA, 22 nt, Human
agagcccuuucuccaggcaccu

SEQ ID NO: 310647 - RNA, 22 nt, Human
ucuccucuauuucuguauguau

SEQ ID NO: 310648 - RNA, 22 nt, Human
acagccaggagccaugggcagg

SEQ ID NO: 310649 - RNA, 23 nt, Human
ccuggcagcaaacgaggagguua

SEQ ID NO: 310650 - RNA, 22 nt, Human
gaaauauugggacucagagcuu

SEQ ID NO: 310651 - RNA, 22 nt, Human
uuuauuugucuugccauuuagu

SEQ ID NO: 310652 - RNA, 22 nt, Human
aaguuucaugauguaauuauug

SEQ ID NO: 310653 - RNA, 22 nt, Human
cugcccugcccaggccuugggc

SEQ ID NO: 310654 - RNA, 22 nt, Human
ggcauguuucaucacaucaaga

SEQ ID NO: 310655 - RNA, 17 nt, Human
cuggagccuccaacucc

SEQ ID NO: 310656 - RNA, 22 nt, Human
acaguuucuccauuuacaccuu

SEQ ID NO: 310657 - RNA, 22 nt, Human
gccuaggagacaagcgugaaag

SEQ ID NO: 310658 - RNA, 22 nt, Human
uuugcauuuguuuagaaccuga

SEQ ID NO: 310659 - RNA, 22 nt, Human
cuuuauguucaguacaaugcuu

SEQ ID NO: 310660 - RNA, 22 nt, Human
gccagcugguaggcaccuagcc

SEQ ID NO: 310661 - RNA, 22 nt, Human
ccuugcguuuuacagcuucuag

SEQ ID NO: 310662 - RNA, 22 nt, Human
gcuggagguggugagaaaaggu

SEQ ID NO: 310663 - RNA, 22 nt, Human
auaaaguuuaaaagucaauagu

SEQ ID NO: 310664 - RNA, 22 nt, Human
gaggcugauucggggaacagca

SEQ ID NO: 310665 - RNA, 22 nt, Human
gccugugacucgucuugggcca

SEQ ID NO: 310666 - RNA, 22 nt, Human
auguuugaaauuguaaguauau

SEQ ID NO: 310667 - RNA, 22 nt, Human
gaucucaaagcaguguggguug

SEQ ID NO: 310668 - RNA, 23 nt, Human
uugugggcagauuccauggggag

SEQ ID NO: 310669 - RNA, 22 nt, Human
uauccaauucaccauugauggg

SEQ ID NO: 310670 - RNA, 22 nt, Human
ucuuuacacaagacaagaauaa

SEQ ID NO: 310671 - RNA, 22 nt, Human
ucucuucuugauuuucacugga

SEQ ID NO: 310672 - RNA, 22 nt, Human
ugagaaaugggucugcugaaga

SEQ ID NO: 310673 - RNA, 20 nt, Human
aaaguguaagcauauaauua

SEQ ID NO: 310674 - RNA, 22 nt, Human
ggucauugaaaucagaaggguu

SEQ ID NO: 310675 - RNA, 22 nt, Human
gggacuggaacuacuggugcag

SEQ ID NO: 310676 - RNA, 22 nt, Human
gaggggcuggcuguggucccau

SEQ ID NO: 310677 - RNA, 22 nt, Human
uugcugugaaaccaugggaagu

SEQ ID NO: 310678 - RNA, 22 nt, Human
uagagcuggaauuugcagcaag

SEQ ID NO: 310679 - RNA, 22 nt, Human
uccagggacacagaguccuucu

SEQ ID NO: 310680 - RNA, 22 nt, Human
aggcaguguauugcuagcggcu

SEQ ID NO: 310681 - RNA, 22 nt, Human
aaaauaucagcaaagggugaca

SEQ ID NO: 310682 - RNA, 22 nt, Human
gcagagugggagcccagggcug

SEQ ID NO: 310683 - RNA, 22 nt, Human
cccuggaggcggagcuugcagu

SEQ ID NO: 310684 - RNA, 22 nt, Human
agggcuggcuaggugcguuccc

SEQ ID NO: 310685 - RNA, 22 nt, Human
uugguuuaggaacuggcuugga

SEQ ID NO: 310686 - RNA, 22 nt, Human
agauguguuucuaguuccugca

SEQ ID NO: 310687 - RNA, 19 nt, Human
aucugccuuagugcugcug

SEQ ID NO: 310688 - RNA, 22 nt, Human
aaacucuggggguggagcccag

SEQ ID NO: 310689 - RNA, 22 nt, Human
gcacugaaaauguuggauucca

SEQ ID NO: 310690 - RNA, 22 nt, Human
gagagaagaaagccaugguccu

SEQ ID NO: 310691 - RNA, 22 nt, Human
augcuguagaucuuagccucua

SEQ ID NO: 310692 - RNA, 22 nt, Human
uuucagaaagcaucaucaaagu

SEQ ID NO: 310693 - RNA, 22 nt, Human
ucacuguaucauguugcacuua

SEQ ID NO: 310694 - RNA, 22 nt, Human
agucccagcuucccccaugcag

SEQ ID NO: 310695 - RNA, 22 nt, Human
ugaagcaggaucguuugcuuca

SEQ ID NO: 310696 - RNA, 17 nt, Human
cauuuguugaucaguug

SEQ ID NO: 310697 - RNA, 22 nt, Human
ccaaggagcaaggcucaacaag

SEQ ID NO: 310698 - RNA, 22 nt, Human
guccucugggcuuugagcaguc

SEQ ID NO: 310699 - RNA, 22 nt, Human
ucaguguuuauugcggugugua

SEQ ID NO: 310700 - RNA, 22 nt, Human
cucaccacagagccuguccagc

SEQ ID NO: 310701 - RNA, 22 nt, Human
auguuugacugaguuuggcaga

SEQ ID NO: 310702 - RNA, 22 nt, Human
cauaauauacuacauugaugaa

SEQ ID NO: 310703 - RNA, 22 nt, Human
cuguguggacugguugaggccc

SEQ ID NO: 310704 - RNA, 20 nt, Human
uuucugugagaaacacuguu

SEQ ID NO: 310705 - RNA, 22 nt, Human
augaaaauguacauguguauaa

SEQ ID NO: 310706 - RNA, 22 nt, Human
gcugagagaaaagugagguucu

SEQ ID NO: 310707 - RNA, 22 nt, Human
guucuucagauuccauuucagu

SEQ ID NO: 310708 - RNA, 20 nt, Human
uugagcuuuuaguacagaca

SEQ ID NO: 310709 - RNA, 22 nt, Human
uuuaaauaggacuccugggggu

SEQ ID NO: 310710 - RNA, 22 nt, Human
gucugucacucaggggcuggag

SEQ ID NO: 310711 - RNA, 22 nt, Human
uagcucuucaaucacugucucc

SEQ ID NO: 310712 - RNA, 20 nt, Human
uacagaaugcaauaaaaugg

SEQ ID NO: 310713 - RNA, 18 nt, Human
cagaagcaggcagugcag

SEQ ID NO: 310714 - RNA, 22 nt, Human
aucugucuugccuugcauauuu

SEQ ID NO: 310715 - RNA, 22 nt, Human
cauagcaacagcaucaagucaa

SEQ ID NO: 310716 - RNA, 22 nt, Human
ucauaaaucauacuccauuugc

SEQ ID NO: 310717 - RNA, 22 nt, Human
aggagcuggaguccaggcaagu

SEQ ID NO: 310718 - RNA, 22 nt, Human
aucuggcuuuuaccccacggcc

SEQ ID NO: 310719 - RNA, 21 nt, Human
gcaaauguucaggaaaaaaga

SEQ ID NO: 310720 - RNA, 21 nt, Human
aggagggcacaaggccaggaa

SEQ ID NO: 310721 - RNA, 22 nt, Human
ucagggcaaagggcagaguuug

SEQ ID NO: 310722 - RNA, 19 nt, Human
uagaaugcccacuuaaaaa

SEQ ID NO: 310723 - RNA, 22 nt, Human
agcuucuugggcuuuacacaaa

SEQ ID NO: 310724 - RNA, 22 nt, Human
ugggggcugaguaagaugagau

SEQ ID NO: 310725 - RNA, 22 nt, Human
aggucauuacaauuaucauuuu

SEQ ID NO: 310726 - RNA, 20 nt, Human
gggcaguggcgcuaucucag

SEQ ID NO: 310727 - RNA, 22 nt, Human
uuuuuccuaagcaguggagcug

SEQ ID NO: 310728 - RNA, 22 nt, Human
aaaugcauguagaauaauagag

SEQ ID NO: 310729 - RNA, 22 nt, Human
ccagccucaucgccugccuguc

SEQ ID NO: 310730 - RNA, 22 nt, Human
cagaggccucacuuccagccag

SEQ ID NO: 310731 - RNA, 22 nt, Human
ugggcagaggacagggaagauc

SEQ ID NO: 310732 - RNA, 22 nt, Human
uauaagaaacaaggcaaauuuu

SEQ ID NO: 310733 - RNA, 22 nt, Human
gaggcugcugagagcccuguuu

SEQ ID NO: 310734 - RNA, 22 nt, Human
agcugcccuggcggagcugcuc

SEQ ID NO: 310735 - RNA, 17 nt, Human
aagauuucauuagcuga

SEQ ID NO: 310736 - RNA, 22 nt, Human
ccucagaguaggucucagcugu

SEQ ID NO: 310737 - RNA, 22 nt, Human
ucuucagaggaagucagucuuu

SEQ ID NO: 310738 - RNA, 22 nt, Human
aaaguguugggaagaaagugca

SEQ ID NO: 310739 - RNA, 22 nt, Human
uugcucagcacuggagccagcu

SEQ ID NO: 310740 - RNA, 19 nt, Human
guucaaacacugauucagc

SEQ ID NO: 310741 - RNA, 22 nt, Human
gcucagucuuugugggguacgg

SEQ ID NO: 310742 - RNA, 22 nt, Human
gcagggcucauucuaguacaau

SEQ ID NO: 310743 - RNA, 22 nt, Human
ugaaggccucugguacaugcca

SEQ ID NO: 310744 - RNA, 22 nt, Human
aaaugaaaugagugccuggagg

SEQ ID NO: 310745 - RNA, 22 nt, Human
uggagcaggugcucaggguaau

SEQ ID NO: 310746 - RNA, 22 nt, Human
caggccuggcccccggcacacc

SEQ ID NO: 310747 - RNA, 22 nt, Human
uacauaugaacuuuauaacuug

SEQ ID NO: 310748 - RNA, 22 nt, Human
uauaguacauggaaucuucaua

SEQ ID NO: 310749 - RNA, 22 nt, Human
cucagugugaaugcucaguaaa

SEQ ID NO: 310750 - RNA, 22 nt, Human
cugagcugggaguggauagugg

SEQ ID NO: 310751 - RNA, 23 nt, Human
ucaggauauugugugccaaggug

SEQ ID NO: 310752 - RNA, 22 nt, Human
aggggauggagcuggaaggcag

SEQ ID NO: 310753 - RNA, 19 nt, Human
cugaggugcaguaagaggc

SEQ ID NO: 310754 - RNA, 22 nt, Human
aagcugccuagaguugaauguc

SEQ ID NO: 310755 - RNA, 19 nt, Human
gcugugccucucuccugcu

SEQ ID NO: 310756 - RNA, 22 nt, Human
agagcugugcuuugcaccacgu

SEQ ID NO: 310757 - RNA, 22 nt, Human
agggagguaggagcuucuagcu

SEQ ID NO: 310758 - RNA, 22 nt, Human
guccuggguccccgcaggucag

SEQ ID NO: 310759 - RNA, 22 nt, Human
uuaugcuaguauaguccuuaga

SEQ ID NO: 310760 - RNA, 22 nt, Human
auaucauucugauguauaucuu

SEQ ID NO: 310761 - RNA, 19 nt, Human
agcagagcccugaagaucc

SEQ ID NO: 310762 - RNA, 22 nt, Human
ucauaacagcuaagucccuuuc

SEQ ID NO: 310763 - RNA, 22 nt, Human
uggcucagaacuacuucuaguu

SEQ ID NO: 310764 - RNA, 22 nt, Human
ucuuugaauucaaacuguucaa

SEQ ID NO: 310765 - RNA, 22 nt, Human
aauucucaggaauuucaucugu

SEQ ID NO: 310766 - RNA, 22 nt, Human
ucaguccucucuggguuucuua

SEQ ID NO: 310767 - RNA, 22 nt, Human
uccucagaugcucuuggacgcc

SEQ ID NO: 310768 - RNA, 22 nt, Human
uguuuuauuucuccaagaggga

SEQ ID NO: 310769 - RNA, 23 nt, Human
gggggcugguugacucucugcag

SEQ ID NO: 310770 - RNA, 22 nt, Human
cuggaggcugaguugggucucc

SEQ ID NO: 310771 - RNA, 22 nt, Human
acaagaauuuacauguagugga

SEQ ID NO: 310772 - RNA, 22 nt, Human
cccugccuucuuggccuuuaaa

SEQ ID NO: 310773 - RNA, 22 nt, Human
agcaguggcuggauggugugcu

SEQ ID NO: 310774 - RNA, 22 nt, Human
cugcuuccaugcaauggcaguc

SEQ ID NO: 310775 - RNA, 22 nt, Human
aucugccucuucuucauugcga

SEQ ID NO: 310776 - RNA, 22 nt, Human
agccauggcgccacuagaggga

SEQ ID NO: 310777 - RNA, 22 nt, Human
cuuggcagcuuuuggaggagcc

SEQ ID NO: 310778 - RNA, 22 nt, Human
cuguggaaauaaacaaugcuaa

SEQ ID NO: 310779 - RNA, 22 nt, Human
uggccugguccuugucaaggca

SEQ ID NO: 310780 - RNA, 22 nt, Human
cucuggagggaggcugagcugg

SEQ ID NO: 310781 - RNA, 22 nt, Human
ccugggaggcggagguugcagg

SEQ ID NO: 310782 - RNA, 22 nt, Human
gccacagucaggacggggagag

SEQ ID NO: 310783 - RNA, 22 nt, Human
ugagaauuuucaguuucacuuu

SEQ ID NO: 310784 - RNA, 21 nt, Human
ugcaggaaagugcugcgaccc

SEQ ID NO: 310785 - RNA, 22 nt, Human
ugccaggcauauggccucuuug

SEQ ID NO: 310786 - RNA, 22 nt, Human
cccaggaggcagagcuugcagu

SEQ ID NO: 310787 - RNA, 22 nt, Human
gagugcugaaugcgagaacaga

SEQ ID NO: 310788 - RNA, 22 nt, Human
ggcacugagcgggcucugagcg

SEQ ID NO: 310789 - RNA, 22 nt, Human
ugcuauaaguagacauucaaca

SEQ ID NO: 310790 - RNA, 22 nt, Human
aggaggccgggauucuggagau

SEQ ID NO: 310791 - RNA, 22 nt, Human
agauacaucuugaacuucuaga

SEQ ID NO: 310792 - RNA, 22 nt, Human
aauaucuucuaaggauagaacu

SEQ ID NO: 310793 - RNA, 22 nt, Human
cugggcugcaucaaagaggcau

SEQ ID NO: 310794 - RNA, 22 nt, Human
uacauguauugauuucucuucu

SEQ ID NO: 310795 - RNA, 22 nt, Human
accucugcaaugcaaugucaug

SEQ ID NO: 310796 - RNA, 22 nt, Human
agguacaguagacagacaguua

SEQ ID NO: 310797 - RNA, 22 nt, Human
ucucauugguauauacaugugu

SEQ ID NO: 310798 - RNA, 22 nt, Human
cuagaaaaauacuuuauuguga

SEQ ID NO: 310799 - RNA, 19 nt, Human
ugcucaggccaaggagccc

SEQ ID NO: 310800 - RNA, 22 nt, Human
ugcagcagacugaguaugagaa

SEQ ID NO: 310801 - RNA, 22 nt, Human
gaagaagcaggaguguguagca

SEQ ID NO: 310802 - RNA, 20 nt, Human
gccugccucagcuagcugag

SEQ ID NO: 310803 - RNA, 22 nt, Human
ggagccugugcccaagcccaga

SEQ ID NO: 310804 - RNA, 22 nt, Human
gcccagcagcugguggagaagg

SEQ ID NO: 310805 - RNA, 22 nt, Human
caguaugagaguugaaucaagg

SEQ ID NO: 310806 - RNA, 22 nt, Human
uucacagggccacuggcaggag

SEQ ID NO: 310807 - RNA, 22 nt, Human
ccaggccccagggcuggcuuuc

SEQ ID NO: 310808 - RNA, 22 nt, Human
ccagaggugccacagaaagagc

SEQ ID NO: 310809 - RNA, 22 nt, Human
ucucacucauuuccuaggucuu

SEQ ID NO: 310810 - RNA, 22 nt, Human
cuguaguugaugauuucugaua

SEQ ID NO: 310811 - RNA, 22 nt, Human
gugucaugcacacucaguguug

SEQ ID NO: 310812 - RNA, 22 nt, Human
ggcacugauaauguccucucuc

SEQ ID NO: 310813 - RNA, 22 nt, Human
ggggaagaauggcagaaaacau

SEQ ID NO: 310814 - RNA, 22 nt, Human
caugcuccaaaaacaagagaau

SEQ ID NO: 310815 - RNA, 22 nt, Human
aaggucauuguugcauguucuc

SEQ ID NO: 310816 - RNA, 22 nt, Human
uugaagcaugguacuuguucaa

SEQ ID NO: 310817 - RNA, 22 nt, Human
ucaguccuccacacaggcaccc

SEQ ID NO: 310818 - RNA, 22 nt, Human
cagagacaguuucacagggucu

SEQ ID NO: 310819 - RNA, 22 nt, Human
cucuucaaaagucuaauccuua

SEQ ID NO: 310820 - RNA, 22 nt, Human
ucucagugauggcccauuugga

SEQ ID NO: 310821 - RNA, 22 nt, Human
gagagcccugcuccuaucccag

SEQ ID NO: 310822 - RNA, 22 nt, Human
acaaaugcagcauaaagugaac

SEQ ID NO: 310823 - RNA, 22 nt, Human
agccugucugucuccaaagcug

SEQ ID NO: 310824 - RNA, 22 nt, Human
ccagagccucuuaugaagaucg

SEQ ID NO: 310825 - RNA, 22 nt, Human
gagggcugaagauuguggcccc

SEQ ID NO: 310826 - RNA, 22 nt, Human
cacguuuuaugacagaagaagc

SEQ ID NO: 310827 - RNA, 22 nt, Human
cuuaacagagagaaguguugcu

SEQ ID NO: 310828 - RNA, 22 nt, Human
aggcuggcuuggcucuccugug

SEQ ID NO: 310829 - RNA, 22 nt, Human
ucuggcucugaauucacuucug

SEQ ID NO: 310830 - RNA, 22 nt, Human
augaagucuagcaagcauugaa

SEQ ID NO: 310831 - RNA, 22 nt, Human
gcccucagaguuccccacagug

SEQ ID NO: 310832 - RNA, 22 nt, Human
ugcugguggagaaaguggaggu

SEQ ID NO: 310833 - RNA, 22 nt, Human
auguuuuugagauacaaacaga

SEQ ID NO: 310834 - RNA, 22 nt, Human
uaagauguuuugguuugauaag

SEQ ID NO: 310835 - RNA, 22 nt, Human
agagaaaagaguucaggcuuug

SEQ ID NO: 310836 - RNA, 22 nt, Human
ggaggugacgaaaagaaauugu

SEQ ID NO: 310837 - RNA, 22 nt, Human
acuggcagagguuggacaccau

SEQ ID NO: 310838 - RNA, 22 nt, Human
cuguguuggcuuuucucuugua

SEQ ID NO: 310839 - RNA, 22 nt, Human
agccucucuuuauucccagcua

SEQ ID NO: 310840 - RNA, 20 nt, Human
cugcucugcuuugcaggugg

SEQ ID NO: 310841 - RNA, 22 nt, Human
gcugccuucaguucugauucau

SEQ ID NO: 310842 - RNA, 22 nt, Human
uggcaguccccugugccuggaa

SEQ ID NO: 310843 - RNA, 22 nt, Human
uuugggcaguagauguaucacu

SEQ ID NO: 310844 - RNA, 22 nt, Human
gccaccagugggggccugggca

SEQ ID NO: 310845 - RNA, 22 nt, Human
uagaacagaguuccagugauca

SEQ ID NO: 310846 - RNA, 22 nt, Human
gcucccagcuggagccucaaca

SEQ ID NO: 310847 - RNA, 22 nt, Human
gacaugcaacaauuuggcauuu

SEQ ID NO: 310848 - RNA, 22 nt, Human
gagcucugggaaacaaagugua

SEQ ID NO: 310849 - RNA, 22 nt, Human
gggucagcugcugggggcugac

SEQ ID NO: 310850 - RNA, 22 nt, Human
uggcucagccagcccuaggaac

SEQ ID NO: 310851 - RNA, 22 nt, Human
acauuugucuucuuucagauua

SEQ ID NO: 310852 - RNA, 22 nt, Human
uaggccagaggagcagcuuugg

SEQ ID NO: 310853 - RNA, 22 nt, Human
aaaggagacuucagaucuccuu

SEQ ID NO: 310854 - RNA, 22 nt, Human
gcugucugcugugcacugagca

SEQ ID NO: 310855 - RNA, 22 nt, Human
uagaaacaucagcuaaccaaaa

SEQ ID NO: 310856 - RNA, 22 nt, Human
agugcugucaguuuuauagaua

SEQ ID NO: 310857 - RNA, 21 nt, Human
ugggcaccaaaaccuaggagu

SEQ ID NO: 310858 - RNA, 20 nt, Human
uccagccacuuccgcugguc

SEQ ID NO: 310859 - RNA, 20 nt, Human
ccaggcacugucccaugcag

SEQ ID NO: 310860 - RNA, 22 nt, Human
uucucagaggagucgggagcug

SEQ ID NO: 310861 - RNA, 22 nt, Human
ccagagaccagaacauggggau

SEQ ID NO: 310862 - RNA, 20 nt, Human
uuuuccuucugaguauguug

SEQ ID NO: 310863 - RNA, 23 nt, Human
cccagcagagaugaggagggguc

SEQ ID NO: 310864 - RNA, 22 nt, Human
ucccaaagcuacucuucugacu

SEQ ID NO: 310865 - RNA, 22 nt, Human
aaaugauguuauaagaccagga

SEQ ID NO: 310866 - RNA, 22 nt, Human
cucaggauuuaaaggggcacuc

SEQ ID NO: 310867 - RNA, 22 nt, Human
agggcagaaauauugauacugu

SEQ ID NO: 310868 - RNA, 22 nt, Human
ggggcagagagaaggaagcuug

SEQ ID NO: 310869 - RNA, 22 nt, Human
uuucagaaagcugaacauauga

SEQ ID NO: 310870 - RNA, 22 nt, Human
gcucccagggcagcgcagaaga

SEQ ID NO: 310871 - RNA, 23 nt, Human
uggcagcagaucuuaaagugacc

SEQ ID NO: 310872 - RNA, 22 nt, Human
cuggcuuucucugugguguuca

SEQ ID NO: 310873 - RNA, 22 nt, Human
uccuuuuuaagucguuguggua

SEQ ID NO: 310874 - RNA, 22 nt, Human
ggagaggugaauggcugcucua

SEQ ID NO: 310875 - RNA, 22 nt, Human
acauagcuuaaaugagaagaua

SEQ ID NO: 310876 - RNA, 22 nt, Human
uuuggaaugguaccuucaguug

SEQ ID NO: 310877 - RNA, 22 nt, Human
auaauuuacaacugcuuuuaau

SEQ ID NO: 310878 - RNA, 22 nt, Human
ugcacacaaguuggagaaugaa

SEQ ID NO: 310879 - RNA, 22 nt, Human
uuagaaaucugcugccaugcaa

SEQ ID NO: 310880 - RNA, 22 nt, Human
ccagggcugcugugggacucca

SEQ ID NO: 310881 - RNA, 22 nt, Human
aggagagggguaggauuaauuu

SEQ ID NO: 310882 - RNA, 22 nt, Human
uuucuucauucaccuucacccc

SEQ ID NO: 310883 - RNA, 22 nt, Human
aggggcuguggaaaccaacucu

SEQ ID NO: 310884 - RNA, 17 nt, Human
ggaaaaggaugauacag

SEQ ID NO: 310885 - RNA, 17 nt, Human
ggugaguguccaggugg

SEQ ID NO: 310886 - RNA, 22 nt, Human
uacagcauauacagaaugaaca

SEQ ID NO: 310887 - RNA, 22 nt, Human
cuguuuaucccuuuggucagca

SEQ ID NO: 310888 - RNA, 22 nt, Human
ucaggcagaccaccgugggcag

SEQ ID NO: 310889 - RNA, 22 nt, Human
agaaaugggccuugggacacaa

SEQ ID NO: 310890 - RNA, 22 nt, Human
uauuuaauuagugauuguagag

SEQ ID NO: 310891 - RNA, 22 nt, Human
cuggccuggggccucagcugcu

SEQ ID NO: 310892 - RNA, 22 nt, Human
guccucuguagggcugggccac

SEQ ID NO: 310893 - RNA, 22 nt, Human
ugauagaaaaugcugucaagcu

SEQ ID NO: 310894 - RNA, 19 nt, Human
uuugaaaggauuguuauuu

SEQ ID NO: 310895 - RNA, 23 nt, Human
ggcucugugcugggccugcagga

SEQ ID NO: 310896 - RNA, 22 nt, Human
uucuuccucagcagggcugccu

SEQ ID NO: 310897 - RNA, 22 nt, Human
gguggccaggccagcucuggcc

SEQ ID NO: 310898 - RNA, 22 nt, Human
uucuucucggcugucagauagu

SEQ ID NO: 310899 - RNA, 22 nt, Human
uggcccagcucagggugggcgg

SEQ ID NO: 310900 - RNA, 22 nt, Human
uucacauugugcagauuauggu

SEQ ID NO: 310901 - RNA, 22 nt, Human
uuuuuaagagauucuccagucu

SEQ ID NO: 310902 - RNA, 22 nt, Human
aagcacuuagaagagugccugc

SEQ ID NO: 310903 - RNA, 22 nt, Human
aaaguuugagugauuugacaca

SEQ ID NO: 310904 - RNA, 22 nt, Human
gagcagggccacuucuguaccu

SEQ ID NO: 310905 - RNA, 22 nt, Human
uucccaggcugugcuaccagag

SEQ ID NO: 310906 - RNA, 21 nt, Human
ucugucugguuuuagaguggc

SEQ ID NO: 310907 - RNA, 22 nt, Human
agggagaacaguugcagcagac

SEQ ID NO: 310908 - RNA, 22 nt, Human
gggcuggaggagauccagaggc

SEQ ID NO: 310909 - RNA, 22 nt, Human
uccugagauucugcauuucuaa

SEQ ID NO: 310910 - RNA, 22 nt, Human
gccugagagucugcauuucuaa

SEQ ID NO: 310911 - RNA, 22 nt, Human
acauuaacacuggugcuggugu

SEQ ID NO: 310912 - RNA, 22 nt, Human
uggcuggcuagugggcaggauu

SEQ ID NO: 310913 - RNA, 22 nt, Human
cugcccugacugaccuuuugaa

SEQ ID NO: 310914 - RNA, 22 nt, Human
uguaggauuuucaccagaccuu

SEQ ID NO: 310915 - RNA, 22 nt, Human
acagaugaggcuggcgagggca

SEQ ID NO: 310916 - RNA, 22 nt, Human
gaaaggccagcucacagaugag

SEQ ID NO: 310917 - RNA, 22 nt, Human
ugucucaguacacuccgauguu

SEQ ID NO: 310918 - RNA, 22 nt, Human
aggacagaccuaggacuggagc

SEQ ID NO: 310919 - RNA, 22 nt, Human
guuucauacagauuauucaugg

SEQ ID NO: 310920 - RNA, 22 nt, Human
ccaggcugagcaugauuggagc

SEQ ID NO: 310921 - RNA, 22 nt, Human
ccucucccacguggcagaggcu

SEQ ID NO: 310922 - RNA, 22 nt, Human
ugaaagauugugauucaauaug

SEQ ID NO: 310923 - RNA, 22 nt, Human
caggaggaggugagguagaacu

SEQ ID NO: 310924 - RNA, 20 nt, Human
cuggcaggagcgagucuacc

SEQ ID NO: 310925 - RNA, 22 nt, Human
guggagacuucuacuagagacc

SEQ ID NO: 310926 - RNA, 22 nt, Human
uuuguaaaaggaggaagcaugg

SEQ ID NO: 310927 - RNA, 22 nt, Human
ucuuugcaugcauuuucccuua

SEQ ID NO: 310928 - RNA, 22 nt, Human
cagagcuguccaaacccugaca

SEQ ID NO: 310929 - RNA, 22 nt, Human
gccugagacagugugguccaau

SEQ ID NO: 310930 - RNA, 22 nt, Human
gcucaggacuggaggagcgggg

SEQ ID NO: 310931 - RNA, 22 nt, Human
gcugagguggcugccuuaguaa

SEQ ID NO: 310932 - RNA, 22 nt, Human
aaugcuagugugauauguaagg

SEQ ID NO: 310933 - RNA, 22 nt, Human
augggaggcaggcucagaaccg

SEQ ID NO: 310934 - RNA, 22 nt, Human
ccucugcugcuguugagcaccg

SEQ ID NO: 310935 - RNA, 22 nt, Human
uggcagagaaccugggcuuugu

SEQ ID NO: 310936 - RNA, 22 nt, Human
cacugaguucccugacauuuca

SEQ ID NO: 310937 - RNA, 22 nt, Human
agucaguguucuccggagaggc

SEQ ID NO: 310938 - RNA, 22 nt, Human
ggcaccaggacaugacucccag

SEQ ID NO: 310939 - RNA, 22 nt, Human
uuuuucagccaugaauuacacu

SEQ ID NO: 310940 - RNA, 23 nt, Human
gggagccaggaccucgcgcccca

SEQ ID NO: 310941 - RNA, 22 nt, Human
caagaacauugugaucacuuca

SEQ ID NO: 310942 - RNA, 22 nt, Human
aauacuuuccuauauaaggugc

SEQ ID NO: 310943 - RNA, 22 nt, Human
agugugagaacggacuaauaaa

SEQ ID NO: 310944 - RNA, 22 nt, Human
uguuuauaccuugguauaacca

SEQ ID NO: 310945 - RNA, 23 nt, Human
gccaggcuccggucuguggccac

SEQ ID NO: 310946 - RNA, 22 nt, Human
cucaggauuuacuaauuucaag

SEQ ID NO: 310947 - RNA, 22 nt, Human
caggguggaagcuguagagugg

SEQ ID NO: 310948 - RNA, 22 nt, Human
uacaucauaauaauacuuagaa

SEQ ID NO: 310949 - RNA, 22 nt, Human
ugucccaguuuugcagguuaga

SEQ ID NO: 310950 - RNA, 22 nt, Human
uuucugaaaucucuuuugagga

SEQ ID NO: 310951 - RNA, 22 nt, Human
agggcagcacaaggcauggacu

SEQ ID NO: 310952 - RNA, 22 nt, Human
auacauuagcucauaugauuaa

SEQ ID NO: 310953 - RNA, 22 nt, Human
ggccucagugggccgcugcagg

SEQ ID NO: 310954 - RNA, 20 nt, Human
ccagagcugauggcugcccg

SEQ ID NO: 310955 - RNA, 22 nt, Human
gcuguucacauuuugggccaaa

SEQ ID NO: 310956 - RNA, 22 nt, Human
ccaguguuccauggagugauua

SEQ ID NO: 310957 - RNA, 22 nt, Human
cccagcagccagaaugaggagc

SEQ ID NO: 310958 - RNA, 22 nt, Human
uuucauaaccucaagcuacagu

SEQ ID NO: 310959 - RNA, 22 nt, Human
cugcccugccuggccagugugg

SEQ ID NO: 310960 - RNA, 22 nt, Human
ucaucugucauccacaaagcug

SEQ ID NO: 310961 - RNA, 22 nt, Human
ggaggugguggcagugacaauu

SEQ ID NO: 310962 - RNA, 22 nt, Human
agaagcugccuacaugaccagc

SEQ ID NO: 310963 - RNA, 22 nt, Human
ugacacagaaauuaagcuguca

SEQ ID NO: 310964 - RNA, 22 nt, Human
cuacuucugugaugaaacuaca

SEQ ID NO: 310965 - RNA, 22 nt, Human
uggcagagaacacacaugauuc

SEQ ID NO: 310966 - RNA, 21 nt, Human
ugaggcuguuguaccagggag

SEQ ID NO: 310967 - RNA, 22 nt, Human
ccugggcagggagaccaggcuc

SEQ ID NO: 310968 - RNA, 22 nt, Human
uaauuucacugauaugaaguca

SEQ ID NO: 310969 - RNA, 22 nt, Human
agccagaggccagccugccuca

SEQ ID NO: 310970 - RNA, 22 nt, Human
uaacagaaaagaacugaguuug

SEQ ID NO: 310971 - RNA, 22 nt, Human
cagcaguguacaaggugucaga

SEQ ID NO: 310972 - RNA, 22 nt, Human
cagccagccucucaaccaugca

SEQ ID NO: 310973 - RNA, 22 nt, Human
uuucacaaugcaauccuacuuc

SEQ ID NO: 310974 - RNA, 22 nt, Human
acuguguguuugucuagcacag

SEQ ID NO: 310975 - RNA, 22 nt, Human
cuucagaagaaaagcagugugu

SEQ ID NO: 310976 - RNA, 22 nt, Human
uaaacaugugagugugcauaua

SEQ ID NO: 310977 - RNA, 22 nt, Human
ggcuuucuagaucuagcucugu

SEQ ID NO: 310978 - RNA, 22 nt, Human
agugggaggcggcugacgggcg

SEQ ID NO: 310979 - RNA, 22 nt, Human
agccuggagaagauguguauug

SEQ ID NO: 310980 - RNA, 22 nt, Human
ucacaacuugaagcugauuuaa

SEQ ID NO: 310981 - RNA, 22 nt, Human
acuggaagccaguugacaauca

SEQ ID NO: 310982 - RNA, 17 nt, Human
gcagcagagagacccuc

SEQ ID NO: 310983 - RNA, 22 nt, Human
ugugaagcuggauccuggagcu

SEQ ID NO: 310984 - RNA, 22 nt, Human
gacaccagcaaggcugugagga

SEQ ID NO: 310985 - RNA, 22 nt, Human
uuugaaguaccugguucugacu

SEQ ID NO: 310986 - RNA, 22 nt, Human
uuccuuccgggcaccaggcacu

SEQ ID NO: 310987 - RNA, 22 nt, Human
ggcugcugugaccucaggugau

SEQ ID NO: 310988 - RNA, 22 nt, Human
ucagcucugccuguggaggcac

SEQ ID NO: 310989 - RNA, 22 nt, Human
guuuuucuaggaccaugugauu

SEQ ID NO: 310990 - RNA, 22 nt, Human
acaguaauuaaaauggaucugc

SEQ ID NO: 310991 - RNA, 22 nt, Human
ggcagggagagcaugcugauaa

SEQ ID NO: 310992 - RNA, 22 nt, Human
ccuggcaguggugaagaagagg

SEQ ID NO: 310993 - RNA, 22 nt, Human
uaguaacccacacaacaguaga

SEQ ID NO: 310994 - RNA, 19 nt, Human
augauggucccauucaccu

SEQ ID NO: 310995 - RNA, 22 nt, Human
cccuccccacaaagcuucacac

SEQ ID NO: 310996 - RNA, 22 nt, Human
aguauucuggaauucuauguga

SEQ ID NO: 310997 - RNA, 22 nt, Human
gagcugccuguugcauagcaac

SEQ ID NO: 310998 - RNA, 22 nt, Human
uaaguucaaugaacucaguucu

SEQ ID NO: 310999 - RNA, 22 nt, Human
aucagcugaaaaacaggcagca

SEQ ID NO: 311000 - RNA, 22 nt, Human
acaaacagaguugaaaaauagg

SEQ ID NO: 311001 - RNA, 21 nt, Human
uucuuuccccagaggacuaaa

SEQ ID NO: 311002 - RNA, 22 nt, Human
uucauucuuauuugugaucugg

SEQ ID NO: 311003 - RNA, 22 nt, Human
uaacagaauuugcuaaacuccg

SEQ ID NO: 311004 - RNA, 22 nt, Human
gcagauggcagcccaggcuggg

SEQ ID NO: 311005 - RNA, 22 nt, Human
cuucuuuccuuccuccaguggc

SEQ ID NO: 311006 - RNA, 22 nt, Human
ugccagugggugugcagagacu

SEQ ID NO: 311007 - RNA, 22 nt, Human
ggcagcaggcgacuucccuauu

SEQ ID NO: 311008 - RNA, 22 nt, Human
gccuggagcucggcugagggcg

SEQ ID NO: 311009 - RNA, 17 nt, Human
acucaggaucugggagu

SEQ ID NO: 311010 - RNA, 22 nt, Human
uuucucuguucucuaacuguaa

SEQ ID NO: 311011 - RNA, 22 nt, Human
agccauugaauuuagugccuuu

SEQ ID NO: 311012 - RNA, 22 nt, Human
gcugucugucucugucccacca

SEQ ID NO: 311013 - RNA, 22 nt, Human
augggaggaucacuugaggcca

SEQ ID NO: 311014 - RNA, 22 nt, Human
aggcugggaaaccugaaguugu

SEQ ID NO: 311015 - RNA, 22 nt, Human
agacucaagcagauaggaauua

SEQ ID NO: 311016 - RNA, 22 nt, Human
cagagcagggugcaccuugggc

SEQ ID NO: 311017 - RNA, 22 nt, Human
guccaugacugugacucacaug

SEQ ID NO: 311018 - RNA, 22 nt, Human
caguguuccaggcggcagugaa

SEQ ID NO: 311019 - RNA, 22 nt, Human
ugauuuccuaggucuggagaag

SEQ ID NO: 311020 - RNA, 22 nt, Human
ccaggaguuggagguugcagug

SEQ ID NO: 311021 - RNA, 22 nt, Human
ugacacagauuagagacauacc

SEQ ID NO: 311022 - RNA, 19 nt, Human
cugguccugacugaggggu

SEQ ID NO: 311023 - RNA, 22 nt, Human
ugccagcuccgaggagcugcag

SEQ ID NO: 311024 - RNA, 22 nt, Human
ccugcccugucacuggcuaggg

SEQ ID NO: 311025 - RNA, 22 nt, Human
ccaggcccuugcaagucccacc

SEQ ID NO: 311026 - RNA, 22 nt, Human
cugcucugaguauuaacggagg

SEQ ID NO: 311027 - RNA, 22 nt, Human
uaggcaggugugcacugcccac

SEQ ID NO: 311028 - RNA, 22 nt, Human
agagccugaggaugucccagcu

SEQ ID NO: 311029 - RNA, 22 nt, Human
ugcugggcuggagcugccaggg

SEQ ID NO: 311030 - RNA, 22 nt, Human
uuuaaauggcauuuucccagau

SEQ ID NO: 311031 - RNA, 22 nt, Human
ggaugcaggacggcauggaugu

SEQ ID NO: 311032 - RNA, 22 nt, Human
uagugcuuaacacaaagugauu

SEQ ID NO: 311033 - RNA, 22 nt, Human
guguggcugugggagauguuca

SEQ ID NO: 311034 - RNA, 22 nt, Human
aggggagccgaggggcaucugu

SEQ ID NO: 311035 - RNA, 22 nt, Human
ggaggccaaggaggagcuugcc

SEQ ID NO: 311036 - RNA, 22 nt, Human
cugagcugguggaagcaugcag

SEQ ID NO: 311037 - RNA, 22 nt, Human
uucuuucagaacacaagugauu

SEQ ID NO: 311038 - RNA, 22 nt, Human
uuugcagcaaggagagagcauu

SEQ ID NO: 311039 - RNA, 22 nt, Human
uuuaagaaguuauguuauaaau

SEQ ID NO: 311040 - RNA, 22 nt, Human
uagaaaguaaaucaguuuuauu

SEQ ID NO: 311041 - RNA, 22 nt, Human
cucagggggaaucaggucacag

SEQ ID NO: 311042 - RNA, 22 nt, Human
gagcugaauugaagcaaggagc

SEQ ID NO: 311043 - RNA, 22 nt, Human
gcaggggcaggagaucucaggc

SEQ ID NO: 311044 - RNA, 22 nt, Human
ggcagcuccaaaaggaaacacu

SEQ ID NO: 311045 - RNA, 22 nt, Human
gagagcugggggacuguggaug

SEQ ID NO: 311046 - RNA, 22 nt, Human
cuucccagaccuuagagugcag

SEQ ID NO: 311047 - RNA, 23 nt, Human
cugcccugaucuugaucuauugu

SEQ ID NO: 311048 - RNA, 23 nt, Human
ccucagcauggcaggagcccagc

SEQ ID NO: 311049 - RNA, 20 nt, Human
aagagaagaagucuuugaaa

SEQ ID NO: 311050 - RNA, 22 nt, Human
agaggugacauaggagaggcuc

SEQ ID NO: 311051 - RNA, 19 nt, Human
uccucaggggcucacagac

SEQ ID NO: 311052 - RNA, 21 nt, Human
uccugccuuaguccagagcag

SEQ ID NO: 311053 - RNA, 22 nt, Human
ucucagggaccaugaugaugac

SEQ ID NO: 311054 - RNA, 22 nt, Human
caaaguuuuaguaaacauauau

SEQ ID NO: 311055 - RNA, 22 nt, Human
ggagcugcauuuagggagccuu

SEQ ID NO: 311056 - RNA, 22 nt, Human
ucuccugugcacccucccugug

SEQ ID NO: 311057 - RNA, 22 nt, Human
gacacagcacuguacaaggaau

SEQ ID NO: 311058 - RNA, 22 nt, Human
gccagcuggagacuggcagggg

SEQ ID NO: 311059 - RNA, 22 nt, Human
uguaugaaugggaaaaggaaac

SEQ ID NO: 311060 - RNA, 22 nt, Human
ggcgcuggccacgguggcucug

SEQ ID NO: 311061 - RNA, 22 nt, Human
uuagccauugucagcacauggc

SEQ ID NO: 311062 - RNA, 23 nt, Human
cagugcagggcaacucagacucc

SEQ ID NO: 311063 - RNA, 22 nt, Human
agccugagugcuuaggacuguu

SEQ ID NO: 311064 - RNA, 22 nt, Human
cucucaguccugcgcgccucug

SEQ ID NO: 311065 - RNA, 22 nt, Human
ucugagcuacgaugccugucac

SEQ ID NO: 311066 - RNA, 22 nt, Human
gcuggagauaguaggauccaua

SEQ ID NO: 311067 - RNA, 19 nt, Human
ggaugagggucaggcauag

SEQ ID NO: 311068 - RNA, 22 nt, Human
gagauuggccuggcuugccaac

SEQ ID NO: 311069 - RNA, 22 nt, Human
cagagccuaaaacgacuccacu

SEQ ID NO: 311070 - RNA, 22 nt, Human
aguccuggacuuggagucaggg

SEQ ID NO: 311071 - RNA, 22 nt, Human
aguguuucccaguaggaugaaa

SEQ ID NO: 311072 - RNA, 22 nt, Human
gcucugagagugggugauucug

SEQ ID NO: 311073 - RNA, 22 nt, Human
gaucuucuagcagaaguaauuu

SEQ ID NO: 311074 - RNA, 22 nt, Human
ggagcugggguuggcaucuucc

SEQ ID NO: 311075 - RNA, 22 nt, Human
agcuuuaugggagcuuagauaa

SEQ ID NO: 311076 - RNA, 22 nt, Human
uguaacaguaagccugugagcu

SEQ ID NO: 311077 - RNA, 22 nt, Human
cucugcugcccaggccugcuag

SEQ ID NO: 311078 - RNA, 22 nt, Human
ugggaccaagucauuucuuuag

SEQ ID NO: 311079 - RNA, 22 nt, Human
aaugaugguuaaacacuggagg

SEQ ID NO: 311080 - RNA, 22 nt, Human
acuguacuguguauuguagaau

SEQ ID NO: 311081 - RNA, 22 nt, Human
augcuacagaguuugaauaugu

SEQ ID NO: 311082 - RNA, 22 nt, Human
acuggaaaugagaugauaucag

SEQ ID NO: 311083 - RNA, 22 nt, Human
acaggagugaaucuggcacuua

SEQ ID NO: 311084 - RNA, 22 nt, Human
gggcuccuccucugacuguggc

SEQ ID NO: 311085 - RNA, 22 nt, Human
cucacuguuuaauagcuggauc

SEQ ID NO: 311086 - RNA, 22 nt, Human
aaagcaaugaugguagacacgu

SEQ ID NO: 311087 - RNA, 22 nt, Human
ucucucuugucaccccaucugc

SEQ ID NO: 311088 - RNA, 16 nt, Human
auuuccagauuaugca

SEQ ID NO: 311089 - RNA, 22 nt, Human
ugggcugccagcucuccagaug

SEQ ID NO: 311090 - RNA, 22 nt, Human
agccccuuccaguucucagauc

SEQ ID NO: 311091 - RNA, 21 nt, Human
augugaaaccuuccacgcuga

SEQ ID NO: 311092 - RNA, 22 nt, Human
ucauugcaccccagucccagcu

SEQ ID NO: 311093 - RNA, 22 nt, Human
ggcuugcuucuuguccaggaau

SEQ ID NO: 311094 - RNA, 17 nt, Human
cucuccuuccucugagg

SEQ ID NO: 311095 - RNA, 22 nt, Human
ggaaguagaaguaaugaaauca

SEQ ID NO: 311096 - RNA, 22 nt, Human
uugcauuguugcaaugaaguau

SEQ ID NO: 311097 - RNA, 22 nt, Human
ugugacaugugucaucuuuucu

SEQ ID NO: 311098 - RNA, 22 nt, Human
gugcaugucggggugcauguca

SEQ ID NO: 311099 - RNA, 22 nt, Human
ucaguguaaguuauguagaugu

SEQ ID NO: 311100 - RNA, 22 nt, Human
gucugucauacggcuuauguaa

SEQ ID NO: 311101 - RNA, 22 nt, Human
ccucagugaccuauugcauuca

SEQ ID NO: 311102 - RNA, 22 nt, Human
ugauucacagacuucacaaggc

SEQ ID NO: 311103 - RNA, 22 nt, Human
uuucuuaggcucuaaaaugacu

SEQ ID NO: 311104 - RNA, 22 nt, Human
agggcagaaaccaccuugaugg

SEQ ID NO: 311105 - RNA, 22 nt, Human
auuucacucucccugccacuua

SEQ ID NO: 311106 - RNA, 22 nt, Human
gcaguguuuuucaaugcuucca

SEQ ID NO: 311107 - RNA, 22 nt, Human
uguaugcuuuccaaaaaugcug

SEQ ID NO: 311108 - RNA, 22 nt, Human
cuucucagaucucagcuuugag

SEQ ID NO: 311109 - RNA, 22 nt, Human
uuuguuuacucauucauugaug

SEQ ID NO: 311110 - RNA, 22 nt, Human
uauuucugaggcccaggaagug

SEQ ID NO: 311111 - RNA, 22 nt, Human
ucacugcaaggaggcuucucaa

SEQ ID NO: 311112 - RNA, 22 nt, Human
caaauaguaugagcaaugauuc

SEQ ID NO: 311113 - RNA, 22 nt, Human
ggugccaggcuguagucagggu

SEQ ID NO: 311114 - RNA, 22 nt, Human
agauuuagugguggaauuuugg

SEQ ID NO: 311115 - RNA, 22 nt, Human
agauaugugcgucuuagauuga

SEQ ID NO: 311116 - RNA, 22 nt, Human
ggcaaaaaccauaauuacuuuu

SEQ ID NO: 311117 - RNA, 22 nt, Human
caaaugaaguccaaagggcuua

SEQ ID NO: 311118 - RNA, 22 nt, Human
agggauguaaauucuucuucuu

SEQ ID NO: 311119 - RNA, 15 nt, Human
cagucccagggaccc

SEQ ID NO: 311120 - RNA, 22 nt, Human
uucagagccacuucaagucuaa

SEQ ID NO: 311121 - RNA, 18 nt, Human
acauuucucucugcguga

SEQ ID NO: 311122 - RNA, 22 nt, Human
ccagcccugccagagagagcug

SEQ ID NO: 311123 - RNA, 22 nt, Human
cggggcugcgcucuuccugccg

SEQ ID NO: 311124 - RNA, 22 nt, Human
uggcagagcccagaacugagca

SEQ ID NO: 311125 - RNA, 22 nt, Human
aauuaacaaauguagcugugau

SEQ ID NO: 311126 - RNA, 22 nt, Human
aacucagcauccugcacagaga

SEQ ID NO: 311127 - RNA, 22 nt, Human
aaucauaauuguauacauucau

SEQ ID NO: 311128 - RNA, 22 nt, Human
uuuuccagauuggacuuagucc

SEQ ID NO: 311129 - RNA, 22 nt, Human
uucuuuccccauggaguucgga

SEQ ID NO: 311130 - RNA, 17 nt, Human
cugagcauccgugcucu

SEQ ID NO: 311131 - RNA, 22 nt, Human
uaagcugugggagauuggcaua

SEQ ID NO: 311132 - RNA, 22 nt, Human
ugauuuccaguugcugggugcu

SEQ ID NO: 311133 - RNA, 22 nt, Human
cccagcuccagagccagaaaca

SEQ ID NO: 311134 - RNA, 22 nt, Human
uacaguauggaaaauguauagu

SEQ ID NO: 311135 - RNA, 22 nt, Human
aaauuucaguuaccuuuacguu

SEQ ID NO: 311136 - RNA, 22 nt, Human
gcaggaugggagcuucacuuug

SEQ ID NO: 311137 - RNA, 22 nt, Human
gagcuuaggccagggacaggga

SEQ ID NO: 311138 - RNA, 22 nt, Human
cucuucuugccugaugaggcag

SEQ ID NO: 311139 - RNA, 22 nt, Human
aaucaguuagaaggaagagaau

SEQ ID NO: 311140 - RNA, 17 nt, Human
ccucacagggaccagac

SEQ ID NO: 311141 - RNA, 22 nt, Human
gacagcagacagaacuaccugc

SEQ ID NO: 311142 - RNA, 22 nt, Human
uaacucugaauccucacagcag

SEQ ID NO: 311143 - RNA, 22 nt, Human
aucaguuugagugcugugucaa

SEQ ID NO: 311144 - RNA, 21 nt, Human
gcccucaggggaggauggccu

SEQ ID NO: 311145 - RNA, 22 nt, Human
uccugccucacaguugaaguuu

SEQ ID NO: 311146 - RNA, 22 nt, Human
gcagccacacuguuacagaaug

SEQ ID NO: 311147 - RNA, 22 nt, Human
agccuggcuguaaccucauggu

SEQ ID NO: 311148 - RNA, 22 nt, Human
gcagcagaguuugggagauggu

SEQ ID NO: 311149 - RNA, 22 nt, Human
ucuuugaugugguuaauuauga

SEQ ID NO: 311150 - RNA, 22 nt, Human
uaugcacacauuagcacagggu

SEQ ID NO: 311151 - RNA, 22 nt, Human
cagguaggauggaagggcucaa

SEQ ID NO: 311152 - RNA, 22 nt, Human
augccaggccccacgcugggca

SEQ ID NO: 311153 - RNA, 22 nt, Human
uaaagaugcuauagugaaggag

SEQ ID NO: 311154 - RNA, 22 nt, Human
gcuccucugucaaaugagagug

SEQ ID NO: 311155 - RNA, 22 nt, Human
agguggggugagcugcagacua

SEQ ID NO: 311156 - RNA, 22 nt, Human
cuggcucaggguggucuggguc

SEQ ID NO: 311157 - RNA, 22 nt, Human
aaaaagauguccugaaguuuag

SEQ ID NO: 311158 - RNA, 22 nt, Human
cucuugggagugcucuggagaa

SEQ ID NO: 311159 - RNA, 22 nt, Human
uccauggggcccaggaugagag

SEQ ID NO: 311160 - RNA, 22 nt, Human
gcacagaacuucucuuaguagg

SEQ ID NO: 311161 - RNA, 22 nt, Human
ugaaauguuugaagaccacuga

SEQ ID NO: 311162 - RNA, 22 nt, Human
uuuccucuaaacgcauuugcuu

SEQ ID NO: 311163 - RNA, 22 nt, Human
acugcagccuuugggcucauaa

SEQ ID NO: 311164 - RNA, 22 nt, Human
ugccucaggcaccuggcagguu

SEQ ID NO: 311165 - RNA, 22 nt, Human
agaaaucucaguaucucaggga

SEQ ID NO: 311166 - RNA, 22 nt, Human
ucagggcucaccagccucugcc

SEQ ID NO: 311167 - RNA, 22 nt, Human
uucaggauaugugauaucugaa

SEQ ID NO: 311168 - RNA, 22 nt, Human
gucccagaggcuuuggccacag

SEQ ID NO: 311169 - RNA, 20 nt, Human
aaagagaagccucaccuugu

SEQ ID NO: 311170 - RNA, 22 nt, Human
cagagcugcagauugaaggcau

SEQ ID NO: 311171 - RNA, 22 nt, Human
ccugaggacacacgcugcagga

SEQ ID NO: 311172 - RNA, 22 nt, Human
gaacacaucacauuuuacagug

SEQ ID NO: 311173 - RNA, 18 nt, Human
cauuguacaaugcuuuau

SEQ ID NO: 311174 - RNA, 22 nt, Human
gcucccuguucucagccaugau

SEQ ID NO: 311175 - RNA, 22 nt, Human
uccugccugcaaucccagcacu

SEQ ID NO: 311176 - RNA, 22 nt, Human
aagaaagggagaaggauggugu

SEQ ID NO: 311177 - RNA, 22 nt, Human
ucauaaagcauuucagcuuuug

SEQ ID NO: 311178 - RNA, 22 nt, Human
uuagauaauguagagauaugag

SEQ ID NO: 311179 - RNA, 22 nt, Human
aucugacaaccuauugacuuga

SEQ ID NO: 311180 - RNA, 22 nt, Human
guuuccauggcucuguuaaugg

SEQ ID NO: 311181 - RNA, 22 nt, Human
cugcuguguugccagugucacc

SEQ ID NO: 311182 - RNA, 22 nt, Human
cucaggagacaguguccacaug

SEQ ID NO: 311183 - RNA, 22 nt, Human
aaacagaaauuuccucaugcuc

SEQ ID NO: 311184 - RNA, 22 nt, Human
cacugaaauauuaauaucuuau

SEQ ID NO: 311185 - RNA, 22 nt, Human
cuggcagcauggagccugugcu

SEQ ID NO: 311186 - RNA, 22 nt, Human
gcaagcaagcagguagagcuga

SEQ ID NO: 311187 - RNA, 22 nt, Human
agauuucaaugugagcauuagu

SEQ ID NO: 311188 - RNA, 20 nt, Human
aaacauucauguacaaguga

SEQ ID NO: 311189 - RNA, 22 nt, Human
uuauuacacugaaagaauugcg

SEQ ID NO: 311190 - RNA, 20 nt, Human
gccuggaggcagagauaaag

SEQ ID NO: 311191 - RNA, 22 nt, Human
guaacaaaguuucuaggugcug

SEQ ID NO: 311192 - RNA, 22 nt, Human
cugugcaagacuuacuuuaaua

SEQ ID NO: 311193 - RNA, 22 nt, Human
ucugugugcccuaaagccugcu

SEQ ID NO: 311194 - RNA, 22 nt, Human
gcugccuuuugcuccucccacc

SEQ ID NO: 311195 - RNA, 22 nt, Human
ucacauuucugauuauaccaaa

SEQ ID NO: 311196 - RNA, 22 nt, Human
auuugcaugcuucuauugugaa

SEQ ID NO: 311197 - RNA, 22 nt, Human
gggagguucuguucgcacuuga

SEQ ID NO: 311198 - RNA, 22 nt, Human
ccaggccuggacggguggccug

SEQ ID NO: 311199 - RNA, 22 nt, Human
ccccuucuguguccugucagcc

SEQ ID NO: 311200 - RNA, 22 nt, Human
aagccaggcugcacuugcuggg

SEQ ID NO: 311201 - RNA, 22 nt, Human
uccuugaauccuagcauccuau

SEQ ID NO: 311202 - RNA, 21 nt, Human
gugcucugggcagcagagggc

SEQ ID NO: 311203 - RNA, 19 nt, Human
gcacugaagaguuggucac

SEQ ID NO: 311204 - RNA, 22 nt, Human
ucucccacagucucccauggcu

SEQ ID NO: 311205 - RNA, 22 nt, Human
ucuuccaguguagacaucugcc

SEQ ID NO: 311206 - RNA, 22 nt, Human
cacucugaugguuucuguucaa

SEQ ID NO: 311207 - RNA, 22 nt, Human
gggacagaaggaagugagcaca

SEQ ID NO: 311208 - RNA, 20 nt, Human
cucugcuuuaggagagucag

SEQ ID NO: 311209 - RNA, 22 nt, Human
agucccagugagaugagccacg

SEQ ID NO: 311210 - RNA, 22 nt, Human
ucugucacuuauuaagauggau

SEQ ID NO: 311211 - RNA, 22 nt, Human
gggggaggugaaugcaauaagg

SEQ ID NO: 311212 - RNA, 22 nt, Human
caaagccucugauuucacuugu

SEQ ID NO: 311213 - RNA, 22 nt, Human
ugaaauauuuagagaguaaguu

SEQ ID NO: 311214 - RNA, 22 nt, Human
gcuggcucccauugguccuucc

SEQ ID NO: 311215 - RNA, 22 nt, Human
uguagaaacuacacaugcaaca

SEQ ID NO: 311216 - RNA, 19 nt, Human
auacagauguauccaugau

SEQ ID NO: 311217 - RNA, 22 nt, Human
guuuuuccuugcugaggacccg

SEQ ID NO: 311218 - RNA, 17 nt, Human
aggcagcucagaacauc

SEQ ID NO: 311219 - RNA, 22 nt, Human
uacaguuuguuacauuguuagu

SEQ ID NO: 311220 - RNA, 22 nt, Human
agcaggaaagaaaaaucugugu

SEQ ID NO: 311221 - RNA, 22 nt, Human
cacccacccacugcucauuggc

SEQ ID NO: 311222 - RNA, 22 nt, Human
aauauaugugguauugaccagc

SEQ ID NO: 311223 - RNA, 22 nt, Human
ucucccacgguacaggauaaac

SEQ ID NO: 311224 - RNA, 22 nt, Human
agaaugcuccagagcugaaaga

SEQ ID NO: 311225 - RNA, 22 nt, Human
auggagggaaaaguggagagcc

SEQ ID NO: 311226 - RNA, 23 nt, Human
aaggucacagaacuuagcaagcc

SEQ ID NO: 311227 - RNA, 22 nt, Human
ugccagcucccuuuucuccucc

SEQ ID NO: 311228 - RNA, 21 nt, Human
gaaggagaaagcaagugcugc

SEQ ID NO: 311229 - RNA, 22 nt, Human
ucucaggguuuccugggggcug

SEQ ID NO: 311230 - RNA, 22 nt, Human
cuggaagggucuacuuagcaga

SEQ ID NO: 311231 - RNA, 17 nt, Human
guccuggugugugagga

SEQ ID NO: 311232 - RNA, 22 nt, Human
uaugcacauauaaccugcacug

SEQ ID NO: 311233 - RNA, 22 nt, Human
agcugucuaccugcagaguccu

SEQ ID NO: 311234 - RNA, 22 nt, Human
aagugacacauggcacuucuau

SEQ ID NO: 311235 - RNA, 22 nt, Human
auggccuggggagcaugggaag

SEQ ID NO: 311236 - RNA, 20 nt, Human
agaggccaguuaggagucua

SEQ ID NO: 311237 - RNA, 22 nt, Human
acugcagggcauccuggccaag

SEQ ID NO: 311238 - RNA, 22 nt, Human
guuauguaucuugauugggugg

SEQ ID NO: 311239 - RNA, 20 nt, Human
ucagugauuuugaagaggaa

SEQ ID NO: 311240 - RNA, 22 nt, Human
uggagcagcaucacuuugagcu

SEQ ID NO: 311241 - RNA, 22 nt, Human
agaugcugucacacacacuguu

SEQ ID NO: 311242 - RNA, 22 nt, Human
aaggaaagacauauaaaugacu

SEQ ID NO: 311243 - RNA, 22 nt, Human
ggggcacacuuuugguagauau

SEQ ID NO: 311244 - RNA, 22 nt, Human
acaaagcuagagaagagaauug

SEQ ID NO: 311245 - RNA, 22 nt, Human
aucuggcuuggguguggguagc

SEQ ID NO: 311246 - RNA, 18 nt, Human
gggcucugauccuucacc

SEQ ID NO: 311247 - RNA, 22 nt, Human
uagaucugauacaauucaucug

SEQ ID NO: 311248 - RNA, 22 nt, Human
uucaggaucacuaaacccucca

SEQ ID NO: 311249 - RNA, 22 nt, Human
ugacagaaauaguucuuaauuu

SEQ ID NO: 311250 - RNA, 22 nt, Human
agcagggcagugaucagaaagg

SEQ ID NO: 311251 - RNA, 19 nt, Human
gcuggcagauguggccgug

SEQ ID NO: 311252 - RNA, 19 nt, Human
uuugaaagaguuuuauugg

SEQ ID NO: 311253 - RNA, 22 nt, Human
ugcagaaggccugacauugcac

SEQ ID NO: 311254 - RNA, 22 nt, Human
ugaaggccuaacuuccagugcu

SEQ ID NO: 311255 - RNA, 22 nt, Human
gggcacugcuggaggcucccug

SEQ ID NO: 311256 - RNA, 22 nt, Human
agggcugcaccggggcuucgcg

SEQ ID NO: 311257 - RNA, 22 nt, Human
aggggagguguccccaaaucuc

SEQ ID NO: 311258 - RNA, 22 nt, Human
ugaaugaguuuggcugcuguuc

SEQ ID NO: 311259 - RNA, 22 nt, Human
cagggccagcgcccaggcccag

SEQ ID NO: 311260 - RNA, 22 nt, Human
uggccuuguguuuuagagaaag

SEQ ID NO: 311261 - RNA, 22 nt, Human
guggagcccugccuugcucaug

SEQ ID NO: 311262 - RNA, 22 nt, Human
agauggggcagaauggagccau

SEQ ID NO: 311263 - RNA, 18 nt, Human
aauuuccauaugaauugc

SEQ ID NO: 311264 - RNA, 22 nt, Human
ccuggguacccuuggcggccuu

SEQ ID NO: 311265 - RNA, 22 nt, Human
ccucagggccaucucugucccu

SEQ ID NO: 311266 - RNA, 22 nt, Human
uaacacaugucugggaugugaa

SEQ ID NO: 311267 - RNA, 22 nt, Human
cagaguccuggacacagagaca

SEQ ID NO: 311268 - RNA, 22 nt, Human
ucugguuagccaauaaugccaa

SEQ ID NO: 311269 - RNA, 22 nt, Human
ggcugccugggagcccuccucu

SEQ ID NO: 311270 - RNA, 21 nt, Human
ccagacuggccuaugugguag

SEQ ID NO: 311271 - RNA, 22 nt, Human
ccugccugcuuucugcuuugca

SEQ ID NO: 311272 - RNA, 22 nt, Human
aucuggcugacuuugugggaca

SEQ ID NO: 311273 - RNA, 22 nt, Human
uaucuacaggugucagguaaga

SEQ ID NO: 311274 - RNA, 22 nt, Human
cucagaaucugccaaguucagg

SEQ ID NO: 311275 - RNA, 21 nt, Human
agagagggagaugaaacaucc

SEQ ID NO: 311276 - RNA, 22 nt, Human
uuagaaacccagacucuuaggu

SEQ ID NO: 311277 - RNA, 22 nt, Human
gaaaugcagaaccugagaccau

SEQ ID NO: 311278 - RNA, 22 nt, Human
uagaaacauucaguugcagucc

SEQ ID NO: 311279 - RNA, 22 nt, Human
uccagcagguccgagacaaguu

SEQ ID NO: 311280 - RNA, 22 nt, Human
cccaggaggccaagguugcagu

SEQ ID NO: 311281 - RNA, 19 nt, Human
gcuuuggagggagguucua

SEQ ID NO: 311282 - RNA, 22 nt, Human
gugcugaggugggugggcagcc

SEQ ID NO: 311283 - RNA, 18 nt, Human
ucucuuuuccccucauug

SEQ ID NO: 311284 - RNA, 23 nt, Human
agaggccaacuucuugccccucc

SEQ ID NO: 311285 - RNA, 22 nt, Human
cuggcagcguguuuaugaacau

SEQ ID NO: 311286 - RNA, 22 nt, Human
agagaaaacucauugagguguc

SEQ ID NO: 311287 - RNA, 22 nt, Human
gagcucccuggagguucagaua

SEQ ID NO: 311288 - RNA, 22 nt, Human
aagcugggacuuagcgcagaua

SEQ ID NO: 311289 - RNA, 22 nt, Human
agaugaagacucaggagcaggu

SEQ ID NO: 311290 - RNA, 22 nt, Human
ucaaaugcacguagagaaaaua

SEQ ID NO: 311291 - RNA, 22 nt, Human
uggccucuuacgacauagccuu

SEQ ID NO: 311292 - RNA, 22 nt, Human
agagucugaggcagcugcagcc

SEQ ID NO: 311293 - RNA, 22 nt, Human
gaagcagcuggugagauggagc

SEQ ID NO: 311294 - RNA, 22 nt, Human
agagcagugcugaagaguaggg

SEQ ID NO: 311295 - RNA, 19 nt, Human
uggcuucuguuuucauguu

SEQ ID NO: 311296 - RNA, 19 nt, Human
ugucacugucauggcccag

SEQ ID NO: 311297 - RNA, 22 nt, Human
cucucaggcuugggucguggca

SEQ ID NO: 311298 - RNA, 22 nt, Human
aggaagaaaacuaauuagaugg

SEQ ID NO: 311299 - RNA, 22 nt, Human
cugaaggagaaggccacuguuc

SEQ ID NO: 311300 - RNA, 22 nt, Human
ccuggggucacuugcagccgca

SEQ ID NO: 311301 - RNA, 22 nt, Human
acagagcuuaggaugacuccca

SEQ ID NO: 311302 - RNA, 23 nt, Human
ucacagggcacuggcugggguug

SEQ ID NO: 311303 - RNA, 22 nt, Human
ucuguucauaguaguguauaug

SEQ ID NO: 311304 - RNA, 22 nt, Human
uuaaauauuuucagcaggguca

SEQ ID NO: 311305 - RNA, 22 nt, Human
aucuaagaguuaacaucaagaa

SEQ ID NO: 311306 - RNA, 22 nt, Human
gcagcuuuguggagaggcccau

SEQ ID NO: 311307 - RNA, 22 nt, Human
agggauggaagcucgucugcaa

SEQ ID NO: 311308 - RNA, 18 nt, Human
gccugcaggcacgggggu

SEQ ID NO: 311309 - RNA, 22 nt, Human
gcugcaggcgccugcggucucu

SEQ ID NO: 311310 - RNA, 22 nt, Human
agagugggugaucucuguuguc

SEQ ID NO: 311311 - RNA, 23 nt, Human
uggcuucugccccauucucucca

SEQ ID NO: 311312 - RNA, 22 nt, Human
uggugugggcguggcaggcaag

SEQ ID NO: 311313 - RNA, 22 nt, Human
uuagagucaaaauggcauguua

SEQ ID NO: 311314 - RNA, 22 nt, Human
agugcauugcaucucugcuuca

SEQ ID NO: 311315 - RNA, 22 nt, Human
ugguaaagaaggcuagaucuga

SEQ ID NO: 311316 - RNA, 22 nt, Human
cuaauacucauuucuguaacuc

SEQ ID NO: 311317 - RNA, 22 nt, Human
uggccuggaaccuggcagggac

SEQ ID NO: 311318 - RNA, 22 nt, Human
aauguauaaaguguuaauaacu

SEQ ID NO: 311319 - RNA, 22 nt, Human
ugacaccacaacuagccauuga

SEQ ID NO: 311320 - RNA, 22 nt, Human
aacauuuaugauugagguaaau

SEQ ID NO: 311321 - RNA, 22 nt, Human
cuucccuuggugaacagagcau

SEQ ID NO: 311322 - RNA, 22 nt, Human
cgcugggcgccgaccugcuggc

SEQ ID NO: 311323 - RNA, 22 nt, Human
uccuggccugucuggaguagcu

SEQ ID NO: 311324 - RNA, 22 nt, Human
cuggggcucacuuuggucaggc

SEQ ID NO: 311325 - RNA, 22 nt, Human
gcaggggcuacucugagcuucc

SEQ ID NO: 311326 - RNA, 22 nt, Human
ugcaguggugguaaagaugcuc

SEQ ID NO: 311327 - RNA, 22 nt, Human
ucuucagacuccaaauguuuua

SEQ ID NO: 311328 - RNA, 20 nt, Human
caggcacacucauuccugcu

SEQ ID NO: 311329 - RNA, 22 nt, Human
cuucuucacacuggucugaagc

SEQ ID NO: 311330 - RNA, 22 nt, Human
ucuggcucuuugggugauugua

SEQ ID NO: 311331 - RNA, 22 nt, Human
gcuggagggguaauaggauggg

SEQ ID NO: 311332 - RNA, 22 nt, Human
ggcagggucuggacugaaagcu

SEQ ID NO: 311333 - RNA, 22 nt, Human
uggaggaugccauccaggauac

SEQ ID NO: 311334 - RNA, 22 nt, Human
gagugugggcacgggggccuug

SEQ ID NO: 311335 - RNA, 22 nt, Human
agagcuggggcauaaaugccac

SEQ ID NO: 311336 - RNA, 22 nt, Human
aucuggcuggauucuuagcguu

SEQ ID NO: 311337 - RNA, 22 nt, Human
uacagugucccuuuuucagaca

SEQ ID NO: 311338 - RNA, 22 nt, Human
accucugccaagaugugcuccc

SEQ ID NO: 311339 - RNA, 22 nt, Human
ggcacugggagaggugagacgg

SEQ ID NO: 311340 - RNA, 22 nt, Human
auuuacagaagcauguaauagc

SEQ ID NO: 311341 - RNA, 19 nt, Human
cugcucaggucagucuguc

SEQ ID NO: 311342 - RNA, 22 nt, Human
uaugcacgucuauuuaugaaga

SEQ ID NO: 311343 - RNA, 22 nt, Human
cccaggagauggagguugcagu

SEQ ID NO: 311344 - RNA, 22 nt, Human
augaggcauuccacucaaacuc

SEQ ID NO: 311345 - RNA, 23 nt, Human
caguacuuaguguagcguuaauu

SEQ ID NO: 311346 - RNA, 22 nt, Human
ugaagcuuuccuguggucagga

SEQ ID NO: 311347 - RNA, 21 nt, Human
aggagcuguguuagcuggucg

SEQ ID NO: 311348 - RNA, 22 nt, Human
cuggggugucucgucugccauu

SEQ ID NO: 311349 - RNA, 22 nt, Human
uucaggauucuuucagacuggg

SEQ ID NO: 311350 - RNA, 22 nt, Human
agaaguuguagguuugcauauu

SEQ ID NO: 311351 - RNA, 22 nt, Human
uuucuugaccacuauguugaua

SEQ ID NO: 311352 - RNA, 22 nt, Human
aagaacaacugcuuuaaaagca

SEQ ID NO: 311353 - RNA, 22 nt, Human
gcuguguuugacaguagcagac

SEQ ID NO: 311354 - RNA, 22 nt, Human
ggcuccuggcaucuggugggua

SEQ ID NO: 311355 - RNA, 22 nt, Human
uagaaaagauaacauucugugc

SEQ ID NO: 311356 - RNA, 22 nt, Human
cccagcucaucaggagccgccc

SEQ ID NO: 311357 - RNA, 22 nt, Human
caggugcucccagagaagugcu

SEQ ID NO: 311358 - RNA, 22 nt, Human
gcagcugcaggcaggcuugcug

SEQ ID NO: 311359 - RNA, 22 nt, Human
uaagacaugguugaucuagugu

SEQ ID NO: 311360 - RNA, 22 nt, Human
cauagagugauguaagguaugu

SEQ ID NO: 311361 - RNA, 23 nt, Human
ugccucaguggaaugugagggug

SEQ ID NO: 311362 - RNA, 22 nt, Human
caaagguaguauauauauuguu

SEQ ID NO: 311363 - RNA, 22 nt, Human
cccugggcagucugcacuucag

SEQ ID NO: 311364 - RNA, 22 nt, Human
uggaaauggaucugaugagucu

SEQ ID NO: 311365 - RNA, 22 nt, Human
cacugcuuuaaggcugaguaac

SEQ ID NO: 311366 - RNA, 22 nt, Human
uguuuaagcugaugagguaucg

SEQ ID NO: 311367 - RNA, 23 nt, Human
agggcugaugccauugcagcucu

SEQ ID NO: 311368 - RNA, 22 nt, Human
auaaagaggauguauuuacagc

SEQ ID NO: 311369 - RNA, 22 nt, Human
gugagcagaacagguggcuucu

SEQ ID NO: 311370 - RNA, 22 nt, Human
aaucaguucuacaucuuaucca

SEQ ID NO: 311371 - RNA, 18 nt, Human
ggagagugagaucaaaca

SEQ ID NO: 311372 - RNA, 22 nt, Human
auacauauccacaggagauaaa

SEQ ID NO: 311373 - RNA, 22 nt, Human
gauuuuauuagcccaaacuuug

SEQ ID NO: 311374 - RNA, 22 nt, Human
ugauuaacugucuauuaaucau

SEQ ID NO: 311375 - RNA, 22 nt, Human
gagcagagacaguacaacuggc

SEQ ID NO: 311376 - RNA, 22 nt, Human
aucagugcuaaagcaaaugccc

SEQ ID NO: 311377 - RNA, 22 nt, Human
gauuucuucauuuguggugaau

SEQ ID NO: 311378 - RNA, 22 nt, Human
uggagccagcccaggccccucu

SEQ ID NO: 311379 - RNA, 22 nt, Human
ugcagccaucgcagagucugua

SEQ ID NO: 311380 - RNA, 22 nt, Human
ccagcucucagcgggagacuca

SEQ ID NO: 311381 - RNA, 22 nt, Human
aaguucaaggcagguccugagg

SEQ ID NO: 311382 - RNA, 22 nt, Human
agcucccagaagccagagucgg

SEQ ID NO: 311383 - RNA, 22 nt, Human
ucauugcauuuauucacuggca

SEQ ID NO: 311384 - RNA, 22 nt, Human
ccucaggggucacugugaggag

SEQ ID NO: 311385 - RNA, 22 nt, Human
caguuaaaggcccaauaucugg

SEQ ID NO: 311386 - RNA, 22 nt, Human
ggggcccagcaccccuccucgc

SEQ ID NO: 311387 - RNA, 22 nt, Human
cagcagugaugugugaggguuc

SEQ ID NO: 311388 - RNA, 18 nt, Human
gaggccugagaaccaggu

SEQ ID NO: 311389 - RNA, 22 nt, Human
guugaaagaugucuugguuccc

SEQ ID NO: 311390 - RNA, 22 nt, Human
aauugucaaacacaaauaagag

SEQ ID NO: 311391 - RNA, 22 nt, Human
cucccugggcagauguggcucu

SEQ ID NO: 311392 - RNA, 22 nt, Human
uccagccaugcaugacaaucac

SEQ ID NO: 311393 - RNA, 22 nt, Human
ccugccuggcuuccagaagaga

SEQ ID NO: 311394 - RNA, 19 nt, Human
acccagagcccuuugcagg

SEQ ID NO: 311395 - RNA, 22 nt, Human
auauucguggucaaguaaggcc

SEQ ID NO: 311396 - RNA, 22 nt, Human
gcugccuguggcccuucugggu

SEQ ID NO: 311397 - RNA, 22 nt, Human
uacuuucuguccuucuguuaaa

SEQ ID NO: 311398 - RNA, 22 nt, Human
uccucuggcucuuucccuagga

SEQ ID NO: 311399 - RNA, 22 nt, Human
ugaaaucuucacuaagucucuu

SEQ ID NO: 311400 - RNA, 22 nt, Human
ugggcagaguugugaugaacug

SEQ ID NO: 311401 - RNA, 22 nt, Human
cccaggagagaggccaguuggc

SEQ ID NO: 311402 - RNA, 22 nt, Human
cagcacugcugcuguacacaca

SEQ ID NO: 311403 - RNA, 17 nt, Human
ggcaccagacggagagu

SEQ ID NO: 311404 - RNA, 22 nt, Human
acacauuuacauguuuacguau

SEQ ID NO: 311405 - RNA, 22 nt, Human
ggaugagguagaugaacaaggg

SEQ ID NO: 311406 - RNA, 22 nt, Human
caauacaauuaccaguuaauca

SEQ ID NO: 311407 - RNA, 22 nt, Human
ucugcaucauuuuucagagccg

SEQ ID NO: 311408 - RNA, 22 nt, Human
gcaggcagguggcaucuuguga

SEQ ID NO: 311409 - RNA, 19 nt, Human
cagucccaaauucuuguca

SEQ ID NO: 311410 - RNA, 22 nt, Human
uuacaucuaaacugugaacaau

SEQ ID NO: 311411 - RNA, 22 nt, Human
uauuccuaagucccaacuacau

SEQ ID NO: 311412 - RNA, 22 nt, Human
auuuuuaugacaaaccauccuc

SEQ ID NO: 311413 - RNA, 22 nt, Human
cacagaaguuucauagucucga

SEQ ID NO: 311414 - RNA, 22 nt, Human
gcucccucugcucaggcacuug

SEQ ID NO: 311415 - RNA, 22 nt, Human
cucugagcagaggccguggcua

SEQ ID NO: 311416 - RNA, 19 nt, Human
acauuuaaauucagaucuc

SEQ ID NO: 311417 - RNA, 22 nt, Human
acauugaugaaaagguaucauu

SEQ ID NO: 311418 - RNA, 22 nt, Human
uuacauaacgguaugaaaaaug

SEQ ID NO: 311419 - RNA, 22 nt, Human
uggcagcaaguucuugggaggu

SEQ ID NO: 311420 - RNA, 22 nt, Human
ucaguccucacuugguucuaag

SEQ ID NO: 311421 - RNA, 22 nt, Human
cuguuuauacgacagguggagg

SEQ ID NO: 311422 - RNA, 22 nt, Human
gucaggggccaugggccaagga

SEQ ID NO: 311423 - RNA, 22 nt, Human
acagaauugauggaaaucucag

SEQ ID NO: 311424 - RNA, 22 nt, Human
gcuucccacagcuggacugggg

SEQ ID NO: 311425 - RNA, 22 nt, Human
ggaggggaggauuaaugacaaa

SEQ ID NO: 311426 - RNA, 22 nt, Human
auguaugaugcuaggcucucag

SEQ ID NO: 311427 - RNA, 22 nt, Human
caggcaccccaggugagcacug

SEQ ID NO: 311428 - RNA, 19 nt, Human
auauauguauacaaugugg

SEQ ID NO: 311429 - RNA, 22 nt, Human
augguguagcaugugauaugac

SEQ ID NO: 311430 - RNA, 23 nt, Human
uccugaggaauggcaucucacau

SEQ ID NO: 311431 - RNA, 22 nt, Human
uacagauacagaucuagauaca

SEQ ID NO: 311432 - RNA, 22 nt, Human
accucaguucaauucaguuaga

SEQ ID NO: 311433 - RNA, 22 nt, Human
gcccagucucuucuggcccugu

SEQ ID NO: 311434 - RNA, 22 nt, Human
aagauacauaaagguagagucu

SEQ ID NO: 311435 - RNA, 22 nt, Human
gcagcuggcccugacacgcaga

SEQ ID NO: 311436 - RNA, 23 nt, Human
uccagggauuaaugaagucaguc

SEQ ID NO: 311437 - RNA, 22 nt, Human
uaugaccuuaggaagcaagaag

SEQ ID NO: 311438 - RNA, 22 nt, Human
gcaucuaauccaguccagcauc

SEQ ID NO: 311439 - RNA, 22 nt, Human
gggccagagcuuggcagcuggg

SEQ ID NO: 311440 - RNA, 22 nt, Human
cugaggcaugaaugugggcuuu

SEQ ID NO: 311441 - RNA, 22 nt, Human
uggcagagcaaaaagauagaau

SEQ ID NO: 311442 - RNA, 22 nt, Human
cugccuuugcccuugacacugu

SEQ ID NO: 311443 - RNA, 22 nt, Human
accacugcccauggugaaaacu

SEQ ID NO: 311444 - RNA, 22 nt, Human
aaggcccuaauagagcacauau

SEQ ID NO: 311445 - RNA, 22 nt, Human
gucagagagggcacgugcacac

SEQ ID NO: 311446 - RNA, 22 nt, Human
aaacugcugguugcuggccagc

SEQ ID NO: 311447 - RNA, 22 nt, Human
agcauggggcuccgcaaugaac

SEQ ID NO: 311448 - RNA, 22 nt, Human
uguucagagacagaaauucuaa

SEQ ID NO: 311449 - RNA, 22 nt, Human
agaagccagcuucagcugcccg

SEQ ID NO: 311450 - RNA, 20 nt, Human
auacacauucauagaaaaau

SEQ ID NO: 311451 - RNA, 22 nt, Human
gaaauguguuguucauuucuaa

SEQ ID NO: 311452 - RNA, 22 nt, Human
uggcuuccugcacagugucugc

SEQ ID NO: 311453 - RNA, 22 nt, Human
agucucugucguagaucagcgu

SEQ ID NO: 311454 - RNA, 22 nt, Human
cuggagccggaccagggacggu

SEQ ID NO: 311455 - RNA, 22 nt, Human
ccagcucccugaagccuggucu

SEQ ID NO: 311456 - RNA, 22 nt, Human
ugaagacacauacaagggaaug

SEQ ID NO: 311457 - RNA, 23 nt, Human
guggagccacaucacaggcuccu

SEQ ID NO: 311458 - RNA, 22 nt, Human
gcugucaggaacaugccuuggu

SEQ ID NO: 311459 - RNA, 22 nt, Human
ccugccugcaaaaugggacaag

SEQ ID NO: 311460 - RNA, 22 nt, Human
ugaaaugauaucugauaacaaa

SEQ ID NO: 311461 - RNA, 23 nt, Human
cccuggagcuagucugagcagag

SEQ ID NO: 311462 - RNA, 22 nt, Human
uuugaagagccacagugaaauu

SEQ ID NO: 311463 - RNA, 22 nt, Human
acagccagaggagccaggcugg

SEQ ID NO: 311464 - RNA, 22 nt, Human
gggugcaggcagcccaggcagg

SEQ ID NO: 311465 - RNA, 22 nt, Human
aggccagacagcuagaaacagg

SEQ ID NO: 311466 - RNA, 20 nt, Human
aggaagccaaaggcugucuu

SEQ ID NO: 311467 - RNA, 22 nt, Human
uguaugugcuugagaagguggg

SEQ ID NO: 311468 - RNA, 22 nt, Human
uccucaguauuguggagcagau

SEQ ID NO: 311469 - RNA, 22 nt, Human
uggcagcuuccugcucauagga

SEQ ID NO: 311470 - RNA, 22 nt, Human
caggccucuauggucagcugag

SEQ ID NO: 311471 - RNA, 21 nt, Human
gcaggggauagaaauggucug

SEQ ID NO: 311472 - RNA, 21 nt, Human
ugauuuccagaaaauuggccc

SEQ ID NO: 311473 - RNA, 22 nt, Human
cugcuguguaucauuuuagaug

SEQ ID NO: 311474 - RNA, 22 nt, Human
agucacuguucugucaugucaa

SEQ ID NO: 311475 - RNA, 22 nt, Human
aagcugcccuguguuagaguuc

SEQ ID NO: 311476 - RNA, 22 nt, Human
uggcgugcccuccagacuuggc

SEQ ID NO: 311477 - RNA, 22 nt, Human
uagaaucuaguucauucauuug

SEQ ID NO: 311478 - RNA, 22 nt, Human
uuagauaacaguagaauaucaa

SEQ ID NO: 311479 - RNA, 22 nt, Human
ggcagcaguccauggcccaagg

SEQ ID NO: 311480 - RNA, 22 nt, Human
gugggagcuuuggcaucaggcu

SEQ ID NO: 311481 - RNA, 23 nt, Human
ugcuguccaacagacuggccaug

SEQ ID NO: 311482 - RNA, 22 nt, Human
caugccaguuuugagaugcacc

SEQ ID NO: 311483 - RNA, 22 nt, Human
acagagguguuccagaccuagg

SEQ ID NO: 311484 - RNA, 20 nt, Human
ugcuggggacauacagggug

SEQ ID NO: 311485 - RNA, 20 nt, Human
cagagccaagagcagcaucu

SEQ ID NO: 311486 - RNA, 21 nt, Human
uaugaacaugaccaauagucc

SEQ ID NO: 311487 - RNA, 22 nt, Human
gaaggaaaacagaucugccuga

SEQ ID NO: 311488 - RNA, 22 nt, Human
aaagagccagcuaccucaguuu

SEQ ID NO: 311489 - RNA, 22 nt, Human
aaggcagagggcuggaucagag

SEQ ID NO: 311490 - RNA, 18 nt, Human
uggagccagcucuaggau

SEQ ID NO: 311491 - RNA, 22 nt, Human
ggcuuccuggagaaggucugag

SEQ ID NO: 311492 - RNA, 22 nt, Human
ugggcugcugcggugcucuugg

SEQ ID NO: 311493 - RNA, 22 nt, Human
ugucaccaguuccaggaaauaa

SEQ ID NO: 311494 - RNA, 21 nt, Human
ucuccaguauccuucucugag

SEQ ID NO: 311495 - RNA, 22 nt, Human
acuccuggggauccauuccuuu

SEQ ID NO: 311496 - RNA, 22 nt, Human
aauguugagcuugaaaguaggu

SEQ ID NO: 311497 - RNA, 22 nt, Human
cucaagacugaucgcaguggaa

SEQ ID NO: 311498 - RNA, 22 nt, Human
ccugugugucugucacugcaca

SEQ ID NO: 311499 - RNA, 22 nt, Human
gcagggcuauuggaaggagaug

SEQ ID NO: 311500 - RNA, 22 nt, Human
aggcugcagugcagguaggauu

SEQ ID NO: 311501 - RNA, 22 nt, Human
cagagccagcccacuguucccg

SEQ ID NO: 311502 - RNA, 22 nt, Human
ucugucugcgcuugcccuggug

SEQ ID NO: 311503 - RNA, 22 nt, Human
uuucaaaccuacuuguauguuu

SEQ ID NO: 311504 - RNA, 22 nt, Human
ucugagagcuguagaagccuau

SEQ ID NO: 311505 - RNA, 22 nt, Human
ucauucagguugggcaaguguc

SEQ ID NO: 311506 - RNA, 22 nt, Human
caaugugucaggaaaagggcca

SEQ ID NO: 311507 - RNA, 19 nt, Human
gugcuuuuuaagagcucag

SEQ ID NO: 311508 - RNA, 22 nt, Human
acauuuagcuguacaaucuaug

SEQ ID NO: 311509 - RNA, 22 nt, Human
cuuauuauaaaauccuguuuga

SEQ ID NO: 311510 - RNA, 22 nt, Human
cuguccuaugaguacucacuag

SEQ ID NO: 311511 - RNA, 22 nt, Human
auuauugugauaggugucagug

SEQ ID NO: 311512 - RNA, 22 nt, Human
ucagagaacacagaggugaugu

SEQ ID NO: 311513 - RNA, 22 nt, Human
ggaaggagggcggcaaugauga

SEQ ID NO: 311514 - RNA, 22 nt, Human
acauguguauagccuguauaga

SEQ ID NO: 311515 - RNA, 22 nt, Human
aaauuucaguuggaaugagcuc

SEQ ID NO: 311516 - RNA, 23 nt, Human
cagugcugguucugccugugggg

SEQ ID NO: 311517 - RNA, 22 nt, Human
gugguaauuuaauccuacacug

SEQ ID NO: 311518 - RNA, 22 nt, Human
ugucaaagccugaaucacauag

SEQ ID NO: 311519 - RNA, 22 nt, Human
uacagucuuuggaaagagauag

SEQ ID NO: 311520 - RNA, 19 nt, Human
uggcugggugccaauggcc

SEQ ID NO: 311521 - RNA, 22 nt, Human
auuguacaugcagugagucauc

SEQ ID NO: 311522 - RNA, 22 nt, Human
auucaguuaaaaacuguacuuc

SEQ ID NO: 311523 - RNA, 22 nt, Human
augauguugauaaauuacuuua

SEQ ID NO: 311524 - RNA, 22 nt, Human
acuugcugguggcauuuacagu

SEQ ID NO: 311525 - RNA, 22 nt, Human
gugggcuucuguuagggaggcu

SEQ ID NO: 311526 - RNA, 22 nt, Human
aaaaagguugauccagauuagg

SEQ ID NO: 311527 - RNA, 22 nt, Human
acaguguuauuucugaguaaug

SEQ ID NO: 311528 - RNA, 22 nt, Human
uaaaugugucuauggacccgcc

SEQ ID NO: 311529 - RNA, 22 nt, Human
cugggaggugcagcaaaaauca

SEQ ID NO: 311530 - RNA, 22 nt, Human
aguggggaagagcaugggcccu

SEQ ID NO: 311531 - RNA, 19 nt, Human
aggagaaguagcagaaauu

SEQ ID NO: 311532 - RNA, 22 nt, Human
ccugucuggaacauggccuguu

SEQ ID NO: 311533 - RNA, 22 nt, Human
ccaggaaugaaauguagauaaa

SEQ ID NO: 311534 - RNA, 22 nt, Human
augcacagacccaaaggccauc

SEQ ID NO: 311535 - RNA, 22 nt, Human
agggagaaaauuggaugcacaa

SEQ ID NO: 311536 - RNA, 21 nt, Human
acaggcucuggggaugcuggg

SEQ ID NO: 311537 - RNA, 22 nt, Human
uuucauaauagugcaguuuguu

SEQ ID NO: 311538 - RNA, 22 nt, Human
cugcucugugguccaugagaca

SEQ ID NO: 311539 - RNA, 22 nt, Human
cagggccucauccucagagauu

SEQ ID NO: 311540 - RNA, 22 nt, Human
uaaaagcucuucuguugaguua

SEQ ID NO: 311541 - RNA, 22 nt, Human
aagggcagcuauuaucgucauc

SEQ ID NO: 311542 - RNA, 22 nt, Human
cuacauuaaauuggcuuacuua

SEQ ID NO: 311543 - RNA, 22 nt, Human
uuuccuugccuccuguccuucu

SEQ ID NO: 311544 - RNA, 22 nt, Human
auuguauaacagcauguauuuu

SEQ ID NO: 311545 - RNA, 22 nt, Human
cuggagccugcaguuuucacuu

SEQ ID NO: 311546 - RNA, 22 nt, Human
uuaaauuccagccucauaauag

SEQ ID NO: 311547 - RNA, 22 nt, Human
aggccucuucagggagcaugga

SEQ ID NO: 311548 - RNA, 22 nt, Human
ucugauuagcaguuuagggaaa

SEQ ID NO: 311549 - RNA, 23 nt, Human
acauuacuuagccagagucucag

SEQ ID NO: 311550 - RNA, 22 nt, Human
auagaacagaaacagaugcaca

SEQ ID NO: 311551 - RNA, 22 nt, Human
uaacagaaauagaaaugagagu

SEQ ID NO: 311552 - RNA, 22 nt, Human
agugcuuuauguuguugugcaa

SEQ ID NO: 311553 - RNA, 22 nt, Human
uugcugaaaucuaugacauccu

SEQ ID NO: 311554 - RNA, 22 nt, Human
gcuggccuuugaggaagcugcg

SEQ ID NO: 311555 - RNA, 22 nt, Human
agauauguuuguauauauuugu

SEQ ID NO: 311556 - RNA, 21 nt, Human
ugugucacuaacuagaggcua

SEQ ID NO: 311557 - RNA, 22 nt, Human
cuucucagcauuuugucagucu

SEQ ID NO: 311558 - RNA, 22 nt, Human
uguccucacaggaaugaacuuu

SEQ ID NO: 311559 - RNA, 22 nt, Human
ccagcucuuuuggcugagugag

SEQ ID NO: 311560 - RNA, 22 nt, Human
ucaaaugcugccuuugugugcc

SEQ ID NO: 311561 - RNA, 22 nt, Human
cucugggcacauuuuccaggac

SEQ ID NO: 311562 - RNA, 22 nt, Human
uagaaauaaaucugcagcuggg

SEQ ID NO: 311563 - RNA, 22 nt, Human
acuugaauuauauuucuagaga

SEQ ID NO: 311564 - RNA, 22 nt, Human
aaguucuuucuggaaggucugc

SEQ ID NO: 311565 - RNA, 22 nt, Human
gugcuuccccaagccacagccu

SEQ ID NO: 311566 - RNA, 22 nt, Human
ccacagggccuuuccugcuggc

SEQ ID NO: 311567 - RNA, 22 nt, Human
gugggaugcaguggugaguggc

SEQ ID NO: 311568 - RNA, 22 nt, Human
uuucaaauggagucgugaaaug

SEQ ID NO: 311569 - RNA, 22 nt, Human
ccagggugaccagcuggccuag

SEQ ID NO: 311570 - RNA, 22 nt, Human
ggcuucuccagguacugagcau

SEQ ID NO: 311571 - RNA, 22 nt, Human
cucccuggaggcccagaccugg

SEQ ID NO: 311572 - RNA, 22 nt, Human
uccuucaagaugccacagcuuu

SEQ ID NO: 311573 - RNA, 22 nt, Human
ucucagagaucuuucugcaugu

SEQ ID NO: 311574 - RNA, 22 nt, Human
ugaaagcagcaccaauaccauu

SEQ ID NO: 311575 - RNA, 22 nt, Human
cuugccuucuuuuccuauagaa

SEQ ID NO: 311576 - RNA, 22 nt, Human
gagcugggauucaucuaugucu

SEQ ID NO: 311577 - RNA, 22 nt, Human
ugucucugugagaucugacgau

SEQ ID NO: 311578 - RNA, 22 nt, Human
cugcuuugauuagaagaguaca

SEQ ID NO: 311579 - RNA, 22 nt, Human
cugagcugcggcaggcaccugg

SEQ ID NO: 311580 - RNA, 22 nt, Human
ccagcagaggggcggagugcag

SEQ ID NO: 311581 - RNA, 22 nt, Human
cuggccgguauuugccucuggg

SEQ ID NO: 311582 - RNA, 22 nt, Human
ucugccuucgcugcucccugaa

SEQ ID NO: 311583 - RNA, 22 nt, Human
ucuuugcaggagcccuuugaac

SEQ ID NO: 311584 - RNA, 22 nt, Human
aaaugcaauuguauguacucca

SEQ ID NO: 311585 - RNA, 22 nt, Human
uuugacauuauccuguuacugg

SEQ ID NO: 311586 - RNA, 20 nt, Human
cguaaggcaagugcugcauc

SEQ ID NO: 311587 - RNA, 22 nt, Human
gaagcccauuuguacagcacau

SEQ ID NO: 311588 - RNA, 22 nt, Human
ccagcuucucucugaugcagcu

SEQ ID NO: 311589 - RNA, 22 nt, Human
aggcucaggcaggaauggcgga

SEQ ID NO: 311590 - RNA, 22 nt, Human
ccucaggguggcaucagaucuu

SEQ ID NO: 311591 - RNA, 22 nt, Human
caggguggcacucagcgcaucu

SEQ ID NO: 311592 - RNA, 21 nt, Human
ugguggagugugcugagcaug

SEQ ID NO: 311593 - RNA, 22 nt, Human
ugcaccauguaaguggccacgu

SEQ ID NO: 311594 - RNA, 22 nt, Human
cagcucuggggcagagugacua

SEQ ID NO: 311595 - RNA, 22 nt, Human
guucacauccuugugaggauuu

SEQ ID NO: 311596 - RNA, 22 nt, Human
uggccuggcugcccugucugga

SEQ ID NO: 311597 - RNA, 22 nt, Human
aaaugcuacauacacaucaggg

SEQ ID NO: 311598 - RNA, 22 nt, Human
cuaaucaucuuucucuuaaagc

SEQ ID NO: 311599 - RNA, 22 nt, Human
uacuuccuguuuccaugucugu

SEQ ID NO: 311600 - RNA, 22 nt, Human
gagcagggagacaacucuggug

SEQ ID NO: 311601 - RNA, 19 nt, Human
agcuccugggcucugggcc

SEQ ID NO: 311602 - RNA, 22 nt, Human
cagguggguacaucacagagac

SEQ ID NO: 311603 - RNA, 22 nt, Human
agugaaaacacuaguucuugcc

SEQ ID NO: 311604 - RNA, 22 nt, Human
uucaaaugcaaguuacuacuuu

SEQ ID NO: 311605 - RNA, 22 nt, Human
gggcacugcuuugcucugucac

SEQ ID NO: 311606 - RNA, 22 nt, Human
gcagagccaggagagacccuug

SEQ ID NO: 311607 - RNA, 22 nt, Human
uggaagcuguggcauaacugag

SEQ ID NO: 311608 - RNA, 22 nt, Human
uggcucagccauucguguugcc

SEQ ID NO: 311609 - RNA, 17 nt, Human
accagccucuccugggg

SEQ ID NO: 311610 - RNA, 22 nt, Human
cugggcugugguguggcccaaa

SEQ ID NO: 311611 - RNA, 22 nt, Human
gcccaugguuacuuuucuggcu

SEQ ID NO: 311612 - RNA, 22 nt, Human
uaauuucuagggacuaaggugc

SEQ ID NO: 311613 - RNA, 22 nt, Human
aaguuugagagccuuuaguaua

SEQ ID NO: 311614 - RNA, 22 nt, Human
cugcaggcccccuuccuggagu

SEQ ID NO: 311615 - RNA, 22 nt, Human
ugguggggucaucgucagaugc

SEQ ID NO: 311616 - RNA, 19 nt, Human
uguuggugcggauguggag

SEQ ID NO: 311617 - RNA, 23 nt, Human
uuuuccuuuggacaggcuguauu

SEQ ID NO: 311618 - RNA, 22 nt, Human
cucucagugccacacagccauu

SEQ ID NO: 311619 - RNA, 20 nt, Human
ucacauccucucccaacaug

SEQ ID NO: 311620 - RNA, 22 nt, Human
caaauagugucacauugugagg

SEQ ID NO: 311621 - RNA, 21 nt, Human
cugguguagcacucaggugcu

SEQ ID NO: 311622 - RNA, 22 nt, Human
ugcauguuaagaaaauauugag

SEQ ID NO: 311623 - RNA, 22 nt, Human
ugugcuucuugcagcuccugua

SEQ ID NO: 311624 - RNA, 22 nt, Human
uggugguuaugcgcuuuguggg

SEQ ID NO: 311625 - RNA, 22 nt, Human
caggccuggcugcagcucgccu

SEQ ID NO: 311626 - RNA, 22 nt, Human
ucacauacacuaggauauuuuu

SEQ ID NO: 311627 - RNA, 22 nt, Human
cuguuuuugugcugugucuccc

SEQ ID NO: 311628 - RNA, 22 nt, Human
auuugcuuaucuccacaguugu

SEQ ID NO: 311629 - RNA, 22 nt, Human
ucaguguccggagccugagugc

SEQ ID NO: 311630 - RNA, 22 nt, Human
ccaccaggacagcccugagggg

SEQ ID NO: 311631 - RNA, 22 nt, Human
cccagcucuggaagguggggga

SEQ ID NO: 311632 - RNA, 22 nt, Human
auccaggguguggagagagcuc

SEQ ID NO: 311633 - RNA, 22 nt, Human
uugauguacagaauuguucaca

SEQ ID NO: 311634 - RNA, 22 nt, Human
cagccagcuggcacugugagua

SEQ ID NO: 311635 - RNA, 22 nt, Human
gcagaagcugggcagcgaggug

SEQ ID NO: 311636 - RNA, 22 nt, Human
aguuuagaguucaaauuaguuc

SEQ ID NO: 311637 - RNA, 22 nt, Human
gaaggcaggcuucugauuaggu

SEQ ID NO: 311638 - RNA, 22 nt, Human
cacacaugaaucccuaguaccu

SEQ ID NO: 311639 - RNA, 22 nt, Human
gaaaauguuuguccggagcuga

SEQ ID NO: 311640 - RNA, 22 nt, Human
uacaugucuacaugcauuuuug

SEQ ID NO: 311641 - RNA, 22 nt, Human
acauuucuggaguuucucaaca

SEQ ID NO: 311642 - RNA, 22 nt, Human
gcagcaggagaguuuguccugc

SEQ ID NO: 311643 - RNA, 17 nt, Human
cugcuuugugcaacgcu

SEQ ID NO: 311644 - RNA, 22 nt, Human
gaaggucaccuccccucucugg

SEQ ID NO: 311645 - RNA, 22 nt, Human
cuucuugcugggggccucagug

SEQ ID NO: 311646 - RNA, 20 nt, Human
gagccuuccccucaccacug

SEQ ID NO: 311647 - RNA, 18 nt, Human
aggccagcccugcuacug

SEQ ID NO: 311648 - RNA, 22 nt, Human
auaguacacauccuacaauguu

SEQ ID NO: 311649 - RNA, 22 nt, Human
uagauuucucauucauagauug

SEQ ID NO: 311650 - RNA, 20 nt, Human
uggagcuguaaucuugucug

SEQ ID NO: 311651 - RNA, 22 nt, Human
uugaaggacauccuauuucuag

SEQ ID NO: 311652 - RNA, 21 nt, Human
aagcaggacauaugaugcccu

SEQ ID NO: 311653 - RNA, 22 nt, Human
gcagagcuucuguccuucagga

SEQ ID NO: 311654 - RNA, 22 nt, Human
guccucuggugaaagcauuccc

SEQ ID NO: 311655 - RNA, 20 nt, Human
augcaaacucacaaaauacc

SEQ ID NO: 311656 - RNA, 22 nt, Human
ucugcucugggccagcuauuaa

SEQ ID NO: 311657 - RNA, 22 nt, Human
aagcagaauuucccacuaguug

SEQ ID NO: 311658 - RNA, 22 nt, Human
ccaagggcugcugaggugucca

SEQ ID NO: 311659 - RNA, 22 nt, Human
ggagucaggagcaggcugggcu

SEQ ID NO: 311660 - RNA, 22 nt, Human
gagagcugauagaugagcuacu

SEQ ID NO: 311661 - RNA, 22 nt, Human
cccuggaggcggauguugcagu

SEQ ID NO: 311662 - RNA, 22 nt, Human
uccaguggagugugggggugaa

SEQ ID NO: 311663 - RNA, 22 nt, Human
acuuuuuacaggguguauacca

SEQ ID NO: 311664 - RNA, 22 nt, Human
aaggcagcccuggcucagccug

SEQ ID NO: 311665 - RNA, 22 nt, Human
ucacagcaaaagugugcagagc

SEQ ID NO: 311666 - RNA, 19 nt, Human
agagaccacagagcugccu

SEQ ID NO: 311667 - RNA, 20 nt, Human
cagagaccugucuucacaga

SEQ ID NO: 311668 - RNA, 23 nt, Human
ggucccaguggagaggccucacc

SEQ ID NO: 311669 - RNA, 22 nt, Human
aaauuaguacauugcaaagucc

SEQ ID NO: 311670 - RNA, 22 nt, Human
auggaaauaucuuuagagcuua

SEQ ID NO: 311671 - RNA, 22 nt, Human
gucauauacacugcauguaauc

SEQ ID NO: 311672 - RNA, 22 nt, Human
augcaguagauaggcacuuuua

SEQ ID NO: 311673 - RNA, 21 nt, Human
ucacaugcccauuacuggagc

SEQ ID NO: 311674 - RNA, 22 nt, Human
uacauaguuccauuuacaggaa

SEQ ID NO: 311675 - RNA, 22 nt, Human
cagcuccccaugguuccugaag

SEQ ID NO: 311676 - RNA, 22 nt, Human
cuagaauugcauucuaugaaua

SEQ ID NO: 311677 - RNA, 22 nt, Human
uaaaugcagauuccugagccua

SEQ ID NO: 311678 - RNA, 18 nt, Human
uccagagguguuggagcc

SEQ ID NO: 311679 - RNA, 22 nt, Human
augaugaagaguaacaggcuga

SEQ ID NO: 311680 - RNA, 22 nt, Human
gccaggcuccccggaucccugg

SEQ ID NO: 311681 - RNA, 22 nt, Human
cacugaagccugggaguaagac

SEQ ID NO: 311682 - RNA, 22 nt, Human
uuucuguagugugguauguagg

SEQ ID NO: 311683 - RNA, 22 nt, Human
uuggaaagauuauuauuaugaa

SEQ ID NO: 311684 - RNA, 22 nt, Human
aggcacuguacuagguacaggg

SEQ ID NO: 311685 - RNA, 22 nt, Human
gggaguggguuuggccuaggcc

SEQ ID NO: 311686 - RNA, 22 nt, Human
uggagcuggaauuucugggccu

SEQ ID NO: 311687 - RNA, 22 nt, Human
gcagugugaccgagcuugcuuc

SEQ ID NO: 311688 - RNA, 22 nt, Human
uccugagggcucggggcucaug

SEQ ID NO: 311689 - RNA, 22 nt, Human
ugagguaggugguaagagauac

SEQ ID NO: 311690 - RNA, 22 nt, Human
ugggggugugccagggaccucc

SEQ ID NO: 311691 - RNA, 22 nt, Human
aaaaugcaugagaaugugcucg

SEQ ID NO: 311692 - RNA, 22 nt, Human
cucuucaauagauuguugaggg

SEQ ID NO: 311693 - RNA, 22 nt, Human
cugggauccacgggcucccaag

SEQ ID NO: 311694 - RNA, 22 nt, Human
cccagacuccucuggcuggugg

SEQ ID NO: 311695 - RNA, 21 nt, Human
uccuccuccacuaggcuagcc

SEQ ID NO: 311696 - RNA, 22 nt, Human
acagguggcauaggcaguuuga

SEQ ID NO: 311697 - RNA, 22 nt, Human
gccaggcugcuggcugcugucc

SEQ ID NO: 311698 - RNA, 19 nt, Human
agugucaucagcuacucag

SEQ ID NO: 311699 - RNA, 22 nt, Human
ccuguggcacaugcagggauuc

SEQ ID NO: 311700 - RNA, 22 nt, Human
auaugugugaugcauggacuaa

SEQ ID NO: 311701 - RNA, 22 nt, Human
gcagagccugggggucugcgga

SEQ ID NO: 311702 - RNA, 22 nt, Human
uaacacauagauauuuuaacuu

SEQ ID NO: 311703 - RNA, 22 nt, Human
agagaaaugauuccugggcaga

SEQ ID NO: 311704 - RNA, 22 nt, Human
ggcucaggaugagccuucucau

SEQ ID NO: 311705 - RNA, 22 nt, Human
uaagauaugguaggaaguuugg

SEQ ID NO: 311706 - RNA, 22 nt, Human
augagcugggccauccagugau

SEQ ID NO: 311707 - RNA, 22 nt, Human
ucugggagauccaagcagaacu

SEQ ID NO: 311708 - RNA, 22 nt, Human
cgaugguucuggcugcuuguau

SEQ ID NO: 311709 - RNA, 22 nt, Human
ccagagcuucggggcggcugua

SEQ ID NO: 311710 - RNA, 21 nt, Human
uccauuguuuucccaggguuu

SEQ ID NO: 311711 - RNA, 22 nt, Human
uguuaucugagcaacgucgacg

SEQ ID NO: 311712 - RNA, 22 nt, Human
uauuuuaaagugaagggucuug

SEQ ID NO: 311713 - RNA, 22 nt, Human
gaggcucagagggagcaugguc

SEQ ID NO: 311714 - RNA, 22 nt, Human
ucuucaaaaaauauccaucagu

SEQ ID NO: 311715 - RNA, 22 nt, Human
gcugucugagaacaugguggaa

SEQ ID NO: 311716 - RNA, 22 nt, Human
cagugcagaggccagggaggau

SEQ ID NO: 311717 - RNA, 22 nt, Human
ccaaggaggccccaggucagcu

SEQ ID NO: 311718 - RNA, 22 nt, Human
gcacugaaugcuuuuacuguaa

SEQ ID NO: 311719 - RNA, 22 nt, Human
cugcccugugaggguccuuggg

SEQ ID NO: 311720 - RNA, 22 nt, Human
gccagggagucugggccacaga

SEQ ID NO: 311721 - RNA, 22 nt, Human
ucagagaguuacacaaauuguu

SEQ ID NO: 311722 - RNA, 22 nt, Human
ugagcagaguuguuucuccuga

SEQ ID NO: 311723 - RNA, 22 nt, Human
ggcuucccaaggagccaggaug

SEQ ID NO: 311724 - RNA, 22 nt, Human
agguggggaaaccagcgauccc

SEQ ID NO: 311725 - RNA, 20 nt, Human
ggagagcagggaagacagua

SEQ ID NO: 311726 - RNA, 20 nt, Human
aggaacuggaagggaggaaa

SEQ ID NO: 311727 - RNA, 22 nt, Human
cagcucugguccagggagggca

SEQ ID NO: 311728 - RNA, 22 nt, Human
aucaguuuggaacauucaggcc

SEQ ID NO: 311729 - RNA, 22 nt, Human
ugcuagaauaccuaccuggagg

SEQ ID NO: 311730 - RNA, 22 nt, Human
ucaggggcccuucccucagcag

SEQ ID NO: 311731 - RNA, 22 nt, Human
caaugaaaauuuaaguugcagc

SEQ ID NO: 311732 - RNA, 22 nt, Human
acugagcugcaagucagggagg

SEQ ID NO: 311733 - RNA, 22 nt, Human
agggcuggagccacagcuggga

SEQ ID NO: 311734 - RNA, 22 nt, Human
aucuucucauguguaaugaggu

SEQ ID NO: 311735 - RNA, 22 nt, Human
uaaaacuuaacuauccagauua

SEQ ID NO: 311736 - RNA, 18 nt, Human
caugucugcgccacaagg

SEQ ID NO: 311737 - RNA, 23 nt, Human
cucugcaggagagugggcagggc

SEQ ID NO: 311738 - RNA, 22 nt, Human
agcagcugccagagagaguucc

SEQ ID NO: 311739 - RNA, 22 nt, Human
cuucaggauuuaggaagaugaa

SEQ ID NO: 311740 - RNA, 22 nt, Human
gagccaaggguugccauggaga

SEQ ID NO: 311741 - RNA, 22 nt, Human
aaggcacucagccuugggacag

SEQ ID NO: 311742 - RNA, 22 nt, Human
gcugucacucuccggccuuccc

SEQ ID NO: 311743 - RNA, 22 nt, Human
uggcucaggauaauuuucccaa

SEQ ID NO: 311744 - RNA, 22 nt, Human
ccuggcacgaagggcugagguu

SEQ ID NO: 311745 - RNA, 22 nt, Human
uugucugucccagcuugugcau

SEQ ID NO: 311746 - RNA, 22 nt, Human
aaaguguugggauuacaggugu

SEQ ID NO: 311747 - RNA, 22 nt, Human
cugggggucuugaaagggagag

SEQ ID NO: 311748 - RNA, 22 nt, Human
guggaaugaauagauuugcauu

SEQ ID NO: 311749 - RNA, 22 nt, Human
uucagugucaauuuuuaaauau

SEQ ID NO: 311750 - RNA, 22 nt, Human
uuuauuguuguuagucauaagu

SEQ ID NO: 311751 - RNA, 22 nt, Human
uauaauguuuuccauggacuga

SEQ ID NO: 311752 - RNA, 22 nt, Human
aaggcacuguacuaguuaguua

SEQ ID NO: 311753 - RNA, 22 nt, Human
ggcacucagagauucaggcugu

SEQ ID NO: 311754 - RNA, 22 nt, Human
aggcuggcuggcaggggacaca

SEQ ID NO: 311755 - RNA, 22 nt, Human
gaaggagacccugaagaugcug

SEQ ID NO: 311756 - RNA, 22 nt, Human
aaaggaagauugagcuuuucca

SEQ ID NO: 311757 - RNA, 22 nt, Human
aaaacuaaauacgcuuugccuc

SEQ ID NO: 311758 - RNA, 22 nt, Human
ucagaggguggcugggagcauc

SEQ ID NO: 311759 - RNA, 22 nt, Human
gugcagggagcccagaaggucc

SEQ ID NO: 311760 - RNA, 22 nt, Human
gcucagugguauucggaaacug

SEQ ID NO: 311761 - RNA, 22 nt, Human
uggcucaggcuugaaaauagau

SEQ ID NO: 311762 - RNA, 22 nt, Human
aaaucucaauuugaauuguagc

SEQ ID NO: 311763 - RNA, 22 nt, Human
gccucugcucucagguagccuc

SEQ ID NO: 311764 - RNA, 22 nt, Human
uauuaguagcuugaaauuggug

SEQ ID NO: 311765 - RNA, 22 nt, Human
gcccugugccagucacgcugug

SEQ ID NO: 311766 - RNA, 22 nt, Human
uuccauuuauucuuguccagau

SEQ ID NO: 311767 - RNA, 22 nt, Human
uggcccugucccuggagccugg

SEQ ID NO: 311768 - RNA, 22 nt, Human
uguagcacagagcuuugacacu

SEQ ID NO: 311769 - RNA, 22 nt, Human
uaugagaagguauggugacuug

SEQ ID NO: 311770 - RNA, 22 nt, Human
gggagagagagcucauguugaa

SEQ ID NO: 311771 - RNA, 22 nt, Human
ccagcccuccuccaucagagga

SEQ ID NO: 311772 - RNA, 22 nt, Human
ccuggaaggugaugguacagca

SEQ ID NO: 311773 - RNA, 22 nt, Human
cauaaguuggguaauauaauga

SEQ ID NO: 311774 - RNA, 22 nt, Human
caggaggaacaagagguucugg

SEQ ID NO: 311775 - RNA, 22 nt, Human
accugagaaugggggcaugugu

SEQ ID NO: 311776 - RNA, 22 nt, Human
acauacauauguuuaaaugcau

SEQ ID NO: 311777 - RNA, 22 nt, Human
caguucuuuguggggaguucuc

SEQ ID NO: 311778 - RNA, 22 nt, Human
caggguagacaguaggugucug

SEQ ID NO: 311779 - RNA, 22 nt, Human
gcaguguuacuuggaguacuaa

SEQ ID NO: 311780 - RNA, 22 nt, Human
gucaaauauacuaagagguaaa

SEQ ID NO: 311781 - RNA, 22 nt, Human
gcccucagaugggaaaggaggg

SEQ ID NO: 311782 - RNA, 20 nt, Human
cagcugccuggcucugggau

SEQ ID NO: 311783 - RNA, 22 nt, Human
ucucagugcagagaggcuaucu

SEQ ID NO: 311784 - RNA, 22 nt, Human
uuacuuugaugaucaaugagcg

SEQ ID NO: 311785 - RNA, 22 nt, Human
cuggcagcccaaccuagagucu

SEQ ID NO: 311786 - RNA, 23 nt, Human
uggcagcuguguaagagaaagca

SEQ ID NO: 311787 - RNA, 22 nt, Human
uugcauuuuuagaugcuucugu

SEQ ID NO: 311788 - RNA, 22 nt, Human
acagcaagccagcuugucacug

SEQ ID NO: 311789 - RNA, 22 nt, Human
agaaugcauuuuguguagcuau

SEQ ID NO: 311790 - RNA, 22 nt, Human
cugcaucacagcaggaggcaca

SEQ ID NO: 311791 - RNA, 22 nt, Human
augcuuuuccaggagaaauaua

SEQ ID NO: 311792 - RNA, 22 nt, Human
agcaugaaagcauaggacaguc

SEQ ID NO: 311793 - RNA, 22 nt, Human
acugggaggcaaagagcaagga

SEQ ID NO: 311794 - RNA, 22 nt, Human
ccagccaggcauugcaaacuga

SEQ ID NO: 311795 - RNA, 22 nt, Human
uucaaugagcccaagaacguga

SEQ ID NO: 311796 - RNA, 23 nt, Human
acuuuagauaaauuaugugcaca

SEQ ID NO: 311797 - RNA, 22 nt, Human
ucccagggacucucugccuucc

SEQ ID NO: 311798 - RNA, 22 nt, Human
aggccagcuguuacuagagcca

SEQ ID NO: 311799 - RNA, 20 nt, Human
gagagcuggaaauaaagucc

SEQ ID NO: 311800 - RNA, 22 nt, Human
gaucauuuacuuguucuggacu

SEQ ID NO: 311801 - RNA, 22 nt, Human
agcagcagaggucagaaaggua

SEQ ID NO: 311802 - RNA, 22 nt, Human
aggcugucaucuuugcaggcag

SEQ ID NO: 311803 - RNA, 22 nt, Human
gcccuuccuuagacagcaggau

SEQ ID NO: 311804 - RNA, 23 nt, Human
ggccauggagacuuagaaugggc

SEQ ID NO: 311805 - RNA, 20 nt, Human
uguacacaguacuuuacaau

SEQ ID NO: 311806 - RNA, 22 nt, Human
ucuggcuccaggaccgggcaca

SEQ ID NO: 311807 - RNA, 22 nt, Human
uugcagcagggugaauucacuc

SEQ ID NO: 311808 - RNA, 22 nt, Human
cuccagggagcugcgggagcca

SEQ ID NO: 311809 - RNA, 22 nt, Human
gaggaugugucuggucugggca

SEQ ID NO: 311810 - RNA, 22 nt, Human
gcucugcucuugacuuaccagg

SEQ ID NO: 311811 - RNA, 22 nt, Human
uagggcagcugcaucaggcacu

SEQ ID NO: 311812 - RNA, 22 nt, Human
uuugaauguuuuagguacuuaa

SEQ ID NO: 311813 - RNA, 22 nt, Human
gggucuggcaugcugagaugga

SEQ ID NO: 311814 - RNA, 22 nt, Human
cugccucugcgucccacagagu

SEQ ID NO: 311815 - RNA, 20 nt, Human
uugauucccucuaaacucgc

SEQ ID NO: 311816 - RNA, 22 nt, Human
acagaugaugugcacagauaga

SEQ ID NO: 311817 - RNA, 22 nt, Human
aaaguaguuagucaugugaaaa

SEQ ID NO: 311818 - RNA, 22 nt, Human
ugcuacaauucacaucuggaua

SEQ ID NO: 311819 - RNA, 22 nt, Human
cacugaagcuuucauucucuug

SEQ ID NO: 311820 - RNA, 22 nt, Human
aagaauucacugguagagucaa

SEQ ID NO: 311821 - RNA, 22 nt, Human
caaggccaagucucugugaaga

SEQ ID NO: 311822 - RNA, 22 nt, Human
aagauggaguaguguaaugguu

SEQ ID NO: 311823 - RNA, 22 nt, Human
gccugccucaaaaucccaguuc

SEQ ID NO: 311824 - RNA, 22 nt, Human
gcagccugaugaucuggguugu

SEQ ID NO: 311825 - RNA, 22 nt, Human
cccccaaggccaggcugagacc

SEQ ID NO: 311826 - RNA, 21 nt, Human
uauacaugugugcauacgugu

SEQ ID NO: 311827 - RNA, 21 nt, Human
gcagagcuggaaccaggaccc

SEQ ID NO: 311828 - RNA, 22 nt, Human
gcuggccauggggagugaggag

SEQ ID NO: 311829 - RNA, 22 nt, Human
uaagaacagauaaaguuucccc

SEQ ID NO: 311830 - RNA, 22 nt, Human
gcugcugcgcuugucuacuguu

SEQ ID NO: 311831 - RNA, 22 nt, Human
agucugucugucacuucugcag

SEQ ID NO: 311832 - RNA, 20 nt, Human
gaggcucugggcauggcgcc

SEQ ID NO: 311833 - RNA, 22 nt, Human
caucaucaaaagugacagagaa

SEQ ID NO: 311834 - RNA, 22 nt, Human
uccuggagcuuccuucauggua

SEQ ID NO: 311835 - RNA, 20 nt, Human
acuggagccaucucagccua

SEQ ID NO: 311836 - RNA, 22 nt, Human
cucaggauagcugcgcagccug

SEQ ID NO: 311837 - RNA, 22 nt, Human
aucuguucuucaaaauauuaca

SEQ ID NO: 311838 - RNA, 22 nt, Human
guaacacagaaaugaaauucca

SEQ ID NO: 311839 - RNA, 22 nt, Human
aggcacuggucuaccccuuagu

SEQ ID NO: 311840 - RNA, 22 nt, Human
uugaggagucaggggcacggaa

SEQ ID NO: 311841 - RNA, 22 nt, Human
ccagggcaucacauccaguguu

SEQ ID NO: 311842 - RNA, 22 nt, Human
gauguguuuccaggauuuguuu

SEQ ID NO: 311843 - RNA, 22 nt, Human
ugucuagggagcugcucaggcu

SEQ ID NO: 311844 - RNA, 22 nt, Human
ucucagaguuuagagcugagcc

SEQ ID NO: 311845 - RNA, 22 nt, Human
uucuuuugggaauuacguaugc

SEQ ID NO: 311846 - RNA, 20 nt, Human
ccuggaagagcuccccaggc

SEQ ID NO: 311847 - RNA, 22 nt, Human
cucagcugcagccuggcuggca

SEQ ID NO: 311848 - RNA, 22 nt, Human
gaagcagcuaggaucuucauuu

SEQ ID NO: 311849 - RNA, 22 nt, Human
ggcucugggucuguggggagcg

SEQ ID NO: 311850 - RNA, 22 nt, Human
gaggucagucagaccaggguuu

SEQ ID NO: 311851 - RNA, 22 nt, Human
agcaccaugaccuugccauuga

SEQ ID NO: 311852 - RNA, 19 nt, Human
uagcugccuguuaccucca

SEQ ID NO: 311853 - RNA, 22 nt, Human
agcugcagagguuugugcaaca

SEQ ID NO: 311854 - RNA, 22 nt, Human
uaagacacaugcguacaagaua

SEQ ID NO: 311855 - RNA, 23 nt, Human
uucauuugucuacuucacuuguu

SEQ ID NO: 311856 - RNA, 22 nt, Human
gagugugucggucagcguggcg

SEQ ID NO: 311857 - RNA, 22 nt, Human
aaggggagaugucaugggcccu

SEQ ID NO: 311858 - RNA, 22 nt, Human
ucuacuguagugaugcugcagu

SEQ ID NO: 311859 - RNA, 22 nt, Human
auuuauguaucuguguagauca

SEQ ID NO: 311860 - RNA, 22 nt, Human
ggcugaaguguaguggcucacu

SEQ ID NO: 311861 - RNA, 22 nt, Human
caagagcugaggcuggagaggu

SEQ ID NO: 311862 - RNA, 22 nt, Human
gcaguggcaugaugugggcuca

SEQ ID NO: 311863 - RNA, 22 nt, Human
aaagaauuuguacacccuacua

SEQ ID NO: 311864 - RNA, 22 nt, Human
cauuuuaagaugaccugguuuc

SEQ ID NO: 311865 - RNA, 22 nt, Human
auaacuuucuucacccuugcug

SEQ ID NO: 311866 - RNA, 22 nt, Human
uuccuccacgugacaggagcca

SEQ ID NO: 311867 - RNA, 22 nt, Human
cucugagggcucgagggacgcg

SEQ ID NO: 311868 - RNA, 22 nt, Human
ucugaagaacugaguaaacaug

SEQ ID NO: 311869 - RNA, 22 nt, Human
ugggcagcagcaaagccagacu

SEQ ID NO: 311870 - RNA, 22 nt, Human
aaugauggucauggcaacuuuu

SEQ ID NO: 311871 - RNA, 22 nt, Human
auguccuuugcuucucuggucc

SEQ ID NO: 311872 - RNA, 22 nt, Human
ucucagggccccaaaggcuagu

SEQ ID NO: 311873 - RNA, 18 nt, Human
ugcugggguagaauccac

SEQ ID NO: 311874 - RNA, 22 nt, Human
ugggccuguggcuuggcucuag

SEQ ID NO: 311875 - RNA, 22 nt, Human
gccagccuucuguggccugcaa

SEQ ID NO: 311876 - RNA, 22 nt, Human
caggccaggcugcauuugcccc

SEQ ID NO: 311877 - RNA, 18 nt, Human
ucaagacaucaugaaaua

SEQ ID NO: 311878 - RNA, 22 nt, Human
uccucugccccagaugaaauuu

SEQ ID NO: 311879 - RNA, 22 nt, Human
agucccagcuacucaagaggcu

SEQ ID NO: 311880 - RNA, 22 nt, Human
uucaaucauuuuuacauagucc

SEQ ID NO: 311881 - RNA, 22 nt, Human
cagagugaaaacugagcucaaa

SEQ ID NO: 311882 - RNA, 22 nt, Human
auuuguacaaauuuauguuagu

SEQ ID NO: 311883 - RNA, 22 nt, Human
ggcagcuguggacgucgucauu

SEQ ID NO: 311884 - RNA, 17 nt, Human
cccugccaccaggaagc

SEQ ID NO: 311885 - RNA, 19 nt, Human
cagaccuguccagccugug

SEQ ID NO: 311886 - RNA, 22 nt, Human
aggcacugggaauaugcugagg

SEQ ID NO: 311887 - RNA, 22 nt, Human
ugaaggaaagagggaacauccc

SEQ ID NO: 311888 - RNA, 20 nt, Human
agcuggagaagggcccuucc

SEQ ID NO: 311889 - RNA, 22 nt, Human
ucuccuuuaagauuuccucagg

SEQ ID NO: 311890 - RNA, 23 nt, Human
acagagaucuugacuuguaugga

SEQ ID NO: 311891 - RNA, 22 nt, Human
cccagcucucucaguucugcuu

SEQ ID NO: 311892 - RNA, 19 nt, Human
uuucccagcccuugcugug

SEQ ID NO: 311893 - RNA, 22 nt, Human
aauuagagaucaguucuuugac

SEQ ID NO: 311894 - RNA, 22 nt, Human
gaggggcuggguagggcaaccc

SEQ ID NO: 311895 - RNA, 22 nt, Human
agauuucacaugcugcucuauu

SEQ ID NO: 311896 - RNA, 22 nt, Human
uucuuguauauaaaaaucauuu

SEQ ID NO: 311897 - RNA, 22 nt, Human
aagaacauuuuguagaaugaca

SEQ ID NO: 311898 - RNA, 22 nt, Human
uagacauuuggaguuuuaugac

SEQ ID NO: 311899 - RNA, 22 nt, Human
uuuauuauucucuggagaaugu

SEQ ID NO: 311900 - RNA, 22 nt, Human
gcagcugggacacugaggccag

SEQ ID NO: 311901 - RNA, 22 nt, Human
cauuuguaggaugcuucuuguu

SEQ ID NO: 311902 - RNA, 22 nt, Human
auaugucgcuacaucauuagau

SEQ ID NO: 311903 - RNA, 22 nt, Human
cagggagaaaucuccaggaggu

SEQ ID NO: 311904 - RNA, 22 nt, Human
uuccagagcaguuuucagauca

SEQ ID NO: 311905 - RNA, 22 nt, Human
ugcugccagggcucugcccaca

SEQ ID NO: 311906 - RNA, 21 nt, Human
uugaaggaucacuucuguacc

SEQ ID NO: 311907 - RNA, 22 nt, Human
ugggccuguugggguugaguua

SEQ ID NO: 311908 - RNA, 22 nt, Human
gaaggccauuagagccugugcc

SEQ ID NO: 311909 - RNA, 22 nt, Human
gucacuguuuccuauuauauuu

SEQ ID NO: 311910 - RNA, 22 nt, Human
ugguaaauauguccauucucuu

SEQ ID NO: 311911 - RNA, 22 nt, Human
gccagagcagaauagaguggcc

SEQ ID NO: 311912 - RNA, 22 nt, Human
cagcugaguuacucugaggucu

SEQ ID NO: 311913 - RNA, 22 nt, Human
agaguucugcucuucucaguga

SEQ ID NO: 311914 - RNA, 22 nt, Human
caggagugagaugcgaucacuu

SEQ ID NO: 311915 - RNA, 22 nt, Human
guggagccaggaucuccgcaca

SEQ ID NO: 311916 - RNA, 22 nt, Human
ggcucaggccagaccacgacuc

SEQ ID NO: 311917 - RNA, 22 nt, Human
cuucucuucccagggacacagg

SEQ ID NO: 311918 - RNA, 22 nt, Human
gggcugugggacccggcacuuu

SEQ ID NO: 311919 - RNA, 22 nt, Human
gcuggcucuucaguggagauag

SEQ ID NO: 311920 - RNA, 19 nt, Human
aacuagaaagguuuugaga

SEQ ID NO: 311921 - RNA, 22 nt, Human
ggccucggcccacugcugcggu

SEQ ID NO: 311922 - RNA, 22 nt, Human
cccagccugucuuucccaauga

SEQ ID NO: 311923 - RNA, 22 nt, Human
ccugggcucuauccugacccag

SEQ ID NO: 311924 - RNA, 22 nt, Human
ugggcaggauaauaucucaugu

SEQ ID NO: 311925 - RNA, 20 nt, Human
gccugagcuccgccuccugu

SEQ ID NO: 311926 - RNA, 22 nt, Human
augcuguggaugccuugcccca

SEQ ID NO: 311927 - RNA, 22 nt, Human
gauuucaaguaucuugggcgag

SEQ ID NO: 311928 - RNA, 22 nt, Human
gaggugggagggcagucccuaa

SEQ ID NO: 311929 - RNA, 22 nt, Human
aggagcagaacuguuguggagg

SEQ ID NO: 311930 - RNA, 22 nt, Human
ccagggugugggcgucggcacg

SEQ ID NO: 311931 - RNA, 22 nt, Human
ugucuguaagguguuuauguua

SEQ ID NO: 311932 - RNA, 22 nt, Human
cagccacuggugccaggcuguu

SEQ ID NO: 311933 - RNA, 22 nt, Human
ugagcccuaagggucaagcagg

SEQ ID NO: 311934 - RNA, 22 nt, Human
agagcugaggauccagcugagc

SEQ ID NO: 311935 - RNA, 22 nt, Human
aggcagugcagaguccucuucu

SEQ ID NO: 311936 - RNA, 22 nt, Human
agaggccggccgagcccauggg

SEQ ID NO: 311937 - RNA, 21 nt, Human
agcucagccgggcacaguggc

SEQ ID NO: 311938 - RNA, 22 nt, Human
agcccuggcccggcugugcuuu

SEQ ID NO: 311939 - RNA, 22 nt, Human
ucucaggaagauuagggcuaag

SEQ ID NO: 311940 - RNA, 22 nt, Human
ucagggcaccaaaaaagaugcc

SEQ ID NO: 311941 - RNA, 22 nt, Human
agggccugggguagcuuacugc

SEQ ID NO: 311942 - RNA, 22 nt, Human
agugucuuucauauccuccauc

SEQ ID NO: 311943 - RNA, 19 nt, Human
uggcaucuguaaaauggug

SEQ ID NO: 311944 - RNA, 22 nt, Human
gggacuggcacagggcugggag

SEQ ID NO: 311945 - RNA, 22 nt, Human
caacagaagguguacuacugaa

SEQ ID NO: 311946 - RNA, 22 nt, Human
agguggguaucaugagagauua

SEQ ID NO: 311947 - RNA, 22 nt, Human
caguacuuugaagauauuuuag

SEQ ID NO: 311948 - RNA, 18 nt, Human
ugucucaggcugaaacag

SEQ ID NO: 311949 - RNA, 22 nt, Human
ucacuuauaaaaugcaagaucu

SEQ ID NO: 311950 - RNA, 22 nt, Human
acugaaggaaacuuuuguguuu

SEQ ID NO: 311951 - RNA, 22 nt, Human
ggugcagaucuuucucuucagg

SEQ ID NO: 311952 - RNA, 22 nt, Human
uucuccagagggcucugcagga

SEQ ID NO: 311953 - RNA, 22 nt, Human
ugguccagaugccuuggcuuua

SEQ ID NO: 311954 - RNA, 22 nt, Human
ccucagggacuccaugcugcag

SEQ ID NO: 311955 - RNA, 22 nt, Human
agugacagcugggaaggugaaa

SEQ ID NO: 311956 - RNA, 22 nt, Human
uugcaucuaccauaucaaagau

SEQ ID NO: 311957 - RNA, 22 nt, Human
aaaaauaggucaaccguguaug

SEQ ID NO: 311958 - RNA, 22 nt, Human
aguaacaagugccaacguuaga

SEQ ID NO: 311959 - RNA, 17 nt, Human
ucaggauguagcaguag

SEQ ID NO: 311960 - RNA, 22 nt, Human
ucccagagccaagcuauggaug

SEQ ID NO: 311961 - RNA, 22 nt, Human
cguguggucccggcaaggcaag

SEQ ID NO: 311962 - RNA, 22 nt, Human
guguuuccucacuucucugacu

SEQ ID NO: 311963 - RNA, 22 nt, Human
uguacauuuagagcucaauaga

SEQ ID NO: 311964 - RNA, 22 nt, Human
ugccucuguugagccuuggcug

SEQ ID NO: 311965 - RNA, 22 nt, Human
agcugguucauucauucauggu

SEQ ID NO: 311966 - RNA, 22 nt, Human
cuagagaggcagauguccugug

SEQ ID NO: 311967 - RNA, 22 nt, Human
auuucaguguugguuagcaagc

SEQ ID NO: 311968 - RNA, 22 nt, Human
ccuccugggacaggcuggcaca

SEQ ID NO: 311969 - RNA, 22 nt, Human
gccugggaagacuaagugggag

SEQ ID NO: 311970 - RNA, 22 nt, Human
uugggaaggcguggaagcagaa

SEQ ID NO: 311971 - RNA, 22 nt, Human
cuugccuucuguuccuauagaa

SEQ ID NO: 311972 - RNA, 23 nt, Human
uuucaacuccugccauuauuucu

SEQ ID NO: 311973 - RNA, 22 nt, Human
ggccuuggggaggauggugucc

SEQ ID NO: 311974 - RNA, 20 nt, Human
acauugauuauguuuguaga

SEQ ID NO: 311975 - RNA, 22 nt, Human
guuauguacuuuuuaaaucuug

SEQ ID NO: 311976 - RNA, 22 nt, Human
ucuucagauggccaguuguccc

SEQ ID NO: 311977 - RNA, 22 nt, Human
auguuagaaggaauguuaaaag

SEQ ID NO: 311978 - RNA, 22 nt, Human
aggucauuggggacuaucuccg

SEQ ID NO: 311979 - RNA, 22 nt, Human
cagccagcuucagauccaagcc

SEQ ID NO: 311980 - RNA, 22 nt, Human
ccagggccaguaagauuggcau

SEQ ID NO: 311981 - RNA, 22 nt, Human
aagaaucauccugcaagagucu

SEQ ID NO: 311982 - RNA, 22 nt, Human
ugcaucuguucagagcugucga

SEQ ID NO: 311983 - RNA, 23 nt, Human
ucucaggacacacaugucuauca

SEQ ID NO: 311984 - RNA, 22 nt, Human
uaagacaauucuucagucacaa

SEQ ID NO: 311985 - RNA, 17 nt, Human
caaggccagcaucuuca

SEQ ID NO: 311986 - RNA, 19 nt, Human
aucagcaagguaggaugug

SEQ ID NO: 311987 - RNA, 22 nt, Human
uuaaaauuuccccaccauguau

SEQ ID NO: 311988 - RNA, 22 nt, Human
aauucuugguccuaguguauaa

SEQ ID NO: 311989 - RNA, 22 nt, Human
gaggcugcuguuagcccugggc

SEQ ID NO: 311990 - RNA, 22 nt, Human
cccagagcuccgguccugccca

SEQ ID NO: 311991 - RNA, 22 nt, Human
uauuucuuucagguauguguug

SEQ ID NO: 311992 - RNA, 22 nt, Human
ccccuuccuuccucagacagcc

SEQ ID NO: 311993 - RNA, 22 nt, Human
uucucugagauagacuaagugg

SEQ ID NO: 311994 - RNA, 22 nt, Human
cagugucuccagaugcuccaau

SEQ ID NO: 311995 - RNA, 18 nt, Human
ugaacagaugaguugaag

SEQ ID NO: 311996 - RNA, 22 nt, Human
cccuguccuuggcugugaggcu

SEQ ID NO: 311997 - RNA, 22 nt, Human
cugcagagcagccaguccccca

SEQ ID NO: 311998 - RNA, 22 nt, Human
aggaaggguucuuugugaaaga

SEQ ID NO: 311999 - RNA, 22 nt, Human
ccugggcuugcaucugugcugg

SEQ ID NO: 312000 - RNA, 22 nt, Human
caguacuugggggguucuaagu

SEQ ID NO: 312001 - RNA, 22 nt, Human
uggggggcacuucagcacaaug

SEQ ID NO: 312002 - RNA, 22 nt, Human
uuuccucugggcccugccaccc

SEQ ID NO: 312003 - RNA, 20 nt, Human
cacaagagaauacacacugg

SEQ ID NO: 312004 - RNA, 22 nt, Human
caaagugcuaggauuacaggcc

SEQ ID NO: 312005 - RNA, 22 nt, Human
cucagaguccccaguggguuug

SEQ ID NO: 312006 - RNA, 22 nt, Human
agccagagcugaugucauucuc

SEQ ID NO: 312007 - RNA, 22 nt, Human
cucaggauugugccuagggaga

SEQ ID NO: 312008 - RNA, 21 nt, Human
gggccuggcugcgcaggacgg

SEQ ID NO: 312009 - RNA, 22 nt, Human
agccacaggaaacagagacagc

SEQ ID NO: 312010 - RNA, 22 nt, Human
aaauuuuguauucuaguucuag

SEQ ID NO: 312011 - RNA, 22 nt, Human
uauugacagagggucagaagag

SEQ ID NO: 312012 - RNA, 22 nt, Human
aaggaaaggaugagcaugcauu

SEQ ID NO: 312013 - RNA, 22 nt, Human
ucucauucauacccuacaugcu

SEQ ID NO: 312014 - RNA, 22 nt, Human
uuccaggauggcaauaaugaau

SEQ ID NO: 312015 - RNA, 22 nt, Human
ugagagucucagaccuccuggu

SEQ ID NO: 312016 - RNA, 22 nt, Human
ugggccugaguuugggaacugg

SEQ ID NO: 312017 - RNA, 22 nt, Human
uaucuacuccucuuucagaugc

SEQ ID NO: 312018 - RNA, 22 nt, Human
gucuucuguaagaugagguccc

SEQ ID NO: 312019 - RNA, 22 nt, Human
guuuucaaggggauuuaacuga

SEQ ID NO: 312020 - RNA, 22 nt, Human
uucuucucagggucccacaugg

SEQ ID NO: 312021 - RNA, 22 nt, Human
guuccacaaaauguacccaguu

SEQ ID NO: 312022 - RNA, 22 nt, Human
cagagccuuaguucuccuagaa

SEQ ID NO: 312023 - RNA, 22 nt, Human
gagguacagaguguuccaaugu

SEQ ID NO: 312024 - RNA, 22 nt, Human
acuccugggugcugaccagcgu

SEQ ID NO: 312025 - RNA, 22 nt, Human
ucaaugaugcugaagguagcgu

SEQ ID NO: 312026 - RNA, 22 nt, Human
auauuucaugggguuccauacu

SEQ ID NO: 312027 - RNA, 20 nt, Human
aggcacuggggauagguaag

SEQ ID NO: 312028 - RNA, 22 nt, Human
gugcugggcuccaccccagagg

SEQ ID NO: 312029 - RNA, 22 nt, Human
aagggcaggaaaagauggaugu

SEQ ID NO: 312030 - RNA, 22 nt, Human
aaggucauugguucugaauucu

SEQ ID NO: 312031 - RNA, 22 nt, Human
uagggcagaguccaggaugggc

SEQ ID NO: 312032 - RNA, 22 nt, Human
agcugccaaguuucucaguuua

SEQ ID NO: 312033 - RNA, 22 nt, Human
aguguuguaugggaugacugcu

SEQ ID NO: 312034 - RNA, 22 nt, Human
uuucuugacugcuuaggaaugc

SEQ ID NO: 312035 - RNA, 22 nt, Human
uggcacugccaaccugcuaggu

SEQ ID NO: 312036 - RNA, 23 nt, Human
agggcccaagccuggacagcagg

SEQ ID NO: 312037 - RNA, 22 nt, Human
aaaggcaggcuuucacaucuca

SEQ ID NO: 312038 - RNA, 22 nt, Human
acaguguucuuggcgcugagug

SEQ ID NO: 312039 - RNA, 18 nt, Human
aggaagcaggaggaaggc

SEQ ID NO: 312040 - RNA, 23 nt, Human
ggcuggaagaaaacagaauuguu

SEQ ID NO: 312041 - RNA, 22 nt, Human
cccaggccagaacuugguugcu

SEQ ID NO: 312042 - RNA, 22 nt, Human
ucaacagaagugauagcuauua

SEQ ID NO: 312043 - RNA, 22 nt, Human
cuagccaugggcauuaaaggua

SEQ ID NO: 312044 - RNA, 22 nt, Human
aaguuucauuguucauguaaca

SEQ ID NO: 312045 - RNA, 22 nt, Human
guuauaaauaccuaauaggauu

SEQ ID NO: 312046 - RNA, 20 nt, Human
uccugagauuuaagggguuc

SEQ ID NO: 312047 - RNA, 22 nt, Human
uuccuuugggaaaucacuaagg

SEQ ID NO: 312048 - RNA, 22 nt, Human
gcaguguugacuaugguaugag

SEQ ID NO: 312049 - RNA, 22 nt, Human
uaucuguuguaguacagaugau

SEQ ID NO: 312050 - RNA, 22 nt, Human
guucuucacauuucauugagga

SEQ ID NO: 312051 - RNA, 21 nt, Human
aguugcauaggccagccaucc

SEQ ID NO: 312052 - RNA, 22 nt, Human
ucucugcugagaagggcuggca

SEQ ID NO: 312053 - RNA, 22 nt, Human
auguaaacucacauuuucuuca

SEQ ID NO: 312054 - RNA, 22 nt, Human
caugagauaauuuuucuccagu

SEQ ID NO: 312055 - RNA, 22 nt, Human
aggaagccaugguggacgucua

SEQ ID NO: 312056 - RNA, 22 nt, Human
gagggugguggcuuaaggugcu

SEQ ID NO: 312057 - RNA, 19 nt, Human
gcaggcacagcccugggug

SEQ ID NO: 312058 - RNA, 22 nt, Human
ugaaacauuugaugaucuuugg

SEQ ID NO: 312059 - RNA, 22 nt, Human
auaacuuagaguaggcaaaagu

SEQ ID NO: 312060 - RNA, 22 nt, Human
ucacuucacacccacuaucaug

SEQ ID NO: 312061 - RNA, 22 nt, Human
aaugcacauauauguguauaca

SEQ ID NO: 312062 - RNA, 22 nt, Human
gugcagcagggggaagacagug

SEQ ID NO: 312063 - RNA, 21 nt, Human
gggaaauuaggauugcucauc

SEQ ID NO: 312064 - RNA, 22 nt, Human
gcaugugucuccccaguggagg

SEQ ID NO: 312065 - RNA, 22 nt, Human
cugcugucuuuauuucacugcu

SEQ ID NO: 312066 - RNA, 22 nt, Human
ccugggaggcuguuuccagccu

SEQ ID NO: 312067 - RNA, 22 nt, Human
gggcagaggcucuggcccaucc

SEQ ID NO: 312068 - RNA, 22 nt, Human
uccuuggcagcagggagcauga

SEQ ID NO: 312069 - RNA, 22 nt, Human
uaauaguuaugguugguucuca

SEQ ID NO: 312070 - RNA, 16 nt, Human
cuuccucuucacuggc

SEQ ID NO: 312071 - RNA, 22 nt, Human
cugacccauauaagaguggagg

SEQ ID NO: 312072 - RNA, 22 nt, Human
cauugucacccaaagcucauag

SEQ ID NO: 312073 - RNA, 22 nt, Human
agcagcuuacauguggccuauc

SEQ ID NO: 312074 - RNA, 22 nt, Human
cccuggaggagcuuagagcuug

SEQ ID NO: 312075 - RNA, 22 nt, Human
guggcucucgccagccugcggg

SEQ ID NO: 312076 - RNA, 22 nt, Human
acagggucauuuuaugaucugu

SEQ ID NO: 312077 - RNA, 22 nt, Human
uggagggcaucuguggucaggc

SEQ ID NO: 312078 - RNA, 22 nt, Human
caggaaagggaugggcugccac

SEQ ID NO: 312079 - RNA, 22 nt, Human
uccacuggaacaacucugaggc

SEQ ID NO: 312080 - RNA, 22 nt, Human
agaaagggucacugaaagagga

SEQ ID NO: 312081 - RNA, 22 nt, Human
gccuggagcccaguguggggcu

SEQ ID NO: 312082 - RNA, 22 nt, Human
uggagagcacaguuccugcuuc

SEQ ID NO: 312083 - RNA, 22 nt, Human
cuggguggaaagugcugagaau

SEQ ID NO: 312084 - RNA, 21 nt, Human
ugcagcugacacugguaugcc

SEQ ID NO: 312085 - RNA, 22 nt, Human
ucagagaguuagugucuuagcu

SEQ ID NO: 312086 - RNA, 22 nt, Human
gauuucuugauaaguaguguga

SEQ ID NO: 312087 - RNA, 22 nt, Human
uuggaaggcccugccuagcagg

SEQ ID NO: 312088 - RNA, 22 nt, Human
ggcucuggugaggguaggagau

SEQ ID NO: 312089 - RNA, 22 nt, Human
ugucauugaggaaaacuaggug

SEQ ID NO: 312090 - RNA, 22 nt, Human
aggggagguggcagaaaugugc

SEQ ID NO: 312091 - RNA, 22 nt, Human
gaaacauauuaauccagugaaa

SEQ ID NO: 312092 - RNA, 22 nt, Human
cuucuucaagagaaugggagac

SEQ ID NO: 312093 - RNA, 22 nt, Human
gggcacugaaugccaagcuagg

SEQ ID NO: 312094 - RNA, 22 nt, Human
ugcugaggagguggcugugcuu

SEQ ID NO: 312095 - RNA, 22 nt, Human
uguguccuucugggagucccag

SEQ ID NO: 312096 - RNA, 22 nt, Human
auauucacugagcauaaagcca

SEQ ID NO: 312097 - RNA, 22 nt, Human
ucugggcucuuaguguacccuc

SEQ ID NO: 312098 - RNA, 22 nt, Human
uggcagcacuagguacugagcu

SEQ ID NO: 312099 - RNA, 22 nt, Human
gcagagacuccacugucuugug

SEQ ID NO: 312100 - RNA, 22 nt, Human
gaggaggcuggcgccgccugcc

SEQ ID NO: 312101 - RNA, 23 nt, Human
uuucauaugguguggaugaagaa

SEQ ID NO: 312102 - RNA, 22 nt, Human
ugccucugugggccuuccuggc

SEQ ID NO: 312103 - RNA, 20 nt, Human
aggcucagcugagcucuugg

SEQ ID NO: 312104 - RNA, 22 nt, Human
agacaaaugguaauuaugucua

SEQ ID NO: 312105 - RNA, 22 nt, Human
augggcugugagguccggcagg

SEQ ID NO: 312106 - RNA, 22 nt, Human
aaaucagucccucuuggaauuu

SEQ ID NO: 312107 - RNA, 22 nt, Human
gauguagagggaagauuuuaaa

SEQ ID NO: 312108 - RNA, 22 nt, Human
auuaaagaaacccagcauguga

SEQ ID NO: 312109 - RNA, 22 nt, Human
caggcuggagugaguguagugg

SEQ ID NO: 312110 - RNA, 22 nt, Human
gcucccacaaccuucuugcucc

SEQ ID NO: 312111 - RNA, 21 nt, Human
gccagagcaguacaaugaggu

SEQ ID NO: 312112 - RNA, 22 nt, Human
cugccacuuacuaggcauggug

SEQ ID NO: 312113 - RNA, 17 nt, Human
uuucaucugggaccacc

SEQ ID NO: 312114 - RNA, 22 nt, Human
uccugaggagaagagugcuagg

SEQ ID NO: 312115 - RNA, 22 nt, Human
ugucuuccucuuggcuugagcu

SEQ ID NO: 312116 - RNA, 22 nt, Human
aaaucugggucaagguggagug

SEQ ID NO: 312117 - RNA, 22 nt, Human
aaagauuugaaauuaggcauca

SEQ ID NO: 312118 - RNA, 22 nt, Human
ucugggagcacacgcagugauc

SEQ ID NO: 312119 - RNA, 22 nt, Human
ggagggagucagcugauuagaa

SEQ ID NO: 312120 - RNA, 20 nt, Human
cccuccagcaaccaggacuu

SEQ ID NO: 312121 - RNA, 22 nt, Human
ggcugucugugguggagcguug

SEQ ID NO: 312122 - RNA, 22 nt, Human
agcugggccugagcuggaagcu

SEQ ID NO: 312123 - RNA, 22 nt, Human
aggggccucgcaggaccgcucc

SEQ ID NO: 312124 - RNA, 22 nt, Human
ggacagagcccugguggccuaa

SEQ ID NO: 312125 - RNA, 21 nt, Human
gcugucucuggcuccugggaa

SEQ ID NO: 312126 - RNA, 22 nt, Human
auaaggcaagcugucaguuugu

SEQ ID NO: 312127 - RNA, 19 nt, Human
augaggaacugaggcucag

SEQ ID NO: 312128 - RNA, 22 nt, Human
caguacuuaacuuauaggagag

SEQ ID NO: 312129 - RNA, 22 nt, Human
cagcccucaaaccacuuccagg

SEQ ID NO: 312130 - RNA, 22 nt, Human
ccagcugauucgguggugguug

SEQ ID NO: 312131 - RNA, 22 nt, Human
uacaaguaaauuguagauacca

SEQ ID NO: 312132 - RNA, 18 nt, Human
acagaacucaggggcacc

SEQ ID NO: 312133 - RNA, 22 nt, Human
uaccuugggcuauuaucuuuga

SEQ ID NO: 312134 - RNA, 22 nt, Human
caugaagcauguuuugucauga

SEQ ID NO: 312135 - RNA, 22 nt, Human
auauaauacaaccugcuaagug

SEQ ID NO: 312136 - RNA, 22 nt, Human
uucaggauccccaccgcguuua

SEQ ID NO: 312137 - RNA, 22 nt, Human
uugcauugaucccagcuugggc

SEQ ID NO: 312138 - RNA, 22 nt, Human
cugccgagugggucaugaggca

SEQ ID NO: 312139 - RNA, 22 nt, Human
aggcccugcuuuccagagcuca

SEQ ID NO: 312140 - RNA, 16 nt, Human
agaggccuugaggaag

SEQ ID NO: 312141 - RNA, 22 nt, Human
ccacagccauuccagggaggcu

SEQ ID NO: 312142 - RNA, 22 nt, Human
aggcugaggcagguggaucauu

SEQ ID NO: 312143 - RNA, 22 nt, Human
gcuucucucucagacugcaagc

SEQ ID NO: 312144 - RNA, 22 nt, Human
agaggacacaucuuuccucaaa

SEQ ID NO: 312145 - RNA, 22 nt, Human
gccuguccacuaaacagccaag

SEQ ID NO: 312146 - RNA, 22 nt, Human
gccaggcugaggcucuggaaga

SEQ ID NO: 312147 - RNA, 22 nt, Human
aucaggaucugcaucauaagaa

SEQ ID NO: 312148 - RNA, 22 nt, Human
ggggagaauuacauggcgugga

SEQ ID NO: 312149 - RNA, 22 nt, Human
gaaaacuauuggccuagaacaa

SEQ ID NO: 312150 - RNA, 19 nt, Human
uccuuugaauaucaguuga

SEQ ID NO: 312151 - RNA, 22 nt, Human
agcuuccucaccucagaggucu

SEQ ID NO: 312152 - RNA, 22 nt, Human
uccugggccuguacuccauccg

SEQ ID NO: 312153 - RNA, 22 nt, Human
ugaagcaggugaauggaugucg

SEQ ID NO: 312154 - RNA, 22 nt, Human
gccucaggacuggcauacucau

SEQ ID NO: 312155 - RNA, 17 nt, Human
ucuggccuuccugaacu

SEQ ID NO: 312156 - RNA, 22 nt, Human
gucagcaggguccccuugagug

SEQ ID NO: 312157 - RNA, 22 nt, Human
agaggcuguuacacucccagau

SEQ ID NO: 312158 - RNA, 22 nt, Human
ccucagagaaagguauggcuga

SEQ ID NO: 312159 - RNA, 22 nt, Human
ugcucuguauucuauggcaguu

SEQ ID NO: 312160 - RNA, 20 nt, Human
acaauagauuugagcaaagu

SEQ ID NO: 312161 - RNA, 22 nt, Human
gaggagagagggacugucugca

SEQ ID NO: 312162 - RNA, 23 nt, Human
aggcugcagaagaauagggucau

SEQ ID NO: 312163 - RNA, 22 nt, Human
ccaaggcuucccagagaugcuc

SEQ ID NO: 312164 - RNA, 22 nt, Human
caaggagaguaauugaaugaga

SEQ ID NO: 312165 - RNA, 22 nt, Human
uggggcuggcuauugucucccu

SEQ ID NO: 312166 - RNA, 22 nt, Human
cugcagugcaagcccagaugga

SEQ ID NO: 312167 - RNA, 22 nt, Human
ucagacaaguaaaauaauguaa

SEQ ID NO: 312168 - RNA, 22 nt, Human
ggagcauguggggugagcaggg

SEQ ID NO: 312169 - RNA, 23 nt, Human
guggccuccccggaaugccucgc

SEQ ID NO: 312170 - RNA, 22 nt, Human
cugcugugagcacuccagccug

SEQ ID NO: 312171 - RNA, 22 nt, Human
auugcagcuggucaggguaauu

SEQ ID NO: 312172 - RNA, 22 nt, Human
cagcucugugcaggccugggga

SEQ ID NO: 312173 - RNA, 22 nt, Human
gcaaggaccuuugagcgugcca

SEQ ID NO: 312174 - RNA, 22 nt, Human
gucacacucagaaugacuagag

SEQ ID NO: 312175 - RNA, 22 nt, Human
ucugcuguaaagaauuucugcc

SEQ ID NO: 312176 - RNA, 22 nt, Human
aggaugggccugggauaugcuu

SEQ ID NO: 312177 - RNA, 22 nt, Human
gcuuuguguagaaggaggaugg

SEQ ID NO: 312178 - RNA, 19 nt, Human
uugaggggccaggggagau

SEQ ID NO: 312179 - RNA, 22 nt, Human
ucccagagauuuccucuccuuc

SEQ ID NO: 312180 - RNA, 22 nt, Human
cugagccaguagucagggacaa

SEQ ID NO: 312181 - RNA, 20 nt, Human
cugggcucaagugauccucc

SEQ ID NO: 312182 - RNA, 22 nt, Human
aggcacaggaaugucauccagu

SEQ ID NO: 312183 - RNA, 22 nt, Human
auacaagacucagcacagacgg

SEQ ID NO: 312184 - RNA, 22 nt, Human
gccucugcaccaguacugugcc

SEQ ID NO: 312185 - RNA, 22 nt, Human
auacagugccccuuuucacaug

SEQ ID NO: 312186 - RNA, 22 nt, Human
ucagagugaccuuacauggucu

SEQ ID NO: 312187 - RNA, 22 nt, Human
caugcuuuaccaaagcagugau

SEQ ID NO: 312188 - RNA, 22 nt, Human
agggguggccugccuuacuccc

SEQ ID NO: 312189 - RNA, 22 nt, Human
cucuggaguucuucaagcuacu

SEQ ID NO: 312190 - RNA, 22 nt, Human
acauuucuaucauccuguaaug

SEQ ID NO: 312191 - RNA, 22 nt, Human
agccccugggaguagcugcugc

SEQ ID NO: 312192 - RNA, 22 nt, Human
gagucccaugaugauagccaca

SEQ ID NO: 312193 - RNA, 22 nt, Human
uggccacccagcugacgccuuc

SEQ ID NO: 312194 - RNA, 22 nt, Human
ccagaggaggggggucuuucug

SEQ ID NO: 312195 - RNA, 22 nt, Human
agcagagccaggucucucugua

SEQ ID NO: 312196 - RNA, 22 nt, Human
cccagcucucugcucuuagccu

SEQ ID NO: 312197 - RNA, 22 nt, Human
uugaaagaagaagcugcgaugu

SEQ ID NO: 312198 - RNA, 19 nt, Human
ucaaagucugagucacuuu

SEQ ID NO: 312199 - RNA, 22 nt, Human
uuggaaauugcaagugauuugc

SEQ ID NO: 312200 - RNA, 22 nt, Human
ccucuucugagugagacucccu

SEQ ID NO: 312201 - RNA, 21 nt, Human
ggagauggguaucgccugggc

SEQ ID NO: 312202 - RNA, 22 nt, Human
uggcucagagccuugagagcug

SEQ ID NO: 312203 - RNA, 22 nt, Human
ucccagaggacuguuggugcua

SEQ ID NO: 312204 - RNA, 19 nt, Human
gggcuccuugggccucucu

SEQ ID NO: 312205 - RNA, 22 nt, Human
ucagcaaugugauacugugcaa

SEQ ID NO: 312206 - RNA, 23 nt, Human
cagguggcuccacgagggguggg

SEQ ID NO: 312207 - RNA, 22 nt, Human
cacuucaauuaacuucagcauu

SEQ ID NO: 312208 - RNA, 22 nt, Human
cugaggucuagacaccccaggg

SEQ ID NO: 312209 - RNA, 20 nt, Human
cagagacccaggcuucagcu

SEQ ID NO: 312210 - RNA, 22 nt, Human
uuugauaagagcugcugaaacu

SEQ ID NO: 312211 - RNA, 22 nt, Human
ccuggccugcucggcucuuaag

SEQ ID NO: 312212 - RNA, 22 nt, Human
uacaugcucaguaacuuucagu

SEQ ID NO: 312213 - RNA, 22 nt, Human
uuuacugaacugcuaguacagg

SEQ ID NO: 312214 - RNA, 22 nt, Human
ugcagccaccaccucugcugaa

SEQ ID NO: 312215 - RNA, 22 nt, Human
uuugcagucuggccugcuuugg

SEQ ID NO: 312216 - RNA, 22 nt, Human
cugagccagcgggcucacuuuu

SEQ ID NO: 312217 - RNA, 22 nt, Human
ggggauggaauguaguagugau

SEQ ID NO: 312218 - RNA, 22 nt, Human
aguacugucagcaggguguuga

SEQ ID NO: 312219 - RNA, 22 nt, Human
uggaaagacauucagccgcugg

SEQ ID NO: 312220 - RNA, 22 nt, Human
aguaaauaacagagaaaauggg

SEQ ID NO: 312221 - RNA, 22 nt, Human
agaggucauaucucagaagaga

SEQ ID NO: 312222 - RNA, 22 nt, Human
aguccuggguucugguguuuug

SEQ ID NO: 312223 - RNA, 20 nt, Human
cagcaggaaaagugccucag

SEQ ID NO: 312224 - RNA, 22 nt, Human
agccagggagguggagguugca

SEQ ID NO: 312225 - RNA, 22 nt, Human
uacaaaugaguuguaugaacca

SEQ ID NO: 312226 - RNA, 22 nt, Human
gaagcucucaaacucuccccuu

SEQ ID NO: 312227 - RNA, 22 nt, Human
cagggccacccucugcugggug

SEQ ID NO: 312228 - RNA, 22 nt, Human
caugaagcuugaagcaguccac

SEQ ID NO: 312229 - RNA, 22 nt, Human
ccauuguaaagaguauacuuug

SEQ ID NO: 312230 - RNA, 22 nt, Human
cccaggcugaguuagagguguc

SEQ ID NO: 312231 - RNA, 22 nt, Human
uaucuuuaacuugcaguauuua

SEQ ID NO: 312232 - RNA, 22 nt, Human
cugcaggacgaccgccucaucu

SEQ ID NO: 312233 - RNA, 22 nt, Human
ccagggcaacgcugucucagag

SEQ ID NO: 312234 - RNA, 22 nt, Human
uaacacaugguuaguacacaau

SEQ ID NO: 312235 - RNA, 19 nt, Human
gacagugcaguuguaguac

SEQ ID NO: 312236 - RNA, 22 nt, Human
uaaaugugaccuucauuuuaua

SEQ ID NO: 312237 - RNA, 22 nt, Human
ccucugaggucauggacuuggc

SEQ ID NO: 312238 - RNA, 22 nt, Human
ucuuugaaagcuguucuagagu

SEQ ID NO: 312239 - RNA, 22 nt, Human
ucaguguuugguuucagaauug

SEQ ID NO: 312240 - RNA, 22 nt, Human
ugcuggaggaguuuacuguggc

SEQ ID NO: 312241 - RNA, 22 nt, Human
ccagcuggcacuguggcugccc

SEQ ID NO: 312242 - RNA, 22 nt, Human
ggcugccaggagaagcucagug

SEQ ID NO: 312243 - RNA, 22 nt, Human
caggggcucugagauugucuaa

SEQ ID NO: 312244 - RNA, 22 nt, Human
cagagggcacaugguuuccuca

SEQ ID NO: 312245 - RNA, 22 nt, Human
uuugcagugauucuugcaguga

SEQ ID NO: 312246 - RNA, 22 nt, Human
guccugggaaggaagccaggga

SEQ ID NO: 312247 - RNA, 22 nt, Human
augcacaagaggcuagaaaaga

SEQ ID NO: 312248 - RNA, 20 nt, Human
uuccagagaucugcauuuua

SEQ ID NO: 312249 - RNA, 19 nt, Human
gcauuucucuuuacagcca

SEQ ID NO: 312250 - RNA, 17 nt, Human
gguguauggggagggaa

SEQ ID NO: 312251 - RNA, 22 nt, Human
uuccucucaacaugccugccgg

SEQ ID NO: 312252 - RNA, 22 nt, Human
gcaaagucugcaucuggaucag

SEQ ID NO: 312253 - RNA, 22 nt, Human
cagcccagcacuaaguagauuu

SEQ ID NO: 312254 - RNA, 22 nt, Human
ccagagcccgggaccuggacuu

SEQ ID NO: 312255 - RNA, 22 nt, Human
agggaguuagaaauccaggaua

SEQ ID NO: 312256 - RNA, 22 nt, Human
agauguuccagccaaugggaau

SEQ ID NO: 312257 - RNA, 20 nt, Human
acuuucucgguuucucaccu

SEQ ID NO: 312258 - RNA, 22 nt, Human
augcugagacuggagcagcugg

SEQ ID NO: 312259 - RNA, 22 nt, Human
cagucucucuccuugcaggcgu

SEQ ID NO: 312260 - RNA, 22 nt, Human
agugugggugagggaggcccuc

SEQ ID NO: 312261 - RNA, 22 nt, Human
ugacacaggcagcucccagcac

SEQ ID NO: 312262 - RNA, 22 nt, Human
aucaguuauuuuuaagcuauaa

SEQ ID NO: 312263 - RNA, 21 nt, Human
ugcucaugcaaugcaugucca

SEQ ID NO: 312264 - RNA, 22 nt, Human
ggcacugggcaccggcugaggg

SEQ ID NO: 312265 - RNA, 22 nt, Human
aagaauugguuuccucugucau

SEQ ID NO: 312266 - RNA, 22 nt, Human
gcaaugauauugaagugaugaa

SEQ ID NO: 312267 - RNA, 22 nt, Human
cugcugugcauauuuaucuagg

SEQ ID NO: 312268 - RNA, 22 nt, Human
acuuggagagcauugcugggga

SEQ ID NO: 312269 - RNA, 22 nt, Human
aagugacaccucuucccuuucc

SEQ ID NO: 312270 - RNA, 17 nt, Human
gcugccaccuuuggagc

SEQ ID NO: 312271 - RNA, 22 nt, Human
ggccucaguuucuucaacugua

SEQ ID NO: 312272 - RNA, 18 nt, Human
aaggcuucaaagaguaga

SEQ ID NO: 312273 - RNA, 22 nt, Human
aggcuccuuguucaucauccau

SEQ ID NO: 312274 - RNA, 22 nt, Human
uuucaguucaguuuauuauauc

SEQ ID NO: 312275 - RNA, 22 nt, Human
gaacccaguccaggugcagccu

SEQ ID NO: 312276 - RNA, 22 nt, Human
uuugaauagcauaggauuacau

SEQ ID NO: 312277 - RNA, 22 nt, Human
agccuucaaccuagcuagagca

SEQ ID NO: 312278 - RNA, 22 nt, Human
ugaaagcacaaguucuaacagg

SEQ ID NO: 312279 - RNA, 22 nt, Human
agauauuuguaucuugcuauug

SEQ ID NO: 312280 - RNA, 22 nt, Human
uuuuguuguaauauaccuaucc

SEQ ID NO: 312281 - RNA, 22 nt, Human
ugagccuggccugcagagacca

SEQ ID NO: 312282 - RNA, 22 nt, Human
ucaaaguuuuugagaauuacau

SEQ ID NO: 312283 - RNA, 22 nt, Human
uagauauggccgucuguuuuaa

SEQ ID NO: 312284 - RNA, 22 nt, Human
guucaaagcuccugguacagua

SEQ ID NO: 312285 - RNA, 19 nt, Human
ccaggccaucccaguuccc

SEQ ID NO: 312286 - RNA, 22 nt, Human
aaacauugcuaaauaaugcugc

SEQ ID NO: 312287 - RNA, 22 nt, Human
ccagcagcuguggcuuugccuc

SEQ ID NO: 312288 - RNA, 22 nt, Human
ugugccuggcauucugggcuuc

SEQ ID NO: 312289 - RNA, 22 nt, Human
uauuucugauugcucaugaggc

SEQ ID NO: 312290 - RNA, 22 nt, Human
agagccaggacugugucucacu

SEQ ID NO: 312291 - RNA, 22 nt, Human
cugagauggccacugggucuca

SEQ ID NO: 312292 - RNA, 22 nt, Human
cagcaggguuaagugacucacc

SEQ ID NO: 312293 - RNA, 22 nt, Human
cacaggugcuccucggggagcu

SEQ ID NO: 312294 - RNA, 22 nt, Human
aagagcuggucacagguccauu

SEQ ID NO: 312295 - RNA, 22 nt, Human
aagagagaacucccuucgccag

SEQ ID NO: 312296 - RNA, 22 nt, Human
uucuucaaauagcagggaguca

SEQ ID NO: 312297 - RNA, 22 nt, Human
uucagcagucguccaggaaaag

SEQ ID NO: 312298 - RNA, 22 nt, Human
cuggagggugagccucaucucu

SEQ ID NO: 312299 - RNA, 22 nt, Human
acagggccauuaucuguucuag

SEQ ID NO: 312300 - RNA, 22 nt, Human
caagauaagaucauuuacacua

SEQ ID NO: 312301 - RNA, 22 nt, Human
ccccuuccacagugcuuccuaa

SEQ ID NO: 312302 - RNA, 22 nt, Human
auuucauagauuguaaaucccu

SEQ ID NO: 312303 - RNA, 19 nt, Human
ugaggccaaggucacagau

SEQ ID NO: 312304 - RNA, 22 nt, Human
gagcagcucgagaaggaagcag

SEQ ID NO: 312305 - RNA, 22 nt, Human
gaggccacagcuaucagggaca

SEQ ID NO: 312306 - RNA, 22 nt, Human
aaaaugauauccugacuuuuau

SEQ ID NO: 312307 - RNA, 22 nt, Human
uuucacaaaugucuuuaacuug

SEQ ID NO: 312308 - RNA, 22 nt, Human
caucacccggaacugugucugc

SEQ ID NO: 312309 - RNA, 22 nt, Human
uuccugguaaauuauguccagg

SEQ ID NO: 312310 - RNA, 22 nt, Human
ucaguuuuaagguuugagaauu

SEQ ID NO: 312311 - RNA, 22 nt, Human
uggcucaggugugagcugaaga

SEQ ID NO: 312312 - RNA, 22 nt, Human
gagaaagcuucuuucccacagg

SEQ ID NO: 312313 - RNA, 22 nt, Human
guccucuguuagaaaugugcuu

SEQ ID NO: 312314 - RNA, 22 nt, Human
ccuuccuggcuguccgccugau

SEQ ID NO: 312315 - RNA, 22 nt, Human
ccagcuccagguagaugggcag

SEQ ID NO: 312316 - RNA, 22 nt, Human
guuauacauauguguuaacaaa

SEQ ID NO: 312317 - RNA, 21 nt, Human
agagcuggccugccaggcccu

SEQ ID NO: 312318 - RNA, 22 nt, Human
gggagcugguuccugcccucca

SEQ ID NO: 312319 - RNA, 22 nt, Human
ugcacagcgggugucugucagg

SEQ ID NO: 312320 - RNA, 20 nt, Human
gccuggcacccggggcuggc

SEQ ID NO: 312321 - RNA, 22 nt, Human
cagccaucaguaaagacagcuu

SEQ ID NO: 312322 - RNA, 22 nt, Human
uuugaaaggagcuuuauccaga

SEQ ID NO: 312323 - RNA, 22 nt, Human
auuugucuagugguauucacgu

SEQ ID NO: 312324 - RNA, 22 nt, Human
agcucccagaguccucugccca

SEQ ID NO: 312325 - RNA, 21 nt, Human
agcagaacagucgagcacugc

SEQ ID NO: 312326 - RNA, 22 nt, Human
cucuguccuugcacaguuccua

SEQ ID NO: 312327 - RNA, 22 nt, Human
gugugccagacaugaugcuaug

SEQ ID NO: 312328 - RNA, 22 nt, Human
aggagaggcaucaagaaaaucg

SEQ ID NO: 312329 - RNA, 22 nt, Human
aggcccugggcaguucuguagc

SEQ ID NO: 312330 - RNA, 22 nt, Human
agaggcuccuucacucuggcac

SEQ ID NO: 312331 - RNA, 22 nt, Human
uaacacaugguucugucaggaa

SEQ ID NO: 312332 - RNA, 22 nt, Human
ccuggcagguggagguugcagu

SEQ ID NO: 312333 - RNA, 21 nt, Human
uaugagaaaacugaggugcau

SEQ ID NO: 312334 - RNA, 22 nt, Human
uugcagggaccugcagaaagcu

SEQ ID NO: 312335 - RNA, 22 nt, Human
acuggcagccacaacuggcagg

SEQ ID NO: 312336 - RNA, 22 nt, Human
cugacagucucauugauuugcu

SEQ ID NO: 312337 - RNA, 22 nt, Human
aagugacaaaaggguauccaaa

SEQ ID NO: 312338 - RNA, 18 nt, Human
gucacuguguuucugagc

SEQ ID NO: 312339 - RNA, 17 nt, Human
gagugcugguggagcuc

SEQ ID NO: 312340 - RNA, 22 nt, Human
uugugaguagugccgcaauaaa

SEQ ID NO: 312341 - RNA, 22 nt, Human
cuggagccggcgagccccagcc

SEQ ID NO: 312342 - RNA, 22 nt, Human
gcuggcugggucccugagaggc

SEQ ID NO: 312343 - RNA, 17 nt, Human
gcucccugaggacagcu

SEQ ID NO: 312344 - RNA, 22 nt, Human
ugucccauggauaccaggcuau

SEQ ID NO: 312345 - RNA, 22 nt, Human
gcuguucucuguaacaugcauu

SEQ ID NO: 312346 - RNA, 22 nt, Human
cugcagcuguagaggacagugg

SEQ ID NO: 312347 - RNA, 22 nt, Human
ugauuucccuguagccucugaa

SEQ ID NO: 312348 - RNA, 22 nt, Human
uuaacacagggggagacaaagu

SEQ ID NO: 312349 - RNA, 22 nt, Human
uucagaaagugaaucuuguuau

SEQ ID NO: 312350 - RNA, 22 nt, Human
ggcugccugaacuuuggggaaa

SEQ ID NO: 312351 - RNA, 22 nt, Human
cugggagcccgcguccuggugg

SEQ ID NO: 312352 - RNA, 22 nt, Human
gaacaauagugguaacaaagcc

SEQ ID NO: 312353 - RNA, 22 nt, Human
uugcugaaguuaaugcuugcaa

SEQ ID NO: 312354 - RNA, 22 nt, Human
uaugaacucuggagucugagug

SEQ ID NO: 312355 - RNA, 22 nt, Human
agccucugugacucacagguca

SEQ ID NO: 312356 - RNA, 22 nt, Human
aggccagcagcaugacggcauc

SEQ ID NO: 312357 - RNA, 22 nt, Human
acuguucauuuggauuucucug

SEQ ID NO: 312358 - RNA, 19 nt, Human
cauaauacaguggaucuga

SEQ ID NO: 312359 - RNA, 22 nt, Human
agggguggagaguguugccagu

SEQ ID NO: 312360 - RNA, 22 nt, Human
uccugccucuccaugcuaacua

SEQ ID NO: 312361 - RNA, 22 nt, Human
uagaauucaagauucaacaggc

SEQ ID NO: 312362 - RNA, 22 nt, Human
cgccaggcuugguagcucaugc

SEQ ID NO: 312363 - RNA, 22 nt, Human
ugcaccugagaggucucugagg

SEQ ID NO: 312364 - RNA, 22 nt, Human
ucugaggcauacccaggccccc

SEQ ID NO: 312365 - RNA, 22 nt, Human
ccagucccagcucugccaugcu

SEQ ID NO: 312366 - RNA, 22 nt, Human
auacauauaugguacuuccugg

SEQ ID NO: 312367 - RNA, 22 nt, Human
caaggaaacaugaaaugcauug

SEQ ID NO: 312368 - RNA, 22 nt, Human
uucaggauccccuugaugggcu

SEQ ID NO: 312369 - RNA, 22 nt, Human
uuuguuuagaaagagauuggug

SEQ ID NO: 312370 - RNA, 22 nt, Human
caugaguuuuuuaguucaugca

SEQ ID NO: 312371 - RNA, 22 nt, Human
gucuggagccacccuaagcauu

SEQ ID NO: 312372 - RNA, 22 nt, Human
agacaaagaaaccguagaagca

SEQ ID NO: 312373 - RNA, 22 nt, Human
agcuguguagggaaucagagaa

SEQ ID NO: 312374 - RNA, 22 nt, Human
aaaggccacacagagcagggag

SEQ ID NO: 312375 - RNA, 22 nt, Human
uauguuauuuucauacaacaga

SEQ ID NO: 312376 - RNA, 22 nt, Human
aguuauaugugaaaacacguau

SEQ ID NO: 312377 - RNA, 22 nt, Human
ggagcuguuggcagcuaucuug

SEQ ID NO: 312378 - RNA, 22 nt, Human
uagugaaauuuaugcacagcua

SEQ ID NO: 312379 - RNA, 22 nt, Human
uuugaaagucaaccuuccaguu

SEQ ID NO: 312380 - RNA, 22 nt, Human
aaaaguguccagauuaugaaga

SEQ ID NO: 312381 - RNA, 22 nt, Human
gccucugcaacuccgccuuggu

SEQ ID NO: 312382 - RNA, 22 nt, Human
agucaaagcuacaggcauuuga

SEQ ID NO: 312383 - RNA, 22 nt, Human
cuguggaauugaugcuuagugu

SEQ ID NO: 312384 - RNA, 21 nt, Human
gaugaagcaaucuuucuguug

SEQ ID NO: 312385 - RNA, 22 nt, Human
auuauauugaguauaaccagag

SEQ ID NO: 312386 - RNA, 22 nt, Human
uguacaguauauuucaaagcca

SEQ ID NO: 312387 - RNA, 22 nt, Human
uacaacauuguguugcuucaua

SEQ ID NO: 312388 - RNA, 22 nt, Human
ucucaggaagugauauugagac

SEQ ID NO: 312389 - RNA, 22 nt, Human
gccaccagguuagauccagccu

SEQ ID NO: 312390 - RNA, 21 nt, Human
ucagcagcaucugccuagagu

SEQ ID NO: 312391 - RNA, 22 nt, Human
caaggccaaagggccacuguca

SEQ ID NO: 312392 - RNA, 22 nt, Human
cugggcacuugcucacagcucu

SEQ ID NO: 312393 - RNA, 22 nt, Human
acaaggaggucuggggggcccu

SEQ ID NO: 312394 - RNA, 22 nt, Human
ugcuugggaauguggagucaga

SEQ ID NO: 312395 - RNA, 22 nt, Human
agggugcauguuugcaagagug

SEQ ID NO: 312396 - RNA, 22 nt, Human
cuggugagacgguugacaggag

SEQ ID NO: 312397 - RNA, 22 nt, Human
agcugcucuuugaaggacacuu

SEQ ID NO: 312398 - RNA, 22 nt, Human
gcagugggcaacaagagcugga

SEQ ID NO: 312399 - RNA, 22 nt, Human
uuuaaauuuguguuuagagggu

SEQ ID NO: 312400 - RNA, 22 nt, Human
cugcugugagugguucuugccu

SEQ ID NO: 312401 - RNA, 17 nt, Human
cucugcagugcauggcu

SEQ ID NO: 312402 - RNA, 22 nt, Human
uggcucagcaagacauugaccu

SEQ ID NO: 312403 - RNA, 22 nt, Human
agucucagggccacccggggaa

SEQ ID NO: 312404 - RNA, 22 nt, Human
gcugagcugaggcagggcuggg

SEQ ID NO: 312405 - RNA, 22 nt, Human
ucauaaaacacaccagguaguu

SEQ ID NO: 312406 - RNA, 20 nt, Human
ccagaagagaugaucaucca

SEQ ID NO: 312407 - RNA, 22 nt, Human
uauguacuaacuuucauucuag

SEQ ID NO: 312408 - RNA, 22 nt, Human
ugauacagucagcucacaauug

SEQ ID NO: 312409 - RNA, 22 nt, Human
gcucaaggcaggcagacaugag

SEQ ID NO: 312410 - RNA, 22 nt, Human
cccagccucugggcucacccaa

SEQ ID NO: 312411 - RNA, 22 nt, Human
aagauauucaaagauuuauuag

SEQ ID NO: 312412 - RNA, 22 nt, Human
aucuuucagagcuccaucaggg

SEQ ID NO: 312413 - RNA, 22 nt, Human
ucuuucagccacuuaccugucu

SEQ ID NO: 312414 - RNA, 21 nt, Human
uaaaugugagcagggcugggc

SEQ ID NO: 312415 - RNA, 22 nt, Human
ugcucucucaggccuggcccac

SEQ ID NO: 312416 - RNA, 22 nt, Human
aagaaauggcuucaucugagua

SEQ ID NO: 312417 - RNA, 22 nt, Human
ugagccugcugucgcuggaccc

SEQ ID NO: 312418 - RNA, 22 nt, Human
agcugagcauuugauccaccuc

SEQ ID NO: 312419 - RNA, 22 nt, Human
ggcugcaggcaggguauccacu

SEQ ID NO: 312420 - RNA, 22 nt, Human
cauguacaaaaggcaaaugccu

SEQ ID NO: 312421 - RNA, 22 nt, Human
agggaaauuaaugugagcaaug

SEQ ID NO: 312422 - RNA, 23 nt, Human
gucagggcuggggucagagugac

SEQ ID NO: 312423 - RNA, 22 nt, Human
ccucaguguguggauguuagag

SEQ ID NO: 312424 - RNA, 22 nt, Human
gccucugcugacaagauggaca

SEQ ID NO: 312425 - RNA, 22 nt, Human
uuguacaaauaggaaccucuga

SEQ ID NO: 312426 - RNA, 22 nt, Human
ugcaggagaaaguacggagcgu

SEQ ID NO: 312427 - RNA, 22 nt, Human
uguaauggaagugggauugcau

SEQ ID NO: 312428 - RNA, 22 nt, Human
caggcugucugaauggaggccc

SEQ ID NO: 312429 - RNA, 22 nt, Human
caggaugagaggcccagggaag

SEQ ID NO: 312430 - RNA, 22 nt, Human
agcccugggaggccagcuugua

SEQ ID NO: 312431 - RNA, 22 nt, Human
accaucagucacauguagagaa

SEQ ID NO: 312432 - RNA, 22 nt, Human
aaaugcagaucccugaaucuca

SEQ ID NO: 312433 - RNA, 22 nt, Human
aggcugggaaauguagucuucc

SEQ ID NO: 312434 - RNA, 22 nt, Human
agacacugccacuucuguuccc

SEQ ID NO: 312435 - RNA, 22 nt, Human
uaaacagaaagcagauguacuu

SEQ ID NO: 312436 - RNA, 22 nt, Human
ugaacauauucaccucuaaaua

SEQ ID NO: 312437 - RNA, 22 nt, Human
gaggagaagcuaagaaacacag

SEQ ID NO: 312438 - RNA, 22 nt, Human
gaguaagagcuggcuuuggugu

SEQ ID NO: 312439 - RNA, 22 nt, Human
uguacuaaggcuguguagaugu

SEQ ID NO: 312440 - RNA, 22 nt, Human
aagauauagauaaaacuaugca

SEQ ID NO: 312441 - RNA, 22 nt, Human
ucaggagauggucuuuauaggc

SEQ ID NO: 312442 - RNA, 22 nt, Human
uuccauaaucaccuuauucuuu

SEQ ID NO: 312443 - RNA, 22 nt, Human
ccugggcagguguggcuucccc

SEQ ID NO: 312444 - RNA, 22 nt, Human
agcuucuggaagccuggcagca

SEQ ID NO: 312445 - RNA, 21 nt, Human
ggccugagcaccuguccaccu

SEQ ID NO: 312446 - RNA, 22 nt, Human
uucuuacagaguuuacagagcc

SEQ ID NO: 312447 - RNA, 22 nt, Human
cagcaggggaacugugggccag

SEQ ID NO: 312448 - RNA, 22 nt, Human
uuguaugaucaaaagaaaugua

SEQ ID NO: 312449 - RNA, 21 nt, Human
aauaaaacaguuggugucaau

SEQ ID NO: 312450 - RNA, 22 nt, Human
aggugcagcugacaccaugugg

SEQ ID NO: 312451 - RNA, 22 nt, Human
cacagcuuccauuagaaugaga

SEQ ID NO: 312452 - RNA, 22 nt, Human
uggcucaguaaucgagucuccu

SEQ ID NO: 312453 - RNA, 22 nt, Human
uuuugaaagggugauuuggcuu

SEQ ID NO: 312454 - RNA, 22 nt, Human
auacaacagaaaaugauuauuc

SEQ ID NO: 312455 - RNA, 20 nt, Human
aguguacagacacuagaaau

SEQ ID NO: 312456 - RNA, 22 nt, Human
ucagcagugcagggugaggcag

SEQ ID NO: 312457 - RNA, 22 nt, Human
aaggccagccugagagcuaaca

SEQ ID NO: 312458 - RNA, 22 nt, Human
uccacuuuagcaaugauugaau

SEQ ID NO: 312459 - RNA, 22 nt, Human
aagggagguaaagcuauuuaaa

SEQ ID NO: 312460 - RNA, 22 nt, Human
acccugccgugggcugcuugug

SEQ ID NO: 312461 - RNA, 22 nt, Human
aggccuguuccaggccccuuuu

SEQ ID NO: 312462 - RNA, 22 nt, Human
cccaggaggcagagguugcagu

SEQ ID NO: 312463 - RNA, 22 nt, Human
uuuccucuccaccaggaggucu

SEQ ID NO: 312464 - RNA, 22 nt, Human
ccagucccgcaugguccagaau

SEQ ID NO: 312465 - RNA, 23 nt, Human
agggguggucaguacccgcagug

SEQ ID NO: 312466 - RNA, 22 nt, Human
agcagcucugagaggccagcac

SEQ ID NO: 312467 - RNA, 22 nt, Human
ccugaagcaaggguaggcaggu

SEQ ID NO: 312468 - RNA, 22 nt, Human
aauuucagaacccaaauuagcg

SEQ ID NO: 312469 - RNA, 22 nt, Human
cuucucagucaccugugagucu

SEQ ID NO: 312470 - RNA, 22 nt, Human
cccuuccucccaggcuucugug

SEQ ID NO: 312471 - RNA, 22 nt, Human
ccaaggcuccucagcuggucuu

SEQ ID NO: 312472 - RNA, 23 nt, Human
aaccagauaaauggcuccagggc

SEQ ID NO: 312473 - RNA, 22 nt, Human
uuaugguaauuaaaacauguau

SEQ ID NO: 312474 - RNA, 22 nt, Human
augcuacagcaucucucaucag

SEQ ID NO: 312475 - RNA, 22 nt, Human
uuuccucugaugcugacuugga

SEQ ID NO: 312476 - RNA, 22 nt, Human
cauaauuugauaugcuugaugg

SEQ ID NO: 312477 - RNA, 22 nt, Human
uuuguuaaauauuuauugagug

SEQ ID NO: 312478 - RNA, 22 nt, Human
acugaaggucucagcaaggaug

SEQ ID NO: 312479 - RNA, 22 nt, Human
uccuguaguugcuaaguuuguu

SEQ ID NO: 312480 - RNA, 22 nt, Human
gcugauguaagacuuuugguuu

SEQ ID NO: 312481 - RNA, 22 nt, Human
gggagcuggagcuggaagacuc

SEQ ID NO: 312482 - RNA, 22 nt, Human
uuagccauguugaagauuuaga

SEQ ID NO: 312483 - RNA, 22 nt, Human
agcccugggauacaguaaaagc

SEQ ID NO: 312484 - RNA, 22 nt, Human
acuggcaguuugagaaugcauu

SEQ ID NO: 312485 - RNA, 22 nt, Human
agaauucucuuccauugaaaca

SEQ ID NO: 312486 - RNA, 22 nt, Human
uagaacauaagucauucauuug

SEQ ID NO: 312487 - RNA, 22 nt, Human
uggcuggcaaggcuggagucag

SEQ ID NO: 312488 - RNA, 22 nt, Human
ugaggcaguucuuacuuguauu

SEQ ID NO: 312489 - RNA, 22 nt, Human
agagcugagaauguggcuuccu

SEQ ID NO: 312490 - RNA, 22 nt, Human
uaugcacaauaugaucuauuug

SEQ ID NO: 312491 - RNA, 22 nt, Human
cagcugcccugccuugcccuua

SEQ ID NO: 312492 - RNA, 22 nt, Human
uuguauuucuccacuuucuguu

SEQ ID NO: 312493 - RNA, 22 nt, Human
agccaagcacucaacuccugga

SEQ ID NO: 312494 - RNA, 22 nt, Human
ucagauggguuuugaaggaugu

SEQ ID NO: 312495 - RNA, 22 nt, Human
ggacggggagcuggaaagggga

SEQ ID NO: 312496 - RNA, 22 nt, Human
uuccauaauaggcuuaagugaa

SEQ ID NO: 312497 - RNA, 22 nt, Human
gaggcccaggucaagcagccac

SEQ ID NO: 312498 - RNA, 17 nt, Human
aggcauggucuggggug

SEQ ID NO: 312499 - RNA, 22 nt, Human
aagcagaugggacuccaaggca

SEQ ID NO: 312500 - RNA, 22 nt, Human
ucaguguuauuagaugagguuu

SEQ ID NO: 312501 - RNA, 22 nt, Human
uaaggcacgcauaagagggggc

SEQ ID NO: 312502 - RNA, 21 nt, Human
acagcagacaggcuuaggacc

SEQ ID NO: 312503 - RNA, 21 nt, Human
ugacugaggcuucuucacaca

SEQ ID NO: 312504 - RNA, 22 nt, Human
gagggcacucgagacuacggca

SEQ ID NO: 312505 - RNA, 22 nt, Human
uuuucauuuacauuagggaaga

SEQ ID NO: 312506 - RNA, 22 nt, Human
cgucuuccucuuacgaugcgcu

SEQ ID NO: 312507 - RNA, 22 nt, Human
cugccuccugccgugcagcuuc

SEQ ID NO: 312508 - RNA, 22 nt, Human
augcagcugugggcaagaaaug

SEQ ID NO: 312509 - RNA, 22 nt, Human
aggcacugaaggaagcuugcgc

SEQ ID NO: 312510 - RNA, 22 nt, Human
aaaguuacuaucacaaugaaau

SEQ ID NO: 312511 - RNA, 22 nt, Human
augaaauguaugagucuggguu

SEQ ID NO: 312512 - RNA, 22 nt, Human
uaugcauaugaccccaagcuug

SEQ ID NO: 312513 - RNA, 22 nt, Human
ggaggccaaggugggcggauca

SEQ ID NO: 312514 - RNA, 22 nt, Human
uaaacauggauucugaucacag

SEQ ID NO: 312515 - RNA, 22 nt, Human
agccuggauccauguggcuacc

SEQ ID NO: 312516 - RNA, 22 nt, Human
guaacagaggguuugcagauau

SEQ ID NO: 312517 - RNA, 22 nt, Human
agggugcagaaggagccuagga

SEQ ID NO: 312518 - RNA, 22 nt, Human
ggagcugugcagugacuacaga

SEQ ID NO: 312519 - RNA, 19 nt, Human
gcagcugugggaagagcca

SEQ ID NO: 312520 - RNA, 22 nt, Human
gcacccagccagcaucucagag

SEQ ID NO: 312521 - RNA, 22 nt, Human
ucaaaguccuugcuuuuucugu

SEQ ID NO: 312522 - RNA, 22 nt, Human
ggcugcagggcagcuggugugg

SEQ ID NO: 312523 - RNA, 22 nt, Human
ucuuugaacuuggcugaucucu

SEQ ID NO: 312524 - RNA, 22 nt, Human
ccaggcuggauuuugcaguuca

SEQ ID NO: 312525 - RNA, 22 nt, Human
uggccuggggaccugugagacc

SEQ ID NO: 312526 - RNA, 22 nt, Human
auguuuccgugagcauccuuga

SEQ ID NO: 312527 - RNA, 22 nt, Human
augcuauacucaaagaaauuca

SEQ ID NO: 312528 - RNA, 22 nt, Human
aagguacagaaauuaacaagga

SEQ ID NO: 312529 - RNA, 22 nt, Human
ccuguucacccuccaugcacag

SEQ ID NO: 312530 - RNA, 22 nt, Human
uacacacaugcauuugccuuau

SEQ ID NO: 312531 - RNA, 22 nt, Human
uagagcugcuggacuguaacag

SEQ ID NO: 312532 - RNA, 22 nt, Human
cuuacauuuaaucaugugucau

SEQ ID NO: 312533 - RNA, 22 nt, Human
acagaacuuccugcuggagugg

SEQ ID NO: 312534 - RNA, 22 nt, Human
ugcucugggcaacagccucccu

SEQ ID NO: 312535 - RNA, 19 nt, Human
cugccuguuauggagagaa

SEQ ID NO: 312536 - RNA, 22 nt, Human
cauauaaauacaacauguguua

SEQ ID NO: 312537 - RNA, 20 nt, Human
aacagggggcugcagagggc

SEQ ID NO: 312538 - RNA, 22 nt, Human
ucaggccuucagaccuggcccg

SEQ ID NO: 312539 - RNA, 22 nt, Human
aggccugggcaagaaggggcgu

SEQ ID NO: 312540 - RNA, 22 nt, Human
uguccucuuccagugcuccuuc

SEQ ID NO: 312541 - RNA, 22 nt, Human
aaggggaagagaccgcagaguc

SEQ ID NO: 312542 - RNA, 22 nt, Human
cuaaaugcccuacaaugacugg

SEQ ID NO: 312543 - RNA, 22 nt, Human
cuggugguucaggagaauggcu

SEQ ID NO: 312544 - RNA, 22 nt, Human
gcuccuggcuccaggcagccaa

SEQ ID NO: 312545 - RNA, 22 nt, Human
uuacaguauuguuaaacucuuu

SEQ ID NO: 312546 - RNA, 22 nt, Human
ucuuuggaucccaacuggcugg

SEQ ID NO: 312547 - RNA, 22 nt, Human
aagauuucucuccuggaaagca

SEQ ID NO: 312548 - RNA, 22 nt, Human
ucaggcugugggcacuggccau

SEQ ID NO: 312549 - RNA, 22 nt, Human
ucaguguucagcggugugugca

SEQ ID NO: 312550 - RNA, 22 nt, Human
cgggcagaucacacagggcuug

SEQ ID NO: 312551 - RNA, 22 nt, Human
ccagcucucuuugaagcauaaa

SEQ ID NO: 312552 - RNA, 22 nt, Human
acauugcugcauucuccuuccc

SEQ ID NO: 312553 - RNA, 23 nt, Human
aggauguaggauguauggcagag

SEQ ID NO: 312554 - RNA, 22 nt, Human
ggcucugcugguaagaugccuc

SEQ ID NO: 312555 - RNA, 22 nt, Human
cugcaggauucucccaguugga

SEQ ID NO: 312556 - RNA, 22 nt, Human
ugguccuggggaucugcaguga

SEQ ID NO: 312557 - RNA, 22 nt, Human
ccucagaugucuuaaggcacug

SEQ ID NO: 312558 - RNA, 22 nt, Human
augaagucugcacaugcaugug

SEQ ID NO: 312559 - RNA, 22 nt, Human
ggggugggguuacucauugugc

SEQ ID NO: 312560 - RNA, 22 nt, Human
ggcaggugugagaucgaggcca

SEQ ID NO: 312561 - RNA, 22 nt, Human
gagauggggucagcugggacau

SEQ ID NO: 312562 - RNA, 22 nt, Human
aggguggccaugagggagagau

SEQ ID NO: 312563 - RNA, 22 nt, Human
ucaggagaaucagggcuguccu

SEQ ID NO: 312564 - RNA, 22 nt, Human
cugagccagggccacacaugga

SEQ ID NO: 312565 - RNA, 22 nt, Human
cuguauuuucaugccuacguac

SEQ ID NO: 312566 - RNA, 22 nt, Human
uucauguauuuaucauguaaau

SEQ ID NO: 312567 - RNA, 22 nt, Human
gaucuucucuuuaguagaaaca

SEQ ID NO: 312568 - RNA, 22 nt, Human
gcacccaggcuugggcagcaac

SEQ ID NO: 312569 - RNA, 22 nt, Human
aaacagcuaauggccaggaaua

SEQ ID NO: 312570 - RNA, 22 nt, Human
ggcagaaggccucccagcuccu

SEQ ID NO: 312571 - RNA, 21 nt, Human
aaucauacaaaacaugucagg

SEQ ID NO: 312572 - RNA, 22 nt, Human
uuuguaugugauaagacuauuc

SEQ ID NO: 312573 - RNA, 22 nt, Human
gagcugccaagauuacaaucag

SEQ ID NO: 312574 - RNA, 22 nt, Human
aggagagaauguuccaggcuug

SEQ ID NO: 312575 - RNA, 22 nt, Human
uccuucagcuacucaguuucca

SEQ ID NO: 312576 - RNA, 20 nt, Human
uggcccuguuuucuccaggc

SEQ ID NO: 312577 - RNA, 22 nt, Human
gucaaguuaagauaaggucaug

SEQ ID NO: 312578 - RNA, 22 nt, Human
caggacagagcccagacugugu

SEQ ID NO: 312579 - RNA, 20 nt, Human
ugggccuguggcagaagucu

SEQ ID NO: 312580 - RNA, 21 nt, Human
ccugccaggaaacugaguguc

SEQ ID NO: 312581 - RNA, 22 nt, Human
cagaccagcucuaugaacccaa

SEQ ID NO: 312582 - RNA, 22 nt, Human
auaugagaauuggaaaauauca

SEQ ID NO: 312583 - RNA, 22 nt, Human
gcaggguaggugacagguaguc

SEQ ID NO: 312584 - RNA, 22 nt, Human
uggagaagucaaagugaacagg

SEQ ID NO: 312585 - RNA, 22 nt, Human
ucucuaguugaggacugagcag

SEQ ID NO: 312586 - RNA, 22 nt, Human
cagggugccaaagaacaaauau

SEQ ID NO: 312587 - RNA, 22 nt, Human
uuauucuuuaaacauauauguu

SEQ ID NO: 312588 - RNA, 22 nt, Human
ugaacagauggcccagcagagg

SEQ ID NO: 312589 - RNA, 22 nt, Human
ugaccaaagaguugcuuguauu

SEQ ID NO: 312590 - RNA, 23 nt, Human
aaguucaagucacagccugucuu

SEQ ID NO: 312591 - RNA, 22 nt, Human
ucagcaguuuuauaugcagcuu

SEQ ID NO: 312592 - RNA, 22 nt, Human
ccagcugacgaugccuggucuc

SEQ ID NO: 312593 - RNA, 22 nt, Human
guguguuuagcauuagcagggg

SEQ ID NO: 312594 - RNA, 22 nt, Human
cccagggacagaugggcagcua

SEQ ID NO: 312595 - RNA, 22 nt, Human
uggcacugagcagccgcggcag

SEQ ID NO: 312596 - RNA, 22 nt, Human
ggauaagaaaauuguaauaacu

SEQ ID NO: 312597 - RNA, 22 nt, Human
ugucucagaauggcucauaaua

SEQ ID NO: 312598 - RNA, 22 nt, Human
ucuggcaggcaaucggcucugg

SEQ ID NO: 312599 - RNA, 22 nt, Human
aaucacuuuucucuaauguagc

SEQ ID NO: 312600 - RNA, 22 nt, Human
uggcagcuggagggcaauggcc

SEQ ID NO: 312601 - RNA, 22 nt, Human
guccacauaggaacccagcuuc

SEQ ID NO: 312602 - RNA, 22 nt, Human
gaagcagcuagcccacuaguca

SEQ ID NO: 312603 - RNA, 22 nt, Human
auaugaaaauguuuuagcugua

SEQ ID NO: 312604 - RNA, 22 nt, Human
uauaauuuaucaugucacaguu

SEQ ID NO: 312605 - RNA, 20 nt, Human
ccucaguguccuggacuggg

SEQ ID NO: 312606 - RNA, 22 nt, Human
uauguguacaucugguugagca

SEQ ID NO: 312607 - RNA, 22 nt, Human
ccuggggcucaagauggcgccg

SEQ ID NO: 312608 - RNA, 22 nt, Human
ugugauauuugaguauugucaa

SEQ ID NO: 312609 - RNA, 22 nt, Human
cagaggcugaugugggaugggc

SEQ ID NO: 312610 - RNA, 22 nt, Human
aggagagagcugagcuuugcug

SEQ ID NO: 312611 - RNA, 22 nt, Human
uuugggcaggcuuuucccuaga

SEQ ID NO: 312612 - RNA, 22 nt, Human
ucacaacucuuuccauuuaaua

SEQ ID NO: 312613 - RNA, 22 nt, Human
ccugggcagggcuggacucuca

SEQ ID NO: 312614 - RNA, 22 nt, Human
cuccagggaugagacagaguag

SEQ ID NO: 312615 - RNA, 22 nt, Human
ccuguucauuuguauuugucuu

SEQ ID NO: 312616 - RNA, 22 nt, Human
gggcuggcucccagguguugaa

SEQ ID NO: 312617 - RNA, 22 nt, Human
acagggucaagggugcuacaag

SEQ ID NO: 312618 - RNA, 22 nt, Human
uucauuacugcgguagucacac

SEQ ID NO: 312619 - RNA, 20 nt, Human
uaugaagauaugugaacagc

SEQ ID NO: 312620 - RNA, 20 nt, Human
aaucucaguauccuaugcaa

SEQ ID NO: 312621 - RNA, 22 nt, Human
uguauaaacuuaagcaggaacc

SEQ ID NO: 312622 - RNA, 22 nt, Human
cugagcugggacucaguagcaa

SEQ ID NO: 312623 - RNA, 21 nt, Human
ugaaugcuucgucauccuggc

SEQ ID NO: 312624 - RNA, 22 nt, Human
ucccagcccagauuugugugac

SEQ ID NO: 312625 - RNA, 22 nt, Human
gcaguguuuacauauuagaaac

SEQ ID NO: 312626 - RNA, 22 nt, Human
auguaauuuauguuauccauaa

SEQ ID NO: 312627 - RNA, 22 nt, Human
uucugagacaauugagagucua

SEQ ID NO: 312628 - RNA, 22 nt, Human
agauaacuuuuggguauucaug

SEQ ID NO: 312629 - RNA, 22 nt, Human
cugcagcugucucuacugggca

SEQ ID NO: 312630 - RNA, 22 nt, Human
uuuggaauguaguuuaaucauc

SEQ ID NO: 312631 - RNA, 22 nt, Human
gugcucacugugagacguccug

SEQ ID NO: 312632 - RNA, 20 nt, Human
cucugcugcccgccggcugc

SEQ ID NO: 312633 - RNA, 22 nt, Human
aagacauuacuggaaucugacu

SEQ ID NO: 312634 - RNA, 19 nt, Human
ugaaggagggggauggcca

SEQ ID NO: 312635 - RNA, 22 nt, Human
ugucucugggugauucaguccu

SEQ ID NO: 312636 - RNA, 22 nt, Human
gagcugccagacaugggaauga

SEQ ID NO: 312637 - RNA, 22 nt, Human
ggcagagccuucuggagcucgc

SEQ ID NO: 312638 - RNA, 22 nt, Human
cagcuguucuugggacagacag

SEQ ID NO: 312639 - RNA, 22 nt, Human
ccaaaauguuugaaugcaugug

SEQ ID NO: 312640 - RNA, 22 nt, Human
ggcagagguagcuggaaccagg

SEQ ID NO: 312641 - RNA, 22 nt, Human
gaaugcacacgugugugcaugc

SEQ ID NO: 312642 - RNA, 22 nt, Human
auaaggcaucucucaguuagca

SEQ ID NO: 312643 - RNA, 22 nt, Human
cuggagcuaggaaguccaagau

SEQ ID NO: 312644 - RNA, 22 nt, Human
aagaacaguugggaggugagcc

SEQ ID NO: 312645 - RNA, 22 nt, Human
uucaagauggcaccagugagug

SEQ ID NO: 312646 - RNA, 21 nt, Human
ucaggggcuguguuuuccauc

SEQ ID NO: 312647 - RNA, 22 nt, Human
auuauguagcuaaaaauugugu

SEQ ID NO: 312648 - RNA, 22 nt, Human
ucuuagcacagcuauauaaguu

SEQ ID NO: 312649 - RNA, 22 nt, Human
aggccugagccccagguuuguu

SEQ ID NO: 312650 - RNA, 22 nt, Human
caaggcaggaagccugucuuau

SEQ ID NO: 312651 - RNA, 22 nt, Human
gaggagguuccggguggagaag

SEQ ID NO: 312652 - RNA, 22 nt, Human
gaggagaagcuauuggaaggac

SEQ ID NO: 312653 - RNA, 22 nt, Human
agacagggucuugaucagagcu

SEQ ID NO: 312654 - RNA, 22 nt, Human
aaauaguucagcuuguaaaccc

SEQ ID NO: 312655 - RNA, 22 nt, Human
cucuggccgcagcucagcucug

SEQ ID NO: 312656 - RNA, 22 nt, Human
aaaaaugcuuggacuuaauaaa

SEQ ID NO: 312657 - RNA, 22 nt, Human
caggguggcacaucacagcauu

SEQ ID NO: 312658 - RNA, 22 nt, Human
ugcccugugugugcaagcacug

SEQ ID NO: 312659 - RNA, 22 nt, Human
ccugcccagcuucaccucaggc

SEQ ID NO: 312660 - RNA, 22 nt, Human
agcugagcucaggcugauguaa

SEQ ID NO: 312661 - RNA, 20 nt, Human
guggccuguccuguuguggg

SEQ ID NO: 312662 - RNA, 22 nt, Human
uaguucuacucaaagugugauc

SEQ ID NO: 312663 - RNA, 22 nt, Human
ucuucucaguuucucuaggaug

SEQ ID NO: 312664 - RNA, 22 nt, Human
uucucugaguacguuucagugu

SEQ ID NO: 312665 - RNA, 19 nt, Human
aagggcugggcaccucacu

SEQ ID NO: 312666 - RNA, 19 nt, Human
ucuggcuccgccucuuagu

SEQ ID NO: 312667 - RNA, 22 nt, Human
ccugagaccaaguugcagccau

SEQ ID NO: 312668 - RNA, 22 nt, Human
caguagccacuagacacaugua

SEQ ID NO: 312669 - RNA, 22 nt, Human
cacauguuuggcaugucaccaa

SEQ ID NO: 312670 - RNA, 22 nt, Human
ggcucugcccagguggacagca

SEQ ID NO: 312671 - RNA, 22 nt, Human
agaggcaggaagagcugauuuu

SEQ ID NO: 312672 - RNA, 23 nt, Human
ccacuagcaccuguucaacuucu

SEQ ID NO: 312673 - RNA, 20 nt, Human
aaaaucucccagaaacuuau

SEQ ID NO: 312674 - RNA, 22 nt, Human
ucacaaaugaggaaaucgagca

SEQ ID NO: 312675 - RNA, 22 nt, Human
gcuggcuugauaguuucugcuu

SEQ ID NO: 312676 - RNA, 22 nt, Human
ucagcugcucaaauuuauguca

SEQ ID NO: 312677 - RNA, 23 nt, Human
ucaugcccaggcuccagauguca

SEQ ID NO: 312678 - RNA, 22 nt, Human
ggacagcccauacacaugucug

SEQ ID NO: 312679 - RNA, 21 nt, Human
agcagcugcaguuucuaucug

SEQ ID NO: 312680 - RNA, 22 nt, Human
cccagccugugacagccguccu

SEQ ID NO: 312681 - RNA, 22 nt, Human
uggaggaaaauuacuggggucu

SEQ ID NO: 312682 - RNA, 22 nt, Human
aggaguguggccagggcucugg

SEQ ID NO: 312683 - RNA, 22 nt, Human
aggcuucuaggguuggcagcgg

SEQ ID NO: 312684 - RNA, 22 nt, Human
uuguaacagcuguuuauauagu

SEQ ID NO: 312685 - RNA, 22 nt, Human
aucuuucuccauauacaucuuu

SEQ ID NO: 312686 - RNA, 22 nt, Human
caggugggcguggcgagaaggc

SEQ ID NO: 312687 - RNA, 22 nt, Human
ggagcuggccgccuaugugcag

SEQ ID NO: 312688 - RNA, 22 nt, Human
ggucucagcuggaguccuuggu

SEQ ID NO: 312689 - RNA, 22 nt, Human
gcagcguggggacaggagcuca

SEQ ID NO: 312690 - RNA, 22 nt, Human
cuggccuucagacucggacuga

SEQ ID NO: 312691 - RNA, 22 nt, Human
ugaaaugaaugugauucgauag

SEQ ID NO: 312692 - RNA, 22 nt, Human
caggagugaguuggggucuaca

SEQ ID NO: 312693 - RNA, 22 nt, Human
gcugucacaagcaucuggggca

SEQ ID NO: 312694 - RNA, 22 nt, Human
gugucccaggagaggagacaau

SEQ ID NO: 312695 - RNA, 22 nt, Human
acugcuuuuagaaaucuauaga

SEQ ID NO: 312696 - RNA, 22 nt, Human
uauuucuugaguggucaguuuc

SEQ ID NO: 312697 - RNA, 22 nt, Human
ggugaagggugucauggcauuu

SEQ ID NO: 312698 - RNA, 21 nt, Human
uaacacauuuugguacuuugg

SEQ ID NO: 312699 - RNA, 22 nt, Human
cuguggcuaggaagcuguggga

SEQ ID NO: 312700 - RNA, 20 nt, Human
guccugggagccacagcaca

SEQ ID NO: 312701 - RNA, 22 nt, Human
aagaauguucuuguagucauga

SEQ ID NO: 312702 - RNA, 23 nt, Human
agagcuuagggaauucacaugag

SEQ ID NO: 312703 - RNA, 22 nt, Human
ccaggccuggccaggggaugcc

SEQ ID NO: 312704 - RNA, 22 nt, Human
uaagaacaguagaacaguaggu

SEQ ID NO: 312705 - RNA, 22 nt, Human
gcugcagccaaauucauuguca

SEQ ID NO: 312706 - RNA, 22 nt, Human
cagaguucaaagccugcuggga

SEQ ID NO: 312707 - RNA, 21 nt, Human
cacaggugggucagugaggcc

SEQ ID NO: 312708 - RNA, 22 nt, Human
uuaaaaugcagauucugauuca

SEQ ID NO: 312709 - RNA, 17 nt, Human
cagacagauauccuggg

SEQ ID NO: 312710 - RNA, 22 nt, Human
aaauguguguauguacauauau

SEQ ID NO: 312711 - RNA, 22 nt, Human
gcuggagguuucaccugaguuu

SEQ ID NO: 312712 - RNA, 20 nt, Human
agaauucuuacccuuugaug

SEQ ID NO: 312713 - RNA, 22 nt, Human
gagaagcaauuuccaacugugc

SEQ ID NO: 312714 - RNA, 22 nt, Human
agugccaggagcaaggagcucc

SEQ ID NO: 312715 - RNA, 22 nt, Human
aaagccuugcccgucacuggga

SEQ ID NO: 312716 - RNA, 22 nt, Human
uccugggcccaggcugccaggg

SEQ ID NO: 312717 - RNA, 22 nt, Human
ggagauggcucugcaaggucua

SEQ ID NO: 312718 - RNA, 22 nt, Human
caggcagcugcuggguucagcc

SEQ ID NO: 312719 - RNA, 22 nt, Human
ggucccaggcugcgggcuggug

SEQ ID NO: 312720 - RNA, 22 nt, Human
aaaugaacucuuccugcauccc

SEQ ID NO: 312721 - RNA, 22 nt, Human
agugcagccgagaucaggugcu

SEQ ID NO: 312722 - RNA, 22 nt, Human
aggcacaguggcucacaccugu

SEQ ID NO: 312723 - RNA, 22 nt, Human
uaaccauauuuuccauuaaguu

SEQ ID NO: 312724 - RNA, 17 nt, Human
ccagagcuacugagacu

SEQ ID NO: 312725 - RNA, 22 nt, Human
uucacaggcuuggagguggggg

SEQ ID NO: 312726 - RNA, 22 nt, Human
caaaugugacuuuugggcuucu

SEQ ID NO: 312727 - RNA, 22 nt, Human
guucuucagucacaucacagaa

SEQ ID NO: 312728 - RNA, 22 nt, Human
aacaugaaguuuucuauaguga

SEQ ID NO: 312729 - RNA, 22 nt, Human
aagcugccugggaggaagggcu

SEQ ID NO: 312730 - RNA, 22 nt, Human
uuaaacagucccagaggcugac

SEQ ID NO: 312731 - RNA, 22 nt, Human
uaggggugaggccaggcaucag

SEQ ID NO: 312732 - RNA, 22 nt, Human
gaaaggagggaaacagagcggu

SEQ ID NO: 312733 - RNA, 22 nt, Human
cuuuguagcugcuucugauuua

SEQ ID NO: 312734 - RNA, 22 nt, Human
ucccuggccauuccucuaggcc

SEQ ID NO: 312735 - RNA, 22 nt, Human
gacaucauagggugggaggaaa

SEQ ID NO: 312736 - RNA, 22 nt, Human
ugugugaaggagccacuguuca

SEQ ID NO: 312737 - RNA, 18 nt, Human
ugcuggcaacuacuauug

SEQ ID NO: 312738 - RNA, 22 nt, Human
caggcuugcugcuagagcacuu

SEQ ID NO: 312739 - RNA, 20 nt, Human
ugaugguucuuuccggguug

SEQ ID NO: 312740 - RNA, 22 nt, Human
cuguggcuuucucugccuccuu

SEQ ID NO: 312741 - RNA, 22 nt, Human
ucucaguggguuaaaagagaag

SEQ ID NO: 312742 - RNA, 22 nt, Human
uggaguucucaggugagggcuu

SEQ ID NO: 312743 - RNA, 22 nt, Human
gaaggccauugcguccugggau

SEQ ID NO: 312744 - RNA, 22 nt, Human
aauuucagaccauuugcaauua

SEQ ID NO: 312745 - RNA, 22 nt, Human
uuugcaguuucauugcugaaau

SEQ ID NO: 312746 - RNA, 22 nt, Human
uagaaaucauuuagaaguauug

SEQ ID NO: 312747 - RNA, 22 nt, Human
caggauagaaaggccauggagu

SEQ ID NO: 312748 - RNA, 22 nt, Human
cuggcuuccaugcuguaguggc

SEQ ID NO: 312749 - RNA, 22 nt, Human
aaaaguaauugcaauuuuguag

SEQ ID NO: 312750 - RNA, 22 nt, Human
cacccaggcuagagugcagugg

SEQ ID NO: 312751 - RNA, 22 nt, Human
gccuggagcucaugugggcauu

SEQ ID NO: 312752 - RNA, 22 nt, Human
uauuuccauguuagaacuaagu

SEQ ID NO: 312753 - RNA, 22 nt, Human
acagucuugagcaucagccaga

SEQ ID NO: 312754 - RNA, 22 nt, Human
cuguccuuacugcuucuggcuu

SEQ ID NO: 312755 - RNA, 22 nt, Human
ccaggaagcggugagggcugcc

SEQ ID NO: 312756 - RNA, 22 nt, Human
cuuuuccacugagccucacaaa

SEQ ID NO: 312757 - RNA, 22 nt, Human
gacagugcauuuccuggcaugg

SEQ ID NO: 312758 - RNA, 22 nt, Human
aagugaguggccuggagaggug

SEQ ID NO: 312759 - RNA, 20 nt, Human
agacccuguguccuguggcc

SEQ ID NO: 312760 - RNA, 20 nt, Human
acuguucaagggccuggugg

SEQ ID NO: 312761 - RNA, 22 nt, Human
gaagagcuaaaggcacaggcuu

SEQ ID NO: 312762 - RNA, 22 nt, Human
gccaccucuuugucucugccgc

SEQ ID NO: 312763 - RNA, 22 nt, Human
ggguggggcccaggaaaucuau

SEQ ID NO: 312764 - RNA, 22 nt, Human
ggugauuuucgaguuucauguu

SEQ ID NO: 312765 - RNA, 22 nt, Human
cuugaaagcacuuaguaaauua

SEQ ID NO: 312766 - RNA, 18 nt, Human
cagcugccagcucaugga

SEQ ID NO: 312767 - RNA, 22 nt, Human
ucagaagagcuggugcugccug

SEQ ID NO: 312768 - RNA, 23 nt, Human
augcucugggcugugggaccugc

SEQ ID NO: 312769 - RNA, 22 nt, Human
uuccagaauuuuguucugcuug

SEQ ID NO: 312770 - RNA, 22 nt, Human
gcuggguggaucggaggcucug

SEQ ID NO: 312771 - RNA, 22 nt, Human
aagggcagcuuaaauugguagc

SEQ ID NO: 312772 - RNA, 22 nt, Human
uacugcauaacuggcauguggg

SEQ ID NO: 312773 - RNA, 22 nt, Human
ugagaauuacaaaugagucaca

SEQ ID NO: 312774 - RNA, 22 nt, Human
uagaauucauguuacuguuagc

SEQ ID NO: 312775 - RNA, 22 nt, Human
aauguacaaggguuccaguuuu

SEQ ID NO: 312776 - RNA, 22 nt, Human
ugucccucugaggcuucccugg

SEQ ID NO: 312777 - RNA, 22 nt, Human
gaaggccacuuuguguugagaa

SEQ ID NO: 312778 - RNA, 22 nt, Human
ggagccagagucugcaguguaa

SEQ ID NO: 312779 - RNA, 19 nt, Human
uccaccccagccagcucug

SEQ ID NO: 312780 - RNA, 22 nt, Human
gaaaucugcccagugcacuggu

SEQ ID NO: 312781 - RNA, 22 nt, Human
guauccuuugcggaaauuucua

SEQ ID NO: 312782 - RNA, 22 nt, Human
acuguucaagcaaaugacauug

SEQ ID NO: 312783 - RNA, 19 nt, Human
ggaccagguccugggcagc

SEQ ID NO: 312784 - RNA, 22 nt, Human
cugagggcaugaacauuccaua

SEQ ID NO: 312785 - RNA, 22 nt, Human
ccuccagcugccucagucucuu

SEQ ID NO: 312786 - RNA, 22 nt, Human
aguguggguuuuauggagcccu

SEQ ID NO: 312787 - RNA, 22 nt, Human
uuagugucuucuucauccucug

SEQ ID NO: 312788 - RNA, 22 nt, Human
agguauuauuagcaucucuauu

SEQ ID NO: 312789 - RNA, 22 nt, Human
ucugucaggagauuggcagcug

SEQ ID NO: 312790 - RNA, 22 nt, Human
aguguuccacacaucuggggaa

SEQ ID NO: 312791 - RNA, 22 nt, Human
gagacugcauuguccaaggguu

SEQ ID NO: 312792 - RNA, 22 nt, Human
auguucaaacuuuuuacacacc

SEQ ID NO: 312793 - RNA, 22 nt, Human
acuggcaggcugcuggccggcg

SEQ ID NO: 312794 - RNA, 22 nt, Human
gcuaggagauugagcucugaag

SEQ ID NO: 312795 - RNA, 22 nt, Human
ggccugaggcgucccagcugug

SEQ ID NO: 312796 - RNA, 22 nt, Human
cccuggagcugcuugcauguug

SEQ ID NO: 312797 - RNA, 22 nt, Human
augagugugaaguuagcucagu

SEQ ID NO: 312798 - RNA, 22 nt, Human
uugaacagcuguuacauuguua

SEQ ID NO: 312799 - RNA, 22 nt, Human
aaaauuauggaguaucccaaag

SEQ ID NO: 312800 - RNA, 22 nt, Human
cuccucugucuaccacgagggu

SEQ ID NO: 312801 - RNA, 22 nt, Human
ggccaagauggaaggagagaug

SEQ ID NO: 312802 - RNA, 22 nt, Human
ggagaccagaaggaagcuucga

SEQ ID NO: 312803 - RNA, 22 nt, Human
ccuggccucgugcucacggcuc

SEQ ID NO: 312804 - RNA, 22 nt, Human
cuguggggaagauagaaccgac

SEQ ID NO: 312805 - RNA, 22 nt, Human
ugcaccauuuugucaggcuacu

SEQ ID NO: 312806 - RNA, 22 nt, Human
cugagcugaaacuugagaggcu

SEQ ID NO: 312807 - RNA, 22 nt, Human
aggcaguggcugagaccagggg

SEQ ID NO: 312808 - RNA, 22 nt, Human
gcugauccuuuuaugucuagcu

SEQ ID NO: 312809 - RNA, 22 nt, Human
guuccaggcaagugggauagga

SEQ ID NO: 312810 - RNA, 22 nt, Human
uccaguggguugcugagggagg

SEQ ID NO: 312811 - RNA, 22 nt, Human
uucuucagucccacuagccaca

SEQ ID NO: 312812 - RNA, 20 nt, Human
cagcucugggcaggucgagg

SEQ ID NO: 312813 - RNA, 22 nt, Human
uuucacauuuaggcgugaauug

SEQ ID NO: 312814 - RNA, 22 nt, Human
gggaagaagacauggugaaggc

SEQ ID NO: 312815 - RNA, 21 nt, Human
ugaaaucugaugggacaaaug

SEQ ID NO: 312816 - RNA, 22 nt, Human
acaaaaguguaggaauuccuua

SEQ ID NO: 312817 - RNA, 22 nt, Human
agaagccauugaagcagaccuc

SEQ ID NO: 312818 - RNA, 22 nt, Human
agggagcaugggugaagcaggc

SEQ ID NO: 312819 - RNA, 22 nt, Human
ugcucuggagggugaagcuuuu

SEQ ID NO: 312820 - RNA, 22 nt, Human
aaaauguguuuaugcauuucgu

SEQ ID NO: 312821 - RNA, 21 nt, Human
ugaagccugaggcauagcccc

SEQ ID NO: 312822 - RNA, 22 nt, Human
uaaggcacacaguugcugcaug

SEQ ID NO: 312823 - RNA, 22 nt, Human
cagcaauaaugucuacaaaucu

SEQ ID NO: 312824 - RNA, 22 nt, Human
cagcaguggccaucuguguggu

SEQ ID NO: 312825 - RNA, 22 nt, Human
ucauacaauucaaucucugauu

SEQ ID NO: 312826 - RNA, 21 nt, Human
ugcuucucuagaucaacuacu

SEQ ID NO: 312827 - RNA, 19 nt, Human
cucagcuguagcucaugug

SEQ ID NO: 312828 - RNA, 22 nt, Human
cacagaaaaaggcuugaaaauc

SEQ ID NO: 312829 - RNA, 22 nt, Human
agggagcuguggucagcucagu

SEQ ID NO: 312830 - RNA, 22 nt, Human
caguucuuauuuggccaguguc

SEQ ID NO: 312831 - RNA, 22 nt, Human
agcagccauccuuagagaaaga

SEQ ID NO: 312832 - RNA, 22 nt, Human
aaaggugacacucugccagcug

SEQ ID NO: 312833 - RNA, 22 nt, Human
ccucuggggguccucagagucu

SEQ ID NO: 312834 - RNA, 22 nt, Human
agagaggcgaguuaccugugcu

SEQ ID NO: 312835 - RNA, 22 nt, Human
acuuucugcaguguuggaaaug

SEQ ID NO: 312836 - RNA, 22 nt, Human
gaggaaccacucugagaagcca

SEQ ID NO: 312837 - RNA, 20 nt, Human
uuuuuccuucucuacaggca

SEQ ID NO: 312838 - RNA, 22 nt, Human
ggcuuggaaaugguaaugagcu

SEQ ID NO: 312839 - RNA, 22 nt, Human
ugugaaagauacuaggcagagg

SEQ ID NO: 312840 - RNA, 22 nt, Human
uuuguuaauucuuauguuagag

SEQ ID NO: 312841 - RNA, 22 nt, Human
gcugccugguuucucagcugca

SEQ ID NO: 312842 - RNA, 22 nt, Human
caagggcucacggucugcuggg

SEQ ID NO: 312843 - RNA, 22 nt, Human
uguaggaguccaaucaggagac

SEQ ID NO: 312844 - RNA, 22 nt, Human
ccacaggggucucuguagcuga

SEQ ID NO: 312845 - RNA, 22 nt, Human
aaaaucugcuuccuuuuacaga

SEQ ID NO: 312846 - RNA, 22 nt, Human
cucucagugccugcccuaggcu

SEQ ID NO: 312847 - RNA, 23 nt, Human
uggcucugagagguucagaugcu

SEQ ID NO: 312848 - RNA, 21 nt, Human
guccucagcugaugggagcug

SEQ ID NO: 312849 - RNA, 22 nt, Human
agccacagggggugagggacaa

SEQ ID NO: 312850 - RNA, 22 nt, Human
ggcagcaguaggagcuaaucuu

SEQ ID NO: 312851 - RNA, 22 nt, Human
agagugaagguugacacuucac

SEQ ID NO: 312852 - RNA, 22 nt, Human
uuuacuuuugguaaggucauuu

SEQ ID NO: 312853 - RNA, 22 nt, Human
ccagcaccuugaucuuggaguu

SEQ ID NO: 312854 - RNA, 19 nt, Human
gcuggggccugaccagaca

SEQ ID NO: 312855 - RNA, 22 nt, Human
aggccuuccucggagacaggga

SEQ ID NO: 312856 - RNA, 22 nt, Human
caggaugggauguagugggccc

SEQ ID NO: 312857 - RNA, 22 nt, Human
uuccuguccgcaauggccuggg

SEQ ID NO: 312858 - RNA, 23 nt, Human
ugucauugugacuacagaaccag

SEQ ID NO: 312859 - RNA, 22 nt, Human
cucuggccagagccugcgggaa

SEQ ID NO: 312860 - RNA, 22 nt, Human
ucccagagacagagccuccucc

SEQ ID NO: 312861 - RNA, 22 nt, Human
ugggugggagcacccugucugg

SEQ ID NO: 312862 - RNA, 22 nt, Human
ucucuggccgagagucccuggg

SEQ ID NO: 312863 - RNA, 22 nt, Human
uccucccacauaggacaauggg

SEQ ID NO: 312864 - RNA, 22 nt, Human
ggcugagggccagggcuagucu

SEQ ID NO: 312865 - RNA, 22 nt, Human
gagagcaggaggcagcgggacg

SEQ ID NO: 312866 - RNA, 21 nt, Human
cagcccagagcaguggggcca

SEQ ID NO: 312867 - RNA, 22 nt, Human
acaguaauauugaugcucguca

SEQ ID NO: 312868 - RNA, 22 nt, Human
gugagagcugcuccagaucucu

SEQ ID NO: 312869 - RNA, 22 nt, Human
agguaaagacagugaaagaggg

SEQ ID NO: 312870 - RNA, 22 nt, Human
aaauucuuucauggcuaauaag

SEQ ID NO: 312871 - RNA, 22 nt, Human
uuauuuaauuuucucacucaga

SEQ ID NO: 312872 - RNA, 22 nt, Human
caggaucccuggccuccgccca

SEQ ID NO: 312873 - RNA, 22 nt, Human
ucagaggugguaaaggacagca

SEQ ID NO: 312874 - RNA, 22 nt, Human
aggagcuggguuccuuuggugg

SEQ ID NO: 312875 - RNA, 22 nt, Human
uguauagaguuggaagaugacu

SEQ ID NO: 312876 - RNA, 22 nt, Human
gauuucaaggaguuuucacagu

SEQ ID NO: 312877 - RNA, 22 nt, Human
uauaauuuggggaaaguggugu

SEQ ID NO: 312878 - RNA, 22 nt, Human
uucugucacagugcugguauca

SEQ ID NO: 312879 - RNA, 22 nt, Human
uuccaggaauucagcucucagu

SEQ ID NO: 312880 - RNA, 18 nt, Human
gugacagcugcuagcuca

SEQ ID NO: 312881 - RNA, 22 nt, Human
gccuggugguauccuggcaaga

SEQ ID NO: 312882 - RNA, 23 nt, Human
uggccucuccccaccuggcagaa

SEQ ID NO: 312883 - RNA, 22 nt, Human
gcaguguugguuugcucugcag

SEQ ID NO: 312884 - RNA, 22 nt, Human
cuguuuaucuaggaguugcagg

SEQ ID NO: 312885 - RNA, 22 nt, Human
uguauuuuuagaccuuuagacc

SEQ ID NO: 312886 - RNA, 22 nt, Human
gcuuggcauugaccauuaucau

SEQ ID NO: 312887 - RNA, 22 nt, Human
aguaaaauuguauuggaaaaca

SEQ ID NO: 312888 - RNA, 22 nt, Human
gcuguccucuuggacucagggc

SEQ ID NO: 312889 - RNA, 22 nt, Human
gaucucugaaucugaagccuuc

SEQ ID NO: 312890 - RNA, 22 nt, Human
cacuguaucuuuuccaaagucu

SEQ ID NO: 312891 - RNA, 22 nt, Human
uauguacaguccuuaacuuaaa

SEQ ID NO: 312892 - RNA, 22 nt, Human
auguguacaaccaagcacuaaa

SEQ ID NO: 312893 - RNA, 22 nt, Human
auugucuuuccacugagaaguu

SEQ ID NO: 312894 - RNA, 22 nt, Human
uccauaagcagguucuuccuga

SEQ ID NO: 312895 - RNA, 18 nt, Human
uggacaggguggagaaaa

SEQ ID NO: 312896 - RNA, 22 nt, Human
ccagcccuucccaacuggccag

SEQ ID NO: 312897 - RNA, 18 nt, Human
aggcacagagcauacaua

SEQ ID NO: 312898 - RNA, 22 nt, Human
uccuguggcguuaucaugugau

SEQ ID NO: 312899 - RNA, 22 nt, Human
gaggccugguagccgagcccca

SEQ ID NO: 312900 - RNA, 22 nt, Human
uaugccugauaacugugucucu

SEQ ID NO: 312901 - RNA, 22 nt, Human
gcagaaggucaaagcaagaugu

SEQ ID NO: 312902 - RNA, 22 nt, Human
cagagccauccaggugccuguu

SEQ ID NO: 312903 - RNA, 22 nt, Human
uuacuuugcuuucucauuacag

SEQ ID NO: 312904 - RNA, 22 nt, Human
aaauacauacacuguacguggc

SEQ ID NO: 312905 - RNA, 22 nt, Human
ugaaaucuuagccauucugccu

SEQ ID NO: 312906 - RNA, 18 nt, Human
uuugcaaaggaaguaugg

SEQ ID NO: 312907 - RNA, 22 nt, Human
auaauuuacuaagcucuaccuu

SEQ ID NO: 312908 - RNA, 22 nt, Human
ggccucugccccagccacaccu

SEQ ID NO: 312909 - RNA, 22 nt, Human
auauaaguuaguggucauguuu

SEQ ID NO: 312910 - RNA, 22 nt, Human
gugcccaggcccaaggcaccac

SEQ ID NO: 312911 - RNA, 22 nt, Human
cuucuuaaugacagauuaaaau

SEQ ID NO: 312912 - RNA, 22 nt, Human
gcugcuucucugauggagucca

SEQ ID NO: 312913 - RNA, 22 nt, Human
cacaguguagacuaauaauaga

SEQ ID NO: 312914 - RNA, 22 nt, Human
acugucugcuggccccugguua

SEQ ID NO: 312915 - RNA, 22 nt, Human
ucagaagaagagacuccacagc

SEQ ID NO: 312916 - RNA, 21 nt, Human
gccagccuguuuaccuguggu

SEQ ID NO: 312917 - RNA, 22 nt, Human
ugcuguggcaguuuauguauag

SEQ ID NO: 312918 - RNA, 22 nt, Human
uauauuaacacccacuugccuc

SEQ ID NO: 312919 - RNA, 22 nt, Human
aagcccagaugggagcauuuca

SEQ ID NO: 312920 - RNA, 22 nt, Human
accucccagcucugagcuuggg

SEQ ID NO: 312921 - RNA, 22 nt, Human
ccuguucaauauucuuccuugu

SEQ ID NO: 312922 - RNA, 22 nt, Human
cugggacacccaaggaaagagc

SEQ ID NO: 312923 - RNA, 22 nt, Human
cucuggagugcagccugguggc

SEQ ID NO: 312924 - RNA, 22 nt, Human
gccugggugucgaucacuagug

SEQ ID NO: 312925 - RNA, 22 nt, Human
cuccaggccauggcugcggagg

SEQ ID NO: 312926 - RNA, 22 nt, Human
ucagaacaauugggaaccauua

SEQ ID NO: 312927 - RNA, 22 nt, Human
gccaggcuggccagcaccuucu

SEQ ID NO: 312928 - RNA, 22 nt, Human
ucucagagagaugaaacuucca

SEQ ID NO: 312929 - RNA, 22 nt, Human
agcacagguacggagaugcuac

SEQ ID NO: 312930 - RNA, 22 nt, Human
auucuccaucaccacuggcacu

SEQ ID NO: 312931 - RNA, 22 nt, Human
cugugcuggcagaccuggaguu

SEQ ID NO: 312932 - RNA, 22 nt, Human
cacugccuccccaggcuccaca

SEQ ID NO: 312933 - RNA, 22 nt, Human
ccugaggggcugcaggccagcu

SEQ ID NO: 312934 - RNA, 22 nt, Human
gcucucugaggugcuggcagag

SEQ ID NO: 312935 - RNA, 18 nt, Human
gcuggcugcacuucugcu

SEQ ID NO: 312936 - RNA, 22 nt, Human
cacugcaguaacucuaggacug

SEQ ID NO: 312937 - RNA, 22 nt, Human
gcucuguguucccuccaggcuc

SEQ ID NO: 312938 - RNA, 22 nt, Human
ccugucuggccaccagggcgau

SEQ ID NO: 312939 - RNA, 22 nt, Human
agucccaggcagccgagccggu

SEQ ID NO: 312940 - RNA, 22 nt, Human
aauggcugggaguguauuuugg

SEQ ID NO: 312941 - RNA, 22 nt, Human
uuuccucuuauacaguguuuau

SEQ ID NO: 312942 - RNA, 22 nt, Human
uguggcugcucaggugcagacc

SEQ ID NO: 312943 - RNA, 22 nt, Human
cccagcucugcagaccugcccu

SEQ ID NO: 312944 - RNA, 23 nt, Human
aggaggccugaaacugaggcuga

SEQ ID NO: 312945 - RNA, 22 nt, Human
gauucacucauauuuuacguuu

SEQ ID NO: 312946 - RNA, 22 nt, Human
uggaaauguauuugggcaugcc

SEQ ID NO: 312947 - RNA, 22 nt, Human
guggguggaggcgucgagggca

SEQ ID NO: 312948 - RNA, 19 nt, Human
gcuucccaccagccagccc

SEQ ID NO: 312949 - RNA, 19 nt, Human
gcugcucugggucucaucu

SEQ ID NO: 312950 - RNA, 22 nt, Human
aagccaggaagagagccuucac

SEQ ID NO: 312951 - RNA, 22 nt, Human
ucagaacagaagcuggcuauaa

SEQ ID NO: 312952 - RNA, 22 nt, Human
gcagagcuaucuucuggauuug

SEQ ID NO: 312953 - RNA, 22 nt, Human
gcccagccccuggguggacgug

SEQ ID NO: 312954 - RNA, 22 nt, Human
aggugcagaaaaaaguccuuua

SEQ ID NO: 312955 - RNA, 22 nt, Human
gcacacaguauaugcucauuaa

SEQ ID NO: 312956 - RNA, 22 nt, Human
uagauuuccucuuccucauucc

SEQ ID NO: 312957 - RNA, 22 nt, Human
gcaggugguccccguggagugg

SEQ ID NO: 312958 - RNA, 22 nt, Human
aaguuuaagguggaaguggugg

SEQ ID NO: 312959 - RNA, 19 nt, Human
uaaaaugucuguggucagu

SEQ ID NO: 312960 - RNA, 22 nt, Human
ccucugccaccucccacgaggc

SEQ ID NO: 312961 - RNA, 22 nt, Human
caaggccaguccauuuuggaag

SEQ ID NO: 312962 - RNA, 22 nt, Human
gcucugggaacugacugccuuc

SEQ ID NO: 312963 - RNA, 22 nt, Human
cucuccucugaaguggugaccc

SEQ ID NO: 312964 - RNA, 20 nt, Human
uauuugaaauggccaagugu

SEQ ID NO: 312965 - RNA, 22 nt, Human
ucagcaguggcucucaugcagu

SEQ ID NO: 312966 - RNA, 22 nt, Human
agaggccuccgaaaggugggcu

SEQ ID NO: 312967 - RNA, 20 nt, Human
ucucaggcccccuccuugcu

SEQ ID NO: 312968 - RNA, 22 nt, Human
agccacgucccugucaggguca

SEQ ID NO: 312969 - RNA, 22 nt, Human
uugcauaaaugcuuaaaauuug

SEQ ID NO: 312970 - RNA, 22 nt, Human
agcagccauagauagcaugcaa

SEQ ID NO: 312971 - RNA, 22 nt, Human
ccaggagucuggaugagguguc

SEQ ID NO: 312972 - RNA, 22 nt, Human
ccagcccugauuagagaauguc

SEQ ID NO: 312973 - RNA, 22 nt, Human
ggcucuggcguccaauggagcg

SEQ ID NO: 312974 - RNA, 18 nt, Human
ggcucaggcuauccuaac

SEQ ID NO: 312975 - RNA, 22 nt, Human
ugccuugcacauaauauacauu

SEQ ID NO: 312976 - RNA, 20 nt, Human
ucacaucuggcagcugauga

SEQ ID NO: 312977 - RNA, 22 nt, Human
acagccagggucucaggaggcg

SEQ ID NO: 312978 - RNA, 22 nt, Human
aagccagguguugugguaagag

SEQ ID NO: 312979 - RNA, 23 nt, Human
cccagcagauuguaaagugucca

SEQ ID NO: 312980 - RNA, 22 nt, Human
cucucuucccgugaguguugca

SEQ ID NO: 312981 - RNA, 22 nt, Human
uaugaaaugguaguaggaaggg

SEQ ID NO: 312982 - RNA, 22 nt, Human
acugucacuccaacugagucgu

SEQ ID NO: 312983 - RNA, 22 nt, Human
ccagggcagaaaaagagggaau

SEQ ID NO: 312984 - RNA, 22 nt, Human
ccugggcaggaugggcccggug

SEQ ID NO: 312985 - RNA, 22 nt, Human
cccucagcuccacccucagcag

SEQ ID NO: 312986 - RNA, 22 nt, Human
cucacuggcaagacuacaggug

SEQ ID NO: 312987 - RNA, 22 nt, Human
cugcuggggucagagcacuggg

SEQ ID NO: 312988 - RNA, 22 nt, Human
gcucuggacuggggccugagaa

SEQ ID NO: 312989 - RNA, 22 nt, Human
uguaguaagugcgcaauaaaua

SEQ ID NO: 312990 - RNA, 22 nt, Human
gcugcucucagagcucaugcug

SEQ ID NO: 312991 - RNA, 22 nt, Human
ugcugcuguuuccuacaucuca

SEQ ID NO: 312992 - RNA, 22 nt, Human
ucaguguucuggauuuggggca

SEQ ID NO: 312993 - RNA, 19 nt, Human
cagaguacaccagauagga

SEQ ID NO: 312994 - RNA, 20 nt, Human
aauuuacucacagaaugaau

SEQ ID NO: 312995 - RNA, 22 nt, Human
aauguuaaaaccuucagugcuu

SEQ ID NO: 312996 - RNA, 22 nt, Human
gcacugcaucuacuggcaagua

SEQ ID NO: 312997 - RNA, 22 nt, Human
aauguaugugcaucauuuacau

SEQ ID NO: 312998 - RNA, 22 nt, Human
ggcaucuguccaucucuccagc

SEQ ID NO: 312999 - RNA, 22 nt, Human
acauucuagaagucuuugcaau

SEQ ID NO: 313000 - RNA, 21 nt, Human
ucaguccuguuagccuuuggg

SEQ ID NO: 313001 - RNA, 22 nt, Human
uugcucaggcuuagagcuacua

SEQ ID NO: 313002 - RNA, 22 nt, Human
uggcccugcuuaugucucucuu

SEQ ID NO: 313003 - RNA, 22 nt, Human
ugaccuuauuugaaaauagaga

SEQ ID NO: 313004 - RNA, 20 nt, Human
ucucccaggcucagggaaga

SEQ ID NO: 313005 - RNA, 18 nt, Human
agcagaauucuaggguuc

SEQ ID NO: 313006 - RNA, 22 nt, Human
cugggccugucagggcuuuuug

SEQ ID NO: 313007 - RNA, 22 nt, Human
cacaaaaguaggaggcaggcgg

SEQ ID NO: 313008 - RNA, 22 nt, Human
caucuggcuagcuaucauugug

SEQ ID NO: 313009 - RNA, 22 nt, Human
ugaaccagagucuccagugguu

SEQ ID NO: 313010 - RNA, 22 nt, Human
gagaaagauguaggcugggagg

SEQ ID NO: 313011 - RNA, 21 nt, Human
ggagggcagcccagacuggcu

SEQ ID NO: 313012 - RNA, 19 nt, Human
uccuccuuacuuccucuug

SEQ ID NO: 313013 - RNA, 22 nt, Human
gagugguaggcaguguuaggaa

SEQ ID NO: 313014 - RNA, 23 nt, Human
gcagacagagcagacuaagacaa

SEQ ID NO: 313015 - RNA, 22 nt, Human
agggacacugaugagaaauucu

SEQ ID NO: 313016 - RNA, 22 nt, Human
aguucucaagacaauuaccugu

SEQ ID NO: 313017 - RNA, 22 nt, Human
aagaugauguuguguuuucacu

SEQ ID NO: 313018 - RNA, 22 nt, Human
uucugucucuguguuuacauua

SEQ ID NO: 313019 - RNA, 22 nt, Human
ucaaagcaucagucaauuuagg

SEQ ID NO: 313020 - RNA, 22 nt, Human
gaaggagagaaaggcaauucug

SEQ ID NO: 313021 - RNA, 22 nt, Human
caccagggcucugagcucugaa

SEQ ID NO: 313022 - RNA, 22 nt, Human
aauguacaaaagucagccaacu

SEQ ID NO: 313023 - RNA, 22 nt, Human
ccuggggagccgccugagcccc

SEQ ID NO: 313024 - RNA, 22 nt, Human
ucaguguuggcuacaucugccu

SEQ ID NO: 313025 - RNA, 18 nt, Human
agccuggaggguugaagu

SEQ ID NO: 313026 - RNA, 22 nt, Human
cucucuggcuuggcacggagau

SEQ ID NO: 313027 - RNA, 22 nt, Human
gagcugugagggacacauugcu

SEQ ID NO: 313028 - RNA, 22 nt, Human
ccugccagcauggcuuaucucc

SEQ ID NO: 313029 - RNA, 19 nt, Human
aggccugggguuuugcacu

SEQ ID NO: 313030 - RNA, 22 nt, Human
gcagagcucaagguguucagcu

SEQ ID NO: 313031 - RNA, 22 nt, Human
gggcagccucggugccugcugc

SEQ ID NO: 313032 - RNA, 22 nt, Human
gccaggcuggaaagaacagaca

SEQ ID NO: 313033 - RNA, 22 nt, Human
aaucuucauuuugacaagauuc

SEQ ID NO: 313034 - RNA, 22 nt, Human
ucaucuugcugccauugcuuua

SEQ ID NO: 313035 - RNA, 22 nt, Human
ucagugucuugggcuugaaugc

SEQ ID NO: 313036 - RNA, 22 nt, Human
uuuauuuauccuucuggauugc

SEQ ID NO: 313037 - RNA, 22 nt, Human
aagauuuccuggauguaauucc

SEQ ID NO: 313038 - RNA, 22 nt, Human
aucauucuagcuguuguguuga

SEQ ID NO: 313039 - RNA, 22 nt, Human
acccacgaagaugagcggcaug

SEQ ID NO: 313040 - RNA, 22 nt, Human
auuuuacuuugugaauauugac

SEQ ID NO: 313041 - RNA, 22 nt, Human
ucagggugaaccaggcaggaau

SEQ ID NO: 313042 - RNA, 22 nt, Human
cauuugaaugagauugcuguaa

SEQ ID NO: 313043 - RNA, 22 nt, Human
uuccaggacaagauguuucagg

SEQ ID NO: 313044 - RNA, 21 nt, Human
gggagcuggaaacugggugac

SEQ ID NO: 313045 - RNA, 22 nt, Human
acaugcauacaagcacauguag

SEQ ID NO: 313046 - RNA, 22 nt, Human
cacagggccuugugugacugca

SEQ ID NO: 313047 - RNA, 22 nt, Human
cccagagcugagucugauauau

SEQ ID NO: 313048 - RNA, 17 nt, Human
gaaagguccuagaaauc

SEQ ID NO: 313049 - RNA, 18 nt, Human
agcagcugugccacacug

SEQ ID NO: 313050 - RNA, 22 nt, Human
uuuccucugagugagcugggag

SEQ ID NO: 313051 - RNA, 22 nt, Human
augccacugacauggacaauuu

SEQ ID NO: 313052 - RNA, 22 nt, Human
gccaguuccuguggagucagag

SEQ ID NO: 313053 - RNA, 23 nt, Human
acagggcauugcuggccucgagg

SEQ ID NO: 313054 - RNA, 22 nt, Human
gauuucuuugcaagcuguguuc

SEQ ID NO: 313055 - RNA, 22 nt, Human
cuggcucucugagauauugagu

SEQ ID NO: 313056 - RNA, 22 nt, Human
guuuauaugaacuucauaccca

SEQ ID NO: 313057 - RNA, 22 nt, Human
acugucuguccugcucuccgug

SEQ ID NO: 313058 - RNA, 22 nt, Human
aucuggcucaccuggguaaaua

SEQ ID NO: 313059 - RNA, 22 nt, Human
gcugcuuccuuuccugcugacc

SEQ ID NO: 313060 - RNA, 22 nt, Human
caggcugcggucggcucugguc

SEQ ID NO: 313061 - RNA, 22 nt, Human
uuuccauauuuggucuuuggga

SEQ ID NO: 313062 - RNA, 22 nt, Human
uuuccuuguuauuauuuguccu

SEQ ID NO: 313063 - RNA, 22 nt, Human
cagaacugggcagggagcagag

SEQ ID NO: 313064 - RNA, 22 nt, Human
cucuggaaaaccacuagcagga

SEQ ID NO: 313065 - RNA, 20 nt, Human
cccuggccuguuucaugccc

SEQ ID NO: 313066 - RNA, 22 nt, Human
acagcuuuucaauucugcugag

SEQ ID NO: 313067 - RNA, 21 nt, Human
ccaggcagagcugugaguucu

SEQ ID NO: 313068 - RNA, 22 nt, Human
auacaaagacaaaucucaaucu

SEQ ID NO: 313069 - RNA, 22 nt, Human
ugggggacugcacuggcgucag

SEQ ID NO: 313070 - RNA, 22 nt, Human
ggcugcuugcuguuucuuggau

SEQ ID NO: 313071 - RNA, 22 nt, Human
augcaguacagauaauucuaca

SEQ ID NO: 313072 - RNA, 20 nt, Human
gucagaggacccuagagcga

SEQ ID NO: 313073 - RNA, 22 nt, Human
ccgggcgggggcucucgucacc

SEQ ID NO: 313074 - RNA, 22 nt, Human
agauacauuguucuaagcauug

SEQ ID NO: 313075 - RNA, 22 nt, Human
gcaggccuccccugcuggagcu

SEQ ID NO: 313076 - RNA, 22 nt, Human
agcgggugcugugucagcccuc

SEQ ID NO: 313077 - RNA, 22 nt, Human
ccagggcuggguuugucggugu

SEQ ID NO: 313078 - RNA, 22 nt, Human
cugaggccagcugcagagcucu

SEQ ID NO: 313079 - RNA, 22 nt, Human
ugauuuccaugaagcugaaggc

SEQ ID NO: 313080 - RNA, 18 nt, Human
ucucuucuuggcagucaa

SEQ ID NO: 313081 - RNA, 22 nt, Human
guccugugucccagagaaagag

SEQ ID NO: 313082 - RNA, 22 nt, Human
gcucagccgaacuucagagcag

SEQ ID NO: 313083 - RNA, 22 nt, Human
cugaaggauuuaguucuuugcu

SEQ ID NO: 313084 - RNA, 21 nt, Human
aaagugguaaggauuauuuug

SEQ ID NO: 313085 - RNA, 21 nt, Human
ccacaggggcuccccugucag

SEQ ID NO: 313086 - RNA, 22 nt, Human
acuuuauuuccuauugcaucca

SEQ ID NO: 313087 - RNA, 22 nt, Human
ccaggcagagugcuccagaaag

SEQ ID NO: 313088 - RNA, 22 nt, Human
ccaggagguggagauugcagug

SEQ ID NO: 313089 - RNA, 22 nt, Human
cugaagaggacgcagcagcaag

SEQ ID NO: 313090 - RNA, 22 nt, Human
uugggcucaggaguuugagacc

SEQ ID NO: 313091 - RNA, 16 nt, Human
gcuggagggagggguu

SEQ ID NO: 313092 - RNA, 22 nt, Human
ucuggcuccaccuccuuuacua

SEQ ID NO: 313093 - RNA, 19 nt, Human
gggcuuggggcugaagccu

SEQ ID NO: 313094 - RNA, 22 nt, Human
aagaggaacugggggcugaguc

SEQ ID NO: 313095 - RNA, 22 nt, Human
gcagcuggggccacacuuaggc

SEQ ID NO: 313096 - RNA, 22 nt, Human
cagaggcagaggucaucucugg

SEQ ID NO: 313097 - RNA, 22 nt, Human
gagacacaaacacauuuagagg

SEQ ID NO: 313098 - RNA, 22 nt, Human
uuguaacagcugcuuaauagag

SEQ ID NO: 313099 - RNA, 22 nt, Human
ccagcacugcucucagacugag

SEQ ID NO: 313100 - RNA, 22 nt, Human
uccuuucccuuuccauccuggc

SEQ ID NO: 313101 - RNA, 22 nt, Human
augagcuucccagacaggaugg

SEQ ID NO: 313102 - RNA, 22 nt, Human
gucaggaugagggaugaggagu

SEQ ID NO: 313103 - RNA, 22 nt, Human
gcagaggggaagcugaggaauu

SEQ ID NO: 313104 - RNA, 22 nt, Human
aagacaagcaucaaaucaggca

SEQ ID NO: 313105 - RNA, 22 nt, Human
agagccuggggauuggcaaggg

SEQ ID NO: 313106 - RNA, 22 nt, Human
gcaagcuggcuguuagaggaug

SEQ ID NO: 313107 - RNA, 21 nt, Human
ggggcagagcuaggcccugca

SEQ ID NO: 313108 - RNA, 22 nt, Human
ggggugagaucaaggaagcccu

SEQ ID NO: 313109 - RNA, 22 nt, Human
auaauuaauuucaguaaucucc

SEQ ID NO: 313110 - RNA, 22 nt, Human
gcagggaccugccacugcuguc

SEQ ID NO: 313111 - RNA, 22 nt, Human
agagcucaagacgcucacagua

SEQ ID NO: 313112 - RNA, 19 nt, Human
acaaagcugugagcagcuu

SEQ ID NO: 313113 - RNA, 22 nt, Human
aggagccaguuccaccccagga

SEQ ID NO: 313114 - RNA, 20 nt, Human
cccugcagccaugggagugg

SEQ ID NO: 313115 - RNA, 22 nt, Human
gcugucugcaagccaggaaaug

SEQ ID NO: 313116 - RNA, 22 nt, Human
uauuugaagauucuucugaugu

SEQ ID NO: 313117 - RNA, 22 nt, Human
ccaggcauccauugcuuccucu

SEQ ID NO: 313118 - RNA, 22 nt, Human
guauuugauagauuucaaagga

SEQ ID NO: 313119 - RNA, 22 nt, Human
uuuccuaguucuaagaaaugua

SEQ ID NO: 313120 - RNA, 22 nt, Human
aaagaacaauguggaaucuccu

SEQ ID NO: 313121 - RNA, 22 nt, Human
aaggccagacaggaccacaucu

SEQ ID NO: 313122 - RNA, 18 nt, Human
uccugccugcgggcuccc

SEQ ID NO: 313123 - RNA, 22 nt, Human
uccaagaagucaucuaaacugu

SEQ ID NO: 313124 - RNA, 22 nt, Human
auugcuguggaaauauaagaug

SEQ ID NO: 313125 - RNA, 22 nt, Human
cuggcaggcagacuucugcaag

SEQ ID NO: 313126 - RNA, 22 nt, Human
uuacaguaugaucaacuuuuca

SEQ ID NO: 313127 - RNA, 22 nt, Human
ggggagaguccuuuccaguucc

SEQ ID NO: 313128 - RNA, 22 nt, Human
gucuggaggaggaagaaggcac

SEQ ID NO: 313129 - RNA, 22 nt, Human
gcugggaggaucucucccuguc

SEQ ID NO: 313130 - RNA, 22 nt, Human
gcugagcuagaaaaggaccaca

SEQ ID NO: 313131 - RNA, 22 nt, Human
ugggaguguucuuggcuugcuu

SEQ ID NO: 313132 - RNA, 22 nt, Human
acuuuguauaagacaauaaaga

SEQ ID NO: 313133 - RNA, 22 nt, Human
aauuuccaaauuucugucacac

SEQ ID NO: 313134 - RNA, 22 nt, Human
uuguaacacuuuucuauuaaua

SEQ ID NO: 313135 - RNA, 22 nt, Human
uccaaagggaagcgcuuucugu

SEQ ID NO: 313136 - RNA, 22 nt, Human
ugagcuggucuugaguguagcu

SEQ ID NO: 313137 - RNA, 22 nt, Human
cucugagguccuacagugaccc

SEQ ID NO: 313138 - RNA, 22 nt, Human
agggagagaaguuauacaagau

SEQ ID NO: 313139 - RNA, 22 nt, Human
ucuuagaaguuuauggcacgga

SEQ ID NO: 313140 - RNA, 22 nt, Human
cugaagagcucuccuguccccu

SEQ ID NO: 313141 - RNA, 22 nt, Human
uuguaacaggcacucugugcca

SEQ ID NO: 313142 - RNA, 22 nt, Human
ugucccagcagcuggguucucu

SEQ ID NO: 313143 - RNA, 22 nt, Human
cacaagucuguggucuccaaca

SEQ ID NO: 313144 - RNA, 22 nt, Human
ccagagcccagcacacggugcu

SEQ ID NO: 313145 - RNA, 22 nt, Human
ucuuagaaugucaacugauguu

SEQ ID NO: 313146 - RNA, 20 nt, Human
auugucagccuucagaggag

SEQ ID NO: 313147 - RNA, 22 nt, Human
cauaauuuuccaugguuugcua

SEQ ID NO: 313148 - RNA, 18 nt, Human
gggaucaggcugccuagg

SEQ ID NO: 313149 - RNA, 22 nt, Human
gagaggcugacuggcuguccug

SEQ ID NO: 313150 - RNA, 22 nt, Human
ugagccuggagucguggagggg

SEQ ID NO: 313151 - RNA, 22 nt, Human
ccuggacucaggcugugggcac

SEQ ID NO: 313152 - RNA, 23 nt, Human
gggaccagcuagggcugugaccu

SEQ ID NO: 313153 - RNA, 22 nt, Human
ucaguuuuuguuugccagauag

SEQ ID NO: 313154 - RNA, 22 nt, Human
acaacaggguaaggcaggccau

SEQ ID NO: 313155 - RNA, 23 nt, Human
uggggagaguuacccuggaagcg

SEQ ID NO: 313156 - RNA, 22 nt, Human
uuauuccauuauuucacuuagg

SEQ ID NO: 313157 - RNA, 20 nt, Human
cgugcugugaccuugagcau

SEQ ID NO: 313158 - RNA, 22 nt, Human
ggggagcagaagcagcaacaac

SEQ ID NO: 313159 - RNA, 22 nt, Human
ugagcuucaaaauaugugaauc

SEQ ID NO: 313160 - RNA, 22 nt, Human
gcagagugagccgaggcugcuc

SEQ ID NO: 313161 - RNA, 22 nt, Human
ucaucuucuauuaauagggaga

SEQ ID NO: 313162 - RNA, 22 nt, Human
cagagccagcuguccuuggcau

SEQ ID NO: 313163 - RNA, 22 nt, Human
ucugaaauagaagugucuuucu

SEQ ID NO: 313164 - RNA, 22 nt, Human
ugggggagccuucacaguagcu

SEQ ID NO: 313165 - RNA, 22 nt, Human
agcaaaguagcugcuguucuua

SEQ ID NO: 313166 - RNA, 22 nt, Human
caaugauggcuaggcagcugcu

SEQ ID NO: 313167 - RNA, 22 nt, Human
aagccagcauuuucccauuccu

SEQ ID NO: 313168 - RNA, 22 nt, Human
uacuaaauaguuuaauuccuca

SEQ ID NO: 313169 - RNA, 22 nt, Human
gucauucuuaacaacucaguag

SEQ ID NO: 313170 - RNA, 22 nt, Human
cuuugcaaacgauuaccacaug

SEQ ID NO: 313171 - RNA, 22 nt, Human
gugguuuucuccaacccagaac

SEQ ID NO: 313172 - RNA, 22 nt, Human
gagggcugcaaugagacagaga

SEQ ID NO: 313173 - RNA, 22 nt, Human
auucuucaaagagugucaaagu

SEQ ID NO: 313174 - RNA, 22 nt, Human
ugccuggcaacuguggugggcu

SEQ ID NO: 313175 - RNA, 22 nt, Human
gcaguguuguuaaaagauuaga

SEQ ID NO: 313176 - RNA, 21 nt, Human
ugaaaguuggagucaaaugua

SEQ ID NO: 313177 - RNA, 22 nt, Human
aguaugaagauuauaauuuuuc

SEQ ID NO: 313178 - RNA, 22 nt, Human
cugcuggccuagcccauccucu

SEQ ID NO: 313179 - RNA, 23 nt, Human
uguaugaauaugccacaguuuaa

SEQ ID NO: 313180 - RNA, 22 nt, Human
cagggcagggagcuuagaauga

SEQ ID NO: 313181 - RNA, 22 nt, Human
uuucaucuucccagagaccuug

SEQ ID NO: 313182 - RNA, 22 nt, Human
acaguguuuuaugagaauuguu

SEQ ID NO: 313183 - RNA, 21 nt, Human
aaguggagaagaaaagcugga

SEQ ID NO: 313184 - RNA, 22 nt, Human
auguuuuauauuuugcagcagu

SEQ ID NO: 313185 - RNA, 22 nt, Human
ccucuggguaucuguggaagua

SEQ ID NO: 313186 - RNA, 22 nt, Human
ugaugguuuuauuaauaggacc

SEQ ID NO: 313187 - RNA, 22 nt, Human
agcagccacagcagaucugagu

SEQ ID NO: 313188 - RNA, 22 nt, Human
agccccaggcccggacgccucu

SEQ ID NO: 313189 - RNA, 22 nt, Human
cggagccugcuuguugcagcug

SEQ ID NO: 313190 - RNA, 22 nt, Human
ucaauucaacacaugcacauug

SEQ ID NO: 313191 - RNA, 22 nt, Human
uccguauuugacuauugcaccg

SEQ ID NO: 313192 - RNA, 22 nt, Human
ugcagcugaggccagcuaugcc

SEQ ID NO: 313193 - RNA, 22 nt, Human
auguaucagaaauagcauuggc

SEQ ID NO: 313194 - RNA, 22 nt, Human
ccugucacgaugacugcacucu

SEQ ID NO: 313195 - RNA, 22 nt, Human
ugaaaugagagcacagaauaaa

SEQ ID NO: 313196 - RNA, 22 nt, Human
uagcagagcagggaucagagcc

SEQ ID NO: 313197 - RNA, 22 nt, Human
ugcagucuggauguccucagau

SEQ ID NO: 313198 - RNA, 22 nt, Human
gcccugugcgacucuagagguu

SEQ ID NO: 313199 - RNA, 22 nt, Human
cugcccuguggcucugagucau

SEQ ID NO: 313200 - RNA, 22 nt, Human
aagagcuggaguuugcagcccu

SEQ ID NO: 313201 - RNA, 22 nt, Human
ugaaaucuacccuauucagggu

SEQ ID NO: 313202 - RNA, 22 nt, Human
uggcccugugugcaggcugcac

SEQ ID NO: 313203 - RNA, 22 nt, Human
uuucuguaaggacuuaaugcaa

SEQ ID NO: 313204 - RNA, 22 nt, Human
uggcucagagagggagugugga

SEQ ID NO: 313205 - RNA, 22 nt, Human
cucagaguucuccugggaggug

SEQ ID NO: 313206 - RNA, 22 nt, Human
cacugccugugagcugugugcc

SEQ ID NO: 313207 - RNA, 22 nt, Human
aauucugugcaggcagagcuau

SEQ ID NO: 313208 - RNA, 22 nt, Human
aggcagagcugauguucuguga

SEQ ID NO: 313209 - RNA, 22 nt, Human
uucauucugggcucuaaggaac

SEQ ID NO: 313210 - RNA, 22 nt, Human
ggcugcagguugguuggcagcu

SEQ ID NO: 313211 - RNA, 20 nt, Human
ucugcccaccccggcuccca

SEQ ID NO: 313212 - RNA, 22 nt, Human
ucuguucaguuguaccuucccc

SEQ ID NO: 313213 - RNA, 20 nt, Human
acugccuugguucaguaggu

SEQ ID NO: 313214 - RNA, 22 nt, Human
acauuucuuugcuagacagcag

SEQ ID NO: 313215 - RNA, 22 nt, Human
aggagagagaacacuugggucc

SEQ ID NO: 313216 - RNA, 22 nt, Human
gggagggaucugcuaggcaaug

SEQ ID NO: 313217 - RNA, 22 nt, Human
agagcuggccagggaucacucu

SEQ ID NO: 313218 - RNA, 22 nt, Human
agccuguccagaggacagggcu

SEQ ID NO: 313219 - RNA, 22 nt, Human
cauaccuuucucaagcacaugu

SEQ ID NO: 313220 - RNA, 22 nt, Human
cagugauguuucugcaucagag

SEQ ID NO: 313221 - RNA, 22 nt, Human
uguacuuccccaaugacagcac

SEQ ID NO: 313222 - RNA, 22 nt, Human
ggcugggcuccgggagcaugcg

SEQ ID NO: 313223 - RNA, 22 nt, Human
cccuucccuucugggagaucca

SEQ ID NO: 313224 - RNA, 22 nt, Human
acuggaaaacacuacuacaugc

SEQ ID NO: 313225 - RNA, 22 nt, Human
caggaaggcccaccuguccugu

SEQ ID NO: 313226 - RNA, 19 nt, Human
ggagccuggagcacgugcc

SEQ ID NO: 313227 - RNA, 22 nt, Human
ucucagagugguggucccucug

SEQ ID NO: 313228 - RNA, 22 nt, Human
augauacaucuucaugucagug

SEQ ID NO: 313229 - RNA, 22 nt, Human
uggcucagaggggaagugguuu

SEQ ID NO: 313230 - RNA, 22 nt, Human
ccagcccucacugaggccucuc

SEQ ID NO: 313231 - RNA, 22 nt, Human
uucagaauauuuguuuuacaug

SEQ ID NO: 313232 - RNA, 22 nt, Human
uaaauguaccuucugccuuacu

SEQ ID NO: 313233 - RNA, 22 nt, Human
ucucagagggaggauuacugcc

SEQ ID NO: 313234 - RNA, 22 nt, Human
uaagauaaguggguugagaugg

SEQ ID NO: 313235 - RNA, 22 nt, Human
uggcucagcugacucggcuucu

SEQ ID NO: 313236 - RNA, 22 nt, Human
gggugggaacaggaugccagga

SEQ ID NO: 313237 - RNA, 23 nt, Human
gagagcugacugucaagacuguu

SEQ ID NO: 313238 - RNA, 22 nt, Human
gcugccaccguggagaugagug

SEQ ID NO: 313239 - RNA, 22 nt, Human
aaauacagaguugcuuaaaagc

SEQ ID NO: 313240 - RNA, 22 nt, Human
ccagccagcugcccuuggggcc

SEQ ID NO: 313241 - RNA, 22 nt, Human
ccaguguuacggcuugaacuau

SEQ ID NO: 313242 - RNA, 22 nt, Human
ggcuggguuauuuauggccaag

SEQ ID NO: 313243 - RNA, 22 nt, Human
aguaugaaccuggguucuggau

SEQ ID NO: 313244 - RNA, 22 nt, Human
accuggagucauuugaggagua

SEQ ID NO: 313245 - RNA, 20 nt, Human
gacaggagaguuagguaggu

SEQ ID NO: 313246 - RNA, 22 nt, Human
ccugggucuugguucaugcucu

SEQ ID NO: 313247 - RNA, 22 nt, Human
gggcugccuuucuucugggagc

SEQ ID NO: 313248 - RNA, 22 nt, Human
acaaggcugaacagugaagccg

SEQ ID NO: 313249 - RNA, 22 nt, Human
cugggcuucucccccuggcaga

SEQ ID NO: 313250 - RNA, 22 nt, Human
aggcacugauucuguuuuccau

SEQ ID NO: 313251 - RNA, 22 nt, Human
uacacuuuuuacuacagauucu

SEQ ID NO: 313252 - RNA, 20 nt, Human
ccucaggaugagggugagca

SEQ ID NO: 313253 - RNA, 22 nt, Human
ccagaggcauguucaaagcaau

SEQ ID NO: 313254 - RNA, 22 nt, Human
agccaugcaccuuacucuugcu

SEQ ID NO: 313255 - RNA, 22 nt, Human
caaggagaaaacggcuucugaa

SEQ ID NO: 313256 - RNA, 22 nt, Human
ugcagaggaccauuguccugga

SEQ ID NO: 313257 - RNA, 22 nt, Human
auaagcauguuagaauauuuga

SEQ ID NO: 313258 - RNA, 22 nt, Human
uuccugagggacuuuugagauu

SEQ ID NO: 313259 - RNA, 22 nt, Human
ugcagaagcagagaguugccaa

SEQ ID NO: 313260 - RNA, 20 nt, Human
uggcggggaugagggaguua

SEQ ID NO: 313261 - RNA, 22 nt, Human
aggcccugcccagagcuccucg

SEQ ID NO: 313262 - RNA, 22 nt, Human
cuuguacaggaauccaugguau

SEQ ID NO: 313263 - RNA, 22 nt, Human
uugcugugucugauggcugaga

SEQ ID NO: 313264 - RNA, 18 nt, Human
uuaagagcugaaagggga

SEQ ID NO: 313265 - RNA, 22 nt, Human
gagagcuggguucaaguagcug

SEQ ID NO: 313266 - RNA, 22 nt, Human
ugccaggcuaaguggaggacuu

SEQ ID NO: 313267 - RNA, 22 nt, Human
ugguccagacauuucugaggua

SEQ ID NO: 313268 - RNA, 22 nt, Human
ccugccuggaucagccauccug

SEQ ID NO: 313269 - RNA, 22 nt, Human
caggugggagccacagcguaca

SEQ ID NO: 313270 - RNA, 22 nt, Human
uucaagaucgaguuuaaaguga

SEQ ID NO: 313271 - RNA, 19 nt, Human
ucauuguugguuugucggg

SEQ ID NO: 313272 - RNA, 22 nt, Human
gcugagaguguaggauguuuac

SEQ ID NO: 313273 - RNA, 22 nt, Human
uguacaauagcuauuaucucca

SEQ ID NO: 313274 - RNA, 21 nt, Human
ucucugggcccuccugugggg

SEQ ID NO: 313275 - RNA, 22 nt, Human
ggccucagaccggagcuggcca

SEQ ID NO: 313276 - RNA, 22 nt, Human
gccuggguuccaugaucuccag

SEQ ID NO: 313277 - RNA, 22 nt, Human
ugccugaugcaggaguaucaga

SEQ ID NO: 313278 - RNA, 22 nt, Human
aaacucugcacugcgguaaggu

SEQ ID NO: 313279 - RNA, 22 nt, Human
uggccugcagaggcuguggggc

SEQ ID NO: 313280 - RNA, 21 nt, Human
agguggggcugcaccucugcu

SEQ ID NO: 313281 - RNA, 22 nt, Human
uaugcuuuuaaccuguaacuga

SEQ ID NO: 313282 - RNA, 22 nt, Human
uucugugaaucuuuuuucccac

SEQ ID NO: 313283 - RNA, 22 nt, Human
ucccagaggcuccagucucuau

SEQ ID NO: 313284 - RNA, 22 nt, Human
ggcucaagcagucugccugccu

SEQ ID NO: 313285 - RNA, 22 nt, Human
cucacugucuguacuagcugau

SEQ ID NO: 313286 - RNA, 22 nt, Human
ucaaaugcuguauuguaguaau

SEQ ID NO: 313287 - RNA, 22 nt, Human
gggcuggaggaccggccucgga

SEQ ID NO: 313288 - RNA, 22 nt, Human
gugggcuggacccuccugcucc

SEQ ID NO: 313289 - RNA, 22 nt, Human
gaucuucuauguaaugaagugu

SEQ ID NO: 313290 - RNA, 22 nt, Human
caguacuucuuggaaacuggau

SEQ ID NO: 313291 - RNA, 22 nt, Human
augugacaauauuuggucuuau

SEQ ID NO: 313292 - RNA, 22 nt, Human
ggcagccuccagggcacuggug

SEQ ID NO: 313293 - RNA, 22 nt, Human
ucaugcuuauugcauauuugga

SEQ ID NO: 313294 - RNA, 22 nt, Human
aggcugggaaauguauuccagc

SEQ ID NO: 313295 - RNA, 22 nt, Human
agaaaucacaggaggcagaagg

SEQ ID NO: 313296 - RNA, 21 nt, Human
ucaaagcacauauuugcacau

SEQ ID NO: 313297 - RNA, 22 nt, Human
uuuccaagagcuuauuucugaa

SEQ ID NO: 313298 - RNA, 22 nt, Human
agugacugggcagggcagggcc

SEQ ID NO: 313299 - RNA, 22 nt, Human
gagagcacaugaacauggagga

SEQ ID NO: 313300 - RNA, 22 nt, Human
caggccucagagaguggcgggg

SEQ ID NO: 313301 - RNA, 22 nt, Human
aagauuucugcuuuuggaggca

SEQ ID NO: 313302 - RNA, 22 nt, Human
cugccuggcauggagaagagaa

SEQ ID NO: 313303 - RNA, 22 nt, Human
uucagaaugugaccuuauuugg

SEQ ID NO: 313304 - RNA, 22 nt, Human
gccuggcacucacugaagaggc

SEQ ID NO: 313305 - RNA, 22 nt, Human
auaugugaaguggguuauuuug

SEQ ID NO: 313306 - RNA, 22 nt, Human
agcuugaguuuuggaugaagug

SEQ ID NO: 313307 - RNA, 22 nt, Human
ggagcuguguuauccauuccca

SEQ ID NO: 313308 - RNA, 22 nt, Human
uuugggaacucuaucauggaaa

SEQ ID NO: 313309 - RNA, 22 nt, Human
uggagcugacucacaccagcua

SEQ ID NO: 313310 - RNA, 22 nt, Human
cauugcacuucugcuuuuccuc

SEQ ID NO: 313311 - RNA, 23 nt, Human
ucaguuuuggcuguucaguguug

SEQ ID NO: 313312 - RNA, 22 nt, Human
acaugcaugucuaugggcaggu

SEQ ID NO: 313313 - RNA, 22 nt, Human
gggucccaggaaggagcagugu

SEQ ID NO: 313314 - RNA, 22 nt, Human
ucuggagcuuccucauuuacag

SEQ ID NO: 313315 - RNA, 22 nt, Human
agagacagaucugagggaccuc

SEQ ID NO: 313316 - RNA, 22 nt, Human
uggcagaggcucugugauguug

SEQ ID NO: 313317 - RNA, 21 nt, Human
augaagucuaugcuucugugu

SEQ ID NO: 313318 - RNA, 22 nt, Human
agucccagcucugccacuuacu

SEQ ID NO: 313319 - RNA, 22 nt, Human
auguguaggugaaucgaggcug

SEQ ID NO: 313320 - RNA, 22 nt, Human
uccugccugagcguggaggagg

SEQ ID NO: 313321 - RNA, 19 nt, Human
ucaaagcaagcauguucug

SEQ ID NO: 313322 - RNA, 22 nt, Human
cccagcuugcccaggacugagg

SEQ ID NO: 313323 - RNA, 22 nt, Human
caugcacagugauaucugaaga

SEQ ID NO: 313324 - RNA, 22 nt, Human
ggaggccaccugaccugcuguu

SEQ ID NO: 313325 - RNA, 22 nt, Human
ccauccugcauugcuauucaga

SEQ ID NO: 313326 - RNA, 22 nt, Human
caaauaguuuuucauguauuau

SEQ ID NO: 313327 - RNA, 22 nt, Human
gaggugggaugugugugcuacu

SEQ ID NO: 313328 - RNA, 22 nt, Human
uagagcauuuagaggggcagga

SEQ ID NO: 313329 - RNA, 22 nt, Human
agaacagaagggaggaaggccu

SEQ ID NO: 313330 - RNA, 22 nt, Human
gggcagagacucagaaacagaa

SEQ ID NO: 313331 - RNA, 18 nt, Human
aaaugcuaggcuacauga

SEQ ID NO: 313332 - RNA, 22 nt, Human
gcugcucuacccaugcaucugu

SEQ ID NO: 313333 - RNA, 22 nt, Human
auuguaauuuuagagaaagugg

SEQ ID NO: 313334 - RNA, 22 nt, Human
guugggaaggcaagaaguagaa

SEQ ID NO: 313335 - RNA, 22 nt, Human
cugcuccacaccuccauuuccu

SEQ ID NO: 313336 - RNA, 22 nt, Human
cucucugaggcaggccuguggg

SEQ ID NO: 313337 - RNA, 22 nt, Human
ggaaagagcuaaaagggugaga

SEQ ID NO: 313338 - RNA, 22 nt, Human
ggugaggcccagugaucugugu

SEQ ID NO: 313339 - RNA, 22 nt, Human
uaacacacugaaggugagaugg

SEQ ID NO: 313340 - RNA, 22 nt, Human
agcugcucuugggugacuucaa

SEQ ID NO: 313341 - RNA, 22 nt, Human
ccugcagguccccggaugcgca

SEQ ID NO: 313342 - RNA, 16 nt, Human
aggaggggaauuagga

SEQ ID NO: 313343 - RNA, 22 nt, Human
uaggacaggugaggggcugugg

SEQ ID NO: 313344 - RNA, 22 nt, Human
uggcagcagggaggccaguguu

SEQ ID NO: 313345 - RNA, 22 nt, Human
cuugcugugugguguucucaga

SEQ ID NO: 313346 - RNA, 22 nt, Human
auguagaauuccuucuacuuug

SEQ ID NO: 313347 - RNA, 19 nt, Human
acaaaugauguugcacuga

SEQ ID NO: 313348 - RNA, 23 nt, Human
ucucagugaaucucagaauucgc

SEQ ID NO: 313349 - RNA, 22 nt, Human
ugagggcugcuuccagagcuag

SEQ ID NO: 313350 - RNA, 23 nt, Human
uggauaaagcugugcugcauagg

SEQ ID NO: 313351 - RNA, 22 nt, Human
uuucauugucuacauaugacau

SEQ ID NO: 313352 - RNA, 23 nt, Human
acucagugagggccuugggcugc

SEQ ID NO: 313353 - RNA, 22 nt, Human
cucugguguccuuuagaauuua

SEQ ID NO: 313354 - RNA, 22 nt, Human
uguuaacaucuuggacucguga

SEQ ID NO: 313355 - RNA, 22 nt, Human
cugucauugagccugucagggc

SEQ ID NO: 313356 - RNA, 22 nt, Human
aggauccugcgcuuugggggag

SEQ ID NO: 313357 - RNA, 22 nt, Human
uuccuugaaaguuugaacugac

SEQ ID NO: 313358 - RNA, 20 nt, Human
cuguuaaaagguaugaauuc

SEQ ID NO: 313359 - RNA, 20 nt, Human
gcaaggcacagugaggaggg

SEQ ID NO: 313360 - RNA, 22 nt, Human
aucuuguuauaagagauaaugg

SEQ ID NO: 313361 - RNA, 22 nt, Human
aucccuggacggcgccucccca

SEQ ID NO: 313362 - RNA, 22 nt, Human
gcccaucaucacuguggaggcu

SEQ ID NO: 313363 - RNA, 22 nt, Human
gggcgagggcgaaagcgagagc

SEQ ID NO: 313364 - RNA, 22 nt, Human
aaggccugggaguacugggaca

SEQ ID NO: 313365 - RNA, 22 nt, Human
aggcugggaagguaaaguugua

SEQ ID NO: 313366 - RNA, 22 nt, Human
agugcuggauuacaggcgugag

SEQ ID NO: 313367 - RNA, 22 nt, Human
uagcugccaaaagggugggcua

SEQ ID NO: 313368 - RNA, 22 nt, Human
cacaaaugugcagaaaugugag

SEQ ID NO: 313369 - RNA, 22 nt, Human
gccaccccaaccucccuaaguu

SEQ ID NO: 313370 - RNA, 22 nt, Human
ccaaagucagugcucagucguc

SEQ ID NO: 313371 - RNA, 22 nt, Human
aaucuucacagaaaaaugucug

SEQ ID NO: 313372 - RNA, 22 nt, Human
aaggagaagucuguugagauug

SEQ ID NO: 313373 - RNA, 22 nt, Human
caaggccagggaauuuuucugg

SEQ ID NO: 313374 - RNA, 22 nt, Human
ccagaagggcuauugcagugac

SEQ ID NO: 313375 - RNA, 22 nt, Human
agcagagcugcaguggccugcu

SEQ ID NO: 313376 - RNA, 22 nt, Human
caauaugcaagcuauuaaguau

SEQ ID NO: 313377 - RNA, 22 nt, Human
ugucacauugaauaugauuuau

SEQ ID NO: 313378 - RNA, 21 nt, Human
gcugagagguugggaaguuca

SEQ ID NO: 313379 - RNA, 22 nt, Human
uuucuguaaguggcaaauaaug

SEQ ID NO: 313380 - RNA, 22 nt, Human
agacacugauguucagcucaau

SEQ ID NO: 313381 - RNA, 22 nt, Human
acagggccaggugagaggugcu

SEQ ID NO: 313382 - RNA, 22 nt, Human
agagcuguucaacguagcaaug
